United States Patent Application Publication US 2007/0042381 A1 - sequence listing, part 22

SEQ ID NO: 952991 - RNA, 22 nt, Human
ggcugggccagggccuguggac

SEQ ID NO: 952992 - RNA, 22 nt, Human
guccuggggauacagaagugaa

SEQ ID NO: 952993 - RNA, 22 nt, Human
agcugagcacauucaaacaggu

SEQ ID NO: 952994 - RNA, 20 nt, Human
ugcugcaguuucaugggacu

SEQ ID NO: 952995 - RNA, 22 nt, Human
cagcccuggccccagguggucu

SEQ ID NO: 952996 - RNA, 22 nt, Human
aguuuuucugcuggucucacua

SEQ ID NO: 952997 - RNA, 22 nt, Human
cucagaguccauaguuuacagu

SEQ ID NO: 952998 - RNA, 22 nt, Human
cugcagagaauuguggggcuuc

SEQ ID NO: 952999 - RNA, 22 nt, Human
gcaguaaaaaaggauaugugca

SEQ ID NO: 953000 - RNA, 22 nt, Human
ucugugccaccucuccaguguc

SEQ ID NO: 953001 - RNA, 22 nt, Human
cagcccuuuccuucucagcuuu

SEQ ID NO: 953002 - RNA, 22 nt, Human
uauaaaguuucgaaagauguau

SEQ ID NO: 953003 - RNA, 22 nt, Human
ucucucagucagaugcuaaaga

SEQ ID NO: 953004 - RNA, 22 nt, Human
uaagaacagugacagccaacau

SEQ ID NO: 953005 - RNA, 22 nt, Human
aggcuggcgacaucuggcgggc

SEQ ID NO: 953006 - RNA, 22 nt, Human
ccugucugcaugaucccugcca

SEQ ID NO: 953007 - RNA, 20 nt, Human
gccugagcuauugccaggau

SEQ ID NO: 953008 - RNA, 22 nt, Human
ugucccaguuuaucugggacug

SEQ ID NO: 953009 - RNA, 22 nt, Human
gccuuccuuacaccugcucagc

SEQ ID NO: 953010 - RNA, 22 nt, Human
gacucugcugacuaguugacua

SEQ ID NO: 953011 - RNA, 23 nt, Human
auuuccuacuauaaaagagguaa

SEQ ID NO: 953012 - RNA, 16 nt, Human
uguuagcugugcauua

SEQ ID NO: 953013 - RNA, 22 nt, Human
agggugccugcugcagguucag

SEQ ID NO: 953014 - RNA, 22 nt, Human
auuucacucucccugccacuua

SEQ ID NO: 953015 - RNA, 22 nt, Human
cagcuggaucccugcagaacuu

SEQ ID NO: 953016 - RNA, 22 nt, Human
uggagggcaucuguggucaggc

SEQ ID NO: 953017 - RNA, 22 nt, Human
cugccugcguugccucgugccu

SEQ ID NO: 953018 - RNA, 22 nt, Human
ucucuggaauuggcugaggcaa

SEQ ID NO: 953019 - RNA, 22 nt, Human
ggcaggcucagcagccaaggag

SEQ ID NO: 953020 - RNA, 22 nt, Human
ucccaggaaugucugaaaguga

SEQ ID NO: 953021 - RNA, 22 nt, Human
ggggcugguggugguuucucca

SEQ ID NO: 953022 - RNA, 22 nt, Human
agcugcucuugggugacuucaa

SEQ ID NO: 953023 - RNA, 22 nt, Human
augcuuuuccuaaaaugaugcc

SEQ ID NO: 953024 - RNA, 19 nt, Human
ugaagcagcaaacucucag

SEQ ID NO: 953025 - RNA, 22 nt, Human
ccaggagauaagcugaguuuau

SEQ ID NO: 953026 - RNA, 23 nt, Human
gcaggugguucgaacagaaguuu

SEQ ID NO: 953027 - RNA, 22 nt, Human
ucugggggcgaccagggacugc

SEQ ID NO: 953028 - RNA, 22 nt, Human
uccucagggcggccuccgucuu

SEQ ID NO: 953029 - RNA, 22 nt, Human
aaugggagagaacacaaagucc

SEQ ID NO: 953030 - RNA, 21 nt, Human
gcagggacaaagcuucaggag

SEQ ID NO: 953031 - RNA, 22 nt, Human
uccuugaaaggggcugcagggc

SEQ ID NO: 953032 - RNA, 18 nt, Human
gcugucugaggucugagg

SEQ ID NO: 953033 - RNA, 20 nt, Human
agggcagagggauuacaggc

SEQ ID NO: 953034 - RNA, 22 nt, Human
ugauuucccucaucauaacaga

SEQ ID NO: 953035 - RNA, 22 nt, Human
ggcuggcauccagggaaaucca

SEQ ID NO: 953036 - RNA, 22 nt, Human
uucaggaucaaguugccaguag

SEQ ID NO: 953037 - RNA, 22 nt, Human
cacucugagaaguacaagcucc

SEQ ID NO: 953038 - RNA, 22 nt, Human
acagggccagccugggaccugg

SEQ ID NO: 953039 - RNA, 22 nt, Human
ggagucagccugucagagugua

SEQ ID NO: 953040 - RNA, 18 nt, Human
ggaaaaggagugucuagc

SEQ ID NO: 953041 - RNA, 22 nt, Human
uguaugcaaauuuauuagcaca

SEQ ID NO: 953042 - RNA, 21 nt, Human
gcagagccggggcgagaaggc

SEQ ID NO: 953043 - RNA, 22 nt, Human
gcacagguugcaaaaguucaca

SEQ ID NO: 953044 - RNA, 22 nt, Human
uaaagguaacaugaacugcuuu

SEQ ID NO: 953045 - RNA, 22 nt, Human
ugguccagacauuucugaggua

SEQ ID NO: 953046 - RNA, 22 nt, Human
uguuacuuaucucacgugaugc

SEQ ID NO: 953047 - RNA, 22 nt, Human
uccaggcuggacaugaggcggg

SEQ ID NO: 953048 - RNA, 22 nt, Human
uaagacaauucuucagucacaa

SEQ ID NO: 953049 - RNA, 22 nt, Human
cugaggccuguguuggggcagu

SEQ ID NO: 953050 - RNA, 22 nt, Human
uuaggauagucuguuagaaaag

SEQ ID NO: 953051 - RNA, 22 nt, Human
cugccugugccaccgccucauu

SEQ ID NO: 953052 - RNA, 22 nt, Human
uagggauguaaacauaguaauu

SEQ ID NO: 953053 - RNA, 23 nt, Human
cuucucagaagucugugccagga

SEQ ID NO: 953054 - RNA, 22 nt, Human
ggccuugggaggagggucagaa

SEQ ID NO: 953055 - RNA, 22 nt, Human
agagccagagaccuggguucac

SEQ ID NO: 953056 - RNA, 22 nt, Human
uggcugucagcugccuggugcg

SEQ ID NO: 953057 - RNA, 22 nt, Human
gaaucucaaggcuugugaggau

SEQ ID NO: 953058 - RNA, 22 nt, Human
cugcccugcuugaugacagcga

SEQ ID NO: 953059 - RNA, 22 nt, Human
uuuguaaggcuaaauaauauuc

SEQ ID NO: 953060 - RNA, 22 nt, Human
ggguguccugugccaagcuggg

SEQ ID NO: 953061 - RNA, 22 nt, Human
gccaggcucucagugacugccc

SEQ ID NO: 953062 - RNA, 17 nt, Human
ggaaaaggaugauacag

SEQ ID NO: 953063 - RNA, 22 nt, Human
gaggggaagacuucuggacagu

SEQ ID NO: 953064 - RNA, 22 nt, Human
uggguggaauaaaucaguucug

SEQ ID NO: 953065 - RNA, 22 nt, Human
cagggaauccauggucauaagg

SEQ ID NO: 953066 - RNA, 22 nt, Human
aaagaacaucggagugggcggg

SEQ ID NO: 953067 - RNA, 22 nt, Human
cacaugggugugccuggaggaa

SEQ ID NO: 953068 - RNA, 20 nt, Human
ggguggaguugcggucugug

SEQ ID NO: 953069 - RNA, 22 nt, Human
caacagcugaucuuugaugaag

SEQ ID NO: 953070 - RNA, 22 nt, Human
ccagcucccugaagccuggucu

SEQ ID NO: 953071 - RNA, 22 nt, Human
aaagccaugggucuuuggcaua

SEQ ID NO: 953072 - RNA, 22 nt, Human
auagaauaaggcacagauucuu

SEQ ID NO: 953073 - RNA, 22 nt, Human
ggagcauguggggugagcaggg

SEQ ID NO: 953074 - RNA, 22 nt, Human
ggaggcagaacuucccgucagu

SEQ ID NO: 953075 - RNA, 21 nt, Human
uucuucaaagaagaaggcaca

SEQ ID NO: 953076 - RNA, 22 nt, Human
acauuuaggauguuuugagaga

SEQ ID NO: 953077 - RNA, 22 nt, Human
uggcccugacagguccugggca

SEQ ID NO: 953078 - RNA, 22 nt, Human
ucuggagccacaaaccucagcu

SEQ ID NO: 953079 - RNA, 22 nt, Human
caggccuggggcuggcuuccag

SEQ ID NO: 953080 - RNA, 19 nt, Human
ggcccaaguacugagugcc

SEQ ID NO: 953081 - RNA, 22 nt, Human
agcugcugaaugacacugcaag

SEQ ID NO: 953082 - RNA, 22 nt, Human
ucaaugaaagagcaugcauuuu

SEQ ID NO: 953083 - RNA, 22 nt, Human
caccugagugucaguauucuca

SEQ ID NO: 953084 - RNA, 22 nt, Human
uacacauguuuggcaaguaugu

SEQ ID NO: 953085 - RNA, 22 nt, Human
cugcuccacaccuccauuuccu

SEQ ID NO: 953086 - RNA, 22 nt, Human
gaguuauuggguggaaagguag

SEQ ID NO: 953087 - RNA, 22 nt, Human
gcagagugaggaagagcuucca

SEQ ID NO: 953088 - RNA, 22 nt, Human
agucagacacguuuuccauuag

SEQ ID NO: 953089 - RNA, 19 nt, Human
acaaaugauguugcacuga

SEQ ID NO: 953090 - RNA, 22 nt, Human
caggguggcacucagcgcaucu

SEQ ID NO: 953091 - RNA, 22 nt, Human
uuuaguagugacagauucuggg

SEQ ID NO: 953092 - RNA, 22 nt, Human
gcugucacauuuggagcacugg

SEQ ID NO: 953093 - RNA, 22 nt, Human
ugcuggcuguauaugugagagu

SEQ ID NO: 953094 - RNA, 22 nt, Human
agcaggguuccaggaguugcag

SEQ ID NO: 953095 - RNA, 22 nt, Human
auaacaugaccugugcuucaca

SEQ ID NO: 953096 - RNA, 22 nt, Human
guguuuccucacuucucugacu

SEQ ID NO: 953097 - RNA, 22 nt, Human
acagagccacuuuggugccuac

SEQ ID NO: 953098 - RNA, 22 nt, Human
agucccagcuucccccaugcag

SEQ ID NO: 953099 - RNA, 22 nt, Human
ucauugcaguagggagagaccc

SEQ ID NO: 953100 - RNA, 22 nt, Human
caaggccuccugggcccagaga

SEQ ID NO: 953101 - RNA, 22 nt, Human
agugaccaaucaugguuagauu

SEQ ID NO: 953102 - RNA, 22 nt, Human
cagcugccuaugaccuagccuc

SEQ ID NO: 953103 - RNA, 22 nt, Human
cauuacaugguccaggauauau

SEQ ID NO: 953104 - RNA, 22 nt, Human
uauuucugaggcccaggaagug

SEQ ID NO: 953105 - RNA, 22 nt, Human
cauccugguuaccccauaguca

SEQ ID NO: 953106 - RNA, 23 nt, Human
ggucccaguggagaggccucacc

SEQ ID NO: 953107 - RNA, 22 nt, Human
uauuggugggggcagagagaga

SEQ ID NO: 953108 - RNA, 22 nt, Human
aagagcuggauggaaucuggga

SEQ ID NO: 953109 - RNA, 22 nt, Human
cagcugcuguuacugcuuauua

SEQ ID NO: 953110 - RNA, 22 nt, Human
ccagccuggagggcaguggugg

SEQ ID NO: 953111 - RNA, 22 nt, Human
cacaauuuccuugcuucacuuu

SEQ ID NO: 953112 - RNA, 22 nt, Human
cccaggagccaucugucuuggc

SEQ ID NO: 953113 - RNA, 20 nt, Human
augugucuuagagcaucagg

SEQ ID NO: 953114 - RNA, 22 nt, Human
cuucccacuaguaucacagagc

SEQ ID NO: 953115 - RNA, 22 nt, Human
cuccuggacauggagcggagga

SEQ ID NO: 953116 - RNA, 22 nt, Human
cagcuugggucaggugccugcu

SEQ ID NO: 953117 - RNA, 22 nt, Human
ucacaugcuacugagccagacc

SEQ ID NO: 953118 - RNA, 22 nt, Human
gcccagcugcacccuggugggu

SEQ ID NO: 953119 - RNA, 22 nt, Human
aggaggggcauagaaauguaau

SEQ ID NO: 953120 - RNA, 20 nt, Human
guauauaaccauagugacua

SEQ ID NO: 953121 - RNA, 23 nt, Human
uugauuucaaaugcagagaacac

SEQ ID NO: 953122 - RNA, 22 nt, Human
cacagguggcuccaaguuagag

SEQ ID NO: 953123 - RNA, 22 nt, Human
aaaggccacugcaagggaaggu

SEQ ID NO: 953124 - RNA, 22 nt, Human
cuguacaggugaggagggggcu

SEQ ID NO: 953125 - RNA, 22 nt, Human
uuuuuccuuggaugugucucuc

SEQ ID NO: 953126 - RNA, 22 nt, Human
cagcugccagcuucucuccauc

SEQ ID NO: 953127 - RNA, 22 nt, Human
ugcaguggcgccaucucagcuc

SEQ ID NO: 953128 - RNA, 22 nt, Human
cacacauugaauucauucuugu

SEQ ID NO: 953129 - RNA, 22 nt, Human
aaggcacugaaaaauugugugu

SEQ ID NO: 953130 - RNA, 22 nt, Human
gaccagucauuacucaugcccu

SEQ ID NO: 953131 - RNA, 22 nt, Human
uguguacaagaguguuuacugu

SEQ ID NO: 953132 - RNA, 22 nt, Human
guucagggagggacagaugaag

SEQ ID NO: 953133 - RNA, 22 nt, Human
ucuuggagaauggcagagaagc

SEQ ID NO: 953134 - RNA, 22 nt, Human
cugacucagcagcugaugaucc

SEQ ID NO: 953135 - RNA, 22 nt, Human
cauucacaucuuguuccaucac

SEQ ID NO: 953136 - RNA, 22 nt, Human
gagagcuguccggcugagcagc

SEQ ID NO: 953137 - RNA, 22 nt, Human
gcaggcaguugcaguuuucuag

SEQ ID NO: 953138 - RNA, 22 nt, Human
cucccagagaccaagcugagaa

SEQ ID NO: 953139 - RNA, 22 nt, Human
aagcugccagauucagucugcu

SEQ ID NO: 953140 - RNA, 21 nt, Human
uaaauaauaaguugcugagau

SEQ ID NO: 953141 - RNA, 22 nt, Human
acuguauuuuugaaucauugug

SEQ ID NO: 953142 - RNA, 22 nt, Human
gcugggcaagugccuuggguuu

SEQ ID NO: 953143 - RNA, 22 nt, Human
cauuuccugucuggaggucaaa

SEQ ID NO: 953144 - RNA, 18 nt, Human
gagcacugguguugaggu

SEQ ID NO: 953145 - RNA, 22 nt, Human
caugaagcuugaagcaguccac

SEQ ID NO: 953146 - RNA, 22 nt, Human
ucugcaggacugaggccuguuu

SEQ ID NO: 953147 - RNA, 22 nt, Human
ccagggcuggugggagaugcug

SEQ ID NO: 953148 - RNA, 22 nt, Human
cauuguauugaggauacuuaag

SEQ ID NO: 953149 - RNA, 22 nt, Human
ccugccugggcucacuugccag

SEQ ID NO: 953150 - RNA, 20 nt, Human
ucauccaggacaggaguggc

SEQ ID NO: 953151 - RNA, 22 nt, Human
cacaugugugcugaggacugug

SEQ ID NO: 953152 - RNA, 19 nt, Human
uccuuugaauaucaguuga

SEQ ID NO: 953153 - RNA, 22 nt, Human
auggagggugguaagacagaga

SEQ ID NO: 953154 - RNA, 22 nt, Human
cugucaguucuuccagauagag

SEQ ID NO: 953155 - RNA, 22 nt, Human
uaauuauaacaguuacaucuua

SEQ ID NO: 953156 - RNA, 22 nt, Human
aguuuuucuccccuggcuucau

SEQ ID NO: 953157 - RNA, 22 nt, Human
uacaaaguaauguauaauaucg

SEQ ID NO: 953158 - RNA, 22 nt, Human
ucugggagaagcugaugugaag

SEQ ID NO: 953159 - RNA, 22 nt, Human
aaagccaugaauguuauagagg

SEQ ID NO: 953160 - RNA, 22 nt, Human
uguuccaucaguuuuugguuga

SEQ ID NO: 953161 - RNA, 22 nt, Human
guuauguacuuuuuaaaucuug

SEQ ID NO: 953162 - RNA, 22 nt, Human
agaagcugacagaugcagcagg

SEQ ID NO: 953163 - RNA, 22 nt, Human
auuuuucucuuuccacugagau

SEQ ID NO: 953164 - RNA, 22 nt, Human
gggcaguugauggaggucugga

SEQ ID NO: 953165 - RNA, 22 nt, Human
ugaaguuauauauguugaaaau

SEQ ID NO: 953166 - RNA, 22 nt, Human
gccaaagcagucuugccucugc

SEQ ID NO: 953167 - RNA, 22 nt, Human
ucucacuggguauaaaugagua

SEQ ID NO: 953168 - RNA, 22 nt, Human
aagcaaaggcaggagcuuguga

SEQ ID NO: 953169 - RNA, 22 nt, Human
cauuugcagagggugacacucu

SEQ ID NO: 953170 - RNA, 22 nt, Human
gaucuucuauguaaugaagugu

SEQ ID NO: 953171 - RNA, 22 nt, Human
cagagggcacaugguuuccuca

SEQ ID NO: 953172 - RNA, 22 nt, Human
acagcagcauaaacugacuaag

SEQ ID NO: 953173 - RNA, 22 nt, Human
agccaggauggucucgaucggc

SEQ ID NO: 953174 - RNA, 22 nt, Human
uuucagaaagcaucaucaaagu

SEQ ID NO: 953175 - RNA, 22 nt, Human
uccaugagaacccuuggagaua

SEQ ID NO: 953176 - RNA, 22 nt, Human
cugcugucgccgagcugcaugc

SEQ ID NO: 953177 - RNA, 22 nt, Human
acauuugaggauguuaagaaug

SEQ ID NO: 953178 - RNA, 22 nt, Human
gacaggaggcagagcucaggug

SEQ ID NO: 953179 - RNA, 21 nt, Human
uuaagagcuuagcaguaggcc

SEQ ID NO: 953180 - RNA, 22 nt, Human
uccuugaagcuuguaucuaaua

SEQ ID NO: 953181 - RNA, 22 nt, Human
agcucccagcagagcuggccac

SEQ ID NO: 953182 - RNA, 22 nt, Human
gcauguguuauuuuauguauga

SEQ ID NO: 953183 - RNA, 22 nt, Human
ucaggcacugcuuucugauaug

SEQ ID NO: 953184 - RNA, 22 nt, Human
aucuuccuucacuuucucccac

SEQ ID NO: 953185 - RNA, 22 nt, Human
agggagcuaggauccugaaggu

SEQ ID NO: 953186 - RNA, 22 nt, Human
gccaggagcaugucauuguuga

SEQ ID NO: 953187 - RNA, 22 nt, Human
agguacagcaauauaagagguc

SEQ ID NO: 953188 - RNA, 22 nt, Human
auguuuuauguuccacucaagg

SEQ ID NO: 953189 - RNA, 22 nt, Human
caguacuugggaaugcugggga

SEQ ID NO: 953190 - RNA, 22 nt, Human
uccagggccaagucauggaacc

SEQ ID NO: 953191 - RNA, 22 nt, Human
ucugcuggccuuagcaggucua

SEQ ID NO: 953192 - RNA, 22 nt, Human
aucaguuuaaaugggcuguugg

SEQ ID NO: 953193 - RNA, 22 nt, Human
uaaaugcagauuccugagccua

SEQ ID NO: 953194 - RNA, 22 nt, Human
aaggcaguuaauuuggcuagaa

SEQ ID NO: 953195 - RNA, 22 nt, Human
cagcagggcccccgggugcgcc

SEQ ID NO: 953196 - RNA, 22 nt, Human
uggaagagaaaggaguggaucu

SEQ ID NO: 953197 - RNA, 22 nt, Human
caaggccaugagcagcgagugu

SEQ ID NO: 953198 - RNA, 22 nt, Human
aucacauucuuucaaagcaguc

SEQ ID NO: 953199 - RNA, 22 nt, Human
aaaucaguuggaacacaagcag

SEQ ID NO: 953200 - RNA, 22 nt, Human
ggcugaaacagauuucaagaca

SEQ ID NO: 953201 - RNA, 22 nt, Human
aggaggugacagccugcaucug

SEQ ID NO: 953202 - RNA, 22 nt, Human
gcucuggagauggagccuugag

SEQ ID NO: 953203 - RNA, 22 nt, Human
cauuucugugacacuuccaucu

SEQ ID NO: 953204 - RNA, 22 nt, Human
augauauuugcaaugugcuugc

SEQ ID NO: 953205 - RNA, 22 nt, Human
agagcccugaagcagagcuaaa

SEQ ID NO: 953206 - RNA, 22 nt, Human
acccuggguucccgcagcacca

SEQ ID NO: 953207 - RNA, 22 nt, Human
aaggcccuggccccagcuucuu

SEQ ID NO: 953208 - RNA, 22 nt, Human
cugcuuccaugcaauggcaguc

SEQ ID NO: 953209 - RNA, 22 nt, Human
cugauuccugauucaugcucuu

SEQ ID NO: 953210 - RNA, 22 nt, Human
ugugcaguuucuauguugucca

SEQ ID NO: 953211 - RNA, 22 nt, Human
uauuucuguaugcauaaaagga

SEQ ID NO: 953212 - RNA, 19 nt, Human
ccagucccauacaggagau

SEQ ID NO: 953213 - RNA, 22 nt, Human
caggaggcaucauggagcggac

SEQ ID NO: 953214 - RNA, 19 nt, Human
gagguggguccccgcagcc

SEQ ID NO: 953215 - RNA, 22 nt, Human
uguugaagauaaaguucucauu

SEQ ID NO: 953216 - RNA, 21 nt, Human
acacauuaugagcauagacuc

SEQ ID NO: 953217 - RNA, 22 nt, Human
uagcaguggaaucuuuugucca

SEQ ID NO: 953218 - RNA, 22 nt, Human
ggccccaggaccuccacggucc

SEQ ID NO: 953219 - RNA, 21 nt, Human
gcuccuggugcugcguggcgc

SEQ ID NO: 953220 - RNA, 22 nt, Human
gagcugccuacauugccaagag

SEQ ID NO: 953221 - RNA, 22 nt, Human
cuagaaaaauacuuuauuguga

SEQ ID NO: 953222 - RNA, 22 nt, Human
ccugguccuuacgucauugcuu

SEQ ID NO: 953223 - RNA, 22 nt, Human
agcagcugaucaaagcacuuau

SEQ ID NO: 953224 - RNA, 22 nt, Human
uggagcuggaauuugagcugga

SEQ ID NO: 953225 - RNA, 22 nt, Human
ccaaaguccauaguuuacuuua

SEQ ID NO: 953226 - RNA, 23 nt, Human
ugugucugaggauauaugugcau

SEQ ID NO: 953227 - RNA, 22 nt, Human
ggccuguccagccugccuggcu

SEQ ID NO: 953228 - RNA, 22 nt, Human
ucagacuugccuuuuuauaaaa

SEQ ID NO: 953229 - RNA, 22 nt, Human
ggcaguggguggaucucaggga

SEQ ID NO: 953230 - RNA, 23 nt, Human
gugcucugcggucugcuagucug

SEQ ID NO: 953231 - RNA, 22 nt, Human
cauguacacucauguaacuaua

SEQ ID NO: 953232 - RNA, 22 nt, Human
ucaagagaaggggaaauagacu

SEQ ID NO: 953233 - RNA, 22 nt, Human
uaaaacuagugguugggacuaa

SEQ ID NO: 953234 - RNA, 22 nt, Human
agaaugcauuuuguguagcuau

SEQ ID NO: 953235 - RNA, 22 nt, Human
uuugcuauaaaagggucacacg

SEQ ID NO: 953236 - RNA, 22 nt, Human
agccagcuggugggucagcugg

SEQ ID NO: 953237 - RNA, 22 nt, Human
agcuguccuggcucaggcugug

SEQ ID NO: 953238 - RNA, 22 nt, Human
gcugucucauacaaggcccugc

SEQ ID NO: 953239 - RNA, 22 nt, Human
ggcagaggagcuggaaacaugg

SEQ ID NO: 953240 - RNA, 22 nt, Human
ggcugccugaggcugaggcccg

SEQ ID NO: 953241 - RNA, 22 nt, Human
gcagugacagggcugcugccuu

SEQ ID NO: 953242 - RNA, 23 nt, Human
ucucagaggauuccugggccuug

SEQ ID NO: 953243 - RNA, 17 nt, Human
gagauggguggaucacc

SEQ ID NO: 953244 - RNA, 22 nt, Human
gggacuggcacagggcugggag

SEQ ID NO: 953245 - RNA, 22 nt, Human
ucuggcucugacacuacuguua

SEQ ID NO: 953246 - RNA, 22 nt, Human
auuugagaugguaaauaacuuu

SEQ ID NO: 953247 - RNA, 22 nt, Human
cucagggccaaggaugcuguug

SEQ ID NO: 953248 - RNA, 22 nt, Human
aucuaggauuugaaugcacagu

SEQ ID NO: 953249 - RNA, 18 nt, Human
cagaaaucacaccagcac

SEQ ID NO: 953250 - RNA, 22 nt, Human
ccagcaugagacgaugaugaag

SEQ ID NO: 953251 - RNA, 22 nt, Human
ggcagaggaggggugaauuugc

SEQ ID NO: 953252 - RNA, 23 nt, Human
ugcugggcagagcuggugcugag

SEQ ID NO: 953253 - RNA, 22 nt, Human
uuuaggaucaaugagaaagucu

SEQ ID NO: 953254 - RNA, 22 nt, Human
auguuuaaauuuauagacagug

SEQ ID NO: 953255 - RNA, 22 nt, Human
augcugugccuucucugugcca

SEQ ID NO: 953256 - RNA, 20 nt, Human
agugucuggugcagggccuc

SEQ ID NO: 953257 - RNA, 22 nt, Human
accuuucaaaguggcuaucacu

SEQ ID NO: 953258 - RNA, 22 nt, Human
ccuggcagcuccuccccggcgg

SEQ ID NO: 953259 - RNA, 22 nt, Human
aggcaguuguagagagggcucu

SEQ ID NO: 953260 - RNA, 23 nt, Human
ccuccugggcacaggccugaugg

SEQ ID NO: 953261 - RNA, 22 nt, Human
agggagcuguggucagcucagu

SEQ ID NO: 953262 - RNA, 22 nt, Human
ccagcagcccucuuccaagacu

SEQ ID NO: 953263 - RNA, 22 nt, Human
agaaaacauuacauaggugugu

SEQ ID NO: 953264 - RNA, 22 nt, Human
guucuucaucuuaaccaucugu

SEQ ID NO: 953265 - RNA, 22 nt, Human
ugucauugaggaaaacuaggug

SEQ ID NO: 953266 - RNA, 22 nt, Human
uggcagcugugcuucauucuuu

SEQ ID NO: 953267 - RNA, 22 nt, Human
uaaugaugugugcaaacugaau

SEQ ID NO: 953268 - RNA, 22 nt, Human
aucaggauuacacggggaugcu

SEQ ID NO: 953269 - RNA, 22 nt, Human
uauaucuuauaugugcagguac

SEQ ID NO: 953270 - RNA, 22 nt, Human
ugugcagggaagggcaugcuau

SEQ ID NO: 953271 - RNA, 22 nt, Human
cuugcugggguaagucugugcu

SEQ ID NO: 953272 - RNA, 22 nt, Human
gaucauuuacuuguucuggacu

SEQ ID NO: 953273 - RNA, 22 nt, Human
gcagauggugggggaggaguac

SEQ ID NO: 953274 - RNA, 22 nt, Human
gcucagagaaucagcagacacc

SEQ ID NO: 953275 - RNA, 22 nt, Human
uggagggcucuuucaccuggua

SEQ ID NO: 953276 - RNA, 23 nt, Human
auuugagaaaguauuuuuaagac

SEQ ID NO: 953277 - RNA, 22 nt, Human
ccuggccaguuuccaggcccug

SEQ ID NO: 953278 - RNA, 22 nt, Human
cugggccaagaaguuguguaug

SEQ ID NO: 953279 - RNA, 22 nt, Human
uggagcagagaugguggccuuc

SEQ ID NO: 953280 - RNA, 22 nt, Human
ucaggaugguccuuuaugagaa

SEQ ID NO: 953281 - RNA, 23 nt, Human
gguggcaggaguggaugcugagc

SEQ ID NO: 953282 - RNA, 22 nt, Human
caggggcuuaagugacagaagg

SEQ ID NO: 953283 - RNA, 22 nt, Human
cccaggaggugugcccaacucg

SEQ ID NO: 953284 - RNA, 22 nt, Human
gcugccacgaucucugcuguag

SEQ ID NO: 953285 - RNA, 20 nt, Human
auguagaugaaagcaaaggc

SEQ ID NO: 953286 - RNA, 22 nt, Human
aaucuguuuaguucugcguaug

SEQ ID NO: 953287 - RNA, 22 nt, Human
uccaggccaauguagcaggccc

SEQ ID NO: 953288 - RNA, 23 nt, Human
uuugcaaauuggacacaaccaca

SEQ ID NO: 953289 - RNA, 22 nt, Human
ggcggggguccaggagccugca

SEQ ID NO: 953290 - RNA, 18 nt, Human
gaggauggaaggagaugc

SEQ ID NO: 953291 - RNA, 22 nt, Human
aggcagcccugugcuggaugcu

SEQ ID NO: 953292 - RNA, 22 nt, Human
cuccaggggccagaagccuggc

SEQ ID NO: 953293 - RNA, 22 nt, Human
agauuguagaaacuguagcauu

SEQ ID NO: 953294 - RNA, 22 nt, Human
uggcagcucuguucaacaugag

SEQ ID NO: 953295 - RNA, 22 nt, Human
uccuggcccggccgggccugcu

SEQ ID NO: 953296 - RNA, 22 nt, Human
ucagcagggaggcucugugccc

SEQ ID NO: 953297 - RNA, 22 nt, Human
agcaauaugacauugcuacauc

SEQ ID NO: 953298 - RNA, 22 nt, Human
uucuuaaguuuagcaacuugug

SEQ ID NO: 953299 - RNA, 22 nt, Human
cucaggauuuaaaggggcacuc

SEQ ID NO: 953300 - RNA, 22 nt, Human
gggcagcugccagaggccaugg

SEQ ID NO: 953301 - RNA, 22 nt, Human
caagagcugaggcuggagaggu

SEQ ID NO: 953302 - RNA, 23 nt, Human
acacaauagaguacuauucagcc

SEQ ID NO: 953303 - RNA, 22 nt, Human
gagccaagaucgcaccacugca

SEQ ID NO: 953304 - RNA, 17 nt, Human
ugccagccugucccagg

SEQ ID NO: 953305 - RNA, 22 nt, Human
ucaaauaaugccauucaucauc

SEQ ID NO: 953306 - RNA, 22 nt, Human
cauugcuuugugcauauuuaaa

SEQ ID NO: 953307 - RNA, 22 nt, Human
gcucuggguagccacugccugg

SEQ ID NO: 953308 - RNA, 22 nt, Human
gagccauacaaccuauaaagug

SEQ ID NO: 953309 - RNA, 22 nt, Human
ucuucuuccucauuuauacaua

SEQ ID NO: 953310 - RNA, 17 nt, Human
gcuggcugacccaugcc

SEQ ID NO: 953311 - RNA, 22 nt, Human
uggcacugccaaccugcuaggu

SEQ ID NO: 953312 - RNA, 22 nt, Human
cagagagggcggcccuggcuuc

SEQ ID NO: 953313 - RNA, 22 nt, Human
gggugggccugucuggccaugu

SEQ ID NO: 953314 - RNA, 22 nt, Human
ggaggaugagcuacgaggagcu

SEQ ID NO: 953315 - RNA, 22 nt, Human
cacugcuuaguugguaaaugug

SEQ ID NO: 953316 - RNA, 22 nt, Human
gcugcagcuguaggacacaauu

SEQ ID NO: 953317 - RNA, 22 nt, Human
gcucacugccauucucuagaug

SEQ ID NO: 953318 - RNA, 22 nt, Human
agcucagggcgaucugucucgg

SEQ ID NO: 953319 - RNA, 21 nt, Human
agaugaggauacugaggccua

SEQ ID NO: 953320 - RNA, 20 nt, Human
gggguuggcuggcacaggga

SEQ ID NO: 953321 - RNA, 22 nt, Human
caguuucucucaauaagcaucg

SEQ ID NO: 953322 - RNA, 22 nt, Human
ccaggguggaggcuggauggag

SEQ ID NO: 953323 - RNA, 22 nt, Human
accuggcacuacaggcaccugu

SEQ ID NO: 953324 - RNA, 22 nt, Human
cucugcuaagcaugaacaauua

SEQ ID NO: 953325 - RNA, 22 nt, Human
ugcauauugugaaaauguagau

SEQ ID NO: 953326 - RNA, 22 nt, Human
uacauucuacuuuuucacuccc

SEQ ID NO: 953327 - RNA, 22 nt, Human
cuccaggaaagccugaggcccg

SEQ ID NO: 953328 - RNA, 22 nt, Human
gcauguguugguuuaugcaugu

SEQ ID NO: 953329 - RNA, 22 nt, Human
aaucagaaaauucaguggaauu

SEQ ID NO: 953330 - RNA, 22 nt, Human
gggcuccagcccgggaccaggu

SEQ ID NO: 953331 - RNA, 22 nt, Human
uuugggaagaggaaucucugga

SEQ ID NO: 953332 - RNA, 22 nt, Human
uuaaaugaggcugauguagauu

SEQ ID NO: 953333 - RNA, 21 nt, Human
uggcacugcuuagcagguucc

SEQ ID NO: 953334 - RNA, 22 nt, Human
cuuuguaagucuuucuccaaga

SEQ ID NO: 953335 - RNA, 22 nt, Human
ucucagggcgcagugaggcagu

SEQ ID NO: 953336 - RNA, 22 nt, Human
acuuugcagggcuugauaucca

SEQ ID NO: 953337 - RNA, 22 nt, Human
gggaagauaguguugagggccc

SEQ ID NO: 953338 - RNA, 22 nt, Human
uggacagguuugggugccuguu

SEQ ID NO: 953339 - RNA, 22 nt, Human
cucaggauccaucuccugcccu

SEQ ID NO: 953340 - RNA, 22 nt, Human
cccuggaggaaaaucugaggcu

SEQ ID NO: 953341 - RNA, 22 nt, Human
ucugccugcggcugcagguggc

SEQ ID NO: 953342 - RNA, 22 nt, Human
auucagcaguuccugcuucagu

SEQ ID NO: 953343 - RNA, 22 nt, Human
aaaguguaaggaauuuaaguaa

SEQ ID NO: 953344 - RNA, 22 nt, Human
ccugggagguggagguugcagu

SEQ ID NO: 953345 - RNA, 22 nt, Human
uauguuuauacuuugauguacu

SEQ ID NO: 953346 - RNA, 21 nt, Human
cugccuugaaugguacuggga

SEQ ID NO: 953347 - RNA, 22 nt, Human
ugcuggcuacugauggcaggcc

SEQ ID NO: 953348 - RNA, 22 nt, Human
uagcaggguccaaugugaggca

SEQ ID NO: 953349 - RNA, 22 nt, Human
gggaagagaccguacccuggcc

SEQ ID NO: 953350 - RNA, 22 nt, Human
gcaaggcugcugccacccaucu

SEQ ID NO: 953351 - RNA, 22 nt, Human
cugggcagugcagcuauagaac

SEQ ID NO: 953352 - RNA, 22 nt, Human
gugggagccauuuccaguaugc

SEQ ID NO: 953353 - RNA, 20 nt, Human
acguggccaccaguggcuua

SEQ ID NO: 953354 - RNA, 18 nt, Human
ucugucucuguccuugcu

SEQ ID NO: 953355 - RNA, 20 nt, Human
uaggcagcuugacccuuggu

SEQ ID NO: 953356 - RNA, 22 nt, Human
gugggagcccucagggaggugc

SEQ ID NO: 953357 - RNA, 22 nt, Human
acuuugugcccaacagaaagaa

SEQ ID NO: 953358 - RNA, 22 nt, Human
ccugaagaugcuguggccuggu

SEQ ID NO: 953359 - RNA, 22 nt, Human
uaugaagacaaugauagcauga

SEQ ID NO: 953360 - RNA, 22 nt, Human
aaagacagagcuguaggggaaa

SEQ ID NO: 953361 - RNA, 22 nt, Human
uuggccaacagcgacagggcca

SEQ ID NO: 953362 - RNA, 22 nt, Human
uccuucagccaugggcucucca

SEQ ID NO: 953363 - RNA, 22 nt, Human
ugggcagaggcucugaagucca

SEQ ID NO: 953364 - RNA, 22 nt, Human
auaauucagguuuucuggcaca

SEQ ID NO: 953365 - RNA, 22 nt, Human
agagcuggcugcugcggugcuu

SEQ ID NO: 953366 - RNA, 22 nt, Human
agccuggaguucccaggagaag

SEQ ID NO: 953367 - RNA, 21 nt, Human
ccuccaggugauuccgugcuc

SEQ ID NO: 953368 - RNA, 22 nt, Human
gcucaggaucccaggggugugc

SEQ ID NO: 953369 - RNA, 22 nt, Human
cuuuccaaugucacuaugaauc

SEQ ID NO: 953370 - RNA, 22 nt, Human
auacauauaugguacuuccugg

SEQ ID NO: 953371 - RNA, 22 nt, Human
uuugcauuuccagaguagcaga

SEQ ID NO: 953372 - RNA, 22 nt, Human
aauuaguauugcgauucauuag

SEQ ID NO: 953373 - RNA, 22 nt, Human
uugcauugaucccagcuugggc

SEQ ID NO: 953374 - RNA, 22 nt, Human
gugcagcugugugagagcucca

SEQ ID NO: 953375 - RNA, 22 nt, Human
agagccuggggauuggcaaggg

SEQ ID NO: 953376 - RNA, 22 nt, Human
ucuucaucucagauuaacagga

SEQ ID NO: 953377 - RNA, 22 nt, Human
acauucuaacauuguacagaua

SEQ ID NO: 953378 - RNA, 22 nt, Human
guacaguuuucaguguucacug

SEQ ID NO: 953379 - RNA, 22 nt, Human
uacauguaauuuucauaguaag

SEQ ID NO: 953380 - RNA, 22 nt, Human
uuugaaaggguuaugagacuga

SEQ ID NO: 953381 - RNA, 22 nt, Human
gccaggggacgcggagcgacga

SEQ ID NO: 953382 - RNA, 22 nt, Human
ucuuuuuauauugacaaaaggu

SEQ ID NO: 953383 - RNA, 22 nt, Human
ugaaaugauaucugauaacaaa

SEQ ID NO: 953384 - RNA, 22 nt, Human
acucaggaaaaauguagugaua

SEQ ID NO: 953385 - RNA, 22 nt, Human
acugucucucuagcaguucagg

SEQ ID NO: 953386 - RNA, 23 nt, Human
agcagccagagauccucggcccu

SEQ ID NO: 953387 - RNA, 22 nt, Human
ucucucuugucaccccaucugc

SEQ ID NO: 953388 - RNA, 22 nt, Human
aggaccugacuggcuccugcuu

SEQ ID NO: 953389 - RNA, 22 nt, Human
gcugccuguggcccuucugggu

SEQ ID NO: 953390 - RNA, 22 nt, Human
cagguggggagaguguggagca

SEQ ID NO: 953391 - RNA, 22 nt, Human
uccagggaugguaaugagcagu

SEQ ID NO: 953392 - RNA, 22 nt, Human
caggagugucuccacacagcaa

SEQ ID NO: 953393 - RNA, 22 nt, Human
uugaaugaccaugaugcaaggg

SEQ ID NO: 953394 - RNA, 22 nt, Human
acccaggaaaacauggugcaga

SEQ ID NO: 953395 - RNA, 22 nt, Human
ucucagagcucacaccuccugg

SEQ ID NO: 953396 - RNA, 22 nt, Human
uuuccucugacugcuccccugc

SEQ ID NO: 953397 - RNA, 22 nt, Human
aggccagguuccucaaucuuga

SEQ ID NO: 953398 - RNA, 22 nt, Human
agaaaugaagagagucaagguu

SEQ ID NO: 953399 - RNA, 22 nt, Human
gagcagcucgagaaggaagcag

SEQ ID NO: 953400 - RNA, 22 nt, Human
uuugcaguagacaucuuauuuu

SEQ ID NO: 953401 - RNA, 22 nt, Human
gacaaaggaucagagguuggga

SEQ ID NO: 953402 - RNA, 22 nt, Human
gaccauuuuuacagagcauuca

SEQ ID NO: 953403 - RNA, 22 nt, Human
ucuugggauagugucucauggc

SEQ ID NO: 953404 - RNA, 21 nt, Human
agccuggcccagggggaggcu

SEQ ID NO: 953405 - RNA, 22 nt, Human
guggcacuaaauacagcauuuc

SEQ ID NO: 953406 - RNA, 22 nt, Human
cuuaaauuggaugaguuaaguu

SEQ ID NO: 953407 - RNA, 22 nt, Human
aauucuuguuguuaguauauuu

SEQ ID NO: 953408 - RNA, 22 nt, Human
aggcucuggacagugaggaguu

SEQ ID NO: 953409 - RNA, 22 nt, Human
ggaggugggcuaaggacucucu

SEQ ID NO: 953410 - RNA, 22 nt, Human
agagacaggauaucugcucaug

SEQ ID NO: 953411 - RNA, 22 nt, Human
cucccuggaggugagcuggcac

SEQ ID NO: 953412 - RNA, 22 nt, Human
gaaccucagugaaacuggaggu

SEQ ID NO: 953413 - RNA, 22 nt, Human
aagccagguguuuaggccagcg

SEQ ID NO: 953414 - RNA, 22 nt, Human
ccugucuguaucgguucagagu

SEQ ID NO: 953415 - RNA, 22 nt, Human
agagcagagggcucugggacaa

SEQ ID NO: 953416 - RNA, 22 nt, Human
ugaaaucuacccuauucagggu

SEQ ID NO: 953417 - RNA, 22 nt, Human
aagccgggccugagaaaugaca

SEQ ID NO: 953418 - RNA, 22 nt, Human
ccaaaugcuccacugacuuugg

SEQ ID NO: 953419 - RNA, 22 nt, Human
uguaugcagcaaaacaauuagu

SEQ ID NO: 953420 - RNA, 22 nt, Human
uaccuuggguugaguucauucu

SEQ ID NO: 953421 - RNA, 22 nt, Human
aaauacagaguugcuuaaaagc

SEQ ID NO: 953422 - RNA, 22 nt, Human
cugccuggcuaaacucaagucg

SEQ ID NO: 953423 - RNA, 22 nt, Human
aggaagcugcuggaguagugug

SEQ ID NO: 953424 - RNA, 22 nt, Human
gcugggagucgcgucuguggcc

SEQ ID NO: 953425 - RNA, 19 nt, Human
gggcuuggggcugaagccu

SEQ ID NO: 953426 - RNA, 22 nt, Human
aacagacagaaaaaugugaucu

SEQ ID NO: 953427 - RNA, 22 nt, Human
ucaggcaguagaauugcuugaa

SEQ ID NO: 953428 - RNA, 22 nt, Human
caguacuuuucaaccaguauga

SEQ ID NO: 953429 - RNA, 22 nt, Human
ugcagccaggaaauauuugcug

SEQ ID NO: 953430 - RNA, 22 nt, Human
acuguguccuauuuccuugaca

SEQ ID NO: 953431 - RNA, 22 nt, Human
uggcucagcuuuccccaucugg

SEQ ID NO: 953432 - RNA, 22 nt, Human
ucuuugcaaaauacaacaaugg

SEQ ID NO: 953433 - RNA, 22 nt, Human
uagcacauuguugaccagaagg

SEQ ID NO: 953434 - RNA, 22 nt, Human
uaugcacaauaugaucuauuug

SEQ ID NO: 953435 - RNA, 22 nt, Human
ucuuccagcaaugugaaaucac

SEQ ID NO: 953436 - RNA, 22 nt, Human
cugcccugaccugccucagagu

SEQ ID NO: 953437 - RNA, 19 nt, Human
ggcauccagaacuaccagu

SEQ ID NO: 953438 - RNA, 22 nt, Human
aggcaacuuuuggggaugaugg

SEQ ID NO: 953439 - RNA, 23 nt, Human
accaggagccaagaucucccugg

SEQ ID NO: 953440 - RNA, 22 nt, Human
aaauacagcagacuccuguugu

SEQ ID NO: 953441 - RNA, 22 nt, Human
acagauauaaacuauaguagug

SEQ ID NO: 953442 - RNA, 22 nt, Human
ggagaggugaauggcugcucua

SEQ ID NO: 953443 - RNA, 22 nt, Human
aggcaagcauugggaacagggc

SEQ ID NO: 953444 - RNA, 22 nt, Human
aucaaaaccuugacuuuuaaug

SEQ ID NO: 953445 - RNA, 22 nt, Human
aaggcagccgugugacugcaug

SEQ ID NO: 953446 - RNA, 22 nt, Human
ucuucagagacucugagccccu

SEQ ID NO: 953447 - RNA, 22 nt, Human
caguuucuacgaaggucaaccc

SEQ ID NO: 953448 - RNA, 22 nt, Human
caggcagggagcuggaaaggau

SEQ ID NO: 953449 - RNA, 22 nt, Human
aaauuaguacauugcaaagucc

SEQ ID NO: 953450 - RNA, 22 nt, Human
ucucuuucuauaugugagucuu

SEQ ID NO: 953451 - RNA, 22 nt, Human
ggccugcuauuggugggcagac

SEQ ID NO: 953452 - RNA, 22 nt, Human
ccaaggagaaugacaccaugga

SEQ ID NO: 953453 - RNA, 20 nt, Human
auauguguacguguauacau

SEQ ID NO: 953454 - RNA, 22 nt, Human
ugcaccauguaaguggccacgu

SEQ ID NO: 953455 - RNA, 22 nt, Human
auguguguacacacgugacucu

SEQ ID NO: 953456 - RNA, 22 nt, Human
ggcucagggaaugaggaagaau

SEQ ID NO: 953457 - RNA, 22 nt, Human
agcagccauccuuagagaaaga

SEQ ID NO: 953458 - RNA, 22 nt, Human
gcagcuuggugaaaggugaugg

SEQ ID NO: 953459 - RNA, 22 nt, Human
cuggcccauggugagcucuggg

SEQ ID NO: 953460 - RNA, 22 nt, Human
cuucucagcaugguuacuguga

SEQ ID NO: 953461 - RNA, 22 nt, Human
ccugggaggcugugggucugcu

SEQ ID NO: 953462 - RNA, 22 nt, Human
agagauucauguuuacuguagg

SEQ ID NO: 953463 - RNA, 22 nt, Human
ugcucuggagggugaagcuuuu

SEQ ID NO: 953464 - RNA, 22 nt, Human
uauuuagaugcauuuggauugc

SEQ ID NO: 953465 - RNA, 22 nt, Human
agagauaugaguaguugugaca

SEQ ID NO: 953466 - RNA, 22 nt, Human
uuugaaaauuuaagugcuacac

SEQ ID NO: 953467 - RNA, 22 nt, Human
ugguuucccauuaucugcagga

SEQ ID NO: 953468 - RNA, 22 nt, Human
uguuccuaaauaugaauggaga

SEQ ID NO: 953469 - RNA, 22 nt, Human
ggcugggagcuggacaggccgg

SEQ ID NO: 953470 - RNA, 22 nt, Human
ggagggcugccagguggagcgg

SEQ ID NO: 953471 - RNA, 22 nt, Human
ggccucuggcaggcaggcccuc

SEQ ID NO: 953472 - RNA, 22 nt, Human
uucacagaauggcaaguuaugg

SEQ ID NO: 953473 - RNA, 22 nt, Human
ugggugcaugugagcacgugca

SEQ ID NO: 953474 - RNA, 22 nt, Human
cagcccaggccgacaguuccuc

SEQ ID NO: 953475 - RNA, 22 nt, Human
ucagggcaagucucagaagguu

SEQ ID NO: 953476 - RNA, 22 nt, Human
acacauuuacauguuuacguau

SEQ ID NO: 953477 - RNA, 22 nt, Human
gugcaugugucuuuauaguagc

SEQ ID NO: 953478 - RNA, 22 nt, Human
ugcagcccuuccuuccucuggg

SEQ ID NO: 953479 - RNA, 22 nt, Human
agccaggcugcaguuggcuggc

SEQ ID NO: 953480 - RNA, 22 nt, Human
acauuuacagugcuagacaauc

SEQ ID NO: 953481 - RNA, 22 nt, Human
agagaauuacagaagaauguca

SEQ ID NO: 953482 - RNA, 21 nt, Human
cucuuuauauaguaaagauau

SEQ ID NO: 953483 - RNA, 22 nt, Human
guuugcauguauuaagucaaua

SEQ ID NO: 953484 - RNA, 15 nt, Human
caggagaggaagguu

SEQ ID NO: 953485 - RNA, 22 nt, Human
uggcagcugucuguggggucuc

SEQ ID NO: 953486 - RNA, 22 nt, Human
ugcuugaaagggguuucccagu

SEQ ID NO: 953487 - RNA, 23 nt, Human
ccuggcagcaaacgaggagguua

SEQ ID NO: 953488 - RNA, 22 nt, Human
aagucaauuuauguucucagac

SEQ ID NO: 953489 - RNA, 22 nt, Human
uuuuccagagcugucucuugca

SEQ ID NO: 953490 - RNA, 22 nt, Human
acaaauauuuacugaauccacu

SEQ ID NO: 953491 - RNA, 22 nt, Human
gaggaguguauuccacaccacu

SEQ ID NO: 953492 - RNA, 22 nt, Human
uccuugaagcaacgugcagaca

SEQ ID NO: 953493 - RNA, 22 nt, Human
cuagccugggauuugaacuuau

SEQ ID NO: 953494 - RNA, 22 nt, Human
gcuggccugcugggcaccaccg

SEQ ID NO: 953495 - RNA, 21 nt, Human
aacugcuggucuuuucugucu

SEQ ID NO: 953496 - RNA, 22 nt, Human
cuggcugcaggaugaggcugcc

SEQ ID NO: 953497 - RNA, 22 nt, Human
acauuucuuccacaugcugcug

SEQ ID NO: 953498 - RNA, 22 nt, Human
acuaaggaauaugacaaacuca

SEQ ID NO: 953499 - RNA, 23 nt, Human
uuggcagcgggucaggcuguggg

SEQ ID NO: 953500 - RNA, 22 nt, Human
cucauggauauaagaacuguuu

SEQ ID NO: 953501 - RNA, 22 nt, Human
ggacucuguuuuccugaucacu

SEQ ID NO: 953502 - RNA, 22 nt, Human
ucccagccacagguguagcccu

SEQ ID NO: 953503 - RNA, 22 nt, Human
uuaaaugugauuucauuuaugu

SEQ ID NO: 953504 - RNA, 22 nt, Human
caaaagauacuugcaucuaacu

SEQ ID NO: 953505 - RNA, 22 nt, Human
ggcucugcugguaagaugccuc

SEQ ID NO: 953506 - RNA, 22 nt, Human
uguuuuaagggucaacugucac

SEQ ID NO: 953507 - RNA, 18 nt, Human
cuguucuagaacuccugu

SEQ ID NO: 953508 - RNA, 22 nt, Human
ucagcagucacauguuguccca

SEQ ID NO: 953509 - RNA, 22 nt, Human
aacuucaaaugugacuuugcau

SEQ ID NO: 953510 - RNA, 22 nt, Human
agaucucaccucuguguauuau

SEQ ID NO: 953511 - RNA, 22 nt, Human
aagaggaagucuccauggagag

SEQ ID NO: 953512 - RNA, 22 nt, Human
uugaagaggacuuugcagcugu

SEQ ID NO: 953513 - RNA, 22 nt, Human
aucuguuuaauucauuuucaca

SEQ ID NO: 953514 - RNA, 22 nt, Human
ugagaggcagaauggugccugc

SEQ ID NO: 953515 - RNA, 22 nt, Human
ggugaaggucagagcaggaaaa

SEQ ID NO: 953516 - RNA, 22 nt, Human
cuuugaaaacuuaaauaacagc

SEQ ID NO: 953517 - RNA, 22 nt, Human
caggugaccuuuguccuaaguu

SEQ ID NO: 953518 - RNA, 22 nt, Human
ccugguguugugaaguagccgu

SEQ ID NO: 953519 - RNA, 22 nt, Human
ccagcagagggucuuggccauu

SEQ ID NO: 953520 - RNA, 22 nt, Human
aggaaaaaagucugugauuaua

SEQ ID NO: 953521 - RNA, 21 nt, Human
gcagaggcacggcaccaaggg

SEQ ID NO: 953522 - RNA, 22 nt, Human
ccugaggggcugcaggccagcu

SEQ ID NO: 953523 - RNA, 22 nt, Human
aggcuuauuaauaugauucugc

SEQ ID NO: 953524 - RNA, 22 nt, Human
cagcagugucuccagcaucaca

SEQ ID NO: 953525 - RNA, 22 nt, Human
gcugggcugagcuagacuuggc

SEQ ID NO: 953526 - RNA, 21 nt, Human
uuuauguacuucauagaguag

SEQ ID NO: 953527 - RNA, 19 nt, Human
gcaggguguugacuguccc

SEQ ID NO: 953528 - RNA, 22 nt, Human
gcaggcagguggcaucuuguga

SEQ ID NO: 953529 - RNA, 21 nt, Human
uuccagagauuguuucaccug

SEQ ID NO: 953530 - RNA, 22 nt, Human
uuucaaugacacaaaagagaaa

SEQ ID NO: 953531 - RNA, 22 nt, Human
caggagcagaggguggucagca

SEQ ID NO: 953532 - RNA, 22 nt, Human
caucaucaaaacaaauggaguc

SEQ ID NO: 953533 - RNA, 22 nt, Human
uggggcugaggagccucacucu

SEQ ID NO: 953534 - RNA, 23 nt, Human
agcacagacuagaaaggucuuuc

SEQ ID NO: 953535 - RNA, 22 nt, Human
gucugaggaagaugcaggggga

SEQ ID NO: 953536 - RNA, 22 nt, Human
uggcagcauuaauuauucaggu

SEQ ID NO: 953537 - RNA, 19 nt, Human
ugggccugcaucugggucu

SEQ ID NO: 953538 - RNA, 22 nt, Human
uuuuuuaguuaggucagaaugu

SEQ ID NO: 953539 - RNA, 22 nt, Human
gggagccaugcuggucuucuuu

SEQ ID NO: 953540 - RNA, 22 nt, Human
auuugcuuaucuccacaguugu

SEQ ID NO: 953541 - RNA, 22 nt, Human
ucagagugguagccuauuuucu

SEQ ID NO: 953542 - RNA, 22 nt, Human
aguuugaaauguuggcaauauu

SEQ ID NO: 953543 - RNA, 22 nt, Human
guucccauacaguaucagugcu

SEQ ID NO: 953544 - RNA, 22 nt, Human
uggucaggcugcucugcggcgu

SEQ ID NO: 953545 - RNA, 22 nt, Human
aaguauauuuuuugaagcauau

SEQ ID NO: 953546 - RNA, 20 nt, Human
cuuugccuauucucugccug

SEQ ID NO: 953547 - RNA, 22 nt, Human
gggaggcuggcucuggccacag

SEQ ID NO: 953548 - RNA, 22 nt, Human
ucacucugauagauaagcuaac

SEQ ID NO: 953549 - RNA, 22 nt, Human
ggcugggcugcugggucagagc

SEQ ID NO: 953550 - RNA, 22 nt, Human
cuggaaggucuguccccacugc

SEQ ID NO: 953551 - RNA, 22 nt, Human
uuagugucuucuucauccucug

SEQ ID NO: 953552 - RNA, 20 nt, Human
ugcagcugguuucacaggga

SEQ ID NO: 953553 - RNA, 22 nt, Human
agccucugguccucccucagcu

SEQ ID NO: 953554 - RNA, 21 nt, Human
cugugcuuuuuaagugugaug

SEQ ID NO: 953555 - RNA, 22 nt, Human
ccacugaggcaggcaguaucua

SEQ ID NO: 953556 - RNA, 21 nt, Human
auuuggcaaaggcgaugcaca

SEQ ID NO: 953557 - RNA, 22 nt, Human
agccuggcacugaggcagggcg

SEQ ID NO: 953558 - RNA, 22 nt, Human
gacagggcauggugcagaguuc

SEQ ID NO: 953559 - RNA, 22 nt, Human
acauauuuccaugcagcauguc

SEQ ID NO: 953560 - RNA, 22 nt, Human
guuccaaacaagucauaaagua

SEQ ID NO: 953561 - RNA, 22 nt, Human
ugaucagucccaugaucuucca

SEQ ID NO: 953562 - RNA, 22 nt, Human
ugcugcuccugccuggcuccca

SEQ ID NO: 953563 - RNA, 22 nt, Human
cagagguagccgagugcaaucg

SEQ ID NO: 953564 - RNA, 19 nt, Human
agaggcugucaccuguagc

SEQ ID NO: 953565 - RNA, 22 nt, Human
uuucuguaauuaaaagggcagg

SEQ ID NO: 953566 - RNA, 22 nt, Human
gaggcagagaccuucaggaccu

SEQ ID NO: 953567 - RNA, 22 nt, Human
ggagaaggugcuggucacugug

SEQ ID NO: 953568 - RNA, 21 nt, Human
gcacagcaugaguguuggcau

SEQ ID NO: 953569 - RNA, 22 nt, Human
gccaggaggucagccccucaac

SEQ ID NO: 953570 - RNA, 22 nt, Human
uacacuuuuuacuacagauucu

SEQ ID NO: 953571 - RNA, 22 nt, Human
cgagaguggacagggcgcagcu

SEQ ID NO: 953572 - RNA, 22 nt, Human
gacggcagaaacucaugagguc

SEQ ID NO: 953573 - RNA, 22 nt, Human
cucugugggggagaggcagcug

SEQ ID NO: 953574 - RNA, 22 nt, Human
cagaggcagacccuccagggcg

SEQ ID NO: 953575 - RNA, 22 nt, Human
aggcugcuggcaggcguggacg

SEQ ID NO: 953576 - RNA, 22 nt, Human
uuucuucuugauuuaaacaggg

SEQ ID NO: 953577 - RNA, 22 nt, Human
cccagcucaucaggagccgccc

SEQ ID NO: 953578 - RNA, 22 nt, Human
uaugagcuuccaguguugcaug

SEQ ID NO: 953579 - RNA, 22 nt, Human
auuaggacagagaugucaagag

SEQ ID NO: 953580 - RNA, 19 nt, Human
ggacacagaaagcugcauu

SEQ ID NO: 953581 - RNA, 22 nt, Human
augaugguaaauucaguauccg

SEQ ID NO: 953582 - RNA, 22 nt, Human
ugcuagaauaccuaccuggagg

SEQ ID NO: 953583 - RNA, 22 nt, Human
uagcugccuagacagcuauagc

SEQ ID NO: 953584 - RNA, 22 nt, Human
caggagacaauggcuguggggc

SEQ ID NO: 953585 - RNA, 22 nt, Human
agaauucuguucuucgggugug

SEQ ID NO: 953586 - RNA, 16 nt, Human
auucacaaggcaucgg

SEQ ID NO: 953587 - RNA, 22 nt, Human
gacccaggguuucugcacaggg

SEQ ID NO: 953588 - RNA, 22 nt, Human
agguggagacccagagaaggcg

SEQ ID NO: 953589 - RNA, 22 nt, Human
ggcuggccuguguggccgccac

SEQ ID NO: 953590 - RNA, 22 nt, Human
ugccuggcaaugccagaagcca

SEQ ID NO: 953591 - RNA, 22 nt, Human
acagagcaugcucaguguguga

SEQ ID NO: 953592 - RNA, 22 nt, Human
cagucucuaaaucaaucugaau

SEQ ID NO: 953593 - RNA, 22 nt, Human
gauuauguucgacuuuagaaau

SEQ ID NO: 953594 - RNA, 22 nt, Human
gccuccugagaagccacaggcu

SEQ ID NO: 953595 - RNA, 22 nt, Human
aaaggccaugguuggaguguuu

SEQ ID NO: 953596 - RNA, 21 nt, Human
uggcucuguucaauauaugga

SEQ ID NO: 953597 - RNA, 22 nt, Human
ccagcccugaacccugcugcau

SEQ ID NO: 953598 - RNA, 22 nt, Human
ggcagcuggccuccucgcccac

SEQ ID NO: 953599 - RNA, 22 nt, Human
uggccugccucccggcuucuuu

SEQ ID NO: 953600 - RNA, 22 nt, Human
gggcuggcaucaguugccgaga

SEQ ID NO: 953601 - RNA, 22 nt, Human
aggcccugaccugggagaucua

SEQ ID NO: 953602 - RNA, 22 nt, Human
uagcugccauugcuccaggaag

SEQ ID NO: 953603 - RNA, 22 nt, Human
uguaagauaugaguacauguaa

SEQ ID NO: 953604 - RNA, 22 nt, Human
uauuugaaaguguacaaaaacu

SEQ ID NO: 953605 - RNA, 22 nt, Human
ugcugagguuucgucugcuugc

SEQ ID NO: 953606 - RNA, 22 nt, Human
agaauuuuugauuaucuacucg

SEQ ID NO: 953607 - RNA, 22 nt, Human
ggaggccaccugaccugcuguu

SEQ ID NO: 953608 - RNA, 22 nt, Human
agucucugagguucagaugccu

SEQ ID NO: 953609 - RNA, 19 nt, Human
aaaugugaugguacaauuc

SEQ ID NO: 953610 - RNA, 22 nt, Human
cuucuucaaccugaaaguuuca

SEQ ID NO: 953611 - RNA, 22 nt, Human
aguggggaagagcaugggcccu

SEQ ID NO: 953612 - RNA, 22 nt, Human
ccugucugagccagggugggca

SEQ ID NO: 953613 - RNA, 22 nt, Human
aagauuuagggccaguuuacau

SEQ ID NO: 953614 - RNA, 21 nt, Human
cacugcagccuugaccugggc

SEQ ID NO: 953615 - RNA, 22 nt, Human
augugucuuauuugauuccaca

SEQ ID NO: 953616 - RNA, 22 nt, Human
cgaggcagaggcugaaacggcu

SEQ ID NO: 953617 - RNA, 22 nt, Human
ugucucaguucccuucucugga

SEQ ID NO: 953618 - RNA, 22 nt, Human
aaguugagaugucauaggagac

SEQ ID NO: 953619 - RNA, 22 nt, Human
aaucuguucuacucuauucaga

SEQ ID NO: 953620 - RNA, 22 nt, Human
gucccucugugucccugcaguc

SEQ ID NO: 953621 - RNA, 22 nt, Human
uggcccugaaucaaggccagca

SEQ ID NO: 953622 - RNA, 22 nt, Human
aggccuggccccaguugcuagg

SEQ ID NO: 953623 - RNA, 16 nt, Human
agcagccagcacugga

SEQ ID NO: 953624 - RNA, 22 nt, Human
acagucucuccacacugcaggg

SEQ ID NO: 953625 - RNA, 22 nt, Human
cugggugaguugaugaaggaga

SEQ ID NO: 953626 - RNA, 22 nt, Human
ccaggccagagugcaguggcac

SEQ ID NO: 953627 - RNA, 22 nt, Human
gaggauggaggugugagcuaug

SEQ ID NO: 953628 - RNA, 22 nt, Human
ccugugugcacacgaggccaug

SEQ ID NO: 953629 - RNA, 22 nt, Human
aggacucaucccugcuugucag

SEQ ID NO: 953630 - RNA, 22 nt, Human
uggcagggaguugcaggauuuc

SEQ ID NO: 953631 - RNA, 19 nt, Human
caagugaagccugggaugg

SEQ ID NO: 953632 - RNA, 22 nt, Human
ggcuccuguggcaagacagcuu

SEQ ID NO: 953633 - RNA, 22 nt, Human
uuuagaaauugcagagugggug

SEQ ID NO: 953634 - RNA, 22 nt, Human
caaaauugauuguggugauggu

SEQ ID NO: 953635 - RNA, 16 nt, Human
ucccaggaggcggaac

SEQ ID NO: 953636 - RNA, 22 nt, Human
uuaugcuaagugcaacaagcca

SEQ ID NO: 953637 - RNA, 22 nt, Human
uaaaagacauauaacuguagga

SEQ ID NO: 953638 - RNA, 22 nt, Human
uccugucagugaggcagaugaa

SEQ ID NO: 953639 - RNA, 22 nt, Human
gcaccugggacccagaggcacc

SEQ ID NO: 953640 - RNA, 22 nt, Human
uucacauugugcagauuauggu

SEQ ID NO: 953641 - RNA, 22 nt, Human
agggauggaagacuugaagacc

SEQ ID NO: 953642 - RNA, 22 nt, Human
uuguuuuggagaugagcuaaaa

SEQ ID NO: 953643 - RNA, 22 nt, Human
auuugucuuugagugcccugcu

SEQ ID NO: 953644 - RNA, 18 nt, Human
ucuuccaacacugacacc

SEQ ID NO: 953645 - RNA, 22 nt, Human
uuuacuuuugguaaggucauuu

SEQ ID NO: 953646 - RNA, 22 nt, Human
gcugucuggaggcucugaggga

SEQ ID NO: 953647 - RNA, 22 nt, Human
ccaggugggaggaaagcagaga

SEQ ID NO: 953648 - RNA, 22 nt, Human
ugaguuuugucuugcuagaagu

SEQ ID NO: 953649 - RNA, 21 nt, Human
ugcagagauaucugaagcaga

SEQ ID NO: 953650 - RNA, 22 nt, Human
gccuuccuuuuaccaccagcca

SEQ ID NO: 953651 - RNA, 22 nt, Human
cauggcagagccugcagguggg

SEQ ID NO: 953652 - RNA, 22 nt, Human
uggcagcuauggucuaagggcc

SEQ ID NO: 953653 - RNA, 22 nt, Human
aggcuggcuggcaggggacaca

SEQ ID NO: 953654 - RNA, 23 nt, Human
aguguuccaguugguugagagug

SEQ ID NO: 953655 - RNA, 22 nt, Human
agccaagcugaucuccugcuga

SEQ ID NO: 953656 - RNA, 22 nt, Human
acagaguaucuaucaggaguau

SEQ ID NO: 953657 - RNA, 22 nt, Human
cauucuuacacaauauuuuaau

SEQ ID NO: 953658 - RNA, 22 nt, Human
uuagcaucugcuguaagcuuau

SEQ ID NO: 953659 - RNA, 22 nt, Human
gcaaggcagcgcggaguagcua

SEQ ID NO: 953660 - RNA, 22 nt, Human
ggcuucccagcagagggcgcac

SEQ ID NO: 953661 - RNA, 22 nt, Human
acuacuuugggccauuuguuua

SEQ ID NO: 953662 - RNA, 22 nt, Human
caggaugggauguagugggccc

SEQ ID NO: 953663 - RNA, 22 nt, Human
aggcccaguuauccuacuuguu

SEQ ID NO: 953664 - RNA, 22 nt, Human
gguggccuccagggcauaggug

SEQ ID NO: 953665 - RNA, 22 nt, Human
gcccaggaugguguguaguggu

SEQ ID NO: 953666 - RNA, 22 nt, Human
agacgagggcccccaggacagc

SEQ ID NO: 953667 - RNA, 22 nt, Human
ugcagaagaccuuccagggcug

SEQ ID NO: 953668 - RNA, 22 nt, Human
uagagugguuaacaguuuagaa

SEQ ID NO: 953669 - RNA, 22 nt, Human
aggaguguggccagggcucugg

SEQ ID NO: 953670 - RNA, 22 nt, Human
uccucucagugugguuguggga

SEQ ID NO: 953671 - RNA, 22 nt, Human
agaggccugugugcuccagugg

SEQ ID NO: 953672 - RNA, 23 nt, Human
aggagccaggugcagcccuugug

SEQ ID NO: 953673 - RNA, 22 nt, Human
uaacuccacaccccucuuggug

SEQ ID NO: 953674 - RNA, 22 nt, Human
ugggcugcuuccucagcugaga

SEQ ID NO: 953675 - RNA, 22 nt, Human
guaagucugaguguaauucaca

SEQ ID NO: 953676 - RNA, 22 nt, Human
aaugauggauuuagacaagcug

SEQ ID NO: 953677 - RNA, 22 nt, Human
uuuucuuaugugcagcuauaug

SEQ ID NO: 953678 - RNA, 20 nt, Human
cuggcaggagcgagucuacc

SEQ ID NO: 953679 - RNA, 22 nt, Human
gggcugcugcccaggaggcacc

SEQ ID NO: 953680 - RNA, 21 nt, Human
guuuuaagggagaaaaccuag

SEQ ID NO: 953681 - RNA, 22 nt, Human
cccaggcuggauuucgguggca

SEQ ID NO: 953682 - RNA, 22 nt, Human
ucagaaguacugugcuacaaua

SEQ ID NO: 953683 - RNA, 22 nt, Human
agcugcagagguuugugcaaca

SEQ ID NO: 953684 - RNA, 22 nt, Human
aggagcugcaaauauuaguaau

SEQ ID NO: 953685 - RNA, 22 nt, Human
caagaaauguuuacugagcauc

SEQ ID NO: 953686 - RNA, 22 nt, Human
cugggcuggagugcaauggcgc

SEQ ID NO: 953687 - RNA, 20 nt, Human
gacaucauguacacauugcc

SEQ ID NO: 953688 - RNA, 23 nt, Human
uugaaggagaaagcuuucuuggu

SEQ ID NO: 953689 - RNA, 22 nt, Human
guuguuuuuguucucuauagcu

SEQ ID NO: 953690 - RNA, 22 nt, Human
cucuugggauuugcaggcucag

SEQ ID NO: 953691 - RNA, 22 nt, Human
ggcugccacgucgaggguccaa

SEQ ID NO: 953692 - RNA, 22 nt, Human
gcucucagguacaaagcugugu

SEQ ID NO: 953693 - RNA, 22 nt, Human
agaggauguucuaggcacucau

SEQ ID NO: 953694 - RNA, 22 nt, Human
ugugcugguacaugugaggaug

SEQ ID NO: 953695 - RNA, 22 nt, Human
cugugccuaagaugcaugucuc

SEQ ID NO: 953696 - RNA, 22 nt, Human
cgccucagccguggucaucuuc

SEQ ID NO: 953697 - RNA, 20 nt, Human
uuucugugcccaggucuguu

SEQ ID NO: 953698 - RNA, 22 nt, Human
ugccaggcuaaguggaggacuu

SEQ ID NO: 953699 - RNA, 20 nt, Human
acagaaagagagaaugucag

SEQ ID NO: 953700 - RNA, 22 nt, Human
auuaaauuaaguggcuaauuua

SEQ ID NO: 953701 - RNA, 22 nt, Human
gcugagguggcugccuuaguaa

SEQ ID NO: 953702 - RNA, 22 nt, Human
cuguacaucccgagagccagua

SEQ ID NO: 953703 - RNA, 22 nt, Human
cugcucuguuucuuagcugggu

SEQ ID NO: 953704 - RNA, 19 nt, Human
ggcugucuggcguguggau

SEQ ID NO: 953705 - RNA, 22 nt, Human
ugucucagaauggcucauaaua

SEQ ID NO: 953706 - RNA, 22 nt, Human
acauuucuggaguuucucaaca

SEQ ID NO: 953707 - RNA, 20 nt, Human
ccucaggaugagggugagca

SEQ ID NO: 953708 - RNA, 22 nt, Human
cagcuggccugaucccuguggc

SEQ ID NO: 953709 - RNA, 22 nt, Human
ucagagaguuacacaaauuguu

SEQ ID NO: 953710 - RNA, 22 nt, Human
cuuauguacacacauauauugu

SEQ ID NO: 953711 - RNA, 22 nt, Human
gugcagugaaaaaagaaugucc

SEQ ID NO: 953712 - RNA, 22 nt, Human
gcagaggagcaaguugcuacag

SEQ ID NO: 953713 - RNA, 22 nt, Human
aaaaaugucauuauggaacuga

SEQ ID NO: 953714 - RNA, 22 nt, Human
ugggagcucagaaagggagguc

SEQ ID NO: 953715 - RNA, 19 nt, Human
ggcucagggcgcugccgcc

SEQ ID NO: 953716 - RNA, 22 nt, Human
auaugcacauacauacauaggu

SEQ ID NO: 953717 - RNA, 22 nt, Human
uggcucaguuaggucagaaaca

SEQ ID NO: 953718 - RNA, 22 nt, Human
ggggagaguccuuuccaguucc

SEQ ID NO: 953719 - RNA, 22 nt, Human
uugccacugaaccagucuugca

SEQ ID NO: 953720 - RNA, 19 nt, Human
ugccuggcaccagcuccac

SEQ ID NO: 953721 - RNA, 22 nt, Human
cccuccagagcuugaccugcug

SEQ ID NO: 953722 - RNA, 18 nt, Human
cagaaguccuucaaggcc

SEQ ID NO: 953723 - RNA, 22 nt, Human
uacauuuggaugugcuuaagug

SEQ ID NO: 953724 - RNA, 22 nt, Human
aacucagcauccugcacagaga

SEQ ID NO: 953725 - RNA, 18 nt, Human
ggcaucugcacagcagcc

SEQ ID NO: 953726 - RNA, 22 nt, Human
cagguacacucccuugugcuga

SEQ ID NO: 953727 - RNA, 22 nt, Human
aaaauuauucauggcuuuugga

SEQ ID NO: 953728 - RNA, 22 nt, Human
aaagcagacugauuugcaucac

SEQ ID NO: 953729 - RNA, 22 nt, Human
cucugugauuuugugagccaga

SEQ ID NO: 953730 - RNA, 22 nt, Human
gugcauuuggugacucucaccc

SEQ ID NO: 953731 - RNA, 22 nt, Human
aagggcaggagaagacggauau

SEQ ID NO: 953732 - RNA, 22 nt, Human
ucaggagagagaaauuggggcu

SEQ ID NO: 953733 - RNA, 20 nt, Human
auuugcaucugaauaacuua

SEQ ID NO: 953734 - RNA, 22 nt, Human
ugaggcacaggcagugcccccg

SEQ ID NO: 953735 - RNA, 22 nt, Human
auggcucauuuaucuugcagcc

SEQ ID NO: 953736 - RNA, 22 nt, Human
cuggcuuccaugcuguaguggc

SEQ ID NO: 953737 - RNA, 22 nt, Human
uaagacaugguugaucuagugu

SEQ ID NO: 953738 - RNA, 22 nt, Human
uauucacuguaacucagcaaua

SEQ ID NO: 953739 - RNA, 22 nt, Human
gccugggaaaugguggggucag

SEQ ID NO: 953740 - RNA, 22 nt, Human
cccugccuugggguccacaccg

SEQ ID NO: 953741 - RNA, 22 nt, Human
ccugugggaggggccuggcgcg

SEQ ID NO: 953742 - RNA, 22 nt, Human
gugcugggauuacaggugugag

SEQ ID NO: 953743 - RNA, 22 nt, Human
uauguacagggauagaacuuga

SEQ ID NO: 953744 - RNA, 22 nt, Human
ggucccaggcucccucuugucc

SEQ ID NO: 953745 - RNA, 22 nt, Human
ggcaaggccaggccuccaagac

SEQ ID NO: 953746 - RNA, 22 nt, Human
auucugagacaauugccgucag

SEQ ID NO: 953747 - RNA, 22 nt, Human
guccaugacugugacucacaug

SEQ ID NO: 953748 - RNA, 22 nt, Human
uaaaugaagaaauggagauugu

SEQ ID NO: 953749 - RNA, 22 nt, Human
uuauuuaauuuucucacucaga

SEQ ID NO: 953750 - RNA, 22 nt, Human
gcucccagaaccaaggcugggg

SEQ ID NO: 953751 - RNA, 21 nt, Human
uggcugcuggcccucucucca

SEQ ID NO: 953752 - RNA, 22 nt, Human
gagggcauaguuaaauaggagg

SEQ ID NO: 953753 - RNA, 22 nt, Human
cugcugugcaacauugcaccua

SEQ ID NO: 953754 - RNA, 22 nt, Human
cuucugugcuucacaguugcca

SEQ ID NO: 953755 - RNA, 22 nt, Human
ucccaguguggcaggccaugga

SEQ ID NO: 953756 - RNA, 22 nt, Human
ucaaguguaguggugucagguc

SEQ ID NO: 953757 - RNA, 22 nt, Human
cagguaggauggaagggcucaa

SEQ ID NO: 953758 - RNA, 20 nt, Human
guggccuguccuguuguggg

SEQ ID NO: 953759 - RNA, 22 nt, Human
guggccucuguuggcuccuagg

SEQ ID NO: 953760 - RNA, 22 nt, Human
uuuccagguauuaauacuguau

SEQ ID NO: 953761 - RNA, 22 nt, Human
gccugcagaacugugaggcaau

SEQ ID NO: 953762 - RNA, 22 nt, Human
ccuggccagccagggcuggggu

SEQ ID NO: 953763 - RNA, 22 nt, Human
ccagagacgucggucagggcgc

SEQ ID NO: 953764 - RNA, 22 nt, Human
aagaugcuuauugcuccugcag

SEQ ID NO: 953765 - RNA, 22 nt, Human
aagauuuacuagcauaauagcu

SEQ ID NO: 953766 - RNA, 23 nt, Human
ugcagccacucaggagcucagug

SEQ ID NO: 953767 - RNA, 22 nt, Human
cauuucugcagaauugcucuuc

SEQ ID NO: 953768 - RNA, 22 nt, Human
gacagcagggacauguaggaag

SEQ ID NO: 953769 - RNA, 22 nt, Human
ggccugcuggcuccagcgcccg

SEQ ID NO: 953770 - RNA, 23 nt, Human
cagggccaggcagcagcugucac

SEQ ID NO: 953771 - RNA, 22 nt, Human
caggggcucccugggugccagu

SEQ ID NO: 953772 - RNA, 22 nt, Human
cucaaggaaagucuggagaaga

SEQ ID NO: 953773 - RNA, 22 nt, Human
ggcagcuucucccaggcuguuu

SEQ ID NO: 953774 - RNA, 22 nt, Human
cagggugcagugucgcugcuag

SEQ ID NO: 953775 - RNA, 22 nt, Human
ugcagcugcuggcccaggugcu

SEQ ID NO: 953776 - RNA, 22 nt, Human
cugcaggcccccuuccuggagu

SEQ ID NO: 953777 - RNA, 22 nt, Human
aggaagccuggggcugcccucg

SEQ ID NO: 953778 - RNA, 22 nt, Human
ucccagagcucugacaccagcu

SEQ ID NO: 953779 - RNA, 22 nt, Human
aggucauuuccuuagaggcaga

SEQ ID NO: 953780 - RNA, 22 nt, Human
ccagguggacggcgaguacagg

SEQ ID NO: 953781 - RNA, 22 nt, Human
gagcaccgccuccacgaugccc

SEQ ID NO: 953782 - RNA, 22 nt, Human
uucaggauucucucccauuuac

SEQ ID NO: 953783 - RNA, 22 nt, Human
uuugaaagggaaauaaacuccu

SEQ ID NO: 953784 - RNA, 19 nt, Human
gagaggccugugcuugaag

SEQ ID NO: 953785 - RNA, 22 nt, Human
agggagacacaugaggaaguca

SEQ ID NO: 953786 - RNA, 22 nt, Human
ggcucagacucccaggcccucu

SEQ ID NO: 953787 - RNA, 22 nt, Human
auucuucauacagacaaguccu

SEQ ID NO: 953788 - RNA, 23 nt, Human
uggggcugauggagacggaccag

SEQ ID NO: 953789 - RNA, 22 nt, Human
agagugaaguucaucgugcagc

SEQ ID NO: 953790 - RNA, 21 nt, Human
gccuggcagguggaagggcuc

SEQ ID NO: 953791 - RNA, 22 nt, Human
gaauacauuggaaaucagaaua

SEQ ID NO: 953792 - RNA, 22 nt, Human
gcaggcaggagcccaacugccu

SEQ ID NO: 953793 - RNA, 21 nt, Human
uggcagggguaguaguacagc

SEQ ID NO: 953794 - RNA, 22 nt, Human
ugccugugguuccaguuuuuuc

SEQ ID NO: 953795 - RNA, 22 nt, Human
cuggcuccacucccugccugac

SEQ ID NO: 953796 - RNA, 22 nt, Human
agaggcuggauugagcauagac

SEQ ID NO: 953797 - RNA, 22 nt, Human
ugggagagugcucaaugugcaa

SEQ ID NO: 953798 - RNA, 22 nt, Human
gagccaggcaccuucuguguug

SEQ ID NO: 953799 - RNA, 22 nt, Human
uggcagcaaguucuugggaggu

SEQ ID NO: 953800 - RNA, 22 nt, Human
agcaggugacccaagcaggcug

SEQ ID NO: 953801 - RNA, 22 nt, Human
aggcucuggaguguggugcugg

SEQ ID NO: 953802 - RNA, 22 nt, Human
ugggugagugggaaaagcccag

SEQ ID NO: 953803 - RNA, 20 nt, Human
cugggcucgguggcccuggc

SEQ ID NO: 953804 - RNA, 22 nt, Human
cacauccuucagcugagcccag

SEQ ID NO: 953805 - RNA, 22 nt, Human
ccaguucuaaacauaaagcuaa

SEQ ID NO: 953806 - RNA, 22 nt, Human
auguuacagaaagcaaagauga

SEQ ID NO: 953807 - RNA, 22 nt, Human
cucuuuccaggguaccccaggu

SEQ ID NO: 953808 - RNA, 22 nt, Human
uaagaacaagauguuccuguuu

SEQ ID NO: 953809 - RNA, 22 nt, Human
ccugcucagagcgucuugugug

SEQ ID NO: 953810 - RNA, 22 nt, Human
aacaucuacagugagauguuag

SEQ ID NO: 953811 - RNA, 22 nt, Human
uugaaauacugcauuguucagu

SEQ ID NO: 953812 - RNA, 22 nt, Human
cccauuuagauaacaguucaaa

SEQ ID NO: 953813 - RNA, 22 nt, Human
cagacagaccugcaagggcaca

SEQ ID NO: 953814 - RNA, 22 nt, Human
uucaggauaugugauaucugaa

SEQ ID NO: 953815 - RNA, 22 nt, Human
cuggugggagcagcaggcagcu

SEQ ID NO: 953816 - RNA, 22 nt, Human
acauacaucaaguaucacaaga

SEQ ID NO: 953817 - RNA, 19 nt, Human
uggcugggugccaauggcc

SEQ ID NO: 953818 - RNA, 22 nt, Human
cagggccagccauccugcuggg

SEQ ID NO: 953819 - RNA, 22 nt, Human
cccaggcugauguucagcgggu

SEQ ID NO: 953820 - RNA, 22 nt, Human
uguuuacaaggagaauuugagg

SEQ ID NO: 953821 - RNA, 23 nt, Human
uggccacagggugcuccauugua

SEQ ID NO: 953822 - RNA, 22 nt, Human
cugugucccccucagccaggug

SEQ ID NO: 953823 - RNA, 19 nt, Human
uagucuuuauucuuaauuu

SEQ ID NO: 953824 - RNA, 22 nt, Human
uuugcauuuauaaguuggugga

SEQ ID NO: 953825 - RNA, 22 nt, Human
uaaacaugugagugugcauaua

SEQ ID NO: 953826 - RNA, 22 nt, Human
gguggguauaguuagggccucu

SEQ ID NO: 953827 - RNA, 22 nt, Human
acagaggccccgugggagagcc

SEQ ID NO: 953828 - RNA, 22 nt, Human
cugggagcuggaugcccugccc

SEQ ID NO: 953829 - RNA, 18 nt, Human
uccugccugcgggcuccc

SEQ ID NO: 953830 - RNA, 22 nt, Human
ucucagaggcccgacguucucc

SEQ ID NO: 953831 - RNA, 22 nt, Human
ggugucccaggccagcugugug

SEQ ID NO: 953832 - RNA, 22 nt, Human
uacagucuuuggaaagagauag

SEQ ID NO: 953833 - RNA, 22 nt, Human
cccagggacagaugggcagcua

SEQ ID NO: 953834 - RNA, 17 nt, Human
cgagggcuugcuggcuc

SEQ ID NO: 953835 - RNA, 22 nt, Human
aaauaugaaugauaagaguuau

SEQ ID NO: 953836 - RNA, 22 nt, Human
gcccagcuggcuuccagcacau

SEQ ID NO: 953837 - RNA, 17 nt, Human
cucugcagugcauggcu

SEQ ID NO: 953838 - RNA, 22 nt, Human
cuguccucuguccucagcagga

SEQ ID NO: 953839 - RNA, 22 nt, Human
aaauaguucagcuuguaaaccc

SEQ ID NO: 953840 - RNA, 22 nt, Human
uauaguaaaauuuucauuuaug

SEQ ID NO: 953841 - RNA, 22 nt, Human
uagauuuccucuuccucauucc

SEQ ID NO: 953842 - RNA, 22 nt, Human
acauuugugcacaugugcaugg

SEQ ID NO: 953843 - RNA, 22 nt, Human
uaugcacaccuggguccuuguc

SEQ ID NO: 953844 - RNA, 22 nt, Human
uauguguacaucugguugagca

SEQ ID NO: 953845 - RNA, 22 nt, Human
caggugcuguccugcacauguc

SEQ ID NO: 953846 - RNA, 22 nt, Human
gcagagccaggagcccaggauc

SEQ ID NO: 953847 - RNA, 22 nt, Human
cccagccugugacagccguccu

SEQ ID NO: 953848 - RNA, 22 nt, Human
aggagacauaacuaugaugaga

SEQ ID NO: 953849 - RNA, 22 nt, Human
uggcgugcccuccagacuuggc

SEQ ID NO: 953850 - RNA, 22 nt, Human
guacaaaguggaccugauagua

SEQ ID NO: 953851 - RNA, 22 nt, Human
gccagacacuccccugggcagg

SEQ ID NO: 953852 - RNA, 22 nt, Human
gccagcagcccagaaggacuuu

SEQ ID NO: 953853 - RNA, 22 nt, Human
agauaugacuagaagcucauuu

SEQ ID NO: 953854 - RNA, 17 nt, Human
ccagguggaaucgugga

SEQ ID NO: 953855 - RNA, 22 nt, Human
aagauucuacaguagguacauu

SEQ ID NO: 953856 - RNA, 22 nt, Human
gagggaggugauacugaacgua

SEQ ID NO: 953857 - RNA, 22 nt, Human
acguguucaauuuccaucugac

SEQ ID NO: 953858 - RNA, 22 nt, Human
uuaacauuguccuuagcagauu

SEQ ID NO: 953859 - RNA, 20 nt, Human
auugucagccuucagaggag

SEQ ID NO: 953860 - RNA, 18 nt, Human
aucucccauuggccaagg

SEQ ID NO: 953861 - RNA, 22 nt, Human
ucuccugguauguaugcaccug

SEQ ID NO: 953862 - RNA, 22 nt, Human
cacauuucucuaccucacacaa

SEQ ID NO: 953863 - RNA, 22 nt, Human
ggcugccuucccugagccccgg

SEQ ID NO: 953864 - RNA, 22 nt, Human
cagccagccucucaaccaugca

SEQ ID NO: 953865 - RNA, 22 nt, Human
ugcauuguuugauaggugaauu

SEQ ID NO: 953866 - RNA, 22 nt, Human
cccaggagguggagguugcggu

SEQ ID NO: 953867 - RNA, 20 nt, Human
caggccagagguuugauggc

SEQ ID NO: 953868 - RNA, 20 nt, Human
acuguucaagggccuggugg

SEQ ID NO: 953869 - RNA, 22 nt, Human
uaaucacaucaggguaaauggg

SEQ ID NO: 953870 - RNA, 22 nt, Human
agcugccugggcuuguacaccu

SEQ ID NO: 953871 - RNA, 22 nt, Human
aggccagccucaggcagggacc

SEQ ID NO: 953872 - RNA, 22 nt, Human
agcugucuuucugccuccugau

SEQ ID NO: 953873 - RNA, 22 nt, Human
ccacaggggucucuguagcuga

SEQ ID NO: 953874 - RNA, 23 nt, Human
ucccuggaggcagguccagggcc

SEQ ID NO: 953875 - RNA, 22 nt, Human
gaaggcugaugacagauucugc

SEQ ID NO: 953876 - RNA, 22 nt, Human
aaguuauugcagcaauccaagu

SEQ ID NO: 953877 - RNA, 21 nt, Human
cucaggaucuuauauauuagu

SEQ ID NO: 953878 - RNA, 22 nt, Human
gcaccugcaggaugagccaggg

SEQ ID NO: 953879 - RNA, 22 nt, Human
cagagcagaaaccugggugauu

SEQ ID NO: 953880 - RNA, 22 nt, Human
aaucagaauuuauugaaucuuu

SEQ ID NO: 953881 - RNA, 22 nt, Human
uggaaagaaaguaaaggcguau

SEQ ID NO: 953882 - RNA, 19 nt, Human
ggcugccuuuccuuaccag

SEQ ID NO: 953883 - RNA, 22 nt, Human
ucuuucagccacuuaccugucu

SEQ ID NO: 953884 - RNA, 22 nt, Human
cacccagccuucacacaggagu

SEQ ID NO: 953885 - RNA, 19 nt, Human
cugggacaaugaaagcauc

SEQ ID NO: 953886 - RNA, 22 nt, Human
agcccaagcauaggagggaggc

SEQ ID NO: 953887 - RNA, 21 nt, Human
ucccugcuuucuggcccaguc

SEQ ID NO: 953888 - RNA, 22 nt, Human
agcuagccuaggcagagugcau

SEQ ID NO: 953889 - RNA, 22 nt, Human
ucauuuaauagcuuuugucuuu

SEQ ID NO: 953890 - RNA, 22 nt, Human
agggcuggcuccguuaccuuga

SEQ ID NO: 953891 - RNA, 22 nt, Human
uggacucagaaguguucuuuua

SEQ ID NO: 953892 - RNA, 22 nt, Human
ggcacugaauuucuuggcaucu

SEQ ID NO: 953893 - RNA, 22 nt, Human
gaggcagcaucuauggugggaa

SEQ ID NO: 953894 - RNA, 19 nt, Human
ucaguuuuagucaucaguu

SEQ ID NO: 953895 - RNA, 22 nt, Human
cagacaggcuagccagacucac

SEQ ID NO: 953896 - RNA, 19 nt, Human
ccuuugaaucaggacacuu

SEQ ID NO: 953897 - RNA, 22 nt, Human
aggcacugaauauccaguaaaa

SEQ ID NO: 953898 - RNA, 22 nt, Human
gggagggguugcauguuugagu

SEQ ID NO: 953899 - RNA, 22 nt, Human
ggggcagagucuggacuguugu

SEQ ID NO: 953900 - RNA, 19 nt, Human
ugaagcaggcagagaagau

SEQ ID NO: 953901 - RNA, 22 nt, Human
gagagugauucccucccauaga

SEQ ID NO: 953902 - RNA, 22 nt, Human
ugggcaaguaucggacucugag

SEQ ID NO: 953903 - RNA, 22 nt, Human
cagcugcccaagccccagaugu

SEQ ID NO: 953904 - RNA, 22 nt, Human
aacaaauguguggcaguguggg

SEQ ID NO: 953905 - RNA, 22 nt, Human
aguuuccaaagcauguucacac

SEQ ID NO: 953906 - RNA, 22 nt, Human
cagagcuguugcggggcuuggc

SEQ ID NO: 953907 - RNA, 22 nt, Human
gcucugugccacaugcaguguu

SEQ ID NO: 953908 - RNA, 22 nt, Human
ucacaugccacagaugaggcaa

SEQ ID NO: 953909 - RNA, 22 nt, Human
uauaugcucugggauccugaaa

SEQ ID NO: 953910 - RNA, 22 nt, Human
ccaggagaugauguuggggauu

SEQ ID NO: 953911 - RNA, 22 nt, Human
gcccagaguucaaggcugcagu

SEQ ID NO: 953912 - RNA, 22 nt, Human
uaaaacuuaacuauccagauua

SEQ ID NO: 953913 - RNA, 22 nt, Human
gcucugggugaacuuggagcaa

SEQ ID NO: 953914 - RNA, 22 nt, Human
caggaaagguagucacaaugua

SEQ ID NO: 953915 - RNA, 22 nt, Human
caaauacuaaacauaagauuuu

SEQ ID NO: 953916 - RNA, 22 nt, Human
uaaauuguuuucuagaaguugu

SEQ ID NO: 953917 - RNA, 22 nt, Human
cugaggaguuuggguuguucaa

SEQ ID NO: 953918 - RNA, 22 nt, Human
caaaaagcuuagguaacaagcc

SEQ ID NO: 953919 - RNA, 22 nt, Human
uuucaaaccuacuuguauguuu

SEQ ID NO: 953920 - RNA, 22 nt, Human
uucaugugaucacagauuguaa

SEQ ID NO: 953921 - RNA, 22 nt, Human
augauguuaccaguacuuagag

SEQ ID NO: 953922 - RNA, 22 nt, Human
cacagcuggugcacuagcucug

SEQ ID NO: 953923 - RNA, 22 nt, Human
uagaaauccccagucucauagu

SEQ ID NO: 953924 - RNA, 22 nt, Human
agaaauguauagugaauuuuuc

SEQ ID NO: 953925 - RNA, 22 nt, Human
ugaggggaacugaugcccauug

SEQ ID NO: 953926 - RNA, 19 nt, Human
uguguaaagucugugguca

SEQ ID NO: 953927 - RNA, 22 nt, Human
ucagcagggagaggagaaugca

SEQ ID NO: 953928 - RNA, 22 nt, Human
gcagggacgccagggacagcaa

SEQ ID NO: 953929 - RNA, 22 nt, Human
ugcauaguucuccuuccuccuc

SEQ ID NO: 953930 - RNA, 22 nt, Human
cuccucugucuggcccugagcc

SEQ ID NO: 953931 - RNA, 16 nt, Human
cagaguguaaacagga

SEQ ID NO: 953932 - RNA, 22 nt, Human
auguaugucugcauacacauac

SEQ ID NO: 953933 - RNA, 22 nt, Human
cuggggugucucgucugccauu

SEQ ID NO: 953934 - RNA, 22 nt, Human
cccaaggcauggcaugguggca

SEQ ID NO: 953935 - RNA, 22 nt, Human
cagcugccuguauuguccucau

SEQ ID NO: 953936 - RNA, 22 nt, Human
auagacuugguuaguaaauuug

SEQ ID NO: 953937 - RNA, 22 nt, Human
uagcagcucugauucugggccc

SEQ ID NO: 953938 - RNA, 23 nt, Human
ggcuggcccggggcugcuccuga

SEQ ID NO: 953939 - RNA, 22 nt, Human
cagagccccucagcucucuccc

SEQ ID NO: 953940 - RNA, 23 nt, Human
cccagggacacgaugacaccucc

SEQ ID NO: 953941 - RNA, 22 nt, Human
cagagggagcccuccaggagca

SEQ ID NO: 953942 - RNA, 22 nt, Human
cugaggcuuggaggggucuggu

SEQ ID NO: 953943 - RNA, 17 nt, Human
ucuguucaagugagagg

SEQ ID NO: 953944 - RNA, 19 nt, Human
gcugugugaccuugggcaa

SEQ ID NO: 953945 - RNA, 20 nt, Human
cuucuucagccuaugcuuca

SEQ ID NO: 953946 - RNA, 22 nt, Human
gcucccagauuucagccuugug

SEQ ID NO: 953947 - RNA, 22 nt, Human
auugucuuuccacugagaaguu

SEQ ID NO: 953948 - RNA, 22 nt, Human
uccuugaaugaagagaggugac

SEQ ID NO: 953949 - RNA, 22 nt, Human
acaguuaucuuugaaauagaga

SEQ ID NO: 953950 - RNA, 22 nt, Human
caguugaugggacucauguggg

SEQ ID NO: 953951 - RNA, 22 nt, Human
uagcacaggucuuguugccauu

SEQ ID NO: 953952 - RNA, 19 nt, Human
guggccagggcaggggcug

SEQ ID NO: 953953 - RNA, 22 nt, Human
gaaaaugugucaucccuacugu

SEQ ID NO: 953954 - RNA, 22 nt, Human
uuuccucuucgauuaaguuugg

SEQ ID NO: 953955 - RNA, 22 nt, Human
uucuaaagugcaaucugacaga

SEQ ID NO: 953956 - RNA, 22 nt, Human
agggaugguggagguugcaagu

SEQ ID NO: 953957 - RNA, 22 nt, Human
cccaccaguacagaugguagau

SEQ ID NO: 953958 - RNA, 22 nt, Human
cugagcccaggcgggagcugag

SEQ ID NO: 953959 - RNA, 22 nt, Human
uucuuucucaacaugaauguuu

SEQ ID NO: 953960 - RNA, 22 nt, Human
auguguuuugguaauuucugcu

SEQ ID NO: 953961 - RNA, 19 nt, Human
uggaagaggaagggaaaua

SEQ ID NO: 953962 - RNA, 22 nt, Human
cauguguagugaaauaagcagu

SEQ ID NO: 953963 - RNA, 22 nt, Human
cagcaauaagguaagcuucucc

SEQ ID NO: 953964 - RNA, 22 nt, Human
uggagcucaaaggccuguggga

SEQ ID NO: 953965 - RNA, 22 nt, Human
cuguuuaucccuuuggucagca

SEQ ID NO: 953966 - RNA, 22 nt, Human
cccaggaaaagcagugccagca

SEQ ID NO: 953967 - RNA, 22 nt, Human
acacaguaccccaaggcugggc

SEQ ID NO: 953968 - RNA, 22 nt, Human
aggcacugacucaagggagcca

SEQ ID NO: 953969 - RNA, 22 nt, Human
uaggccagcccuuaguccuguc

SEQ ID NO: 953970 - RNA, 22 nt, Human
uuucuuccuuaccuuacuagag

SEQ ID NO: 953971 - RNA, 22 nt, Human
uuuauuguuaucaugggugagu

SEQ ID NO: 953972 - RNA, 18 nt, Human
uugcuuuguaagcuugca

SEQ ID NO: 953973 - RNA, 22 nt, Human
uuguugguggaauugaugcuag

SEQ ID NO: 953974 - RNA, 22 nt, Human
cugccucuggccucaggcccag

SEQ ID NO: 953975 - RNA, 22 nt, Human
cuuccucugcggcgccgggcgc

SEQ ID NO: 953976 - RNA, 23 nt, Human
ggcucugugcugggccugcagga

SEQ ID NO: 953977 - RNA, 22 nt, Human
guucuugccagcauccucaggu

SEQ ID NO: 953978 - RNA, 22 nt, Human
uuuagaguugaguauucauugg

SEQ ID NO: 953979 - RNA, 22 nt, Human
acagccagaggugguccugggu

SEQ ID NO: 953980 - RNA, 22 nt, Human
gucugucuguuguugagaagca

SEQ ID NO: 953981 - RNA, 22 nt, Human
ucucaggaaauaggauuugagu

SEQ ID NO: 953982 - RNA, 22 nt, Human
ucugggaguuucugugggagcu

SEQ ID NO: 953983 - RNA, 22 nt, Human
cucaucugauaaaucacucuua

SEQ ID NO: 953984 - RNA, 22 nt, Human
cuccagaagacccauccucaug

SEQ ID NO: 953985 - RNA, 18 nt, Human
gggcacuggggacuggag

SEQ ID NO: 953986 - RNA, 22 nt, Human
agccaggaaccagcuacagucu

SEQ ID NO: 953987 - RNA, 22 nt, Human
ggcuguagguuggugcuggaca

SEQ ID NO: 953988 - RNA, 22 nt, Human
ccuguucaaugcccuggcuuca

SEQ ID NO: 953989 - RNA, 22 nt, Human
gcugccuguguggccacucacu

SEQ ID NO: 953990 - RNA, 22 nt, Human
ucagugaucuaaggguauggcc

SEQ ID NO: 953991 - RNA, 22 nt, Human
acagacagauuuugucugaugu

SEQ ID NO: 953992 - RNA, 22 nt, Human
uauuuaauuagugauuguagag

SEQ ID NO: 953993 - RNA, 22 nt, Human
augucuuucucacagccaguuc

SEQ ID NO: 953994 - RNA, 22 nt, Human
caagggccuccaccuugcucgu

SEQ ID NO: 953995 - RNA, 22 nt, Human
aaaugcuucaccucauuaaacu

SEQ ID NO: 953996 - RNA, 22 nt, Human
auugaaaggcaaaguaggaagc

SEQ ID NO: 953997 - RNA, 22 nt, Human
aguuuuuccugauuuuacagaa

SEQ ID NO: 953998 - RNA, 22 nt, Human
agugaaauagcauuuaugaagc

SEQ ID NO: 953999 - RNA, 22 nt, Human
cccagggaaugacucuggccuu

SEQ ID NO: 954000 - RNA, 22 nt, Human
gucaucuuccuaguguuaacua

SEQ ID NO: 954001 - RNA, 22 nt, Human
uggggagugaugccucggauaa

SEQ ID NO: 954002 - RNA, 23 nt, Human
agaggcaggaguggcuugcccgg

SEQ ID NO: 954003 - RNA, 22 nt, Human
ccucagaguaggucucagcugu

SEQ ID NO: 954004 - RNA, 22 nt, Human
uaaggccaauuaacaaccaggg

SEQ ID NO: 954005 - RNA, 22 nt, Human
gcccaggcuagcguagagugca

SEQ ID NO: 954006 - RNA, 22 nt, Human
aagcagccuggcaugaugcuuu

SEQ ID NO: 954007 - RNA, 22 nt, Human
augauggugagguugagcacag

SEQ ID NO: 954008 - RNA, 22 nt, Human
aauaauuagugggacagagaac

SEQ ID NO: 954009 - RNA, 18 nt, Human
uggcagccagcugcuccu

SEQ ID NO: 954010 - RNA, 22 nt, Human
aaggaagacacagaugaaguga

SEQ ID NO: 954011 - RNA, 22 nt, Human
acagacagggcaccugccuccu

SEQ ID NO: 954012 - RNA, 22 nt, Human
ucaaaacacuauuaccuuuaau

SEQ ID NO: 954013 - RNA, 22 nt, Human
cagcuuccgaccgggggcugca

SEQ ID NO: 954014 - RNA, 22 nt, Human
ggguggaguagaaagaugaauu

SEQ ID NO: 954015 - RNA, 22 nt, Human
gcagagcugggucuguauccaa

SEQ ID NO: 954016 - RNA, 22 nt, Human
aggucauuuuugccuucuauuu

SEQ ID NO: 954017 - RNA, 22 nt, Human
ggaggggcagccauggaacucc

SEQ ID NO: 954018 - RNA, 22 nt, Human
uggccugguccuugucaaggca

SEQ ID NO: 954019 - RNA, 21 nt, Human
uagagaaaagaagcuguuccu

SEQ ID NO: 954020 - RNA, 22 nt, Human
cggcagcucgagggccacccgu

SEQ ID NO: 954021 - RNA, 22 nt, Human
uaauuucacugauaugaaguca

SEQ ID NO: 954022 - RNA, 22 nt, Human
ccaggugguucaggucaccaua

SEQ ID NO: 954023 - RNA, 20 nt, Human
agaaucugacccagagagac

SEQ ID NO: 954024 - RNA, 22 nt, Human
uugaaagggauauaucuuucug

SEQ ID NO: 954025 - RNA, 22 nt, Human
ucauuauuuuggacuggagugu

SEQ ID NO: 954026 - RNA, 22 nt, Human
uguugagacugagggagucagc

SEQ ID NO: 954027 - RNA, 22 nt, Human
cacugaaucucaaggggagggu

SEQ ID NO: 954028 - RNA, 22 nt, Human
cugggaggcccacguugggaag

SEQ ID NO: 954029 - RNA, 22 nt, Human
aacauuuaugguagucauugca

SEQ ID NO: 954030 - RNA, 22 nt, Human
aauuuuaagcauaugacugguu

SEQ ID NO: 954031 - RNA, 22 nt, Human
cuagagaggcagauguccugug

SEQ ID NO: 954032 - RNA, 22 nt, Human
aggugcagcugacaccaugugg

SEQ ID NO: 954033 - RNA, 22 nt, Human
aaagagcuaacauugccgagau

SEQ ID NO: 954034 - RNA, 22 nt, Human
cugucccaggagcuguaagaca

SEQ ID NO: 954035 - RNA, 22 nt, Human
cauugaaaccuaacauaggcug

SEQ ID NO: 954036 - RNA, 22 nt, Human
ucagagucauugcaaguagaag

SEQ ID NO: 954037 - RNA, 22 nt, Human
agacagcugcucgcagagcuau

SEQ ID NO: 954038 - RNA, 22 nt, Human
ggacagaggguugacagaguau

SEQ ID NO: 954039 - RNA, 22 nt, Human
uggcagcagacaaaaggccauu

SEQ ID NO: 954040 - RNA, 22 nt, Human
gucacaggccuggaugaggggc

SEQ ID NO: 954041 - RNA, 22 nt, Human
cugucagguuggucucagagcu

SEQ ID NO: 954042 - RNA, 22 nt, Human
caaggcaggcaguucacuugag

SEQ ID NO: 954043 - RNA, 22 nt, Human
uaagauaaguggguugagaugg

SEQ ID NO: 954044 - RNA, 22 nt, Human
gggugggaacaggaugccagga

SEQ ID NO: 954045 - RNA, 22 nt, Human
ucacugcucagucuguacuaca

SEQ ID NO: 954046 - RNA, 22 nt, Human
aggaccuguagggccugcaucc

SEQ ID NO: 954047 - RNA, 22 nt, Human
uugagaagaauguguugaguuu

SEQ ID NO: 954048 - RNA, 22 nt, Human
caggaugagaagggcucuuacg

SEQ ID NO: 954049 - RNA, 22 nt, Human
gcugaagcugcagcaggaggaa

SEQ ID NO: 954050 - RNA, 22 nt, Human
ucuuuuaaaagcccugcugucu

SEQ ID NO: 954051 - RNA, 22 nt, Human
cuguccuggagggcauaggacg

SEQ ID NO: 954052 - RNA, 22 nt, Human
cagucauuuuauuugaaaauua

SEQ ID NO: 954053 - RNA, 22 nt, Human
aagugacaaaaggguauccaaa

SEQ ID NO: 954054 - RNA, 22 nt, Human
aggcugugggaauggcugcuug

SEQ ID NO: 954055 - RNA, 22 nt, Human
cuggccagaguuggagggugug

SEQ ID NO: 954056 - RNA, 22 nt, Human
aucugucuggaggccuggcaug

SEQ ID NO: 954057 - RNA, 22 nt, Human
aagggcagcuauuaucgucauc

SEQ ID NO: 954058 - RNA, 22 nt, Human
guuauacauauguguuaacaaa

SEQ ID NO: 954059 - RNA, 22 nt, Human
uguggcucucagauccuccaau

SEQ ID NO: 954060 - RNA, 22 nt, Human
uuugcagcaaggagagagcauu

SEQ ID NO: 954061 - RNA, 22 nt, Human
uauuuuaucugccagaguggag

SEQ ID NO: 954062 - RNA, 22 nt, Human
guuuccauggcucuguuaaugg

SEQ ID NO: 954063 - RNA, 22 nt, Human
aaguuucaugauguaauuauug

SEQ ID NO: 954064 - RNA, 22 nt, Human
uauucacauguacauaugcuca

SEQ ID NO: 954065 - RNA, 22 nt, Human
agcugcaggccucuccugggga

SEQ ID NO: 954066 - RNA, 22 nt, Human
ucacacagguuugcaaugauuu

SEQ ID NO: 954067 - RNA, 22 nt, Human
ucauccaggaaaagauuuggaa

SEQ ID NO: 954068 - RNA, 22 nt, Human
uccagggaccucccugagagcu

SEQ ID NO: 954069 - RNA, 22 nt, Human
ggcuguccuuggccaaggcacu

SEQ ID NO: 954070 - RNA, 22 nt, Human
uacaguauggaaaauguauagu

SEQ ID NO: 954071 - RNA, 20 nt, Human
uuuuccagaaaguaucauug

SEQ ID NO: 954072 - RNA, 22 nt, Human
aguacuuugcacuuugcucaga

SEQ ID NO: 954073 - RNA, 22 nt, Human
aguuuaaaucauguuuuguaac

SEQ ID NO: 954074 - RNA, 22 nt, Human
gcccugcugcuggcagaggcgc

SEQ ID NO: 954075 - RNA, 22 nt, Human
gcucugugcaguucagggacac

SEQ ID NO: 954076 - RNA, 19 nt, Human
aggcagcacccaguccuug

SEQ ID NO: 954077 - RNA, 22 nt, Human
acuggccaggagcuggaaauac

SEQ ID NO: 954078 - RNA, 22 nt, Human
ggucugaguggggccugagauu

SEQ ID NO: 954079 - RNA, 22 nt, Human
uucacagauguauuggaacucc

SEQ ID NO: 954080 - RNA, 22 nt, Human
uucaugugauaaaugugugacu

SEQ ID NO: 954081 - RNA, 22 nt, Human
gcuggcuuugcacugggugcau

SEQ ID NO: 954082 - RNA, 22 nt, Human
caguggucugugcuucuguaca

SEQ ID NO: 954083 - RNA, 22 nt, Human
agcucacaguguccuuccucaa

SEQ ID NO: 954084 - RNA, 22 nt, Human
uaugcacauauaaccugcacug

SEQ ID NO: 954085 - RNA, 22 nt, Human
caggauggagaguuguugguug

SEQ ID NO: 954086 - RNA, 19 nt, Human
agauggcaaaaugcaaaga

SEQ ID NO: 954087 - RNA, 22 nt, Human
uuucuuaggcucuaaaaugacu

SEQ ID NO: 954088 - RNA, 22 nt, Human
ucuuugcaaauguuauuaucuu

SEQ ID NO: 954089 - RNA, 22 nt, Human
gaggccugcagcguggucccug

SEQ ID NO: 954090 - RNA, 21 nt, Human
gggcagaggggccuccugggu

SEQ ID NO: 954091 - RNA, 22 nt, Human
uuuuaauucaaagugaauagug

SEQ ID NO: 954092 - RNA, 22 nt, Human
aaaggcuccuucucccaugacc

SEQ ID NO: 954093 - RNA, 22 nt, Human
ggagagugggagcaacuguugc

SEQ ID NO: 954094 - RNA, 22 nt, Human
gugugccaccagucaaggugaa

SEQ ID NO: 954095 - RNA, 22 nt, Human
uggcucagccuggcccuuucau

SEQ ID NO: 954096 - RNA, 22 nt, Human
aggggugaaagagggcccucaa

SEQ ID NO: 954097 - RNA, 22 nt, Human
gcaggagaacaaagcaagcugc

SEQ ID NO: 954098 - RNA, 22 nt, Human
uuucacaacguuguggugagag

SEQ ID NO: 954099 - RNA, 22 nt, Human
cugggagcuuguuaggaaugca

SEQ ID NO: 954100 - RNA, 22 nt, Human
ugccaggauggccagggggcca

SEQ ID NO: 954101 - RNA, 22 nt, Human
uggagccugagucagcggaggc

SEQ ID NO: 954102 - RNA, 22 nt, Human
aaggcgacacaggcagcaggcc

SEQ ID NO: 954103 - RNA, 22 nt, Human
gcccagagagaugcuguagacc

SEQ ID NO: 954104 - RNA, 22 nt, Human
uuagccauauagaaaaagagcu

SEQ ID NO: 954105 - RNA, 22 nt, Human
gcagagccugugucugagcaaa

SEQ ID NO: 954106 - RNA, 23 nt, Human
caugccaguuugugcaggcagau

SEQ ID NO: 954107 - RNA, 22 nt, Human
ucugccugagggagcugaggaa

SEQ ID NO: 954108 - RNA, 22 nt, Human
ccagcugcagguguuccagaug

SEQ ID NO: 954109 - RNA, 22 nt, Human
aacauguugcuuuaauaauauu

SEQ ID NO: 954110 - RNA, 22 nt, Human
ucaaugauaguacaaucagccu

SEQ ID NO: 954111 - RNA, 22 nt, Human
ugcugccuucuaggcgugcccu

SEQ ID NO: 954112 - RNA, 22 nt, Human
cuggcagcuuccuuugcaucug

SEQ ID NO: 954113 - RNA, 22 nt, Human
ucauguuuggaguuugcucacu

SEQ ID NO: 954114 - RNA, 22 nt, Human
ccucuuugugccugcaggcugc

SEQ ID NO: 954115 - RNA, 22 nt, Human
ucugagaguccaucuccaagcc

SEQ ID NO: 954116 - RNA, 22 nt, Human
cuguucucuggcgguggcuguu

SEQ ID NO: 954117 - RNA, 22 nt, Human
agaggagugggaagcagugcaa

SEQ ID NO: 954118 - RNA, 22 nt, Human
cugggagcgcagcaggcacaac

SEQ ID NO: 954119 - RNA, 22 nt, Human
cccuaggguuuggccagagccc

SEQ ID NO: 954120 - RNA, 22 nt, Human
agccuggaauuaaggaaaugca

SEQ ID NO: 954121 - RNA, 22 nt, Human
gggacgggcaguccaagggguc

SEQ ID NO: 954122 - RNA, 22 nt, Human
gcacugggaagaaugagccugu

SEQ ID NO: 954123 - RNA, 22 nt, Human
uuccauaauaggcuuaagugaa

SEQ ID NO: 954124 - RNA, 21 nt, Human
cuacuuaaguaggggauuagg

SEQ ID NO: 954125 - RNA, 22 nt, Human
agacagugauguaagcaggagu

SEQ ID NO: 954126 - RNA, 22 nt, Human
ggcaguggugggaggcucgcuc

SEQ ID NO: 954127 - RNA, 22 nt, Human
cucucugaggcaggccuguggg

SEQ ID NO: 954128 - RNA, 17 nt, Human
ugaaacaccaagacugu

SEQ ID NO: 954129 - RNA, 20 nt, Human
ugggcagcacugcuggcugg

SEQ ID NO: 954130 - RNA, 22 nt, Human
cagcuggaugggagaccauguu

SEQ ID NO: 954131 - RNA, 22 nt, Human
auuauuagacuuauaugguagu

SEQ ID NO: 954132 - RNA, 22 nt, Human
uggaagagguggaaguggcuuc

SEQ ID NO: 954133 - RNA, 22 nt, Human
gcaggagugacauggaugugga

SEQ ID NO: 954134 - RNA, 22 nt, Human
acccaggagcaggcugggcagu

SEQ ID NO: 954135 - RNA, 22 nt, Human
gagaagcaaucaguggccaccc

SEQ ID NO: 954136 - RNA, 22 nt, Human
cuuuggcaaugaaacacaagaa

SEQ ID NO: 954137 - RNA, 22 nt, Human
cuccucacuuuccagacugggc

SEQ ID NO: 954138 - RNA, 22 nt, Human
cugcccagaaucacucacucga

SEQ ID NO: 954139 - RNA, 22 nt, Human
gagcacaggcuuugguggacac

SEQ ID NO: 954140 - RNA, 22 nt, Human
cucagggggaaucaggucacag

SEQ ID NO: 954141 - RNA, 22 nt, Human
aauuucaaacuaauaggaacca

SEQ ID NO: 954142 - RNA, 22 nt, Human
cucugcauuuuaacagaugauu

SEQ ID NO: 954143 - RNA, 23 nt, Human
ugcucugugaauaguuggugacu

SEQ ID NO: 954144 - RNA, 22 nt, Human
aucagaauaauuagauuucaga

SEQ ID NO: 954145 - RNA, 22 nt, Human
uugcauaaaugcuuaaaauuug

SEQ ID NO: 954146 - RNA, 22 nt, Human
uccuuggcaugccgucuucucc

SEQ ID NO: 954147 - RNA, 22 nt, Human
ggaggccaggguggguggaucg

SEQ ID NO: 954148 - RNA, 22 nt, Human
ccaggagacccagggaaggagc

SEQ ID NO: 954149 - RNA, 22 nt, Human
cuugaaaugacaggagcacauc

SEQ ID NO: 954150 - RNA, 22 nt, Human
cugcugugcacccaggaaggcu

SEQ ID NO: 954151 - RNA, 22 nt, Human
uggagaagucaaagugaacagg

SEQ ID NO: 954152 - RNA, 22 nt, Human
cagccugcauuuguaucuguau

SEQ ID NO: 954153 - RNA, 22 nt, Human
cagcucccagagugaccagcag

SEQ ID NO: 954154 - RNA, 18 nt, Human
cuuucagauggauaugcu

SEQ ID NO: 954155 - RNA, 22 nt, Human
cuugaacucaaugugaggaaga

SEQ ID NO: 954156 - RNA, 22 nt, Human
uggccucuuacgacauagccuu

SEQ ID NO: 954157 - RNA, 22 nt, Human
ggagggugcauuuuacccugug

SEQ ID NO: 954158 - RNA, 22 nt, Human
uaagcauaacuaaaaaugauuu

SEQ ID NO: 954159 - RNA, 22 nt, Human
acacagccgugaaucugcuucu

SEQ ID NO: 954160 - RNA, 22 nt, Human
caaugugucaggaaaagggcca

SEQ ID NO: 954161 - RNA, 22 nt, Human
aggcugggcuccgcccaacucc

SEQ ID NO: 954162 - RNA, 22 nt, Human
uuuaacagguaaaguaaaugug

SEQ ID NO: 954163 - RNA, 22 nt, Human
ucauucuccucuggaaaaggca

SEQ ID NO: 954164 - RNA, 22 nt, Human
gcccugagacugagcauggguu

SEQ ID NO: 954165 - RNA, 22 nt, Human
gugauaaagacgugucauaauu

SEQ ID NO: 954166 - RNA, 22 nt, Human
ggucccaggaagugcggcggcg

SEQ ID NO: 954167 - RNA, 22 nt, Human
guuuauuaacugucaagugauu

SEQ ID NO: 954168 - RNA, 22 nt, Human
uccaugagcuagcuuuccaaag

SEQ ID NO: 954169 - RNA, 22 nt, Human
uccuggccuugcuccugaugcc

SEQ ID NO: 954170 - RNA, 19 nt, Human
cuugcugggugguuucugc

SEQ ID NO: 954171 - RNA, 22 nt, Human
aguugaauaauuagacauaucu

SEQ ID NO: 954172 - RNA, 22 nt, Human
cccaggagguggagcuugcagu

SEQ ID NO: 954173 - RNA, 22 nt, Human
gugacaguggucacuuguaguu

SEQ ID NO: 954174 - RNA, 20 nt, Human
gucaucgccggcagcaaaga

SEQ ID NO: 954175 - RNA, 22 nt, Human
agcugucagugcugugccugua

SEQ ID NO: 954176 - RNA, 22 nt, Human
agcucagcuuccucuccaugcu

SEQ ID NO: 954177 - RNA, 20 nt, Human
accaggagauggaggcaggg

SEQ ID NO: 954178 - RNA, 22 nt, Human
auucugauaucuuauucuagcu

SEQ ID NO: 954179 - RNA, 22 nt, Human
uguccucaaggagcuucagucu

SEQ ID NO: 954180 - RNA, 22 nt, Human
gcagggucugaggccacagagg

SEQ ID NO: 954181 - RNA, 22 nt, Human
gccuuggccuuccuaggccuga

SEQ ID NO: 954182 - RNA, 22 nt, Human
gccagcuggagugagagugggc

SEQ ID NO: 954183 - RNA, 22 nt, Human
cugagcugggaguggauagugg

SEQ ID NO: 954184 - RNA, 22 nt, Human
uugcuagcugguguaugcauug

SEQ ID NO: 954185 - RNA, 21 nt, Human
uaacuuuugugccuaucuugu

SEQ ID NO: 954186 - RNA, 22 nt, Human
cccuuagcuccaagggguuugg

SEQ ID NO: 954187 - RNA, 22 nt, Human
agggaaggaaaagcugucgcuu

SEQ ID NO: 954188 - RNA, 22 nt, Human
cauuccuuaacguggggagucu

SEQ ID NO: 954189 - RNA, 22 nt, Human
uuugcauuugcaaauaaugaaa

SEQ ID NO: 954190 - RNA, 22 nt, Human
gaaaaguacacagcccaaacau

SEQ ID NO: 954191 - RNA, 22 nt, Human
cuauuagguaugugguugcuau

SEQ ID NO: 954192 - RNA, 22 nt, Human
caaggccacugcucagguuucc

SEQ ID NO: 954193 - RNA, 22 nt, Human
aggcacuugaauugaugauguu

SEQ ID NO: 954194 - RNA, 17 nt, Human
auccccagcaucuagaa

SEQ ID NO: 954195 - RNA, 22 nt, Human
gcuccucuauuccccacauuuu

SEQ ID NO: 954196 - RNA, 22 nt, Human
aggccaaagcacagagcuggaa

SEQ ID NO: 954197 - RNA, 22 nt, Human
accaggaguuuugaccaggggc

SEQ ID NO: 954198 - RNA, 22 nt, Human
agugaaauaaagcugccuaugg

SEQ ID NO: 954199 - RNA, 22 nt, Human
cuguggcugcagccuugguccu

SEQ ID NO: 954200 - RNA, 22 nt, Human
cuggcugaggucaccaguagcu

SEQ ID NO: 954201 - RNA, 22 nt, Human
caaucagauaugugacauauuu

SEQ ID NO: 954202 - RNA, 22 nt, Human
acauuucucauucuccccuaac

SEQ ID NO: 954203 - RNA, 22 nt, Human
agcucugggccaggaacccuaa

SEQ ID NO: 954204 - RNA, 22 nt, Human
agcucccagggcugggcaaguu

SEQ ID NO: 954205 - RNA, 22 nt, Human
guggccaaaaggaagaagguua

SEQ ID NO: 954206 - RNA, 22 nt, Human
ggcugcagauagccagccacca

SEQ ID NO: 954207 - RNA, 22 nt, Human
aucugccuggcuccaggugagc

SEQ ID NO: 954208 - RNA, 22 nt, Human
ugaagcagaggggucuugagcu

SEQ ID NO: 954209 - RNA, 22 nt, Human
auaaugugauauuucauuuaca

SEQ ID NO: 954210 - RNA, 22 nt, Human
gccuggagaauuaaaaggaagg

SEQ ID NO: 954211 - RNA, 22 nt, Human
cauaauaucuccgauuacuugc

SEQ ID NO: 954212 - RNA, 19 nt, Human
agaaaucucgagauuuguu

SEQ ID NO: 954213 - RNA, 22 nt, Human
aaguucaaggcucuagaguucc

SEQ ID NO: 954214 - RNA, 22 nt, Human
cucuggagcaccgggcuaucca

SEQ ID NO: 954215 - RNA, 22 nt, Human
ggagccaggcaaucuguacuuu

SEQ ID NO: 954216 - RNA, 22 nt, Human
cucccaggguagggagagacua

SEQ ID NO: 954217 - RNA, 22 nt, Human
uacacacaugcauuugccuuau

SEQ ID NO: 954218 - RNA, 22 nt, Human
aggagucagauaugggaaaguu

SEQ ID NO: 954219 - RNA, 22 nt, Human
aucuuugaagaggacuugaagu

SEQ ID NO: 954220 - RNA, 22 nt, Human
uggcucagucauggaugaguaa

SEQ ID NO: 954221 - RNA, 22 nt, Human
ggaggggaggauuaaugacaaa

SEQ ID NO: 954222 - RNA, 22 nt, Human
aacagcuuugcuucuggagaca

SEQ ID NO: 954223 - RNA, 19 nt, Human
cagcucaguuugauucucu

SEQ ID NO: 954224 - RNA, 22 nt, Human
auuggcaaggcugcggugucug

SEQ ID NO: 954225 - RNA, 20 nt, Human
uggcaucucucaauuguagg

SEQ ID NO: 954226 - RNA, 22 nt, Human
ucagacuuuaaaggcuaacagg

SEQ ID NO: 954227 - RNA, 22 nt, Human
aggccuggcaugagaccugaga

SEQ ID NO: 954228 - RNA, 22 nt, Human
agcugcccuuaauaggcauuca

SEQ ID NO: 954229 - RNA, 22 nt, Human
cucagagucccuucccucgugg

SEQ ID NO: 954230 - RNA, 22 nt, Human
cuggaagggucuacuuagcaga

SEQ ID NO: 954231 - RNA, 22 nt, Human
aagauauucaaagauuuauuag

SEQ ID NO: 954232 - RNA, 22 nt, Human
agcuggcaguaugacuggugac

SEQ ID NO: 954233 - RNA, 22 nt, Human
aucuggcucuuccuggaguucc

SEQ ID NO: 954234 - RNA, 22 nt, Human
gcuggcuccucuguccucacgg

SEQ ID NO: 954235 - RNA, 22 nt, Human
uuucuguaaguggcaaauaaug

SEQ ID NO: 954236 - RNA, 22 nt, Human
gaugguuuggaaugaaguagcu

SEQ ID NO: 954237 - RNA, 22 nt, Human
aaggcagcaugaaucccuguac

SEQ ID NO: 954238 - RNA, 22 nt, Human
cuugccuguggcuaguuggcuc

SEQ ID NO: 954239 - RNA, 22 nt, Human
augcaguggcagcuccuggugu

SEQ ID NO: 954240 - RNA, 22 nt, Human
agccuggaggccaggagacagu

SEQ ID NO: 954241 - RNA, 22 nt, Human
acagugaaugcccaagaaaagu

SEQ ID NO: 954242 - RNA, 22 nt, Human
cuccagggggcauccacacagc

SEQ ID NO: 954243 - RNA, 22 nt, Human
agagaggcugggcguagggcuu

SEQ ID NO: 954244 - RNA, 17 nt, Human
gcugccaccuuuggagc

SEQ ID NO: 954245 - RNA, 22 nt, Human
cauggccugccuccuccuggug

SEQ ID NO: 954246 - RNA, 22 nt, Human
cagagcugcagauugaaggcau

SEQ ID NO: 954247 - RNA, 22 nt, Human
aaaagagguuaaccaggugugu

SEQ ID NO: 954248 - RNA, 22 nt, Human
uuggccaauggugauucccggc

SEQ ID NO: 954249 - RNA, 18 nt, Human
cagucccaaaccuuagga

SEQ ID NO: 954250 - RNA, 22 nt, Human
ucuccugguuuguuaaauaauu

SEQ ID NO: 954251 - RNA, 22 nt, Human
agccuggauccuaggcucagcu

SEQ ID NO: 954252 - RNA, 22 nt, Human
ucucaguguguuuucucucaga

SEQ ID NO: 954253 - RNA, 22 nt, Human
ucugaggcuaagagacagaggc

SEQ ID NO: 954254 - RNA, 22 nt, Human
agggaagugaaugacagauauc

SEQ ID NO: 954255 - RNA, 22 nt, Human
agguggccggugccagccgggc

SEQ ID NO: 954256 - RNA, 22 nt, Human
ccugugugucugucacugcaca

SEQ ID NO: 954257 - RNA, 22 nt, Human
gaggccagaagugccucgggcu

SEQ ID NO: 954258 - RNA, 22 nt, Human
gcagggcuaauggggcaaguag

SEQ ID NO: 954259 - RNA, 22 nt, Human
ccuggagauuauuugguccaau

SEQ ID NO: 954260 - RNA, 22 nt, Human
agagccugaggaugucccagcu

SEQ ID NO: 954261 - RNA, 19 nt, Human
ccaggccuccugggagguc

SEQ ID NO: 954262 - RNA, 22 nt, Human
ucacugcaaucucugccuucca

SEQ ID NO: 954263 - RNA, 22 nt, Human
gaagcagcuagcccacuaguca

SEQ ID NO: 954264 - RNA, 22 nt, Human
gggagccuugggagugccagcc

SEQ ID NO: 954265 - RNA, 22 nt, Human
ugccacagaggugaagcccacu

SEQ ID NO: 954266 - RNA, 22 nt, Human
gccuggcugagguggggaggca

SEQ ID NO: 954267 - RNA, 19 nt, Human
aggcugcaagguggugggc

SEQ ID NO: 954268 - RNA, 22 nt, Human
uauagagguggaaacugagguu

SEQ ID NO: 954269 - RNA, 22 nt, Human
guuuauaaggcccaauauuucu

SEQ ID NO: 954270 - RNA, 22 nt, Human
ugagugccugaacauagaguag

SEQ ID NO: 954271 - RNA, 22 nt, Human
gucacacucagaaugacuagag

SEQ ID NO: 954272 - RNA, 22 nt, Human
gcuccuggguguggcugccccu

SEQ ID NO: 954273 - RNA, 21 nt, Human
gccagggaagagaguuggcug

SEQ ID NO: 954274 - RNA, 22 nt, Human
cugccucuccccagaguggccc

SEQ ID NO: 954275 - RNA, 22 nt, Human
ugaaacaggaaguaaacagaca

SEQ ID NO: 954276 - RNA, 22 nt, Human
uuggccaagugguuaaucucca

SEQ ID NO: 954277 - RNA, 22 nt, Human
ucugcaucauuuuucagagccg

SEQ ID NO: 954278 - RNA, 22 nt, Human
guucuucaucauuuuagauagg

SEQ ID NO: 954279 - RNA, 22 nt, Human
ccucuggggguccucagagucu

SEQ ID NO: 954280 - RNA, 23 nt, Human
cagggaggagauacuguguaucu

SEQ ID NO: 954281 - RNA, 22 nt, Human
cuggcaguguccagcucgugau

SEQ ID NO: 954282 - RNA, 22 nt, Human
cucugggcaaguuucuucauga

SEQ ID NO: 954283 - RNA, 18 nt, Human
cagaugagaugcaaucuc

SEQ ID NO: 954284 - RNA, 22 nt, Human
uaggcagcauggauucugaaua

SEQ ID NO: 954285 - RNA, 22 nt, Human
gccaccucuuugucucugccgc

SEQ ID NO: 954286 - RNA, 22 nt, Human
uaaauuauguuccauguccuuu

SEQ ID NO: 954287 - RNA, 18 nt, Human
cgaggcaggcggaucacg

SEQ ID NO: 954288 - RNA, 22 nt, Human
ugauugaacugagcuucaagau

SEQ ID NO: 954289 - RNA, 22 nt, Human
cucugugccucaguuuucuucu

SEQ ID NO: 954290 - RNA, 22 nt, Human
gcagcugcuggagggaggcagg

SEQ ID NO: 954291 - RNA, 22 nt, Human
gucaggaugagggaugaggagu

SEQ ID NO: 954292 - RNA, 22 nt, Human
gggcccuggggccugauuugca

SEQ ID NO: 954293 - RNA, 21 nt, Human
uggagcugccacuuguccucc

SEQ ID NO: 954294 - RNA, 22 nt, Human
cccagcuccuuacagggccgaa

SEQ ID NO: 954295 - RNA, 22 nt, Human
ugccucagaguugucccuacca

SEQ ID NO: 954296 - RNA, 22 nt, Human
cccugggcaagcccuauuuucc

SEQ ID NO: 954297 - RNA, 22 nt, Human
cugggcucagaugagaggaagg

SEQ ID NO: 954298 - RNA, 22 nt, Human
agcucuccacacauaggacuag

SEQ ID NO: 954299 - RNA, 18 nt, Human
gcacucugacugcagagc

SEQ ID NO: 954300 - RNA, 22 nt, Human
ccuuucagaugggcauggaccg

SEQ ID NO: 954301 - RNA, 22 nt, Human
cagcaggcccagaguuucaugg

SEQ ID NO: 954302 - RNA, 22 nt, Human
aggagguggccugagcgugccc

SEQ ID NO: 954303 - RNA, 22 nt, Human
gaggcucugugaugugccaggc

SEQ ID NO: 954304 - RNA, 22 nt, Human
gaaggccacggaauggagcugg

SEQ ID NO: 954305 - RNA, 21 nt, Human
guggcccugccgcagugucca

SEQ ID NO: 954306 - RNA, 20 nt, Human
acugugaaugcugaauuagc

SEQ ID NO: 954307 - RNA, 22 nt, Human
uuccaggauagcuuucaggaau

SEQ ID NO: 954308 - RNA, 22 nt, Human
cauucacauucuucuuacuguu

SEQ ID NO: 954309 - RNA, 22 nt, Human
gggcagcuguaucugagcuuau

SEQ ID NO: 954310 - RNA, 22 nt, Human
gaucuuggggggaucaccaugg

SEQ ID NO: 954311 - RNA, 22 nt, Human
ggaggccaguccuggccgggcu

SEQ ID NO: 954312 - RNA, 22 nt, Human
gcuuagaaguuccuauaaaaug

SEQ ID NO: 954313 - RNA, 22 nt, Human
agggagcucacaguccaguaga

SEQ ID NO: 954314 - RNA, 16 nt, Human
ccuuucucugccuucc

SEQ ID NO: 954315 - RNA, 22 nt, Human
cacagggcuaaaugaaggguug

SEQ ID NO: 954316 - RNA, 22 nt, Human
cuauugaauuaacuauuaaagu

SEQ ID NO: 954317 - RNA, 22 nt, Human
cccaggagagggaaccaaaugu

SEQ ID NO: 954318 - RNA, 22 nt, Human
gugcauuggugcgccacuucac

SEQ ID NO: 954319 - RNA, 22 nt, Human
cccaggaacuccagagcuccuc

SEQ ID NO: 954320 - RNA, 22 nt, Human
ucugggaacagccuggcugugu

SEQ ID NO: 954321 - RNA, 21 nt, Human
gcagcagaggcuugacagaca

SEQ ID NO: 954322 - RNA, 22 nt, Human
cuggcucauccagguguugcuc

SEQ ID NO: 954323 - RNA, 22 nt, Human
ucaggauguccaaaauccagcc

SEQ ID NO: 954324 - RNA, 22 nt, Human
accauguuggccaagcuggucu

SEQ ID NO: 954325 - RNA, 22 nt, Human
gcagaacauuucacaguaucuu

SEQ ID NO: 954326 - RNA, 22 nt, Human
uguggccuccccacuucugggg

SEQ ID NO: 954327 - RNA, 22 nt, Human
ccucauggccuugagcugaggg

SEQ ID NO: 954328 - RNA, 22 nt, Human
cucuggagcgcugcuucccgcg

SEQ ID NO: 954329 - RNA, 22 nt, Human
uggcucaggugugagcugaaga

SEQ ID NO: 954330 - RNA, 19 nt, Human
auuucaagagguuuauugg

SEQ ID NO: 954331 - RNA, 21 nt, Human
ucuuguccuugcucucccacu

SEQ ID NO: 954332 - RNA, 22 nt, Human
guucuucaucauuaacacucug

SEQ ID NO: 954333 - RNA, 22 nt, Human
agucauauguggcauuuucuaa

SEQ ID NO: 954334 - RNA, 22 nt, Human
acauuucucauaggagagccac

SEQ ID NO: 954335 - RNA, 22 nt, Human
agcagccaguucucugugguag

SEQ ID NO: 954336 - RNA, 22 nt, Human
agggacugagcuaggaucuagu

SEQ ID NO: 954337 - RNA, 22 nt, Human
guggccaaaucaugucaaaggc

SEQ ID NO: 954338 - RNA, 22 nt, Human
auucagagcacuggguagaauu

SEQ ID NO: 954339 - RNA, 22 nt, Human
caggacagcucaacaccuccuc

SEQ ID NO: 954340 - RNA, 22 nt, Human
aaaagguagauucuccuucuau

SEQ ID NO: 954341 - RNA, 22 nt, Human
uggagaggagcaccauggccau

SEQ ID NO: 954342 - RNA, 22 nt, Human
ucucagaggucuucagccucug

SEQ ID NO: 954343 - RNA, 22 nt, Human
ugcaucuguucagagcugucga

SEQ ID NO: 954344 - RNA, 20 nt, Human
aggcaccugucacaggugag

SEQ ID NO: 954345 - RNA, 22 nt, Human
gagaggugaaggcugcccuggg

SEQ ID NO: 954346 - RNA, 22 nt, Human
caaaggcaguuacugaaugaag

SEQ ID NO: 954347 - RNA, 22 nt, Human
cugugucccuugucccagagcc

SEQ ID NO: 954348 - RNA, 22 nt, Human
augaaggcuguguggagccccc

SEQ ID NO: 954349 - RNA, 22 nt, Human
gcacucugccaggucuccugau

SEQ ID NO: 954350 - RNA, 22 nt, Human
gucugagcgcuggagcuugugu

SEQ ID NO: 954351 - RNA, 22 nt, Human
cucacagaugcugugggucagg

SEQ ID NO: 954352 - RNA, 22 nt, Human
ggcuucuuccugugaacauguu

SEQ ID NO: 954353 - RNA, 22 nt, Human
ucccagaguauuagcaauugcu

SEQ ID NO: 954354 - RNA, 22 nt, Human
ucacaggguaucugggauggau

SEQ ID NO: 954355 - RNA, 22 nt, Human
ggcuguggggggagccugcccg

SEQ ID NO: 954356 - RNA, 22 nt, Human
acuguucauuuggauuucucug

SEQ ID NO: 954357 - RNA, 22 nt, Human
gcugcucugugacagccuccgg

SEQ ID NO: 954358 - RNA, 22 nt, Human
ccugcacuaccuggggcugcug

SEQ ID NO: 954359 - RNA, 22 nt, Human
cacugaagccacuggaagagga

SEQ ID NO: 954360 - RNA, 22 nt, Human
caucacuguccucagcauucca

SEQ ID NO: 954361 - RNA, 21 nt, Human
auucagaguaauucaucuuua

SEQ ID NO: 954362 - RNA, 22 nt, Human
aguuuuaugcaguguucugaua

SEQ ID NO: 954363 - RNA, 22 nt, Human
uaugugucugucgugcauaaau

SEQ ID NO: 954364 - RNA, 22 nt, Human
ggauccuuaacuaucacaguga

SEQ ID NO: 954365 - RNA, 22 nt, Human
uccaguggcacuggagacuaga

SEQ ID NO: 954366 - RNA, 22 nt, Human
uuucucuaaauagggaggcuua

SEQ ID NO: 954367 - RNA, 23 nt, Human
augcucugggcugugggaccugc

SEQ ID NO: 954368 - RNA, 22 nt, Human
ccaggggaaacagggagcacuc

SEQ ID NO: 954369 - RNA, 22 nt, Human
ugcauggacucaucagacaaga

SEQ ID NO: 954370 - RNA, 22 nt, Human
gagcuguccgccccugggccga

SEQ ID NO: 954371 - RNA, 22 nt, Human
acuggccaggcgaaccacacug

SEQ ID NO: 954372 - RNA, 22 nt, Human
cugcuuugauuagaagaguaca

SEQ ID NO: 954373 - RNA, 22 nt, Human
ccaggaugacccccacuuuccu

SEQ ID NO: 954374 - RNA, 22 nt, Human
cggggcuguagcacagcugagc

SEQ ID NO: 954375 - RNA, 22 nt, Human
aggcagaggaaggguggauuug

SEQ ID NO: 954376 - RNA, 22 nt, Human
caaauucacaugauugcuucug

SEQ ID NO: 954377 - RNA, 22 nt, Human
ccagaggaggggggucuuucug

SEQ ID NO: 954378 - RNA, 22 nt, Human
agaggcugggaaggguccccgg

SEQ ID NO: 954379 - RNA, 22 nt, Human
gaauuacauuguuagccuuccu

SEQ ID NO: 954380 - RNA, 18 nt, Human
accuucauuccuuugccu

SEQ ID NO: 954381 - RNA, 22 nt, Human
uggcucagugaagagauaacuu

SEQ ID NO: 954382 - RNA, 20 nt, Human
ugugcccaauguccagguuc

SEQ ID NO: 954383 - RNA, 22 nt, Human
cuucccuuggugaacagagcau

SEQ ID NO: 954384 - RNA, 22 nt, Human
gucaggauuaaugggaguaugc

SEQ ID NO: 954385 - RNA, 22 nt, Human
uucucucauucaaauuaaagug

SEQ ID NO: 954386 - RNA, 21 nt, Human
gcucccuggcugugugaccug

SEQ ID NO: 954387 - RNA, 22 nt, Human
uaagaacauaaauucauacggg

SEQ ID NO: 954388 - RNA, 22 nt, Human
ggcuucaccgcgggguugcagg

SEQ ID NO: 954389 - RNA, 22 nt, Human
cccagcccaucucaaaggucua

SEQ ID NO: 954390 - RNA, 22 nt, Human
gaggccacagcuaucagggaca

SEQ ID NO: 954391 - RNA, 18 nt, Human
cuccagggaacucaguca

SEQ ID NO: 954392 - RNA, 22 nt, Human
cacaguuagcuccagucuuagc

SEQ ID NO: 954393 - RNA, 22 nt, Human
ggugaagggccuuaggagacag

SEQ ID NO: 954394 - RNA, 22 nt, Human
agaagcuuccuacauuguucuu

SEQ ID NO: 954395 - RNA, 22 nt, Human
cugaccaucauggugaaacccc

SEQ ID NO: 954396 - RNA, 22 nt, Human
auuuucaucauggguuuaacau

SEQ ID NO: 954397 - RNA, 22 nt, Human
acaggugauucaggcucuggga

SEQ ID NO: 954398 - RNA, 22 nt, Human
cccugcagccggccagcucauu

SEQ ID NO: 954399 - RNA, 22 nt, Human
augccagggucacagucauauu

SEQ ID NO: 954400 - RNA, 22 nt, Human
ccaugcaauuucuguaaaacca

SEQ ID NO: 954401 - RNA, 22 nt, Human
ccucagggacuccaugcugcag

SEQ ID NO: 954402 - RNA, 23 nt, Human
gcauugucuccccacuucugggc

SEQ ID NO: 954403 - RNA, 22 nt, Human
uaagaacaucuguccccagauu

SEQ ID NO: 954404 - RNA, 22 nt, Human
gcugggagugggcaagaugaga

SEQ ID NO: 954405 - RNA, 22 nt, Human
auuaggcaauucugggcaucuc

SEQ ID NO: 954406 - RNA, 22 nt, Human
uacuaucucuucuaacuucaga

SEQ ID NO: 954407 - RNA, 22 nt, Human
agcagcugccagagagaguucc

SEQ ID NO: 954408 - RNA, 22 nt, Human
ugaggcaggacuugcauaaagu

SEQ ID NO: 954409 - RNA, 22 nt, Human
agcuucuggaaggcaaggcuug

SEQ ID NO: 954410 - RNA, 22 nt, Human
ugcuggaggccugacuguguuu

SEQ ID NO: 954411 - RNA, 22 nt, Human
aggagucauaaaugugaacaaa

SEQ ID NO: 954412 - RNA, 22 nt, Human
ugguaauuaauuugauagguuc

SEQ ID NO: 954413 - RNA, 22 nt, Human
ggccugagcucuggggaggcaa

SEQ ID NO: 954414 - RNA, 22 nt, Human
ucacaggaggaaccuggccugg

SEQ ID NO: 954415 - RNA, 22 nt, Human
cccaggcagugugugcaugcgu

SEQ ID NO: 954416 - RNA, 21 nt, Human
agaggccuuacaggauagacc

SEQ ID NO: 954417 - RNA, 22 nt, Human
uggcuguggacucagauggcuc

SEQ ID NO: 954418 - RNA, 22 nt, Human
gggaguguugagcgcccugcca

SEQ ID NO: 954419 - RNA, 22 nt, Human
guucuucaaagugacaacuaaa

SEQ ID NO: 954420 - RNA, 22 nt, Human
gcugucugagaacaugguggaa

SEQ ID NO: 954421 - RNA, 22 nt, Human
ccacaggggcccacgagccgcu

SEQ ID NO: 954422 - RNA, 22 nt, Human
ccugagagcagcuuccugcuua

SEQ ID NO: 954423 - RNA, 22 nt, Human
cccaggaguuagagguuguggu

SEQ ID NO: 954424 - RNA, 17 nt, Human
auguuaauuucacauuu

SEQ ID NO: 954425 - RNA, 22 nt, Human
uugcauugugauuacagaggug

SEQ ID NO: 954426 - RNA, 19 nt, Human
augucuguugaauuucaua

SEQ ID NO: 954427 - RNA, 22 nt, Human
ggucucagcaguugcuuugacu

SEQ ID NO: 954428 - RNA, 22 nt, Human
acaguuucuccauuuacaccuu

SEQ ID NO: 954429 - RNA, 22 nt, Human
auuugaauggcuuaacacaacg

SEQ ID NO: 954430 - RNA, 22 nt, Human
cagagugaaauaggggaucaag

SEQ ID NO: 954431 - RNA, 22 nt, Human
gcagcuuuguggagaggcccau

SEQ ID NO: 954432 - RNA, 22 nt, Human
guccuggggauuauagaguguu

SEQ ID NO: 954433 - RNA, 22 nt, Human
guuuauuagaguuuucugucug

SEQ ID NO: 954434 - RNA, 22 nt, Human
caguuuaaccuauccauuaugu

SEQ ID NO: 954435 - RNA, 22 nt, Human
auucucaaaacauaacuucacu

SEQ ID NO: 954436 - RNA, 22 nt, Human
uggaaggcaugggaacuguucu

SEQ ID NO: 954437 - RNA, 22 nt, Human
cacuguaucuuuuccaaagucu

SEQ ID NO: 954438 - RNA, 22 nt, Human
acaccuuucagguccagacagu

SEQ ID NO: 954439 - RNA, 22 nt, Human
aggguauaaagagcaagcagaa

SEQ ID NO: 954440 - RNA, 22 nt, Human
gaagcagcuggugagauggagc

SEQ ID NO: 954441 - RNA, 22 nt, Human
gaggccagggaugcaaugagag

SEQ ID NO: 954442 - RNA, 22 nt, Human
aaaaaaucagaucuuugguuaa

SEQ ID NO: 954443 - RNA, 22 nt, Human
aguggaccagaagacugaagcu

SEQ ID NO: 954444 - RNA, 22 nt, Human
gagguauguaugcuacauucuu

SEQ ID NO: 954445 - RNA, 22 nt, Human
uggagagguuuaaacaaaaguu

SEQ ID NO: 954446 - RNA, 22 nt, Human
guccaaauaaguugcaaaauag

SEQ ID NO: 954447 - RNA, 21 nt, Human
acugccugucuccauagucua

SEQ ID NO: 954448 - RNA, 22 nt, Human
gcuggcagccaagugaagaggg

SEQ ID NO: 954449 - RNA, 22 nt, Human
gcagagcuucuguccuucagga

SEQ ID NO: 954450 - RNA, 22 nt, Human
ucgcugugguuucuguacaugg

SEQ ID NO: 954451 - RNA, 22 nt, Human
gaggagcuggcagcgucuccgc

SEQ ID NO: 954452 - RNA, 22 nt, Human
agccagcuguucuggggcagca

SEQ ID NO: 954453 - RNA, 22 nt, Human
gcacugggaaugugagcagcug

SEQ ID NO: 954454 - RNA, 22 nt, Human
ggugccaggcucccagcucagg

SEQ ID NO: 954455 - RNA, 22 nt, Human
cuugcugugugguguucucaga

SEQ ID NO: 954456 - RNA, 22 nt, Human
agcugguucauucauucauggu

SEQ ID NO: 954457 - RNA, 22 nt, Human
auauuaggcaaggagauuauuu

SEQ ID NO: 954458 - RNA, 22 nt, Human
gagggcuccauuccccgugccc

SEQ ID NO: 954459 - RNA, 22 nt, Human
uauuuugagguauuuuugagcu

SEQ ID NO: 954460 - RNA, 21 nt, Human
ccucuggcuugugcugugccc

SEQ ID NO: 954461 - RNA, 22 nt, Human
cugccgaguacagccauagaaa

SEQ ID NO: 954462 - RNA, 22 nt, Human
ugggccugauucuugaauccug

SEQ ID NO: 954463 - RNA, 19 nt, Human
ucccuggcgccucucgggc

SEQ ID NO: 954464 - RNA, 22 nt, Human
ccaaggagcaaggcucaacaag

SEQ ID NO: 954465 - RNA, 22 nt, Human
uguaggacauguacuuguaaca

SEQ ID NO: 954466 - RNA, 22 nt, Human
uacccaggaggaaacugaggcu

SEQ ID NO: 954467 - RNA, 23 nt, Human
agccacuucuaucuugcuccugg

SEQ ID NO: 954468 - RNA, 22 nt, Human
acauguaaaaggaacaugcaug

SEQ ID NO: 954469 - RNA, 22 nt, Human
uucacauuagugguucuauaua

SEQ ID NO: 954470 - RNA, 22 nt, Human
uugaaaguuaucuagauucuga

SEQ ID NO: 954471 - RNA, 22 nt, Human
gauggcacacagacauccccgc

SEQ ID NO: 954472 - RNA, 22 nt, Human
agggacacaugugauuauuuau

SEQ ID NO: 954473 - RNA, 22 nt, Human
aggagggaccuaggaauauugc

SEQ ID NO: 954474 - RNA, 22 nt, Human
caggagugcagguggugaggca

SEQ ID NO: 954475 - RNA, 22 nt, Human
uggcagucauuaucgcugaguc

SEQ ID NO: 954476 - RNA, 22 nt, Human
caaaggcaacauauacuuguuu

SEQ ID NO: 954477 - RNA, 22 nt, Human
cuggccagcugacagcagggcu

SEQ ID NO: 954478 - RNA, 22 nt, Human
ccucuggggugagugggccacu

SEQ ID NO: 954479 - RNA, 22 nt, Human
aagagcugcccaaggugaacag

SEQ ID NO: 954480 - RNA, 22 nt, Human
caggaggcccaaagggcgcaga

SEQ ID NO: 954481 - RNA, 22 nt, Human
uucuucuucuggcugcaccugg

SEQ ID NO: 954482 - RNA, 22 nt, Human
aauccuggaauacaagagugaa

SEQ ID NO: 954483 - RNA, 22 nt, Human
cucuggagguggagguugcagu

SEQ ID NO: 954484 - RNA, 21 nt, Human
ucucugguuggaguugugcca

SEQ ID NO: 954485 - RNA, 22 nt, Human
cacaccuguaauaccagcuacu

SEQ ID NO: 954486 - RNA, 22 nt, Human
uacaaaguauauuucuagcugu

SEQ ID NO: 954487 - RNA, 22 nt, Human
cccuggagguggagguugcagg

SEQ ID NO: 954488 - RNA, 19 nt, Human
ccucccacggauuccuucc

SEQ ID NO: 954489 - RNA, 22 nt, Human
agugcauuauauguuucaaugg

SEQ ID NO: 954490 - RNA, 21 nt, Human
ccucugcucgggcaugcguuu

SEQ ID NO: 954491 - RNA, 22 nt, Human
ggcugcaggcaggguauccacu

SEQ ID NO: 954492 - RNA, 22 nt, Human
auccaguuuaugucauauucuu

SEQ ID NO: 954493 - RNA, 22 nt, Human
cgaggcagggaagcugcaaaag

SEQ ID NO: 954494 - RNA, 22 nt, Human
agcagcaacuuauuuuucuuau

SEQ ID NO: 954495 - RNA, 22 nt, Human
agacaggaugcauacucuuggu

SEQ ID NO: 954496 - RNA, 22 nt, Human
cuccuggaccagggcuauuggg

SEQ ID NO: 954497 - RNA, 17 nt, Human
auuagguuuugucauga

SEQ ID NO: 954498 - RNA, 22 nt, Human
aguaaaauuguauuggaaaaca

SEQ ID NO: 954499 - RNA, 21 nt, Human
agcugccacccuagcuucuga

SEQ ID NO: 954500 - RNA, 22 nt, Human
gcugagaggcacuaucuccgga

SEQ ID NO: 954501 - RNA, 22 nt, Human
cgcugggggaacagcgagggug

SEQ ID NO: 954502 - RNA, 22 nt, Human
cuuggcagagggcugggcucag

SEQ ID NO: 954503 - RNA, 22 nt, Human
cagcugaacauguagagcaucu

SEQ ID NO: 954504 - RNA, 22 nt, Human
agaaaucugacugcugugcaca

SEQ ID NO: 954505 - RNA, 22 nt, Human
cagaggcauauaauugcugggg

SEQ ID NO: 954506 - RNA, 22 nt, Human
uuggccaagggcucuuuaggcu

SEQ ID NO: 954507 - RNA, 22 nt, Human
uggcucugcugaaccuagugca

SEQ ID NO: 954508 - RNA, 19 nt, Human
uggcaucuguaaaauggug

SEQ ID NO: 954509 - RNA, 22 nt, Human
ucugcuguucauucuuuuagcu

SEQ ID NO: 954510 - RNA, 22 nt, Human
cuguccuaugaguacucacuag

SEQ ID NO: 954511 - RNA, 22 nt, Human
cugcccugugaggguccuuggg

SEQ ID NO: 954512 - RNA, 22 nt, Human
gcugagggcuguaacagcagag

SEQ ID NO: 954513 - RNA, 22 nt, Human
ggcugcugcccaccccugcaug

SEQ ID NO: 954514 - RNA, 22 nt, Human
cauguacauucuguagauggag

SEQ ID NO: 954515 - RNA, 22 nt, Human
auaaacacuucuagggcacaca

SEQ ID NO: 954516 - RNA, 22 nt, Human
uucuacaugguugcucagaggg

SEQ ID NO: 954517 - RNA, 23 nt, Human
aggcuuccuaucuuagagcuggg

SEQ ID NO: 954518 - RNA, 18 nt, Human
ggcagggaaaagauaggg

SEQ ID NO: 954519 - RNA, 22 nt, Human
gcugguaggaagugcuccugcc

SEQ ID NO: 954520 - RNA, 22 nt, Human
aacugcauuugcauaaguccau

SEQ ID NO: 954521 - RNA, 22 nt, Human
auggccaagagucgauuugggg

SEQ ID NO: 954522 - RNA, 22 nt, Human
ggccccuggcaccaggcugauu

SEQ ID NO: 954523 - RNA, 22 nt, Human
cuguacaucucugaggacagua

SEQ ID NO: 954524 - RNA, 22 nt, Human
ggagcacuauaauagagauuuu

SEQ ID NO: 954525 - RNA, 19 nt, Human
auacacauacguaaacuga

SEQ ID NO: 954526 - RNA, 22 nt, Human
ccaggccauucccagaguugcu

SEQ ID NO: 954527 - RNA, 22 nt, Human
ugaaaugagauaauuuaagugc

SEQ ID NO: 954528 - RNA, 22 nt, Human
ccagagcaauucucacagaacu

SEQ ID NO: 954529 - RNA, 22 nt, Human
uguacacaauucuuaacauaca

SEQ ID NO: 954530 - RNA, 22 nt, Human
cauugcucaggcccagcaggaa

SEQ ID NO: 954531 - RNA, 22 nt, Human
caggcugaggcaguaggguuug

SEQ ID NO: 954532 - RNA, 19 nt, Human
ccagguggaacugagguag

SEQ ID NO: 954533 - RNA, 22 nt, Human
uccagagcagguggucagaagg

SEQ ID NO: 954534 - RNA, 19 nt, Human
aaagcagaggagcaucuga

SEQ ID NO: 954535 - RNA, 22 nt, Human
gccuggcacucacugaagaggc

SEQ ID NO: 954536 - RNA, 22 nt, Human
uguuaaauguuccuuuacugga

SEQ ID NO: 954537 - RNA, 22 nt, Human
agagugaaguaauuguuaggau

SEQ ID NO: 954538 - RNA, 22 nt, Human
aggcaaaauuacaaaguuauua

SEQ ID NO: 954539 - RNA, 22 nt, Human
aauguucaguagaauaggaaug

SEQ ID NO: 954540 - RNA, 22 nt, Human
auucauucugaccucaagagaa

SEQ ID NO: 954541 - RNA, 22 nt, Human
uggcugugucaucauagcugug

SEQ ID NO: 954542 - RNA, 16 nt, Human
gcucugcugaggccca

SEQ ID NO: 954543 - RNA, 22 nt, Human
uuuucaguuccaucucugcucu

SEQ ID NO: 954544 - RNA, 22 nt, Human
aggcccugcaggaguggggaca

SEQ ID NO: 954545 - RNA, 22 nt, Human
augggcaugcuucuaguugaaa

SEQ ID NO: 954546 - RNA, 22 nt, Human
gccaugaggaacuguaagacaa

SEQ ID NO: 954547 - RNA, 22 nt, Human
acagcaggauuuggcgauguug

SEQ ID NO: 954548 - RNA, 22 nt, Human
uguacaguaggaacuuguuauu

SEQ ID NO: 954549 - RNA, 22 nt, Human
ccucugcagcagagagccagag

SEQ ID NO: 954550 - RNA, 22 nt, Human
gaaggagagggucaaggauaau

SEQ ID NO: 954551 - RNA, 23 nt, Human
ugucauugugacuacagaaccag

SEQ ID NO: 954552 - RNA, 21 nt, Human
aggcagcuggaaggccuggcu

SEQ ID NO: 954553 - RNA, 22 nt, Human
gguggggucacgacagagggaa

SEQ ID NO: 954554 - RNA, 22 nt, Human
uuucuuuaucauagcaucuuug

SEQ ID NO: 954555 - RNA, 22 nt, Human
ggagcuggcuacagagaacucc

SEQ ID NO: 954556 - RNA, 22 nt, Human
uagcuuuguuagaaugucuuca

SEQ ID NO: 954557 - RNA, 21 nt, Human
uggccaaaaccauauuauuaa

SEQ ID NO: 954558 - RNA, 22 nt, Human
ucugcuguaaagaauuucugcc

SEQ ID NO: 954559 - RNA, 22 nt, Human
auauuguugacuauaagaguaa

SEQ ID NO: 954560 - RNA, 22 nt, Human
uccuggcccuguggccugcagu

SEQ ID NO: 954561 - RNA, 22 nt, Human
gagcuggugaucagcuggagga

SEQ ID NO: 954562 - RNA, 22 nt, Human
cugagggcccugaagcuuggca

SEQ ID NO: 954563 - RNA, 22 nt, Human
ucaguggauauuucuguggcug

SEQ ID NO: 954564 - RNA, 22 nt, Human
ccucccucuguuagagcugucu

SEQ ID NO: 954565 - RNA, 22 nt, Human
uaucuuugaugccagauguuac

SEQ ID NO: 954566 - RNA, 22 nt, Human
cagcagcugauggggaagugau

SEQ ID NO: 954567 - RNA, 22 nt, Human
aaaugcacacaccaggaaacua

SEQ ID NO: 954568 - RNA, 22 nt, Human
agauuuccugcacugccuuuga

SEQ ID NO: 954569 - RNA, 22 nt, Human
gaguuauuugguuugcaugcag

SEQ ID NO: 954570 - RNA, 22 nt, Human
gagcacagaaucuucccaugca

SEQ ID NO: 954571 - RNA, 22 nt, Human
augggaugaacuugaucugcuu

SEQ ID NO: 954572 - RNA, 22 nt, Human
ugggccuccaauuccagcggga

SEQ ID NO: 954573 - RNA, 23 nt, Human
agggcugaugccauugcagcucu

SEQ ID NO: 954574 - RNA, 22 nt, Human
ggcagauggaagaggcuggguc

SEQ ID NO: 954575 - RNA, 22 nt, Human
ucuuuacacaagacaagaauaa

SEQ ID NO: 954576 - RNA, 22 nt, Human
auguuaaaugguuuauuauuaa

SEQ ID NO: 954577 - RNA, 22 nt, Human
gcagagccccauugcuggcggg

SEQ ID NO: 954578 - RNA, 22 nt, Human
gcagcuggagccagccagacac

SEQ ID NO: 954579 - RNA, 22 nt, Human
uggcucaggguccccaaauggu

SEQ ID NO: 954580 - RNA, 22 nt, Human
cuggugggaggcaagguggaag

SEQ ID NO: 954581 - RNA, 22 nt, Human
uccuggccucacaguccugggu

SEQ ID NO: 954582 - RNA, 22 nt, Human
aggguauguuuuuaucuacugu

SEQ ID NO: 954583 - RNA, 18 nt, Human
agccuggaggguugaagu

SEQ ID NO: 954584 - RNA, 23 nt, Human
agggagcuaaaaggcuggagcag

SEQ ID NO: 954585 - RNA, 22 nt, Human
aggcugccuguuccaaucuccu

SEQ ID NO: 954586 - RNA, 22 nt, Human
ccagggcagaaaaagagggaau

SEQ ID NO: 954587 - RNA, 22 nt, Human
aauuagagaucaguucuuugac

SEQ ID NO: 954588 - RNA, 22 nt, Human
aggucaaaccacagcucuaggc

SEQ ID NO: 954589 - RNA, 22 nt, Human
auaaguaggaaaauuugaauau

SEQ ID NO: 954590 - RNA, 22 nt, Human
ugggccacaagccaugggacca

SEQ ID NO: 954591 - RNA, 22 nt, Human
aggagcagaccguaguccugca

SEQ ID NO: 954592 - RNA, 22 nt, Human
cggcuggguagaggugccgggu

SEQ ID NO: 954593 - RNA, 22 nt, Human
uuugacagauccuuaacucagc

SEQ ID NO: 954594 - RNA, 22 nt, Human
uuugaaauguaucaguauaggu

SEQ ID NO: 954595 - RNA, 22 nt, Human
ccuggccaggcauggagucaca

SEQ ID NO: 954596 - RNA, 22 nt, Human
cugguccuugacgcgugggagg

SEQ ID NO: 954597 - RNA, 22 nt, Human
gagaaagacguaggcugggagg

SEQ ID NO: 954598 - RNA, 22 nt, Human
gcuguucucuguaacaugcauu

SEQ ID NO: 954599 - RNA, 22 nt, Human
ccaggcaggcgauggugcagug

SEQ ID NO: 954600 - RNA, 22 nt, Human
gggaucagcaagccacugcacc

SEQ ID NO: 954601 - RNA, 17 nt, Human
cauuuguugaucaguug

SEQ ID NO: 954602 - RNA, 22 nt, Human
gaacaauagugguaacaaagcc

SEQ ID NO: 954603 - RNA, 22 nt, Human
agguuauaugucauacugaagu

SEQ ID NO: 954604 - RNA, 22 nt, Human
acuucuucuucagcugggggau

SEQ ID NO: 954605 - RNA, 22 nt, Human
uccucacaagcaagcacaggua

SEQ ID NO: 954606 - RNA, 19 nt, Human
cugagcagcggcagcacuu

SEQ ID NO: 954607 - RNA, 22 nt, Human
ucuucucuacaccagcagcccc

SEQ ID NO: 954608 - RNA, 22 nt, Human
cagggacaugacuggucucugu

SEQ ID NO: 954609 - RNA, 22 nt, Human
acaagagacaagagguucuucu

SEQ ID NO: 954610 - RNA, 22 nt, Human
cuggcccagagcucuggccuuu

SEQ ID NO: 954611 - RNA, 22 nt, Human
gcagcugaaagggaucucuaca

SEQ ID NO: 954612 - RNA, 22 nt, Human
cuucuccucugaguccugggag

SEQ ID NO: 954613 - RNA, 22 nt, Human
agucccagcuacucaagaggcu

SEQ ID NO: 954614 - RNA, 22 nt, Human
uuucacauuuaggcgugaauug

SEQ ID NO: 954615 - RNA, 20 nt, Human
gcccuggagccuuguccugg

SEQ ID NO: 954616 - RNA, 22 nt, Human
uggagcaggccggaaguggcuu

SEQ ID NO: 954617 - RNA, 22 nt, Human
aagacuuucaaaccuauguuug

SEQ ID NO: 954618 - RNA, 22 nt, Human
cagaagcauugacuccuugcuc

SEQ ID NO: 954619 - RNA, 22 nt, Human
uuggcaguagucucggcuaccc

SEQ ID NO: 954620 - RNA, 22 nt, Human
cacgggagacgugaucuuggac

SEQ ID NO: 954621 - RNA, 22 nt, Human
gaggugggagggcagucccuaa

SEQ ID NO: 954622 - RNA, 22 nt, Human
uggcccgaccucugcucaugca

SEQ ID NO: 954623 - RNA, 22 nt, Human
uggagacucugcaucugugaca

SEQ ID NO: 954624 - RNA, 22 nt, Human
uucuucuuaauguccugggaac

SEQ ID NO: 954625 - RNA, 22 nt, Human
aucuuucaguuucauaccaauu

SEQ ID NO: 954626 - RNA, 22 nt, Human
gagcugcugguugcuggugccu

SEQ ID NO: 954627 - RNA, 22 nt, Human
uauuagugaaagaauuaguuug

SEQ ID NO: 954628 - RNA, 22 nt, Human
uggcucuggcgugaagcccaga

SEQ ID NO: 954629 - RNA, 22 nt, Human
ucugagagagggucagaugcua

SEQ ID NO: 954630 - RNA, 22 nt, Human
guggcuucacauggcauuuggc

SEQ ID NO: 954631 - RNA, 22 nt, Human
ggcagccaugucccagggcuuc

SEQ ID NO: 954632 - RNA, 22 nt, Human
agagugcaaccgaaacaagcag

SEQ ID NO: 954633 - RNA, 22 nt, Human
agcagggcuuugcagacuuggg

SEQ ID NO: 954634 - RNA, 22 nt, Human
gucuucaauagagccucaauuu

SEQ ID NO: 954635 - RNA, 22 nt, Human
uggcagcugcguuguguuucug

SEQ ID NO: 954636 - RNA, 22 nt, Human
ccuggcagcuaagugcuuugag

SEQ ID NO: 954637 - RNA, 22 nt, Human
uuuguaaagucuguucugaguu

SEQ ID NO: 954638 - RNA, 22 nt, Human
uuccaggacuggguguuugaag

SEQ ID NO: 954639 - RNA, 22 nt, Human
uuugacagcuuguuacaaaguu

SEQ ID NO: 954640 - RNA, 22 nt, Human
cccugccugugggcaucaacau

SEQ ID NO: 954641 - RNA, 22 nt, Human
cucuggaguuagugaucugggc

SEQ ID NO: 954642 - RNA, 22 nt, Human
ucaguucuuuauuucacaguga

SEQ ID NO: 954643 - RNA, 22 nt, Human
aggugccagugcuguggucccc

SEQ ID NO: 954644 - RNA, 22 nt, Human
cauuuguaggaugcuucuuguu

SEQ ID NO: 954645 - RNA, 22 nt, Human
acugaaggcuuaacucuuucau

SEQ ID NO: 954646 - RNA, 22 nt, Human
cugggucuggugucaggcgacg

SEQ ID NO: 954647 - RNA, 22 nt, Human
cucugagcccgcugcagcccca

SEQ ID NO: 954648 - RNA, 22 nt, Human
agagugaaggccagguuacagu

SEQ ID NO: 954649 - RNA, 22 nt, Human
cucagaagccuucagucuuggc

SEQ ID NO: 954650 - RNA, 22 nt, Human
ugucccaguuuugcagguuaga

SEQ ID NO: 954651 - RNA, 22 nt, Human
uagaaaugcaguguacuguguc

SEQ ID NO: 954652 - RNA, 22 nt, Human
gaugccucuuuuggcugaauua

SEQ ID NO: 954653 - RNA, 22 nt, Human
aggccaaauugaucaucuuuag

SEQ ID NO: 954654 - RNA, 22 nt, Human
acugccugcauccuuaggguag

SEQ ID NO: 954655 - RNA, 22 nt, Human
aaccuuuugcaagugccuugac

SEQ ID NO: 954656 - RNA, 22 nt, Human
uggcugaaggaagauucuucua

SEQ ID NO: 954657 - RNA, 22 nt, Human
caguugccuacuacauggcagg

SEQ ID NO: 954658 - RNA, 22 nt, Human
uggaggcauaggccugggcccu

SEQ ID NO: 954659 - RNA, 22 nt, Human
gggauggcuuuguggcugacuc

SEQ ID NO: 954660 - RNA, 22 nt, Human
ucaaacuguuuacagugagaua

SEQ ID NO: 954661 - RNA, 22 nt, Human
ucuggauggucagcucuuccug

SEQ ID NO: 954662 - RNA, 22 nt, Human
cagagccugccaccuuucuccc

SEQ ID NO: 954663 - RNA, 20 nt, Human
ucugugugccaucaccuaac

SEQ ID NO: 954664 - RNA, 21 nt, Human
ugcucacagaugugcucagug

SEQ ID NO: 954665 - RNA, 22 nt, Human
gacagccucaugaggagcaaaa

SEQ ID NO: 954666 - RNA, 22 nt, Human
gagggagggaaaguuuaacacu

SEQ ID NO: 954667 - RNA, 22 nt, Human
ugcccaggguuucuaagagcag

SEQ ID NO: 954668 - RNA, 22 nt, Human
caggcagcagccacucugguau

SEQ ID NO: 954669 - RNA, 22 nt, Human
aggaaaaagaguugcugccuuc

SEQ ID NO: 954670 - RNA, 22 nt, Human
agcuuaggaggaugaugaacau

SEQ ID NO: 954671 - RNA, 22 nt, Human
ucuggcucuguguccucaccca

SEQ ID NO: 954672 - RNA, 22 nt, Human
cagcugccccgcuggcugacca

SEQ ID NO: 954673 - RNA, 22 nt, Human
ugcugaggagguggcugugcuu

SEQ ID NO: 954674 - RNA, 22 nt, Human
gcaccugggcaaggauucagag

SEQ ID NO: 954675 - RNA, 19 nt, Human
acaagggcaggcaagguga

SEQ ID NO: 954676 - RNA, 22 nt, Human
aggcccagggcugcucucugaa

SEQ ID NO: 954677 - RNA, 21 nt, Human
cugcucuggggaccggcugug

SEQ ID NO: 954678 - RNA, 22 nt, Human
uguccacaucacucacuuguca

SEQ ID NO: 954679 - RNA, 22 nt, Human
auuugaagaaaguuuucuagau

SEQ ID NO: 954680 - RNA, 22 nt, Human
caaugaaauugagauccagaga

SEQ ID NO: 954681 - RNA, 22 nt, Human
aagccagguuccauggaggagc

SEQ ID NO: 954682 - RNA, 22 nt, Human
acagagauguggaugagggauu

SEQ ID NO: 954683 - RNA, 22 nt, Human
gcugggagcccuggucugcucc

SEQ ID NO: 954684 - RNA, 22 nt, Human
ugccagcacuucuggcugucug

SEQ ID NO: 954685 - RNA, 22 nt, Human
uuucaacaccagagaccaugcg

SEQ ID NO: 954686 - RNA, 22 nt, Human
uggcaaacuggaggaagcccug

SEQ ID NO: 954687 - RNA, 21 nt, Human
ccuccaggagcagagcccuga

SEQ ID NO: 954688 - RNA, 22 nt, Human
acuuccuggcugggugaccugg

SEQ ID NO: 954689 - RNA, 22 nt, Human
aaagcuaugaggcaugcauuuc

SEQ ID NO: 954690 - RNA, 22 nt, Human
gccuugggauucuuggaugcuc

SEQ ID NO: 954691 - RNA, 22 nt, Human
cacugaaggaaggacuacugca

SEQ ID NO: 954692 - RNA, 22 nt, Human
augaaugacugucuacuuuggg

SEQ ID NO: 954693 - RNA, 22 nt, Human
ggcugccagugagugcagaccg

SEQ ID NO: 954694 - RNA, 22 nt, Human
uuugcauuuuagauuuaggccu

SEQ ID NO: 954695 - RNA, 22 nt, Human
caggcacuucugcugcuugucu

SEQ ID NO: 954696 - RNA, 22 nt, Human
ugucauaaaacacaagcuguug

SEQ ID NO: 954697 - RNA, 22 nt, Human
cauguuuucuaggcuuucacaa

SEQ ID NO: 954698 - RNA, 22 nt, Human
ccagucacagguguguuuauau

SEQ ID NO: 954699 - RNA, 22 nt, Human
ccauccuaucugaccuacuugu

SEQ ID NO: 954700 - RNA, 22 nt, Human
uucucagaauugacugggagca

SEQ ID NO: 954701 - RNA, 22 nt, Human
uaugcacaacaugcagguuugu

SEQ ID NO: 954702 - RNA, 22 nt, Human
ggagcagcuugcaugcucaggg

SEQ ID NO: 954703 - RNA, 22 nt, Human
uccucuggcccagcugccucug

SEQ ID NO: 954704 - RNA, 22 nt, Human
ugcucuguaaggucagaaaagg

SEQ ID NO: 954705 - RNA, 22 nt, Human
gauggguggucucagacuugcc

SEQ ID NO: 954706 - RNA, 22 nt, Human
ccauggaguuccucuggucuau

SEQ ID NO: 954707 - RNA, 22 nt, Human
agcccaugcaacaggccuagcg

SEQ ID NO: 954708 - RNA, 22 nt, Human
cucagucucuugggcugugaag

SEQ ID NO: 954709 - RNA, 22 nt, Human
acagccaggaauucuggagaag

SEQ ID NO: 954710 - RNA, 22 nt, Human
gccagaaacauacacaucacuu

SEQ ID NO: 954711 - RNA, 22 nt, Human
ugcauauuuuauaaagauggaa

SEQ ID NO: 954712 - RNA, 22 nt, Human
aaucaguucuacaucuuaucca

SEQ ID NO: 954713 - RNA, 22 nt, Human
cauuugaaauaguucauucuug

SEQ ID NO: 954714 - RNA, 22 nt, Human
uucacagacuuuccauagauug

SEQ ID NO: 954715 - RNA, 22 nt, Human
ggauggcauguugggcucuguu

SEQ ID NO: 954716 - RNA, 23 nt, Human
cuucacaaucaaaaucaguucug

SEQ ID NO: 954717 - RNA, 22 nt, Human
aguguuccacacaucuggggaa

SEQ ID NO: 954718 - RNA, 22 nt, Human
ggcagcuauuccaagcagcacu

SEQ ID NO: 954719 - RNA, 22 nt, Human
ucccuggcugggggcugccuug

SEQ ID NO: 954720 - RNA, 22 nt, Human
auaaggcacacauagauagggu

SEQ ID NO: 954721 - RNA, 22 nt, Human
cuggcucaauaaauauuagcug

SEQ ID NO: 954722 - RNA, 22 nt, Human
ucugccuguucaagucuucuag

SEQ ID NO: 954723 - RNA, 22 nt, Human
augcuguguccuagugaaagaa

SEQ ID NO: 954724 - RNA, 22 nt, Human
augcugugaaaaagaaggcuga

SEQ ID NO: 954725 - RNA, 22 nt, Human
ugggcuggcccaccacaccucg

SEQ ID NO: 954726 - RNA, 22 nt, Human
uuguaacaaucugucauaaaug

SEQ ID NO: 954727 - RNA, 22 nt, Human
ggggcagaaagcccacagagug

SEQ ID NO: 954728 - RNA, 22 nt, Human
agugcuuucccugaaaccuucc

SEQ ID NO: 954729 - RNA, 22 nt, Human
auaugccauuagcuagaaauaa

SEQ ID NO: 954730 - RNA, 22 nt, Human
uuucacagcuggguggcagagu

SEQ ID NO: 954731 - RNA, 22 nt, Human
cauuuguuggucagauuguagu

SEQ ID NO: 954732 - RNA, 22 nt, Human
ugucucaggggcauugaaauaa

SEQ ID NO: 954733 - RNA, 22 nt, Human
agcuugaguuuuggaugaagug

SEQ ID NO: 954734 - RNA, 22 nt, Human
guuggccugaauggucaagagg

SEQ ID NO: 954735 - RNA, 21 nt, Human
aggucccagguuugggcagca

SEQ ID NO: 954736 - RNA, 23 nt, Human
acagagaucuugacuuguaugga

SEQ ID NO: 954737 - RNA, 22 nt, Human
uucggcuuggguauuucucagg

SEQ ID NO: 954738 - RNA, 22 nt, Human
ugauuuccuagcugacaugaaa

SEQ ID NO: 954739 - RNA, 21 nt, Human
uuagaaagcucacuacaguua

SEQ ID NO: 954740 - RNA, 22 nt, Human
gcugaagagagaugcguccagc

SEQ ID NO: 954741 - RNA, 22 nt, Human
gcagggcaugggcccugucugc

SEQ ID NO: 954742 - RNA, 22 nt, Human
cacaggcuuccaguccccagcu

SEQ ID NO: 954743 - RNA, 22 nt, Human
gccaggagccagcuucuuagca

SEQ ID NO: 954744 - RNA, 22 nt, Human
aucaguuuugggggacauacug

SEQ ID NO: 954745 - RNA, 19 nt, Human
gagcacagcggcauuuggu

SEQ ID NO: 954746 - RNA, 22 nt, Human
cugcuguggaugcaggaccuca

SEQ ID NO: 954747 - RNA, 22 nt, Human
cacugagcugauagaauuccag

SEQ ID NO: 954748 - RNA, 22 nt, Human
acaaaaagggagaugagguaga

SEQ ID NO: 954749 - RNA, 22 nt, Human
cccaugagguggagguugcagu

SEQ ID NO: 954750 - RNA, 22 nt, Human
gccaggugcauggcugagucuc

SEQ ID NO: 954751 - RNA, 22 nt, Human
cucacugcccugaaguuggguu

SEQ ID NO: 954752 - RNA, 22 nt, Human
uggcuuccuggacagaugcggu

SEQ ID NO: 954753 - RNA, 22 nt, Human
gaacagcuucuugggagcuggg

SEQ ID NO: 954754 - RNA, 22 nt, Human
aauguuauuacacuugugaaau

SEQ ID NO: 954755 - RNA, 22 nt, Human
ccaggcugcuuagccuuaucuu

SEQ ID NO: 954756 - RNA, 22 nt, Human
gacaggggucccucugggcugu

SEQ ID NO: 954757 - RNA, 22 nt, Human
agagccuggcucccagcuaccg

SEQ ID NO: 954758 - RNA, 22 nt, Human
gagagcugggaaagccguggag

SEQ ID NO: 954759 - RNA, 22 nt, Human
ucagaggaauaaugcugcauuu

SEQ ID NO: 954760 - RNA, 19 nt, Human
aggugaugugacucuagaa

SEQ ID NO: 954761 - RNA, 22 nt, Human
ugggacagagugagcuuuggcc

SEQ ID NO: 954762 - RNA, 22 nt, Human
cagccugacaccagcuuugggc

SEQ ID NO: 954763 - RNA, 20 nt, Human
ucauccaguugguuuauggu

SEQ ID NO: 954764 - RNA, 22 nt, Human
uuccaugagcucugaguucaca

SEQ ID NO: 954765 - RNA, 22 nt, Human
ggccuggcucuugcccagccug

SEQ ID NO: 954766 - RNA, 22 nt, Human
cacccacauggaaauucacagu

SEQ ID NO: 954767 - RNA, 22 nt, Human
aagaacauguuaaaagauucac

SEQ ID NO: 954768 - RNA, 22 nt, Human
cauuaaauuccuuguucucaaa

SEQ ID NO: 954769 - RNA, 22 nt, Human
uugacaauguccuuugaauuuc

SEQ ID NO: 954770 - RNA, 22 nt, Human
agcuggguggagggcccacggu

SEQ ID NO: 954771 - RNA, 23 nt, Human
cucccuggaguuucuggaagaug

SEQ ID NO: 954772 - RNA, 22 nt, Human
ccacagaaaguugucuagagua

SEQ ID NO: 954773 - RNA, 22 nt, Human
ggcuucuccccuuugagucuuc

SEQ ID NO: 954774 - RNA, 22 nt, Human
uuacuuuguucucaagauaugu

SEQ ID NO: 954775 - RNA, 22 nt, Human
uccagaggcuccaaagggagau

SEQ ID NO: 954776 - RNA, 22 nt, Human
gcagaggcugggugucccaguc

SEQ ID NO: 954777 - RNA, 22 nt, Human
cauuaucucuucuauaugcuag

SEQ ID NO: 954778 - RNA, 22 nt, Human
agaggcccucucucuccugaug

SEQ ID NO: 954779 - RNA, 22 nt, Human
uucucuggaacugaaacaagau

SEQ ID NO: 954780 - RNA, 22 nt, Human
ucacaggauaagguggcaucac

SEQ ID NO: 954781 - RNA, 22 nt, Human
gggcugacucugcacugagcca

SEQ ID NO: 954782 - RNA, 22 nt, Human
gcaccugauugauuucacugcu

SEQ ID NO: 954783 - RNA, 21 nt, Human
ggcacugagccagauggacuc

SEQ ID NO: 954784 - RNA, 22 nt, Human
augucccaagauacagcuagag

SEQ ID NO: 954785 - RNA, 22 nt, Human
gaaaauacuucaguguucuggc

SEQ ID NO: 954786 - RNA, 23 nt, Human
cuguggcugaguccuguuggagu

SEQ ID NO: 954787 - RNA, 22 nt, Human
agacagcugggaaauggagugu

SEQ ID NO: 954788 - RNA, 22 nt, Human
aaauguuucuacuugugagcau

SEQ ID NO: 954789 - RNA, 22 nt, Human
cagcucugugcaggccugggga

SEQ ID NO: 954790 - RNA, 22 nt, Human
guccagggcuaaaucagguucc

SEQ ID NO: 954791 - RNA, 22 nt, Human
aaaguuucaauagaggaagugg

SEQ ID NO: 954792 - RNA, 23 nt, Human
guggccuccccggaaugccucgc

SEQ ID NO: 954793 - RNA, 22 nt, Human
cuuuuauuuugaauuaagggcu

SEQ ID NO: 954794 - RNA, 22 nt, Human
uaacagaagagcaggcagcccu

SEQ ID NO: 954795 - RNA, 22 nt, Human
gugccuuccccgguggucuguu

SEQ ID NO: 954796 - RNA, 22 nt, Human
cagaauggcuuuuauggcucag

SEQ ID NO: 954797 - RNA, 22 nt, Human
ucccuucacagaugcgauguuu

SEQ ID NO: 954798 - RNA, 23 nt, Human
ggcagagagcauggcuggggccc

SEQ ID NO: 954799 - RNA, 22 nt, Human
ggaugggagcagaggacgacca

SEQ ID NO: 954800 - RNA, 22 nt, Human
cugggcaggagggcucuaugga

SEQ ID NO: 954801 - RNA, 22 nt, Human
aucccaugagaccacguuggcu

SEQ ID NO: 954802 - RNA, 22 nt, Human
guuuuucuaggaccaugugauu

SEQ ID NO: 954803 - RNA, 22 nt, Human
caauaagugcuuuuguuuagca

SEQ ID NO: 954804 - RNA, 22 nt, Human
cagcaggcugcgauugcucauu

SEQ ID NO: 954805 - RNA, 22 nt, Human
gcuuccaaaucuguucaaaaug

SEQ ID NO: 954806 - RNA, 22 nt, Human
auuauauaggacuugcccuucc

SEQ ID NO: 954807 - RNA, 22 nt, Human
aucacugucgucaucugagauu

SEQ ID NO: 954808 - RNA, 22 nt, Human
acagggaaguucugcaacagga

SEQ ID NO: 954809 - RNA, 22 nt, Human
agcauaaguugguacagccacu

SEQ ID NO: 954810 - RNA, 22 nt, Human
gggagggauuaguucugccugg

SEQ ID NO: 954811 - RNA, 22 nt, Human
ucccagccauuccuuuaggugu

SEQ ID NO: 954812 - RNA, 22 nt, Human
uggagcaggugccaggugugug

SEQ ID NO: 954813 - RNA, 23 nt, Human
gaggcagcuccugcagugcccug

SEQ ID NO: 954814 - RNA, 22 nt, Human
agucccagaucuacaggaggga

SEQ ID NO: 954815 - RNA, 22 nt, Human
aaagcagcagcaccugcauuuc

SEQ ID NO: 954816 - RNA, 23 nt, Human
ucagucuucccugucaguaauag

SEQ ID NO: 954817 - RNA, 22 nt, Human
agagcuguuuggacaucugagu

SEQ ID NO: 954818 - RNA, 22 nt, Human
uaguacuuaucucugucauugu

SEQ ID NO: 954819 - RNA, 22 nt, Human
aggagcagcuucugaaccaugu

SEQ ID NO: 954820 - RNA, 22 nt, Human
agggcagaaauauugauacugu

SEQ ID NO: 954821 - RNA, 22 nt, Human
auuguuuuauuaaaugagcccu

SEQ ID NO: 954822 - RNA, 22 nt, Human
gagggaaagguuaauacaugau

SEQ ID NO: 954823 - RNA, 22 nt, Human
auacaucucauguaagagauaa

SEQ ID NO: 954824 - RNA, 22 nt, Human
uggcuccuaggauggugccugg

SEQ ID NO: 954825 - RNA, 21 nt, Human
uaaaugugagcagggcugggc

SEQ ID NO: 954826 - RNA, 22 nt, Human
gggagagagaaaacguggcgca

SEQ ID NO: 954827 - RNA, 22 nt, Human
ggcucaagcagucugccugccu

SEQ ID NO: 954828 - RNA, 22 nt, Human
cagcugaguguuggcauguuca

SEQ ID NO: 954829 - RNA, 20 nt, Human
ccugaggguuuguguucuuu

SEQ ID NO: 954830 - RNA, 22 nt, Human
auggccaagaaguauuccugac

SEQ ID NO: 954831 - RNA, 22 nt, Human
uagugaaauuuaugcacagcua

SEQ ID NO: 954832 - RNA, 22 nt, Human
ccucuccuugcacccgucccgc

SEQ ID NO: 954833 - RNA, 22 nt, Human
agggacagucuacuguucacug

SEQ ID NO: 954834 - RNA, 22 nt, Human
gcugucacucuccggccuuccc

SEQ ID NO: 954835 - RNA, 22 nt, Human
agggccuggcuucacuuucuca

SEQ ID NO: 954836 - RNA, 22 nt, Human
aggcacugugcagucccaagca

SEQ ID NO: 954837 - RNA, 18 nt, Human
aggcagacacuagagguc

SEQ ID NO: 954838 - RNA, 23 nt, Human
ucagagagcuguugagagcugcc

SEQ ID NO: 954839 - RNA, 22 nt, Human
ucuacagacagagcagguggga

SEQ ID NO: 954840 - RNA, 22 nt, Human
uuucucuguucucuaacuguaa

SEQ ID NO: 954841 - RNA, 22 nt, Human
caugagauaauuuuucuccagu

SEQ ID NO: 954842 - RNA, 22 nt, Human
auccagucaaaauuaguaaggu

SEQ ID NO: 954843 - RNA, 22 nt, Human
gagagcugcauucucagacaca

SEQ ID NO: 954844 - RNA, 22 nt, Human
uaaggcagaaauaugagcaggg

SEQ ID NO: 954845 - RNA, 23 nt, Human
uggcucugugucacauacaggau

SEQ ID NO: 954846 - RNA, 22 nt, Human
cucugcugggauguaaagucuu

SEQ ID NO: 954847 - RNA, 22 nt, Human
uuuauuaugauggacaccuucg

SEQ ID NO: 954848 - RNA, 22 nt, Human
ccaggccucuggcugcuuaguc

SEQ ID NO: 954849 - RNA, 22 nt, Human
gcugagagcaguguggccuuaa

SEQ ID NO: 954850 - RNA, 22 nt, Human
ugcaaucucggcacuuugggag

SEQ ID NO: 954851 - RNA, 22 nt, Human
ucaccaggcuggaaugcagugg

SEQ ID NO: 954852 - RNA, 22 nt, Human
cacugggcaauucugagccuaa

SEQ ID NO: 954853 - RNA, 23 nt, Human
ugcagagggacugaagccagcuu

SEQ ID NO: 954854 - RNA, 22 nt, Human
aaguaacaaugcuguugaauug

SEQ ID NO: 954855 - RNA, 22 nt, Human
gagcagcugcagugcagacccu

SEQ ID NO: 954856 - RNA, 22 nt, Human
aggugaguugguaggaaguuug

SEQ ID NO: 954857 - RNA, 22 nt, Human
ugcauauuuguaugauguuuag

SEQ ID NO: 954858 - RNA, 22 nt, Human
cuggcagcauuaacagagagca

SEQ ID NO: 954859 - RNA, 22 nt, Human
uccucaggaucuaggagugcuu

SEQ ID NO: 954860 - RNA, 22 nt, Human
ugacauaaaucuaaaggaaagg

SEQ ID NO: 954861 - RNA, 22 nt, Human
gucucagggacugcuucugggg

SEQ ID NO: 954862 - RNA, 22 nt, Human
gccuaggaguacagaaugguuu

SEQ ID NO: 954863 - RNA, 22 nt, Human
uccagugcuggaccagagcacc

SEQ ID NO: 954864 - RNA, 22 nt, Human
ugcccacauggugccauggcca

SEQ ID NO: 954865 - RNA, 22 nt, Human
guaaauaacugguaauuggggu

SEQ ID NO: 954866 - RNA, 22 nt, Human
gcucucugaggugcuggcagag

SEQ ID NO: 954867 - RNA, 23 nt, Human
agaauuguaaauagaauauaccu

SEQ ID NO: 954868 - RNA, 22 nt, Human
cagaguguggcaucuuccaacu

SEQ ID NO: 954869 - RNA, 22 nt, Human
cccccagccagcagugcucagc

SEQ ID NO: 954870 - RNA, 22 nt, Human
caggugcucccagagaagugcu

SEQ ID NO: 954871 - RNA, 22 nt, Human
cuggccaagcacuggggucaaa

SEQ ID NO: 954872 - RNA, 17 nt, Human
uccuggcucugccacug

SEQ ID NO: 954873 - RNA, 22 nt, Human
cuggcagccaagugggauacuc

SEQ ID NO: 954874 - RNA, 22 nt, Human
ggcaggguggcccuccagugag

SEQ ID NO: 954875 - RNA, 22 nt, Human
auucaaguggcugcuauguuaa

SEQ ID NO: 954876 - RNA, 22 nt, Human
cagggugccaaagaacaaauau

SEQ ID NO: 954877 - RNA, 21 nt, Human
uccacaaguuagaaggaaauu

SEQ ID NO: 954878 - RNA, 22 nt, Human
ggcucagguuuccuucccagcu

SEQ ID NO: 954879 - RNA, 22 nt, Human
uagggcagccuuauagcuccca

SEQ ID NO: 954880 - RNA, 22 nt, Human
cugugucuucaauguacuggga

SEQ ID NO: 954881 - RNA, 22 nt, Human
aagggcagaaagggacgcuuug

SEQ ID NO: 954882 - RNA, 22 nt, Human
ggugaagggugucauggcauuu

SEQ ID NO: 954883 - RNA, 22 nt, Human
ggccucugccccagccacaccu

SEQ ID NO: 954884 - RNA, 22 nt, Human
gccugagauucugcauuucuaa

SEQ ID NO: 954885 - RNA, 21 nt, Human
ggcagaaguagcauggacggg

SEQ ID NO: 954886 - RNA, 22 nt, Human
gcaguggcuaagcucgcaugca

SEQ ID NO: 954887 - RNA, 22 nt, Human
aggccaaagugcuccuuuuaga

SEQ ID NO: 954888 - RNA, 22 nt, Human
ccucaggauccgcaggugcagu

SEQ ID NO: 954889 - RNA, 22 nt, Human
ugggcugcugagaaugagagag

SEQ ID NO: 954890 - RNA, 22 nt, Human
uccagggacacagaguccuucu

SEQ ID NO: 954891 - RNA, 22 nt, Human
cgccaggcuugguagcucaugc

SEQ ID NO: 954892 - RNA, 22 nt, Human
uuuccauauuuggucuuuggga

SEQ ID NO: 954893 - RNA, 22 nt, Human
uaaugucaaggugauagauuug

SEQ ID NO: 954894 - RNA, 22 nt, Human
uggcccuguggaggucagugag

SEQ ID NO: 954895 - RNA, 22 nt, Human
agcaccuguugcacuucauaau

SEQ ID NO: 954896 - RNA, 22 nt, Human
aaggaaccuggaguagagggag

SEQ ID NO: 954897 - RNA, 22 nt, Human
augguuuguaacccaauacucc

SEQ ID NO: 954898 - RNA, 22 nt, Human
agcagagcugcaguggccugcu

SEQ ID NO: 954899 - RNA, 22 nt, Human
cauuuagacauuugauuugggg

SEQ ID NO: 954900 - RNA, 22 nt, Human
gcagugguggagcuuacauauc

SEQ ID NO: 954901 - RNA, 22 nt, Human
ucugaaaugcaaauuugacuga

SEQ ID NO: 954902 - RNA, 22 nt, Human
uuugaacuucuccauucugaug

SEQ ID NO: 954903 - RNA, 22 nt, Human
gagaagccgagucagcugagcc

SEQ ID NO: 954904 - RNA, 22 nt, Human
gagacagugguugcagaagcuc

SEQ ID NO: 954905 - RNA, 22 nt, Human
ggagcugucuguagggcacagg

SEQ ID NO: 954906 - RNA, 22 nt, Human
aacagaaaagguagguggcuuu

SEQ ID NO: 954907 - RNA, 22 nt, Human
acagguggggaggcugagguuc

SEQ ID NO: 954908 - RNA, 22 nt, Human
gcugucagugaggugagacaug

SEQ ID NO: 954909 - RNA, 22 nt, Human
gggcucuggauggagccugcag

SEQ ID NO: 954910 - RNA, 22 nt, Human
cucccagggccaucgagucacu

SEQ ID NO: 954911 - RNA, 22 nt, Human
gcccugagggguggugucugua

SEQ ID NO: 954912 - RNA, 22 nt, Human
ggccuggccuccagaugugggc

SEQ ID NO: 954913 - RNA, 22 nt, Human
cacugcucgcugcagcauggcc

SEQ ID NO: 954914 - RNA, 23 nt, Human
gugugccaagcacugugccagga

SEQ ID NO: 954915 - RNA, 22 nt, Human
agguggcuccucccauggcugg

SEQ ID NO: 954916 - RNA, 22 nt, Human
cccaggcugaugggaugggcca

SEQ ID NO: 954917 - RNA, 22 nt, Human
cccagggaagccauuucugacu

SEQ ID NO: 954918 - RNA, 22 nt, Human
ugggcugcugcggugcucuugg

SEQ ID NO: 954919 - RNA, 22 nt, Human
acacuuuuguguauauccaguu

SEQ ID NO: 954920 - RNA, 22 nt, Human
uacuuuuuagcacagugugugc

SEQ ID NO: 954921 - RNA, 22 nt, Human
uaaggccaggcuguggucggca

SEQ ID NO: 954922 - RNA, 22 nt, Human
uugcuuuguuacugcaguuucc

SEQ ID NO: 954923 - RNA, 22 nt, Human
agcccagguucuaaagccaaac

SEQ ID NO: 954924 - RNA, 22 nt, Human
ucugggaaaugcuguuccuugu

SEQ ID NO: 954925 - RNA, 22 nt, Human
aaacccugcccuucccaagaug

SEQ ID NO: 954926 - RNA, 20 nt, Human
aagcaauauagugcaaaugu

SEQ ID NO: 954927 - RNA, 22 nt, Human
uuuuuauaacucuuuugugaca

SEQ ID NO: 954928 - RNA, 22 nt, Human
aagcagggugucuugacccaug

SEQ ID NO: 954929 - RNA, 22 nt, Human
aauuuagauugauaaacaugga

SEQ ID NO: 954930 - RNA, 22 nt, Human
auauauaaccuggauaaggcuu

SEQ ID NO: 954931 - RNA, 22 nt, Human
ccagcuccgggaguugcugcug

SEQ ID NO: 954932 - RNA, 22 nt, Human
auucuuuuuuaaggaauagaac

SEQ ID NO: 954933 - RNA, 22 nt, Human
ggucucagcccucgccagcagc

SEQ ID NO: 954934 - RNA, 23 nt, Human
cccuguagcccaggacaggcuuu

SEQ ID NO: 954935 - RNA, 22 nt, Human
uccauuuuucaugacuccucaa

SEQ ID NO: 954936 - RNA, 22 nt, Human
ucuggccaggauggcaagacca

SEQ ID NO: 954937 - RNA, 22 nt, Human
ggccuucacgugaccuggcgug

SEQ ID NO: 954938 - RNA, 22 nt, Human
uccagccaacugccuagggagc

SEQ ID NO: 954939 - RNA, 22 nt, Human
gcacugcagccucagauggugg

SEQ ID NO: 954940 - RNA, 22 nt, Human
cuucacaaucaccuuuucggaa

SEQ ID NO: 954941 - RNA, 23 nt, Human
ucuggcucuaugugacagcucuc

SEQ ID NO: 954942 - RNA, 22 nt, Human
cuggcuccuccaaggccuggag

SEQ ID NO: 954943 - RNA, 22 nt, Human
ugagaacugaggauuugaauuc

SEQ ID NO: 954944 - RNA, 22 nt, Human
ccuguucacgguguguuguuag

SEQ ID NO: 954945 - RNA, 22 nt, Human
uuauauacugugguaguacugu

SEQ ID NO: 954946 - RNA, 22 nt, Human
cuauugaaaguguacaauucaa

SEQ ID NO: 954947 - RNA, 22 nt, Human
ggcaggaggugaguggcgggug

SEQ ID NO: 954948 - RNA, 22 nt, Human
aagauuucagaguuugggggaa

SEQ ID NO: 954949 - RNA, 22 nt, Human
uacaguaaccuuauuugucauu

SEQ ID NO: 954950 - RNA, 22 nt, Human
aggucagcaggccaggggcgaa

SEQ ID NO: 954951 - RNA, 22 nt, Human
agagcugugcuuugcaccacgu

SEQ ID NO: 954952 - RNA, 22 nt, Human
ccugggaguggcacucacagca

SEQ ID NO: 954953 - RNA, 22 nt, Human
ccaaagugcugagauuacaggu

SEQ ID NO: 954954 - RNA, 22 nt, Human
gagccagccgcaagagcuguga

SEQ ID NO: 954955 - RNA, 22 nt, Human
aggcacugaagaacucuuuuug

SEQ ID NO: 954956 - RNA, 22 nt, Human
ucucaggggauucacuggcacc

SEQ ID NO: 954957 - RNA, 22 nt, Human
aucugguuuggggauccuugug

SEQ ID NO: 954958 - RNA, 22 nt, Human
aacauaaauuugaaguggcaaa

SEQ ID NO: 954959 - RNA, 22 nt, Human
agcagcauuaugauauaucuua

SEQ ID NO: 954960 - RNA, 19 nt, Human
ucaggacugacuugaaguc

SEQ ID NO: 954961 - RNA, 22 nt, Human
acaggugguaaaauggacuguc

SEQ ID NO: 954962 - RNA, 22 nt, Human
auggccaagaucacagacuuca

SEQ ID NO: 954963 - RNA, 22 nt, Human
ggcuucucucuucacauggcuu

SEQ ID NO: 954964 - RNA, 22 nt, Human
uagcugugagcacccaggcugu

SEQ ID NO: 954965 - RNA, 22 nt, Human
cagagcugcacauucuaugaug

SEQ ID NO: 954966 - RNA, 22 nt, Human
ugcauauuauguguaucugucu

SEQ ID NO: 954967 - RNA, 22 nt, Human
auggacagugugucuguuucca

SEQ ID NO: 954968 - RNA, 22 nt, Human
agagccaggcggcugggcaccu

SEQ ID NO: 954969 - RNA, 22 nt, Human
gucccugcaucaccacgggacu

SEQ ID NO: 954970 - RNA, 17 nt, Human
gcuuccucaugcaguuc

SEQ ID NO: 954971 - RNA, 22 nt, Human
cagauggcauuuccuuucuggc

SEQ ID NO: 954972 - RNA, 22 nt, Human
uacaaagucaccagcuucuugc

SEQ ID NO: 954973 - RNA, 22 nt, Human
ucaggaggccaccaggaccugu

SEQ ID NO: 954974 - RNA, 22 nt, Human
accugccuauggagccacaugg

SEQ ID NO: 954975 - RNA, 22 nt, Human
ucuggccacuaauaggucucac

SEQ ID NO: 954976 - RNA, 20 nt, Human
ugcagaagaacguucugguu

SEQ ID NO: 954977 - RNA, 22 nt, Human
guaauaaugguccccaaacacu

SEQ ID NO: 954978 - RNA, 22 nt, Human
ucucccacuggccuuguaugau

SEQ ID NO: 954979 - RNA, 22 nt, Human
acccuuucuuacucacacgcuc

SEQ ID NO: 954980 - RNA, 22 nt, Human
guggcuucugcggugugcgcag

SEQ ID NO: 954981 - RNA, 22 nt, Human
acuguggggggcuuugcucagu

SEQ ID NO: 954982 - RNA, 22 nt, Human
cagcuugcaguacuuguuuuug

SEQ ID NO: 954983 - RNA, 22 nt, Human
ugcagcagacugaguaugagaa

SEQ ID NO: 954984 - RNA, 22 nt, Human
ccuggcugugcauugccggccc

SEQ ID NO: 954985 - RNA, 22 nt, Human
cucugagcugaaacaugagcau

SEQ ID NO: 954986 - RNA, 22 nt, Human
agggaaagguagugaggucaca

SEQ ID NO: 954987 - RNA, 22 nt, Human
uuuaggaugcucuauucugacu

SEQ ID NO: 954988 - RNA, 22 nt, Human
ccuugcguuuuacagcuucuag

SEQ ID NO: 954989 - RNA, 22 nt, Human
cuccaguaucuguaggaaaagg

SEQ ID NO: 954990 - RNA, 22 nt, Human
aggcacugaccugcuuccuuga

SEQ ID NO: 954991 - RNA, 22 nt, Human
caugugguucaaguacuccaca

SEQ ID NO: 954992 - RNA, 22 nt, Human
uguaggauguaaggcaggcauc

SEQ ID NO: 954993 - RNA, 22 nt, Human
gccugccucaaaaucccaguuc

SEQ ID NO: 954994 - RNA, 18 nt, Human
gcuccuggagucugacuc

SEQ ID NO: 954995 - RNA, 19 nt, Human
ucauucaggaccaguggau

SEQ ID NO: 954996 - RNA, 23 nt, Human
ugcucccaggugacgcugcuguu

SEQ ID NO: 954997 - RNA, 18 nt, Human
ggagccagucugucucug

SEQ ID NO: 954998 - RNA, 19 nt, Human
gauuucuacaaaugucaga

SEQ ID NO: 954999 - RNA, 22 nt, Human
aaacuguaaacacagcaguaca

SEQ ID NO: 955000 - RNA, 22 nt, Human
acucucucacagcuuggcugau

SEQ ID NO: 955001 - RNA, 20 nt, Human
caaugcacacagcugcuucu

SEQ ID NO: 955002 - RNA, 22 nt, Human
gugucccaggagaggagacaau

SEQ ID NO: 955003 - RNA, 22 nt, Human
cuuccaaagcacuuuauggacc

SEQ ID NO: 955004 - RNA, 22 nt, Human
ugagccaguggaagauggcagu

SEQ ID NO: 955005 - RNA, 22 nt, Human
gggagucugggcuagacuccuu

SEQ ID NO: 955006 - RNA, 22 nt, Human
aggcucugaaggagaaccuguu

SEQ ID NO: 955007 - RNA, 22 nt, Human
ucucaggacuuugggaagcuca

SEQ ID NO: 955008 - RNA, 21 nt, Human
gcugcccaacccugcaucucc

SEQ ID NO: 955009 - RNA, 22 nt, Human
aucuuucaaucaggaaaaaucu

SEQ ID NO: 955010 - RNA, 22 nt, Human
uccaugugccaaggggcagagg

SEQ ID NO: 955011 - RNA, 22 nt, Human
cagcuucccuuggcugagcaga

SEQ ID NO: 955012 - RNA, 22 nt, Human
cagggccauaucuugugcacca

SEQ ID NO: 955013 - RNA, 22 nt, Human
ccugccuggcugucagcagagc

SEQ ID NO: 955014 - RNA, 22 nt, Human
agucucagccacacagaccuau

SEQ ID NO: 955015 - RNA, 22 nt, Human
uucacauuugcccuuaugugug

SEQ ID NO: 955016 - RNA, 22 nt, Human
uuuccucuaaacgcauuugcuu

SEQ ID NO: 955017 - RNA, 21 nt, Human
uucaaaaugguguguuugucu

SEQ ID NO: 955018 - RNA, 22 nt, Human
ugccugggccucugaggaaggc

SEQ ID NO: 955019 - RNA, 22 nt, Human
ucacaggguguacaucaccuau

SEQ ID NO: 955020 - RNA, 22 nt, Human
cugugaggcccugggugcugga

SEQ ID NO: 955021 - RNA, 22 nt, Human
gcccaggcuggagugcaguagc

SEQ ID NO: 955022 - RNA, 22 nt, Human
agcuggcacagaccaggagauc

SEQ ID NO: 955023 - RNA, 22 nt, Human
aggugcagcaugaguccaacgg

SEQ ID NO: 955024 - RNA, 22 nt, Human
gaacagaauuaccgaagaucug

SEQ ID NO: 955025 - RNA, 22 nt, Human
guacauuggcaacucucuuaga

SEQ ID NO: 955026 - RNA, 22 nt, Human
uguauagaguuggaagaugacu

SEQ ID NO: 955027 - RNA, 21 nt, Human
auacacauacacauaaaugug

SEQ ID NO: 955028 - RNA, 21 nt, Human
ucuuccuccacagcgugccac

SEQ ID NO: 955029 - RNA, 21 nt, Human
ggcccugguuacgccuccucu

SEQ ID NO: 955030 - RNA, 22 nt, Human
auagauacauuagguaacuugu

SEQ ID NO: 955031 - RNA, 22 nt, Human
uccaggccacugcagaggcucu

SEQ ID NO: 955032 - RNA, 22 nt, Human
ucugcugcacaaauucaucucu

SEQ ID NO: 955033 - RNA, 22 nt, Human
ggccugcucuggcuguggucag

SEQ ID NO: 955034 - RNA, 22 nt, Human
cugcugugagcacuccagccug

SEQ ID NO: 955035 - RNA, 22 nt, Human
aaagaacaaaugauauaugguu

SEQ ID NO: 955036 - RNA, 22 nt, Human
ugaagcagagaauuugacaguc

SEQ ID NO: 955037 - RNA, 22 nt, Human
ucccagaguuuccuguguccca

SEQ ID NO: 955038 - RNA, 22 nt, Human
ucugaaaucuguaagcacuagc

SEQ ID NO: 955039 - RNA, 22 nt, Human
acucugcuaucuuagcaaaagg

SEQ ID NO: 955040 - RNA, 22 nt, Human
gaaaugcaggcuuggauucagc

SEQ ID NO: 955041 - RNA, 22 nt, Human
gugcagugagcagugcagcacc

SEQ ID NO: 955042 - RNA, 22 nt, Human
ugcaggugguuuggacacugcu

SEQ ID NO: 955043 - RNA, 18 nt, Human
acccucuggcuucugagc

SEQ ID NO: 955044 - RNA, 22 nt, Human
cuggccuagcucucugcuugaa

SEQ ID NO: 955045 - RNA, 22 nt, Human
aauaugaauuauuguuacaagu

SEQ ID NO: 955046 - RNA, 22 nt, Human
gccucccuguucuuccacaaua

SEQ ID NO: 955047 - RNA, 22 nt, Human
aaugaaauguagcuuauccaua

SEQ ID NO: 955048 - RNA, 19 nt, Human
caggaugaucccaugacac

SEQ ID NO: 955049 - RNA, 22 nt, Human
ugcagaagauggucugagcacc

SEQ ID NO: 955050 - RNA, 22 nt, Human
aguuucaauucuuuucacaaag

SEQ ID NO: 955051 - RNA, 22 nt, Human
aggugcuggagucugggcagga

SEQ ID NO: 955052 - RNA, 18 nt, Human
cuucagugacagucuggc

SEQ ID NO: 955053 - RNA, 22 nt, Human
guccuggcuuaguucgcuguaa

SEQ ID NO: 955054 - RNA, 22 nt, Human
caagauggagaagcagcaaggg

SEQ ID NO: 955055 - RNA, 22 nt, Human
ugcuguggcaguuuauguauag

SEQ ID NO: 955056 - RNA, 22 nt, Human
aggcuagcaaugggagaugagu

SEQ ID NO: 955057 - RNA, 22 nt, Human
gggcugcacagaucuucaaggg

SEQ ID NO: 955058 - RNA, 22 nt, Human
cagcugugaauugucuuaucua

SEQ ID NO: 955059 - RNA, 21 nt, Human
gauugaaaccauggcagugag

SEQ ID NO: 955060 - RNA, 17 nt, Human
aauagcugcucagagag

SEQ ID NO: 955061 - RNA, 23 nt, Human
caguggagacucaugcuuccuua

SEQ ID NO: 955062 - RNA, 22 nt, Human
agaggccagguccagaguuugu

SEQ ID NO: 955063 - RNA, 22 nt, Human
gccuggagugguccugcugccc

SEQ ID NO: 955064 - RNA, 22 nt, Human
uuucaguuuaugucuugaauua

SEQ ID NO: 955065 - RNA, 22 nt, Human
gagggcagaaaauuaugcggug

SEQ ID NO: 955066 - RNA, 22 nt, Human
uuggccaaauacacaccuuuug

SEQ ID NO: 955067 - RNA, 22 nt, Human
acugucugcaaaacucauacuc

SEQ ID NO: 955068 - RNA, 22 nt, Human
guuauaaaggugauaaugguca

SEQ ID NO: 955069 - RNA, 22 nt, Human
uugauagguuuuauguauaguu

SEQ ID NO: 955070 - RNA, 22 nt, Influenza A virus
acaggcauucaaaugggacugu

SEQ ID NO: 955071 - RNA, 22 nt, Influenza A virus
uccuggaagagaaggcaauggu

SEQ ID NO: 955072 - RNA, 22 nt, Human
auuauuagauucuuaauuguaa

SEQ ID NO: 955073 - RNA, 22 nt, Human
aaagauaugucuccaaagagau

SEQ ID NO: 955074 - RNA, 22 nt, Human
agucugcuuccuggagaacuca

SEQ ID NO: 955075 - RNA, 22 nt, Human
cuggccaagcuucucuaagcag

SEQ ID NO: 955076 - RNA, 22 nt, Human
cugaaaugguugccuggagaau

SEQ ID NO: 955077 - RNA, 22 nt, Human
aaguaugugauacauguuaauu

SEQ ID NO: 955078 - RNA, 22 nt, Human
ucuccuggguaaaaggguugau

SEQ ID NO: 955079 - RNA, 22 nt, Human
auguuguagcauaugaaauaua

SEQ ID NO: 955080 - RNA, 22 nt, Human
aaaugauggaaaugaggcugaa

SEQ ID NO: 955081 - RNA, 22 nt, Human
uuauuugguugcugacuuggaa

SEQ ID NO: 955082 - RNA, 22 nt, Human
aauguuauuacacuugugaaau

SEQ ID NO: 955083 - RNA, 22 nt, Human
uauuggaugauucacuuggcag

SEQ ID NO: 955084 - RNA, 22 nt, Human
auucacaauagcagcuugcaug

SEQ ID NO: 955085 - RNA, 22 nt, Human
auucacaaauaacaggugcaga

SEQ ID NO: 955086 - RNA, 22 nt, Human
gacacuaaaguauaggguaucu

SEQ ID NO: 955087 - RNA, 22 nt, Human
aaagcagcagcaccugcauuuc

SEQ ID NO: 955088 - RNA, 22 nt, Human
aaauaggagcuuaagcacuucu

SEQ ID NO: 955089 - RNA, 22 nt, Human
ucucugcuaagauugugucuag

SEQ ID NO: 955090 - RNA, 22 nt, Human
ucugagccuauuucaaauuccu

SEQ ID NO: 955091 - RNA, 22 nt, Human
auuauaaagaacaugugugugg

SEQ ID NO: 955092 - RNA, 22 nt, Human
auauuagggucucuaaauucua

SEQ ID NO: 955093 - RNA, 22 nt, Human
guuuaauaauguugaauuacua

SEQ ID NO: 955094 - RNA, 22 nt, Human
acucugcucccuaagccaugau

SEQ ID NO: 955095 - RNA, 22 nt, Human
uggcacaugguaagugcuuaac

SEQ ID NO: 955096 - RNA, 22 nt, Human
uauuaggguaaauuugacaugc

SEQ ID NO: 955097 - RNA, 22 nt, Human
uugauaaaaugaugaaaucacu

SEQ ID NO: 955098 - RNA, 22 nt, Human
acauagaaccuggcacauagua

SEQ ID NO: 955099 - RNA, 22 nt, Human
uucaacuagauuuauacaauuc

SEQ ID NO: 955100 - RNA, 21 nt, Human
ucuccuggguccaacccaugc

SEQ ID NO: 955101 - RNA, 22 nt, Human
uuauuuggguuugaguguggca

SEQ ID NO: 955102 - RNA, 22 nt, Human
cugggccaagaaguuguguaug

SEQ ID NO: 955103 - RNA, 23 nt, Human
auagucauguaaaauauuugaag

SEQ ID NO: 955104 - RNA, 22 nt, Human
ucacucuguggcccaggcagug

SEQ ID NO: 955105 - RNA, 22 nt, Human
auaauguguucaucuuacaauu

SEQ ID NO: 955106 - RNA, 22 nt, Human
cauucacaucuuguuccaucac

SEQ ID NO: 955107 - RNA, 22 nt, Human
ucuggccaggggucccugaagg

SEQ ID NO: 955108 - RNA, 22 nt, Human
cuacucugaauugaagugauau

SEQ ID NO: 955109 - RNA, 22 nt, Human
uauuagguaugaacuggcaacc

SEQ ID NO: 955110 - RNA, 22 nt, Human
aaugauguauguauaaggcagg

SEQ ID NO: 955111 - RNA, 22 nt, Human
gaaaaguacacagcccaaacau

SEQ ID NO: 955112 - RNA, 22 nt, Human
ucacucugguccauccgagagc

SEQ ID NO: 955113 - RNA, 22 nt, Human
cugagccaugagccugcgccca

SEQ ID NO: 955114 - RNA, 22 nt, Human
acuccugggugcauuucugauu

SEQ ID NO: 955115 - RNA, 22 nt, Human
auauuaggcaaggagauuauuu

SEQ ID NO: 955116 - RNA, 22 nt, Human
ggcagcauuuagagcacagugu

SEQ ID NO: 955117 - RNA, 22 nt, Human
cucuggccugcagauccaugcu

SEQ ID NO: 955118 - RNA, 22 nt, Human
aaauaguuacuucugcugucuu

SEQ ID NO: 955119 - RNA, 22 nt, Human
gcucugcuuucuggggggaucc

SEQ ID NO: 955120 - RNA, 22 nt, Human
cuuauuagugucugucugaguu

SEQ ID NO: 955121 - RNA, 22 nt, Human
aaaucaguaaauguucauuaac

SEQ ID NO: 955122 - RNA, 22 nt, Human
gaccuuuuuacuguguacgcug

SEQ ID NO: 955123 - RNA, 22 nt, Human
cacucugcgcugggcgccagcg

SEQ ID NO: 955124 - RNA, 22 nt, Human
cuuauuagaaagaaaagacaug

SEQ ID NO: 955125 - RNA, 22 nt, Human
uguuuauuacaguucuuggaau

SEQ ID NO: 955126 - RNA, 22 nt, Human
uaggcaauauuagacuuugucu

SEQ ID NO: 955127 - RNA, 22 nt, Human
uuuaguagaugcagcauuauuu

SEQ ID NO: 955128 - RNA, 21 nt, Human
auuguuaucauugugcugugu

SEQ ID NO: 955129 - RNA, 22 nt, Human
gaagccuugaacugcaaacccc

SEQ ID NO: 955130 - RNA, 22 nt, Human
cuccuggaagcccgcccugcug

SEQ ID NO: 955131 - RNA, 22 nt, Human
ucuccuggagcaggaagguggg

SEQ ID NO: 955132 - RNA, 22 nt, Human
aagaguaugcaugcauguuugu

SEQ ID NO: 955133 - RNA, 22 nt, Human
ucuucaaaaaauauccaucagu

SEQ ID NO: 955134 - RNA, 20 nt, Human
uuggcagcaguuccaaguga

SEQ ID NO: 955135 - RNA, 22 nt, Human
ccuccugggacucauuagcacc

SEQ ID NO: 955136 - RNA, 19 nt, Human
caugcugaccugcuguggu

SEQ ID NO: 955137 - RNA, 22 nt, Human
acucuggcccuccugcugccag

SEQ ID NO: 955138 - RNA, 22 nt, Human
cagcaggguagguuguaucagu

SEQ ID NO: 955139 - RNA, 22 nt, Human
ccuggccagcagccccuuccuc

SEQ ID NO: 955140 - RNA, 22 nt, Human
acuggccaugaacuugggaucu

SEQ ID NO: 955141 - RNA, 22 nt, Human
acucucugguauuggcaaguuu

SEQ ID NO: 955142 - RNA, 22 nt, Human
ucuccuggcaugugggucaucu

SEQ ID NO: 955143 - RNA, 22 nt, Human
aagucauugguagcuugauagg

SEQ ID NO: 955144 - RNA, 22 nt, Human
ucugaagccuuuguacaggccu

SEQ ID NO: 955145 - RNA, 22 nt, Human
uuguuacuaagccuuuaaauag

SEQ ID NO: 955146 - RNA, 22 nt, Human
agagucuuuugucaguaauguu

SEQ ID NO: 955147 - RNA, 18 nt, Human
augugcaauuuuguauuu

SEQ ID NO: 955148 - RNA, 22 nt, Human
ugaagggggagauauaugugug

SEQ ID NO: 955149 - RNA, 19 nt, Human
ucucugcuucucuuggcau

SEQ ID NO: 955150 - RNA, 22 nt, Human
auuauuagugauguuguuacug

SEQ ID NO: 955151 - RNA, 22 nt, Human
cugaaaugacgguuuggggcaa

SEQ ID NO: 955152 - RNA, 18 nt, Human
gcacucugacugcagagc

SEQ ID NO: 955153 - RNA, 22 nt, Human
cugccuggguucaaguccuguu

SEQ ID NO: 955154 - RNA, 22 nt, Human
caaaaguaauugugguuuuugc

SEQ ID NO: 955155 - RNA, 21 nt, Human
gacucugcaccaaauuaagcc

SEQ ID NO: 955156 - RNA, 21 nt, Human
uggccaaacuggagcauuuga

SEQ ID NO: 955157 - RNA, 22 nt, Human
acucugcuaucuuagcaaaagg

SEQ ID NO: 955158 - RNA, 22 nt, Human
gaaacacaugcagcuccauaga

SEQ ID NO: 955159 - RNA, 21 nt, Human
uuugaauagaaauagugcuua

SEQ ID NO: 955160 - RNA, 22 nt, Human
aaaaaguauuggccaugguuga

SEQ ID NO: 955161 - RNA, 18 nt, Human
uuuaugagcugugggacc

SEQ ID NO: 955162 - RNA, 22 nt, Human
auuggucaggacuggcaugugg

SEQ ID NO: 955163 - RNA, 22 nt, Human
ccugggcaggccggacgcuggg

SEQ ID NO: 955164 - RNA, 22 nt, Human
guucacaagaguuacagacaga

SEQ ID NO: 955165 - RNA, 22 nt, Human
uggcagcaccagcaguguccuu

SEQ ID NO: 955166 - RNA, 19 nt, Human
agucugcauuucuagcaag

SEQ ID NO: 955167 - RNA, 22 nt, Human
uuauuagggugguuuauguucu

SEQ ID NO: 955168 - RNA, 22 nt, Human
uccugagcugccgcaucagcag

SEQ ID NO: 955169 - RNA, 22 nt, Human
aacagacauauuuuuaauaugc

SEQ ID NO: 955170 - RNA, 22 nt, Human
ccucugcucccuggugucugag

SEQ ID NO: 955171 - RNA, 22 nt, Human
agcaugcgcuugaucagcucca

SEQ ID NO: 955172 - RNA, 22 nt, Human
aguuuaaaucauguuuuguaac

SEQ ID NO: 955173 - RNA, 22 nt, Human
auuaaggaauguaggcaagaag

SEQ ID NO: 955174 - RNA, 22 nt, Human
guacauuucauuuaaaugaugu

SEQ ID NO: 955175 - RNA, 22 nt, Human
aaauacaguguguguucuuuga

SEQ ID NO: 955176 - RNA, 22 nt, Human
aaucauaauucaaauaagcuua

SEQ ID NO: 955177 - RNA, 22 nt, Human
acucugcuugcccaauggaaac

SEQ ID NO: 955178 - RNA, 22 nt, Human
aggauuugaaccugcauccagu

SEQ ID NO: 955179 - RNA, 22 nt, Human
cugccuugguuucuagcagggc

SEQ ID NO: 955180 - RNA, 22 nt, Human
uuauuaugguauuucuuugcag

SEQ ID NO: 955181 - RNA, 22 nt, Human
uuuauauuucccaggauuggcc

SEQ ID NO: 955182 - RNA, 17 nt, Human
uuaagguggaucagcac

SEQ ID NO: 955183 - RNA, 22 nt, Human
ucugcaggaggcuggcugcagg

SEQ ID NO: 955184 - RNA, 18 nt, Human
auguauguacauauuuau

SEQ ID NO: 955185 - RNA, 22 nt, Human
uuuauuauguacaggcacuaua

SEQ ID NO: 955186 - RNA, 22 nt, Human
acucugcucaaaguccugaggc

SEQ ID NO: 955187 - RNA, 22 nt, Human
uuuaugagcaccuuggcccaga

SEQ ID NO: 955188 - RNA, 22 nt, Human
gcuggccauauauuuugcuguu

SEQ ID NO: 955189 - RNA, 22 nt, Human
ucugagccaauuucugugucca

SEQ ID NO: 955190 - RNA, 22 nt, Human
uucagcaaugacagccuauaua

SEQ ID NO: 955191 - RNA, 22 nt, Human
ucuucaaacugaaaauuuagaa

SEQ ID NO: 955192 - RNA, 22 nt, Human
auauuaaugagcaaguaaguga

SEQ ID NO: 955193 - RNA, 22 nt, Human
aaaacaguuauaaacagaguca

SEQ ID NO: 955194 - RNA, 18 nt, Human
uguuaggaagggcacaca

SEQ ID NO: 955195 - RNA, 22 nt, Human
gucauggaggauugugaguggu

SEQ ID NO: 955196 - RNA, 22 nt, Human
cuccugggaauuuaguugugag

SEQ ID NO: 955197 - RNA, 22 nt, Human
uagaacaugugaaaauauagcc

SEQ ID NO: 955198 - RNA, 22 nt, Human
gcacucugccaggucuccugau

SEQ ID NO: 955199 - RNA, 22 nt, Human
guauuagggccaaaggcaggaa

SEQ ID NO: 955200 - RNA, 22 nt, Human
cugagggugcuauucuugccuu

SEQ ID NO: 955201 - RNA, 22 nt, Human
acauuucuuucuauucaguagc

SEQ ID NO: 955202 - RNA, 22 nt, Human
ggccacaacuugcuccuagccc

SEQ ID NO: 955203 - RNA, 22 nt, Human
uuuuaugugcuggacuggcagu

SEQ ID NO: 955204 - RNA, 22 nt, Human
uuggccaacauggugaaacccc

SEQ ID NO: 955205 - RNA, 22 nt, Human
uauucacaggcuggagugaugu

SEQ ID NO: 955206 - RNA, 22 nt, Human
ccuccugggccuugcucuguga

SEQ ID NO: 955207 - RNA, 22 nt, Human
aaaucagucccucuuggaauuu

SEQ ID NO: 955208 - RNA, 22 nt, Human
auggccaaauaacagcuugcau

SEQ ID NO: 955209 - RNA, 22 nt, Human
uuucauuauaaaaaguuggcuu

SEQ ID NO: 955210 - RNA, 20 nt, Human
auuaggauuuuaggucauca

SEQ ID NO: 955211 - RNA, 22 nt, Human
cugugccaucugcacucucguc

SEQ ID NO: 955212 - RNA, 22 nt, Human
uuucacaaguaaaguccuaagu

SEQ ID NO: 955213 - RNA, 22 nt, Human
ucuccugggcuugguugaaguu

SEQ ID NO: 955214 - RNA, 22 nt, Human
auaaacaucuguuucucuucug

SEQ ID NO: 955215 - RNA, 22 nt, Human
uuggcaucaguguaggaccugu

SEQ ID NO: 955216 - RNA, 22 nt, Human
uuaggcauuggaaggucagcuu

SEQ ID NO: 955217 - RNA, 22 nt, Human
cauguguaugcauucauacaua

SEQ ID NO: 955218 - RNA, 20 nt, Human
uguuccaagcuaaugaauga

SEQ ID NO: 955219 - RNA, 22 nt, Human
ucacaaagggagggauagcugg

SEQ ID NO: 955220 - RNA, 22 nt, Human
aauucacaaaaccagauugcuu

SEQ ID NO: 955221 - RNA, 22 nt, Human
uuuauguaauuucauaggugug

SEQ ID NO: 955222 - RNA, 22 nt, Human
gcugauguuuaguugauguuac

SEQ ID NO: 955223 - RNA, 22 nt, Human
auuaggaaacugaaugucagaa

SEQ ID NO: 955224 - RNA, 22 nt, Human
acagggaacaggaauauacaaa

SEQ ID NO: 955225 - RNA, 22 nt, Human
uaggauaugguagaaaucauuc

SEQ ID NO: 955226 - RNA, 23 nt, Human
uggcuaaaggcucuaguccugcu

SEQ ID NO: 955227 - RNA, 22 nt, Human
ucauugaagugacugaaagauu

SEQ ID NO: 955228 - RNA, 22 nt, Human
caucuuuuggccuauucugagg

SEQ ID NO: 955229 - RNA, 22 nt, Human
agacauuuggaagauacacaua

SEQ ID NO: 955230 - RNA, 22 nt, Human
uugcaguugucuuuccuaauuu

SEQ ID NO: 955231 - RNA, 22 nt, Human
guaauguguuuugaaaaacagu

SEQ ID NO: 955232 - RNA, 22 nt, Human
gcaauaaauaacauggaagaca

SEQ ID NO: 955233 - RNA, 22 nt, Human
augauugguggucagcaguaug

SEQ ID NO: 955234 - RNA, 22 nt, Human
ucuggccaacccucaaguugua

SEQ ID NO: 955235 - RNA, 22 nt, Human
gcuccugggcucuaccuugcua

SEQ ID NO: 955236 - RNA, 22 nt, Human
ugaggccagcuucagcagugga

SEQ ID NO: 955237 - RNA, 22 nt, Human
uuacuggcugggccugagggcu

SEQ ID NO: 955238 - RNA, 22 nt, Human
caguuuaaccuauccauuaugu

SEQ ID NO: 955239 - RNA, 22 nt, Human
acuaacauguuaaucaaaagaa

SEQ ID NO: 955240 - RNA, 22 nt, Human
gaaaaagugaccuugguagcua

SEQ ID NO: 955241 - RNA, 22 nt, Human
gcucugcugggugggcaguuau

SEQ ID NO: 955242 - RNA, 22 nt, Human
uuaaagagucuacugcacaucc

SEQ ID NO: 955243 - RNA, 22 nt, Human
cuccuggcucugccacuuacua

SEQ ID NO: 955244 - RNA, 22 nt, Human
ucuuggccagguguggugccuc

SEQ ID NO: 955245 - RNA, 22 nt, Human
agcuccugcucuuugucccuaa

SEQ ID NO: 955246 - RNA, 22 nt, Human
acucugcugauagguccucaga

SEQ ID NO: 955247 - RNA, 22 nt, Human
ugcugaaagucccaaaucucau

SEQ ID NO: 955248 - RNA, 22 nt, Human
aaagauguuuuauaaguuaugg

SEQ ID NO: 955249 - RNA, 22 nt, Human
ucacucuguguuugaacucaag

SEQ ID NO: 955250 - RNA, 22 nt, Human
uagaaaugauuuugaugcuuca

SEQ ID NO: 955251 - RNA, 22 nt, Human
ugucccaguuggguauugaauu

SEQ ID NO: 955252 - RNA, 22 nt, Human
uggaagagacacuuacauucag

SEQ ID NO: 955253 - RNA, 22 nt, Human
uggcagcagggccccuggagga

SEQ ID NO: 955254 - RNA, 21 nt, Human
ccugggccaaauucccuggac

SEQ ID NO: 955255 - RNA, 22 nt, Human
aaauuauuuucagaauggagaa

SEQ ID NO: 955256 - RNA, 22 nt, Human
uuggccaagauacgagcacaua

SEQ ID NO: 955257 - RNA, 22 nt, Human
gcucugcuaauauuguaguacc

SEQ ID NO: 955258 - RNA, 22 nt, Human
guggccaacucaauguuuuuca

SEQ ID NO: 955259 - RNA, 23 nt, Human
uggccaagauaaucucaguuuuc

SEQ ID NO: 955260 - RNA, 22 nt, Human
aauuaggaaaugagaguauuug

SEQ ID NO: 955261 - RNA, 22 nt, Human
ucuuggcaauuugaucucaguu

SEQ ID NO: 955262 - RNA, 22 nt, Human
cagacauauguuuuaacagauu

SEQ ID NO: 955263 - RNA, 22 nt, Human
auuauuagacuuauaugguagu

SEQ ID NO: 955264 - RNA, 21 nt, Human
auguaggaguuauuggaacag

SEQ ID NO: 955265 - RNA, 19 nt, Human
acauuuaaauucagaucuc

SEQ ID NO: 955266 - RNA, 22 nt, Human
acaguuauucuuuaugcaacca

SEQ ID NO: 955267 - RNA, 22 nt, Human
aacacauauuuauauaugcaca

SEQ ID NO: 955268 - RNA, 22 nt, Human
uacaaaaaauugauacugacga

SEQ ID NO: 955269 - RNA, 22 nt, Human
uuucacaacacaaucucguuaa

SEQ ID NO: 955270 - RNA, 23 nt, Human
guuguaauggauaaugcaaauug

SEQ ID NO: 955271 - RNA, 22 nt, Human
cagaggaguucaguacacagcc

SEQ ID NO: 955272 - RNA, 22 nt, Human
auuuggcaaauaauuugagggu

SEQ ID NO: 955273 - RNA, 22 nt, Human
augcacuacuagaugcaaaagu

SEQ ID NO: 955274 - RNA, 19 nt, Human
uauucaggaugauggcaca

SEQ ID NO: 955275 - RNA, 22 nt, Human
acaaaguaggucaucaaagcuc

SEQ ID NO: 955276 - RNA, 22 nt, Human
guaaaauagaauaacguggcua

SEQ ID NO: 955277 - RNA, 20 nt, Human
ugagccaaacgaugaagagc

SEQ ID NO: 955278 - RNA, 22 nt, Human
cuucaugcugauauccucgaug

SEQ ID NO: 955279 - RNA, 22 nt, Human
uggucaaaaacucucaguggac

SEQ ID NO: 955280 - RNA, 21 nt, Human
cuggccgaccccucugugcuc

SEQ ID NO: 955281 - RNA, 19 nt, Human
cugggccagagcuguccuc

SEQ ID NO: 955282 - RNA, 22 nt, Human
ucauaaaaauagacucuaaagu

SEQ ID NO: 955283 - RNA, 22 nt, Human
ugaggccagucucaucacaggc

SEQ ID NO: 955284 - RNA, 20 nt, Human
ucuccuggucugguccgugc

SEQ ID NO: 955285 - RNA, 21 nt, Human
uucugagcacucaucacuguc

SEQ ID NO: 955286 - RNA, 20 nt, Human
uccugagccuccaccauguc

SEQ ID NO: 955287 - RNA, 22 nt, Human
acacagaguauuuagaaggggu

SEQ ID NO: 955288 - RNA, 22 nt, Human
auuuauuauugugguuacuucu

SEQ ID NO: 955289 - RNA, 22 nt, Human
aauaaaaugaacugguagaguu

SEQ ID NO: 955290 - RNA, 22 nt, Human
gugauaaagacgugucauaauu

SEQ ID NO: 955291 - RNA, 22 nt, Human
aagaauaaauuaagauacuuag

SEQ ID NO: 955292 - RNA, 22 nt, Human
cauuccuuaacguggggagucu

SEQ ID NO: 955293 - RNA, 22 nt, Human
uuuucauuguuacuaugagcua

SEQ ID NO: 955294 - RNA, 22 nt, Human
aaaagguaguugccaaauaagg

SEQ ID NO: 955295 - RNA, 22 nt, Human
cugggccacaagccugugugau

SEQ ID NO: 955296 - RNA, 22 nt, Human
ggauuuggaagaccgggucaca

SEQ ID NO: 955297 - RNA, 22 nt, Human
uggcaacaugucgaagugcugu

SEQ ID NO: 955298 - RNA, 22 nt, Human
aggagacauaacuaugaugaga

SEQ ID NO: 955299 - RNA, 22 nt, Human
cucugcuaagcaugaacaauua

SEQ ID NO: 955300 - RNA, 22 nt, Human
cagucauuuuauuugaaaauua

SEQ ID NO: 955301 - RNA, 22 nt, Human
uccuggccuugcuccugaugcc

SEQ ID NO: 955302 - RNA, 22 nt, Human
uuaaaugaugcauaucauuuag

SEQ ID NO: 955303 - RNA, 22 nt, Human
caugcaggcccgccugaauggg

SEQ ID NO: 955304 - RNA, 22 nt, Human
uuauuagguuuacauaaagguu

SEQ ID NO: 955305 - RNA, 22 nt, Human
uccugggcgguuaugugaucug

SEQ ID NO: 955306 - RNA, 22 nt, Human
acuuccugcaaucguccacucc

SEQ ID NO: 955307 - RNA, 22 nt, Human
uguuuaauucaccaucauguuc

SEQ ID NO: 955308 - RNA, 22 nt, Human
auaaugugaagauaaugcaaga

SEQ ID NO: 955309 - RNA, 22 nt, Human
ccagacaggaacacacaucucc

SEQ ID NO: 955310 - RNA, 22 nt, Human
uccugucuaaagaccugcaggc

SEQ ID NO: 955311 - RNA, 23 nt, Human
ccagucucacguauacaggauuu

SEQ ID NO: 955312 - RNA, 22 nt, Human
uuuauaagaagcaaugucugag

SEQ ID NO: 955313 - RNA, 22 nt, Human
uuuuaugauugagcuggcuaca

SEQ ID NO: 955314 - RNA, 22 nt, Human
caaguaaagaaucacauuucuu

SEQ ID NO: 955315 - RNA, 22 nt, Human
caccguuugguuuggauuuaca

SEQ ID NO: 955316 - RNA, 22 nt, Human
uuggcagauuugucaguaagcu

SEQ ID NO: 955317 - RNA, 22 nt, Human
caaggugcagcguugucaagcu

SEQ ID NO: 955318 - RNA, 22 nt, Human
uuauuagagauauuugguuagg

SEQ ID NO: 955319 - RNA, 22 nt, Human
uuauuagguuauucucuguacu

SEQ ID NO: 955320 - RNA, 22 nt, Human
acugccugcucauaacauugcu

SEQ ID NO: 955321 - RNA, 22 nt, Human
auuuauuaugggauuuggcaca

SEQ ID NO: 955322 - RNA, 22 nt, Human
caaaaguaauggcgguuuuuac

SEQ ID NO: 955323 - RNA, 22 nt, Human
accaaacaaaauugugcacugu

SEQ ID NO: 955324 - RNA, 22 nt, Human
uccuggcccacuaugccagcau

SEQ ID NO: 955325 - RNA, 22 nt, Human
cagcuccugaggacugcuggga

SEQ ID NO: 955326 - RNA, 22 nt, Human
cagucauuggcuaaagcucccu

SEQ ID NO: 955327 - RNA, 22 nt, Human
cagucucagaggugggaguggg

SEQ ID NO: 955328 - RNA, 22 nt, Human
gcuguuaggugcccugaccuug

SEQ ID NO: 955329 - RNA, 19 nt, Human
cuuauuagagugagagcuu

SEQ ID NO: 955330 - RNA, 22 nt, Human
cuucacaacgacaucugguuag

SEQ ID NO: 955331 - RNA, 22 nt, Human
uaagucaugauucuguguuacu

SEQ ID NO: 955332 - RNA, 17 nt, Human
acuccuggucugaaggg

SEQ ID NO: 955333 - RNA, 22 nt, Human
auaaaaaggacagauguggucu

SEQ ID NO: 955334 - RNA, 22 nt, Human
acagaccucuagauuacauuug

SEQ ID NO: 955335 - RNA, 22 nt, Human
uggucaaaaaggccuagacaca

SEQ ID NO: 955336 - RNA, 22 nt, Human
uuggccaacagcgacagggcca

SEQ ID NO: 955337 - RNA, 22 nt, Human
uggcacauaguaggugcucaau

SEQ ID NO: 955338 - RNA, 22 nt, Human
ucuggccaggauggcaagacca

SEQ ID NO: 955339 - RNA, 22 nt, Human
cugagccuguguuucucuggca

SEQ ID NO: 955340 - RNA, 22 nt, Human
cucaaauauguggucagaaagc

SEQ ID NO: 955341 - RNA, 22 nt, Human
guggccaaggugcagagcagcu

SEQ ID NO: 955342 - RNA, 16 nt, Human
gcuccugggcccucga

SEQ ID NO: 955343 - RNA, 22 nt, Human
guaaauaacugguaauuggggu

SEQ ID NO: 955344 - RNA, 22 nt, Human
uggccaaaguagaaaauaauag

SEQ ID NO: 955345 - RNA, 22 nt, Human
aacucugcuuauaguuugucca

SEQ ID NO: 955346 - RNA, 22 nt, Human
cugaagccaugugcucacuggu

SEQ ID NO: 955347 - RNA, 22 nt, Human
uuaauaaacaggugcagcugaa

SEQ ID NO: 955348 - RNA, 22 nt, Human
acuggccagaacuaagucacau

SEQ ID NO: 955349 - RNA, 22 nt, Human
uccaagggaauuuaaaguugcu

SEQ ID NO: 955350 - RNA, 22 nt, Human
ugaaugugaugcuaaacauaug

SEQ ID NO: 955351 - RNA, 22 nt, Human
agacauaagugcuaugacauug

SEQ ID NO: 955352 - RNA, 22 nt, Human
gcuggccauggccugcgccauc

SEQ ID NO: 955353 - RNA, 17 nt, Human
cagacaggcugucaccc

SEQ ID NO: 955354 - RNA, 22 nt, Human
uagaauauacacuacagcuuaa

SEQ ID NO: 955355 - RNA, 22 nt, Human
acaccuuuuauucgccaggcac

SEQ ID NO: 955356 - RNA, 22 nt, Human
uuggccaaagcucaccagugcu

SEQ ID NO: 955357 - RNA, 22 nt, Human
ucacaagaauuuguagaugaaa

SEQ ID NO: 955358 - RNA, 22 nt, Human
uuuucauuguuccucgagcauu

SEQ ID NO: 955359 - RNA, 22 nt, Human
acucugcuggcugcagggcagc

SEQ ID NO: 955360 - RNA, 22 nt, Human
uggucaacaggcagggaugaaa

SEQ ID NO: 955361 - RNA, 22 nt, Human
aaaguaaccuaguaauaguguc

SEQ ID NO: 955362 - RNA, 22 nt, Human
uauauuaaagugcuuugcagug

SEQ ID NO: 955363 - RNA, 22 nt, Human
ucucugcucugugccucaguuu

SEQ ID NO: 955364 - RNA, 22 nt, Human
uucagcaagaccaccauguacc

SEQ ID NO: 955365 - RNA, 22 nt, Human
auuagguugugcuuuguggaca

SEQ ID NO: 955366 - RNA, 22 nt, Human
gagagcuguuuaucuucuucaa

SEQ ID NO: 955367 - RNA, 22 nt, Human
uuucuuaguccuagagugauuu

SEQ ID NO: 955368 - RNA, 22 nt, Human
guggccaagagauaaaauugug

SEQ ID NO: 955369 - RNA, 22 nt, Human
cacaugugugcugaggacugug

SEQ ID NO: 955370 - RNA, 22 nt, Human
cugggccagcaacugcaaugga

SEQ ID NO: 955371 - RNA, 22 nt, Human
gucuggccugccagcucuggug

SEQ ID NO: 955372 - RNA, 22 nt, Human
caaaaguaauugugguuuucac

SEQ ID NO: 955373 - RNA, 19 nt, Human
agucucacccaagcagucu

SEQ ID NO: 955374 - RNA, 22 nt, Human
ugaaacacuuucaauuacauau

SEQ ID NO: 955375 - RNA, 22 nt, Human
uacaucuagccuuacaauuauu

SEQ ID NO: 955376 - RNA, 22 nt, Human
cuuaauaaaugguagcuguuau

SEQ ID NO: 955377 - RNA, 22 nt, Human
acacauuauagagaguauaaua

SEQ ID NO: 955378 - RNA, 22 nt, Human
acucugcuaaauguguaggcuc

SEQ ID NO: 955379 - RNA, 22 nt, Human
cuaccuuucugacucuugggau

SEQ ID NO: 955380 - RNA, 22 nt, Human
ugcaacauuauuaaacuaagca

SEQ ID NO: 955381 - RNA, 18 nt, Human
auggucucauacugggag

SEQ ID NO: 955382 - RNA, 22 nt, Human
cuggccaagcacuggggucaaa

SEQ ID NO: 955383 - RNA, 21 nt, Human
uccuggcccacucuaucccca

SEQ ID NO: 955384 - RNA, 23 nt, Human
ccagucucuuuccaaaaucacau

SEQ ID NO: 955385 - RNA, 22 nt, Human
ugaauauguuccucacaaguuc

SEQ ID NO: 955386 - RNA, 21 nt, Human
uuuauuaacaacuguggacgu

SEQ ID NO: 955387 - RNA, 22 nt, Human
aaaugugcuucuuacucucaau

SEQ ID NO: 955388 - RNA, 22 nt, Human
auucuuuuuuaaggaauagaac

SEQ ID NO: 955389 - RNA, 22 nt, Human
ucuggccacuaauaggucucac

SEQ ID NO: 955390 - RNA, 22 nt, Human
aaugauguauuaguacaacaca

SEQ ID NO: 955391 - RNA, 22 nt, Human
cagcugacgccagaguggaauu

SEQ ID NO: 955392 - RNA, 22 nt, Human
aaauauaguaaaugcauaguuc

SEQ ID NO: 955393 - RNA, 22 nt, Human
acacauuuaaaaaggaacauau

SEQ ID NO: 955394 - RNA, 22 nt, Human
acaaaaagggagaugagguaga

SEQ ID NO: 955395 - RNA, 19 nt, Human
gucaucuuuuaauaaugug

SEQ ID NO: 955396 - RNA, 22 nt, Human
aggccaaauagcagguuugcua

SEQ ID NO: 955397 - RNA, 22 nt, Human
uuaaguaagaccuuaugucuug

SEQ ID NO: 955398 - RNA, 23 nt, Human
cacuccuguuucuaagccagcau

SEQ ID NO: 955399 - RNA, 22 nt, Human
ccuuuuauaaaguuguauugaa

SEQ ID NO: 955400 - RNA, 22 nt, Human
gcuccuggguguggcugccccu

SEQ ID NO: 955401 - RNA, 23 nt, Human
uuucaacaaugcuuagagaaaac

SEQ ID NO: 955402 - RNA, 19 nt, Human
agcagcuggagguggagug

SEQ ID NO: 955403 - RNA, 22 nt, Human
uugcaaauuccaauccaauauu

SEQ ID NO: 955404 - RNA, 22 nt, Human
cacuaugcuuacaugcuuauau

SEQ ID NO: 955405 - RNA, 22 nt, Human
cugaccaucauggugaaacccc

SEQ ID NO: 955406 - RNA, 22 nt, Human
uccuggccagaggacaaagcug

SEQ ID NO: 955407 - RNA, 22 nt, Human
acuuccugaauggggcuaauua

SEQ ID NO: 955408 - RNA, 22 nt, Human
uucugagguccaugcaguacug

SEQ ID NO: 955409 - RNA, 22 nt, Human
acuccagguuuuuucacugaag

SEQ ID NO: 955410 - RNA, 22 nt, Human
aacucuggagcacgcccuggcc

SEQ ID NO: 955411 - RNA, 22 nt, Human
uuaauaggcuucuaacauagcu

SEQ ID NO: 955412 - RNA, 22 nt, Human
acuucuggauagagucagcuuu

SEQ ID NO: 955413 - RNA, 22 nt, Human
agccuugaacacugacugaagg

SEQ ID NO: 955414 - RNA, 22 nt, Human
uucuuauucuugaaauguggga

SEQ ID NO: 955415 - RNA, 22 nt, Human
aauucacaauguguagucaugc

SEQ ID NO: 955416 - RNA, 22 nt, Human
uccuggccuccguucucugcau

SEQ ID NO: 955417 - RNA, 22 nt, Human
auggccaagaaguauuccugac

SEQ ID NO: 955418 - RNA, 22 nt, Human
aacacauaggcagagcaugaca

SEQ ID NO: 955419 - RNA, 21 nt, Human
acugccugucuccauagucua

SEQ ID NO: 955420 - RNA, 22 nt, Human
aaacugcugguugcuggccagc

SEQ ID NO: 955421 - RNA, 22 nt, Human
acacuugauaggucaaaucagu

SEQ ID NO: 955422 - RNA, 22 nt, Human
agggaagugaaugacagauauc

SEQ ID NO: 955423 - RNA, 20 nt, Human
ccuccuggucaggugugcag

SEQ ID NO: 955424 - RNA, 22 nt, Human
cuauuagguaugugguugcuau

SEQ ID NO: 955425 - RNA, 22 nt, Human
aggaagaauguuuacauaucaa

SEQ ID NO: 955426 - RNA, 22 nt, Human
ucagggaaauuuccauguguuu

SEQ ID NO: 955427 - RNA, 22 nt, Human
uggucaaauuuagucucuggaa

SEQ ID NO: 955428 - RNA, 22 nt, Human
aguguacaguuuguaguacuac

SEQ ID NO: 955429 - RNA, 22 nt, Human
aaagaacaauguggaaucuccu

SEQ ID NO: 955430 - RNA, 22 nt, Human
cuguuuauggagguaaggcauc

SEQ ID NO: 955431 - RNA, 22 nt, Human
aauucacauauacauuauuccu

SEQ ID NO: 955432 - RNA, 22 nt, Human
ugcaugugcccacucuggcuua

SEQ ID NO: 955433 - RNA, 22 nt, Human
uggcaacauggacaggucugcc

SEQ ID NO: 955434 - RNA, 21 nt, Human
auuuggcaaaggcgaugcaca

SEQ ID NO: 955435 - RNA, 22 nt, Human
accuguuuggaggagguguuag

SEQ ID NO: 955436 - RNA, 17 nt, Human
acucugcugaaguagaa

SEQ ID NO: 955437 - RNA, 22 nt, Human
cugagccagggccacacaugga

SEQ ID NO: 955438 - RNA, 22 nt, Human
uuggccaaggaaguagcaacgg

SEQ ID NO: 955439 - RNA, 22 nt, Human
ugaaagcacaaguucuaacagg

SEQ ID NO: 955440 - RNA, 22 nt, Human
ucuuguuaucaggaaaacagua

SEQ ID NO: 955441 - RNA, 22 nt, Human
agaaauguggaggaacagggcu

SEQ ID NO: 955442 - RNA, 22 nt, Human
uuauuagagugcuuugagaaag

SEQ ID NO: 955443 - RNA, 22 nt, Human
aaagacauugaagaaggacuua

SEQ ID NO: 955444 - RNA, 21 nt, Human
ccuggccaaucugauaggguu

SEQ ID NO: 955445 - RNA, 22 nt, Human
uauccaaacauauagucucucu

SEQ ID NO: 955446 - RNA, 22 nt, Human
aagaugcagcaaacuacuuuuu

SEQ ID NO: 955447 - RNA, 22 nt, Human
guccaaauaaguugcaaaauag

SEQ ID NO: 955448 - RNA, 22 nt, Human
agcuuuguauuugagcauacga

SEQ ID NO: 955449 - RNA, 22 nt, Human
ucuccuggcauuugguugagua

SEQ ID NO: 955450 - RNA, 22 nt, Human
ccugugccagcugggcccugcc

SEQ ID NO: 955451 - RNA, 22 nt, Human
aaagcuauuugugaguuauaga

SEQ ID NO: 955452 - RNA, 22 nt, Human
acacauuaugagcaguugucuu

SEQ ID NO: 955453 - RNA, 22 nt, Human
agggucuguggaugcaucuggg

SEQ ID NO: 955454 - RNA, 22 nt, Human
aggccaaauguguauaaaacau

SEQ ID NO: 955455 - RNA, 22 nt, Human
aaagauuaaaucaaauugguca

SEQ ID NO: 955456 - RNA, 21 nt, Human
uggaccaaaguaauuugccuu

SEQ ID NO: 955457 - RNA, 22 nt, Human
uuaaaaugcagauucugauuca

SEQ ID NO: 955458 - RNA, 22 nt, Human
aagcuaugggggaguuucaacc

SEQ ID NO: 955459 - RNA, 22 nt, Human
aauuaggaaauucagccauuuu

SEQ ID NO: 955460 - RNA, 17 nt, Human
uagaauauggugggcug

SEQ ID NO: 955461 - RNA, 22 nt, Human
ugcaugcugcacacaugcguag

SEQ ID NO: 955462 - RNA, 22 nt, Human
gcuggccauagaagccaaagag

SEQ ID NO: 955463 - RNA, 22 nt, Human
uaagccugguucauaauuugcu

SEQ ID NO: 955464 - RNA, 22 nt, Human
cuucugagcagaccuccugggg

SEQ ID NO: 955465 - RNA, 22 nt, Human
aaugugcagaugaauaaacaaa

SEQ ID NO: 955466 - RNA, 21 nt, Human
gucaaacuugcaccagugccc

SEQ ID NO: 955467 - RNA, 22 nt, Human
cuccugcgguacuacugugcuu

SEQ ID NO: 955468 - RNA, 22 nt, Human
gaggaaagcugguuuaaaguau

SEQ ID NO: 955469 - RNA, 22 nt, Human
gaaaaguaaacacuagggguca

SEQ ID NO: 955470 - RNA, 22 nt, Human
aaaguuuggauuagcaguuaga

SEQ ID NO: 955471 - RNA, 22 nt, Human
uaccuuuugcuuauuaugacac

SEQ ID NO: 955472 - RNA, 22 nt, Human
auauauaagcugaugagccaca

SEQ ID NO: 955473 - RNA, 22 nt, Human
ggucugaaaauggugaccacca

SEQ ID NO: 955474 - RNA, 22 nt, Human
auuagagaaugugcugacauug

SEQ ID NO: 955475 - RNA, 21 nt, Human
ucacauuucucauggguaaau

SEQ ID NO: 955476 - RNA, 22 nt, Human
ucuccugggaggacaaggaagg

SEQ ID NO: 955477 - RNA, 22 nt, Human
cuggcccaggaagacguguccc

SEQ ID NO: 955478 - RNA, 22 nt, Human
ucaaauaaugccauucaucauc

SEQ ID NO: 955479 - RNA, 22 nt, Human
gcuccugggcccugggcuaacu

SEQ ID NO: 955480 - RNA, 22 nt, Human
aaaugaugcucacagauuagug

SEQ ID NO: 955481 - RNA, 17 nt, Human
auguuaauuucacauuu

SEQ ID NO: 955482 - RNA, 22 nt, Human
guggccaagaggggacuggaua

SEQ ID NO: 955483 - RNA, 20 nt, Human
aggccaaacccagcgcgccc

SEQ ID NO: 955484 - RNA, 22 nt, Human
uacucugccccagccaauaaug

SEQ ID NO: 955485 - RNA, 22 nt, Human
gcacucugugaucugcagagcc

SEQ ID NO: 955486 - RNA, 22 nt, Human
acauaaauagauuauugggagg

SEQ ID NO: 955487 - RNA, 22 nt, Human
acagacauucagcuaagucuau

SEQ ID NO: 955488 - RNA, 22 nt, Human
agaggaaguaaucaggaccugc

SEQ ID NO: 955489 - RNA, 22 nt, Human
ucagggaaugaugcacacaguu

SEQ ID NO: 955490 - RNA, 22 nt, Human
caucuuuaacaauuuacaaugu

SEQ ID NO: 955491 - RNA, 22 nt, Human
auguggcauucuuggucauuuc

SEQ ID NO: 955492 - RNA, 22 nt, Human
ccuccuggggugaaggauggga

SEQ ID NO: 955493 - RNA, 22 nt, Human
cuggccaacaucuggggcacau

SEQ ID NO: 955494 - RNA, 22 nt, Human
acuuugaaacuaaaauucauua

SEQ ID NO: 955495 - RNA, 23 nt, Human
ucugggccacuugucugcacuuc

SEQ ID NO: 955496 - RNA, 22 nt, Human
gucaucuuaucauuguugcugu

SEQ ID NO: 955497 - RNA, 22 nt, Human
uugccacugaaccagucuugca

SEQ ID NO: 955498 - RNA, 22 nt, Human
uaaaugauaauaaugcuagugu

SEQ ID NO: 955499 - RNA, 22 nt, Human
uaacuccagagaauccauccau

SEQ ID NO: 955500 - RNA, 19 nt, Human
ugaggccaaggucacagau

SEQ ID NO: 955501 - RNA, 22 nt, Human
uggucaaaagaaagcucagaac

SEQ ID NO: 955502 - RNA, 22 nt, Human
ugacauaaaucuaaaggaaagg

SEQ ID NO: 955503 - RNA, 22 nt, Human
ucuaagccuaggaaaugaguuu

SEQ ID NO: 955504 - RNA, 22 nt, Human
uuugauaacagugaauaucaug

SEQ ID NO: 955505 - RNA, 22 nt, Human
acauuuuuuagagucccacauu

SEQ ID NO: 955506 - RNA, 22 nt, Human
aauguacaauaagacaaagagg

SEQ ID NO: 955507 - RNA, 22 nt, Human
uuaaaaugcagauuaugacuca

SEQ ID NO: 955508 - RNA, 22 nt, Human
aucuacaggauaguuuaauauu

SEQ ID NO: 955509 - RNA, 22 nt, Human
uuagagaugucccaaaaugaag

SEQ ID NO: 955510 - RNA, 22 nt, Human
aaacuccugcauacucagaagc

SEQ ID NO: 955511 - RNA, 22 nt, Human
uuuuaucugcuucauuaguuga

SEQ ID NO: 955512 - RNA, 22 nt, Human
augugcaacuucagcagaaagg

SEQ ID NO: 955513 - RNA, 21 nt, Human
ucugagagcaacugcccuuua

SEQ ID NO: 955514 - RNA, 23 nt, Human
agacaguggccgagagguacuag

SEQ ID NO: 955515 - RNA, 22 nt, Human
aaauguuagguuguacugaguc

SEQ ID NO: 955516 - RNA, 22 nt, Human
auacauacauguacacauaaau

SEQ ID NO: 955517 - RNA, 22 nt, Human
uauuuaaaaagaggccagcugg

SEQ ID NO: 955518 - RNA, 20 nt, Human
cacguuuuuccacuagcaaa

SEQ ID NO: 955519 - RNA, 22 nt, Human
uggcaagccugagauccgggag

SEQ ID NO: 955520 - RNA, 22 nt, Human
uauucacaaaaugagguccuca

SEQ ID NO: 955521 - RNA, 22 nt, Human
aaccaaauggaugguaagaggg

SEQ ID NO: 955522 - RNA, 22 nt, Human
cuuauaguaugauguugagaau

SEQ ID NO: 955523 - RNA, 19 nt, Human
uuggcagcugagauccugc

SEQ ID NO: 955524 - RNA, 22 nt, Human
uagaaaugugauaauagcuuaa

SEQ ID NO: 955525 - RNA, 22 nt, Human
agagacugcgugucagcgcugg

SEQ ID NO: 955526 - RNA, 22 nt, Human
auggccaagcauauacagauug

SEQ ID NO: 955527 - RNA, 22 nt, Human
uucaccuugaauaugucuuaaa

SEQ ID NO: 955528 - RNA, 22 nt, Human
ucuccugguauguaugcaccug

SEQ ID NO: 955529 - RNA, 22 nt, Human
gcacucuguuucuccugucagc

SEQ ID NO: 955530 - RNA, 18 nt, Human
gcuccugguuggaaagaa

SEQ ID NO: 955531 - RNA, 22 nt, Human
aucaggaucugcaucauaagaa

SEQ ID NO: 955532 - RNA, 22 nt, Human
uugagggucuggaucugcugcu

SEQ ID NO: 955533 - RNA, 22 nt, Human
gaguuuaacacuuggagaaaag

SEQ ID NO: 955534 - RNA, 19 nt, Human
uggaagaggaagggaaaua

SEQ ID NO: 955535 - RNA, 22 nt, Human
acaggccugagauuuugcauuu

SEQ ID NO: 955536 - RNA, 22 nt, Human
uugcuucagagggagacacuuu

SEQ ID NO: 955537 - RNA, 22 nt, Human
ucacucuguuagaggaaagugc

SEQ ID NO: 955538 - RNA, 22 nt, Human
cagcuguggcugccacugcucc

SEQ ID NO: 955539 - RNA, 22 nt, Human
aaaaaugugaccacaggguguu

SEQ ID NO: 955540 - RNA, 22 nt, Human
aauguggaaucauggacuuuau

SEQ ID NO: 955541 - RNA, 22 nt, Human
gagggaaggacccauuuuaagu

SEQ ID NO: 955542 - RNA, 20 nt, Human
uuggccaaaucuuagucaug

SEQ ID NO: 955543 - RNA, 22 nt, Human
uccuaggcaguuggugcuccau

SEQ ID NO: 955544 - RNA, 22 nt, Human
ggcagacaccuuuaugucuaau

SEQ ID NO: 955545 - RNA, 22 nt, Human
aucaggaucagggcuagcagag

SEQ ID NO: 955546 - RNA, 22 nt, Human
cgagcaugaugacggcuguggc

SEQ ID NO: 955547 - RNA, 22 nt, Human
caccuugugauccucuugccuu

SEQ ID NO: 955548 - RNA, 22 nt, Human
acuggccaggcagcaguagcuu

SEQ ID NO: 955549 - RNA, 22 nt, Human
augugaggaagaaagagguaag

SEQ ID NO: 955550 - RNA, 22 nt, Human
ccuguuuagugaggugaggagu

SEQ ID NO: 955551 - RNA, 22 nt, Human
acuccuggguuccggagauucu

SEQ ID NO: 955552 - RNA, 22 nt, Human
cuggcacaugcucccugagugg

SEQ ID NO: 955553 - RNA, 22 nt, Human
ucugaaaucuguaagcacuagc

SEQ ID NO: 955554 - RNA, 22 nt, Human
uaacccaauaauugguggccuu

SEQ ID NO: 955555 - RNA, 22 nt, Human
uuggccaaauacacaccuuuug

SEQ ID NO: 955556 - RNA, 22 nt, Human
uccuugacugugaggaacuagc

SEQ ID NO: 955557 - RNA, 22 nt, Human
auauugaacccuacagacugua

SEQ ID NO: 955558 - RNA, 22 nt, Human
gcucugcucuaacauuccugac

SEQ ID NO: 955559 - RNA, 22 nt, Human
uugaaauacugcauuguucagu

SEQ ID NO: 955560 - RNA, 22 nt, Human
aaagucauuggaauauuaauga

SEQ ID NO: 955561 - RNA, 22 nt, Human
aaauaaguaguuuaguguugug

SEQ ID NO: 955562 - RNA, 21 nt, Human
uguaaguuucaucugaauugg

SEQ ID NO: 955563 - RNA, 22 nt, Human
uaaaagacauauaacuguagga

SEQ ID NO: 955564 - RNA, 22 nt, Human
uaggaugagggguggccaagua

SEQ ID NO: 955565 - RNA, 22 nt, Human
uaugucacauuguaacagugug

SEQ ID NO: 955566 - RNA, 22 nt, Human
guucacaauggcuuuaccuaag

SEQ ID NO: 955567 - RNA, 22 nt, Human
aaaagagucuuaggcagucaua

SEQ ID NO: 955568 - RNA, 22 nt, Human
cuccugggcucaagugauccuc

SEQ ID NO: 955569 - RNA, 22 nt, Human
uuauguaggauaaugaauugcc

SEQ ID NO: 955570 - RNA, 22 nt, Human
agacaggagagggaacugccgg

SEQ ID NO: 955571 - RNA, 22 nt, Human
uauuagguuggugcaacaguaa

SEQ ID NO: 955572 - RNA, 22 nt, Human
gcacagcucgagcucaggaggg

SEQ ID NO: 955573 - RNA, 22 nt, Human
aaguuguauauaccgcuuuaag

SEQ ID NO: 955574 - RNA, 22 nt, Human
acuggccaggcacagcuguggg

SEQ ID NO: 955575 - RNA, 22 nt, Human
ucaucuaagagucuuacauuua

SEQ ID NO: 955576 - RNA, 22 nt, Human
gucuagagugcuuccuagucau

SEQ ID NO: 955577 - RNA, 22 nt, Human
ugucuuaagaaauugcauuugu

SEQ ID NO: 955578 - RNA, 22 nt, Human
caaaaguaauuaugguuuuugc

SEQ ID NO: 955579 - RNA, 22 nt, Human
ucuugaaggggggcaguguuga

SEQ ID NO: 955580 - RNA, 22 nt, Human
uccuggccaaguuacucucugc

SEQ ID NO: 955581 - RNA, 22 nt, Human
cacucugagccaaaacuaauuc

SEQ ID NO: 955582 - RNA, 22 nt, Human
ucuauuuacagaaagcagaauu

SEQ ID NO: 955583 - RNA, 22 nt, Human
aagccuugcagcauuaggcucu

SEQ ID NO: 955584 - RNA, 22 nt, Human
agcuauguauaaauaggccacu

SEQ ID NO: 955585 - RNA, 22 nt, Human
aauguacacugaaagccuauca

SEQ ID NO: 955586 - RNA, 22 nt, Human
ccuccuggugacaaggcaaagc

SEQ ID NO: 955587 - RNA, 21 nt, Human
gcuccuggugcugcguggcgc

SEQ ID NO: 955588 - RNA, 22 nt, Human
cagagacauuaagugccaugau

SEQ ID NO: 955589 - RNA, 22 nt, Human
ccugguccuuacgucauugcuu

SEQ ID NO: 955590 - RNA, 22 nt, Human
uuaguuaggaaacaaaguuguu

SEQ ID NO: 955591 - RNA, 22 nt, Human
uuagugauaggaagccagauug

SEQ ID NO: 955592 - RNA, 20 nt, Human
aggcucugcauuucugagug

SEQ ID NO: 955593 - RNA, 22 nt, Human
augcaaaaguaacugugauuuu

SEQ ID NO: 955594 - RNA, 20 nt, Human
ucacucugaugcuagggugg

SEQ ID NO: 955595 - RNA, 22 nt, Human
uuucacaacugcuuauuugaga

SEQ ID NO: 955596 - RNA, 22 nt, Human
acugucuucaaaugaauauauu

SEQ ID NO: 955597 - RNA, 23 nt, Human
uccaagggcuacaaacacagacc

SEQ ID NO: 955598 - RNA, 18 nt, Human
acuaugcugaauaaaugg

SEQ ID NO: 955599 - RNA, 22 nt, Human
cuucacaaaauauuucauuaua

SEQ ID NO: 955600 - RNA, 22 nt, Human
uuuauuaaaacuguuggcucug

SEQ ID NO: 955601 - RNA, 22 nt, Human
aacucacuuuguggcuucugaa

SEQ ID NO: 955602 - RNA, 22 nt, Human
cagcucugaggaacacuccuuu

SEQ ID NO: 955603 - RNA, 22 nt, Human
acucugcaauguggcaagaaca

SEQ ID NO: 955604 - RNA, 19 nt, Human
gcucugcuacuauuaccac

SEQ ID NO: 955605 - RNA, 22 nt, Human
uaacuccacaccccucuuggug

SEQ ID NO: 955606 - RNA, 21 nt, Human
cauauuaaaucggugccuuua

SEQ ID NO: 955607 - RNA, 22 nt, Human
guucacaagcugauugucuuuc

SEQ ID NO: 955608 - RNA, 22 nt, Human
uuucacaagacagcuacuguug

SEQ ID NO: 955609 - RNA, 22 nt, Human
uagaacaugcucauguauaaau

SEQ ID NO: 955610 - RNA, 22 nt, Human
auggccaagcaugccuguggcc

SEQ ID NO: 955611 - RNA, 22 nt, Human
aaaaguaauugcaauuuuguag

SEQ ID NO: 955612 - RNA, 22 nt, Human
uguuuaguaggaguuuaauacu

SEQ ID NO: 955613 - RNA, 22 nt, Human
gaucuuggggggaucaccaugg

SEQ ID NO: 955614 - RNA, 22 nt, Human
gaaauguguuguucauuucuaa

SEQ ID NO: 955615 - RNA, 22 nt, Human
gcuccuggcauccugcuuuuaa

SEQ ID NO: 955616 - RNA, 22 nt, Human
aaauauaauuucugccucaaua

SEQ ID NO: 955617 - RNA, 22 nt, Human
guggccaagaaaauagaugcau

SEQ ID NO: 955618 - RNA, 22 nt, Human
cuuauuagaguuguguucuguu

SEQ ID NO: 955619 - RNA, 20 nt, Human
caaguguagaaacuaauaag

SEQ ID NO: 955620 - RNA, 22 nt, Human
aggauauuugcuuaagauagcu

SEQ ID NO: 955621 - RNA, 22 nt, Human
uguuuauuuucaggauggauug

SEQ ID NO: 955622 - RNA, 22 nt, Human
acauucuaacauuguacagaua

SEQ ID NO: 955623 - RNA, 22 nt, Human
uuauuuaaaauguagguuggga

SEQ ID NO: 955624 - RNA, 22 nt, Human
uuuuauuaucuuugaaugggac

SEQ ID NO: 955625 - RNA, 22 nt, Human
uuuauuguuguuagucauaagu

SEQ ID NO: 955626 - RNA, 22 nt, Human
uccaagggcucauggacacuuu

SEQ ID NO: 955627 - RNA, 22 nt, Human
gcuccuggagagauugagaaag

SEQ ID NO: 955628 - RNA, 22 nt, Human
gcuggccaaaguguaccuggag

SEQ ID NO: 955629 - RNA, 22 nt, Human
cugcccaaauccuucuuccucu

SEQ ID NO: 955630 - RNA, 22 nt, Human
cuucugaggcagcuauucaguu

SEQ ID NO: 955631 - RNA, 22 nt, Human
guucacaaaguacuguaugcau

SEQ ID NO: 955632 - RNA, 22 nt, Human
ugagaauaggcauagaaccugg

SEQ ID NO: 955633 - RNA, 22 nt, Human
auauuaggaguuaaauguauua

SEQ ID NO: 955634 - RNA, 22 nt, Human
uucugagcuacauaguacuggg

SEQ ID NO: 955635 - RNA, 22 nt, Human
cugggccaucuccuuugugugg

SEQ ID NO: 955636 - RNA, 22 nt, Human
aguuucaauucuuuucacaaag

SEQ ID NO: 955637 - RNA, 22 nt, Human
ugcugaaauuagaacauugagg

SEQ ID NO: 955638 - RNA, 22 nt, Human
cagggaauccauggucauaagg

SEQ ID NO: 955639 - RNA, 21 nt, Human
agacaguaacucuucuacucc

SEQ ID NO: 955640 - RNA, 22 nt, Human
uaggauaugugaaaucauauua

SEQ ID NO: 955641 - RNA, 22 nt, Human
aacuaaaucuggcauuuagagc

SEQ ID NO: 955642 - RNA, 22 nt, Human
uauccaaaguuucucagaaacu

SEQ ID NO: 955643 - RNA, 22 nt, Human
gcuggccaguguggugaccacc

SEQ ID NO: 955644 - RNA, 22 nt, Human
ugucaucuucaucauaaguaaa

SEQ ID NO: 955645 - RNA, 22 nt, Human
cugugccaggcccagcugacuu

SEQ ID NO: 955646 - RNA, 22 nt, Human
ugaaagcacugauucucaacuc

SEQ ID NO: 955647 - RNA, 22 nt, Human
cagcuuugucugauuccucuuu

SEQ ID NO: 955648 - RNA, 22 nt, Human
uggccauagcucagcuccuuca

SEQ ID NO: 955649 - RNA, 22 nt, Human
uuuauguaguuacggacuauca

SEQ ID NO: 955650 - RNA, 22 nt, Human
auguggcacagcacaguaagag

SEQ ID NO: 955651 - RNA, 22 nt, Human
guuauuaguaagacucgcacau

SEQ ID NO: 955652 - RNA, 22 nt, Human
caaaacauucagagagcucacu

SEQ ID NO: 955653 - RNA, 21 nt, Human
cggccaaauuccuccuaggga

SEQ ID NO: 955654 - RNA, 22 nt, Human
aaacacauuuuaggaaaaucua

SEQ ID NO: 955655 - RNA, 22 nt, Human
uggaagagguggaaguggcuuc

SEQ ID NO: 955656 - RNA, 16 nt, Human
gucuggccuaccugcc

SEQ ID NO: 955657 - RNA, 22 nt, Human
augaaauguuggucccaaucgc

SEQ ID NO: 955658 - RNA, 22 nt, Human
agacucugcuaagaauauaauu

SEQ ID NO: 955659 - RNA, 22 nt, Human
gcccucugcacagcucugagca

SEQ ID NO: 955660 - RNA, 22 nt, Human
uaaaaaguugaaaggacuuauc

SEQ ID NO: 955661 - RNA, 22 nt, Human
uuuauuagauuaucaaagaggu

SEQ ID NO: 955662 - RNA, 22 nt, Human
ccuggccacagggcucugcauu

SEQ ID NO: 955663 - RNA, 22 nt, Human
acuccuggguugcaguccucaa

SEQ ID NO: 955664 - RNA, 22 nt, Human
uuuuaguuguacugucaacagu

SEQ ID NO: 955665 - RNA, 22 nt, Human
ugagccaaugauuugaauagag

SEQ ID NO: 955666 - RNA, 22 nt, Human
acagcaugucuaguuaaauacu

SEQ ID NO: 955667 - RNA, 20 nt, Human
cugggccauccuuuuacaau

SEQ ID NO: 955668 - RNA, 22 nt, Human
uuauuuggaaauauggcuucug

SEQ ID NO: 955669 - RNA, 22 nt, Human
acacauuauaggcaaucaaaag

SEQ ID NO: 955670 - RNA, 22 nt, Human
ugaaauguaaauaggacuagaa

SEQ ID NO: 955671 - RNA, 22 nt, Human
ucagcaggcaggaggcaugcca

SEQ ID NO: 955672 - RNA, 22 nt, Human
auagucaaccuuguaauuagcc

SEQ ID NO: 955673 - RNA, 22 nt, Human
cagagagggcggcccuggcuuc

SEQ ID NO: 955674 - RNA, 22 nt, Human
cacucugccugauguuacaugg

SEQ ID NO: 955675 - RNA, 22 nt, Human
auucacaaagaagggaaguaca

SEQ ID NO: 955676 - RNA, 22 nt, Human
cucauacauaugccauuccugc

SEQ ID NO: 955677 - RNA, 22 nt, Human
gcucugcugaagccccuugcau

SEQ ID NO: 955678 - RNA, 22 nt, Human
auauuagguuggugcaaaagua

SEQ ID NO: 955679 - RNA, 22 nt, Human
uagcacugaaucacaugcugcu

SEQ ID NO: 955680 - RNA, 20 nt, Human
uugaggagauauugaauacu

SEQ ID NO: 955681 - RNA, 22 nt, Human
uacucugccacuaggaguucug

SEQ ID NO: 955682 - RNA, 22 nt, Human
gaguuuaaauaacacauuucca

SEQ ID NO: 955683 - RNA, 22 nt, Human
guucacaaaauucuggccagug

SEQ ID NO: 955684 - RNA, 22 nt, Human
auguuuaaaggagucagagacu

SEQ ID NO: 955685 - RNA, 22 nt, Human
aguguacacuaaaugaauacaa

SEQ ID NO: 955686 - RNA, 22 nt, Human
ucauugaaugcucugcagguug

SEQ ID NO: 955687 - RNA, 22 nt, Human
gcuuccuaaaugcacagggcag

SEQ ID NO: 955688 - RNA, 22 nt, Human
aaacacagggauauauauucca

SEQ ID NO: 955689 - RNA, 22 nt, Human
uggcaccagcaccuagaugggg

SEQ ID NO: 955690 - RNA, 22 nt, Human
ggcagcaucacuugucuccagc

SEQ ID NO: 955691 - RNA, 22 nt, Human
cuucacaauucuaacagggcaa

SEQ ID NO: 955692 - RNA, 22 nt, Human
uguguuaauuccacaaacauuc

SEQ ID NO: 955693 - RNA, 22 nt, Human
uuuaggauaacuccaguuuucc

SEQ ID NO: 955694 - RNA, 22 nt, Human
ugcauguuauuguggcaagaau

SEQ ID NO: 955695 - RNA, 22 nt, Human
ccuccuggaaaaauucccuggc

SEQ ID NO: 955696 - RNA, 22 nt, Human
aucugaagcuaucugcacuuca

SEQ ID NO: 955697 - RNA, 22 nt, Human
uaaagcacgucuauuuaaugau

SEQ ID NO: 955698 - RNA, 22 nt, Human
aacaugucuggguauucacaag

SEQ ID NO: 955699 - RNA, 22 nt, Human
uuaauuuuuauguauagugugu

SEQ ID NO: 955700 - RNA, 19 nt, Human
ccucugcuccaguuuccuu

SEQ ID NO: 955701 - RNA, 23 nt, Human
ugucuggcucauggugggucuca

SEQ ID NO: 955702 - RNA, 22 nt, Human
ucacucugucccccauugagau

SEQ ID NO: 955703 - RNA, 22 nt, Human
auuauuaggacuacugggguug

SEQ ID NO: 955704 - RNA, 22 nt, Human
aaacacaucauucaugucguca

SEQ ID NO: 955705 - RNA, 17 nt, Human
ucuccuggcucuaucag

SEQ ID NO: 955706 - RNA, 22 nt, Human
uccaagggcaugcugaaauaag

SEQ ID NO: 955707 - RNA, 22 nt, Human
ccuccugggcuccugucugcac

SEQ ID NO: 955708 - RNA, 22 nt, Human
ccuccuggccugugcagagccc

SEQ ID NO: 955709 - RNA, 22 nt, Human
uuauguagcagaaagauguuug

SEQ ID NO: 955710 - RNA, 22 nt, Human
uuggccaagucacugguuaaug

SEQ ID NO: 955711 - RNA, 22 nt, Human
cugagccagcgggcucacuuuu

SEQ ID NO: 955712 - RNA, 22 nt, Human
uccuggcccgaucccugugaag

SEQ ID NO: 955713 - RNA, 22 nt, Human
ucaaaaaguugaagaguugggg

SEQ ID NO: 955714 - RNA, 20 nt, Human
uccagggcaacuagagugug

SEQ ID NO: 955715 - RNA, 22 nt, Human
uuggcagcauccaagucucggg

SEQ ID NO: 955716 - RNA, 22 nt, Human
gaauuacauuguuagccuuccu

SEQ ID NO: 955717 - RNA, 22 nt, Human
uaggaugaucuuguagagagau

SEQ ID NO: 955718 - RNA, 22 nt, Human
uuuaggaucaaugagaaagucu

SEQ ID NO: 955719 - RNA, 22 nt, Human
cuccuggaccagggcuauuggg

SEQ ID NO: 955720 - RNA, 22 nt, Human
ucacucuguguuucccugggac

SEQ ID NO: 955721 - RNA, 22 nt, Human
ucuccugggugcuuuaucagaa

SEQ ID NO: 955722 - RNA, 22 nt, Human
ccuuuuaugaacuugagcaggu

SEQ ID NO: 955723 - RNA, 23 nt, Human
acucagcuuugggagaugacuca

SEQ ID NO: 955724 - RNA, 22 nt, Human
gggccaaggggagcuggaaggg

SEQ ID NO: 955725 - RNA, 22 nt, Human
aaagucauugcuguuaucaaug

SEQ ID NO: 955726 - RNA, 22 nt, Human
guacacucccccugugaaguug

SEQ ID NO: 955727 - RNA, 18 nt, Human
uggcagcaggaagccauu

SEQ ID NO: 955728 - RNA, 23 nt, Human
aacuccugaaucgugagccaucu

SEQ ID NO: 955729 - RNA, 22 nt, Human
uugaauaauuaauuacacucag

SEQ ID NO: 955730 - RNA, 22 nt, Human
uuccuugaaugagucauggaaa

SEQ ID NO: 955731 - RNA, 18 nt, Human
aggccaaacuuguaagca

SEQ ID NO: 955732 - RNA, 16 nt, Human
gcucugcugaggccca

SEQ ID NO: 955733 - RNA, 19 nt, Human
gcuccugggccucacucau

SEQ ID NO: 955734 - RNA, 22 nt, Human
uuggccaaauaaucuugcagau

SEQ ID NO: 955735 - RNA, 22 nt, Human
acucugcucuuuggacaaugcc

SEQ ID NO: 955736 - RNA, 22 nt, Human
guuugaaugcaguaugcauuuu

SEQ ID NO: 955737 - RNA, 22 nt, Human
uggcaacaccuggaagacaugg

SEQ ID NO: 955738 - RNA, 22 nt, Human
aguugcagacgcagagauguug

SEQ ID NO: 955739 - RNA, 22 nt, Human
gggaagauaguguugagggccc

SEQ ID NO: 955740 - RNA, 22 nt, Human
uauaaagaaguguaaacaggaa

SEQ ID NO: 955741 - RNA, 22 nt, Human
augcugagcagagcugacaugc

SEQ ID NO: 955742 - RNA, 22 nt, Human
aauccuggaauacaagagugaa

SEQ ID NO: 955743 - RNA, 22 nt, Human
augaggauuaacuguugucaua

SEQ ID NO: 955744 - RNA, 22 nt, Human
uaaugaugugugcaaacugaau

SEQ ID NO: 955745 - RNA, 22 nt, Human
uucagcaacauuuguugagugc

SEQ ID NO: 955746 - RNA, 22 nt, Human
ugcugagguuucgucugcuugc

SEQ ID NO: 955747 - RNA, 22 nt, Human
uuggccaaaaaagucauuagaa

SEQ ID NO: 955748 - RNA, 22 nt, Human
uccuggcccggccgggccugcu

SEQ ID NO: 955749 - RNA, 22 nt, Human
aaccaggugacucauggugagc

SEQ ID NO: 955750 - RNA, 22 nt, Human
uuguuaguuuauauaauguagu

SEQ ID NO: 955751 - RNA, 22 nt, Human
uagaauaaguugaugauauaug

SEQ ID NO: 955752 - RNA, 22 nt, Human
auagaguccaaaguaugaauau

SEQ ID NO: 955753 - RNA, 22 nt, Human
ucuccuggccgggcuguccccu

SEQ ID NO: 955754 - RNA, 22 nt, Human
uuguauucauugcuuacccaau

SEQ ID NO: 955755 - RNA, 22 nt, Human
cuggcccagagcucuggccuuu

SEQ ID NO: 955756 - RNA, 22 nt, Human
uaaaccuugguagcaucuugcu

SEQ ID NO: 955757 - RNA, 22 nt, Human
augcccugaggaaugucacgcu

SEQ ID NO: 955758 - RNA, 22 nt, Human
caauaaguaauaggcaucuaau

SEQ ID NO: 955759 - RNA, 22 nt, Human
uuuuauucuaaguaugauggga

SEQ ID NO: 955760 - RNA, 22 nt, Human
cugagggucaacuugauuguau

SEQ ID NO: 955761 - RNA, 22 nt, Human
ucuggccacccgaggccccugc

SEQ ID NO: 955762 - RNA, 19 nt, Human
auuagcaugcuugaggaug

SEQ ID NO: 955763 - RNA, 22 nt, Human
acuccuggaaaagaacgcaggg

SEQ ID NO: 955764 - RNA, 22 nt, Human
augaaauaucuugaagaaauuc

SEQ ID NO: 955765 - RNA, 22 nt, Human
ucugccacuagugguuaccuua

SEQ ID NO: 955766 - RNA, 22 nt, Human
uucaggauggcggauguugggg

SEQ ID NO: 955767 - RNA, 22 nt, Human
ugcauuccauguguuuccugag

SEQ ID NO: 955768 - RNA, 22 nt, Human
aaagacauuagauuaacguaca

SEQ ID NO: 955769 - RNA, 22 nt, Human
gacucugcuacaggccgagguu

SEQ ID NO: 955770 - RNA, 22 nt, Human
uuucaacagcucucaaaugauc

SEQ ID NO: 955771 - RNA, 22 nt, Human
uuggccaagggaucgagguugg

SEQ ID NO: 955772 - RNA, 22 nt, Human
uccaagggcuuuggcgugaagu

SEQ ID NO: 955773 - RNA, 22 nt, Human
caauaagugcuuuuguuuagca

SEQ ID NO: 955774 - RNA, 22 nt, Human
aucauuuaaaacaagucucuau

SEQ ID NO: 955775 - RNA, 22 nt, Human
acuugaaaggaagcucuaaaac

SEQ ID NO: 955776 - RNA, 22 nt, Human
acacuucuauucccugcacaaa

SEQ ID NO: 955777 - RNA, 17 nt, Human
acacagggagagggagc

SEQ ID NO: 955778 - RNA, 22 nt, Human
auagucacucuguuagguguuu

SEQ ID NO: 955779 - RNA, 22 nt, Human
acauucuuaacaguuaaaaacu

SEQ ID NO: 955780 - RNA, 23 nt, Human
agggcacugaagcuggaauuggg

SEQ ID NO: 955781 - RNA, 22 nt, Human
gagggcuccucacauucucuau

SEQ ID NO: 955782 - RNA, 22 nt, Human
auauaauaguuucauaaaggcu

SEQ ID NO: 955783 - RNA, 22 nt, Human
acaugaaaccugagucuaacuc

SEQ ID NO: 955784 - RNA, 22 nt, Human
aauacugccugugagguaacuc

SEQ ID NO: 955785 - RNA, 22 nt, Human
gaaauauuacaguggaggggau

SEQ ID NO: 955786 - RNA, 22 nt, Human
guuuauuauacaacaaaagcua

SEQ ID NO: 955787 - RNA, 22 nt, Human
ucagggaacuacuucucccuau

SEQ ID NO: 955788 - RNA, 22 nt, Human
ucuggccacuugcuucacacug

SEQ ID NO: 955789 - RNA, 22 nt, Human
uuccuguuucauagaaaacuga

SEQ ID NO: 955790 - RNA, 22 nt, Human
accuuauuaaaaugaugaugua

SEQ ID NO: 955791 - RNA, 22 nt, Human
auaugaaaguaagcaugugugu

SEQ ID NO: 955792 - RNA, 20 nt, Human
ccuuuauuauuuguaugaug

SEQ ID NO: 955793 - RNA, 22 nt, Human
uguuggcagauugucuaggguu

SEQ ID NO: 955794 - RNA, 22 nt, Human
ccuggccauuugaacuucagac

SEQ ID NO: 955795 - RNA, 22 nt, Human
gagggcuccauuccccgugccc

SEQ ID NO: 955796 - RNA, 22 nt, Human
caccucuuugauuugaggcaag

SEQ ID NO: 955797 - RNA, 22 nt, Human
cucucuggcacuucauugcugu

SEQ ID NO: 955798 - RNA, 23 nt, Human
uucaaaacuggaaaaucagaugc

SEQ ID NO: 955799 - RNA, 22 nt, Human
ucuccuggaagugauuccccug

SEQ ID NO: 955800 - RNA, 22 nt, Human
gcuggccagugucccagggauc

SEQ ID NO: 955801 - RNA, 22 nt, Human
ccacucugauuggucaccucug

SEQ ID NO: 955802 - RNA, 22 nt, Human
uuccuggcauagagagggcaca

SEQ ID NO: 955803 - RNA, 22 nt, Human
cagccuuugggucagaagauuc

SEQ ID NO: 955804 - RNA, 18 nt, Human
aacuucaacuacaaugga

SEQ ID NO: 955805 - RNA, 22 nt, Human
uccaagggcagcagccauagcc

SEQ ID NO: 955806 - RNA, 22 nt, Human
caacuccuccccagcaugccaa

SEQ ID NO: 955807 - RNA, 16 nt, Human
ucucugcuucauaggu

SEQ ID NO: 955808 - RNA, 22 nt, Human
agccauuggcugccuggugcgu

SEQ ID NO: 955809 - RNA, 22 nt, Human
cacucugcugaaaucgccuugu

SEQ ID NO: 955810 - RNA, 22 nt, Human
caaaaguagugaaguuguacau

SEQ ID NO: 955811 - RNA, 22 nt, Human
uggcacauagaaaaggaucaau

SEQ ID NO: 955812 - RNA, 22 nt, Human
uguuggcaucucugagagaguu

SEQ ID NO: 955813 - RNA, 22 nt, Human
auaaauaucacuguugucccuc

SEQ ID NO: 955814 - RNA, 22 nt, Human
cugccacuagcuuucacaucuu

SEQ ID NO: 955815 - RNA, 22 nt, Human
auggccaagagucgauuugggg

SEQ ID NO: 955816 - RNA, 22 nt, Human
cucuggccuggggccugcuccc

SEQ ID NO: 955817 - RNA, 22 nt, Human
cuucaaacccagauuaaaugca

SEQ ID NO: 955818 - RNA, 22 nt, Human
cuuaggaugaguuuuugcguuu

SEQ ID NO: 955819 - RNA, 19 nt, Human
cauuccuuugucugccaaa

SEQ ID NO: 955820 - RNA, 22 nt, Human
auuaggcaauucugggcaucuc

SEQ ID NO: 955821 - RNA, 22 nt, Human
ggucugaguggugcugacucag

SEQ ID NO: 955822 - RNA, 22 nt, Human
uaacccaaaggcaaugucucga

SEQ ID NO: 955823 - RNA, 20 nt, Human
cugagccaacucucuucuug

SEQ ID NO: 955824 - RNA, 20 nt, Human
acauggaaggucaaacuauc

SEQ ID NO: 955825 - RNA, 22 nt, Human
aagcaugugcuggggcuuuuug

SEQ ID NO: 955826 - RNA, 22 nt, Human
augaaagaugauuuaaaguacu

SEQ ID NO: 955827 - RNA, 23 nt, Human
gcucugcucuguuucauagacag

SEQ ID NO: 955828 - RNA, 22 nt, Human
ucuccuggauagauacuaucca

SEQ ID NO: 955829 - RNA, 22 nt, Human
cuccugggcucauaucauucag

SEQ ID NO: 955830 - RNA, 22 nt, Human
uuccuggcaugaaaaauaucac

SEQ ID NO: 955831 - RNA, 22 nt, Human
agcuuguagaaggccacgagca

SEQ ID NO: 955832 - RNA, 22 nt, Human
aaacaaguuuagaauaaugaau

SEQ ID NO: 955833 - RNA, 22 nt, Human
auuaggauguguauauuguguu

SEQ ID NO: 955834 - RNA, 22 nt, Human
gcucugcuugcaucaugacugc

SEQ ID NO: 955835 - RNA, 20 nt, Human
auggccaaccugcuuaugac

SEQ ID NO: 955836 - RNA, 22 nt, Human
cucuugaaaauuggaacacaga

SEQ ID NO: 955837 - RNA, 22 nt, Human
ucuuuuauccuacauuuagcuc

SEQ ID NO: 955838 - RNA, 17 nt, Human
uuccacaauaguuuguc

SEQ ID NO: 955839 - RNA, 22 nt, Human
uucaaucauuuuuacauagucc

SEQ ID NO: 955840 - RNA, 22 nt, Human
ccuccuggcuuuucccauugaa

SEQ ID NO: 955841 - RNA, 22 nt, Human
uaacugauauugaaaaacauca

SEQ ID NO: 955842 - RNA, 22 nt, Human
agcuagaauguuccuuuucauu

SEQ ID NO: 955843 - RNA, 22 nt, Human
ucauguuuggaguuugcucacu

SEQ ID NO: 955844 - RNA, 22 nt, Human
augcacuaugaugagcuagucu

SEQ ID NO: 955845 - RNA, 22 nt, Human
acauuuaaauaugccuuauauu

SEQ ID NO: 955846 - RNA, 22 nt, Human
gacagagaggcugagcaguaca

SEQ ID NO: 955847 - RNA, 22 nt, Human
aacugccuggccaggcugcaac

SEQ ID NO: 955848 - RNA, 22 nt, Human
ccacucugauuuuggcuccacu

SEQ ID NO: 955849 - RNA, 22 nt, Human
uaugucuugcauuuuucaaacu

SEQ ID NO: 955850 - RNA, 22 nt, Human
gaaucauagaacauuaauagaa

SEQ ID NO: 955851 - RNA, 22 nt, Human
ugaaagcagugccaugauuaug

SEQ ID NO: 955852 - RNA, 22 nt, Human
ccuggccaggcauggagucaca

SEQ ID NO: 955853 - RNA, 22 nt, Human
auggcaagcaagcugaagagau

SEQ ID NO: 955854 - RNA, 22 nt, Human
ggaagugaggaauuagguuuau

SEQ ID NO: 955855 - RNA, 22 nt, Human
uccuggcccuguggccugcagu

SEQ ID NO: 955856 - RNA, 22 nt, Human
ccacucugcugugcuccaugau

SEQ ID NO: 955857 - RNA, 20 nt, Human
uuucacaaugaacaugucuc

SEQ ID NO: 955858 - RNA, 19 nt, Human
acuuccugcccgcuccuuu

SEQ ID NO: 955859 - RNA, 22 nt, Human
auucuuuucccaacugcuuuaa

SEQ ID NO: 955860 - RNA, 22 nt, Human
aaauauuauugcuuaaggggag

SEQ ID NO: 955861 - RNA, 22 nt, Human
cuuuuuaucucuuaaugauguu

SEQ ID NO: 955862 - RNA, 22 nt, Human
aaaacagacagccaguguagag

SEQ ID NO: 955863 - RNA, 22 nt, Human
guauuaggagguggagccuuug

SEQ ID NO: 955864 - RNA, 21 nt, Human
uuccuggcggcagaaacguga

SEQ ID NO: 955865 - RNA, 22 nt, Human
auuaggacacauacauguacag

SEQ ID NO: 955866 - RNA, 17 nt, Human
ccacucaguaauuucuc

SEQ ID NO: 955867 - RNA, 22 nt, Human
acagggaaguucugcaacagga

SEQ ID NO: 955868 - RNA, 22 nt, Human
uuaggcauauggcacaugauag

SEQ ID NO: 955869 - RNA, 22 nt, Human
aaccuucacuugcuucauuuga

SEQ ID NO: 955870 - RNA, 22 nt, Human
uccuggccgccgcguggggccg

SEQ ID NO: 955871 - RNA, 22 nt, Human
aauaagaaagagucagcuucag

SEQ ID NO: 955872 - RNA, 22 nt, Human
uagcuuuguuagaaugucuuca

SEQ ID NO: 955873 - RNA, 22 nt, Human
uggccacaguguccagcagcag

SEQ ID NO: 955874 - RNA, 21 nt, Human
aaguuuguucuuguauagucu

SEQ ID NO: 955875 - RNA, 22 nt, Human
auuggcaaggcugcggugucug

SEQ ID NO: 955876 - RNA, 22 nt, Human
aacauguugcuuuaauaauauu

SEQ ID NO: 955877 - RNA, 20 nt, Human
aggauuugagaaggcgucuu

SEQ ID NO: 955878 - RNA, 22 nt, Human
ucucuggcagggauaucuggcu

SEQ ID NO: 955879 - RNA, 18 nt, Human
ucuuggcagcaucuggca

SEQ ID NO: 955880 - RNA, 22 nt, Human
uuguuuaaaauguagcaagaaa

SEQ ID NO: 955881 - RNA, 22 nt, Human
acacuuuuguguauauccaguu

SEQ ID NO: 955882 - RNA, 22 nt, Human
uggaagagaaaggaguggaucu

SEQ ID NO: 955883 - RNA, 22 nt, Human
acuggccaggcgaaccacacug

SEQ ID NO: 955884 - RNA, 22 nt, Human
aaaguuugcaauuuauguuaau

SEQ ID NO: 955885 - RNA, 22 nt, Human
aggucaccauggcaugcuccac

SEQ ID NO: 955886 - RNA, 22 nt, Human
cauugguagaguuuguuuuaua

SEQ ID NO: 955887 - RNA, 22 nt, Human
agaauaaaucaaauguccugag

SEQ ID NO: 955888 - RNA, 22 nt, Human
acucugcuauugcagugcaaaa

SEQ ID NO: 955889 - RNA, 22 nt, Human
aauucacagcauuugcccaucu

SEQ ID NO: 955890 - RNA, 22 nt, Human
gacauaaaauucaauaauuugu

SEQ ID NO: 955891 - RNA, 22 nt, Human
aagucauucuauuucucuaugu

SEQ ID NO: 955892 - RNA, 22 nt, Human
agaauaaauguuggacuuagga

SEQ ID NO: 955893 - RNA, 22 nt, Human
agggaaugcuccguauaaaucu

SEQ ID NO: 955894 - RNA, 22 nt, Human
aacuucugggcuguccaaaacu

SEQ ID NO: 955895 - RNA, 22 nt, Human
uuaaaagagcagcccagcauau

SEQ ID NO: 955896 - RNA, 22 nt, Human
gacucugcugacuaguugacua

SEQ ID NO: 955897 - RNA, 22 nt, Human
ucugccacuuuugcuuacuggg

SEQ ID NO: 955898 - RNA, 22 nt, Human
uuggccaauccuauuggguggg

SEQ ID NO: 955899 - RNA, 22 nt, Human
guugaaauuugugauaauuuag

SEQ ID NO: 955900 - RNA, 22 nt, Human
auacagcagugaauaagauaaa

SEQ ID NO: 955901 - RNA, 22 nt, Human
ucuugcuaaagaccaacacauu

SEQ ID NO: 955902 - RNA, 22 nt, Human
agaauaugaggaaacugugaau

SEQ ID NO: 955903 - RNA, 22 nt, Human
uuugauucuguaaaauaacagg

SEQ ID NO: 955904 - RNA, 20 nt, Human
ccagucucuaucagaaauaa

SEQ ID NO: 955905 - RNA, 22 nt, Human
cugggccaguuaugucucaucu

SEQ ID NO: 955906 - RNA, 18 nt, Human
acaguaaagaaaggaauu

SEQ ID NO: 955907 - RNA, 22 nt, Human
gcucugcuggaaguucucugga

SEQ ID NO: 955908 - RNA, 22 nt, Human
uaucuuugaugccagauguuac

SEQ ID NO: 955909 - RNA, 22 nt, Human
uacaccuuaaucauaugugucu

SEQ ID NO: 955910 - RNA, 22 nt, Human
cacaguuucuauaggucagaau

SEQ ID NO: 955911 - RNA, 22 nt, Human
cuucuuaaagauuacacaauga

SEQ ID NO: 955912 - RNA, 22 nt, Human
gcugaaauucagauuccuaggc

SEQ ID NO: 955913 - RNA, 17 nt, Human
auuagguuuugucauga

SEQ ID NO: 955914 - RNA, 22 nt, Human
gaaaugugggucaugacccauu

SEQ ID NO: 955915 - RNA, 22 nt, Human
acuuugaaggggaacauuuuaa

SEQ ID NO: 955916 - RNA, 20 nt, Human
caguuuaacuuugagcaguu

SEQ ID NO: 955917 - RNA, 22 nt, Human
uuccuggcugaacugaacuccu

SEQ ID NO: 955918 - RNA, 22 nt, Human
aacucugccagguuucaggagc

SEQ ID NO: 955919 - RNA, 22 nt, Human
gucucuaucauagcugaacccu

SEQ ID NO: 955920 - RNA, 22 nt, Human
uacuccugcugauccugccagc

SEQ ID NO: 955921 - RNA, 22 nt, Human
ucacucuguuuuacucacuguu

SEQ ID NO: 955922 - RNA, 22 nt, Human
ggccaaauuuggccaugagcau

SEQ ID NO: 955923 - RNA, 22 nt, Human
aggccaaagcaagacccuguaa

SEQ ID NO: 955924 - RNA, 22 nt, Human
gaguuuaaaacgcuuguauuua

SEQ ID NO: 955925 - RNA, 22 nt, Human
uuccuggccucucucugagcag

SEQ ID NO: 955926 - RNA, 22 nt, Human
aggccaaauugaucaucuuuag

SEQ ID NO: 955927 - RNA, 22 nt, Human
uuggccaagacucauguccuau

SEQ ID NO: 955928 - RNA, 22 nt, Human
gauuuggccuuucgcaugguau

SEQ ID NO: 955929 - RNA, 22 nt, Human
auuaggauuugguauggucaua

SEQ ID NO: 955930 - RNA, 21 nt, Human
cucucugcuuaugaauaguga

SEQ ID NO: 955931 - RNA, 22 nt, Human
aaaagcuagucaaugauguauu

SEQ ID NO: 955932 - RNA, 22 nt, Human
aaugauguuuuuaaagaacaua

SEQ ID NO: 955933 - RNA, 22 nt, Human
agagggcugcugcacagugcuc

SEQ ID NO: 955934 - RNA, 23 nt, Human
ucaaacauauugugagacacagg

SEQ ID NO: 955935 - RNA, 22 nt, Human
ccuccuggcccugggccuggaa

SEQ ID NO: 955936 - RNA, 22 nt, Human
aucaggauccaccuugagccug

SEQ ID NO: 955937 - RNA, 20 nt, Human
auucacaaagccaguguugc

SEQ ID NO: 955938 - RNA, 22 nt, Human
aauaauguugacgauagucuua

SEQ ID NO: 955939 - RNA, 22 nt, Human
uggccaaauuugguguaacuug

SEQ ID NO: 955940 - RNA, 22 nt, Human
gucaucuuccuaguguuaacua

SEQ ID NO: 955941 - RNA, 23 nt, Human
aacugagauaauguauguaaagc

SEQ ID NO: 955942 - RNA, 22 nt, Human
aaagucauacauggugcuuacu

SEQ ID NO: 955943 - RNA, 22 nt, Human
uagaauaugugguguauacuuu

SEQ ID NO: 955944 - RNA, 22 nt, Human
ccugagccuggcucaugcacuc

SEQ ID NO: 955945 - RNA, 23 nt, Human
ucuccuggcugcacuguggccac

SEQ ID NO: 955946 - RNA, 17 nt, Human
uucugagccacuuccuu

SEQ ID NO: 955947 - RNA, 22 nt, Human
uggcagcagacaaaaggccauu

SEQ ID NO: 955948 - RNA, 22 nt, Human
uauuagugaaagaauuaguuug

SEQ ID NO: 955949 - RNA, 22 nt, Human
gcuccuggugcuguagagauuu

SEQ ID NO: 955950 - RNA, 22 nt, Human
aauucacauguugaaguccuaa

SEQ ID NO: 955951 - RNA, 22 nt, Human
cuuaggauuuaauuucagacuc

SEQ ID NO: 955952 - RNA, 22 nt, Human
cuucacaaucaccuuuucggaa

SEQ ID NO: 955953 - RNA, 22 nt, Human
caccuuuugugucugcguuugu

SEQ ID NO: 955954 - RNA, 23 nt, Human
uauuagggccaggacuggcaaau

SEQ ID NO: 955955 - RNA, 22 nt, Human
gcaccuuucuauauucaguggc

SEQ ID NO: 955956 - RNA, 22 nt, Human
cacuaaguaagcuccucuacaa

SEQ ID NO: 955957 - RNA, 22 nt, Human
uauuagagaaaagauggaugug

SEQ ID NO: 955958 - RNA, 22 nt, Human
cuuuguauucaguugggcugug

SEQ ID NO: 955959 - RNA, 22 nt, Human
acucuuuuauaaagcaucuuga

SEQ ID NO: 955960 - RNA, 22 nt, Human
uuucacaauuuuaaggagcaaa

SEQ ID NO: 955961 - RNA, 21 nt, Human
gacaggacuagaccagagcuc

SEQ ID NO: 955962 - RNA, 22 nt, Human
gaauauuaguaucaguuauacc

SEQ ID NO: 955963 - RNA, 22 nt, Human
uuuuauauugagugagaguucc

SEQ ID NO: 955964 - RNA, 22 nt, Human
ccuccuggaggcucuaagggag

SEQ ID NO: 955965 - RNA, 22 nt, Human
agcuccugaaaauccagacugg

SEQ ID NO: 955966 - RNA, 21 nt, Human
aaaaagcuggggcaugcaugc

SEQ ID NO: 955967 - RNA, 22 nt, Human
aaauaaguuaaacuagaaugau

SEQ ID NO: 955968 - RNA, 22 nt, Human
uauuaugagguauuuggacuuu

SEQ ID NO: 955969 - RNA, 22 nt, Human
aucauaaaccacuuuguaaucu

SEQ ID NO: 955970 - RNA, 22 nt, Human
auagauguucaaucagauauuu

SEQ ID NO: 955971 - RNA, 22 nt, Human
ccucugcugcuguugagcaccg

SEQ ID NO: 955972 - RNA, 22 nt, Human
aauucacaugcaugucugugca

SEQ ID NO: 955973 - RNA, 22 nt, Human
gcuggccauggggagugaggag

SEQ ID NO: 955974 - RNA, 22 nt, Human
acauuuaaauaccuauguuucu

SEQ ID NO: 955975 - RNA, 20 nt, Human
acugggcauaccuguccugu

SEQ ID NO: 955976 - RNA, 23 nt, Human
uuuuaauuuggacauaagaagau

SEQ ID NO: 955977 - RNA, 22 nt, Human
auguuuaagaaagucuuccaua

SEQ ID NO: 955978 - RNA, 18 nt, Human
augcuuugcuuacguuau

SEQ ID NO: 955979 - RNA, 22 nt, Human
aauaauguuaugucauucuucu

SEQ ID NO: 955980 - RNA, 22 nt, Human
uugaggaguguuuagggugagg

SEQ ID NO: 955981 - RNA, 22 nt, Human
gcuggccaggugcuuugguucu

SEQ ID NO: 955982 - RNA, 22 nt, Human
caugucuuggcuuaggcacaga

SEQ ID NO: 955983 - RNA, 22 nt, Human
aaacacuagcaggaagcacuga

SEQ ID NO: 955984 - RNA, 22 nt, Human
guucacaagaugugguggggag

SEQ ID NO: 955985 - RNA, 22 nt, Human
aggauguugcuauuggcagucu

SEQ ID NO: 955986 - RNA, 22 nt, Human
ccuuuucuaaucuuaagaaugu

SEQ ID NO: 955987 - RNA, 21 nt, Human
ucacucugauuaggugucucu

SEQ ID NO: 955988 - RNA, 22 nt, Human
acuggccaugggauuuauauuu

SEQ ID NO: 955989 - RNA, 22 nt, Human
cuguuuauagcagagcaagccu

SEQ ID NO: 955990 - RNA, 22 nt, Human
cugguccauucucucccugaag

SEQ ID NO: 955991 - RNA, 22 nt, Human
acauuaaugaggugaugacaca

SEQ ID NO: 955992 - RNA, 22 nt, Human
auggccaaggggccuaggcagg

SEQ ID NO: 955993 - RNA, 22 nt, Human
ucugccaccaccuacacuagua

SEQ ID NO: 955994 - RNA, 22 nt, Human
ucuuuuaaaagcccugcugucu

SEQ ID NO: 955995 - RNA, 22 nt, Human
uauauuaacacccacuugccuc

SEQ ID NO: 955996 - RNA, 21 nt, Human
uggcagacuagaguauagaug

SEQ ID NO: 955997 - RNA, 22 nt, Human
ucugagccaccugccagugcug

SEQ ID NO: 955998 - RNA, 22 nt, Human
uuucacaaucaaauggugaaau

SEQ ID NO: 955999 - RNA, 22 nt, Human
ucugcuguugccaugaguaaua

SEQ ID NO: 956000 - RNA, 22 nt, Human
ggccaaaucuguaaggcaagau

SEQ ID NO: 956001 - RNA, 21 nt, Human
auuuggauauugcuggcaaau

SEQ ID NO: 956002 - RNA, 18 nt, Human
gcuccuggagucugacuc

SEQ ID NO: 956003 - RNA, 22 nt, Human
cccauggcuuaggagggagugu

SEQ ID NO: 956004 - RNA, 22 nt, Human
uaaccuuucaggcauguagguu

SEQ ID NO: 956005 - RNA, 22 nt, Human
uauuggcagcaugagcuccugg

SEQ ID NO: 956006 - RNA, 22 nt, Human
acacucugcucugagcuucagg

SEQ ID NO: 956007 - RNA, 22 nt, Human
augcugagugagugaaacccag

SEQ ID NO: 956008 - RNA, 22 nt, Human
ucuuuuuauauugacaaaaggu

SEQ ID NO: 956009 - RNA, 20 nt, Human
ucaccuuuguugguauucau

SEQ ID NO: 956010 - RNA, 20 nt, Human
aaaaacaguaaugcugaaga

SEQ ID NO: 956011 - RNA, 22 nt, Human
aacuccuguucuaugacaagag

SEQ ID NO: 956012 - RNA, 22 nt, Human
guugaaaugagggauuaaucag

SEQ ID NO: 956013 - RNA, 22 nt, Human
gucugagcgcuggagcuugugu

SEQ ID NO: 956014 - RNA, 22 nt, Human
uggcagcacuugaacuugagcc

SEQ ID NO: 956015 - RNA, 22 nt, Human
uauuuaauuugcucauugugau

SEQ ID NO: 956016 - RNA, 22 nt, Human
auuagagaaauguugccaagau

SEQ ID NO: 956017 - RNA, 23 nt, Human
cuucacaaucaaaaucaguucug

SEQ ID NO: 956018 - RNA, 22 nt, Human
uuaaaacagcgugaaucuggca

SEQ ID NO: 956019 - RNA, 22 nt, Human
ugaauaagaauuauuauaauga

SEQ ID NO: 956020 - RNA, 22 nt, Human
auggccaagaauauuucucaac

SEQ ID NO: 956021 - RNA, 22 nt, Human
auuuggcauaggcagaggccca

SEQ ID NO: 956022 - RNA, 22 nt, Human
gcuggccacacugcugauggag

SEQ ID NO: 956023 - RNA, 22 nt, Human
caaguaugagaaagcuauuacc

SEQ ID NO: 956024 - RNA, 22 nt, Human
ucacucugagaggucacuggaa

SEQ ID NO: 956025 - RNA, 21 nt, Human
agggaaagaaaaugagcuaau

SEQ ID NO: 956026 - RNA, 22 nt, Human
cucugcuuuuuaaaaggagucc

SEQ ID NO: 956027 - RNA, 22 nt, Human
gaggaaggucccaucagaauuu

SEQ ID NO: 956028 - RNA, 22 nt, Human
agacagugcaagaagagcaggc

SEQ ID NO: 956029 - RNA, 21 nt, Human
ugacauaauccauaguacaaa

SEQ ID NO: 956030 - RNA, 22 nt, Human
ugacauaaaccagugagcaaaa

SEQ ID NO: 956031 - RNA, 22 nt, Human
uuuaggaugcucuauucugacu

SEQ ID NO: 956032 - RNA, 22 nt, Human
uccugggcuuuguuucucuccu

SEQ ID NO: 956033 - RNA, 22 nt, Human
cuggccaauauagggaaaucuu

SEQ ID NO: 956034 - RNA, 22 nt, Human
acucugcuuccacuuuugcuaa

SEQ ID NO: 956035 - RNA, 22 nt, Human
aaacagaaauuuccucaugcuc

SEQ ID NO: 956036 - RNA, 22 nt, Human
aggauguuaucugugcaggugg

SEQ ID NO: 956037 - RNA, 22 nt, Human
augcaaaagacuauuuguugcu

SEQ ID NO: 956038 - RNA, 22 nt, Human
aauaugaauuauuguuacaagu

SEQ ID NO: 956039 - RNA, 22 nt, Human
aauaugucugcuaauuguuucu

SEQ ID NO: 956040 - RNA, 22 nt, Human
aaaguauuuuugacaggcauua

SEQ ID NO: 956041 - RNA, 22 nt, Human
cugagccagcuggcaugugcua

SEQ ID NO: 956042 - RNA, 22 nt, Human
uaggauuuggcuuuagucaggu

SEQ ID NO: 956043 - RNA, 22 nt, Human
ugaaauguguaauguggaugcc

SEQ ID NO: 956044 - RNA, 22 nt, Human
acacucugugaggcauguaaug

SEQ ID NO: 956045 - RNA, 22 nt, Human
ccuccugggacaggcuggcaca

SEQ ID NO: 956046 - RNA, 22 nt, Human
uggucuaaauauggcucuaaau

SEQ ID NO: 956047 - RNA, 22 nt, Human
uggaagaggcccaugacugccu

SEQ ID NO: 956048 - RNA, 22 nt, Human
uggcacaaaucuagucccuggu

SEQ ID NO: 956049 - RNA, 22 nt, Human
cugagccauccauaccagcuua

SEQ ID NO: 956050 - RNA, 22 nt, Human
uccugggcaaaaguaucuguga

SEQ ID NO: 956051 - RNA, 21 nt, Human
gggucugaauaucuggugcug

SEQ ID NO: 956052 - RNA, 22 nt, Human
uggccacaugcgucugugaggc

SEQ ID NO: 956053 - RNA, 22 nt, Human
aacaaguaaguuuauauauauu

SEQ ID NO: 956054 - RNA, 23 nt, Human
uucuuauuuacuuuggaaucucc

SEQ ID NO: 956055 - RNA, 22 nt, Human
acuccugguuuguguccuggcu

SEQ ID NO: 956056 - RNA, 22 nt, Human
cuccugggagucuuccuggaug

SEQ ID NO: 956057 - RNA, 17 nt, Human
agcugaaauugcugaag

SEQ ID NO: 956058 - RNA, 22 nt, Human
gcuagaaaucgacuucagaauu

SEQ ID NO: 956059 - RNA, 22 nt, Human
aggauuuguuuauaggucuuaa

SEQ ID NO: 956060 - RNA, 22 nt, Human
uaugcauuuuauagugcaaagc

SEQ ID NO: 956061 - RNA, 22 nt, Human
cuucacaaagcucucuuuaugu

SEQ ID NO: 956062 - RNA, 22 nt, Human
cuggccauguugccucugagac

SEQ ID NO: 956063 - RNA, 22 nt, Human
uuggccaaccagaacggagguc

SEQ ID NO: 956064 - RNA, 22 nt, Human
acagcauugcuccaucucaaga

SEQ ID NO: 956065 - RNA, 22 nt, Human
guauguauguauauguuuaaga

SEQ ID NO: 956066 - RNA, 22 nt, Human
uaggaugaaaauccagcuuaua

SEQ ID NO: 956067 - RNA, 22 nt, Human
aacauuucuucugaaacugagu

SEQ ID NO: 956068 - RNA, 20 nt, Human
ccuggccaaugagauaggaa

SEQ ID NO: 956069 - RNA, 22 nt, Human
augauguuaccaguacuuagag

SEQ ID NO: 956070 - RNA, 22 nt, Human
caauagaaaacucaauacuuaa

SEQ ID NO: 956071 - RNA, 22 nt, Human
gacuccuggcuuucccucuuag

SEQ ID NO: 956072 - RNA, 22 nt, Human
caccuuguggcccagucagguu

SEQ ID NO: 956073 - RNA, 22 nt, Human
uagaauguaaauuccaagggca

SEQ ID NO: 956074 - RNA, 22 nt, Human
uguguuaaguauuugauacacu

SEQ ID NO: 956075 - RNA, 22 nt, Human
gagaggggcgcgcagcucgcga

SEQ ID NO: 956076 - RNA, 22 nt, Human
ucuccuggaagaauaccacacu

SEQ ID NO: 956077 - RNA, 22 nt, Human
acauuccugaggaaauacauuc

SEQ ID NO: 956078 - RNA, 21 nt, Human
gauguuggaggcuggggucug

SEQ ID NO: 956079 - RNA, 17 nt, Human
ucugaagccagucugcu

SEQ ID NO: 956080 - RNA, 22 nt, Human
ucugagaggcaucugcacuucu

SEQ ID NO: 956081 - RNA, 22 nt, Human
uuccuggcgccacggagccggu

SEQ ID NO: 956082 - RNA, 22 nt, Human
ucuuuaaucauaaccaagaugg

SEQ ID NO: 956083 - RNA, 23 nt, Human
cagaaaguuugagaagauacauc

SEQ ID NO: 956084 - RNA, 21 nt, Human
uggcagacaggaggagcucac

SEQ ID NO: 956085 - RNA, 22 nt, Human
uuaauguggaaagcucuugagu

SEQ ID NO: 956086 - RNA, 22 nt, Human
cgcaccacugaauuccagccug

SEQ ID NO: 956087 - RNA, 22 nt, Human
uuccuggcaccaccacuucuag

SEQ ID NO: 956088 - RNA, 22 nt, Human
auucacaacugauccuugcuca

SEQ ID NO: 956089 - RNA, 22 nt, Human
uaaaacugaauacauacugagg

SEQ ID NO: 956090 - RNA, 22 nt, Human
gaguuauuagucaaauagggaa

SEQ ID NO: 956091 - RNA, 22 nt, Human
gagcacugauuuauuuuugucu

SEQ ID NO: 956092 - RNA, 22 nt, Human
cuguuuaucuaggaguugcagg

SEQ ID NO: 956093 - RNA, 22 nt, Human
augcccaaugucacaauuuuug

SEQ ID NO: 956094 - RNA, 19 nt, Human
ucuaagccucaauguuuuc

SEQ ID NO: 956095 - RNA, 22 nt, Human
ucaaauaaggagucaugaccau

SEQ ID NO: 956096 - RNA, 22 nt, Human
cauuuuauccucugggaagcua

SEQ ID NO: 956097 - RNA, 22 nt, Human
ugaaggugucuuugugaacauc

SEQ ID NO: 956098 - RNA, 22 nt, Human
auguuuaaauuuauagacagug

SEQ ID NO: 956099 - RNA, 21 nt, Human
cauuucaugauuauagaaaug

SEQ ID NO: 956100 - RNA, 22 nt, Human
cagcuuugcccuuugcccaauc

SEQ ID NO: 956101 - RNA, 22 nt, Human
guggccaaacaccaguuuagga

SEQ ID NO: 956102 - RNA, 22 nt, Human
agacagugauguaagcaggagu

SEQ ID NO: 956103 - RNA, 22 nt, Human
gcagcauauuguacuggccugc

SEQ ID NO: 956104 - RNA, 22 nt, Human
uuguuauaaagacuaaauaugu

SEQ ID NO: 956105 - RNA, 23 nt, Human
uuggcagcgggucaggcuguggg

SEQ ID NO: 956106 - RNA, 22 nt, Human
cagacagggaccucgcuccaga

SEQ ID NO: 956107 - RNA, 22 nt, Human
ucaaaacacuauuaccuuuaau

SEQ ID NO: 956108 - RNA, 22 nt, Human
uaggaucucaccauagaaggaa

SEQ ID NO: 956109 - RNA, 18 nt, Human
uugauaaacaauuucauu

SEQ ID NO: 956110 - RNA, 22 nt, Human
cagacaggaauucuggcguggu

SEQ ID NO: 956111 - RNA, 22 nt, Human
gacaucaauauucugcagggau

SEQ ID NO: 956112 - RNA, 22 nt, Human
uuauuaguguugauauuaggau

SEQ ID NO: 956113 - RNA, 22 nt, Human
guuuauuagaguuuucugucug

SEQ ID NO: 956114 - RNA, 22 nt, Human
acauucaaggccuucugacaca

SEQ ID NO: 956115 - RNA, 22 nt, Human
cugggccagaccuuguggucuu

SEQ ID NO: 956116 - RNA, 22 nt, Human
aaagacagagcuguaggggaaa

SEQ ID NO: 956117 - RNA, 22 nt, Human
ucuggcaaaggcaaccacaguu

SEQ ID NO: 956118 - RNA, 22 nt, Human
gcagggaagggaaacagagacc

SEQ ID NO: 956119 - RNA, 22 nt, Human
ccaaaaagcucagagauauguu

SEQ ID NO: 956120 - RNA, 22 nt, Human
acuccuggggcugccaucacag

SEQ ID NO: 956121 - RNA, 22 nt, Human
guacacauugucuguuuacuuc

SEQ ID NO: 956122 - RNA, 21 nt, Human
cucuuuauauaguaaagauau

SEQ ID NO: 956123 - RNA, 22 nt, Human
gucaucuugcuguuuuagaucu

SEQ ID NO: 956124 - RNA, 22 nt, Human
cacuccuguuccacuaaaugag

SEQ ID NO: 956125 - RNA, 22 nt, Human
caaaaguaaucguggcuuuugc

SEQ ID NO: 956126 - RNA, 22 nt, Human
auaaagacaugcuuacuugccc

SEQ ID NO: 956127 - RNA, 22 nt, Human
aauguacaaaagucagccaacu

SEQ ID NO: 956128 - RNA, 22 nt, Human
acaaaaagcuccauuacugucc

SEQ ID NO: 956129 - RNA, 22 nt, Human
uaaaagacccucuagaguccca

SEQ ID NO: 956130 - RNA, 22 nt, Human
uuaaaagaauccuguuauccuc

SEQ ID NO: 956131 - RNA, 22 nt, Human
cucuuuaaaguaaaauuugucu

SEQ ID NO: 956132 - RNA, 22 nt, Human
ugaaacaggaaguaaacagaca

SEQ ID NO: 956133 - RNA, 22 nt, Human
uagcacaggucuuguugccauu

SEQ ID NO: 956134 - RNA, 22 nt, Human
ugcuugaggggaauaaaaagaa

SEQ ID NO: 956135 - RNA, 22 nt, Human
acaccuuucagguccagacagu

SEQ ID NO: 956136 - RNA, 20 nt, Human
agacaggagcccccauucag

SEQ ID NO: 956137 - RNA, 22 nt, Human
aacugcuguggccuaguacuua

SEQ ID NO: 956138 - RNA, 22 nt, Human
uguguuaacacugcaugauaau

SEQ ID NO: 956139 - RNA, 22 nt, Human
uguuccuguguggaaaagggcc

SEQ ID NO: 956140 - RNA, 22 nt, Human
uggcagcauuaauuauucaggu

SEQ ID NO: 956141 - RNA, 22 nt, Human
uggacaaaugauuucuaccuuu

SEQ ID NO: 956142 - RNA, 19 nt, Human
auagaaaggguuaaagaca

SEQ ID NO: 956143 - RNA, 22 nt, Human
uauucacauuaauaagucuuca

SEQ ID NO: 956144 - RNA, 21 nt, Human
aacauuucaggauccaaauug

SEQ ID NO: 956145 - RNA, 22 nt, Human
gcucugcuggagggaaagagaa

SEQ ID NO: 956146 - RNA, 22 nt, Human
auuaggauuuuguccaaguagc

SEQ ID NO: 956147 - RNA, 22 nt, Human
aggccaaagugcuccuuuuaga

SEQ ID NO: 956148 - RNA, 22 nt, Human
ucugagccaaaauaaacagcau

SEQ ID NO: 956149 - RNA, 22 nt, Human
aaguuuguuguacauguuagua

SEQ ID NO: 956150 - RNA, 18 nt, Human
aaguaugccuauguuauu

SEQ ID NO: 956151 - RNA, 22 nt, Human
agcacucuucugugauaguugu

SEQ ID NO: 956152 - RNA, 22 nt, Human
auauuaauuauuuacacaugag

SEQ ID NO: 956153 - RNA, 22 nt, Human
gagacagugguugcagaagcuc

SEQ ID NO: 956154 - RNA, 22 nt, Human
cagggucugaaacugaucacag

SEQ ID NO: 956155 - RNA, 22 nt, Human
ugguccaagugagguggccucu

SEQ ID NO: 956156 - RNA, 20 nt, Human
ucucugcuguccacauuugc

SEQ ID NO: 956157 - RNA, 22 nt, Human
uauauuaaaugaccaguuuuaa

SEQ ID NO: 956158 - RNA, 22 nt, Human
ugucuuaauaugugcauucugu

SEQ ID NO: 956159 - RNA, 22 nt, Human
uuguacacaauucuuaacauac

SEQ ID NO: 956160 - RNA, 22 nt, Human
aacacaaagaagcugcaggauc

SEQ ID NO: 956161 - RNA, 22 nt, Human
cuaauguggacucuaucaaagu

SEQ ID NO: 956162 - RNA, 22 nt, Human
cuccuggaggauagugacuggg

SEQ ID NO: 956163 - RNA, 22 nt, Human
guauuagguuggugcaaaagua

SEQ ID NO: 956164 - RNA, 22 nt, Human
guggccaauaggagcagcuauc

SEQ ID NO: 956165 - RNA, 19 nt, Human
ugcuagaaauucugugacu

SEQ ID NO: 956166 - RNA, 22 nt, Human
cugggccaaaagaaguguucuu

SEQ ID NO: 956167 - RNA, 22 nt, Human
aaauaugugaucagugaauaaa

SEQ ID NO: 956168 - RNA, 22 nt, Human
gaaauauuucucuugagccccu

SEQ ID NO: 956169 - RNA, 22 nt, Human
uuugcaauuugugcugcaaaug

SEQ ID NO: 956170 - RNA, 22 nt, Human
auuuauuaccucggaguuucug

SEQ ID NO: 956171 - RNA, 22 nt, Human
auagugcaguggacugaguuaa

SEQ ID NO: 956172 - RNA, 22 nt, Human
uaggaugacacagcaaguauag

SEQ ID NO: 956173 - RNA, 17 nt, Human
cagcucugcaucuuccu

SEQ ID NO: 956174 - RNA, 22 nt, Human
aaauaacuuaugaucgucuggc

SEQ ID NO: 956175 - RNA, 22 nt, Human
ucacucugaaugguacugagga

SEQ ID NO: 956176 - RNA, 22 nt, Human
cugcauucauaucagauagaag

SEQ ID NO: 956177 - RNA, 22 nt, Human
uauauuaguggaaugauaugaa

SEQ ID NO: 956178 - RNA, 18 nt, Human
gcuccuggaccaggucac

SEQ ID NO: 956179 - RNA, 22 nt, Human
gccauaaauugcuggucaaaau

SEQ ID NO: 956180 - RNA, 22 nt, Human
cauauuaaggucuguaaggggu

SEQ ID NO: 956181 - RNA, 22 nt, Human
auaaaaccaaagcagcaguguu

SEQ ID NO: 956182 - RNA, 22 nt, Human
uuuauaaguacuuugucugcuu

SEQ ID NO: 956183 - RNA, 22 nt, Human
aaaaauguuaucuacuguccga

SEQ ID NO: 956184 - RNA, 22 nt, Human
ucacucugcugcccgagggcug

SEQ ID NO: 956185 - RNA, 20 nt, Human
ucugccacugcacucugccc

SEQ ID NO: 956186 - RNA, 22 nt, Human
aacaauaauugcgguucucuau

SEQ ID NO: 956187 - RNA, 22 nt, Human
ggccaaaugaaggcaaugggac

SEQ ID NO: 956188 - RNA, 22 nt, Human
gauuaggagggagaggcaagua

SEQ ID NO: 956189 - RNA, 22 nt, Human
auuagguaagauaaagcagagg

SEQ ID NO: 956190 - RNA, 22 nt, Human
uuaaaugaacgagauaugcaac

SEQ ID NO: 956191 - RNA, 22 nt, Human
ccugggccugaaaacauuucuc

SEQ ID NO: 956192 - RNA, 18 nt, Human
cugaggccaacuacacug

SEQ ID NO: 956193 - RNA, 22 nt, Human
guuuuauuuccaugagagaccg

SEQ ID NO: 956194 - RNA, 17 nt, Human
cuccuggccaccccucu

SEQ ID NO: 956195 - RNA, 22 nt, Human
guucacaaauaugcacuuacga

SEQ ID NO: 956196 - RNA, 22 nt, Human
aagucuguagaaaaacaguuua

SEQ ID NO: 956197 - RNA, 20 nt, Human
ucacagaaacaaauagagaa

SEQ ID NO: 956198 - RNA, 22 nt, Human
uaaaguguccuagcuaggaggc

SEQ ID NO: 956199 - RNA, 19 nt, Human
uuuaggauaaagucuggac

SEQ ID NO: 956200 - RNA, 22 nt, Human
aggagacaucuaacuguagguu

SEQ ID NO: 956201 - RNA, 17 nt, Human
ugaagaugcauggcagc

SEQ ID NO: 956202 - RNA, 22 nt, Human
gcaaaacagucgaugccuccca

SEQ ID NO: 956203 - RNA, 22 nt, Human
cagccuuugugaacaucaggug

SEQ ID NO: 956204 - RNA, 22 nt, Human
auggccaaagccacagcagagg

SEQ ID NO: 956205 - RNA, 22 nt, Human
ucuguaaauccugcucagcaac

SEQ ID NO: 956206 - RNA, 22 nt, Human
cuggcacacaaguauuuccuuu

SEQ ID NO: 956207 - RNA, 22 nt, Human
uuauguagugacugacuguuag

SEQ ID NO: 956208 - RNA, 22 nt, Human
uuggccaaaggaaagacuacug

SEQ ID NO: 956209 - RNA, 22 nt, Human
aggauguucgggucacauagcc

SEQ ID NO: 956210 - RNA, 22 nt, Human
auaaaacuuauuagaauugugu

SEQ ID NO: 956211 - RNA, 22 nt, Human
ccuaggcccauuaauuccccuu

SEQ ID NO: 956212 - RNA, 20 nt, Human
uacuuaggcuuguuuuggcc

SEQ ID NO: 956213 - RNA, 22 nt, Human
aguuauagaaccagguccucac

SEQ ID NO: 956214 - RNA, 22 nt, Human
guucacaagcuggguuucugca

SEQ ID NO: 956215 - RNA, 22 nt, Human
aaacuccugggcucaagcaguu

SEQ ID NO: 956216 - RNA, 22 nt, Human
uuggcacacaguaagcccuaag

SEQ ID NO: 956217 - RNA, 22 nt, Human
uuuauuagugcuuguaucacug

SEQ ID NO: 956218 - RNA, 22 nt, Human
ggucagccuuggauuugguagc

SEQ ID NO: 956219 - RNA, 22 nt, Human
acacucuguaaugucacacucc

SEQ ID NO: 956220 - RNA, 22 nt, Human
gcucugcugacagcugggacag

SEQ ID NO: 956221 - RNA, 22 nt, Human
gaaaaugugucaucccuacugu

SEQ ID NO: 956222 - RNA, 22 nt, Human
cuccugaguaguagcauuguca

SEQ ID NO: 956223 - RNA, 22 nt, Human
auuauggacguuaauuuuggaa

SEQ ID NO: 956224 - RNA, 22 nt, Human
uacucugcaggauggacuaugg

SEQ ID NO: 956225 - RNA, 22 nt, Human
uggcucaagugauccuccugcc

SEQ ID NO: 956226 - RNA, 22 nt, Human
ggccaaaugaaaucugagcaau

SEQ ID NO: 956227 - RNA, 22 nt, Human
ucugugccuccguaacacacca

SEQ ID NO: 956228 - RNA, 22 nt, Human
gcaccuuuuucuaggagaaugu

SEQ ID NO: 956229 - RNA, 22 nt, Human
ucagggaacaauguuauggcuu

SEQ ID NO: 956230 - RNA, 22 nt, Human
uagaaaugauugguugagcucu

SEQ ID NO: 956231 - RNA, 22 nt, Human
auagaauagcauagaaaauuga

SEQ ID NO: 956232 - RNA, 22 nt, Human
ggucuaaaaugagucuuccuag

SEQ ID NO: 956233 - RNA, 22 nt, Human
uccugagcuucaaaacacuuug

SEQ ID NO: 956234 - RNA, 22 nt, Human
agaguucagcuacugcaaaugu

SEQ ID NO: 956235 - RNA, 22 nt, Human
cuuuugauaguugcugagcagg

SEQ ID NO: 956236 - RNA, 22 nt, Human
uauagcaagcaggacagucuca

SEQ ID NO: 956237 - RNA, 22 nt, Human
auucacaaugauacauaagcga

SEQ ID NO: 956238 - RNA, 22 nt, Human
uucaggaugaaagugugcaaca

SEQ ID NO: 956239 - RNA, 22 nt, Human
uuuauuuggcaucucugccaag

SEQ ID NO: 956240 - RNA, 22 nt, Human
guugaaauccuaacccccuagu

SEQ ID NO: 956241 - RNA, 19 nt, Human
aauaauguucaugagauug

SEQ ID NO: 956242 - RNA, 22 nt, Human
cauuaaauuccuuguucucaaa

SEQ ID NO: 956243 - RNA, 18 nt, Human
uccuggccacacuaccuu

SEQ ID NO: 956244 - RNA, 22 nt, Human
uuagugauuacuacauagauga

SEQ ID NO: 956245 - RNA, 22 nt, Human
aggcauguauaugugcacaugu

SEQ ID NO: 956246 - RNA, 17 nt, Human
auucuuugaugucucug

SEQ ID NO: 956247 - RNA, 22 nt, Human
uauuauuauaguuauugggaag

SEQ ID NO: 956248 - RNA, 22 nt, Human
gcucugcucccucaaaugacau

SEQ ID NO: 956249 - RNA, 22 nt, Human
uuuaguagugacagauucuggg

SEQ ID NO: 956250 - RNA, 22 nt, Human
ucacucugcaggaaggagcagc

SEQ ID NO: 956251 - RNA, 22 nt, Human
uuggccaaggaccuuuuuggag

SEQ ID NO: 956252 - RNA, 22 nt, Human
cuggcgcaacagaaaaucugga

SEQ ID NO: 956253 - RNA, 22 nt, Human
aggccaaaccggauggaaaagg

SEQ ID NO: 956254 - RNA, 22 nt, Human
aaagcacauuacaagcucaguc

SEQ ID NO: 956255 - RNA, 22 nt, Human
uaagauaauaaguaugucuaug

SEQ ID NO: 956256 - RNA, 22 nt, Human
ucuguaaaacuucuuuguaaau

SEQ ID NO: 956257 - RNA, 22 nt, Human
ccuccuggugggcgcuucuggc

SEQ ID NO: 956258 - RNA, 22 nt, Human
uccuggccuuauccccaaacug

SEQ ID NO: 956259 - RNA, 22 nt, Human
uucaugcuuuuaccgcuguuaa

SEQ ID NO: 956260 - RNA, 22 nt, Human
uuaggauaugaaacaguauaag

SEQ ID NO: 956261 - RNA, 22 nt, Human
cugggccauggaagucucugcc

SEQ ID NO: 956262 - RNA, 22 nt, Human
ccuccugguccagcaucucuuu

SEQ ID NO: 956263 - RNA, 18 nt, Human
accuucauuccuuugccu

SEQ ID NO: 956264 - RNA, 22 nt, Human
uguuuaaucuauaaaauggaga

SEQ ID NO: 956265 - RNA, 22 nt, Human
uacuaggaagcagcugcauugg

SEQ ID NO: 956266 - RNA, 22 nt, Human
cagggucuuggcgccaucaccc

SEQ ID NO: 956267 - RNA, 22 nt, Human
uucugagcugcaacacuaacau

SEQ ID NO: 956268 - RNA, 22 nt, Human
ccuccuggguucaagcgauucu

SEQ ID NO: 956269 - RNA, 22 nt, Human
uacucugcaaguugaagguggc

SEQ ID NO: 956270 - RNA, 22 nt, Human
aguauacauauauuagccuucg

SEQ ID NO: 956271 - RNA, 22 nt, Human
uacucugcucauuggagugugu

SEQ ID NO: 956272 - RNA, 22 nt, Human
ugcucccagggacucuggcugg

SEQ ID NO: 956273 - RNA, 22 nt, Human
auuuggauucuuauuuagcacu

SEQ ID NO: 956274 - RNA, 22 nt, Human
uaaccaaagggccuaaggaaug

SEQ ID NO: 956275 - RNA, 21 nt, Human
ccacucugaguguugaacaga

SEQ ID NO: 956276 - RNA, 22 nt, Human
aaacaccaagagcuagcuauua

SEQ ID NO: 956277 - RNA, 22 nt, Human
uugacaaugcacugugcuaagu

SEQ ID NO: 956278 - RNA, 22 nt, Human
uggcagcacuagguacugagcu

SEQ ID NO: 956279 - RNA, 22 nt, Human
auucacaaguugauggauauuu

SEQ ID NO: 956280 - RNA, 22 nt, Human
acucugcugucugauggcagga

SEQ ID NO: 956281 - RNA, 22 nt, Human
aaagaauacccugggucauaaa

SEQ ID NO: 956282 - RNA, 22 nt, Human
uaaagaacacagggaauagcac

SEQ ID NO: 956283 - RNA, 22 nt, Human
acuaaauaguuuugacagaaca

SEQ ID NO: 956284 - RNA, 22 nt, Human
uaaccuuuguucaauguaagau

SEQ ID NO: 956285 - RNA, 22 nt, Human
uuauucaggcucucuuuggcua

SEQ ID NO: 956286 - RNA, 23 nt, Human
ccuccugggcacaggccugaugg

SEQ ID NO: 956287 - RNA, 22 nt, Human
uucagcaagaauuuacugagcu

SEQ ID NO: 956288 - RNA, 22 nt, Human
cuccuuggccguuaaugucaca

SEQ ID NO: 956289 - RNA, 22 nt, Human
ucauaaaaugcuccugauauug

SEQ ID NO: 956290 - RNA, 22 nt, Human
uccaaggguucaugugcauuca

SEQ ID NO: 956291 - RNA, 22 nt, Human
ucacuaaguuacauuuaguauu

SEQ ID NO: 956292 - RNA, 22 nt, Human
uuucacaaacugaggagacaau

SEQ ID NO: 956293 - RNA, 21 nt, Human
ugaaacacucuuuccaugaga

SEQ ID NO: 956294 - RNA, 22 nt, Human
gcucugcuguggaauccucucc

SEQ ID NO: 956295 - RNA, 22 nt, Human
auuuauuaagcaucugcuaugu

SEQ ID NO: 956296 - RNA, 22 nt, Human
gcuggccaggaagagucucaga

SEQ ID NO: 956297 - RNA, 22 nt, Human
uuuaauugauucacagucugua

SEQ ID NO: 956298 - RNA, 22 nt, Human
uccuggccuagcucacccugga

SEQ ID NO: 956299 - RNA, 22 nt, Human
aacuccugaggaaauggucuca

SEQ ID NO: 956300 - RNA, 22 nt, Human
uuauuuagucuagaugaauuuu

SEQ ID NO: 956301 - RNA, 22 nt, Human
cagcuccucacgagucuugaaa

SEQ ID NO: 956302 - RNA, 22 nt, Human
uggcagcaauuagcuagagcug

SEQ ID NO: 956303 - RNA, 22 nt, Human
aagaacauuuaugauggcauuu

SEQ ID NO: 956304 - RNA, 22 nt, Human
aaauaguuagcccugcauauau

SEQ ID NO: 956305 - RNA, 22 nt, Human
ucuccugguuuguuaaauaauu

SEQ ID NO: 956306 - RNA, 22 nt, Human
uagaaacagagagauaugcccc

SEQ ID NO: 956307 - RNA, 22 nt, Human
acuggccaggagcuggaaauac

SEQ ID NO: 956308 - RNA, 22 nt, Human
acaaaaaccguggauucagcau

SEQ ID NO: 956309 - RNA, 22 nt, Human
aaaaagcuuaaaugagcaguuc

SEQ ID NO: 956310 - RNA, 22 nt, Human
uagggauggcagcauguagcuu

SEQ ID NO: 956311 - RNA, 22 nt, Human
cagccuuuaagcuuggauaggu

SEQ ID NO: 956312 - RNA, 22 nt, Human
uggagggaacaaaggaguccca

SEQ ID NO: 956313 - RNA, 22 nt, Human
auuagggaaggauuuggccuga

SEQ ID NO: 956314 - RNA, 22 nt, Human
gaacccaaccucacuuggggua

SEQ ID NO: 956315 - RNA, 22 nt, Human
ucuccuggccuuuagguuaagg

SEQ ID NO: 956316 - RNA, 22 nt, Human
aaacaugagcacuugcuucaua

SEQ ID NO: 956317 - RNA, 22 nt, Human
uaaguauguuagaaaaucaagu

SEQ ID NO: 956318 - RNA, 22 nt, Human
cugcugagaaaagacugaggga

SEQ ID NO: 956319 - RNA, 22 nt, Human
agucauguguucaucuuucauu

SEQ ID NO: 956320 - RNA, 22 nt, Human
guggccaaaaggaagaagguua

SEQ ID NO: 956321 - RNA, 22 nt, Human
aucaggauggguuuggcuuagg

SEQ ID NO: 956322 - RNA, 22 nt, Human
cugggccagggaggugucugua

SEQ ID NO: 956323 - RNA, 22 nt, Human
acuggccagguucaaaauacag

SEQ ID NO: 956324 - RNA, 21 nt, Human
uucagcaagcacucuggacac

SEQ ID NO: 956325 - RNA, 22 nt, Human
cucaugucuucacccauucuaa

SEQ ID NO: 956326 - RNA, 22 nt, Human
uccuggccaggaugaccuaaca

SEQ ID NO: 956327 - RNA, 22 nt, Human
uguuuaauugggccaacagcgg

SEQ ID NO: 956328 - RNA, 22 nt, Human
auuccaaagccugaauaaugga

SEQ ID NO: 956329 - RNA, 22 nt, Human
ggcaagcauaaccuguacagcc

SEQ ID NO: 956330 - RNA, 22 nt, Human
ucuuaaaaguaugccaauugga

SEQ ID NO: 956331 - RNA, 22 nt, Human
ucugagccguauggcuuggcua

SEQ ID NO: 956332 - RNA, 22 nt, Human
cuuuauauccagauguuuggug

SEQ ID NO: 956333 - RNA, 22 nt, Human
agcagacauaucucaugucaca

SEQ ID NO: 956334 - RNA, 22 nt, Human
uuuuauuaguggcuagaugggg

SEQ ID NO: 956335 - RNA, 22 nt, Human
aaauguggguaaugggacugga

SEQ ID NO: 956336 - RNA, 22 nt, Human
aagugccaucauagcauggcug

SEQ ID NO: 956337 - RNA, 22 nt, Human
cuucuuaucaaguggcaaaucu

SEQ ID NO: 956338 - RNA, 22 nt, Human
uccugggcuuaagugauccucc

SEQ ID NO: 956339 - RNA, 22 nt, Human
uuuuaguuguaguuggugagga

SEQ ID NO: 956340 - RNA, 22 nt, Human
aaguuuguguaguuuagcaucc

SEQ ID NO: 956341 - RNA, 19 nt, Human
acugccugaggcucacagg

SEQ ID NO: 956342 - RNA, 21 nt, Human
gugguucuagagaaacagaau

SEQ ID NO: 956343 - RNA, 22 nt, Human
cuuccugggcaauguucugcuu

SEQ ID NO: 956344 - RNA, 22 nt, Human
aauucacaaaaguuagauccau

SEQ ID NO: 956345 - RNA, 22 nt, Human
cugugccaguguauuccuguga

SEQ ID NO: 956346 - RNA, 22 nt, Human
aauaagaauuuacuugucaaga

SEQ ID NO: 956347 - RNA, 20 nt, Human
aauauaauucucugaauuua

SEQ ID NO: 956348 - RNA, 22 nt, Human
aaauauguaaccaaggugaagu

SEQ ID NO: 956349 - RNA, 22 nt, Human
uucaaaacagcuagauauugga

SEQ ID NO: 956350 - RNA, 22 nt, Human
caaaaguaccuugugugcuuug

SEQ ID NO: 956351 - RNA, 22 nt, Human
ucugacauuuugagaaugacau

SEQ ID NO: 956352 - RNA, 22 nt, Human
ggaugcacgaaggcgccucgga

SEQ ID NO: 956353 - RNA, 20 nt, Human
uauuaggaaggaggaaggaa

SEQ ID NO: 956354 - RNA, 23 nt, Human
auauuagggagauuagcccucua

SEQ ID NO: 956355 - RNA, 22 nt, Human
cagcuuuuuagaaucuagggca

SEQ ID NO: 956356 - RNA, 22 nt, Human
caaauaguuuuucauguauuau

SEQ ID NO: 956357 - RNA, 22 nt, Human
uuucaagagggaacugaacaca

SEQ ID NO: 956358 - RNA, 22 nt, Human
ucuccuggauggaccuucucuu

SEQ ID NO: 956359 - RNA, 22 nt, Human
uuuaauguucaucucaaaggau

SEQ ID NO: 956360 - RNA, 22 nt, Human
uguaggauguaaggcaggcauc

SEQ ID NO: 956361 - RNA, 22 nt, Human
cggccaaauugcagagagaagc

SEQ ID NO: 956362 - RNA, 22 nt, Human
acucugcuuaauuaaaaccagg

SEQ ID NO: 956363 - RNA, 22 nt, Human
uaaaaugacuuccuccaacauc

SEQ ID NO: 956364 - RNA, 22 nt, Human
uagggauggaaacuaggaaucu

SEQ ID NO: 956365 - RNA, 22 nt, Human
auggccaagcuuacucuguugu

SEQ ID NO: 956366 - RNA, 22 nt, Human
uuucaaauaccauaaaccuaau

SEQ ID NO: 956367 - RNA, 22 nt, Human
auucacaaagucacccuuacac

SEQ ID NO: 956368 - RNA, 22 nt, Human
uaacauuccucaaaguuuucag

SEQ ID NO: 956369 - RNA, 22 nt, Human
aaauaguaaagugguagccauc

SEQ ID NO: 956370 - RNA, 22 nt, Human
aagacagagacucugcaacagg

SEQ ID NO: 956371 - RNA, 22 nt, Human
ccuuuuauacucagugauauca

SEQ ID NO: 956372 - RNA, 18 nt, Human
uuaaggauaagcagacua

SEQ ID NO: 956373 - RNA, 22 nt, Human
gcuggccagggcugcucgcgga

SEQ ID NO: 956374 - RNA, 22 nt, Human
auuuacagaagcauguaauagc

SEQ ID NO: 956375 - RNA, 22 nt, Human
acuaugcucauuguuaauauuu

SEQ ID NO: 956376 - RNA, 22 nt, Human
cauguuaaugaauuuuugcagu

SEQ ID NO: 956377 - RNA, 22 nt, Human
uguguauagcaguuuccagucu

SEQ ID NO: 956378 - RNA, 22 nt, Human
aaguuuaagguggaaguggugg

SEQ ID NO: 956379 - RNA, 22 nt, Human
ugucaucuuuuuaaagaagaga

SEQ ID NO: 956380 - RNA, 19 nt, Human
gcuccuggaugaccugugg

SEQ ID NO: 956381 - RNA, 22 nt, Human
ucugaagccaccucugcuuguc

SEQ ID NO: 956382 - RNA, 22 nt, Human
uauuagguaaaggacuugcagg

SEQ ID NO: 956383 - RNA, 22 nt, Human
auguuuuacccuuugcacaaac

SEQ ID NO: 956384 - RNA, 22 nt, Human
aaagacauggaacuagagaugg

SEQ ID NO: 956385 - RNA, 22 nt, Human
uacaguauggaaaauguauagu

SEQ ID NO: 956386 - RNA, 22 nt, Human
ucuggccagaaagacuugaugu

SEQ ID NO: 956387 - RNA, 22 nt, Human
acagggaauggagggaucagua

SEQ ID NO: 956388 - RNA, 22 nt, Human
cuggcucaauuuguacugcugu

SEQ ID NO: 956389 - RNA, 22 nt, Human
aggauaguugugaagauaggcu

SEQ ID NO: 956390 - RNA, 22 nt, Human
uuggcagcagggaguuggccgc

SEQ ID NO: 956391 - RNA, 22 nt, Human
cagcugugaauugucuuaucua

SEQ ID NO: 956392 - RNA, 22 nt, Human
uccaaagaagucacaaacgaag

SEQ ID NO: 956393 - RNA, 22 nt, Human
cuguuuauuacacuggauagca

SEQ ID NO: 956394 - RNA, 22 nt, Human
uuuuuuauaucaacugaagucu

SEQ ID NO: 956395 - RNA, 22 nt, Human
uaguuauuauuguuacuaucag

SEQ ID NO: 956396 - RNA, 22 nt, Human
uggcagacuuuagggucuacau

SEQ ID NO: 956397 - RNA, 20 nt, Human
guauuaggagguaaauguaa

SEQ ID NO: 956398 - RNA, 19 nt, Human
uccaccuuucuucauuugg

SEQ ID NO: 956399 - RNA, 22 nt, Human
ccuguuuaucuaucuagagaug

SEQ ID NO: 956400 - RNA, 22 nt, Human
uagaaacaucagcuaaccaaaa

SEQ ID NO: 956401 - RNA, 22 nt, Human
uuggcagagaguaugcugaaga

SEQ ID NO: 956402 - RNA, 22 nt, Human
ugcccaaaccucuccuagcucu

SEQ ID NO: 956403 - RNA, 22 nt, Human
aggccaaagcacagagcuggaa

SEQ ID NO: 956404 - RNA, 22 nt, Human
gcuggccacauugugccguccu

SEQ ID NO: 956405 - RNA, 22 nt, Human
ccuggccagcgccggcugcucg

SEQ ID NO: 956406 - RNA, 22 nt, Human
guuuaaguuucagaagcuaaga

SEQ ID NO: 956407 - RNA, 22 nt, Human
uauuagcgcuuacugaguugcc

SEQ ID NO: 956408 - RNA, 22 nt, Human
aaaauaacuucuacuauuugca

SEQ ID NO: 956409 - RNA, 22 nt, Human
auggccaaaucuaaacuguugg

SEQ ID NO: 956410 - RNA, 22 nt, Human
auagaauaaggcacagauucuu

SEQ ID NO: 956411 - RNA, 22 nt, Human
uccuggcccucugcaaacgcca

SEQ ID NO: 956412 - RNA, 22 nt, Human
uccaagggcaacaauggaacac

SEQ ID NO: 956413 - RNA, 22 nt, Human
caaaaguaauguaugcucaucg

SEQ ID NO: 956414 - RNA, 22 nt, Human
ugcugagaaucacagguuauaa

SEQ ID NO: 956415 - RNA, 22 nt, Human
ucucugcucaggcaccagcccu

SEQ ID NO: 956416 - RNA, 22 nt, Human
uuuuacuuaauucuuggucaug

SEQ ID NO: 956417 - RNA, 22 nt, Human
gcuggccauucucuuugagaug

SEQ ID NO: 956418 - RNA, 22 nt, Human
ucuggccagugaaaugcagaau

SEQ ID NO: 956419 - RNA, 22 nt, Human
aaacuacuaugggaauguacuu

SEQ ID NO: 956420 - RNA, 22 nt, Human
uuggccaaggucacugggugag

SEQ ID NO: 956421 - RNA, 22 nt, Human
cuccuggcuuucccagaccagg

SEQ ID NO: 956422 - RNA, 22 nt, Human
uaggauaggauggagacagaau

SEQ ID NO: 956423 - RNA, 20 nt, Human
uguccuaauagacaagcaga

SEQ ID NO: 956424 - RNA, 22 nt, Human
acucugcuguuuacucucuaua

SEQ ID NO: 956425 - RNA, 22 nt, Human
agugaacaaagguagugagcau

SEQ ID NO: 956426 - RNA, 22 nt, Human
ucaauaaaauuguuuuccuauc

SEQ ID NO: 956427 - RNA, 22 nt, Human
aaauaguuguuuggaucaauaa

SEQ ID NO: 956428 - RNA, 22 nt, Human
accuuuuauguaaauauauguu

SEQ ID NO: 956429 - RNA, 21 nt, Human
caugcaggauuuaaccuagaa

SEQ ID NO: 956430 - RNA, 20 nt, Human
guauuagguguuccucuuuc

SEQ ID NO: 956431 - RNA, 22 nt, Human
caacaaguggguacuuuacagg

SEQ ID NO: 956432 - RNA, 22 nt, Human
augauguugauaaauuacuuua

SEQ ID NO: 956433 - RNA, 22 nt, Human
auggccaacugaaaugaaagau

SEQ ID NO: 956434 - RNA, 21 nt, Human
ugcuggaaaaagugguucuag

SEQ ID NO: 956435 - RNA, 22 nt, Human
acacuuuuagcuaugaguuaau

SEQ ID NO: 956436 - RNA, 22 nt, Human
aauaguaaaagauacagcuaau

SEQ ID NO: 956437 - RNA, 22 nt, Human
uuggccaagugguuaaucucca

SEQ ID NO: 956438 - RNA, 22 nt, Human
ccuggccaggcuccaaguacug

SEQ ID NO: 956439 - RNA, 22 nt, Human
gcuccuggcuccaggcagccaa

SEQ ID NO: 956440 - RNA, 22 nt, Human
uucuuaggacuaguauagcaug

SEQ ID NO: 956441 - RNA, 22 nt, Human
aauauccagguagaugucuucu

SEQ ID NO: 956442 - RNA, 22 nt, Human
acaggacuguggaaggaucucu

SEQ ID NO: 956443 - RNA, 22 nt, Human
aaucaguauugguauagaauga

SEQ ID NO: 956444 - RNA, 22 nt, Human
guauuagguuggugcaaaauug

SEQ ID NO: 956445 - RNA, 22 nt, Human
ccuguuuacaucaucaaggacu

SEQ ID NO: 956446 - RNA, 22 nt, Human
uuucauuauucaugcuaguuau

SEQ ID NO: 956447 - RNA, 22 nt, Human
ucaaaacaaucauuggaugugc

SEQ ID NO: 956448 - RNA, 22 nt, Human
gugcaagguacauccuugaugu

SEQ ID NO: 956449 - RNA, 22 nt, Human
uaaagacaugguguaggugaac

SEQ ID NO: 956450 - RNA, 22 nt, Human
ccuccugguugcaaugaaaugg

SEQ ID NO: 956451 - RNA, 20 nt, Human
uaacauaguccagagaacga

SEQ ID NO: 956452 - RNA, 22 nt, Human
caaauauuccagguacaucccu

SEQ ID NO: 956453 - RNA, 22 nt, Human
uuaaaaugaauauugauuagca

SEQ ID NO: 956454 - RNA, 23 nt, Human
ugauuaggucuacucuuggcucc

SEQ ID NO: 956455 - RNA, 23 nt, Human
gacaccuuugccagaucaagaug

SEQ ID NO: 956456 - RNA, 22 nt, Human
caauaagccagguguuuguguu

SEQ ID NO: 956457 - RNA, 22 nt, Human
cguggccagccauuuccuggaa

SEQ ID NO: 956458 - RNA, 22 nt, Human
ucuggccaacaaaaacuaaguc

SEQ ID NO: 956459 - RNA, 22 nt, Human
auucacaacaaaaggauaugag

SEQ ID NO: 956460 - RNA, 22 nt, Human
uagaaacagcauauauuagccc

SEQ ID NO: 956461 - RNA, 22 nt, Human
aggauuuuagauaagacagcaa

SEQ ID NO: 956462 - RNA, 22 nt, Human
ucuuguuacaguuuauuacaug

SEQ ID NO: 956463 - RNA, 22 nt, Human
uauugaaauccauuacguucuu

SEQ ID NO: 956464 - RNA, 20 nt, Human
uccuggccucccuggggcuc

SEQ ID NO: 956465 - RNA, 23 nt, Human
ggccacaaauagucuccccuggc

SEQ ID NO: 956466 - RNA, 22 nt, Human
cugggcaauaugcugggccugg

SEQ ID NO: 956467 - RNA, 22 nt, Human
cuuuagugguauuuuagcaagu

SEQ ID NO: 956468 - RNA, 22 nt, Human
ucucugcuugguguaugugagu

SEQ ID NO: 956469 - RNA, 22 nt, Human
uaauaggagccaggucacauag

SEQ ID NO: 956470 - RNA, 22 nt, Human
ggauuugggcuugcagcagagc

SEQ ID NO: 956471 - RNA, 22 nt, Human
aggaucuugcuguagaggauag

SEQ ID NO: 956472 - RNA, 22 nt, Human
accucugcaacccuggaauggg

SEQ ID NO: 956473 - RNA, 22 nt, Human
gaaauauugggacucagagcuu

SEQ ID NO: 956474 - RNA, 17 nt, Human
cuccuggcagccucagg

SEQ ID NO: 956475 - RNA, 18 nt, Human
uagaauauaggucauucu

SEQ ID NO: 956476 - RNA, 22 nt, Human
aaauauuagggagaacagggac

SEQ ID NO: 956477 - RNA, 19 nt, Human
uccugggcugcgucuugcc

SEQ ID NO: 956478 - RNA, 22 nt, Human
auucugaguccaugggggcagg

SEQ ID NO: 956479 - RNA, 22 nt, Human
ccuggccaggcucucagcacug

SEQ ID NO: 956480 - RNA, 22 nt, Human
auuaggcagggcaugguggcuc

SEQ ID NO: 956481 - RNA, 22 nt, Human
uuuauuaauguagcauccaugg

SEQ ID NO: 956482 - RNA, 22 nt, Human
ucacucuggccucugcagcagu

SEQ ID NO: 956483 - RNA, 22 nt, Human
guuuuauuggaacacagccaug

SEQ ID NO: 956484 - RNA, 22 nt, Human
gacauacagcauggucuaugaa

SEQ ID NO: 956485 - RNA, 22 nt, Human
accuuguuaaaaugaggauucu

SEQ ID NO: 956486 - RNA, 22 nt, Human
cuggccuagcucucugcuugaa

SEQ ID NO: 956487 - RNA, 22 nt, Human
acaguguuuuaugagaauuguu

SEQ ID NO: 956488 - RNA, 22 nt, Human
uugagggaacaugagaaucauc

SEQ ID NO: 956489 - RNA, 17 nt, Human
aaauaugaccucaaagu

SEQ ID NO: 956490 - RNA, 22 nt, Human
agccaugugucuuuauucuguu

SEQ ID NO: 956491 - RNA, 22 nt, Human
caacccaaaagcguuuccauuu

SEQ ID NO: 956492 - RNA, 22 nt, Human
cucugcugggauguaaagucuu

SEQ ID NO: 956493 - RNA, 22 nt, Human
caacuccuggcuguuaggcaca

SEQ ID NO: 956494 - RNA, 22 nt, Human
cuaaauaaucccucuggucuua

SEQ ID NO: 956495 - RNA, 22 nt, Human
gagccaagaucgcaccacugca

SEQ ID NO: 956496 - RNA, 22 nt, Human
cugcacaguuugauuucuugcu

SEQ ID NO: 956497 - RNA, 22 nt, Human
agccuugaguucaagugcuggc

SEQ ID NO: 956498 - RNA, 22 nt, Human
ucacucugccuccauauuacua

SEQ ID NO: 956499 - RNA, 22 nt, Human
cacugucuuuugugaagacaau

SEQ ID NO: 956500 - RNA, 18 nt, Human
ugcagcaagugcuaaaua

SEQ ID NO: 956501 - RNA, 22 nt, Human
acuccuggguucuaaauuugaa

SEQ ID NO: 956502 - RNA, 22 nt, Human
cuggccaguugccuuccugggu

SEQ ID NO: 956503 - RNA, 22 nt, Human
uugcuucauuuuaaauaaagac

SEQ ID NO: 956504 - RNA, 18 nt, Human
ucagggaaucuuggccuu

SEQ ID NO: 956505 - RNA, 22 nt, Human
uguagaaagaauauguuucaua

SEQ ID NO: 956506 - RNA, 19 nt, Human
ccuggccagacuucugccc

SEQ ID NO: 956507 - RNA, 22 nt, Human
aaauauguauggaguucaugaa

SEQ ID NO: 956508 - RNA, 22 nt, Human
aacuaacagucauuaaaagaac

SEQ ID NO: 956509 - RNA, 21 nt, Human
uuucacaaaaguaugugacaa

SEQ ID NO: 956510 - RNA, 22 nt, Human
cuuucacacacauacauuugga

SEQ ID NO: 956511 - RNA, 22 nt, Human
aggucacccguuugacuaucca

SEQ ID NO: 956512 - RNA, 22 nt, Human
aacaaaccuucccuauacgucu

SEQ ID NO: 956513 - RNA, 22 nt, Human
cuggccaauccauuaauuuguu

SEQ ID NO: 956514 - RNA, 19 nt, Human
gcuggccacgccccaguug

SEQ ID NO: 956515 - RNA, 22 nt, Human
guuauauaagacaaaucagagu

SEQ ID NO: 956516 - RNA, 22 nt, Human
aauaauaagauacuaagggagu

SEQ ID NO: 956517 - RNA, 22 nt, Human
agacauuuauugaacaccuagc

SEQ ID NO: 956518 - RNA, 22 nt, Human
uugaaaaguuuugaaacacucu

SEQ ID NO: 956519 - RNA, 22 nt, Human
aacauuucauuggaagcuaugu

SEQ ID NO: 956520 - RNA, 22 nt, Human
guuuauuauucaacuucauguu

SEQ ID NO: 956521 - RNA, 22 nt, Human
acucugcucuuauaguguuaua

SEQ ID NO: 956522 - RNA, 22 nt, Human
aacuccagggcauugucuccug

SEQ ID NO: 956523 - RNA, 22 nt, Human
cuauuagguuggugcaaaagua

SEQ ID NO: 956524 - RNA, 22 nt, Human
ucacucugauagauaagcuaac

SEQ ID NO: 956525 - RNA, 19 nt, Human
uuucuuaggccuuuggccu

SEQ ID NO: 956526 - RNA, 22 nt, Human
aaaguuugagugauuugacaca

SEQ ID NO: 956527 - RNA, 21 nt, Human
ugcauuccuccauccaacagg

SEQ ID NO: 956528 - RNA, 22 nt, Human
gcuccuggcucuggccaaggga

SEQ ID NO: 956529 - RNA, 22 nt, Human
agcugaaagugcuuugaggacu

SEQ ID NO: 956530 - RNA, 22 nt, Human
uauuuauucauucagcaagcau

SEQ ID NO: 956531 - RNA, 22 nt, Human
aaugauggucauggcaacuuuu

SEQ ID NO: 956532 - RNA, 22 nt, Human
cagcuuuguccugcaaaccuga

SEQ ID NO: 956533 - RNA, 22 nt, Human
aaauuagucauguuguauuacu

SEQ ID NO: 956534 - RNA, 22 nt, Human
uucaucaauguguuuaauaaug

SEQ ID NO: 956535 - RNA, 22 nt, Human
ucuggccaauguugugaucaca

SEQ ID NO: 956536 - RNA, 23 nt, Human
uuccuggcagguacaacuuuuac

SEQ ID NO: 956537 - RNA, 22 nt, Human
uucagauaaacuacaaauaauu

SEQ ID NO: 956538 - RNA, 21 nt, Human
uuuauuuauauaggacacaug

SEQ ID NO: 956539 - RNA, 22 nt, Human
acuaaauagccucugguaguug

SEQ ID NO: 956540 - RNA, 22 nt, Human
gcuggccagcccucuuccucca

SEQ ID NO: 956541 - RNA, 22 nt, Human
cauuucauaguugucacaauaa

SEQ ID NO: 956542 - RNA, 22 nt, Human
aaauaugaaugauaagaguuau

SEQ ID NO: 956543 - RNA, 22 nt, Human
agagugauccuaauugauuugg

SEQ ID NO: 956544 - RNA, 22 nt, Human
aaguaugcaaaucgucuuagaa

SEQ ID NO: 956545 - RNA, 22 nt, Human
ccuggccagggucugggcugcu

SEQ ID NO: 956546 - RNA, 22 nt, Human
guuauuagaagugaaggauugu

SEQ ID NO: 956547 - RNA, 22 nt, Human
auguuauaguuauaaaaugagg

SEQ ID NO: 956548 - RNA, 22 nt, Human
aacuccagugucagcugcaaug

SEQ ID NO: 956549 - RNA, 22 nt, Human
auagacauuuugcauucaagca

SEQ ID NO: 956550 - RNA, 22 nt, Human
guuaggauguggggacuuuggg

SEQ ID NO: 956551 - RNA, 22 nt, Human
cuccugugggucaccaauaggc

SEQ ID NO: 956552 - RNA, 22 nt, Human
gauuaggacauggauguauguu

SEQ ID NO: 956553 - RNA, 22 nt, Human
uaaccuuuggugaaauauuaac

SEQ ID NO: 956554 - RNA, 18 nt, Human
ugucaucuguuuaaaacc

SEQ ID NO: 956555 - RNA, 22 nt, Human
uuugaaauguaucaguauaggu

SEQ ID NO: 956556 - RNA, 22 nt, Human
ucugugccaccucuccaguguc

SEQ ID NO: 956557 - RNA, 22 nt, Human
agacaggaugcauacucuuggu

SEQ ID NO: 956558 - RNA, 22 nt, Human
uggcaccaggcgggguggcugu

SEQ ID NO: 956559 - RNA, 22 nt, Human
cauagaaacugagacaaggauu

SEQ ID NO: 956560 - RNA, 22 nt, Human
ucuggccauggcaagccgagug

SEQ ID NO: 956561 - RNA, 22 nt, Human
uuuuaauugcaauuaugguccc

SEQ ID NO: 956562 - RNA, 22 nt, Human
aauucacaggagguauuugucc

SEQ ID NO: 956563 - RNA, 22 nt, Human
acuccugggugcugaccagcgu

SEQ ID NO: 956564 - RNA, 22 nt, Human
ccuccuggauggauuuggugga

SEQ ID NO: 956565 - RNA, 22 nt, Human
auuacacacucaaguccuguua

SEQ ID NO: 956566 - RNA, 22 nt, Human
uagcuuuguguaugaugucugu

SEQ ID NO: 956567 - RNA, 22 nt, Human
uggcagcagaacaugaaaccca

SEQ ID NO: 956568 - RNA, 22 nt, Human
cuggcacaaugucacuuuugcu

SEQ ID NO: 956569 - RNA, 22 nt, Human
acuccuggugcugaugaagaga

SEQ ID NO: 956570 - RNA, 22 nt, Human
caaaaguaauugcaguuuuugc

SEQ ID NO: 956571 - RNA, 22 nt, Human
gcaggagagucugugccagguu

SEQ ID NO: 956572 - RNA, 20 nt, Human
ggccgaaauaauaguggcuu

SEQ ID NO: 956573 - RNA, 22 nt, Human
gggucugaggaguaccauuguc

SEQ ID NO: 956574 - RNA, 22 nt, Human
cugagccaguagucagggacaa

SEQ ID NO: 956575 - RNA, 22 nt, Human
acuccugguucccaguugagau

SEQ ID NO: 956576 - RNA, 22 nt, Human
ugacauaaguugguagaaagga

SEQ ID NO: 956577 - RNA, 22 nt, Human
aaaacuccugaaauuguuuccc

SEQ ID NO: 956578 - RNA, 22 nt, Human
gcucugcugagauaucugggag

SEQ ID NO: 956579 - RNA, 20 nt, Human
ucuguaaagacuccagaagc

SEQ ID NO: 956580 - RNA, 22 nt, Human
gaaaaguauguuuauuuugacu

SEQ ID NO: 956581 - RNA, 22 nt, Human
gucuggccuuuuuagcuugugg

SEQ ID NO: 956582 - RNA, 22 nt, Human
gauauagguucauaguguuaca

SEQ ID NO: 956583 - RNA, 22 nt, Human
uuuaguagaaauauuugggccu

SEQ ID NO: 956584 - RNA, 22 nt, Human
uuuuuauaugaaggauagugcg

SEQ ID NO: 956585 - RNA, 22 nt, Human
uuuuaauucaaagugaauagug

SEQ ID NO: 956586 - RNA, 22 nt, Human
aaugaaauguagcuuauccaua

SEQ ID NO: 956587 - RNA, 21 nt, Human
uuuuauugaugaauggccacu

SEQ ID NO: 956588 - RNA, 22 nt, Human
uuuaggaucucucuuguuacau

SEQ ID NO: 956589 - RNA, 22 nt, Human
uugaaugaccaugaugcaaggg

SEQ ID NO: 956590 - RNA, 22 nt, Human
aaauacagcagacuccuguugu

SEQ ID NO: 956591 - RNA, 22 nt, Human
aaauauagcaauuaugccuacu

SEQ ID NO: 956592 - RNA, 22 nt, Human
augaaaaguucgaucuagaagg

SEQ ID NO: 956593 - RNA, 22 nt, Human
ucugccaccuucauccuccacu

SEQ ID NO: 956594 - RNA, 22 nt, Human
cuggccaacuugcuuguuggca

SEQ ID NO: 956595 - RNA, 22 nt, Human
acacauaagaaacuacaaagag

SEQ ID NO: 956596 - RNA, 22 nt, Human
gcauugaguccacucugucuuu

SEQ ID NO: 956597 - RNA, 21 nt, Human
acacauuaugagcauagacuc

SEQ ID NO: 956598 - RNA, 22 nt, Human
acucugcucuguauuucacugu

SEQ ID NO: 956599 - RNA, 22 nt, Human
aacugcauuuaacaaauacucu

SEQ ID NO: 956600 - RNA, 22 nt, Human
uagagcugggcagugcucugag

SEQ ID NO: 956601 - RNA, 22 nt, Human
aggauuucugugccuggaaaau

SEQ ID NO: 956602 - RNA, 19 nt, Human
auaaauaaaaagugggaga

SEQ ID NO: 956603 - RNA, 22 nt, Human
uacaaagagguaauugcauaua

SEQ ID NO: 956604 - RNA, 22 nt, Human
aauaaaauggucaguuuucuca

SEQ ID NO: 956605 - RNA, 22 nt, Human
gauguuucaugcuagcaugugu

SEQ ID NO: 956606 - RNA, 22 nt, Human
ccuggccaaucuagggcuguua

SEQ ID NO: 956607 - RNA, 22 nt, Human
ccuggccacucagguguggggc

SEQ ID NO: 956608 - RNA, 22 nt, Human
accuguuuuccuaucuagauug

SEQ ID NO: 956609 - RNA, 16 nt, Human
auucacaaggcaucgg

SEQ ID NO: 956610 - RNA, 22 nt, Human
acagacauuuucuguauugccu

SEQ ID NO: 956611 - RNA, 19 nt, Human
uggucuaaaugugugcccc

SEQ ID NO: 956612 - RNA, 22 nt, Human
aaugccuuggagagccuagagg

SEQ ID NO: 956613 - RNA, 22 nt, Human
guggccaaggcagagaaagagc

SEQ ID NO: 956614 - RNA, 22 nt, Human
aaaaguaauugaugcaaucgua

SEQ ID NO: 956615 - RNA, 22 nt, Human
acuccaggguuuugcaccugga

SEQ ID NO: 956616 - RNA, 22 nt, Human
gcuccuggcaggcagugugugu

SEQ ID NO: 956617 - RNA, 22 nt, Human
uaaaauguuugcaagagaccag

SEQ ID NO: 956618 - RNA, 22 nt, Human
auauaaagagcuuaguauagug

SEQ ID NO: 956619 - RNA, 22 nt, Human
uuuaggauauuaauguucagag

SEQ ID NO: 956620 - RNA, 22 nt, Human
cuggccuaaaauugcuucugca

SEQ ID NO: 956621 - RNA, 22 nt, Human
auucugagaaaugcauugucag

SEQ ID NO: 956622 - RNA, 22 nt, Human
uugcaaaugggcaaagcagauc

SEQ ID NO: 956623 - RNA, 22 nt, Human
cuccuggcucgcccccagcuga

SEQ ID NO: 956624 - RNA, 22 nt, Human
uggccacacccaccuagaggag

SEQ ID NO: 956625 - RNA, 22 nt, Human
aaguaugcuaauuaacuagcac

SEQ ID NO: 956626 - RNA, 22 nt, Human
ucuccuggcucuaaaaggcugu

SEQ ID NO: 956627 - RNA, 22 nt, Human
uggcagcagcuaacuuaggcag

SEQ ID NO: 956628 - RNA, 22 nt, Human
cuaggccacuugcucucaugga

SEQ ID NO: 956629 - RNA, 22 nt, Human
ucacucugacuuggccuccaac

SEQ ID NO: 956630 - RNA, 22 nt, Human
uauuggucuuggaagguuuugu

SEQ ID NO: 956631 - RNA, 22 nt, Human
aguaugaagaugaugaaaaaua

SEQ ID NO: 956632 - RNA, 22 nt, Human
uugcaaaugaccauugccacau

SEQ ID NO: 956633 - RNA, 22 nt, Human
uuugaauaucacaaacuuucaa

SEQ ID NO: 956634 - RNA, 22 nt, Human
acauacaucaaguaucacaaga

SEQ ID NO: 956635 - RNA, 16 nt, Human
aggccaaaaaggggca

SEQ ID NO: 956636 - RNA, 22 nt, Human
guuauaaaaugcacaguuguuu

SEQ ID NO: 956637 - RNA, 22 nt, Human
uggagccagagcgcagccuggg

SEQ ID NO: 956638 - RNA, 22 nt, Human
ccuggccauagggcccaggaaa

SEQ ID NO: 956639 - RNA, 22 nt, Human
cagacaggcaggugcugcuuug

SEQ ID NO: 956640 - RNA, 22 nt, Human
acuccuggggauccauuccuuu

SEQ ID NO: 956641 - RNA, 22 nt, Human
uaaauaugcauguauccuuauc

SEQ ID NO: 956642 - RNA, 22 nt, Human
uuucacaaguuucaggauucug

SEQ ID NO: 956643 - RNA, 22 nt, Human
ugaccaaaaaauucccugugag

SEQ ID NO: 956644 - RNA, 22 nt, Human
gcucugcugcuuacuagauggu

SEQ ID NO: 956645 - RNA, 22 nt, Human
gaaauauuguacuggagauguu

SEQ ID NO: 956646 - RNA, 22 nt, Human
ucuccugguacccuuccuagca

SEQ ID NO: 956647 - RNA, 22 nt, Human
cuggccacugguggucauaggc

SEQ ID NO: 956648 - RNA, 22 nt, Human
augauugaaaaugacauugcca

SEQ ID NO: 956649 - RNA, 22 nt, Human
agauaaauuccuaagauuucag

SEQ ID NO: 956650 - RNA, 22 nt, Human
aguuggcauuuuauuuaaguau

SEQ ID NO: 956651 - RNA, 22 nt, Human
aaagcuauuuuauugcagcucu

SEQ ID NO: 956652 - RNA, 22 nt, Human
caaguuaucagaaggcacuuuu

SEQ ID NO: 956653 - RNA, 21 nt, Human
uuauugagacauuuguggaaa

SEQ ID NO: 956654 - RNA, 22 nt, Human
auaaaagaaguuuugguacuug

SEQ ID NO: 956655 - RNA, 22 nt, Human
ucuggccaguagauguggguug

SEQ ID NO: 956656 - RNA, 22 nt, Human
caugcaggcacccagagcccac

SEQ ID NO: 956657 - RNA, 22 nt, Human
aagucaaaccuugcucacagga

SEQ ID NO: 956658 - RNA, 22 nt, Human
accuguuuguguccauuaguga

SEQ ID NO: 956659 - RNA, 22 nt, Human
gcagggaaggggcaugcuggag

SEQ ID NO: 956660 - RNA, 22 nt, Human
aggccaaagcucaccugcagcu

SEQ ID NO: 956661 - RNA, 22 nt, Human
uuagauaacaguagaauaucaa

SEQ ID NO: 956662 - RNA, 22 nt, Human
uucaaacaguguagaauauaug

SEQ ID NO: 956663 - RNA, 22 nt, Human
guucacaauuuuuacugauugg

SEQ ID NO: 956664 - RNA, 22 nt, Human
uuucaacauauaccauaaugcc

SEQ ID NO: 956665 - RNA, 22 nt, Human
gaugcaaagcauuuuugugugu

SEQ ID NO: 956666 - RNA, 22 nt, Human
ccuccugguaauuagcgaaagg

SEQ ID NO: 956667 - RNA, 22 nt, Human
cuccuggcacugucuugaccca

SEQ ID NO: 956668 - RNA, 22 nt, Human
uuuacuguuuacagcuaaugca

SEQ ID NO: 956669 - RNA, 22 nt, Human
aucuuucaaucaggaaaaaucu

SEQ ID NO: 956670 - RNA, 22 nt, Human
uaaauaaguucuucauuguuug

SEQ ID NO: 956671 - RNA, 20 nt, Human
guguuucaugugauacaaug

SEQ ID NO: 956672 - RNA, 22 nt, Human
caacugagcaguagcgucugga

SEQ ID NO: 956673 - RNA, 22 nt, Human
ucacucugggcccuacugggcu

SEQ ID NO: 956674 - RNA, 22 nt, Human
agcuauguauuuguguguuaaa

SEQ ID NO: 956675 - RNA, 22 nt, Human
uaaguuaucggaguguguuuca

SEQ ID NO: 956676 - RNA, 18 nt, Human
uacaucuauauaguguuu

SEQ ID NO: 956677 - RNA, 22 nt, Human
uucagcaauuuuuuaagcuaau

SEQ ID NO: 956678 - RNA, 22 nt, Human
uucugagccucauucaugaggc

SEQ ID NO: 956679 - RNA, 22 nt, Human
agcauaaguugguacagccacu

SEQ ID NO: 956680 - RNA, 22 nt, Human
agacagguaaauagagaugcug

SEQ ID NO: 956681 - RNA, 22 nt, Human
aacacugcugcuggguucugug

SEQ ID NO: 956682 - RNA, 22 nt, Human
guuccaaacaagucauaaagua

SEQ ID NO: 956683 - RNA, 22 nt, Human
aggcucugugcagccugcaucu

SEQ ID NO: 956684 - RNA, 22 nt, Human
auaaugugauauuucauuuaca

SEQ ID NO: 956685 - RNA, 22 nt, Human
uuauuaggaacucaggauuuuu

SEQ ID NO: 956686 - RNA, 21 nt, Human
acucugcugcgggcuuggccu

SEQ ID NO: 956687 - RNA, 22 nt, Human
ccuggaccaaacacuggccugg

SEQ ID NO: 956688 - RNA, 22 nt, Human
ggucugaguggggccugagauu

SEQ ID NO: 956689 - RNA, 22 nt, Human
auuaggauguuccuaugcacau

SEQ ID NO: 956690 - RNA, 22 nt, Human
ucugagccagccaccuccuuca

SEQ ID NO: 956691 - RNA, 22 nt, Human
ucuccuggcccugucgccaucu

SEQ ID NO: 956692 - RNA, 22 nt, Human
ccuccuggagcauuggugagga

SEQ ID NO: 956693 - RNA, 22 nt, Human
guuaauaaagguauagaaucag

SEQ ID NO: 956694 - RNA, 22 nt, Human
aacacuuucuuccuugcucagg

SEQ ID NO: 956695 - RNA, 22 nt, Human
auucacauguugaagcccuaac

SEQ ID NO: 956696 - RNA, 22 nt, Human
gcuccuggauguucaagucggc

SEQ ID NO: 956697 - RNA, 22 nt, Human
auuacacaggauuugccuuacu

SEQ ID NO: 956698 - RNA, 22 nt, Human
uuuauuauccaguguugucaug

SEQ ID NO: 956699 - RNA, 22 nt, Human
ucugcaagauggucuuagaggu

SEQ ID NO: 956700 - RNA, 22 nt, Human
auguuuuauauuuugcagcagu

SEQ ID NO: 956701 - RNA, 22 nt, Human
ugaaaaacuuuaauccauaaag

SEQ ID NO: 956702 - RNA, 22 nt, Human
uuuauagggacaguucuuggag

SEQ ID NO: 956703 - RNA, 22 nt, Human
cugcugucauagccaucccucc

SEQ ID NO: 956704 - RNA, 22 nt, Human
uuuacugugcauuagaaucacc

SEQ ID NO: 956705 - RNA, 22 nt, Human
ugcuuccuauccacacaaugcc

SEQ ID NO: 956706 - RNA, 22 nt, Human
ucaaugaaagagcaugcauuuu

SEQ ID NO: 956707 - RNA, 22 nt, Human
ggcaacauucuccagauccuuu

SEQ ID NO: 956708 - RNA, 22 nt, Human
auccauggaggacaagagcaau

SEQ ID NO: 956709 - RNA, 22 nt, Human
uugcauguagaauacucaacuu

SEQ ID NO: 956710 - RNA, 22 nt, Human
ucacuaagugccgaguuuaguu

SEQ ID NO: 956711 - RNA, 18 nt, Human
uuaauguggcuuacuaug

SEQ ID NO: 956712 - RNA, 22 nt, Human
augugcuaaacucaacaaaucu

SEQ ID NO: 956713 - RNA, 22 nt, Human
gauuucuuuagguguaauagug

SEQ ID NO: 956714 - RNA, 22 nt, Human
ugcugaaaacucaaccauugug

SEQ ID NO: 956715 - RNA, 22 nt, Human
ccuucuuaaacaucauuuuggc

SEQ ID NO: 956716 - RNA, 22 nt, Human
acucugacuggagugagagagg

SEQ ID NO: 956717 - RNA, 22 nt, Human
acauaaugaaaugcagaaauca

SEQ ID NO: 956718 - RNA, 22 nt, Human
ucuuuauuuuaugcuugugcaa

SEQ ID NO: 956719 - RNA, 22 nt, Human
aaaagucugcucucauuucaga

SEQ ID NO: 956720 - RNA, 22 nt, Human
guauuaggaaauaugaagaaag

SEQ ID NO: 956721 - RNA, 22 nt, Human
ccucugcucugguccaugugcu

SEQ ID NO: 956722 - RNA, 22 nt, Human
uuaguaggagagcuuguucauu

SEQ ID NO: 956723 - RNA, 22 nt, Human
aagggcugagcacagugagcca

SEQ ID NO: 956724 - RNA, 22 nt, Human
uucagcaagugucucuacuguc

SEQ ID NO: 956725 - RNA, 22 nt, Human
ggucugaguagagggcuggcga

SEQ ID NO: 956726 - RNA, 22 nt, Human
uuaggauagucuguuagaaaag

SEQ ID NO: 956727 - RNA, 22 nt, Human
uauguagguaaacacagacaua

SEQ ID NO: 956728 - RNA, 22 nt, Human
uccuggccucgcuguccaccuu

SEQ ID NO: 956729 - RNA, 22 nt, Human
cuguuacacggaccuucaaauc

SEQ ID NO: 956730 - RNA, 22 nt, Human
gacucugcuaggaaaaucucag

SEQ ID NO: 956731 - RNA, 22 nt, Human
aacauuucugagaauaucaguu

SEQ ID NO: 956732 - RNA, 15 nt, Human
ucacucuggaaggga

SEQ ID NO: 956733 - RNA, 22 nt, Human
uucuuagaugauuaaugauggg

SEQ ID NO: 956734 - RNA, 22 nt, Human
guuaggauauggugaaauggag

SEQ ID NO: 956735 - RNA, 23 nt, Human
cuccuggaggguccggcccugcc

SEQ ID NO: 956736 - RNA, 22 nt, Human
augcuuccaaggcuaagacaag

SEQ ID NO: 956737 - RNA, 22 nt, Human
uggcagcacaagguggcccaug

SEQ ID NO: 956738 - RNA, 22 nt, Human
agucuuaacuaugcaaguacua

SEQ ID NO: 956739 - RNA, 22 nt, Human
ugucaucucacugauauagaug

SEQ ID NO: 956740 - RNA, 22 nt, Human
uuuauauagagauuugugcaug

SEQ ID NO: 956741 - RNA, 22 nt, Human
cauccugguuaccccauaguca

SEQ ID NO: 956742 - RNA, 22 nt, Human
uggcaucauagccaaggugcuu

SEQ ID NO: 956743 - RNA, 22 nt, Human
ccacucugauuucaagggagau

SEQ ID NO: 956744 - RNA, 22 nt, Human
gggcauguagugugcauagaga

SEQ ID NO: 956745 - RNA, 22 nt, Human
augguacaauguguuuguuagg

SEQ ID NO: 956746 - RNA, 22 nt, Human
cuugaucuacauagugaaaccc

SEQ ID NO: 956747 - RNA, 22 nt, Human
caaaaagcuuagguaacaagcc

SEQ ID NO: 956748 - RNA, 22 nt, Human
accuauuuaugcaauuaugaaa

SEQ ID NO: 956749 - RNA, 20 nt, Human
cauuggacuuggcuucaugg

SEQ ID NO: 956750 - RNA, 22 nt, Human
caacccaagguuaguuggucuu

SEQ ID NO: 956751 - RNA, 22 nt, Human
uaaaaaguagugagaauggcgc

SEQ ID NO: 956752 - RNA, 22 nt, Human
ugucaucuuggucuggaauaag

SEQ ID NO: 956753 - RNA, 22 nt, Human
aacauuucagcaccugauuccu

SEQ ID NO: 956754 - RNA, 22 nt, Human
aacauucaccucuaccuccuuc

SEQ ID NO: 956755 - RNA, 22 nt, Human
acucugcuaaauguaaguuggu

SEQ ID NO: 956756 - RNA, 22 nt, Human
uuucuauucuggaucuguggca

SEQ ID NO: 956757 - RNA, 22 nt, Human
auuaggaaauguguugcaagca

SEQ ID NO: 956758 - RNA, 22 nt, Human
aagauauuuuagaacauucacu

SEQ ID NO: 956759 - RNA, 22 nt, Human
accuacccuuagaucacaaggg

SEQ ID NO: 956760 - RNA, 22 nt, Human
auaauaaaccaggaugggucug

SEQ ID NO: 956761 - RNA, 22 nt, Human
uugaaaugcagauuccaaucca

SEQ ID NO: 956762 - RNA, 22 nt, Human
ccuccuggaggcucuagggaaa

SEQ ID NO: 956763 - RNA, 22 nt, Human
aacuucuggauguuucaaaugu

SEQ ID NO: 956764 - RNA, 22 nt, Human
aaacccaucugucugucugcag

SEQ ID NO: 956765 - RNA, 22 nt, Human
uuggccaauuuagaacguguug

SEQ ID NO: 956766 - RNA, 22 nt, Human
uaggauguagcuaugucaucau

SEQ ID NO: 956767 - RNA, 22 nt, Human
gcagacaucaagcacaggccca

SEQ ID NO: 956768 - RNA, 22 nt, Human
cuccacagcucaggcucagagu

SEQ ID NO: 956769 - RNA, 22 nt, Human
aaagguaacaguuauaaccagg

SEQ ID NO: 956770 - RNA, 22 nt, Human
auuuauuaugggauuuggcuca

SEQ ID NO: 956771 - RNA, 22 nt, Human
aaguuuguucagggcuuacauu

SEQ ID NO: 956772 - RNA, 22 nt, Human
gucugucuguuguugagaagca

SEQ ID NO: 956773 - RNA, 22 nt, Human
uuucuggcagcgggacaggggu

SEQ ID NO: 956774 - RNA, 22 nt, Human
ucacaaaucauuuuaucugugu

SEQ ID NO: 956775 - RNA, 22 nt, Human
uggcgcaacucauucauggugu

SEQ ID NO: 956776 - RNA, 22 nt, Human
auucacaaguucuagggauuag

SEQ ID NO: 956777 - RNA, 22 nt, Human
aguuucuuuagauagaaaguuc

SEQ ID NO: 956778 - RNA, 22 nt, Human
augcaaaugaacauguugcuag

SEQ ID NO: 956779 - RNA, 22 nt, Human
cacucugcagcugaagggcugg

SEQ ID NO: 956780 - RNA, 22 nt, Human
cuugaaaugacaggagcacauc

SEQ ID NO: 956781 - RNA, 22 nt, Human
uauucacauucucaggccuggu

SEQ ID NO: 956782 - RNA, 22 nt, Human
cauaacauccuugcuacuuuga

SEQ ID NO: 956783 - RNA, 22 nt, Human
uuggccaauggugauucccggc

SEQ ID NO: 956784 - RNA, 22 nt, Human
augucacauggccuguacuuug

SEQ ID NO: 956785 - RNA, 22 nt, Human
gaguuauuugguuugcaugcag

SEQ ID NO: 956786 - RNA, 22 nt, Human
uaaaaguaggaaugaaacgcau

SEQ ID NO: 956787 - RNA, 22 nt, Human
gcuccuggugcaaaguuucuuc

SEQ ID NO: 956788 - RNA, 22 nt, Human
uaagaacaguagaacaguaggu

SEQ ID NO: 956789 - RNA, 22 nt, Human
accuuuuuguucuguucucagc

SEQ ID NO: 956790 - RNA, 23 nt, Human
uacuuaggaauggggacggcaag

SEQ ID NO: 956791 - RNA, 22 nt, Human
auucugagacaauugccgucag

SEQ ID NO: 956792 - RNA, 23 nt, Human
acagaaaguucugcuggacagag

SEQ ID NO: 956793 - RNA, 22 nt, Human
augugagguaucuaggucuucg

SEQ ID NO: 956794 - RNA, 22 nt, Human
uggccaagaaugauaugugaag

SEQ ID NO: 956795 - RNA, 22 nt, Human
aguuuaauauccuucaacuuuc

SEQ ID NO: 956796 - RNA, 22 nt, Human
aguaacucauguaaaccucaca

SEQ ID NO: 956797 - RNA, 22 nt, Human
agggaagaugucucaucuuagg

SEQ ID NO: 956798 - RNA, 22 nt, Human
aagaacauucgaacuauuuucu

SEQ ID NO: 956799 - RNA, 22 nt, Human
aaaauauuuuagggccaggaga

SEQ ID NO: 956800 - RNA, 22 nt, Human
cuucacaaauggccuagaguuc

SEQ ID NO: 956801 - RNA, 21 nt, Human
uccuggccagggcacuaggca

SEQ ID NO: 956802 - RNA, 22 nt, Human
aauaauuagugggacagagaac

SEQ ID NO: 956803 - RNA, 22 nt, Human
uuucacaaacucagggugugug

SEQ ID NO: 956804 - RNA, 22 nt, Human
uuuuauugucaaugaagacaga

SEQ ID NO: 956805 - RNA, 22 nt, Human
auuagguuagugugcaagagaa

SEQ ID NO: 956806 - RNA, 22 nt, Human
uaaaguauauuuuuucucaaua

SEQ ID NO: 956807 - RNA, 22 nt, Human
ugagccaaacuucuccuugguc

SEQ ID NO: 956808 - RNA, 22 nt, Human
aacugcuggggaggccaaacuc

SEQ ID NO: 956809 - RNA, 22 nt, Human
gaaauauucuugucuuguuuuc

SEQ ID NO: 956810 - RNA, 22 nt, Human
uaugcacaauaugaucuauuug

SEQ ID NO: 956811 - RNA, 22 nt, Human
augauguuauuuucagaaacau

SEQ ID NO: 956812 - RNA, 21 nt, Human
ccucugcucgggcaugcguuu

SEQ ID NO: 956813 - RNA, 22 nt, Human
aauuaggagaaaacuguugucu

SEQ ID NO: 956814 - RNA, 22 nt, Human
cuggucaaggagagucucugca

SEQ ID NO: 956815 - RNA, 22 nt, Human
caaaaguaauugcgguuuuugc

SEQ ID NO: 956816 - RNA, 22 nt, Human
accuucaaugaaaauaauaguc

SEQ ID NO: 956817 - RNA, 22 nt, Human
uaaaaguauacuuucaaaggag

SEQ ID NO: 956818 - RNA, 22 nt, Human
uggcacaugguaagacucagua

SEQ ID NO: 956819 - RNA, 20 nt, Human
uuggcagcagcucagccacc

SEQ ID NO: 956820 - RNA, 22 nt, Human
gcaccuuuggaaugaaaaguug

SEQ ID NO: 956821 - RNA, 22 nt, Human
augucacauggucaccucuagc

SEQ ID NO: 956822 - RNA, 22 nt, Human
aauauuaauagaagggguucua

SEQ ID NO: 956823 - RNA, 22 nt, Human
gcagacauuuugaaucuaggcu

SEQ ID NO: 956824 - RNA, 22 nt, Human
uaguuuaauggucaacuaauga

SEQ ID NO: 956825 - RNA, 20 nt, Human
uccuggccuucucgggcagu

SEQ ID NO: 956826 - RNA, 23 nt, Human
uccugaggguuucccagccuugg

SEQ ID NO: 956827 - RNA, 22 nt, Human
acucugcuuauugcugcaggca

SEQ ID NO: 956828 - RNA, 22 nt, Human
aacucugcagugacuuauaaag

SEQ ID NO: 956829 - RNA, 22 nt, Human
gcuccuggucuggagcuucaag

SEQ ID NO: 956830 - RNA, 22 nt, Human
uuaauguguguacaggauuuug

SEQ ID NO: 956831 - RNA, 22 nt, Human
uuucacaacguuguggugagag

SEQ ID NO: 956832 - RNA, 22 nt, Human
agaauaaacugcuuuagggcag

SEQ ID NO: 956833 - RNA, 22 nt, Human
uccuguuaguguuagacuuccc

SEQ ID NO: 956834 - RNA, 22 nt, Human
auuacaaaagaagggagaaggu

SEQ ID NO: 956835 - RNA, 22 nt, Human
caaauaguaugagcaaugauuc

SEQ ID NO: 956836 - RNA, 22 nt, Human
cagcuccugggccaucuccuag

SEQ ID NO: 956837 - RNA, 21 nt, Human
gggaaugagauucuuggagau

SEQ ID NO: 956838 - RNA, 22 nt, Human
ucugagcccucuuuugcagccc

SEQ ID NO: 956839 - RNA, 22 nt, Human
uuuuaacuuaaaauacauagau

SEQ ID NO: 956840 - RNA, 22 nt, Human
uccuggcccaaucugcccauga

SEQ ID NO: 956841 - RNA, 22 nt, Human
guauuaggugguggaauuguag

SEQ ID NO: 956842 - RNA, 22 nt, Human
agacaggcagaggcugcagagg

SEQ ID NO: 956843 - RNA, 22 nt, Human
aggcucugcagugcuggaggac

SEQ ID NO: 956844 - RNA, 22 nt, Human
uucaaaacaaucuguuugcauu

SEQ ID NO: 956845 - RNA, 21 nt, Human
acagacagggccagugucccc

SEQ ID NO: 956846 - RNA, 22 nt, Human
ccuuuucaacuaagauucugca

SEQ ID NO: 956847 - RNA, 22 nt, Human
ggccaaaccgcaauuauuuuug

SEQ ID NO: 956848 - RNA, 22 nt, Human
auuuggcacacuggguucucgu

SEQ ID NO: 956849 - RNA, 22 nt, Human
ugcaaaugaguugcagaucagg

SEQ ID NO: 956850 - RNA, 22 nt, Human
ugcaccuuguccauuuuuggcc

SEQ ID NO: 956851 - RNA, 22 nt, Human
guuaggauuauauaucccauga

SEQ ID NO: 956852 - RNA, 23 nt, Human
uuauugaggguguagauuggugu

SEQ ID NO: 956853 - RNA, 22 nt, Human
cggccaagccggggccccgaag

SEQ ID NO: 956854 - RNA, 22 nt, Human
cagccuuuuaggacuauuugug

SEQ ID NO: 956855 - RNA, 22 nt, Human
uugaaauauggauugaccuuga

SEQ ID NO: 956856 - RNA, 22 nt, Human
ugaagucuauuaacugauuucu

SEQ ID NO: 956857 - RNA, 22 nt, Human
cuuuauuagauguagacuuucu

SEQ ID NO: 956858 - RNA, 22 nt, Human
agcacauucuugccuuaaccuc

SEQ ID NO: 956859 - RNA, 19 nt, Human
ucaaaacacaaaugguuga

SEQ ID NO: 956860 - RNA, 22 nt, Human
acucugcuugggccauaucugg

SEQ ID NO: 956861 - RNA, 22 nt, Human
gucaucuuugcccugugcagga

SEQ ID NO: 956862 - RNA, 22 nt, Human
uuucacaaagcauagcacuuua

SEQ ID NO: 956863 - RNA, 22 nt, Human
ucuuguuaaagugaagauacug

SEQ ID NO: 956864 - RNA, 22 nt, Human
aacauaaauuugaaguggcaaa

SEQ ID NO: 956865 - RNA, 22 nt, Human
uauauuaacuugugauccugga

SEQ ID NO: 956866 - RNA, 22 nt, Human
cuguaaaacugcuuaaguaugc

SEQ ID NO: 956867 - RNA, 21 nt, Human
auucugaguugucagucuuca

SEQ ID NO: 956868 - RNA, 22 nt, Human
aaacccugcccuucccaagaug

SEQ ID NO: 956869 - RNA, 22 nt, Human
cuccuggcccugagcucccagg

SEQ ID NO: 956870 - RNA, 22 nt, Human
gcuccuggccagcacagggccc

SEQ ID NO: 956871 - RNA, 22 nt, Human
gacuccugccuccucuguuugc

SEQ ID NO: 956872 - RNA, 22 nt, Human
uuuuauauggcacauugguugg

SEQ ID NO: 956873 - RNA, 22 nt, Human
acgcuuuuacuauuuugagcuc

SEQ ID NO: 956874 - RNA, 22 nt, Human
uggcaaacuggaggaagcccug

SEQ ID NO: 956875 - RNA, 22 nt, Human
gagaaggaguagcugaccuggg

SEQ ID NO: 956876 - RNA, 22 nt, Human
uagaauaugugguaggaucugg

SEQ ID NO: 956877 - RNA, 22 nt, Human
auauuaggugcucaauacaugc

SEQ ID NO: 956878 - RNA, 20 nt, Human
ucuccuggugacaguaccca

SEQ ID NO: 956879 - RNA, 22 nt, Human
agcuauguuauagcauguauca

SEQ ID NO: 956880 - RNA, 22 nt, Human
aaaccaaacauuugcgguggug

SEQ ID NO: 956881 - RNA, 22 nt, Human
auggccaagaaauugccgacug

SEQ ID NO: 956882 - RNA, 22 nt, Human
cuuuuauuuugaauuaagggcu

SEQ ID NO: 956883 - RNA, 21 nt, Human
acuggccaccacuggcagggg

SEQ ID NO: 956884 - RNA, 22 nt, Human
auuaggacagagaugucaagag

SEQ ID NO: 956885 - RNA, 22 nt, Human
acauaaaguacugagagacucu

SEQ ID NO: 956886 - RNA, 22 nt, Human
ccugggcaucucaugcaccugc

SEQ ID NO: 956887 - RNA, 22 nt, Human
uuggcagcccagcuuacuagca

SEQ ID NO: 956888 - RNA, 22 nt, Human
uuaauaaaguaugaauuggaaa

SEQ ID NO: 956889 - RNA, 18 nt, Human
gaaaggagagacaguagg

SEQ ID NO: 956890 - RNA, 22 nt, Human
uuucaacaggaugauaauaggc

SEQ ID NO: 956891 - RNA, 22 nt, Human
accuuauuuugaaauagauugu

SEQ ID NO: 956892 - RNA, 22 nt, Human
gaacccaaaccuggaccucccu

SEQ ID NO: 956893 - RNA, 22 nt, Human
aaacauucucagcccugcuugc

SEQ ID NO: 956894 - RNA, 22 nt, Human
uacagccucacauuuacuuaca

SEQ ID NO: 956895 - RNA, 22 nt, Human
uccuggucuacacugcauuggg

SEQ ID NO: 956896 - RNA, 22 nt, Human
uaagucauaagucaugauguua

SEQ ID NO: 956897 - RNA, 22 nt, Human
aaauaguucagcuuguaaaccc

SEQ ID NO: 956898 - RNA, 22 nt, Human
cuauuuaugugcuauuuuguau

SEQ ID NO: 956899 - RNA, 22 nt, Human
auucacaaaugcugccccauuc

SEQ ID NO: 956900 - RNA, 22 nt, Human
aaaagagugacugauaaguaua

SEQ ID NO: 956901 - RNA, 22 nt, Human
uuucacaaaugucuuuaacuug

SEQ ID NO: 956902 - RNA, 22 nt, Human
uggcagcagacaucugaggucu

SEQ ID NO: 956903 - RNA, 21 nt, Human
auguaggguuugccuucucua

SEQ ID NO: 956904 - RNA, 22 nt, Human
ggccacaagugguccugagucc

SEQ ID NO: 956905 - RNA, 22 nt, Human
guggccaagggacucuaaggca

SEQ ID NO: 956906 - RNA, 22 nt, Human
cucccuggugacucccaaagcu

SEQ ID NO: 956907 - RNA, 22 nt, Human
gcagcauacagggagaguacuc

SEQ ID NO: 956908 - RNA, 22 nt, Human
aggauuuugacuuauucaggga

SEQ ID NO: 956909 - RNA, 22 nt, Human
uagauaaauuagaaaguuuacu

SEQ ID NO: 956910 - RNA, 22 nt, Human
cuguuuaucccuuuggucagca

SEQ ID NO: 956911 - RNA, 22 nt, Human
uagggauguaaacauaguaauu

SEQ ID NO: 956912 - RNA, 22 nt, Human
aaaaguauuuauggcuauguaa

SEQ ID NO: 956913 - RNA, 22 nt, Human
guauuaggaggaacacaggccu

SEQ ID NO: 956914 - RNA, 22 nt, Human
uaccucacugggccucaguuuu

SEQ ID NO: 956915 - RNA, 20 nt, Human
acuccugguaacuuuuguga

SEQ ID NO: 956916 - RNA, 22 nt, Human
ggaagugaggaaauauuuuguu

SEQ ID NO: 956917 - RNA, 22 nt, Human
cuauuaggcuuccauuucaugc

SEQ ID NO: 956918 - RNA, 22 nt, Human
cacccacauggaaauucacagu

SEQ ID NO: 956919 - RNA, 22 nt, Human
ucugcuguccuuuauauagauu

SEQ ID NO: 956920 - RNA, 22 nt, Human
gggaggaggaauguuuugugua

SEQ ID NO: 956921 - RNA, 22 nt, Human
aauuaaauugguuuagagagga

SEQ ID NO: 956922 - RNA, 22 nt, Human
gaguuauugaguauagaaugua

SEQ ID NO: 956923 - RNA, 22 nt, Human
cuuagaaaugcagauucucagg

SEQ ID NO: 956924 - RNA, 18 nt, Human
ucuccuggguaggggccu

SEQ ID NO: 956925 - RNA, 20 nt, Human
ucugccacuuuuucugucac

SEQ ID NO: 956926 - RNA, 22 nt, Human
gacagguggggaaacuaaggua

SEQ ID NO: 956927 - RNA, 22 nt, Human
uuaggaaucaccugcagaucuu

SEQ ID NO: 956928 - RNA, 22 nt, Human
auucaucaacugauagccauag

SEQ ID NO: 956929 - RNA, 22 nt, Human
cauaagaaauuuaacagaacuu

SEQ ID NO: 956930 - RNA, 22 nt, Human
cauucacauucuucuuacuguu

SEQ ID NO: 956931 - RNA, 22 nt, Human
uguuggcauuagaggguuauug

SEQ ID NO: 956932 - RNA, 22 nt, Human
aacaguaucuuuuaucagaaau

SEQ ID NO: 956933 - RNA, 22 nt, Human
gcuuagaaguuccuauaaaaug

SEQ ID NO: 956934 - RNA, 22 nt, Human
uauauuaaccauaggguucuag

SEQ ID NO: 956935 - RNA, 22 nt, Human
augcacuacuuggcuuuacuga

SEQ ID NO: 956936 - RNA, 22 nt, Human
guuccaguaugauuccacccau

SEQ ID NO: 956937 - RNA, 20 nt, Human
uauauaggaaauauuguguu

SEQ ID NO: 956938 - RNA, 22 nt, Human
ugucuuaauuuggaugauguuu

SEQ ID NO: 956939 - RNA, 22 nt, Human
aaguuugugucagagcuguuac

SEQ ID NO: 956940 - RNA, 22 nt, Human
uagaaacacagagagacccaug

SEQ ID NO: 956941 - RNA, 22 nt, Human
uuauuaggaaaaggucagaugu

SEQ ID NO: 956942 - RNA, 22 nt, Human
aaacucaaauuaaacuagcuua

SEQ ID NO: 956943 - RNA, 22 nt, Human
agaaguauaaagaauguuuaug

SEQ ID NO: 956944 - RNA, 22 nt, Human
cuccuggcuucugaaaucgugg

SEQ ID NO: 956945 - RNA, 22 nt, Human
ugugaaauucuugaaaugcaca

SEQ ID NO: 956946 - RNA, 22 nt, Human
uaaaacuagugguugggacuaa

SEQ ID NO: 956947 - RNA, 22 nt, Human
gacuccugggccucugagaggc

SEQ ID NO: 956948 - RNA, 22 nt, Human
uuggccaauuccagaggaucau

SEQ ID NO: 956949 - RNA, 23 nt, Human
agucuuaauacagcucuuuucua

SEQ ID NO: 956950 - RNA, 22 nt, Human
uauugaggauugaggaaagcac

SEQ ID NO: 956951 - RNA, 22 nt, Human
uccuggccucacaguccugggu

SEQ ID NO: 956952 - RNA, 22 nt, Human
guaauaaugguccccaaacacu

SEQ ID NO: 956953 - RNA, 19 nt, Human
aggucuaaucauaagacaa

SEQ ID NO: 956954 - RNA, 22 nt, Human
uagaauaugauuaauuuucuua

SEQ ID NO: 956955 - RNA, 22 nt, Human
uauucacagguucuggggauca

SEQ ID NO: 956956 - RNA, 22 nt, Human
cauauaaauacaacauguguua

SEQ ID NO: 956957 - RNA, 22 nt, Human
aaaugaguuuccucaauguccu

SEQ ID NO: 956958 - RNA, 19 nt, Human
cugggccagaaucagcuca

SEQ ID NO: 956959 - RNA, 22 nt, Human
agaaaugaagcaggaguuauua

SEQ ID NO: 956960 - RNA, 22 nt, Human
aaccuuuugcaagugccuugac

SEQ ID NO: 956961 - RNA, 22 nt, Human
cuauuagguaugcagccuauuu

SEQ ID NO: 956962 - RNA, 20 nt, Human
ccaauaaagcucuauaggga

SEQ ID NO: 956963 - RNA, 22 nt, Human
cugcuaaaccucucugagagcu

SEQ ID NO: 956964 - RNA, 22 nt, Human
cauuuaaagguuguggguaaaa

SEQ ID NO: 956965 - RNA, 22 nt, Human
uuucacaaugcaauccuacuuc

SEQ ID NO: 956966 - RNA, 22 nt, Human
acagucauuagauacaaugucu

SEQ ID NO: 956967 - RNA, 22 nt, Human
accuuuuccagcuucuagaggc

SEQ ID NO: 956968 - RNA, 22 nt, Human
uuuaucagagauauguguggac

SEQ ID NO: 956969 - RNA, 22 nt, Human
uuuaauuaggaaaugggcaggg

SEQ ID NO: 956970 - RNA, 22 nt, Human
ugcaccuucauuuuaggcagcu

SEQ ID NO: 956971 - RNA, 22 nt, Human
aaacugccuccugggcaacuaa

SEQ ID NO: 956972 - RNA, 22 nt, Human
uugcaaauauguucuccuauuc

SEQ ID NO: 956973 - RNA, 23 nt, Human
cuucuggcucuauaucagaauuc

SEQ ID NO: 956974 - RNA, 22 nt, Human
uccuggccgcuggccccugaga

SEQ ID NO: 956975 - RNA, 22 nt, Human
cucucuggaccucaacuauuuu

SEQ ID NO: 956976 - RNA, 22 nt, Human
ucacucuggaguccgcuaccag

SEQ ID NO: 956977 - RNA, 22 nt, Human
cuaagccacucaaaucuugugg

SEQ ID NO: 956978 - RNA, 22 nt, Human
gucugucucccugugacugaga

SEQ ID NO: 956979 - RNA, 22 nt, Human
gcucugcucuugacuuaccagg

SEQ ID NO: 956980 - RNA, 22 nt, Human
ucuuugcacacaucccuucccg

SEQ ID NO: 956981 - RNA, 22 nt, Human
ucugugccucaucugguucagg

SEQ ID NO: 956982 - RNA, 22 nt, Human
cugcucacgccaccguucauca

SEQ ID NO: 956983 - RNA, 22 nt, Human
aauucacagaaccauggugcuc

SEQ ID NO: 956984 - RNA, 22 nt, Human
aauuucaaguggcaucuuugau

SEQ ID NO: 956985 - RNA, 22 nt, Human
cagacaggguccuguccgucac

SEQ ID NO: 956986 - RNA, 22 nt, Human
uuuuaauacugcuauuguagga

SEQ ID NO: 956987 - RNA, 22 nt, Human
ugucaucugauauuacuuauag

SEQ ID NO: 956988 - RNA, 22 nt, Human
gaguuauuuugagcagaugguu

SEQ ID NO: 956989 - RNA, 22 nt, Human
uucagcaacucaaaccuauuag

SEQ ID NO: 956990 - RNA, 22 nt, Human
cugagccaccggcagggacauc

SEQ ID NO: 956991 - RNA, 22 nt, Human
uccaagggaaacugcacuucua

SEQ ID NO: 956992 - RNA, 21 nt, Human
cuccugggcuaagauauagug

SEQ ID NO: 956993 - RNA, 18 nt, Human
ucauuagggauugcaaag

SEQ ID NO: 956994 - RNA, 22 nt, Human
aaacaccagcacuguuuacaaa

SEQ ID NO: 956995 - RNA, 22 nt, Human
gcucugcugauccgcagccauc

SEQ ID NO: 956996 - RNA, 22 nt, Human
gucaucuucgcagagugauuuu

SEQ ID NO: 956997 - RNA, 22 nt, Human
cagccuuuuccauguauuguug

SEQ ID NO: 956998 - RNA, 22 nt, Human
aucaggauguuuggcugucaua

SEQ ID NO: 956999 - RNA, 22 nt, Human
agaaaugacacacaugagacau

SEQ ID NO: 957000 - RNA, 22 nt, Human
uaacuccaucucugugucugcu

SEQ ID NO: 957001 - RNA, 22 nt, Human
guguugacucuuggacuucaag

SEQ ID NO: 957002 - RNA, 22 nt, Human
agcuauguaacagugccaugga

SEQ ID NO: 957003 - RNA, 22 nt, Human
aaugugcaggcucaaaccuugu

SEQ ID NO: 957004 - RNA, 22 nt, Human
cauagaaaagaguagguaaugu

SEQ ID NO: 957005 - RNA, 21 nt, Human
uggccaaaaccauauuauuaa

SEQ ID NO: 957006 - RNA, 22 nt, Human
cuuuuacugugaaaagaaacug

SEQ ID NO: 957007 - RNA, 22 nt, Human
aauagaauguaaucuaauacau

SEQ ID NO: 957008 - RNA, 22 nt, Human
cauguguagugaaauaagcagu

SEQ ID NO: 957009 - RNA, 22 nt, Human
cuggcucaccuccgcuccagca

SEQ ID NO: 957010 - RNA, 22 nt, Human
uuccuggccccaccccuggaga

SEQ ID NO: 957011 - RNA, 22 nt, Human
gggaggagggugcuggcuaaac

SEQ ID NO: 957012 - RNA, 22 nt, Human
uucuuaagcaccuaaaaagugg

SEQ ID NO: 957013 - RNA, 22 nt, Human
ucacucugggccagcgcaggua

SEQ ID NO: 957014 - RNA, 22 nt, Human
auucacaauuagaaguagauaa

SEQ ID NO: 957015 - RNA, 23 nt, Human
uuucacaaugagcauuacagaau

SEQ ID NO: 957016 - RNA, 22 nt, Human
uuuuaucugugacaucuggcag

SEQ ID NO: 957017 - RNA, 19 nt, Human
cauuaggauuagagacaag

SEQ ID NO: 957018 - RNA, 22 nt, Human
cccaaacaguuccugugguacu

SEQ ID NO: 957019 - RNA, 22 nt, Human
uagaguguuguaauugaaaagg

SEQ ID NO: 957020 - RNA, 22 nt, Human
auucggaucauguguauguguu

SEQ ID NO: 957021 - RNA, 22 nt, Human
uuugcaaaaugucuuguguuag

SEQ ID NO: 957022 - RNA, 22 nt, Human
uccaagggaaugugggcaaugc

SEQ ID NO: 957023 - RNA, 21 nt, Human
ucuuggccuaaguucacugaa

SEQ ID NO: 957024 - RNA, 22 nt, Human
ccuggccaguuuccaggcccug

SEQ ID NO: 957025 - RNA, 22 nt, Human
uaauaaaugaaagugcuggcau

SEQ ID NO: 957026 - RNA, 22 nt, Human
ccuccugggagagcacggaggg

SEQ ID NO: 957027 - RNA, 22 nt, Human
agggucugcauuccaacuuggg

SEQ ID NO: 957028 - RNA, 22 nt, Human
ugcugaaacaauaacauacugg

SEQ ID NO: 957029 - RNA, 22 nt, Human
aacucugcaaccuauguagacc

SEQ ID NO: 957030 - RNA, 22 nt, Human
gcuccuggcuucacugacauca

SEQ ID NO: 957031 - RNA, 22 nt, Human
uuucuauuuuaaaggcauaugg

SEQ ID NO: 957032 - RNA, 22 nt, Human
uaccuucaccagcgaauguuug

SEQ ID NO: 957033 - RNA, 22 nt, Human
auuaaauacugcaggcuaagca

SEQ ID NO: 957034 - RNA, 22 nt, Human
cacacuuuuggcauguuugguu

SEQ ID NO: 957035 - RNA, 22 nt, Human
ucuuggccccaccugugccagc

SEQ ID NO: 957036 - RNA, 22 nt, Human
cagcugcaguucaaugcuugcu

SEQ ID NO: 957037 - RNA, 23 nt, Human
uggccacagggugcuccauugua

SEQ ID NO: 957038 - RNA, 22 nt, Human
auggccaagaucacagacuuca

SEQ ID NO: 957039 - RNA, 22 nt, Human
gagaggugaauguggaugccac

SEQ ID NO: 957040 - RNA, 22 nt, Human
gccaugaggaacuguaagacaa

SEQ ID NO: 957041 - RNA, 22 nt, Human
ccaaaaaguacauuuaggugug

SEQ ID NO: 957042 - RNA, 22 nt, Human
gaauuacaaagugagacaagcu

SEQ ID NO: 957043 - RNA, 22 nt, Human
acauccugaagucagucauuug

SEQ ID NO: 957044 - RNA, 22 nt, Human
aaagucauuguaauauaugcua

SEQ ID NO: 957045 - RNA, 22 nt, Human
ucuggccagcaugagaccuggu

SEQ ID NO: 957046 - RNA, 22 nt, Human
uggcacauagcagguacucagu

SEQ ID NO: 957047 - RNA, 22 nt, Human
uacaucuauacugaucuacauu

SEQ ID NO: 957048 - RNA, 22 nt, Human
ucauugaauauggggccauaca

SEQ ID NO: 957049 - RNA, 22 nt, Human
cacucugcaggccaaaccaaag

SEQ ID NO: 957050 - RNA, 22 nt, Human
cuggccaaugccuggggaauag

SEQ ID NO: 957051 - RNA, 22 nt, Human
uaguuuaaaaguuagggaugau

SEQ ID NO: 957052 - RNA, 22 nt, Human
acaaacagcuaacauauguuaa

SEQ ID NO: 957053 - RNA, 22 nt, Human
cagggucuuauaaggccaauuu

SEQ ID NO: 957054 - RNA, 22 nt, Human
ccuggccagaggcgugccugug

SEQ ID NO: 957055 - RNA, 22 nt, Human
uaguuaggguucugcagagaca

SEQ ID NO: 957056 - RNA, 22 nt, Human
cugccuggcuaaacucaagucg

SEQ ID NO: 957057 - RNA, 22 nt, Human
acaccuuugugaagugaugaug

SEQ ID NO: 957058 - RNA, 22 nt, Human
guggccaaaucaugucaaaggc

SEQ ID NO: 957059 - RNA, 22 nt, Human
ccuggccacccagccuuggcca

SEQ ID NO: 957060 - RNA, 22 nt, Human
aauuaggaauaaaugaguacuu

SEQ ID NO: 957061 - RNA, 19 nt, Human
uggcagcauugguaccuug

SEQ ID NO: 957062 - RNA, 22 nt, Human
ccuggccagcuaauugcccauc

SEQ ID NO: 957063 - RNA, 19 nt, Human
uccucagugacaaccucag

SEQ ID NO: 957064 - RNA, 22 nt, Human
caguuuaaaugagugacugcag

SEQ ID NO: 957065 - RNA, 22 nt, Human
uauuuaauaaaacuauggcaug

SEQ ID NO: 957066 - RNA, 22 nt, Human
ugcaccuuguugcuuuuacgaa

SEQ ID NO: 957067 - RNA, 20 nt, Human
uuggcagcuucaggguacua

SEQ ID NO: 957068 - RNA, 22 nt, Human
cucuugaagggcaucugaguua

SEQ ID NO: 957069 - RNA, 22 nt, Human
gcucugcuguguuuguucagca

SEQ ID NO: 957070 - RNA, 22 nt, Human
ccugagccucuugcacgcucag

SEQ ID NO: 957071 - RNA, 18 nt, Human
aggauauuaagaguacag

SEQ ID NO: 957072 - RNA, 20 nt, Human
aacacacugguggcaucagg

SEQ ID NO: 957073 - RNA, 22 nt, Human
aaaaugagauacaguuugaaag

SEQ ID NO: 957074 - RNA, 22 nt, Human
uucaggauucuuucagacuggg

SEQ ID NO: 957075 - RNA, 22 nt, Human
gcuccuggcucucugagggcug

SEQ ID NO: 957076 - RNA, 22 nt, Human
uugcaaauuauuuuagucccuu

SEQ ID NO: 957077 - RNA, 22 nt, Human
ucauugaauuugguucaauaug

SEQ ID NO: 957078 - RNA, 22 nt, Human
aacauuucagcaaauaagaaca

SEQ ID NO: 957079 - RNA, 20 nt, Human
uuaggcauuuggauuggcuu

SEQ ID NO: 957080 - RNA, 18 nt, Human
uuucacaaccuccagagg

SEQ ID NO: 957081 - RNA, 22 nt, Human
uccugugccuccaccugcuccg

SEQ ID NO: 957082 - RNA, 22 nt, Human
uauucacauguacauaugcuca

SEQ ID NO: 957083 - RNA, 22 nt, Human
auuaggaagaggaugucagcau

SEQ ID NO: 957084 - RNA, 22 nt, Human
ucucuggccgagagucccuggg

SEQ ID NO: 957085 - RNA, 22 nt, Human
cuuuguaucuaaauaucuugaa

SEQ ID NO: 957086 - RNA, 22 nt, Human
uaacuaacuaguguucaaaaua

SEQ ID NO: 957087 - RNA, 22 nt, Human
auguuuaaucggcugccuuucc

SEQ ID NO: 957088 - RNA, 22 nt, Human
uauauuaaacccucucuguagg

SEQ ID NO: 957089 - RNA, 22 nt, Human
uaccuauagguacaauuacaag

SEQ ID NO: 957090 - RNA, 22 nt, Human
ucaaauacauggucaaucaacu

SEQ ID NO: 957091 - RNA, 22 nt, Human
aauaagauugacacaaguaccu

SEQ ID NO: 957092 - RNA, 22 nt, Human
acauaacaaucauaggacauag

SEQ ID NO: 957093 - RNA, 22 nt, Human
ucucugcugagaagggcuggca

SEQ ID NO: 957094 - RNA, 22 nt, Human
aauguucaguagaauaggaaug

SEQ ID NO: 957095 - RNA, 22 nt, Human
uaugcacacauguaugcaugug

SEQ ID NO: 957096 - RNA, 22 nt, Human
uuggccaagggcucuuuaggcu

SEQ ID NO: 957097 - RNA, 22 nt, Human
acuccaggcaucugcuucugcu

SEQ ID NO: 957098 - RNA, 22 nt, Human
auuauuaggugcucucugacaa

SEQ ID NO: 957099 - RNA, 22 nt, Human
auauauaaccuggauaaggcuu

SEQ ID NO: 957100 - RNA, 22 nt, Human
uaugcacaacaugcagguuugu

SEQ ID NO: 957101 - RNA, 19 nt, Human
ucucacaguuuccuugccu

SEQ ID NO: 957102 - RNA, 22 nt, Human
auuagcauauuaaauagucauu

SEQ ID NO: 957103 - RNA, 22 nt, Human
uaaauacuuuuacuccacugau

SEQ ID NO: 957104 - RNA, 22 nt, Human
uuggcacagagcugcagccugg

SEQ ID NO: 957105 - RNA, 19 nt, Human
cugaggcccauguaccaug

SEQ ID NO: 957106 - RNA, 22 nt, Human
acagcauucaauaaauaauaac

SEQ ID NO: 957107 - RNA, 22 nt, Human
uuggccaaacagaguucaacag

SEQ ID NO: 957108 - RNA, 22 nt, Human
cagagcagucuggagauccagc

SEQ ID NO: 957109 - RNA, 22 nt, Human
aauagaauuuguacuguguuuu

SEQ ID NO: 957110 - RNA, 22 nt, Human
guggccaauuuccaucuguaag

SEQ ID NO: 957111 - RNA, 22 nt, Human
acaccuuugccccaagucauag

SEQ ID NO: 957112 - RNA, 22 nt, Human
augguacaaaauguauaaaguc

SEQ ID NO: 957113 - RNA, 20 nt, Human
ugaaauaaggaguuguccuu

SEQ ID NO: 957114 - RNA, 22 nt, Human
ucuccuggcucaccaggcugga

SEQ ID NO: 957115 - RNA, 22 nt, Human
aagucauuaucucuucuaaucu

SEQ ID NO: 957116 - RNA, 22 nt, Human
cacuggcccauuccugucuggc

SEQ ID NO: 957117 - RNA, 22 nt, Human
ucugagccacagauguccuguu

SEQ ID NO: 957118 - RNA, 22 nt, Human
gagccaggggucagcuccgagg

SEQ ID NO: 957119 - RNA, 22 nt, Human
guuuauuaacugucaagugauu

SEQ ID NO: 957120 - RNA, 22 nt, Human
gaguuuaaagcauacauauuuu

SEQ ID NO: 957121 - RNA, 19 nt, Human
ucauaaaaaugguaaccca

SEQ ID NO: 957122 - RNA, 22 nt, Human
aagauguaucuuuccuuuaauu

SEQ ID NO: 957123 - RNA, 20 nt, Human
aaaauauguauaacucuucu

SEQ ID NO: 957124 - RNA, 22 nt, Human
ccuggccagccagggcuggggu

SEQ ID NO: 957125 - RNA, 22 nt, Human
ucagggaaucagacucugcagc

SEQ ID NO: 957126 - RNA, 22 nt, Human
uggccacauccuuuccuuguca

SEQ ID NO: 957127 - RNA, 22 nt, Human
cacagcuaggaggaaagcagag

SEQ ID NO: 957128 - RNA, 22 nt, Human
gcucugcugucuucuugcaggc

SEQ ID NO: 957129 - RNA, 22 nt, Human
ugcauguggaccccuggugccu

SEQ ID NO: 957130 - RNA, 22 nt, Human
acauuucagcgugcaugacaug

SEQ ID NO: 957131 - RNA, 22 nt, Human
aauaggcaguuggauaugcaag

SEQ ID NO: 957132 - RNA, 22 nt, Human
aaacagucaugguugcuguuca

SEQ ID NO: 957133 - RNA, 22 nt, Human
auucacaaaaugauauagauac

SEQ ID NO: 957134 - RNA, 19 nt, Human
uuucacaaagagagcguga

SEQ ID NO: 957135 - RNA, 20 nt, Human
augcaaacccugcuuugugg

SEQ ID NO: 957136 - RNA, 20 nt, Human
auguaaaauuauaaggcuga

SEQ ID NO: 957137 - RNA, 22 nt, Human
cucucugcaaguuuugaaauag

SEQ ID NO: 957138 - RNA, 22 nt, Human
ugcucuucggggccacugcuug

SEQ ID NO: 957139 - RNA, 22 nt, Human
cuuugaauuccaguacaauaac

SEQ ID NO: 957140 - RNA, 22 nt, Human
agacaugagaaacccaccagag

SEQ ID NO: 957141 - RNA, 22 nt, Human
uggcagacacugucgaagccua

SEQ ID NO: 957142 - RNA, 22 nt, Human
uuauugagcacauaguaugugg

SEQ ID NO: 957143 - RNA, 23 nt, Human
gcuguuagauuuaauaagcauuu

SEQ ID NO: 957144 - RNA, 22 nt, Human
uauuggauagcuugugcagaau

SEQ ID NO: 957145 - RNA, 22 nt, Human
ucuccuggucaccucagaaguc

SEQ ID NO: 957146 - RNA, 22 nt, Human
aauaauguacauacauauuucg

SEQ ID NO: 957147 - RNA, 22 nt, Human
ugauaauauuuugaaucauaag

SEQ ID NO: 957148 - RNA, 22 nt, Human
uccuggccuugcgucuugggag

SEQ ID NO: 957149 - RNA, 22 nt, Human
agacagugauguaagcaggagu

SEQ ID NO: 957150 - RNA, 22 nt, Human
uagaaaugauuuugaugcuuca

SEQ ID NO: 957151 - RNA, 22 nt, Human
aacuccuguucuaugacaagag

SEQ ID NO: 957152 - RNA, 18 nt, Human
gcuccuggaccaggucac

SEQ ID NO: 957153 - RNA, 22 nt, Human
acagacauuuucuguauugccu

SEQ ID NO: 957154 - RNA, 20 nt, Human
uuggcagcaguuccaaguga

SEQ ID NO: 957155 - RNA, 22 nt, Human
uagaaacagcauauauuagccc

SEQ ID NO: 957156 - RNA, 22 nt, Human
caugucuuggcuuaggcacaga

SEQ ID NO: 957157 - RNA, 22 nt, Human
uguuuaguaggaguuuaauacu

SEQ ID NO: 957158 - RNA, 22 nt, Human
gaguuuaacacuuggagaaaag

SEQ ID NO: 957159 - RNA, 22 nt, Human
cagacaggguccuguccgucac

SEQ ID NO: 957160 - RNA, 22 nt, Human
uggcagcagacaaaaggccauu

SEQ ID NO: 957161 - RNA, 21 nt, Human
ccacucugaguguugaacaga

SEQ ID NO: 957162 - RNA, 22 nt, Human
aggccaaauugaucaucuuuag

SEQ ID NO: 957163 - RNA, 22 nt, Human
guauuaggaggaacacaggccu

SEQ ID NO: 957164 - RNA, 22 nt, Human
auuaggauuuuguccaaguagc

SEQ ID NO: 957165 - RNA, 22 nt, Human
auauaaagagcuuaguauagug

SEQ ID NO: 957166 - RNA, 22 nt, Human
augguacaaaauguauaaaguc

SEQ ID NO: 957167 - RNA, 17 nt, Human
uuaagguggaucagcac

SEQ ID NO: 957168 - RNA, 22 nt, Human
acuaaauagccucugguaguug

SEQ ID NO: 957169 - RNA, 22 nt, Human
aauguucaguagaauaggaaug

SEQ ID NO: 957170 - RNA, 22 nt, Human
uugaaaugcagauuccaaucca

SEQ ID NO: 957171 - RNA, 22 nt, Human
uauucacaaaaugagguccuca

SEQ ID NO: 957172 - RNA, 22 nt, Human
ggccaaauuuggccaugagcau

SEQ ID NO: 957173 - RNA, 22 nt, Human
ccuguuuaucuaucuagagaug

SEQ ID NO: 957174 - RNA, 22 nt, Human
uguuuauuuucaggauggauug

SEQ ID NO: 957175 - RNA, 22 nt, Human
uaacccaaaggcaaugucucga

SEQ ID NO: 957176 - RNA, 22 nt, Human
cuggcucaccuccgcuccagca

SEQ ID NO: 957177 - RNA, 22 nt, Human
gcccucugcacagcucugagca

SEQ ID NO: 957178 - RNA, 22 nt, Human
aaccaaauggaugguaagaggg

SEQ ID NO: 957179 - RNA, 22 nt, Human
aaacugcugguugcuggccagc

SEQ ID NO: 957180 - RNA, 22 nt, Human
auguuuaaaggagucagagacu

SEQ ID NO: 957181 - RNA, 22 nt, Human
uuggccaagauacgagcacaua

SEQ ID NO: 957182 - RNA, 22 nt, Human
gagacagugguugcagaagcuc

SEQ ID NO: 957183 - RNA, 22 nt, Human
uuuuaucugcuucauuaguuga

SEQ ID NO: 957184 - RNA, 22 nt, Human
uaaaagacauauaacuguagga

SEQ ID NO: 957185 - RNA, 18 nt, Human
uccuggccacacuaccuu

SEQ ID NO: 957186 - RNA, 23 nt, Human
uggcuaaaggcucuaguccugcu

SEQ ID NO: 957187 - RNA, 22 nt, Human
ucucuggccgagagucccuggg

SEQ ID NO: 957188 - RNA, 22 nt, Human
aacaaguaaguuuauauauauu

SEQ ID NO: 957189 - RNA, 20 nt, Human
aaaaacaguaaugcugaaga

SEQ ID NO: 957190 - RNA, 22 nt, Human
uggagggaacaaaggaguccca

SEQ ID NO: 957191 - RNA, 22 nt, Human
aaaugugcuucuuacucucaau

SEQ ID NO: 957192 - RNA, 22 nt, Human
cuauuuaugugcuauuuuguau

SEQ ID NO: 957193 - RNA, 22 nt, Human
cagccuuuaagcuuggauaggu

SEQ ID NO: 957194 - RNA, 22 nt, Human
uuaaaaugcagauucugauuca

SEQ ID NO: 957195 - RNA, 22 nt, Human
ugaaggugucuuugugaacauc

SEQ ID NO: 957196 - RNA, 22 nt, Human
ggccaaaugaaaucugagcaau

SEQ ID NO: 957197 - RNA, 22 nt, Human
ucaaauaaugccauucaucauc

SEQ ID NO: 957198 - RNA, 22 nt, Human
uaaaguguccuagcuaggaggc

SEQ ID NO: 957199 - RNA, 22 nt, Human
guauguauguauauguuuaaga

SEQ ID NO: 957200 - RNA, 22 nt, Human
cagcuuuguccugcaaaccuga

SEQ ID NO: 957201 - RNA, 22 nt, Human
gcucugcucccucaaaugacau

SEQ ID NO: 957202 - RNA, 22 nt, Human
agaggaaguaaucaggaccugc

SEQ ID NO: 957203 - RNA, 22 nt, Human
cuggccaacuugcuuguuggca

SEQ ID NO: 957204 - RNA, 22 nt, Human
ugaggccagcuucagcagugga

SEQ ID NO: 957205 - RNA, 22 nt, Human
gauguuucaugcuagcaugugu

SEQ ID NO: 957206 - RNA, 22 nt, Human
cugagggucaacuugauuguau

SEQ ID NO: 957207 - RNA, 22 nt, Human
auuagcauauuaaauagucauu

SEQ ID NO: 957208 - RNA, 22 nt, Human
guaaauaacugguaauuggggu

SEQ ID NO: 957209 - RNA, 22 nt, Human
acucuggcccuccugcugccag

SEQ ID NO: 957210 - RNA, 22 nt, Human
uuuauaaguacuuugucugcuu

SEQ ID NO: 957211 - RNA, 18 nt, Human
auggucucauacugggag

SEQ ID NO: 957212 - RNA, 22 nt, Human
uuucuauucuggaucuguggca

SEQ ID NO: 957213 - RNA, 22 nt, Human
cagucauuggcuaaagcucccu

SEQ ID NO: 957214 - RNA, 23 nt, Human
acucagcuuugggagaugacuca

SEQ ID NO: 957215 - RNA, 23 nt, Human
auagucauguaaaauauuugaag

SEQ ID NO: 957216 - RNA, 22 nt, Human
guacauuucauuuaaaugaugu

SEQ ID NO: 957217 - RNA, 22 nt, Human
uccuggccucgcuguccaccuu

SEQ ID NO: 957218 - RNA, 22 nt, Human
ucucugcucugugccucaguuu

SEQ ID NO: 957219 - RNA, 22 nt, Human
gagaggugaauguggaugccac

SEQ ID NO: 957220 - RNA, 22 nt, Human
ugacauaaaucuaaaggaaagg

SEQ ID NO: 957221 - RNA, 22 nt, Human
uuauuaggaacucaggauuuuu

SEQ ID NO: 957222 - RNA, 22 nt, Human
agaauaaauguuggacuuagga

SEQ ID NO: 957223 - RNA, 22 nt, Human
ucuuuuauccuacauuuagcuc

SEQ ID NO: 957224 - RNA, 21 nt, Human
ugacauaauccauaguacaaa

SEQ ID NO: 957225 - RNA, 19 nt, Human
ucuaagccucaauguuuuc

SEQ ID NO: 957226 - RNA, 22 nt, Human
guggccaaaucaugucaaaggc

SEQ ID NO: 957227 - RNA, 22 nt, Human
ccuuuuaugaacuugagcaggu

SEQ ID NO: 957228 - RNA, 22 nt, Human
uuucacaauuuuaaggagcaaa

SEQ ID NO: 957229 - RNA, 22 nt, Human
agggaaugcuccguauaaaucu

SEQ ID NO: 957230 - RNA, 22 nt, Human
caccucuuugauuugaggcaag

SEQ ID NO: 957231 - RNA, 22 nt, Human
acauuaaugaggugaugacaca

SEQ ID NO: 957232 - RNA, 22 nt, Human
cugcuaaaccucucugagagcu

SEQ ID NO: 957233 - RNA, 22 nt, Human
ccuggccagcuaauugcccauc

SEQ ID NO: 957234 - RNA, 22 nt, Human
cagcaggguagguuguaucagu

SEQ ID NO: 957235 - RNA, 22 nt, Human
cauaagaaauuuaacagaacuu

SEQ ID NO: 957236 - RNA, 22 nt, Human
uuggccaauggugauucccggc

SEQ ID NO: 957237 - RNA, 22 nt, Human
ucugaagccaccucugcuuguc

SEQ ID NO: 957238 - RNA, 22 nt, Human
uaucuuugaugccagauguuac

SEQ ID NO: 957239 - RNA, 22 nt, Human
cuccuggaggauagugacuggg

SEQ ID NO: 957240 - RNA, 22 nt, Human
auggccaagaaguauuccugac

SEQ ID NO: 957241 - RNA, 22 nt, Human
uauuagguaugaacuggcaacc

SEQ ID NO: 957242 - RNA, 22 nt, Human
gaguuauugaguauagaaugua

SEQ ID NO: 957243 - RNA, 22 nt, Human
uaugcacaauaugaucuauuug

SEQ ID NO: 957244 - RNA, 22 nt, Human
agcuauguuauagcauguauca

SEQ ID NO: 957245 - RNA, 22 nt, Human
ugaaugugaugcuaaacauaug

SEQ ID NO: 957246 - RNA, 22 nt, Human
ucuccuggucaccucagaaguc

SEQ ID NO: 957247 - RNA, 22 nt, Human
ggucugaguggugcugacucag

SEQ ID NO: 957248 - RNA, 22 nt, Human
uugagggaacaugagaaucauc

SEQ ID NO: 957249 - RNA, 22 nt, Human
uuauuagagauauuugguuagg

SEQ ID NO: 957250 - RNA, 20 nt, Human
ggccgaaauaauaguggcuu

SEQ ID NO: 957251 - RNA, 22 nt, Human
ucuggccaguagauguggguug

SEQ ID NO: 957252 - RNA, 21 nt, Human
acugccugucuccauagucua

SEQ ID NO: 957253 - RNA, 22 nt, Human
acuggccaggagcuggaaauac

SEQ ID NO: 957254 - RNA, 22 nt, Human
cccauggcuuaggagggagugu

SEQ ID NO: 957255 - RNA, 22 nt, Human
ggaagugaggaaauauuuuguu

SEQ ID NO: 957256 - RNA, 22 nt, Human
ccacucugauuucaagggagau

SEQ ID NO: 957257 - RNA, 22 nt, Human
acacauuuaaaaaggaacauau

SEQ ID NO: 957258 - RNA, 22 nt, Human
uggaagagguggaaguggcuuc

SEQ ID NO: 957259 - RNA, 22 nt, Human
gaguuauuagucaaauagggaa

SEQ ID NO: 957260 - RNA, 22 nt, Human
aagucauugguagcuugauagg

SEQ ID NO: 957261 - RNA, 22 nt, Human
guuccaaacaagucauaaagua

SEQ ID NO: 957262 - RNA, 22 nt, Human
cuuuuuaucucuuaaugauguu

SEQ ID NO: 957263 - RNA, 22 nt, Human
aaagguaacaguuauaaccagg

SEQ ID NO: 957264 - RNA, 22 nt, Human
uggucaaaaacucucaguggac

SEQ ID NO: 957265 - RNA, 22 nt, Human
aggcucugugcagccugcaucu

SEQ ID NO: 957266 - RNA, 22 nt, Human
acuccuggaaaagaacgcaggg

SEQ ID NO: 957267 - RNA, 22 nt, Human
guacacucccccugugaaguug

SEQ ID NO: 957268 - RNA, 22 nt, Human
cuacucugaauugaagugauau

SEQ ID NO: 957269 - RNA, 22 nt, Human
uuucaacauauaccauaaugcc

SEQ ID NO: 957270 - RNA, 22 nt, Human
gagccaagaucgcaccacugca

SEQ ID NO: 957271 - RNA, 22 nt, Human
aaauaggagcuuaagcacuucu

SEQ ID NO: 957272 - RNA, 22 nt, Human
aacugcauuuaacaaauacucu

SEQ ID NO: 957273 - RNA, 22 nt, Human
uauauuaacuugugauccugga

SEQ ID NO: 957274 - RNA, 22 nt, Human
ucagggaaugaugcacacaguu

SEQ ID NO: 957275 - RNA, 22 nt, Human
gacucugcuacaggccgagguu

SEQ ID NO: 957276 - RNA, 22 nt, Human
acucugcuugggccauaucugg

SEQ ID NO: 957277 - RNA, 22 nt, Human
uccuggcccaaucugcccauga

SEQ ID NO: 957278 - RNA, 22 nt, Human
uccaagggcaugcugaaauaag

SEQ ID NO: 957279 - RNA, 22 nt, Human
cuggcgcaacagaaaaucugga

SEQ ID NO: 957280 - RNA, 22 nt, Human
uggucaaaaaggccuagacaca

SEQ ID NO: 957281 - RNA, 22 nt, Human
cagcuccugggccaucuccuag

SEQ ID NO: 957282 - RNA, 22 nt, Human
cucugcugggauguaaagucuu

SEQ ID NO: 957283 - RNA, 22 nt, Human
aaugaaauguagcuuauccaua

SEQ ID NO: 957284 - RNA, 22 nt, Human
augcugagcagagcugacaugc

SEQ ID NO: 957285 - RNA, 22 nt, Human
auaaugugauauuucauuuaca

SEQ ID NO: 957286 - RNA, 22 nt, Human
ucacucugcaggaaggagcagc

SEQ ID NO: 957287 - RNA, 19 nt, Human
acuuccugcccgcuccuuu

SEQ ID NO: 957288 - RNA, 22 nt, Human
cuaauguggacucuaucaaagu

SEQ ID NO: 957289 - RNA, 22 nt, Human
cuucacaacgacaucugguuag

SEQ ID NO: 957290 - RNA, 22 nt, Human
ugaagucuauuaacugauuucu

SEQ ID NO: 957291 - RNA, 22 nt, Human
auguuuuauauuuugcagcagu

SEQ ID NO: 957292 - RNA, 22 nt, Human
cuauuagguaugcagccuauuu

SEQ ID NO: 957293 - RNA, 22 nt, Human
ucacucugagaggucacuggaa

SEQ ID NO: 957294 - RNA, 19 nt, Human
gcuccugggccucacucau

SEQ ID NO: 957295 - RNA, 22 nt, Human
gggucugaggaguaccauuguc

SEQ ID NO: 957296 - RNA, 22 nt, Human
aaaagucugcucucauuucaga

SEQ ID NO: 957297 - RNA, 22 nt, Human
uuggccaacagcgacagggcca

SEQ ID NO: 957298 - RNA, 23 nt, Human
cagaaaguuugagaagauacauc

SEQ ID NO: 957299 - RNA, 22 nt, Human
acuaaauaguuuugacagaaca

SEQ ID NO: 957300 - RNA, 22 nt, Human
aaacaaguuuagaauaaugaau

SEQ ID NO: 957301 - RNA, 22 nt, Human
uggcagacacugucgaagccua

SEQ ID NO: 957302 - RNA, 22 nt, Human
caaaaguaauugugguuuucac

SEQ ID NO: 957303 - RNA, 22 nt, Human
cugugccaguguauuccuguga

SEQ ID NO: 957304 - RNA, 22 nt, Human
gcaccuuucuauauucaguggc

SEQ ID NO: 957305 - RNA, 22 nt, Human
accuguuuggaggagguguuag

SEQ ID NO: 957306 - RNA, 22 nt, Human
uuugauaacagugaauaucaug

SEQ ID NO: 957307 - RNA, 22 nt, Human
gacucugcuaggaaaaucucag

SEQ ID NO: 957308 - RNA, 22 nt, Human
agucuuaacuaugcaaguacua

SEQ ID NO: 957309 - RNA, 22 nt, Human
uuuuaguuguaguuggugagga

SEQ ID NO: 957310 - RNA, 22 nt, Human
cacuaaguaagcuccucuacaa

SEQ ID NO: 957311 - RNA, 22 nt, Human
auuaggauuugguauggucaua

SEQ ID NO: 957312 - RNA, 21 nt, Human
acagacagggccagugucccc

SEQ ID NO: 957313 - RNA, 22 nt, Human
acacagaguauuuagaaggggu

SEQ ID NO: 957314 - RNA, 22 nt, Human
aaccuucacuugcuucauuuga

SEQ ID NO: 957315 - RNA, 22 nt, Human
uggcagcagacaucugaggucu

SEQ ID NO: 957316 - RNA, 22 nt, Human
uagaauauacacuacagcuuaa

SEQ ID NO: 957317 - RNA, 22 nt, Human
uccuggccaggaugaccuaaca

SEQ ID NO: 957318 - RNA, 22 nt, Human
uauuauuauaguuauugggaag

SEQ ID NO: 957319 - RNA, 22 nt, Human
uauuuaauuugcucauugugau

SEQ ID NO: 957320 - RNA, 23 nt, Human
guuguaauggauaaugcaaauug

SEQ ID NO: 957321 - RNA, 22 nt, Human
gucugucucccugugacugaga

SEQ ID NO: 957322 - RNA, 18 nt, Human
aacuucaacuacaaugga

SEQ ID NO: 957323 - RNA, 22 nt, Human
uauguagguaaacacagacaua

SEQ ID NO: 957324 - RNA, 18 nt, Human
uagaauauaggucauucu

SEQ ID NO: 957325 - RNA, 22 nt, Human
gcuggccauagaagccaaagag

SEQ ID NO: 957326 - RNA, 23 nt, Human
aacugagauaauguauguaaagc

SEQ ID NO: 957327 - RNA, 22 nt, Human
gacucugcugacuaguugacua

SEQ ID NO: 957328 - RNA, 22 nt, Human
ucugaaaucuguaagcacuagc

SEQ ID NO: 957329 - RNA, 22 nt, Human
ucuaagccuaggaaaugaguuu

SEQ ID NO: 957330 - RNA, 16 nt, Human
auucacaaggcaucgg

SEQ ID NO: 957331 - RNA, 22 nt, Human
ccaaaaagcucagagauauguu

SEQ ID NO: 957332 - RNA, 22 nt, Human
uuuucauuguuacuaugagcua

SEQ ID NO: 957333 - RNA, 22 nt, Human
agacauaagugcuaugacauug

SEQ ID NO: 957334 - RNA, 22 nt, Human
aauucacaugcaugucugugca

SEQ ID NO: 957335 - RNA, 22 nt, Human
ucuccugggugcuuuaucagaa

SEQ ID NO: 957336 - RNA, 21 nt, Human
uucugagcacucaucacuguc

SEQ ID NO: 957337 - RNA, 22 nt, Human
aaaguuugcaauuuauguuaau

SEQ ID NO: 957338 - RNA, 22 nt, Human
cagcuccugaggacugcuggga

SEQ ID NO: 957339 - RNA, 22 nt, Human
uggcagcauuaauuauucaggu

SEQ ID NO: 957340 - RNA, 22 nt, Human
cuguuacacggaccuucaaauc

SEQ ID NO: 957341 - RNA, 22 nt, Human
gcuggccauauauuuugcuguu

SEQ ID NO: 957342 - RNA, 22 nt, Human
uccuggucuacacugcauuggg

SEQ ID NO: 957343 - RNA, 22 nt, Human
acuccugggugcugaccagcgu

SEQ ID NO: 957344 - RNA, 22 nt, Human
auucacaaaaugauauagauac

SEQ ID NO: 957345 - RNA, 22 nt, Human
uagcacaggucuuguugccauu

SEQ ID NO: 957346 - RNA, 20 nt, Human
uauuaggaaggaggaaggaa

SEQ ID NO: 957347 - RNA, 22 nt, Human
uuggccaauuccagaggaucau

SEQ ID NO: 957348 - RNA, 20 nt, Human
uauauaggaaauauuguguu

SEQ ID NO: 957349 - RNA, 22 nt, Human
uuugauucuguaaaauaacagg

SEQ ID NO: 957350 - RNA, 22 nt, Human
uacucugcaaguugaagguggc

SEQ ID NO: 957351 - RNA, 22 nt, Human
aaagucauuggaauauuaauga

SEQ ID NO: 957352 - RNA, 22 nt, Human
guauuagggccaaaggcaggaa

SEQ ID NO: 957353 - RNA, 22 nt, Human
ucugagccaaaauaaacagcau

SEQ ID NO: 957354 - RNA, 22 nt, Human
guauuagguuggugcaaaagua

SEQ ID NO: 957355 - RNA, 22 nt, Human
gaagccuugaacugcaaacccc

SEQ ID NO: 957356 - RNA, 22 nt, Human
acacucuguaaugucacacucc

SEQ ID NO: 957357 - RNA, 22 nt, Human
aacucugcuuauaguuugucca

SEQ ID NO: 957358 - RNA, 22 nt, Human
aaacuacuaugggaauguacuu

SEQ ID NO: 957359 - RNA, 22 nt, Human
gcucugcuuucuggggggaucc

SEQ ID NO: 957360 - RNA, 22 nt, Human
ucacucugaaugguacugagga

SEQ ID NO: 957361 - RNA, 22 nt, Human
ucuccuggauggaccuucucuu

SEQ ID NO: 957362 - RNA, 22 nt, Human
cuggccuaaaauugcuucugca

SEQ ID NO: 957363 - RNA, 21 nt, Human
gggucugaauaucuggugcug

SEQ ID NO: 957364 - RNA, 22 nt, Human
ucugacauuuugagaaugacau

SEQ ID NO: 957365 - RNA, 22 nt, Human
cugagccaugagccugcgccca

SEQ ID NO: 957366 - RNA, 22 nt, Human
aagauauuuuagaacauucacu

SEQ ID NO: 957367 - RNA, 22 nt, Human
uuggccaacauggugaaacccc

SEQ ID NO: 957368 - RNA, 22 nt, Human
ucaaauacauggucaaucaacu

SEQ ID NO: 957369 - RNA, 22 nt, Human
cuccugggaauuuaguugugag

SEQ ID NO: 957370 - RNA, 22 nt, Human
uugagggucuggaucugcugcu

SEQ ID NO: 957371 - RNA, 22 nt, Human
acacuugauaggucaaaucagu

SEQ ID NO: 957372 - RNA, 22 nt, Human
cauagaaaagaguagguaaugu

SEQ ID NO: 957373 - RNA, 22 nt, Human
aaaugauggaaaugaggcugaa

SEQ ID NO: 957374 - RNA, 22 nt, Human
aaaagcuagucaaugauguauu

SEQ ID NO: 957375 - RNA, 22 nt, Human
auagaauagcauagaaaauuga

SEQ ID NO: 957376 - RNA, 22 nt, Human
aacauuucuucugaaacugagu

SEQ ID NO: 957377 - RNA, 21 nt, Human
ugaaacacucuuuccaugaga

SEQ ID NO: 957378 - RNA, 22 nt, Human
acuucuggauagagucagcuuu

SEQ ID NO: 957379 - RNA, 22 nt, Human
uguguauagcaguuuccagucu

SEQ ID NO: 957380 - RNA, 22 nt, Human
cauguguagugaaauaagcagu

SEQ ID NO: 957381 - RNA, 22 nt, Human
uuggcacagagcugcagccugg

SEQ ID NO: 957382 - RNA, 22 nt, Human
aauaauguugacgauagucuua

SEQ ID NO: 957383 - RNA, 22 nt, Human
aacuccagggcauugucuccug

SEQ ID NO: 957384 - RNA, 21 nt, Human
acuggccaccacuggcagggg

SEQ ID NO: 957385 - RNA, 22 nt, Human
agaaaugaagcaggaguuauua

SEQ ID NO: 957386 - RNA, 18 nt, Human
uuucacaaccuccagagg

SEQ ID NO: 957387 - RNA, 22 nt, Human
cuccuggcucugccacuuacua

SEQ ID NO: 957388 - RNA, 22 nt, Human
aagucauuaucucuucuaaucu

SEQ ID NO: 957389 - RNA, 22 nt, Human
caaaaguaauggcgguuuuuac

SEQ ID NO: 957390 - RNA, 22 nt, Human
uuuuaguuguacugucaacagu

SEQ ID NO: 957391 - RNA, 22 nt, Human
ccuggccagccagggcuggggu

SEQ ID NO: 957392 - RNA, 22 nt, Human
uuauuagguuuacauaaagguu

SEQ ID NO: 957393 - RNA, 22 nt, Human
acacauuauagagaguauaaua

SEQ ID NO: 957394 - RNA, 22 nt, Human
gucaucuuaucauuguugcugu

SEQ ID NO: 957395 - RNA, 22 nt, Human
uuuuuauaugaaggauagugcg

SEQ ID NO: 957396 - RNA, 22 nt, Human
auucacaauagcagcuugcaug

SEQ ID NO: 957397 - RNA, 21 nt, Human
auuuggauauugcuggcaaau

SEQ ID NO: 957398 - RNA, 20 nt, Human
guauuagguguuccucuuuc

SEQ ID NO: 957399 - RNA, 20 nt, Human
ccaauaaagcucuauaggga

SEQ ID NO: 957400 - RNA, 22 nt, Human
gcuccuggcucuggccaaggga

SEQ ID NO: 957401 - RNA, 22 nt, Human
aaagacauugaagaaggacuua

SEQ ID NO: 957402 - RNA, 22 nt, Human
augcccaaugucacaauuuuug

SEQ ID NO: 957403 - RNA, 22 nt, Human
acuccuggggauccauuccuuu

SEQ ID NO: 957404 - RNA, 22 nt, Human
aauaauaagauacuaagggagu

SEQ ID NO: 957405 - RNA, 22 nt, Human
gauauagguucauaguguuaca

SEQ ID NO: 957406 - RNA, 19 nt, Human
ucucugcuucucuuggcau

SEQ ID NO: 957407 - RNA, 22 nt, Human
ucucugcuaagauugugucuag

SEQ ID NO: 957408 - RNA, 23 nt, Human
ucaaacauauugugagacacagg

SEQ ID NO: 957409 - RNA, 22 nt, Human
gcucugcugaagccccuugcau

SEQ ID NO: 957410 - RNA, 22 nt, Human
ucuccuggcucaccaggcugga

SEQ ID NO: 957411 - RNA, 22 nt, Human
ucacucuguuagaggaaagugc

SEQ ID NO: 957412 - RNA, 22 nt, Human
ugucaucucacugauauagaug

SEQ ID NO: 957413 - RNA, 22 nt, Human
aggauguuaucugugcaggugg

SEQ ID NO: 957414 - RNA, 22 nt, Human
agaauaaacugcuuuagggcag

SEQ ID NO: 957415 - RNA, 22 nt, Human
ggcagacaccuuuaugucuaau

SEQ ID NO: 957416 - RNA, 22 nt, Human
auggccaaagccacagcagagg

SEQ ID NO: 957417 - RNA, 22 nt, Human
ccuggccagggucugggcugcu

SEQ ID NO: 957418 - RNA, 22 nt, Human
cuuaggaugaguuuuugcguuu

SEQ ID NO: 957419 - RNA, 22 nt, Human
uuucacaaucaaauggugaaau

SEQ ID NO: 957420 - RNA, 21 nt, Human
gcuccuggugcugcguggcgc

SEQ ID NO: 957421 - RNA, 22 nt, Human
cauguuaaugaauuuuugcagu

SEQ ID NO: 957422 - RNA, 22 nt, Human
aggccaaauagcagguuugcua

SEQ ID NO: 957423 - RNA, 23 nt, Human
uccaagggcuacaaacacagacc

SEQ ID NO: 957424 - RNA, 19 nt, Human
uccaccuuucuucauuugg

SEQ ID NO: 957425 - RNA, 22 nt, Human
ucacucugauagauaagcuaac

SEQ ID NO: 957426 - RNA, 22 nt, Human
agaauaaaucaaauguccugag

SEQ ID NO: 957427 - RNA, 22 nt, Human
augugaggaagaaagagguaag

SEQ ID NO: 957428 - RNA, 22 nt, Human
aaauaguucagcuuguaaaccc

SEQ ID NO: 957429 - RNA, 22 nt, Human
cagccuuuuccauguauuguug

SEQ ID NO: 957430 - RNA, 22 nt, Human
cugagccauccauaccagcuua

SEQ ID NO: 957431 - RNA, 22 nt, Human
uuucaacaggaugauaauaggc

SEQ ID NO: 957432 - RNA, 22 nt, Human
uuguauucauugcuuacccaau

SEQ ID NO: 957433 - RNA, 22 nt, Human
ccuggccaguuuccaggcccug

SEQ ID NO: 957434 - RNA, 22 nt, Human
auaaaaccaaagcagcaguguu

SEQ ID NO: 957435 - RNA, 22 nt, Human
aucaggaucagggcuagcagag

SEQ ID NO: 957436 - RNA, 19 nt, Human
uggaagaggaagggaaaua

SEQ ID NO: 957437 - RNA, 22 nt, Human
aaucaguauugguauagaauga

SEQ ID NO: 957438 - RNA, 22 nt, Human
augauguuauuuucagaaacau

SEQ ID NO: 957439 - RNA, 22 nt, Human
uugaggaguguuuagggugagg

SEQ ID NO: 957440 - RNA, 22 nt, Human
cuucuuaucaaguggcaaaucu

SEQ ID NO: 957441 - RNA, 22 nt, Human
cugaaaugacgguuuggggcaa

SEQ ID NO: 957442 - RNA, 22 nt, Human
uaauaggagccaggucacauag

SEQ ID NO: 957443 - RNA, 22 nt, Human
uacaucuagccuuacaauuauu

SEQ ID NO: 957444 - RNA, 22 nt, Human
acagaccucuagauuacauuug

SEQ ID NO: 957445 - RNA, 22 nt, Human
acugccugcucauaacauugcu

SEQ ID NO: 957446 - RNA, 22 nt, Human
gcuuccuaaaugcacagggcag

SEQ ID NO: 957447 - RNA, 22 nt, Human
cugcacaguuugauuucuugcu

SEQ ID NO: 957448 - RNA, 20 nt, Human
ccuuuauuauuuguaugaug

SEQ ID NO: 957449 - RNA, 22 nt, Human
aaauacaguguguguucuuuga

SEQ ID NO: 957450 - RNA, 22 nt, Human
uaagaacaguagaacaguaggu

SEQ ID NO: 957451 - RNA, 22 nt, Human
auuaaggaauguaggcaagaag

SEQ ID NO: 957452 - RNA, 22 nt, Human
auagugcaguggacugaguuaa

SEQ ID NO: 957453 - RNA, 22 nt, Human
aaacacauuuuaggaaaaucua

SEQ ID NO: 957454 - RNA, 22 nt, Human
acucugcucuguauuucacugu

SEQ ID NO: 957455 - RNA, 22 nt, Human
cauccugguuaccccauaguca

SEQ ID NO: 957456 - RNA, 22 nt, Human
aggccaaaccggauggaaaagg

SEQ ID NO: 957457 - RNA, 22 nt, Human
uggcagcaauuagcuagagcug

SEQ ID NO: 957458 - RNA, 22 nt, Human
uaccuuuugcuuauuaugacac

SEQ ID NO: 957459 - RNA, 22 nt, Human
acucugcuugcccaauggaaac

SEQ ID NO: 957460 - RNA, 22 nt, Human
aacaaaccuucccuauacgucu

SEQ ID NO: 957461 - RNA, 18 nt, Human
gcuccugguuggaaagaa

SEQ ID NO: 957462 - RNA, 22 nt, Human
cuccuuggccguuaaugucaca

SEQ ID NO: 957463 - RNA, 22 nt, Human
auucggaucauguguauguguu

SEQ ID NO: 957464 - RNA, 22 nt, Human
caaaaguaaucguggcuuuugc

SEQ ID NO: 957465 - RNA, 22 nt, Human
aauuaaauugguuuagagagga

SEQ ID NO: 957466 - RNA, 22 nt, Human
ucaaugaaagagcaugcauuuu

SEQ ID NO: 957467 - RNA, 23 nt, Human
uggccacagggugcuccauugua

SEQ ID NO: 957468 - RNA, 22 nt, Human
gcuccuggagagauugagaaag

SEQ ID NO: 957469 - RNA, 22 nt, Human
cuaggccacuugcucucaugga

SEQ ID NO: 957470 - RNA, 22 nt, Human
acucuuuuauaaagcaucuuga

SEQ ID NO: 957471 - RNA, 22 nt, Human
uuuacugugcauuagaaucacc

SEQ ID NO: 957472 - RNA, 22 nt, Human
guuaggauuauauaucccauga

SEQ ID NO: 957473 - RNA, 22 nt, Human
uugcuucauuuuaaauaaagac

SEQ ID NO: 957474 - RNA, 22 nt, Human
cauuuuauccucugggaagcua

SEQ ID NO: 957475 - RNA, 20 nt, Human
ucacagaaacaaauagagaa

SEQ ID NO: 957476 - RNA, 22 nt, Human
aauucacagaaccauggugcuc

SEQ ID NO: 957477 - RNA, 22 nt, Human
ggucagccuuggauuugguagc

SEQ ID NO: 957478 - RNA, 22 nt, Human
aaauuauuuucagaauggagaa

SEQ ID NO: 957479 - RNA, 22 nt, Human
uacucugccacuaggaguucug

SEQ ID NO: 957480 - RNA, 22 nt, Human
uccaagggcaacaauggaacac

SEQ ID NO: 957481 - RNA, 22 nt, Human
guuauuaguaagacucgcacau

SEQ ID NO: 957482 - RNA, 22 nt, Human
gcacagcucgagcucaggaggg

SEQ ID NO: 957483 - RNA, 22 nt, Human
acaguguuuuaugagaauuguu

SEQ ID NO: 957484 - RNA, 22 nt, Human
gcucugcucuaacauuccugac

SEQ ID NO: 957485 - RNA, 22 nt, Human
caaaaagcuuagguaacaagcc

SEQ ID NO: 957486 - RNA, 22 nt, Human
gcucugcuguguuuguucagca

SEQ ID NO: 957487 - RNA, 22 nt, Human
cuggccaauccauuaauuuguu

SEQ ID NO: 957488 - RNA, 22 nt, Human
auauuaauuauuuacacaugag

SEQ ID NO: 957489 - RNA, 22 nt, Human
ucuuguuaaagugaagauacug

SEQ ID NO: 957490 - RNA, 22 nt, Human
ucugugccucaucugguucagg

SEQ ID NO: 957491 - RNA, 22 nt, Human
acaaaaagcuccauuacugucc

SEQ ID NO: 957492 - RNA, 22 nt, Human
uuggccaaauacacaccuuuug

SEQ ID NO: 957493 - RNA, 22 nt, Human
aucugaagcuaucugcacuuca

SEQ ID NO: 957494 - RNA, 22 nt, Human
ugcaccuuguugcuuuuacgaa

SEQ ID NO: 957495 - RNA, 22 nt, Human
acuccuggguugcaguccucaa

SEQ ID NO: 957496 - RNA, 22 nt, Human
cucuuuaaaguaaaauuugucu

SEQ ID NO: 957497 - RNA, 22 nt, Human
uagggauggaaacuaggaaucu

SEQ ID NO: 957498 - RNA, 22 nt, Human
acucugcuaucuuagcaaaagg

SEQ ID NO: 957499 - RNA, 22 nt, Human
uccaagggcucauggacacuuu

SEQ ID NO: 957500 - RNA, 19 nt, Human
uuggcagcugagauccugc

SEQ ID NO: 957501 - RNA, 22 nt, Human
aauaugucugcuaauuguuucu

SEQ ID NO: 957502 - RNA, 22 nt, Human
agacaggcagaggcugcagagg

SEQ ID NO: 957503 - RNA, 22 nt, Human
aggcucugcagugcuggaggac

SEQ ID NO: 957504 - RNA, 22 nt, Human
auagaauaaggcacagauucuu

SEQ ID NO: 957505 - RNA, 17 nt, Human
auguuaauuucacauuu

SEQ ID NO: 957506 - RNA, 22 nt, Human
aacugcuggggaggccaaacuc

SEQ ID NO: 957507 - RNA, 22 nt, Human
aaucauaauucaaauaagcuua

SEQ ID NO: 957508 - RNA, 22 nt, Human
cacagcuaggaggaaagcagag

SEQ ID NO: 957509 - RNA, 22 nt, Human
agagggcugcugcacagugcuc

SEQ ID NO: 957510 - RNA, 22 nt, Human
uggccauagcucagcuccuuca

SEQ ID NO: 957511 - RNA, 22 nt, Human
ucagcaggcaggaggcaugcca

SEQ ID NO: 957512 - RNA, 22 nt, Human
gcagacauuuugaaucuaggcu

SEQ ID NO: 957513 - RNA, 22 nt, Human
uucaaacaguguagaauauaug

SEQ ID NO: 957514 - RNA, 22 nt, Human
uagcuuuguguaugaugucugu

SEQ ID NO: 957515 - RNA, 23 nt, Human
cuucuggcucuauaucagaauuc

SEQ ID NO: 957516 - RNA, 22 nt, Human
ucucugcugagaagggcuggca

SEQ ID NO: 957517 - RNA, 22 nt, Human
aucuacaggauaguuuaauauu

SEQ ID NO: 957518 - RNA, 22 nt, Human
ucugagccuauuucaaauuccu

SEQ ID NO: 957519 - RNA, 22 nt, Human
uagaauaugugguguauacuuu

SEQ ID NO: 957520 - RNA, 22 nt, Human
uuucuggcagcgggacaggggu

SEQ ID NO: 957521 - RNA, 22 nt, Human
uucagcaagaauuuacugagcu

SEQ ID NO: 957522 - RNA, 22 nt, Human
ccaaaaaguacauuuaggugug

SEQ ID NO: 957523 - RNA, 22 nt, Human
uuaaaagaauccuguuauccuc

SEQ ID NO: 957524 - RNA, 22 nt, Human
auauuaaugagcaaguaaguga

SEQ ID NO: 957525 - RNA, 22 nt, Human
uuggccaagggcucuuuaggcu

SEQ ID NO: 957526 - RNA, 22 nt, Human
ccuggccaggcuccaaguacug

SEQ ID NO: 957527 - RNA, 22 nt, Human
agacagguaaauagagaugcug

SEQ ID NO: 957528 - RNA, 22 nt, Human
aaaccaaacauuugcgguggug

SEQ ID NO: 957529 - RNA, 22 nt, Human
acaggccugagauuuugcauuu

SEQ ID NO: 957530 - RNA, 22 nt, Human
gaguuuaaauaacacauuucca

SEQ ID NO: 957531 - RNA, 22 nt, Human
gcuggccauggggagugaggag

SEQ ID NO: 957532 - RNA, 22 nt, Human
aaaguuugagugauuugacaca

SEQ ID NO: 957533 - RNA, 22 nt, Human
uuauguagugacugacuguuag

SEQ ID NO: 957534 - RNA, 22 nt, Human
auucacaaguugauggauauuu

SEQ ID NO: 957535 - RNA, 22 nt, Human
agccuugaacacugacugaagg

SEQ ID NO: 957536 - RNA, 17 nt, Human
uuccacaauaguuuguc

SEQ ID NO: 957537 - RNA, 22 nt, Human
aaccuuuugcaagugccuugac

SEQ ID NO: 957538 - RNA, 22 nt, Human
auuuggcacacuggguucucgu

SEQ ID NO: 957539 - RNA, 22 nt, Human
ccuccuggugggcgcuucuggc

SEQ ID NO: 957540 - RNA, 22 nt, Human
aucuuucaaucaggaaaaaucu

SEQ ID NO: 957541 - RNA, 18 nt, Human
acuaugcugaauaaaugg

SEQ ID NO: 957542 - RNA, 22 nt, Human
uuccuugaaugagucauggaaa

SEQ ID NO: 957543 - RNA, 20 nt, Human
ucacucugaugcuagggugg

SEQ ID NO: 957544 - RNA, 22 nt, Human
ccuaggcccauuaauuccccuu

SEQ ID NO: 957545 - RNA, 22 nt, Human
agcauaaguugguacagccacu

SEQ ID NO: 957546 - RNA, 22 nt, Human
accuguuuguguccauuaguga

SEQ ID NO: 957547 - RNA, 22 nt, Human
guggccaauaggagcagcuauc

SEQ ID NO: 957548 - RNA, 22 nt, Human
aagaauaaauuaagauacuuag

SEQ ID NO: 957549 - RNA, 22 nt, Human
uuuuaacuuaaaauacauagau

SEQ ID NO: 957550 - RNA, 22 nt, Human
cucuggccuggggccugcuccc

SEQ ID NO: 957551 - RNA, 22 nt, Human
ugcugagaaucacagguuauaa

SEQ ID NO: 957552 - RNA, 22 nt, Human
acucugcugauagguccucaga

SEQ ID NO: 957553 - RNA, 21 nt, Human
uguaaguuucaucugaauugg

SEQ ID NO: 957554 - RNA, 17 nt, Human
ucuccuggcucuaucag

SEQ ID NO: 957555 - RNA, 22 nt, Human
auucuuuuuuaaggaauagaac

SEQ ID NO: 957556 - RNA, 20 nt, Human
uccuggccucccuggggcuc

SEQ ID NO: 957557 - RNA, 22 nt, Human
uuuaguagaugcagcauuauuu

SEQ ID NO: 957558 - RNA, 22 nt, Human
guucacaaaguacuguaugcau

SEQ ID NO: 957559 - RNA, 22 nt, Human
gacagguggggaaacuaaggua

SEQ ID NO: 957560 - RNA, 22 nt, Human
uuuauauuucccaggauuggcc

SEQ ID NO: 957561 - RNA, 22 nt, Human
uucugagcuacauaguacuggg

SEQ ID NO: 957562 - RNA, 22 nt, Human
aauaagaauuuacuugucaaga

SEQ ID NO: 957563 - RNA, 22 nt, Human
ccuccugggacaggcuggcaca

SEQ ID NO: 957564 - RNA, 22 nt, Human
auaaauaucacuguugucccuc

SEQ ID NO: 957565 - RNA, 22 nt, Human
uugcaaaugggcaaagcagauc

SEQ ID NO: 957566 - RNA, 22 nt, Human
acacuuuuagcuaugaguuaau

SEQ ID NO: 957567 - RNA, 21 nt, Human
uccuggccagggcacuaggca

SEQ ID NO: 957568 - RNA, 22 nt, Human
guggccaagggacucuaaggca

SEQ ID NO: 957569 - RNA, 22 nt, Human
cugggccaguuaugucucaucu

SEQ ID NO: 957570 - RNA, 22 nt, Human
cuccuggcuucugaaaucgugg

SEQ ID NO: 957571 - RNA, 22 nt, Human
auguuuuacccuuugcacaaac

SEQ ID NO: 957572 - RNA, 22 nt, Human
aaagcacauuacaagcucaguc

SEQ ID NO: 957573 - RNA, 22 nt, Human
aacagacauauuuuuaauaugc

SEQ ID NO: 957574 - RNA, 22 nt, Human
ucugcaggaggcuggcugcagg

SEQ ID NO: 957575 - RNA, 22 nt, Human
uucaaaacagcuagauauugga

SEQ ID NO: 957576 - RNA, 22 nt, Human
cauuuaaagguuguggguaaaa

SEQ ID NO: 957577 - RNA, 22 nt, Human
ucuccuggaagaauaccacacu

SEQ ID NO: 957578 - RNA, 22 nt, Human
cauucacauucuucuuacuguu

SEQ ID NO: 957579 - RNA, 22 nt, Human
uguuuauuacaguucuuggaau

SEQ ID NO: 957580 - RNA, 22 nt, Human
ucugccacuagugguuaccuua

SEQ ID NO: 957581 - RNA, 22 nt, Human
caaguaaagaaucacauuucuu

SEQ ID NO: 957582 - RNA, 22 nt, Human
cugcauucauaucagauagaag

SEQ ID NO: 957583 - RNA, 22 nt, Human
aucaggauccaccuugagccug

SEQ ID NO: 957584 - RNA, 22 nt, Human
aguugcagacgcagagauguug

SEQ ID NO: 957585 - RNA, 22 nt, Human
auucugaguccaugggggcagg

SEQ ID NO: 957586 - RNA, 22 nt, Human
uuguuauaaagacuaaauaugu

SEQ ID NO: 957587 - RNA, 20 nt, Human
augcaaacccugcuuugugg

SEQ ID NO: 957588 - RNA, 22 nt, Human
auucacaauuagaaguagauaa

SEQ ID NO: 957589 - RNA, 22 nt, Human
ucuggccacccgaggccccugc

SEQ ID NO: 957590 - RNA, 19 nt, Human
uggucuaaaugugugcccc

SEQ ID NO: 957591 - RNA, 22 nt, Human
uucagauaaacuacaaauaauu

SEQ ID NO: 957592 - RNA, 22 nt, Human
aaaacagacagccaguguagag

SEQ ID NO: 957593 - RNA, 22 nt, Human
aggucacccguuugacuaucca

SEQ ID NO: 957594 - RNA, 22 nt, Human
agcuauguaacagugccaugga

SEQ ID NO: 957595 - RNA, 22 nt, Human
cacuaugcuuacaugcuuauau

SEQ ID NO: 957596 - RNA, 22 nt, Human
ucuuguuaucaggaaaacagua

SEQ ID NO: 957597 - RNA, 22 nt, Human
uucuuagaugauuaaugauggg

SEQ ID NO: 957598 - RNA, 22 nt, Human
cauagaaacugagacaaggauu

SEQ ID NO: 957599 - RNA, 22 nt, Human
uuuaauuaggaaaugggcaggg

SEQ ID NO: 957600 - RNA, 22 nt, Human
augucacauggucaccucuagc

SEQ ID NO: 957601 - RNA, 22 nt, Human
uucuuauucuugaaauguggga

SEQ ID NO: 957602 - RNA, 22 nt, Human
aaugugcaggcucaaaccuugu

SEQ ID NO: 957603 - RNA, 22 nt, Human
aaauuagucauguuguauuacu

SEQ ID NO: 957604 - RNA, 22 nt, Human
uggcgcaacucauucauggugu

SEQ ID NO: 957605 - RNA, 22 nt, Human
guuauuagaagugaaggauugu

SEQ ID NO: 957606 - RNA, 22 nt, Human
uuaaaagagcagcccagcauau

SEQ ID NO: 957607 - RNA, 22 nt, Human
cuccuggcccugagcucccagg

SEQ ID NO: 957608 - RNA, 22 nt, Human
gauuaggagggagaggcaagua

SEQ ID NO: 957609 - RNA, 22 nt, Human
aucaggauggguuuggcuuagg

SEQ ID NO: 957610 - RNA, 22 nt, Human
gucaucuugcuguuuuagaucu

SEQ ID NO: 957611 - RNA, 22 nt, Human
uucugagguccaugcaguacug

SEQ ID NO: 957612 - RNA, 22 nt, Human
cagccuuugggucagaagauuc

SEQ ID NO: 957613 - RNA, 22 nt, Human
aaaaaguauuggccaugguuga

SEQ ID NO: 957614 - RNA, 22 nt, Human
uucaaucauuuuuacauagucc

SEQ ID NO: 957615 - RNA, 18 nt, Human
aggccaaacuuguaagca

SEQ ID NO: 957616 - RNA, 22 nt, Human
ucugagcccucuuuugcagccc

SEQ ID NO: 957617 - RNA, 22 nt, Human
ccuggccagcgccggcugcucg

SEQ ID NO: 957618 - RNA, 22 nt, Human
cuugaucuacauagugaaaccc

SEQ ID NO: 957619 - RNA, 22 nt, Human
acucugcucuuauaguguuaua

SEQ ID NO: 957620 - RNA, 23 nt, Human
cuccuggaggguccggcccugcc

SEQ ID NO: 957621 - RNA, 22 nt, Human
uucuuaagcaccuaaaaagugg

SEQ ID NO: 957622 - RNA, 22 nt, Human
uuggcagcagggaguuggccgc

SEQ ID NO: 957623 - RNA, 19 nt, Human
ucaaaacacaaaugguuga

SEQ ID NO: 957624 - RNA, 22 nt, Human
acagcauucaauaaauaauaac

SEQ ID NO: 957625 - RNA, 22 nt, Human
gggcauguagugugcauagaga

SEQ ID NO: 957626 - RNA, 22 nt, Human
accuuuuauguaaauauauguu

SEQ ID NO: 957627 - RNA, 22 nt, Human
cuggccaagcuucucuaagcag

SEQ ID NO: 957628 - RNA, 22 nt, Human
uuggccaaggucacugggugag

SEQ ID NO: 957629 - RNA, 22 nt, Human
auaauaaaccaggaugggucug

SEQ ID NO: 957630 - RNA, 21 nt, Human
ugcuggaaaaagugguucuag

SEQ ID NO: 957631 - RNA, 22 nt, Human
uaacccaauaauugguggccuu

SEQ ID NO: 957632 - RNA, 22 nt, Human
aggaagaauguuuacauaucaa

SEQ ID NO: 957633 - RNA, 20 nt, Human
ucucugcuguccacauuugc

SEQ ID NO: 957634 - RNA, 22 nt, Human
guugaaauuugugauaauuuag

SEQ ID NO: 957635 - RNA, 22 nt, Human
ucauugaauauggggccauaca

SEQ ID NO: 957636 - RNA, 22 nt, Human
caaauauuccagguacaucccu

SEQ ID NO: 957637 - RNA, 22 nt, Human
ucugcuguugccaugaguaaua

SEQ ID NO: 957638 - RNA, 22 nt, Human
gcuccuggcuccaggcagccaa

SEQ ID NO: 957639 - RNA, 22 nt, Human
aauaauuagugggacagagaac

SEQ ID NO: 957640 - RNA, 19 nt, Human
auaaauaaaaagugggaga

SEQ ID NO: 957641 - RNA, 22 nt, Human
ucacucugccuccauauuacua

SEQ ID NO: 957642 - RNA, 22 nt, Human
accuuuuuguucuguucucagc

SEQ ID NO: 957643 - RNA, 22 nt, Human
ucuggccacuugcuucacacug

SEQ ID NO: 957644 - RNA, 22 nt, Human
uuaggaaucaccugcagaucuu

SEQ ID NO: 957645 - RNA, 22 nt, Human
gaaaugugggucaugacccauu

SEQ ID NO: 957646 - RNA, 22 nt, Human
acuaugcucauuguuaauauuu

SEQ ID NO: 957647 - RNA, 19 nt, Human
uuucuuaggccuuuggccu

SEQ ID NO: 957648 - RNA, 22 nt, Human
uuauuuggaaauauggcuucug

SEQ ID NO: 957649 - RNA, 22 nt, Human
aaaacuccugaaauuguuuccc

SEQ ID NO: 957650 - RNA, 22 nt, Human
cuccugggcucaagugauccuc

SEQ ID NO: 957651 - RNA, 22 nt, Human
aauaugaauuauuguuacaagu

SEQ ID NO: 957652 - RNA, 22 nt, Human
aauguacacugaaagccuauca

SEQ ID NO: 957653 - RNA, 22 nt, Human
ccuccuggauggauuuggugga

SEQ ID NO: 957654 - RNA, 22 nt, Human
guucacaaauaugcacuuacga

SEQ ID NO: 957655 - RNA, 22 nt, Human
gucuagagugcuuccuagucau

SEQ ID NO: 957656 - RNA, 22 nt, Human
uuuauuguuguuagucauaagu

SEQ ID NO: 957657 - RNA, 22 nt, Human
cugaaaugguugccuggagaau

SEQ ID NO: 957658 - RNA, 22 nt, Human
uugccacugaaccagucuugca

SEQ ID NO: 957659 - RNA, 22 nt, Human
ugagccaaugauuugaauagag

SEQ ID NO: 957660 - RNA, 22 nt, Human
uuucacaaguuucaggauucug

SEQ ID NO: 957661 - RNA, 22 nt, Human
aucauaaaccacuuuguaaucu

SEQ ID NO: 957662 - RNA, 22 nt, Human
gagggaaggacccauuuuaagu

SEQ ID NO: 957663 - RNA, 22 nt, Human
auuaggcagggcaugguggcuc

SEQ ID NO: 957664 - RNA, 19 nt, Human
caugcugaccugcuguggu

SEQ ID NO: 957665 - RNA, 22 nt, Human
accuuuuccagcuucuagaggc

SEQ ID NO: 957666 - RNA, 22 nt, Human
cucugcuuuuuaaaaggagucc

SEQ ID NO: 957667 - RNA, 22 nt, Human
cacacuuuuggcauguuugguu

SEQ ID NO: 957668 - RNA, 22 nt, Human
gcuccuggcuucacugacauca

SEQ ID NO: 957669 - RNA, 22 nt, Human
ugcaugcugcacacaugcguag

SEQ ID NO: 957670 - RNA, 22 nt, Human
uggcagcacaagguggcccaug

SEQ ID NO: 957671 - RNA, 19 nt, Human
cauuaggauuagagacaag

SEQ ID NO: 957672 - RNA, 22 nt, Human
uaacugauauugaaaaacauca

SEQ ID NO: 957673 - RNA, 22 nt, Human
aauguggaaucauggacuuuau

SEQ ID NO: 957674 - RNA, 22 nt, Human
aacucugcaaccuauguagacc

SEQ ID NO: 957675 - RNA, 22 nt, Human
aucaggauguuuggcugucaua

SEQ ID NO: 957676 - RNA, 22 nt, Human
acuccuggguucuaaauuugaa

SEQ ID NO: 957677 - RNA, 22 nt, Human
aggccaaauguguauaaaacau

SEQ ID NO: 957678 - RNA, 16 nt, Human
ucucugcuucauaggu

SEQ ID NO: 957679 - RNA, 22 nt, Human
aauucacaauguguagucaugc

SEQ ID NO: 957680 - RNA, 22 nt, Human
guuuauuaacugucaagugauu

SEQ ID NO: 957681 - RNA, 22 nt, Human
cugggcaauaugcugggccugg

SEQ ID NO: 957682 - RNA, 22 nt, Human
cuauuagguaugugguugcuau

SEQ ID NO: 957683 - RNA, 22 nt, Human
ccacucugcugugcuccaugau

SEQ ID NO: 957684 - RNA, 22 nt, Human
uaaagacaugguguaggugaac

SEQ ID NO: 957685 - RNA, 19 nt, Human
agcagcuggagguggagug

SEQ ID NO: 957686 - RNA, 22 nt, Human
auuaggaaauguguugcaagca

SEQ ID NO: 957687 - RNA, 22 nt, Human
uuuuaauacugcuauuguagga

SEQ ID NO: 957688 - RNA, 22 nt, Human
uacaaagagguaauugcauaua

SEQ ID NO: 957689 - RNA, 22 nt, Human
uugcaaauuccaauccaauauu

SEQ ID NO: 957690 - RNA, 22 nt, Human
ucuccuggcauuugguugagua

SEQ ID NO: 957691 - RNA, 22 nt, Human
uggccaagaaugauaugugaag

SEQ ID NO: 957692 - RNA, 20 nt, Human
aggauuugagaaggcgucuu

SEQ ID NO: 957693 - RNA, 21 nt, Human
uggaccaaaguaauuugccuu

SEQ ID NO: 957694 - RNA, 22 nt, Human
guuuuauuuccaugagagaccg

SEQ ID NO: 957695 - RNA, 19 nt, Human
cauuccuuugucugccaaa

SEQ ID NO: 957696 - RNA, 22 nt, Human
caauaagccagguguuuguguu

SEQ ID NO: 957697 - RNA, 21 nt, Human
gacucugcaccaaauuaagcc

SEQ ID NO: 957698 - RNA, 22 nt, Human
uaaaacugaauacauacugagg

SEQ ID NO: 957699 - RNA, 21 nt, Human
ucacauuucucauggguaaau

SEQ ID NO: 957700 - RNA, 22 nt, Human
auuagagaaauguugccaagau

SEQ ID NO: 957701 - RNA, 22 nt, Human
uucaccuugaauaugucuuaaa

SEQ ID NO: 957702 - RNA, 22 nt, Human
acaaaguaggucaucaaagcuc

SEQ ID NO: 957703 - RNA, 22 nt, Human
aggagacauaacuaugaugaga

SEQ ID NO: 957704 - RNA, 22 nt, Human
aauaguaaaagauacagcuaau

SEQ ID NO: 957705 - RNA, 22 nt, Human
ccuuuuauaaaguuguauugaa

SEQ ID NO: 957706 - RNA, 22 nt, Human
cagccuuugugaacaucaggug

SEQ ID NO: 957707 - RNA, 22 nt, Human
uggcagcacuugaacuugagcc

SEQ ID NO: 957708 - RNA, 22 nt, Human
agagugauccuaauugauuugg

SEQ ID NO: 957709 - RNA, 22 nt, Human
guuuauuauacaacaaaagcua

SEQ ID NO: 957710 - RNA, 22 nt, Human
acauuuaaauaccuauguuucu

SEQ ID NO: 957711 - RNA, 22 nt, Human
uaaagaacacagggaauagcac

SEQ ID NO: 957712 - RNA, 22 nt, Human
ggauuuggaagaccgggucaca

SEQ ID NO: 957713 - RNA, 22 nt, Human
guucacaagaugugguggggag

SEQ ID NO: 957714 - RNA, 22 nt, Human
cguggccagccauuuccuggaa

SEQ ID NO: 957715 - RNA, 22 nt, Human
augcacuacuagaugcaaaagu

SEQ ID NO: 957716 - RNA, 19 nt, Human
acauuuaaauucagaucuc

SEQ ID NO: 957717 - RNA, 22 nt, Human
ccugugccagcugggcccugcc

SEQ ID NO: 957718 - RNA, 22 nt, Human
gcucugcugauccgcagccauc

SEQ ID NO: 957719 - RNA, 18 nt, Human
ucauuagggauugcaaag

SEQ ID NO: 957720 - RNA, 22 nt, Human
aagcaugugcuggggcuuuuug

SEQ ID NO: 957721 - RNA, 22 nt, Human
cucaugucuucacccauucuaa

SEQ ID NO: 957722 - RNA, 22 nt, Human
auagauguucaaucagauauuu

SEQ ID NO: 957723 - RNA, 22 nt, Human
auucacaacaaaaggauaugag

SEQ ID NO: 957724 - RNA, 22 nt, Human
aaauauaauuucugccucaaua

SEQ ID NO: 957725 - RNA, 22 nt, Human
uaaaagacccucuagaguccca

SEQ ID NO: 957726 - RNA, 22 nt, Human
aaacagucaugguugcuguuca

SEQ ID NO: 957727 - RNA, 22 nt, Human
cuccuggcacugucuugaccca

SEQ ID NO: 957728 - RNA, 22 nt, Human
ucugcuguccuuuauauagauu

SEQ ID NO: 957729 - RNA, 22 nt, Human
auuaggaaacugaaugucagaa

SEQ ID NO: 957730 - RNA, 22 nt, Human
ccuuuuauacucagugauauca

SEQ ID NO: 957731 - RNA, 22 nt, Human
uacucugcucauuggagugugu

SEQ ID NO: 957732 - RNA, 22 nt, Human
ugacauaaaccagugagcaaaa

SEQ ID NO: 957733 - RNA, 22 nt, Human
agcuuguagaaggccacgagca

SEQ ID NO: 957734 - RNA, 22 nt, Human
augaggauuaacuguugucaua

SEQ ID NO: 957735 - RNA, 21 nt, Human
uggcagacuagaguauagaug

SEQ ID NO: 957736 - RNA, 22 nt, Human
uuggcagcauccaagucucggg

SEQ ID NO: 957737 - RNA, 22 nt, Human
uuuauuaauguagcauccaugg

SEQ ID NO: 957738 - RNA, 22 nt, Human
agacucugcuaagaauauaauu

SEQ ID NO: 957739 - RNA, 22 nt, Human
cagggucugaaacugaucacag

SEQ ID NO: 957740 - RNA, 19 nt, Human
uccucagugacaaccucag

SEQ ID NO: 957741 - RNA, 22 nt, Human
uaggauaugugaaaucauauua

SEQ ID NO: 957742 - RNA, 22 nt, Human
ucuccuggcucuaaaaggcugu

SEQ ID NO: 957743 - RNA, 22 nt, Human
ccuuuucaacuaagauucugca

SEQ ID NO: 957744 - RNA, 22 nt, Human
cagagacauuaagugccaugau

SEQ ID NO: 957745 - RNA, 22 nt, Human
cacucugagccaaaacuaauuc

SEQ ID NO: 957746 - RNA, 22 nt, Human
gaggaaagcugguuuaaaguau

SEQ ID NO: 957747 - RNA, 22 nt, Human
acagggaacaggaauauacaaa

SEQ ID NO: 957748 - RNA, 21 nt, Human
ugcauuccuccauccaacagg

SEQ ID NO: 957749 - RNA, 22 nt, Human
uuuacuguuuacagcuaaugca

SEQ ID NO: 957750 - RNA, 22 nt, Human
uuuauguaguuacggacuauca

SEQ ID NO: 957751 - RNA, 22 nt, Human
acucugcuuauugcugcaggca

SEQ ID NO: 957752 - RNA, 22 nt, Human
uagaacaugugaaaauauagcc

SEQ ID NO: 957753 - RNA, 22 nt, Human
ucacuaagugccgaguuuaguu

SEQ ID NO: 957754 - RNA, 22 nt, Human
guuaggauguggggacuuuggg

SEQ ID NO: 957755 - RNA, 22 nt, Human
aagucuguagaaaaacaguuua

SEQ ID NO: 957756 - RNA, 22 nt, Human
cuucacaaauggccuagaguuc

SEQ ID NO: 957757 - RNA, 22 nt, Human
caucuuuaacaauuuacaaugu

SEQ ID NO: 957758 - RNA, 22 nt, Human
agcuccugcucuuugucccuaa

SEQ ID NO: 957759 - RNA, 22 nt, Human
caucuuuuggccuauucugagg

SEQ ID NO: 957760 - RNA, 22 nt, Human
gcuggccaguguggugaccacc

SEQ ID NO: 957761 - RNA, 22 nt, Human
uuaggcauauggcacaugauag

SEQ ID NO: 957762 - RNA, 20 nt, Human
guguuucaugugauacaaug

SEQ ID NO: 957763 - RNA, 22 nt, Human
acuccaggcaucugcuucugcu

SEQ ID NO: 957764 - RNA, 22 nt, Human
uaaagcacgucuauuuaaugau

SEQ ID NO: 957765 - RNA, 22 nt, Human
uccuggccuagcucacccugga

SEQ ID NO: 957766 - RNA, 22 nt, Human
gacuccugccuccucuguuugc

SEQ ID NO: 957767 - RNA, 22 nt, Human
guuuauuauucaacuucauguu

SEQ ID NO: 957768 - RNA, 22 nt, Human
uggcacaugguaagugcuuaac

SEQ ID NO: 957769 - RNA, 22 nt, Human
uuggccaaggaaguagcaacgg

SEQ ID NO: 957770 - RNA, 22 nt, Human
ccuccuggcuuuucccauugaa

SEQ ID NO: 957771 - RNA, 22 nt, Human
auggccaaauaacagcuugcau

SEQ ID NO: 957772 - RNA, 22 nt, Human
uugcaaauauguucuccuauuc

SEQ ID NO: 957773 - RNA, 22 nt, Human
aggauuuguuuauaggucuuaa

SEQ ID NO: 957774 - RNA, 22 nt, Human
uccuugacugugaggaacuagc

SEQ ID NO: 957775 - RNA, 22 nt, Human
ucuguaaaacuucuuuguaaau

SEQ ID NO: 957776 - RNA, 22 nt, Human
acauacaucaaguaucacaaga

SEQ ID NO: 957777 - RNA, 22 nt, Human
cagacaggcaggugcugcuuug

SEQ ID NO: 957778 - RNA, 22 nt, Human
agccuugaguucaagugcuggc

SEQ ID NO: 957779 - RNA, 22 nt, Human
cauauuaaggucuguaaggggu

SEQ ID NO: 957780 - RNA, 22 nt, Human
cuuuuauuuugaauuaagggcu

SEQ ID NO: 957781 - RNA, 22 nt, Human
augaaauaucuugaagaaauuc

SEQ ID NO: 957782 - RNA, 22 nt, Human
cagaggaguucaguacacagcc

SEQ ID NO: 957783 - RNA, 22 nt, Human
aaaauauuuuagggccaggaga

SEQ ID NO: 957784 - RNA, 20 nt, Human
aggccaaacccagcgcgccc

SEQ ID NO: 957785 - RNA, 22 nt, Human
aagucauucuauuucucuaugu

SEQ ID NO: 957786 - RNA, 22 nt, Human
gaaucauagaacauuaauagaa

SEQ ID NO: 957787 - RNA, 22 nt, Human
guauuaggagguggagccuuug

SEQ ID NO: 957788 - RNA, 22 nt, Human
acaccuuugccccaagucauag

SEQ ID NO: 957789 - RNA, 22 nt, Human
uuccuggcugaacugaacuccu

SEQ ID NO: 957790 - RNA, 22 nt, Human
uuaaaugaacgagauaugcaac

SEQ ID NO: 957791 - RNA, 22 nt, Human
gaacccaaccucacuuggggua

SEQ ID NO: 957792 - RNA, 19 nt, Human
uccugggcugcgucuugcc

SEQ ID NO: 957793 - RNA, 22 nt, Human
ugaaacacuuucaauuacauau

SEQ ID NO: 957794 - RNA, 22 nt, Human
uggcacauagaaaaggaucaau

SEQ ID NO: 957795 - RNA, 22 nt, Human
augauguugauaaauuacuuua

SEQ ID NO: 957796 - RNA, 22 nt, Human
guggccaaggcagagaaagagc

SEQ ID NO: 957797 - RNA, 22 nt, Human
aauaaaaugaacugguagaguu

SEQ ID NO: 957798 - RNA, 20 nt, Human
aaaauauguauaacucuucu

SEQ ID NO: 957799 - RNA, 22 nt, Human
agcacauucuugccuuaaccuc

SEQ ID NO: 957800 - RNA, 22 nt, Human
uaaccaaagggccuaaggaaug

SEQ ID NO: 957801 - RNA, 22 nt, Human
ucuggccaggauggcaagacca

SEQ ID NO: 957802 - RNA, 22 nt, Human
auguggcacagcacaguaagag

SEQ ID NO: 957803 - RNA, 22 nt, Human
caacuccuccccagcaugccaa

SEQ ID NO: 957804 - RNA, 22 nt, Human
uuggccaagugguuaaucucca

SEQ ID NO: 957805 - RNA, 22 nt, Human
uggcaacaugucgaagugcugu

SEQ ID NO: 957806 - RNA, 22 nt, Human
uucaugcuuuuaccgcuguuaa

SEQ ID NO: 957807 - RNA, 22 nt, Human
uacagccucacauuuacuuaca

SEQ ID NO: 957808 - RNA, 21 nt, Human
uuuuauugaugaauggccacu

SEQ ID NO: 957809 - RNA, 19 nt, Human
uuucacaaagagagcguga

SEQ ID NO: 957810 - RNA, 22 nt, Human
uauucacauguacauaugcuca

SEQ ID NO: 957811 - RNA, 22 nt, Human
acuuccugcaaucguccacucc

SEQ ID NO: 957812 - RNA, 21 nt, Human
cggccaaauuccuccuaggga

SEQ ID NO: 957813 - RNA, 22 nt, Human
uugaaaaguuuugaaacacucu

SEQ ID NO: 957814 - RNA, 22 nt, Human
cuggccaauauagggaaaucuu

SEQ ID NO: 957815 - RNA, 22 nt, Human
ugacauaaguugguagaaagga

SEQ ID NO: 957816 - RNA, 22 nt, Human
uagaaacaucagcuaaccaaaa

SEQ ID NO: 957817 - RNA, 22 nt, Human
uucaacuagauuuauacaauuc

SEQ ID NO: 957818 - RNA, 22 nt, Human
uuggccaagggaucgagguugg

SEQ ID NO: 957819 - RNA, 22 nt, Human
cucuugaaaauuggaacacaga

SEQ ID NO: 957820 - RNA, 22 nt, Human
acagcaugucuaguuaaauacu

SEQ ID NO: 957821 - RNA, 22 nt, Human
auauuagguuggugcaaaagua

SEQ ID NO: 957822 - RNA, 22 nt, Human
uuucaacagcucucaaaugauc

SEQ ID NO: 957823 - RNA, 22 nt, Human
ucacucugacuuggccuccaac

SEQ ID NO: 957824 - RNA, 22 nt, Human
cuucacaaucaccuuuucggaa

SEQ ID NO: 957825 - RNA, 22 nt, Human
acucugacuggagugagagagg

SEQ ID NO: 957826 - RNA, 18 nt, Human
uacaucuauauaguguuu

SEQ ID NO: 957827 - RNA, 22 nt, Human
augugcaacuucagcagaaagg

SEQ ID NO: 957828 - RNA, 22 nt, Human
cuuugaauuccaguacaauaac

SEQ ID NO: 957829 - RNA, 22 nt, Human
ugcugaaauuagaacauugagg

SEQ ID NO: 957830 - RNA, 22 nt, Human
guucacaaaauucuggccagug

SEQ ID NO: 957831 - RNA, 22 nt, Human
uuaauuuuuauguauagugugu

SEQ ID NO: 957832 - RNA, 22 nt, Human
aaagcuauuuuauugcagcucu

SEQ ID NO: 957833 - RNA, 20 nt, Human
ucuccuggugacaguaccca

SEQ ID NO: 957834 - RNA, 22 nt, Human
aguauacauauauuagccuucg

SEQ ID NO: 957835 - RNA, 20 nt, Human
cacguuuuuccacuagcaaa

SEQ ID NO: 957836 - RNA, 21 nt, Human
ucacucugauuaggugucucu

SEQ ID NO: 957837 - RNA, 22 nt, Human
ucuggccagcaugagaccuggu

SEQ ID NO: 957838 - RNA, 22 nt, Human
acauaacaaucauaggacauag

SEQ ID NO: 957839 - RNA, 22 nt, Human
ucaauaaaauuguuuuccuauc

SEQ ID NO: 957840 - RNA, 22 nt, Human
gacaucaauauucugcagggau

SEQ ID NO: 957841 - RNA, 23 nt, Human
gcuguuagauuuaauaagcauuu

SEQ ID NO: 957842 - RNA, 22 nt, Human
uauccaaaguuucucagaaacu

SEQ ID NO: 957843 - RNA, 22 nt, Human
cucuugaagggcaucugaguua

SEQ ID NO: 957844 - RNA, 17 nt, Human
uagaauauggugggcug

SEQ ID NO: 957845 - RNA, 22 nt, Human
auggccaagaucacagacuuca

SEQ ID NO: 957846 - RNA, 22 nt, Human
ugaccaaaaaauucccugugag

SEQ ID NO: 957847 - RNA, 21 nt, Human
agacaguaacucuucuacucc

SEQ ID NO: 957848 - RNA, 22 nt, Human
ccuccuggaggcucuagggaaa

SEQ ID NO: 957849 - RNA, 22 nt, Human
uaaaaugacuuccuccaacauc

SEQ ID NO: 957850 - RNA, 22 nt, Human
uccugggcuuuguuucucuccu

SEQ ID NO: 957851 - RNA, 22 nt, Human
gaauuacaaagugagacaagcu

SEQ ID NO: 957852 - RNA, 22 nt, Human
uuauuuaaaauguagguuggga

SEQ ID NO: 957853 - RNA, 22 nt, Human
agucugcuuccuggagaacuca

SEQ ID NO: 957854 - RNA, 17 nt, Human
aaauaugaccucaaagu

SEQ ID NO: 957855 - RNA, 22 nt, Human
cugcccaaauccuucuuccucu

SEQ ID NO: 957856 - RNA, 22 nt, Human
gcuccuggauguucaagucggc

SEQ ID NO: 957857 - RNA, 22 nt, Human
ugaaagcagugccaugauuaug

SEQ ID NO: 957858 - RNA, 22 nt, Human
uaggaugagggguggccaagua

SEQ ID NO: 957859 - RNA, 22 nt, Human
cugagccaguagucagggacaa

SEQ ID NO: 957860 - RNA, 22 nt, Human
aaaaaugugaccacaggguguu

SEQ ID NO: 957861 - RNA, 22 nt, Human
uguguuaaguauuugauacacu

SEQ ID NO: 957862 - RNA, 20 nt, Human
ccuggccaaugagauaggaa

SEQ ID NO: 957863 - RNA, 22 nt, Human
accuuauuuugaaauagauugu

SEQ ID NO: 957864 - RNA, 22 nt, Human
ucugugccaccucuccaguguc

SEQ ID NO: 957865 - RNA, 22 nt, Human
aacuccagugucagcugcaaug

SEQ ID NO: 957866 - RNA, 22 nt, Human
acucugcucccuaagccaugau

SEQ ID NO: 957867 - RNA, 22 nt, Human
caugcaggcccgccugaauggg

SEQ ID NO: 957868 - RNA, 22 nt, Human
aaguuguauauaccgcuuuaag

SEQ ID NO: 957869 - RNA, 22 nt, Human
aauucacaaaaccagauugcuu

SEQ ID NO: 957870 - RNA, 22 nt, Human
acacauuauaggcaaucaaaag

SEQ ID NO: 957871 - RNA, 22 nt, Human
aaaacaguuauaaacagaguca

SEQ ID NO: 957872 - RNA, 22 nt, Human
gaaauauuacaguggaggggau

SEQ ID NO: 957873 - RNA, 22 nt, Human
ugcuugaggggaauaaaaagaa

SEQ ID NO: 957874 - RNA, 22 nt, Human
uuuuaugauugagcuggcuaca

SEQ ID NO: 957875 - RNA, 22 nt, Human
cauaacauccuugcuacuuuga

SEQ ID NO: 957876 - RNA, 22 nt, Human
uucagcaauuuuuuaagcuaau

SEQ ID NO: 957877 - RNA, 22 nt, Human
acuggccaugggauuuauauuu

SEQ ID NO: 957878 - RNA, 22 nt, Human
gacauaaaauucaauaauuugu

SEQ ID NO: 957879 - RNA, 22 nt, Human
auggccaagagucgauuugggg

SEQ ID NO: 957880 - RNA, 22 nt, Human
ccuggaccaaacacuggccugg

SEQ ID NO: 957881 - RNA, 22 nt, Human
uuugaaauguaucaguauaggu

SEQ ID NO: 957882 - RNA, 22 nt, Human
cacuggcccauuccugucuggc

SEQ ID NO: 957883 - RNA, 22 nt, Human
uacaucuauacugaucuacauu

SEQ ID NO: 957884 - RNA, 22 nt, Human
gagagcuguuuaucuucuucaa

SEQ ID NO: 957885 - RNA, 22 nt, Human
aaagucauacauggugcuuacu

SEQ ID NO: 957886 - RNA, 22 nt, Human
auacagcagugaauaagauaaa

SEQ ID NO: 957887 - RNA, 22 nt, Human
uagaaacagagagauaugcccc

SEQ ID NO: 957888 - RNA, 21 nt, Human
gggaaugagauucuuggagau

SEQ ID NO: 957889 - RNA, 22 nt, Human
aguuucuuuagauagaaaguuc

SEQ ID NO: 957890 - RNA, 22 nt, Human
gucaucuuugcccugugcagga

SEQ ID NO: 957891 - RNA, 22 nt, Human
uccaagggaaugugggcaaugc

SEQ ID NO: 957892 - RNA, 22 nt, Human
aaccaggugacucauggugagc

SEQ ID NO: 957893 - RNA, 22 nt, Human
uccuguuaguguuagacuuccc

SEQ ID NO: 957894 - RNA, 22 nt, Human
acucugcuuccacuuuugcuaa

SEQ ID NO: 957895 - RNA, 22 nt, Human
gcuccugggcucuaccuugcua

SEQ ID NO: 957896 - RNA, 22 nt, Human
augauugaaaaugacauugcca

SEQ ID NO: 957897 - RNA, 22 nt, Human
uaguuuaaaaguuagggaugau

SEQ ID NO: 957898 - RNA, 22 nt, Human
aauguuauuacacuugugaaau

SEQ ID NO: 957899 - RNA, 22 nt, Human
acugucuucaaaugaauauauu

SEQ ID NO: 957900 - RNA, 22 nt, Human
cagcuguggcugccacugcucc

SEQ ID NO: 957901 - RNA, 22 nt, Human
acucugcuaaauguguaggcuc

SEQ ID NO: 957902 - RNA, 22 nt, Human
caaauaguaugagcaaugauuc

SEQ ID NO: 957903 - RNA, 19 nt, Human
agucucacccaagcagucu

SEQ ID NO: 957904 - RNA, 22 nt, Human
ucuccuggccuuuagguuaagg

SEQ ID NO: 957905 - RNA, 22 nt, Human
uguuccuguguggaaaagggcc

SEQ ID NO: 957906 - RNA, 22 nt, Human
ucugcaagauggucuuagaggu

SEQ ID NO: 957907 - RNA, 22 nt, Human
gcuggccacacugcugauggag

SEQ ID NO: 957908 - RNA, 22 nt, Human
uugcauguagaauacucaacuu

SEQ ID NO: 957909 - RNA, 22 nt, Human
uuggccaauccuauuggguggg

SEQ ID NO: 957910 - RNA, 20 nt, Human
uccugagccuccaccauguc

SEQ ID NO: 957911 - RNA, 19 nt, Human
gcucugcuacuauuaccac

SEQ ID NO: 957912 - RNA, 22 nt, Human
uaugcacaacaugcagguuugu

SEQ ID NO: 957913 - RNA, 22 nt, Human
ucauaaaaugcuccugauauug

SEQ ID NO: 957914 - RNA, 22 nt, Human
uucagcaacauuuguugagugc

SEQ ID NO: 957915 - RNA, 22 nt, Human
caccuuguggcccagucagguu

SEQ ID NO: 957916 - RNA, 22 nt, Human
acaaaaagggagaugagguaga

SEQ ID NO: 957917 - RNA, 22 nt, Human
ucuggcaaaggcaaccacaguu

SEQ ID NO: 957918 - RNA, 22 nt, Human
uuuuauucuaaguaugauggga

SEQ ID NO: 957919 - RNA, 22 nt, Human
gaguuauuugguuugcaugcag

SEQ ID NO: 957920 - RNA, 22 nt, Human
accuuguuaaaaugaggauucu

SEQ ID NO: 957921 - RNA, 22 nt, Human
ucauguuuggaguuugcucacu

SEQ ID NO: 957922 - RNA, 21 nt, Human
gucaaacuugcaccagugccc

SEQ ID NO: 957923 - RNA, 20 nt, Human
auuaggauuuuaggucauca

SEQ ID NO: 957924 - RNA, 22 nt, Human
gcucugcugggugggcaguuau

SEQ ID NO: 957925 - RNA, 22 nt, Human
accuacccuuagaucacaaggg

SEQ ID NO: 957926 - RNA, 22 nt, Human
uaaaguauauuuuuucucaaua

SEQ ID NO: 957927 - RNA, 22 nt, Human
agggucuguggaugcaucuggg

SEQ ID NO: 957928 - RNA, 22 nt, Human
aauagaauguaaucuaauacau

SEQ ID NO: 957929 - RNA, 22 nt, Human
cacucugcaggccaaaccaaag

SEQ ID NO: 957930 - RNA, 22 nt, Human
ccuccuggccugugcagagccc

SEQ ID NO: 957931 - RNA, 22 nt, Human
gcucugcugacagcugggacag

SEQ ID NO: 957932 - RNA, 22 nt, Human
gucauggaggauugugaguggu

SEQ ID NO: 957933 - RNA, 22 nt, Human
gcuccuggcucucugagggcug

SEQ ID NO: 957934 - RNA, 22 nt, Human
uagaaacacagagagacccaug

SEQ ID NO: 957935 - RNA, 22 nt, Human
auaauguguucaucuuacaauu

SEQ ID NO: 957936 - RNA, 22 nt, Human
aaaguuuggauuagcaguuaga

SEQ ID NO: 957937 - RNA, 22 nt, Human
uaugcacacauguaugcaugug

SEQ ID NO: 957938 - RNA, 22 nt, Human
ugagccaaacuucuccuugguc

SEQ ID NO: 957939 - RNA, 22 nt, Human
accuucaaugaaaauaauaguc

SEQ ID NO: 957940 - RNA, 22 nt, Human
accucugcaacccuggaauggg

SEQ ID NO: 957941 - RNA, 22 nt, Human
acuccuggggcugccaucacag

SEQ ID NO: 957942 - RNA, 22 nt, Human
cuccuggaccagggcuauuggg

SEQ ID NO: 957943 - RNA, 22 nt, Human
cagcuuugcccuuugcccaauc

SEQ ID NO: 957944 - RNA, 23 nt, Human
ccagucucacguauacaggauuu

SEQ ID NO: 957945 - RNA, 22 nt, Human
cauauaaauacaacauguguua

SEQ ID NO: 957946 - RNA, 22 nt, Human
caaauaguuuuucauguauuau

SEQ ID NO: 957947 - RNA, 22 nt, Human
uaccuauagguacaauuacaag

SEQ ID NO: 957948 - RNA, 22 nt, Human
uacucugcaggauggacuaugg

SEQ ID NO: 957949 - RNA, 22 nt, Human
ugcucuucggggccacugcuug

SEQ ID NO: 957950 - RNA, 22 nt, Human
ucacucugcugcccgagggcug

SEQ ID NO: 957951 - RNA, 22 nt, Human
gucucuaucauagcugaacccu

SEQ ID NO: 957952 - RNA, 22 nt, Human
uccuggcccggccgggccugcu

SEQ ID NO: 957953 - RNA, 22 nt, Human
uuaauguggaaagcucuugagu

SEQ ID NO: 957954 - RNA, 22 nt, Human
gcucugcucuugacuuaccagg

SEQ ID NO: 957955 - RNA, 22 nt, Human
uugaauaauuaauuacacucag

SEQ ID NO: 957956 - RNA, 22 nt, Human
ucuccuggcccugucgccaucu

SEQ ID NO: 957957 - RNA, 22 nt, Human
gcauugaguccacucugucuuu

SEQ ID NO: 957958 - RNA, 22 nt, Human
uuucacaaagcauagcacuuua

SEQ ID NO: 957959 - RNA, 22 nt, Human
auagucaaccuuguaauuagcc

SEQ ID NO: 957960 - RNA, 22 nt, Human
uuaauaggcuucuaacauagcu

SEQ ID NO: 957961 - RNA, 22 nt, Human
ucuuugcacacaucccuucccg

SEQ ID NO: 957962 - RNA, 22 nt, Human
ccucugcucugguccaugugcu

SEQ ID NO: 957963 - RNA, 22 nt, Human
cuuauuagugucugucugaguu

SEQ ID NO: 957964 - RNA, 23 nt, Human
ccuccugggcacaggccugaugg

SEQ ID NO: 957965 - RNA, 22 nt, Human
aaauaaguuaaacuagaaugau

SEQ ID NO: 957966 - RNA, 22 nt, Human
cauugguagaguuuguuuuaua

SEQ ID NO: 957967 - RNA, 22 nt, Human
ucaucuaagagucuuacauuua

SEQ ID NO: 957968 - RNA, 22 nt, Human
uauaaagaaguguaaacaggaa

SEQ ID NO: 957969 - RNA, 22 nt, Human
ucacucugggcccuacugggcu

SEQ ID NO: 957970 - RNA, 22 nt, Human
acacuuuuguguauauccaguu

SEQ ID NO: 957971 - RNA, 22 nt, Human
uggcagcagaacaugaaaccca

SEQ ID NO: 957972 - RNA, 23 nt, Human
uuuuaauuuggacauaagaagau

SEQ ID NO: 957973 - RNA, 22 nt, Human
cccaaacaguuccugugguacu

SEQ ID NO: 957974 - RNA, 22 nt, Human
aaauauuagggagaacagggac

SEQ ID NO: 957975 - RNA, 22 nt, Human
cuuauuagaguuguguucuguu

SEQ ID NO: 957976 - RNA, 22 nt, Human
cugcugucauagccaucccucc

SEQ ID NO: 957977 - RNA, 22 nt, Human
gacacuaaaguauaggguaucu

SEQ ID NO: 957978 - RNA, 22 nt, Human
uaaaauguuugcaagagaccag

SEQ ID NO: 957979 - RNA, 22 nt, Human
ugauaauauuuugaaucauaag

SEQ ID NO: 957980 - RNA, 22 nt, Human
uccugagcugccgcaucagcag

SEQ ID NO: 957981 - RNA, 22 nt, Human
aagacagagacucugcaacagg

SEQ ID NO: 957982 - RNA, 22 nt, Human
cuggcucaauuuguacugcugu

SEQ ID NO: 957983 - RNA, 22 nt, Human
gagggcuccauuccccgugccc

SEQ ID NO: 957984 - RNA, 22 nt, Human
acuccuggugcugaugaagaga

SEQ ID NO: 957985 - RNA, 22 nt, Human
gaaauauugggacucagagcuu

SEQ ID NO: 957986 - RNA, 22 nt, Human
auucugagaaaugcauugucag

SEQ ID NO: 957987 - RNA, 18 nt, Human
ugcagcaagugcuaaaua

SEQ ID NO: 957988 - RNA, 22 nt, Human
acucugcuuaauuaaaaccagg

SEQ ID NO: 957989 - RNA, 22 nt, Human
uccaaagaagucacaaacgaag

SEQ ID NO: 957990 - RNA, 22 nt, Human
uuauguaggauaaugaauugcc

SEQ ID NO: 957991 - RNA, 22 nt, Human
aaauacagcagacuccuguugu

SEQ ID NO: 957992 - RNA, 22 nt, Human
uauucacauuaauaagucuuca

SEQ ID NO: 957993 - RNA, 22 nt, Human
agacagugcaagaagagcaggc

SEQ ID NO: 957994 - RNA, 22 nt, Human
agagacugcgugucagcgcugg

SEQ ID NO: 957995 - RNA, 22 nt, Human
uuguacacaauucuuaacauac

SEQ ID NO: 957996 - RNA, 22 nt, Human
ucugagccagccaccuccuuca

SEQ ID NO: 957997 - RNA, 22 nt, Human
acacucugcucugagcuucagg

SEQ ID NO: 957998 - RNA, 22 nt, Human
auucacaaagucacccuuacac

SEQ ID NO: 957999 - RNA, 22 nt, Human
uggcagcagcuaacuuaggcag

SEQ ID NO: 958000 - RNA, 22 nt, Human
gcaccuuuuucuaggagaaugu

SEQ ID NO: 958001 - RNA, 22 nt, Human
auucacaaaugcugccccauuc

SEQ ID NO: 958002 - RNA, 22 nt, Human
ugcccaaaccucuccuagcucu

SEQ ID NO: 958003 - RNA, 22 nt, Human
ccuccuggagcauuggugagga

SEQ ID NO: 958004 - RNA, 22 nt, Human
ucucugcuugguguaugugagu

SEQ ID NO: 958005 - RNA, 22 nt, Human
uagaaaugugauaauagcuuaa

SEQ ID NO: 958006 - RNA, 22 nt, Human
aacacugcugcuggguucugug

SEQ ID NO: 958007 - RNA, 22 nt, Human
augcugagugagugaaacccag

SEQ ID NO: 958008 - RNA, 22 nt, Human
ccuggccagcagccccuuccuc

SEQ ID NO: 958009 - RNA, 22 nt, Human
gcuggccagcccucuuccucca

SEQ ID NO: 958010 - RNA, 20 nt, Human
uuaggcauuuggauuggcuu

SEQ ID NO: 958011 - RNA, 23 nt, Human
uuucaacaaugcuuagagaaaac

SEQ ID NO: 958012 - RNA, 22 nt, Human
uuauucaggcucucuuuggcua

SEQ ID NO: 958013 - RNA, 22 nt, Human
aacacauaggcagagcaugaca

SEQ ID NO: 958014 - RNA, 22 nt, Human
aucaggaucugcaucauaagaa

SEQ ID NO: 958015 - RNA, 22 nt, Human
ucagggaacaauguuauggcuu

SEQ ID NO: 958016 - RNA, 22 nt, Human
uggucaacaggcagggaugaaa

SEQ ID NO: 958017 - RNA, 22 nt, Human
gcacucuguuucuccugucagc

SEQ ID NO: 958018 - RNA, 22 nt, Human
ucuggccaacaaaaacuaaguc

SEQ ID NO: 958019 - RNA, 22 nt, Human
ucugagaggcaucugcacuucu

SEQ ID NO: 958020 - RNA, 22 nt, Human
ucuuuuuauauugacaaaaggu

SEQ ID NO: 958021 - RNA, 22 nt, Human
aacugccuggccaggcugcaac

SEQ ID NO: 958022 - RNA, 22 nt, Human
cuuuauuagauguagacuuucu

SEQ ID NO: 958023 - RNA, 22 nt, Human
uggcaucauagccaaggugcuu

SEQ ID NO: 958024 - RNA, 22 nt, Human
cagcuuugucugauuccucuuu

SEQ ID NO: 958025 - RNA, 22 nt, Human
ucauugaagugacugaaagauu

SEQ ID NO: 958026 - RNA, 22 nt, Human
cucccuggugacucccaaagcu

SEQ ID NO: 958027 - RNA, 22 nt, Human
acauucaaggccuucugacaca

SEQ ID NO: 958028 - RNA, 22 nt, Human
aaaagagugacugauaaguaua

SEQ ID NO: 958029 - RNA, 21 nt, Human
gacaggacuagaccagagcuc

SEQ ID NO: 958030 - RNA, 22 nt, Human
uggucaaaagaaagcucagaac

SEQ ID NO: 958031 - RNA, 17 nt, Human
uucugagccacuuccuu

SEQ ID NO: 958032 - RNA, 22 nt, Human
acuccugggugcauuucugauu

SEQ ID NO: 958033 - RNA, 22 nt, Human
cuuuuacugugaaaagaaacug

SEQ ID NO: 958034 - RNA, 23 nt, Human
uucaaaacuggaaaaucagaugc

SEQ ID NO: 958035 - RNA, 22 nt, Human
acaguuauucuuuaugcaacca

SEQ ID NO: 958036 - RNA, 22 nt, Human
ugcugagguuucgucugcuugc

SEQ ID NO: 958037 - RNA, 22 nt, Human
uaggauaugguagaaaucauuc

SEQ ID NO: 958038 - RNA, 22 nt, Human
uucaggauggcggauguugggg

SEQ ID NO: 958039 - RNA, 22 nt, Human
cuccuggcuuucccagaccagg

SEQ ID NO: 958040 - RNA, 23 nt, Human
ugucuggcucauggugggucuca

SEQ ID NO: 958041 - RNA, 17 nt, Human
cagacaggcugucaccc

SEQ ID NO: 958042 - RNA, 20 nt, Human
aauauaauucucugaauuua

SEQ ID NO: 958043 - RNA, 22 nt, Human
uuaaaaugcagauuaugacuca

SEQ ID NO: 958044 - RNA, 22 nt, Human
uugauaaaaugaugaaaucacu

SEQ ID NO: 958045 - RNA, 22 nt, Human
cuuuguauucaguugggcugug

SEQ ID NO: 958046 - RNA, 22 nt, Human
guucacaagaguuacagacaga

SEQ ID NO: 958047 - RNA, 22 nt, Human
agaguucagcuacugcaaaugu

SEQ ID NO: 958048 - RNA, 22 nt, Human
cuggccauguugccucugagac

SEQ ID NO: 958049 - RNA, 22 nt, Human
uauauuaaaugaccaguuuuaa

SEQ ID NO: 958050 - RNA, 22 nt, Human
aacuucugggcuguccaaaacu

SEQ ID NO: 958051 - RNA, 22 nt, Human
uuuaggaucaaugagaaagucu

SEQ ID NO: 958052 - RNA, 22 nt, Human
aaaguaaccuaguaauaguguc

SEQ ID NO: 958053 - RNA, 22 nt, Human
aacaguaucuuuuaucagaaau

SEQ ID NO: 958054 - RNA, 22 nt, Human
ucuugcuaaagaccaacacauu

SEQ ID NO: 958055 - RNA, 22 nt, Human
aaaaugagauacaguuugaaag

SEQ ID NO: 958056 - RNA, 22 nt, Human
auuaggaagaggaugucagcau

SEQ ID NO: 958057 - RNA, 22 nt, Human
cauucacaucuuguuccaucac

SEQ ID NO: 958058 - RNA, 22 nt, Human
cugaagccaugugcucacuggu

SEQ ID NO: 958059 - RNA, 22 nt, Human
auauuaggaguuaaauguauua

SEQ ID NO: 958060 - RNA, 22 nt, Human
auucacauguugaagcccuaac

SEQ ID NO: 958061 - RNA, 20 nt, Human
agacaggagcccccauucag

SEQ ID NO: 958062 - RNA, 22 nt, Human
uguguuaacacugcaugauaau

SEQ ID NO: 958063 - RNA, 22 nt, Human
uuucacaaguaaaguccuaagu

SEQ ID NO: 958064 - RNA, 22 nt, Human
uucagcaagaccaccauguacc

SEQ ID NO: 958065 - RNA, 22 nt, Human
ccuggccaggcucucagcacug

SEQ ID NO: 958066 - RNA, 22 nt, Human
uaccucacugggccucaguuuu

SEQ ID NO: 958067 - RNA, 22 nt, Human
gcuguuaggugcccugaccuug

SEQ ID NO: 958068 - RNA, 22 nt, Human
uagauaaauuagaaaguuuacu

SEQ ID NO: 958069 - RNA, 22 nt, Human
auccauggaggacaagagcaau

SEQ ID NO: 958070 - RNA, 22 nt, Human
ugucuuaauuuggaugauguuu

SEQ ID NO: 958071 - RNA, 22 nt, Human
gcuccuggugcuguagagauuu

SEQ ID NO: 958072 - RNA, 23 nt, Human
ucuccuggcugcacuguggccac

SEQ ID NO: 958073 - RNA, 22 nt, Human
gcuuagaaguuccuauaaaaug

SEQ ID NO: 958074 - RNA, 22 nt, Human
cucaaauauguggucagaaagc

SEQ ID NO: 958075 - RNA, 22 nt, Human
aaagacauggaacuagagaugg

SEQ ID NO: 958076 - RNA, 18 nt, Human
ucuccuggguaggggccu

SEQ ID NO: 958077 - RNA, 22 nt, Human
uuggcacacaguaagcccuaag

SEQ ID NO: 958078 - RNA, 22 nt, Human
uuaaaacagcgugaaucuggca

SEQ ID NO: 958079 - RNA, 22 nt, Human
auuauggacguuaauuuuggaa

SEQ ID NO: 958080 - RNA, 22 nt, Human
uacaccuuaaucauaugugucu

SEQ ID NO: 958081 - RNA, 22 nt, Human
cugccuggcuaaacucaagucg

SEQ ID NO: 958082 - RNA, 22 nt, Human
cuauuaggcuuccauuucaugc

SEQ ID NO: 958083 - RNA, 23 nt, Human
uuggcagcgggucaggcuguggg

SEQ ID NO: 958084 - RNA, 22 nt, Human
ccugagccuggcucaugcacuc

SEQ ID NO: 958085 - RNA, 22 nt, Human
acagcauugcuccaucucaaga

SEQ ID NO: 958086 - RNA, 22 nt, Human
ccuccugggccuugcucuguga

SEQ ID NO: 958087 - RNA, 22 nt, Human
gcuggccaggaagagucucaga

SEQ ID NO: 958088 - RNA, 22 nt, Human
uuauuuagucuagaugaauuuu

SEQ ID NO: 958089 - RNA, 22 nt, Human
uuuaucagagauauguguggac

SEQ ID NO: 958090 - RNA, 22 nt, Human
aaugauguauuaguacaacaca

SEQ ID NO: 958091 - RNA, 22 nt, Human
auagacauuuugcauucaagca

SEQ ID NO: 958092 - RNA, 22 nt, Human
gcugaaauucagauuccuaggc

SEQ ID NO: 958093 - RNA, 22 nt, Human
cugccuggguucaaguccuguu

SEQ ID NO: 958094 - RNA, 23 nt, Human
gacaccuuugccagaucaagaug

SEQ ID NO: 958095 - RNA, 22 nt, Human
ugcaccuuguccauuuuuggcc

SEQ ID NO: 958096 - RNA, 23 nt, Human
uuauugaggguguagauuggugu

SEQ ID NO: 958097 - RNA, 22 nt, Human
uaagauaauaaguaugucuaug

SEQ ID NO: 958098 - RNA, 22 nt, Human
gcuccuggcauccugcuuuuaa

SEQ ID NO: 958099 - RNA, 22 nt, Human
ucuccuggccgggcuguccccu

SEQ ID NO: 958100 - RNA, 22 nt, Human
aagaacauucgaacuauuuucu

SEQ ID NO: 958101 - RNA, 22 nt, Human
uggcacaugguaagacucagua

SEQ ID NO: 958102 - RNA, 22 nt, Human
uccuaggcaguuggugcuccau

SEQ ID NO: 958103 - RNA, 22 nt, Human
uccuggccgccgcguggggccg

SEQ ID NO: 958104 - RNA, 22 nt, Human
aacuaacagucauuaaaagaac

SEQ ID NO: 958105 - RNA, 22 nt, Human
aggucaccauggcaugcuccac

SEQ ID NO: 958106 - RNA, 22 nt, Human
cuuuugauaguugcugagcagg

SEQ ID NO: 958107 - RNA, 22 nt, Human
gggaggagggugcuggcuaaac

SEQ ID NO: 958108 - RNA, 22 nt, Human
acauaaauagauuauugggagg

SEQ ID NO: 958109 - RNA, 18 nt, Human
augugcaauuuuguauuu

SEQ ID NO: 958110 - RNA, 22 nt, Human
guauuagguuggugcaaaauug

SEQ ID NO: 958111 - RNA, 21 nt, Human
auguaggguuugccuucucua

SEQ ID NO: 958112 - RNA, 22 nt, Human
uguuggcagauugucuaggguu

SEQ ID NO: 958113 - RNA, 22 nt, Human
augcuuccaaggcuaagacaag

SEQ ID NO: 958114 - RNA, 21 nt, Human
ucuccuggguccaacccaugc

SEQ ID NO: 958115 - RNA, 22 nt, Human
aaauaguaaagugguagccauc

SEQ ID NO: 958116 - RNA, 23 nt, Human
uauuagggccaggacuggcaaau

SEQ ID NO: 958117 - RNA, 22 nt, Human
uuaaagagucuacugcacaucc

SEQ ID NO: 958118 - RNA, 22 nt, Human
agacaggaugcauacucuuggu

SEQ ID NO: 958119 - RNA, 22 nt, Human
uagaacaugcucauguauaaau

SEQ ID NO: 958120 - RNA, 22 nt, Human
gcacucugugaucugcagagcc

SEQ ID NO: 958121 - RNA, 22 nt, Human
caauaagugcuuuuguuuagca

SEQ ID NO: 958122 - RNA, 20 nt, Human
aacacacugguggcaucagg

SEQ ID NO: 958123 - RNA, 22 nt, Human
aacaugucuggguauucacaag

SEQ ID NO: 958124 - RNA, 21 nt, Human
uuugaauagaaauagugcuua

SEQ ID NO: 958125 - RNA, 22 nt, Human
uuccuggcgccacggagccggu

SEQ ID NO: 958126 - RNA, 22 nt, Human
uuguuacuaagccuuuaaauag

SEQ ID NO: 958127 - RNA, 22 nt, Human
guggccaaggugcagagcagcu

SEQ ID NO: 958128 - RNA, 21 nt, Human
gugguucuagagaaacagaau

SEQ ID NO: 958129 - RNA, 22 nt, Human
ucuguaaauccugcucagcaac

SEQ ID NO: 958130 - RNA, 22 nt, Human
uuuauaagaagcaaugucugag

SEQ ID NO: 958131 - RNA, 19 nt, Human
acugccugaggcucacagg

SEQ ID NO: 958132 - RNA, 22 nt, Human
uuggcagauuugucaguaagcu

SEQ ID NO: 958133 - RNA, 22 nt, Human
caugcaggcacccagagcccac

SEQ ID NO: 958134 - RNA, 22 nt, Human
ggccaaaucuguaaggcaagau

SEQ ID NO: 958135 - RNA, 22 nt, Human
aauagaauuuguacuguguuuu

SEQ ID NO: 958136 - RNA, 22 nt, Human
agcagacauaucucaugucaca

SEQ ID NO: 958137 - RNA, 21 nt, Human
uggccaaacuggagcauuuga

SEQ ID NO: 958138 - RNA, 22 nt, Human
acucugcucaaaguccugaggc

SEQ ID NO: 958139 - RNA, 22 nt, Human
uaaccuuucaggcauguagguu

SEQ ID NO: 958140 - RNA, 22 nt, Human
uguuuaaucuauaaaauggaga

SEQ ID NO: 958141 - RNA, 22 nt, Human
ucuugaaggggggcaguguuga

SEQ ID NO: 958142 - RNA, 22 nt, Human
uuaauaaaguaugaauuggaaa

SEQ ID NO: 958143 - RNA, 22 nt, Human
uaaccuuuguucaauguaagau

SEQ ID NO: 958144 - RNA, 22 nt, Human
augugagguaucuaggucuucg

SEQ ID NO: 958145 - RNA, 22 nt, Human
cuaaauaaucccucuggucuua

SEQ ID NO: 958146 - RNA, 22 nt, Human
cuuaggauuuaauuucagacuc

SEQ ID NO: 958147 - RNA, 22 nt, Human
acuggccaggcagcaguagcuu

SEQ ID NO: 958148 - RNA, 22 nt, Human
uagaauaugauuaauuuucuua

SEQ ID NO: 958149 - RNA, 22 nt, Human
ucuggccaauguugugaucaca

SEQ ID NO: 958150 - RNA, 22 nt, Human
uuaguaggagagcuuguucauu

SEQ ID NO: 958151 - RNA, 19 nt, Human
auagaaaggguuaaagaca

SEQ ID NO: 958152 - RNA, 22 nt, Human
auauuagggucucuaaauucua

SEQ ID NO: 958153 - RNA, 22 nt, Human
acaccuuugugaagugaugaug

SEQ ID NO: 958154 - RNA, 22 nt, Human
gcagcauauuguacuggccugc

SEQ ID NO: 958155 - RNA, 22 nt, Human
aaacuccugggcucaagcaguu

SEQ ID NO: 958156 - RNA, 19 nt, Human
aauaauguucaugagauug

SEQ ID NO: 958157 - RNA, 22 nt, Human
ugaaagcacaaguucuaacagg

SEQ ID NO: 958158 - RNA, 22 nt, Human
cuaccuuucugacucuugggau

SEQ ID NO: 958159 - RNA, 22 nt, Human
caaaaguaauguaugcucaucg

SEQ ID NO: 958160 - RNA, 22 nt, Human
cuguuuauggagguaaggcauc

SEQ ID NO: 958161 - RNA, 18 nt, Human
gaaaggagagacaguagg

SEQ ID NO: 958162 - RNA, 22 nt, Human
agggaagaugucucaucuuagg

SEQ ID NO: 958163 - RNA, 22 nt, Human
cuucuuaaagauuacacaauga

SEQ ID NO: 958164 - RNA, 22 nt, Human
uauuggcagcaugagcuccugg

SEQ ID NO: 958165 - RNA, 20 nt, Human
uccagggcaacuagagugug

SEQ ID NO: 958166 - RNA, 22 nt, Human
aacucuggagcacgcccuggcc

SEQ ID NO: 958167 - RNA, 22 nt, Human
uuucacaacacaaucucguuaa

SEQ ID NO: 958168 - RNA, 22 nt, Human
ccuccuggguucaagcgauucu

SEQ ID NO: 958169 - RNA, 22 nt, Human
uauucacaggcuggagugaugu

SEQ ID NO: 958170 - RNA, 22 nt, Human
gacuccugggccucugagaggc

SEQ ID NO: 958171 - RNA, 22 nt, Human
cugagccagcuggcaugugcua

SEQ ID NO: 958172 - RNA, 22 nt, Human
acucugcuggcugcagggcagc

SEQ ID NO: 958173 - RNA, 22 nt, Human
uccaagggcuuuggcgugaagu

SEQ ID NO: 958174 - RNA, 22 nt, Human
cucucuggaccucaacuauuuu

SEQ ID NO: 958175 - RNA, 22 nt, Human
uggacaaaugauuucuaccuuu

SEQ ID NO: 958176 - RNA, 22 nt, Human
aggccaaagugcuccuuuuaga

SEQ ID NO: 958177 - RNA, 22 nt, Human
cuuagaaaugcagauucucagg

SEQ ID NO: 958178 - RNA, 22 nt, Human
aaauaaguaguuuaguguugug

SEQ ID NO: 958179 - RNA, 22 nt, Human
augauugguggucagcaguaug

SEQ ID NO: 958180 - RNA, 22 nt, Human
ucuggccagugaaaugcagaau

SEQ ID NO: 958181 - RNA, 22 nt, Human
aguuuaauauccuucaacuuuc

SEQ ID NO: 958182 - RNA, 22 nt, Human
ucaaaacaaucauuggaugugc

SEQ ID NO: 958183 - RNA, 22 nt, Human
cauuucauaguugucacaauaa

SEQ ID NO: 958184 - RNA, 22 nt, Human
agggaagugaaugacagauauc

SEQ ID NO: 958185 - RNA, 22 nt, Human
gcagcauacagggagaguacuc

SEQ ID NO: 958186 - RNA, 20 nt, Human
cugagccaacucucuucuug

SEQ ID NO: 958187 - RNA, 22 nt, Human
cacucugcugaaaucgccuugu

SEQ ID NO: 958188 - RNA, 22 nt, Human
guauuaggaaauaugaagaaag

SEQ ID NO: 958189 - RNA, 22 nt, Human
gccauaaauugcuggucaaaau

SEQ ID NO: 958190 - RNA, 22 nt, Human
accuauuuaugcaauuaugaaa

SEQ ID NO: 958191 - RNA, 17 nt, Human
ucugaagccagucugcu

SEQ ID NO: 958192 - RNA, 22 nt, Human
cugccacuagcuuucacaucuu

SEQ ID NO: 958193 - RNA, 22 nt, Human
acauaaugaaaugcagaaauca

SEQ ID NO: 958194 - RNA, 22 nt, Human
gucuggccugccagcucuggug

SEQ ID NO: 958195 - RNA, 22 nt, Human
uggaagaggcccaugacugccu

SEQ ID NO: 958196 - RNA, 22 nt, Human
cacucugcgcugggcgccagcg

SEQ ID NO: 958197 - RNA, 22 nt, Human
uaagccugguucauaauuugcu

SEQ ID NO: 958198 - RNA, 22 nt, Human
aaguuuguguaguuuagcaucc

SEQ ID NO: 958199 - RNA, 22 nt, Human
ccuuuucuaaucuuaagaaugu

SEQ ID NO: 958200 - RNA, 22 nt, Human
uagaguguuguaauugaaaagg

SEQ ID NO: 958201 - RNA, 22 nt, Human
cagucucagaggugggaguggg

SEQ ID NO: 958202 - RNA, 22 nt, Human
uuucacaagacagcuacuguug

SEQ ID NO: 958203 - RNA, 22 nt, Human
uauugaaauccauuacguucuu

SEQ ID NO: 958204 - RNA, 21 nt, Human
caugcaggauuuaaccuagaa

SEQ ID NO: 958205 - RNA, 22 nt, Human
uccuggccucacaguccugggu

SEQ ID NO: 958206 - RNA, 22 nt, Human
ucugccacuuuugcuuacuggg

SEQ ID NO: 958207 - RNA, 17 nt, Human
acucugcugaaguagaa

SEQ ID NO: 958208 - RNA, 17 nt, Human
acacagggagagggagc

SEQ ID NO: 958209 - RNA, 19 nt, Human
uauucaggaugauggcaca

SEQ ID NO: 958210 - RNA, 22 nt, Human
ugcaugugcccacucuggcuua

SEQ ID NO: 958211 - RNA, 22 nt, Human
acucugcucuuuggacaaugcc

SEQ ID NO: 958212 - RNA, 22 nt, Human
uggccacacccaccuagaggag

SEQ ID NO: 958213 - RNA, 22 nt, Human
uccuggcccacuaugccagcau

SEQ ID NO: 958214 - RNA, 21 nt, Human
cucucugcuuaugaauaguga

SEQ ID NO: 958215 - RNA, 22 nt, Human
aaaaguaauugaugcaaucgua

SEQ ID NO: 958216 - RNA, 22 nt, Human
guggccaagaaaauagaugcau

SEQ ID NO: 958217 - RNA, 18 nt, Human
uguuaggaagggcacaca

SEQ ID NO: 958218 - RNA, 22 nt, Human
ugugaaauucuugaaaugcaca

SEQ ID NO: 958219 - RNA, 18 nt, Human
accuucauuccuuugccu

SEQ ID NO: 958220 - RNA, 22 nt, Human
uguguuaauuccacaaacauuc

SEQ ID NO: 958221 - RNA, 22 nt, Human
uugaaugaccaugaugcaaggg

SEQ ID NO: 958222 - RNA, 22 nt, Human
auguuuaaauuuauagacagug

SEQ ID NO: 958223 - RNA, 22 nt, Human
acagggaauggagggaucagua

SEQ ID NO: 958224 - RNA, 20 nt, Human
uuggccaaaucuuagucaug

SEQ ID NO: 958225 - RNA, 22 nt, Human
cagcuccucacgagucuugaaa

SEQ ID NO: 958226 - RNA, 22 nt, Human
aacauguugcuuuaauaauauu

SEQ ID NO: 958227 - RNA, 22 nt, Human
auaaaaaggacagauguggucu

SEQ ID NO: 958228 - RNA, 22 nt, Human
uggccacaguguccagcagcag

SEQ ID NO: 958229 - RNA, 22 nt, Human
uuugcaauuugugcugcaaaug

SEQ ID NO: 958230 - RNA, 22 nt, Human
augaaauguuggucccaaucgc

SEQ ID NO: 958231 - RNA, 22 nt, Human
uuauugagcacauaguaugugg

SEQ ID NO: 958232 - RNA, 22 nt, Human
uuaggauagucuguuagaaaag

SEQ ID NO: 958233 - RNA, 22 nt, Human
uccaaggguucaugugcauuca

SEQ ID NO: 958234 - RNA, 22 nt, Human
ucuuuaaucauaaccaagaugg

SEQ ID NO: 958235 - RNA, 22 nt, Human
auaaugugaagauaaugcaaga

SEQ ID NO: 958236 - RNA, 22 nt, Human
agcacucuucugugauaguugu

SEQ ID NO: 958237 - RNA, 22 nt, Human
cuucacaaagcucucuuuaugu

SEQ ID NO: 958238 - RNA, 22 nt, Human
uuuauuauguacaggcacuaua

SEQ ID NO: 958239 - RNA, 22 nt, Human
cuguuuaucuaggaguugcagg

SEQ ID NO: 958240 - RNA, 22 nt, Human
acauuccugaggaaauacauuc

SEQ ID NO: 958241 - RNA, 22 nt, Human
cuggccaagcacuggggucaaa

SEQ ID NO: 958242 - RNA, 22 nt, Human
aaguuugugucagagcuguuac

SEQ ID NO: 958243 - RNA, 22 nt, Human
cacccacauggaaauucacagu

SEQ ID NO: 958244 - RNA, 22 nt, Human
ucuggccagaaagacuugaugu

SEQ ID NO: 958245 - RNA, 22 nt, Human
acacucugugaggcauguaaug

SEQ ID NO: 958246 - RNA, 22 nt, Human
ccuccugggacucauuagcacc

SEQ ID NO: 958247 - RNA, 17 nt, Human
acuccuggucugaaggg

SEQ ID NO: 958248 - RNA, 22 nt, Human
uuauguagcagaaagauguuug

SEQ ID NO: 958249 - RNA, 22 nt, Human
uauccaaacauauagucucucu

SEQ ID NO: 958250 - RNA, 21 nt, Human
ucugagagcaacugcccuuua

SEQ ID NO: 958251 - RNA, 22 nt, Human
gaaaaugugucaucccuacugu

SEQ ID NO: 958252 - RNA, 22 nt, Human
guggccaaacaccaguuuagga

SEQ ID NO: 958253 - RNA, 22 nt, Human
auuagguaagauaaagcagagg

SEQ ID NO: 958254 - RNA, 22 nt, Human
aagaguaugcaugcauguuugu

SEQ ID NO: 958255 - RNA, 22 nt, Human
ccucugcucccuggugucugag

SEQ ID NO: 958256 - RNA, 22 nt, Human
aaagcuauuugugaguuauaga

SEQ ID NO: 958257 - RNA, 22 nt, Human
uaaugaugugugcaaacugaau

SEQ ID NO: 958258 - RNA, 22 nt, Human
ugucccaguuggguauugaauu

SEQ ID NO: 958259 - RNA, 22 nt, Human
aggauuuugacuuauucaggga

SEQ ID NO: 958260 - RNA, 22 nt, Human
uuucuuaguccuagagugauuu

SEQ ID NO: 958261 - RNA, 22 nt, Human
ucauugaauuugguucaauaug

SEQ ID NO: 958262 - RNA, 22 nt, Human
aggagacaucuaacuguagguu

SEQ ID NO: 958263 - RNA, 22 nt, Human
aaacccaucugucugucugcag

SEQ ID NO: 958264 - RNA, 22 nt, Human
aaacauucucagcccugcuugc

SEQ ID NO: 958265 - RNA, 22 nt, Human
agaaguauaaagaauguuuaug

SEQ ID NO: 958266 - RNA, 22 nt, Human
uuauuuggguuugaguguggca

SEQ ID NO: 958267 - RNA, 22 nt, Human
guucacaauggcuuuaccuaag

SEQ ID NO: 958268 - RNA, 22 nt, Human
cauguguaugcauucauacaua

SEQ ID NO: 958269 - RNA, 22 nt, Human
cucucuggcacuucauugcugu

SEQ ID NO: 958270 - RNA, 22 nt, Human
auggccaagcaugccuguggcc

SEQ ID NO: 958271 - RNA, 22 nt, Human
uaaguauguuagaaaaucaagu

SEQ ID NO: 958272 - RNA, 22 nt, Human
gucugucuguuguugagaagca

SEQ ID NO: 958273 - RNA, 22 nt, Human
uaaaaguaggaaugaaacgcau

SEQ ID NO: 958274 - RNA, 22 nt, Human
uuggccaaacagaguucaacag

SEQ ID NO: 958275 - RNA, 22 nt, Human
gagaggggcgcgcagcucgcga

SEQ ID NO: 958276 - RNA, 22 nt, Human
ucugaagccuuuguacaggccu

SEQ ID NO: 958277 - RNA, 22 nt, Human
uucaggauucuuucagacuggg

SEQ ID NO: 958278 - RNA, 22 nt, Human
ucuggccaggggucccugaagg

SEQ ID NO: 958279 - RNA, 22 nt, Human
gauuuggccuuucgcaugguau

SEQ ID NO: 958280 - RNA, 22 nt, Human
aggauuugaaccugcauccagu

SEQ ID NO: 958281 - RNA, 22 nt, Human
uuggccaaauaaucuugcagau

SEQ ID NO: 958282 - RNA, 22 nt, Human
acagucauuagauacaaugucu

SEQ ID NO: 958283 - RNA, 22 nt, Human
ucacuaaguuacauuuaguauu

SEQ ID NO: 958284 - RNA, 20 nt, Human
uaacauaguccagagaacga

SEQ ID NO: 958285 - RNA, 22 nt, Human
uacuaggaagcagcugcauugg

SEQ ID NO: 958286 - RNA, 22 nt, Human
cagcuuuuuagaaucuagggca

SEQ ID NO: 958287 - RNA, 22 nt, Human
uucagcaacucaaaccuauuag

SEQ ID NO: 958288 - RNA, 22 nt, Human
aacauuucagcaaauaagaaca

SEQ ID NO: 958289 - RNA, 22 nt, Human
auggccaagcauauacagauug

SEQ ID NO: 958290 - RNA, 19 nt, Human
ccuggccagacuucugccc

SEQ ID NO: 958291 - RNA, 22 nt, Human
agacauuuggaagauacacaua

SEQ ID NO: 958292 - RNA, 22 nt, Human
aaacacagggauauauauucca

SEQ ID NO: 958293 - RNA, 22 nt, Human
caaaaguaauugugguuuuugc

SEQ ID NO: 958294 - RNA, 20 nt, Human
uacuuaggcuuguuuuggcc

SEQ ID NO: 958295 - RNA, 22 nt, Human
cugggccagaccuuguggucuu

SEQ ID NO: 958296 - RNA, 22 nt, Human
uaaaaaguagugagaauggcgc

SEQ ID NO: 958297 - RNA, 22 nt, Human
aauucacauguugaaguccuaa

SEQ ID NO: 958298 - RNA, 22 nt, Human
gcaauaaauaacauggaagaca

SEQ ID NO: 958299 - RNA, 22 nt, Human
guauuaggugguggaauuguag

SEQ ID NO: 958300 - RNA, 16 nt, Human
gucuggccuaccugcc

SEQ ID NO: 958301 - RNA, 22 nt, Human
uuauuagggugguuuauguucu

SEQ ID NO: 958302 - RNA, 22 nt, Human
aaacaccagcacuguuuacaaa

SEQ ID NO: 958303 - RNA, 22 nt, Human
uuagugauaggaagccagauug

SEQ ID NO: 958304 - RNA, 22 nt, Human
auucuuuucccaacugcuuuaa

SEQ ID NO: 958305 - RNA, 22 nt, Human
aucauuuaaaacaagucucuau

SEQ ID NO: 958306 - RNA, 22 nt, Human
gcuggccacauugugccguccu

SEQ ID NO: 958307 - RNA, 22 nt, Human
uuauuagguuauucucuguacu

SEQ ID NO: 958308 - RNA, 22 nt, Human
uuucaaauaccauaaaccuaau

SEQ ID NO: 958309 - RNA, 22 nt, Human
uauuuaaaaagaggccagcugg

SEQ ID NO: 958310 - RNA, 22 nt, Human
aaauauguauggaguucaugaa

SEQ ID NO: 958311 - RNA, 22 nt, Human
uuggcagcccagcuuacuagca

SEQ ID NO: 958312 - RNA, 22 nt, Human
uuuauuaaaacuguuggcucug

SEQ ID NO: 958313 - RNA, 22 nt, Human
ugguccaagugagguggccucu

SEQ ID NO: 958314 - RNA, 20 nt, Human
uuggcagcagcucagccacc

SEQ ID NO: 958315 - RNA, 22 nt, Human
ccuccugggcuccugucugcac

SEQ ID NO: 958316 - RNA, 22 nt, Human
uuucacaaacugaggagacaau

SEQ ID NO: 958317 - RNA, 23 nt, Human
cacuccuguuucuaagccagcau

SEQ ID NO: 958318 - RNA, 21 nt, Human
uuucacaaaaguaugugacaa

SEQ ID NO: 958319 - RNA, 22 nt, Human
guuuaaguuucagaagcuaaga

SEQ ID NO: 958320 - RNA, 21 nt, Human
auguaggaguuauuggaacag

SEQ ID NO: 958321 - RNA, 22 nt, Human
auuagagaaugugcugacauug

SEQ ID NO: 958322 - RNA, 22 nt, Human
uagggauguaaacauaguaauu

SEQ ID NO: 958323 - RNA, 22 nt, Human
guugaaaugagggauuaaucag

SEQ ID NO: 958324 - RNA, 22 nt, Human
auuuggauucuuauuuagcacu

SEQ ID NO: 958325 - RNA, 22 nt, Human
aguguacaguuuguaguacuac

SEQ ID NO: 958326 - RNA, 22 nt, Human
aacuaaaucuggcauuuagagc

SEQ ID NO: 958327 - RNA, 22 nt, Human
aauucacagcauuugcccaucu

SEQ ID NO: 958328 - RNA, 22 nt, Human
uuggccaaaggaaagacuacug

SEQ ID NO: 958329 - RNA, 22 nt, Human
uaaauaaguucuucauuguuug

SEQ ID NO: 958330 - RNA, 22 nt, Human
ucuccugguauguaugcaccug

SEQ ID NO: 958331 - RNA, 23 nt, Human
uuucacaaugagcauuacagaau

SEQ ID NO: 958332 - RNA, 22 nt, Human
acucugcuaaauguaaguuggu

SEQ ID NO: 958333 - RNA, 22 nt, Human
acuggccaggcacagcuguggg

SEQ ID NO: 958334 - RNA, 22 nt, Human
gucuggccuuuuuagcuugugg

SEQ ID NO: 958335 - RNA, 22 nt, Human
uguagaaagaauauguuucaua

SEQ ID NO: 958336 - RNA, 22 nt, Human
cagagagggcggcccuggcuuc

SEQ ID NO: 958337 - RNA, 20 nt, Human
guauuaggagguaaauguaa

SEQ ID NO: 958338 - RNA, 22 nt, Human
aacacaaagaagcugcaggauc

SEQ ID NO: 958339 - RNA, 22 nt, Human
ccuccugggagagcacggaggg

SEQ ID NO: 958340 - RNA, 22 nt, Human
agacaggagagggaacugccgg

SEQ ID NO: 958341 - RNA, 22 nt, Human
cuguuuauagcagagcaagccu

SEQ ID NO: 958342 - RNA, 22 nt, Human
aacaauaauugcgguucucuau

SEQ ID NO: 958343 - RNA, 22 nt, Human
uuuuauauggcacauugguugg

SEQ ID NO: 958344 - RNA, 22 nt, Human
cugaccaucauggugaaacccc

SEQ ID NO: 958345 - RNA, 22 nt, Human
uacaaaaaauugauacugacga

SEQ ID NO: 958346 - RNA, 22 nt, Human
acaccuuucagguccagacagu

SEQ ID NO: 958347 - RNA, 22 nt, Human
ggcagcauuuagagcacagugu

SEQ ID NO: 958348 - RNA, 22 nt, Human
uggagccagagcgcagccuggg

SEQ ID NO: 958349 - RNA, 23 nt, Human
ggccacaaauagucuccccuggc

SEQ ID NO: 958350 - RNA, 22 nt, Human
uaguuauuauuguuacuaucag

SEQ ID NO: 958351 - RNA, 22 nt, Human
cuccugggcucauaucauucag

SEQ ID NO: 958352 - RNA, 22 nt, Human
guggccaauuuccaucuguaag

SEQ ID NO: 958353 - RNA, 22 nt, Human
caaaaguagugaaguuguacau

SEQ ID NO: 958354 - RNA, 22 nt, Human
acauucuuaacaguuaaaaacu

SEQ ID NO: 958355 - RNA, 22 nt, Human
caauaaguaauaggcaucuaau

SEQ ID NO: 958356 - RNA, 23 nt, Human
uccugaggguuucccagccuugg

SEQ ID NO: 958357 - RNA, 22 nt, Human
uauuagguuggugcaacaguaa

SEQ ID NO: 958358 - RNA, 22 nt, Human
uguuggcaucucugagagaguu

SEQ ID NO: 958359 - RNA, 22 nt, Human
caacccaagguuaguuggucuu

SEQ ID NO: 958360 - RNA, 22 nt, Human
uagaauguaaauuccaagggca

SEQ ID NO: 958361 - RNA, 22 nt, Human
cuucugagcagaccuccugggg

SEQ ID NO: 958362 - RNA, 22 nt, Human
uaaaaaguugaaaggacuuauc

SEQ ID NO: 958363 - RNA, 21 nt, Human
acucugcugcgggcuuggccu

SEQ ID NO: 958364 - RNA, 22 nt, Human
uggcacauaguaggugcucaau

SEQ ID NO: 958365 - RNA, 22 nt, Human
ucuuggccccaccugugccagc

SEQ ID NO: 958366 - RNA, 22 nt, Human
uccugagcuucaaaacacuuug

SEQ ID NO: 958367 - RNA, 22 nt, Human
caacaaguggguacuuuacagg

SEQ ID NO: 958368 - RNA, 22 nt, Human
aaugugcagaugaauaaacaaa

SEQ ID NO: 958369 - RNA, 22 nt, Human
ucagggaaauuuccauguguuu

SEQ ID NO: 958370 - RNA, 22 nt, Human
aacauuucugagaauaucaguu

SEQ ID NO: 958371 - RNA, 22 nt, Human
auguuguagcauaugaaauaua

SEQ ID NO: 958372 - RNA, 22 nt, Human
uuggccaauuuagaacguguug

SEQ ID NO: 958373 - RNA, 22 nt, Human
auggccaagaaauugccgacug

SEQ ID NO: 958374 - RNA, 21 nt, Human
uuuauuaacaacuguggacgu

SEQ ID NO: 958375 - RNA, 22 nt, Human
ugcauguuauuguggcaagaau

SEQ ID NO: 958376 - RNA, 22 nt, Human
aggccaaagcucaccugcagcu

SEQ ID NO: 958377 - RNA, 22 nt, Human
agaauaugaggaaacugugaau

SEQ ID NO: 958378 - RNA, 22 nt, Human
cacaguuucuauaggucagaau

SEQ ID NO: 958379 - RNA, 22 nt, Human
gcucugcugucuucuugcaggc

SEQ ID NO: 958380 - RNA, 22 nt, Human
uggucuaaauauggcucuaaau

SEQ ID NO: 958381 - RNA, 22 nt, Human
auggccaaaucuaaacuguugg

SEQ ID NO: 958382 - RNA, 22 nt, Human
gaaaaagugaccuugguagcua

SEQ ID NO: 958383 - RNA, 22 nt, Human
aaacugccuccugggcaacuaa

SEQ ID NO: 958384 - RNA, 22 nt, Human
uaagucaugauucuguguuacu

SEQ ID NO: 958385 - RNA, 19 nt, Human
gcuccuggaugaccugugg

SEQ ID NO: 958386 - RNA, 22 nt, Human
ccagacaggaacacacaucucc

SEQ ID NO: 958387 - RNA, 22 nt, Human
cagucauuuuauuugaaaauua

SEQ ID NO: 958388 - RNA, 22 nt, Human
ucaaaacacuauuaccuuuaau

SEQ ID NO: 958389 - RNA, 22 nt, Human
ucagggaaucagacucugcagc

SEQ ID NO: 958390 - RNA, 22 nt, Human
ucacaagaauuuguagaugaaa

SEQ ID NO: 958391 - RNA, 22 nt, Human
caaaaguaccuugugugcuuug

SEQ ID NO: 958392 - RNA, 22 nt, Human
uuuucauuguuccucgagcauu

SEQ ID NO: 958393 - RNA, 22 nt, Human
ucuccugguuuguuaaauaauu

SEQ ID NO: 958394 - RNA, 22 nt, Human
gugauaaagacgugucauaauu

SEQ ID NO: 958395 - RNA, 18 nt, Human
aaguaugccuauguuauu

SEQ ID NO: 958396 - RNA, 22 nt, Human
uccuggcccgaucccugugaag

SEQ ID NO: 958397 - RNA, 22 nt, Human
cuuccugggcaauguucugcuu

SEQ ID NO: 958398 - RNA, 22 nt, Human
gcacucugccaggucuccugau

SEQ ID NO: 958399 - RNA, 22 nt, Human
gaaaaguaaacacuagggguca

SEQ ID NO: 958400 - RNA, 22 nt, Human
uggcucaagugauccuccugcc

SEQ ID NO: 958401 - RNA, 22 nt, Human
ggucuaaaaugagucuuccuag

SEQ ID NO: 958402 - RNA, 17 nt, Human
agcugaaauugcugaag

SEQ ID NO: 958403 - RNA, 22 nt, Human
acaccuuuuauucgccaggcac

SEQ ID NO: 958404 - RNA, 22 nt, Human
uaggaugaucuuguagagagau

SEQ ID NO: 958405 - RNA, 22 nt, Human
uguuggcauuagaggguuauug

SEQ ID NO: 958406 - RNA, 22 nt, Human
uguuuaauugggccaacagcgg

SEQ ID NO: 958407 - RNA, 22 nt, Human
auuuauuaugggauuuggcuca

SEQ ID NO: 958408 - RNA, 23 nt, Human
auauuagggagauuagcccucua

SEQ ID NO: 958409 - RNA, 22 nt, Human
augauguuaccaguacuuagag

SEQ ID NO: 958410 - RNA, 22 nt, Human
aaagcagcagcaccugcauuuc

SEQ ID NO: 958411 - RNA, 22 nt, Human
aacucugcagugacuuauaaag

SEQ ID NO: 958412 - RNA, 22 nt, Human
uauagcaagcaggacagucuca

SEQ ID NO: 958413 - RNA, 22 nt, Human
uggaagagaaaggaguggaucu

SEQ ID NO: 958414 - RNA, 22 nt, Human
acauuuuuuagagucccacauu

SEQ ID NO: 958415 - RNA, 22 nt, Human
uucagcaagugucucuacuguc

SEQ ID NO: 958416 - RNA, 22 nt, Human
aagggcugagcacagugagcca

SEQ ID NO: 958417 - RNA, 22 nt, Human
ggccaaaccgcaauuauuuuug

SEQ ID NO: 958418 - RNA, 22 nt, Human
uauuggucuuggaagguuuugu

SEQ ID NO: 958419 - RNA, 22 nt, Human
acuccugguuuguguccuggcu

SEQ ID NO: 958420 - RNA, 19 nt, Human
agucugcauuucuagcaag

SEQ ID NO: 958421 - RNA, 22 nt, Human
uguaggauguaaggcaggcauc

SEQ ID NO: 958422 - RNA, 22 nt, Human
ucuggccaacccucaaguugua

SEQ ID NO: 958423 - RNA, 22 nt, Human
ggccacaagugguccugagucc

SEQ ID NO: 958424 - RNA, 22 nt, Human
auucacaacugauccuugcuca

SEQ ID NO: 958425 - RNA, 22 nt, Human
uuuauauagagauuugugcaug

SEQ ID NO: 958426 - RNA, 22 nt, Human
ugcaaaugaguugcagaucagg

SEQ ID NO: 958427 - RNA, 22 nt, Human
cugggccaagaaguuguguaug

SEQ ID NO: 958428 - RNA, 22 nt, Human
uaaccuuuggugaaauauuaac

SEQ ID NO: 958429 - RNA, 22 nt, Human
cucauacauaugccauuccugc

SEQ ID NO: 958430 - RNA, 16 nt, Human
gcucugcugaggccca

SEQ ID NO: 958431 - RNA, 22 nt, Human
cugugccaggcccagcugacuu

SEQ ID NO: 958432 - RNA, 22 nt, Human
caauagaaaacucaauacuuaa

SEQ ID NO: 958433 - RNA, 22 nt, Human
agcuauguauaaauaggccacu

SEQ ID NO: 958434 - RNA, 22 nt, Human
cucucugcaaguuuugaaauag

SEQ ID NO: 958435 - RNA, 18 nt, Human
cugaggccaacuacacug

SEQ ID NO: 958436 - RNA, 22 nt, Human
aaguuuguucagggcuuacauu

SEQ ID NO: 958437 - RNA, 22 nt, Human
uuuuuuauaucaacugaagucu

SEQ ID NO: 958438 - RNA, 22 nt, Human
aaagauguuuuauaaguuaugg

SEQ ID NO: 958439 - RNA, 22 nt, Human
gaucuuggggggaucaccaugg

SEQ ID NO: 958440 - RNA, 22 nt, Human
aauaggcaguuggauaugcaag

SEQ ID NO: 958441 - RNA, 22 nt, Human
ccugguccuuacgucauugcuu

SEQ ID NO: 958442 - RNA, 22 nt, Human
cuggucaaggagagucucugca

SEQ ID NO: 958443 - RNA, 22 nt, Human
cugagccagggccacacaugga

SEQ ID NO: 958444 - RNA, 22 nt, Human
auggccaaggggccuaggcagg

SEQ ID NO: 958445 - RNA, 20 nt, Human
ugagccaaacgaugaagagc

SEQ ID NO: 958446 - RNA, 22 nt, Human
auguuauaguuauaaaaugagg

SEQ ID NO: 958447 - RNA, 22 nt, Human
ccugggcaggccggacgcuggg

SEQ ID NO: 958448 - RNA, 22 nt, Human
gggaagauaguguugagggccc

SEQ ID NO: 958449 - RNA, 22 nt, Human
cugggccaucuccuuugugugg

SEQ ID NO: 958450 - RNA, 22 nt, Human
gcagggaagggaaacagagacc

SEQ ID NO: 958451 - RNA, 22 nt, Human
uauauuaguggaaugauaugaa

SEQ ID NO: 958452 - RNA, 22 nt, Human
guuaauaaagguauagaaucag

SEQ ID NO: 958453 - RNA, 22 nt, Human
augguacaauguguuuguuagg

SEQ ID NO: 958454 - RNA, 22 nt, Human
gcagacaucaagcacaggccca

SEQ ID NO: 958455 - RNA, 22 nt, Human
uuuaguagugacagauucuggg

SEQ ID NO: 958456 - RNA, 18 nt, Human
ucuuggcagcaucuggca

SEQ ID NO: 958457 - RNA, 22 nt, Human
auggccaagaauauuucucaac

SEQ ID NO: 958458 - RNA, 22 nt, Human
aaugccuuggagagccuagagg

SEQ ID NO: 958459 - RNA, 22 nt, Human
cugggccacaagccugugugau

SEQ ID NO: 958460 - RNA, 22 nt, Human
acacuucuauucccugcacaaa

SEQ ID NO: 958461 - RNA, 20 nt, Human
acauggaaggucaaacuauc

SEQ ID NO: 958462 - RNA, 22 nt, Human
cgcaccacugaauuccagccug

SEQ ID NO: 958463 - RNA, 22 nt, Human
cugagccaccggcagggacauc

SEQ ID NO: 958464 - RNA, 22 nt, Human
aaacacuagcaggaagcacuga

SEQ ID NO: 958465 - RNA, 22 nt, Human
uuuuauuaucuuugaaugggac

SEQ ID NO: 958466 - RNA, 22 nt, Human
cuucacaaaauauuucauuaua

SEQ ID NO: 958467 - RNA, 22 nt, Human
gacuccuggcuuucccucuuag

SEQ ID NO: 958468 - RNA, 22 nt, Human
aaaauaacuucuacuauuugca

SEQ ID NO: 958469 - RNA, 22 nt, Human
aaaagagucuuaggcagucaua

SEQ ID NO: 958470 - RNA, 22 nt, Human
aaugauguauguauaaggcagg

SEQ ID NO: 958471 - RNA, 22 nt, Human
cagacauauguuuuaacagauu

SEQ ID NO: 958472 - RNA, 22 nt, Human
aguaugaagaugaugaaaaaua

SEQ ID NO: 958473 - RNA, 22 nt, Human
ggucugaguggggccugagauu

SEQ ID NO: 958474 - RNA, 22 nt, Human
cugcucacgccaccguucauca

SEQ ID NO: 958475 - RNA, 20 nt, Human
ucuguaaagacuccagaagc

SEQ ID NO: 958476 - RNA, 22 nt, Human
caaaacauucagagagcucacu

SEQ ID NO: 958477 - RNA, 22 nt, Human
uaacauuccucaaaguuuucag

SEQ ID NO: 958478 - RNA, 22 nt, Human
ucacucugggccagcgcaggua

SEQ ID NO: 958479 - RNA, 22 nt, Human
caaaaguaauugcgguuuuugc

SEQ ID NO: 958480 - RNA, 22 nt, Human
gaaaaguauguuuauuuugacu

SEQ ID NO: 958481 - RNA, 22 nt, Human
ucugagccguauggcuuggcua

SEQ ID NO: 958482 - RNA, 18 nt, Human
ucagggaaucuuggccuu

SEQ ID NO: 958483 - RNA, 22 nt, Human
ugaaauguaaauaggacuagaa

SEQ ID NO: 958484 - RNA, 22 nt, Human
gacagagaggcugagcaguaca

SEQ ID NO: 958485 - RNA, 22 nt, Human
aacuucuggauguuucaaaugu

SEQ ID NO: 958486 - RNA, 22 nt, Human
auaaaagaaguuuugguacuug

SEQ ID NO: 958487 - RNA, 22 nt, Human
uggcagacuuuagggucuacau

SEQ ID NO: 958488 - RNA, 22 nt, Human
uuauuaugguauuucuuugcag

SEQ ID NO: 958489 - RNA, 22 nt, Human
uggcaagccugagauccgggag

SEQ ID NO: 958490 - RNA, 22 nt, Human
acucugcuguuuacucucuaua

SEQ ID NO: 958491 - RNA, 22 nt, Human
cuucugaggcagcuauucaguu

SEQ ID NO: 958492 - RNA, 22 nt, Human
ugcaccuucauuuuaggcagcu

SEQ ID NO: 958493 - RNA, 22 nt, Human
acuccaggguuuugcaccugga

SEQ ID NO: 958494 - RNA, 22 nt, Human
aauguacaaaagucagccaacu

SEQ ID NO: 958495 - RNA, 22 nt, Human
caguuuaaaugagugacugcag

SEQ ID NO: 958496 - RNA, 22 nt, Human
acucucugguauuggcaaguuu

SEQ ID NO: 958497 - RNA, 22 nt, Human
uccaagggaauuuaaaguugcu

SEQ ID NO: 958498 - RNA, 22 nt, Human
auauugaacccuacagacugua

SEQ ID NO: 958499 - RNA, 22 nt, Human
aaguaugugauacauguuaauu

SEQ ID NO: 958500 - RNA, 22 nt, Human
aauauuaauagaagggguucua

SEQ ID NO: 958501 - RNA, 22 nt, Human
cuuuguaucuaaauaucuugaa

SEQ ID NO: 958502 - RNA, 18 nt, Human
uugauaaacaauuucauu

SEQ ID NO: 958503 - RNA, 22 nt, Human
auuauaaagaacaugugugugg

SEQ ID NO: 958504 - RNA, 19 nt, Human
uggcagcauugguaccuug

SEQ ID NO: 958505 - RNA, 20 nt, Human
uugaggagauauugaauacu

SEQ ID NO: 958506 - RNA, 22 nt, Human
gcucugcuugcaucaugacugc

SEQ ID NO: 958507 - RNA, 16 nt, Human
gcuccugggcccucga

SEQ ID NO: 958508 - RNA, 22 nt, Human
uccaagggcagcagccauagcc

SEQ ID NO: 958509 - RNA, 17 nt, Human
ccacucaguaauuucuc

SEQ ID NO: 958510 - RNA, 22 nt, Human
auuuacagaagcauguaauagc

SEQ ID NO: 958511 - RNA, 22 nt, Human
cuggcacaaugucacuuuugcu

SEQ ID NO: 958512 - RNA, 22 nt, Human
acuccagguuuuuucacugaag

SEQ ID NO: 958513 - RNA, 20 nt, Human
auucacaaagccaguguugc

SEQ ID NO: 958514 - RNA, 21 nt, Human
aaaaagcuggggcaugcaugc

SEQ ID NO: 958515 - RNA, 22 nt, Human
gcuccuggccagcacagggccc

SEQ ID NO: 958516 - RNA, 22 nt, Human
acauuucagcgugcaugacaug

SEQ ID NO: 958517 - RNA, 22 nt, Human
gaacccaaaccuggaccucccu

SEQ ID NO: 958518 - RNA, 22 nt, Human
cuggcacacaaguauuuccuuu

SEQ ID NO: 958519 - RNA, 19 nt, Human
gcuggccacgccccaguug

SEQ ID NO: 958520 - RNA, 22 nt, Human
ggcagcaucacuugucuccagc

SEQ ID NO: 958521 - RNA, 22 nt, Human
uuuaguagaaauauuugggccu

SEQ ID NO: 958522 - RNA, 22 nt, Human
cagccuuuuaggacuauuugug

SEQ ID NO: 958523 - RNA, 22 nt, Human
ucuccuggagcaggaagguggg

SEQ ID NO: 958524 - RNA, 22 nt, Human
aauaagaaagagucagcuucag

SEQ ID NO: 958525 - RNA, 22 nt, Human
uugcaguugucuuuccuaauuu

SEQ ID NO: 958526 - RNA, 22 nt, Human
auucacaaagaagggaaguaca

SEQ ID NO: 958527 - RNA, 22 nt, Human
gcucugcugagauaucugggag

SEQ ID NO: 958528 - RNA, 22 nt, Human
caccuugugauccucuugccuu

SEQ ID NO: 958529 - RNA, 22 nt, Human
aagccuugcagcauuaggcucu

SEQ ID NO: 958530 - RNA, 21 nt, Human
ccugggccaaauucccuggac

SEQ ID NO: 958531 - RNA, 20 nt, Human
ucaccuuuguugguauucau

SEQ ID NO: 958532 - RNA, 21 nt, Human
cuccugggcuaagauauagug

SEQ ID NO: 958533 - RNA, 22 nt, Human
uauuagugaaagaauuaguuug

SEQ ID NO: 958534 - RNA, 22 nt, Human
uagaauaugugguaggaucugg

SEQ ID NO: 958535 - RNA, 22 nt, Human
uuaguuaggaaacaaaguuguu

SEQ ID NO: 958536 - RNA, 22 nt, Human
gauuucuuuagguguaauagug

SEQ ID NO: 958537 - RNA, 22 nt, Human
ggaugcacgaaggcgccucgga

SEQ ID NO: 958538 - RNA, 22 nt, Human
cggccaaauugcagagagaagc

SEQ ID NO: 958539 - RNA, 22 nt, Human
uuauuaggaaaaggucagaugu

SEQ ID NO: 958540 - RNA, 22 nt, Human
uauauuaaacccucucuguagg

SEQ ID NO: 958541 - RNA, 19 nt, Human
cugaggcccauguaccaug

SEQ ID NO: 958542 - RNA, 22 nt, Human
aaguuuaagguggaaguggugg

SEQ ID NO: 958543 - RNA, 22 nt, Human
cuggccaguugccuuccugggu

SEQ ID NO: 958544 - RNA, 20 nt, Human
uguccuaauagacaagcaga

SEQ ID NO: 958545 - RNA, 22 nt, Human
auuauuagugauguuguuacug

SEQ ID NO: 958546 - RNA, 22 nt, Human
uggccacauccuuuccuuguca

SEQ ID NO: 958547 - RNA, 22 nt, Human
acuggccagaacuaagucacau

SEQ ID NO: 958548 - RNA, 22 nt, Human
aauuaggagaaaacuguugucu

SEQ ID NO: 958549 - RNA, 22 nt, Human
ucacucugguccauccgagagc

SEQ ID NO: 958550 - RNA, 22 nt, Human
uccuggccuuauccccaaacug

SEQ ID NO: 958551 - RNA, 22 nt, Human
uuaauguguguacaggauuuug

SEQ ID NO: 958552 - RNA, 22 nt, Human
gcuccugggcccugggcuaacu

SEQ ID NO: 958553 - RNA, 22 nt, Human
aaauauagcaauuaugccuacu

SEQ ID NO: 958554 - RNA, 22 nt, Human
auuaggacacauacauguacag

SEQ ID NO: 958555 - RNA, 22 nt, Human
auauauaaccuggauaaggcuu

SEQ ID NO: 958556 - RNA, 21 nt, Human
aaguuuguucuuguauagucu

SEQ ID NO: 958557 - RNA, 20 nt, Human
caguuuaacuuugagcaguu

SEQ ID NO: 958558 - RNA, 22 nt, Human
caaguaugagaaagcuauuacc

SEQ ID NO: 958559 - RNA, 22 nt, Human
uuuauuagugcuuguaucacug

SEQ ID NO: 958560 - RNA, 22 nt, Human
uaauaaaugaaagugcuggcau

SEQ ID NO: 958561 - RNA, 22 nt, Human
uggcacauagcagguacucagu

SEQ ID NO: 958562 - RNA, 22 nt, Human
agcaugcgcuugaucagcucca

SEQ ID NO: 958563 - RNA, 22 nt, Human
uccuggccuugcuccugaugcc

SEQ ID NO: 958564 - RNA, 22 nt, Human
aauccuggaauacaagagugaa

SEQ ID NO: 958565 - RNA, 21 nt, Human
uccuggcccacucuaucccca

SEQ ID NO: 958566 - RNA, 22 nt, Human
guuuauuagaguuuucugucug

SEQ ID NO: 958567 - RNA, 22 nt, Human
acuaacauguuaaucaaaagaa

SEQ ID NO: 958568 - RNA, 22 nt, Human
uagaauaaguugaugauauaug

SEQ ID NO: 958569 - RNA, 22 nt, Human
agcuuuguauuugagcauacga

SEQ ID NO: 958570 - RNA, 22 nt, Human
ugcugaaacaauaacauacugg

SEQ ID NO: 958571 - RNA, 22 nt, Human
uucaggaugaaagugugcaaca

SEQ ID NO: 958572 - RNA, 22 nt, Human
aaauauguaaccaaggugaagu

SEQ ID NO: 958573 - RNA, 22 nt, Human
auuagguugugcuuuguggaca

SEQ ID NO: 958574 - RNA, 22 nt, Human
ucuccugggcuugguugaaguu

SEQ ID NO: 958575 - RNA, 22 nt, Human
acuuugaaggggaacauuuuaa

SEQ ID NO: 958576 - RNA, 19 nt, Human
ucucacaguuuccuugccu

SEQ ID NO: 958577 - RNA, 22 nt, Human
guucacaagcugauugucuuuc

SEQ ID NO: 958578 - RNA, 18 nt, Human
auguauguacauauuuau

SEQ ID NO: 958579 - RNA, 22 nt, Human
gaaacacaugcagcuccauaga

SEQ ID NO: 958580 - RNA, 17 nt, Human
auucuuugaugucucug

SEQ ID NO: 958581 - RNA, 22 nt, Human
cuuauaguaugauguugagaau

SEQ ID NO: 958582 - RNA, 22 nt, Human
uauauuaacacccacuugccuc

SEQ ID NO: 958583 - RNA, 22 nt, Human
uuccuggcauagagagggcaca

SEQ ID NO: 958584 - RNA, 22 nt, Human
aaauguuagguuguacugaguc

SEQ ID NO: 958585 - RNA, 22 nt, Human
cuggcccagagcucuggccuuu

SEQ ID NO: 958586 - RNA, 22 nt, Human
ggcaagcauaaccuguacagcc

SEQ ID NO: 958587 - RNA, 22 nt, Human
uggcagcagggccccuggagga

SEQ ID NO: 958588 - RNA, 22 nt, Human
gacauacagcauggucuaugaa

SEQ ID NO: 958589 - RNA, 22 nt, Human
uccugggcuuaagugauccucc

SEQ ID NO: 958590 - RNA, 22 nt, Human
aggauaguugugaagauaggcu

SEQ ID NO: 958591 - RNA, 22 nt, Human
uuaggauaugaaacaguauaag

SEQ ID NO: 958592 - RNA, 22 nt, Human
aacacauauuuauauaugcaca

SEQ ID NO: 958593 - RNA, 22 nt, Human
aaauaguuagcccugcauauau

SEQ ID NO: 958594 - RNA, 20 nt, Human
ucuccuggucugguccgugc

SEQ ID NO: 958595 - RNA, 17 nt, Human
ugaagaugcauggcagc

SEQ ID NO: 958596 - RNA, 22 nt, Human
cagacagggaccucgcuccaga

SEQ ID NO: 958597 - RNA, 22 nt, Human
acauucuaacauuguacagaua

SEQ ID NO: 958598 - RNA, 22 nt, Human
cauuccuuaacguggggagucu

SEQ ID NO: 958599 - RNA, 22 nt, Human
cuucaaacccagauuaaaugca

SEQ ID NO: 958600 - RNA, 20 nt, Human
cauuggacuuggcuucaugg

SEQ ID NO: 958601 - RNA, 22 nt, Human
cuccuggaagcccgcccugcug

SEQ ID NO: 958602 - RNA, 22 nt, Human
guugaaauccuaacccccuagu

SEQ ID NO: 958603 - RNA, 21 nt, Human
uggccaaaaccauauuauuaa

SEQ ID NO: 958604 - RNA, 22 nt, Human
auuauuaggugcucucugacaa

SEQ ID NO: 958605 - RNA, 22 nt, Human
uggcaccaggcgggguggcugu

SEQ ID NO: 958606 - RNA, 19 nt, Human
ucauaaaaaugguaaccca

SEQ ID NO: 958607 - RNA, 22 nt, Human
auaugaaaguaagcaugugugu

SEQ ID NO: 958608 - RNA, 22 nt, Human
uugaaauacugcauuguucagu

SEQ ID NO: 958609 - RNA, 22 nt, Human
ugcauuccauguguuuccugag

SEQ ID NO: 958610 - RNA, 22 nt, Human
agccauuggcugccuggugcgu

SEQ ID NO: 958611 - RNA, 22 nt, Human
cagcugacgccagaguggaauu

SEQ ID NO: 958612 - RNA, 22 nt, Human
acauagaaccuggcacauagua

SEQ ID NO: 958613 - RNA, 22 nt, Human
augcccugaggaaugucacgcu

SEQ ID NO: 958614 - RNA, 22 nt, Human
gaaauauucuugucuuguuuuc

SEQ ID NO: 958615 - RNA, 22 nt, Human
aauuaggaaaugagaguauuug

SEQ ID NO: 958616 - RNA, 22 nt, Human
auuaaauacugcaggcuaagca

SEQ ID NO: 958617 - RNA, 22 nt, Human
gcaccuuuggaaugaaaaguug

SEQ ID NO: 958618 - RNA, 22 nt, Human
acuggccagguucaaaauacag

SEQ ID NO: 958619 - RNA, 22 nt, Human
uuccuggccccaccccuggaga

SEQ ID NO: 958620 - RNA, 22 nt, Human
cagggucuuauaaggccaauuu

SEQ ID NO: 958621 - RNA, 22 nt, Human
uaaaaguauacuuucaaaggag

SEQ ID NO: 958622 - RNA, 22 nt, Human
cugggccagggaggugucugua

SEQ ID NO: 958623 - RNA, 22 nt, Human
uuggcagagaguaugcugaaga

SEQ ID NO: 958624 - RNA, 22 nt, Human
auuaggacagagaugucaagag

SEQ ID NO: 958625 - RNA, 22 nt, Human
gaguuuaaagcauacauauuuu

SEQ ID NO: 958626 - RNA, 22 nt, Human
gauuaggacauggauguauguu

SEQ ID NO: 958627 - RNA, 22 nt, Human
aggccaaagcacagagcuggaa

SEQ ID NO: 958628 - RNA, 22 nt, Human
accaaacaaaauugugcacugu

SEQ ID NO: 958629 - RNA, 21 nt, Human
cauauuaaaucggugccuuua

SEQ ID NO: 958630 - RNA, 22 nt, Human
auuacaaaagaagggagaaggu

SEQ ID NO: 958631 - RNA, 22 nt, Human
cuggcccaggaagacguguccc

SEQ ID NO: 958632 - RNA, 22 nt, Human
aguaacucauguaaaccucaca

SEQ ID NO: 958633 - RNA, 22 nt, Human
gaguuauuuugagcagaugguu

SEQ ID NO: 958634 - RNA, 22 nt, Human
uaagucauaagucaugauguua

SEQ ID NO: 958635 - RNA, 22 nt, Human
uuguuuaaaauguagcaagaaa

SEQ ID NO: 958636 - RNA, 22 nt, Human
cgagcaugaugacggcuguggc

SEQ ID NO: 958637 - RNA, 22 nt, Human
aagaugcagcaaacuacuuuuu

SEQ ID NO: 958638 - RNA, 22 nt, Human
auuccaaagccugaauaaugga

SEQ ID NO: 958639 - RNA, 22 nt, Human
ucuccuggaagugauuccccug

SEQ ID NO: 958640 - RNA, 22 nt, Human
ccuguuuacaucaucaaggacu

SEQ ID NO: 958641 - RNA, 22 nt, Human
ccugggcaucucaugcaccugc

SEQ ID NO: 958642 - RNA, 22 nt, Human
uaacuccagagaauccauccau

SEQ ID NO: 958643 - RNA, 22 nt, Human
accuuauuaaaaugaugaugua

SEQ ID NO: 958644 - RNA, 22 nt, Human
guaaaauagaauaacguggcua

SEQ ID NO: 958645 - RNA, 22 nt, Human
gcuccuggguguggcugccccu

SEQ ID NO: 958646 - RNA, 23 nt, Human
uggccaagauaaucucaguuuuc

SEQ ID NO: 958647 - RNA, 23 nt, Human
ugauuaggucuacucuuggcucc

SEQ ID NO: 958648 - RNA, 22 nt, Human
uuucacaacguuguggugagag

SEQ ID NO: 958649 - RNA, 22 nt, Human
ccuccugguaauuagcgaaagg

SEQ ID NO: 958650 - RNA, 22 nt, Human
uuagauaacaguagaauaucaa

SEQ ID NO: 958651 - RNA, 22 nt, Human
gaaauguguuguucauuucuaa

SEQ ID NO: 958652 - RNA, 22 nt, Human
uccugggcaaaaguaucuguga

SEQ ID NO: 958653 - RNA, 22 nt, Human
ccacucugauuggucaccucug

SEQ ID NO: 958654 - RNA, 22 nt, Human
guuuaauaauguugaauuacua

SEQ ID NO: 958655 - RNA, 22 nt, Human
uaggauguagcuaugucaucau

SEQ ID NO: 958656 - RNA, 22 nt, Human
uuccuguuucauagaaaacuga

SEQ ID NO: 958657 - RNA, 22 nt, Human
aaguaugcaaaucgucuuagaa

SEQ ID NO: 958658 - RNA, 22 nt, Human
acaggacuguggaaggaucucu

SEQ ID NO: 958659 - RNA, 22 nt, Human
agcuccugaaaauccagacugg

SEQ ID NO: 958660 - RNA, 22 nt, Human
uaacuccacaccccucuuggug

SEQ ID NO: 958661 - RNA, 22 nt, Human
aaauaugugaucagugaauaaa

SEQ ID NO: 958662 - RNA, 22 nt, Human
ucuuaaaaguaugccaauugga

SEQ ID NO: 958663 - RNA, 22 nt, Human
auucacaaguucuagggauuag

SEQ ID NO: 958664 - RNA, 22 nt, Human
uccuggccagaggacaaagcug

SEQ ID NO: 958665 - RNA, 22 nt, Human
aauacugccugugagguaacuc

SEQ ID NO: 958666 - RNA, 22 nt, Human
aacauucaccucuaccuccuuc

SEQ ID NO: 958667 - RNA, 22 nt, Human
ccugggccugaaaacauuucuc

SEQ ID NO: 958668 - RNA, 22 nt, Human
cuggccaacaucuggggcacau

SEQ ID NO: 958669 - RNA, 22 nt, Human
acucugcaauguggcaagaaca

SEQ ID NO: 958670 - RNA, 22 nt, Human
cagcucugaggaacacuccuuu

SEQ ID NO: 958671 - RNA, 22 nt, Human
uuggcaucaguguaggaccugu

SEQ ID NO: 958672 - RNA, 22 nt, Human
gcuggccauggccugcgccauc

SEQ ID NO: 958673 - RNA, 22 nt, Human
ccuggccacucagguguggggc

SEQ ID NO: 958674 - RNA, 22 nt, Human
caaggugcagcguugucaagcu

SEQ ID NO: 958675 - RNA, 22 nt, Human
gaauauuaguaucaguuauacc

SEQ ID NO: 958676 - RNA, 19 nt, Human
cugggccagaaucagcuca

SEQ ID NO: 958677 - RNA, 22 nt, Human
uauuggauagcuugugcagaau

SEQ ID NO: 958678 - RNA, 22 nt, Human
aaaguauuuuugacaggcauua

SEQ ID NO: 958679 - RNA, 22 nt, Human
uugcaaaugaccauugccacau

SEQ ID NO: 958680 - RNA, 22 nt, Human
auuaggauguguauauuguguu

SEQ ID NO: 958681 - RNA, 18 nt, Human
aggauauuaagaguacag

SEQ ID NO: 958682 - RNA, 22 nt, Human
uuuuaauugcaauuaugguccc

SEQ ID NO: 958683 - RNA, 22 nt, Human
aagaacauuuaugauggcauuu

SEQ ID NO: 958684 - RNA, 22 nt, Human
gcuggccaggugcuuugguucu

SEQ ID NO: 958685 - RNA, 22 nt, Human
acuggccaugaacuugggaucu

SEQ ID NO: 958686 - RNA, 22 nt, Human
caaguuaucagaaggcacuuuu

SEQ ID NO: 958687 - RNA, 22 nt, Human
auuacacacucaaguccuguua

SEQ ID NO: 958688 - RNA, 22 nt, Human
cuccuggcucgcccccagcuga

SEQ ID NO: 958689 - RNA, 22 nt, Human
aaaaauguuaucuacuguccga

SEQ ID NO: 958690 - RNA, 22 nt, Human
augaaaaguucgaucuagaagg

SEQ ID NO: 958691 - RNA, 22 nt, Human
uccugggcgguuaugugaucug

SEQ ID NO: 958692 - RNA, 22 nt, Human
auggccaacugaaaugaaagau

SEQ ID NO: 958693 - RNA, 22 nt, Human
aagcuaugggggaguuucaacc

SEQ ID NO: 958694 - RNA, 21 nt, Human
auuguuaucauugugcugugu

SEQ ID NO: 958695 - RNA, 22 nt, Human
gaaauauuucucuugagccccu

SEQ ID NO: 958696 - RNA, 22 nt, Human
auuuauuaugggauuuggcaca

SEQ ID NO: 958697 - RNA, 22 nt, Human
acacauuaugagcaguugucuu

SEQ ID NO: 958698 - RNA, 22 nt, Human
cugcugagaaaagacugaggga

SEQ ID NO: 958699 - RNA, 22 nt, Human
ucuuggcaauuugaucucaguu

SEQ ID NO: 958700 - RNA, 22 nt, Human
uaugucuugcauuuuucaaacu

SEQ ID NO: 958701 - RNA, 22 nt, Human
guguugacucuuggacuucaag

SEQ ID NO: 958702 - RNA, 22 nt, Human
uaggauaggauggagacagaau

SEQ ID NO: 958703 - RNA, 22 nt, Human
uuggccaaggaccuuuuuggag

SEQ ID NO: 958704 - RNA, 22 nt, Human
uuucuauuuuaaaggcauaugg

SEQ ID NO: 958705 - RNA, 17 nt, Human
cagcucugcaucuuccu

SEQ ID NO: 958706 - RNA, 22 nt, Human
ggauuugggcuugcagcagagc

SEQ ID NO: 958707 - RNA, 22 nt, Human
gagggcuccucacauucucuau

SEQ ID NO: 958708 - RNA, 22 nt, Human
cuuuauauccagauguuuggug

SEQ ID NO: 958709 - RNA, 22 nt, Human
guccaaauaaguugcaaaauag

SEQ ID NO: 958710 - RNA, 22 nt, Human
ucugccaccaccuacacuagua

SEQ ID NO: 958711 - RNA, 20 nt, Human
caaguguagaaacuaauaag

SEQ ID NO: 958712 - RNA, 22 nt, Human
augucacauggccuguacuuug

SEQ ID NO: 958713 - RNA, 22 nt, Human
aauaauguuaugucauucuucu

SEQ ID NO: 958714 - RNA, 22 nt, Human
aagauguaucuuuccuuuaauu

SEQ ID NO: 958715 - RNA, 22 nt, Human
aaaagguaguugccaaauaagg

SEQ ID NO: 958716 - RNA, 21 nt, Human
ccucugcucgggcaugcguuu

SEQ ID NO: 958717 - RNA, 22 nt, Human
ccuccugguugcaaugaaaugg

SEQ ID NO: 958718 - RNA, 21 nt, Human
uuccuggcggcagaaacguga

SEQ ID NO: 958719 - RNA, 22 nt, Human
ccucugcugcuguugagcaccg

SEQ ID NO: 958720 - RNA, 22 nt, Human
uagggauggcagcauguagcuu

SEQ ID NO: 958721 - RNA, 22 nt, Human
gucugagcgcuggagcuugugu

SEQ ID NO: 958722 - RNA, 22 nt, Human
acauaaaguacugagagacucu

SEQ ID NO: 958723 - RNA, 22 nt, Human
ggucugaaaauggugaccacca

SEQ ID NO: 958724 - RNA, 17 nt, Human
cuccuggccaccccucu

SEQ ID NO: 958725 - RNA, 22 nt, Human
aauauccagguagaugucuucu

SEQ ID NO: 958726 - RNA, 22 nt, Human
augcaaaugaacauguugcuag

SEQ ID NO: 958727 - RNA, 22 nt, Human
acuugaaaggaagcucuaaaac

SEQ ID NO: 958728 - RNA, 22 nt, Human
uuucacaaacucagggugugug

SEQ ID NO: 958729 - RNA, 18 nt, Human
augcuuugcuuacguuau

SEQ ID NO: 958730 - RNA, 22 nt, Human
ccuccuggggugaaggauggga

SEQ ID NO: 958731 - RNA, 22 nt, Human
acucugcuauugcagugcaaaa

SEQ ID NO: 958732 - RNA, 22 nt, Human
cuccugaguaguagcauuguca

SEQ ID NO: 958733 - RNA, 22 nt, Human
auucaucaacugauagccauag

SEQ ID NO: 958734 - RNA, 22 nt, Human
augaaagaugauuuaaaguacu

SEQ ID NO: 958735 - RNA, 22 nt, Human
ugaaaaacuuuaauccauaaag

SEQ ID NO: 958736 - RNA, 22 nt, Human
uccuggccaaguuacucucugc

SEQ ID NO: 958737 - RNA, 22 nt, Human
cuuauuagaaagaaaagacaug

SEQ ID NO: 958738 - RNA, 22 nt, Human
cuuuagugguauuuuagcaagu

SEQ ID NO: 958739 - RNA, 22 nt, Human
uuuuacuuaauucuuggucaug

SEQ ID NO: 958740 - RNA, 22 nt, Human
ucacaaaucauuuuaucugugu

SEQ ID NO: 958741 - RNA, 22 nt, Human
aagugccaucauagcauggcug

SEQ ID NO: 958742 - RNA, 22 nt, Human
ccacucugauuuuggcuccacu

SEQ ID NO: 958743 - RNA, 19 nt, Human
cugggccagagcuguccuc

SEQ ID NO: 958744 - RNA, 21 nt, Human
uuuauuuauauaggacacaug

SEQ ID NO: 958745 - RNA, 21 nt, Human
uucagcaagcacucuggacac

SEQ ID NO: 958746 - RNA, 22 nt, Human
acuccugguucccaguugagau

SEQ ID NO: 958747 - RNA, 22 nt, Human
agagucuuuugucaguaauguu

SEQ ID NO: 958748 - RNA, 22 nt, Human
uaggaucucaccauagaaggaa

SEQ ID NO: 958749 - RNA, 22 nt, Human
uauuaggguaaauuugacaugc

SEQ ID NO: 958750 - RNA, 22 nt, Human
uuggccaaaaaagucauuagaa

SEQ ID NO: 958751 - RNA, 22 nt, Human
augcacuacuuggcuuuacuga

SEQ ID NO: 958752 - RNA, 22 nt, Human
aaagacagagcuguaggggaaa

SEQ ID NO: 958753 - RNA, 22 nt, Human
ccuccugguccagcaucucuuu

SEQ ID NO: 958754 - RNA, 22 nt, Human
uccuggccgcuggccccugaga

SEQ ID NO: 958755 - RNA, 22 nt, Human
ucuggccacuaauaggucucac

SEQ ID NO: 958756 - RNA, 22 nt, Human
uuuauagggacaguucuuggag

SEQ ID NO: 958757 - RNA, 22 nt, Human
gcaggagagucugugccagguu

SEQ ID NO: 958758 - RNA, 22 nt, Human
gcuccuggucuggagcuucaag

SEQ ID NO: 958759 - RNA, 22 nt, Human
cacuccuguuccacuaaaugag

SEQ ID NO: 958760 - RNA, 22 nt, Human
aauuaggaaauucagccauuuu

SEQ ID NO: 958761 - RNA, 22 nt, Human
ccuggccacagggcucugcauu

SEQ ID NO: 958762 - RNA, 22 nt, Human
cuccugcgguacuacugugcuu

SEQ ID NO: 958763 - RNA, 22 nt, Human
guuauauaagacaaaucagagu

SEQ ID NO: 958764 - RNA, 20 nt, Human
ucugccacugcacucugccc

SEQ ID NO: 958765 - RNA, 22 nt, Human
cacugucuuuugugaagacaau

SEQ ID NO: 958766 - RNA, 22 nt, Human
guaauaaugguccccaaacacu

SEQ ID NO: 958767 - RNA, 22 nt, Human
auuagggaaggauuuggccuga

SEQ ID NO: 958768 - RNA, 22 nt, Human
uccuggcccucugcaaacgcca

SEQ ID NO: 958769 - RNA, 22 nt, Human
aaagaacaauguggaaucuccu

SEQ ID NO: 958770 - RNA, 22 nt, Human
auggcaagcaagcugaagagau

SEQ ID NO: 958771 - RNA, 22 nt, Human
ucuucaaaaaauauccaucagu

SEQ ID NO: 958772 - RNA, 22 nt, Human
ccuggccauuugaacuucagac

SEQ ID NO: 958773 - RNA, 18 nt, Human
gcacucugacugcagagc

SEQ ID NO: 958774 - RNA, 22 nt, Human
cagagcagucuggagauccagc

SEQ ID NO: 958775 - RNA, 22 nt, Human
gucaucuucgcagagugauuuu

SEQ ID NO: 958776 - RNA, 22 nt, Human
auuaggauguuccuaugcacau

SEQ ID NO: 958777 - RNA, 22 nt, Human
uuuuauuaguggcuagaugggg

SEQ ID NO: 958778 - RNA, 22 nt, Human
auuuauuaagcaucugcuaugu

SEQ ID NO: 958779 - RNA, 22 nt, Human
ucagggaacuacuucucccuau

SEQ ID NO: 958780 - RNA, 22 nt, Human
aggauguugcuauuggcagucu

SEQ ID NO: 958781 - RNA, 22 nt, Human
gaugcaaagcauuuuugugugu

SEQ ID NO: 958782 - RNA, 22 nt, Human
aacauaaauuugaaguggcaaa

SEQ ID NO: 958783 - RNA, 22 nt, Human
aacauuucagcaccugauuccu

SEQ ID NO: 958784 - RNA, 22 nt, Human
cuggccacugguggucauaggc

SEQ ID NO: 958785 - RNA, 22 nt, Human
gcuccuggugcaaaguuucuuc

SEQ ID NO: 958786 - RNA, 22 nt, Human
uuaggcauuggaaggucagcuu

SEQ ID NO: 958787 - RNA, 22 nt, Human
auuggcaaggcugcggugucug

SEQ ID NO: 958788 - RNA, 22 nt, Human
acagggaaguucugcaacagga

SEQ ID NO: 958789 - RNA, 23 nt, Human
gcucugcucuguuucauagacag

SEQ ID NO: 958790 - RNA, 22 nt, Human
uuuuaucugugacaucuggcag

SEQ ID NO: 958791 - RNA, 22 nt, Human
agugaacaaagguagugagcau

SEQ ID NO: 958792 - RNA, 22 nt, Human
uuauuugguugcugacuuggaa

SEQ ID NO: 958793 - RNA, 22 nt, Human
uuugcaaaaugucuuguguuag

SEQ ID NO: 958794 - RNA, 20 nt, Human
ucugccacuuuuucugucac

SEQ ID NO: 958795 - RNA, 22 nt, Human
auuauuagacuuauaugguagu

SEQ ID NO: 958796 - RNA, 22 nt, Human
acauuuaaauaugccuuauauu

SEQ ID NO: 958797 - RNA, 22 nt, Human
uuucacaaaugucuuuaacuug

SEQ ID NO: 958798 - RNA, 22 nt, Human
agcuauguauuuguguguuaaa

SEQ ID NO: 958799 - RNA, 22 nt, Human
uauuggaugauucacuuggcag

SEQ ID NO: 958800 - RNA, 22 nt, Human
uuuauguaauuucauaggugug

SEQ ID NO: 958801 - RNA, 22 nt, Human
ucuggccauggcaagccgagug

SEQ ID NO: 958802 - RNA, 22 nt, Human
ccuggccauagggcccaggaaa

SEQ ID NO: 958803 - RNA, 22 nt, Human
acaaaaaccguggauucagcau

SEQ ID NO: 958804 - RNA, 22 nt, Human
uuucacaacugcuuauuugaga

SEQ ID NO: 958805 - RNA, 22 nt, Human
aauaaaauggucaguuuucuca

SEQ ID NO: 958806 - RNA, 22 nt, Human
cagcugugaauugucuuaucua

SEQ ID NO: 958807 - RNA, 22 nt, Human
uuuuauauugagugagaguucc

SEQ ID NO: 958808 - RNA, 22 nt, Human
uuaaguaagaccuuaugucuug

SEQ ID NO: 958809 - RNA, 19 nt, Human
gucaucuuuuaauaaugug

SEQ ID NO: 958810 - RNA, 22 nt, Human
uaaaugauaauaaugcuagugu

SEQ ID NO: 958811 - RNA, 22 nt, Human
aaagaauacccugggucauaaa

SEQ ID NO: 958812 - RNA, 22 nt, Human
aaaaguaauugcaauuuuguag

SEQ ID NO: 958813 - RNA, 22 nt, Human
ugcugaaaacucaaccauugug

SEQ ID NO: 958814 - RNA, 22 nt, Human
cacucugccugauguuacaugg

SEQ ID NO: 958815 - RNA, 22 nt, Human
aaacuccugcauacucagaagc

SEQ ID NO: 958816 - RNA, 21 nt, Human
uuauugagacauuuguggaaa

SEQ ID NO: 958817 - RNA, 22 nt, Human
uaaauaugcauguauccuuauc

SEQ ID NO: 958818 - RNA, 22 nt, Human
aguguacacuaaaugaauacaa

SEQ ID NO: 958819 - RNA, 22 nt, Human
acauccugaagucagucauuug

SEQ ID NO: 958820 - RNA, 20 nt, Human
uuucacaaugaacaugucuc

SEQ ID NO: 958821 - RNA, 22 nt, Human
gcucugcuggagggaaagagaa

SEQ ID NO: 958822 - RNA, 22 nt, Human
gagcacugauuuauuuuugucu

SEQ ID NO: 958823 - RNA, 22 nt, Human
auggccaagcuuacucuguugu

SEQ ID NO: 958824 - RNA, 20 nt, Human
uguuccaagcuaaugaauga

SEQ ID NO: 958825 - RNA, 22 nt, Human
uaaguuaucggaguguguuuca

SEQ ID NO: 958826 - RNA, 22 nt, Human
guggccaacucaauguuuuuca

SEQ ID NO: 958827 - RNA, 21 nt, Human
cucuuuauauaguaaagauau

SEQ ID NO: 958828 - RNA, 22 nt, Human
ugucuuaauaugugcauucugu

SEQ ID NO: 958829 - RNA, 22 nt, Human
ugagaauaggcauagaaccugg

SEQ ID NO: 958830 - RNA, 20 nt, Human
aggcucugcauuucugagug

SEQ ID NO: 958831 - RNA, 22 nt, Human
ccuccuggugacaaggcaaagc

SEQ ID NO: 958832 - RNA, 22 nt, Human
aaguaugcuaauuaacuagcac

SEQ ID NO: 958833 - RNA, 23 nt, Human
ucugggccacuugucugcacuuc

SEQ ID NO: 958834 - RNA, 23 nt, Human
aacuccugaaucgugagccaucu

SEQ ID NO: 958835 - RNA, 22 nt, Human
gucaucuuccuaguguuaacua

SEQ ID NO: 958836 - RNA, 20 nt, Human
uuggcagcuucaggguacua

SEQ ID NO: 958837 - RNA, 19 nt, Human
ccucugcuccaguuuccuu

SEQ ID NO: 958838 - RNA, 22 nt, Human
gcugauguuuaguugauguuac

SEQ ID NO: 958839 - RNA, 22 nt, Human
uuuaggaugcucuauucugacu

SEQ ID NO: 958840 - RNA, 22 nt, Human
auauauaagcugaugagccaca

SEQ ID NO: 958841 - RNA, 22 nt, Human
aguuuaaaucauguuuuguaac

SEQ ID NO: 958842 - RNA, 22 nt, Human
guuuuauuggaacacagccaug

SEQ ID NO: 958843 - RNA, 22 nt, Human
ucacucuggccucugcagcagu

SEQ ID NO: 958844 - RNA, 22 nt, Human
uuugaauaucacaaacuuucaa

SEQ ID NO: 958845 - RNA, 22 nt, Human
gcucugcugcuuacuagauggu

SEQ ID NO: 958846 - RNA, 22 nt, Human
acuccuggguuccggagauucu

SEQ ID NO: 958847 - RNA, 22 nt, Human
uucaaaacaaucuguuugcauu

SEQ ID NO: 958848 - RNA, 22 nt, Human
uugacaaugcacugugcuaagu

SEQ ID NO: 958849 - RNA, 22 nt, Human
uguuuaauucaccaucauguuc

SEQ ID NO: 958850 - RNA, 21 nt, Human
aacauuucaggauccaaauug

SEQ ID NO: 958851 - RNA, 22 nt, Human
aguuggcauuuuauuuaaguau

SEQ ID NO: 958852 - RNA, 22 nt, Human
aaauguggguaaugggacugga

SEQ ID NO: 958853 - RNA, 22 nt, Human
caacuccuggcuguuaggcaca

SEQ ID NO: 958854 - RNA, 22 nt, Human
ucaaauaaggagucaugaccau

SEQ ID NO: 958855 - RNA, 22 nt, Human
ugaaagcacugauucucaacuc

SEQ ID NO: 958856 - RNA, 22 nt, Human
uggcacaaaucuagucccuggu

SEQ ID NO: 958857 - RNA, 22 nt, Human
ccuggccacccagccuuggcca

SEQ ID NO: 958858 - RNA, 21 nt, Human
acacauuaugagcauagacuc

SEQ ID NO: 958859 - RNA, 22 nt, Human
ucacucuguggcccaggcagug

SEQ ID NO: 958860 - RNA, 22 nt, Human
cuguaaaacugcuuaaguaugc

SEQ ID NO: 958861 - RNA, 22 nt, Human
ugucuuaagaaauugcauuugu

SEQ ID NO: 958862 - RNA, 22 nt, Human
agauaaauuccuaagauuucag

SEQ ID NO: 958863 - RNA, 22 nt, Human
ucuccuggcaugugggucaucu

SEQ ID NO: 958864 - RNA, 22 nt, Human
ccugagccucuugcacgcucag

SEQ ID NO: 958865 - RNA, 22 nt, Human
gcucugcuguggaauccucucc

SEQ ID NO: 958866 - RNA, 22 nt, Human
aguuucaauucuuuucacaaag

SEQ ID NO: 958867 - RNA, 22 nt, Human
cagggaauccauggucauaagg

SEQ ID NO: 958868 - RNA, 22 nt, Human
aacacuuucuuccuugcucagg

SEQ ID NO: 958869 - RNA, 22 nt, Human
cggccaagccggggccccgaag

SEQ ID NO: 958870 - RNA, 22 nt, Human
aauuaggaauaaaugaguacuu

SEQ ID NO: 958871 - RNA, 22 nt, Human
cugguccauucucucccugaag

SEQ ID NO: 958872 - RNA, 22 nt, Human
gcuggccaaaguguaccuggag

SEQ ID NO: 958873 - RNA, 22 nt, Human
uuauuaguguugauauuaggau

SEQ ID NO: 958874 - RNA, 22 nt, Human
uggccaaauuugguguaacuug

SEQ ID NO: 958875 - RNA, 22 nt, Human
uuuuaugugcuggacuggcagu

SEQ ID NO: 958876 - RNA, 22 nt, Human
uucugagccucauucaugaggc

SEQ ID NO: 958877 - RNA, 22 nt, Human
ugcaacauuauuaaacuaagca

SEQ ID NO: 958878 - RNA, 22 nt, Human
agccaugugucuuuauucuguu

SEQ ID NO: 958879 - RNA, 22 nt, Human
augcaaaagacuauuuguugcu

SEQ ID NO: 958880 - RNA, 22 nt, Human
agacaugagaaacccaccagag

SEQ ID NO: 958881 - RNA, 22 nt, Human
aaauaguuguuuggaucaauaa

SEQ ID NO: 958882 - RNA, 22 nt, Human
aaauaguuacuucugcugucuu

SEQ ID NO: 958883 - RNA, 22 nt, Human
guuauaaaaugcacaguuguuu

SEQ ID NO: 958884 - RNA, 22 nt, Human
ucugugccuccguaacacacca

SEQ ID NO: 958885 - RNA, 22 nt, Human
ccuccuggaggcucuaagggag

SEQ ID NO: 958886 - RNA, 20 nt, Human
ccuccuggucaggugugcag

SEQ ID NO: 958887 - RNA, 22 nt, Human
uuucauuauucaugcuaguuau

SEQ ID NO: 958888 - RNA, 23 nt, Human
agacaguggccgagagguacuag

SEQ ID NO: 958889 - RNA, 22 nt, Human
aagucaaaccuugcucacagga

SEQ ID NO: 958890 - RNA, 22 nt, Human
gcuggccagggcugcucgcgga

SEQ ID NO: 958891 - RNA, 22 nt, Human
caccguuugguuuggauuuaca

SEQ ID NO: 958892 - RNA, 22 nt, Human
uccuggcccuguggccugcagu

SEQ ID NO: 958893 - RNA, 23 nt, Human
uuccuggcagguacaacuuuuac

SEQ ID NO: 958894 - RNA, 22 nt, Human
aguuauagaaccagguccucac

SEQ ID NO: 958895 - RNA, 22 nt, Human
ugaggccagucucaucacaggc

SEQ ID NO: 958896 - RNA, 21 nt, Human
uggcagacaggaggagcucac

SEQ ID NO: 958897 - RNA, 22 nt, Human
aaacacaucauucaugucguca

SEQ ID NO: 958898 - RNA, 22 nt, Human
uuaaaaugaauauugauuagca

SEQ ID NO: 958899 - RNA, 22 nt, Human
auuuggcaaauaauuugagggu

SEQ ID NO: 958900 - RNA, 22 nt, Human
uggcagcacuagguacugagcu

SEQ ID NO: 958901 - RNA, 22 nt, Human
gugcaagguacauccuugaugu

SEQ ID NO: 958902 - RNA, 22 nt, Human
ucuauuuacagaaagcagaauu

SEQ ID NO: 958903 - RNA, 22 nt, Human
ucuuggccagguguggugccuc

SEQ ID NO: 958904 - RNA, 22 nt, Human
auuggucaggacuggcaugugg

SEQ ID NO: 958905 - RNA, 22 nt, Human
ucacucuguguuugaacucaag

SEQ ID NO: 958906 - RNA, 22 nt, Human
uacuccugcugauccugccagc

SEQ ID NO: 958907 - RNA, 22 nt, Human
aauucacauauacauuauuccu

SEQ ID NO: 958908 - RNA, 22 nt, Human
auaaacaucuguuucucuucug

SEQ ID NO: 958909 - RNA, 22 nt, Human
agggucugcauuccaacuuggg

SEQ ID NO: 958910 - RNA, 22 nt, Human
uuucauuauaaaaaguuggcuu

SEQ ID NO: 958911 - RNA, 22 nt, Human
ugucaucuuuuuaaagaagaga

SEQ ID NO: 958912 - RNA, 22 nt, Human
cugggccauggaagucucugcc

SEQ ID NO: 958913 - RNA, 22 nt, Human
ucuucaaacugaaaauuuagaa

SEQ ID NO: 958914 - RNA, 22 nt, Human
uuuaugagcaccuuggcccaga

SEQ ID NO: 958915 - RNA, 22 nt, Human
agcuagaauguuccuuuucauu

SEQ ID NO: 958916 - RNA, 22 nt, Human
ucucugcucaggcaccagcccu

SEQ ID NO: 958917 - RNA, 22 nt, Human
uuccuggccucucucugagcag

SEQ ID NO: 958918 - RNA, 22 nt, Human
uacaguauggaaaauguauagu

SEQ ID NO: 958919 - RNA, 22 nt, Human
cucuggccugcagauccaugcu

SEQ ID NO: 958920 - RNA, 22 nt, Human
aggccaaagcaagacccuguaa

SEQ ID NO: 958921 - RNA, 18 nt, Human
acaguaaagaaaggaauu

SEQ ID NO: 958922 - RNA, 22 nt, Human
aacugcuguggccuaguacuua

SEQ ID NO: 958923 - RNA, 22 nt, Human
ccuucuuaaacaucauuuuggc

SEQ ID NO: 958924 - RNA, 22 nt, Human
cauuaaauuccuuguucucaaa

SEQ ID NO: 958925 - RNA, 22 nt, Human
uagaaaugauugguugagcucu

SEQ ID NO: 958926 - RNA, 22 nt, Human
augcaaaaguaacugugauuuu

SEQ ID NO: 958927 - RNA, 19 nt, Human
uuuaggauaaagucuggac

SEQ ID NO: 958928 - RNA, 22 nt, Human
auuacacaggauuugccuuacu

SEQ ID NO: 958929 - RNA, 22 nt, Human
ucacucugucccccauugagau

SEQ ID NO: 958930 - RNA, 22 nt, Human
uuuaggauaacuccaguuuucc

SEQ ID NO: 958931 - RNA, 22 nt, Human
acuuccugaauggggcuaauua

SEQ ID NO: 958932 - RNA, 22 nt, Human
aaaucagucccucuuggaauuu

SEQ ID NO: 958933 - RNA, 22 nt, Human
cuguuuaucccuuuggucagca

SEQ ID NO: 958934 - RNA, 22 nt, Human
guuugaaugcaguaugcauuuu

SEQ ID NO: 958935 - RNA, 22 nt, Human
uccugugccuccaccugcuccg

SEQ ID NO: 958936 - RNA, 22 nt, Human
ucacucuggaguccgcuaccag

SEQ ID NO: 958937 - RNA, 22 nt, Human
aaagucauugcuguuaucaaug

SEQ ID NO: 958938 - RNA, 22 nt, Human
accuguuuuccuaucuagauug

SEQ ID NO: 958939 - RNA, 20 nt, Human
acuccugguaacuuuuguga

SEQ ID NO: 958940 - RNA, 22 nt, Human
uauuagagaaaagauggaugug

SEQ ID NO: 958941 - RNA, 22 nt, Human
uuucaagagggaacugaacaca

SEQ ID NO: 958942 - RNA, 22 nt, Human
ucaaaaaguugaagaguugggg

SEQ ID NO: 958943 - RNA, 22 nt, Human
aacucugccagguuucaggagc

SEQ ID NO: 958944 - RNA, 22 nt, Human
aaagacauuagauuaacguaca

SEQ ID NO: 958945 - RNA, 22 nt, Human
cugugccaucugcacucucguc

SEQ ID NO: 958946 - RNA, 22 nt, Human
auaaagacaugcuuacuugccc

SEQ ID NO: 958947 - RNA, 22 nt, Human
gcuggccauucucuuugagaug

SEQ ID NO: 958948 - RNA, 22 nt, Human
uaccuucaccagcgaauguuug

SEQ ID NO: 958949 - RNA, 22 nt, Human
auagucacucuguuagguguuu

SEQ ID NO: 958950 - RNA, 22 nt, Human
ugaaauguguaauguggaugcc

SEQ ID NO: 958951 - RNA, 22 nt, Human
auuuggcauaggcagaggccca

SEQ ID NO: 958952 - RNA, 22 nt, Human
ccuggccaaucuagggcuguua

SEQ ID NO: 958953 - RNA, 22 nt, Human
caguuuaaccuauccauuaugu

SEQ ID NO: 958954 - RNA, 22 nt, Human
aacuccugaggaaauggucuca

SEQ ID NO: 958955 - RNA, 22 nt, Human
uagcuuuguuagaaugucuuca

SEQ ID NO: 958956 - RNA, 22 nt, Human
ugaauaagaauuauuauaauga

SEQ ID NO: 958957 - RNA, 22 nt, Human
uaggauuuggcuuuagucaggu

SEQ ID NO: 958958 - RNA, 22 nt, Human
uauauuaaccauaggguucuag

SEQ ID NO: 958959 - RNA, 22 nt, Human
uuauuagagugcuuugagaaag

SEQ ID NO: 958960 - RNA, 17 nt, Human
cuccuggcagccucagg

SEQ ID NO: 958961 - RNA, 22 nt, Human
acucugcugucugauggcagga

SEQ ID NO: 958962 - RNA, 22 nt, Human
aaauaacuuaugaucgucuggc

SEQ ID NO: 958963 - RNA, 22 nt, Human
uauucacauucucaggccuggu

SEQ ID NO: 958964 - RNA, 22 nt, Human
aaacagaaauuuccucaugcuc

SEQ ID NO: 958965 - RNA, 22 nt, Human
augcacuaugaugagcuagucu

SEQ ID NO: 958966 - RNA, 22 nt, Human
agucauguguucaucuuucauu

SEQ ID NO: 958967 - RNA, 22 nt, Human
uuuaggauauuaauguucagag

SEQ ID NO: 958968 - RNA, 22 nt, Human
aggaucuugcuguagaggauag

SEQ ID NO: 958969 - RNA, 22 nt, Human
uaaauacuuuuacuccacugau

SEQ ID NO: 958970 - RNA, 22 nt, Human
gccaugaggaacuguaagacaa

SEQ ID NO: 958971 - RNA, 22 nt, Human
ucuccuggauagauacuaucca

SEQ ID NO: 958972 - RNA, 19 nt, Human
auuagcaugcuugaggaug

SEQ ID NO: 958973 - RNA, 22 nt, Human
guacacauugucuguuuacuuc

SEQ ID NO: 958974 - RNA, 22 nt, Human
auucacaaauaacaggugcaga

SEQ ID NO: 958975 - RNA, 22 nt, Human
ucuuguuacaguuuauuacaug

SEQ ID NO: 958976 - RNA, 22 nt, Human
guaauguguuuugaaaaacagu

SEQ ID NO: 958977 - RNA, 22 nt, Human
uuguuaguuuauauaauguagu

SEQ ID NO: 958978 - RNA, 22 nt, Human
gcuccuggcaggcagugugugu

SEQ ID NO: 958979 - RNA, 22 nt, Human
uaaaccuugguagcaucuugcu

SEQ ID NO: 958980 - RNA, 22 nt, Human
cuguuuauuacacuggauagca

SEQ ID NO: 958981 - RNA, 22 nt, Human
caaaaguaauuaugguuuuugc

SEQ ID NO: 958982 - RNA, 20 nt, Human
ugaaauaaggaguuguccuu

SEQ ID NO: 958983 - RNA, 22 nt, Human
acacauaagaaacuacaaagag

SEQ ID NO: 958984 - RNA, 22 nt, Human
ucucuggcagggauaucuggcu

SEQ ID NO: 958985 - RNA, 22 nt, Human
gaaauauuguacuggagauguu

SEQ ID NO: 958986 - RNA, 22 nt, Human
ucuccugggaggacaaggaagg

SEQ ID NO: 958987 - RNA, 22 nt, Human
aggauauuugcuuaagauagcu

SEQ ID NO: 958988 - RNA, 22 nt, Human
aggcauguauaugugcacaugu

SEQ ID NO: 958989 - RNA, 22 nt, Human
ucuccugguacccuuccuagca

SEQ ID NO: 958990 - RNA, 22 nt, Human
gagaaggaguagcugaccuggg

SEQ ID NO: 958991 - RNA, 22 nt, Human
ugcucccagggacucuggcugg

SEQ ID NO: 958992 - RNA, 22 nt, Human
uauuaugagguauuuggacuuu

SEQ ID NO: 958993 - RNA, 22 nt, Human
cuugaaaugacaggagcacauc

SEQ ID NO: 958994 - RNA, 22 nt, Human
auuaggcaauucugggcaucuc

SEQ ID NO: 958995 - RNA, 20 nt, Human
cugggccauccuuuuacaau

SEQ ID NO: 958996 - RNA, 22 nt, Human
acauuucuuucuauucaguagc

SEQ ID NO: 958997 - RNA, 22 nt, Human
uggcaacaccuggaagacaugg

SEQ ID NO: 958998 - RNA, 22 nt, Human
uggcagcaccagcaguguccuu

SEQ ID NO: 958999 - RNA, 22 nt, Human
uuuauuauccaguguugucaug

SEQ ID NO: 959000 - RNA, 22 nt, Human
uauuuaauaaaacuauggcaug

SEQ ID NO: 959001 - RNA, 16 nt, Human
aggccaaaaaggggca

SEQ ID NO: 959002 - RNA, 22 nt, Human
uuccuggcaccaccacuucuag

SEQ ID NO: 959003 - RNA, 22 nt, Human
uggcaccagcaccuagaugggg

SEQ ID NO: 959004 - RNA, 22 nt, Human
uaggaugacacagcaaguauag

SEQ ID NO: 959005 - RNA, 21 nt, Human
auucugaguugucagucuuca

SEQ ID NO: 959006 - RNA, 22 nt, Human
cuggccuagcucucugcuugaa

SEQ ID NO: 959007 - RNA, 22 nt, Human
cuauuagguuggugcaaaagua

SEQ ID NO: 959008 - RNA, 22 nt, Human
ucuccuggguaaaaggguugau

SEQ ID NO: 959009 - RNA, 22 nt, Human
cuccacagcucaggcucagagu

SEQ ID NO: 959010 - RNA, 15 nt, Human
ucacucuggaaggga

SEQ ID NO: 959011 - RNA, 23 nt, Human
uacuuaggaauggggacggcaag

SEQ ID NO: 959012 - RNA, 22 nt, Human
caacugagcaguagcgucugga

SEQ ID NO: 959013 - RNA, 22 nt, Human
gggccaaggggagcuggaaggg

SEQ ID NO: 959014 - RNA, 22 nt, Human
gggaggaggaauguuuugugua

SEQ ID NO: 959015 - RNA, 22 nt, Human
uuagagaugucccaaaaugaag

SEQ ID NO: 959016 - RNA, 22 nt, Human
caacccaaaagcguuuccauuu

SEQ ID NO: 959017 - RNA, 20 nt, Human
auggccaaccugcuuaugac

SEQ ID NO: 959018 - RNA, 22 nt, Human
uauucacagguucuggggauca

SEQ ID NO: 959019 - RNA, 22 nt, Human
uuuuaauucaaagugaauagug

SEQ ID NO: 959020 - RNA, 22 nt, Human
guggccaaaaggaagaagguua

SEQ ID NO: 959021 - RNA, 22 nt, Human
uagcacugaaucacaugcugcu

SEQ ID NO: 959022 - RNA, 22 nt, Human
uauugaggauugaggaaagcac

SEQ ID NO: 959023 - RNA, 22 nt, Human
guggccaagaggggacuggaua

SEQ ID NO: 959024 - RNA, 22 nt, Human
aaagucauuguaauauaugcua

SEQ ID NO: 959025 - RNA, 22 nt, Human
cugggccaaaagaaguguucuu

SEQ ID NO: 959026 - RNA, 22 nt, Human
uuacuggcugggccugagggcu

SEQ ID NO: 959027 - RNA, 22 nt, Human
ucacaaagggagggauagcugg

SEQ ID NO: 959028 - RNA, 22 nt, Human
cuaagccacucaaaucuugugg

SEQ ID NO: 959029 - RNA, 22 nt, Human
uugcuucagagggagacacuuu

SEQ ID NO: 959030 - RNA, 22 nt, Human
aaagauuaaaucaaauugguca

SEQ ID NO: 959031 - RNA, 22 nt, Human
gaguuuaaaacgcuuguauuua

SEQ ID NO: 959032 - RNA, 22 nt, Human
aaauauuauugcuuaaggggag

SEQ ID NO: 959033 - RNA, 22 nt, Human
cugagccagcgggcucacuuuu

SEQ ID NO: 959034 - RNA, 22 nt, Human
aaugauguuuuuaaagaacaua

SEQ ID NO: 959035 - RNA, 22 nt, Human
agacauuuauugaacaccuagc

SEQ ID NO: 959036 - RNA, 21 nt, Human
ccuggccaaucugauaggguu

SEQ ID NO: 959037 - RNA, 22 nt, Human
aaauauaguaaaugcauaguuc

SEQ ID NO: 959038 - RNA, 22 nt, Human
cuccugugggucaccaauaggc

SEQ ID NO: 959039 - RNA, 22 nt, Human
ugucaucuucaucauaaguaaa

SEQ ID NO: 959040 - RNA, 19 nt, Human
aggucuaaucauaagacaa

SEQ ID NO: 959041 - RNA, 22 nt, Human
ucugagccaccugccagugcug

SEQ ID NO: 959042 - RNA, 22 nt, Human
aaaugaugcucacagauuagug

SEQ ID NO: 959043 - RNA, 21 nt, Human
ucuuggccuaaguucacugaa

SEQ ID NO: 959044 - RNA, 22 nt, Human
uaaaacuagugguugggacuaa

SEQ ID NO: 959045 - RNA, 20 nt, Human
ccagucucuaucagaaauaa

SEQ ID NO: 959046 - RNA, 22 nt, Human
aacucacuuuguggcuucugaa

SEQ ID NO: 959047 - RNA, 22 nt, Human
uacucugccccagccaauaaug

SEQ ID NO: 959048 - RNA, 22 nt, Human
acaaacagcuaacauauguuaa

SEQ ID NO: 959049 - RNA, 22 nt, Human
aaagauaugucuccaaagagau

SEQ ID NO: 959050 - RNA, 22 nt, Human
aggauguucgggucacauagcc

SEQ ID NO: 959051 - RNA, 22 nt, Human
ccuggccaggcauggagucaca

SEQ ID NO: 959052 - RNA, 22 nt, Human
auuauuaggacuacugggguug

SEQ ID NO: 959053 - RNA, 22 nt, Human
uauuagcgcuuacugaguugcc

SEQ ID NO: 959054 - RNA, 22 nt, Human
caaaaguaauugcaguuuuugc

SEQ ID NO: 959055 - RNA, 22 nt, Human
cuucacaauucuaacagggcaa

SEQ ID NO: 959056 - RNA, 22 nt, Human
aggauuuuagauaagacagcaa

SEQ ID NO: 959057 - RNA, 22 nt, Human
uggcaaacuggaggaagcccug

SEQ ID NO: 959058 - RNA, 22 nt, Human
uaguuuaauggucaacuaauga

SEQ ID NO: 959059 - RNA, 22 nt, Human
uuuauuagauuaucaaagaggu

SEQ ID NO: 959060 - RNA, 22 nt, Human
gagccaggggucagcuccgagg

SEQ ID NO: 959061 - RNA, 22 nt, Human
gaggaaggucccaucagaauuu

SEQ ID NO: 959062 - RNA, 22 nt, Human
ccuccuggaaaaauucccuggc

SEQ ID NO: 959063 - RNA, 22 nt, Human
ugucaucuuggucuggaauaag

SEQ ID NO: 959064 - RNA, 22 nt, Human
gcagggaaggggcaugcuggag

SEQ ID NO: 959065 - RNA, 22 nt, Human
aauucacaggagguauuugucc

SEQ ID NO: 959066 - RNA, 22 nt, Human
cuuaauaaaugguagcuguuau

SEQ ID NO: 959067 - RNA, 22 nt, Human
ucugccaccuucauccuccacu

SEQ ID NO: 959068 - RNA, 22 nt, Human
auauuaggugcucaauacaugc

SEQ ID NO: 959069 - RNA, 19 nt, Human
cuuauuagagugagagcuu

SEQ ID NO: 959070 - RNA, 22 nt, Human
guuaggauauggugaaauggag

SEQ ID NO: 959071 - RNA, 23 nt, Human
cuucacaaucaaaaucaguucug

SEQ ID NO: 959072 - RNA, 22 nt, Human
aauaauguacauacauauuucg

SEQ ID NO: 959073 - RNA, 22 nt, Human
agcugaaagugcuuugaggacu

SEQ ID NO: 959074 - RNA, 20 nt, Human
uccuggccuucucgggcagu

SEQ ID NO: 959075 - RNA, 18 nt, Human
uuuaugagcugugggacc

SEQ ID NO: 959076 - RNA, 22 nt, Human
uauuagguaaaggacuugcagg

SEQ ID NO: 959077 - RNA, 22 nt, Human
uggccacaugcgucugugaggc

SEQ ID NO: 959078 - RNA, 22 nt, Human
uauauuaaagugcuuugcagug

SEQ ID NO: 959079 - RNA, 22 nt, Human
uuuauuuggcaucucugccaag

SEQ ID NO: 959080 - RNA, 22 nt, Human
aauaagauugacacaaguaccu

SEQ ID NO: 959081 - RNA, 22 nt, Human
auguuuaaucggcugccuuucc

SEQ ID NO: 959082 - RNA, 22 nt, Human
cuuucacacacauacauuugga

SEQ ID NO: 959083 - RNA, 22 nt, Human
uaugcauuuuauagugcaaagc

SEQ ID NO: 959084 - RNA, 22 nt, Human
uaacuaacuaguguucaaaaua

SEQ ID NO: 959085 - RNA, 22 nt, Human
aaaaguauuuauggcuauguaa

SEQ ID NO: 959086 - RNA, 22 nt, Human
guucacaauuuuuacugauugg

SEQ ID NO: 959087 - RNA, 20 nt, Human
auguaaaauuauaaggcuga

SEQ ID NO: 959088 - RNA, 22 nt, Human
uccuggccuugcgucuugggag

SEQ ID NO: 959089 - RNA, 22 nt, Human
gaaaaguacacagcccaaacau

SEQ ID NO: 959090 - RNA, 22 nt, Human
uuggccaagacucauguccuau

SEQ ID NO: 959091 - RNA, 22 nt, Human
ucugagccaauuucugugucca

SEQ ID NO: 959092 - RNA, 22 nt, Human
cugagggugcuauucuugccuu

SEQ ID NO: 959093 - RNA, 22 nt, Human
ugaaacaggaaguaaacagaca

SEQ ID NO: 959094 - RNA, 22 nt, Human
auauuaggcaaggagauuauuu

SEQ ID NO: 959095 - RNA, 22 nt, Human
gcuagaaaucgacuucagaauu

SEQ ID NO: 959096 - RNA, 22 nt, Human
uaguuaggguucugcagagaca

SEQ ID NO: 959097 - RNA, 22 nt, Human
cugccuugguuucuagcagggc

SEQ ID NO: 959098 - RNA, 22 nt, Human
gaauuacauuguuagccuuccu

SEQ ID NO: 959099 - RNA, 22 nt, Human
auuuauuauugugguuacuucu

SEQ ID NO: 959100 - RNA, 22 nt, Human
uuuaauguucaucucaaaggau

SEQ ID NO: 959101 - RNA, 22 nt, Human
aaacucaaauuaaacuagcuua

SEQ ID NO: 959102 - RNA, 22 nt, Human
aaguuuguuguacauguuagua

SEQ ID NO: 959103 - RNA, 22 nt, Human
ggccaaaugaaggcaaugggac

SEQ ID NO: 959104 - RNA, 22 nt, Human
ucacucuguguuucccugggac

SEQ ID NO: 959105 - RNA, 22 nt, Human
auuagguuagugugcaagagaa

SEQ ID NO: 959106 - RNA, 22 nt, Human
auuauuagauucuuaauuguaa

SEQ ID NO: 959107 - RNA, 22 nt, Human
uucuuaggacuaguauagcaug

SEQ ID NO: 959108 - RNA, 17 nt, Human
auuagguuuugucauga

SEQ ID NO: 959109 - RNA, 22 nt, Human
ucuuuuaaaagcccugcugucu

SEQ ID NO: 959110 - RNA, 22 nt, Human
auguuuaagaaagucuuccaua

SEQ ID NO: 959111 - RNA, 18 nt, Human
ugucaucuguuuaaaacc

SEQ ID NO: 959112 - RNA, 19 nt, Human
ugcuagaaauucugugacu

SEQ ID NO: 959113 - RNA, 22 nt, Human
aaaucaguaaauguucauuaac

SEQ ID NO: 959114 - RNA, 22 nt, Human
uggcaacauggacaggucugcc

SEQ ID NO: 959115 - RNA, 22 nt, Human
ucacucuguuuuacucacuguu

SEQ ID NO: 959116 - RNA, 22 nt, Human
ucugagccacagauguccuguu

SEQ ID NO: 959117 - RNA, 22 nt, Human
acuuugaaacuaaaauucauua

SEQ ID NO: 959118 - RNA, 22 nt, Human
auguggcauucuuggucauuuc

SEQ ID NO: 959119 - RNA, 21 nt, Human
gauguuggaggcuggggucug

SEQ ID NO: 959120 - RNA, 22 nt, Human
uuucacaaugcaauccuacuuc

SEQ ID NO: 959121 - RNA, 22 nt, Human
ugcauguggaccccuggugccu

SEQ ID NO: 959122 - RNA, 22 nt, Human
gcucugcuaauauuguaguacc

SEQ ID NO: 959123 - RNA, 22 nt, Human
uugcaaauuauuuuagucccuu

SEQ ID NO: 959124 - RNA, 22 nt, Human
auuuauuaccucggaguuucug

SEQ ID NO: 959125 - RNA, 22 nt, Human
acaugaaaccugagucuaacuc

SEQ ID NO: 959126 - RNA, 22 nt, Human
uggucaaauuuagucucuggaa

SEQ ID NO: 959127 - RNA, 22 nt, Human
uucagcaaugacagccuauaua

SEQ ID NO: 959128 - RNA, 22 nt, Human
auacauacauguacacauaaau

SEQ ID NO: 959129 - RNA, 22 nt, Human
aaacccugcccuucccaagaug

SEQ ID NO: 959130 - RNA, 22 nt, Human
uuccuggcaugaaaaauaucac

SEQ ID NO: 959131 - RNA, 22 nt, Human
cuucaugcugauauccucgaug

SEQ ID NO: 959132 - RNA, 22 nt, Human
ggaagugaggaauuagguuuau

SEQ ID NO: 959133 - RNA, 22 nt, Human
uuagugauuacuacauagauga

SEQ ID NO: 959134 - RNA, 23 nt, Human
uucuuauuuacuuuggaaucucc

SEQ ID NO: 959135 - RNA, 22 nt, Human
uauuuauucauucagcaagcau

SEQ ID NO: 959136 - RNA, 22 nt, Human
aaaaagcuuaaaugagcaguuc

SEQ ID NO: 959137 - RNA, 18 nt, Human
uuaauguggcuuacuaug

SEQ ID NO: 959138 - RNA, 22 nt, Human
aacauuucauuggaagcuaugu

SEQ ID NO: 959139 - RNA, 22 nt, Human
acagacauucagcuaagucuau

SEQ ID NO: 959140 - RNA, 22 nt, Human
ucuuuauuuuaugcuugugcaa

SEQ ID NO: 959141 - RNA, 22 nt, Human
cagacaggaauucuggcguggu

SEQ ID NO: 959142 - RNA, 22 nt, Human
aaugauggucauggcaacuuuu

SEQ ID NO: 959143 - RNA, 22 nt, Human
aaacaccaagagcuagcuauua

SEQ ID NO: 959144 - RNA, 22 nt, Human
guggccaagagauaaaauugug

SEQ ID NO: 959145 - RNA, 22 nt, Human
uuggccaaagcucaccagugcu

SEQ ID NO: 959146 - RNA, 22 nt, Human
guuccaguaugauuccacccau

SEQ ID NO: 959147 - RNA, 22 nt, Human
auaaaacuuauuagaauugugu

SEQ ID NO: 959148 - RNA, 22 nt, Human
uuuuauugucaaugaagacaga

SEQ ID NO: 959149 - RNA, 22 nt, Human
ucauaaaaauagacucuaaagu

SEQ ID NO: 959150 - RNA, 22 nt, Human
cugagccuguguuucucuggca

SEQ ID NO: 959151 - RNA, 21 nt, Human
cuggccgaccccucugugcuc

SEQ ID NO: 959152 - RNA, 18 nt, Human
gcuccuggagucugacuc

SEQ ID NO: 959153 - RNA, 22 nt, Human
cagcugcaguucaaugcuugcu

SEQ ID NO: 959154 - RNA, 22 nt, Human
uucugagcugcaacacuaacau

SEQ ID NO: 959155 - RNA, 18 nt, Human
uuaaggauaagcagacua

SEQ ID NO: 959156 - RNA, 22 nt, Human
ggccacaacuugcuccuagccc

SEQ ID NO: 959157 - RNA, 22 nt, Human
caccuuuugugucugcguuugu

SEQ ID NO: 959158 - RNA, 22 nt, Human
uagagcugggcagugcucugag

SEQ ID NO: 959159 - RNA, 22 nt, Human
uuggccaaccagaacggagguc

SEQ ID NO: 959160 - RNA, 22 nt, Human
uccugucuaaagaccugcaggc

SEQ ID NO: 959161 - RNA, 22 nt, Human
aauucacaaaaguuagauccau

SEQ ID NO: 959162 - RNA, 22 nt, Human
uaugucacauuguaacagugug

SEQ ID NO: 959163 - RNA, 22 nt, Human
ccuguuuagugaggugaggagu

SEQ ID NO: 959164 - RNA, 22 nt, Human
auagaguccaaaguaugaauau

SEQ ID NO: 959165 - RNA, 22 nt, Human
ggucugaguagagggcuggcga

SEQ ID NO: 959166 - RNA, 22 nt, Human
aauuucaaguggcaucuuugau

SEQ ID NO: 959167 - RNA, 22 nt, Human
ucauugaaugcucugcagguug

SEQ ID NO: 959168 - RNA, 22 nt, Human
ccuccuggcccugggccuggaa

SEQ ID NO: 959169 - RNA, 22 nt, Human
gcucugcuggaaguucucugga

SEQ ID NO: 959170 - RNA, 22 nt, Human
ggcaacauucuccagauccuuu

SEQ ID NO: 959171 - RNA, 22 nt, Human
aaaugaguuuccucaauguccu

SEQ ID NO: 959172 - RNA, 22 nt, Human
cugggccagcaacugcaaugga

SEQ ID NO: 959173 - RNA, 19 nt, Human
ugaggccaaggucacagau

SEQ ID NO: 959174 - RNA, 23 nt, Human
agggcacugaagcuggaauuggg

SEQ ID NO: 959175 - RNA, 22 nt, Human
uuuaauugauucacagucugua

SEQ ID NO: 959176 - RNA, 22 nt, Human
ugaagggggagauauaugugug

SEQ ID NO: 959177 - RNA, 22 nt, Human
uuaaaugaugcauaucauuuag

SEQ ID NO: 959178 - RNA, 22 nt, Human
uuaauaaacaggugcagcugaa

SEQ ID NO: 959179 - RNA, 22 nt, Human
uccuggccuccguucucugcau

SEQ ID NO: 959180 - RNA, 22 nt, Human
aggauuucugugccuggaaaau

SEQ ID NO: 959181 - RNA, 22 nt, Human
agaaaugacacacaugagacau

SEQ ID NO: 959182 - RNA, 22 nt, Human
gcuggccagugucccagggauc

SEQ ID NO: 959183 - RNA, 22 nt, Human
agaaauguggaggaacagggcu

SEQ ID NO: 959184 - RNA, 22 nt, Human
uaggaugaaaauccagcuuaua

SEQ ID NO: 959185 - RNA, 22 nt, Human
uaacuccaucucugugucugcu

SEQ ID NO: 959186 - RNA, 22 nt, Human
cuccugggagucuuccuggaug

SEQ ID NO: 959187 - RNA, 22 nt, Human
cacaugugugcugaggacugug

SEQ ID NO: 959188 - RNA, 22 nt, Human
ugaauauguuccucacaaguuc

SEQ ID NO: 959189 - RNA, 22 nt, Human
cuggccaaugccuggggaauag

SEQ ID NO: 959190 - RNA, 22 nt, Human
acuggccaggcgaaccacacug

SEQ ID NO: 959191 - RNA, 23 nt, Human
ccagucucuuuccaaaaucacau

SEQ ID NO: 959192 - RNA, 21 nt, Human
cauuucaugauuauagaaaug

SEQ ID NO: 959193 - RNA, 23 nt, Human
acagaaaguucugcuggacagag

SEQ ID NO: 959194 - RNA, 22 nt, Human
uggaagagacacuuacauucag

SEQ ID NO: 959195 - RNA, 22 nt, Human
guucacaagcuggguuucugca

SEQ ID NO: 959196 - RNA, 22 nt, Human
ccuggccagaggcgugccugug

SEQ ID NO: 959197 - RNA, 22 nt, Human
uccaagggaaacugcacuucua

SEQ ID NO: 959198 - RNA, 22 nt, Human
uugaaauauggauugaccuuga

SEQ ID NO: 959199 - RNA, 21 nt, Human
auuuggcaaaggcgaugcaca

SEQ ID NO: 959200 - RNA, 20 nt, Human
acugggcauaccuguccugu

SEQ ID NO: 959201 - RNA, 22 nt, Human
uaggcaauauuagacuuugucu

SEQ ID NO: 959202 - RNA, 22 nt, Human
cuggcacaugcucccugagugg

SEQ ID NO: 959203 - RNA, 22 nt, Human
augugcuaaacucaacaaaucu

SEQ ID NO: 959204 - RNA, 22 nt, Human
uuggccaagucacugguuaaug

SEQ ID NO: 959205 - RNA, 22 nt, Human
ugcugaaagucccaaaucucau

SEQ ID NO: 959206 - RNA, 22 nt, Human
aauguacaauaagacaaagagg

SEQ ID NO: 959207 - RNA, 22 nt, Human
acgcuuuuacuauuuugagcuc

SEQ ID NO: 959208 - RNA, 22 nt, Human
auucacaaugauacauaagcga

SEQ ID NO: 959209 - RNA, 22 nt, Human
cucugcuaagcaugaacaauua

SEQ ID NO: 959210 - RNA, 22 nt, Human
uggccaaaguagaaaauaauag

SEQ ID NO: 959211 - RNA, 18 nt, Human
uggcagcaggaagccauu

SEQ ID NO: 959212 - RNA, 22 nt, Human
gcaaaacagucgaugccuccca

SEQ ID NO: 959213 - RNA, 22 nt, Human
cagggucuuggcgccaucaccc

SEQ ID NO: 959214 - RNA, 21 nt, Human
agggaaagaaaaugagcuaau

SEQ ID NO: 959215 - RNA, 22 nt, Human
auucugagacaauugccgucag

SEQ ID NO: 959216 - RNA, 23 nt, Human
agucuuaauacagcucuuuucua

SEQ ID NO: 959217 - RNA, 22 nt, Human
ugucaucugauauuacuuauag

SEQ ID NO: 959218 - RNA, 22 nt, Human
uuuaggaucucucuuguuacau

SEQ ID NO: 959219 - RNA, 22 nt, Human
aaacaugagcacuugcuucaua

SEQ ID NO: 959220 - RNA, 22 nt, Human
aaauaugaaugauaagaguuau

SEQ ID NO: 959221 - RNA, 22 nt, Human
auauaauaguuucauaaaggcu

SEQ ID NO: 959222 - RNA, 22 nt, Human
gaccuuuuuacuguguacgcug

SEQ ID NO: 959223 - RNA, 22 nt, Human
uucaucaauguguuuaauaaug

SEQ ID NO: 959224 - RNA, 22 nt, Human
cacucugcagcugaagggcugg

SEQ ID NO: 959225 - RNA, 22 nt, Human
ugcuuccuauccacacaaugcc

SEQ ID NO: 959226 - RNA, 22 nt, Human
augaggcaaucaugguccaguu

SEQ ID NO: 959227 - RNA, 22 nt, Human
aauaagauugacacaaguaccu

SEQ ID NO: 959228 - RNA, 23 nt, Human
cuuugccacccagagccugacag

SEQ ID NO: 959229 - RNA, 22 nt, Human
caggagcccagaguccucagcu

SEQ ID NO: 959230 - RNA, 22 nt, Human
uacuuugucaugcuaagaguga

SEQ ID NO: 959231 - RNA, 22 nt, Human
uucuuaagcguaugauaaugaa

SEQ ID NO: 959232 - RNA, 22 nt, Human
ugucacauaggcaaaauguuuu

SEQ ID NO: 959233 - RNA, 22 nt, Human
ccuguuuagugaggugaggagu

SEQ ID NO: 959234 - RNA, 22 nt, Human
guccucugcccaggucaagguu

SEQ ID NO: 959235 - RNA, 22 nt, Human
uuagucuucuuccuuauauguu

SEQ ID NO: 959236 - RNA, 22 nt, Human
agcaggcuccuuccuucucugg

SEQ ID NO: 959237 - RNA, 22 nt, Human
ggucaggggcugcucuacagag

SEQ ID NO: 959238 - RNA, 22 nt, Human
ucuccuggccuuuagguuaagg

SEQ ID NO: 959239 - RNA, 22 nt, Human
cacugaaauauuaauaucuuau

SEQ ID NO: 959240 - RNA, 22 nt, Human
gccccucccagucaggagcacu

SEQ ID NO: 959241 - RNA, 19 nt, Human
gcagccaggugcucuaccu

SEQ ID NO: 959242 - RNA, 22 nt, Human
uguguuuuacaaauucucuuaa

SEQ ID NO: 959243 - RNA, 22 nt, Human
uuuuauucuaaguaugauggga

SEQ ID NO: 959244 - RNA, 20 nt, Human
ugugcccaauguccagguuc

SEQ ID NO: 959245 - RNA, 22 nt, Human
auuugaauggcuuaacacaacg

SEQ ID NO: 959246 - RNA, 22 nt, Human
auggaaagugcauggaagucau

SEQ ID NO: 959247 - RNA, 22 nt, Human
cugccgaguacagccauagaaa

SEQ ID NO: 959248 - RNA, 22 nt, Human
caggccagugugcuucccaggc

SEQ ID NO: 959249 - RNA, 22 nt, Human
augaaggauggcuggcugcccu

SEQ ID NO: 959250 - RNA, 22 nt, Human
uaagaacaucuguccccagauu

SEQ ID NO: 959251 - RNA, 22 nt, Human
caccucuuugauuugaggcaag

SEQ ID NO: 959252 - RNA, 20 nt, Human
aauauaauucucugaauuua

SEQ ID NO: 959253 - RNA, 22 nt, Human
gcugucuguggugucagcugac

SEQ ID NO: 959254 - RNA, 22 nt, Human
uucuacaugguugcucagaggg

SEQ ID NO: 959255 - RNA, 22 nt, Human
ccucugcagcagagagccagag

SEQ ID NO: 959256 - RNA, 22 nt, Human
aacagaaaucauuuagggcucu

SEQ ID NO: 959257 - RNA, 22 nt, Human
agagugaaguaauuguuaggau

SEQ ID NO: 959258 - RNA, 21 nt, Human
cucacaggaugcaguguuacu

SEQ ID NO: 959259 - RNA, 21 nt, Human
uuugcauuuuacaugugggga

SEQ ID NO: 959260 - RNA, 19 nt, Human
auuuacugccuaaaaucuc

SEQ ID NO: 959261 - RNA, 23 nt, Human
gggagccaggaccucgcgcccca

SEQ ID NO: 959262 - RNA, 22 nt, Human
cagcccugcacgcugccuccgc

SEQ ID NO: 959263 - RNA, 21 nt, Human
agcagaggcagaauguaugca

SEQ ID NO: 959264 - RNA, 22 nt, Human
ucugucugagggagugacauuu

SEQ ID NO: 959265 - RNA, 22 nt, Human
agggugcauguuugcaagagug

SEQ ID NO: 959266 - RNA, 23 nt, Human
gguggcaggaguggaugcugagc

SEQ ID NO: 959267 - RNA, 22 nt, Human
cccagcaguaaccaguggaaau

SEQ ID NO: 959268 - RNA, 22 nt, Human
guaucuuuugguggaaaaauaa

SEQ ID NO: 959269 - RNA, 22 nt, Human
ugaggcaguauuuuagugacuu

SEQ ID NO: 959270 - RNA, 22 nt, Human
agucccagcucagaaccacuag

SEQ ID NO: 959271 - RNA, 22 nt, Human
ucucagggagggcgagucagcg

SEQ ID NO: 959272 - RNA, 22 nt, Human
ugcuggccgugagcucucggga

SEQ ID NO: 959273 - RNA, 22 nt, Human
gugcauauaugugcagcaucaa

SEQ ID NO: 959274 - RNA, 22 nt, Human
ugcaguggaaagacucagacuu

SEQ ID NO: 959275 - RNA, 22 nt, Human
caggauggagggagggcuguua

SEQ ID NO: 959276 - RNA, 22 nt, Human
acacuuuuagcuaugaguuaau

SEQ ID NO: 959277 - RNA, 22 nt, Human
ugaggcagguggauuacaaggu

SEQ ID NO: 959278 - RNA, 22 nt, Human
ccuguggcacaugcagggauuc

SEQ ID NO: 959279 - RNA, 22 nt, Human
aagcaauaagccagauuuggau

SEQ ID NO: 959280 - RNA, 22 nt, Human
aaguaaaauguuuccuuuauua

SEQ ID NO: 959281 - RNA, 22 nt, Human
agagccaggugcugcuguuuga

SEQ ID NO: 959282 - RNA, 22 nt, Human
gcagaagucagaccaucugaau

SEQ ID NO: 959283 - RNA, 19 nt, Human
uuugaaagaguuuuauugg

SEQ ID NO: 959284 - RNA, 22 nt, Human
ucuggaguccagauccauuugg

SEQ ID NO: 959285 - RNA, 22 nt, Human
cugcugagcaucagggcugccc

SEQ ID NO: 959286 - RNA, 22 nt, Human
ucccagagcucugacaccagcu

SEQ ID NO: 959287 - RNA, 22 nt, Human
uguaugcaccauuguauuaccu

SEQ ID NO: 959288 - RNA, 22 nt, Human
cugcagaggucuugcugauggu

SEQ ID NO: 959289 - RNA, 22 nt, Human
caggcugggaacgccacccgcu

SEQ ID NO: 959290 - RNA, 22 nt, Human
agguggccggugccagccgggc

SEQ ID NO: 959291 - RNA, 22 nt, Human
ccagggcaaaugagaucauagc

SEQ ID NO: 959292 - RNA, 22 nt, Human
agaacagaagggaggaaggccu

SEQ ID NO: 959293 - RNA, 22 nt, Human
aaauuauucucauguguuucuu

SEQ ID NO: 959294 - RNA, 22 nt, Human
agaggccaucugcucugugggg

SEQ ID NO: 959295 - RNA, 22 nt, Human
ugggaggaaugucacugagcca

SEQ ID NO: 959296 - RNA, 22 nt, Human
cugcagcugucucuacugggca

SEQ ID NO: 959297 - RNA, 22 nt, Human
gaggcccugguaggucagagug

SEQ ID NO: 959298 - RNA, 23 nt, Human
ggccuguguuuugucugaaguac

SEQ ID NO: 959299 - RNA, 22 nt, Human
gaagaggaugacaggagccggu

SEQ ID NO: 959300 - RNA, 22 nt, Human
cuuuggcaugguccucacuaua

SEQ ID NO: 959301 - RNA, 22 nt, Human
uuuuggucagguuggucucgaa

SEQ ID NO: 959302 - RNA, 22 nt, Human
ccucagaugucuuaaggcacug

SEQ ID NO: 959303 - RNA, 19 nt, Human
ggcugucuggcguguggau

SEQ ID NO: 959304 - RNA, 22 nt, Human
accagcucagaagccagaaaga

SEQ ID NO: 959305 - RNA, 22 nt, Human
agccagcugccuuucacaucug

SEQ ID NO: 959306 - RNA, 22 nt, Human
ucuccugguuuguuaaauaauu

SEQ ID NO: 959307 - RNA, 22 nt, Human
gcucccagcauugcuucccagg

SEQ ID NO: 959308 - RNA, 22 nt, Human
caggaucuuuuaaugucuccag

SEQ ID NO: 959309 - RNA, 18 nt, Human
gggcauggaugcagcauc

SEQ ID NO: 959310 - RNA, 22 nt, Human
ggcagcuuucucacccaugacc

SEQ ID NO: 959311 - RNA, 22 nt, Human
uuggaaagcaagcuggacauac

SEQ ID NO: 959312 - RNA, 22 nt, Human
ggcagggaagcuggcaucacgg

SEQ ID NO: 959313 - RNA, 23 nt, Human
agccucuuuucuccugcccugca

SEQ ID NO: 959314 - RNA, 22 nt, Human
cuucuggggauggagcccagaa

SEQ ID NO: 959315 - RNA, 22 nt, Human
cugggaggcggagguuguagug

SEQ ID NO: 959316 - RNA, 22 nt, Human
uugggagcuggaagcaaggccu

SEQ ID NO: 959317 - RNA, 22 nt, Human
uuuccucauuuaucugcuggga

SEQ ID NO: 959318 - RNA, 22 nt, Human
aggcucagagagcuguguccau

SEQ ID NO: 959319 - RNA, 22 nt, Human
augggaggcagcagagcccagc

SEQ ID NO: 959320 - RNA, 22 nt, Human
ugaaggcuguuggauggggaag

SEQ ID NO: 959321 - RNA, 22 nt, Human
acaucugaggagaccagccucu

SEQ ID NO: 959322 - RNA, 22 nt, Human
cauuuguuaaccaguguggauu

SEQ ID NO: 959323 - RNA, 20 nt, Human
ugacucugcaaccgucucuc

SEQ ID NO: 959324 - RNA, 22 nt, Human
ucucagagauuuauggaaaacu

SEQ ID NO: 959325 - RNA, 22 nt, Human
acaggggaauuuacugucauua

SEQ ID NO: 959326 - RNA, 19 nt, Human
ucaggacugacuugaaguc

SEQ ID NO: 959327 - RNA, 20 nt, Human
aggcugggguguuuugccca

SEQ ID NO: 959328 - RNA, 22 nt, Human
cagucccagacccagaaggugg

SEQ ID NO: 959329 - RNA, 22 nt, Human
auuucuuccucugucaguaacu

SEQ ID NO: 959330 - RNA, 22 nt, Human
gaaauuauugcuagagacugca

SEQ ID NO: 959331 - RNA, 22 nt, Human
ucucagagccuaacuaaccuaa

SEQ ID NO: 959332 - RNA, 22 nt, Human
auccaggcuggguguggcuacu

SEQ ID NO: 959333 - RNA, 22 nt, Human
acaggcuuacaggcugcaagua

SEQ ID NO: 959334 - RNA, 22 nt, Human
ucagucucagcaccuagucaca

SEQ ID NO: 959335 - RNA, 22 nt, Human
ccugcugggccugagcaaugag

SEQ ID NO: 959336 - RNA, 22 nt, Human
gaagagcugcaguuuccugggc

SEQ ID NO: 959337 - RNA, 22 nt, Human
caguacuuuucaaccaguauga

SEQ ID NO: 959338 - RNA, 22 nt, Human
ccagggcuccauugcucauccu

SEQ ID NO: 959339 - RNA, 19 nt, Human
uggcuccugccugccuucu

SEQ ID NO: 959340 - RNA, 22 nt, Human
gaccauuucuaggaaucagacu

SEQ ID NO: 959341 - RNA, 22 nt, Human
aggcaagcauugggaacagggc

SEQ ID NO: 959342 - RNA, 22 nt, Human
uguaugcagcaaaacaauuagu

SEQ ID NO: 959343 - RNA, 23 nt, Human
gccugccugaccugugcaaaguc

SEQ ID NO: 959344 - RNA, 22 nt, Human
ggagccagcagggugacacuga

SEQ ID NO: 959345 - RNA, 22 nt, Human
cagggcaugaggugugcuucuc

SEQ ID NO: 959346 - RNA, 22 nt, Human
uucuucucagggucccacaugg

SEQ ID NO: 959347 - RNA, 22 nt, Human
uggucaggcugcucugcggcgu

SEQ ID NO: 959348 - RNA, 22 nt, Human
uuuguuuugaacuagcucagaa

SEQ ID NO: 959349 - RNA, 22 nt, Human
ucucagggcagcaaggaagcau

SEQ ID NO: 959350 - RNA, 22 nt, Human
acucucugguauuggcaaguuu

SEQ ID NO: 959351 - RNA, 22 nt, Human
uggggcugugagacuacaggau

SEQ ID NO: 959352 - RNA, 22 nt, Human
aggacccugagcgggcaugccg

SEQ ID NO: 959353 - RNA, 22 nt, Human
uccauuuucuaaguaucacuua

SEQ ID NO: 959354 - RNA, 22 nt, Human
ugaagcaacuggacaaguuggc

SEQ ID NO: 959355 - RNA, 21 nt, Human
agcagagugcuuugacuuugu

SEQ ID NO: 959356 - RNA, 22 nt, Human
gggucuggacggcugcaggaag

SEQ ID NO: 959357 - RNA, 22 nt, Human
ugugucccuuggaaccucagcu

SEQ ID NO: 959358 - RNA, 22 nt, Human
ucagacuucuacuuugcagagc

SEQ ID NO: 959359 - RNA, 22 nt, Human
aacaguaucuuuuaucagaaau

SEQ ID NO: 959360 - RNA, 22 nt, Human
agggaguguaaauggugcucag

SEQ ID NO: 959361 - RNA, 22 nt, Human
cagagugaaaacugagcucaaa

SEQ ID NO: 959362 - RNA, 22 nt, Human
uucuccaacacaagcaugaugu

SEQ ID NO: 959363 - RNA, 22 nt, Human
uccaggcaggguuaaggguccu

SEQ ID NO: 959364 - RNA, 22 nt, Human
gguggggucacgacagagggaa

SEQ ID NO: 959365 - RNA, 22 nt, Human
gcucaagggaugggagugggug

SEQ ID NO: 959366 - RNA, 23 nt, Human
ccaggccucucagagggugugcc

SEQ ID NO: 959367 - RNA, 23 nt, Human
ugucauugugacuacagaaccag

SEQ ID NO: 959368 - RNA, 22 nt, Human
gccuugggggugaaagaggcua

SEQ ID NO: 959369 - RNA, 22 nt, Human
gggcugcugccaaucacagccu

SEQ ID NO: 959370 - RNA, 22 nt, Human
uuuaacagaugugaaauuuuca

SEQ ID NO: 959371 - RNA, 22 nt, Human
gcucagagaaucagcagacacc

SEQ ID NO: 959372 - RNA, 22 nt, Human
gcaggaugaaggcagaggcuga

SEQ ID NO: 959373 - RNA, 23 nt, Human
gggcagcuuaagcuuguuuuucu

SEQ ID NO: 959374 - RNA, 22 nt, Human
uaaaguucuggugagagguaag

SEQ ID NO: 959375 - RNA, 22 nt, Human
ggccugcacagagguggcucua

SEQ ID NO: 959376 - RNA, 22 nt, Human
ccucacugcuauguguuugcuc

SEQ ID NO: 959377 - RNA, 22 nt, Human
gaggaaaagagacagguuauug

SEQ ID NO: 959378 - RNA, 22 nt, Human
agccaggcugcaguuggcuggc

SEQ ID NO: 959379 - RNA, 22 nt, Human
auucuucagcaggggacacuau

SEQ ID NO: 959380 - RNA, 23 nt, Human
aaccuagacuacuuacuaugugg

SEQ ID NO: 959381 - RNA, 22 nt, Human
ucaauucaacacaugcacauug

SEQ ID NO: 959382 - RNA, 22 nt, Human
ccugugcccucagccuggcucu

SEQ ID NO: 959383 - RNA, 19 nt, Human
aggaaagguggccuuagca

SEQ ID NO: 959384 - RNA, 23 nt, Human
gaggcacucaggaaaugugagug

SEQ ID NO: 959385 - RNA, 22 nt, Human
gacaaaggaucagagguuggga

SEQ ID NO: 959386 - RNA, 22 nt, Human
acauaacaaucauaggacauag

SEQ ID NO: 959387 - RNA, 22 nt, Human
uaagacaauucuucagucacaa

SEQ ID NO: 959388 - RNA, 22 nt, Human
auucacaaguucuagggauuag

SEQ ID NO: 959389 - RNA, 22 nt, Human
uagggauggcagcauguagcuu

SEQ ID NO: 959390 - RNA, 22 nt, Human
aagccuuccugagugcaaggcc

SEQ ID NO: 959391 - RNA, 22 nt, Human
auuuucuauucugcugguuuag

SEQ ID NO: 959392 - RNA, 22 nt, Human
cagaggcagccgggggagaacg

SEQ ID NO: 959393 - RNA, 21 nt, Human
agagucugcauuucugacaag

SEQ ID NO: 959394 - RNA, 22 nt, Human
agccucugcacgggcacgggug

SEQ ID NO: 959395 - RNA, 22 nt, Human
agguggagaagagaugggcagu

SEQ ID NO: 959396 - RNA, 22 nt, Human
cucaugauguagcgaaugagaa

SEQ ID NO: 959397 - RNA, 22 nt, Human
uugucuuaaauggauggacaau

SEQ ID NO: 959398 - RNA, 22 nt, Human
guuguauucuucaauaucagag

SEQ ID NO: 959399 - RNA, 22 nt, Human
gagagggccgggggccagcucc

SEQ ID NO: 959400 - RNA, 22 nt, Human
cugcagagcauaaaucugaaua

SEQ ID NO: 959401 - RNA, 22 nt, Human
ucacacguccuugcuacuccuc

SEQ ID NO: 959402 - RNA, 22 nt, Human
uacucugcaggauggacuaugg

SEQ ID NO: 959403 - RNA, 22 nt, Human
caggacaguuugcuuugcccug

SEQ ID NO: 959404 - RNA, 22 nt, Human
aauucacaaaaguuagauccau

SEQ ID NO: 959405 - RNA, 22 nt, Human
cugcaggauucucccaguugga

SEQ ID NO: 959406 - RNA, 22 nt, Human
caggaagagaacauggaggcug

SEQ ID NO: 959407 - RNA, 22 nt, Human
auguaguauuuggaaauguaaa

SEQ ID NO: 959408 - RNA, 22 nt, Human
ugugucagagguagagauggca

SEQ ID NO: 959409 - RNA, 21 nt, Human
aaucauacaaaacaugucagg

SEQ ID NO: 959410 - RNA, 22 nt, Human
ugaaggccagcagagugaaggc

SEQ ID NO: 959411 - RNA, 23 nt, Human
uggccaagauaaucucaguuuuc

SEQ ID NO: 959412 - RNA, 22 nt, Human
cuuagcaugugguguccuugua

SEQ ID NO: 959413 - RNA, 22 nt, Human
agugugucugaucacuugugag

SEQ ID NO: 959414 - RNA, 22 nt, Human
guccucugggcuuugagcaguc

SEQ ID NO: 959415 - RNA, 22 nt, Human
ucauuucuauugcuacugucug

SEQ ID NO: 959416 - RNA, 22 nt, Human
gcccaggauucuuucuuccuua

SEQ ID NO: 959417 - RNA, 20 nt, Human
uggcccuguuuucuccaggc

SEQ ID NO: 959418 - RNA, 22 nt, Human
ccucagaggugaacaucagugc

SEQ ID NO: 959419 - RNA, 22 nt, Human
aaugcacauguuguaauaaaua

SEQ ID NO: 959420 - RNA, 22 nt, Human
caccuagcagaacagaggugcu

SEQ ID NO: 959421 - RNA, 22 nt, Human
aggugcagcugguggagucugg

SEQ ID NO: 959422 - RNA, 22 nt, Human
agcugauuccacuuuuucccca

SEQ ID NO: 959423 - RNA, 22 nt, Human
uggggcuggcuauugucucccu

SEQ ID NO: 959424 - RNA, 22 nt, Human
uggccauagcucagcuccuuca

SEQ ID NO: 959425 - RNA, 22 nt, Human
ugggcagauguggcucuccuug

SEQ ID NO: 959426 - RNA, 20 nt, Human
gcauccauauaugcaugugu

SEQ ID NO: 959427 - RNA, 22 nt, Human
ucauugcaguagggagagaccc

SEQ ID NO: 959428 - RNA, 22 nt, Human
ccugggaggcggagguugcagg

SEQ ID NO: 959429 - RNA, 22 nt, Human
auguccuucuccucuuaccugc

SEQ ID NO: 959430 - RNA, 22 nt, Human
aaaugcuguguuuuaacauaga

SEQ ID NO: 959431 - RNA, 19 nt, Human
uccuuugaauaucaguuga

SEQ ID NO: 959432 - RNA, 22 nt, Human
ucgugcuccuggugaggcucug

SEQ ID NO: 959433 - RNA, 22 nt, Human
cugcaguguucuggaaugcauu

SEQ ID NO: 959434 - RNA, 22 nt, Human
cugggugaguugaugaaggaga

SEQ ID NO: 959435 - RNA, 21 nt, Human
uccaggaguggcugggcaggg

SEQ ID NO: 959436 - RNA, 23 nt, Human
gggagccauggguggucauggag

SEQ ID NO: 959437 - RNA, 22 nt, Human
cagagccaugguaugggcuugu

SEQ ID NO: 959438 - RNA, 19 nt, Human
aggcagaggcuuggcuagc

SEQ ID NO: 959439 - RNA, 22 nt, Human
aggcagcccacaggacacagga

SEQ ID NO: 959440 - RNA, 22 nt, Human
gauuucuuugcaagcuguguuc

SEQ ID NO: 959441 - RNA, 22 nt, Human
uauuuccauguuagaacuaagu

SEQ ID NO: 959442 - RNA, 22 nt, Human
cauuuuaaaugauuuaagccaa

SEQ ID NO: 959443 - RNA, 22 nt, Human
gggacuggaacuacuggugcag

SEQ ID NO: 959444 - RNA, 22 nt, Human
aucaguuuuuauuaauguagcu

SEQ ID NO: 959445 - RNA, 22 nt, Human
aguguuccugcucucaggaagc

SEQ ID NO: 959446 - RNA, 22 nt, Human
ucagaagaagagacuccacagc

SEQ ID NO: 959447 - RNA, 22 nt, Human
uuguugguggaauugaugcuag

SEQ ID NO: 959448 - RNA, 22 nt, Human
ucacagaaauaagauaguuauu

SEQ ID NO: 959449 - RNA, 22 nt, Human
ucuguucaucucaugggagaau

SEQ ID NO: 959450 - RNA, 22 nt, Human
ggcagcauauauucagugggca

SEQ ID NO: 959451 - RNA, 22 nt, Human
gugagcagaacagguggcuucu

SEQ ID NO: 959452 - RNA, 22 nt, Human
aucuggcucaccuggguaaaua

SEQ ID NO: 959453 - RNA, 22 nt, Human
caggaaccuaaagagacauuac

SEQ ID NO: 959454 - RNA, 22 nt, Human
ucaggauguccaaaauccagcc

SEQ ID NO: 959455 - RNA, 22 nt, Human
uuuuuaagcuccuuugauguca

SEQ ID NO: 959456 - RNA, 22 nt, Human
cugaaugaggaaaagagugagg

SEQ ID NO: 959457 - RNA, 22 nt, Human
cuguguggacugguugaggccc

SEQ ID NO: 959458 - RNA, 22 nt, Human
gggcucugguacuuccuggcuc

SEQ ID NO: 959459 - RNA, 22 nt, Human
aucuuucuauuucuaaaaacua

SEQ ID NO: 959460 - RNA, 18 nt, Human
agucucagcggaggagua

SEQ ID NO: 959461 - RNA, 22 nt, Human
ccaggagagcaggcgugcagcu

SEQ ID NO: 959462 - RNA, 22 nt, Human
uuuaguagugacagauucuggg

SEQ ID NO: 959463 - RNA, 22 nt, Human
aucaggaucugggagccugaaa

SEQ ID NO: 959464 - RNA, 22 nt, Human
gaggcugucuguuagccuggga

SEQ ID NO: 959465 - RNA, 22 nt, Human
augcaaaaguaacugugauuuu

SEQ ID NO: 959466 - RNA, 22 nt, Human
cccagcucucugcucuuagccu

SEQ ID NO: 959467 - RNA, 22 nt, Human
auugacaagacaauggcucuua

SEQ ID NO: 959468 - RNA, 19 nt, Human
aagcagcccuggcaagagc

SEQ ID NO: 959469 - RNA, 22 nt, Human
aaaaaugugaccacaggguguu

SEQ ID NO: 959470 - RNA, 22 nt, Human
cccaggaggcggagguuguggu

SEQ ID NO: 959471 - RNA, 18 nt, Human
gcuccugguuggaaagaa

SEQ ID NO: 959472 - RNA, 22 nt, Human
ccugggaggcggagguugcagu

SEQ ID NO: 959473 - RNA, 22 nt, Human
uagggcagccacccaggcugcu

SEQ ID NO: 959474 - RNA, 22 nt, Human
aauaagaaagagucagcuucag

SEQ ID NO: 959475 - RNA, 20 nt, Human
ccuuuauuauuuguaugaug

SEQ ID NO: 959476 - RNA, 22 nt, Human
ccugagaccaaguugcagccau

SEQ ID NO: 959477 - RNA, 22 nt, Human
cccaggaguuggaggcuacggu

SEQ ID NO: 959478 - RNA, 22 nt, Human
gcuggguggaucggaggcucug

SEQ ID NO: 959479 - RNA, 22 nt, Human
agcuugccucuuaaucaccuca

SEQ ID NO: 959480 - RNA, 20 nt, Human
agaggaggauuauuuuauuc

SEQ ID NO: 959481 - RNA, 22 nt, Human
ggaggccuugaggccaggagcu

SEQ ID NO: 959482 - RNA, 22 nt, Human
cagggaguuuuuguuccucuag

SEQ ID NO: 959483 - RNA, 22 nt, Human
gcucccugcacucugcagcccu

SEQ ID NO: 959484 - RNA, 22 nt, Human
cagggcaguuugugccuaugag

SEQ ID NO: 959485 - RNA, 21 nt, Human
gcagcagaggcuugacagaca

SEQ ID NO: 959486 - RNA, 22 nt, Human
cuggggaggcagggcugccccu

SEQ ID NO: 959487 - RNA, 18 nt, Human
aauuuccauaugaauugc

SEQ ID NO: 959488 - RNA, 22 nt, Human
aggcagcugcccucuccuuccu

SEQ ID NO: 959489 - RNA, 22 nt, Human
gggccucucccuucucacgcau

SEQ ID NO: 959490 - RNA, 22 nt, Human
caaaugcuggcccugcuacuua

SEQ ID NO: 959491 - RNA, 22 nt, Human
acuggccaggcagcaguagcuu

SEQ ID NO: 959492 - RNA, 20 nt, Human
guaaaauauggucuuugggu

SEQ ID NO: 959493 - RNA, 17 nt, Human
ucuguccagggagugug

SEQ ID NO: 959494 - RNA, 22 nt, Human
cuuccuggccauugccauggca

SEQ ID NO: 959495 - RNA, 22 nt, Human
aucugccuccaaguccaugugu

SEQ ID NO: 959496 - RNA, 22 nt, Human
cccuggagcuagucugagcaga

SEQ ID NO: 959497 - RNA, 22 nt, Human
agcaccuguugcacuucauaau

SEQ ID NO: 959498 - RNA, 21 nt, Human
ugcagcugacacugguaugcc

SEQ ID NO: 959499 - RNA, 22 nt, Human
ggcagggugccuggcuccuguu

SEQ ID NO: 959500 - RNA, 21 nt, Human
uuaagagcuuagcaguaggcc

SEQ ID NO: 959501 - RNA, 22 nt, Human
agaauaaaucaaauguccugag

SEQ ID NO: 959502 - RNA, 22 nt, Human
aaguucaagcucugccuaaaau

SEQ ID NO: 959503 - RNA, 22 nt, Human
ccggggacuuaaagugaaggaa

SEQ ID NO: 959504 - RNA, 22 nt, Human
ccucccaccauuuagagagagc

SEQ ID NO: 959505 - RNA, 22 nt, Human
ucuggccuuaucuguccaagcc

SEQ ID NO: 959506 - RNA, 22 nt, Human
agauuuagugguggaauuuugg

SEQ ID NO: 959507 - RNA, 22 nt, Human
aggcagcugaggucuggcgccc

SEQ ID NO: 959508 - RNA, 16 nt, Human
agcagggcgggaagga

SEQ ID NO: 959509 - RNA, 22 nt, Human
ggggaaggauugaguugaccca

SEQ ID NO: 959510 - RNA, 16 nt, Human
ccacagggcaaggggc

SEQ ID NO: 959511 - RNA, 22 nt, Human
augcccugcaucaagugacacu

SEQ ID NO: 959512 - RNA, 23 nt, Human
ccagucucuuuccaaaaucacau

SEQ ID NO: 959513 - RNA, 22 nt, Human
uggcagagcaaaaagauagaau

SEQ ID NO: 959514 - RNA, 22 nt, Human
aggcagcuuaagcccuggccca

SEQ ID NO: 959515 - RNA, 22 nt, Human
uaaccuuuguucaauguaagau

SEQ ID NO: 959516 - RNA, 22 nt, Human
ugccagcuccgaggagcugcag

SEQ ID NO: 959517 - RNA, 22 nt, Human
agaaauguggaggaacagggcu

SEQ ID NO: 959518 - RNA, 22 nt, Human
aagccucaccuuuuagaagcua

SEQ ID NO: 959519 - RNA, 22 nt, Human
aggcaagggggcgccaccuucc

SEQ ID NO: 959520 - RNA, 22 nt, Human
aguauuucugcucaugaaagag

SEQ ID NO: 959521 - RNA, 21 nt, Human
aggcagcucaggcccagagag

SEQ ID NO: 959522 - RNA, 22 nt, Human
ccaugcaauuucuguaaaacca

SEQ ID NO: 959523 - RNA, 22 nt, Human
acuguguggaccacucugaggc

SEQ ID NO: 959524 - RNA, 22 nt, Human
gggagcugguuccugcccucca

SEQ ID NO: 959525 - RNA, 21 nt, Human
agugaaauugcaucagaggga

SEQ ID NO: 959526 - RNA, 22 nt, Human
ugcaguggaagagguggagauc

SEQ ID NO: 959527 - RNA, 22 nt, Human
uggcagcugguacagugggucu

SEQ ID NO: 959528 - RNA, 22 nt, Human
cucaaggaaagucuggagaaga

SEQ ID NO: 959529 - RNA, 22 nt, Human
accagagaaaacacagcaggcu

SEQ ID NO: 959530 - RNA, 22 nt, Human
gccaagaguuuccagcugcaag

SEQ ID NO: 959531 - RNA, 22 nt, Human
cuagaaauauuuuacagucaag

SEQ ID NO: 959532 - RNA, 22 nt, Human
cagcccugagagaaccaucuau

SEQ ID NO: 959533 - RNA, 22 nt, Human
ucugguuagccaauaaugccaa

SEQ ID NO: 959534 - RNA, 23 nt, Human
agccuucaggcaaugucaguaga

SEQ ID NO: 959535 - RNA, 22 nt, Human
accuugggcaaguuggaaacug

SEQ ID NO: 959536 - RNA, 22 nt, Human
gggccucugugcagaggggccu

SEQ ID NO: 959537 - RNA, 22 nt, Human
uuuuuugucuugaagaaauggu

SEQ ID NO: 959538 - RNA, 22 nt, Human
ugaggcaggacuugcauaaagu

SEQ ID NO: 959539 - RNA, 22 nt, Human
cauuuauuggcauguaguaggu

SEQ ID NO: 959540 - RNA, 22 nt, Human
aggaggccgcugaugggcuccc

SEQ ID NO: 959541 - RNA, 22 nt, Human
gaggguccccaugcagagcuca

SEQ ID NO: 959542 - RNA, 22 nt, Human
agggccuggugaccuggguccu

SEQ ID NO: 959543 - RNA, 22 nt, Human
ugggcagaggacagggaagauc

SEQ ID NO: 959544 - RNA, 22 nt, Human
uccccagccgugaaggagagga

SEQ ID NO: 959545 - RNA, 20 nt, Human
auuucaguguuugcaauuuc

SEQ ID NO: 959546 - RNA, 22 nt, Human
ugggcugcugucugcacaugcu

SEQ ID NO: 959547 - RNA, 22 nt, Human
acuguacuguguauuguagaau

SEQ ID NO: 959548 - RNA, 22 nt, Human
ucccaggaaggauucggcauuu

SEQ ID NO: 959549 - RNA, 22 nt, Human
uggcucagaaggcugccuucac

SEQ ID NO: 959550 - RNA, 22 nt, Human
ucauugcagcuucagguguuca

SEQ ID NO: 959551 - RNA, 22 nt, Human
auauucacugagcauaaagcca

SEQ ID NO: 959552 - RNA, 22 nt, Human
ccuuucagaugggcauggaccg

SEQ ID NO: 959553 - RNA, 22 nt, Human
ucuggcuccuggcuccacugcc

SEQ ID NO: 959554 - RNA, 22 nt, Human
aucauuuaaaacaagucucuau

SEQ ID NO: 959555 - RNA, 22 nt, Human
auugaaagcacaaagaacaagu

SEQ ID NO: 959556 - RNA, 22 nt, Human
agagugauccuaauugauuugg

SEQ ID NO: 959557 - RNA, 22 nt, Human
aacaugaaguuuucuauaguga

SEQ ID NO: 959558 - RNA, 15 nt, Human
cccaggaguucgaga

SEQ ID NO: 959559 - RNA, 22 nt, Human
cacagggccacuuucccaguaa

SEQ ID NO: 959560 - RNA, 22 nt, Human
auguagcaugaggcacugugcc

SEQ ID NO: 959561 - RNA, 22 nt, Human
ucugccugccagucugguccuc

SEQ ID NO: 959562 - RNA, 22 nt, Human
uaagcugugggagauuggcaua

SEQ ID NO: 959563 - RNA, 22 nt, Human
gucucagaccacccucuuuggc

SEQ ID NO: 959564 - RNA, 22 nt, Human
gagagugaugaaugguuaaaca

SEQ ID NO: 959565 - RNA, 22 nt, Human
gcugccacuuggucaugucaug

SEQ ID NO: 959566 - RNA, 22 nt, Human
agcucccagaguccucugccca

SEQ ID NO: 959567 - RNA, 22 nt, Human
cuggguggcgucuggggccagu

SEQ ID NO: 959568 - RNA, 22 nt, Human
auuauuagauucuuaauuguaa

SEQ ID NO: 959569 - RNA, 19 nt, Human
ggagccuggagcacgugcc

SEQ ID NO: 959570 - RNA, 22 nt, Human
cucuuaguaaugccaugaagca

SEQ ID NO: 959571 - RNA, 22 nt, Human
ggaugcaggggcagcagagccu

SEQ ID NO: 959572 - RNA, 22 nt, Human
ucugcagauuuaucagcagcug

SEQ ID NO: 959573 - RNA, 22 nt, Human
ucugccacuagugguuaccuua

SEQ ID NO: 959574 - RNA, 22 nt, Human
ugggaccaagucauuucuuuag

SEQ ID NO: 959575 - RNA, 20 nt, Human
ccagcugagccaaggggaga

SEQ ID NO: 959576 - RNA, 22 nt, Human
gccagagcaugcacugccugca

SEQ ID NO: 959577 - RNA, 22 nt, Human
cagggcugugcccaucuucccc

SEQ ID NO: 959578 - RNA, 17 nt, Human
acacagggagagggagc

SEQ ID NO: 959579 - RNA, 22 nt, Human
ccugcccagcuucaccucaggc

SEQ ID NO: 959580 - RNA, 22 nt, Human
cugccucuccccagaguggccc

SEQ ID NO: 959581 - RNA, 22 nt, Human
gucugucuguuguugagaagca

SEQ ID NO: 959582 - RNA, 22 nt, Human
accagagcuuacaugcuagaaa

SEQ ID NO: 959583 - RNA, 22 nt, Human
ugaggcagcauucuucaagaca

SEQ ID NO: 959584 - RNA, 22 nt, Human
uggcagcuacagacagagguga

SEQ ID NO: 959585 - RNA, 22 nt, Human
ugggacacccucacgccugcac

SEQ ID NO: 959586 - RNA, 22 nt, Human
caguagcacuagauaugugugg

SEQ ID NO: 959587 - RNA, 23 nt, Human
gcucugcucuguuucauagacag

SEQ ID NO: 959588 - RNA, 22 nt, Human
gccuggagagcacugugcgcuu

SEQ ID NO: 959589 - RNA, 22 nt, Human
uucuuuggggaauauucugguu

SEQ ID NO: 959590 - RNA, 22 nt, Human
auuucauugaaguuaauucuuc

SEQ ID NO: 959591 - RNA, 22 nt, Human
uggcagcugucagaaugcaaau

SEQ ID NO: 959592 - RNA, 22 nt, Human
cuggcucucugagauauugagu

SEQ ID NO: 959593 - RNA, 20 nt, Human
gcucccugguagaaauguuu

SEQ ID NO: 959594 - RNA, 22 nt, Human
uauucaaaguaccuucauugcc

SEQ ID NO: 959595 - RNA, 22 nt, Human
uuccagauuucuacacaagacc

SEQ ID NO: 959596 - RNA, 22 nt, Human
ugaaggccacuuccugugagcu

SEQ ID NO: 959597 - RNA, 18 nt, Human
ucuuuggacaacuacugg

SEQ ID NO: 959598 - RNA, 22 nt, Human
uggcagucggacuucuaucuca

SEQ ID NO: 959599 - RNA, 22 nt, Human
aguaucaaggaucuccagcacc

SEQ ID NO: 959600 - RNA, 22 nt, Human
ccagaggugccacagaaagagc

SEQ ID NO: 959601 - RNA, 22 nt, Human
auccagggauaaaaguaagguu

SEQ ID NO: 959602 - RNA, 20 nt, Human
ggcacuggaagcacacagga

SEQ ID NO: 959603 - RNA, 22 nt, Human
gccugggaaaugguggggucag

SEQ ID NO: 959604 - RNA, 22 nt, Human
aaaaaguuucaacugccaacuc

SEQ ID NO: 959605 - RNA, 22 nt, Human
aauuugcaugaugagaacaaua

SEQ ID NO: 959606 - RNA, 20 nt, Human
uucacagaggacucagguca

SEQ ID NO: 959607 - RNA, 22 nt, Human
cuucucucccuggcacucagac

SEQ ID NO: 959608 - RNA, 22 nt, Human
uggcagaguucgcuccuauuca

SEQ ID NO: 959609 - RNA, 22 nt, Human
cugacuguaauucuguucuuaa

SEQ ID NO: 959610 - RNA, 22 nt, Human
uucagaauauuuguuuuacaug

SEQ ID NO: 959611 - RNA, 22 nt, Human
uuagucaauagugaauauagag

SEQ ID NO: 959612 - RNA, 22 nt, Human
cugguccauucucucccugaag

SEQ ID NO: 959613 - RNA, 22 nt, Human
aaacaaugaaauucauucuuca

SEQ ID NO: 959614 - RNA, 22 nt, Human
agccucugcuuaugcaaaggua

SEQ ID NO: 959615 - RNA, 22 nt, Human
aauagguagccagauauauaaa

SEQ ID NO: 959616 - RNA, 22 nt, Human
aucagcaagauugugucuugua

SEQ ID NO: 959617 - RNA, 22 nt, Human
ccugggaggcagagguugcagu

SEQ ID NO: 959618 - RNA, 22 nt, Human
gcagcugagcgugaggaagagu

SEQ ID NO: 959619 - RNA, 22 nt, Human
ucaagagacaggacguguuuca

SEQ ID NO: 959620 - RNA, 22 nt, Human
aagcagcuggaagaguaagaug

SEQ ID NO: 959621 - RNA, 20 nt, Human
ccucucugaagaggucaucu

SEQ ID NO: 959622 - RNA, 22 nt, Human
uucuuaagcaguuuggcauguu

SEQ ID NO: 959623 - RNA, 22 nt, Human
agagucugaggcagcugcagcc

SEQ ID NO: 959624 - RNA, 22 nt, Human
ggcaggcaaugaggaugggaag

SEQ ID NO: 959625 - RNA, 22 nt, Human
gcugagcucccagcaguaucug

SEQ ID NO: 959626 - RNA, 22 nt, Human
caguucuuauuuggccaguguc

SEQ ID NO: 959627 - RNA, 22 nt, Human
uguucucacuggaugcuucaca

SEQ ID NO: 959628 - RNA, 22 nt, Human
ugagccagauaagggcucacgc

SEQ ID NO: 959629 - RNA, 22 nt, Human
uaucuaaaggauuuaauuuagu

SEQ ID NO: 959630 - RNA, 22 nt, Human
uaagaacauuuucggaaagaua

SEQ ID NO: 959631 - RNA, 20 nt, Human
ugcagggcucugcuucucuc

SEQ ID NO: 959632 - RNA, 23 nt, Human
ugauuaggucuacucuuggcucc

SEQ ID NO: 959633 - RNA, 22 nt, Human
gcaggccugacuguagggggca

SEQ ID NO: 959634 - RNA, 22 nt, Human
ucucuggcagggauaucuggcu

SEQ ID NO: 959635 - RNA, 22 nt, Human
ugcccaggguuucuaagagcag

SEQ ID NO: 959636 - RNA, 22 nt, Human
ucaguggauauuucuguggcug

SEQ ID NO: 959637 - RNA, 22 nt, Human
cugugcuugacagugggaagca

SEQ ID NO: 959638 - RNA, 22 nt, Human
acuaugcucauuguuaauauuu

SEQ ID NO: 959639 - RNA, 22 nt, Human
uccugggcccaggcugccaggg

SEQ ID NO: 959640 - RNA, 23 nt, Human
ggcacugaagcuacaauggugag

SEQ ID NO: 959641 - RNA, 20 nt, Human
gggcaguucaaugccacucu

SEQ ID NO: 959642 - RNA, 22 nt, Human
aucuggcuauuucuggucgggg

SEQ ID NO: 959643 - RNA, 22 nt, Human
gggagcugagggaccucugugg

SEQ ID NO: 959644 - RNA, 22 nt, Human
ugccaggccucaggagucucca

SEQ ID NO: 959645 - RNA, 21 nt, Human
ugcugccauagaccugaggga

SEQ ID NO: 959646 - RNA, 22 nt, Human
cugggccugguagggcuugaaa

SEQ ID NO: 959647 - RNA, 22 nt, Human
ugcaggaacugggagggauagu

SEQ ID NO: 959648 - RNA, 22 nt, Human
ucagcugaguucuagagcacuc

SEQ ID NO: 959649 - RNA, 22 nt, Human
guucuucagucacaucacagaa

SEQ ID NO: 959650 - RNA, 22 nt, Human
ugaccaaaggugguuuauuugg

SEQ ID NO: 959651 - RNA, 22 nt, Human
ugcagcuguaacagaggccuca

SEQ ID NO: 959652 - RNA, 22 nt, Human
agacucaagacugcagaagacg

SEQ ID NO: 959653 - RNA, 22 nt, Human
gcucagagauggggaaugaaaa

SEQ ID NO: 959654 - RNA, 22 nt, Human
uuuucauuguuccucgagcauu

SEQ ID NO: 959655 - RNA, 22 nt, Human
cccaggagaauauuuuuggguc

SEQ ID NO: 959656 - RNA, 22 nt, Human
cucucuucccgugaguguugca

SEQ ID NO: 959657 - RNA, 22 nt, Human
gagcucaggagcaucagaagaa

SEQ ID NO: 959658 - RNA, 22 nt, Human
guccaaauaaguugcaaaauag

SEQ ID NO: 959659 - RNA, 22 nt, Human
aaauauguauggaguucaugaa

SEQ ID NO: 959660 - RNA, 22 nt, Human
ccagaggaggggggucuuucug

SEQ ID NO: 959661 - RNA, 22 nt, Human
aggcccugggcaguucuguagc

SEQ ID NO: 959662 - RNA, 22 nt, Human
aacuagaacgucuaguugcugg

SEQ ID NO: 959663 - RNA, 22 nt, Human
gaagcagcaaguauaggacagg

SEQ ID NO: 959664 - RNA, 22 nt, Human
auuucaguagaaaaucuugauu

SEQ ID NO: 959665 - RNA, 22 nt, Human
uuugaaguucccccauaucaga

SEQ ID NO: 959666 - RNA, 22 nt, Human
agaugcuucaguguuuaauuua

SEQ ID NO: 959667 - RNA, 22 nt, Human
uggcugggccgggccuugugcc

SEQ ID NO: 959668 - RNA, 22 nt, Human
cacagaggaaaggcaguuggua

SEQ ID NO: 959669 - RNA, 23 nt, Human
agccacuucuaucuugcuccugg

SEQ ID NO: 959670 - RNA, 22 nt, Human
ugcaaucucggcacuuugggag

SEQ ID NO: 959671 - RNA, 22 nt, Human
accaucagucauugucaguggg

SEQ ID NO: 959672 - RNA, 22 nt, Human
gucacaggccuggaugaggggc

SEQ ID NO: 959673 - RNA, 22 nt, Human
uucuuaaaacuuauggacaggu

SEQ ID NO: 959674 - RNA, 22 nt, Human
cucuccagccacagaagcugcu

SEQ ID NO: 959675 - RNA, 22 nt, Human
ggcaggcaggagcgugcuuggg

SEQ ID NO: 959676 - RNA, 22 nt, Human
auuauggacguuaauuuuggaa

SEQ ID NO: 959677 - RNA, 22 nt, Human
agcuggugcugaagcucuugag

SEQ ID NO: 959678 - RNA, 22 nt, Human
aagggcagaauagagaagaugg

SEQ ID NO: 959679 - RNA, 22 nt, Human
cuucuugcugggggccucagug

SEQ ID NO: 959680 - RNA, 18 nt, Human
gggcucugauccuucacc

SEQ ID NO: 959681 - RNA, 20 nt, Human
ucauuguguugccaauuccc

SEQ ID NO: 959682 - RNA, 22 nt, Human
uuucuucauagaccuugucuug

SEQ ID NO: 959683 - RNA, 22 nt, Human
cucaggacccgguccagguggg

SEQ ID NO: 959684 - RNA, 22 nt, Human
caguuaaaggcccaauaucugg

SEQ ID NO: 959685 - RNA, 23 nt, Human
uggaaagcggaccuggggcagag

SEQ ID NO: 959686 - RNA, 22 nt, Human
ucuccuggccgggcuguccccu

SEQ ID NO: 959687 - RNA, 22 nt, Human
acacagggcugcgccugacccc

SEQ ID NO: 959688 - RNA, 22 nt, Human
uaacagaauccuguuauugcca

SEQ ID NO: 959689 - RNA, 22 nt, Human
auuggcaguuagugacgaggcu

SEQ ID NO: 959690 - RNA, 22 nt, Human
aaaguguaaaagcauguuaggg

SEQ ID NO: 959691 - RNA, 22 nt, Human
ugggccugaguuugggaacugg

SEQ ID NO: 959692 - RNA, 22 nt, Human
uuccuuguuuguagcucuggga

SEQ ID NO: 959693 - RNA, 22 nt, Human
cuucuuuacuuucuagaaauaa

SEQ ID NO: 959694 - RNA, 22 nt, Human
auuggcagaaacagcagggcca

SEQ ID NO: 959695 - RNA, 22 nt, Human
ucucccaggcugcccuguggac

SEQ ID NO: 959696 - RNA, 22 nt, Human
uuauguuugaguauaugacuca

SEQ ID NO: 959697 - RNA, 18 nt, Human
auuuugaacaaugcugua

SEQ ID NO: 959698 - RNA, 22 nt, Human
aggcccaguagugcugccuuua

SEQ ID NO: 959699 - RNA, 22 nt, Human
caguagcauguaauaaagacag

SEQ ID NO: 959700 - RNA, 22 nt, Human
ugaagcccugugucagcuucca

SEQ ID NO: 959701 - RNA, 22 nt, Human
ugacacagauuagagacauacc

SEQ ID NO: 959702 - RNA, 22 nt, Human
augaggcaucugcagucacuag

SEQ ID NO: 959703 - RNA, 23 nt, Human
uaagaacagacaagcauuuacau

SEQ ID NO: 959704 - RNA, 22 nt, Human
guggccaggccgacugccaggc

SEQ ID NO: 959705 - RNA, 17 nt, Human
aagauuucauuagcuga

SEQ ID NO: 959706 - RNA, 22 nt, Human
aggcuauuuccacucuucucau

SEQ ID NO: 959707 - RNA, 22 nt, Human
aggaagcuccaugaaggcagag

SEQ ID NO: 959708 - RNA, 22 nt, Human
gagcugugaaaagugccugggg

SEQ ID NO: 959709 - RNA, 22 nt, Human
caaguaaagaaucacauuucuu

SEQ ID NO: 959710 - RNA, 22 nt, Human
gcugucaguuuuacccacagac

SEQ ID NO: 959711 - RNA, 22 nt, Human
ccagucccaucucugucgcuua

SEQ ID NO: 959712 - RNA, 22 nt, Human
caugucuggguauaugcauaug

SEQ ID NO: 959713 - RNA, 18 nt, Human
uguuaggaagggcacaca

SEQ ID NO: 959714 - RNA, 22 nt, Human
cugaagccacgauagcuuccua

SEQ ID NO: 959715 - RNA, 22 nt, Human
gccagggagucugggccacaga

SEQ ID NO: 959716 - RNA, 21 nt, Human
ugucauuaaucgcuauagaag

SEQ ID NO: 959717 - RNA, 22 nt, Human
ugccaggcccagcuccagagcu

SEQ ID NO: 959718 - RNA, 22 nt, Human
ucucagagauucagggagaagu

SEQ ID NO: 959719 - RNA, 20 nt, Human
ucacaggggaccaggagcag

SEQ ID NO: 959720 - RNA, 22 nt, Human
gaguuauuaauggcugaguuug

SEQ ID NO: 959721 - RNA, 22 nt, Human
uguggccagcagguggcugugu

SEQ ID NO: 959722 - RNA, 22 nt, Human
gcucagagauguucaguagcuu

SEQ ID NO: 959723 - RNA, 22 nt, Human
uggcucugucaaacugcacaca

SEQ ID NO: 959724 - RNA, 22 nt, Human
ggcggggguccaggagccugca

SEQ ID NO: 959725 - RNA, 22 nt, Human
caggccucccggugcacacuga

SEQ ID NO: 959726 - RNA, 22 nt, Human
gccaggcugcuggcugcugucc

SEQ ID NO: 959727 - RNA, 22 nt, Human
agggcagcagcggcccaggccu

SEQ ID NO: 959728 - RNA, 22 nt, Human
gcugagguaggagguugcagug

SEQ ID NO: 959729 - RNA, 22 nt, Human
ucccaggauguuuauggcuggu

SEQ ID NO: 959730 - RNA, 22 nt, Human
aacauacauauuucagugucca

SEQ ID NO: 959731 - RNA, 22 nt, Human
ucuccuccuuuuuucaacauag

SEQ ID NO: 959732 - RNA, 22 nt, Human
cggcagcucgagggccacccgu

SEQ ID NO: 959733 - RNA, 22 nt, Human
auucacauguugaagcccuaac

SEQ ID NO: 959734 - RNA, 22 nt, Human
caaauguauucucacuucaggg

SEQ ID NO: 959735 - RNA, 22 nt, Human
auguuuuacccuuugcacaaac

SEQ ID NO: 959736 - RNA, 22 nt, Human
acccagcucuuugauggucuug

SEQ ID NO: 959737 - RNA, 22 nt, Human
uaagauguuuugguuugauaag

SEQ ID NO: 959738 - RNA, 22 nt, Human
cacacagaugguaagggaggga

SEQ ID NO: 959739 - RNA, 22 nt, Human
agccagggagguggagguugca

SEQ ID NO: 959740 - RNA, 22 nt, Human
ucuguucauacagaguauagua

SEQ ID NO: 959741 - RNA, 22 nt, Human
cccagcacaggcaauuccauac

SEQ ID NO: 959742 - RNA, 22 nt, Human
aaggccaugaccacuugcugug

SEQ ID NO: 959743 - RNA, 22 nt, Human
ugcagggccagacuggguugga

SEQ ID NO: 959744 - RNA, 22 nt, Human
ugcagaagaccuuccagggcug

SEQ ID NO: 959745 - RNA, 22 nt, Human
ugaaaaacuuuaauccauaaag

SEQ ID NO: 959746 - RNA, 22 nt, Human
gcagaggagcaaguugcuacag

SEQ ID NO: 959747 - RNA, 21 nt, Human
uggagcugccacuuguccucc

SEQ ID NO: 959748 - RNA, 22 nt, Human
cacaaugcguacauauaucaaa

SEQ ID NO: 959749 - RNA, 22 nt, Human
cugcagggcccgccugagcccu

SEQ ID NO: 959750 - RNA, 22 nt, Human
ucugagagguuaagcaauuuga

SEQ ID NO: 959751 - RNA, 22 nt, Human
uggcccugcuggccaaaggcua

SEQ ID NO: 959752 - RNA, 22 nt, Human
uucuaguguccuuggacuugcu

SEQ ID NO: 959753 - RNA, 22 nt, Human
uuacaugguuguuggaaaugcu

SEQ ID NO: 959754 - RNA, 22 nt, Human
ucccagggugcgccugcccucg

SEQ ID NO: 959755 - RNA, 21 nt, Human
agagagaaggccauauggucc

SEQ ID NO: 959756 - RNA, 22 nt, Human
cugggaggugcagcaaaaauca

SEQ ID NO: 959757 - RNA, 22 nt, Human
auuuacagaagcauguaauagc

SEQ ID NO: 959758 - RNA, 22 nt, Human
ugcagaagauggucugagcacc

SEQ ID NO: 959759 - RNA, 22 nt, Human
cucaguuucugacauuaaaauc

SEQ ID NO: 959760 - RNA, 22 nt, Human
aaauacuagaauucagaguuga

SEQ ID NO: 959761 - RNA, 22 nt, Human
aggcagcuggaggcagagacua

SEQ ID NO: 959762 - RNA, 20 nt, Human
aggagccauugacugcagca

SEQ ID NO: 959763 - RNA, 22 nt, Human
gguggccucgguggugcacagg

SEQ ID NO: 959764 - RNA, 19 nt, Human
uacauuuguguacacuugu

SEQ ID NO: 959765 - RNA, 22 nt, Human
agcgggugcugugucagcccuc

SEQ ID NO: 959766 - RNA, 22 nt, Human
uuucuuccuuaccuuacuagag

SEQ ID NO: 959767 - RNA, 22 nt, Human
aguacauauaguaauuuagcca

SEQ ID NO: 959768 - RNA, 22 nt, Human
uguuugaauuuugcuaacgugu

SEQ ID NO: 959769 - RNA, 22 nt, Human
uuugcauuccugccugcauuca

SEQ ID NO: 959770 - RNA, 22 nt, Human
caggagagcccggguccgggcu

SEQ ID NO: 959771 - RNA, 22 nt, Human
auggcagccugagcagaggaau

SEQ ID NO: 959772 - RNA, 22 nt, Human
ccaggcuggagugcaauggugc

SEQ ID NO: 959773 - RNA, 21 nt, Human
uccacaaguuagaaggaaauu

SEQ ID NO: 959774 - RNA, 22 nt, Human
uggaaugacagagagucugaau

SEQ ID NO: 959775 - RNA, 22 nt, Human
ucagggcauccauugccuguug

SEQ ID NO: 959776 - RNA, 22 nt, Human
uaaaugcaaugugcuuuaccag

SEQ ID NO: 959777 - RNA, 22 nt, Human
ucucugaguaagugacaguuca

SEQ ID NO: 959778 - RNA, 20 nt, Human
uuccuguauacaaagaguuc

SEQ ID NO: 959779 - RNA, 23 nt, Human
ugauuuccagugagucaguggga

SEQ ID NO: 959780 - RNA, 23 nt, Human
uuuggacuugugacucuucuccu

SEQ ID NO: 959781 - RNA, 22 nt, Human
uggggccugagguggagcugca

SEQ ID NO: 959782 - RNA, 22 nt, Human
uacaaaugaguuguaugaacca

SEQ ID NO: 959783 - RNA, 22 nt, Human
uccaggagguagugcuuaauuu

SEQ ID NO: 959784 - RNA, 22 nt, Human
ccuccugggccuugcucuguga

SEQ ID NO: 959785 - RNA, 19 nt, Human
agggaaggauucugucauu

SEQ ID NO: 959786 - RNA, 22 nt, Human
gaauuguacgcuuuacauaggu

SEQ ID NO: 959787 - RNA, 22 nt, Human
uggcucagaugcucuuccagug

SEQ ID NO: 959788 - RNA, 22 nt, Human
cuggggcucacuuuggucaggc

SEQ ID NO: 959789 - RNA, 22 nt, Human
ccuggcuuccuggagcucacaa

SEQ ID NO: 959790 - RNA, 22 nt, Human
ggccagaggccacagcuguguc

SEQ ID NO: 959791 - RNA, 19 nt, Human
auuugaaagcugugcuugc

SEQ ID NO: 959792 - RNA, 22 nt, Human
ccagcagcuguggcuuugccuc

SEQ ID NO: 959793 - RNA, 22 nt, Human
uuauuucauguaaaauuuaugu

SEQ ID NO: 959794 - RNA, 22 nt, Human
uggccucugcaauggauucacc

SEQ ID NO: 959795 - RNA, 22 nt, Human
gguggaaggccuggaaggaggc

SEQ ID NO: 959796 - RNA, 22 nt, Human
ugggcagcagcaaagccagacu

SEQ ID NO: 959797 - RNA, 22 nt, Human
uggaagccaggcccgcuccuaa

SEQ ID NO: 959798 - RNA, 22 nt, Human
uggcuucugcuuucaguggagg

SEQ ID NO: 959799 - RNA, 22 nt, Human
acuguguccucauguggcagaa

SEQ ID NO: 959800 - RNA, 19 nt, Human
ugagugggccccugcagac

SEQ ID NO: 959801 - RNA, 22 nt, Human
ggccucggcccacugcugcggu

SEQ ID NO: 959802 - RNA, 22 nt, Human
uagaaaugauuuugaugcuuca

SEQ ID NO: 959803 - RNA, 22 nt, Human
uggcucagcugacucggcuucu

SEQ ID NO: 959804 - RNA, 22 nt, Human
gcugucacaaauauuucucagc

SEQ ID NO: 959805 - RNA, 22 nt, Human
caguuucuacgacuuaagcaca

SEQ ID NO: 959806 - RNA, 22 nt, Human
cagcugggagcuccauuagaua

SEQ ID NO: 959807 - RNA, 18 nt, Human
agggucagugucacuggc

SEQ ID NO: 959808 - RNA, 22 nt, Human
acucacauuucaucaggccaag

SEQ ID NO: 959809 - RNA, 22 nt, Human
aaggccauuauucugauauauu

SEQ ID NO: 959810 - RNA, 22 nt, Human
aagcuaugggggaguuucaacc

SEQ ID NO: 959811 - RNA, 22 nt, Human
cucaggauccaucuccugcccu

SEQ ID NO: 959812 - RNA, 20 nt, Human
gggguuggcuggcacaggga

SEQ ID NO: 959813 - RNA, 22 nt, Human
aaguucaaguaguguuacaugg

SEQ ID NO: 959814 - RNA, 22 nt, Human
ccuggccagcgccggcugcucg

SEQ ID NO: 959815 - RNA, 22 nt, Human
cccaggcagagagcuggugagc

SEQ ID NO: 959816 - RNA, 22 nt, Human
caaaguauauuggauugaaugg

SEQ ID NO: 959817 - RNA, 21 nt, Human
agccuggcccagggggaggcu

SEQ ID NO: 959818 - RNA, 21 nt, Human
ccacucugaguguugaacaga

SEQ ID NO: 959819 - RNA, 22 nt, Human
aucuguuuaauucauuuucaca

SEQ ID NO: 959820 - RNA, 22 nt, Human
ccaaaugugccuguuucaacaa

SEQ ID NO: 959821 - RNA, 22 nt, Human
guacaguuuucaguguucacug

SEQ ID NO: 959822 - RNA, 22 nt, Human
cacacaugaaucccuaguaccu

SEQ ID NO: 959823 - RNA, 21 nt, Human
ggugucaguuuuggucauuag

SEQ ID NO: 959824 - RNA, 22 nt, Human
caauagaaaacucaauacuuaa

SEQ ID NO: 959825 - RNA, 22 nt, Human
acugccuugaaagauuguugag

SEQ ID NO: 959826 - RNA, 22 nt, Human
agggcugggcugcuuguuguca

SEQ ID NO: 959827 - RNA, 22 nt, Human
gcuggagccauuggcuuggccu

SEQ ID NO: 959828 - RNA, 22 nt, Human
auuaaauacugcaggcuaagca

SEQ ID NO: 959829 - RNA, 22 nt, Human
ugucccauggacacaacuucuu

SEQ ID NO: 959830 - RNA, 22 nt, Human
ugaggcaggaauggggaaaagu

SEQ ID NO: 959831 - RNA, 22 nt, Human
uggcagacuuuagggucuacau

SEQ ID NO: 959832 - RNA, 22 nt, Human
ucccuggggauguuggccugcc

SEQ ID NO: 959833 - RNA, 22 nt, Human
ugguggcuguugcagaacugag

SEQ ID NO: 959834 - RNA, 22 nt, Human
cugggccuggcguuccaggcug

SEQ ID NO: 959835 - RNA, 22 nt, Human
aggcagguuggugagaagacug

SEQ ID NO: 959836 - RNA, 22 nt, Human
agagcuggggccagagucaagg

SEQ ID NO: 959837 - RNA, 22 nt, Human
cagaagaguagcugaacaaguu

SEQ ID NO: 959838 - RNA, 22 nt, Human
cuucuucauguauugauagucu

SEQ ID NO: 959839 - RNA, 22 nt, Human
caggcagcguccugcuuccugu

SEQ ID NO: 959840 - RNA, 22 nt, Human
guuauguauugggaaauccaag

SEQ ID NO: 959841 - RNA, 22 nt, Human
uuguccuuaccucaaucuggaa

SEQ ID NO: 959842 - RNA, 22 nt, Human
guggcagagguuccucagugug

SEQ ID NO: 959843 - RNA, 22 nt, Human
uuugaaaggguuaugagacuga

SEQ ID NO: 959844 - RNA, 22 nt, Human
agagcagagggcucugggacaa

SEQ ID NO: 959845 - RNA, 22 nt, Human
accauguuggccaagcuggucu

SEQ ID NO: 959846 - RNA, 22 nt, Human
uggcacugggacagaugcucuc

SEQ ID NO: 959847 - RNA, 22 nt, Human
ugugggcaggcccgggucugag

SEQ ID NO: 959848 - RNA, 22 nt, Human
auucuggauuaucaguccacca

SEQ ID NO: 959849 - RNA, 22 nt, Human
gagggcagagacagugauucac

SEQ ID NO: 959850 - RNA, 22 nt, Human
ggcagcagggcugucucccuac

SEQ ID NO: 959851 - RNA, 22 nt, Human
gaacagcugcuagagaucugug

SEQ ID NO: 959852 - RNA, 22 nt, Human
aggaaaggccuuugcauuuggu

SEQ ID NO: 959853 - RNA, 22 nt, Human
ggcugggcaaacaagacucuuc

SEQ ID NO: 959854 - RNA, 22 nt, Human
auuuccaggagaaaggauuuua

SEQ ID NO: 959855 - RNA, 23 nt, Human
uccuuccuuugagaggcuccauc

SEQ ID NO: 959856 - RNA, 22 nt, Human
ugcucuggagggugaagcuuuu

SEQ ID NO: 959857 - RNA, 22 nt, Human
cacaguuucuauaggucagaau

SEQ ID NO: 959858 - RNA, 22 nt, Human
agccaaggcagcuagagcucug

SEQ ID NO: 959859 - RNA, 22 nt, Human
gaggcagccucaguggaccucg

SEQ ID NO: 959860 - RNA, 22 nt, Human
gcacagggagcaggucucuggu

SEQ ID NO: 959861 - RNA, 23 nt, Human
ccagccucugggucuucauccag

SEQ ID NO: 959862 - RNA, 22 nt, Human
uuggcagcauccaagucucggg

SEQ ID NO: 959863 - RNA, 22 nt, Human
acuuguguaacacagaaagaac

SEQ ID NO: 959864 - RNA, 22 nt, Human
aaaaaucacuuuuauaggcagc

SEQ ID NO: 959865 - RNA, 22 nt, Human
aagucacacuagacaacugagg

SEQ ID NO: 959866 - RNA, 22 nt, Human
gcuguguccucacacagccuuu

SEQ ID NO: 959867 - RNA, 22 nt, Human
agggggcaggagagaccugcug

SEQ ID NO: 959868 - RNA, 22 nt, Human
uagacacaucaaguauaguuaa

SEQ ID NO: 959869 - RNA, 22 nt, Human
ccuguucauuuguauuugucuu

SEQ ID NO: 959870 - RNA, 22 nt, Human
acugcuuuucuaagauucugug

SEQ ID NO: 959871 - RNA, 22 nt, Human
cuggccaacuugcuuguuggca

SEQ ID NO: 959872 - RNA, 22 nt, Human
cuggagcauccaugcccagggu

SEQ ID NO: 959873 - RNA, 22 nt, Human
cuucuucagcacaauauugaug

SEQ ID NO: 959874 - RNA, 22 nt, Human
aucaguuuugggggacauacug

SEQ ID NO: 959875 - RNA, 22 nt, Human
ccuguguggccaggcuggaguc

SEQ ID NO: 959876 - RNA, 22 nt, Human
gucccaggugggcuccaccucu

SEQ ID NO: 959877 - RNA, 21 nt, Human
gggcagcucuguuuuauuuuc

SEQ ID NO: 959878 - RNA, 22 nt, Human
aaggacuccaauucuuucaucu

SEQ ID NO: 959879 - RNA, 22 nt, Human
aggagaguaccauugggccgca

SEQ ID NO: 959880 - RNA, 22 nt, Human
ccugccuggcuuccagaagaga

SEQ ID NO: 959881 - RNA, 22 nt, Human
uauuugcaacauaaaacucuga

SEQ ID NO: 959882 - RNA, 22 nt, Human
acagaauacuacagacugguua

SEQ ID NO: 959883 - RNA, 22 nt, Human
ggccugaggcgucccagcugug

SEQ ID NO: 959884 - RNA, 22 nt, Human
acagagaaagugggcugaagau

SEQ ID NO: 959885 - RNA, 22 nt, Human
acacaaguucuaaagauugcgc

SEQ ID NO: 959886 - RNA, 22 nt, Human
uggcccugugugcaggcugcac

SEQ ID NO: 959887 - RNA, 22 nt, Human
ccaggcaggcagcguucucagg

SEQ ID NO: 959888 - RNA, 22 nt, Human
ccuguguguaggccaggggagu

SEQ ID NO: 959889 - RNA, 22 nt, Human
gaguguggugaacaggagcacc

SEQ ID NO: 959890 - RNA, 22 nt, Human
uuuuucaagacaaccugcaugu

SEQ ID NO: 959891 - RNA, 22 nt, Human
cucuccuggggagcacacacac

SEQ ID NO: 959892 - RNA, 22 nt, Human
acucugcucaaaguccugaggc

SEQ ID NO: 959893 - RNA, 22 nt, Human
auaguaacuggcauguuuauga

SEQ ID NO: 959894 - RNA, 22 nt, Human
ugggggucaggaugaggccuug

SEQ ID NO: 959895 - RNA, 22 nt, Human
cagucccaucucccagguggcu

SEQ ID NO: 959896 - RNA, 22 nt, Human
ggagcagccuguguagacgggg

SEQ ID NO: 959897 - RNA, 22 nt, Human
cccagagccucauucuguuggg

SEQ ID NO: 959898 - RNA, 22 nt, Human
uguucaauccccagguccugaa

SEQ ID NO: 959899 - RNA, 22 nt, Human
acagauauaaacuauaguagug

SEQ ID NO: 959900 - RNA, 22 nt, Human
ggugggugagcccugggagcug

SEQ ID NO: 959901 - RNA, 22 nt, Human
cuuugaaagcucccaggacuua

SEQ ID NO: 959902 - RNA, 22 nt, Human
auccaggguguggagagagcuc

SEQ ID NO: 959903 - RNA, 22 nt, Human
uguaugcuuguguauaauauaa

SEQ ID NO: 959904 - RNA, 22 nt, Human
agcuggcauacuuugcuaggaa

SEQ ID NO: 959905 - RNA, 22 nt, Human
ggcugggagcuggacaggccgg

SEQ ID NO: 959906 - RNA, 22 nt, Human
cuggccuggagccucugggugg

SEQ ID NO: 959907 - RNA, 22 nt, Human
uggcagagagagugcagucgac

SEQ ID NO: 959908 - RNA, 22 nt, Human
aagauuuaccacuuuauucaag

SEQ ID NO: 959909 - RNA, 19 nt, Human
cauuaggauuagagacaag

SEQ ID NO: 959910 - RNA, 22 nt, Human
gcacugcagccucagauggugg

SEQ ID NO: 959911 - RNA, 22 nt, Human
aucugccugcaguggagguggg

SEQ ID NO: 959912 - RNA, 22 nt, Human
gcaccugggcaaggauucagag

SEQ ID NO: 959913 - RNA, 22 nt, Human
uuuaauugauucacagucugua

SEQ ID NO: 959914 - RNA, 22 nt, Human
ugcugccuuagcagccaggcaa

SEQ ID NO: 959915 - RNA, 17 nt, Human
aggaaacauuuucuuuc

SEQ ID NO: 959916 - RNA, 22 nt, Human
augggaggaucacuugaggcca

SEQ ID NO: 959917 - RNA, 22 nt, Human
caggugccgggaaugcagcaau

SEQ ID NO: 959918 - RNA, 22 nt, Human
aagccaggcaugcuuggacagu

SEQ ID NO: 959919 - RNA, 22 nt, Human
uggcucaggagggaucuuugcu

SEQ ID NO: 959920 - RNA, 19 nt, Human
ccucugcgcuguccugcuc

SEQ ID NO: 959921 - RNA, 22 nt, Human
ugccaggaggaggugggacaga

SEQ ID NO: 959922 - RNA, 22 nt, Human
ucucaggguuuccugggggcug

SEQ ID NO: 959923 - RNA, 22 nt, Human
ggaagaggcugaggccaugcug

SEQ ID NO: 959924 - RNA, 22 nt, Human
gccuggaggggacagucucugg

SEQ ID NO: 959925 - RNA, 22 nt, Human
ggcugcucuucuuggcgaccuc

SEQ ID NO: 959926 - RNA, 22 nt, Human
ugaaaucuuuaguuucuguccc

SEQ ID NO: 959927 - RNA, 20 nt, Human
gaacauuuggccauacugag

SEQ ID NO: 959928 - RNA, 22 nt, Human
uguuuauuuucaggauggauug

SEQ ID NO: 959929 - RNA, 22 nt, Human
ccugccucaucaacuugucgug

SEQ ID NO: 959930 - RNA, 22 nt, Human
aaauauguaagauuagcacuag

SEQ ID NO: 959931 - RNA, 22 nt, Human
uguguuccuucgucuucccuuc

SEQ ID NO: 959932 - RNA, 22 nt, Human
ucacaaagggagggauagcugg

SEQ ID NO: 959933 - RNA, 17 nt, Human
ucugaagccagucugcu

SEQ ID NO: 959934 - RNA, 22 nt, Human
ggagagcugguagcuggcucca

SEQ ID NO: 959935 - RNA, 22 nt, Human
ccucccucuuucagucccacag

SEQ ID NO: 959936 - RNA, 22 nt, Human
agaacuuaggaacaacagcuua

SEQ ID NO: 959937 - RNA, 22 nt, Human
gcacugcaucuacuggcaagua

SEQ ID NO: 959938 - RNA, 22 nt, Human
uagcagggucucaggagucagg

SEQ ID NO: 959939 - RNA, 18 nt, Human
gcuccuggaccaggucac

SEQ ID NO: 959940 - RNA, 22 nt, Human
aaagagcuucauuuccauuuau

SEQ ID NO: 959941 - RNA, 22 nt, Human
ggugcagaucuuucucuucagg

SEQ ID NO: 959942 - RNA, 22 nt, Human
cuuagaaauuguuacucauuca

SEQ ID NO: 959943 - RNA, 22 nt, Human
augcuuccaaggcuaagacaag

SEQ ID NO: 959944 - RNA, 20 nt, Human
agcugaggcaccugagguua

SEQ ID NO: 959945 - RNA, 22 nt, Human
agaguucagcuacugcaaaugu

SEQ ID NO: 959946 - RNA, 22 nt, Human
aggccugcagcaggagcaaacc

SEQ ID NO: 959947 - RNA, 22 nt, Human
caggaugagguagaggcagaua

SEQ ID NO: 959948 - RNA, 22 nt, Human
uaccuuuugcuuauuaugacac

SEQ ID NO: 959949 - RNA, 22 nt, Human
acauuucuaucauccuguaaug

SEQ ID NO: 959950 - RNA, 22 nt, Human
uaaauguaccuucugccuuacu

SEQ ID NO: 959951 - RNA, 22 nt, Human
uagaaauaaaucugcagcuggg

SEQ ID NO: 959952 - RNA, 22 nt, Human
cagggucuuggcgccaucaccc

SEQ ID NO: 959953 - RNA, 22 nt, Human
gcaauaaauaacauggaagaca

SEQ ID NO: 959954 - RNA, 22 nt, Human
ucucugaguauccugaacugcc

SEQ ID NO: 959955 - RNA, 22 nt, Human
agcagccauccuuagagaaaga

SEQ ID NO: 959956 - RNA, 20 nt, Human
ugugaaagcaguagaaugac

SEQ ID NO: 959957 - RNA, 22 nt, Human
cacucugcgcugggcgccagcg

SEQ ID NO: 959958 - RNA, 22 nt, Human
ucuggcucucaacaaauauuua

SEQ ID NO: 959959 - RNA, 22 nt, Human
gagauggggaauaggagcaagc

SEQ ID NO: 959960 - RNA, 22 nt, Human
cuguccuuacugcuucuggcuu

SEQ ID NO: 959961 - RNA, 22 nt, Human
agguuauaugucauacugaagu

SEQ ID NO: 959962 - RNA, 22 nt, Human
acucaggaaaugaagacugguu

SEQ ID NO: 959963 - RNA, 22 nt, Human
cugcucugaagccaggauucug

SEQ ID NO: 959964 - RNA, 22 nt, Human
acaaaguccugguguauggcca

SEQ ID NO: 959965 - RNA, 22 nt, Human
gcaggggcaggagaucucaggc

SEQ ID NO: 959966 - RNA, 22 nt, Human
gccuggaguggacuuggccccu

SEQ ID NO: 959967 - RNA, 22 nt, Human
uauuuagaacagacaauagaaa

SEQ ID NO: 959968 - RNA, 22 nt, Human
uaaaguucagugcaugaaugug

SEQ ID NO: 959969 - RNA, 22 nt, Human
cugggcacauuuugacuagugu

SEQ ID NO: 959970 - RNA, 23 nt, Human
uaauucacauauacauugcuuca

SEQ ID NO: 959971 - RNA, 22 nt, Human
ugaaaucuacccuauucagggu

SEQ ID NO: 959972 - RNA, 22 nt, Human
aggcuuauuuuaggucucucuu

SEQ ID NO: 959973 - RNA, 20 nt, Human
ucauccaguugguuuauggu

SEQ ID NO: 959974 - RNA, 22 nt, Human
uaaaucucacuggguauauugg

SEQ ID NO: 959975 - RNA, 22 nt, Human
ggcuucuccagguacugagcau

SEQ ID NO: 959976 - RNA, 22 nt, Human
ccugguggacagcagccagcag

SEQ ID NO: 959977 - RNA, 22 nt, Human
aaaagguuuugaguacaaauau

SEQ ID NO: 959978 - RNA, 18 nt, Human
uggguggcuagggaguuu

SEQ ID NO: 959979 - RNA, 22 nt, Human
ccugucauacuaacguaguggg

SEQ ID NO: 959980 - RNA, 22 nt, Human
ugcugcugauggcaccuaggca

SEQ ID NO: 959981 - RNA, 22 nt, Human
gugauuucaaauauagagugag

SEQ ID NO: 959982 - RNA, 22 nt, Human
cccaggcugaugggaugggcca

SEQ ID NO: 959983 - RNA, 22 nt, Human
uuugugaagggaacagaagugu

SEQ ID NO: 959984 - RNA, 22 nt, Human
gugccugggcaugagcuuguug

SEQ ID NO: 959985 - RNA, 22 nt, Human
agagcugaaaaagcugacccgg

SEQ ID NO: 959986 - RNA, 22 nt, Human
cugggaggacaacuuggagcuc

SEQ ID NO: 959987 - RNA, 22 nt, Human
uucaggauuguguuuuuccuga

SEQ ID NO: 959988 - RNA, 22 nt, Human
gcgucugaguugcgggggcuca

SEQ ID NO: 959989 - RNA, 19 nt, Human
aaggcagcaguagcaucca

SEQ ID NO: 959990 - RNA, 22 nt, Human
uaaauucccaacucugcucuuc

SEQ ID NO: 959991 - RNA, 22 nt, Human
agcuggccuuagugagcaccug

SEQ ID NO: 959992 - RNA, 22 nt, Human
acucagaguuugcguuccauac

SEQ ID NO: 959993 - RNA, 22 nt, Human
guaggcagauaggagugcagcc

SEQ ID NO: 959994 - RNA, 19 nt, Human
uggucuaaaugugugcccc

SEQ ID NO: 959995 - RNA, 22 nt, Human
cggggacacacuggcagcuccu

SEQ ID NO: 959996 - RNA, 22 nt, Human
acacuaaugagaaaggaauuaa

SEQ ID NO: 959997 - RNA, 22 nt, Human
ugaaaauuguuguacuugauaa

SEQ ID NO: 959998 - RNA, 22 nt, Human
uuccaugugaguacacugugau

SEQ ID NO: 959999 - RNA, 22 nt, Human
ucccagggacugggcuaggcuu

SEQ ID NO: 960000 - RNA, 22 nt, Human
uuaaaugaugcauaucauuuag

SEQ ID NO: 960001 - RNA, 22 nt, Human
gccuggguccacugaucaugcu

SEQ ID NO: 960002 - RNA, 23 nt, Human
gaguguucauagcaggcucuugc

SEQ ID NO: 960003 - RNA, 22 nt, Human
uguagcacagagcuuugacacu

SEQ ID NO: 960004 - RNA, 22 nt, Human
acacucugcucugagcuucagg

SEQ ID NO: 960005 - RNA, 23 nt, Human
ccagucucacguauacaggauuu

SEQ ID NO: 960006 - RNA, 18 nt, Human
uacaugcauaaaugaagc

SEQ ID NO: 960007 - RNA, 23 nt, Human
ccaggcaguagcuauugaaguga

SEQ ID NO: 960008 - RNA, 22 nt, Human
cuuccagguccuucuugagaag

SEQ ID NO: 960009 - RNA, 22 nt, Human
ucaucuaagagucuuacauuua

SEQ ID NO: 960010 - RNA, 22 nt, Human
ccagcugcuugggaaaaugucu

SEQ ID NO: 960011 - RNA, 22 nt, Human
agaggccaggcugcagagggau

SEQ ID NO: 960012 - RNA, 22 nt, Human
agaggacagacggaaagugcca

SEQ ID NO: 960013 - RNA, 22 nt, Human
guccucugacucagccuuggga

SEQ ID NO: 960014 - RNA, 22 nt, Human
aggcacuggguaauuaguagcu

SEQ ID NO: 960015 - RNA, 23 nt, Human
gccugggacucaggaggagcuca

SEQ ID NO: 960016 - RNA, 22 nt, Human
cugugcuggcagaccuggaguu

SEQ ID NO: 960017 - RNA, 22 nt, Human
aaaggucaagcuggacucaggu

SEQ ID NO: 960018 - RNA, 22 nt, Human
gcugccucaggcaccuccuggc

SEQ ID NO: 960019 - RNA, 22 nt, Human
cagggacaugacuggucucugu

SEQ ID NO: 960020 - RNA, 22 nt, Human
aucucagacauguuguccauga

SEQ ID NO: 960021 - RNA, 22 nt, Human
acucuucuugcugcucauuaau

SEQ ID NO: 960022 - RNA, 21 nt, Human
uggcugcuggcccucucucca

SEQ ID NO: 960023 - RNA, 22 nt, Human
uguuacacagcagaauagcaag

SEQ ID NO: 960024 - RNA, 22 nt, Human
aaaaauguuaucuacuguccga

SEQ ID NO: 960025 - RNA, 22 nt, Human
uggagcagccaugaugacagag

SEQ ID NO: 960026 - RNA, 22 nt, Human
uauuuccaagcugaauccaaug

SEQ ID NO: 960027 - RNA, 22 nt, Human
uuucagaaaacuuaucaucagu

SEQ ID NO: 960028 - RNA, 22 nt, Human
gaggagcacaugaggcugaggg

SEQ ID NO: 960029 - RNA, 20 nt, Human
cagagaccugucuucacaga

SEQ ID NO: 960030 - RNA, 22 nt, Human
ccugcccuagagaugacacaau

SEQ ID NO: 960031 - RNA, 22 nt, Human
ccugccuguacuagagacccag

SEQ ID NO: 960032 - RNA, 22 nt, Human
ccugccugucccucaguccaca

SEQ ID NO: 960033 - RNA, 22 nt, Human
ccugccugaaggucagccaccc

SEQ ID NO: 960034 - RNA, 22 nt, Human
cagcucugugggagcguaugug

SEQ ID NO: 960035 - RNA, 22 nt, Human
ucauccagagcuucauaaguaa

SEQ ID NO: 960036 - RNA, 20 nt, Human
ucagugauuaucucugagug

SEQ ID NO: 960037 - RNA, 22 nt, Human
gaaaucugucuuuguuugaaua

SEQ ID NO: 960038 - RNA, 22 nt, Human
gcucugugccacaugcaguguu

SEQ ID NO: 960039 - RNA, 22 nt, Human
auuucacucauucauguuacuu

SEQ ID NO: 960040 - RNA, 22 nt, Human
ggggcagagucuggacuguugu

SEQ ID NO: 960041 - RNA, 22 nt, Human
ucuuagaaaugaaguucuuucu

SEQ ID NO: 960042 - RNA, 22 nt, Human
guguugaugacauuuuagaaac

SEQ ID NO: 960043 - RNA, 22 nt, Human
uagagcugauaaugaggccaag

SEQ ID NO: 960044 - RNA, 21 nt, Human
agcagccauuucacagagacu

SEQ ID NO: 960045 - RNA, 22 nt, Human
ccacuugugaaauaaucaaaua

SEQ ID NO: 960046 - RNA, 22 nt, Human
ggagugacucucggggccacua

SEQ ID NO: 960047 - RNA, 22 nt, Human
uggcagagucucuccuuuccag

SEQ ID NO: 960048 - RNA, 22 nt, Human
agugcucauaaaaaugugaaac

SEQ ID NO: 960049 - RNA, 22 nt, Human
ggcaggagaaaggucucuucuu

SEQ ID NO: 960050 - RNA, 17 nt, Human
aaugaaugaauucuuug

SEQ ID NO: 960051 - RNA, 22 nt, Human
cagagaaacucagauagcugau

SEQ ID NO: 960052 - RNA, 22 nt, Human
uguguauuucuggaacagacua

SEQ ID NO: 960053 - RNA, 22 nt, Human
ggcuucccaaggagccaggaug

SEQ ID NO: 960054 - RNA, 22 nt, Human
aaauauaguaaaugcauaguuc

SEQ ID NO: 960055 - RNA, 22 nt, Human
ccuuggaggacugcugcuucuu

SEQ ID NO: 960056 - RNA, 22 nt, Human
cagggccuuauccugccauuga

SEQ ID NO: 960057 - RNA, 22 nt, Human
aacuagaaaacaagaugcugau

SEQ ID NO: 960058 - RNA, 22 nt, Human
cuugauguauaaguugauaugu

SEQ ID NO: 960059 - RNA, 20 nt, Human
uguauauuuucugguguaaa

SEQ ID NO: 960060 - RNA, 22 nt, Human
agaauucugacaauagaauugg

SEQ ID NO: 960061 - RNA, 22 nt, Human
uggcucaggggucuggcucugu

SEQ ID NO: 960062 - RNA, 22 nt, Human
cuggcccagagagcagagcuua

SEQ ID NO: 960063 - RNA, 19 nt, Human
cugggacaaugaaagcauc

SEQ ID NO: 960064 - RNA, 19 nt, Human
gcaggcaguggcauucgga

SEQ ID NO: 960065 - RNA, 22 nt, Human
uaaacagaaagcagauguacuu

SEQ ID NO: 960066 - RNA, 22 nt, Human
cuggaaggcucugcugccuguc

SEQ ID NO: 960067 - RNA, 22 nt, Human
auuguaauuuuagagaaagugg

SEQ ID NO: 960068 - RNA, 22 nt, Human
ugaacuccaaauacugcugauu

SEQ ID NO: 960069 - RNA, 22 nt, Human
gggaguguugagcgcccugcca

SEQ ID NO: 960070 - RNA, 22 nt, Human
uuuauguacauauccacaagga

SEQ ID NO: 960071 - RNA, 22 nt, Human
uuggcagauuugucaguaagcu

SEQ ID NO: 960072 - RNA, 22 nt, Human
aaaggccaagcaugagguggac

SEQ ID NO: 960073 - RNA, 22 nt, Human
cugugcugauucagcacaggcc

SEQ ID NO: 960074 - RNA, 22 nt, Human
uucauuaguucugaagaugucu

SEQ ID NO: 960075 - RNA, 20 nt, Human
uauauguguacauacacaca

SEQ ID NO: 960076 - RNA, 22 nt, Human
agauuguagaaacuguagcauu

SEQ ID NO: 960077 - RNA, 22 nt, Human
gaaaugcaaauucucucucgcu

SEQ ID NO: 960078 - RNA, 22 nt, Human
ggcucugccugcccagcagcac

SEQ ID NO: 960079 - RNA, 22 nt, Human
acaaaaguguaggaauuccuua

SEQ ID NO: 960080 - RNA, 17 nt, Human
cucagaguugcuuuguc

SEQ ID NO: 960081 - RNA, 22 nt, Human
cugccaggcagcagagggagaa

SEQ ID NO: 960082 - RNA, 20 nt, Human
cccaggaguuugcucuuacu

SEQ ID NO: 960083 - RNA, 22 nt, Human
uuucuguagggauuucacaguu

SEQ ID NO: 960084 - RNA, 22 nt, Human
agggcagagacaugcuuccuga

SEQ ID NO: 960085 - RNA, 22 nt, Human
cucagagaggcaguggaaguca

SEQ ID NO: 960086 - RNA, 18 nt, Human
cucucuggucuggauccc

SEQ ID NO: 960087 - RNA, 22 nt, Human
ccacagggacuguuaaaacccu

SEQ ID NO: 960088 - RNA, 22 nt, Human
cagggcuguggcuuugugcugu

SEQ ID NO: 960089 - RNA, 22 nt, Human
gggccacacagaaccuccuggu

SEQ ID NO: 960090 - RNA, 19 nt, Human
ucucagagcccuagaggcc

SEQ ID NO: 960091 - RNA, 22 nt, Human
cacugccuccccaggcuccaca

SEQ ID NO: 960092 - RNA, 22 nt, Human
cuggcaggaagaggaaagguca

SEQ ID NO: 960093 - RNA, 22 nt, Human
cagggccugcuuccuucuuguu

SEQ ID NO: 960094 - RNA, 18 nt, Human
gagacacaagggccugga

SEQ ID NO: 960095 - RNA, 22 nt, Human
acagggcaaccucugggagacu

SEQ ID NO: 960096 - RNA, 22 nt, Human
augcacagcagugaguucagug

SEQ ID NO: 960097 - RNA, 22 nt, Human
cuuuuauuuugaauuaagggcu

SEQ ID NO: 960098 - RNA, 22 nt, Human
ucaggagcagcaugggugagag

SEQ ID NO: 960099 - RNA, 22 nt, Human
gcagcuuuguggagaggcccau

SEQ ID NO: 960100 - RNA, 22 nt, Human
gaugguuugguaaaaguauguu

SEQ ID NO: 960101 - RNA, 20 nt, Human
gaagcagcuucauguagaca

SEQ ID NO: 960102 - RNA, 22 nt, Human
uaaguucauuagacuacagaua

SEQ ID NO: 960103 - RNA, 20 nt, Human
agucccuuuggucagguauu

SEQ ID NO: 960104 - RNA, 22 nt, Human
ggcaguggguggaucucaggga

SEQ ID NO: 960105 - RNA, 22 nt, Human
gcucuggagauggagccuugag

SEQ ID NO: 960106 - RNA, 22 nt, Human
cugggacccugcccuguggccu

SEQ ID NO: 960107 - RNA, 22 nt, Human
agcagggccaacaguaaacacc

SEQ ID NO: 960108 - RNA, 22 nt, Human
ugcauauuguccuugauauuau

SEQ ID NO: 960109 - RNA, 22 nt, Human
uagcacauaacuuagaauaguu

SEQ ID NO: 960110 - RNA, 22 nt, Human
ugugacaucgcugugucuguuu

SEQ ID NO: 960111 - RNA, 21 nt, Human
ugcaggagucugugagucagg

SEQ ID NO: 960112 - RNA, 23 nt, Human
aaugauuucaugaugauagcagc

SEQ ID NO: 960113 - RNA, 22 nt, Human
uugacaauugggagauauaaag

SEQ ID NO: 960114 - RNA, 22 nt, Human
uccucagacuucccuuugugua

SEQ ID NO: 960115 - RNA, 22 nt, Human
gagagaagaauguuccgaggcc

SEQ ID NO: 960116 - RNA, 20 nt, Human
cugagcccccagccugcagg

SEQ ID NO: 960117 - RNA, 22 nt, Human
gcagcucccaucagggcacaga

SEQ ID NO: 960118 - RNA, 22 nt, Human
ggaucauuaacacauccaucac

SEQ ID NO: 960119 - RNA, 20 nt, Human
uguuucuuuuaaugagcggc

SEQ ID NO: 960120 - RNA, 22 nt, Human
aauucacaugcaugucugugca

SEQ ID NO: 960121 - RNA, 22 nt, Human
ccauggaguuccucuggucuau

SEQ ID NO: 960122 - RNA, 22 nt, Human
aucuggcucacuuagucuagga

SEQ ID NO: 960123 - RNA, 22 nt, Human
uucuuucacucaagaaggaucu

SEQ ID NO: 960124 - RNA, 22 nt, Human
ucaggauguuaauauagcauua

SEQ ID NO: 960125 - RNA, 22 nt, Human
cacagaauuaagggagaaauau

SEQ ID NO: 960126 - RNA, 22 nt, Human
acuaagugauucuaagcaucuu

SEQ ID NO: 960127 - RNA, 22 nt, Human
auucuucaccugagucagucua

SEQ ID NO: 960128 - RNA, 22 nt, Human
agagggcugcugcacagugcuc

SEQ ID NO: 960129 - RNA, 22 nt, Human
ccaaggagcaaggcucaacaag

SEQ ID NO: 960130 - RNA, 22 nt, Human
aucaggauccaccuugagccug

SEQ ID NO: 960131 - RNA, 22 nt, Human
ccaggagacuguacugauauuu

SEQ ID NO: 960132 - RNA, 22 nt, Human
cagccagggucaggcagcuucu

SEQ ID NO: 960133 - RNA, 22 nt, Human
ugggccuggcccuguggaggag

SEQ ID NO: 960134 - RNA, 22 nt, Human
gcagagccagaauggccaggac

SEQ ID NO: 960135 - RNA, 22 nt, Human
cagggcagaaggcacucuacuc

SEQ ID NO: 960136 - RNA, 22 nt, Human
aguucucaggucagcugagucu

SEQ ID NO: 960137 - RNA, 22 nt, Human
caugggcuacagaagcaugcug

SEQ ID NO: 960138 - RNA, 22 nt, Human
ugguccagacauuucugaggua

SEQ ID NO: 960139 - RNA, 22 nt, Human
caagauggaguccgggaaugug

SEQ ID NO: 960140 - RNA, 22 nt, Human
agaggcugggaaggguccccgg

SEQ ID NO: 960141 - RNA, 22 nt, Human
gacagcugugcaggagaagggg

SEQ ID NO: 960142 - RNA, 22 nt, Human
ggcucaagcagucugccugccu

SEQ ID NO: 960143 - RNA, 22 nt, Human
gagagugaggcaucaggggcag

SEQ ID NO: 960144 - RNA, 22 nt, Human
uuucacaaguaaaguccuaagu

SEQ ID NO: 960145 - RNA, 17 nt, Human
cagugcagagcccuuuc

SEQ ID NO: 960146 - RNA, 22 nt, Human
aagauuucugcuccugagagaa

SEQ ID NO: 960147 - RNA, 22 nt, Human
auggccaagaaguauuccugac

SEQ ID NO: 960148 - RNA, 22 nt, Human
gauggggaugagaagugagcag

SEQ ID NO: 960149 - RNA, 22 nt, Human
gcuggagccuucugcucuguug

SEQ ID NO: 960150 - RNA, 22 nt, Human
cagaguguauucugcaguugca

SEQ ID NO: 960151 - RNA, 22 nt, Human
ggccgggcaggucucagccagc

SEQ ID NO: 960152 - RNA, 22 nt, Human
uaaugucaaggugauagauuug

SEQ ID NO: 960153 - RNA, 22 nt, Human
uuucucuguucucuaacuguaa

SEQ ID NO: 960154 - RNA, 22 nt, Human
uuccuguccgcaauggccuggg

SEQ ID NO: 960155 - RNA, 22 nt, Human
agcagcugccagagagaguucc

SEQ ID NO: 960156 - RNA, 22 nt, Human
uagcagggguagauagagugug

SEQ ID NO: 960157 - RNA, 22 nt, Human
ucugggaaguccucugucaugc

SEQ ID NO: 960158 - RNA, 23 nt, Human
cuguggcugaguccuguuggagu

SEQ ID NO: 960159 - RNA, 22 nt, Human
uccaugagaacccuuggagaua

SEQ ID NO: 960160 - RNA, 22 nt, Human
ugccuugguucucuacuuggag

SEQ ID NO: 960161 - RNA, 22 nt, Human
uccagcucuaacaugcugggcc

SEQ ID NO: 960162 - RNA, 22 nt, Human
uaaugugugucaucaguagagu

SEQ ID NO: 960163 - RNA, 20 nt, Human
gugggcagaugugugcaugg

SEQ ID NO: 960164 - RNA, 22 nt, Human
uauuucugaggcccaggaagug

SEQ ID NO: 960165 - RNA, 18 nt, Human
uucagcagcagacacacu

SEQ ID NO: 960166 - RNA, 22 nt, Human
uccauuuacuauucucauaucg

SEQ ID NO: 960167 - RNA, 22 nt, Human
agcugucuccagauacaggauu

SEQ ID NO: 960168 - RNA, 23 nt, Human
agaggggagcaucugcuggcuga

SEQ ID NO: 960169 - RNA, 22 nt, Human
cacguuuuaugacagaagaagc

SEQ ID NO: 960170 - RNA, 22 nt, Human
ccagccucaucgccugccuguc

SEQ ID NO: 960171 - RNA, 22 nt, Human
uacaguaucuucuggcaagcau

SEQ ID NO: 960172 - RNA, 22 nt, Human
uuugaguugcuuauuuaauagg

SEQ ID NO: 960173 - RNA, 22 nt, Human
caagaugaucccugaaggcagc

SEQ ID NO: 960174 - RNA, 22 nt, Human
ccagagacgucggucagggcgc

SEQ ID NO: 960175 - RNA, 22 nt, Human
uauuauuauaguuauugggaag

SEQ ID NO: 960176 - RNA, 22 nt, Human
ggccucugcccucacuccuguc

SEQ ID NO: 960177 - RNA, 22 nt, Human
gcugucccgcugacuuccagcu

SEQ ID NO: 960178 - RNA, 22 nt, Human
uuugaaaggaaguuaauacuuu

SEQ ID NO: 960179 - RNA, 22 nt, Human
ucugcagcuuuuugguggggug

SEQ ID NO: 960180 - RNA, 22 nt, Human
ucacaguaucacacaaggauua

SEQ ID NO: 960181 - RNA, 16 nt, Human
gggcugggggauucug

SEQ ID NO: 960182 - RNA, 22 nt, Human
aggcagcuuucuguaggggugu

SEQ ID NO: 960183 - RNA, 22 nt, Human
ggucccaggaagugcggcggcg

SEQ ID NO: 960184 - RNA, 22 nt, Human
cuggacagaaagggcugcugug

SEQ ID NO: 960185 - RNA, 22 nt, Human
caggagaagguuuggagugcag

SEQ ID NO: 960186 - RNA, 23 nt, Human
agcuggaggcugucuacucccaa

SEQ ID NO: 960187 - RNA, 22 nt, Human
gguguccaucaggcugugcuuc

SEQ ID NO: 960188 - RNA, 22 nt, Human
uugcucuguaauaaucuggggu

SEQ ID NO: 960189 - RNA, 21 nt, Human
gggaaauuaggauugcucauc

SEQ ID NO: 960190 - RNA, 22 nt, Human
uuuuuaagagauucuccagucu

SEQ ID NO: 960191 - RNA, 18 nt, Human
uccugccugcgggcuccc

SEQ ID NO: 960192 - RNA, 22 nt, Human
ucaggggacuuaggagagaagu

SEQ ID NO: 960193 - RNA, 22 nt, Human
gcagggccagguacaagaagca

SEQ ID NO: 960194 - RNA, 22 nt, Human
uauguguaggaggaggacaggg

SEQ ID NO: 960195 - RNA, 22 nt, Human
ccucuggcuguaccacuggcac

SEQ ID NO: 960196 - RNA, 22 nt, Human
cucugucccagacccaccucuc

SEQ ID NO: 960197 - RNA, 22 nt, Human
augugcuaaacucaacaaaucu

SEQ ID NO: 960198 - RNA, 22 nt, Human
uauaagaaacaaggcaaauuuu

SEQ ID NO: 960199 - RNA, 22 nt, Human
uggcagcagcuaacuuaggcag

SEQ ID NO: 960200 - RNA, 22 nt, Human
ccucugcucugguccaugugcu

SEQ ID NO: 960201 - RNA, 22 nt, Human
cugcuucuccaaaguaggacuu

SEQ ID NO: 960202 - RNA, 22 nt, Human
aggagucaggaccaaauggaaa

SEQ ID NO: 960203 - RNA, 19 nt, Human
aggccugggguuuugcacu

SEQ ID NO: 960204 - RNA, 22 nt, Human
auaaggcauauagucacuuuuu

SEQ ID NO: 960205 - RNA, 22 nt, Human
agcaugcacaugacuggcuuaa

SEQ ID NO: 960206 - RNA, 22 nt, Human
ugccucugggugaccaaggagc

SEQ ID NO: 960207 - RNA, 22 nt, Human
gcuguucucuguaacaugcauu

SEQ ID NO: 960208 - RNA, 22 nt, Human
gcguaaggccucuggucucgga

SEQ ID NO: 960209 - RNA, 22 nt, Human
uaucuguuugcucacagguguu

SEQ ID NO: 960210 - RNA, 22 nt, Human
gcuggccugcgagggcaggcug

SEQ ID NO: 960211 - RNA, 22 nt, Human
ggucucagcuggaguccuuggu

SEQ ID NO: 960212 - RNA, 22 nt, Human
ucugagcccucuuuugcagccc

SEQ ID NO: 960213 - RNA, 21 nt, Human
ucugucugguuuuagaguggc

SEQ ID NO: 960214 - RNA, 22 nt, Human
cagcauggggaucacuguaggc

SEQ ID NO: 960215 - RNA, 22 nt, Human
cacaaaugguuguagacauuaa

SEQ ID NO: 960216 - RNA, 22 nt, Human
uauuauuaaauggcagaauuuu

SEQ ID NO: 960217 - RNA, 22 nt, Human
cgaggcagggaagcugcaaaag

SEQ ID NO: 960218 - RNA, 22 nt, Human
uccaugagacagauacuguaag

SEQ ID NO: 960219 - RNA, 22 nt, Human
ucucagagcucacaccuccugg

SEQ ID NO: 960220 - RNA, 22 nt, Human
aaguguuaaaagauuaaaugcu

SEQ ID NO: 960221 - RNA, 22 nt, Human
cagcuccucacgagucuugaaa

SEQ ID NO: 960222 - RNA, 22 nt, Human
gggaguggagagcaauggauga

SEQ ID NO: 960223 - RNA, 22 nt, Human
caggugggccaugaaaaaugac

SEQ ID NO: 960224 - RNA, 22 nt, Human
uguuucaagcaauagcauuuca

SEQ ID NO: 960225 - RNA, 22 nt, Human
ggacuggccggcgcugaggccc

SEQ ID NO: 960226 - RNA, 22 nt, Human
uuaaaguucauuaaaugagcca

SEQ ID NO: 960227 - RNA, 20 nt, Human
gucucagaauggauuugcau

SEQ ID NO: 960228 - RNA, 18 nt, Human
ccauuucaugauuauuac

SEQ ID NO: 960229 - RNA, 22 nt, Human
gcaaaugcucuccuuggucagg

SEQ ID NO: 960230 - RNA, 22 nt, Human
uuucuagucagccauaucuagu

SEQ ID NO: 960231 - RNA, 23 nt, Human
aaauuauugcucuucaauugccu

SEQ ID NO: 960232 - RNA, 22 nt, Human
gggcuggcucugucuagaaagg

SEQ ID NO: 960233 - RNA, 22 nt, Human
agggcagaaaccaccuugaugg

SEQ ID NO: 960234 - RNA, 22 nt, Human
acuccugguucccaguugagau

SEQ ID NO: 960235 - RNA, 22 nt, Human
uauaaagaaguguaaacaggaa

SEQ ID NO: 960236 - RNA, 22 nt, Human
gcucugagauugagccuuuggu

SEQ ID NO: 960237 - RNA, 22 nt, Human
uauguguuugacacccugcaag

SEQ ID NO: 960238 - RNA, 17 nt, Human
uucugagccacuuccuu

SEQ ID NO: 960239 - RNA, 22 nt, Human
uauuuaauuugcucauugugau

SEQ ID NO: 960240 - RNA, 22 nt, Human
uaaaaugaucucucauguucuu

SEQ ID NO: 960241 - RNA, 22 nt, Human
cguggccuuugagugagcuccc

SEQ ID NO: 960242 - RNA, 22 nt, Human
cugcccugucuuuuucugauga

SEQ ID NO: 960243 - RNA, 22 nt, Human
ugugaugguucacugggcauga

SEQ ID NO: 960244 - RNA, 20 nt, Human
cugggaggucuuccaaauca

SEQ ID NO: 960245 - RNA, 22 nt, Human
gccaugaggaacuguaagacaa

SEQ ID NO: 960246 - RNA, 22 nt, Human
uaguacuuaucucugucauugu

SEQ ID NO: 960247 - RNA, 22 nt, Human
aaaguuucaauagaggaagugg

SEQ ID NO: 960248 - RNA, 22 nt, Human
gcagcauauuguacuggccugc

SEQ ID NO: 960249 - RNA, 22 nt, Human
guuuuuccuugcugaggacccg

SEQ ID NO: 960250 - RNA, 22 nt, Human
uuuugcuugagugcacaaaaug

SEQ ID NO: 960251 - RNA, 22 nt, Human
ucuuuucaucauuuaauaggua

SEQ ID NO: 960252 - RNA, 22 nt, Human
uuaaacagguuuuugaauggcc

SEQ ID NO: 960253 - RNA, 22 nt, Human
aaguuuuaacaaguacuuacua

SEQ ID NO: 960254 - RNA, 22 nt, Human
uaccuauagguacaauuacaag

SEQ ID NO: 960255 - RNA, 22 nt, Human
ggauccuuaacuaucacaguga

SEQ ID NO: 960256 - RNA, 22 nt, Human
ugauuuccuagcugacaugaaa

SEQ ID NO: 960257 - RNA, 22 nt, Human
ucaagagaagugcuccacagua

SEQ ID NO: 960258 - RNA, 18 nt, Human
cagaugagaugcaaucuc

SEQ ID NO: 960259 - RNA, 22 nt, Human
uccaaauucuagggccuugguu

SEQ ID NO: 960260 - RNA, 22 nt, Human
ccagcuggagccaagguggacu

SEQ ID NO: 960261 - RNA, 22 nt, Human
uagaucugauacaauucaucug

SEQ ID NO: 960262 - RNA, 22 nt, Human
cuguacaucucugaggacagua

SEQ ID NO: 960263 - RNA, 21 nt, Human
auguaggguuugccuucucua

SEQ ID NO: 960264 - RNA, 22 nt, Human
gggugaggagcugccagucaug

SEQ ID NO: 960265 - RNA, 22 nt, Human
acaguuucuccauuuacaccuu

SEQ ID NO: 960266 - RNA, 22 nt, Human
ccucagggucugaggagaccgu

SEQ ID NO: 960267 - RNA, 22 nt, Human
ccagguaggagagagggauccu

SEQ ID NO: 960268 - RNA, 22 nt, Human
aauuucagaacccaaauuagcg

SEQ ID NO: 960269 - RNA, 22 nt, Human
agggggugcccagaugaaggau

SEQ ID NO: 960270 - RNA, 22 nt, Human
uaauacagaaguguauuaaaau

SEQ ID NO: 960271 - RNA, 19 nt, Human
cagcaauaaugccagaugg

SEQ ID NO: 960272 - RNA, 22 nt, Human
gccuaauaugcaaaauugauac

SEQ ID NO: 960273 - RNA, 20 nt, Human
uuuuuccuucucuacaggca

SEQ ID NO: 960274 - RNA, 22 nt, Human
uauauguaagcuauguaagagu

SEQ ID NO: 960275 - RNA, 22 nt, Human
uaugcacacaggcuuaauucau

SEQ ID NO: 960276 - RNA, 22 nt, Human
caaauagugucacauugugagg

SEQ ID NO: 960277 - RNA, 22 nt, Human
ucauugcaccccagucccagcu

SEQ ID NO: 960278 - RNA, 22 nt, Human
gcagcuggcccugacacgcaga

SEQ ID NO: 960279 - RNA, 22 nt, Human
auuugcuuucagguauaaaagg

SEQ ID NO: 960280 - RNA, 22 nt, Human
uagaaacauguucuguucuguu

SEQ ID NO: 960281 - RNA, 22 nt, Human
acugggaggcaucuggagcuga

SEQ ID NO: 960282 - RNA, 22 nt, Human
ucacugcugcugccaugaugga

SEQ ID NO: 960283 - RNA, 22 nt, Human
gcagcugauggaaguccuauug

SEQ ID NO: 960284 - RNA, 22 nt, Human
gaggugggaugugugugcuacu

SEQ ID NO: 960285 - RNA, 22 nt, Human
ggcagcuuucaauaggguuaug

SEQ ID NO: 960286 - RNA, 22 nt, Human
augucuuucucacagccaguuc

SEQ ID NO: 960287 - RNA, 20 nt, Human
auaaaauaacugccacaaga

SEQ ID NO: 960288 - RNA, 22 nt, Human
uccagggaugccagccauguug

SEQ ID NO: 960289 - RNA, 22 nt, Human
guggugcauccuugaguaagcu

SEQ ID NO: 960290 - RNA, 22 nt, Human
auguaaggcugccuaugacacu

SEQ ID NO: 960291 - RNA, 22 nt, Human
uaugugcaaaaugcuagacuag

SEQ ID NO: 960292 - RNA, 22 nt, Human
auccuugaaugacucugcccuc

SEQ ID NO: 960293 - RNA, 22 nt, Human
ucagaggacgcacuaggguugu

SEQ ID NO: 960294 - RNA, 22 nt, Human
ccuccugggacaggcuggcaca

SEQ ID NO: 960295 - RNA, 23 nt, Human
cuccccaguguccucaugcaucu

SEQ ID NO: 960296 - RNA, 22 nt, Human
uagaaauccccagucucauagu

SEQ ID NO: 960297 - RNA, 17 nt, Human
ugaaggaaggaugaugu

SEQ ID NO: 960298 - RNA, 22 nt, Human
ggcagacuguaauaggagaauu

SEQ ID NO: 960299 - RNA, 22 nt, Human
auucuuuucccaacugcuuuaa

SEQ ID NO: 960300 - RNA, 22 nt, Human
agcugcugcggaaagaugccac

SEQ ID NO: 960301 - RNA, 22 nt, Human
agggagcuucuggccucagccu

SEQ ID NO: 960302 - RNA, 20 nt, Human
ugcuuccuggccacugcggg

SEQ ID NO: 960303 - RNA, 22 nt, Human
auacaaagacaaaucucaaucu

SEQ ID NO: 960304 - RNA, 22 nt, Human
aauaugcauuaacuguguacau

SEQ ID NO: 960305 - RNA, 22 nt, Human
auuagguugugcuuuguggaca

SEQ ID NO: 960306 - RNA, 22 nt, Human
uacauauacugagugauuugcu

SEQ ID NO: 960307 - RNA, 22 nt, Human
uuuccucugcugccauugcccc

SEQ ID NO: 960308 - RNA, 19 nt, Human
cccaaggcccugggcaggc

SEQ ID NO: 960309 - RNA, 22 nt, Human
uggcagcuccggguaggggcug

SEQ ID NO: 960310 - RNA, 22 nt, Human
uaagaaauuuaguuauagaaug

SEQ ID NO: 960311 - RNA, 22 nt, Human
gcagguggauuaucagaagugc

SEQ ID NO: 960312 - RNA, 21 nt, Human
ccucugcucgggcaugcguuu

SEQ ID NO: 960313 - RNA, 22 nt, Human
uuggcagugucugcaaaaugga

SEQ ID NO: 960314 - RNA, 22 nt, Human
gggauggggucaacauguaccu

SEQ ID NO: 960315 - RNA, 22 nt, Human
uucaacuaauguuuauuuuaug

SEQ ID NO: 960316 - RNA, 22 nt, Human
guugaaauccuaacccccuagu

SEQ ID NO: 960317 - RNA, 22 nt, Human
caguggcagagaacagagaccu

SEQ ID NO: 960318 - RNA, 22 nt, Human
ggcugcuggcauugagguaggu

SEQ ID NO: 960319 - RNA, 22 nt, Human
agggagagguugaaaccucagu

SEQ ID NO: 960320 - RNA, 22 nt, Human
uuuaggauauuaauguucagag

SEQ ID NO: 960321 - RNA, 22 nt, Human
ccagggcugcugugggacucca

SEQ ID NO: 960322 - RNA, 22 nt, Human
uuugaaaguucuucugacacua

SEQ ID NO: 960323 - RNA, 23 nt, Human
agagcuuagggaauucacaugag

SEQ ID NO: 960324 - RNA, 22 nt, Human
aaugcacagcuaaagugguucc

SEQ ID NO: 960325 - RNA, 22 nt, Human
uuugaaauguaucaguauaggu

SEQ ID NO: 960326 - RNA, 22 nt, Human
gagguacagaguguuccaaugu

SEQ ID NO: 960327 - RNA, 22 nt, Human
augcacuacuuggcuuuacuga

SEQ ID NO: 960328 - RNA, 21 nt, Human
agcagaacagucgagcacugc

SEQ ID NO: 960329 - RNA, 22 nt, Human
cagaaagaccugggcucaagag

SEQ ID NO: 960330 - RNA, 22 nt, Human
uacaggaggauuaucaaaggau

SEQ ID NO: 960331 - RNA, 22 nt, Human
gugauugcccagcaccauuguu

SEQ ID NO: 960332 - RNA, 22 nt, Human
ugcaccauuuugucaggcuacu

SEQ ID NO: 960333 - RNA, 22 nt, Human
gcaggagagccagcaggcuucc

SEQ ID NO: 960334 - RNA, 22 nt, Human
caggaaagggaugggcugccac

SEQ ID NO: 960335 - RNA, 17 nt, Human
ggagagugggaauggcc

SEQ ID NO: 960336 - RNA, 22 nt, Human
gcauuuagcuuuaaaauauuuc

SEQ ID NO: 960337 - RNA, 22 nt, Human
uugaauaggacucagcagugau

SEQ ID NO: 960338 - RNA, 21 nt, Human
acagagccgggcacaaagcug

SEQ ID NO: 960339 - RNA, 22 nt, Human
gcccucuggcagccuuggcugg

SEQ ID NO: 960340 - RNA, 22 nt, Human
ccugggcaacauagugagaccc

SEQ ID NO: 960341 - RNA, 22 nt, Human
cggcagcuccgcgccguaggac

SEQ ID NO: 960342 - RNA, 22 nt, Human
ccuggcaguuuugcccaggauu

SEQ ID NO: 960343 - RNA, 22 nt, Human
uggcucaggauaauuuucccaa

SEQ ID NO: 960344 - RNA, 22 nt, Human
ggagaugguggaagcuggugca

SEQ ID NO: 960345 - RNA, 22 nt, Human
cuucuucaaccugaaaguuuca

SEQ ID NO: 960346 - RNA, 22 nt, Human
aaugaugguuaaacacuggagg

SEQ ID NO: 960347 - RNA, 19 nt, Human
gucucugcuccagggucuc

SEQ ID NO: 960348 - RNA, 22 nt, Human
ggcugcuuuaucggcugcugaa

SEQ ID NO: 960349 - RNA, 22 nt, Human
auuuccauagagcgucucacag

SEQ ID NO: 960350 - RNA, 22 nt, Human
caaggaaacaugaaaugcauug

SEQ ID NO: 960351 - RNA, 22 nt, Human
ggcaggcucagcagccaaggag

SEQ ID NO: 960352 - RNA, 22 nt, Human
agagugauggguugugcugacc

SEQ ID NO: 960353 - RNA, 22 nt, Human
uucuguguggguagcuccuguu

SEQ ID NO: 960354 - RNA, 22 nt, Human
agcagagcccuuccauggccuu

SEQ ID NO: 960355 - RNA, 22 nt, Human
aaaugcaggaaauuaugcuuuu

SEQ ID NO: 960356 - RNA, 18 nt, Human
uuaagagcugaaagggga

SEQ ID NO: 960357 - RNA, 18 nt, Human
ugucaucuguuuaaaacc

SEQ ID NO: 960358 - RNA, 22 nt, Human
gauaugaaguggcauugugaag

SEQ ID NO: 960359 - RNA, 22 nt, Human
acaggagacccugcugguucug

SEQ ID NO: 960360 - RNA, 22 nt, Human
gucugcccucacgccagcuggg

SEQ ID NO: 960361 - RNA, 22 nt, Human
gcuccuggcucucugagggcug

SEQ ID NO: 960362 - RNA, 22 nt, Human
uggcagaggaggcucagauuga

SEQ ID NO: 960363 - RNA, 22 nt, Human
ggguccagaguugaagagguua

SEQ ID NO: 960364 - RNA, 22 nt, Human
caggauggccccggggcugugc

SEQ ID NO: 960365 - RNA, 22 nt, Human
aaagcaaugaugguagacacgu

SEQ ID NO: 960366 - RNA, 22 nt, Human
uugugaaacauucauggauuug

SEQ ID NO: 960367 - RNA, 22 nt, Human
acuggcagcuguaggaugcaug

SEQ ID NO: 960368 - RNA, 22 nt, Human
agcugccaggccccugagaacc

SEQ ID NO: 960369 - RNA, 17 nt, Human
gcucccugaggacagcu

SEQ ID NO: 960370 - RNA, 22 nt, Human
agggagacacaugaggaaguca

SEQ ID NO: 960371 - RNA, 22 nt, Human
aaaguaaccuaguaauaguguc

SEQ ID NO: 960372 - RNA, 22 nt, Human
uaugcacagaaguuugcugaau

SEQ ID NO: 960373 - RNA, 22 nt, Human
gaggaugugucuggucugggca

SEQ ID NO: 960374 - RNA, 22 nt, Human
uuggccaagacucauguccuau

SEQ ID NO: 960375 - RNA, 21 nt, Human
ugaagccugaggcauagcccc

SEQ ID NO: 960376 - RNA, 22 nt, Human
ugcuggcccuggcucagggaac

SEQ ID NO: 960377 - RNA, 22 nt, Human
aggcuucccagcugagcucagc

SEQ ID NO: 960378 - RNA, 22 nt, Human
uggggcuguccuuagucugaga

SEQ ID NO: 960379 - RNA, 22 nt, Human
caggaggcuccuagggcucugu

SEQ ID NO: 960380 - RNA, 22 nt, Human
aagugacaccucuucccuuucc

SEQ ID NO: 960381 - RNA, 22 nt, Human
uggagagguugaauaacuuguc

SEQ ID NO: 960382 - RNA, 22 nt, Human
uacauuguuuuuucuugccauc

SEQ ID NO: 960383 - RNA, 22 nt, Human
ccaaggaggccccaggucagcu

SEQ ID NO: 960384 - RNA, 22 nt, Human
aggcccugcaggaguggggaca

SEQ ID NO: 960385 - RNA, 22 nt, Human
cucccagggucuaggcugcugg

SEQ ID NO: 960386 - RNA, 22 nt, Human
gcagggcaugggcccugucugc

SEQ ID NO: 960387 - RNA, 22 nt, Human
gcucuguguugucagaggcacc

SEQ ID NO: 960388 - RNA, 22 nt, Human
uggcccuguggaggucagugag

SEQ ID NO: 960389 - RNA, 22 nt, Human
ugccuggauucgguuguuguca

SEQ ID NO: 960390 - RNA, 22 nt, Human
caagcuccuuacauccacaggg

SEQ ID NO: 960391 - RNA, 22 nt, Human
aagccaggaagagagccuucac

SEQ ID NO: 960392 - RNA, 22 nt, Human
uguuuaaauagaacauacugca

SEQ ID NO: 960393 - RNA, 20 nt, Human
ccagagcugauggcugcccg

SEQ ID NO: 960394 - RNA, 22 nt, Human
uguacaguaggaacuuguuauu

SEQ ID NO: 960395 - RNA, 22 nt, Human
cuggcugguuacuauuucuggu

SEQ ID NO: 960396 - RNA, 22 nt, Human
aggugcuuggcucgugcacaca

SEQ ID NO: 960397 - RNA, 22 nt, Human
ugcucccaggcucuguggucug

SEQ ID NO: 960398 - RNA, 22 nt, Human
gggagagagagcucauguugaa

SEQ ID NO: 960399 - RNA, 22 nt, Human
guauucuugguuaucaaaauac

SEQ ID NO: 960400 - RNA, 22 nt, Human
caugaaaaugucaaguucugcu

SEQ ID NO: 960401 - RNA, 22 nt, Human
acagaccaaaaaaggauauugg

SEQ ID NO: 960402 - RNA, 22 nt, Human
gaggagagaugguagauugggu

SEQ ID NO: 960403 - RNA, 22 nt, Human
agcuuuguauuugagcauacga

SEQ ID NO: 960404 - RNA, 22 nt, Human
accaggagguguuugcucaagu

SEQ ID NO: 960405 - RNA, 22 nt, Human
gacacagcacuguacaaggaau

SEQ ID NO: 960406 - RNA, 22 nt, Human
auauuaaugagcaaguaaguga

SEQ ID NO: 960407 - RNA, 22 nt, Human
uauguuaaauguuugauguuua

SEQ ID NO: 960408 - RNA, 22 nt, Human
uacuuugcagcuugauaaaaug

SEQ ID NO: 960409 - RNA, 22 nt, Human
acauauauuacuaguaaagaca

SEQ ID NO: 960410 - RNA, 22 nt, Human
ugugucaaguggaauuucaggg

SEQ ID NO: 960411 - RNA, 22 nt, Human
aaaaugugcaguuuuuaagcug

SEQ ID NO: 960412 - RNA, 22 nt, Human
ugcacccucaucagucaaaugg

SEQ ID NO: 960413 - RNA, 22 nt, Human
ccccuuccgucucuugaguguc

SEQ ID NO: 960414 - RNA, 20 nt, Human
acuuucucgguuucucaccu

SEQ ID NO: 960415 - RNA, 22 nt, Human
ugccaaggguaugggcaagaua

SEQ ID NO: 960416 - RNA, 21 nt, Human
gacaaagugaagcaggcagga

SEQ ID NO: 960417 - RNA, 22 nt, Human
cagagugaaauaggggaucaag

SEQ ID NO: 960418 - RNA, 22 nt, Human
augcuauacucaaagaaauuca

SEQ ID NO: 960419 - RNA, 22 nt, Human
gugccugugccaggggugugcu

SEQ ID NO: 960420 - RNA, 22 nt, Human
ugugaaagucaaauuaauugaa

SEQ ID NO: 960421 - RNA, 22 nt, Human
aaaacaguuauaaacagaguca

SEQ ID NO: 960422 - RNA, 22 nt, Human
uuauuagguuuacauaaagguu

SEQ ID NO: 960423 - RNA, 22 nt, Human
caugaagcauguuuugucauga

SEQ ID NO: 960424 - RNA, 22 nt, Human
ggccugugagcccuugcaugua

SEQ ID NO: 960425 - RNA, 22 nt, Human
uggaguuccuuugaaaggcucu

SEQ ID NO: 960426 - RNA, 22 nt, Human
ugggccugggcuccuguccucu

SEQ ID NO: 960427 - RNA, 20 nt, Human
cugggcucgguggcccuggc

SEQ ID NO: 960428 - RNA, 22 nt, Human
augaguaaaaccacuauuuaca

SEQ ID NO: 960429 - RNA, 22 nt, Human
acuggaagccaguugacaauca

SEQ ID NO: 960430 - RNA, 22 nt, Human
ggccugcuccgggggcugagcu

SEQ ID NO: 960431 - RNA, 22 nt, Human
gggaggucagggugccugcugg

SEQ ID NO: 960432 - RNA, 22 nt, Human
aucaguuuggaacauucaggcc

SEQ ID NO: 960433 - RNA, 22 nt, Human
ccagucccgcaugguccagaau

SEQ ID NO: 960434 - RNA, 22 nt, Human
ucuucuuccuccacagggccca

SEQ ID NO: 960435 - RNA, 22 nt, Human
cagucuuauccugaaaacaaca

SEQ ID NO: 960436 - RNA, 22 nt, Human
cucagcagagaccagggaggaa

SEQ ID NO: 960437 - RNA, 22 nt, Human
ugugcucugaagagugcauguc

SEQ ID NO: 960438 - RNA, 22 nt, Human
ccucccucuguuagagcugucu

SEQ ID NO: 960439 - RNA, 22 nt, Human
ccuccuggcccugggccuggaa

SEQ ID NO: 960440 - RNA, 23 nt, Human
ucccagggaaggugagcgaggcu

SEQ ID NO: 960441 - RNA, 22 nt, Human
gggccugugcacaguucuguua

SEQ ID NO: 960442 - RNA, 22 nt, Human
cagaaguaagauuacugugagu

SEQ ID NO: 960443 - RNA, 22 nt, Human
ugcuggaggaguuuacuguggc

SEQ ID NO: 960444 - RNA, 22 nt, Human
uccugugccuccaccugcuccg

SEQ ID NO: 960445 - RNA, 20 nt, Human
gcccaggaucucugaggcau

SEQ ID NO: 960446 - RNA, 22 nt, Human
agaaacugaauuauuucugagg

SEQ ID NO: 960447 - RNA, 21 nt, Human
cacugcagccuugaccugggc

SEQ ID NO: 960448 - RNA, 22 nt, Human
caggccucuccuuagucuggca

SEQ ID NO: 960449 - RNA, 22 nt, Human
ucucuucugaaaccugucuuua

SEQ ID NO: 960450 - RNA, 22 nt, Human
aguaacuaugcuugagaaucag

SEQ ID NO: 960451 - RNA, 22 nt, Human
aaaaugagauacaguuugaaag

SEQ ID NO: 960452 - RNA, 22 nt, Human
uaagucaugauucuguguuacu

SEQ ID NO: 960453 - RNA, 21 nt, Human
ccugggagaucagcugccuuc

SEQ ID NO: 960454 - RNA, 22 nt, Human
cagcccaaagccccaggcuaga

SEQ ID NO: 960455 - RNA, 22 nt, Human
aucuauuaugcugagaaacugu

SEQ ID NO: 960456 - RNA, 18 nt, Human
gccugggaggaggaaaug

SEQ ID NO: 960457 - RNA, 22 nt, Human
gcucccagauuucagccuugug

SEQ ID NO: 960458 - RNA, 22 nt, Human
ggcagggaaacagcugauccca

SEQ ID NO: 960459 - RNA, 22 nt, Human
ucucugucugagccuggcagac

SEQ ID NO: 960460 - RNA, 22 nt, Human
uugggguguuggauggagcaag

SEQ ID NO: 960461 - RNA, 22 nt, Human
guggcaggagagacacagccau

SEQ ID NO: 960462 - RNA, 22 nt, Human
augugcaugcacuuacaugugu

SEQ ID NO: 960463 - RNA, 22 nt, Human
cuuuggcagccucugcuauuga

SEQ ID NO: 960464 - RNA, 19 nt, Human
uucacauuggaagaaguag

SEQ ID NO: 960465 - RNA, 22 nt, Human
ccuuuuaugaacuugagcaggu

SEQ ID NO: 960466 - RNA, 22 nt, Human
auaaacacuucuagggcacaca

SEQ ID NO: 960467 - RNA, 22 nt, Human
gcugagaggcacuaucuccgga

SEQ ID NO: 960468 - RNA, 22 nt, Human
cuggcucauuuuagcaucaggu

SEQ ID NO: 960469 - RNA, 22 nt, Human
gacccaggggcagggagaaagu

SEQ ID NO: 960470 - RNA, 22 nt, Human
guuauguaugggggccuuauga

SEQ ID NO: 960471 - RNA, 22 nt, Human
uaugaacuuuugaugugacaug

SEQ ID NO: 960472 - RNA, 22 nt, Human
ucugagcuuuuauuaucaaccu

SEQ ID NO: 960473 - RNA, 22 nt, Human
agaggggagagcuaagcaauuc

SEQ ID NO: 960474 - RNA, 22 nt, Human
cccagcauggagugaggacuca

SEQ ID NO: 960475 - RNA, 22 nt, Human
acacaguaccccaaggcugggc

SEQ ID NO: 960476 - RNA, 22 nt, Human
acagaccaaguuuccagcaggu

SEQ ID NO: 960477 - RNA, 22 nt, Human
aguucuuauuuuggaacugagg

SEQ ID NO: 960478 - RNA, 22 nt, Human
gugcauuugacgaauacucacu

SEQ ID NO: 960479 - RNA, 22 nt, Human
gggcugcuuccuggggaaugcu

SEQ ID NO: 960480 - RNA, 22 nt, Human
cuuccugggcaauguucugcuu

SEQ ID NO: 960481 - RNA, 20 nt, Human
agacaggagcccccauucag

SEQ ID NO: 960482 - RNA, 22 nt, Human
cagagcuggagggaacccuggc

SEQ ID NO: 960483 - RNA, 22 nt, Human
augcccugcugcuggggcagug

SEQ ID NO: 960484 - RNA, 22 nt, Human
gccuucaggaggguuccagaca

SEQ ID NO: 960485 - RNA, 22 nt, Human
aaguuuuccuguguccaagaug

SEQ ID NO: 960486 - RNA, 22 nt, Human
uaugugcauaugcauacacaca

SEQ ID NO: 960487 - RNA, 22 nt, Human
ucaaaugcugccuuugugugcc

SEQ ID NO: 960488 - RNA, 22 nt, Human
uuuaagaugguauuuuauaaag

SEQ ID NO: 960489 - RNA, 22 nt, Human
uacaucauaauaauacuuagaa

SEQ ID NO: 960490 - RNA, 22 nt, Human
gaggagagaagcuaacggugcu

SEQ ID NO: 960491 - RNA, 22 nt, Human
uacuuccagcaaucugcauauu

SEQ ID NO: 960492 - RNA, 22 nt, Human
aagcccagcugaaagcauuuuu

SEQ ID NO: 960493 - RNA, 22 nt, Human
aauuaacaaauguagcugugau

SEQ ID NO: 960494 - RNA, 22 nt, Human
gcaugcugcaccagagccucuc

SEQ ID NO: 960495 - RNA, 22 nt, Human
cuguccuggagggcauaggacg

SEQ ID NO: 960496 - RNA, 22 nt, Human
ccaggguguagggauuccagau

SEQ ID NO: 960497 - RNA, 22 nt, Human
ucagaacagaagcuggcuauaa

SEQ ID NO: 960498 - RNA, 22 nt, Human
aggagcagaauuuaaugugcag

SEQ ID NO: 960499 - RNA, 22 nt, Human
acaggagugaaucuggcacuua

SEQ ID NO: 960500 - RNA, 22 nt, Human
aguagaaagaaggcacugggcc

SEQ ID NO: 960501 - RNA, 22 nt, Human
gagcacagccaaaguaagaagg

SEQ ID NO: 960502 - RNA, 22 nt, Human
uuacaggggacauuggggacau

SEQ ID NO: 960503 - RNA, 22 nt, Human
guguguccaggcgggagucaag

SEQ ID NO: 960504 - RNA, 22 nt, Human
ucugaagccuuuguacaggccu

SEQ ID NO: 960505 - RNA, 22 nt, Human
uccuccaggucuaggguggcuu

SEQ ID NO: 960506 - RNA, 22 nt, Human
ugucucagauacgccaucaagg

SEQ ID NO: 960507 - RNA, 22 nt, Human
cagcugccaagaaucuuuucua

SEQ ID NO: 960508 - RNA, 22 nt, Human
agaauuguaagcaauuugauua

SEQ ID NO: 960509 - RNA, 22 nt, Human
gccagagccacuuuugggugau

SEQ ID NO: 960510 - RNA, 22 nt, Human
aaggcugccucugccagaggag

SEQ ID NO: 960511 - RNA, 22 nt, Human
gggagccuugggagugccagcc

SEQ ID NO: 960512 - RNA, 22 nt, Human
ggccaggcugcccugggagcag

SEQ ID NO: 960513 - RNA, 22 nt, Human
ucuguucaguugauguaguuuu

SEQ ID NO: 960514 - RNA, 22 nt, Human
ugccagccagguucugaggcua

SEQ ID NO: 960515 - RNA, 22 nt, Human
auuuuuaugacaaaccauccuc

SEQ ID NO: 960516 - RNA, 22 nt, Human
cacauuuaauccuuuauaagua

SEQ ID NO: 960517 - RNA, 19 nt, Human
ccaggccuccugggagguc

SEQ ID NO: 960518 - RNA, 22 nt, Human
uggaaagucucuuuugacugua

SEQ ID NO: 960519 - RNA, 22 nt, Human
auucuucauguugaagcuguca

SEQ ID NO: 960520 - RNA, 22 nt, Human
uugaagcauuguggcuuguauu

SEQ ID NO: 960521 - RNA, 20 nt, Human
ucagaggcugccagcugggg

SEQ ID NO: 960522 - RNA, 22 nt, Human
aagucacagcuaaauagcuaag

SEQ ID NO: 960523 - RNA, 22 nt, Human
guguuccauguuugagguaguu

SEQ ID NO: 960524 - RNA, 22 nt, Human
ugcuuuguguuugaauagauaa

SEQ ID NO: 960525 - RNA, 22 nt, Human
aauacauauggaauuccauguu

SEQ ID NO: 960526 - RNA, 22 nt, Human
ugcuggaggggccugaccagga

SEQ ID NO: 960527 - RNA, 22 nt, Human
aaaaugcaugagaaugugcucg

SEQ ID NO: 960528 - RNA, 22 nt, Human
auaugagagaggaaagauuuua

SEQ ID NO: 960529 - RNA, 22 nt, Human
acuggcagcagcagcccuuggg

SEQ ID NO: 960530 - RNA, 22 nt, Human
cuccccagguucaggagguggg

SEQ ID NO: 960531 - RNA, 20 nt, Human
ccagucccugagcaccaggg

SEQ ID NO: 960532 - RNA, 22 nt, Human
ccuggcugaaccaaugaagugg

SEQ ID NO: 960533 - RNA, 22 nt, Human
ugcuugugagaguuuuuucaga

SEQ ID NO: 960534 - RNA, 21 nt, Human
gagcugggcgaggcuccgggg

SEQ ID NO: 960535 - RNA, 22 nt, Human
aauuucaaguggcaucuuugau

SEQ ID NO: 960536 - RNA, 22 nt, Human
auauuucucucagacauggaag

SEQ ID NO: 960537 - RNA, 20 nt, Human
cugagcgucuaagaggugag

SEQ ID NO: 960538 - RNA, 19 nt, Human
ugggccugcaucugggucu

SEQ ID NO: 960539 - RNA, 22 nt, Human
agaaaaggauugauggaucaga

SEQ ID NO: 960540 - RNA, 20 nt, Human
uauuaggaaggaggaaggaa

SEQ ID NO: 960541 - RNA, 17 nt, Human
gggcagggacuccuggg

SEQ ID NO: 960542 - RNA, 22 nt, Human
uucuuaagaaaccaucacauuc

SEQ ID NO: 960543 - RNA, 22 nt, Human
ucaaaagucugcauucuucaca

SEQ ID NO: 960544 - RNA, 22 nt, Human
aggggcugcuggguccgccccu

SEQ ID NO: 960545 - RNA, 22 nt, Human
ugaauggucacugagcaucugu

SEQ ID NO: 960546 - RNA, 22 nt, Human
agccuucauaaucuugggcuuu

SEQ ID NO: 960547 - RNA, 22 nt, Human
aggagaggcucuaacucugugu

SEQ ID NO: 960548 - RNA, 22 nt, Human
caggacagcucaacaccuccuc

SEQ ID NO: 960549 - RNA, 22 nt, Human
ggucauugaaaucagaaggguu

SEQ ID NO: 960550 - RNA, 22 nt, Human
uucacaaaacacuauuuucugg

SEQ ID NO: 960551 - RNA, 22 nt, Human
gcucugagaggugcagcaguaa

SEQ ID NO: 960552 - RNA, 22 nt, Human
uauuuaauuagugauuguagag

SEQ ID NO: 960553 - RNA, 19 nt, Human
gcaggguguugacuguccc

SEQ ID NO: 960554 - RNA, 22 nt, Human
agccuguggaucccugcacugg

SEQ ID NO: 960555 - RNA, 22 nt, Human
accccagcucugagccacacca

SEQ ID NO: 960556 - RNA, 22 nt, Human
gcucugucuucagcacacagua

SEQ ID NO: 960557 - RNA, 22 nt, Human
cagcuccugccugggcagcugu

SEQ ID NO: 960558 - RNA, 18 nt, Human
ugggcugccuggccucug

SEQ ID NO: 960559 - RNA, 22 nt, Human
ggaugcacgaaggcgccucgga

SEQ ID NO: 960560 - RNA, 22 nt, Human
ggacucagcagccaggaguggc

SEQ ID NO: 960561 - RNA, 21 nt, Human
agagagggagaugaaacaucc

SEQ ID NO: 960562 - RNA, 22 nt, Human
gaacccaggcuuuugaggcugu

SEQ ID NO: 960563 - RNA, 22 nt, Human
cagggccuccuaaggcaucuaa

SEQ ID NO: 960564 - RNA, 22 nt, Human
ugucaaauuuuuauugcaguau

SEQ ID NO: 960565 - RNA, 21 nt, Human
ggccugaguauaggacaggcc

SEQ ID NO: 960566 - RNA, 22 nt, Human
ccugcagguccccggaugcgca

SEQ ID NO: 960567 - RNA, 22 nt, Human
aggcacaggccucagcacccag

SEQ ID NO: 960568 - RNA, 22 nt, Human
cagcaauaguguguuuguuuca

SEQ ID NO: 960569 - RNA, 22 nt, Human
gagaaagauguaggcugggagg

SEQ ID NO: 960570 - RNA, 22 nt, Human
uguucauuuggcccuuuuguau

SEQ ID NO: 960571 - RNA, 22 nt, Human
uagagcuagcuucaaaaugcga

SEQ ID NO: 960572 - RNA, 22 nt, Human
ucccaaagcuacucuucugacu

SEQ ID NO: 960573 - RNA, 19 nt, Human
ccagucccauacaggagau

SEQ ID NO: 960574 - RNA, 21 nt, Human
ugguuugcggccaaaguuaaa

SEQ ID NO: 960575 - RNA, 22 nt, Human
uagggcaggggaggaaucugaa

SEQ ID NO: 960576 - RNA, 22 nt, Human
gggcugcuuuuaagggucucag

SEQ ID NO: 960577 - RNA, 22 nt, Human
cuugcugucccuugguaugaac

SEQ ID NO: 960578 - RNA, 19 nt, Human
cuggcucuuggguggagga

SEQ ID NO: 960579 - RNA, 17 nt, Human
cccagcuggcagugccg

SEQ ID NO: 960580 - RNA, 22 nt, Human
uguccucacaggaaugaacuuu

SEQ ID NO: 960581 - RNA, 22 nt, Human
uguuuuguuuaugagagcacag

SEQ ID NO: 960582 - RNA, 22 nt, Human
acccuggggguggccagugcca

SEQ ID NO: 960583 - RNA, 22 nt, Human
gccuggagugguccugcugccc

SEQ ID NO: 960584 - RNA, 21 nt, Human
aagagcuggaucaaggauaag

SEQ ID NO: 960585 - RNA, 22 nt, Human
ggagggagucagcugauuagaa

SEQ ID NO: 960586 - RNA, 23 nt, Human
ucacagggcacuggcugggguug

SEQ ID NO: 960587 - RNA, 22 nt, Human
uauuccaguccuauccucuuuu

SEQ ID NO: 960588 - RNA, 18 nt, Human
gagcugccauauuuaguu

SEQ ID NO: 960589 - RNA, 22 nt, Human
cagcucugggugacaggagggc

SEQ ID NO: 960590 - RNA, 22 nt, Human
ccuggcagcccagagcgccgcu

SEQ ID NO: 960591 - RNA, 22 nt, Human
uuaauuuuaaccuguuuguguc

SEQ ID NO: 960592 - RNA, 22 nt, Human
gggugggacugaagucugaggg

SEQ ID NO: 960593 - RNA, 22 nt, Human
aaugcugcucucauaauuauag

SEQ ID NO: 960594 - RNA, 22 nt, Human
cuggggugucucgucugccauu

SEQ ID NO: 960595 - RNA, 22 nt, Human
aauaauuuuagcucagaguugu

SEQ ID NO: 960596 - RNA, 22 nt, Human
uccagccaagccuugguagcug

SEQ ID NO: 960597 - RNA, 22 nt, Human
ucuacuguagugaugcugcagu

SEQ ID NO: 960598 - RNA, 22 nt, Human
ggaggcugcugccucacguggg

SEQ ID NO: 960599 - RNA, 22 nt, Human
caagcagacaguaggccuagaa

SEQ ID NO: 960600 - RNA, 22 nt, Human
uaucaucuuguugucaugcagc

SEQ ID NO: 960601 - RNA, 22 nt, Human
caguagcaggcacucagcacgu

SEQ ID NO: 960602 - RNA, 22 nt, Human
ucaggggcuugaggugcauguc

SEQ ID NO: 960603 - RNA, 22 nt, Human
ugcguugcgcuccugcagcagg

SEQ ID NO: 960604 - RNA, 22 nt, Human
cuagaaauacaggcacgugcca

SEQ ID NO: 960605 - RNA, 22 nt, Human
cugcugucuuuauuucacugcu

SEQ ID NO: 960606 - RNA, 22 nt, Human
agcagaacugaugagacuugag

SEQ ID NO: 960607 - RNA, 22 nt, Human
cugcuguggguuaagacacugu

SEQ ID NO: 960608 - RNA, 22 nt, Human
aaauauguaaccaaggugaagu

SEQ ID NO: 960609 - RNA, 22 nt, Human
ggcuggcuugccaagcucaggg

SEQ ID NO: 960610 - RNA, 22 nt, Human
agcaaagucaguggaaccaucc

SEQ ID NO: 960611 - RNA, 22 nt, Human
cccaggagacauauagaaggac

SEQ ID NO: 960612 - RNA, 22 nt, Human
aagcagugcgcucaucuaaggg

SEQ ID NO: 960613 - RNA, 22 nt, Human
auugaaagaguuuucugcugca

SEQ ID NO: 960614 - RNA, 22 nt, Human
ugaggcagggagaguggauaug

SEQ ID NO: 960615 - RNA, 22 nt, Human
gcaguucuacuuauccauagac

SEQ ID NO: 960616 - RNA, 22 nt, Human
uucuuagaugauuaaugauggg

SEQ ID NO: 960617 - RNA, 22 nt, Human
ugcugucccccgugucugggcu

SEQ ID NO: 960618 - RNA, 22 nt, Human
ugcagagggacagccacagcuc

SEQ ID NO: 960619 - RNA, 22 nt, Human
ugaaagguuauuuaggucugcu

SEQ ID NO: 960620 - RNA, 22 nt, Human
uauuuuguuuuguauccacugu

SEQ ID NO: 960621 - RNA, 22 nt, Human
cuuucacagcugugcuuaugau

SEQ ID NO: 960622 - RNA, 22 nt, Human
uuguuaaaaugcauauucuggu

SEQ ID NO: 960623 - RNA, 22 nt, Human
ccugcuggccaguggagggcug

SEQ ID NO: 960624 - RNA, 22 nt, Human
ccaggacucaguggggaaaggg

SEQ ID NO: 960625 - RNA, 22 nt, Human
ugcuuccuauccacacaaugcc

SEQ ID NO: 960626 - RNA, 22 nt, Human
agcagccagaaauccagaggug

SEQ ID NO: 960627 - RNA, 22 nt, Human
ggccugugcacaugugcaggaa

SEQ ID NO: 960628 - RNA, 22 nt, Human
ugacaccacaacuagccauuga

SEQ ID NO: 960629 - RNA, 19 nt, Human
cagagcagugguuccugaa

SEQ ID NO: 960630 - RNA, 22 nt, Human
cauuuagaaacuguuuuuaaca

SEQ ID NO: 960631 - RNA, 22 nt, Human
aagauacauaaagguagagucu

SEQ ID NO: 960632 - RNA, 22 nt, Human
uuuucuauucauugucuauggu

SEQ ID NO: 960633 - RNA, 22 nt, Human
uggcacugaaaaaggagagguu

SEQ ID NO: 960634 - RNA, 22 nt, Human
cuggagcuggcuuccuuccacu

SEQ ID NO: 960635 - RNA, 21 nt, Human
uaaagaagaugaaugugauca

SEQ ID NO: 960636 - RNA, 22 nt, Human
cccaggagaugcacuccauugg

SEQ ID NO: 960637 - RNA, 22 nt, Human
agcagcuucuuucacuccugga

SEQ ID NO: 960638 - RNA, 22 nt, Human
cuacuuuaauuuucugcagaga

SEQ ID NO: 960639 - RNA, 22 nt, Human
cagggcccauggcucagguagg

SEQ ID NO: 960640 - RNA, 22 nt, Human
gcagcugccuauucagggcuug

SEQ ID NO: 960641 - RNA, 22 nt, Human
cuggcucccagcuuucagggag

SEQ ID NO: 960642 - RNA, 21 nt, Human
auuguuaucauugugcugugu

SEQ ID NO: 960643 - RNA, 22 nt, Human
cccuguacagucucuguggcac

SEQ ID NO: 960644 - RNA, 22 nt, Human
cuggcugcaggaugaggcugcc

SEQ ID NO: 960645 - RNA, 22 nt, Human
agcagcugguaggaguggccac

SEQ ID NO: 960646 - RNA, 22 nt, Human
uucagagcaucucuaaagccag

SEQ ID NO: 960647 - RNA, 22 nt, Human
caguuucuacgaaggucaaccc

SEQ ID NO: 960648 - RNA, 22 nt, Human
agugcacagcgugauguauugg

SEQ ID NO: 960649 - RNA, 22 nt, Human
ccugagagagaagcgaccuggu

SEQ ID NO: 960650 - RNA, 22 nt, Human
aggggcuggaguucgagguuac

SEQ ID NO: 960651 - RNA, 22 nt, Human
gaggcugcuguuagcccugggc

SEQ ID NO: 960652 - RNA, 22 nt, Human
auaaggcagaaaugauucuagu

SEQ ID NO: 960653 - RNA, 22 nt, Human
ugaggcagggaguuuaauuguc

SEQ ID NO: 960654 - RNA, 22 nt, Human
gagcccuggcagucugggaugg

SEQ ID NO: 960655 - RNA, 22 nt, Human
uggccacauccuuuccuuguca

SEQ ID NO: 960656 - RNA, 22 nt, Human
uccugggcaaaaguaucuguga

SEQ ID NO: 960657 - RNA, 17 nt, Human
uggcagcugaaagcucu

SEQ ID NO: 960658 - RNA, 22 nt, Human
gcaaagucucaagacccaagug

SEQ ID NO: 960659 - RNA, 22 nt, Human
ugcaauaaagugcuauaaaucc

SEQ ID NO: 960660 - RNA, 22 nt, Human
uaauuuaauuccauggauucua

SEQ ID NO: 960661 - RNA, 22 nt, Human
cucagaauuuagggcucugagg

SEQ ID NO: 960662 - RNA, 22 nt, Human
ggcaacauucuccagauccuuu

SEQ ID NO: 960663 - RNA, 22 nt, Human
ccugccuguaagauggguacaa

SEQ ID NO: 960664 - RNA, 22 nt, Human
gacagguggggaaacuaaggua

SEQ ID NO: 960665 - RNA, 22 nt, Human
auuguaaguagaaauguuaugg

SEQ ID NO: 960666 - RNA, 22 nt, Human
aggcagcuuucagugucucuca

SEQ ID NO: 960667 - RNA, 22 nt, Human
ugggcuguggagcaccuuugca

SEQ ID NO: 960668 - RNA, 22 nt, Human
gcagaggacagggauuuagauu

SEQ ID NO: 960669 - RNA, 22 nt, Human
agugcuuugugcucucacugca

SEQ ID NO: 960670 - RNA, 22 nt, Human
gaaggaaaaauacucuguaagg

SEQ ID NO: 960671 - RNA, 22 nt, Human
gcacugaaauuauaugcauuug

SEQ ID NO: 960672 - RNA, 22 nt, Human
uacauuugcuuugauuuucagc

SEQ ID NO: 960673 - RNA, 22 nt, Human
gcagcccagagcgcaggacccc

SEQ ID NO: 960674 - RNA, 22 nt, Human
ggccagaaguuggaaaagagcc

SEQ ID NO: 960675 - RNA, 19 nt, Human
guuuuucccagacgaggca

SEQ ID NO: 960676 - RNA, 22 nt, Human
gcagcuuuuuggaugucaguua

SEQ ID NO: 960677 - RNA, 22 nt, Human
gccaugcuugguaugcugugag

SEQ ID NO: 960678 - RNA, 22 nt, Human
gaacagaagaggcuggugccac

SEQ ID NO: 960679 - RNA, 22 nt, Human
ggcaggugugagaucgaggcca

SEQ ID NO: 960680 - RNA, 23 nt, Human
ccacagagcugccaauuccugug

SEQ ID NO: 960681 - RNA, 20 nt, Human
uggcaucucucaauuguagg

SEQ ID NO: 960682 - RNA, 22 nt, Human
uacccagggcuuuucugaugca

SEQ ID NO: 960683 - RNA, 22 nt, Human
uugcaaauguuucauaacagua

SEQ ID NO: 960684 - RNA, 22 nt, Human
uuuaacagguaaaguaaaugug

SEQ ID NO: 960685 - RNA, 21 nt, Human
ugccagcauuaaacagucauu

SEQ ID NO: 960686 - RNA, 22 nt, Human
agucccaguucgguucuuccuc

SEQ ID NO: 960687 - RNA, 22 nt, Human
aggcaggcccucuggaaaggua

SEQ ID NO: 960688 - RNA, 23 nt, Human
agcagccagagauccucggcccu

SEQ ID NO: 960689 - RNA, 22 nt, Human
auguaucaauuaucugucugca

SEQ ID NO: 960690 - RNA, 21 nt, Human
ccuucucuugcuucagcuuca

SEQ ID NO: 960691 - RNA, 22 nt, Human
auagaauagcauagaaaauuga

SEQ ID NO: 960692 - RNA, 22 nt, Human
gcagcugcagguggucccaugc

SEQ ID NO: 960693 - RNA, 22 nt, Human
aaacccugcccuucccaagaug

SEQ ID NO: 960694 - RNA, 22 nt, Human
ugaggcagguaagcaaguuuug

SEQ ID NO: 960695 - RNA, 23 nt, Human
agggcccaagccuggacagcagg

SEQ ID NO: 960696 - RNA, 22 nt, Human
gcuuccugauauucauacuguu

SEQ ID NO: 960697 - RNA, 22 nt, Human
cauggcccucuucuggagcaau

SEQ ID NO: 960698 - RNA, 22 nt, Human
ucuguucauguugggcuuuucc

SEQ ID NO: 960699 - RNA, 22 nt, Human
auagugcaguggacugaguuaa

SEQ ID NO: 960700 - RNA, 22 nt, Human
ggagcugucuguagggcacagg

SEQ ID NO: 960701 - RNA, 22 nt, Human
agagcagauggccagggggccu

SEQ ID NO: 960702 - RNA, 22 nt, Human
agaaacuucagcuauucuuuug

SEQ ID NO: 960703 - RNA, 21 nt, Human
cuccugggcuaagauauagug

SEQ ID NO: 960704 - RNA, 21 nt, Human
cacucaggguaugugccaggc

SEQ ID NO: 960705 - RNA, 22 nt, Human
ucacauuuuaucuauuuuaagu

SEQ ID NO: 960706 - RNA, 22 nt, Human
cuuauuagugucugucugaguu

SEQ ID NO: 960707 - RNA, 22 nt, Human
cugggagccuggcaguugcuga

SEQ ID NO: 960708 - RNA, 22 nt, Human
auccuugacacacuccaguacu

SEQ ID NO: 960709 - RNA, 22 nt, Human
ggcucugggucuguggggagcg

SEQ ID NO: 960710 - RNA, 22 nt, Human
ucucagagaucuuucugcaugu

SEQ ID NO: 960711 - RNA, 22 nt, Human
ugggccaggauuucaagacccu

SEQ ID NO: 960712 - RNA, 22 nt, Human
ucuuuccucugagcuccuguag

SEQ ID NO: 960713 - RNA, 22 nt, Human
ccccaggaagccucagauuugc

SEQ ID NO: 960714 - RNA, 19 nt, Human
gugcuuuuuaagagcucag

SEQ ID NO: 960715 - RNA, 22 nt, Human
uggcagcaguggagguagaaag

SEQ ID NO: 960716 - RNA, 22 nt, Human
acacagaaccucauagccucuc

SEQ ID NO: 960717 - RNA, 22 nt, Human
uccaggcccauggagcagagcu

SEQ ID NO: 960718 - RNA, 22 nt, Human
uaauaaaugaaagugcuggcau

SEQ ID NO: 960719 - RNA, 22 nt, Human
ggccaagauggaaggagagaug

SEQ ID NO: 960720 - RNA, 17 nt, Human
uccuggcucugccacug

SEQ ID NO: 960721 - RNA, 22 nt, Human
uguuuuauuucuccaagaggga

SEQ ID NO: 960722 - RNA, 22 nt, Human
uauuucaugugcaccauaauuc

SEQ ID NO: 960723 - RNA, 22 nt, Human
ucuggcucucucaucacccaau

SEQ ID NO: 960724 - RNA, 22 nt, Human
gagcugccagacaugggaauga

SEQ ID NO: 960725 - RNA, 20 nt, Human
acuguucaagggccuggugg

SEQ ID NO: 960726 - RNA, 22 nt, Human
aggagaaguaaggcuagaugau

SEQ ID NO: 960727 - RNA, 22 nt, Human
cugugcauugucuugucuguag

SEQ ID NO: 960728 - RNA, 22 nt, Human
uuuuauauggcacauugguugg

SEQ ID NO: 960729 - RNA, 21 nt, Human
gggcagaggggccuccugggu

SEQ ID NO: 960730 - RNA, 22 nt, Human
gugcugugcgcuuuuucuguau

SEQ ID NO: 960731 - RNA, 22 nt, Human
gagcucugacugcugggugaca

SEQ ID NO: 960732 - RNA, 22 nt, Human
acguguucaauuuccaucugac

SEQ ID NO: 960733 - RNA, 22 nt, Human
augccuguaaucccagugcuuu

SEQ ID NO: 960734 - RNA, 22 nt, Human
aggcggcuccgggagugugggc

SEQ ID NO: 960735 - RNA, 22 nt, Human
cuugaauccaaaugggagauga

SEQ ID NO: 960736 - RNA, 22 nt, Human
agccuccaucccaugcacaaag

SEQ ID NO: 960737 - RNA, 22 nt, Human
accagcuguguccuggcugcag

SEQ ID NO: 960738 - RNA, 22 nt, Human
gcaagcugaugugauagugaaa

SEQ ID NO: 960739 - RNA, 22 nt, Human
ucaguuuucucaucuguaauuu

SEQ ID NO: 960740 - RNA, 22 nt, Human
aggcagagcugauguucuguga

SEQ ID NO: 960741 - RNA, 22 nt, Human
agcagccaggaaucugcagagc

SEQ ID NO: 960742 - RNA, 19 nt, Human
uccugggcugcgucuugcc

SEQ ID NO: 960743 - RNA, 22 nt, Human
uccugucugcucacagagcugg

SEQ ID NO: 960744 - RNA, 22 nt, Human
ggccucugccccagccacaccu

SEQ ID NO: 960745 - RNA, 22 nt, Human
ccagcucuggcuucuugcuggg

SEQ ID NO: 960746 - RNA, 22 nt, Human
auucaaguggcugcuauguuaa

SEQ ID NO: 960747 - RNA, 22 nt, Human
aacucugcuuauaguuugucca

SEQ ID NO: 960748 - RNA, 22 nt, Human
ugggagcacccugaggagcuuc

SEQ ID NO: 960749 - RNA, 22 nt, Human
cagcuuuguccugcaaaccuga

SEQ ID NO: 960750 - RNA, 22 nt, Human
cacucccuucaggagccuagga

SEQ ID NO: 960751 - RNA, 22 nt, Human
gagagcuggauucuggauaggu

SEQ ID NO: 960752 - RNA, 22 nt, Human
gccuccugguugcuucuccaac

SEQ ID NO: 960753 - RNA, 19 nt, Human
ucuggcuccugccaggcug

SEQ ID NO: 960754 - RNA, 22 nt, Human
acaccauacucauguugguucc

SEQ ID NO: 960755 - RNA, 22 nt, Human
aaagaugucauacacauuaaga

SEQ ID NO: 960756 - RNA, 22 nt, Human
cuggccaagcacuggggucaaa

SEQ ID NO: 960757 - RNA, 22 nt, Human
aggagcuggguuccuuuggugg

SEQ ID NO: 960758 - RNA, 22 nt, Human
ucagaggugguaaaggacagca

SEQ ID NO: 960759 - RNA, 22 nt, Human
auaaauuuauaauuguuuccug

SEQ ID NO: 960760 - RNA, 22 nt, Human
ccuccagggcagacggggagca

SEQ ID NO: 960761 - RNA, 22 nt, Human
agguauagaauugaaaggguuu

SEQ ID NO: 960762 - RNA, 22 nt, Human
gagccuccuccuggugugccga

SEQ ID NO: 960763 - RNA, 22 nt, Human
cuacauuuguucuauagcuuuu

SEQ ID NO: 960764 - RNA, 22 nt, Human
cuguccuguggaccugaggacg

SEQ ID NO: 960765 - RNA, 22 nt, Human
aaaauacacauacuaggggaaa

SEQ ID NO: 960766 - RNA, 22 nt, Human
auucuucaguauguguggauug

SEQ ID NO: 960767 - RNA, 22 nt, Human
cagcugaggucaaagaagcagg

SEQ ID NO: 960768 - RNA, 22 nt, Human
aagcagaggaccgacggaggga

SEQ ID NO: 960769 - RNA, 22 nt, Human
gcugauguaagacuuuugguuu

SEQ ID NO: 960770 - RNA, 22 nt, Human
guaacagaaagucaugcucauu

SEQ ID NO: 960771 - RNA, 20 nt, Human
ccugccugccucggcucauu

SEQ ID NO: 960772 - RNA, 22 nt, Human
cuccagggagcugcgggagcca

SEQ ID NO: 960773 - RNA, 22 nt, Human
uuauucuucuucucuugccagg

SEQ ID NO: 960774 - RNA, 22 nt, Human
gggauggcuuuguggcugacuc

SEQ ID NO: 960775 - RNA, 23 nt, Human
ucugucacuuucugcuguggagu

SEQ ID NO: 960776 - RNA, 22 nt, Human
gaaggccacaagagaaguuaag

SEQ ID NO: 960777 - RNA, 17 nt, Human
agagggaaaaugcgguu

SEQ ID NO: 960778 - RNA, 21 nt, Human
gugcucugggcagcagagggc

SEQ ID NO: 960779 - RNA, 22 nt, Human
ucagacuuuaaaggcuaacagg

SEQ ID NO: 960780 - RNA, 22 nt, Human
cagugcuccugauguacccuug

SEQ ID NO: 960781 - RNA, 22 nt, Human
uagggauguccugagacuuggc

SEQ ID NO: 960782 - RNA, 22 nt, Human
ucacucuggaguccgcuaccag

SEQ ID NO: 960783 - RNA, 22 nt, Human
cacagcugcccuacuccaugug

SEQ ID NO: 960784 - RNA, 22 nt, Human
auucagcauaaucaguagcuug

SEQ ID NO: 960785 - RNA, 22 nt, Human
cucuggccugcagauccaugcu

SEQ ID NO: 960786 - RNA, 17 nt, Human
ugaaggccaugaccacg

SEQ ID NO: 960787 - RNA, 22 nt, Human
ucacagacaauuguuuuggugu

SEQ ID NO: 960788 - RNA, 22 nt, Human
ugaaagguagcuggccucauag

SEQ ID NO: 960789 - RNA, 22 nt, Human
uaaagguaacaugaacugcuuu

SEQ ID NO: 960790 - RNA, 22 nt, Human
ugaggcaggaaguuauauaaug

SEQ ID NO: 960791 - RNA, 16 nt, Human
aaggagggaagagaau

SEQ ID NO: 960792 - RNA, 22 nt, Human
agaugcugccucuccucacaag

SEQ ID NO: 960793 - RNA, 22 nt, Human
ucugagccacagauguccuguu

SEQ ID NO: 960794 - RNA, 22 nt, Human
cucugugcucccaugcuaguaa

SEQ ID NO: 960795 - RNA, 22 nt, Human
ucagagccaaucauggugcauu

SEQ ID NO: 960796 - RNA, 22 nt, Human
auggcaggcccagguguucauu

SEQ ID NO: 960797 - RNA, 21 nt, Human
ucuuguccuugcucucccacu

SEQ ID NO: 960798 - RNA, 22 nt, Human
cuggccacaugugugcugagca

SEQ ID NO: 960799 - RNA, 22 nt, Human
ucaaaguaaaaguauagaguuu

SEQ ID NO: 960800 - RNA, 22 nt, Human
ugcuguguucuccugacucacc

SEQ ID NO: 960801 - RNA, 22 nt, Human
guuaggauauggugaaauggag

SEQ ID NO: 960802 - RNA, 21 nt, Human
auacacauacacauaaaugug

SEQ ID NO: 960803 - RNA, 23 nt, Human
gcagacagagcagacuaagacaa

SEQ ID NO: 960804 - RNA, 17 nt, Human
uagagcugguucaggag

SEQ ID NO: 960805 - RNA, 22 nt, Human
aagguacaaaguauuauuuaaa

SEQ ID NO: 960806 - RNA, 22 nt, Human
uaaaucaguuucucuuauuggu

SEQ ID NO: 960807 - RNA, 22 nt, Human
uauuucagcccuacuacuuggc

SEQ ID NO: 960808 - RNA, 22 nt, Human
uccugccucuuuucuuauucca

SEQ ID NO: 960809 - RNA, 22 nt, Human
cuaaucaucuuucucuuaaagc

SEQ ID NO: 960810 - RNA, 22 nt, Human
uacuuccuguuuccaugucugu

SEQ ID NO: 960811 - RNA, 22 nt, Human
acauuuaaauaugccuuauauu

SEQ ID NO: 960812 - RNA, 19 nt, Human
gguaaaagugagcuucagg

SEQ ID NO: 960813 - RNA, 17 nt, Human
aucuggcugcuucuaga

SEQ ID NO: 960814 - RNA, 22 nt, Human
uuggcuuccaggaucucagcag

SEQ ID NO: 960815 - RNA, 22 nt, Human
auuguacaugcagugagucauc

SEQ ID NO: 960816 - RNA, 22 nt, Human
cacauccuucagcugagcccag

SEQ ID NO: 960817 - RNA, 22 nt, Human
aggauuuguuuauaggucuuaa

SEQ ID NO: 960818 - RNA, 22 nt, Human
uuugcauugcagugguuuacag

SEQ ID NO: 960819 - RNA, 22 nt, Human
aggcaggccccugagaauagac

SEQ ID NO: 960820 - RNA, 23 nt, Human
uggcccugugcaugcugcuuccc

SEQ ID NO: 960821 - RNA, 22 nt, Human
ggcugcugcccaccccugcaug

SEQ ID NO: 960822 - RNA, 22 nt, Human
cagcugccuaugaccuagccuc

SEQ ID NO: 960823 - RNA, 22 nt, Human
cagcugaacauguagagcaucu

SEQ ID NO: 960824 - RNA, 22 nt, Human
guauuuucaagagcaguaguau

SEQ ID NO: 960825 - RNA, 22 nt, Human
ccugaagcaaggguaggcaggu

SEQ ID NO: 960826 - RNA, 18 nt, Human
uggagccauugccaccau

SEQ ID NO: 960827 - RNA, 20 nt, Human
uguacacaguacuuuacaau

SEQ ID NO: 960828 - RNA, 22 nt, Human
agucuucccugugccagagugu

SEQ ID NO: 960829 - RNA, 22 nt, Human
ucucuuccaguaagagucuuua

SEQ ID NO: 960830 - RNA, 22 nt, Human
cucugcuuggaacuggacagaa

SEQ ID NO: 960831 - RNA, 22 nt, Human
ggagcugugcagugacuacaga

SEQ ID NO: 960832 - RNA, 22 nt, Human
cagcuucugagcaagccagggg

SEQ ID NO: 960833 - RNA, 22 nt, Human
gcccucagaugggaaaggaggg

SEQ ID NO: 960834 - RNA, 22 nt, Human
aaugcaguuucauuuguagaau

SEQ ID NO: 960835 - RNA, 22 nt, Human
uugagaagaaauaguuugcaau

SEQ ID NO: 960836 - RNA, 22 nt, Human
cugggcacuugcucacagcucu

SEQ ID NO: 960837 - RNA, 22 nt, Human
cucccagagaccaagcugagaa

SEQ ID NO: 960838 - RNA, 22 nt, Human
cuggagccuagguugaccuggg

SEQ ID NO: 960839 - RNA, 22 nt, Human
cccaggagaccuagaucuguuu

SEQ ID NO: 960840 - RNA, 22 nt, Human
aagcugccuagaguugaauguc

SEQ ID NO: 960841 - RNA, 22 nt, Human
ucaaugauuagaguuuagugug

SEQ ID NO: 960842 - RNA, 22 nt, Human
ggguacaaagauuucauaagau

SEQ ID NO: 960843 - RNA, 22 nt, Human
agacuuucuugaccuaguuaau

SEQ ID NO: 960844 - RNA, 22 nt, Human
uggcaaggccacaggugcaguu

SEQ ID NO: 960845 - RNA, 22 nt, Human
uggcagcuagauaguguguuua

SEQ ID NO: 960846 - RNA, 22 nt, Human
uccaaggguucaugugcauuca

SEQ ID NO: 960847 - RNA, 22 nt, Human
agaacagcagcacgucaagcug

SEQ ID NO: 960848 - RNA, 22 nt, Human
cuacccaggcuuagagggcugg

SEQ ID NO: 960849 - RNA, 22 nt, Human
agcagcucuggcacuguagcau

SEQ ID NO: 960850 - RNA, 22 nt, Human
uuuccucugggcccugccaccc

SEQ ID NO: 960851 - RNA, 22 nt, Human
uggaggaaguggcuggccagaa

SEQ ID NO: 960852 - RNA, 22 nt, Human
uuucaaagaguuguaaauuacu

SEQ ID NO: 960853 - RNA, 22 nt, Human
ccaguugguuucaaugggacag

SEQ ID NO: 960854 - RNA, 19 nt, Human
uggagacugagagugagca

SEQ ID NO: 960855 - RNA, 22 nt, Human
guuccaguaugauuccacccau

SEQ ID NO: 960856 - RNA, 22 nt, Human
augcauaauguauguauugacu

SEQ ID NO: 960857 - RNA, 22 nt, Human
aggggcugggacagagccaagc

SEQ ID NO: 960858 - RNA, 22 nt, Human
uuauuaggaacucaggauuuuu

SEQ ID NO: 960859 - RNA, 22 nt, Human
aaguuugagagccuuuaguaua

SEQ ID NO: 960860 - RNA, 19 nt, Human
uggggccuccugucccugg

SEQ ID NO: 960861 - RNA, 22 nt, Human
gaggggcugggguugacuccaa

SEQ ID NO: 960862 - RNA, 22 nt, Human
ggccccacgggggaguccuagu

SEQ ID NO: 960863 - RNA, 22 nt, Human
accuucaaugaaaauaauaguc

SEQ ID NO: 960864 - RNA, 22 nt, Human
cuugaaaugacaggagcacauc

SEQ ID NO: 960865 - RNA, 22 nt, Human
gcuuucucuucacugauguuca

SEQ ID NO: 960866 - RNA, 22 nt, Human
gccucugcaauuacauugugcc

SEQ ID NO: 960867 - RNA, 22 nt, Human
gcugucuggguugagggcccug

SEQ ID NO: 960868 - RNA, 22 nt, Human
ugagccaggcucaagugauccu

SEQ ID NO: 960869 - RNA, 22 nt, Human
gcuccagaugaaaggccagagg

SEQ ID NO: 960870 - RNA, 19 nt, Human
caugcugaccugcuguggu

SEQ ID NO: 960871 - RNA, 22 nt, Human
guggccaaaaggaagaagguua

SEQ ID NO: 960872 - RNA, 22 nt, Human
acucucagaggguggcagcaau

SEQ ID NO: 960873 - RNA, 22 nt, Human
acauguguauagccuguauaga

SEQ ID NO: 960874 - RNA, 22 nt, Human
guguccagagaaacucacagcu

SEQ ID NO: 960875 - RNA, 22 nt, Human
uccugcaggccuguucccagua

SEQ ID NO: 960876 - RNA, 22 nt, Human
uauuccaguucaccuuuucauc

SEQ ID NO: 960877 - RNA, 22 nt, Human
gagcugccuguugcauagcaac

SEQ ID NO: 960878 - RNA, 22 nt, Human
uuuucuuaggugcuccaaguag

SEQ ID NO: 960879 - RNA, 20 nt, Human
uacauucaaaacaaacucug

SEQ ID NO: 960880 - RNA, 22 nt, Human
ggccacuccgcugcuacuggaa

SEQ ID NO: 960881 - RNA, 22 nt, Human
uuguggcucgugagauguuagg

SEQ ID NO: 960882 - RNA, 22 nt, Human
ggugcagugguguggcaaaggg

SEQ ID NO: 960883 - RNA, 22 nt, Human
cagcucccaguggcagcuccuu

SEQ ID NO: 960884 - RNA, 22 nt, Human
guuuuaguggguggccacugau

SEQ ID NO: 960885 - RNA, 22 nt, Human
ucacaggcuccagggccuggau

SEQ ID NO: 960886 - RNA, 22 nt, Human
agggcagacuaggauggaagug

SEQ ID NO: 960887 - RNA, 22 nt, Human
ccagcuggcaggagagucaggg

SEQ ID NO: 960888 - RNA, 22 nt, Human
uuuguaaauagcaguacucaug

SEQ ID NO: 960889 - RNA, 22 nt, Human
ccagaagucaggaaugagucuu

SEQ ID NO: 960890 - RNA, 22 nt, Human
auggcaagcaagcugaagagau

SEQ ID NO: 960891 - RNA, 22 nt, Human
gaucuucucuuuaguagaaaca

SEQ ID NO: 960892 - RNA, 22 nt, Human
uccaggucuggccugcuaggca

SEQ ID NO: 960893 - RNA, 22 nt, Human
gaaaccucuuagccucucuuug

SEQ ID NO: 960894 - RNA, 22 nt, Human
cuggccuggcaggggaccucua

SEQ ID NO: 960895 - RNA, 22 nt, Human
agcaggagagcagugcgugguc

SEQ ID NO: 960896 - RNA, 22 nt, Human
gccaguuccuguggagucagag

SEQ ID NO: 960897 - RNA, 22 nt, Human
augccacugacauggacaauuu

SEQ ID NO: 960898 - RNA, 18 nt, Human
aguaaagcuuauuacaug

SEQ ID NO: 960899 - RNA, 22 nt, Human
uuuaggaugcucuauucugacu

SEQ ID NO: 960900 - RNA, 22 nt, Human
acagcuggaggucugugagcac

SEQ ID NO: 960901 - RNA, 22 nt, Human
agcuggagaucaugcugauacu

SEQ ID NO: 960902 - RNA, 21 nt, Human
gauguuggaggcuggggucug

SEQ ID NO: 960903 - RNA, 22 nt, Human
cagaccagaaggaagccgacaa

SEQ ID NO: 960904 - RNA, 22 nt, Human
ucucagaguaauucuuuaaggu

SEQ ID NO: 960905 - RNA, 22 nt, Human
aaggcgacacaggcagcaggcc

SEQ ID NO: 960906 - RNA, 22 nt, Human
gccagcugcaucuccugggcug

SEQ ID NO: 960907 - RNA, 22 nt, Human
auuuccaguccuaaugaucugg

SEQ ID NO: 960908 - RNA, 22 nt, Human
agggcuggaggguacuaguuua

SEQ ID NO: 960909 - RNA, 22 nt, Human
cugccaggcagggagauggcug

SEQ ID NO: 960910 - RNA, 22 nt, Human
guggccaagaaaauagaugcau

SEQ ID NO: 960911 - RNA, 20 nt, Human
gugggcagcaggcauacugg

SEQ ID NO: 960912 - RNA, 22 nt, Human
uuauuauuggugaguuaaggaa

SEQ ID NO: 960913 - RNA, 22 nt, Human
uggaagcagugauucuugucug

SEQ ID NO: 960914 - RNA, 22 nt, Human
acauuccugaggaaauacauuc

SEQ ID NO: 960915 - RNA, 22 nt, Human
aaagacauggaacuagagaugg

SEQ ID NO: 960916 - RNA, 22 nt, Human
aauuucagaccauuugcaauua

SEQ ID NO: 960917 - RNA, 22 nt, Human
cccuccagccauggacccaggu

SEQ ID NO: 960918 - RNA, 19 nt, Human
uggggcuguguuuugaccc

SEQ ID NO: 960919 - RNA, 22 nt, Human
gauuuccuaauguggaucucug

SEQ ID NO: 960920 - RNA, 18 nt, Human
gaggccugagaaccaggu

SEQ ID NO: 960921 - RNA, 22 nt, Human
ccagaggcuggcaagggcuccu

SEQ ID NO: 960922 - RNA, 22 nt, Human
ggacacagauaaucacacagau

SEQ ID NO: 960923 - RNA, 23 nt, Human
uggagaugccccacucccugucu

SEQ ID NO: 960924 - RNA, 22 nt, Human
cacugaaggacaguaggaaggg

SEQ ID NO: 960925 - RNA, 22 nt, Human
uucaagaugcacaguggcauuc

SEQ ID NO: 960926 - RNA, 22 nt, Human
cagagagagugggguguggauu

SEQ ID NO: 960927 - RNA, 22 nt, Human
caucuuuuggccuauucugagg

SEQ ID NO: 960928 - RNA, 22 nt, Human
cuggggcugcgguggaggagcc

SEQ ID NO: 960929 - RNA, 22 nt, Human
cauuuguaguuaaaaaugucuc

SEQ ID NO: 960930 - RNA, 22 nt, Human
agucucagaaaagaagcaugga

SEQ ID NO: 960931 - RNA, 22 nt, Human
gcagaggccaucaacuuugcca

SEQ ID NO: 960932 - RNA, 22 nt, Human
uggcuccuucauucuccugcca

SEQ ID NO: 960933 - RNA, 22 nt, Human
agcaauauuuaaagguuugcaa

SEQ ID NO: 960934 - RNA, 22 nt, Human
auaagaaacauuauucuuucca

SEQ ID NO: 960935 - RNA, 22 nt, Human
gggaucagcaagccacugcacc

SEQ ID NO: 960936 - RNA, 22 nt, Human
aacaugauggggaagaacaaga

SEQ ID NO: 960937 - RNA, 22 nt, Human
gagccugaaauacaggucacug

SEQ ID NO: 960938 - RNA, 22 nt, Human
uagugcuuaauaaauuucagaa

SEQ ID NO: 960939 - RNA, 22 nt, Human
caggcagaagaaguggaaggac

SEQ ID NO: 960940 - RNA, 22 nt, Human
cagccugacaccagcuuugggc

SEQ ID NO: 960941 - RNA, 22 nt, Human
gggcuucucccuaaggacucug

SEQ ID NO: 960942 - RNA, 22 nt, Human
agaggucauaucucagaagaga

SEQ ID NO: 960943 - RNA, 22 nt, Human
uuccuggcauagagagggcaca

SEQ ID NO: 960944 - RNA, 22 nt, Human
uccuuguaacguugggcugggg

SEQ ID NO: 960945 - RNA, 22 nt, Human
gaggcgagaagcuggagauggu

SEQ ID NO: 960946 - RNA, 22 nt, Human
uaggcacugaggggagcaaggu

SEQ ID NO: 960947 - RNA, 19 nt, Human
agucucaguguacagaggc

SEQ ID NO: 960948 - RNA, 22 nt, Human
augggcuguccuaguccagccc

SEQ ID NO: 960949 - RNA, 22 nt, Human
auguguagaacuguaaugccca

SEQ ID NO: 960950 - RNA, 22 nt, Human
gcaggcagagaaggaacauuua

SEQ ID NO: 960951 - RNA, 22 nt, Human
cccagcucaagcagagagcuaa

SEQ ID NO: 960952 - RNA, 22 nt, Human
caggagcucuuaaggaugugau

SEQ ID NO: 960953 - RNA, 22 nt, Human
uguuccaauaaggaguugaaau

SEQ ID NO: 960954 - RNA, 22 nt, Human
caggagacaaguuagcagcuga

SEQ ID NO: 960955 - RNA, 21 nt, Human
uuuuauugaugaauggccacu

SEQ ID NO: 960956 - RNA, 22 nt, Human
uagaacaugugaaaauauagcc

SEQ ID NO: 960957 - RNA, 22 nt, Human
aaagcagaacugagagagcugg

SEQ ID NO: 960958 - RNA, 23 nt, Human
ugccagaggcagucacaguggug

SEQ ID NO: 960959 - RNA, 22 nt, Human
ucugggcugggagcguguggac

SEQ ID NO: 960960 - RNA, 22 nt, Human
cuccuggcucugccacuuacua

SEQ ID NO: 960961 - RNA, 22 nt, Human
aaugagcugcugcuguuccacc

SEQ ID NO: 960962 - RNA, 22 nt, Human
ucaucugucccaggcuuuuuuc

SEQ ID NO: 960963 - RNA, 22 nt, Human
agagccaggaucuguuuugggg

SEQ ID NO: 960964 - RNA, 22 nt, Human
auguuuccgugagcauccuuga

SEQ ID NO: 960965 - RNA, 22 nt, Human
guauguauguauauguuuaaga

SEQ ID NO: 960966 - RNA, 20 nt, Human
ccuggccaaugagauaggaa

SEQ ID NO: 960967 - RNA, 22 nt, Human
cagcuggcccuuugguagccuu

SEQ ID NO: 960968 - RNA, 22 nt, Human
ucuguucagguuucagagaacu

SEQ ID NO: 960969 - RNA, 17 nt, Human
gcagugaaaagagauca

SEQ ID NO: 960970 - RNA, 22 nt, Human
aggccuuuguggagcucauggc

SEQ ID NO: 960971 - RNA, 22 nt, Human
aaauugcauuuuaaagguagau

SEQ ID NO: 960972 - RNA, 19 nt, Human
agaaguuagacauugcaau

SEQ ID NO: 960973 - RNA, 22 nt, Human
ugguggccuugauggcaucugc

SEQ ID NO: 960974 - RNA, 22 nt, Human
ccagugcuaagguagccucugc

SEQ ID NO: 960975 - RNA, 20 nt, Human
aggaacuggaagggaggaaa

SEQ ID NO: 960976 - RNA, 22 nt, Human
agcugcagauucuaucuagaag

SEQ ID NO: 960977 - RNA, 22 nt, Human
cccaagggagugccuggucaac

SEQ ID NO: 960978 - RNA, 22 nt, Human
gccugcagugagugcagaaggu

SEQ ID NO: 960979 - RNA, 22 nt, Human
ugcucaguccuaccuuggcucc

SEQ ID NO: 960980 - RNA, 22 nt, Human
cugaggccuaagacaugaauga

SEQ ID NO: 960981 - RNA, 22 nt, Human
ggacagcugcuuucaggccaca

SEQ ID NO: 960982 - RNA, 22 nt, Human
caggccucaggggcucaggcug

SEQ ID NO: 960983 - RNA, 22 nt, Human
agccuggagaagauguguauug

SEQ ID NO: 960984 - RNA, 22 nt, Human
uggccacuuggcaugugugcca

SEQ ID NO: 960985 - RNA, 22 nt, Human
uaacagaaaagaacugaguuug

SEQ ID NO: 960986 - RNA, 22 nt, Human
ucucagucagccuugauguccc

SEQ ID NO: 960987 - RNA, 23 nt, Human
ugcucccaggugacgcugcuguu

SEQ ID NO: 960988 - RNA, 22 nt, Human
uguaaauaaugcauguaaauca

SEQ ID NO: 960989 - RNA, 22 nt, Human
agaacuguccuuggaggagagu

SEQ ID NO: 960990 - RNA, 22 nt, Human
uggcccuguguccugcugccag

SEQ ID NO: 960991 - RNA, 22 nt, Human
uuacaaagagugccagagugug

SEQ ID NO: 960992 - RNA, 22 nt, Human
ugggcaggauaauaucucaugu

SEQ ID NO: 960993 - RNA, 22 nt, Human
aagcugcccucauucccagugc

SEQ ID NO: 960994 - RNA, 22 nt, Human
uggccuggcugcccugucugga

SEQ ID NO: 960995 - RNA, 22 nt, Human
agcagccuuugaucaucuggga

SEQ ID NO: 960996 - RNA, 22 nt, Human
agucaguguagaaagcccaggc

SEQ ID NO: 960997 - RNA, 22 nt, Human
uauucugugugauauguaaaug

SEQ ID NO: 960998 - RNA, 22 nt, Human
ucauuauccuaguaucuugaau

SEQ ID NO: 960999 - RNA, 22 nt, Human
gucauauacacugcauguaauc

SEQ ID NO: 961000 - RNA, 22 nt, Human
uacauuuggaugugcuuaagug

SEQ ID NO: 961001 - RNA, 23 nt, Human
gcugucugucaucucugcgggag

SEQ ID NO: 961002 - RNA, 22 nt, Human
agcaccauugcaaauauggcag

SEQ ID NO: 961003 - RNA, 22 nt, Human
aucugccucuucuucauugcga

SEQ ID NO: 961004 - RNA, 22 nt, Human
uuggccaaauaaucuugcagau

SEQ ID NO: 961005 - RNA, 22 nt, Human
uuucagauggagguuuaggaca

SEQ ID NO: 961006 - RNA, 22 nt, Human
uuggcacugugccuggcacauu

SEQ ID NO: 961007 - RNA, 22 nt, Human
agugugugcaugcauucgugca

SEQ ID NO: 961008 - RNA, 23 nt, Human
gucagggcuggggucagagugac

SEQ ID NO: 961009 - RNA, 22 nt, Human
uucaggauccccuugaugggcu

SEQ ID NO: 961010 - RNA, 22 nt, Human
uaauucagggccagaaucccca

SEQ ID NO: 961011 - RNA, 22 nt, Human
gucccugggaugcccuucuggg

SEQ ID NO: 961012 - RNA, 22 nt, Human
ggaggacacuggcucugccuuc

SEQ ID NO: 961013 - RNA, 22 nt, Human
ggggcugggauuugaacccagg

SEQ ID NO: 961014 - RNA, 22 nt, Human
gaaauaguacagcauaguucuu

SEQ ID NO: 961015 - RNA, 22 nt, Human
cagcaaaagccagcauaagcuc

SEQ ID NO: 961016 - RNA, 20 nt, Human
guauuagguguuccucuuuc

SEQ ID NO: 961017 - RNA, 22 nt, Human
cugaggcuuugugugcaugccu

SEQ ID NO: 961018 - RNA, 21 nt, Human
gcaggguccuuuccauuccua

SEQ ID NO: 961019 - RNA, 22 nt, Human
ugcaccauuaauuuaugugaga

SEQ ID NO: 961020 - RNA, 22 nt, Human
ccuguucacgguguguuguuag

SEQ ID NO: 961021 - RNA, 22 nt, Human
ugcugccagggcucugcccaca

SEQ ID NO: 961022 - RNA, 22 nt, Human
agggcagcauugccuuucucca

SEQ ID NO: 961023 - RNA, 22 nt, Human
cucuucagauaaaagggauauu

SEQ ID NO: 961024 - RNA, 20 nt, Human
guauauaaccauagugacua

SEQ ID NO: 961025 - RNA, 22 nt, Human
augccagucaaagaagaugaca

SEQ ID NO: 961026 - RNA, 17 nt, Human
aaauaugaccucaaagu

SEQ ID NO: 961027 - RNA, 22 nt, Human
acuuucuccagaaaaccaagga

SEQ ID NO: 961028 - RNA, 22 nt, Human
aauaucagcacuuuugugguau

SEQ ID NO: 961029 - RNA, 22 nt, Human
uuugaauagcauaggauuacau

SEQ ID NO: 961030 - RNA, 22 nt, Human
ugaggcacaggcagugcccccg

SEQ ID NO: 961031 - RNA, 22 nt, Human
cacugcuucuggaggaauuugg

SEQ ID NO: 961032 - RNA, 22 nt, Human
ugcucacugaacucuugcuguc

SEQ ID NO: 961033 - RNA, 22 nt, Human
auguaacuguuauauuuuguug

SEQ ID NO: 961034 - RNA, 22 nt, Human
uauuggucuuggaagguuuugu

SEQ ID NO: 961035 - RNA, 22 nt, Human
aguaugaagaugaugaaaaaua

SEQ ID NO: 961036 - RNA, 22 nt, Human
acaguguuuuaugagaauuguu

SEQ ID NO: 961037 - RNA, 22 nt, Human
acugaaggaagcgggcaggggu

SEQ ID NO: 961038 - RNA, 22 nt, Human
gcucugggcugcccucuggaca

SEQ ID NO: 961039 - RNA, 22 nt, Human
gcaggugggggucggugcaucu

SEQ ID NO: 961040 - RNA, 22 nt, Human
gaaaagcuaggccaguucagcu

SEQ ID NO: 961041 - RNA, 22 nt, Human
auuucagaugaccaaauggaaa

SEQ ID NO: 961042 - RNA, 22 nt, Human
ucaguuuuuaagaguuaugcga

SEQ ID NO: 961043 - RNA, 22 nt, Human
ucaggagaaaauaucaggaagu

SEQ ID NO: 961044 - RNA, 22 nt, Human
accaggagcauuuuuuauuagu

SEQ ID NO: 961045 - RNA, 22 nt, Human
uggaggaugagugugggcucug

SEQ ID NO: 961046 - RNA, 22 nt, Human
ucugcuguccuuuauauagauu

SEQ ID NO: 961047 - RNA, 22 nt, Human
ugccuggguucccaccccaaag

SEQ ID NO: 961048 - RNA, 18 nt, Human
gaugggagcaagagaaga

SEQ ID NO: 961049 - RNA, 22 nt, Human
ugagcuucuuuauuuggccaga

SEQ ID NO: 961050 - RNA, 19 nt, Human
guucaaacacugauucagc

SEQ ID NO: 961051 - RNA, 22 nt, Human
uaucuguugucuuuuacaugua

SEQ ID NO: 961052 - RNA, 22 nt, Human
ucauuguuucugcuuuucauga

SEQ ID NO: 961053 - RNA, 22 nt, Human
uggcaggggaggugcuugcuua

SEQ ID NO: 961054 - RNA, 22 nt, Human
agucccagcccaguccuguaag

SEQ ID NO: 961055 - RNA, 22 nt, Human
cuacccagcaccuaggcugccu

SEQ ID NO: 961056 - RNA, 22 nt, Human
ccagcugcaggggagcagugga

SEQ ID NO: 961057 - RNA, 22 nt, Human
agucucuuauucccuauugcug

SEQ ID NO: 961058 - RNA, 22 nt, Human
acuugaauuauauuucuagaga

SEQ ID NO: 961059 - RNA, 22 nt, Human
uuaaaacagcgugaaucuggca

SEQ ID NO: 961060 - RNA, 20 nt, Human
gcugccuguuucuguaagua

SEQ ID NO: 961061 - RNA, 22 nt, Human
ggcugagcacuuuaggcaggag

SEQ ID NO: 961062 - RNA, 22 nt, Human
gagccagguuugaaucucaguc

SEQ ID NO: 961063 - RNA, 22 nt, Human
ggcugaguugagaggauuacuu

SEQ ID NO: 961064 - RNA, 22 nt, Human
gaaggccuagggaugcucugcg

SEQ ID NO: 961065 - RNA, 22 nt, Human
cagacagaaggcuccuugaggu

SEQ ID NO: 961066 - RNA, 22 nt, Human
gcauguguuauuuuauguauga

SEQ ID NO: 961067 - RNA, 22 nt, Human
uggagcugauacagcuggcuuu

SEQ ID NO: 961068 - RNA, 22 nt, Human
uagcugccaaaagggugggcua

SEQ ID NO: 961069 - RNA, 22 nt, Human
gaaaaugugccuuuggguauug

SEQ ID NO: 961070 - RNA, 22 nt, Human
auucugauaucuuauucuagcu

SEQ ID NO: 961071 - RNA, 22 nt, Human
cugggcacaaguggcccuggau

SEQ ID NO: 961072 - RNA, 22 nt, Human
uggcccugcuuaugucucucuu

SEQ ID NO: 961073 - RNA, 22 nt, Human
augcaguacagauaauucuaca

SEQ ID NO: 961074 - RNA, 22 nt, Human
gucaggaugacaagugcuuuca

SEQ ID NO: 961075 - RNA, 22 nt, Human
cugccagccaggccagguaggc

SEQ ID NO: 961076 - RNA, 21 nt, Human
ccuccaggagcagagcccuga

SEQ ID NO: 961077 - RNA, 22 nt, Human
gacagaguuguugauguaugcu

SEQ ID NO: 961078 - RNA, 22 nt, Human
uacagcuaggcaaaaaugacau

SEQ ID NO: 961079 - RNA, 22 nt, Human
ugugaacuggcagguggacggg

SEQ ID NO: 961080 - RNA, 22 nt, Human
uaauuucaccguugcuagaaau

SEQ ID NO: 961081 - RNA, 22 nt, Human
ccucaugguacuuacuguagcu

SEQ ID NO: 961082 - RNA, 22 nt, Human
agggcagaaguacagacacuua

SEQ ID NO: 961083 - RNA, 22 nt, Human
cuuguccuuuacuugagacuca

SEQ ID NO: 961084 - RNA, 22 nt, Human
agggccaggaacaccugaaggg

SEQ ID NO: 961085 - RNA, 22 nt, Human
caggcagcuagauuuauaacaa

SEQ ID NO: 961086 - RNA, 22 nt, Human
ccagagcaauucucacagaacu

SEQ ID NO: 961087 - RNA, 22 nt, Human
auucccaucgucaacuucacug

SEQ ID NO: 961088 - RNA, 22 nt, Human
caaggagaaaacggcuucugaa

SEQ ID NO: 961089 - RNA, 22 nt, Human
aagauggaguaguguaaugguu

SEQ ID NO: 961090 - RNA, 22 nt, Human
ccagggugagugucauggguua

SEQ ID NO: 961091 - RNA, 20 nt, Human
acuugcugggcuuuguuacc

SEQ ID NO: 961092 - RNA, 22 nt, Human
gcugcugguccucagagcucau

SEQ ID NO: 961093 - RNA, 22 nt, Human
acagccuggacuggcucucugc

SEQ ID NO: 961094 - RNA, 22 nt, Human
uggugaagucagcggagcccgg

SEQ ID NO: 961095 - RNA, 22 nt, Human
guggccagcaagugcugccucu

SEQ ID NO: 961096 - RNA, 20 nt, Human
augcaaacccugcuuugugg

SEQ ID NO: 961097 - RNA, 22 nt, Human
ggggauggaggcgugugguccu

SEQ ID NO: 961098 - RNA, 22 nt, Human
cauuuucagcacccaucugaaa

SEQ ID NO: 961099 - RNA, 22 nt, Human
agacagagauacuauguuguca

SEQ ID NO: 961100 - RNA, 22 nt, Human
cuuucacacacauacauuugga

SEQ ID NO: 961101 - RNA, 22 nt, Human
gccaagagaaugugagagaaau

SEQ ID NO: 961102 - RNA, 22 nt, Human
uauccagggaguuuuagggcuu

SEQ ID NO: 961103 - RNA, 22 nt, Human
agcaggcuaagggaccuguuua

SEQ ID NO: 961104 - RNA, 22 nt, Human
aggcagugccuggaccccagcu

SEQ ID NO: 961105 - RNA, 22 nt, Human
cuugccuucuuuuccuauagaa

SEQ ID NO: 961106 - RNA, 22 nt, Human
ggcuucuccccuuugagucuuc

SEQ ID NO: 961107 - RNA, 22 nt, Human
uccaggagugauaaggccacug

SEQ ID NO: 961108 - RNA, 22 nt, Human
cacagggccuugugugacugca

SEQ ID NO: 961109 - RNA, 22 nt, Human
auggcugggaugggguagagaa

SEQ ID NO: 961110 - RNA, 22 nt, Human
uugcaggauuuuagagaugaca

SEQ ID NO: 961111 - RNA, 22 nt, Human
ucucacugggucacagcagagg

SEQ ID NO: 961112 - RNA, 19 nt, Human
uugcauuguaguuggacug

SEQ ID NO: 961113 - RNA, 22 nt, Human
agggccagcugaugagaaugag

SEQ ID NO: 961114 - RNA, 20 nt, Human
caccacagaauuggggacag

SEQ ID NO: 961115 - RNA, 22 nt, Human
agugguaacuaaguccugcuua

SEQ ID NO: 961116 - RNA, 22 nt, Human
agacaguguguguauauauggu

SEQ ID NO: 961117 - RNA, 22 nt, Human
uccucaggcggugaggaggggc

SEQ ID NO: 961118 - RNA, 22 nt, Human
agagcagccugugaugaugcac

SEQ ID NO: 961119 - RNA, 22 nt, Human
ccagcagaagcucccgcugggu

SEQ ID NO: 961120 - RNA, 22 nt, Human
uggcuggggccacaguuuuccu

SEQ ID NO: 961121 - RNA, 19 nt, Human
gggcuucugggaucaagag

SEQ ID NO: 961122 - RNA, 19 nt, Human
ugaaggagggggauggcca

SEQ ID NO: 961123 - RNA, 22 nt, Human
acccagaggcggagguugcagu

SEQ ID NO: 961124 - RNA, 22 nt, Human
uuccauaauuaaguggagagaa

SEQ ID NO: 961125 - RNA, 22 nt, Human
uuacaaagaguguucuuuucca

SEQ ID NO: 961126 - RNA, 22 nt, Human
guccucuguguaggcugcagac

SEQ ID NO: 961127 - RNA, 22 nt, Human
uagucuuuuuaauaaauaaugc

SEQ ID NO: 961128 - RNA, 22 nt, Human
gcaccuuucuauauucaguggc

SEQ ID NO: 961129 - RNA, 23 nt, Human
agggugagcaagcuauggagacc

SEQ ID NO: 961130 - RNA, 22 nt, Human
uucaggaugacaccauguccag

SEQ ID NO: 961131 - RNA, 22 nt, Human
auuuagaaauuccaaaaguauu

SEQ ID NO: 961132 - RNA, 22 nt, Human
ugguaaagaaggcuagaucuga

SEQ ID NO: 961133 - RNA, 19 nt, Human
ugccugucaguagaucuca

SEQ ID NO: 961134 - RNA, 22 nt, Human
uugacagcaaagauugugccua

SEQ ID NO: 961135 - RNA, 22 nt, Human
ccucagagguuuucauucugua

SEQ ID NO: 961136 - RNA, 22 nt, Human
agcagggcagugaucagaaagg

SEQ ID NO: 961137 - RNA, 18 nt, Human
uuaauguggcuuacuaug

SEQ ID NO: 961138 - RNA, 16 nt, Human
gcccaggacgggaggc

SEQ ID NO: 961139 - RNA, 22 nt, Human
cauuuguuuagaagucuuuaua

SEQ ID NO: 961140 - RNA, 22 nt, Human
uuuucacacaaggugauaaguu

SEQ ID NO: 961141 - RNA, 20 nt, Human
ugcagcuucaccugugucau

SEQ ID NO: 961142 - RNA, 22 nt, Human
aaauaugaaugauaagaguuau

SEQ ID NO: 961143 - RNA, 22 nt, Human
agccacagcauguguguaugua

SEQ ID NO: 961144 - RNA, 23 nt, Human
aacuccugaaucgugagccaucu

SEQ ID NO: 961145 - RNA, 22 nt, Human
cacagcuuguuuagugacucac

SEQ ID NO: 961146 - RNA, 22 nt, Human
gugacaguggucacuuguaguu

SEQ ID NO: 961147 - RNA, 22 nt, Human
guggccuggcgagcuggcgcgg

SEQ ID NO: 961148 - RNA, 22 nt, Human
uguuauugagguuacuuauaag

SEQ ID NO: 961149 - RNA, 22 nt, Human
cuuuugauaguugcugagcagg

SEQ ID NO: 961150 - RNA, 22 nt, Human
cagccagcuucagauccaagcc

SEQ ID NO: 961151 - RNA, 22 nt, Human
aucauguuccagaaacagugau

SEQ ID NO: 961152 - RNA, 22 nt, Human
ccucaggaaccacauugcugcu

SEQ ID NO: 961153 - RNA, 22 nt, Human
caguacuuaguucucaugguuu

SEQ ID NO: 961154 - RNA, 22 nt, Human
ccuuggagcggucagcacuggu

SEQ ID NO: 961155 - RNA, 19 nt, Human
gucaucuuuuaauaaugug

SEQ ID NO: 961156 - RNA, 22 nt, Human
agauggcaggcccugugggggu

SEQ ID NO: 961157 - RNA, 22 nt, Human
acuuucuauuguuuagauucug

SEQ ID NO: 961158 - RNA, 22 nt, Human
ucagcuccagaguugcacagug

SEQ ID NO: 961159 - RNA, 22 nt, Human
ugcugucccuaagucucuucaa

SEQ ID NO: 961160 - RNA, 22 nt, Human
agagcugugcuuugcaccacgu

SEQ ID NO: 961161 - RNA, 22 nt, Human
ucagagaacacagaggugaugu

SEQ ID NO: 961162 - RNA, 22 nt, Human
ggcacugagaggcucuuccuaa

SEQ ID NO: 961163 - RNA, 22 nt, Human
aggccagcucacccuggcuccu

SEQ ID NO: 961164 - RNA, 22 nt, Human
aggacagcagugcuggcacuug

SEQ ID NO: 961165 - RNA, 21 nt, Human
agacagaacaacugcucucca

SEQ ID NO: 961166 - RNA, 22 nt, Human
ugccuggcugggcugcucaugg

SEQ ID NO: 961167 - RNA, 22 nt, Human
agauaacuuuuggguauucaug

SEQ ID NO: 961168 - RNA, 22 nt, Human
uagaaacugauagucuugugcu

SEQ ID NO: 961169 - RNA, 22 nt, Human
acuguugucaggcugcuuugga

SEQ ID NO: 961170 - RNA, 22 nt, Human
ugccagugggugugcagagacu

SEQ ID NO: 961171 - RNA, 22 nt, Human
gugcuuuccauccucccugcug

SEQ ID NO: 961172 - RNA, 22 nt, Human
cugggaguugacgaggcuugua

SEQ ID NO: 961173 - RNA, 22 nt, Human
gcucugcuguggaauccucucc

SEQ ID NO: 961174 - RNA, 22 nt, Human
agaacagaggccuuauguuuca

SEQ ID NO: 961175 - RNA, 22 nt, Human
caagccugucucaccagugcua

SEQ ID NO: 961176 - RNA, 22 nt, Human
gcuggcucagggacuagaguuu

SEQ ID NO: 961177 - RNA, 22 nt, Human
uuaaaucaguaggcuacuccuu

SEQ ID NO: 961178 - RNA, 22 nt, Human
ucuuuggauaucgcuagaccgu

SEQ ID NO: 961179 - RNA, 22 nt, Human
ccaggagagcauugcacagagg

SEQ ID NO: 961180 - RNA, 22 nt, Human
ugcuggccaauggcagaggcgg

SEQ ID NO: 961181 - RNA, 22 nt, Human
gguguccuacagggccgcaggc

SEQ ID NO: 961182 - RNA, 22 nt, Human
cagaggccucacuuccagccag

SEQ ID NO: 961183 - RNA, 22 nt, Human
gaauuacaaagugagacaagcu

SEQ ID NO: 961184 - RNA, 22 nt, Human
cuacccagauccaggauggcua

SEQ ID NO: 961185 - RNA, 22 nt, Human
aagguacaccaaaguucaaguu

SEQ ID NO: 961186 - RNA, 22 nt, Human
ucaggagacauucuuaaaguag

SEQ ID NO: 961187 - RNA, 19 nt, Human
cugguccugacugaggggu

SEQ ID NO: 961188 - RNA, 22 nt, Human
auucaagagcccauguuuccug

SEQ ID NO: 961189 - RNA, 22 nt, Human
aggcagagcuggguuuugaaau

SEQ ID NO: 961190 - RNA, 22 nt, Human
uaguuacagcaggcaggauaua

SEQ ID NO: 961191 - RNA, 22 nt, Human
uaugaagacaaugauagcauga

SEQ ID NO: 961192 - RNA, 22 nt, Human
cugguggggaguccuggucucc

SEQ ID NO: 961193 - RNA, 18 nt, Human
augugucuuucuuguuug

SEQ ID NO: 961194 - RNA, 22 nt, Human
uuucucaucuggaaacagugcu

SEQ ID NO: 961195 - RNA, 22 nt, Human
gaauuguagagggaacagaagc

SEQ ID NO: 961196 - RNA, 22 nt, Human
ggucucagcccucgccagcagc

SEQ ID NO: 961197 - RNA, 22 nt, Human
gcuggcucccauugguccuucc

SEQ ID NO: 961198 - RNA, 22 nt, Human
aaaagagucuuaggcagucaua

SEQ ID NO: 961199 - RNA, 22 nt, Human
uaaaugugagugaugcggugaa

SEQ ID NO: 961200 - RNA, 22 nt, Human
ccaggacuuuaaguccagcacu

SEQ ID NO: 961201 - RNA, 22 nt, Human
uuccuugguagagagaauauuu

SEQ ID NO: 961202 - RNA, 22 nt, Human
gagcugccugaacaagcagcag

SEQ ID NO: 961203 - RNA, 22 nt, Human
ucaugcuuaaaagacacuugag

SEQ ID NO: 961204 - RNA, 19 nt, Human
ggcucucuuaaagcuguuu

SEQ ID NO: 961205 - RNA, 22 nt, Human
aaugcacaaaaauuguauguaa

SEQ ID NO: 961206 - RNA, 22 nt, Human
ggccuuggugccauggccaguu

SEQ ID NO: 961207 - RNA, 22 nt, Human
cccagggauuauaaaggugaaa

SEQ ID NO: 961208 - RNA, 22 nt, Human
gaccagagaaaggcacuggaag

SEQ ID NO: 961209 - RNA, 22 nt, Human
cucccaggacucagaggagaag

SEQ ID NO: 961210 - RNA, 22 nt, Human
ggaggcccagagaggugaagug

SEQ ID NO: 961211 - RNA, 22 nt, Human
caggauggucucgaucuccuga

SEQ ID NO: 961212 - RNA, 22 nt, Human
aguaaaauuucugcugaggaga

SEQ ID NO: 961213 - RNA, 22 nt, Human
caauagcagcuucugaaugcaa

SEQ ID NO: 961214 - RNA, 22 nt, Human
cugccucuauucacugaggcag

SEQ ID NO: 961215 - RNA, 22 nt, Human
uacauggguagguuaagucaua

SEQ ID NO: 961216 - RNA, 22 nt, Human
uuccauaaaggugauaguauac

SEQ ID NO: 961217 - RNA, 22 nt, Human
aggagggagcuuaagccaggca

SEQ ID NO: 961218 - RNA, 22 nt, Human
uggcagaggcucugugauguug

SEQ ID NO: 961219 - RNA, 22 nt, Human
augcacagacccaaaggccauc

SEQ ID NO: 961220 - RNA, 22 nt, Human
ccaagggcugcugaggugucca

SEQ ID NO: 961221 - RNA, 22 nt, Human
gcugucuccauagcuguguguc

SEQ ID NO: 961222 - RNA, 22 nt, Human
agaaauacuaggaauauucaua

SEQ ID NO: 961223 - RNA, 22 nt, Human
cacugccugugagcugugugcc

SEQ ID NO: 961224 - RNA, 22 nt, Human
cugacagucucauugauuugcu

SEQ ID NO: 961225 - RNA, 17 nt, Human
ucuguucaugcauaccu

SEQ ID NO: 961226 - RNA, 22 nt, Human
aggcuccuaucgcuuucagcaa

SEQ ID NO: 961227 - RNA, 22 nt, Human
acauccauguuguaauguuccu

SEQ ID NO: 961228 - RNA, 22 nt, Human
cacaugaguccugccagguaug

SEQ ID NO: 961229 - RNA, 22 nt, Human
guuugucuuaauuaggcaucga

SEQ ID NO: 961230 - RNA, 22 nt, Human
auacauauaugguacuuccugg

SEQ ID NO: 961231 - RNA, 20 nt, Human
cagcugccuggcucugggau

SEQ ID NO: 961232 - RNA, 22 nt, Human
gugugucuuucauuucaugagg

SEQ ID NO: 961233 - RNA, 22 nt, Human
aaacugccuccugggcaacuaa

SEQ ID NO: 961234 - RNA, 22 nt, Human
ucuuugaaagcuguucuagagu

SEQ ID NO: 961235 - RNA, 22 nt, Human
agagcuggccagggaucacucu

SEQ ID NO: 961236 - RNA, 22 nt, Human
aguuuagaguucaaauuaguuc

SEQ ID NO: 961237 - RNA, 22 nt, Human
uauuucugaauccaaaagguca

SEQ ID NO: 961238 - RNA, 22 nt, Human
uggcucagcauucacuggucuu

SEQ ID NO: 961239 - RNA, 22 nt, Human
uaucuguuaggaucagagcugg

SEQ ID NO: 961240 - RNA, 22 nt, Human
aggcugcuuucauggccgcccc

SEQ ID NO: 961241 - RNA, 22 nt, Human
aggccagguggucaugcuugcu

SEQ ID NO: 961242 - RNA, 22 nt, Human
cuccuggcucgcccccagcuga

SEQ ID NO: 961243 - RNA, 22 nt, Human
ccuggaaggugaugguacagca

SEQ ID NO: 961244 - RNA, 23 nt, Human
auugaugacuugauuacacuuuu

SEQ ID NO: 961245 - RNA, 20 nt, Human
cugagagucugugcuuaguc

SEQ ID NO: 961246 - RNA, 22 nt, Human
gggauggacuuggggacuccag

SEQ ID NO: 961247 - RNA, 22 nt, Human
accagccugucugagucguggg

SEQ ID NO: 961248 - RNA, 22 nt, Human
cugccugugcaugcagucagaa

SEQ ID NO: 961249 - RNA, 22 nt, Human
acauauuuccaugcagcauguc

SEQ ID NO: 961250 - RNA, 22 nt, Human
ccaggccuuccaguacgcagaa

SEQ ID NO: 961251 - RNA, 22 nt, Human
uugcuuccucgaggccagcgug

SEQ ID NO: 961252 - RNA, 22 nt, Human
cccuggagggcagacagaugcc

SEQ ID NO: 961253 - RNA, 22 nt, Human
ucucagagaugucaagagucua

SEQ ID NO: 961254 - RNA, 22 nt, Human
cuuuccaaugcauuuccaaugu

SEQ ID NO: 961255 - RNA, 22 nt, Human
cccagcucuuuuagcggcaucu

SEQ ID NO: 961256 - RNA, 22 nt, Human
uucucuggaacugaaacaagau

SEQ ID NO: 961257 - RNA, 22 nt, Human
cugagccacugcuuguucagug

SEQ ID NO: 961258 - RNA, 22 nt, Human
ucugaaaguaucuggaucuuuu

SEQ ID NO: 961259 - RNA, 22 nt, Human
guccacauaggaacccagcuuc

SEQ ID NO: 961260 - RNA, 22 nt, Human
aggccuguuccaggccccuuuu

SEQ ID NO: 961261 - RNA, 22 nt, Human
ggcucaggacugcagcguagag

SEQ ID NO: 961262 - RNA, 22 nt, Human
aagcaccugcaguugacaaaaa

SEQ ID NO: 961263 - RNA, 22 nt, Human
cugggccagaccuuguggucuu

SEQ ID NO: 961264 - RNA, 22 nt, Human
auagaacagaaacagaugcaca

SEQ ID NO: 961265 - RNA, 22 nt, Human
ucagaguguggugagaugugca

SEQ ID NO: 961266 - RNA, 22 nt, Human
ugugaaaggagccauagacagu

SEQ ID NO: 961267 - RNA, 22 nt, Human
uuccaguuaaggaagcuauucu

SEQ ID NO: 961268 - RNA, 22 nt, Human
uugcucugacuggagugcagug

SEQ ID NO: 961269 - RNA, 22 nt, Human
uacugcaugguggaguggagcu

SEQ ID NO: 961270 - RNA, 22 nt, Human
uuucaguguaucuuccaaaagc

SEQ ID NO: 961271 - RNA, 22 nt, Human
agguggggaaaccagcgauccc

SEQ ID NO: 961272 - RNA, 22 nt, Human
ccugggagugcacagguuucgu

SEQ ID NO: 961273 - RNA, 18 nt, Human
ggagccagucugucucug

SEQ ID NO: 961274 - RNA, 22 nt, Human
ugcaccauguaaguggccacgu

SEQ ID NO: 961275 - RNA, 23 nt, Human
gacagagugagaccuugucuuac

SEQ ID NO: 961276 - RNA, 22 nt, Human
ugacauaaguugguagaaagga

SEQ ID NO: 961277 - RNA, 22 nt, Human
ugugccugaguuggcugaguac

SEQ ID NO: 961278 - RNA, 22 nt, Human
ugaggcagauauuuauuggguu

SEQ ID NO: 961279 - RNA, 22 nt, Human
ggccaggagcaagccaggcucu

SEQ ID NO: 961280 - RNA, 22 nt, Human
uuggccaaaggaaagacuacug

SEQ ID NO: 961281 - RNA, 22 nt, Human
caccagcagaagacugagggug

SEQ ID NO: 961282 - RNA, 18 nt, Human
acauuucuccuucugacc

SEQ ID NO: 961283 - RNA, 22 nt, Human
ugcauaaagugccauaguauua

SEQ ID NO: 961284 - RNA, 22 nt, Human
ggccagggggcuucagacucca

SEQ ID NO: 961285 - RNA, 22 nt, Human
uuugaauagaggccccucagaa

SEQ ID NO: 961286 - RNA, 22 nt, Human
ggcagcucugcuccacaugagu

SEQ ID NO: 961287 - RNA, 22 nt, Human
agcuccugcucuuugucccuaa

SEQ ID NO: 961288 - RNA, 22 nt, Human
cccugcagccuugcaugccuuc

SEQ ID NO: 961289 - RNA, 18 nt, Human
ggaaaaggagugucuagc

SEQ ID NO: 961290 - RNA, 22 nt, Human
gaacagcccuguuaagucuguu

SEQ ID NO: 961291 - RNA, 22 nt, Human
augacagaggagugcaggugau

SEQ ID NO: 961292 - RNA, 22 nt, Human
ucuggccacccgaggccccugc

SEQ ID NO: 961293 - RNA, 22 nt, Human
auucuagaugcuguaaguagca

SEQ ID NO: 961294 - RNA, 22 nt, Human
cugggaggauacacaagaucag

SEQ ID NO: 961295 - RNA, 22 nt, Human
aagaacauuuuguagaaugaca

SEQ ID NO: 961296 - RNA, 22 nt, Human
cagaaggcuggcagauugagau

SEQ ID NO: 961297 - RNA, 22 nt, Human
aaaucaguucacguucugaggu

SEQ ID NO: 961298 - RNA, 22 nt, Human
aaggcaguaaaaucuaccuugc

SEQ ID NO: 961299 - RNA, 22 nt, Human
uguguuaaguauuugauacacu

SEQ ID NO: 961300 - RNA, 19 nt, Human
ggcccaaguacugagugcc

SEQ ID NO: 961301 - RNA, 22 nt, Human
cccuggcaaaacacucucuuga

SEQ ID NO: 961302 - RNA, 22 nt, Human
gugauacaaauaaacauaugcu

SEQ ID NO: 961303 - RNA, 22 nt, Human
uucugggagagaaagggccuug

SEQ ID NO: 961304 - RNA, 22 nt, Human
guucauauuacuuugagugcag

SEQ ID NO: 961305 - RNA, 22 nt, Human
cacuaaguaagcuccucuacaa

SEQ ID NO: 961306 - RNA, 22 nt, Human
cuggccuggcagggagggcaug

SEQ ID NO: 961307 - RNA, 22 nt, Human
uggagcuggaauuugagcugga

SEQ ID NO: 961308 - RNA, 22 nt, Human
ucauuuguugcuguuaccugag

SEQ ID NO: 961309 - RNA, 22 nt, Human
uaaggcacccgugagcugccag

SEQ ID NO: 961310 - RNA, 21 nt, Human
gcccucaggggaggauggccu

SEQ ID NO: 961311 - RNA, 20 nt, Human
acauugauuauguuuguaga

SEQ ID NO: 961312 - RNA, 22 nt, Human
ucugucuucaucagcaugugau

SEQ ID NO: 961313 - RNA, 22 nt, Human
guggccaaggugcagagcagcu

SEQ ID NO: 961314 - RNA, 22 nt, Human
agcagagucugugugcacuuua

SEQ ID NO: 961315 - RNA, 22 nt, Human
auugaaucugcacuaguauuuu

SEQ ID NO: 961316 - RNA, 22 nt, Human
aggagccaagauggggcaagua

SEQ ID NO: 961317 - RNA, 22 nt, Human
gcccagcaccucucucaggguu

SEQ ID NO: 961318 - RNA, 22 nt, Human
caguggcuguuucuggaaggca

SEQ ID NO: 961319 - RNA, 22 nt, Human
guuauuaguaagacucgcacau

SEQ ID NO: 961320 - RNA, 22 nt, Human
agaaaaaucuuggcgcuugucu

SEQ ID NO: 961321 - RNA, 22 nt, Human
aguuggcauuuuauuuaaguau

SEQ ID NO: 961322 - RNA, 22 nt, Human
gagccaagggcgugcuggagag

SEQ ID NO: 961323 - RNA, 20 nt, Human
aauuuacucacagaaugaau

SEQ ID NO: 961324 - RNA, 22 nt, Human
aagacugucuuuucugagugac

SEQ ID NO: 961325 - RNA, 22 nt, Human
aaaauaacuucuacuauuugca

SEQ ID NO: 961326 - RNA, 22 nt, Human
uuuguaaaagcccaagcuguag

SEQ ID NO: 961327 - RNA, 22 nt, Human
agaguguuucagucuuccuaga

SEQ ID NO: 961328 - RNA, 22 nt, Human
ugggcuggugagggaucauuua

SEQ ID NO: 961329 - RNA, 22 nt, Human
gaggccuggugugucucccgcu

SEQ ID NO: 961330 - RNA, 22 nt, Human
uccagcagcccgaaggcccauc

SEQ ID NO: 961331 - RNA, 22 nt, Human
ucugagccagccaccuccuuca

SEQ ID NO: 961332 - RNA, 22 nt, Human
cuccuuggccguuaaugucaca

SEQ ID NO: 961333 - RNA, 22 nt, Human
cucaggcacgggucagugagcg

SEQ ID NO: 961334 - RNA, 18 nt, Human
caggaugagugaugggga

SEQ ID NO: 961335 - RNA, 19 nt, Human
augucccaccgccccugag

SEQ ID NO: 961336 - RNA, 22 nt, Human
cuuugaagagauuacugugcuc

SEQ ID NO: 961337 - RNA, 22 nt, Human
auguuuuauuaccaacuuguac

SEQ ID NO: 961338 - RNA, 22 nt, Human
ucauggcacuuagcacaguccu

SEQ ID NO: 961339 - RNA, 20 nt, Human
ucagccagcuaacaugggga

SEQ ID NO: 961340 - RNA, 22 nt, Human
aaauuacuuuacacuuucaucu

SEQ ID NO: 961341 - RNA, 22 nt, Human
cuuguccccagcagguugguuu

SEQ ID NO: 961342 - RNA, 22 nt, Human
guacuuccguggacuaauuguu

SEQ ID NO: 961343 - RNA, 22 nt, Human
uccuucagauuccugcuucugg

SEQ ID NO: 961344 - RNA, 22 nt, Human
caaggccaagguuuugugaacu

SEQ ID NO: 961345 - RNA, 22 nt, Human
cugagccaaccacagcaggagc

SEQ ID NO: 961346 - RNA, 22 nt, Human
uugcaaauuccaauccaauauu

SEQ ID NO: 961347 - RNA, 22 nt, Human
aauucacauauacauuauuccu

SEQ ID NO: 961348 - RNA, 22 nt, Human
ugaaucugauuucccuggaggc

SEQ ID NO: 961349 - RNA, 22 nt, Human
cucaggaugaaagucaugguga

SEQ ID NO: 961350 - RNA, 19 nt, Human
cucugccucccuccugggu

SEQ ID NO: 961351 - RNA, 22 nt, Human
guugaaaguagaugcuauuugg

SEQ ID NO: 961352 - RNA, 22 nt, Human
ucuggagcgaggucccugucug

SEQ ID NO: 961353 - RNA, 22 nt, Human
gucccacaccuugaggggucuu

SEQ ID NO: 961354 - RNA, 22 nt, Human
ggcaggaggaagaguuagcacc

SEQ ID NO: 961355 - RNA, 22 nt, Human
aggaccaacauagcagcagugg

SEQ ID NO: 961356 - RNA, 22 nt, Human
agcaccugcuugugacuaggga

SEQ ID NO: 961357 - RNA, 22 nt, Human
uacucugcaaguugaagguggc

SEQ ID NO: 961358 - RNA, 22 nt, Human
guccuggggaauacagaagccg

SEQ ID NO: 961359 - RNA, 23 nt, Human
gagagcugacugucaagacuguu

SEQ ID NO: 961360 - RNA, 22 nt, Human
cuguggcuuucucugccuccuu

SEQ ID NO: 961361 - RNA, 22 nt, Human
ccagagcuucggggcggcugua

SEQ ID NO: 961362 - RNA, 22 nt, Human
acucugcuaucuuagcaaaagg

SEQ ID NO: 961363 - RNA, 22 nt, Human
aaacacuagcaggaagcacuga

SEQ ID NO: 961364 - RNA, 22 nt, Human
ugcccuguuccugccuccagcu

SEQ ID NO: 961365 - RNA, 22 nt, Human
uagcuauuuagcccagauaagu

SEQ ID NO: 961366 - RNA, 22 nt, Human
cuggagagaaaugacaaagcua

SEQ ID NO: 961367 - RNA, 22 nt, Human
cucuucuuuaguccagaccauc

SEQ ID NO: 961368 - RNA, 20 nt, Human
uccaguuuuggagacauucu

SEQ ID NO: 961369 - RNA, 22 nt, Human
ucuagaaauuuugccuuguauu

SEQ ID NO: 961370 - RNA, 22 nt, Human
ccaggccuagccccugagggua

SEQ ID NO: 961371 - RNA, 22 nt, Human
ucccagagcccaaguuggagag

SEQ ID NO: 961372 - RNA, 22 nt, Human
acuuuugguucuguaacuguga

SEQ ID NO: 961373 - RNA, 22 nt, Human
cagaagcauuccagcaaauagu

SEQ ID NO: 961374 - RNA, 22 nt, Human
gaaggccucacucugcagcaua

SEQ ID NO: 961375 - RNA, 22 nt, Human
ugaaacacuuucaauuacauau

SEQ ID NO: 961376 - RNA, 22 nt, Human
ggcaaaaaccauaauuacuuuu

SEQ ID NO: 961377 - RNA, 20 nt, Human
agcuggagaagggcccuucc

SEQ ID NO: 961378 - RNA, 19 nt, Human
gaagaagcuugagaaguag

SEQ ID NO: 961379 - RNA, 22 nt, Human
uuagauaauguagagauaugag

SEQ ID NO: 961380 - RNA, 22 nt, Human
ccuuucucuaucgacccaucgc

SEQ ID NO: 961381 - RNA, 23 nt, Human
uuguuuuuagagguggcaugaga

SEQ ID NO: 961382 - RNA, 22 nt, Human
aggcagcuuuguaguaaagcua

SEQ ID NO: 961383 - RNA, 21 nt, Human
agagccugagaucuuccagca

SEQ ID NO: 961384 - RNA, 20 nt, Human
augccucuaauuuugcaaac

SEQ ID NO: 961385 - RNA, 19 nt, Human
uggcaggcccaggauggac

SEQ ID NO: 961386 - RNA, 22 nt, Human
gggcuguggagccgcgagggcu

SEQ ID NO: 961387 - RNA, 21 nt, Human
acaguucaugauaacuccauc

SEQ ID NO: 961388 - RNA, 22 nt, Human
gggggcucugacucccucagcu

SEQ ID NO: 961389 - RNA, 22 nt, Human
uagaacagaguuccagugauca

SEQ ID NO: 961390 - RNA, 22 nt, Human
caucaguguggcaguucacugu

SEQ ID NO: 961391 - RNA, 18 nt, Human
ccugagcccugcuuacuu

SEQ ID NO: 961392 - RNA, 22 nt, Human
uggcagagaacacggcugaucu

SEQ ID NO: 961393 - RNA, 22 nt, Human
cuucucuucccagggacacagg

SEQ ID NO: 961394 - RNA, 22 nt, Human
uccuggaggcaaaugaagacuc

SEQ ID NO: 961395 - RNA, 22 nt, Human
agccucuguagaaagcagugug

SEQ ID NO: 961396 - RNA, 22 nt, Human
acaaaugcaaguuuuaugucaa

SEQ ID NO: 961397 - RNA, 23 nt, Human
cuccuggaggguccggcccugcc

SEQ ID NO: 961398 - RNA, 22 nt, Human
uucaaugauuuuuagggaucau

SEQ ID NO: 961399 - RNA, 22 nt, Human
agccuggcccugcugaacucug

SEQ ID NO: 961400 - RNA, 22 nt, Human
aggcagauuacuugaggccagg

SEQ ID NO: 961401 - RNA, 22 nt, Human
aggcaggcuggucugaagagug

SEQ ID NO: 961402 - RNA, 22 nt, Human
gaggcugguaggaaaggaaaca

SEQ ID NO: 961403 - RNA, 22 nt, Human
ucccagccuuccagucugguuu

SEQ ID NO: 961404 - RNA, 22 nt, Human
agaaaugaaaccaaagccuaga

SEQ ID NO: 961405 - RNA, 22 nt, Human
cacaggcuugucagcaugaggc

SEQ ID NO: 961406 - RNA, 22 nt, Human
aggguagguguaagauagcccu

SEQ ID NO: 961407 - RNA, 22 nt, Human
uccugucugucuuuggucccuu

SEQ ID NO: 961408 - RNA, 22 nt, Human
uccuggccucgcuguccaccuu

SEQ ID NO: 961409 - RNA, 22 nt, Human
ccuggagcccaaggcagugaga

SEQ ID NO: 961410 - RNA, 22 nt, Human
cuuugaaaacuuaaauaacagc

SEQ ID NO: 961411 - RNA, 22 nt, Human
cugugucucccaaggaggguca

SEQ ID NO: 961412 - RNA, 22 nt, Human
gaaaugcauaaucuuaguagau

SEQ ID NO: 961413 - RNA, 22 nt, Human
uguguccuucugggagucccag

SEQ ID NO: 961414 - RNA, 22 nt, Human
uucaggaucauuuguuuuaucu

SEQ ID NO: 961415 - RNA, 22 nt, Human
agcccagccggauucccaguuc

SEQ ID NO: 961416 - RNA, 22 nt, Human
gccaccagugggggccugggca

SEQ ID NO: 961417 - RNA, 22 nt, Human
gaggcagcugggauacaaggga

SEQ ID NO: 961418 - RNA, 22 nt, Human
gcacacccucucaccagcacug

SEQ ID NO: 961419 - RNA, 22 nt, Human
caggauggucagaugcauuguc

SEQ ID NO: 961420 - RNA, 22 nt, Human
ggcagugacuguucagacgucc

SEQ ID NO: 961421 - RNA, 22 nt, Human
aauuuccagaucagaugacuca

SEQ ID NO: 961422 - RNA, 22 nt, Human
accuuuuccagcuucuagaggc

SEQ ID NO: 961423 - RNA, 22 nt, Human
cacuggaauucaagauacugag

SEQ ID NO: 961424 - RNA, 22 nt, Human
cagggcccaggccacuggguug

SEQ ID NO: 961425 - RNA, 22 nt, Human
aggccagcucuacccuuggacu

SEQ ID NO: 961426 - RNA, 22 nt, Human
agagccuugaagaucuggaaaa

SEQ ID NO: 961427 - RNA, 22 nt, Human
ugggcagauuaaugcaguggcu

SEQ ID NO: 961428 - RNA, 22 nt, Human
gggcacuggaaggcucucaggc

SEQ ID NO: 961429 - RNA, 22 nt, Human
auucuuggagcagucaaagaag

SEQ ID NO: 961430 - RNA, 22 nt, Human
ugucccagacacaguaugcgcu

SEQ ID NO: 961431 - RNA, 22 nt, Human
uuugcaaaaugucuuguguuag

SEQ ID NO: 961432 - RNA, 22 nt, Human
gaauauuuuuaaagggacuaau

SEQ ID NO: 961433 - RNA, 22 nt, Human
gcugcagcagcugcaggguugu

SEQ ID NO: 961434 - RNA, 22 nt, Human
uucuucaacaaggacacuguua

SEQ ID NO: 961435 - RNA, 22 nt, Human
cucuggagguggagguugcagu

SEQ ID NO: 961436 - RNA, 22 nt, Human
uggcagcuggaucccaaggcag

SEQ ID NO: 961437 - RNA, 22 nt, Human
ugcuggaauaauuucauguuaa

SEQ ID NO: 961438 - RNA, 22 nt, Human
cugugucccaguaccuugggua

SEQ ID NO: 961439 - RNA, 22 nt, Human
uaucuacuccucuuucagaugc

SEQ ID NO: 961440 - RNA, 22 nt, Human
aauaggcaguuggauaugcaag

SEQ ID NO: 961441 - RNA, 22 nt, Human
ccacagugguucucaaccaggg

SEQ ID NO: 961442 - RNA, 22 nt, Human
cugagccagggccacacaugga

SEQ ID NO: 961443 - RNA, 22 nt, Human
aggagccuccuucucaugugca

SEQ ID NO: 961444 - RNA, 22 nt, Human
uccuauugguagacauuucugu

SEQ ID NO: 961445 - RNA, 19 nt, Human
aaagcagaggagcaucuga

SEQ ID NO: 961446 - RNA, 22 nt, Human
ccugccaggccagugagcuucc

SEQ ID NO: 961447 - RNA, 22 nt, Human
cagucacauugcccugcauuua

SEQ ID NO: 961448 - RNA, 22 nt, Human
cccaggagccaucugucuuggc

SEQ ID NO: 961449 - RNA, 22 nt, Human
uugcauaaaugcuuaaaauuug

SEQ ID NO: 961450 - RNA, 22 nt, Human
aucagaauaauuagauuucaga

SEQ ID NO: 961451 - RNA, 22 nt, Human
uuuuccuaguaggccuauuaga

SEQ ID NO: 961452 - RNA, 22 nt, Human
gagcugccggcccacaguacua

SEQ ID NO: 961453 - RNA, 22 nt, Human
ggaaaaggccauuguuucucug

SEQ ID NO: 961454 - RNA, 22 nt, Human
cuggcagauuggggucagcagu

SEQ ID NO: 961455 - RNA, 22 nt, Human
uaaggccaaguucauauacaac

SEQ ID NO: 961456 - RNA, 22 nt, Human
gaggacagagccgccuggcaag

SEQ ID NO: 961457 - RNA, 22 nt, Human
gcugcagcaagcccuccagggg

SEQ ID NO: 961458 - RNA, 22 nt, Human
cuggaagguucuuugugugccu

SEQ ID NO: 961459 - RNA, 22 nt, Human
ugaacucgggaggaggcugcag

SEQ ID NO: 961460 - RNA, 22 nt, Human
aauacaguagguaauaguucau

SEQ ID NO: 961461 - RNA, 19 nt, Human
ccuggaggugaagguucuc

SEQ ID NO: 961462 - RNA, 22 nt, Human
gaggagaggccaucguuguuau

SEQ ID NO: 961463 - RNA, 23 nt, Human
ggagccuggcauaugagacgcau

SEQ ID NO: 961464 - RNA, 22 nt, Human
ugcagaagaaugagcuuggagu

SEQ ID NO: 961465 - RNA, 23 nt, Human
cuggggcuuucaaaucugggcag

SEQ ID NO: 961466 - RNA, 22 nt, Human
cccaguccuaaagcagacgcca

SEQ ID NO: 961467 - RNA, 22 nt, Human
uccugcagagacagaggccuca

SEQ ID NO: 961468 - RNA, 22 nt, Human
caauaagugcuuuuguuuagca

SEQ ID NO: 961469 - RNA, 22 nt, Human
ggacccugggcuugcuccuggg

SEQ ID NO: 961470 - RNA, 22 nt, Human
ugugcagggaagggcaugcuau

SEQ ID NO: 961471 - RNA, 22 nt, Human
ggagcugaaggggugggcucag

SEQ ID NO: 961472 - RNA, 22 nt, Human
guccucuggugaaagcauuccc

SEQ ID NO: 961473 - RNA, 22 nt, Human
cugaaggauuuaguucuuugcu

SEQ ID NO: 961474 - RNA, 22 nt, Human
cagugccaugucugagccccua

SEQ ID NO: 961475 - RNA, 22 nt, Human
ccagggccaguaagauuggcau

SEQ ID NO: 961476 - RNA, 22 nt, Human
cauuugaugacucaacucauaa

SEQ ID NO: 961477 - RNA, 22 nt, Human
uugcauugcuuggucuucaaga

SEQ ID NO: 961478 - RNA, 22 nt, Human
uuuguuuagaugguaaaucagu

SEQ ID NO: 961479 - RNA, 22 nt, Human
cccugcagcuuuugcauaguca

SEQ ID NO: 961480 - RNA, 22 nt, Human
uauuccuaagucccaacuacau

SEQ ID NO: 961481 - RNA, 22 nt, Human
ggcacugacacuagcauggcac

SEQ ID NO: 961482 - RNA, 20 nt, Human
uccagggcuagggagcucau

SEQ ID NO: 961483 - RNA, 23 nt, Human
acacaaggguaacugccagccau

SEQ ID NO: 961484 - RNA, 22 nt, Human
cuggccagcugacagcagggcu

SEQ ID NO: 961485 - RNA, 22 nt, Human
aucaggauuacacggggaugcu

SEQ ID NO: 961486 - RNA, 22 nt, Human
uauuuucuguggaggaccagau

SEQ ID NO: 961487 - RNA, 22 nt, Human
cuggccagacuacacaugugug

SEQ ID NO: 961488 - RNA, 22 nt, Human
agaaagaacgcacuugugcugc

SEQ ID NO: 961489 - RNA, 22 nt, Human
aaagaacagauguguggugcau

SEQ ID NO: 961490 - RNA, 22 nt, Human
caggcagccugcggucugcaca

SEQ ID NO: 961491 - RNA, 22 nt, Human
ucuuguuacaguuuauuacaug

SEQ ID NO: 961492 - RNA, 22 nt, Human
auuuucugguugagguuuaaca

SEQ ID NO: 961493 - RNA, 22 nt, Human
aagcagccuggacuugggcugg

SEQ ID NO: 961494 - RNA, 22 nt, Human
gccaggcuggugcaaggauauu

SEQ ID NO: 961495 - RNA, 22 nt, Human
cugucccuucauuauucacuac

SEQ ID NO: 961496 - RNA, 22 nt, Human
uuuccuaguucuaagaaaugua

SEQ ID NO: 961497 - RNA, 22 nt, Human
uugcuuuguuacugcaguuucc

SEQ ID NO: 961498 - RNA, 22 nt, Human
ggucagggcucuuccaguggcu

SEQ ID NO: 961499 - RNA, 22 nt, Human
uggcagcuguuaauguuuuguu

SEQ ID NO: 961500 - RNA, 18 nt, Human
agaggggagguaagucug

SEQ ID NO: 961501 - RNA, 22 nt, Human
acagagcauauaaagugcuuug

SEQ ID NO: 961502 - RNA, 22 nt, Human
accaggaggccuugguucugag

SEQ ID NO: 961503 - RNA, 22 nt, Human
acaguaauaaguguuggugagg

SEQ ID NO: 961504 - RNA, 22 nt, Human
cauacauuuugcauauuuacca

SEQ ID NO: 961505 - RNA, 22 nt, Human
cccaggaggacauuccauaccc

SEQ ID NO: 961506 - RNA, 22 nt, Human
cagggacugagauccagacugu

SEQ ID NO: 961507 - RNA, 22 nt, Human
gaaucacgguauucugcacggg

SEQ ID NO: 961508 - RNA, 22 nt, Human
cagagcugggaucccaugggcg

SEQ ID NO: 961509 - RNA, 22 nt, Human
gcacucugugaucugcagagcc

SEQ ID NO: 961510 - RNA, 22 nt, Human
uggagcugguaaacagugacau

SEQ ID NO: 961511 - RNA, 22 nt, Human
cucuguccacagguuugucccu

SEQ ID NO: 961512 - RNA, 22 nt, Human
cauugaaauauggaaacugaug

SEQ ID NO: 961513 - RNA, 22 nt, Human
aggguauguuuuuaucuacugu

SEQ ID NO: 961514 - RNA, 22 nt, Human
auaacaugaccugugcuucaca

SEQ ID NO: 961515 - RNA, 22 nt, Human
acagagcuuaggaugacuccca

SEQ ID NO: 961516 - RNA, 22 nt, Human
cagagccucagaauccugugga

SEQ ID NO: 961517 - RNA, 22 nt, Human
gggaagaguaacuagcccaugu

SEQ ID NO: 961518 - RNA, 22 nt, Human
aaauaguaaagugguagccauc

SEQ ID NO: 961519 - RNA, 22 nt, Human
aggcaagcgcagaagcggagga

SEQ ID NO: 961520 - RNA, 22 nt, Human
aggccagguuccucaaucuuga

SEQ ID NO: 961521 - RNA, 22 nt, Human
aagggcugaaugaaggguugaa

SEQ ID NO: 961522 - RNA, 22 nt, Human
gcccagcugcacccuggugggu

SEQ ID NO: 961523 - RNA, 22 nt, Human
gcaggaugagugaguacauuua

SEQ ID NO: 961524 - RNA, 22 nt, Human
ugcuucaaguugaaauauucuu

SEQ ID NO: 961525 - RNA, 22 nt, Human
agaggcugaaugaugucaucau

SEQ ID NO: 961526 - RNA, 22 nt, Human
ccucacugaagaggugacauuu

SEQ ID NO: 961527 - RNA, 22 nt, Human
aauuaaauugguuuagagagga

SEQ ID NO: 961528 - RNA, 22 nt, Human
ucagggacugcagagggaagcu

SEQ ID NO: 961529 - RNA, 22 nt, Human
agcugagcugcagaugacugua

SEQ ID NO: 961530 - RNA, 22 nt, Human
ggaggguuagcaaaggcacaga

SEQ ID NO: 961531 - RNA, 22 nt, Human
ccuggcagaauauuaaagugca

SEQ ID NO: 961532 - RNA, 22 nt, Human
cauuaucucuucuauaugcuag

SEQ ID NO: 961533 - RNA, 22 nt, Human
gaugcagggcuggcaggagcuu

SEQ ID NO: 961534 - RNA, 22 nt, Human
uaugauuuguagacauuugauu

SEQ ID NO: 961535 - RNA, 22 nt, Human
uuacaagcagcuacauaucaca

SEQ ID NO: 961536 - RNA, 22 nt, Human
gccaggcuggugucacaacucu

SEQ ID NO: 961537 - RNA, 22 nt, Human
gcugaaggaggcucugguacua

SEQ ID NO: 961538 - RNA, 22 nt, Human
aaucuguuuaguucugcguaug

SEQ ID NO: 961539 - RNA, 20 nt, Human
cagggccacgcuccaaggca

SEQ ID NO: 961540 - RNA, 22 nt, Human
uaugagaaaauaaauaucuguu

SEQ ID NO: 961541 - RNA, 22 nt, Human
cugugucuuuccuacuuugugg

SEQ ID NO: 961542 - RNA, 22 nt, Human
cacagggcagugcugcccacuc

SEQ ID NO: 961543 - RNA, 22 nt, Human
gagaggucaucucccaucagca

SEQ ID NO: 961544 - RNA, 22 nt, Human
ugguaauuaauuugauagguuc

SEQ ID NO: 961545 - RNA, 22 nt, Human
aaguaugcuaauuaacuagcac

SEQ ID NO: 961546 - RNA, 22 nt, Human
caugugugacaaacugccugca

SEQ ID NO: 961547 - RNA, 22 nt, Human
uacuaugugaaaauacuauagu

SEQ ID NO: 961548 - RNA, 22 nt, Human
guuauguacuuuuuaaaucuug

SEQ ID NO: 961549 - RNA, 22 nt, Human
ggugucccaggccagcugugug

SEQ ID NO: 961550 - RNA, 22 nt, Human
ccuuucucauuuuaagcauuag

SEQ ID NO: 961551 - RNA, 22 nt, Human
auucuccagcucacuguccaua

SEQ ID NO: 961552 - RNA, 22 nt, Human
gguucacauauugagaguauuc

SEQ ID NO: 961553 - RNA, 19 nt, Human
ccucugcuccaguuuccuu

SEQ ID NO: 961554 - RNA, 22 nt, Human
cuguggcuaugguguacauacu

SEQ ID NO: 961555 - RNA, 22 nt, Human
uggccugcccagagcagcucug

SEQ ID NO: 961556 - RNA, 22 nt, Human
gaggcccaggucaagcagccac

SEQ ID NO: 961557 - RNA, 23 nt, Human
agaugagccaacaccuccaugcc

SEQ ID NO: 961558 - RNA, 22 nt, Human
ucugugacuugcgggaggagaa

SEQ ID NO: 961559 - RNA, 22 nt, Human
agggacuuguguccuauguaug

SEQ ID NO: 961560 - RNA, 22 nt, Human
aagacagagacucugcaacagg

SEQ ID NO: 961561 - RNA, 22 nt, Human
aagccaagaguuaacuauuugu

SEQ ID NO: 961562 - RNA, 22 nt, Human
agccagggauggcagugcccag

SEQ ID NO: 961563 - RNA, 22 nt, Human
cacagggcuuugauggcugagu

SEQ ID NO: 961564 - RNA, 18 nt, Human
ggagagugacagagucgu

SEQ ID NO: 961565 - RNA, 22 nt, Human
gcaaggcugcugccacccaucu

SEQ ID NO: 961566 - RNA, 22 nt, Human
agagagcauugaggaaaucuuc

SEQ ID NO: 961567 - RNA, 21 nt, Human
uggccaaaaccauauuauuaa

SEQ ID NO: 961568 - RNA, 22 nt, Human
uccagggaagagcagaggcuac

SEQ ID NO: 961569 - RNA, 22 nt, Human
ggaugggagcagaggacgacca

SEQ ID NO: 961570 - RNA, 22 nt, Human
aagcagagcaagcguauuuauu

SEQ ID NO: 961571 - RNA, 22 nt, Human
agggcagaaauauugauacugu

SEQ ID NO: 961572 - RNA, 19 nt, Human
agauggggaagagugugag

SEQ ID NO: 961573 - RNA, 22 nt, Human
auuggucaggacuggcaugugg

SEQ ID NO: 961574 - RNA, 22 nt, Human
gcucucugggugugucuagaua

SEQ ID NO: 961575 - RNA, 19 nt, Human
gccaggagggcucuggcug

SEQ ID NO: 961576 - RNA, 22 nt, Human
aggcaguuguugcugagcagcu

SEQ ID NO: 961577 - RNA, 22 nt, Human
uggggacacagagccaaacuau

SEQ ID NO: 961578 - RNA, 22 nt, Human
ucaguuuuuacggucacaggga

SEQ ID NO: 961579 - RNA, 23 nt, Human
aggcagcagguuguccaggguga

SEQ ID NO: 961580 - RNA, 22 nt, Human
ccagcuccccucagcagguaau

SEQ ID NO: 961581 - RNA, 22 nt, Human
ggugacugguuuaucuggcagu

SEQ ID NO: 961582 - RNA, 22 nt, Human
aucuaagaguuaacaucaagaa

SEQ ID NO: 961583 - RNA, 22 nt, Human
aucccaugagaccacguuggcu

SEQ ID NO: 961584 - RNA, 22 nt, Human
ucucaggcuaccuugcacaagg

SEQ ID NO: 961585 - RNA, 22 nt, Human
augaagcuaaacccugcagcca

SEQ ID NO: 961586 - RNA, 22 nt, Human
aagccuugcagcauuaggcucu

SEQ ID NO: 961587 - RNA, 22 nt, Human
acugcuuuagaccuagagcucu

SEQ ID NO: 961588 - RNA, 22 nt, Human
ugagcaguaggucugaauagug

SEQ ID NO: 961589 - RNA, 23 nt, Human
aguuuuucugcaugguucuguau

SEQ ID NO: 961590 - RNA, 22 nt, Human
ggugagaggcagaggacagcuu

SEQ ID NO: 961591 - RNA, 22 nt, Human
cccuggagggacagcugcucua

SEQ ID NO: 961592 - RNA, 22 nt, Human
ggaggccuagccagcuccaguu

SEQ ID NO: 961593 - RNA, 22 nt, Human
acauuuaggauguuuugagaga

SEQ ID NO: 961594 - RNA, 22 nt, Human
gucuggccugccagcucuggug

SEQ ID NO: 961595 - RNA, 22 nt, Human
ucgagcucuggagccaaggaug

SEQ ID NO: 961596 - RNA, 22 nt, Human
gagccaggguuugaaacuagac

SEQ ID NO: 961597 - RNA, 21 nt, Human
uccauuguuuucccaggguuu

SEQ ID NO: 961598 - RNA, 22 nt, Human
aauguugagcuugaaaguaggu

SEQ ID NO: 961599 - RNA, 22 nt, Human
ucuggagccacaaaccucagcu

SEQ ID NO: 961600 - RNA, 22 nt, Human
ugggcugcccaagguggccaug

SEQ ID NO: 961601 - RNA, 22 nt, Human
aaaauuauagaucuagugccug

SEQ ID NO: 961602 - RNA, 22 nt, Human
gcacacagauuaggaaacagaa

SEQ ID NO: 961603 - RNA, 22 nt, Human
cagucccaaggaggaagcaguc

SEQ ID NO: 961604 - RNA, 22 nt, Human
uaugcauaugaccccaagcuug

SEQ ID NO: 961605 - RNA, 22 nt, Human
aaaugcuguaacugauauucug

SEQ ID NO: 961606 - RNA, 22 nt, Human
gauccuugcacuugacuuggca

SEQ ID NO: 961607 - RNA, 22 nt, Human
agggaagaugucucaucuuagg

SEQ ID NO: 961608 - RNA, 22 nt, Human
gggagagagaaaacguggcgca

SEQ ID NO: 961609 - RNA, 22 nt, Human
ccaggagcauuaagagaacaua

SEQ ID NO: 961610 - RNA, 22 nt, Human
ggccauggaccccgagcugacc

SEQ ID NO: 961611 - RNA, 22 nt, Human
aauaauguugacgauagucuua

SEQ ID NO: 961612 - RNA, 22 nt, Human
gacccaggcucgugggacggcu

SEQ ID NO: 961613 - RNA, 22 nt, Human
caaauucucacccuguuugauu

SEQ ID NO: 961614 - RNA, 22 nt, Human
ucuuuggaucccaacuggcugg

SEQ ID NO: 961615 - RNA, 22 nt, Human
ugugccagccucuggcuguguc

SEQ ID NO: 961616 - RNA, 22 nt, Human
ugagccuggggccugggcagcg

SEQ ID NO: 961617 - RNA, 22 nt, Human
ggcucuggaaaguguccuugau

SEQ ID NO: 961618 - RNA, 22 nt, Human
auauuaggcaaggagauuauuu

SEQ ID NO: 961619 - RNA, 22 nt, Human
uggccuggcccugaggcccugu

SEQ ID NO: 961620 - RNA, 22 nt, Human
cagcuggcagaaccugcaucca

SEQ ID NO: 961621 - RNA, 22 nt, Human
gcagcugccccgacugugaguc

SEQ ID NO: 961622 - RNA, 19 nt, Human
agggagaauuccaagagga

SEQ ID NO: 961623 - RNA, 22 nt, Human
aauaacaggcucaucagaugcu

SEQ ID NO: 961624 - RNA, 22 nt, Human
uagcaguggaaucuuuugucca

SEQ ID NO: 961625 - RNA, 22 nt, Human
uggccuggggaagaccaugggc

SEQ ID NO: 961626 - RNA, 22 nt, Human
ggggcagauggaacagagcaca

SEQ ID NO: 961627 - RNA, 22 nt, Human
uaauccacaauagagauuaucu

SEQ ID NO: 961628 - RNA, 22 nt, Human
ucaacagaagugauagcuauua

SEQ ID NO: 961629 - RNA, 22 nt, Human
gagggcaguagccucguacccu

SEQ ID NO: 961630 - RNA, 22 nt, Human
cagcugagaccagaaugcaggu

SEQ ID NO: 961631 - RNA, 22 nt, Human
auacaucuaugccuuucugaca

SEQ ID NO: 961632 - RNA, 22 nt, Human
ggcagagcugcaugagcacuca

SEQ ID NO: 961633 - RNA, 22 nt, Human
ugucccagaucacaggagggga

SEQ ID NO: 961634 - RNA, 22 nt, Human
auuuaguguguauugcuauuau

SEQ ID NO: 961635 - RNA, 22 nt, Human
ugccagggcugcuacuggcuga

SEQ ID NO: 961636 - RNA, 22 nt, Human
augcaguacauacaaacacuga

SEQ ID NO: 961637 - RNA, 22 nt, Human
ccucccacuucuugcugagguc

SEQ ID NO: 961638 - RNA, 22 nt, Human
gagucuuaggcaaaaauaaugg

SEQ ID NO: 961639 - RNA, 22 nt, Human
agcugccauggccugaauuuac

SEQ ID NO: 961640 - RNA, 22 nt, Human
aaggcagcuuuaaaaaagaugc

SEQ ID NO: 961641 - RNA, 22 nt, Human
ugcuagaaaucugaaacuagca

SEQ ID NO: 961642 - RNA, 22 nt, Human
acuccuggggcugccaucacag

SEQ ID NO: 961643 - RNA, 22 nt, Human
cugcccugugaggguccuuggg

SEQ ID NO: 961644 - RNA, 22 nt, Human
gcagagaagaugcccaggcuuc

SEQ ID NO: 961645 - RNA, 22 nt, Human
ccaggcagagugcuccagaaag

SEQ ID NO: 961646 - RNA, 22 nt, Human
ucucaggggauucacuggcacc

SEQ ID NO: 961647 - RNA, 22 nt, Human
uauaugcagauuuucaucaucg

SEQ ID NO: 961648 - RNA, 22 nt, Human
uuggcuucucuuaacccuaaag

SEQ ID NO: 961649 - RNA, 22 nt, Human
cauaucccauuggccaggacau

SEQ ID NO: 961650 - RNA, 22 nt, Human
ccuccaggcugaauaucuagaa

SEQ ID NO: 961651 - RNA, 22 nt, Human
uggcugugggaugagagccuca

SEQ ID NO: 961652 - RNA, 22 nt, Human
cggagaggaccugcaacucgcu

SEQ ID NO: 961653 - RNA, 22 nt, Human
ccagggucucugcugccugaga

SEQ ID NO: 961654 - RNA, 18 nt, Human
gucacuguguuucugagc

SEQ ID NO: 961655 - RNA, 17 nt, Human
ucccaggaacagggaau

SEQ ID NO: 961656 - RNA, 22 nt, Human
aggcagaauguuggaaaggaag

SEQ ID NO: 961657 - RNA, 19 nt, Human
caaggguugggucugucau

SEQ ID NO: 961658 - RNA, 22 nt, Human
caagggugguauugggagcaua

SEQ ID NO: 961659 - RNA, 22 nt, Human
aagacauugucauuuuauaauu

SEQ ID NO: 961660 - RNA, 22 nt, Human
gagccauacaaccuauaaagug

SEQ ID NO: 961661 - RNA, 22 nt, Human
gagcaggccagcaauggaaggg

SEQ ID NO: 961662 - RNA, 22 nt, Human
uggcagcaccagcaguguccuu

SEQ ID NO: 961663 - RNA, 20 nt, Human
augugucuuagagcaucagg

SEQ ID NO: 961664 - RNA, 22 nt, Human
cccgggaggaggaaguugcagu

SEQ ID NO: 961665 - RNA, 22 nt, Human
ucacagggcauuauggcuccag

SEQ ID NO: 961666 - RNA, 22 nt, Human
gauggacagccuggaaggaaag

SEQ ID NO: 961667 - RNA, 22 nt, Human
auagucaaccuuguaauuagcc

SEQ ID NO: 961668 - RNA, 22 nt, Human
ggccagaggccauccuccugcu

SEQ ID NO: 961669 - RNA, 22 nt, Human
cugcuguguggauucaauggcu

SEQ ID NO: 961670 - RNA, 22 nt, Human
aauguguacaugacagauagaa

SEQ ID NO: 961671 - RNA, 22 nt, Human
uuuguuaauucuuauguuagag

SEQ ID NO: 961672 - RNA, 22 nt, Human
uccagucaggcugaauucaagg

SEQ ID NO: 961673 - RNA, 19 nt, Human
ugaggggaggagaggccug

SEQ ID NO: 961674 - RNA, 22 nt, Human
agugcugucccgacaacugagg

SEQ ID NO: 961675 - RNA, 22 nt, Human
uguacacugcaggaugcauugc

SEQ ID NO: 961676 - RNA, 22 nt, Human
gagccuggauugucaccgacuu

SEQ ID NO: 961677 - RNA, 22 nt, Human
gccuggagcagacgugucccgg

SEQ ID NO: 961678 - RNA, 20 nt, Human
gugcauuucaccuguacugu

SEQ ID NO: 961679 - RNA, 22 nt, Human
ugcucccagggacucuggcugg

SEQ ID NO: 961680 - RNA, 22 nt, Human
aagcccagaugggagcauuuca

SEQ ID NO: 961681 - RNA, 22 nt, Human
ggcucaggaugagccuucucau

SEQ ID NO: 961682 - RNA, 22 nt, Human
gagggaauggugugcaagaggu

SEQ ID NO: 961683 - RNA, 20 nt, Human
uuucaguugguuaauggcau

SEQ ID NO: 961684 - RNA, 22 nt, Human
cgaugguucuggcugcuuguau

SEQ ID NO: 961685 - RNA, 22 nt, Human
agauuucccaaauacuuguuau

SEQ ID NO: 961686 - RNA, 22 nt, Human
cagggccucuccuccaggaacu

SEQ ID NO: 961687 - RNA, 22 nt, Human
aaugggaggauuuucucucuug

SEQ ID NO: 961688 - RNA, 22 nt, Human
caggacagguguucuagaucag

SEQ ID NO: 961689 - RNA, 22 nt, Human
auucuucacaccuguuccuguu

SEQ ID NO: 961690 - RNA, 19 nt, Human
ugagagugaggaaggcuuc

SEQ ID NO: 961691 - RNA, 22 nt, Human
cacuaugcuuacaugcuuauau

SEQ ID NO: 961692 - RNA, 22 nt, Human
ccagcugaggcagccacacagg

SEQ ID NO: 961693 - RNA, 22 nt, Human
aggcacugugcuucuuauaugu

SEQ ID NO: 961694 - RNA, 19 nt, Human
ccuuggaguuccaggugga

SEQ ID NO: 961695 - RNA, 22 nt, Human
uugaggagucaggggcacggaa

SEQ ID NO: 961696 - RNA, 22 nt, Human
acuuucucaggaauucacagac

SEQ ID NO: 961697 - RNA, 22 nt, Human
ccuggcaggcuggggacagugc

SEQ ID NO: 961698 - RNA, 22 nt, Human
gaggucaggggagaggcugaug

SEQ ID NO: 961699 - RNA, 18 nt, Human
cauuaugugguuauagaa

SEQ ID NO: 961700 - RNA, 22 nt, Human
uccagggagagccgcugcucca

SEQ ID NO: 961701 - RNA, 20 nt, Human
gcagcugcccccagucccug

SEQ ID NO: 961702 - RNA, 22 nt, Human
gaaugcacuuccaacaucuauu

SEQ ID NO: 961703 - RNA, 22 nt, Human
acugucacuccaacugagucgu

SEQ ID NO: 961704 - RNA, 20 nt, Human
gcagcugaaaguaugacacc

SEQ ID NO: 961705 - RNA, 22 nt, Human
uuucuauaaaaagugcuaggau

SEQ ID NO: 961706 - RNA, 22 nt, Human
uauauuaacuugugauccugga

SEQ ID NO: 961707 - RNA, 23 nt, Human
agagcuuucuaaaauguaaaucu

SEQ ID NO: 961708 - RNA, 22 nt, Human
cugcccugcccaggccuugggc

SEQ ID NO: 961709 - RNA, 22 nt, Human
ggcagcucugugucugggaagc

SEQ ID NO: 961710 - RNA, 22 nt, Human
guauuuauaggggaaugagagu

SEQ ID NO: 961711 - RNA, 22 nt, Human
gguuugaacagcuuuggagaag

SEQ ID NO: 961712 - RNA, 22 nt, Human
ggcagaggaggggugaauuugc

SEQ ID NO: 961713 - RNA, 22 nt, Human
ugauacagucagcucacaauug

SEQ ID NO: 961714 - RNA, 22 nt, Human
uucucagagugaccaagucuuu

SEQ ID NO: 961715 - RNA, 23 nt, Human
caugggagugagaaugccagcuc

SEQ ID NO: 961716 - RNA, 22 nt, Human
gccaggcagcugggagggugcc

SEQ ID NO: 961717 - RNA, 22 nt, Human
gauuuucauuauagcuaguuuc

SEQ ID NO: 961718 - RNA, 22 nt, Human
uccuggaggggacagcaugggc

SEQ ID NO: 961719 - RNA, 22 nt, Human
aucaaaguccaucagaagguag

SEQ ID NO: 961720 - RNA, 19 nt, Human
ggccuggauuuagggcucc

SEQ ID NO: 961721 - RNA, 22 nt, Human
uuccucaugggguuccuucaga

SEQ ID NO: 961722 - RNA, 19 nt, Human
acaaagcugugagcagcuu

SEQ ID NO: 961723 - RNA, 22 nt, Human
cacaggagcuguggggcagugu

SEQ ID NO: 961724 - RNA, 22 nt, Human
ucugggagacguguguugucag

SEQ ID NO: 961725 - RNA, 22 nt, Human
gaggagcuggcugucgggaggc

SEQ ID NO: 961726 - RNA, 22 nt, Human
uugcagcagggugaauucacuc

SEQ ID NO: 961727 - RNA, 22 nt, Human
ccuugcguuuuacagcuucuag

SEQ ID NO: 961728 - RNA, 22 nt, Human
cagcuuugauucuuucugccau

SEQ ID NO: 961729 - RNA, 22 nt, Human
aagauuuccauuucuagcucau

SEQ ID NO: 961730 - RNA, 20 nt, Human
cccaggagcugugccccauc

SEQ ID NO: 961731 - RNA, 22 nt, Human
ucaggcaggcagagggcaaaug

SEQ ID NO: 961732 - RNA, 22 nt, Human
uccaggagguugagugaguucc

SEQ ID NO: 961733 - RNA, 22 nt, Human
ucacagugaugacgugggagca

SEQ ID NO: 961734 - RNA, 22 nt, Human
ugcugcauuuaucuucucaaac

SEQ ID NO: 961735 - RNA, 22 nt, Human
cugaagcacagcauauaaauaa

SEQ ID NO: 961736 - RNA, 22 nt, Human
agagccaggcggcugggcaccu

SEQ ID NO: 961737 - RNA, 22 nt, Human
gucccugcaucaccacgggacu

SEQ ID NO: 961738 - RNA, 22 nt, Human
cccaggucuaugccagcucuga

SEQ ID NO: 961739 - RNA, 22 nt, Human
gggccaaggggagcuggaaggg

SEQ ID NO: 961740 - RNA, 22 nt, Human
caguggccugagccaggcuucc

SEQ ID NO: 961741 - RNA, 22 nt, Human
gcccauggcagaacugugagca

SEQ ID NO: 961742 - RNA, 22 nt, Human
uaaagugcugggauuauaggcc

SEQ ID NO: 961743 - RNA, 22 nt, Human
uuuguagaggguaauugacaga

SEQ ID NO: 961744 - RNA, 22 nt, Human
acauaaaguacugagagacucu

SEQ ID NO: 961745 - RNA, 22 nt, Human
agacucaagcagauaggaauua

SEQ ID NO: 961746 - RNA, 22 nt, Human
cuucaugcugauauccucgaug

SEQ ID NO: 961747 - RNA, 19 nt, Human
cccagcuugaccaccugcu

SEQ ID NO: 961748 - RNA, 22 nt, Human
uccuggagauaauugcagugaa

SEQ ID NO: 961749 - RNA, 22 nt, Human
cuggcagcaguuaugaaacaau

SEQ ID NO: 961750 - RNA, 22 nt, Human
agcccaggagguggagguugca

SEQ ID NO: 961751 - RNA, 22 nt, Human
uggacagcgaaagugccuggga

SEQ ID NO: 961752 - RNA, 22 nt, Human
uagagcaguuggcagcuguauu

SEQ ID NO: 961753 - RNA, 22 nt, Human
acucaggaaaugagaggcucuc

SEQ ID NO: 961754 - RNA, 22 nt, Human
ggagccagagggaugcaguuga

SEQ ID NO: 961755 - RNA, 16 nt, Human
ugggcagaugagaaga

SEQ ID NO: 961756 - RNA, 22 nt, Human
agcugguggauuaugcuguaca

SEQ ID NO: 961757 - RNA, 22 nt, Human
auguuacagaaagcaaagauga

SEQ ID NO: 961758 - RNA, 22 nt, Human
uggacucagaaguguucuuuua

SEQ ID NO: 961759 - RNA, 22 nt, Human
uuucacauuuaggcgugaauug

SEQ ID NO: 961760 - RNA, 18 nt, Human
uggcagagugucuguucu

SEQ ID NO: 961761 - RNA, 21 nt, Human
gcagccacugccuucaacaau

SEQ ID NO: 961762 - RNA, 21 nt, Human
aauaaaacaguuggugucaau

SEQ ID NO: 961763 - RNA, 22 nt, Human
uguggcucucaugcacucccag

SEQ ID NO: 961764 - RNA, 22 nt, Human
caugagauaauuuuucuccagu

SEQ ID NO: 961765 - RNA, 22 nt, Human
aggcucagagaugaguaagcac

SEQ ID NO: 961766 - RNA, 22 nt, Human
uccaggccuaggccaagugauu

SEQ ID NO: 961767 - RNA, 22 nt, Human
gagcagcuuaugucaagccaga

SEQ ID NO: 961768 - RNA, 22 nt, Human
uguacacaauucuuaacauaca

SEQ ID NO: 961769 - RNA, 22 nt, Human
ucugcagcgugcaggcuggugc

SEQ ID NO: 961770 - RNA, 22 nt, Human
aggaugagccgcgcaagcugac

SEQ ID NO: 961771 - RNA, 20 nt, Human
uacugggcaagcccacagac

SEQ ID NO: 961772 - RNA, 22 nt, Human
uccuguaguugcuaaguuuguu

SEQ ID NO: 961773 - RNA, 22 nt, Human
uucuucuucuggcugcaccugg

SEQ ID NO: 961774 - RNA, 22 nt, Human
gcaugugucuccccaguggagg

SEQ ID NO: 961775 - RNA, 22 nt, Human
uugugucccccuuugagagcca

SEQ ID NO: 961776 - RNA, 23 nt, Human
guuguaauggauaaugcaaauug

SEQ ID NO: 961777 - RNA, 22 nt, Human
guuagaaagugucugcuugggu

SEQ ID NO: 961778 - RNA, 22 nt, Human
ucugagaguagagcugccucuu

SEQ ID NO: 961779 - RNA, 22 nt, Human
ugucucaguucccuucucugga

SEQ ID NO: 961780 - RNA, 22 nt, Human
cauuugaaccuggauguucuua

SEQ ID NO: 961781 - RNA, 22 nt, Human
uuugcagucuggccugcuuugg

SEQ ID NO: 961782 - RNA, 22 nt, Human
uucaaagugcauguuccucaga

SEQ ID NO: 961783 - RNA, 22 nt, Human
uuuuaugugcuggacuggcagu

SEQ ID NO: 961784 - RNA, 19 nt, Human
ccaggccaucccaguuccc

SEQ ID NO: 961785 - RNA, 22 nt, Human
uuucacauaugguuguugauug

SEQ ID NO: 961786 - RNA, 22 nt, Human
gccuggcugcuagccagaggca

SEQ ID NO: 961787 - RNA, 22 nt, Human
auguagagcaguguuguccaau

SEQ ID NO: 961788 - RNA, 22 nt, Human
acaaauguggacauggauaaug

SEQ ID NO: 961789 - RNA, 22 nt, Human
ucauuuaauagcuuuugucuuu

SEQ ID NO: 961790 - RNA, 22 nt, Human
aagagcuggaugaagaaaucaa

SEQ ID NO: 961791 - RNA, 22 nt, Human
gggcugggaauggcuaaguaug

SEQ ID NO: 961792 - RNA, 22 nt, Human
aggaggccccuccuggguugcu

SEQ ID NO: 961793 - RNA, 22 nt, Human
uggccucuuaggacauccucua

SEQ ID NO: 961794 - RNA, 22 nt, Human
gugccagcucuccccacaucug

SEQ ID NO: 961795 - RNA, 20 nt, Human
auccaugagagucuggauuc

SEQ ID NO: 961796 - RNA, 22 nt, Human
acaaagucacaauaauuaaccu

SEQ ID NO: 961797 - RNA, 22 nt, Human
gaggcccuccagcugucagcug

SEQ ID NO: 961798 - RNA, 21 nt, Human
acugggagaacgagccuuucc

SEQ ID NO: 961799 - RNA, 22 nt, Human
caccuugugauccucuugccuu

SEQ ID NO: 961800 - RNA, 22 nt, Human
uccuucagcucucuauuuagau

SEQ ID NO: 961801 - RNA, 22 nt, Human
agaacagaugugggcagaccug

SEQ ID NO: 961802 - RNA, 22 nt, Human
ugcaauaaggaguaauaguaaa

SEQ ID NO: 961803 - RNA, 22 nt, Human
uucacagucacccuucuccaug

SEQ ID NO: 961804 - RNA, 22 nt, Human
cagaggccccagaacuagcucu

SEQ ID NO: 961805 - RNA, 22 nt, Human
acucugaggcaggucagggcag

SEQ ID NO: 961806 - RNA, 22 nt, Human
uccagagguauguagagaguau

SEQ ID NO: 961807 - RNA, 22 nt, Human
gcagccaccucccauggcgggg

SEQ ID NO: 961808 - RNA, 22 nt, Human
gagguacaugaggauacacagg

SEQ ID NO: 961809 - RNA, 22 nt, Human
ggcuucaccaggugcaugcaug

SEQ ID NO: 961810 - RNA, 22 nt, Human
uuagaaaggaaucuucauuuca

SEQ ID NO: 961811 - RNA, 22 nt, Human
ugcucuggaguggcuugugcac

SEQ ID NO: 961812 - RNA, 22 nt, Human
agggcugcaccggggcuucgcg

SEQ ID NO: 961813 - RNA, 22 nt, Human
gucuucaauagagccucaauuu

SEQ ID NO: 961814 - RNA, 22 nt, Human
gccuucagcccugacuggccag

SEQ ID NO: 961815 - RNA, 22 nt, Human
cacauuugaaggaauuagcauu

SEQ ID NO: 961816 - RNA, 19 nt, Human
gcaugcuugguggcuucug

SEQ ID NO: 961817 - RNA, 22 nt, Human
ucucagagaagugaugagcaau

SEQ ID NO: 961818 - RNA, 22 nt, Human
uaaagguaugucuuaaucaaac

SEQ ID NO: 961819 - RNA, 19 nt, Human
ccucccacggauuccuucc

SEQ ID NO: 961820 - RNA, 16 nt, Human
gggagggaguuggugg

SEQ ID NO: 961821 - RNA, 22 nt, Human
augcuguggaaguuccugaagc

SEQ ID NO: 961822 - RNA, 21 nt, Human
aggagggcacaaggccaggaa

SEQ ID NO: 961823 - RNA, 22 nt, Human
uugaaagucacaauggcauuaa

SEQ ID NO: 961824 - RNA, 22 nt, Human
aacauguugcuuuaauaauauu

SEQ ID NO: 961825 - RNA, 22 nt, Human
ugaagcaggaucguuugcuuca

SEQ ID NO: 961826 - RNA, 20 nt, Human
uccaggagaacugggagccg

SEQ ID NO: 961827 - RNA, 22 nt, Human
cugcagcuguagaggacagugg

SEQ ID NO: 961828 - RNA, 22 nt, Human
auugaaagauuuugggcucaug

SEQ ID NO: 961829 - RNA, 20 nt, Human
uccaggagguuaguguggcu

SEQ ID NO: 961830 - RNA, 22 nt, Human
augaguucaauuguuucaguca

SEQ ID NO: 961831 - RNA, 22 nt, Human
cugggagcuuguuaggaaugca

SEQ ID NO: 961832 - RNA, 22 nt, Human
ugagccugcaauaagcacagcc

SEQ ID NO: 961833 - RNA, 22 nt, Human
aacaucuacagugagauguuag

SEQ ID NO: 961834 - RNA, 22 nt, Human
gcuugggacuggagaauagggu

SEQ ID NO: 961835 - RNA, 22 nt, Human
ugggcugccagcucuccagaug

SEQ ID NO: 961836 - RNA, 22 nt, Human
gcccagcuccucugcagacccu

SEQ ID NO: 961837 - RNA, 22 nt, Human
caggcuugggagcagagccacu

SEQ ID NO: 961838 - RNA, 19 nt, Human
ugugaaagcuaguguucuu

SEQ ID NO: 961839 - RNA, 22 nt, Human
gugcucuccuggcugcccugac

SEQ ID NO: 961840 - RNA, 22 nt, Human
aagugaaacauguaucucuuua

SEQ ID NO: 961841 - RNA, 22 nt, Human
uauuuccaggccccacucuaga

SEQ ID NO: 961842 - RNA, 22 nt, Human
auguuaaaugguuuauuauuaa

SEQ ID NO: 961843 - RNA, 21 nt, Human
uccauaagagaccaucuccua

SEQ ID NO: 961844 - RNA, 22 nt, Human
ucauaaaaugcuccugauauug

SEQ ID NO: 961845 - RNA, 22 nt, Human
aguuucuuuagauagaaaguuc

SEQ ID NO: 961846 - RNA, 22 nt, Human
agauggaguuaguaccagaguc

SEQ ID NO: 961847 - RNA, 22 nt, Human
ugcuucucccaaccagggccug

SEQ ID NO: 961848 - RNA, 22 nt, Human
caaggccagggaauuuuucugg

SEQ ID NO: 961849 - RNA, 19 nt, Human
ccucuccgcccaccagccc

SEQ ID NO: 961850 - RNA, 22 nt, Human
uugcuucagagggagacacuuu

SEQ ID NO: 961851 - RNA, 22 nt, Human
ucacucuguguuugaacucaag

SEQ ID NO: 961852 - RNA, 22 nt, Human
aagaacaacugcuuuaaaagca

SEQ ID NO: 961853 - RNA, 22 nt, Human
ccugugccauccugagcauccc

SEQ ID NO: 961854 - RNA, 22 nt, Human
uucuucaguguagcaacuguau

SEQ ID NO: 961855 - RNA, 22 nt, Human
gauggguggucucagacuugcc

SEQ ID NO: 961856 - RNA, 22 nt, Human
uucaagucaaggaaagaggucu

SEQ ID NO: 961857 - RNA, 23 nt, Human
uggccuggagagaaaagaugagu

SEQ ID NO: 961858 - RNA, 23 nt, Human
uugcauagacauccucauagauu

SEQ ID NO: 961859 - RNA, 22 nt, Human
ugacccauggucugaucauagg

SEQ ID NO: 961860 - RNA, 22 nt, Human
cuauuuaugugcuauuuuguau

SEQ ID NO: 961861 - RNA, 22 nt, Human
cauuuguaggaugcuucuuguu

SEQ ID NO: 961862 - RNA, 22 nt, Human
gucucagaguccuacuuauucc

SEQ ID NO: 961863 - RNA, 22 nt, Human
ucccagcgcggggggaggaucc

SEQ ID NO: 961864 - RNA, 22 nt, Human
ggcugaaguguaguggcucacu

SEQ ID NO: 961865 - RNA, 22 nt, Human
cugaggccucuguucaccagaa

SEQ ID NO: 961866 - RNA, 22 nt, Human
uugggagcuuggccgagaugua

SEQ ID NO: 961867 - RNA, 22 nt, Human
auuauguaacugugguucagca

SEQ ID NO: 961868 - RNA, 22 nt, Human
gcuggcuguguuccuucugcca

SEQ ID NO: 961869 - RNA, 22 nt, Human
uucuucaguuugguaaauguaa

SEQ ID NO: 961870 - RNA, 20 nt, Human
uucaggauucuagaccacac

SEQ ID NO: 961871 - RNA, 22 nt, Human
uaaauguggagacucaggaguc

SEQ ID NO: 961872 - RNA, 22 nt, Human
uuguaacaaucugucauaaaug

SEQ ID NO: 961873 - RNA, 22 nt, Human
cuggagagggagcccuggcagu

SEQ ID NO: 961874 - RNA, 22 nt, Human
uguccacaucacucacuuguca

SEQ ID NO: 961875 - RNA, 21 nt, Human
aggugcagagccagggaccag

SEQ ID NO: 961876 - RNA, 22 nt, Human
uauucacauucucaggccuggu

SEQ ID NO: 961877 - RNA, 22 nt, Human
ugggcugcugagaaugagagag

SEQ ID NO: 961878 - RNA, 22 nt, Human
cuuaacauccugcauuuuucuu

SEQ ID NO: 961879 - RNA, 22 nt, Human
cccaggagcuucucucugccuc

SEQ ID NO: 961880 - RNA, 22 nt, Human
ggcccuguccuggcugucuccg

SEQ ID NO: 961881 - RNA, 22 nt, Human
uauuuugacuauuaaaccaaca

SEQ ID NO: 961882 - RNA, 22 nt, Human
ggagaaggugcuggucacugug

SEQ ID NO: 961883 - RNA, 22 nt, Human
ucacucugcaggaaggagcagc

SEQ ID NO: 961884 - RNA, 22 nt, Human
gagauucuguagucaggcaucu

SEQ ID NO: 961885 - RNA, 22 nt, Human
ugucucugguauuaggugaaaa

SEQ ID NO: 961886 - RNA, 22 nt, Human
gcuggugccuuguuguuguuac

SEQ ID NO: 961887 - RNA, 22 nt, Human
auugaaagcauggauuuggauu

SEQ ID NO: 961888 - RNA, 22 nt, Human
uggcuggcccugggagugcaga

SEQ ID NO: 961889 - RNA, 22 nt, Human
uaaaguuuggcagacaauaaca

SEQ ID NO: 961890 - RNA, 22 nt, Human
uaagccugguucauaauuugcu

SEQ ID NO: 961891 - RNA, 22 nt, Human
cuuauaguaugauguugagaau

SEQ ID NO: 961892 - RNA, 17 nt, Human
agcagcuggcacaggag

SEQ ID NO: 961893 - RNA, 22 nt, Human
ccauggcauuuuaugugucuua

SEQ ID NO: 961894 - RNA, 22 nt, Human
ccuccuggcuuuucccauugaa

SEQ ID NO: 961895 - RNA, 22 nt, Human
aauucacagcauuugcccaucu

SEQ ID NO: 961896 - RNA, 22 nt, Human
agccucugucaagcuuuucaaa

SEQ ID NO: 961897 - RNA, 22 nt, Human
cucuggacacuggcaugggguc

SEQ ID NO: 961898 - RNA, 22 nt, Human
uuguaaauaguaguaagaugcc

SEQ ID NO: 961899 - RNA, 22 nt, Human
aagggagacaguugugugagga

SEQ ID NO: 961900 - RNA, 22 nt, Human
uuugcagucaaauuugcuaaau

SEQ ID NO: 961901 - RNA, 20 nt, Human
gucugaggagcagugggaaa

SEQ ID NO: 961902 - RNA, 22 nt, Human
ccagcucugccaagcgucagcu

SEQ ID NO: 961903 - RNA, 22 nt, Human
ugaggcagaaaauagcaguuca

SEQ ID NO: 961904 - RNA, 22 nt, Human
uguauuuucuucuggaagcuua

SEQ ID NO: 961905 - RNA, 22 nt, Human
aguuauucauuuauucuguaca

SEQ ID NO: 961906 - RNA, 22 nt, Human
aagaaauguagagccuaguaaa

SEQ ID NO: 961907 - RNA, 22 nt, Human
agcugccagaugacagugcuau

SEQ ID NO: 961908 - RNA, 22 nt, Human
ugggccuccaauuccagcggga

SEQ ID NO: 961909 - RNA, 22 nt, Human
agccuggaagaaccugaagucu

SEQ ID NO: 961910 - RNA, 22 nt, Human
cccaggaggcagauguugcagu

SEQ ID NO: 961911 - RNA, 21 nt, Human
ccauaccuaccucaccugguu

SEQ ID NO: 961912 - RNA, 22 nt, Human
cuccugagcucugaggaagcuu

SEQ ID NO: 961913 - RNA, 20 nt, Human
caguagcaauaauuagaagc

SEQ ID NO: 961914 - RNA, 22 nt, Human
guuucuaugguuuauauuacug

SEQ ID NO: 961915 - RNA, 18 nt, Human
aguguuaaguaaguagca

SEQ ID NO: 961916 - RNA, 22 nt, Human
gcugcuccgucugagcucuggu

SEQ ID NO: 961917 - RNA, 22 nt, Human
gccaggagaaugcuagcagagg

SEQ ID NO: 961918 - RNA, 22 nt, Human
ugucagugguagacccagaggu

SEQ ID NO: 961919 - RNA, 22 nt, Human
aagauucucagagugaaagaau

SEQ ID NO: 961920 - RNA, 22 nt, Human
uagccucucuccuccacaaccu

SEQ ID NO: 961921 - RNA, 22 nt, Human
ugggagcaggugugcuagggaa

SEQ ID NO: 961922 - RNA, 22 nt, Human
agugaguggacccugcaaggaa

SEQ ID NO: 961923 - RNA, 22 nt, Human
ucagcuccucaugcaggggaua

SEQ ID NO: 961924 - RNA, 22 nt, Human
cagagcagggugcaccuugggc

SEQ ID NO: 961925 - RNA, 22 nt, Human
auucuucauaccuacugagguu

SEQ ID NO: 961926 - RNA, 22 nt, Human
ugggaggacuugugggcuucau

SEQ ID NO: 961927 - RNA, 22 nt, Human
caguuuuuagauuaguuggugg

SEQ ID NO: 961928 - RNA, 22 nt, Human
uuggccaacauggugaaacccc

SEQ ID NO: 961929 - RNA, 22 nt, Human
ccagcuccagguagaugggcag

SEQ ID NO: 961930 - RNA, 22 nt, Human
uugcacagaugagggugaugcu

SEQ ID NO: 961931 - RNA, 22 nt, Human
aaaaguucccugguuagaaaag

SEQ ID NO: 961932 - RNA, 22 nt, Human
ggccugagucacaucaggagag

SEQ ID NO: 961933 - RNA, 21 nt, Human
acaugucucuaaucucaguga

SEQ ID NO: 961934 - RNA, 22 nt, Human
aggcacagagaaugcccuccau

SEQ ID NO: 961935 - RNA, 22 nt, Human
ugcauccuuaaccagcaucacu

SEQ ID NO: 961936 - RNA, 22 nt, Human
cucacuguccaacaggcuuuac

SEQ ID NO: 961937 - RNA, 23 nt, Human
uucaagauacgguuuccaggcug

SEQ ID NO: 961938 - RNA, 22 nt, Human
aaaggccaccaacaugaagcau

SEQ ID NO: 961939 - RNA, 22 nt, Human
gucuugaucuccugaccuugug

SEQ ID NO: 961940 - RNA, 22 nt, Human
aagcuggcaauuaucaaaacug

SEQ ID NO: 961941 - RNA, 21 nt, Human
gcagcaguguucuagaauacu

SEQ ID NO: 961942 - RNA, 22 nt, Human
gcagacauuuugaaucuaggcu

SEQ ID NO: 961943 - RNA, 22 nt, Human
uucuuuuccuacacagcgauuu

SEQ ID NO: 961944 - RNA, 22 nt, Human
ucauugcagaaauaaaggugaa

SEQ ID NO: 961945 - RNA, 21 nt, Human
aaagagguuaauauuguaagu

SEQ ID NO: 961946 - RNA, 22 nt, Human
gcacucugccaggucuccugau

SEQ ID NO: 961947 - RNA, 22 nt, Human
ucccagccuuccuuguggugaa

SEQ ID NO: 961948 - RNA, 22 nt, Human
ucaguauccacaaaugcucaaa

SEQ ID NO: 961949 - RNA, 22 nt, Human
guaacagaggguuugcagauau

SEQ ID NO: 961950 - RNA, 22 nt, Human
uugaagcaggaaaauuucuauu

SEQ ID NO: 961951 - RNA, 22 nt, Human
ggaggccaucuggcuggaggcu

SEQ ID NO: 961952 - RNA, 22 nt, Human
uacauagcaaggaaaugacaga

SEQ ID NO: 961953 - RNA, 22 nt, Human
gaagagcuuaguuguccuagaa

SEQ ID NO: 961954 - RNA, 22 nt, Human
gccuucugcgcucgugucuccg

SEQ ID NO: 961955 - RNA, 22 nt, Human
gccaggcacaguucuaggugcu

SEQ ID NO: 961956 - RNA, 22 nt, Human
gucccagggagguucagggcuu

SEQ ID NO: 961957 - RNA, 22 nt, Human
ugauuuccuggcuuuggaguuc

SEQ ID NO: 961958 - RNA, 22 nt, Human
caggaugggugucggccagcac

SEQ ID NO: 961959 - RNA, 22 nt, Human
agcacucuucugugauaguugu

SEQ ID NO: 961960 - RNA, 22 nt, Human
acuuuggaucugauguaaucag

SEQ ID NO: 961961 - RNA, 22 nt, Human
auugaaagguuuugagcagaua

SEQ ID NO: 961962 - RNA, 19 nt, Human
ugaagcagcaaacucucag

SEQ ID NO: 961963 - RNA, 19 nt, Human
gagcgcagagggcagggga

SEQ ID NO: 961964 - RNA, 22 nt, Human
cacauaaguggguuccauugca

SEQ ID NO: 961965 - RNA, 22 nt, Human
ugacaauacagagagagcaaaa

SEQ ID NO: 961966 - RNA, 22 nt, Human
gcucuggcuacuguggcuaccg

SEQ ID NO: 961967 - RNA, 22 nt, Human
cuaauacacccuauugcuuguu

SEQ ID NO: 961968 - RNA, 22 nt, Human
ucuuucaaugagcauucuuucc

SEQ ID NO: 961969 - RNA, 21 nt, Human
ucuggagcccuaagcugagaa

SEQ ID NO: 961970 - RNA, 22 nt, Human
ccagcuggucugugcucauguu

SEQ ID NO: 961971 - RNA, 22 nt, Human
cccaggagagggaaccaaaugu

SEQ ID NO: 961972 - RNA, 22 nt, Human
ccuggccagaggcgugccugug

SEQ ID NO: 961973 - RNA, 22 nt, Human
ccagcccuccuccaucagagga

SEQ ID NO: 961974 - RNA, 22 nt, Human
ggcagcugugaagugccucaca

SEQ ID NO: 961975 - RNA, 22 nt, Human
caguggguaggaaaggcucuuc

SEQ ID NO: 961976 - RNA, 22 nt, Human
auucauaacggcaaaugucacc

SEQ ID NO: 961977 - RNA, 22 nt, Human
cagcagagcuuauguuggguca

SEQ ID NO: 961978 - RNA, 22 nt, Human
gccucaggacuggcauacucau

SEQ ID NO: 961979 - RNA, 22 nt, Human
uuacacaacaucuguauuauua

SEQ ID NO: 961980 - RNA, 22 nt, Human
ggagccugugcccaagcccaga

SEQ ID NO: 961981 - RNA, 22 nt, Human
gugcugggauuacaggugugag

SEQ ID NO: 961982 - RNA, 22 nt, Human
agggccagaggcaccuugcagc

SEQ ID NO: 961983 - RNA, 22 nt, Human
uuccauaaugagauucccagcc

SEQ ID NO: 961984 - RNA, 22 nt, Human
gaggcccucuugccacaaugaa

SEQ ID NO: 961985 - RNA, 22 nt, Human
acuuugaaacuaaaauucauua

SEQ ID NO: 961986 - RNA, 22 nt, Human
gaaauacaaaugccuagauccu

SEQ ID NO: 961987 - RNA, 22 nt, Human
cagcuacuccucccaugacuuc

SEQ ID NO: 961988 - RNA, 22 nt, Human
ugccuguccugaggaugagggu

SEQ ID NO: 961989 - RNA, 22 nt, Human
uucucuuauucuggauaugcag

SEQ ID NO: 961990 - RNA, 22 nt, Human
uuauuagagugcuuugagaaag

SEQ ID NO: 961991 - RNA, 22 nt, Human
uucaggauggaguaccuuuuau

SEQ ID NO: 961992 - RNA, 22 nt, Human
ucucuggaauuuugagagugac

SEQ ID NO: 961993 - RNA, 22 nt, Human
auuucuguaacuuaugaaaguu

SEQ ID NO: 961994 - RNA, 22 nt, Human
uggaaggaaagguagcagagaa

SEQ ID NO: 961995 - RNA, 22 nt, Human
cugccagcucgccacaaugaca

SEQ ID NO: 961996 - RNA, 22 nt, Human
ggucccaggcugcgggcuggug

SEQ ID NO: 961997 - RNA, 22 nt, Human
cucagcucuuuauacuagcugu

SEQ ID NO: 961998 - RNA, 22 nt, Human
ccuggccacucagguguggggc

SEQ ID NO: 961999 - RNA, 22 nt, Human
augucacagucugacucaguga

SEQ ID NO: 962000 - RNA, 22 nt, Human
caagaugugccuaaucagaccu

SEQ ID NO: 962001 - RNA, 22 nt, Human
uuauuuaaaagugguaagauuc

SEQ ID NO: 962002 - RNA, 22 nt, Human
uuccauaauaaccugagagaaa

SEQ ID NO: 962003 - RNA, 22 nt, Human
cuaugaaaugucagauucugca

SEQ ID NO: 962004 - RNA, 22 nt, Human
ggucucagcaguugcuuugacu

SEQ ID NO: 962005 - RNA, 22 nt, Human
ugcagggcuacaggacuacaac

SEQ ID NO: 962006 - RNA, 22 nt, Human
aagauguguccauucuuugcuc

SEQ ID NO: 962007 - RNA, 22 nt, Human
aaauaguuacuucugcugucuu

SEQ ID NO: 962008 - RNA, 19 nt, Human
uuggaaggagccagagugg

SEQ ID NO: 962009 - RNA, 22 nt, Human
ucagcagcagcucagcauguuu

SEQ ID NO: 962010 - RNA, 22 nt, Human
gcugcucugugacagccuccgg

SEQ ID NO: 962011 - RNA, 22 nt, Human
ucaguuuuaagguuugagaauu

SEQ ID NO: 962012 - RNA, 22 nt, Human
acugagcucuugacugggaguu

SEQ ID NO: 962013 - RNA, 19 nt, Human
uugaggggccaggggagau

SEQ ID NO: 962014 - RNA, 22 nt, Human
uguguguauaugcauuuaucua

SEQ ID NO: 962015 - RNA, 22 nt, Human
gaaggagagggucaaggauaau

SEQ ID NO: 962016 - RNA, 22 nt, Human
agagcuguuuggacaucugagu

SEQ ID NO: 962017 - RNA, 22 nt, Human
uuucuuuaucauagcaucuuug

SEQ ID NO: 962018 - RNA, 22 nt, Human
uucuuuccccauggaguucgga

SEQ ID NO: 962019 - RNA, 22 nt, Human
gugcaguggcagauccuagcuc

SEQ ID NO: 962020 - RNA, 22 nt, Human
uuuuaugauugagcuggcuaca

SEQ ID NO: 962021 - RNA, 22 nt, Human
gugcucuggcuggucucccggu

SEQ ID NO: 962022 - RNA, 17 nt, Human
caaggccagcaucuuca

SEQ ID NO: 962023 - RNA, 22 nt, Human
gagcuuggugaugccuccuggu

SEQ ID NO: 962024 - RNA, 22 nt, Human
gggugacauuucccaaugagcc

SEQ ID NO: 962025 - RNA, 22 nt, Human
uagcuuuguuagaaugucuuca

SEQ ID NO: 962026 - RNA, 22 nt, Human
cugcagugcaagcccagaugga

SEQ ID NO: 962027 - RNA, 22 nt, Human
acaggugauucaggcucuggga

SEQ ID NO: 962028 - RNA, 22 nt, Human
uucuuguaauuuggagaaauga

SEQ ID NO: 962029 - RNA, 20 nt, Human
cagagacccaggcuucagcu

SEQ ID NO: 962030 - RNA, 22 nt, Human
cuggccaaugccuggggaauag

SEQ ID NO: 962031 - RNA, 23 nt, Human
cauuugauccucacaauaaaugg

SEQ ID NO: 962032 - RNA, 22 nt, Human
cagggagcuggcuggcgugagu

SEQ ID NO: 962033 - RNA, 22 nt, Human
auuaaaauuccaagguaugcca

SEQ ID NO: 962034 - RNA, 22 nt, Human
agaaaaggcuugaagagguuuu

SEQ ID NO: 962035 - RNA, 22 nt, Human
cuccagaagacccauccucaug

SEQ ID NO: 962036 - RNA, 19 nt, Human
ugcuuccucaccaucuccc

SEQ ID NO: 962037 - RNA, 22 nt, Human
agagcuggguggacuuguaguu

SEQ ID NO: 962038 - RNA, 22 nt, Human
gcaggggcuacucugagcuucc

SEQ ID NO: 962039 - RNA, 22 nt, Human
ggaggggucucuagcgaggaga

SEQ ID NO: 962040 - RNA, 22 nt, Human
caggagcuacucagguuggguu

SEQ ID NO: 962041 - RNA, 22 nt, Human
uaauuauuaugacaacaauugc

SEQ ID NO: 962042 - RNA, 22 nt, Human
ggcccucccugagccagguggg

SEQ ID NO: 962043 - RNA, 22 nt, Human
cggggcugcucguccuccugug

SEQ ID NO: 962044 - RNA, 22 nt, Human
agcuggccuucggugucacugg

SEQ ID NO: 962045 - RNA, 22 nt, Human
gccuguguggaugcgccggugc

SEQ ID NO: 962046 - RNA, 22 nt, Human
uuggcacacaguaagcccuaag

SEQ ID NO: 962047 - RNA, 22 nt, Human
ucugcugugggucuauauuuua

SEQ ID NO: 962048 - RNA, 22 nt, Human
cuggacagaaaaggccacugga

SEQ ID NO: 962049 - RNA, 22 nt, Human
ugugugcagccucugucuuugg

SEQ ID NO: 962050 - RNA, 22 nt, Human
ucucucagcuuugagaccugcu

SEQ ID NO: 962051 - RNA, 22 nt, Human
cagagcagugaggaguugugua

SEQ ID NO: 962052 - RNA, 22 nt, Human
uaccucacugggccucaguuuu

SEQ ID NO: 962053 - RNA, 22 nt, Human
ggcugaaggaugaaagcugcag

SEQ ID NO: 962054 - RNA, 22 nt, Human
cuggccuaaaauugcuucugca

SEQ ID NO: 962055 - RNA, 22 nt, Human
cuuaggauuuaauuucagacuc

SEQ ID NO: 962056 - RNA, 22 nt, Human
uauagcaagcaggacagucuca

SEQ ID NO: 962057 - RNA, 22 nt, Human
acagcugggugcugcucagagc

SEQ ID NO: 962058 - RNA, 22 nt, Human
ggaggccaguccuggccgggcu

SEQ ID NO: 962059 - RNA, 22 nt, Human
ucccaggacaugggcucugcuc

SEQ ID NO: 962060 - RNA, 22 nt, Human
uaccaggcagcugcacagaggc

SEQ ID NO: 962061 - RNA, 22 nt, Human
ugaaggaaaugacggcagaaga

SEQ ID NO: 962062 - RNA, 20 nt, Human
caggccucugggggcccugg

SEQ ID NO: 962063 - RNA, 22 nt, Human
aaaugucuuuaucucauguaac

SEQ ID NO: 962064 - RNA, 19 nt, Human
uccugggcugggccagguc

SEQ ID NO: 962065 - RNA, 22 nt, Human
aagcccagaugugagaacugag

SEQ ID NO: 962066 - RNA, 22 nt, Human
gccuggugcuaugagggccagc

SEQ ID NO: 962067 - RNA, 22 nt, Human
acccacgaagaugagcggcaug

SEQ ID NO: 962068 - RNA, 22 nt, Human
agagccugcaucaggcuugggg

SEQ ID NO: 962069 - RNA, 22 nt, Human
uggcagggccuaccccaauauc

SEQ ID NO: 962070 - RNA, 22 nt, Human
gaggaaaauggaguguaauuaa

SEQ ID NO: 962071 - RNA, 22 nt, Human
uucuacaauaugaauaaugaag

SEQ ID NO: 962072 - RNA, 22 nt, Human
acacaggagauauguaauggcu

SEQ ID NO: 962073 - RNA, 22 nt, Human
aggaagccuggggcugcccucg

SEQ ID NO: 962074 - RNA, 22 nt, Human
ucccagaggcuccagucucuau

SEQ ID NO: 962075 - RNA, 22 nt, Human
agucucagcaagcauggcuagu

SEQ ID NO: 962076 - RNA, 17 nt, Human
uccaugagacaugaaga

SEQ ID NO: 962077 - RNA, 22 nt, Human
cacagaggacuguagcggggag

SEQ ID NO: 962078 - RNA, 23 nt, Human
uggauaaagcugugcugcauagg

SEQ ID NO: 962079 - RNA, 19 nt, Human
uagcagcugccaaaggaga

SEQ ID NO: 962080 - RNA, 22 nt, Human
aggcagcugaccacaguaugau

SEQ ID NO: 962081 - RNA, 19 nt, Human
ugagaaggcaguggggagc

SEQ ID NO: 962082 - RNA, 22 nt, Human
aagggcugccagggggugccag

SEQ ID NO: 962083 - RNA, 20 nt, Human
gcccaagguccagaaggggg

SEQ ID NO: 962084 - RNA, 22 nt, Human
agcuggaggggccagcaggugu

SEQ ID NO: 962085 - RNA, 22 nt, Human
gccaggguggcagaaggcccca

SEQ ID NO: 962086 - RNA, 22 nt, Human
cacccacccacugcucauuggc

SEQ ID NO: 962087 - RNA, 22 nt, Human
ggccugugucugugccuguccu

SEQ ID NO: 962088 - RNA, 22 nt, Human
uguguacuugaaagggcagguc

SEQ ID NO: 962089 - RNA, 22 nt, Human
caaaauugauuguggugauggu

SEQ ID NO: 962090 - RNA, 22 nt, Human
acauuucuuugcuagacagcag

SEQ ID NO: 962091 - RNA, 23 nt, Human
ggccauggagacuuagaaugggc

SEQ ID NO: 962092 - RNA, 22 nt, Human
accugaggcuguuagucuaggu

SEQ ID NO: 962093 - RNA, 22 nt, Human
auuucccaugugaaucaauugg

SEQ ID NO: 962094 - RNA, 17 nt, Human
uucucuuccuggauagu

SEQ ID NO: 962095 - RNA, 22 nt, Human
ggcuccagggaguggagagaag

SEQ ID NO: 962096 - RNA, 22 nt, Human
agcagcucuguuuaccuggagg

SEQ ID NO: 962097 - RNA, 22 nt, Human
aggauuuugacuuauucaggga

SEQ ID NO: 962098 - RNA, 22 nt, Human
acagcaagccagcuugucacug

SEQ ID NO: 962099 - RNA, 22 nt, Human
aggcagcagugauaagauagga

SEQ ID NO: 962100 - RNA, 22 nt, Human
caaggccagagccagcgauaag

SEQ ID NO: 962101 - RNA, 22 nt, Human
aaucagaaagaggucauguugc

SEQ ID NO: 962102 - RNA, 22 nt, Human
ggccugagcuugggcagcguau

SEQ ID NO: 962103 - RNA, 22 nt, Human
cagucccagcugcucagaaggc

SEQ ID NO: 962104 - RNA, 22 nt, Human
gcugcccucccagggcaagcuu

SEQ ID NO: 962105 - RNA, 22 nt, Human
aggcuggagggcaauggcaaga

SEQ ID NO: 962106 - RNA, 22 nt, Human
gcagcuccuucaaucucaccau

SEQ ID NO: 962107 - RNA, 21 nt, Human
guuuuaagggagaaaaccuag

SEQ ID NO: 962108 - RNA, 21 nt, Human
gcaaauguucaggaaaaaaga

SEQ ID NO: 962109 - RNA, 22 nt, Human
agugaaauccuggucaacaggu

SEQ ID NO: 962110 - RNA, 22 nt, Human
gggcugcugcccaggaggcacc

SEQ ID NO: 962111 - RNA, 22 nt, Human
aggcagcuggcaaauucuagag

SEQ ID NO: 962112 - RNA, 22 nt, Human
acacauauucauauguacuuac

SEQ ID NO: 962113 - RNA, 22 nt, Human
uauguacagggauagaacuuga

SEQ ID NO: 962114 - RNA, 22 nt, Human
cccaggaggucgaagcugcagu

SEQ ID NO: 962115 - RNA, 22 nt, Human
cccagaaggucgaggcugcagu

SEQ ID NO: 962116 - RNA, 22 nt, Human
ugggggugugccagggaccucc

SEQ ID NO: 962117 - RNA, 22 nt, Human
uuguuacacauaauaacauuuu

SEQ ID NO: 962118 - RNA, 22 nt, Human
aacuccuguucuaugacaagag

SEQ ID NO: 962119 - RNA, 22 nt, Human
gcccaggaagccaccgggaagu

SEQ ID NO: 962120 - RNA, 22 nt, Human
uacuuacagagcuuauaaguua

SEQ ID NO: 962121 - RNA, 19 nt, Human
cuggugcuugagugaguca

SEQ ID NO: 962122 - RNA, 22 nt, Human
auguuacauaguccuuauuugu

SEQ ID NO: 962123 - RNA, 22 nt, Human
aaggccagaguacuagaggcug

SEQ ID NO: 962124 - RNA, 22 nt, Human
aguguacauguuuacagcaucu

SEQ ID NO: 962125 - RNA, 22 nt, Human
uccuggaguugugcagugcaca

SEQ ID NO: 962126 - RNA, 22 nt, Human
auuuaagacugacuucaccagu

SEQ ID NO: 962127 - RNA, 22 nt, Human
gcugugugaaaacugggccugg

SEQ ID NO: 962128 - RNA, 22 nt, Human
agcagcucacaggauuccugaa

SEQ ID NO: 962129 - RNA, 20 nt, Human
gccagcccugacacaggagc

SEQ ID NO: 962130 - RNA, 21 nt, Human
guggcccugccgcagugucca

SEQ ID NO: 962131 - RNA, 22 nt, Human
ugggguggauagaaagugaugu

SEQ ID NO: 962132 - RNA, 22 nt, Human
auaucacaguaguuguuuaguu

SEQ ID NO: 962133 - RNA, 22 nt, Human
gaggaaagcugguuuaaaguau

SEQ ID NO: 962134 - RNA, 22 nt, Human
caccagagugggugagggugau

SEQ ID NO: 962135 - RNA, 22 nt, Human
gcagagugagccgaggcugcuc

SEQ ID NO: 962136 - RNA, 22 nt, Human
uauugacaauuugugaaacuau

SEQ ID NO: 962137 - RNA, 22 nt, Human
ugagccagccuugcagcugugc

SEQ ID NO: 962138 - RNA, 22 nt, Human
uuuccucuuauacaguguuuau

SEQ ID NO: 962139 - RNA, 21 nt, Human
cuugaaagguagagucuacag

SEQ ID NO: 962140 - RNA, 22 nt, Human
ucuucagagugaaagucuguga

SEQ ID NO: 962141 - RNA, 22 nt, Human
uggcucagagccuugagagcug

SEQ ID NO: 962142 - RNA, 22 nt, Human
ccagcgcuucccaucagggagg

SEQ ID NO: 962143 - RNA, 22 nt, Human
caaggccauauugccuguaugu

SEQ ID NO: 962144 - RNA, 22 nt, Human
uuuauuuggcaucucugccaag

SEQ ID NO: 962145 - RNA, 22 nt, Human
agugcugucaguuuuauagaua

SEQ ID NO: 962146 - RNA, 22 nt, Human
guaauuuuuaguucauucuauc

SEQ ID NO: 962147 - RNA, 22 nt, Human
ucaggagucugugcaguuccac

SEQ ID NO: 962148 - RNA, 22 nt, Human
ucagaggaauaaugcugcauuu

SEQ ID NO: 962149 - RNA, 22 nt, Human
cagaggaguucaguacacagcc

SEQ ID NO: 962150 - RNA, 22 nt, Human
ggaggacaggggcugcagcaca

SEQ ID NO: 962151 - RNA, 22 nt, Human
aguucucauugcaugagacaga

SEQ ID NO: 962152 - RNA, 22 nt, Human
cugcuuuggacaacuauucuug

SEQ ID NO: 962153 - RNA, 22 nt, Human
aucagacucagaaaugacgugg

SEQ ID NO: 962154 - RNA, 22 nt, Human
ugcugucuuccaggauggugaa

SEQ ID NO: 962155 - RNA, 22 nt, Human
ucaaaaguuucacauagagaua

SEQ ID NO: 962156 - RNA, 22 nt, Human
aggccuggcaugagaccugaga

SEQ ID NO: 962157 - RNA, 20 nt, Human
ucuggcucuuugcuccuccc

SEQ ID NO: 962158 - RNA, 22 nt, Human
cuccauugaacauccucucaga

SEQ ID NO: 962159 - RNA, 19 nt, Human
uucccaggaaaggggugca

SEQ ID NO: 962160 - RNA, 22 nt, Human
uuauuuaaugugaucugaagag

SEQ ID NO: 962161 - RNA, 22 nt, Human
acugccugugucccuucagugc

SEQ ID NO: 962162 - RNA, 22 nt, Human
gaaaaguacacagcccaaacau

SEQ ID NO: 962163 - RNA, 22 nt, Human
uucacauuaucaggauuguuuc

SEQ ID NO: 962164 - RNA, 22 nt, Human
gcagcuccuggcacaguuuuuu

SEQ ID NO: 962165 - RNA, 22 nt, Human
agagggagugaaauggaauaga

SEQ ID NO: 962166 - RNA, 20 nt, Human
auuuggcaugaaguauugau

SEQ ID NO: 962167 - RNA, 22 nt, Human
uugcaaauuauuuuagucccuu

SEQ ID NO: 962168 - RNA, 22 nt, Human
gggcaguuuauucuagaugguu

SEQ ID NO: 962169 - RNA, 22 nt, Human
aggcacuguggguguggccgga

SEQ ID NO: 962170 - RNA, 22 nt, Human
aauaaaauggucaguuuucuca

SEQ ID NO: 962171 - RNA, 22 nt, Human
caggcagcucaaccuugggagc

SEQ ID NO: 962172 - RNA, 22 nt, Human
acacaggaagucagcacugaug

SEQ ID NO: 962173 - RNA, 22 nt, Human
gcagccacugggagugcuuaua

SEQ ID NO: 962174 - RNA, 22 nt, Human
uugugcauuucucugagugugu

SEQ ID NO: 962175 - RNA, 22 nt, Human
ggagucagccugucagagugua

SEQ ID NO: 962176 - RNA, 18 nt, Human
gagcccugagucugcaca

SEQ ID NO: 962177 - RNA, 22 nt, Human
ccuggcuccugccucugcaggg

SEQ ID NO: 962178 - RNA, 22 nt, Human
agcaggcuuucaagagucuucu

SEQ ID NO: 962179 - RNA, 22 nt, Human
cauagcaacagcaucaagucaa

SEQ ID NO: 962180 - RNA, 22 nt, Human
cacauguacagaagcaggcugg

SEQ ID NO: 962181 - RNA, 22 nt, Human
aggaagcugcuggaguagugug

SEQ ID NO: 962182 - RNA, 22 nt, Human
uuggccaaacagaguucaacag

SEQ ID NO: 962183 - RNA, 22 nt, Human
gccggggcuggggagagacaug

SEQ ID NO: 962184 - RNA, 22 nt, Human
uggcacauagcagguacucagu

SEQ ID NO: 962185 - RNA, 19 nt, Human
cucuggccucuggaugcug

SEQ ID NO: 962186 - RNA, 22 nt, Human
cuuauguauauuuggaacguac

SEQ ID NO: 962187 - RNA, 22 nt, Human
gugcucacugugagacguccug

SEQ ID NO: 962188 - RNA, 21 nt, Human
auggagggaccagggaagcag

SEQ ID NO: 962189 - RNA, 22 nt, Human
agugucugccagcugccaggug

SEQ ID NO: 962190 - RNA, 22 nt, Human
ugucccagcacuuugggagucu

SEQ ID NO: 962191 - RNA, 18 nt, Human
cuguucuagaacuccugu

SEQ ID NO: 962192 - RNA, 22 nt, Human
ucucuggaagcgcagaucuguu

SEQ ID NO: 962193 - RNA, 22 nt, Human
uuagcugacugugugauuuggc

SEQ ID NO: 962194 - RNA, 22 nt, Human
ugcacagagagaugagacacgu

SEQ ID NO: 962195 - RNA, 22 nt, Human
aggccuggccuuuauguucaag

SEQ ID NO: 962196 - RNA, 22 nt, Human
aaauccuaaggagaauaugauu

SEQ ID NO: 962197 - RNA, 22 nt, Human
agaagcaguuauuuuuugcaca

SEQ ID NO: 962198 - RNA, 22 nt, Human
agccaaagaucagugugcaagu

SEQ ID NO: 962199 - RNA, 21 nt, Human
ccagcagcucaaggaucucuu

SEQ ID NO: 962200 - RNA, 22 nt, Human
ucagucuuugcuuaugacaaua

SEQ ID NO: 962201 - RNA, 21 nt, Human
aggucccagguuugggcagca

SEQ ID NO: 962202 - RNA, 22 nt, Human
uugcauuuuuagaugcuucugu

SEQ ID NO: 962203 - RNA, 22 nt, Human
ugcauguguuugccacagugag

SEQ ID NO: 962204 - RNA, 22 nt, Human
gagagcugggcuuugggugaag

SEQ ID NO: 962205 - RNA, 22 nt, Human
cuuccugguuugaagcucgccg

SEQ ID NO: 962206 - RNA, 22 nt, Human
gcagcugggacacugaggccag

SEQ ID NO: 962207 - RNA, 22 nt, Human
gugcagcugcaggagucagguc

SEQ ID NO: 962208 - RNA, 21 nt, Human
ugcaggaaagugcugcgaccc

SEQ ID NO: 962209 - RNA, 19 nt, Human
acagggcagcaauaggaua

SEQ ID NO: 962210 - RNA, 22 nt, Human
uauacagaaccgccugaagucu

SEQ ID NO: 962211 - RNA, 22 nt, Human
cuccugggcucauaucauucag

SEQ ID NO: 962212 - RNA, 22 nt, Human
gagccaggggucagcuccgagg

SEQ ID NO: 962213 - RNA, 22 nt, Human
gaaauauuucucuugagccccu

SEQ ID NO: 962214 - RNA, 22 nt, Human
acguuuucagccuuaauguaga

SEQ ID NO: 962215 - RNA, 22 nt, Human
ucugccuugagguccucagcuc

SEQ ID NO: 962216 - RNA, 22 nt, Human
uucuuaacucaaauauauaucc

SEQ ID NO: 962217 - RNA, 22 nt, Human
aggcugaggcagguggaucacu

SEQ ID NO: 962218 - RNA, 22 nt, Human
uuugaagugggcauuagaaccu

SEQ ID NO: 962219 - RNA, 22 nt, Human
uuugcaaagaaauuauugcugu

SEQ ID NO: 962220 - RNA, 19 nt, Human
gcugggagcagacccuccc

SEQ ID NO: 962221 - RNA, 22 nt, Human
auguguauugagcaccuacugc

SEQ ID NO: 962222 - RNA, 21 nt, Human
cuggccgaccccucugugcuc

SEQ ID NO: 962223 - RNA, 20 nt, Human
uggccuuggggagcucacac

SEQ ID NO: 962224 - RNA, 20 nt, Human
uaucaaucagaaagaagacu

SEQ ID NO: 962225 - RNA, 22 nt, Human
aaagaacaaaugauauaugguu

SEQ ID NO: 962226 - RNA, 22 nt, Human
agcugcugaaugacacugcaag

SEQ ID NO: 962227 - RNA, 22 nt, Human
ggcucuggucagugaggggccu

SEQ ID NO: 962228 - RNA, 22 nt, Human
ugcugccaagcccgugcuccug

SEQ ID NO: 962229 - RNA, 22 nt, Human
guaaaucccauccuuucucugg

SEQ ID NO: 962230 - RNA, 23 nt, Human
ugccucugccucccuagucugca

SEQ ID NO: 962231 - RNA, 22 nt, Human
cccagcagaaucugaugagggc

SEQ ID NO: 962232 - RNA, 22 nt, Human
augcuguguccuagugaaagaa

SEQ ID NO: 962233 - RNA, 18 nt, Human
aggcuucuuggcucaguc

SEQ ID NO: 962234 - RNA, 22 nt, Human
gagagcugggggacuguggaug

SEQ ID NO: 962235 - RNA, 22 nt, Human
acucugccaucccaggugcugu

SEQ ID NO: 962236 - RNA, 22 nt, Human
uuuuaagaugcuaguauuucag

SEQ ID NO: 962237 - RNA, 22 nt, Human
cauuaagucuguuaacuggaga

SEQ ID NO: 962238 - RNA, 22 nt, Human
aggcucuggcuacuacagagcu

SEQ ID NO: 962239 - RNA, 22 nt, Human
gaugguuuggaaugaaguagcu

SEQ ID NO: 962240 - RNA, 19 nt, Human
ucuuuggcuaaauugggug

SEQ ID NO: 962241 - RNA, 22 nt, Human
caggcugaucagggcugggaug

SEQ ID NO: 962242 - RNA, 22 nt, Human
cccuggaagguucucuggcuca

SEQ ID NO: 962243 - RNA, 22 nt, Human
uguggcuuaagaaugccuuuaa

SEQ ID NO: 962244 - RNA, 22 nt, Human
cggcuggguucggcugcaggcc

SEQ ID NO: 962245 - RNA, 18 nt, Human
cucagggcaucagucugg

SEQ ID NO: 962246 - RNA, 22 nt, Human
cuucccagacgggguggcagcc

SEQ ID NO: 962247 - RNA, 22 nt, Human
uguuugaacugaauaacauagu

SEQ ID NO: 962248 - RNA, 22 nt, Human
cagaagcuuugcucauaaccau

SEQ ID NO: 962249 - RNA, 22 nt, Human
ccugucuguaucgguucagagu

SEQ ID NO: 962250 - RNA, 22 nt, Human
augcagguugggcaaguguggg

SEQ ID NO: 962251 - RNA, 22 nt, Human
cccugccuucuuggccuuuaaa

SEQ ID NO: 962252 - RNA, 22 nt, Human
acagaacugcaggaggaaaagc

SEQ ID NO: 962253 - RNA, 22 nt, Human
guuauaaauaccuaauaggauu

SEQ ID NO: 962254 - RNA, 22 nt, Human
augucuuucgcaucaguagcua

SEQ ID NO: 962255 - RNA, 22 nt, Human
gcuucccagcagaggaaagacu

SEQ ID NO: 962256 - RNA, 22 nt, Human
cugggagaggaaccucgagggu

SEQ ID NO: 962257 - RNA, 22 nt, Human
cugcucuggcguacucggcauc

SEQ ID NO: 962258 - RNA, 23 nt, Human
cugcagucgccggccugggugcc

SEQ ID NO: 962259 - RNA, 22 nt, Human
aaaauugaagugaucaggaacu

SEQ ID NO: 962260 - RNA, 22 nt, Human
ucugccuggauuccauucucca

SEQ ID NO: 962261 - RNA, 22 nt, Human
gcugggcugagcuagacuuggc

SEQ ID NO: 962262 - RNA, 22 nt, Human
ggcuuccuggggccuccugcaa

SEQ ID NO: 962263 - RNA, 22 nt, Human
ugaacagaucaauagaacugac

SEQ ID NO: 962264 - RNA, 22 nt, Human
cugccuggcuaaacucaagucg

SEQ ID NO: 962265 - RNA, 20 nt, Human
ugcucugucuaaaacuuccc

SEQ ID NO: 962266 - RNA, 22 nt, Human
ucagccagguaauguggagaug

SEQ ID NO: 962267 - RNA, 22 nt, Human
cugaggugcuauggaggauacg

SEQ ID NO: 962268 - RNA, 22 nt, Human
cuggccaacaucuggggcacau

SEQ ID NO: 962269 - RNA, 22 nt, Human
gccuccugagaagccacaggcu

SEQ ID NO: 962270 - RNA, 22 nt, Human
cugagggcaugaacauuccaua

SEQ ID NO: 962271 - RNA, 22 nt, Human
gggcagagacucagaaacagaa

SEQ ID NO: 962272 - RNA, 22 nt, Human
ggaccagagaagugagcaccug

SEQ ID NO: 962273 - RNA, 22 nt, Human
gccucugcaucaucacuccagc

SEQ ID NO: 962274 - RNA, 21 nt, Human
uccuccuucaaguccuggccu

SEQ ID NO: 962275 - RNA, 18 nt, Human
ugucauugccagggaagc

SEQ ID NO: 962276 - RNA, 22 nt, Human
gcugggcaccucucccagauug

SEQ ID NO: 962277 - RNA, 22 nt, Human
ugauuuuuagcuauucugaaga

SEQ ID NO: 962278 - RNA, 22 nt, Human
acagugcuggcuacaacccugg

SEQ ID NO: 962279 - RNA, 22 nt, Human
caguuuuucaaaauuacaugau

SEQ ID NO: 962280 - RNA, 22 nt, Human
gcucuccaaacccuguggcuuu

SEQ ID NO: 962281 - RNA, 20 nt, Human
auauguguacguguauacau

SEQ ID NO: 962282 - RNA, 22 nt, Human
acagcugugaaaauccacagga

SEQ ID NO: 962283 - RNA, 20 nt, Human
uccuucaggcagggccuagu

SEQ ID NO: 962284 - RNA, 22 nt, Human
uuauuuucagcuaggaaagcca

SEQ ID NO: 962285 - RNA, 22 nt, Human
acuccugggugcugaccagcgu

SEQ ID NO: 962286 - RNA, 22 nt, Human
gcaggccucuguugagggccuu

SEQ ID NO: 962287 - RNA, 22 nt, Human
aggcuggcuggcaggggacaca

SEQ ID NO: 962288 - RNA, 22 nt, Human
gggcagcugcagggauggugac

SEQ ID NO: 962289 - RNA, 22 nt, Human
ucaaggcuaaacuuucagagua

SEQ ID NO: 962290 - RNA, 22 nt, Human
aggcagcaugcucugcuucuac

SEQ ID NO: 962291 - RNA, 22 nt, Human
cugagaaggaagccuccacucu

SEQ ID NO: 962292 - RNA, 22 nt, Human
agcaccuugcucuuggccuucc

SEQ ID NO: 962293 - RNA, 22 nt, Human
gcucacagccggcuggcagggg

SEQ ID NO: 962294 - RNA, 18 nt, Human
uuuaugagcugugggacc

SEQ ID NO: 962295 - RNA, 22 nt, Human
gaacccaguccaggugcagccu

SEQ ID NO: 962296 - RNA, 22 nt, Human
uccuugggaaaucacuagcacu

SEQ ID NO: 962297 - RNA, 22 nt, Human
aggggagaguuaaugugaaugu

SEQ ID NO: 962298 - RNA, 22 nt, Human
uaaggccaauuaacaaccaggg

SEQ ID NO: 962299 - RNA, 22 nt, Human
uuuacuuugugucaagucaaga

SEQ ID NO: 962300 - RNA, 22 nt, Human
cagccccucccucaggcaggug

SEQ ID NO: 962301 - RNA, 22 nt, Human
ugcacagugaccccuggugacu

SEQ ID NO: 962302 - RNA, 22 nt, Human
ugucucugugacuccuuccgcc

SEQ ID NO: 962303 - RNA, 17 nt, Human
agcagcuggguugaucu

SEQ ID NO: 962304 - RNA, 22 nt, Human
gaggaggcuuccgggaggcacg

SEQ ID NO: 962305 - RNA, 22 nt, Human
uagcaggguaaauguagaugga

SEQ ID NO: 962306 - RNA, 22 nt, Human
acauuucucccugcaugccugc

SEQ ID NO: 962307 - RNA, 22 nt, Human
agggagcuuccgaacuacagcu

SEQ ID NO: 962308 - RNA, 22 nt, Human
ggcagcucacgggcauggggug

SEQ ID NO: 962309 - RNA, 22 nt, Human
agauguguuucuaguuccugca

SEQ ID NO: 962310 - RNA, 22 nt, Human
guucuccauucagcuuccugug

SEQ ID NO: 962311 - RNA, 22 nt, Human
gugaggugggcuggccagagac

SEQ ID NO: 962312 - RNA, 22 nt, Human
guggccuggaguuugauguagg

SEQ ID NO: 962313 - RNA, 22 nt, Human
cuccaugaauuugagcuuugug

SEQ ID NO: 962314 - RNA, 22 nt, Human
agcugcucucacuggacgccug

SEQ ID NO: 962315 - RNA, 22 nt, Human
ggaguucacugugcaggcucug

SEQ ID NO: 962316 - RNA, 22 nt, Human
aucacaaaggcugcuucaugau

SEQ ID NO: 962317 - RNA, 22 nt, Human
caggaaauaucuccuggcagag

SEQ ID NO: 962318 - RNA, 22 nt, Human
gcagagcauguccucaggacag

SEQ ID NO: 962319 - RNA, 22 nt, Human
gguggcagaggugcaucagccc

SEQ ID NO: 962320 - RNA, 22 nt, Human
cuacauuuuaauaagcugcuua

SEQ ID NO: 962321 - RNA, 22 nt, Human
cccagcucugcagaccugcccu

SEQ ID NO: 962322 - RNA, 22 nt, Human
uucacauuugcccuuaugugug

SEQ ID NO: 962323 - RNA, 20 nt, Human
uccugagccuccaccauguc

SEQ ID NO: 962324 - RNA, 19 nt, Human
aggucuaaucauaagacaa

SEQ ID NO: 962325 - RNA, 22 nt, Human
cagcccagcacuaaguagauuu

SEQ ID NO: 962326 - RNA, 22 nt, Human
aaggcccuggcaggaagcagga

SEQ ID NO: 962327 - RNA, 22 nt, Human
cucaccaggaacagcugcggag

SEQ ID NO: 962328 - RNA, 22 nt, Human
uuuuccagagcugucucuugca

SEQ ID NO: 962329 - RNA, 22 nt, Human
cacugaagaugcgacuagugcu

SEQ ID NO: 962330 - RNA, 22 nt, Human
ucaggcugcccguucagggcuc

SEQ ID NO: 962331 - RNA, 22 nt, Human
agccaggaaccagcuacagucu

SEQ ID NO: 962332 - RNA, 17 nt, Human
auucuuugaugucucug

SEQ ID NO: 962333 - RNA, 22 nt, Human
aggcuccaugcaaaggcuguuu

SEQ ID NO: 962334 - RNA, 22 nt, Human
guugaaagagcauggacuugaa

SEQ ID NO: 962335 - RNA, 22 nt, Human
uucucagaggagucgggagcug

SEQ ID NO: 962336 - RNA, 20 nt, Human
ccagaagagaugaucaucca

SEQ ID NO: 962337 - RNA, 22 nt, Human
auaagagcuagucuuuuccuug

SEQ ID NO: 962338 - RNA, 22 nt, Human
auauguguauuugguuagccua

SEQ ID NO: 962339 - RNA, 22 nt, Human
aaaguguagagacuuuggaacc

SEQ ID NO: 962340 - RNA, 22 nt, Human
aacuuucagcaaguaauucugg

SEQ ID NO: 962341 - RNA, 22 nt, Human
aggagcugcaaauauuaguaau

SEQ ID NO: 962342 - RNA, 22 nt, Human
uccuugaaugaagagaggugac

SEQ ID NO: 962343 - RNA, 23 nt, Human
agggagcuaaaaggcuggagcag

SEQ ID NO: 962344 - RNA, 22 nt, Human
gaggaggcuaagugggcucugg

SEQ ID NO: 962345 - RNA, 22 nt, Human
cuguccagcugaccagagcagc

SEQ ID NO: 962346 - RNA, 22 nt, Human
uuugcauugcauacaaggaacu

SEQ ID NO: 962347 - RNA, 22 nt, Human
ggcugccugccuccaagccggg

SEQ ID NO: 962348 - RNA, 22 nt, Human
agggcagaggcggacacggaag

SEQ ID NO: 962349 - RNA, 22 nt, Human
uugcaggggaaggagcagagcu

SEQ ID NO: 962350 - RNA, 20 nt, Human
cuucuucagccuaugcuuca

SEQ ID NO: 962351 - RNA, 21 nt, Human
agaggcaggcauuaaguacac

SEQ ID NO: 962352 - RNA, 22 nt, Human
agccuuguuggucugaguuugg

SEQ ID NO: 962353 - RNA, 22 nt, Human
uggcucagugaagagauaacuu

SEQ ID NO: 962354 - RNA, 19 nt, Human
ggaccagguccugggcagc

SEQ ID NO: 962355 - RNA, 22 nt, Human
cagugggaagggcagaggcuuu

SEQ ID NO: 962356 - RNA, 22 nt, Human
ggcaaggccugcagcucagugu

SEQ ID NO: 962357 - RNA, 22 nt, Human
gaagcccacguuuggugaugua

SEQ ID NO: 962358 - RNA, 22 nt, Human
cccaucacagacacuggguuau

SEQ ID NO: 962359 - RNA, 22 nt, Human
ggugggcacauucagucucugu

SEQ ID NO: 962360 - RNA, 22 nt, Human
guuaaauucgaugauggauaaa

SEQ ID NO: 962361 - RNA, 22 nt, Human
caagaauuguacaaacugggug

SEQ ID NO: 962362 - RNA, 22 nt, Human
ucccaggaggugcuuccuagga

SEQ ID NO: 962363 - RNA, 22 nt, Human
uguacaugugucuguauaucuu

SEQ ID NO: 962364 - RNA, 22 nt, Human
uuucaguuacugcuauaucauu

SEQ ID NO: 962365 - RNA, 22 nt, Human
uuccagugaugggcaauuuggu

SEQ ID NO: 962366 - RNA, 22 nt, Human
cuugaaagucagcagaguggau

SEQ ID NO: 962367 - RNA, 22 nt, Human
acugugugaaacaucaaugugu

SEQ ID NO: 962368 - RNA, 22 nt, Human
gaggccugcagcguggucccug

SEQ ID NO: 962369 - RNA, 22 nt, Human
cucucuguuaugcuuucaugaa

SEQ ID NO: 962370 - RNA, 22 nt, Human
ggcagcugaccuagcaccaucc

SEQ ID NO: 962371 - RNA, 22 nt, Human
ugucccagggaaggcccagcac

SEQ ID NO: 962372 - RNA, 22 nt, Human
ggcaaaaaccgcaauaacuucu

SEQ ID NO: 962373 - RNA, 22 nt, Human
aagacuuucaaaccuauguuug

SEQ ID NO: 962374 - RNA, 22 nt, Human
aauucacagaaccauggugcuc

SEQ ID NO: 962375 - RNA, 22 nt, Human
acuuuguaauaguuuaagguca

SEQ ID NO: 962376 - RNA, 22 nt, Human
uucagcaacucaaaccuauuag

SEQ ID NO: 962377 - RNA, 22 nt, Human
gaggcagcauucgcauagacag

SEQ ID NO: 962378 - RNA, 23 nt, Human
agcagccauagggaagcaauaca

SEQ ID NO: 962379 - RNA, 22 nt, Human
cggagaggugggggcagcaucu

SEQ ID NO: 962380 - RNA, 21 nt, Human
cgcagagcgaacuugcggcgc

SEQ ID NO: 962381 - RNA, 22 nt, Human
uuauuauagauuaugcaagauu

SEQ ID NO: 962382 - RNA, 22 nt, Human
caggguggaaaagcuaguugga

SEQ ID NO: 962383 - RNA, 21 nt, Human
uucuucuuggacuguuuuggc

SEQ ID NO: 962384 - RNA, 22 nt, Human
ggaggaggggugacugaaugcu

SEQ ID NO: 962385 - RNA, 22 nt, Human
agugaaaugacugaaucagaua

SEQ ID NO: 962386 - RNA, 22 nt, Human
ccuauugacaauucucuucucc

SEQ ID NO: 962387 - RNA, 22 nt, Human
cugggcugucaauggcccucug

SEQ ID NO: 962388 - RNA, 22 nt, Human
ugccaggagucaggccaggcag

SEQ ID NO: 962389 - RNA, 22 nt, Human
acacagccaggguaguaaggcu

SEQ ID NO: 962390 - RNA, 20 nt, Human
gcucccagccugcagucccc

SEQ ID NO: 962391 - RNA, 22 nt, Human
auucauuugcuauuguguaugg

SEQ ID NO: 962392 - RNA, 22 nt, Human
caugugguucaaguacuccaca

SEQ ID NO: 962393 - RNA, 20 nt, Human
aaucagaaagugugagcucu

SEQ ID NO: 962394 - RNA, 22 nt, Human
uaaggcacgcauaagagggggc

SEQ ID NO: 962395 - RNA, 22 nt, Human
gcucugugcaguucagggacac

SEQ ID NO: 962396 - RNA, 22 nt, Human
agcagggggaguuagacuagau

SEQ ID NO: 962397 - RNA, 22 nt, Human
uuucuuguaagauguuuauuaa

SEQ ID NO: 962398 - RNA, 22 nt, Human
auuucuauaggaggacaguauu

SEQ ID NO: 962399 - RNA, 22 nt, Human
cacugaaucucaaggggagggu

SEQ ID NO: 962400 - RNA, 22 nt, Human
cucccagggccaucgagucacu

SEQ ID NO: 962401 - RNA, 22 nt, Human
gaggucaauaauaugugcuuua

SEQ ID NO: 962402 - RNA, 22 nt, Human
cccuggguucuggcugggcugc

SEQ ID NO: 962403 - RNA, 22 nt, Human
caccuuguggcccagucagguu

SEQ ID NO: 962404 - RNA, 22 nt, Human
uugaggagcacuagucagguau

SEQ ID NO: 962405 - RNA, 22 nt, Human
uccugccucuugccuucuucac

SEQ ID NO: 962406 - RNA, 22 nt, Human
ucuguggccuguguccaagugc

SEQ ID NO: 962407 - RNA, 22 nt, Human
uaucuauuccaaauaucagcgu

SEQ ID NO: 962408 - RNA, 22 nt, Human
gggacagacccaugggccaggu

SEQ ID NO: 962409 - RNA, 22 nt, Human
agucccagacuccaguuuucug

SEQ ID NO: 962410 - RNA, 22 nt, Human
aacaguaaagacagaauuuauc

SEQ ID NO: 962411 - RNA, 21 nt, Human
aggugggagaccauguagguc

SEQ ID NO: 962412 - RNA, 22 nt, Human
gaaaguuuauagguuauauaau

SEQ ID NO: 962413 - RNA, 22 nt, Human
uaaggcacccuucugaguagag

SEQ ID NO: 962414 - RNA, 22 nt, Human
aagcugccaaugguaagcugcu

SEQ ID NO: 962415 - RNA, 22 nt, Human
uccugcagagccgcccucaggu

SEQ ID NO: 962416 - RNA, 18 nt, Human
gggaucaggcugccuagg

SEQ ID NO: 962417 - RNA, 22 nt, Human
caggaggaacaagagguucugg

SEQ ID NO: 962418 - RNA, 22 nt, Human
ccuggagcaaaaaucuaaggag

SEQ ID NO: 962419 - RNA, 22 nt, Human
ggcuucagugacuggugcccuc

SEQ ID NO: 962420 - RNA, 19 nt, Human
cuucuucuuggcagccaag

SEQ ID NO: 962421 - RNA, 22 nt, Human
aucagcaaaaaugccuucagaa

SEQ ID NO: 962422 - RNA, 22 nt, Human
uaaauuguuuucuagaaguugu

SEQ ID NO: 962423 - RNA, 22 nt, Human
cccccuggcaggcuggccucuc

SEQ ID NO: 962424 - RNA, 22 nt, Human
ggcccugugguuuugcaaaguc

SEQ ID NO: 962425 - RNA, 22 nt, Human
aaguuauugcagcaauccaagu

SEQ ID NO: 962426 - RNA, 22 nt, Human
uaugcugaauuugguuugcuau

SEQ ID NO: 962427 - RNA, 22 nt, Human
auuguucaaagugcuuugcaug

SEQ ID NO: 962428 - RNA, 22 nt, Human
gcugcagcccggcgcgccugag

SEQ ID NO: 962429 - RNA, 22 nt, Human
uggcucugugucucccagcagc

SEQ ID NO: 962430 - RNA, 22 nt, Human
uggcucugcaccucaguguacc

SEQ ID NO: 962431 - RNA, 22 nt, Human
cauuucuguacauguuuuggug

SEQ ID NO: 962432 - RNA, 22 nt, Human
cagagggcucaguccugcugga

SEQ ID NO: 962433 - RNA, 20 nt, Human
aagcaauauagugcaaaugu

SEQ ID NO: 962434 - RNA, 22 nt, Human
accugccuauggagccacaugg

SEQ ID NO: 962435 - RNA, 22 nt, Human
ucagaagcugguguccuuugaa

SEQ ID NO: 962436 - RNA, 22 nt, Human
ugugucaugugugaggcucccu

SEQ ID NO: 962437 - RNA, 22 nt, Human
uagcagcugugaguaaaagcca

SEQ ID NO: 962438 - RNA, 22 nt, Human
aggcccuguccauggugcugaa

SEQ ID NO: 962439 - RNA, 17 nt, Human
cuggagccaagagggcc

SEQ ID NO: 962440 - RNA, 22 nt, Human
auucauuuagguauucacuuac

SEQ ID NO: 962441 - RNA, 22 nt, Human
ucacuguugaccuggaaguggg

SEQ ID NO: 962442 - RNA, 22 nt, Human
ccagcuggagcucgcagauagg

SEQ ID NO: 962443 - RNA, 17 nt, Human
ggugagaccucccacuc

SEQ ID NO: 962444 - RNA, 23 nt, Human
agaugaggcuucuccauguuggu

SEQ ID NO: 962445 - RNA, 22 nt, Human
uccuugaauccuagcauccuau

SEQ ID NO: 962446 - RNA, 21 nt, Human
agcugccacccuagcuucuga

SEQ ID NO: 962447 - RNA, 22 nt, Human
cacauuucuaggaaauuaaaug

SEQ ID NO: 962448 - RNA, 18 nt, Human
gcaggugccacugcuguu

SEQ ID NO: 962449 - RNA, 22 nt, Human
gucuuuaugguaugaaaacuga

SEQ ID NO: 962450 - RNA, 22 nt, Human
agaaagaacguugguuaucuua

SEQ ID NO: 962451 - RNA, 22 nt, Human
uucaagaugccagggacgcggc

SEQ ID NO: 962452 - RNA, 22 nt, Human
aggauauuugcuuaagauagcu

SEQ ID NO: 962453 - RNA, 22 nt, Human
aggugccagugcuguggucccc

SEQ ID NO: 962454 - RNA, 22 nt, Human
uuaacauuguccuuagcagauu

SEQ ID NO: 962455 - RNA, 21 nt, Human
ccuauugaauauaggaagauu

SEQ ID NO: 962456 - RNA, 22 nt, Human
gcagagccugacgggauuuuuc

SEQ ID NO: 962457 - RNA, 22 nt, Human
ucccagcagagccagcaagccg

SEQ ID NO: 962458 - RNA, 22 nt, Human
gcaggagagucugugccagguu

SEQ ID NO: 962459 - RNA, 22 nt, Human
caucugcuguuccuuggacuca

SEQ ID NO: 962460 - RNA, 18 nt, Human
gagucuuuguuacugcug

SEQ ID NO: 962461 - RNA, 22 nt, Human
cucugagcuccuggaagcgugc

SEQ ID NO: 962462 - RNA, 20 nt, Human
gggugggagagucugagggu

SEQ ID NO: 962463 - RNA, 22 nt, Human
gccagacacuccccugggcagg

SEQ ID NO: 962464 - RNA, 22 nt, Human
gaaccaaguaggauacaaggag

SEQ ID NO: 962465 - RNA, 22 nt, Human
gcuccuggcauccugcuuuuaa

SEQ ID NO: 962466 - RNA, 18 nt, Human
gcuccuggagucugacuc

SEQ ID NO: 962467 - RNA, 22 nt, Human
uguggcuguguccaccugcugc

SEQ ID NO: 962468 - RNA, 22 nt, Human
gaggggcucuuuaauaguaaca

SEQ ID NO: 962469 - RNA, 22 nt, Human
uuggcaguagucucggcuaccc

SEQ ID NO: 962470 - RNA, 22 nt, Human
ccuggcagcuccuccccggcgg

SEQ ID NO: 962471 - RNA, 20 nt, Human
accuuucaaaugauucagca

SEQ ID NO: 962472 - RNA, 22 nt, Human
uuggaaggcccugccuagcagg

SEQ ID NO: 962473 - RNA, 22 nt, Human
ccucagaguaggucucagcugu

SEQ ID NO: 962474 - RNA, 22 nt, Human
ucccaggagcaccuuuugagcc

SEQ ID NO: 962475 - RNA, 22 nt, Human
ucccaggaauugaagccagugu

SEQ ID NO: 962476 - RNA, 22 nt, Human
ccugucucccuggcauggcuca

SEQ ID NO: 962477 - RNA, 22 nt, Human
aagcgccaugguuccugcgcag

SEQ ID NO: 962478 - RNA, 22 nt, Human
caggccugauacacugaacucu

SEQ ID NO: 962479 - RNA, 22 nt, Human
agaauccugaugaaaaggagag

SEQ ID NO: 962480 - RNA, 22 nt, Human
ccacccugagccgcaagagcag

SEQ ID NO: 962481 - RNA, 22 nt, Human
auaugccauuagcuagaaauaa

SEQ ID NO: 962482 - RNA, 22 nt, Human
ggaagagagggcugggccucaa

SEQ ID NO: 962483 - RNA, 22 nt, Human
uuaguaauguguuaauaugaau

SEQ ID NO: 962484 - RNA, 22 nt, Human
agagugaaggccagguuacagu

SEQ ID NO: 962485 - RNA, 22 nt, Human
uccuucaaagcuccuagugagc

SEQ ID NO: 962486 - RNA, 22 nt, Human
uaaaugugucuauggacccgcc

SEQ ID NO: 962487 - RNA, 22 nt, Human
gugguuuucuccaacccagaac

SEQ ID NO: 962488 - RNA, 22 nt, Human
cauugguagaguuuguuuuaua

SEQ ID NO: 962489 - RNA, 20 nt, Human
aggaggggauagaaucaaag

SEQ ID NO: 962490 - RNA, 22 nt, Human
ucuccucugcgcggcagugccc

SEQ ID NO: 962491 - RNA, 22 nt, Human
ggaaaguggugguggaaagagg

SEQ ID NO: 962492 - RNA, 22 nt, Human
agcugcucccuauccuuuccuu

SEQ ID NO: 962493 - RNA, 22 nt, Human
accucugcaacccuggaauggg

SEQ ID NO: 962494 - RNA, 22 nt, Human
gcuggcagccaagugaagaggg

SEQ ID NO: 962495 - RNA, 22 nt, Human
uuguggaaauacagacuccaag

SEQ ID NO: 962496 - RNA, 22 nt, Human
acaggcugccuaccaaguauca

SEQ ID NO: 962497 - RNA, 22 nt, Human
cggcagagacggcgcuuugaac

SEQ ID NO: 962498 - RNA, 22 nt, Human
gagggcauaguuaaauaggagg

SEQ ID NO: 962499 - RNA, 22 nt, Human
cagggccaugaggcacaggguc

SEQ ID NO: 962500 - RNA, 22 nt, Human
uuucauuauguuccuggaagag

SEQ ID NO: 962501 - RNA, 19 nt, Human
ugggcuuccccagggcaga

SEQ ID NO: 962502 - RNA, 22 nt, Human
aauaucaguauauuguaucagu

SEQ ID NO: 962503 - RNA, 22 nt, Human
aucaggaugcugucaguuacca

SEQ ID NO: 962504 - RNA, 22 nt, Human
cuccucugucuaccacgagggu

SEQ ID NO: 962505 - RNA, 20 nt, Human
guggccuguccuguuguggg

SEQ ID NO: 962506 - RNA, 22 nt, Human
ugucucuggcccaugagcagag

SEQ ID NO: 962507 - RNA, 18 nt, Human
agcagcugugccacacug

SEQ ID NO: 962508 - RNA, 22 nt, Human
uuugcauuuauaaguuggugga

SEQ ID NO: 962509 - RNA, 22 nt, Human
aaauuauaggugccaccuugga

SEQ ID NO: 962510 - RNA, 22 nt, Human
uuugcaguuucauugcugaaau

SEQ ID NO: 962511 - RNA, 22 nt, Human
gccagcagguugucaaggagcu

SEQ ID NO: 962512 - RNA, 22 nt, Human
uggcagcaaguucuugggaggu

SEQ ID NO: 962513 - RNA, 22 nt, Human
gagaaggaguagcugaccuggg

SEQ ID NO: 962514 - RNA, 22 nt, Human
uagggcagagcuuguacacgau

SEQ ID NO: 962515 - RNA, 22 nt, Human
aaaguggucaccuucucauuuc

SEQ ID NO: 962516 - RNA, 22 nt, Human
auuuggauucuuauuuagcacu

SEQ ID NO: 962517 - RNA, 22 nt, Human
cccaggaguuugaguucagcau

SEQ ID NO: 962518 - RNA, 22 nt, Human
ccagagccggcucccucagcuu

SEQ ID NO: 962519 - RNA, 22 nt, Human
acucugccuuucagcagaugaa

SEQ ID NO: 962520 - RNA, 22 nt, Human
cugagcugguggaagcaugcag

SEQ ID NO: 962521 - RNA, 22 nt, Human
ccaucuccacugucccugucaa

SEQ ID NO: 962522 - RNA, 22 nt, Human
ucugggaguuguaguccggugg

SEQ ID NO: 962523 - RNA, 20 nt, Human
aggaaaaggguggugguaga

SEQ ID NO: 962524 - RNA, 21 nt, Human
ugaaaucugaugggacaaaug

SEQ ID NO: 962525 - RNA, 22 nt, Human
ugccuugcgggcguuucuguug

SEQ ID NO: 962526 - RNA, 22 nt, Human
uaucuguuggcuccuaguugua

SEQ ID NO: 962527 - RNA, 22 nt, Human
ucacaugccacagaugaggcaa

SEQ ID NO: 962528 - RNA, 22 nt, Human
auggacagugugucuguuucca

SEQ ID NO: 962529 - RNA, 22 nt, Human
ccugggcucuauccugacccag

SEQ ID NO: 962530 - RNA, 22 nt, Human
gagaggcaggcgcugcaauggu

SEQ ID NO: 962531 - RNA, 22 nt, Human
ccagcagaggggcggagugcag

SEQ ID NO: 962532 - RNA, 22 nt, Human
gugccugguuuggggaguguuc

SEQ ID NO: 962533 - RNA, 20 nt, Human
guugaaaguaauaugaugcu

SEQ ID NO: 962534 - RNA, 22 nt, Human
ucagggaaucagacucugcagc

SEQ ID NO: 962535 - RNA, 22 nt, Human
ugggacagggaaucugaucccc

SEQ ID NO: 962536 - RNA, 22 nt, Human
acuggcaggcugcuggccggcg

SEQ ID NO: 962537 - RNA, 22 nt, Human
ugaggcagugcugggaagccug

SEQ ID NO: 962538 - RNA, 22 nt, Human
acaacauuauacauagaaagcu

SEQ ID NO: 962539 - RNA, 22 nt, Human
aggcacugaagugguaaaugua

SEQ ID NO: 962540 - RNA, 22 nt, Human
ccugggcaggccggacgcuggg

SEQ ID NO: 962541 - RNA, 22 nt, Human
ccucagcugcuucccuggagcc

SEQ ID NO: 962542 - RNA, 22 nt, Human
uggcucagagagggagugugga

SEQ ID NO: 962543 - RNA, 19 nt, Human
guaagggcuaauggacuau

SEQ ID NO: 962544 - RNA, 22 nt, Human
uauguacaucguugaauucaaa

SEQ ID NO: 962545 - RNA, 22 nt, Human
gaggccaggagugcuguaaguu

SEQ ID NO: 962546 - RNA, 22 nt, Human
gcagcugcagagaccggguggg

SEQ ID NO: 962547 - RNA, 22 nt, Human
ggcugugcgggcagccguggga

SEQ ID NO: 962548 - RNA, 22 nt, Human
cacuggaauauggcguugaacc

SEQ ID NO: 962549 - RNA, 22 nt, Human
cagcuuugucugauuccucuuu

SEQ ID NO: 962550 - RNA, 19 nt, Human
uggcagcauugguaccuug

SEQ ID NO: 962551 - RNA, 22 nt, Human
cuggcagguccagcuggacuca

SEQ ID NO: 962552 - RNA, 22 nt, Human
cuauaauuaugcucaaaaugua

SEQ ID NO: 962553 - RNA, 22 nt, Human
caugcacuuaccugaaauucaa

SEQ ID NO: 962554 - RNA, 22 nt, Human
ucuucaaguuccaaagugcagg

SEQ ID NO: 962555 - RNA, 22 nt, Human
acucugcuuauugcugcaggca

SEQ ID NO: 962556 - RNA, 22 nt, Human
agccauugaauuuagugccuuu

SEQ ID NO: 962557 - RNA, 22 nt, Human
ugcagcugauuaaagggcagac

SEQ ID NO: 962558 - RNA, 22 nt, Human
caaaugcaugagaaauaagagg

SEQ ID NO: 962559 - RNA, 22 nt, Human
cagccacguagcccuuggccgu

SEQ ID NO: 962560 - RNA, 22 nt, Human
ucccagccuuucuuuucugcug

SEQ ID NO: 962561 - RNA, 21 nt, Human
uuguucuuccagaagcaaagu

SEQ ID NO: 962562 - RNA, 22 nt, Human
gagugugucggucagcguggcg

SEQ ID NO: 962563 - RNA, 22 nt, Human
augcugugguagacagcauucc

SEQ ID NO: 962564 - RNA, 22 nt, Human
ucacugaagacugggcucuaaa

SEQ ID NO: 962565 - RNA, 22 nt, Human
guccucagagugggcagguccu

SEQ ID NO: 962566 - RNA, 22 nt, Human
cagcauggcuugaguguuuccu

SEQ ID NO: 962567 - RNA, 22 nt, Human
augaugguggguaauguguaaa

SEQ ID NO: 962568 - RNA, 22 nt, Human
cuggcaggagcauucacagagg

SEQ ID NO: 962569 - RNA, 22 nt, Human
ucuggcucccuggagcuccaca

SEQ ID NO: 962570 - RNA, 20 nt, Human
uaugcuuuuuauaagauuga

SEQ ID NO: 962571 - RNA, 21 nt, Human
gaaaggucuuaacuuacagag

SEQ ID NO: 962572 - RNA, 22 nt, Human
ccagggugggaggcugaaggcg

SEQ ID NO: 962573 - RNA, 22 nt, Human
uuugaauguuuuagguacuuaa

SEQ ID NO: 962574 - RNA, 17 nt, Human
accagccucuccugggg

SEQ ID NO: 962575 - RNA, 19 nt, Human
gucacauuugucucccagg

SEQ ID NO: 962576 - RNA, 19 nt, Human
uccucagugacaaccucag

SEQ ID NO: 962577 - RNA, 22 nt, Human
aaggcagcaagaauuccagguu

SEQ ID NO: 962578 - RNA, 16 nt, Human
gcuccugggcccucga

SEQ ID NO: 962579 - RNA, 22 nt, Human
gcccugugccagucacgcugug

SEQ ID NO: 962580 - RNA, 22 nt, Human
cuguacaucccgagagccagua

SEQ ID NO: 962581 - RNA, 22 nt, Human
cagucucucugaaguauuaaga

SEQ ID NO: 962582 - RNA, 22 nt, Human
accugagaaugggggcaugugu

SEQ ID NO: 962583 - RNA, 22 nt, Human
aagcaaaagguuacacuucugg

SEQ ID NO: 962584 - RNA, 22 nt, Human
gggcugcuuuuuucuuagcaga

SEQ ID NO: 962585 - RNA, 22 nt, Human
aaggcagcaggauuuggugacu

SEQ ID NO: 962586 - RNA, 22 nt, Human
gcuccuggcucuggccaaggga

SEQ ID NO: 962587 - RNA, 22 nt, Human
aguccaugguucugacucaucu

SEQ ID NO: 962588 - RNA, 21 nt, Human
agacaguaacucuucuacucc

SEQ ID NO: 962589 - RNA, 22 nt, Human
cugcuucugggaugauggagua

SEQ ID NO: 962590 - RNA, 22 nt, Human
gugcccugaguggguaggagag

SEQ ID NO: 962591 - RNA, 19 nt, Human
cugcugggugcugagggag

SEQ ID NO: 962592 - RNA, 22 nt, Human
uaggcagcagugcuaugauucu

SEQ ID NO: 962593 - RNA, 17 nt, Human
ccuguguuugcuccuuc

SEQ ID NO: 962594 - RNA, 21 nt, Human
ccuguucacagaucuguaacu

SEQ ID NO: 962595 - RNA, 22 nt, Human
ugugaaaugaagauaauucuug

SEQ ID NO: 962596 - RNA, 22 nt, Human
uuccaugaaggagacugagaag

SEQ ID NO: 962597 - RNA, 18 nt, Human
caugggugacagguggau

SEQ ID NO: 962598 - RNA, 22 nt, Human
uggcucaguuccaucaucugga

SEQ ID NO: 962599 - RNA, 21 nt, Human
acagaguaguugaaacagaga

SEQ ID NO: 962600 - RNA, 22 nt, Human
uggcucaggccacuucuuuuau

SEQ ID NO: 962601 - RNA, 22 nt, Human
ggccucugcaacuggcuguggc

SEQ ID NO: 962602 - RNA, 22 nt, Human
ucugaggcuauguucaggcuaa

SEQ ID NO: 962603 - RNA, 22 nt, Human
gcugggcacugucccauaggcu

SEQ ID NO: 962604 - RNA, 22 nt, Human
cuggcaguuggcagggcugcca

SEQ ID NO: 962605 - RNA, 22 nt, Human
ccaccagcagugugcaaggauu

SEQ ID NO: 962606 - RNA, 21 nt, Human
ugggcagauggcaguguggcu

SEQ ID NO: 962607 - RNA, 22 nt, Human
agcucccaggcagucaugagga

SEQ ID NO: 962608 - RNA, 22 nt, Human
aggccagcuguuacuagagcca

SEQ ID NO: 962609 - RNA, 22 nt, Human
uacauaguuccauuuacaggaa

SEQ ID NO: 962610 - RNA, 22 nt, Human
ucacugcaaucucugccuucca

SEQ ID NO: 962611 - RNA, 22 nt, Human
gcucccaggcauggagguaauu

SEQ ID NO: 962612 - RNA, 22 nt, Human
aaaugcaauuguauguacucca

SEQ ID NO: 962613 - RNA, 22 nt, Human
agcaccuggucuccuggcgcug

SEQ ID NO: 962614 - RNA, 22 nt, Human
cucuucaauagauuguugaggg

SEQ ID NO: 962615 - RNA, 22 nt, Human
aucacauucuuucaaagcaguc

SEQ ID NO: 962616 - RNA, 22 nt, Human
aauguucaaacagaucacuuag

SEQ ID NO: 962617 - RNA, 22 nt, Human
uuuucaguuccaucucugcucu

SEQ ID NO: 962618 - RNA, 22 nt, Human
agaaaagggcaggagggauaca

SEQ ID NO: 962619 - RNA, 22 nt, Human
uuucuucugagaucagggagaa

SEQ ID NO: 962620 - RNA, 22 nt, Human
gauauagguucauaguguuaca

SEQ ID NO: 962621 - RNA, 21 nt, Human
ugcugccaucaugcagagaug

SEQ ID NO: 962622 - RNA, 22 nt, Human
uguauuuucugaagauaaucaa

SEQ ID NO: 962623 - RNA, 22 nt, Human
aaggaaccauuugugugcaugg

SEQ ID NO: 962624 - RNA, 22 nt, Human
cugggagaucuccugagggcag

SEQ ID NO: 962625 - RNA, 22 nt, Human
acccaggagacagguugcagug

SEQ ID NO: 962626 - RNA, 22 nt, Human
uugaaauacugcauuguucagu

SEQ ID NO: 962627 - RNA, 22 nt, Human
ucacugggagaugugggaaggg

SEQ ID NO: 962628 - RNA, 22 nt, Human
agccaggacguugcucagcucc

SEQ ID NO: 962629 - RNA, 22 nt, Human
uucaaugagcccggggccauag

SEQ ID NO: 962630 - RNA, 22 nt, Human
guggaggagaggcgccuugcgg

SEQ ID NO: 962631 - RNA, 22 nt, Human
cugacucagcagcugaugaucc

SEQ ID NO: 962632 - RNA, 22 nt, Human
gaaaucugcuucuugcauagua

SEQ ID NO: 962633 - RNA, 22 nt, Human
augaaggcuguguggagccccc

SEQ ID NO: 962634 - RNA, 22 nt, Human
agggccuggaacugugggcagg

SEQ ID NO: 962635 - RNA, 22 nt, Human
gucugagcgcuggagcuugugu

SEQ ID NO: 962636 - RNA, 22 nt, Human
cuugggagacacaagaagacau

SEQ ID NO: 962637 - RNA, 22 nt, Human
aaaucaguuggaacacaagcag

SEQ ID NO: 962638 - RNA, 22 nt, Human
gacccaggaagcuacuucuggu

SEQ ID NO: 962639 - RNA, 22 nt, Human
gcaccaggcuuagagccccagg

SEQ ID NO: 962640 - RNA, 22 nt, Human
ggagaggguguggaaaguuauc

SEQ ID NO: 962641 - RNA, 22 nt, Human
gggcagcucggaagugggaaag

SEQ ID NO: 962642 - RNA, 22 nt, Human
gagccaaggguugccauggaga

SEQ ID NO: 962643 - RNA, 22 nt, Human
cuggcaguggggccucaguguu

SEQ ID NO: 962644 - RNA, 22 nt, Human
cccaggcucccaggugggacaa

SEQ ID NO: 962645 - RNA, 22 nt, Human
ugagccugguugcagugucugg

SEQ ID NO: 962646 - RNA, 22 nt, Human
ggcagccauacucagaccuggg

SEQ ID NO: 962647 - RNA, 22 nt, Human
aggcagaggaaggguggauuug

SEQ ID NO: 962648 - RNA, 22 nt, Human
uggcagagcccagaacugagca

SEQ ID NO: 962649 - RNA, 22 nt, Human
cagccuuuaagcuuggauaggu

SEQ ID NO: 962650 - RNA, 22 nt, Human
gaggcaguuccugagugacaag

SEQ ID NO: 962651 - RNA, 22 nt, Human
aauaguguuguucacucaggag

SEQ ID NO: 962652 - RNA, 22 nt, Human
aacaggagaguaaauauaugau

SEQ ID NO: 962653 - RNA, 22 nt, Human
acauugaucagccucccaugca

SEQ ID NO: 962654 - RNA, 22 nt, Human
cugagggccuuggcuccugccc

SEQ ID NO: 962655 - RNA, 22 nt, Human
ggugguggagccagcugggagu

SEQ ID NO: 962656 - RNA, 22 nt, Human
uccagugguacauggagacacu

SEQ ID NO: 962657 - RNA, 22 nt, Human
ugcauuguugaccaguugugca

SEQ ID NO: 962658 - RNA, 22 nt, Human
auuacacacucaaguccuguua

SEQ ID NO: 962659 - RNA, 22 nt, Human
uuucugugguggguaguucaga

SEQ ID NO: 962660 - RNA, 22 nt, Human
gggcuggaucuccugcaggcag

SEQ ID NO: 962661 - RNA, 22 nt, Human
cagagccauuauggagacuugc

SEQ ID NO: 962662 - RNA, 22 nt, Human
guagccauuggcaaugaagccu

SEQ ID NO: 962663 - RNA, 22 nt, Human
caggaguggugugagggacucc

SEQ ID NO: 962664 - RNA, 22 nt, Human
auaaggcagaaauagggaaagu

SEQ ID NO: 962665 - RNA, 22 nt, Human
cagggccuuuuagcaucuucuc

SEQ ID NO: 962666 - RNA, 22 nt, Human
gggcuggaggugagcaggacag

SEQ ID NO: 962667 - RNA, 22 nt, Human
uccuucaggguugaggccgacu

SEQ ID NO: 962668 - RNA, 22 nt, Human
agccucugauggcucccaagga

SEQ ID NO: 962669 - RNA, 22 nt, Human
ugucuuaagaaauugcauuugu

SEQ ID NO: 962670 - RNA, 22 nt, Human
ggcugccauaacugauaccaua

SEQ ID NO: 962671 - RNA, 22 nt, Human
uauuuagaugcauuuggauugc

SEQ ID NO: 962672 - RNA, 22 nt, Human
accuuucacgguaucagacauc

SEQ ID NO: 962673 - RNA, 22 nt, Human
uggccuugggcagguggccugc

SEQ ID NO: 962674 - RNA, 22 nt, Human
augugucaauuuucaaaugcuu

SEQ ID NO: 962675 - RNA, 22 nt, Human
auggccaagaucacagacuuca

SEQ ID NO: 962676 - RNA, 22 nt, Human
ccugugcauccgguggucauug

SEQ ID NO: 962677 - RNA, 22 nt, Human
ugagguggcuagggaggcacuc

SEQ ID NO: 962678 - RNA, 22 nt, Human
ggccugagaaccauggggccaa

SEQ ID NO: 962679 - RNA, 22 nt, Human
cucagaaguucagccuagagua

SEQ ID NO: 962680 - RNA, 22 nt, Human
uuagggcuuuucugaauaggcc

SEQ ID NO: 962681 - RNA, 22 nt, Human
cccaggcagccugcagggaagg

SEQ ID NO: 962682 - RNA, 22 nt, Human
accacugggcgggcagccugcu

SEQ ID NO: 962683 - RNA, 22 nt, Human
uggccugccuucgcugagcuga

SEQ ID NO: 962684 - RNA, 22 nt, Human
uccaugugccaaggggcagagg

SEQ ID NO: 962685 - RNA, 19 nt, Human
uuuuccuucuauauguuuc

SEQ ID NO: 962686 - RNA, 22 nt, Human
aaggcugagacagcacaggucc

SEQ ID NO: 962687 - RNA, 22 nt, Human
ucugggagccaugccuuggagu

SEQ ID NO: 962688 - RNA, 22 nt, Human
uuacauuuuaguuaaccuguga

SEQ ID NO: 962689 - RNA, 22 nt, Human
caguggucugugcuucuguaca

SEQ ID NO: 962690 - RNA, 19 nt, Human
ggacacagaaagcugcauu

SEQ ID NO: 962691 - RNA, 22 nt, Human
uagagaaaagcagggaucagga

SEQ ID NO: 962692 - RNA, 22 nt, Human
cuuuaagacucugcucuuggug

SEQ ID NO: 962693 - RNA, 22 nt, Human
ucuggccaguagauguggguug

SEQ ID NO: 962694 - RNA, 19 nt, Human
ucugucacuggggguauuc

SEQ ID NO: 962695 - RNA, 19 nt, Human
agagaggcugugugaggga

SEQ ID NO: 962696 - RNA, 22 nt, Human
cagucccaggguugguucagcu

SEQ ID NO: 962697 - RNA, 22 nt, Human
cagggcagggagcuuagaauga

SEQ ID NO: 962698 - RNA, 22 nt, Human
cagagcaguccuugucaaucag

SEQ ID NO: 962699 - RNA, 22 nt, Human
cagcaguggaacuacccaggga

SEQ ID NO: 962700 - RNA, 22 nt, Human
augcacaagaggcuagaaaaga

SEQ ID NO: 962701 - RNA, 22 nt, Human
ucaucacucauuggacaacaga

SEQ ID NO: 962702 - RNA, 22 nt, Human
uuguuuuaaugagggagguuga

SEQ ID NO: 962703 - RNA, 22 nt, Human
gaggccugcuuuggcacucugg

SEQ ID NO: 962704 - RNA, 22 nt, Human
gacccaggagugcagagagugg

SEQ ID NO: 962705 - RNA, 22 nt, Human
ucugugccucaucugguucagg

SEQ ID NO: 962706 - RNA, 22 nt, Human
aggaaagggguagguguggacg

SEQ ID NO: 962707 - RNA, 22 nt, Human
gcuggaaggcuaggcucaguug

SEQ ID NO: 962708 - RNA, 22 nt, Human
caaaacauucagagagcucacu

SEQ ID NO: 962709 - RNA, 22 nt, Human
caggggcucugagauugucuaa

SEQ ID NO: 962710 - RNA, 22 nt, Human
gucagcugucuccccagagugg

SEQ ID NO: 962711 - RNA, 17 nt, Human
acaagcaguggccaugg

SEQ ID NO: 962712 - RNA, 21 nt, Human
cagugcucaaucugacagugg

SEQ ID NO: 962713 - RNA, 22 nt, Human
gccaggcaaauuaaggaaugca

SEQ ID NO: 962714 - RNA, 22 nt, Human
ugcccacaggaagacaccagcg

SEQ ID NO: 962715 - RNA, 22 nt, Human
ucagaguggugguuuugccuuc

SEQ ID NO: 962716 - RNA, 22 nt, Human
gagggaugguaguugacacuga

SEQ ID NO: 962717 - RNA, 22 nt, Human
uucaggauaguggugaguggca

SEQ ID NO: 962718 - RNA, 20 nt, Human
gccaggagggugugaugagc

SEQ ID NO: 962719 - RNA, 22 nt, Human
gggcuggcaucaguugccgaga

SEQ ID NO: 962720 - RNA, 22 nt, Human
gcagugguccaguucacaccca

SEQ ID NO: 962721 - RNA, 22 nt, Human
acuguauuuuugaaucauugug

SEQ ID NO: 962722 - RNA, 21 nt, Human
cccaggaguccuauuuaaaug

SEQ ID NO: 962723 - RNA, 22 nt, Human
augugucugaccacuguauugg

SEQ ID NO: 962724 - RNA, 19 nt, Human
agcuuccauauucucuagu

SEQ ID NO: 962725 - RNA, 22 nt, Human
gcagagcucaagguguucagcu

SEQ ID NO: 962726 - RNA, 22 nt, Human
ugcaggaaucagaggggaagcg

SEQ ID NO: 962727 - RNA, 22 nt, Human
uucauagugauuguucagauag

SEQ ID NO: 962728 - RNA, 22 nt, Human
ugaggcaggaugcuugcacagg

SEQ ID NO: 962729 - RNA, 22 nt, Human
cugccagcucaaagcgcagcua

SEQ ID NO: 962730 - RNA, 22 nt, Human
uggaggugagugugguacagca

SEQ ID NO: 962731 - RNA, 22 nt, Human
aggcagacugugcgggaagagu

SEQ ID NO: 962732 - RNA, 22 nt, Human
uaaauacagucauuugagccau

SEQ ID NO: 962733 - RNA, 22 nt, Human
uagaaaugugauaauagcuuaa

SEQ ID NO: 962734 - RNA, 22 nt, Human
gaagcagcuaggaucuucauuu

SEQ ID NO: 962735 - RNA, 22 nt, Human
agggaggagaauggacuccuuc

SEQ ID NO: 962736 - RNA, 22 nt, Human
ucugagccuauuucaaauuccu

SEQ ID NO: 962737 - RNA, 22 nt, Human
ccucagccuuggccccaggcag

SEQ ID NO: 962738 - RNA, 22 nt, Human
aagcaggcauuccagagacaau

SEQ ID NO: 962739 - RNA, 22 nt, Human
uuggcuucuggcagucuggacg

SEQ ID NO: 962740 - RNA, 22 nt, Human
augaaaaguucgaucuagaagg

SEQ ID NO: 962741 - RNA, 22 nt, Human
ucagagugaggcccagcaaucu

SEQ ID NO: 962742 - RNA, 22 nt, Human
uugggcucaggaguuugagacc

SEQ ID NO: 962743 - RNA, 22 nt, Human
uuugacaugcaaagcacuuuag

SEQ ID NO: 962744 - RNA, 22 nt, Human
gcacugggggcagcagugaggg

SEQ ID NO: 962745 - RNA, 22 nt, Human
ccaccuccaccuauugccagcc

SEQ ID NO: 962746 - RNA, 22 nt, Human
ccagucacuggaaaaugggaau

SEQ ID NO: 962747 - RNA, 22 nt, Human
ugaggcagaaauuccuguuuuc

SEQ ID NO: 962748 - RNA, 22 nt, Human
cagcagcuuugccaagucagcc

SEQ ID NO: 962749 - RNA, 22 nt, Human
ugcagcaggcacaggacggaag

SEQ ID NO: 962750 - RNA, 21 nt, Human
gggugggaggacacagcaggc

SEQ ID NO: 962751 - RNA, 22 nt, Human
gcagugcugaucccauggcaga

SEQ ID NO: 962752 - RNA, 22 nt, Human
ugugugaauggauuauucuauu

SEQ ID NO: 962753 - RNA, 21 nt, Human
aggcagaaagagcccaggcug

SEQ ID NO: 962754 - RNA, 22 nt, Human
aaaucaguuaagaugaggccau

SEQ ID NO: 962755 - RNA, 22 nt, Human
ggcacagagcccagcuuccuag

SEQ ID NO: 962756 - RNA, 22 nt, Human
uuugaauaucacaaacuuucaa

SEQ ID NO: 962757 - RNA, 22 nt, Human
acuguucaaguuuuaugcugga

SEQ ID NO: 962758 - RNA, 23 nt, Human
ugcauuauccucucugaagacca

SEQ ID NO: 962759 - RNA, 22 nt, Human
gggcacagagggucuugaagaa

SEQ ID NO: 962760 - RNA, 22 nt, Human
cagcagagggagccauugaaau

SEQ ID NO: 962761 - RNA, 22 nt, Human
ggcacugagcugccuuggggca

SEQ ID NO: 962762 - RNA, 22 nt, Human
uaagauaugguaggaaguuugg

SEQ ID NO: 962763 - RNA, 22 nt, Human
auaaggcagucacuggaauguu

SEQ ID NO: 962764 - RNA, 22 nt, Human
gcagccacuuugcaaccaagag

SEQ ID NO: 962765 - RNA, 22 nt, Human
ggcucaggacacagugguuuag

SEQ ID NO: 962766 - RNA, 22 nt, Human
agugggcaugaucuggugucug

SEQ ID NO: 962767 - RNA, 22 nt, Human
cugaaggaagcagguggccugu

SEQ ID NO: 962768 - RNA, 22 nt, Human
uccuggagaauccugccaccug

SEQ ID NO: 962769 - RNA, 22 nt, Human
ugccuggaaggcccaugggaag

SEQ ID NO: 962770 - RNA, 22 nt, Human
aaauauuauugcuuaaggggag

SEQ ID NO: 962771 - RNA, 22 nt, Human
uagggauggaaacuaggaaucu

SEQ ID NO: 962772 - RNA, 22 nt, Human
cccuggggcugagggauggccg

SEQ ID NO: 962773 - RNA, 22 nt, Human
ucuggcuuucauuuguuuaaag

SEQ ID NO: 962774 - RNA, 22 nt, Human
gcucucuggguggugggcaaca

SEQ ID NO: 962775 - RNA, 21 nt, Human
uuauugagacauuuguggaaa

SEQ ID NO: 962776 - RNA, 22 nt, Human
uuucuucucacccaggacagag

SEQ ID NO: 962777 - RNA, 22 nt, Human
augaaauuugcugcuaaguucc

SEQ ID NO: 962778 - RNA, 22 nt, Human
ugauggcuaucccuggaagggc

SEQ ID NO: 962779 - RNA, 23 nt, Human
aguguuccaguugguugagagug

SEQ ID NO: 962780 - RNA, 22 nt, Human
ugaaagcacugauucucaacuc

SEQ ID NO: 962781 - RNA, 22 nt, Human
cugugucucauccgccucuggc

SEQ ID NO: 962782 - RNA, 22 nt, Human
agucccagugacuuggccagaa

SEQ ID NO: 962783 - RNA, 22 nt, Human
uccugcagaccucagucagguc

SEQ ID NO: 962784 - RNA, 22 nt, Human
uuggccuucccuaccugggcca

SEQ ID NO: 962785 - RNA, 22 nt, Human
caugggcuuuggaggcuggagg

SEQ ID NO: 962786 - RNA, 22 nt, Human
cugggcacagcguugggcucuu

SEQ ID NO: 962787 - RNA, 22 nt, Human
cugucucucuaggacacugggg

SEQ ID NO: 962788 - RNA, 22 nt, Human
cugcccaaauccuucuuccucu

SEQ ID NO: 962789 - RNA, 22 nt, Human
acagccugcugccugcuucuug

SEQ ID NO: 962790 - RNA, 22 nt, Human
agugagggaugaagaacugcgg

SEQ ID NO: 962791 - RNA, 22 nt, Human
ccuuuugcucucccauccagaa

SEQ ID NO: 962792 - RNA, 22 nt, Human
gugaaaauaaggcugguucuug

SEQ ID NO: 962793 - RNA, 22 nt, Human
cugcugugggcaggguagcugg

SEQ ID NO: 962794 - RNA, 22 nt, Human
ugcugccaccccucaccagagc

SEQ ID NO: 962795 - RNA, 22 nt, Human
gauuuguagcuuuucagucugu

SEQ ID NO: 962796 - RNA, 22 nt, Human
auucuucaucagagaugcacua

SEQ ID NO: 962797 - RNA, 20 nt, Human
gcugccuuguccugcuuggu

SEQ ID NO: 962798 - RNA, 22 nt, Human
gccuuuuuuguugcucugucac

SEQ ID NO: 962799 - RNA, 22 nt, Human
aaaggucauugaaaaggaggaa

SEQ ID NO: 962800 - RNA, 22 nt, Human
ccagcagccaccuucucgaaau

SEQ ID NO: 962801 - RNA, 22 nt, Human
uagaaacauauaggauggcagg

SEQ ID NO: 962802 - RNA, 22 nt, Human
ugaggccagcuucagcagugga

SEQ ID NO: 962803 - RNA, 22 nt, Human
gcccagcagcugguggagaagg

SEQ ID NO: 962804 - RNA, 22 nt, Human
cugccugcugccuguggagggu

SEQ ID NO: 962805 - RNA, 20 nt, Human
cacguuuuuccacuagcaaa

SEQ ID NO: 962806 - RNA, 22 nt, Human
caccagggacaaugcuaggggu

SEQ ID NO: 962807 - RNA, 22 nt, Human
ugaagcaguucucagaaguggg

SEQ ID NO: 962808 - RNA, 22 nt, Human
agcagccauagauagcaugcaa

SEQ ID NO: 962809 - RNA, 22 nt, Human
caggagacuauggcccaaggcc

SEQ ID NO: 962810 - RNA, 17 nt, Human
gagagcugcugcuuccg

SEQ ID NO: 962811 - RNA, 22 nt, Human
ugcaagaggaauucuagaagca

SEQ ID NO: 962812 - RNA, 22 nt, Human
gaguuuaaaacgcuuguauuua

SEQ ID NO: 962813 - RNA, 22 nt, Human
auuuaaugucgagcuauuguag

SEQ ID NO: 962814 - RNA, 22 nt, Human
agauacauagcugugagcacac

SEQ ID NO: 962815 - RNA, 17 nt, Human
auuuccucagggcugag

SEQ ID NO: 962816 - RNA, 22 nt, Human
uccuggccaaguuacucucugc

SEQ ID NO: 962817 - RNA, 22 nt, Human
caguccaggccuggaggagcca

SEQ ID NO: 962818 - RNA, 22 nt, Human
ggcccugggcagaggagugggc

SEQ ID NO: 962819 - RNA, 21 nt, Human
ugucagaaauaagcaugugau

SEQ ID NO: 962820 - RNA, 22 nt, Human
agccagacauggcuccugcucc

SEQ ID NO: 962821 - RNA, 22 nt, Human
acugcaucugaaacauggguca

SEQ ID NO: 962822 - RNA, 22 nt, Human
cucagaguccccacaucugggu

SEQ ID NO: 962823 - RNA, 22 nt, Human
agcagccauuuaaaaugaauug

SEQ ID NO: 962824 - RNA, 22 nt, Human
ggcuucagugagcugagcucac

SEQ ID NO: 962825 - RNA, 22 nt, Human
cauggcaggaggcugcuggcag

SEQ ID NO: 962826 - RNA, 22 nt, Human
uccucacagucaacacuuugag

SEQ ID NO: 962827 - RNA, 22 nt, Human
gagcucagcccaaagagcagug

SEQ ID NO: 962828 - RNA, 22 nt, Human
aacuuuaaggcuauaaauuaug

SEQ ID NO: 962829 - RNA, 22 nt, Human
agggcuggcuaggugcguuccc

SEQ ID NO: 962830 - RNA, 22 nt, Human
gcugguuaggugagggugcgcc

SEQ ID NO: 962831 - RNA, 22 nt, Human
uaauuccaaguugagacaugca

SEQ ID NO: 962832 - RNA, 22 nt, Human
agaggcccucucugcucagucu

SEQ ID NO: 962833 - RNA, 22 nt, Human
ugggccacuugaaaguggaugu

SEQ ID NO: 962834 - RNA, 22 nt, Human
uggcgugcccuccagacuuggc

SEQ ID NO: 962835 - RNA, 22 nt, Human
agagcugugaaaaugagguuug

SEQ ID NO: 962836 - RNA, 22 nt, Human
ugcauuugucuugucucaugaa

SEQ ID NO: 962837 - RNA, 22 nt, Human
cauuaugugggaaaauguucuu

SEQ ID NO: 962838 - RNA, 22 nt, Human
agcugcuaugacaacaccagcc

SEQ ID NO: 962839 - RNA, 22 nt, Human
ggagaaggaagaaagcuacuau

SEQ ID NO: 962840 - RNA, 22 nt, Human
ggugaaggcacaagagggcaag

SEQ ID NO: 962841 - RNA, 21 nt, Human
gccaccccuggcacaggugcu

SEQ ID NO: 962842 - RNA, 22 nt, Human
uccaggagaggccugaccaggu

SEQ ID NO: 962843 - RNA, 22 nt, Human
cggagcugccugccaagccugc

SEQ ID NO: 962844 - RNA, 22 nt, Human
uuggccaaauacacaccuuuug

SEQ ID NO: 962845 - RNA, 22 nt, Human
aucugaagcuaucugcacuuca

SEQ ID NO: 962846 - RNA, 22 nt, Human
ucaauaaaauuguuuuccuauc

SEQ ID NO: 962847 - RNA, 21 nt, Human
uugaaaguaaauucagcagcu

SEQ ID NO: 962848 - RNA, 22 nt, Human
cauuaucugccauugacaccau

SEQ ID NO: 962849 - RNA, 22 nt, Human
auugaggcagcauaguucaggg

SEQ ID NO: 962850 - RNA, 22 nt, Human
uguguuccugccuggcucuggu

SEQ ID NO: 962851 - RNA, 22 nt, Human
gaggaaccacucugagaagcca

SEQ ID NO: 962852 - RNA, 19 nt, Human
uggaggagaggaaaaguca

SEQ ID NO: 962853 - RNA, 22 nt, Human
aaggucauugguucugaauucu

SEQ ID NO: 962854 - RNA, 22 nt, Human
ccuucuucuguguggcccaaga

SEQ ID NO: 962855 - RNA, 22 nt, Human
gagcagggagacaacucuggug

SEQ ID NO: 962856 - RNA, 22 nt, Human
ggcagcuaggggcagggaauuc

SEQ ID NO: 962857 - RNA, 22 nt, Human
uaaaugcaguuaguacuugcca

SEQ ID NO: 962858 - RNA, 22 nt, Human
agugcauauaugaagaguauga

SEQ ID NO: 962859 - RNA, 22 nt, Human
agccacgucccugucaggguca

SEQ ID NO: 962860 - RNA, 22 nt, Human
gggcuccaacggugagcaugga

SEQ ID NO: 962861 - RNA, 23 nt, Human
cuuuuaacuagaguaucagcugc

SEQ ID NO: 962862 - RNA, 22 nt, Human
gccaccucggcuuucucugcuc

SEQ ID NO: 962863 - RNA, 22 nt, Human
uggagcauauucuggagcuugg

SEQ ID NO: 962864 - RNA, 22 nt, Human
cagaaaauaaaguuucuacgca

SEQ ID NO: 962865 - RNA, 22 nt, Human
uuugcauuguaauauuuaguuc

SEQ ID NO: 962866 - RNA, 22 nt, Human
uugaaaguuuauggagucugca

SEQ ID NO: 962867 - RNA, 19 nt, Human
ccugggaggcggagguugc

SEQ ID NO: 962868 - RNA, 22 nt, Human
gcauuuguacaaaaugcaguag

SEQ ID NO: 962869 - RNA, 22 nt, Human
ugggcagagaguagaggcaacg

SEQ ID NO: 962870 - RNA, 22 nt, Human
cccaggagaccugugaaaggac

SEQ ID NO: 962871 - RNA, 22 nt, Human
uucauucccuuauauuagcauu

SEQ ID NO: 962872 - RNA, 22 nt, Human
acagaaauaacuuuuuauguuu

SEQ ID NO: 962873 - RNA, 22 nt, Human
guggcagcugguaugcagacag

SEQ ID NO: 962874 - RNA, 21 nt, Human
acagccugucaucucaugguc

SEQ ID NO: 962875 - RNA, 22 nt, Human
caguguguggauccucccagga

SEQ ID NO: 962876 - RNA, 22 nt, Human
ugcagucuuccagcugcacaaa

SEQ ID NO: 962877 - RNA, 22 nt, Human
ggucugaguggggccugagauu

SEQ ID NO: 962878 - RNA, 21 nt, Human
gagcauggcuuacaucagcag

SEQ ID NO: 962879 - RNA, 22 nt, Human
ccugucuguauugguuugcuau

SEQ ID NO: 962880 - RNA, 22 nt, Human
ucaacugcaaguuugcuuaguu

SEQ ID NO: 962881 - RNA, 22 nt, Human
gccuuggccaacaccuugcaaa

SEQ ID NO: 962882 - RNA, 22 nt, Human
ucaggcagagcuguggagcucu

SEQ ID NO: 962883 - RNA, 18 nt, Human
cucaccauucugcccaau

SEQ ID NO: 962884 - RNA, 22 nt, Human
gggugggagucuggcccucaaa

SEQ ID NO: 962885 - RNA, 22 nt, Human
gccuggccgcuccgagcuccgc

SEQ ID NO: 962886 - RNA, 22 nt, Human
gcugauguuuaguugauguuac

SEQ ID NO: 962887 - RNA, 22 nt, Human
ugcugcucaaugagaugccauc

SEQ ID NO: 962888 - RNA, 22 nt, Human
uuuuuauaugaaggauagugcg

SEQ ID NO: 962889 - RNA, 22 nt, Human
ugggccuguugccugaguccau

SEQ ID NO: 962890 - RNA, 22 nt, Human
cugcccugaccugccucagagu

SEQ ID NO: 962891 - RNA, 23 nt, Human
gcagaggagcaagcuggacacca

SEQ ID NO: 962892 - RNA, 22 nt, Human
uuugaaagaaaccagugaguga

SEQ ID NO: 962893 - RNA, 22 nt, Human
aaaugucugagacuucugaacu

SEQ ID NO: 962894 - RNA, 22 nt, Human
gcacagcucgagcucaggaggg

SEQ ID NO: 962895 - RNA, 22 nt, Human
gaugugagugguagcugggauu

SEQ ID NO: 962896 - RNA, 22 nt, Human
aaguccaugaucaagauguggc

SEQ ID NO: 962897 - RNA, 22 nt, Human
ugcuucugggcaaaugugugug

SEQ ID NO: 962898 - RNA, 22 nt, Human
caguuucuuggaugccaauuuc

SEQ ID NO: 962899 - RNA, 22 nt, Human
uccuugaauauaauaacaguag

SEQ ID NO: 962900 - RNA, 22 nt, Human
aaggcacuuaacgugggaggau

SEQ ID NO: 962901 - RNA, 22 nt, Human
uggcaagccugagauccgggag

SEQ ID NO: 962902 - RNA, 22 nt, Human
caguacuugggggguucuaagu

SEQ ID NO: 962903 - RNA, 22 nt, Human
aucauuucccuuuagaucacaa

SEQ ID NO: 962904 - RNA, 19 nt, Human
ucccagagucuagagguug

SEQ ID NO: 962905 - RNA, 22 nt, Human
cuucuucaagagaaugggagac

SEQ ID NO: 962906 - RNA, 22 nt, Human
gggcugccuuucuucugggagc

SEQ ID NO: 962907 - RNA, 22 nt, Human
cuggcugccacuucagggucuu

SEQ ID NO: 962908 - RNA, 22 nt, Human
ucagcaaugagaacuggcauuu

SEQ ID NO: 962909 - RNA, 22 nt, Human
acacucugugaggcauguaaug

SEQ ID NO: 962910 - RNA, 22 nt, Human
caagagcuggguggcaagcuag

SEQ ID NO: 962911 - RNA, 22 nt, Human
gcucuuccauuucucuugaacu

SEQ ID NO: 962912 - RNA, 22 nt, Human
aguaaagcagaguugcaguaca

SEQ ID NO: 962913 - RNA, 22 nt, Human
aggccagcuuccagaggggcag

SEQ ID NO: 962914 - RNA, 22 nt, Human
cccugccuuguuggagccuaug

SEQ ID NO: 962915 - RNA, 22 nt, Human
ugucuucaucuccaugcacaga

SEQ ID NO: 962916 - RNA, 22 nt, Human
agcagccacagucugggacagg

SEQ ID NO: 962917 - RNA, 20 nt, Human
ccacaggaguccagucgacc

SEQ ID NO: 962918 - RNA, 22 nt, Human
cagccugggcuccagagucccu

SEQ ID NO: 962919 - RNA, 22 nt, Human
ucugagaggcagaccuuccuaa

SEQ ID NO: 962920 - RNA, 20 nt, Human
ggccuuggccucuuugcagc

SEQ ID NO: 962921 - RNA, 22 nt, Human
acugaaggaaacuuuuguguuu

SEQ ID NO: 962922 - RNA, 22 nt, Human
ccugagugaauucccucacugu

SEQ ID NO: 962923 - RNA, 22 nt, Human
cuguggaaaauuuguauguaau

SEQ ID NO: 962924 - RNA, 22 nt, Human
acagggccagccugggaccugg

SEQ ID NO: 962925 - RNA, 22 nt, Human
cagaggcccagugagagggcug

SEQ ID NO: 962926 - RNA, 22 nt, Human
uggccaaaguagaaaauaauag

SEQ ID NO: 962927 - RNA, 22 nt, Human
uccaaagggaagcgcuuucugu

SEQ ID NO: 962928 - RNA, 22 nt, Human
uuugaacaugcugcaugauaau

SEQ ID NO: 962929 - RNA, 22 nt, Human
auaaagaggauguauuuacagc

SEQ ID NO: 962930 - RNA, 22 nt, Human
gauuuagagaauguuuuguaag

SEQ ID NO: 962931 - RNA, 20 nt, Human
cugcucagaccaacucuucu

SEQ ID NO: 962932 - RNA, 22 nt, Human
aucuagaaguggcaugaauuac

SEQ ID NO: 962933 - RNA, 22 nt, Human
cacugggcaauucugagccuaa

SEQ ID NO: 962934 - RNA, 22 nt, Human
acaggcugcugagccauuugcu

SEQ ID NO: 962935 - RNA, 22 nt, Human
cagaguguuucuuugggugggu

SEQ ID NO: 962936 - RNA, 22 nt, Human
aaaggccacugcaagggaaggu

SEQ ID NO: 962937 - RNA, 22 nt, Human
caccaggcuggagugcagaggu

SEQ ID NO: 962938 - RNA, 22 nt, Human
ucaggccacggcucacugagac

SEQ ID NO: 962939 - RNA, 22 nt, Human
gggcucuguccauuccuucaua

SEQ ID NO: 962940 - RNA, 22 nt, Human
auuaggaaacugaaugucagaa

SEQ ID NO: 962941 - RNA, 22 nt, Human
caaauaguuuuucauguauuau

SEQ ID NO: 962942 - RNA, 22 nt, Human
gcagggacaccuuugugaagcu

SEQ ID NO: 962943 - RNA, 22 nt, Human
aggccaaaccggauggaaaagg

SEQ ID NO: 962944 - RNA, 22 nt, Human
cagagcucuauguucauggagg

SEQ ID NO: 962945 - RNA, 22 nt, Human
aaguuguauauaccgcuuuaag

SEQ ID NO: 962946 - RNA, 22 nt, Human
cuggagcccaggccuggugucu

SEQ ID NO: 962947 - RNA, 22 nt, Human
ggcugccucuggaagcuggaga

SEQ ID NO: 962948 - RNA, 20 nt, Human
ugugcaggagagugaggcug

SEQ ID NO: 962949 - RNA, 22 nt, Human
aaucgguugaacccaggaagug

SEQ ID NO: 962950 - RNA, 19 nt, Human
auagaaaggguuaaagaca

SEQ ID NO: 962951 - RNA, 22 nt, Human
cacacauugaauucauucuugu

SEQ ID NO: 962952 - RNA, 22 nt, Human
aaugcuguauaucuuagcuaau

SEQ ID NO: 962953 - RNA, 22 nt, Human
gaaacugugaggaucuuaacuu

SEQ ID NO: 962954 - RNA, 22 nt, Human
agagguagagguugcagugagc

SEQ ID NO: 962955 - RNA, 15 nt, Human
uggcagcuuguuaag

SEQ ID NO: 962956 - RNA, 22 nt, Human
caacugugaauuuuaugauacc

SEQ ID NO: 962957 - RNA, 20 nt, Human
ggggcugcaugcagagaaga

SEQ ID NO: 962958 - RNA, 17 nt, Human
uuagcaaaauagcacuu

SEQ ID NO: 962959 - RNA, 22 nt, Human
auuaggauguguauauuguguu

SEQ ID NO: 962960 - RNA, 22 nt, Human
auuuuucucuuuccacugagau

SEQ ID NO: 962961 - RNA, 21 nt, Human
ugggagagggcucagcuaccc

SEQ ID NO: 962962 - RNA, 22 nt, Human
gcucugagccgggggccugucc

SEQ ID NO: 962963 - RNA, 22 nt, Human
uuuaaagaaauuccucaucuuu

SEQ ID NO: 962964 - RNA, 22 nt, Human
aucuggcucucucauuuacaaa

SEQ ID NO: 962965 - RNA, 22 nt, Human
gaggcccugaagacagcugggg

SEQ ID NO: 962966 - RNA, 23 nt, Human
ugauuuuaaaaaguaaguuauca

SEQ ID NO: 962967 - RNA, 22 nt, Human
ucugucacaauuugcuuacucu

SEQ ID NO: 962968 - RNA, 22 nt, Human
cagaggcaggauaagaacugcg

SEQ ID NO: 962969 - RNA, 23 nt, Human
cuucucagaagucugugccagga

SEQ ID NO: 962970 - RNA, 22 nt, Human
ccugcugugaaacuggcauaug

SEQ ID NO: 962971 - RNA, 18 nt, Human
ccagaggcccgggcaggc

SEQ ID NO: 962972 - RNA, 22 nt, Human
aaauguauccuacuuccugagu

SEQ ID NO: 962973 - RNA, 22 nt, Human
ggcuggccuguguggccgccac

SEQ ID NO: 962974 - RNA, 22 nt, Human
aguacauacuucaaauguacuu

SEQ ID NO: 962975 - RNA, 20 nt, Human
acuggcagccugccugcugu

SEQ ID NO: 962976 - RNA, 22 nt, Human
cugcugucauagccaucccucc

SEQ ID NO: 962977 - RNA, 22 nt, Human
cugggacagcugagacaggaga

SEQ ID NO: 962978 - RNA, 22 nt, Human
cugggccaagaaguuguguaug

SEQ ID NO: 962979 - RNA, 21 nt, Human
cccagggaagccgcagucacc

SEQ ID NO: 962980 - RNA, 22 nt, Human
cagccugcuagggcaaugccuu

SEQ ID NO: 962981 - RNA, 22 nt, Human
ccagggugaccagcuggccuag

SEQ ID NO: 962982 - RNA, 18 nt, Human
acccucuggcuucugagc

SEQ ID NO: 962983 - RNA, 22 nt, Human
aaggaggaauuucagggugaau

SEQ ID NO: 962984 - RNA, 22 nt, Human
agucccagaugacccagcuacu

SEQ ID NO: 962985 - RNA, 22 nt, Human
acguuuucagugacugugcuuc

SEQ ID NO: 962986 - RNA, 23 nt, Human
gcagagcugcccuauugccuugg

SEQ ID NO: 962987 - RNA, 20 nt, Human
cgugcugugaccuugagcau

SEQ ID NO: 962988 - RNA, 22 nt, Human
ucucagaguuuagagcugagcc

SEQ ID NO: 962989 - RNA, 22 nt, Human
ggcugggcuccgggagcaugcg

SEQ ID NO: 962990 - RNA, 22 nt, Human
uaaaucacuccuaauaaucagu

SEQ ID NO: 962991 - RNA, 22 nt, Human
ccaggcagcaaauuuucugaau

SEQ ID NO: 962992 - RNA, 22 nt, Human
cugccuguuuucugauagauuu

SEQ ID NO: 962993 - RNA, 22 nt, Human
agugaaauuccuggucuuuguu

SEQ ID NO: 962994 - RNA, 22 nt, Human
ugucugucugcaagccagaaag

SEQ ID NO: 962995 - RNA, 22 nt, Human
aaaucugggucaagguggagug

SEQ ID NO: 962996 - RNA, 22 nt, Human
acuccuggguuccggagauucu

SEQ ID NO: 962997 - RNA, 22 nt, Human
auaacagaugugaagugcuaau

SEQ ID NO: 962998 - RNA, 22 nt, Human
ggauggcagucugcaugagaaa

SEQ ID NO: 962999 - RNA, 22 nt, Human
ggcccugagcugaaguacugug

SEQ ID NO: 963000 - RNA, 22 nt, Human
acauuucuugaugccucuguga

SEQ ID NO: 963001 - RNA, 22 nt, Human
cacaugggcguaauguccaugg

SEQ ID NO: 963002 - RNA, 22 nt, Human
ggucagguuuuuaggagugacc

SEQ ID NO: 963003 - RNA, 22 nt, Human
gagggcagaaaauuaugcggug

SEQ ID NO: 963004 - RNA, 22 nt, Human
agcugcuguggggcucggccug

SEQ ID NO: 963005 - RNA, 22 nt, Human
cugccaaggcuggggaggacaa

SEQ ID NO: 963006 - RNA, 22 nt, Human
guuuuauaggugaaauauuacu

SEQ ID NO: 963007 - RNA, 22 nt, Human
cccuuucccuucuggcucaggg

SEQ ID NO: 963008 - RNA, 22 nt, Human
ucacauucucagcaucuauaca

SEQ ID NO: 963009 - RNA, 22 nt, Human
gccagccccuuagggcucuccc

SEQ ID NO: 963010 - RNA, 22 nt, Human
caggccugggcuucggggcuga

SEQ ID NO: 963011 - RNA, 22 nt, Human
uuugaaaggugucgagaugugu

SEQ ID NO: 963012 - RNA, 22 nt, Human
gggcacugugcuaggugcugag

SEQ ID NO: 963013 - RNA, 22 nt, Human
uuuaaaaucagaugggaguugg

SEQ ID NO: 963014 - RNA, 17 nt, Human
gcaaucucagucuccuu

SEQ ID NO: 963015 - RNA, 22 nt, Human
caggcagcugacugucagauau

SEQ ID NO: 963016 - RNA, 22 nt, Human
ugccuggaugugcuggccucac

SEQ ID NO: 963017 - RNA, 22 nt, Human
gcagggcucauucuaguacaau

SEQ ID NO: 963018 - RNA, 22 nt, Human
cacagggcagaggguccguggc

SEQ ID NO: 963019 - RNA, 22 nt, Human
cagcagagcauuugguaggagg

SEQ ID NO: 963020 - RNA, 22 nt, Human
acuuccugcagcuucucagccc

SEQ ID NO: 963021 - RNA, 22 nt, Human
cuguaugaggaucagacuggac

SEQ ID NO: 963022 - RNA, 22 nt, Human
uuuauuguuguuagucauaagu

SEQ ID NO: 963023 - RNA, 22 nt, Human
uggccuccccuaacagccucuu

SEQ ID NO: 963024 - RNA, 22 nt, Human
gcagcuccuccugggcuggaga

SEQ ID NO: 963025 - RNA, 17 nt, Human
ugagacagggcaggccc

SEQ ID NO: 963026 - RNA, 22 nt, Human
uuucacauaaauauuaugccua

SEQ ID NO: 963027 - RNA, 22 nt, Human
gcagccaggaaagcuggacccu

SEQ ID NO: 963028 - RNA, 22 nt, Human
ucacacagauugguagagcuga

SEQ ID NO: 963029 - RNA, 22 nt, Human
cuggcagcuggaggcuagaggc

SEQ ID NO: 963030 - RNA, 22 nt, Human
uuucuguagugugguauguagg

SEQ ID NO: 963031 - RNA, 22 nt, Human
ucacuuauaaaaugcaagaucu

SEQ ID NO: 963032 - RNA, 22 nt, Human
gggcuggggcucaauaauuugu

SEQ ID NO: 963033 - RNA, 22 nt, Human
gaaaucaggaugauguuccaga

SEQ ID NO: 963034 - RNA, 22 nt, Human
caggagaaauguggcugcuacc

SEQ ID NO: 963035 - RNA, 22 nt, Human
caugcacaaagguaagaugcgu

SEQ ID NO: 963036 - RNA, 21 nt, Human
auccauccaucuuggccuaac

SEQ ID NO: 963037 - RNA, 22 nt, Human
uuuuauguaauccuuacugucg

SEQ ID NO: 963038 - RNA, 22 nt, Human
auugcuguggaaauauaagaug

SEQ ID NO: 963039 - RNA, 22 nt, Human
cugagaggcacaaggcauuucg

SEQ ID NO: 963040 - RNA, 22 nt, Human
gagcagugggaaggaacagggu

SEQ ID NO: 963041 - RNA, 22 nt, Human
cugcuuuguaaaauagacauaa

SEQ ID NO: 963042 - RNA, 22 nt, Human
ugguuuugcuaaaauagaaaga

SEQ ID NO: 963043 - RNA, 22 nt, Human
uuaugauuugccacagauuggu

SEQ ID NO: 963044 - RNA, 22 nt, Human
agccuggaccaggggccucaga

SEQ ID NO: 963045 - RNA, 22 nt, Human
cagggaauccauggucauaagg

SEQ ID NO: 963046 - RNA, 22 nt, Human
cauugcccaguaggaucaccag

SEQ ID NO: 963047 - RNA, 22 nt, Human
ugggaguguucuuggcuugcuu

SEQ ID NO: 963048 - RNA, 22 nt, Human
gaugcugaagugaagugaucuu

SEQ ID NO: 963049 - RNA, 22 nt, Human
ucagaacauuuaaaaagugguu

SEQ ID NO: 963050 - RNA, 22 nt, Human
gugguuuugccauuacaaguaa

SEQ ID NO: 963051 - RNA, 20 nt, Human
cccagccccuaccuguugcc

SEQ ID NO: 963052 - RNA, 22 nt, Human
aacaaaccuucccuauacgucu

SEQ ID NO: 963053 - RNA, 22 nt, Human
ugagccaaugauuugaauagag

SEQ ID NO: 963054 - RNA, 22 nt, Human
uggaagcuguggcauaacugag

SEQ ID NO: 963055 - RNA, 22 nt, Human
gaugcagaaaguagacaccauc

SEQ ID NO: 963056 - RNA, 22 nt, Human
ugaagcaggugaauggaugucg

SEQ ID NO: 963057 - RNA, 22 nt, Human
ucugggcuugguuagggcuguu

SEQ ID NO: 963058 - RNA, 22 nt, Human
gccugcuggcuguccauugcag

SEQ ID NO: 963059 - RNA, 22 nt, Human
guggggggacguuggucacuuu

SEQ ID NO: 963060 - RNA, 22 nt, Human
ggagccuggccuggcucugugu

SEQ ID NO: 963061 - RNA, 18 nt, Human
ccugccagucuggagcag

SEQ ID NO: 963062 - RNA, 22 nt, Human
agagccugaggcccugagaggg

SEQ ID NO: 963063 - RNA, 22 nt, Human
ucugagagcuguagaagccuau

SEQ ID NO: 963064 - RNA, 22 nt, Human
gugucccagcagcacauuggcu

SEQ ID NO: 963065 - RNA, 22 nt, Human
agcaccugcacaguggaggaaa

SEQ ID NO: 963066 - RNA, 22 nt, Human
cagagccaaaccucagggcccg

SEQ ID NO: 963067 - RNA, 22 nt, Human
agaaaacauuacauaggugugu

SEQ ID NO: 963068 - RNA, 22 nt, Human
ucccagagcugauaagccuuua

SEQ ID NO: 963069 - RNA, 22 nt, Human
uauuaucauugguaauaugguc

SEQ ID NO: 963070 - RNA, 22 nt, Human
gucaggaugggcagccaaacua

SEQ ID NO: 963071 - RNA, 22 nt, Human
gcuggccugggcucaagaccag

SEQ ID NO: 963072 - RNA, 22 nt, Human
ggcagcacugcagcuuguuggg

SEQ ID NO: 963073 - RNA, 22 nt, Human
agcuuguuagaaauguagacuc

SEQ ID NO: 963074 - RNA, 22 nt, Human
guacauuggcaacucucuuaga

SEQ ID NO: 963075 - RNA, 17 nt, Human
ucuguucaagugagagg

SEQ ID NO: 963076 - RNA, 22 nt, Human
agaaaucucaguaucucaggga

SEQ ID NO: 963077 - RNA, 22 nt, Human
cagcuucugucugauuagcaag

SEQ ID NO: 963078 - RNA, 22 nt, Human
aggcagccaaucagaggcugac

SEQ ID NO: 963079 - RNA, 22 nt, Human
aagggcugaaagaccuugggca

SEQ ID NO: 963080 - RNA, 22 nt, Human
aaacugaauucccaagggcaug

SEQ ID NO: 963081 - RNA, 16 nt, Human
ucccaggaggcggaac

SEQ ID NO: 963082 - RNA, 22 nt, Human
uugucugugaaauggaaauagu

SEQ ID NO: 963083 - RNA, 22 nt, Human
uaauguguugaauauuuguaca

SEQ ID NO: 963084 - RNA, 22 nt, Human
gcccaggaguugaaugcagcag

SEQ ID NO: 963085 - RNA, 22 nt, Human
gggacuucauagcuaggcacuu

SEQ ID NO: 963086 - RNA, 22 nt, Human
uuccuguauucuaaagggaaag

SEQ ID NO: 963087 - RNA, 22 nt, Human
acagggcagagaggcaggcuug

SEQ ID NO: 963088 - RNA, 22 nt, Human
aggcagcagggccacuggcuga

SEQ ID NO: 963089 - RNA, 22 nt, Human
agcuuccaauuucuccaagaga

SEQ ID NO: 963090 - RNA, 22 nt, Human
cagggaggcugucuuaugccug

SEQ ID NO: 963091 - RNA, 22 nt, Human
acacauauauacauauuugugc

SEQ ID NO: 963092 - RNA, 22 nt, Human
acagaggccccgugggagagcc

SEQ ID NO: 963093 - RNA, 22 nt, Human
cugagcucuaaugucagccuug

SEQ ID NO: 963094 - RNA, 22 nt, Human
gcugucccaugguugcaagaug

SEQ ID NO: 963095 - RNA, 22 nt, Human
ucacucugauagauaagcuaac

SEQ ID NO: 963096 - RNA, 22 nt, Human
ccucaggggugcccacagcugc

SEQ ID NO: 963097 - RNA, 22 nt, Human
ugccuggguguaaagggccaac

SEQ ID NO: 963098 - RNA, 22 nt, Human
cagcaguggccaucuguguggu

SEQ ID NO: 963099 - RNA, 22 nt, Human
ggguagcaugugucagaguuug

SEQ ID NO: 963100 - RNA, 22 nt, Human
ucccugggcaucacguugcuuc

SEQ ID NO: 963101 - RNA, 22 nt, Human
uauuugagcgaagcaguguuuu

SEQ ID NO: 963102 - RNA, 22 nt, Human
cccauuuaaacacaagcuuuca

SEQ ID NO: 963103 - RNA, 22 nt, Human
ccugagagcgaguggccucaug

SEQ ID NO: 963104 - RNA, 17 nt, Human
agagagagcaugccacc

SEQ ID NO: 963105 - RNA, 22 nt, Human
uacauucuacuuuuucacuccc

SEQ ID NO: 963106 - RNA, 22 nt, Human
uucuuuuacauuaagauuucag

SEQ ID NO: 963107 - RNA, 22 nt, Human
ccuaggcccauuaauuccccuu

SEQ ID NO: 963108 - RNA, 22 nt, Human
cugagaggaugcugcaguggag

SEQ ID NO: 963109 - RNA, 22 nt, Human
acacagccgugaaucugcuucu

SEQ ID NO: 963110 - RNA, 22 nt, Human
cagcugaguuacucugaggucu

SEQ ID NO: 963111 - RNA, 22 nt, Human
cagcuggcgggcagagccgcca

SEQ ID NO: 963112 - RNA, 22 nt, Human
uguuucauuaguacugacaaua

SEQ ID NO: 963113 - RNA, 22 nt, Human
aauauccagguagaugucuucu

SEQ ID NO: 963114 - RNA, 22 nt, Human
ugcucugaugggguggacauag

SEQ ID NO: 963115 - RNA, 22 nt, Human
cucucugguacauagaguuugg

SEQ ID NO: 963116 - RNA, 22 nt, Human
cuuccucccccacacacucacu

SEQ ID NO: 963117 - RNA, 22 nt, Human
gagcaacaguuuaugguuuuuc

SEQ ID NO: 963118 - RNA, 22 nt, Human
gggggcuguccugugcauugua

SEQ ID NO: 963119 - RNA, 22 nt, Human
uguguacucaauugagccauuu

SEQ ID NO: 963120 - RNA, 22 nt, Human
caggagugagaugcgaucacuu

SEQ ID NO: 963121 - RNA, 22 nt, Human
agcagccaaccuuacauucauc

SEQ ID NO: 963122 - RNA, 22 nt, Human
ggggcagcucccgagggcagga

SEQ ID NO: 963123 - RNA, 22 nt, Human
guuacacaggaaaacauuagca

SEQ ID NO: 963124 - RNA, 22 nt, Human
caacuccuccccagcaugccaa

SEQ ID NO: 963125 - RNA, 22 nt, Human
uugucuguaaagacggccacca

SEQ ID NO: 963126 - RNA, 22 nt, Human
gaucuuggggggaucaccaugg

SEQ ID NO: 963127 - RNA, 22 nt, Human
cuucuuaucaaguggcaaaucu

SEQ ID NO: 963128 - RNA, 22 nt, Human
uguaaauugaaggaaauuugug

SEQ ID NO: 963129 - RNA, 22 nt, Human
aaggcagccauagcaccaucca

SEQ ID NO: 963130 - RNA, 22 nt, Human
cauguaaaacacucagaacagu

SEQ ID NO: 963131 - RNA, 22 nt, Human
guucuucaggcugugcucuaga

SEQ ID NO: 963132 - RNA, 22 nt, Human
uccaggagugugugcuaauggg

SEQ ID NO: 963133 - RNA, 22 nt, Human
uagaaaucagguuuuuagaaag

SEQ ID NO: 963134 - RNA, 21 nt, Human
auaagcaugcugauuacauuu

SEQ ID NO: 963135 - RNA, 22 nt, Human
acauaaugaaaugcagaaauca

SEQ ID NO: 963136 - RNA, 21 nt, Human
ccagagccugcugagcccccu

SEQ ID NO: 963137 - RNA, 22 nt, Human
agaugaagacucaggagcaggu

SEQ ID NO: 963138 - RNA, 22 nt, Human
ucuuuauuuuaugcuugugcaa

SEQ ID NO: 963139 - RNA, 22 nt, Human
agugaaauugcuguaagaggaa

SEQ ID NO: 963140 - RNA, 22 nt, Human
uggcugggggugcuauagcugc

SEQ ID NO: 963141 - RNA, 22 nt, Human
ugucagggcaugcgguccagcc

SEQ ID NO: 963142 - RNA, 20 nt, Human
gcuuuuucuaauagcagucc

SEQ ID NO: 963143 - RNA, 22 nt, Human
ugugaaggagaugaagggagug

SEQ ID NO: 963144 - RNA, 22 nt, Human
gaccaggacacaguggcaaggu

SEQ ID NO: 963145 - RNA, 18 nt, Human
ugggcacaaugaacagca

SEQ ID NO: 963146 - RNA, 22 nt, Human
cagcugccacaccucuuucucu

SEQ ID NO: 963147 - RNA, 22 nt, Human
gccuggcuccuaagagcacaac

SEQ ID NO: 963148 - RNA, 22 nt, Human
aggcccuggcccccagagauuc

SEQ ID NO: 963149 - RNA, 22 nt, Human
uuguuuuaucuuucuacagacu

SEQ ID NO: 963150 - RNA, 22 nt, Human
cuuuccaaugucacuaugaauc

SEQ ID NO: 963151 - RNA, 23 nt, Human
ugcucugugaauaguuggugacu

SEQ ID NO: 963152 - RNA, 23 nt, Human
uugcuuucaucaugagaugcucc

SEQ ID NO: 963153 - RNA, 23 nt, Human
ucuccagugucucuucauugagu

SEQ ID NO: 963154 - RNA, 22 nt, Human
uaggcagccagcaucaguuggg

SEQ ID NO: 963155 - RNA, 22 nt, Human
ucugggaaaugcuguuccuugu

SEQ ID NO: 963156 - RNA, 18 nt, Human
acagacaaaauggaaaug

SEQ ID NO: 963157 - RNA, 22 nt, Human
uauguacacauacacuuguaau

SEQ ID NO: 963158 - RNA, 22 nt, Human
aagacagagggaagcaaugaug

SEQ ID NO: 963159 - RNA, 22 nt, Human
uaauaggagccaggucacauag

SEQ ID NO: 963160 - RNA, 22 nt, Human
ucaaauaccagcuuuuccagaa

SEQ ID NO: 963161 - RNA, 22 nt, Human
ccuggaaggcaggcauggauug

SEQ ID NO: 963162 - RNA, 22 nt, Human
uagagcauuuagaggggcagga

SEQ ID NO: 963163 - RNA, 22 nt, Human
caugcaggcacccagagcccac

SEQ ID NO: 963164 - RNA, 22 nt, Human
ucucucagaggccaggguccug

SEQ ID NO: 963165 - RNA, 20 nt, Human
gggaguggugguagccugug

SEQ ID NO: 963166 - RNA, 20 nt, Human
ccuguucacugcgcaguuuc

SEQ ID NO: 963167 - RNA, 22 nt, Human
uacucugcucauuggagugugu

SEQ ID NO: 963168 - RNA, 22 nt, Human
ccaggagaugggagcaucuaaa

SEQ ID NO: 963169 - RNA, 22 nt, Human
ccugaggcuuaaucugucccaa

SEQ ID NO: 963170 - RNA, 23 nt, Human
cagggcugggcuugguguuaggc

SEQ ID NO: 963171 - RNA, 21 nt, Human
ccugugugucugacugggcua

SEQ ID NO: 963172 - RNA, 22 nt, Human
ccuggcugggguagaagugagg

SEQ ID NO: 963173 - RNA, 22 nt, Human
gucccagaggacagggucacau

SEQ ID NO: 963174 - RNA, 22 nt, Human
uuaucacuuaugagcuuuuugc

SEQ ID NO: 963175 - RNA, 19 nt, Human
agcuccugggcucugggcc

SEQ ID NO: 963176 - RNA, 19 nt, Human
gcuggcagauguggccgug

SEQ ID NO: 963177 - RNA, 23 nt, Human
gccuggccaccccagggcugcuu

SEQ ID NO: 963178 - RNA, 22 nt, Human
aaagucauugcuguuaucaaug

SEQ ID NO: 963179 - RNA, 22 nt, Human
cugagacuuucaugugcuuuua

SEQ ID NO: 963180 - RNA, 22 nt, Human
gcaggccagcugugcagauggg

SEQ ID NO: 963181 - RNA, 22 nt, Human
uuuggacuuagccugcagaauu

SEQ ID NO: 963182 - RNA, 22 nt, Human
ugcuggggagugauugaccauc

SEQ ID NO: 963183 - RNA, 22 nt, Human
aucagcaaucucguguauuagg

SEQ ID NO: 963184 - RNA, 22 nt, Human
gcccaugcucucaggcgggccu

SEQ ID NO: 963185 - RNA, 22 nt, Human
aaagauuugaguucugcuuaua

SEQ ID NO: 963186 - RNA, 22 nt, Human
aagcaccucuaugauugcuuuu

SEQ ID NO: 963187 - RNA, 20 nt, Human
agacaaaaugacuucaugca

SEQ ID NO: 963188 - RNA, 22 nt, Human
ucacaugcccuguauuuaccag

SEQ ID NO: 963189 - RNA, 18 nt, Human
uggcucagauggcuuuaa

SEQ ID NO: 963190 - RNA, 22 nt, Human
ggcuuggaaauugcaggacaca

SEQ ID NO: 963191 - RNA, 22 nt, Human
aaaaguuuaagacucauucuag

SEQ ID NO: 963192 - RNA, 22 nt, Human
gcugagagcggccagcugggaa

SEQ ID NO: 963193 - RNA, 22 nt, Human
augaaauaucuugaagaaauuc

SEQ ID NO: 963194 - RNA, 20 nt, Human
cagagaccaggccagguguc

SEQ ID NO: 963195 - RNA, 22 nt, Human
ucaggagauguaaccuuagcug

SEQ ID NO: 963196 - RNA, 22 nt, Human
agcacaggcuuuggugugaggg

SEQ ID NO: 963197 - RNA, 22 nt, Human
cuguggaaggccuguccugaaa

SEQ ID NO: 963198 - RNA, 22 nt, Human
aagcagccagccaucaugcccg

SEQ ID NO: 963199 - RNA, 22 nt, Human
auguucuuucagccagugcauc

SEQ ID NO: 963200 - RNA, 22 nt, Human
gccuggagcuacuggacacuga

SEQ ID NO: 963201 - RNA, 22 nt, Human
ucucaggaagugauauugagac

SEQ ID NO: 963202 - RNA, 16 nt, Human
aggccaaaaaggggca

SEQ ID NO: 963203 - RNA, 22 nt, Human
uuuuccucaggaaugcuaagcu

SEQ ID NO: 963204 - RNA, 22 nt, Human
cugugucuaaucuuauacauca

SEQ ID NO: 963205 - RNA, 22 nt, Human
ucugucaggagauuggcagcug

SEQ ID NO: 963206 - RNA, 22 nt, Human
gcacuugguaggacuucaguga

SEQ ID NO: 963207 - RNA, 22 nt, Human
cacagaagaaucaugcuguguu

SEQ ID NO: 963208 - RNA, 22 nt, Human
gaggagcuugugagaagauguc

SEQ ID NO: 963209 - RNA, 22 nt, Human
aagauauuuuagaacauucacu

SEQ ID NO: 963210 - RNA, 22 nt, Human
auaaaaguaggaccaacuuaca

SEQ ID NO: 963211 - RNA, 22 nt, Human
auaaaagaaguuuugguacuug

SEQ ID NO: 963212 - RNA, 22 nt, Human
aaaacaguuuaggcaucacagu

SEQ ID NO: 963213 - RNA, 22 nt, Human
uggcagaguaggauggcccugu

SEQ ID NO: 963214 - RNA, 22 nt, Human
uccuucagcuuauuucuuagga

SEQ ID NO: 963215 - RNA, 20 nt, Human
guauuaggagguaaauguaa

SEQ ID NO: 963216 - RNA, 22 nt, Human
uuggccaacagcgacagggcca

SEQ ID NO: 963217 - RNA, 22 nt, Human
gcugccugcucggcuccuggga

SEQ ID NO: 963218 - RNA, 22 nt, Human
uggccacaguguccagcagcag

SEQ ID NO: 963219 - RNA, 22 nt, Human
uuggccaagggcucuuuaggcu

SEQ ID NO: 963220 - RNA, 22 nt, Human
auuuucauggcuucugcucagu

SEQ ID NO: 963221 - RNA, 23 nt, Human
ucuggcuccauccuuggggaucc

SEQ ID NO: 963222 - RNA, 22 nt, Human
caguuucucucaauaagcaucg

SEQ ID NO: 963223 - RNA, 22 nt, Human
ucacaggacccugaggguggcg

SEQ ID NO: 963224 - RNA, 22 nt, Human
auaaacagcuccauuuagugcc

SEQ ID NO: 963225 - RNA, 22 nt, Human
cacucugagaaguacaagcucc

SEQ ID NO: 963226 - RNA, 20 nt, Human
ccaccuggccaaggcugugc

SEQ ID NO: 963227 - RNA, 22 nt, Human
caaaguuaucaacugcaacauu

SEQ ID NO: 963228 - RNA, 22 nt, Human
cucuuuccucagccacagucua

SEQ ID NO: 963229 - RNA, 22 nt, Human
cucagaagaacaaaggcucuac

SEQ ID NO: 963230 - RNA, 22 nt, Human
gaugaggggucauuggcuggga

SEQ ID NO: 963231 - RNA, 22 nt, Human
agggacagaugaaugacugagu

SEQ ID NO: 963232 - RNA, 22 nt, Human
acagugucugacacauuguagc

SEQ ID NO: 963233 - RNA, 21 nt, Human
ccacaggggcuccccugucag

SEQ ID NO: 963234 - RNA, 22 nt, Human
ccaggcugcucacaagcugccc

SEQ ID NO: 963235 - RNA, 22 nt, Human
agucccuguacuuuccacugcc

SEQ ID NO: 963236 - RNA, 22 nt, Human
augggaggaagagaagaugucu

SEQ ID NO: 963237 - RNA, 18 nt, Human
gguggcucagucaugggg

SEQ ID NO: 963238 - RNA, 21 nt, Human
aggccucuucauggccaugau

SEQ ID NO: 963239 - RNA, 22 nt, Human
aaaggugacacucugccagcug

SEQ ID NO: 963240 - RNA, 22 nt, Human
gaggcaucugggcacagaagug

SEQ ID NO: 963241 - RNA, 22 nt, Human
uccagggaugguaaugagcagu

SEQ ID NO: 963242 - RNA, 22 nt, Human
cccuggaggaaaaucugaggcu

SEQ ID NO: 963243 - RNA, 22 nt, Human
cagcaauaaugucuacaaaucu

SEQ ID NO: 963244 - RNA, 22 nt, Human
agguacagcaauauaagagguc

SEQ ID NO: 963245 - RNA, 18 nt, Human
aaagaaggauuggagagc

SEQ ID NO: 963246 - RNA, 22 nt, Human
agggccugacacccuugccagc

SEQ ID NO: 963247 - RNA, 20 nt, Human
ugcagggcugccucccagcu

SEQ ID NO: 963248 - RNA, 22 nt, Human
ccugauggagcccugcugcaug

SEQ ID NO: 963249 - RNA, 22 nt, Human
aaggcagcaugaaucccuguac

SEQ ID NO: 963250 - RNA, 22 nt, Human
ggagggugcauuuuacccugug

SEQ ID NO: 963251 - RNA, 18 nt, Human
uccucucuuuccccaggg

SEQ ID NO: 963252 - RNA, 22 nt, Human
ucauuaagauuacgugccagaa

SEQ ID NO: 963253 - RNA, 22 nt, Human
ccaaggagcucauauucuuguu

SEQ ID NO: 963254 - RNA, 22 nt, Human
gcuggcagaauuucuucuugcu

SEQ ID NO: 963255 - RNA, 22 nt, Human
gccuccugaaaggaagagcucc

SEQ ID NO: 963256 - RNA, 22 nt, Human
ugaggggaaggcaugauaaaua

SEQ ID NO: 963257 - RNA, 22 nt, Human
gguggcuggaggagcugaugga

SEQ ID NO: 963258 - RNA, 22 nt, Human
ccagcuucucucugaugcagcu

SEQ ID NO: 963259 - RNA, 22 nt, Human
gggcagcucuuugguauccuuc

SEQ ID NO: 963260 - RNA, 22 nt, Human
aaauucaguuuuaauaaucacu

SEQ ID NO: 963261 - RNA, 22 nt, Human
aggccugggacgggagccguga

SEQ ID NO: 963262 - RNA, 22 nt, Human
aucuugcauuugcuaaaaugca

SEQ ID NO: 963263 - RNA, 22 nt, Human
uguggagcacuguuccuggcau

SEQ ID NO: 963264 - RNA, 22 nt, Human
gccugugcauagcagcggacuc

SEQ ID NO: 963265 - RNA, 22 nt, Human
aucuuccuucacuuucucccac

SEQ ID NO: 963266 - RNA, 22 nt, Human
ccucaggauccgcaggugcagu

SEQ ID NO: 963267 - RNA, 22 nt, Human
gauugaaacauaggcagucgag

SEQ ID NO: 963268 - RNA, 22 nt, Human
caacaaguggguacuuuacagg

SEQ ID NO: 963269 - RNA, 22 nt, Human
ucugccuuccccauaaucugau

SEQ ID NO: 963270 - RNA, 22 nt, Human
aacagcagggggaccugcuggu

SEQ ID NO: 963271 - RNA, 22 nt, Human
cauauaaauacaacauguguua

SEQ ID NO: 963272 - RNA, 22 nt, Human
uuguuuucuccacugcaucuua

SEQ ID NO: 963273 - RNA, 22 nt, Human
uauaauccauucauugauuucu

SEQ ID NO: 963274 - RNA, 22 nt, Human
uuuaaaauuuagaccucuccac

SEQ ID NO: 963275 - RNA, 22 nt, Human
uggaaggagacugggaagugug

SEQ ID NO: 963276 - RNA, 19 nt, Human
cuucuggcccugagccacc

SEQ ID NO: 963277 - RNA, 22 nt, Human
ggccaaaugaaggcaaugggac

SEQ ID NO: 963278 - RNA, 18 nt, Human
cagaaaucacaccagcac

SEQ ID NO: 963279 - RNA, 22 nt, Human
cacaggaggaggugcccgggcc

SEQ ID NO: 963280 - RNA, 22 nt, Human
uggcaucauagccaaggugcuu

SEQ ID NO: 963281 - RNA, 22 nt, Human
cuggcuccuccaaggccuggag

SEQ ID NO: 963282 - RNA, 22 nt, Human
ccagccaggcuggcuguggagg

SEQ ID NO: 963283 - RNA, 22 nt, Human
aagcucugcucagcagacuagg

SEQ ID NO: 963284 - RNA, 22 nt, Human
gugauuucuaaucaucugaaug

SEQ ID NO: 963285 - RNA, 22 nt, Human
acccaggagagagcuauaaaau

SEQ ID NO: 963286 - RNA, 20 nt, Human
auacaaagagauugauguau

SEQ ID NO: 963287 - RNA, 22 nt, Human
agauacaugucaagagacuuau

SEQ ID NO: 963288 - RNA, 22 nt, Human
cuucacaauucuaacagggcaa

SEQ ID NO: 963289 - RNA, 22 nt, Human
cucaggccauucuuccagcugc

SEQ ID NO: 963290 - RNA, 21 nt, Human
acuggccaccacuggcagggg

SEQ ID NO: 963291 - RNA, 20 nt, Human
agcccuguuuccuggagaga

SEQ ID NO: 963292 - RNA, 22 nt, Human
agaauucuccuucagggcagga

SEQ ID NO: 963293 - RNA, 22 nt, Human
gcugccuugaacuuggccuggg

SEQ ID NO: 963294 - RNA, 22 nt, Human
gcuggccaaaguguaccuggag

SEQ ID NO: 963295 - RNA, 22 nt, Human
gaaggagagagacaucgucccu

SEQ ID NO: 963296 - RNA, 22 nt, Human
caggcacugugcugagcucugc

SEQ ID NO: 963297 - RNA, 22 nt, Human
agggaagcuuguuacugagaag

SEQ ID NO: 963298 - RNA, 22 nt, Human
gggacuggaguagaggccggug

SEQ ID NO: 963299 - RNA, 22 nt, Human
uacaaaaaauugauacugacga

SEQ ID NO: 963300 - RNA, 22 nt, Human
uuuccaauaaagugucauuguu

SEQ ID NO: 963301 - RNA, 22 nt, Human
uaauaucuacuucauagaguuu

SEQ ID NO: 963302 - RNA, 22 nt, Human
accuugaugccuuuccaagaug

SEQ ID NO: 963303 - RNA, 22 nt, Human
accuguuuggaggagguguuag

SEQ ID NO: 963304 - RNA, 22 nt, Human
caggcacucauucagagaggug

SEQ ID NO: 963305 - RNA, 22 nt, Human
augcaguaaauguuaagaaaaa

SEQ ID NO: 963306 - RNA, 22 nt, Human
cauugcacgggcgucugucugu

SEQ ID NO: 963307 - RNA, 22 nt, Human
uggcacugaccccaggccugug

SEQ ID NO: 963308 - RNA, 22 nt, Human
gaaggccauuagagccugugcc

SEQ ID NO: 963309 - RNA, 17 nt, Human
cucacggaggaugaauc

SEQ ID NO: 963310 - RNA, 20 nt, Human
ugcuggggacauacagggug

SEQ ID NO: 963311 - RNA, 22 nt, Human
gaauucuuuucuuucugaaagu

SEQ ID NO: 963312 - RNA, 22 nt, Human
ucucacuuuccagacuuuucaa

SEQ ID NO: 963313 - RNA, 22 nt, Human
cggcuggggcuguccccaugac

SEQ ID NO: 963314 - RNA, 22 nt, Human
agaaaugacaagacugaucagg

SEQ ID NO: 963315 - RNA, 22 nt, Human
cuauugaauagcccaaaucauu

SEQ ID NO: 963316 - RNA, 22 nt, Human
uuauucuuuucuccagaauccc

SEQ ID NO: 963317 - RNA, 22 nt, Human
agcuggcagcucucagggguac

SEQ ID NO: 963318 - RNA, 22 nt, Human
accaucaguacuggaugcugac

SEQ ID NO: 963319 - RNA, 22 nt, Human
ugggcagaaaucaguaucagau

SEQ ID NO: 963320 - RNA, 22 nt, Human
ucaaugauaguacaaucagccu

SEQ ID NO: 963321 - RNA, 22 nt, Human
cuauuacauuucuggacauuca

SEQ ID NO: 963322 - RNA, 22 nt, Human
cugggcucagcccaugcugucc

SEQ ID NO: 963323 - RNA, 20 nt, Human
ccagucucuaucagaaauaa

SEQ ID NO: 963324 - RNA, 21 nt, Human
ccugagccuguuuauccagaa

SEQ ID NO: 963325 - RNA, 22 nt, Human
gcuggcugaggucuagcucuuu

SEQ ID NO: 963326 - RNA, 22 nt, Human
aaggccugcucagcugucugug

SEQ ID NO: 963327 - RNA, 22 nt, Human
cuggcuggucaucagcaguacg

SEQ ID NO: 963328 - RNA, 22 nt, Human
acuuccuggcugggugaccugg

SEQ ID NO: 963329 - RNA, 22 nt, Human
aaugugcagaugaauaaacaaa

SEQ ID NO: 963330 - RNA, 22 nt, Human
augucccaagauacagcuagag

SEQ ID NO: 963331 - RNA, 17 nt, Human
cuccuggcagccucagg

SEQ ID NO: 963332 - RNA, 22 nt, Human
acagccagggucucaggaggcg

SEQ ID NO: 963333 - RNA, 22 nt, Human
ucuugcuaaagaccaacacauu

SEQ ID NO: 963334 - RNA, 22 nt, Human
aaauguuuugcucccauguggu

SEQ ID NO: 963335 - RNA, 22 nt, Human
gcagggcaaugaucccgagagg

SEQ ID NO: 963336 - RNA, 22 nt, Human
ucugucaccgagggcauccaaa

SEQ ID NO: 963337 - RNA, 22 nt, Human
ugaaggcccuaucuccauauac

SEQ ID NO: 963338 - RNA, 22 nt, Human
ccucacuggccagccaggggug

SEQ ID NO: 963339 - RNA, 20 nt, Human
gcauugaguauagacagaug

SEQ ID NO: 963340 - RNA, 22 nt, Human
cugggguggauggguccaaguu

SEQ ID NO: 963341 - RNA, 22 nt, Human
cuuuucaugagucuguuauggg

SEQ ID NO: 963342 - RNA, 22 nt, Human
aguccuucaagaaaucuggaaa

SEQ ID NO: 963343 - RNA, 22 nt, Human
cugagccaguagucagggacaa

SEQ ID NO: 963344 - RNA, 22 nt, Human
gccagguggcugagcagcugca

SEQ ID NO: 963345 - RNA, 23 nt, Human
acacauuuuucccguucugaggu

SEQ ID NO: 963346 - RNA, 22 nt, Human
gcccaggauaaugcugucccug

SEQ ID NO: 963347 - RNA, 22 nt, Human
ugaagcaguuacuggguguuaa

SEQ ID NO: 963348 - RNA, 22 nt, Human
uuuaaauuuguguuuagagggu

SEQ ID NO: 963349 - RNA, 21 nt, Human
guauugcagaguuaugugcuc

SEQ ID NO: 963350 - RNA, 22 nt, Human
uucuuacuaguauguuucagca

SEQ ID NO: 963351 - RNA, 22 nt, Human
cccaggagguggagguugcggu

SEQ ID NO: 963352 - RNA, 22 nt, Human
cugugucucuccuuacaagacu

SEQ ID NO: 963353 - RNA, 22 nt, Human
uuucacaaaugucuuuaacuug

SEQ ID NO: 963354 - RNA, 22 nt, Human
uccaggagaccagauguaggcc

SEQ ID NO: 963355 - RNA, 23 nt, Human
ucucagaggauuccugggccuug

SEQ ID NO: 963356 - RNA, 22 nt, Human
gcucucugccauaugaggauac

SEQ ID NO: 963357 - RNA, 23 nt, Human
ucagaaugcacugaauuuacccu

SEQ ID NO: 963358 - RNA, 22 nt, Human
cugccucugguuuuggucccug

SEQ ID NO: 963359 - RNA, 22 nt, Human
cccuggaguagcacugggucgc

SEQ ID NO: 963360 - RNA, 23 nt, Human
cccagcuuucccacugccgagag

SEQ ID NO: 963361 - RNA, 22 nt, Human
cuuaggaugaguuuuugcguuu

SEQ ID NO: 963362 - RNA, 21 nt, Human
ccuggcugcacaguugcuggu

SEQ ID NO: 963363 - RNA, 21 nt, Human
gaugaagcaaucuuucuguug

SEQ ID NO: 963364 - RNA, 22 nt, Human
agacagugauguaagcaggagu

SEQ ID NO: 963365 - RNA, 22 nt, Human
ucaaaugcuucuacuccuaaga

SEQ ID NO: 963366 - RNA, 22 nt, Human
ucaggagaguguucaguggagg

SEQ ID NO: 963367 - RNA, 20 nt, Human
ggcagagggccugggagaag

SEQ ID NO: 963368 - RNA, 22 nt, Human
caguacuugggaaugcugggga

SEQ ID NO: 963369 - RNA, 20 nt, Human
ucucagcauaagaacccuuc

SEQ ID NO: 963370 - RNA, 22 nt, Human
cugcccaggaaggagaggaugg

SEQ ID NO: 963371 - RNA, 19 nt, Human
uguguguuuauauauguau

SEQ ID NO: 963372 - RNA, 22 nt, Human
gaaucucaguggaagcaggaag

SEQ ID NO: 963373 - RNA, 22 nt, Human
ccucuuugugccugcaggcugc

SEQ ID NO: 963374 - RNA, 22 nt, Human
aacaaguaaguuuauauauauu

SEQ ID NO: 963375 - RNA, 22 nt, Human
ucucacuggguauaaaugagua

SEQ ID NO: 963376 - RNA, 22 nt, Human
gccaaagcagucuugccucugc

SEQ ID NO: 963377 - RNA, 22 nt, Human
gcuguggguccggaccccacgg

SEQ ID NO: 963378 - RNA, 22 nt, Human
caggugggccgggguuuguucu

SEQ ID NO: 963379 - RNA, 22 nt, Human
agagugcaaccgaaacaagcag

SEQ ID NO: 963380 - RNA, 22 nt, Human
cuguagccagaagcagaaggcc

SEQ ID NO: 963381 - RNA, 22 nt, Human
ugggcagaauugugguaguuaa

SEQ ID NO: 963382 - RNA, 18 nt, Human
gggcuguguucaugccca

SEQ ID NO: 963383 - RNA, 22 nt, Human
gcagaggauagcauaugaaccu

SEQ ID NO: 963384 - RNA, 23 nt, Human
uaguuauuuucucuguaauuugc

SEQ ID NO: 963385 - RNA, 18 nt, Human
ucuauauggacauagaga

SEQ ID NO: 963386 - RNA, 22 nt, Human
ugguaucagagccaucuguauu

SEQ ID NO: 963387 - RNA, 22 nt, Human
gccucugcaacuccgccuuggu

SEQ ID NO: 963388 - RNA, 22 nt, Human
accaaggagacaaagguguauu

SEQ ID NO: 963389 - RNA, 21 nt, Human
ugaaacacucuuuccaugaga

SEQ ID NO: 963390 - RNA, 22 nt, Human
cagcugaguguuggcauguuca

SEQ ID NO: 963391 - RNA, 22 nt, Human
ugcugccagccaggccauggag

SEQ ID NO: 963392 - RNA, 23 nt, Human
gccuggagaaaagcugcaguuca

SEQ ID NO: 963393 - RNA, 22 nt, Human
cauuucuagggaucauaaagua

SEQ ID NO: 963394 - RNA, 22 nt, Human
ccuggggcucaagauggcgccg

SEQ ID NO: 963395 - RNA, 19 nt, Human
auacagauguauccaugau

SEQ ID NO: 963396 - RNA, 22 nt, Human
cagcccucagguccucagcagc

SEQ ID NO: 963397 - RNA, 22 nt, Human
cugggccagggaggugucugua

SEQ ID NO: 963398 - RNA, 22 nt, Human
uugaaauaucaaguuauuagug

SEQ ID NO: 963399 - RNA, 22 nt, Human
ugcauguguguguauuuauaaa

SEQ ID NO: 963400 - RNA, 22 nt, Human
uuguuugaggucacugauauuu

SEQ ID NO: 963401 - RNA, 22 nt, Human
ugggagucagacagccugagau

SEQ ID NO: 963402 - RNA, 22 nt, Human
auuacaaaagaagggagaaggu

SEQ ID NO: 963403 - RNA, 22 nt, Human
caaaaguaauugugguuuucac

SEQ ID NO: 963404 - RNA, 20 nt, Human
ccagagcagccacugaaguu

SEQ ID NO: 963405 - RNA, 22 nt, Human
ucccuggacaacagacuucacu

SEQ ID NO: 963406 - RNA, 22 nt, Human
augggaguuuucucugaugcuc

SEQ ID NO: 963407 - RNA, 22 nt, Human
cugcugugcaggugccuaugau

SEQ ID NO: 963408 - RNA, 22 nt, Human
uccagcagguccgagacaaguu

SEQ ID NO: 963409 - RNA, 22 nt, Human
agcagcuggugagcaagcucag

SEQ ID NO: 963410 - RNA, 22 nt, Human
ggcagagguagcuggaaccagg

SEQ ID NO: 963411 - RNA, 22 nt, Human
cuaggaggcgggggcugcagua

SEQ ID NO: 963412 - RNA, 22 nt, Human
uggucaguugcaucagagaagu

SEQ ID NO: 963413 - RNA, 22 nt, Human
agcugagcucaggcugauguaa

SEQ ID NO: 963414 - RNA, 22 nt, Human
agaggcuguuacacucccagau

SEQ ID NO: 963415 - RNA, 22 nt, Human
ucugggaacugagcuccccuag

SEQ ID NO: 963416 - RNA, 21 nt, Human
gggccacaccuucugcagacc

SEQ ID NO: 963417 - RNA, 22 nt, Human
gaaggccacuuuguguugagaa

SEQ ID NO: 963418 - RNA, 22 nt, Human
gcugagugagguccagagcuug

SEQ ID NO: 963419 - RNA, 22 nt, Human
uaggggugaggccaggcaucag

SEQ ID NO: 963420 - RNA, 22 nt, Human
caggagcucucaucgucagggc

SEQ ID NO: 963421 - RNA, 22 nt, Human
aguggggagguccaggccaccc

SEQ ID NO: 963422 - RNA, 22 nt, Human
ugagggaguuggguguauagga

SEQ ID NO: 963423 - RNA, 15 nt, Human
ugggcagaucacuug

SEQ ID NO: 963424 - RNA, 22 nt, Human
uggccugccugggagcagcagg

SEQ ID NO: 963425 - RNA, 22 nt, Human
ggccucagugggccgcugcagg

SEQ ID NO: 963426 - RNA, 18 nt, Human
ucugagggugcgggagcu

SEQ ID NO: 963427 - RNA, 22 nt, Human
uucucucauucaaauuaaagug

SEQ ID NO: 963428 - RNA, 22 nt, Human
ugauaauauuuugaaucauaag

SEQ ID NO: 963429 - RNA, 19 nt, Human
gcuucccaccagccagccc

SEQ ID NO: 963430 - RNA, 22 nt, Human
gggccugacugagagcuccuca

SEQ ID NO: 963431 - RNA, 22 nt, Human
uccaguucuaggucacucucug

SEQ ID NO: 963432 - RNA, 19 nt, Human
uggccagguacugucugcu

SEQ ID NO: 963433 - RNA, 22 nt, Human
uuauuaaugaguacaaguuauu

SEQ ID NO: 963434 - RNA, 22 nt, Human
gcagccacacuguuacagaaug

SEQ ID NO: 963435 - RNA, 22 nt, Human
ugucucaguacacuccgauguu

SEQ ID NO: 963436 - RNA, 22 nt, Human
cucaggauggaagccuacagga

SEQ ID NO: 963437 - RNA, 22 nt, Human
agacaggcagaggcugcagagg

SEQ ID NO: 963438 - RNA, 22 nt, Human
agauacaucuugaacuucuaga

SEQ ID NO: 963439 - RNA, 22 nt, Human
gccugggaagacuaagugggag

SEQ ID NO: 963440 - RNA, 22 nt, Human
ggagcugggguuggcaucuucc

SEQ ID NO: 963441 - RNA, 22 nt, Human
aaagauuucagaagccugugcc

SEQ ID NO: 963442 - RNA, 22 nt, Human
ggcagcuuguccuggaggaugg

SEQ ID NO: 963443 - RNA, 22 nt, Human
uccuggccuagcucacccugga

SEQ ID NO: 963444 - RNA, 22 nt, Human
auuugaagaaaguuuucuagau

SEQ ID NO: 963445 - RNA, 22 nt, Human
ucagaggaccuuacugagaacc

SEQ ID NO: 963446 - RNA, 22 nt, Human
ucaggaauccagacagggcaca

SEQ ID NO: 963447 - RNA, 22 nt, Human
ucacucugccuccauauuacua

SEQ ID NO: 963448 - RNA, 19 nt, Human
cuccucagucccagagguc

SEQ ID NO: 963449 - RNA, 22 nt, Human
uccuggagggaggcggugcuac

SEQ ID NO: 963450 - RNA, 22 nt, Human
aaguuuguucagggcuuacauu

SEQ ID NO: 963451 - RNA, 22 nt, Human
ucaagcaucuuggucuacgauc

SEQ ID NO: 963452 - RNA, 20 nt, Human
cacaggccuugugagcagac

SEQ ID NO: 963453 - RNA, 22 nt, Human
ugcccagcacugugccagucac

SEQ ID NO: 963454 - RNA, 22 nt, Human
guggcuucacauggcauuuggc

SEQ ID NO: 963455 - RNA, 22 nt, Human
ugugauauuugaguauugucaa

SEQ ID NO: 963456 - RNA, 22 nt, Human
cugcuuuguguggucccuccag

SEQ ID NO: 963457 - RNA, 22 nt, Human
aggagcugucagagugccagag

SEQ ID NO: 963458 - RNA, 22 nt, Human
guaagcaucugucucuucugca

SEQ ID NO: 963459 - RNA, 22 nt, Human
ugggccugacucaccugccucc

SEQ ID NO: 963460 - RNA, 22 nt, Human
auagucuuagucuauaguuuug

SEQ ID NO: 963461 - RNA, 22 nt, Human
accuuucaaaguggcuaucacu

SEQ ID NO: 963462 - RNA, 19 nt, Human
uagucuuuauucuuaauuu

SEQ ID NO: 963463 - RNA, 20 nt, Human
cucucccagcacagcuuccu

SEQ ID NO: 963464 - RNA, 22 nt, Human
caaugugugcuuacaggccagu

SEQ ID NO: 963465 - RNA, 22 nt, Human
uacauuuguuauagaaaugaag

SEQ ID NO: 963466 - RNA, 22 nt, Human
ggcugccugaggcugaggcccg

SEQ ID NO: 963467 - RNA, 22 nt, Human
ucucuucuauuugagacuauuu

SEQ ID NO: 963468 - RNA, 22 nt, Human
ucaguuuucucauuuaugagau

SEQ ID NO: 963469 - RNA, 22 nt, Human
ugucucagaggcaggaagagcc

SEQ ID NO: 963470 - RNA, 17 nt, Human
cacaggugugguuugag

SEQ ID NO: 963471 - RNA, 22 nt, Human
ucugccugcuaacuccugcacc

SEQ ID NO: 963472 - RNA, 22 nt, Human
aagaaucauccugcaagagucu

SEQ ID NO: 963473 - RNA, 22 nt, Human
uuuguuuucaaugugucauuca

SEQ ID NO: 963474 - RNA, 22 nt, Human
auaauguguucaucuuacaauu

SEQ ID NO: 963475 - RNA, 22 nt, Human
agaggggacagccaccugcccg

SEQ ID NO: 963476 - RNA, 22 nt, Human
ucugucacuauuggccagaaca

SEQ ID NO: 963477 - RNA, 22 nt, Human
cugcaggcucgaagacacggau

SEQ ID NO: 963478 - RNA, 22 nt, Human
cacagaggcaaccuucuggggu

SEQ ID NO: 963479 - RNA, 22 nt, Human
auugcaccuuggguuuugaaag

SEQ ID NO: 963480 - RNA, 22 nt, Human
acagagcaauucuuggguguuu

SEQ ID NO: 963481 - RNA, 22 nt, Human
aguggcagagcaggugcuggaa

SEQ ID NO: 963482 - RNA, 22 nt, Human
auggccaaauaacagcuugcau

SEQ ID NO: 963483 - RNA, 22 nt, Human
uaaaugagggcugacaugauug

SEQ ID NO: 963484 - RNA, 23 nt, Human
gcucugagggcuuaucccuccca

SEQ ID NO: 963485 - RNA, 22 nt, Human
aggcuggcgacaucuggcgggc

SEQ ID NO: 963486 - RNA, 22 nt, Human
agaaaugacacacaugagacau

SEQ ID NO: 963487 - RNA, 22 nt, Human
augaaggcaguuaaacgucauc

SEQ ID NO: 963488 - RNA, 23 nt, Human
aaccagauaaauggcuccagggc

SEQ ID NO: 963489 - RNA, 22 nt, Human
ccucugcugcuguugagcaccg

SEQ ID NO: 963490 - RNA, 22 nt, Human
uuuuccucuguauuugaaaugc

SEQ ID NO: 963491 - RNA, 22 nt, Human
uaaagguagcaugaaacugcaa

SEQ ID NO: 963492 - RNA, 23 nt, Human
uggagcugggcucagacccuggg

SEQ ID NO: 963493 - RNA, 22 nt, Human
cagaggcugaugugggaugggc

SEQ ID NO: 963494 - RNA, 22 nt, Human
ccacaggggucucuguagcuga

SEQ ID NO: 963495 - RNA, 22 nt, Human
ggucccaggaaucuguguucua

SEQ ID NO: 963496 - RNA, 22 nt, Human
ugucaugcuuauguuacauacu

SEQ ID NO: 963497 - RNA, 22 nt, Human
uagggcaguuauaacauuagug

SEQ ID NO: 963498 - RNA, 22 nt, Human
aaaggucagacuuaggcugggc

SEQ ID NO: 963499 - RNA, 22 nt, Human
aacagcaauagcacuauucauu

SEQ ID NO: 963500 - RNA, 22 nt, Human
aguaaaaucuuaagcacagugg

SEQ ID NO: 963501 - RNA, 22 nt, Human
agcuccuccugugccaggccag

SEQ ID NO: 963502 - RNA, 22 nt, Human
uuacaaagcguugagacaagua

SEQ ID NO: 963503 - RNA, 18 nt, Human
agggaucaucacugcagc

SEQ ID NO: 963504 - RNA, 22 nt, Human
auaaggcagugacuucaucuau

SEQ ID NO: 963505 - RNA, 22 nt, Human
acuuccugggcaugcagagucc

SEQ ID NO: 963506 - RNA, 22 nt, Human
cuguuuauggagguaaggcauc

SEQ ID NO: 963507 - RNA, 22 nt, Human
guucacaaaauucuggccagug

SEQ ID NO: 963508 - RNA, 22 nt, Human
ccagagcugauuccugggacuu

SEQ ID NO: 963509 - RNA, 21 nt, Human
cagcuuugucugucuucgggg

SEQ ID NO: 963510 - RNA, 22 nt, Human
gccaggcuggccagcaccuucu

SEQ ID NO: 963511 - RNA, 22 nt, Human
accaggagggacccugguggcc

SEQ ID NO: 963512 - RNA, 21 nt, Human
agaugcugugcuccaggagca

SEQ ID NO: 963513 - RNA, 22 nt, Human
gccugggugaauuugauccuaa

SEQ ID NO: 963514 - RNA, 22 nt, Human
ugggcugcagggguugagagcu

SEQ ID NO: 963515 - RNA, 22 nt, Human
uuaaaagagcagcccagcauau

SEQ ID NO: 963516 - RNA, 22 nt, Human
caggggcagucugugugcgugg

SEQ ID NO: 963517 - RNA, 22 nt, Human
aguguuucccaguaggaugaaa

SEQ ID NO: 963518 - RNA, 22 nt, Human
cugcgcagcaaucagagaggag

SEQ ID NO: 963519 - RNA, 22 nt, Human
auguguguauauauagucauuu

SEQ ID NO: 963520 - RNA, 18 nt, Human
ugcuggcaacuacuauug

SEQ ID NO: 963521 - RNA, 22 nt, Human
auaaggcaucucucaguuagca

SEQ ID NO: 963522 - RNA, 22 nt, Human
cugagcugggaguggauagugg

SEQ ID NO: 963523 - RNA, 17 nt, Human
aggagucucagaugagc

SEQ ID NO: 963524 - RNA, 22 nt, Human
gaggaacccagcugggguugcc

SEQ ID NO: 963525 - RNA, 20 nt, Human
auugucagccuucagaggag

SEQ ID NO: 963526 - RNA, 22 nt, Human
ggucccaguugcccaggucagg

SEQ ID NO: 963527 - RNA, 22 nt, Human
aggucacauggauaaugaucag

SEQ ID NO: 963528 - RNA, 22 nt, Human
uauucacagguucuggggauca

SEQ ID NO: 963529 - RNA, 22 nt, Human
ucucugguggcuccaucaguag

SEQ ID NO: 963530 - RNA, 22 nt, Human
caggggcuuuuccucuauaagg

SEQ ID NO: 963531 - RNA, 20 nt, Human
aacuuguucuaccuguuuca

SEQ ID NO: 963532 - RNA, 18 nt, Human
gcuggcugcacuucugcu

SEQ ID NO: 963533 - RNA, 22 nt, Human
acacuuuuguguauauccaguu

SEQ ID NO: 963534 - RNA, 20 nt, Human
cucugcuuuaggagagucag

SEQ ID NO: 963535 - RNA, 22 nt, Human
ugcauuauaacugaauguuguu

SEQ ID NO: 963536 - RNA, 22 nt, Human
aagaggaagucuccauggagag

SEQ ID NO: 963537 - RNA, 22 nt, Human
gccuggagaauuaaaaggaagg

SEQ ID NO: 963538 - RNA, 21 nt, Human
guccaguggaggaggacagga

SEQ ID NO: 963539 - RNA, 22 nt, Human
cuucccacuaguaucacagagc

SEQ ID NO: 963540 - RNA, 22 nt, Human
uugcagggaccugcagaaagcu

SEQ ID NO: 963541 - RNA, 22 nt, Human
aagcagcuuaaauuagagccug

SEQ ID NO: 963542 - RNA, 22 nt, Human
uggguucagaucccagcucugu

SEQ ID NO: 963543 - RNA, 22 nt, Human
ucagggcaaagggcagaguuug

SEQ ID NO: 963544 - RNA, 22 nt, Human
gcuccugucuuggggcacuggc

SEQ ID NO: 963545 - RNA, 22 nt, Human
cugcccuguggcucugagucau

SEQ ID NO: 963546 - RNA, 20 nt, Human
ggcugccuccuuccuuuccu

SEQ ID NO: 963547 - RNA, 22 nt, Human
cugcuguguuagcagguuuagu

SEQ ID NO: 963548 - RNA, 22 nt, Human
cagcucccuauggugaggcgac

SEQ ID NO: 963549 - RNA, 23 nt, Human
cccagcagauuguaaagugucca

SEQ ID NO: 963550 - RNA, 22 nt, Human
cucauggauauaagaacuguuu

SEQ ID NO: 963551 - RNA, 22 nt, Human
uccaggaggguuuucugccuuc

SEQ ID NO: 963552 - RNA, 22 nt, Human
cauuuccacuucugaaaacugg

SEQ ID NO: 963553 - RNA, 19 nt, Human
cauuccuuugucugccaaa

SEQ ID NO: 963554 - RNA, 22 nt, Human
aaaguguacuaugucaugaaca

SEQ ID NO: 963555 - RNA, 22 nt, Human
aaggcagccuuuguuugauuga

SEQ ID NO: 963556 - RNA, 22 nt, Human
uagugcacacgcauguagcagu

SEQ ID NO: 963557 - RNA, 22 nt, Human
gaaacugugaucguguucuggg

SEQ ID NO: 963558 - RNA, 22 nt, Human
gagcaccucaauuugcuauuug

SEQ ID NO: 963559 - RNA, 22 nt, Human
cuauuuucauucuuacauuguc

SEQ ID NO: 963560 - RNA, 22 nt, Human
acagccagguaaaggcauggca

SEQ ID NO: 963561 - RNA, 22 nt, Human
ccagggcuggugggagaugcug

SEQ ID NO: 963562 - RNA, 22 nt, Human
uggcagcugaggggaggcuuug

SEQ ID NO: 963563 - RNA, 22 nt, Human
uuagagaugucccaaaaugaag

SEQ ID NO: 963564 - RNA, 22 nt, Human
ucuuccucucuaauugaucaga

SEQ ID NO: 963565 - RNA, 22 nt, Human
cagagcagaaaccugggugauu

SEQ ID NO: 963566 - RNA, 22 nt, Human
uccaggagcucauccacgucaa

SEQ ID NO: 963567 - RNA, 22 nt, Human
aaguucuaauuuugcauucagg

SEQ ID NO: 963568 - RNA, 22 nt, Human
uguacauugucacucaucaagu

SEQ ID NO: 963569 - RNA, 22 nt, Human
agcugggaugauaaccucaguc

SEQ ID NO: 963570 - RNA, 22 nt, Human
cugccacuuacuaggcauggug

SEQ ID NO: 963571 - RNA, 22 nt, Human
ccuguggggccaucucagucac

SEQ ID NO: 963572 - RNA, 22 nt, Human
ucuccuucgaggcccagcuccc

SEQ ID NO: 963573 - RNA, 22 nt, Human
aaaucaguuagugguaggauug

SEQ ID NO: 963574 - RNA, 22 nt, Human
caggguggcaggcaccauggcc

SEQ ID NO: 963575 - RNA, 22 nt, Human
ggucccugguucccucugagcu

SEQ ID NO: 963576 - RNA, 22 nt, Human
uugaacaguccuaagagacccu

SEQ ID NO: 963577 - RNA, 22 nt, Human
ucaauucugguccucaggaacu

SEQ ID NO: 963578 - RNA, 22 nt, Human
ucccagcagucagagcuaugug

SEQ ID NO: 963579 - RNA, 22 nt, Human
uccugggcuugcuccuccagcu

SEQ ID NO: 963580 - RNA, 22 nt, Human
acuguggggggcuuugcucagu

SEQ ID NO: 963581 - RNA, 22 nt, Human
auggacagugugaagcagauag

SEQ ID NO: 963582 - RNA, 22 nt, Human
ggugggcaggcgaggcccaggu

SEQ ID NO: 963583 - RNA, 20 nt, Human
ugagccaaacgaugaagagc

SEQ ID NO: 963584 - RNA, 20 nt, Human
ucagagucaucaaagauggu

SEQ ID NO: 963585 - RNA, 22 nt, Human
agaggccugugugcuccagugg

SEQ ID NO: 963586 - RNA, 22 nt, Human
caagagcugugaccucauucac

SEQ ID NO: 963587 - RNA, 22 nt, Human
ggcuuccuaauacucccuacac

SEQ ID NO: 963588 - RNA, 21 nt, Human
uucagcaguccucuagagaua

SEQ ID NO: 963589 - RNA, 22 nt, Human
uauuucuuucagguauguguug

SEQ ID NO: 963590 - RNA, 22 nt, Human
acaugcauacacguacauaccu

SEQ ID NO: 963591 - RNA, 22 nt, Human
aaggcacuacgcugcuggggcg

SEQ ID NO: 963592 - RNA, 22 nt, Human
gcagggcugcagagggcacugu

SEQ ID NO: 963593 - RNA, 22 nt, Human
gucagcagugucagcucugggg

SEQ ID NO: 963594 - RNA, 22 nt, Human
ggcucuggagacauguggagag

SEQ ID NO: 963595 - RNA, 22 nt, Human
cauuucacaaauggccacauca

SEQ ID NO: 963596 - RNA, 22 nt, Human
gcagagccaugggagguuuuug

SEQ ID NO: 963597 - RNA, 22 nt, Human
uugaauaauuaauuacacucag

SEQ ID NO: 963598 - RNA, 22 nt, Human
ugccucugguuaucugguaccu

SEQ ID NO: 963599 - RNA, 22 nt, Human
uucucagagcacugcugacaaa

SEQ ID NO: 963600 - RNA, 22 nt, Human
aagggcagcuauuaucgucauc

SEQ ID NO: 963601 - RNA, 22 nt, Human
guucuugccagcauccucaggu

SEQ ID NO: 963602 - RNA, 22 nt, Human
uuuugaaagaguccugcuacag

SEQ ID NO: 963603 - RNA, 22 nt, Human
accaggagucuagccuagucaa

SEQ ID NO: 963604 - RNA, 22 nt, Human
ugcugccaaaugcgagcucugu

SEQ ID NO: 963605 - RNA, 22 nt, Human
ucugccaccaccuacacuagua

SEQ ID NO: 963606 - RNA, 22 nt, Human
cccagggacagcuagguggggc

SEQ ID NO: 963607 - RNA, 22 nt, Human
acacaggggaaaguggagcuga

SEQ ID NO: 963608 - RNA, 22 nt, Human
cagcugcccugccuugcccuua

SEQ ID NO: 963609 - RNA, 22 nt, Human
guuucacagucugcagaauuuu

SEQ ID NO: 963610 - RNA, 22 nt, Human
ggugcagaaggaagggagcugg

SEQ ID NO: 963611 - RNA, 22 nt, Human
ccaggaagcggugagggcugcc

SEQ ID NO: 963612 - RNA, 22 nt, Human
ucagugaucuaaggguauggcc

SEQ ID NO: 963613 - RNA, 22 nt, Human
caggaugagaggcccagggaag

SEQ ID NO: 963614 - RNA, 22 nt, Human
auggaagguccuacagagcgca

SEQ ID NO: 963615 - RNA, 22 nt, Human
ucugcaagauggucuuagaggu

SEQ ID NO: 963616 - RNA, 22 nt, Human
ugcugccuccaacuccugggcu

SEQ ID NO: 963617 - RNA, 22 nt, Human
uucucuagguuuuagaugaaga

SEQ ID NO: 963618 - RNA, 22 nt, Human
agccuguccagaggacagggcu

SEQ ID NO: 963619 - RNA, 23 nt, Human
ugucuggcucauggugggucuca

SEQ ID NO: 963620 - RNA, 22 nt, Human
agcacagaguugcagagagcgu

SEQ ID NO: 963621 - RNA, 22 nt, Human
cugcuuugggcagcuuuguggc

SEQ ID NO: 963622 - RNA, 22 nt, Human
ugacagggcuagaggcaaugca

SEQ ID NO: 963623 - RNA, 22 nt, Human
cuguggaauugaugcuuagugu

SEQ ID NO: 963624 - RNA, 22 nt, Human
uggcucaguagcagugugguca

SEQ ID NO: 963625 - RNA, 22 nt, Human
cugggaggcccacguugggaag

SEQ ID NO: 963626 - RNA, 22 nt, Human
ucauccaggaaaagauuuggaa

SEQ ID NO: 963627 - RNA, 22 nt, Human
ucaaaacaaucauuggaugugc

SEQ ID NO: 963628 - RNA, 22 nt, Human
gcuggagcugaguucccugggc

SEQ ID NO: 963629 - RNA, 22 nt, Human
ggcacugaaccaggacacaagc

SEQ ID NO: 963630 - RNA, 20 nt, Human
ggcagcucacuacuuucugu

SEQ ID NO: 963631 - RNA, 22 nt, Human
uggccucaagucugagggccuu

SEQ ID NO: 963632 - RNA, 17 nt, Human
caggcagacauguaagc

SEQ ID NO: 963633 - RNA, 22 nt, Human
ugucaugccauuuaaaauguuu

SEQ ID NO: 963634 - RNA, 19 nt, Human
cuguccuuggcugcacugu

SEQ ID NO: 963635 - RNA, 22 nt, Human
gcugucacacaugggaucucag

SEQ ID NO: 963636 - RNA, 20 nt, Human
gaggcugcggacugcuggac

SEQ ID NO: 963637 - RNA, 22 nt, Human
uauguacaccggggaagguggg

SEQ ID NO: 963638 - RNA, 19 nt, Human
auaaggcaauuggauuugg

SEQ ID NO: 963639 - RNA, 22 nt, Human
auggggcuguucucugcccugc

SEQ ID NO: 963640 - RNA, 22 nt, Human
guccucuguagggcugggccac

SEQ ID NO: 963641 - RNA, 21 nt, Human
agggagcuuuagguagaaguu

SEQ ID NO: 963642 - RNA, 22 nt, Human
cugcaggcccccuuccuggagu

SEQ ID NO: 963643 - RNA, 20 nt, Human
cccucugcuacacugggagc

SEQ ID NO: 963644 - RNA, 22 nt, Human
uuauguaggauaaugaauugcc

SEQ ID NO: 963645 - RNA, 22 nt, Human
ggcugccaggagggaggccagu

SEQ ID NO: 963646 - RNA, 22 nt, Human
ucucagagaaaugugucaccau

SEQ ID NO: 963647 - RNA, 22 nt, Human
agggccuggcgcguggccgccg

SEQ ID NO: 963648 - RNA, 20 nt, Human
gacaggagaguuagguaggu

SEQ ID NO: 963649 - RNA, 22 nt, Human
ugcaucuuacguuuugaaaggg

SEQ ID NO: 963650 - RNA, 22 nt, Human
cugggacacccagagcugcaga

SEQ ID NO: 963651 - RNA, 22 nt, Human
cggagccugcuuguugcagcug

SEQ ID NO: 963652 - RNA, 22 nt, Human
gggagcuguaguccagauaccg

SEQ ID NO: 963653 - RNA, 22 nt, Human
gaaugugugacucuauugagca

SEQ ID NO: 963654 - RNA, 22 nt, Human
ucuuagaaugucaacugauguu

SEQ ID NO: 963655 - RNA, 22 nt, Human
gcagcaggagaguuuguccugc

SEQ ID NO: 963656 - RNA, 22 nt, Human
aaguauauuuuuugaagcauau

SEQ ID NO: 963657 - RNA, 22 nt, Human
gcucagagcuugaaguuccacu

SEQ ID NO: 963658 - RNA, 22 nt, Human
aucaguuuguauaugaaacacu

SEQ ID NO: 963659 - RNA, 22 nt, Human
uucuaaauggggauccuuucug

SEQ ID NO: 963660 - RNA, 22 nt, Human
auuucuguuugcuacuauaagu

SEQ ID NO: 963661 - RNA, 22 nt, Human
ccaggcucugucuggucagaag

SEQ ID NO: 963662 - RNA, 22 nt, Human
cccagguggcagaagcugcagu

SEQ ID NO: 963663 - RNA, 22 nt, Human
agacgagggcccccaggacagc

SEQ ID NO: 963664 - RNA, 22 nt, Human
cugugcuuccaggauggcagcu

SEQ ID NO: 963665 - RNA, 22 nt, Human
ggaggccaaggcagguggaucg

SEQ ID NO: 963666 - RNA, 22 nt, Human
agcaauaugacauugcuacauc

SEQ ID NO: 963667 - RNA, 22 nt, Human
ccugccagugaagcugacgggc

SEQ ID NO: 963668 - RNA, 22 nt, Human
gaggcaugcagagcuggagcag

SEQ ID NO: 963669 - RNA, 22 nt, Human
uuucacaaagcauagcacuuua

SEQ ID NO: 963670 - RNA, 22 nt, Human
uacaugaacaaaauagcagaaa

SEQ ID NO: 963671 - RNA, 22 nt, Human
cugcugcugcuaucuacccagg

SEQ ID NO: 963672 - RNA, 20 nt, Human
cguaaggcaagugcugcauc

SEQ ID NO: 963673 - RNA, 21 nt, Human
cagaggcugagagggcaaucu

SEQ ID NO: 963674 - RNA, 22 nt, Human
agggccuggaacuggagaccac

SEQ ID NO: 963675 - RNA, 22 nt, Human
agagugaaaagcuagagcagua

SEQ ID NO: 963676 - RNA, 22 nt, Human
uccaagggcaugcugaaauaag

SEQ ID NO: 963677 - RNA, 22 nt, Human
uucaauucuaaacuaauauucu

SEQ ID NO: 963678 - RNA, 22 nt, Human
guggcugcucgggcuccggccc

SEQ ID NO: 963679 - RNA, 22 nt, Human
augauauuugcaaugugcuugc

SEQ ID NO: 963680 - RNA, 22 nt, Human
aaacugcuuuccacaguggcua

SEQ ID NO: 963681 - RNA, 22 nt, Human
gcucagaggcacgaccucuugg

SEQ ID NO: 963682 - RNA, 22 nt, Human
ugaaaucuccucuuuauauauc

SEQ ID NO: 963683 - RNA, 21 nt, Human
aggcccagcuuuccucuugcu

SEQ ID NO: 963684 - RNA, 22 nt, Human
cuggcucaauuuguacugcugu

SEQ ID NO: 963685 - RNA, 22 nt, Human
aaaagagugacugauaaguaua

SEQ ID NO: 963686 - RNA, 22 nt, Human
gcucagaaaagugaggcucagu

SEQ ID NO: 963687 - RNA, 22 nt, Human
uccagucaagcuugagaauuuc

SEQ ID NO: 963688 - RNA, 22 nt, Human
uguugaagauaaaguucucauu

SEQ ID NO: 963689 - RNA, 19 nt, Human
ccuuugaaucaggacacuu

SEQ ID NO: 963690 - RNA, 22 nt, Human
caggauggugugagugugagga

SEQ ID NO: 963691 - RNA, 22 nt, Human
aagcugccagcugagcugaggc

SEQ ID NO: 963692 - RNA, 22 nt, Human
gaggccagaaugagcugaaugc

SEQ ID NO: 963693 - RNA, 22 nt, Human
ggccuguccagccugccuggcu

SEQ ID NO: 963694 - RNA, 22 nt, Human
auauucguggucaaguaaggcc

SEQ ID NO: 963695 - RNA, 22 nt, Human
uagaaaucuacuuagacuuucu

SEQ ID NO: 963696 - RNA, 22 nt, Human
acuccaggcaucugcuucugcu

SEQ ID NO: 963697 - RNA, 22 nt, Human
aggagcugaaacuucucauaug

SEQ ID NO: 963698 - RNA, 22 nt, Human
ggaggcagaacuucccgucagu

SEQ ID NO: 963699 - RNA, 22 nt, Human
aggcgcugcgcuggggccagaa

SEQ ID NO: 963700 - RNA, 22 nt, Human
gcuguguuuuauguuagguuaa

SEQ ID NO: 963701 - RNA, 22 nt, Human
uauucacauuaauaagucuuca

SEQ ID NO: 963702 - RNA, 22 nt, Human
ccucagagguguggcaucucug

SEQ ID NO: 963703 - RNA, 23 nt, Human
aaggccagaauuucaauggugcc

SEQ ID NO: 963704 - RNA, 22 nt, Human
aggauccuguauggagaagcug

SEQ ID NO: 963705 - RNA, 16 nt, Human
uguuagcugugcauua

SEQ ID NO: 963706 - RNA, 22 nt, Human
ugccuugccacugcucuuaaug

SEQ ID NO: 963707 - RNA, 22 nt, Human
gggaaggagccugcuugcuaga

SEQ ID NO: 963708 - RNA, 22 nt, Human
caggagaggaggcuacuucuua

SEQ ID NO: 963709 - RNA, 22 nt, Human
cuccugaggggacaggacucau

SEQ ID NO: 963710 - RNA, 22 nt, Human
uucuuuccaaccagauauuggu

SEQ ID NO: 963711 - RNA, 22 nt, Human
agauacaucauuuauaccuuca

SEQ ID NO: 963712 - RNA, 22 nt, Human
uaugugaauacagcaguggaug

SEQ ID NO: 963713 - RNA, 22 nt, Human
ugaggcaguauucuccauucca

SEQ ID NO: 963714 - RNA, 22 nt, Human
ggcagccaugcacgcugccugg

SEQ ID NO: 963715 - RNA, 22 nt, Human
ucuguaucuaauuuuacaguag

SEQ ID NO: 963716 - RNA, 22 nt, Human
ggaggugaggccguagggugug

SEQ ID NO: 963717 - RNA, 20 nt, Human
gcagcuacucugucucgcuc

SEQ ID NO: 963718 - RNA, 22 nt, Human
cacuccagccucagugacagag

SEQ ID NO: 963719 - RNA, 22 nt, Human
uaauuauaacaguuacaucuua

SEQ ID NO: 963720 - RNA, 22 nt, Human
ucauccaguuguggagagggaa

SEQ ID NO: 963721 - RNA, 22 nt, Human
uguuccaucaguuuuugguuga

SEQ ID NO: 963722 - RNA, 22 nt, Human
aaaaugugaucuacaaaugcaa

SEQ ID NO: 963723 - RNA, 22 nt, Human
ucaagaaggaguuauuuauuca

SEQ ID NO: 963724 - RNA, 22 nt, Human
cauggcugcgagaagagugggu

SEQ ID NO: 963725 - RNA, 22 nt, Human
acagggaauggagggaucagua

SEQ ID NO: 963726 - RNA, 23 nt, Human
uggccugcagaguuucugcuggg

SEQ ID NO: 963727 - RNA, 22 nt, Human
ugggagcaaaugacugggagau

SEQ ID NO: 963728 - RNA, 22 nt, Human
acuuccuguguuggucuugcug

SEQ ID NO: 963729 - RNA, 22 nt, Human
cugggccagcaacugcaaugga

SEQ ID NO: 963730 - RNA, 20 nt, Human
uuucacagucccuguuuccu

SEQ ID NO: 963731 - RNA, 23 nt, Human
gggaccagcuagggcugugaccu

SEQ ID NO: 963732 - RNA, 22 nt, Human
aacauuucuucugaaacugagu

SEQ ID NO: 963733 - RNA, 19 nt, Human
cagaguacaccagauagga

SEQ ID NO: 963734 - RNA, 22 nt, Human
aucuuugaagaggacuugaagu

SEQ ID NO: 963735 - RNA, 22 nt, Human
aggucauuguuaagucaccaua

SEQ ID NO: 963736 - RNA, 22 nt, Human
gaguuauuucagaaggaaagau

SEQ ID NO: 963737 - RNA, 22 nt, Human
guggccugucagaagccguggg

SEQ ID NO: 963738 - RNA, 22 nt, Human
guaggcagucucucaggugauc

SEQ ID NO: 963739 - RNA, 22 nt, Human
ugcaccuuguugcuuuuacgaa

SEQ ID NO: 963740 - RNA, 22 nt, Human
uggcaggagguuuucuccagga

SEQ ID NO: 963741 - RNA, 22 nt, Human
aaagacuagcauuuauauguac

SEQ ID NO: 963742 - RNA, 22 nt, Human
cccaagaucuuucgugcacuaa

SEQ ID NO: 963743 - RNA, 22 nt, Human
gagguuagaggucagugcaguc

SEQ ID NO: 963744 - RNA, 22 nt, Human
cacccaggcuggagugcagggg

SEQ ID NO: 963745 - RNA, 22 nt, Human
gaggcaacacauuuggaaagca

SEQ ID NO: 963746 - RNA, 22 nt, Human
gcuggcagggugguugagagag

SEQ ID NO: 963747 - RNA, 22 nt, Human
uccaaacacccuccaugcugca

SEQ ID NO: 963748 - RNA, 22 nt, Human
uguuucaugauugcugucauuu

SEQ ID NO: 963749 - RNA, 22 nt, Human
caaaaguaauugcgguuuuugc

SEQ ID NO: 963750 - RNA, 22 nt, Human
ucugcaggaaaaaagugccugg

SEQ ID NO: 963751 - RNA, 22 nt, Human
cacccuggcuggaggugcagug

SEQ ID NO: 963752 - RNA, 22 nt, Human
uggcugugaacaaagagaauaa

SEQ ID NO: 963753 - RNA, 22 nt, Human
uauuuuguuaauaauccagucc

SEQ ID NO: 963754 - RNA, 18 nt, Human
aggccugggaagcugagg

SEQ ID NO: 963755 - RNA, 22 nt, Human
ugugcaaaguguacaaauuaau

SEQ ID NO: 963756 - RNA, 22 nt, Human
gguaacaguauguagaguaaga

SEQ ID NO: 963757 - RNA, 22 nt, Human
ggagucccagcaaagccuuccc

SEQ ID NO: 963758 - RNA, 22 nt, Human
uccugcagccacugcaggcaga

SEQ ID NO: 963759 - RNA, 22 nt, Human
cuuucucuguguuucacaugcu

SEQ ID NO: 963760 - RNA, 19 nt, Human
ugaagcaauaccauuuuug

SEQ ID NO: 963761 - RNA, 22 nt, Human
uaaauaugcauguauccuuauc

SEQ ID NO: 963762 - RNA, 22 nt, Human
guucacaaauaugcacuuacga

SEQ ID NO: 963763 - RNA, 22 nt, Human
agggcagcccuucugggagggc

SEQ ID NO: 963764 - RNA, 22 nt, Human
gcaccacaucaaugaggggagc

SEQ ID NO: 963765 - RNA, 22 nt, Human
ucucauguauugcccuggugug

SEQ ID NO: 963766 - RNA, 22 nt, Human
ccugagccucuugcacgcucag

SEQ ID NO: 963767 - RNA, 22 nt, Human
aggcagguccccuggaaggcac

SEQ ID NO: 963768 - RNA, 21 nt, Human
acaugcauagagagauuucug

SEQ ID NO: 963769 - RNA, 20 nt, Human
uggagcuguaaucuugucug

SEQ ID NO: 963770 - RNA, 18 nt, Human
uggcucuggacuugcucc

SEQ ID NO: 963771 - RNA, 22 nt, Human
uucaauucaauucuaaauauau

SEQ ID NO: 963772 - RNA, 19 nt, Human
gcaggcacagcccugggug

SEQ ID NO: 963773 - RNA, 22 nt, Human
caacuccuggcuguuaggcaca

SEQ ID NO: 963774 - RNA, 22 nt, Human
cagagcugggcauggugaaagg

SEQ ID NO: 963775 - RNA, 22 nt, Human
cacagcugccauggcugcacuu

SEQ ID NO: 963776 - RNA, 22 nt, Human
ccagugugggcccggccuccuc

SEQ ID NO: 963777 - RNA, 22 nt, Human
gaggcugaggguuagagaguca

SEQ ID NO: 963778 - RNA, 22 nt, Human
cugccaggcgauggauuggcug

SEQ ID NO: 963779 - RNA, 22 nt, Human
agggcugcuccuccuucaggcc

SEQ ID NO: 963780 - RNA, 22 nt, Human
uaaaaugacuuccuccaacauc

SEQ ID NO: 963781 - RNA, 22 nt, Human
ccauuguaaauucuguggaagu

SEQ ID NO: 963782 - RNA, 22 nt, Human
aaaugaacucuuccugcauccc

SEQ ID NO: 963783 - RNA, 22 nt, Human
gccugcagggugaugggcugcc

SEQ ID NO: 963784 - RNA, 22 nt, Human
ugaaguuauauauguugaaaau

SEQ ID NO: 963785 - RNA, 22 nt, Human
cugggagcugaggcugacgcug

SEQ ID NO: 963786 - RNA, 22 nt, Human
ggcaggcugcuugggucauguc

SEQ ID NO: 963787 - RNA, 20 nt, Human
ccucaagcagacugacagcu

SEQ ID NO: 963788 - RNA, 22 nt, Human
augggaugaacuugaucugcuu

SEQ ID NO: 963789 - RNA, 22 nt, Human
ugggccugauucuugaauccug

SEQ ID NO: 963790 - RNA, 22 nt, Human
cagcuccccucuguggggcagu

SEQ ID NO: 963791 - RNA, 22 nt, Human
guccucugggagccuugagccu

SEQ ID NO: 963792 - RNA, 22 nt, Human
ugggccuggagcccuggagagu

SEQ ID NO: 963793 - RNA, 21 nt, Human
aggcacuguuugugguuuggg

SEQ ID NO: 963794 - RNA, 22 nt, Human
ugucacauugaauaugauuuau

SEQ ID NO: 963795 - RNA, 19 nt, Human
ucccuggcgccucucgggc

SEQ ID NO: 963796 - RNA, 22 nt, Human
ucagcagggccuccuugugcag

SEQ ID NO: 963797 - RNA, 22 nt, Human
gaagcagcuggugagauggagc

SEQ ID NO: 963798 - RNA, 22 nt, Human
caguacuuggucaaggaagcag

SEQ ID NO: 963799 - RNA, 22 nt, Human
gcagugguggagcuuacauauc

SEQ ID NO: 963800 - RNA, 22 nt, Human
acuucuggugucauacugcauu

SEQ ID NO: 963801 - RNA, 22 nt, Human
gggaguggauuauguggaccca

SEQ ID NO: 963802 - RNA, 22 nt, Human
gcgcaggagccgcggagggccg

SEQ ID NO: 963803 - RNA, 22 nt, Human
gagggggcgugcaaggcuccgc

SEQ ID NO: 963804 - RNA, 18 nt, Human
acaaauguagugucuuaa

SEQ ID NO: 963805 - RNA, 22 nt, Human
agagcagcugugacauggacag

SEQ ID NO: 963806 - RNA, 22 nt, Human
ccagcucucugcagaaaggacu

SEQ ID NO: 963807 - RNA, 22 nt, Human
acacauuucucuuuuuguaagu

SEQ ID NO: 963808 - RNA, 22 nt, Human
cugccucaugcugccugcagcc

SEQ ID NO: 963809 - RNA, 22 nt, Human
aaaguauuugugauuuuuacca

SEQ ID NO: 963810 - RNA, 21 nt, Human
ugcuccuuagcugccccugcc

SEQ ID NO: 963811 - RNA, 22 nt, Human
aaagccuugcccgucacuggga

SEQ ID NO: 963812 - RNA, 22 nt, Human
gagggagucugugcaaagaauu

SEQ ID NO: 963813 - RNA, 22 nt, Human
cccaggaaaguggaggcggcug

SEQ ID NO: 963814 - RNA, 22 nt, Human
ugaggcaggaguucaggcugcg

SEQ ID NO: 963815 - RNA, 22 nt, Human
acauuucucauaggagagccac

SEQ ID NO: 963816 - RNA, 22 nt, Human
agcaaaguagcugcuguucuua

SEQ ID NO: 963817 - RNA, 22 nt, Human
agccccaguccgcugcgggcgg

SEQ ID NO: 963818 - RNA, 22 nt, Human
gcugcaggcgccugcggucucu

SEQ ID NO: 963819 - RNA, 22 nt, Human
caggguggcacucagcgcaucu

SEQ ID NO: 963820 - RNA, 22 nt, Human
gccuggagcucuccacuugggg

SEQ ID NO: 963821 - RNA, 22 nt, Human
ccacugucuuuuccaggcugaa

SEQ ID NO: 963822 - RNA, 22 nt, Human
ggaagaggcugagccagguccc

SEQ ID NO: 963823 - RNA, 22 nt, Human
gccaggugggagacagacagca

SEQ ID NO: 963824 - RNA, 22 nt, Human
uggagcaggugccaggugugug

SEQ ID NO: 963825 - RNA, 22 nt, Human
cugcccugagggccuguguguu

SEQ ID NO: 963826 - RNA, 21 nt, Human
auggagccuaagaguggaggu

SEQ ID NO: 963827 - RNA, 20 nt, Human
auucacaaagccaguguugc

SEQ ID NO: 963828 - RNA, 22 nt, Human
gccagcucagugccaggccccu

SEQ ID NO: 963829 - RNA, 22 nt, Human
cuuuauguuggggugucuuagu

SEQ ID NO: 963830 - RNA, 22 nt, Human
cuucucagucaccugugagucu

SEQ ID NO: 963831 - RNA, 22 nt, Human
acagacauuuucuguauugccu

SEQ ID NO: 963832 - RNA, 22 nt, Human
ucucuggggauggaccugggag

SEQ ID NO: 963833 - RNA, 22 nt, Human
caggugggcuugggagaacacu

SEQ ID NO: 963834 - RNA, 22 nt, Human
gagggcuccucacauucucuau

SEQ ID NO: 963835 - RNA, 22 nt, Human
gggcagcagaggaucccuuaau

SEQ ID NO: 963836 - RNA, 22 nt, Human
cuauguuuaucuguauuucugu

SEQ ID NO: 963837 - RNA, 16 nt, Human
agaggccuugaggaag

SEQ ID NO: 963838 - RNA, 22 nt, Human
ccugagcuggaagagcuugugc

SEQ ID NO: 963839 - RNA, 22 nt, Human
cuucccagaccuuagagugcag

SEQ ID NO: 963840 - RNA, 22 nt, Human
cguggccagccauuuccuggaa

SEQ ID NO: 963841 - RNA, 19 nt, Human
gcagcugugggaagagcca

SEQ ID NO: 963842 - RNA, 22 nt, Human
aagcuccccgaaacccaccucu

SEQ ID NO: 963843 - RNA, 22 nt, Human
ccagcuuguuugaagcucguca

SEQ ID NO: 963844 - RNA, 19 nt, Human
ccugucugucuucagcuag

SEQ ID NO: 963845 - RNA, 22 nt, Human
accuuauuaaaaugaugaugua

SEQ ID NO: 963846 - RNA, 22 nt, Human
gagcuuaggccagggacaggga

SEQ ID NO: 963847 - RNA, 22 nt, Human
uaggcacugguuguggauaguu

SEQ ID NO: 963848 - RNA, 22 nt, Human
cagugguuauacuuacuguuuc

SEQ ID NO: 963849 - RNA, 15 nt, Human
cagucccagggaccc

SEQ ID NO: 963850 - RNA, 22 nt, Human
aagagcauauuaauaguggaga

SEQ ID NO: 963851 - RNA, 22 nt, Human
aucaaaaugcuccagugauggu

SEQ ID NO: 963852 - RNA, 22 nt, Human
aaaagguagauucuccuucuau

SEQ ID NO: 963853 - RNA, 22 nt, Human
accaggggugucaacagcauuu

SEQ ID NO: 963854 - RNA, 22 nt, Human
cugugccuuuguagcugugccu

SEQ ID NO: 963855 - RNA, 22 nt, Human
cagaguguaucuguguaagcau

SEQ ID NO: 963856 - RNA, 22 nt, Human
ugcauaguucuccuuccuccuc

SEQ ID NO: 963857 - RNA, 22 nt, Human
ucccugggguaacauuagaggg

SEQ ID NO: 963858 - RNA, 22 nt, Human
aacccuggggcagcugcuaggg

SEQ ID NO: 963859 - RNA, 22 nt, Human
gucaggaugagggaugaggagu

SEQ ID NO: 963860 - RNA, 22 nt, Human
cacuggcaugugaggcgguggc

SEQ ID NO: 963861 - RNA, 22 nt, Human
accuuuuuguucuguucucagc

SEQ ID NO: 963862 - RNA, 22 nt, Human
auugucuucuggucuuaucuuu

SEQ ID NO: 963863 - RNA, 22 nt, Human
uugcagggcaggaccauggaca

SEQ ID NO: 963864 - RNA, 22 nt, Human
uggcagcuggagggcaauggcc

SEQ ID NO: 963865 - RNA, 22 nt, Human
uuucagaaagcugaacauauga

SEQ ID NO: 963866 - RNA, 22 nt, Human
agucuuauguuugugaagaacu

SEQ ID NO: 963867 - RNA, 22 nt, Human
ugaggggaacugaugcccauug

SEQ ID NO: 963868 - RNA, 17 nt, Human
aguggcaggcagauggg

SEQ ID NO: 963869 - RNA, 21 nt, Human
ccugcagcaccagaaggagau

SEQ ID NO: 963870 - RNA, 22 nt, Human
ugagccaggcuccaugccaccu

SEQ ID NO: 963871 - RNA, 22 nt, Human
auguucuuccaaaucuguaaca

SEQ ID NO: 963872 - RNA, 22 nt, Human
uuugugaacaaacaugaagaug

SEQ ID NO: 963873 - RNA, 22 nt, Human
ggucacugcucuaaacaaaagu

SEQ ID NO: 963874 - RNA, 22 nt, Human
acacauaagaaacuacaaagag

SEQ ID NO: 963875 - RNA, 22 nt, Human
ugaggcaggagaauggcgggaa

SEQ ID NO: 963876 - RNA, 22 nt, Human
auguuucaccagcaaauuaccu

SEQ ID NO: 963877 - RNA, 22 nt, Human
auuauuauauagggaaaguccc

SEQ ID NO: 963878 - RNA, 22 nt, Human
ucaaugauagacaagaucuaag

SEQ ID NO: 963879 - RNA, 22 nt, Human
gggcuucuagaccagcagugag

SEQ ID NO: 963880 - RNA, 22 nt, Human
cuucaggauuuaggaagaugaa

SEQ ID NO: 963881 - RNA, 22 nt, Human
cugcuggagguuggagcaugca

SEQ ID NO: 963882 - RNA, 22 nt, Human
gcccucucggcauagcaggggc

SEQ ID NO: 963883 - RNA, 22 nt, Human
uucucuaagcuggcugaggucu

SEQ ID NO: 963884 - RNA, 22 nt, Human
cuggcugaguuacuccacugag

SEQ ID NO: 963885 - RNA, 22 nt, Human
cagcaggguagguuguaucagu

SEQ ID NO: 963886 - RNA, 22 nt, Human
cacagccuccuucagagagcau

SEQ ID NO: 963887 - RNA, 22 nt, Human
gugugcagaagacacaagacau

SEQ ID NO: 963888 - RNA, 22 nt, Human
cauugcacaucugagaagagau

SEQ ID NO: 963889 - RNA, 22 nt, Human
ccuguuuaucuaucuagagaug

SEQ ID NO: 963890 - RNA, 22 nt, Human
caaauucagaaaauugguagag

SEQ ID NO: 963891 - RNA, 22 nt, Human
uaaggcagaaauaugagcaggg

SEQ ID NO: 963892 - RNA, 22 nt, Human
caaagguaguauauauauuguu

SEQ ID NO: 963893 - RNA, 22 nt, Human
aaauguguuucuuugugaaugg

SEQ ID NO: 963894 - RNA, 22 nt, Human
ccucccacauccuagcucugcu

SEQ ID NO: 963895 - RNA, 22 nt, Human
gccucacugcagccccaggaag

SEQ ID NO: 963896 - RNA, 22 nt, Human
gccacugcacuccagcccaggc

SEQ ID NO: 963897 - RNA, 22 nt, Human
gugcuuuuaaaggcaauuagua

SEQ ID NO: 963898 - RNA, 22 nt, Human
gagguagcaugcuggaagggac

SEQ ID NO: 963899 - RNA, 22 nt, Human
aagucuguagaaaaacaguuua

SEQ ID NO: 963900 - RNA, 22 nt, Human
cagccagguaugggcgugcggg

SEQ ID NO: 963901 - RNA, 22 nt, Human
ccuucuuaaacaucauuuuggc

SEQ ID NO: 963902 - RNA, 22 nt, Human
ugcuguuauacuuagcugguua

SEQ ID NO: 963903 - RNA, 22 nt, Human
gcugccugucccaggaugagga

SEQ ID NO: 963904 - RNA, 22 nt, Human
auagaaaacagauguccuuaaa

SEQ ID NO: 963905 - RNA, 20 nt, Human
uauuuacaacuuagagccuc

SEQ ID NO: 963906 - RNA, 22 nt, Human
aggcugucugaccccagagccc

SEQ ID NO: 963907 - RNA, 22 nt, Human
cagcacugcugcuguacacaca

SEQ ID NO: 963908 - RNA, 22 nt, Human
agcucagcuuccucuccaugcu

SEQ ID NO: 963909 - RNA, 19 nt, Human
ugucuuaauuaacucagag

SEQ ID NO: 963910 - RNA, 22 nt, Human
acacagggcggaaagcaugaga

SEQ ID NO: 963911 - RNA, 22 nt, Human
aggcugcugccuuggagagugu

SEQ ID NO: 963912 - RNA, 22 nt, Human
uugaacagcuguuacauuguua

SEQ ID NO: 963913 - RNA, 22 nt, Human
gccaggagagcuccuucagguu

SEQ ID NO: 963914 - RNA, 19 nt, Human
cugaggugcaguaagaggc

SEQ ID NO: 963915 - RNA, 22 nt, Human
ggcugccuccugcugggcugga

SEQ ID NO: 963916 - RNA, 22 nt, Human
aaacaccaagagcuagcuauua

SEQ ID NO: 963917 - RNA, 22 nt, Human
ggagaguggauuccagcuguau

SEQ ID NO: 963918 - RNA, 20 nt, Human
aguagcagugugacauugac

SEQ ID NO: 963919 - RNA, 22 nt, Human
ucaggggagguugaaucgucuc

SEQ ID NO: 963920 - RNA, 18 nt, Human
cagauccaggcagcuauu

SEQ ID NO: 963921 - RNA, 22 nt, Human
gggcacuguacacugugcaugg

SEQ ID NO: 963922 - RNA, 22 nt, Human
aggguggcaguuacuggagcaa

SEQ ID NO: 963923 - RNA, 22 nt, Human
caguggaggccuugggaccuuu

SEQ ID NO: 963924 - RNA, 22 nt, Human
acuguucaucucuuagaaagua

SEQ ID NO: 963925 - RNA, 22 nt, Human
ugccucagcugaggccgcucca

SEQ ID NO: 963926 - RNA, 22 nt, Human
gagcagcucugggugacccagu

SEQ ID NO: 963927 - RNA, 22 nt, Human
uuugacauuggcuuauucuguu

SEQ ID NO: 963928 - RNA, 22 nt, Human
aaguucaaggaagccuccaguu

SEQ ID NO: 963929 - RNA, 17 nt, Human
agcagaagucagaggga

SEQ ID NO: 963930 - RNA, 22 nt, Human
gagcagcugcagugcagacccu

SEQ ID NO: 963931 - RNA, 22 nt, Human
uggcagcuuuuuguuucaggcu

SEQ ID NO: 963932 - RNA, 22 nt, Human
acauuucugcauguaggguaau

SEQ ID NO: 963933 - RNA, 22 nt, Human
gcaguggcuaagcucgcaugca

SEQ ID NO: 963934 - RNA, 21 nt, Human
gccagggaagagaguuggcug

SEQ ID NO: 963935 - RNA, 22 nt, Human
ucaugacaacuauauuauucca

SEQ ID NO: 963936 - RNA, 22 nt, Human
ucuuugcaugugcuucuuggcc

SEQ ID NO: 963937 - RNA, 22 nt, Human
gcuggggagggcgucaaggcca

SEQ ID NO: 963938 - RNA, 22 nt, Human
ucaaauaccagcaauuucaugu

SEQ ID NO: 963939 - RNA, 22 nt, Human
gagaggagucccuaucacaguu

SEQ ID NO: 963940 - RNA, 20 nt, Human
acccagcucugugcccuggg

SEQ ID NO: 963941 - RNA, 22 nt, Human
uuccagcaggcagacaggagau

SEQ ID NO: 963942 - RNA, 22 nt, Human
aagagcuggaagugaagauaac

SEQ ID NO: 963943 - RNA, 22 nt, Human
ucagggcauguauguuucuuua

SEQ ID NO: 963944 - RNA, 22 nt, Human
cccauugugguuguugaggaua

SEQ ID NO: 963945 - RNA, 22 nt, Human
agcaguggccuggggcucugug

SEQ ID NO: 963946 - RNA, 21 nt, Human
agcugggccucagccugcagu

SEQ ID NO: 963947 - RNA, 22 nt, Human
auguuacacauaggcauaaaug

SEQ ID NO: 963948 - RNA, 22 nt, Human
uauccaaacauauagucucucu

SEQ ID NO: 963949 - RNA, 18 nt, Human
agggagagaccgcggguc

SEQ ID NO: 963950 - RNA, 19 nt, Human
ugaggggcucacagucuca

SEQ ID NO: 963951 - RNA, 22 nt, Human
gauuucuucauuuguggugaau

SEQ ID NO: 963952 - RNA, 17 nt, Human
acuccuggucugaaggg

SEQ ID NO: 963953 - RNA, 22 nt, Human
aauucuauaggcaagcuauuuu

SEQ ID NO: 963954 - RNA, 22 nt, Human
agacagcauggagcugauaaca

SEQ ID NO: 963955 - RNA, 22 nt, Human
cuuugcaaacugucacacuuuc

SEQ ID NO: 963956 - RNA, 22 nt, Human
gcauuuauuucuuuacugcauc

SEQ ID NO: 963957 - RNA, 22 nt, Human
uauauuaaacccucucuguagg

SEQ ID NO: 963958 - RNA, 22 nt, Human
ugugaaauucuugaaaugcaca

SEQ ID NO: 963959 - RNA, 22 nt, Human
uggaaagacauucagccgcugg

SEQ ID NO: 963960 - RNA, 22 nt, Human
uuugaaaguguuuacuugggaa

SEQ ID NO: 963961 - RNA, 20 nt, Human
uguucacaguaguugcugcu

SEQ ID NO: 963962 - RNA, 22 nt, Human
aaaugaacaguugcauucucug

SEQ ID NO: 963963 - RNA, 22 nt, Human
acauuucuuccuaauuaucccu

SEQ ID NO: 963964 - RNA, 22 nt, Human
augucuaaaagauaaaguuuaa

SEQ ID NO: 963965 - RNA, 22 nt, Human
uggcccugcagaacuagccugg

SEQ ID NO: 963966 - RNA, 22 nt, Human
guaaauaacugguaauuggggu

SEQ ID NO: 963967 - RNA, 22 nt, Human
ggcugccaggagaagcucagug

SEQ ID NO: 963968 - RNA, 21 nt, Human
gcugcaucaaucuacccaggg

SEQ ID NO: 963969 - RNA, 22 nt, Human
uggaagagacacuuacauucag

SEQ ID NO: 963970 - RNA, 22 nt, Human
acaccuuugccccaagucauag

SEQ ID NO: 963971 - RNA, 19 nt, Human
agcagccaucgaccaugga

SEQ ID NO: 963972 - RNA, 22 nt, Human
cccagccucuguuugcuccucu

SEQ ID NO: 963973 - RNA, 22 nt, Human
cccccaaggccaggcugagacc

SEQ ID NO: 963974 - RNA, 22 nt, Human
aggcucagaggugagcaucugc

SEQ ID NO: 963975 - RNA, 22 nt, Human
ggagcagagcucuucaucugca

SEQ ID NO: 963976 - RNA, 22 nt, Human
ggucauuguucuuuucugugau

SEQ ID NO: 963977 - RNA, 18 nt, Human
uggcagcaggaagccauu

SEQ ID NO: 963978 - RNA, 22 nt, Human
ggggcagagcauagcuccaauu

SEQ ID NO: 963979 - RNA, 22 nt, Human
aggugcagaaaaaaguccuuua

SEQ ID NO: 963980 - RNA, 22 nt, Human
guugaaaguggagaaccugguu

SEQ ID NO: 963981 - RNA, 22 nt, Human
ugcagcucugaacagucaugaa

SEQ ID NO: 963982 - RNA, 22 nt, Human
ggaggagguggguuaaguugua

SEQ ID NO: 963983 - RNA, 22 nt, Human
agcuuuauuugucauucacggc

SEQ ID NO: 963984 - RNA, 22 nt, Human
caguggugaagagcaggggcuc

SEQ ID NO: 963985 - RNA, 22 nt, Human
ugcccacauucaaaaggugaug

SEQ ID NO: 963986 - RNA, 22 nt, Human
acacauuauagagaguauaaua

SEQ ID NO: 963987 - RNA, 22 nt, Human
cugggaggugaacagaaaaacu

SEQ ID NO: 963988 - RNA, 22 nt, Human
aggagcagaacuguuguggagg

SEQ ID NO: 963989 - RNA, 22 nt, Human
accaggaguuuugaccaggggc

SEQ ID NO: 963990 - RNA, 22 nt, Human
cucaguuucuucauauuguagg

SEQ ID NO: 963991 - RNA, 22 nt, Human
acaagagauuaucuacagauga

SEQ ID NO: 963992 - RNA, 17 nt, Human
ugaggccugcaucagug

SEQ ID NO: 963993 - RNA, 22 nt, Human
cuacauggagaagaaaauucuu

SEQ ID NO: 963994 - RNA, 20 nt, Human
uugcagcagugaggugaagg

SEQ ID NO: 963995 - RNA, 22 nt, Human
gccagggcaggggagcaucugc

SEQ ID NO: 963996 - RNA, 22 nt, Human
ugcagggcuuccucuuggaguu

SEQ ID NO: 963997 - RNA, 22 nt, Human
agucaguggcuccgagccuggu

SEQ ID NO: 963998 - RNA, 22 nt, Human
aguauguauuuuauacuuacag

SEQ ID NO: 963999 - RNA, 18 nt, Human
ugcucuggucucacuugg

SEQ ID NO: 964000 - RNA, 22 nt, Human
gaggggcugcccuggugucagg

SEQ ID NO: 964001 - RNA, 22 nt, Human
ucccacucccaggcaggccucu

SEQ ID NO: 964002 - RNA, 22 nt, Human
auagacuugguuaguaaauuug

SEQ ID NO: 964003 - RNA, 22 nt, Human
guauccuuugcggaaauuucua

SEQ ID NO: 964004 - RNA, 22 nt, Human
agcugagccagcagcaacagga

SEQ ID NO: 964005 - RNA, 22 nt, Human
uguuuaagcugaugagguaucg

SEQ ID NO: 964006 - RNA, 22 nt, Human
accugccuaucagcugccugcu

SEQ ID NO: 964007 - RNA, 22 nt, Human
auguguauacuugugcuuacuc

SEQ ID NO: 964008 - RNA, 22 nt, Human
ucaccacugaacagaccuuugg

SEQ ID NO: 964009 - RNA, 22 nt, Human
ugaugggaggugcugcaggacc

SEQ ID NO: 964010 - RNA, 19 nt, Human
gcauuucucuuuacagcca

SEQ ID NO: 964011 - RNA, 22 nt, Human
aaugauuuccccuacacagaag

SEQ ID NO: 964012 - RNA, 22 nt, Human
uggcccucagucuugcuccugc

SEQ ID NO: 964013 - RNA, 22 nt, Human
gaugcacuugccccuccucaga

SEQ ID NO: 964014 - RNA, 22 nt, Human
aaaugucuuugaguauuucugc

SEQ ID NO: 964015 - RNA, 23 nt, Human
guggagccacaucacaggcuccu

SEQ ID NO: 964016 - RNA, 22 nt, Human
ggugaaggucuacugugugcca

SEQ ID NO: 964017 - RNA, 22 nt, Human
caggcagagugagguggucuaa

SEQ ID NO: 964018 - RNA, 22 nt, Human
gaaggagggugcggaucugagc

SEQ ID NO: 964019 - RNA, 22 nt, Human
ucucaagaucucaagauggccc

SEQ ID NO: 964020 - RNA, 22 nt, Human
aacagacaacuccuguggcuca

SEQ ID NO: 964021 - RNA, 22 nt, Human
aggaguguggccagggcucugg

SEQ ID NO: 964022 - RNA, 22 nt, Human
augaagucugcacaugcaugug

SEQ ID NO: 964023 - RNA, 22 nt, Human
aaacaacucggcaacugcuuuu

SEQ ID NO: 964024 - RNA, 22 nt, Human
gugacagucaaagacaugacuu

SEQ ID NO: 964025 - RNA, 22 nt, Human
agccuggcacugaggcagggcg

SEQ ID NO: 964026 - RNA, 22 nt, Human
agccacagucugaugccugaga

SEQ ID NO: 964027 - RNA, 22 nt, Human
uauuccuauggccacugcuacu

SEQ ID NO: 964028 - RNA, 22 nt, Human
gcugucacacauggccccagcu

SEQ ID NO: 964029 - RNA, 22 nt, Human
auguuucagauacagaucaaau

SEQ ID NO: 964030 - RNA, 22 nt, Human
cucaggaugucggugacuauug

SEQ ID NO: 964031 - RNA, 22 nt, Human
agcuuccuuggcgcugaggccu

SEQ ID NO: 964032 - RNA, 22 nt, Human
gcuccaggagagggaagcagau

SEQ ID NO: 964033 - RNA, 22 nt, Human
aaaagagguuaaccaggugugu

SEQ ID NO: 964034 - RNA, 22 nt, Human
aggcaggugggucacuugaguc

SEQ ID NO: 964035 - RNA, 22 nt, Human
gguccccagcaguggcugcuuc

SEQ ID NO: 964036 - RNA, 21 nt, Human
gacaggacuagaccagagcuc

SEQ ID NO: 964037 - RNA, 22 nt, Human
uggccuguggcuuaaggucugu

SEQ ID NO: 964038 - RNA, 22 nt, Human
guuauuagaagugaaggauugu

SEQ ID NO: 964039 - RNA, 22 nt, Human
ggugaagguggaacgcagagca

SEQ ID NO: 964040 - RNA, 23 nt, Human
acagaaaguucugcuggacagag

SEQ ID NO: 964041 - RNA, 22 nt, Human
ggcaaaaaguucccaucagugu

SEQ ID NO: 964042 - RNA, 21 nt, Human
aaaguucaugcuuuaauauuc

SEQ ID NO: 964043 - RNA, 22 nt, Human
ggaggccaaggcgggcggauca

SEQ ID NO: 964044 - RNA, 22 nt, Human
gagagcacaugaacauggagga

SEQ ID NO: 964045 - RNA, 22 nt, Human
cauggcauugcauaacggggcu

SEQ ID NO: 964046 - RNA, 23 nt, Human
cagcccuuccugcauguuuuugu

SEQ ID NO: 964047 - RNA, 22 nt, Human
uuuuccagauuggacuuagucc

SEQ ID NO: 964048 - RNA, 22 nt, Human
cccaccccuggacaggugagug

SEQ ID NO: 964049 - RNA, 22 nt, Human
guugaaaugagggauuaaucag

SEQ ID NO: 964050 - RNA, 22 nt, Human
ucaucacauaugucaugauuug

SEQ ID NO: 964051 - RNA, 21 nt, Human
ucaggcaggcgcagagggaag

SEQ ID NO: 964052 - RNA, 22 nt, Human
aagacccacaaggcugaauguu

SEQ ID NO: 964053 - RNA, 22 nt, Human
agcccagaggcugggcgugcau

SEQ ID NO: 964054 - RNA, 22 nt, Human
cauucauuuaugaaauaucuau

SEQ ID NO: 964055 - RNA, 22 nt, Human
gggcccacuggcugucugaccc

SEQ ID NO: 964056 - RNA, 19 nt, Human
uguggccaugguucagcug

SEQ ID NO: 964057 - RNA, 22 nt, Human
auugucugaauccaaagcucug

SEQ ID NO: 964058 - RNA, 22 nt, Human
cucuggaggccuaaggaagugg

SEQ ID NO: 964059 - RNA, 22 nt, Human
uuccuuaguguuagauucugug

SEQ ID NO: 964060 - RNA, 22 nt, Human
auucagagcacuggguagaauu

SEQ ID NO: 964061 - RNA, 22 nt, Human
uauuuagaaugcguguacgugu

SEQ ID NO: 964062 - RNA, 23 nt, Human
ugcaggggaggcuuaaagcaggu

SEQ ID NO: 964063 - RNA, 22 nt, Human
aagagaggacauggugaaccug

SEQ ID NO: 964064 - RNA, 22 nt, Human
cugggcaauaugcugggccugg

SEQ ID NO: 964065 - RNA, 22 nt, Human
ugcugcuccugccuggcuccca

SEQ ID NO: 964066 - RNA, 22 nt, Human
acaggccugagauuuugcauuu

SEQ ID NO: 964067 - RNA, 22 nt, Human
aggaagcugccugggaugggaa

SEQ ID NO: 964068 - RNA, 23 nt, Human
aucagucuugguagcugugccca

SEQ ID NO: 964069 - RNA, 22 nt, Human
auacauuagcucauaugauuaa

SEQ ID NO: 964070 - RNA, 22 nt, Human
uagcccagcaugagcagagcug

SEQ ID NO: 964071 - RNA, 22 nt, Human
ugcuggggguucagaugaguaa

SEQ ID NO: 964072 - RNA, 22 nt, Human
ggcacuguguacacacagagac

SEQ ID NO: 964073 - RNA, 20 nt, Human
caaguguagaaacuaauaag

SEQ ID NO: 964074 - RNA, 22 nt, Human
cuggcagcuucaggacacucgg

SEQ ID NO: 964075 - RNA, 22 nt, Human
ugucuuuaugcacacugacuug

SEQ ID NO: 964076 - RNA, 22 nt, Human
ucccuggaacagagagacaacg

SEQ ID NO: 964077 - RNA, 22 nt, Human
acugggaguucuccaugucccu

SEQ ID NO: 964078 - RNA, 22 nt, Human
aagauuucucuccuggaaagca

SEQ ID NO: 964079 - RNA, 22 nt, Human
augcacgccccacacuggugug

SEQ ID NO: 964080 - RNA, 22 nt, Human
uuguuucauggggauguuuauu

SEQ ID NO: 964081 - RNA, 22 nt, Human
aaaugguguuucuaaugcuaga

SEQ ID NO: 964082 - RNA, 22 nt, Human
agccuucacugggaccuuggau

SEQ ID NO: 964083 - RNA, 22 nt, Human
uacaaaaguaauuacgguuuuu

SEQ ID NO: 964084 - RNA, 22 nt, Human
guggcuugaccaucccugcuac

SEQ ID NO: 964085 - RNA, 21 nt, Human
ucccucagaagcucuugguca

SEQ ID NO: 964086 - RNA, 22 nt, Human
uuagccauugucagcacauggc

SEQ ID NO: 964087 - RNA, 23 nt, Human
ugggaguguugggaucucugcuc

SEQ ID NO: 964088 - RNA, 22 nt, Human
caggcuugcugcuagagcacuu

SEQ ID NO: 964089 - RNA, 22 nt, Human
gccagcaguauguccuggcagu

SEQ ID NO: 964090 - RNA, 22 nt, Human
ggcagggguccugguguugacu

SEQ ID NO: 964091 - RNA, 22 nt, Human
augugaggaagaaagagguaag

SEQ ID NO: 964092 - RNA, 22 nt, Human
aaggcacugagccagccgucuc

SEQ ID NO: 964093 - RNA, 22 nt, Human
cuggcucagacagcugugcagu

SEQ ID NO: 964094 - RNA, 17 nt, Human
uuccacaauaguuuguc

SEQ ID NO: 964095 - RNA, 22 nt, Human
ucagcaggcgguuccuuguggg

SEQ ID NO: 964096 - RNA, 22 nt, Human
augcuguggggagugaggguag

SEQ ID NO: 964097 - RNA, 22 nt, Human
uguagcauguaaauugguuauu

SEQ ID NO: 964098 - RNA, 22 nt, Human
caauaagccagguguuuguguu

SEQ ID NO: 964099 - RNA, 22 nt, Human
auucagaaaguugucauauuug

SEQ ID NO: 964100 - RNA, 22 nt, Human
uggcagcuauggucuaagggcc

SEQ ID NO: 964101 - RNA, 22 nt, Human
gccuaggagacaagcgugaaag

SEQ ID NO: 964102 - RNA, 22 nt, Human
auagucuuagaucagauaaagu

SEQ ID NO: 964103 - RNA, 22 nt, Human
gcacaauuauuuaugcaguaug

SEQ ID NO: 964104 - RNA, 22 nt, Human
ugucucugauaaguaguucagu

SEQ ID NO: 964105 - RNA, 22 nt, Human
caggauggucuucauuuggcuc

SEQ ID NO: 964106 - RNA, 22 nt, Human
acugcuuuuagaaaucuauaga

SEQ ID NO: 964107 - RNA, 23 nt, Human
agcacacuuguacaaugcccuag

SEQ ID NO: 964108 - RNA, 22 nt, Human
gugcagggcuggcaccggaggc

SEQ ID NO: 964109 - RNA, 22 nt, Human
ucccugggaacaaaggaugaga

SEQ ID NO: 964110 - RNA, 22 nt, Human
gcucccacgcaauucuuuucag

SEQ ID NO: 964111 - RNA, 21 nt, Human
aucuuuauuacgcagagaaga

SEQ ID NO: 964112 - RNA, 22 nt, Human
cagcuggccccacaguagaggc

SEQ ID NO: 964113 - RNA, 22 nt, Human
uuucaacaggaugauaauaggc

SEQ ID NO: 964114 - RNA, 22 nt, Human
cucucuggaagggggagcugau

SEQ ID NO: 964115 - RNA, 22 nt, Human
agugggaggcggcugacgggcg

SEQ ID NO: 964116 - RNA, 22 nt, Human
cccuggcaugcaugucccuggc

SEQ ID NO: 964117 - RNA, 22 nt, Human
agagugauucuaguuagggaau

SEQ ID NO: 964118 - RNA, 22 nt, Human
uuagagucaaaauggcauguua

SEQ ID NO: 964119 - RNA, 22 nt, Human
ccagagccucgcccggagccuc

SEQ ID NO: 964120 - RNA, 22 nt, Human
uggccucuggcugaggacuaac

SEQ ID NO: 964121 - RNA, 22 nt, Human
uuggcugagagaggaaaagggc

SEQ ID NO: 964122 - RNA, 23 nt, Human
ugcuucucugcuugacaguucug

SEQ ID NO: 964123 - RNA, 20 nt, Human
uguuccaugacuauuuggau

SEQ ID NO: 964124 - RNA, 22 nt, Human
ugcuugggaauguggagucaga

SEQ ID NO: 964125 - RNA, 22 nt, Human
gaggggaaagugugaggcugcg

SEQ ID NO: 964126 - RNA, 18 nt, Human
ucaggagacacagacgca

SEQ ID NO: 964127 - RNA, 22 nt, Human
gcucccaccuccagccugaguu

SEQ ID NO: 964128 - RNA, 22 nt, Human
ggggagugacgcagggccauag

SEQ ID NO: 964129 - RNA, 18 nt, Human
aacuucaacuacaaugga

SEQ ID NO: 964130 - RNA, 21 nt, Human
uuccuggcggcagaaacguga

SEQ ID NO: 964131 - RNA, 22 nt, Human
gcuccucuauuccccacauuuu

SEQ ID NO: 964132 - RNA, 22 nt, Human
ugcaugugcccacucuggcuua

SEQ ID NO: 964133 - RNA, 22 nt, Human
ggcaaaaacagcaaugacuuuu

SEQ ID NO: 964134 - RNA, 22 nt, Human
uaacccaauaauugguggccuu

SEQ ID NO: 964135 - RNA, 23 nt, Human
uccagggauuaaugaagucaguc

SEQ ID NO: 964136 - RNA, 22 nt, Human
caagagcuagaaauugguuaga

SEQ ID NO: 964137 - RNA, 22 nt, Human
caaggccauaagagauacaaaa

SEQ ID NO: 964138 - RNA, 22 nt, Human
ugcugccuucuaggcgugcccu

SEQ ID NO: 964139 - RNA, 22 nt, Human
ugcuugaaagggguuucccagu

SEQ ID NO: 964140 - RNA, 22 nt, Human
aaucauucuuauuucacagcaa

SEQ ID NO: 964141 - RNA, 17 nt, Human
uucucugagcuguauug

SEQ ID NO: 964142 - RNA, 22 nt, Human
aaaggccaugguuggaguguuu

SEQ ID NO: 964143 - RNA, 22 nt, Human
uucauucuuugaaucugaggua

SEQ ID NO: 964144 - RNA, 22 nt, Human
ccacagggcucuaggcgcuucc

SEQ ID NO: 964145 - RNA, 22 nt, Human
aagccaggggcugcuuaggaga

SEQ ID NO: 964146 - RNA, 22 nt, Human
agaggccagcagugccuaucug

SEQ ID NO: 964147 - RNA, 22 nt, Human
ccccaggagcuuguuuuagaga

SEQ ID NO: 964148 - RNA, 22 nt, Human
ucugucacugagcucaggauuc

SEQ ID NO: 964149 - RNA, 22 nt, Human
aggcuucuacguggucccaggg

SEQ ID NO: 964150 - RNA, 22 nt, Human
auucuuggcaaggagauuuaaa

SEQ ID NO: 964151 - RNA, 22 nt, Human
auuuauuaagcaucugcuaugu

SEQ ID NO: 964152 - RNA, 23 nt, Human
gggauauggaccuuggaggaguc

SEQ ID NO: 964153 - RNA, 23 nt, Human
agcuggguggccugcgugaagcu

SEQ ID NO: 964154 - RNA, 22 nt, Human
ccagcucucagcgggagacuca

SEQ ID NO: 964155 - RNA, 22 nt, Human
cugggagucuggccucuggucc

SEQ ID NO: 964156 - RNA, 22 nt, Human
cuggagccacuuuuuauccuuu

SEQ ID NO: 964157 - RNA, 22 nt, Human
uauguagaagcugcucaaagaa

SEQ ID NO: 964158 - RNA, 22 nt, Human
uggggcuggcacagucucuauu

SEQ ID NO: 964159 - RNA, 22 nt, Human
uuuggaaaguugucacuuuaga

SEQ ID NO: 964160 - RNA, 22 nt, Human
cuagagaggcagauguccugug

SEQ ID NO: 964161 - RNA, 22 nt, Human
gcaguggggaaugcuggggaga

SEQ ID NO: 964162 - RNA, 22 nt, Human
uggaaagcgaggaguuggcauu

SEQ ID NO: 964163 - RNA, 22 nt, Human
caccaggcugaaccagagggga

SEQ ID NO: 964164 - RNA, 22 nt, Human
cagggucuuauaaggccaauuu

SEQ ID NO: 964165 - RNA, 22 nt, Human
uucaugaauggaaucaaugcuc

SEQ ID NO: 964166 - RNA, 22 nt, Human
gacagaggcuggagcaccuccu

SEQ ID NO: 964167 - RNA, 22 nt, Human
ccuccugguugcaaugaaaugg

SEQ ID NO: 964168 - RNA, 22 nt, Human
uuugcauuuugauaagaucacu

SEQ ID NO: 964169 - RNA, 22 nt, Human
uccagccaugacucggacagug

SEQ ID NO: 964170 - RNA, 23 nt, Human
cagaccuggcagucauccucaac

SEQ ID NO: 964171 - RNA, 22 nt, Human
guugaaauuugugauaauuuag

SEQ ID NO: 964172 - RNA, 22 nt, Human
uauaugcuaauggugccauucc

SEQ ID NO: 964173 - RNA, 22 nt, Human
ucugcagggaugugagggguga

SEQ ID NO: 964174 - RNA, 22 nt, Human
gagguggccucaagcagucuuc

SEQ ID NO: 964175 - RNA, 22 nt, Human
agcucccaauugacuugaacua

SEQ ID NO: 964176 - RNA, 22 nt, Human
acauuugucuucuuucagauua

SEQ ID NO: 964177 - RNA, 22 nt, Human
gccuuggccuuccuaggccuga

SEQ ID NO: 964178 - RNA, 22 nt, Human
uuggccaaggucacugggugag

SEQ ID NO: 964179 - RNA, 22 nt, Human
ucuucaucucagauuaacagga

SEQ ID NO: 964180 - RNA, 22 nt, Human
uaauuucacugauaugaaguca

SEQ ID NO: 964181 - RNA, 22 nt, Human
gccuuugcaccaucagugcaau

SEQ ID NO: 964182 - RNA, 22 nt, Human
ucuuucagccacuuaccugucu

SEQ ID NO: 964183 - RNA, 22 nt, Human
cagcagagacgguaagcagaac

SEQ ID NO: 964184 - RNA, 22 nt, Human
ccuuucucuuugcugaucaugu

SEQ ID NO: 964185 - RNA, 22 nt, Human
cuggaaugccucccugucagag

SEQ ID NO: 964186 - RNA, 22 nt, Human
ccuggaaguuggagguugcagu

SEQ ID NO: 964187 - RNA, 22 nt, Human
gaaugcacucacccaucacuca

SEQ ID NO: 964188 - RNA, 19 nt, Human
cccaggaggcggagguugc

SEQ ID NO: 964189 - RNA, 22 nt, Human
ccucucuguguggccucuccau

SEQ ID NO: 964190 - RNA, 22 nt, Human
uuggccaaggaaguagcaacgg

SEQ ID NO: 964191 - RNA, 22 nt, Human
gcugggagaggcccugaaguga

SEQ ID NO: 964192 - RNA, 22 nt, Human
cugcuguuccaccucugaaugc

SEQ ID NO: 964193 - RNA, 22 nt, Human
uuguuuuggagaugagcuaaaa

SEQ ID NO: 964194 - RNA, 22 nt, Human
cuuaugcugagaaugaaagaau

SEQ ID NO: 964195 - RNA, 22 nt, Human
uggcucagagcagggacucugg

SEQ ID NO: 964196 - RNA, 18 nt, Human
ugaggcagucagugaugg

SEQ ID NO: 964197 - RNA, 22 nt, Human
agggaauguagcaagaugccaa

SEQ ID NO: 964198 - RNA, 22 nt, Human
cugugagcuggguggccaggac

SEQ ID NO: 964199 - RNA, 21 nt, Human
ugcuggccucaagggugacuu

SEQ ID NO: 964200 - RNA, 22 nt, Human
ggagcugaugacgucaccaugg

SEQ ID NO: 964201 - RNA, 22 nt, Human
uaagugcaauguuuuacuuaaa

SEQ ID NO: 964202 - RNA, 22 nt, Human
agccaacuaggagauuaaggua

SEQ ID NO: 964203 - RNA, 22 nt, Human
acccugccgugggcugcuugug

SEQ ID NO: 964204 - RNA, 22 nt, Human
ugggacagagugagcuuuggcc

SEQ ID NO: 964205 - RNA, 22 nt, Human
agccagcuggagaccacuguuu

SEQ ID NO: 964206 - RNA, 16 nt, Human
uggaaggggucuccgg

SEQ ID NO: 964207 - RNA, 22 nt, Human
gcccaggaguucaaggcugcag

SEQ ID NO: 964208 - RNA, 22 nt, Human
uagcugcugcagcacagggagg

SEQ ID NO: 964209 - RNA, 22 nt, Human
aaggaagggaaauagugauguc

SEQ ID NO: 964210 - RNA, 22 nt, Human
acugccaggauggcacuagagg

SEQ ID NO: 964211 - RNA, 22 nt, Human
accuuucauuaaagucuguagu

SEQ ID NO: 964212 - RNA, 22 nt, Human
ugcacuggggucccagcgcacg

SEQ ID NO: 964213 - RNA, 17 nt, Human
gcugagugcagggaguc

SEQ ID NO: 964214 - RNA, 22 nt, Human
auccaaaucaugucagaagaac

SEQ ID NO: 964215 - RNA, 22 nt, Human
auacuguuucucuucuacauga

SEQ ID NO: 964216 - RNA, 22 nt, Human
uugaacauuaacuucagucuau

SEQ ID NO: 964217 - RNA, 22 nt, Human
aaaugcacaaaguaaguguaau

SEQ ID NO: 964218 - RNA, 22 nt, Human
uccugccuguuuaccuguacuu

SEQ ID NO: 964219 - RNA, 23 nt, Human
ucugggcaccuuguugacaugau

SEQ ID NO: 964220 - RNA, 22 nt, Human
ggccuuggggaggauggugucc

SEQ ID NO: 964221 - RNA, 22 nt, Human
uucuuaacuggaaaaugucaga

SEQ ID NO: 964222 - RNA, 19 nt, Human
aaaagucuauucaauuaca

SEQ ID NO: 964223 - RNA, 22 nt, Human
cagaggccuggcuuggacaccu

SEQ ID NO: 964224 - RNA, 23 nt, Human
aggugccaacugagagcugagag

SEQ ID NO: 964225 - RNA, 22 nt, Human
ugcugucaguuggcaggaugag

SEQ ID NO: 964226 - RNA, 22 nt, Human
aggucauuccagccauuccccu

SEQ ID NO: 964227 - RNA, 23 nt, Human
gagguacagcaccagugaauagg

SEQ ID NO: 964228 - RNA, 21 nt, Human
ugcuggaaaaagugguucuag

SEQ ID NO: 964229 - RNA, 22 nt, Human
agcagggcagguaaggaucaga

SEQ ID NO: 964230 - RNA, 22 nt, Human
cugccuccucacguccacagug

SEQ ID NO: 964231 - RNA, 22 nt, Human
gaggccaaguuggagaccaggu

SEQ ID NO: 964232 - RNA, 22 nt, Human
auuauauugaguauaaccagag

SEQ ID NO: 964233 - RNA, 22 nt, Human
gcugugcacuaccuauacaucc

SEQ ID NO: 964234 - RNA, 22 nt, Human
uggcagcugcaggccuccugag

SEQ ID NO: 964235 - RNA, 22 nt, Human
ugcagccaucuuucuuggagga

SEQ ID NO: 964236 - RNA, 22 nt, Human
uggcacugaagcuggaaagccu

SEQ ID NO: 964237 - RNA, 22 nt, Human
ggcuguccuuggccaaggcacu

SEQ ID NO: 964238 - RNA, 22 nt, Human
cuauuucaaggcccagauauga

SEQ ID NO: 964239 - RNA, 22 nt, Human
augcuuuacaguuuuccaaaca

SEQ ID NO: 964240 - RNA, 22 nt, Human
accucugccaagaugugcuccc

SEQ ID NO: 964241 - RNA, 22 nt, Human
auauaaaguguuuagaaagcug

SEQ ID NO: 964242 - RNA, 22 nt, Human
cugugucucguuaaagcauugg

SEQ ID NO: 964243 - RNA, 22 nt, Human
gcccuggaaucucuccauggga

SEQ ID NO: 964244 - RNA, 22 nt, Human
cucacugugccuuuucccaaac

SEQ ID NO: 964245 - RNA, 22 nt, Human
uuugaacaagagcuucacauua

SEQ ID NO: 964246 - RNA, 22 nt, Human
agcuucuuggcucagcacuugg

SEQ ID NO: 964247 - RNA, 22 nt, Human
gcagagccccucaagccagccu

SEQ ID NO: 964248 - RNA, 22 nt, Human
cuggagcuccagggucuccucu

SEQ ID NO: 964249 - RNA, 22 nt, Human
cucagucugucuugucuguguu

SEQ ID NO: 964250 - RNA, 22 nt, Human
ugagcccagagaucugagcuau

SEQ ID NO: 964251 - RNA, 22 nt, Human
aucuuguuauaagagauaaugg

SEQ ID NO: 964252 - RNA, 23 nt, Human
uuucauaugguguggaugaagaa

SEQ ID NO: 964253 - RNA, 22 nt, Human
ccuggcagcaggugggcccgug

SEQ ID NO: 964254 - RNA, 22 nt, Human
uguccucaaggagcuucagucu

SEQ ID NO: 964255 - RNA, 22 nt, Human
uucuucuccuaaggagaguccu

SEQ ID NO: 964256 - RNA, 21 nt, Human
ccaccaggucuucugcucggg

SEQ ID NO: 964257 - RNA, 22 nt, Human
auucacaacugauccuugcuca

SEQ ID NO: 964258 - RNA, 22 nt, Human
gcuggagguuucaccugaguuu

SEQ ID NO: 964259 - RNA, 22 nt, Human
ucuucagagacucugagccccu

SEQ ID NO: 964260 - RNA, 22 nt, Human
ggcugcugguagggguaggaag

SEQ ID NO: 964261 - RNA, 22 nt, Human
gagugguaggcaguguuaggaa

SEQ ID NO: 964262 - RNA, 22 nt, Human
cauuccuuaacguggggagucu

SEQ ID NO: 964263 - RNA, 22 nt, Human
auggcccaggccuccuguggcu

SEQ ID NO: 964264 - RNA, 22 nt, Human
gcagauggcagcccaggcuggg

SEQ ID NO: 964265 - RNA, 22 nt, Human
ccuggcugguggcagcgacaag

SEQ ID NO: 964266 - RNA, 22 nt, Human
auacacaugcacacaugugugu

SEQ ID NO: 964267 - RNA, 18 nt, Human
ugacagaaccuggagccu

SEQ ID NO: 964268 - RNA, 22 nt, Human
ugcagcucauugcuggggucug

SEQ ID NO: 964269 - RNA, 22 nt, Human
aacagacagaaaaaugugaucu

SEQ ID NO: 964270 - RNA, 22 nt, Human
cagcugcuuuaguuuuccaucc

SEQ ID NO: 964271 - RNA, 22 nt, Human
aagcaccuggguuauaucuuag

SEQ ID NO: 964272 - RNA, 22 nt, Human
ccagaggucuccugcacgggau

SEQ ID NO: 964273 - RNA, 22 nt, Human
ugucagaacucuauugaugucc

SEQ ID NO: 964274 - RNA, 22 nt, Human
agggaggucuuugaggggcuua

SEQ ID NO: 964275 - RNA, 22 nt, Human
gccucugcaugcucagcaccca

SEQ ID NO: 964276 - RNA, 22 nt, Human
agugucauuccagggacccucg

SEQ ID NO: 964277 - RNA, 22 nt, Human
aggcucugacgucacacguggc

SEQ ID NO: 964278 - RNA, 22 nt, Human
uuaacaugucuugacuucaucu

SEQ ID NO: 964279 - RNA, 20 nt, Human
aggcccugccagggacggag

SEQ ID NO: 964280 - RNA, 22 nt, Human
gcagagcugucuaagucacuuc

SEQ ID NO: 964281 - RNA, 22 nt, Human
uugugucugggggagugacauc

SEQ ID NO: 964282 - RNA, 22 nt, Human
gucagugucuuaacagagauua

SEQ ID NO: 964283 - RNA, 22 nt, Human
uuugaagucaggcuuucuaccc

SEQ ID NO: 964284 - RNA, 22 nt, Human
aaggccugggaguacugggaca

SEQ ID NO: 964285 - RNA, 22 nt, Human
uuuuaucuucauuccuaucuac

SEQ ID NO: 964286 - RNA, 22 nt, Human
cuccucagacuuuccuuguccg

SEQ ID NO: 964287 - RNA, 23 nt, Human
acagggcauugcuggccucgagg

SEQ ID NO: 964288 - RNA, 22 nt, Human
agcaauauuucagcuagcaggu

SEQ ID NO: 964289 - RNA, 22 nt, Human
gccacaggcacuuaagggcugg

SEQ ID NO: 964290 - RNA, 22 nt, Human
agugaaaucagguuuugacugc

SEQ ID NO: 964291 - RNA, 22 nt, Human
gagagcuguguucauucuacca

SEQ ID NO: 964292 - RNA, 22 nt, Human
ccagcagacacacaggcguggg

SEQ ID NO: 964293 - RNA, 22 nt, Human
ucaggcugccuaucagacugug

SEQ ID NO: 964294 - RNA, 23 nt, Human
cucccuggaguuucuggaagaug

SEQ ID NO: 964295 - RNA, 22 nt, Human
gcagcuggggaggucgugggga

SEQ ID NO: 964296 - RNA, 22 nt, Human
cugggcucagaugagaggaagg

SEQ ID NO: 964297 - RNA, 22 nt, Human
aggagagaauguuccaggcuug

SEQ ID NO: 964298 - RNA, 22 nt, Human
agucucagaguaccugagggac

SEQ ID NO: 964299 - RNA, 22 nt, Human
uggaaauggaucugaugagucu

SEQ ID NO: 964300 - RNA, 22 nt, Human
ccuggugccacuagagaauguc

SEQ ID NO: 964301 - RNA, 22 nt, Human
ccagggugcucuguggcgucgc

SEQ ID NO: 964302 - RNA, 22 nt, Human
cuggguggcagagccugcagug

SEQ ID NO: 964303 - RNA, 21 nt, Human
gcagcuggucucagagcuugc

SEQ ID NO: 964304 - RNA, 22 nt, Human
cagcaggauuugaaaggaagag

SEQ ID NO: 964305 - RNA, 22 nt, Human
cacaggggcaaacuguagggga

SEQ ID NO: 964306 - RNA, 22 nt, Human
ugaaagguguccaauauuucuc

SEQ ID NO: 964307 - RNA, 22 nt, Human
uucauuacugcgguagucacac

SEQ ID NO: 964308 - RNA, 21 nt, Human
ccagcuccaggaccuuggauc

SEQ ID NO: 964309 - RNA, 22 nt, Human
ugucuuccucuuggcuugagcu

SEQ ID NO: 964310 - RNA, 22 nt, Human
ccaggagacccagggaaggagc

SEQ ID NO: 964311 - RNA, 22 nt, Human
aggcacugagaggcuguguugc

SEQ ID NO: 964312 - RNA, 22 nt, Human
aauguguagggugccuguuuuu

SEQ ID NO: 964313 - RNA, 22 nt, Human
gcagcucccagcuugaaagguc

SEQ ID NO: 964314 - RNA, 22 nt, Human
agguguguauaaacauacauau

SEQ ID NO: 964315 - RNA, 22 nt, Human
ccagggagccuggugugucagc

SEQ ID NO: 964316 - RNA, 22 nt, Human
uaaggccagcaugaaugcagca

SEQ ID NO: 964317 - RNA, 20 nt, Human
aagcagaagcugcucucagc

SEQ ID NO: 964318 - RNA, 22 nt, Human
aguuauaaucugcuacugauau

SEQ ID NO: 964319 - RNA, 22 nt, Human
gagcuggcaggaggcuccccga

SEQ ID NO: 964320 - RNA, 22 nt, Human
ucacaggagagcugaugcuggu

SEQ ID NO: 964321 - RNA, 22 nt, Human
cuggcagcugugugaagaacug

SEQ ID NO: 964322 - RNA, 22 nt, Human
aaagacugguguguuacauaua

SEQ ID NO: 964323 - RNA, 22 nt, Human
uccugccuuagagcaaggaaaa

SEQ ID NO: 964324 - RNA, 22 nt, Human
aaauuccauuaugauaauuucg

SEQ ID NO: 964325 - RNA, 22 nt, Human
agggguggccugccuuacuccc

SEQ ID NO: 964326 - RNA, 22 nt, Human
guggcacuaaauacagcauuuc

SEQ ID NO: 964327 - RNA, 22 nt, Human
ugcaacagacuuuauuaacucu

SEQ ID NO: 964328 - RNA, 22 nt, Human
uccuguuaguguuagacuuccc

SEQ ID NO: 964329 - RNA, 22 nt, Human
cuucugagcagaccuccugggg

SEQ ID NO: 964330 - RNA, 22 nt, Human
agagcugcaccuaugcagaccu

SEQ ID NO: 964331 - RNA, 22 nt, Human
gcagcugcuguggcaucaagcu

SEQ ID NO: 964332 - RNA, 22 nt, Human
uucagagccacuucaagucuaa

SEQ ID NO: 964333 - RNA, 22 nt, Human
caaugaaauugagauccagaga

SEQ ID NO: 964334 - RNA, 22 nt, Human
acaaaggugcgucccuucagcu

SEQ ID NO: 964335 - RNA, 22 nt, Human
agccuggaauuaaggaaaugca

SEQ ID NO: 964336 - RNA, 22 nt, Human
cuggugagacgguugacaggag

SEQ ID NO: 964337 - RNA, 22 nt, Human
cuguggcuaggaagcuguggga

SEQ ID NO: 964338 - RNA, 22 nt, Human
cagccaggagcucccccugcuc

SEQ ID NO: 964339 - RNA, 22 nt, Human
ccagagccggauugugaagugc

SEQ ID NO: 964340 - RNA, 22 nt, Human
caggcugggacugaccccugcu

SEQ ID NO: 964341 - RNA, 22 nt, Human
agaaacauuuagauuauauguc

SEQ ID NO: 964342 - RNA, 22 nt, Human
guggcccucugauagggucagg

SEQ ID NO: 964343 - RNA, 22 nt, Human
aaggcacuagcagaauuaguga

SEQ ID NO: 964344 - RNA, 22 nt, Human
ugaccaaagaguugcuuguauu

SEQ ID NO: 964345 - RNA, 22 nt, Human
uucuccagagggcucugcagga

SEQ ID NO: 964346 - RNA, 22 nt, Human
cgucuuccucuuacgaugcgcu

SEQ ID NO: 964347 - RNA, 22 nt, Human
cugcuguguaucauuuuagaug

SEQ ID NO: 964348 - RNA, 22 nt, Human
guaauuuuggaguauaaccugg

SEQ ID NO: 964349 - RNA, 22 nt, Human
auuauguagcuaaaaauugugu

SEQ ID NO: 964350 - RNA, 23 nt, Human
acagagaucuugacuuguaugga

SEQ ID NO: 964351 - RNA, 22 nt, Human
gcauuucuuccuggugugagcc

SEQ ID NO: 964352 - RNA, 22 nt, Human
cccaggugcugcgugaagccuc

SEQ ID NO: 964353 - RNA, 22 nt, Human
uggcagcuagcuguuuucaugc

SEQ ID NO: 964354 - RNA, 22 nt, Human
uauguguauguacauacauaca

SEQ ID NO: 964355 - RNA, 22 nt, Human
cccaggagacugagcuguaacc

SEQ ID NO: 964356 - RNA, 23 nt, Human
uggggccaagugaggaagggucu

SEQ ID NO: 964357 - RNA, 22 nt, Human
uuugcuaaugccucugaaauca

SEQ ID NO: 964358 - RNA, 22 nt, Human
caaauaucuuuggcaaagagaa

SEQ ID NO: 964359 - RNA, 22 nt, Human
cuucuucaauagcaagcgcaua

SEQ ID NO: 964360 - RNA, 22 nt, Human
uuuccucuuugugacacagcug

SEQ ID NO: 964361 - RNA, 22 nt, Human
uccaagaucuacagcaguuuag

SEQ ID NO: 964362 - RNA, 22 nt, Human
uacaucuauacugaucuacauu

SEQ ID NO: 964363 - RNA, 22 nt, Human
cuggcaggcggcagagcccagg

SEQ ID NO: 964364 - RNA, 22 nt, Human
caugggagcuaucuccaucacu

SEQ ID NO: 964365 - RNA, 22 nt, Human
ugcucugggcaacagccucccu

SEQ ID NO: 964366 - RNA, 19 nt, Human
aagaagcaauaagcuguga

SEQ ID NO: 964367 - RNA, 20 nt, Human
gaaaugugaccucuucugug

SEQ ID NO: 964368 - RNA, 22 nt, Human
aucaggauggguuuggcuuagg

SEQ ID NO: 964369 - RNA, 22 nt, Human
ggccuggaagaggacagagaaa

SEQ ID NO: 964370 - RNA, 22 nt, Human
gccaguggucacugaggaagaa

SEQ ID NO: 964371 - RNA, 22 nt, Human
cuccuggcccugagcucccagg

SEQ ID NO: 964372 - RNA, 21 nt, Human
uguaaguuucaucugaauugg

SEQ ID NO: 964373 - RNA, 22 nt, Human
caguagccacuagacacaugua

SEQ ID NO: 964374 - RNA, 22 nt, Human
uggagaagucaaagugaacagg

SEQ ID NO: 964375 - RNA, 23 nt, Human
gcucagagguuuuucucuggaug

SEQ ID NO: 964376 - RNA, 22 nt, Human
uggcugaauaauauucuguugu

SEQ ID NO: 964377 - RNA, 22 nt, Human
ccaaggcuucccagagaugcuc

SEQ ID NO: 964378 - RNA, 22 nt, Human
ccacacagggggaugaguuauu

SEQ ID NO: 964379 - RNA, 22 nt, Human
cagugggcugugauggauucac

SEQ ID NO: 964380 - RNA, 22 nt, Human
uggccuggaagagaggucgagg

SEQ ID NO: 964381 - RNA, 22 nt, Human
cagauaaaggcuuacuaguagu

SEQ ID NO: 964382 - RNA, 22 nt, Human
aggauuuuagauaagacagcaa

SEQ ID NO: 964383 - RNA, 17 nt, Human
agguggcugcugcgccu

SEQ ID NO: 964384 - RNA, 23 nt, Human
uccaugagaugugggcuucuagu

SEQ ID NO: 964385 - RNA, 22 nt, Human
gggccugucucacucccugguu

SEQ ID NO: 964386 - RNA, 22 nt, Human
cugguuuagcuguaagguuccc

SEQ ID NO: 964387 - RNA, 22 nt, Human
ucaguuuuuaaaugauauaauu

SEQ ID NO: 964388 - RNA, 22 nt, Human
gagagguccauuccccugucag

SEQ ID NO: 964389 - RNA, 22 nt, Human
ugaguucucacccauucuucuu

SEQ ID NO: 964390 - RNA, 22 nt, Human
guacacucccccugugaaguug

SEQ ID NO: 964391 - RNA, 22 nt, Human
uaaauucagugaguaauuucug

SEQ ID NO: 964392 - RNA, 17 nt, Human
uggagcugcguguguuc

SEQ ID NO: 964393 - RNA, 22 nt, Human
uccagggcugacuugggagagg

SEQ ID NO: 964394 - RNA, 22 nt, Human
ggaggugggagacauaggcggc

SEQ ID NO: 964395 - RNA, 22 nt, Human
aagcugcccaagacugaagcau

SEQ ID NO: 964396 - RNA, 22 nt, Human
cagggucugaaacugaucacag

SEQ ID NO: 964397 - RNA, 19 nt, Human
ugccagcauuaggcugaag

SEQ ID NO: 964398 - RNA, 22 nt, Human
aggcucugucaggcggagcagc

SEQ ID NO: 964399 - RNA, 22 nt, Human
ucuggcuccaggaccgggcaca

SEQ ID NO: 964400 - RNA, 22 nt, Human
ucucuucacaugcuugcuccaa

SEQ ID NO: 964401 - RNA, 22 nt, Human
ggcccaucucuugcucuggguu

SEQ ID NO: 964402 - RNA, 22 nt, Human
accaggcuggagugcaguggcg

SEQ ID NO: 964403 - RNA, 22 nt, Human
gaggagcugggucagggagaca

SEQ ID NO: 964404 - RNA, 22 nt, Human
auugugcaaauauuaucuguag

SEQ ID NO: 964405 - RNA, 22 nt, Human
cagggcuguuagcugcugcucu

SEQ ID NO: 964406 - RNA, 22 nt, Human
gcccgcagagaucuuuaacaaa

SEQ ID NO: 964407 - RNA, 21 nt, Human
ggcuccugcuuugugaggggc

SEQ ID NO: 964408 - RNA, 22 nt, Human
ugaugcuucacgcugaauaugc

SEQ ID NO: 964409 - RNA, 22 nt, Human
ccaguccagugccaugcauggc

SEQ ID NO: 964410 - RNA, 23 nt, Human
ucccuggaggcagguccagggcc

SEQ ID NO: 964411 - RNA, 22 nt, Human
gcacacaggcaguuuccagcca

SEQ ID NO: 964412 - RNA, 22 nt, Human
gaaaggcaguacagcugagccu

SEQ ID NO: 964413 - RNA, 22 nt, Human
guggcagcggcccaggccgucu

SEQ ID NO: 964414 - RNA, 22 nt, Human
acaauguguuuuuauacauuug

SEQ ID NO: 964415 - RNA, 22 nt, Human
aggacucaucccugcuugucag

SEQ ID NO: 964416 - RNA, 22 nt, Human
cuggcaaguacugggccagcuc

SEQ ID NO: 964417 - RNA, 22 nt, Human
uaggaucucaccauagaaggaa

SEQ ID NO: 964418 - RNA, 19 nt, Human
ucauuguugguuugucggg

SEQ ID NO: 964419 - RNA, 22 nt, Human
uucuuguauguaugcaaaauca

SEQ ID NO: 964420 - RNA, 22 nt, Human
ugcaaaugaguugcagaucagg

SEQ ID NO: 964421 - RNA, 19 nt, Human
caggaaugagguaauggcu

SEQ ID NO: 964422 - RNA, 20 nt, Human
agcagcuguguuuucauccu

SEQ ID NO: 964423 - RNA, 22 nt, Human
ucagggcaaugucccucagaag

SEQ ID NO: 964424 - RNA, 22 nt, Human
acauacaucaaguaucacaaga

SEQ ID NO: 964425 - RNA, 22 nt, Human
ccacagggcacaagggagguug

SEQ ID NO: 964426 - RNA, 22 nt, Human
cuagccaugggcauuaaaggua

SEQ ID NO: 964427 - RNA, 22 nt, Human
aagagguaaccauagcaaccac

SEQ ID NO: 964428 - RNA, 22 nt, Human
aagaggagacuucagcaacuug

SEQ ID NO: 964429 - RNA, 22 nt, Human
agagcagcacguuguccccaca

SEQ ID NO: 964430 - RNA, 22 nt, Human
cagggcuggcuguggcaaucuc

SEQ ID NO: 964431 - RNA, 22 nt, Human
uaccuugggcuauuaucuuuga

SEQ ID NO: 964432 - RNA, 22 nt, Human
aaggcacugacugugcagggga

SEQ ID NO: 964433 - RNA, 22 nt, Human
agccaugugucuuuauucuguu

SEQ ID NO: 964434 - RNA, 22 nt, Human
cuggugccuccucccugugcuu

SEQ ID NO: 964435 - RNA, 22 nt, Human
acauccugaagucagucauuug

SEQ ID NO: 964436 - RNA, 22 nt, Human
auguuuuaugcuucagaugagg

SEQ ID NO: 964437 - RNA, 22 nt, Human
agacagcaggggagucugguuu

SEQ ID NO: 964438 - RNA, 22 nt, Human
ugggagcaguucagguguggcu

SEQ ID NO: 964439 - RNA, 22 nt, Human
gcucccagcaauugaggcagcc

SEQ ID NO: 964440 - RNA, 22 nt, Human
agagaauuuuaaaagccuugaa

SEQ ID NO: 964441 - RNA, 22 nt, Human
cugccugugccaccgccucauu

SEQ ID NO: 964442 - RNA, 22 nt, Human
uaaauuaugucacaugacucug

SEQ ID NO: 964443 - RNA, 22 nt, Human
guaacaaaguuucuaggugcug

SEQ ID NO: 964444 - RNA, 22 nt, Human
agagccugaggccaggaaaaug

SEQ ID NO: 964445 - RNA, 22 nt, Human
cagcuggccaaucagggcgccc

SEQ ID NO: 964446 - RNA, 17 nt, Human
agcuccugcccauggcu

SEQ ID NO: 964447 - RNA, 22 nt, Human
ccagucugaggccuggugaggg

SEQ ID NO: 964448 - RNA, 22 nt, Human
aauucuagcauugugaaaauau

SEQ ID NO: 964449 - RNA, 19 nt, Human
ucccuuccugucgggcucc

SEQ ID NO: 964450 - RNA, 22 nt, Human
ucuguuccaguagaaaggugca

SEQ ID NO: 964451 - RNA, 21 nt, Human
uccagggaacuucucaggaau

SEQ ID NO: 964452 - RNA, 22 nt, Human
gaggccuggcugucagucccca

SEQ ID NO: 964453 - RNA, 22 nt, Human
ucaggaucggccuuuuuuuaag

SEQ ID NO: 964454 - RNA, 22 nt, Human
ggagcauguggggugagcaggg

SEQ ID NO: 964455 - RNA, 22 nt, Human
ccagagcccgggaccuggacuu

SEQ ID NO: 964456 - RNA, 22 nt, Human
ugaaaaggagccuuagguaggu

SEQ ID NO: 964457 - RNA, 22 nt, Human
uaagaacuucggacauguuauc

SEQ ID NO: 964458 - RNA, 22 nt, Human
uggcagcugugcuucauucuuu

SEQ ID NO: 964459 - RNA, 22 nt, Human
uuauuagggugguuuauguucu

SEQ ID NO: 964460 - RNA, 22 nt, Human
ccugucugcaugagugagcaua

SEQ ID NO: 964461 - RNA, 22 nt, Human
uuugaacuucuaccugucauau

SEQ ID NO: 964462 - RNA, 19 nt, Human
auaaggcaggaggaaauuu

SEQ ID NO: 964463 - RNA, 22 nt, Human
cucaggagacaguguccacaug

SEQ ID NO: 964464 - RNA, 22 nt, Human
auucggaucauguguauguguu

SEQ ID NO: 964465 - RNA, 18 nt, Human
acaguaaagaaaggaauu

SEQ ID NO: 964466 - RNA, 22 nt, Human
cuagaaaaauacuuuauuguga

SEQ ID NO: 964467 - RNA, 18 nt, Human
augggaggggccaagaga

SEQ ID NO: 964468 - RNA, 22 nt, Human
uccauguguuuuccuguccaca

SEQ ID NO: 964469 - RNA, 22 nt, Human
gcuuggaaguaggauugggaga

SEQ ID NO: 964470 - RNA, 22 nt, Human
ucaguguagcagacuuguagcc

SEQ ID NO: 964471 - RNA, 22 nt, Human
ggcagcucugaugaugcucugg

SEQ ID NO: 964472 - RNA, 22 nt, Human
guucuucaucuuaaccaucugu

SEQ ID NO: 964473 - RNA, 22 nt, Human
aauugugcuaugauuaugaaag

SEQ ID NO: 964474 - RNA, 22 nt, Human
uuucuaggcacagugucuuccc

SEQ ID NO: 964475 - RNA, 22 nt, Human
agauuucccucuuguauuugca

SEQ ID NO: 964476 - RNA, 22 nt, Human
gcagagccaggcuggggcaggu

SEQ ID NO: 964477 - RNA, 23 nt, Human
uggcccugaaucuguccuggagg

SEQ ID NO: 964478 - RNA, 22 nt, Human
agcagggcagugcuucagcucu

SEQ ID NO: 964479 - RNA, 22 nt, Human
cugaaaugguugccuggagaau

SEQ ID NO: 964480 - RNA, 22 nt, Human
cccagcauccucagggagcggg

SEQ ID NO: 964481 - RNA, 22 nt, Human
uaacagaagaaaacauauugga

SEQ ID NO: 964482 - RNA, 22 nt, Human
ggguccaggucuucaggcagag

SEQ ID NO: 964483 - RNA, 22 nt, Human
accugccucuaagcagcaggug

SEQ ID NO: 964484 - RNA, 19 nt, Human
aucugccuuagugcugcug

SEQ ID NO: 964485 - RNA, 22 nt, Human
auuauuaggacuacugggguug

SEQ ID NO: 964486 - RNA, 22 nt, Human
gcucccuguucucagccaugau

SEQ ID NO: 964487 - RNA, 22 nt, Human
gggcuacauugugagagaaguu

SEQ ID NO: 964488 - RNA, 22 nt, Human
gcacugaaugcuuuuacuguaa

SEQ ID NO: 964489 - RNA, 22 nt, Human
aaaugugucauauucaaaguca

SEQ ID NO: 964490 - RNA, 22 nt, Human
aagauaugaggucaccugcugg

SEQ ID NO: 964491 - RNA, 22 nt, Human
cagggcaguaccgcccucuggc

SEQ ID NO: 964492 - RNA, 22 nt, Human
gucaccagugcuaagaggugga

SEQ ID NO: 964493 - RNA, 22 nt, Human
ugugcagcuaguccuggacuug

SEQ ID NO: 964494 - RNA, 22 nt, Human
ugcuucaggagaugucaccaug

SEQ ID NO: 964495 - RNA, 20 nt, Human
aagagaggaaguuauacuag

SEQ ID NO: 964496 - RNA, 22 nt, Human
cauuucuguucucuuccuguac

SEQ ID NO: 964497 - RNA, 22 nt, Human
caagaugaaacuacagggagga

SEQ ID NO: 964498 - RNA, 17 nt, Human
ccacucaguaauuucuc

SEQ ID NO: 964499 - RNA, 17 nt, Human
gcacugaacaauccugu

SEQ ID NO: 964500 - RNA, 22 nt, Human
aagagcuggaguuugcagcccu

SEQ ID NO: 964501 - RNA, 22 nt, Human
ggcaguggcuccucucuacucc

SEQ ID NO: 964502 - RNA, 22 nt, Human
ggcugccugcucaggugcggcg

SEQ ID NO: 964503 - RNA, 22 nt, Human
aggcugcaggucugggucaugu

SEQ ID NO: 964504 - RNA, 20 nt, Human
gcaaauggaucccacaagcc

SEQ ID NO: 964505 - RNA, 22 nt, Human
ucuucaaaugcuaguaauauca

SEQ ID NO: 964506 - RNA, 22 nt, Human
aucaggauagucuguaaauugu

SEQ ID NO: 964507 - RNA, 22 nt, Human
uccaugaggcagggaggcuggc

SEQ ID NO: 964508 - RNA, 22 nt, Human
agccuggagguaaugaggaaac

SEQ ID NO: 964509 - RNA, 22 nt, Human
gucuggagccacccuaagcauu

SEQ ID NO: 964510 - RNA, 22 nt, Human
cucugggaccauggcaagugcg

SEQ ID NO: 964511 - RNA, 20 nt, Human
ugccaugguaacagagugug

SEQ ID NO: 964512 - RNA, 22 nt, Human
cugagcugggacucaguagcaa

SEQ ID NO: 964513 - RNA, 22 nt, Human
aucaggaugacuauaaggcugc

SEQ ID NO: 964514 - RNA, 20 nt, Human
gaguuccccauuucuccugg

SEQ ID NO: 964515 - RNA, 23 nt, Human
agcuccagaacauagcacaggaa

SEQ ID NO: 964516 - RNA, 16 nt, Human
aggaggggaauuagga

SEQ ID NO: 964517 - RNA, 22 nt, Human
ggagagaaauugagguagcaag

SEQ ID NO: 964518 - RNA, 22 nt, Human
caggagggcccgagacucuucc

SEQ ID NO: 964519 - RNA, 22 nt, Human
gcaaguuauuuccauuuaaagc

SEQ ID NO: 964520 - RNA, 20 nt, Human
cucaggauugucuagccccu

SEQ ID NO: 964521 - RNA, 17 nt, Human
agcugaccagauggacu

SEQ ID NO: 964522 - RNA, 22 nt, Human
ugcuccauucucuagccagugc

SEQ ID NO: 964523 - RNA, 22 nt, Human
cucaggaggugguagaggcccu

SEQ ID NO: 964524 - RNA, 22 nt, Human
agaaaugugagccccuuaucaa

SEQ ID NO: 964525 - RNA, 22 nt, Human
gcugcugugaauuuuuuaaaug

SEQ ID NO: 964526 - RNA, 22 nt, Human
uccuucagggggccgccugcac

SEQ ID NO: 964527 - RNA, 22 nt, Human
uucuacagacuauaacugugau

SEQ ID NO: 964528 - RNA, 22 nt, Human
ugguccagaugccuuggcuuua

SEQ ID NO: 964529 - RNA, 22 nt, Human
gcagguguggaguggggugagc

SEQ ID NO: 964530 - RNA, 22 nt, Human
gucauuccuauccauuugauac

SEQ ID NO: 964531 - RNA, 22 nt, Human
agaguucugcucuucucaguga

SEQ ID NO: 964532 - RNA, 22 nt, Human
ugggcuggcguggagaguuuag

SEQ ID NO: 964533 - RNA, 22 nt, Human
agaaauuccuaagguacacaag

SEQ ID NO: 964534 - RNA, 22 nt, Human
uauguuuaguauccauuuucag

SEQ ID NO: 964535 - RNA, 22 nt, Human
gcugcucucucccuaaguuggg

SEQ ID NO: 964536 - RNA, 19 nt, Human
aggcugugagggaggacuc

SEQ ID NO: 964537 - RNA, 22 nt, Human
cagucccaccaggaucgcucuu

SEQ ID NO: 964538 - RNA, 22 nt, Human
aauccuggaauacaagagugaa

SEQ ID NO: 964539 - RNA, 22 nt, Human
augcaucauggaaaacucaguu

SEQ ID NO: 964540 - RNA, 22 nt, Human
gcagaggagaugaagauacuuu

SEQ ID NO: 964541 - RNA, 22 nt, Human
ugaaaugauguacaagaaggca

SEQ ID NO: 964542 - RNA, 22 nt, Human
cugccucucaggucccugagau

SEQ ID NO: 964543 - RNA, 22 nt, Human
acagcagcuaaccccugggcca

SEQ ID NO: 964544 - RNA, 22 nt, Human
uccauuuuagaagaaaauccac

SEQ ID NO: 964545 - RNA, 18 nt, Human
cugcccagagcacuugug

SEQ ID NO: 964546 - RNA, 22 nt, Human
ugcccaaguccuccaccgaggu

SEQ ID NO: 964547 - RNA, 22 nt, Human
ucuguaaaacuucuuuguaaau

SEQ ID NO: 964548 - RNA, 22 nt, Human
gcugggcagccccuacagagag

SEQ ID NO: 964549 - RNA, 22 nt, Human
uuauuccauucaguucaacaag

SEQ ID NO: 964550 - RNA, 22 nt, Human
aaucuucuacuugacaguucuc

SEQ ID NO: 964551 - RNA, 22 nt, Human
ggcucugcuucagaaggcucau

SEQ ID NO: 964552 - RNA, 22 nt, Human
ggugcccaccugucuuccugga

SEQ ID NO: 964553 - RNA, 22 nt, Human
ggcagcuuguccuucaggagag

SEQ ID NO: 964554 - RNA, 22 nt, Human
ucagggaaauuuccauguguuu

SEQ ID NO: 964555 - RNA, 23 nt, Human
cuugcaggaagcagauggcacac

SEQ ID NO: 964556 - RNA, 22 nt, Human
uggcugaaggaagauucuucua

SEQ ID NO: 964557 - RNA, 22 nt, Human
uguaggccuauguccagcaauu

SEQ ID NO: 964558 - RNA, 22 nt, Human
gacuuucucuccucccaggugu

SEQ ID NO: 964559 - RNA, 22 nt, Human
ucugucuccugccagugccucu

SEQ ID NO: 964560 - RNA, 22 nt, Human
ugcuggcccaguauggacugca

SEQ ID NO: 964561 - RNA, 22 nt, Human
ugcucuggguccugggccuccu

SEQ ID NO: 964562 - RNA, 22 nt, Human
ugguaaaguguacugaauauga

SEQ ID NO: 964563 - RNA, 22 nt, Human
agaggggaaguaaugaaugaua

SEQ ID NO: 964564 - RNA, 22 nt, Human
cacugaagguaggaccaaggcu

SEQ ID NO: 964565 - RNA, 20 nt, Human
ugcuccaucuaaagugauua

SEQ ID NO: 964566 - RNA, 17 nt, Human
agaggcagauacuugga

SEQ ID NO: 964567 - RNA, 22 nt, Human
uccuggagccacggagcuuuca

SEQ ID NO: 964568 - RNA, 22 nt, Human
augcaguacugauacaugccac

SEQ ID NO: 964569 - RNA, 22 nt, Human
ggucucaggagacuggagagca

SEQ ID NO: 964570 - RNA, 22 nt, Human
gcccugucggaacugcgaccuc

SEQ ID NO: 964571 - RNA, 22 nt, Human
ggcuucugccacgagagggaag

SEQ ID NO: 964572 - RNA, 22 nt, Human
acacugaauauacaaugaauau

SEQ ID NO: 964573 - RNA, 22 nt, Human
ccccagcucagugcagggacau

SEQ ID NO: 964574 - RNA, 22 nt, Human
aagugggaauagaaaugaaggu

SEQ ID NO: 964575 - RNA, 18 nt, Human
gcccugguggagcuggug

SEQ ID NO: 964576 - RNA, 22 nt, Human
cucuugaagcaggggccaguuc

SEQ ID NO: 964577 - RNA, 22 nt, Human
uaggcagcgcuuggcugugcuu

SEQ ID NO: 964578 - RNA, 22 nt, Human
ucacaggagggagagacaccca

SEQ ID NO: 964579 - RNA, 22 nt, Human
ugucccaggccucauguugcca

SEQ ID NO: 964580 - RNA, 22 nt, Human
gcugggagcaaagccaugcaua

SEQ ID NO: 964581 - RNA, 22 nt, Human
cagagcugcuucccaguuugug

SEQ ID NO: 964582 - RNA, 22 nt, Human
cagcugacccgugggaggcggg

SEQ ID NO: 964583 - RNA, 22 nt, Human
acuuaaaaagaaucuuuucacg

SEQ ID NO: 964584 - RNA, 22 nt, Human
ugaaaugagauagauaaucagg

SEQ ID NO: 964585 - RNA, 22 nt, Human
gcagagccuugcgucaugugcc

SEQ ID NO: 964586 - RNA, 22 nt, Human
caaaauguucuggcaccuuuaa

SEQ ID NO: 964587 - RNA, 22 nt, Human
gaacaguaucaguagugccagu

SEQ ID NO: 964588 - RNA, 20 nt, Human
gcugggggugugcugaguga

SEQ ID NO: 964589 - RNA, 22 nt, Human
ucuggccugggccugccggugc

SEQ ID NO: 964590 - RNA, 22 nt, Human
auuaaauuagcaaacugugaaa

SEQ ID NO: 964591 - RNA, 22 nt, Human
ccuccuggugggcgcuucuggc

SEQ ID NO: 964592 - RNA, 22 nt, Human
gaaaaaugagcugaugucaggg

SEQ ID NO: 964593 - RNA, 22 nt, Human
uggccugguuauauugcuauca

SEQ ID NO: 964594 - RNA, 22 nt, Human
ucucucagaggaagaggcagug

SEQ ID NO: 964595 - RNA, 22 nt, Human
gcaagcuggcuguuagaggaug

SEQ ID NO: 964596 - RNA, 22 nt, Human
gccagcuggagacuggcagggg

SEQ ID NO: 964597 - RNA, 22 nt, Human
cagccagcuggcacugugagua

SEQ ID NO: 964598 - RNA, 17 nt, Human
gccucugcuugugucau

SEQ ID NO: 964599 - RNA, 22 nt, Human
cccucagcuccacccucagcag

SEQ ID NO: 964600 - RNA, 22 nt, Human
uguauuagaucugagaacuucu

SEQ ID NO: 964601 - RNA, 22 nt, Human
gcucucugccuuucucaaugac

SEQ ID NO: 964602 - RNA, 22 nt, Human
gagcacugaggaaagcugguua

SEQ ID NO: 964603 - RNA, 22 nt, Human
cuggacuuuggcccaucugcca

SEQ ID NO: 964604 - RNA, 22 nt, Human
gucuucuuuucagucugcuugu

SEQ ID NO: 964605 - RNA, 22 nt, Human
aggugcugccccgagaaggaug

SEQ ID NO: 964606 - RNA, 22 nt, Human
gcucccaguucccaaagugacc

SEQ ID NO: 964607 - RNA, 22 nt, Human
ccagcagcccacaggcgucccu

SEQ ID NO: 964608 - RNA, 22 nt, Human
uauguagguaaacacagacaua

SEQ ID NO: 964609 - RNA, 22 nt, Human
gcucccaggaugaggagccagg

SEQ ID NO: 964610 - RNA, 22 nt, Human
gcagggccagggcucaggcugu

SEQ ID NO: 964611 - RNA, 22 nt, Human
gaggccuguagucauggaugua

SEQ ID NO: 964612 - RNA, 22 nt, Human
guuccuauauagccuuaaggau

SEQ ID NO: 964613 - RNA, 22 nt, Human
uccucaggaucuaggagugcuu

SEQ ID NO: 964614 - RNA, 22 nt, Human
uggcaggcagugugggagcugg

SEQ ID NO: 964615 - RNA, 22 nt, Human
guuauaaaggugauaaugguca

SEQ ID NO: 964616 - RNA, 22 nt, Human
agucucaggcagaggaaggcua

SEQ ID NO: 964617 - RNA, 22 nt, Human
cagggcaguaacgggaacaucu

SEQ ID NO: 964618 - RNA, 22 nt, Human
ugggggagauugugcaucucua

SEQ ID NO: 964619 - RNA, 22 nt, Human
ucuugggaccauuuacacauac

SEQ ID NO: 964620 - RNA, 22 nt, Human
cacagaaucugugacuccaaga

SEQ ID NO: 964621 - RNA, 22 nt, Human
ucuguucacugagcaauggcaa

SEQ ID NO: 964622 - RNA, 21 nt, Human
aaaggccauaaucacggagca

SEQ ID NO: 964623 - RNA, 22 nt, Human
gagaggagguggcuaugacagc

SEQ ID NO: 964624 - RNA, 22 nt, Human
aaugcuagugugauauguaagg

SEQ ID NO: 964625 - RNA, 22 nt, Human
agcacuuuccuggcaaaugugg

SEQ ID NO: 964626 - RNA, 22 nt, Human
aauuaggagaaaacuguugucu

SEQ ID NO: 964627 - RNA, 22 nt, Human
aggugagggugccagugcaugg

SEQ ID NO: 964628 - RNA, 22 nt, Human
cagucucagaggugggaguggg

SEQ ID NO: 964629 - RNA, 22 nt, Human
cagcuguggcugccacugcucc

SEQ ID NO: 964630 - RNA, 22 nt, Human
ccugggcagggcuggacucuca

SEQ ID NO: 964631 - RNA, 22 nt, Human
uuugauucuguaaaauaacagg

SEQ ID NO: 964632 - RNA, 22 nt, Human
gcagggugaaggucacauagaa

SEQ ID NO: 964633 - RNA, 22 nt, Human
ccuguggcugccacuuggguga

SEQ ID NO: 964634 - RNA, 22 nt, Human
gcagcugccuucagcuggaugg

SEQ ID NO: 964635 - RNA, 22 nt, Human
aaaugcacaggagaaccaauuc

SEQ ID NO: 964636 - RNA, 18 nt, Human
aguaguggguuuagcuuc

SEQ ID NO: 964637 - RNA, 17 nt, Human
ugcauuguuggaaauuu

SEQ ID NO: 964638 - RNA, 22 nt, Human
ccugccugacagagaagguuca

SEQ ID NO: 964639 - RNA, 22 nt, Human
aagcagcagaccugauuuugaa

SEQ ID NO: 964640 - RNA, 22 nt, Human
caaaguuuaaaguagauuucag

SEQ ID NO: 964641 - RNA, 23 nt, Human
ccugcagcugcuggggcuccacc

SEQ ID NO: 964642 - RNA, 22 nt, Human
acagucuacuugagcuuguaua

SEQ ID NO: 964643 - RNA, 22 nt, Human
ucaggaucaggggccuuuccuu

SEQ ID NO: 964644 - RNA, 22 nt, Human
uauguacaugauuucauuugcu

SEQ ID NO: 964645 - RNA, 18 nt, Human
guaggucaguaccaagca

SEQ ID NO: 964646 - RNA, 22 nt, Human
cuugcugucuugcauuuagagc

SEQ ID NO: 964647 - RNA, 22 nt, Human
ugccuggguccaggccaagccu

SEQ ID NO: 964648 - RNA, 22 nt, Human
acuuccugaauggggcuaauua

SEQ ID NO: 964649 - RNA, 22 nt, Human
cauuuguaucugggcugcugug

SEQ ID NO: 964650 - RNA, 19 nt, Human
ucuguucacauuguuucgc

SEQ ID NO: 964651 - RNA, 22 nt, Human
cugaggcaugaaugugggcuuu

SEQ ID NO: 964652 - RNA, 22 nt, Human
cugaaggagcauagucaguuuu

SEQ ID NO: 964653 - RNA, 22 nt, Human
ccugggagugugccaucucugu

SEQ ID NO: 964654 - RNA, 22 nt, Human
uguaguaagugcgcaauaaaua

SEQ ID NO: 964655 - RNA, 22 nt, Human
auguacauuuguaguaauauca

SEQ ID NO: 964656 - RNA, 22 nt, Human
aaggcagccagauccuuugggu

SEQ ID NO: 964657 - RNA, 22 nt, Human
gugcauuggugcgccacuucac

SEQ ID NO: 964658 - RNA, 22 nt, Human
agauguuuucuaauucuauauu

SEQ ID NO: 964659 - RNA, 22 nt, Human
caggaccccauauucacugaac

SEQ ID NO: 964660 - RNA, 21 nt, Human
agugaaaugaaguguaugcuc

SEQ ID NO: 964661 - RNA, 22 nt, Human
uagccgggugugguggaacucc

SEQ ID NO: 964662 - RNA, 22 nt, Human
ucccaagugucuuggaccaggg

SEQ ID NO: 964663 - RNA, 22 nt, Human
ccuguuuacaucaucaaggacu

SEQ ID NO: 964664 - RNA, 22 nt, Human
aggcagcuggaaaacuccaggc

SEQ ID NO: 964665 - RNA, 22 nt, Human
agcucccauuaucuucugaaac

SEQ ID NO: 964666 - RNA, 22 nt, Human
uuauucuuuaaacauauauguu

SEQ ID NO: 964667 - RNA, 22 nt, Human
caggggcugagaaggaacgucc

SEQ ID NO: 964668 - RNA, 22 nt, Human
agcagugggggaguguuaguuu

SEQ ID NO: 964669 - RNA, 22 nt, Human
gaggagcugggcugagaggguc

SEQ ID NO: 964670 - RNA, 22 nt, Human
auucuguauuucuaauaagauc

SEQ ID NO: 964671 - RNA, 19 nt, Human
uuugaaaggauuguuauuu

SEQ ID NO: 964672 - RNA, 22 nt, Human
uagaaacagcauauauuagccc

SEQ ID NO: 964673 - RNA, 22 nt, Human
ggagugaguacuggaguagcug

SEQ ID NO: 964674 - RNA, 22 nt, Human
augugaaagagguguucagugg

SEQ ID NO: 964675 - RNA, 22 nt, Human
gcuggggagcuagaccucagca

SEQ ID NO: 964676 - RNA, 22 nt, Human
gagggagugccagagggccagc

SEQ ID NO: 964677 - RNA, 22 nt, Human
cugccgagugggucaugaggca

SEQ ID NO: 964678 - RNA, 22 nt, Human
aggaggcccuagagcucuagag

SEQ ID NO: 964679 - RNA, 22 nt, Human
uuggccaagugguuaaucucca

SEQ ID NO: 964680 - RNA, 22 nt, Human
ucugccacuuuugcuuacuggg

SEQ ID NO: 964681 - RNA, 22 nt, Human
auggccuggccagagcucugcu

SEQ ID NO: 964682 - RNA, 22 nt, Human
ucaggcuggaaugcaguggggc

SEQ ID NO: 964683 - RNA, 19 nt, Human
gggcagaauggcaucucag

SEQ ID NO: 964684 - RNA, 22 nt, Human
aaaucaguuguuauauuaaaga

SEQ ID NO: 964685 - RNA, 22 nt, Human
uagaaaucauuuagaaguauug

SEQ ID NO: 964686 - RNA, 22 nt, Human
ucuaaccuuugaaacugcuuuc

SEQ ID NO: 964687 - RNA, 22 nt, Human
guguguccuugggccucugcag

SEQ ID NO: 964688 - RNA, 22 nt, Human
ucucaguguguuuucucucaga

SEQ ID NO: 964689 - RNA, 22 nt, Human
cagucccaguuugagacucugg

SEQ ID NO: 964690 - RNA, 19 nt, Human
uguguaaagucugugguca

SEQ ID NO: 964691 - RNA, 22 nt, Human
auuagguuagugugcaagagaa

SEQ ID NO: 964692 - RNA, 22 nt, Human
ucugggaguggguccaaggaau

SEQ ID NO: 964693 - RNA, 22 nt, Human
cuucuaggcuucucagggggca

SEQ ID NO: 964694 - RNA, 22 nt, Human
caggcacuagcagaaugaggcu

SEQ ID NO: 964695 - RNA, 22 nt, Human
aaguucuacuguggguaaaaug

SEQ ID NO: 964696 - RNA, 22 nt, Human
ccagcugacgaugccuggucuc

SEQ ID NO: 964697 - RNA, 22 nt, Human
uaaaugcaagugcuccugggag

SEQ ID NO: 964698 - RNA, 22 nt, Human
cauggccugccuccuccuggug

SEQ ID NO: 964699 - RNA, 22 nt, Human
gaggccuggagccgccuaggcg

SEQ ID NO: 964700 - RNA, 22 nt, Human
uucugugaaucuuuuuucccac

SEQ ID NO: 964701 - RNA, 22 nt, Human
uuuggaauuggaaagugcugug

SEQ ID NO: 964702 - RNA, 22 nt, Human
agacaacaccaaaugcuagugu

SEQ ID NO: 964703 - RNA, 19 nt, Human
uugaaagauuagcuuucua

SEQ ID NO: 964704 - RNA, 22 nt, Human
agcagggcagcugaugcgcacg

SEQ ID NO: 964705 - RNA, 22 nt, Human
uuucaucuaacacuacauaggg

SEQ ID NO: 964706 - RNA, 19 nt, Human
cugcucaggucagucuguc

SEQ ID NO: 964707 - RNA, 22 nt, Human
ggcuccuggggaggugagcuug

SEQ ID NO: 964708 - RNA, 22 nt, Human
cuggcaggcagacuucugcaag

SEQ ID NO: 964709 - RNA, 22 nt, Human
gaagcagcuagcccacuaguca

SEQ ID NO: 964710 - RNA, 22 nt, Human
ggagaccagaaggaagcuucga

SEQ ID NO: 964711 - RNA, 22 nt, Human
caucuggcuagcuaucauugug

SEQ ID NO: 964712 - RNA, 22 nt, Human
gcugggaggaauuuggggaaua

SEQ ID NO: 964713 - RNA, 22 nt, Human
ucuuuccaaggacucuguagca

SEQ ID NO: 964714 - RNA, 22 nt, Human
gcagccccaggagacgcccagg

SEQ ID NO: 964715 - RNA, 22 nt, Human
agcugcccuuuaugaugcugaa

SEQ ID NO: 964716 - RNA, 22 nt, Human
auggcucauuuaucuugcagcc

SEQ ID NO: 964717 - RNA, 22 nt, Human
agcagagaagacacaggcuuca

SEQ ID NO: 964718 - RNA, 22 nt, Human
ugaugcugagccugggacugac

SEQ ID NO: 964719 - RNA, 22 nt, Human
gggccagagcuuggcagcuggg

SEQ ID NO: 964720 - RNA, 22 nt, Human
guguguccucaguaguggcaug

SEQ ID NO: 964721 - RNA, 22 nt, Human
ugagagaugaacucugauaugu

SEQ ID NO: 964722 - RNA, 22 nt, Human
uuaagucacuuaucuaaagaca

SEQ ID NO: 964723 - RNA, 22 nt, Human
ugcugcucuguaaagugaugag

SEQ ID NO: 964724 - RNA, 22 nt, Human
auucacaacaaaaggauaugag

SEQ ID NO: 964725 - RNA, 20 nt, Human
aggaagccaaaggcugucuu

SEQ ID NO: 964726 - RNA, 22 nt, Human
ggccagcucugcacagcagcug

SEQ ID NO: 964727 - RNA, 22 nt, Human
ucccuucacagaugcgauguuu

SEQ ID NO: 964728 - RNA, 22 nt, Human
uguacaaugccgagacuaacuc

SEQ ID NO: 964729 - RNA, 22 nt, Human
agaaauguuguggguuuuguua

SEQ ID NO: 964730 - RNA, 22 nt, Human
uccaugagggacacuggaugcu

SEQ ID NO: 964731 - RNA, 22 nt, Human
aagggcugagcacagugagcca

SEQ ID NO: 964732 - RNA, 22 nt, Human
ucaggcagcuccaggaauggua

SEQ ID NO: 964733 - RNA, 22 nt, Human
gagagcuguccggcugagcagc

SEQ ID NO: 964734 - RNA, 22 nt, Human
ugcuuagacgucaaguacagcc

SEQ ID NO: 964735 - RNA, 22 nt, Human
gacagagugcagggcuagaaga

SEQ ID NO: 964736 - RNA, 22 nt, Human
ugcccuguuaucuuggaagagu

SEQ ID NO: 964737 - RNA, 22 nt, Human
gcagagcuucuguccuucagga

SEQ ID NO: 964738 - RNA, 22 nt, Human
uggccuugagagaucaaaaggu

SEQ ID NO: 964739 - RNA, 22 nt, Human
cucacaggagaaagucaugguc

SEQ ID NO: 964740 - RNA, 22 nt, Human
ucagggcaagauugguuaauaa

SEQ ID NO: 964741 - RNA, 22 nt, Human
augauucagcaauuuuauaucu

SEQ ID NO: 964742 - RNA, 22 nt, Human
ucaagugcuugugagguauuug

SEQ ID NO: 964743 - RNA, 22 nt, Human
acagaacugggaaaugcacaua

SEQ ID NO: 964744 - RNA, 21 nt, Human
gcucccuggcugugugaccug

SEQ ID NO: 964745 - RNA, 22 nt, Human
agagacaggguuuugucguguu

SEQ ID NO: 964746 - RNA, 22 nt, Human
uccuuugacuucuugcagucca

SEQ ID NO: 964747 - RNA, 22 nt, Human
cagagccagaacuagaccuugu

SEQ ID NO: 964748 - RNA, 22 nt, Human
cugaaagaauaagauguuuaca

SEQ ID NO: 964749 - RNA, 22 nt, Human
acagcuuuucaauucugcugag

SEQ ID NO: 964750 - RNA, 22 nt, Human
gaguggggucugggcaucaguc

SEQ ID NO: 964751 - RNA, 22 nt, Human
aaccaggacaauuugaauagaa

SEQ ID NO: 964752 - RNA, 22 nt, Human
cagcagcucccauccgcugagc

SEQ ID NO: 964753 - RNA, 22 nt, Human
gcagugggagcuuaggcagugc

SEQ ID NO: 964754 - RNA, 22 nt, Human
ggcucacgcaauuaucccggcc

SEQ ID NO: 964755 - RNA, 22 nt, Human
gauuucaaggaguuuucacagu

SEQ ID NO: 964756 - RNA, 22 nt, Human
cagggccuccccggcagucuuu

SEQ ID NO: 964757 - RNA, 20 nt, Human
agggcagagggauuacaggc

SEQ ID NO: 964758 - RNA, 22 nt, Human
aagagguugucugugaugaguu

SEQ ID NO: 964759 - RNA, 22 nt, Human
gcucucuuuuuccagugguggu

SEQ ID NO: 964760 - RNA, 22 nt, Human
augggggccugaacaggcaaaa

SEQ ID NO: 964761 - RNA, 22 nt, Human
gcucagccgaacuucagagcag

SEQ ID NO: 964762 - RNA, 22 nt, Human
aucuacccacugaacacaauau

SEQ ID NO: 964763 - RNA, 23 nt, Human
gccaggaguggguagacuaaugc

SEQ ID NO: 964764 - RNA, 22 nt, Human
ucacugucugaaagaaauggcc

SEQ ID NO: 964765 - RNA, 22 nt, Human
agcagaggaggauuuaguuagg

SEQ ID NO: 964766 - RNA, 22 nt, Human
acagccagaggugguccugggu

SEQ ID NO: 964767 - RNA, 22 nt, Human
caguuucuucaucaguuaagca

SEQ ID NO: 964768 - RNA, 22 nt, Human
auaugagaauuggaaaauauca

SEQ ID NO: 964769 - RNA, 22 nt, Human
gaggugaguggaucacgagguc

SEQ ID NO: 964770 - RNA, 22 nt, Human
ggcagugaaaaaguauguuucc

SEQ ID NO: 964771 - RNA, 22 nt, Human
gccuggugguauccuggcaaga

SEQ ID NO: 964772 - RNA, 22 nt, Human
uuccaugaaauguguuaugcuu

SEQ ID NO: 964773 - RNA, 22 nt, Human
uaacuccagagaauccauccau

SEQ ID NO: 964774 - RNA, 22 nt, Human
aauguacaaggguuccaguuuu

SEQ ID NO: 964775 - RNA, 22 nt, Human
cucugggcuuguugaccugcac

SEQ ID NO: 964776 - RNA, 22 nt, Human
agggaagugaaugacagauauc

SEQ ID NO: 964777 - RNA, 22 nt, Human
cauuucugauuacagaauacua

SEQ ID NO: 964778 - RNA, 22 nt, Human
ccuccagguguuacauaugacu

SEQ ID NO: 964779 - RNA, 22 nt, Human
agaaauguacgauguuaugcag

SEQ ID NO: 964780 - RNA, 22 nt, Human
cuggugucugcucccucacagc

SEQ ID NO: 964781 - RNA, 21 nt, Human
aggagcuguguuagcuggucg

SEQ ID NO: 964782 - RNA, 22 nt, Human
ugaggccacuuccccacagccc

SEQ ID NO: 964783 - RNA, 22 nt, Human
gucuuucuuaauucaagugcuu

SEQ ID NO: 964784 - RNA, 22 nt, Human
gcugugaguggaggaggcugag

SEQ ID NO: 964785 - RNA, 22 nt, Human
gcccccucuuuggagccagcca

SEQ ID NO: 964786 - RNA, 22 nt, Human
ccuggccugcucggcucuuaag

SEQ ID NO: 964787 - RNA, 22 nt, Human
uuuuucauauuccccucucugg

SEQ ID NO: 964788 - RNA, 22 nt, Human
agugaaauaugcccauugcugu

SEQ ID NO: 964789 - RNA, 19 nt, Human
auuagcaugcuugaggaug

SEQ ID NO: 964790 - RNA, 22 nt, Human
ucauaauacaaagaguucugca

SEQ ID NO: 964791 - RNA, 22 nt, Human
auuaaagugaaguucucagaug

SEQ ID NO: 964792 - RNA, 20 nt, Human
guccaggacccagcaggagg

SEQ ID NO: 964793 - RNA, 22 nt, Human
augcugagacuggagcagcugg

SEQ ID NO: 964794 - RNA, 22 nt, Human
cagaguguugaccauaagccca

SEQ ID NO: 964795 - RNA, 22 nt, Human
gccagcucccaagugagccccu

SEQ ID NO: 964796 - RNA, 22 nt, Human
gccuggugugcgccgcgcagcu

SEQ ID NO: 964797 - RNA, 22 nt, Human
gcaaggcugugcacuuugcauu

SEQ ID NO: 964798 - RNA, 22 nt, Human
cucccaggcacagggaggagcc

SEQ ID NO: 964799 - RNA, 22 nt, Human
aggcagucuaucucuggagccu

SEQ ID NO: 964800 - RNA, 22 nt, Human
uggagucugugaugcucugggu

SEQ ID NO: 964801 - RNA, 22 nt, Human
ucagggcacauucugcaguggc

SEQ ID NO: 964802 - RNA, 22 nt, Human
ucauucagguugggcaaguguc

SEQ ID NO: 964803 - RNA, 22 nt, Human
augaaacacacacgcgcauacu

SEQ ID NO: 964804 - RNA, 22 nt, Human
gcucuccacugaccacggggca

SEQ ID NO: 964805 - RNA, 22 nt, Human
caagagcuagacuuugucagga

SEQ ID NO: 964806 - RNA, 22 nt, Human
agaggccaugcuagaggccugg

SEQ ID NO: 964807 - RNA, 22 nt, Human
auaugaagucagacaaacuggg

SEQ ID NO: 964808 - RNA, 22 nt, Human
agaaguuguagguuugcauauu

SEQ ID NO: 964809 - RNA, 22 nt, Human
ucugaggcuaagagacagaggc

SEQ ID NO: 964810 - RNA, 22 nt, Human
gccaggagcccugggcaaguuc

SEQ ID NO: 964811 - RNA, 22 nt, Human
gcauuucugugcauacacauga

SEQ ID NO: 964812 - RNA, 22 nt, Human
agacaaaggauuaaugaugaug

SEQ ID NO: 964813 - RNA, 22 nt, Human
auguucuguuuuguaauucaua

SEQ ID NO: 964814 - RNA, 22 nt, Human
auaugaaaguaagcaugugugu

SEQ ID NO: 964815 - RNA, 22 nt, Human
gaggcagcagggcugguuccuu

SEQ ID NO: 964816 - RNA, 22 nt, Human
uucuggaguauuccuggcaccu

SEQ ID NO: 964817 - RNA, 22 nt, Human
ccugugugucugucacugcaca

SEQ ID NO: 964818 - RNA, 22 nt, Human
cagagccagcuguccuuggcau

SEQ ID NO: 964819 - RNA, 22 nt, Human
auuaggaaauguguugcaagca

SEQ ID NO: 964820 - RNA, 22 nt, Human
uaaagacaugguguaggugaac

SEQ ID NO: 964821 - RNA, 22 nt, Human
ccugguggccuucagcccacaa

SEQ ID NO: 964822 - RNA, 22 nt, Human
acuguucacccagcacuagcag

SEQ ID NO: 964823 - RNA, 22 nt, Human
cugguucauccccuuccaggaa

SEQ ID NO: 964824 - RNA, 22 nt, Human
gguggggcccuggcacugguau

SEQ ID NO: 964825 - RNA, 22 nt, Human
cugcugugucagaguccagggg

SEQ ID NO: 964826 - RNA, 22 nt, Human
ccuggccauuugaacuucagac

SEQ ID NO: 964827 - RNA, 22 nt, Human
augcaaaugaacauguugcuag

SEQ ID NO: 964828 - RNA, 22 nt, Human
agaagccagcuucagcugcccg

SEQ ID NO: 964829 - RNA, 19 nt, Human
uuugaauccagcugguaac

SEQ ID NO: 964830 - RNA, 20 nt, Human
cuccucaguuccaugggagg

SEQ ID NO: 964831 - RNA, 22 nt, Human
uaacuccacaccccucuuggug

SEQ ID NO: 964832 - RNA, 22 nt, Human
cacccaggcuagagugcagugg

SEQ ID NO: 964833 - RNA, 22 nt, Human
cccaggaauuggaggcugcagu

SEQ ID NO: 964834 - RNA, 22 nt, Human
aagccagggucaggggccuccu

SEQ ID NO: 964835 - RNA, 22 nt, Human
cagcugagcaucacuagucugg

SEQ ID NO: 964836 - RNA, 22 nt, Human
aggcccugcuuuccagagcuca

SEQ ID NO: 964837 - RNA, 22 nt, Human
uuuauuguuaucaugggugagu

SEQ ID NO: 964838 - RNA, 22 nt, Human
gggcaguggcucacgccuguaa

SEQ ID NO: 964839 - RNA, 22 nt, Human
gcuccuggguguggcugccccu

SEQ ID NO: 964840 - RNA, 18 nt, Human
cagggcuguggggucacu

SEQ ID NO: 964841 - RNA, 22 nt, Human
cuugaaucuggcuuugccacuu

SEQ ID NO: 964842 - RNA, 22 nt, Human
cuuucaaugugccugccuuggg

SEQ ID NO: 964843 - RNA, 22 nt, Human
auuaaauuggacgcugggggaa

SEQ ID NO: 964844 - RNA, 22 nt, Human
guggcugcagagccagcaagcu

SEQ ID NO: 964845 - RNA, 22 nt, Human
aagaagaugguuaacuuucagu

SEQ ID NO: 964846 - RNA, 22 nt, Human
cagggccuucguaaguguccgg

SEQ ID NO: 964847 - RNA, 22 nt, Human
gccugagauucccggagccgug

SEQ ID NO: 964848 - RNA, 22 nt, Human
aauuuccagaccccauccacag

SEQ ID NO: 964849 - RNA, 22 nt, Human
cccagcuccaagggacagcgaa

SEQ ID NO: 964850 - RNA, 22 nt, Human
uccuucagcuacucaguuucca

SEQ ID NO: 964851 - RNA, 22 nt, Human
gagggggagaugugcacacacu

SEQ ID NO: 964852 - RNA, 22 nt, Human
ugggggacugcacuggcgucag

SEQ ID NO: 964853 - RNA, 22 nt, Human
gcuggcagcuggaaguugggcu

SEQ ID NO: 964854 - RNA, 22 nt, Human
gggugcugacuggggccugaaa

SEQ ID NO: 964855 - RNA, 22 nt, Human
cagcagcugcgugcccaggccg

SEQ ID NO: 964856 - RNA, 17 nt, Human
ccaggugggaggugggg

SEQ ID NO: 964857 - RNA, 22 nt, Human
aaauucuuucauggcuaauaag

SEQ ID NO: 964858 - RNA, 20 nt, Human
gggcaguggcgcuaucucag

SEQ ID NO: 964859 - RNA, 22 nt, Human
uguggcucucagauccuccaau

SEQ ID NO: 964860 - RNA, 22 nt, Human
uucaggaugcucagaguagucu

SEQ ID NO: 964861 - RNA, 22 nt, Human
uaucuguuaugggcugaauugc

SEQ ID NO: 964862 - RNA, 22 nt, Human
gucucccaaccccugugcccag

SEQ ID NO: 964863 - RNA, 22 nt, Human
gaaagaggaaggagauguauua

SEQ ID NO: 964864 - RNA, 22 nt, Human
ucacugcucagucuguacuaca

SEQ ID NO: 964865 - RNA, 22 nt, Human
uggaguucucaggugagggcuu

SEQ ID NO: 964866 - RNA, 22 nt, Human
caaauauuccagguacaucccu

SEQ ID NO: 964867 - RNA, 22 nt, Human
auaugaagaauuccaauuugga

SEQ ID NO: 964868 - RNA, 22 nt, Human
uggucucugacucugaagaccc

SEQ ID NO: 964869 - RNA, 20 nt, Human
ugggccugagccugugggcu

SEQ ID NO: 964870 - RNA, 22 nt, Human
cuggcuugcagcucaucauaaa

SEQ ID NO: 964871 - RNA, 22 nt, Human
ugaugauguuuaucuugguauu

SEQ ID NO: 964872 - RNA, 18 nt, Human
acauacauucugucugca

SEQ ID NO: 964873 - RNA, 22 nt, Human
gccagcugaagcccugguggaa

SEQ ID NO: 964874 - RNA, 22 nt, Human
aauaguaaaagauacagcuaau

SEQ ID NO: 964875 - RNA, 22 nt, Human
cagagagagucaaaucuuugcu

SEQ ID NO: 964876 - RNA, 22 nt, Human
aagccagccagugccagucuua

SEQ ID NO: 964877 - RNA, 21 nt, Human
ggcagcugaccgcgcggugca

SEQ ID NO: 964878 - RNA, 22 nt, Human
agggagguaggagcuucuagcu

SEQ ID NO: 964879 - RNA, 22 nt, Human
uauccaauucaccauugauggg

SEQ ID NO: 964880 - RNA, 22 nt, Human
ggccugucucacccccgggugc

SEQ ID NO: 964881 - RNA, 22 nt, Human
aucaguuuaacugucaagagcc

SEQ ID NO: 964882 - RNA, 22 nt, Human
gagggagagugauggaccauug

SEQ ID NO: 964883 - RNA, 23 nt, Human
uugcaaauuucaguuaguucaug

SEQ ID NO: 964884 - RNA, 22 nt, Human
uccuuggcagcagggagcauga

SEQ ID NO: 964885 - RNA, 22 nt, Human
uucaggauucugugucugacaa

SEQ ID NO: 964886 - RNA, 22 nt, Human
ugcaugcauaaauguacacaca

SEQ ID NO: 964887 - RNA, 22 nt, Human
cagcugcccaggccaccuggag

SEQ ID NO: 964888 - RNA, 22 nt, Human
gcuccuggcuccaggcagccaa

SEQ ID NO: 964889 - RNA, 22 nt, Human
auaauaaaccaggaugggucug

SEQ ID NO: 964890 - RNA, 22 nt, Human
ugaugaaauguugaggcaguga

SEQ ID NO: 964891 - RNA, 22 nt, Human
auuaucuauguagaaugauuuu

SEQ ID NO: 964892 - RNA, 22 nt, Human
gggcagcagagcccugccgagu

SEQ ID NO: 964893 - RNA, 22 nt, Human
gcucaggagcucuugguggcgc

SEQ ID NO: 964894 - RNA, 20 nt, Human
agcccaggccugugugaguc

SEQ ID NO: 964895 - RNA, 22 nt, Human
auacaugucaucauauguuugu

SEQ ID NO: 964896 - RNA, 22 nt, Human
ccucuucuagguuucagccugc

SEQ ID NO: 964897 - RNA, 22 nt, Human
gggugggguucaggaaucuuca

SEQ ID NO: 964898 - RNA, 22 nt, Human
ucagaacaauugggaaccauua

SEQ ID NO: 964899 - RNA, 22 nt, Human
caggccuggcccccggcacacc

SEQ ID NO: 964900 - RNA, 20 nt, Human
cagcaggaaaagugccucag

SEQ ID NO: 964901 - RNA, 22 nt, Human
uaaagaacacagggaauagcac

SEQ ID NO: 964902 - RNA, 18 nt, Human
ucuuggcagcaucuggca

SEQ ID NO: 964903 - RNA, 22 nt, Human
agcagggcaaagucaggcuaac

SEQ ID NO: 964904 - RNA, 18 nt, Human
cagcugccagcucaugga

SEQ ID NO: 964905 - RNA, 23 nt, Human
agccagggcacugguggagauug

SEQ ID NO: 964906 - RNA, 22 nt, Human
uaaagcacauaucuuacaauaa

SEQ ID NO: 964907 - RNA, 22 nt, Human
ggcccagccggcgagucucgcg

SEQ ID NO: 964908 - RNA, 22 nt, Human
auuguuuuguuucccagugacu

SEQ ID NO: 964909 - RNA, 22 nt, Human
ccugggaagagcugacaggagg

SEQ ID NO: 964910 - RNA, 22 nt, Human
cugccugugugugccugcagaa

SEQ ID NO: 964911 - RNA, 22 nt, Human
agagaagacuuacagccacagu

SEQ ID NO: 964912 - RNA, 22 nt, Human
ugauuucauaguauauacauga

SEQ ID NO: 964913 - RNA, 19 nt, Human
agcagcuggagguggagug

SEQ ID NO: 964914 - RNA, 22 nt, Human
cuaauuuuuguucugcauugaa

SEQ ID NO: 964915 - RNA, 22 nt, Human
ggcaggguggcccuccagugag

SEQ ID NO: 964916 - RNA, 22 nt, Human
gguggccugcccugaucccugg

SEQ ID NO: 964917 - RNA, 22 nt, Human
uugaaaacuuucuagaccaaga

SEQ ID NO: 964918 - RNA, 22 nt, Human
ggccagcuuugagcugcaggaa

SEQ ID NO: 964919 - RNA, 22 nt, Human
gggcuucucuuuagugagcuga

SEQ ID NO: 964920 - RNA, 22 nt, Human
gauuaggacauggauguauguu

SEQ ID NO: 964921 - RNA, 22 nt, Human
cuacauuuugugauuaugaaau

SEQ ID NO: 964922 - RNA, 22 nt, Human
caggccugucugcacaugaggc

SEQ ID NO: 964923 - RNA, 22 nt, Human
ggauaagaaaauuguaauaacu

SEQ ID NO: 964924 - RNA, 22 nt, Human
uacacuuuuuacuacagauucu

SEQ ID NO: 964925 - RNA, 22 nt, Human
gggcucucaugaguguguggua

SEQ ID NO: 964926 - RNA, 22 nt, Human
cucucugguuucagcgaagggg

SEQ ID NO: 964927 - RNA, 19 nt, Human
gggaaauucacuugcuucc

SEQ ID NO: 964928 - RNA, 22 nt, Human
cagcccuguccagcagagggug

SEQ ID NO: 964929 - RNA, 22 nt, Human
augggaggcaggcucagaaccg

SEQ ID NO: 964930 - RNA, 22 nt, Human
aaaauucugucauuaaauugug

SEQ ID NO: 964931 - RNA, 22 nt, Human
aggaugagaagauuggaaucuu

SEQ ID NO: 964932 - RNA, 17 nt, Human
ugcauguccuuuguucc

SEQ ID NO: 964933 - RNA, 20 nt, Human
agaagcugauacugauggaa

SEQ ID NO: 964934 - RNA, 22 nt, Human
ugagcccaggaguaugaggcug

SEQ ID NO: 964935 - RNA, 22 nt, Human
uccagggaccucccugagagcu

SEQ ID NO: 964936 - RNA, 21 nt, Human
acagcaagccuucacaugagu

SEQ ID NO: 964937 - RNA, 22 nt, Human
gccugguggugugcucaagugg

SEQ ID NO: 964938 - RNA, 22 nt, Human
aucuuucagagcuccaucaggg

SEQ ID NO: 964939 - RNA, 22 nt, Human
uggccugguccuugucaaggca

SEQ ID NO: 964940 - RNA, 22 nt, Human
gugcccaggcccaaggcaccac

SEQ ID NO: 964941 - RNA, 22 nt, Human
gcugagugauugauauuuuagu

SEQ ID NO: 964942 - RNA, 22 nt, Human
gaggagguuccggguggagaag

SEQ ID NO: 964943 - RNA, 18 nt, Human
gggaagaggaucuggccc

SEQ ID NO: 964944 - RNA, 22 nt, Human
ucuccugugcacccucccugug

SEQ ID NO: 964945 - RNA, 22 nt, Human
ccuggccucuccgaguaaccug

SEQ ID NO: 964946 - RNA, 22 nt, Human
uaaguucauaagcuuauucuua

SEQ ID NO: 964947 - RNA, 22 nt, Human
agccacagcccacaggacucuu

SEQ ID NO: 964948 - RNA, 19 nt, Human
aggcugcaagguggugggc

SEQ ID NO: 964949 - RNA, 20 nt, Human
gagggcaggcacccauuuca

SEQ ID NO: 964950 - RNA, 22 nt, Human
uccugggcgguuaugugaucug

SEQ ID NO: 964951 - RNA, 22 nt, Human
aagugagugguaaggagcaugg

SEQ ID NO: 964952 - RNA, 22 nt, Human
accuggcaugaagcaugccuua

SEQ ID NO: 964953 - RNA, 22 nt, Human
uaugagcuuccaguguugcaug

SEQ ID NO: 964954 - RNA, 22 nt, Human
uggcucagauuuuuguaggcuu

SEQ ID NO: 964955 - RNA, 22 nt, Human
cugucuccagggcaggugcagg

SEQ ID NO: 964956 - RNA, 22 nt, Human
cuggagcugucuucacaggccu

SEQ ID NO: 964957 - RNA, 22 nt, Human
aggaguggugcaggaccugcca

SEQ ID NO: 964958 - RNA, 18 nt, Human
agcagagcccaugcauuc

SEQ ID NO: 964959 - RNA, 22 nt, Human
gcccaggaaaugccccguggug

SEQ ID NO: 964960 - RNA, 20 nt, Human
agggcagcuugaggagccgg

SEQ ID NO: 964961 - RNA, 22 nt, Human
uagggaggaggguuuucaaauc

SEQ ID NO: 964962 - RNA, 22 nt, Human
auccaaaccuggacaugagugg

SEQ ID NO: 964963 - RNA, 22 nt, Human
aaagaacaauguggaaucuccu

SEQ ID NO: 964964 - RNA, 22 nt, Human
guuuccauggcucuguuaaugg

SEQ ID NO: 964965 - RNA, 22 nt, Human
ccugggcauaaaucacuccaag

SEQ ID NO: 964966 - RNA, 22 nt, Human
uucaccuugaauaugucuuaaa

SEQ ID NO: 964967 - RNA, 22 nt, Human
cagaggcagacccuccagggcg

SEQ ID NO: 964968 - RNA, 22 nt, Human
aggcaguggaugucaggaaugg

SEQ ID NO: 964969 - RNA, 22 nt, Human
ucuguuuugcauaauguucuuu

SEQ ID NO: 964970 - RNA, 22 nt, Human
cugggcagugguggcccuuccc

SEQ ID NO: 964971 - RNA, 22 nt, Human
uggggagugaugccucggauaa

SEQ ID NO: 964972 - RNA, 22 nt, Human
uuccuguauuuugcgaauuuuc

SEQ ID NO: 964973 - RNA, 21 nt, Human
aucacauuggcuguuauuauu

SEQ ID NO: 964974 - RNA, 22 nt, Human
aggcucuguuauucuagagggc

SEQ ID NO: 964975 - RNA, 22 nt, Human
cuucaagauccauagauauugc

SEQ ID NO: 964976 - RNA, 22 nt, Human
gccuucccacccugcgaggcug

SEQ ID NO: 964977 - RNA, 22 nt, Human
ucaggagacuuaugucacagug

SEQ ID NO: 964978 - RNA, 22 nt, Human
gauggcagcauauugacagcau

SEQ ID NO: 964979 - RNA, 23 nt, Human
cagggccaggcagcagcugucac

SEQ ID NO: 964980 - RNA, 22 nt, Human
gcccagcacagcuggaagaguc

SEQ ID NO: 964981 - RNA, 22 nt, Human
agaggcugucccuugcuauucc

SEQ ID NO: 964982 - RNA, 22 nt, Human
cugggggcaauggucagagugu

SEQ ID NO: 964983 - RNA, 20 nt, Human
ggggcccaagcccucuugcc

SEQ ID NO: 964984 - RNA, 22 nt, Human
gcauggcagccaguacauggug

SEQ ID NO: 964985 - RNA, 22 nt, Human
uucaaaggcaggauagcagcug

SEQ ID NO: 964986 - RNA, 22 nt, Human
aggcagaggagaaugaucuucc

SEQ ID NO: 964987 - RNA, 22 nt, Human
aagggcuggaucucucugagca

SEQ ID NO: 964988 - RNA, 22 nt, Human
ggcuggaaguccaagaucaaga

SEQ ID NO: 964989 - RNA, 22 nt, Human
uauggcauuuuguaagggcuug

SEQ ID NO: 964990 - RNA, 22 nt, Human
uggccucugggaaagcagauuc

SEQ ID NO: 964991 - RNA, 22 nt, Human
cauggcagagccugcagguggg

SEQ ID NO: 964992 - RNA, 22 nt, Human
uggcacaugguaagugcuuaac

SEQ ID NO: 964993 - RNA, 22 nt, Human
cuguaugguccacgugggugcc

SEQ ID NO: 964994 - RNA, 22 nt, Human
gugagcaggauuucauggugua

SEQ ID NO: 964995 - RNA, 20 nt, Human
gcacugaagguuccagggga

SEQ ID NO: 964996 - RNA, 16 nt, Human
ggagagugucugcaaa

SEQ ID NO: 964997 - RNA, 22 nt, Human
ggacagcccauacacaugucug

SEQ ID NO: 964998 - RNA, 21 nt, Human
uauaguguggauaugcugaug

SEQ ID NO: 964999 - RNA, 22 nt, Human
ugugugccagccuacgaggagc

SEQ ID NO: 965000 - RNA, 20 nt, Human
auuccauaguuggcacuuuu

SEQ ID NO: 965001 - RNA, 22 nt, Human
ucugcaggcuguacaggaagca

SEQ ID NO: 965002 - RNA, 22 nt, Human
acacuugauaggucaaaucagu

SEQ ID NO: 965003 - RNA, 22 nt, Human
aggugcagcugacaccaugugg

SEQ ID NO: 965004 - RNA, 22 nt, Human
cagccagggagggcaaaugaga

SEQ ID NO: 965005 - RNA, 22 nt, Human
uuugaaaacuuaauuuggucgu

SEQ ID NO: 965006 - RNA, 22 nt, Human
cugggagcuggaaugggagaag

SEQ ID NO: 965007 - RNA, 22 nt, Human
agcagaugagccucaugacugg

SEQ ID NO: 965008 - RNA, 22 nt, Human
guggcagcggugugcaaggagg

SEQ ID NO: 965009 - RNA, 22 nt, Human
gcugcccacaaugauuacaugg

SEQ ID NO: 965010 - RNA, 22 nt, Human
uacugcauaacuggcauguggg

SEQ ID NO: 965011 - RNA, 22 nt, Human
aaccauuugcaguuacugagac

SEQ ID NO: 965012 - RNA, 22 nt, Human
cucugaacucuugggcagcaug

SEQ ID NO: 965013 - RNA, 22 nt, Human
ccucauggccuugagcugaggg

SEQ ID NO: 965014 - RNA, 22 nt, Human
uauuuguauuucaugcaguaaa

SEQ ID NO: 965015 - RNA, 22 nt, Human
uggcucugagacacaggcucuc

SEQ ID NO: 965016 - RNA, 22 nt, Human
ucagcagucacauguuguccca

SEQ ID NO: 965017 - RNA, 19 nt, Human
cuugcugggugguuucugc

SEQ ID NO: 965018 - RNA, 22 nt, Human
cugucuccuccacugcauggga

SEQ ID NO: 965019 - RNA, 22 nt, Human
gagagcuggccagcuucaguau

SEQ ID NO: 965020 - RNA, 22 nt, Human
aggcacugacaauucuggacug

SEQ ID NO: 965021 - RNA, 22 nt, Human
gcaggcagguggcaucuuguga

SEQ ID NO: 965022 - RNA, 20 nt, Human
auguuuuauaaaagaacggg

SEQ ID NO: 965023 - RNA, 22 nt, Human
ucagauggguuuugaaggaugu

SEQ ID NO: 965024 - RNA, 22 nt, Human
ccaggagcaggagcuggacaga

SEQ ID NO: 965025 - RNA, 22 nt, Human
ggccugcucaguccucuuucuu

SEQ ID NO: 965026 - RNA, 22 nt, Human
ggauuugggcuugcagcagagc

SEQ ID NO: 965027 - RNA, 22 nt, Human
ucucaggaauagaguggcagca

SEQ ID NO: 965028 - RNA, 22 nt, Human
uuuuggcacugcgucuacaugg

SEQ ID NO: 965029 - RNA, 22 nt, Human
gccucugcucggacuuugccuc

SEQ ID NO: 965030 - RNA, 23 nt, Human
ucugcucugaaguucggcugagc

SEQ ID NO: 965031 - RNA, 22 nt, Human
gcucaggacuggaggagcgggg

SEQ ID NO: 965032 - RNA, 22 nt, Human
acaggugggcuuaagagucggc

SEQ ID NO: 965033 - RNA, 22 nt, Human
gucaggauuuacaaacuucagu

SEQ ID NO: 965034 - RNA, 22 nt, Human
acagggcagguggcuacugguc

SEQ ID NO: 965035 - RNA, 22 nt, Human
accucugccacuuucuaacucu

SEQ ID NO: 965036 - RNA, 22 nt, Human
cucccucugucuuguccagaaa

SEQ ID NO: 965037 - RNA, 22 nt, Human
cacauguuuggcaugucaccaa

SEQ ID NO: 965038 - RNA, 22 nt, Human
aaaaaugcuuggacuuaauaaa

SEQ ID NO: 965039 - RNA, 22 nt, Human
cucugcuuuuuaaaaggagucc

SEQ ID NO: 965040 - RNA, 20 nt, Human
aggccaaacccagcgcgccc

SEQ ID NO: 965041 - RNA, 22 nt, Human
ucauuucuccgaccugcugucc

SEQ ID NO: 965042 - RNA, 22 nt, Human
cugccuggccugaucuccacgc

SEQ ID NO: 965043 - RNA, 22 nt, Human
gcucuguccagcgugcacagaa

SEQ ID NO: 965044 - RNA, 22 nt, Human
auuuccuuugcaaagacugugc

SEQ ID NO: 965045 - RNA, 20 nt, Human
uuuuccagaaaguaucauug

SEQ ID NO: 965046 - RNA, 22 nt, Human
cagggugggcacccagccucca

SEQ ID NO: 965047 - RNA, 22 nt, Human
gaagccaguacugugcucugca

SEQ ID NO: 965048 - RNA, 22 nt, Human
cucaugucuucacccauucuaa

SEQ ID NO: 965049 - RNA, 22 nt, Human
caggugaccuuuguccuaaguu

SEQ ID NO: 965050 - RNA, 22 nt, Human
acagaauuaaugaaaauuacaa

SEQ ID NO: 965051 - RNA, 22 nt, Human
acagagaugcaaguguguauuu

SEQ ID NO: 965052 - RNA, 22 nt, Human
agguaggguuaauggagauaua

SEQ ID NO: 965053 - RNA, 22 nt, Human
ucagcaaugugauacugugcaa

SEQ ID NO: 965054 - RNA, 22 nt, Human
agcagaacauuuucagggcugu

SEQ ID NO: 965055 - RNA, 22 nt, Human
ccagagucuuuauauuccugaa

SEQ ID NO: 965056 - RNA, 20 nt, Human
acugagcugcauggagagga

SEQ ID NO: 965057 - RNA, 22 nt, Human
ccugccugcuuucugcuuugca

SEQ ID NO: 965058 - RNA, 22 nt, Human
agcagcuguggaaaaguaacua

SEQ ID NO: 965059 - RNA, 22 nt, Human
uugaaucauuacaauagauaag

SEQ ID NO: 965060 - RNA, 22 nt, Human
ggcagacaccuuuaugucuaau

SEQ ID NO: 965061 - RNA, 22 nt, Human
cagcccaggccgacaguuccuc

SEQ ID NO: 965062 - RNA, 22 nt, Human
acugaaggcuuucccaagguca

SEQ ID NO: 965063 - RNA, 22 nt, Human
gagaagcaauuuccaacugugc

SEQ ID NO: 965064 - RNA, 22 nt, Human
ccaggcucaggugcgagagaca

SEQ ID NO: 965065 - RNA, 22 nt, Human
gagacugauggggcucccagaa

SEQ ID NO: 965066 - RNA, 22 nt, Human
ccuggcuguggcggugcucuca

SEQ ID NO: 965067 - RNA, 22 nt, Human
cagcugccccuccagggcuggg

SEQ ID NO: 965068 - RNA, 22 nt, Human
aucaguuuauacuuauaaaucu

SEQ ID NO: 965069 - RNA, 22 nt, Human
aauaauuagugggacagagaac

SEQ ID NO: 965070 - RNA, 22 nt, Human
aggccaaauguguauaaaacau

SEQ ID NO: 965071 - RNA, 22 nt, Human
ucucucagggggaaggcugaag

SEQ ID NO: 965072 - RNA, 22 nt, Human
gaaauauucuugucuuguuuuc

SEQ ID NO: 965073 - RNA, 22 nt, Human
uggccuggaaaaaugcagaugg

SEQ ID NO: 965074 - RNA, 22 nt, Human
aacauuucagcaccugauuccu

SEQ ID NO: 965075 - RNA, 22 nt, Human
ugggagcccaagggagcugccg

SEQ ID NO: 965076 - RNA, 22 nt, Human
gggaggugauggcaagcagcgg

SEQ ID NO: 965077 - RNA, 22 nt, Human
uggugagcucuggcagucugug

SEQ ID NO: 965078 - RNA, 22 nt, Human
agagugaagguugacacuucac

SEQ ID NO: 965079 - RNA, 22 nt, Human
ggccacaagugguccugagucc

SEQ ID NO: 965080 - RNA, 22 nt, Human
guuauauaagacaaaucagagu

SEQ ID NO: 965081 - RNA, 17 nt, Human
uuccaguuuaguauugu

SEQ ID NO: 965082 - RNA, 22 nt, Human
uuaaagggccgauuuccaggcc

SEQ ID NO: 965083 - RNA, 22 nt, Human
gaacagcuucuugggagcuggg

SEQ ID NO: 965084 - RNA, 22 nt, Human
uggcaacauggacaggucugcc

SEQ ID NO: 965085 - RNA, 22 nt, Human
gucaucuugcuguuuuagaucu

SEQ ID NO: 965086 - RNA, 21 nt, Human
aaugugugcuauuuaucuuuu

SEQ ID NO: 965087 - RNA, 22 nt, Human
gcucaggaucagccaccucuuu

SEQ ID NO: 965088 - RNA, 22 nt, Human
ugauuuccaguugcugggugcu

SEQ ID NO: 965089 - RNA, 22 nt, Human
ccagagcuccagggcuacagaa

SEQ ID NO: 965090 - RNA, 22 nt, Human
agaugauggccauguccucucc

SEQ ID NO: 965091 - RNA, 22 nt, Human
agcugaaggcuagaacagcugg

SEQ ID NO: 965092 - RNA, 16 nt, Human
gccuggaguggcaggg

SEQ ID NO: 965093 - RNA, 22 nt, Human
acuguucacagauuagucgaug

SEQ ID NO: 965094 - RNA, 22 nt, Human
gcuccacuugcagcuaggcuug

SEQ ID NO: 965095 - RNA, 22 nt, Human
ucuuugcaacucccauuuccau

SEQ ID NO: 965096 - RNA, 19 nt, Human
gaguuauugccagggcaug

SEQ ID NO: 965097 - RNA, 22 nt, Human
ucagaacagaagaaggaacacg

SEQ ID NO: 965098 - RNA, 22 nt, Human
auuaggacagagaugucaagag

SEQ ID NO: 965099 - RNA, 22 nt, Human
gccugggugucgaucacuagug

SEQ ID NO: 965100 - RNA, 21 nt, Human
uccaggagcacgggacuagga

SEQ ID NO: 965101 - RNA, 22 nt, Human
gcagcagaguuugggagauggu

SEQ ID NO: 965102 - RNA, 22 nt, Human
ugggagcaccuugagggcagaa

SEQ ID NO: 965103 - RNA, 22 nt, Human
ugcuccuuccucauccugugca

SEQ ID NO: 965104 - RNA, 22 nt, Human
gccuggcacauugcaguggauu

SEQ ID NO: 965105 - RNA, 22 nt, Human
ccuggccagggucugggcugcu

SEQ ID NO: 965106 - RNA, 20 nt, Human
acaaaugcauucugugacau

SEQ ID NO: 965107 - RNA, 22 nt, Human
ugucacauguguggcauuuuuc

SEQ ID NO: 965108 - RNA, 20 nt, Human
acugccuugguucaguaggu

SEQ ID NO: 965109 - RNA, 22 nt, Human
gagaaagcuucuuucccacagg

SEQ ID NO: 965110 - RNA, 22 nt, Human
gcucucuugguggcuguccugg

SEQ ID NO: 965111 - RNA, 22 nt, Human
auauguuuuuggaaagaacaca

SEQ ID NO: 965112 - RNA, 22 nt, Human
guuugcauguauuaagucaaua

SEQ ID NO: 965113 - RNA, 22 nt, Human
cagggcucaucugugugaccag

SEQ ID NO: 965114 - RNA, 22 nt, Human
uugacaauguccuuugaauuuc

SEQ ID NO: 965115 - RNA, 22 nt, Human
caaagccucugauuucacuugu

SEQ ID NO: 965116 - RNA, 21 nt, Human
ugagccaggcugacggcugug

SEQ ID NO: 965117 - RNA, 19 nt, Human
gcuuuggagggagguucua

SEQ ID NO: 965118 - RNA, 22 nt, Human
gcuggccuucugcagaguucug

SEQ ID NO: 965119 - RNA, 18 nt, Human
cagagcagagguggagcg

SEQ ID NO: 965120 - RNA, 22 nt, Human
gagccagguuggaggcugcagu

SEQ ID NO: 965121 - RNA, 22 nt, Human
uggcagggccugaaucuuauac

SEQ ID NO: 965122 - RNA, 22 nt, Human
ugcugcacucaccaacagauaa

SEQ ID NO: 965123 - RNA, 22 nt, Human
uggaagggggaagacagcucug

SEQ ID NO: 965124 - RNA, 22 nt, Human
ugucucagggcagcagcagggg

SEQ ID NO: 965125 - RNA, 22 nt, Human
uaguaucuauuaguaacaagag

SEQ ID NO: 965126 - RNA, 22 nt, Human
auguguguacacacgugacucu

SEQ ID NO: 965127 - RNA, 22 nt, Human
cuuguucaguugccucuccugc

SEQ ID NO: 965128 - RNA, 22 nt, Human
uucuaaacuucaauucuaaauu

SEQ ID NO: 965129 - RNA, 22 nt, Human
auugaaagagaauguagcucuu

SEQ ID NO: 965130 - RNA, 22 nt, Human
gauuucuugauaauucaaaucc

SEQ ID NO: 965131 - RNA, 22 nt, Human
uguggccaccagagcugcuauu

SEQ ID NO: 965132 - RNA, 21 nt, Human
ugggacagugauggcuccucc

SEQ ID NO: 965133 - RNA, 22 nt, Human
ucucaggagccacagcgggagu

SEQ ID NO: 965134 - RNA, 22 nt, Human
aucuggcucuuccuggaguucc

SEQ ID NO: 965135 - RNA, 22 nt, Human
agaguggggaagguguugagaa

SEQ ID NO: 965136 - RNA, 22 nt, Human
cuuggcagcuuuuggaggagcc

SEQ ID NO: 965137 - RNA, 22 nt, Human
gaagcagcugccagagaugucu

SEQ ID NO: 965138 - RNA, 22 nt, Human
gcaguggauccaaugguaucuu

SEQ ID NO: 965139 - RNA, 22 nt, Human
augggagccaucgcauuugcug

SEQ ID NO: 965140 - RNA, 22 nt, Human
uccugggcugcagggaagagca

SEQ ID NO: 965141 - RNA, 22 nt, Human
aggguggagggagucccugagc

SEQ ID NO: 965142 - RNA, 22 nt, Human
gccaccagguuagauccagccu

SEQ ID NO: 965143 - RNA, 22 nt, Human
uuuggaauauuaaaaugucuca

SEQ ID NO: 965144 - RNA, 22 nt, Human
gcagggacaacugugcaccuga

SEQ ID NO: 965145 - RNA, 23 nt, Human
aggauguaggauguauggcagag

SEQ ID NO: 965146 - RNA, 21 nt, Human
accucaagcaacaaccaaggu

SEQ ID NO: 965147 - RNA, 22 nt, Human
ugcauugcauuugucaugaaga

SEQ ID NO: 965148 - RNA, 19 nt, Human
cccaggagcaguauugaug

SEQ ID NO: 965149 - RNA, 22 nt, Human
aggccagaugucgggcuagaag

SEQ ID NO: 965150 - RNA, 22 nt, Human
ggcucugcugguaagaugccuc

SEQ ID NO: 965151 - RNA, 22 nt, Human
uguuuuaagggucaacugucac

SEQ ID NO: 965152 - RNA, 22 nt, Human
uuuccuaggagauugaucacau

SEQ ID NO: 965153 - RNA, 22 nt, Human
gucaaguuaagauaaggucaug

SEQ ID NO: 965154 - RNA, 22 nt, Human
aggccagcaagaaagagagucu

SEQ ID NO: 965155 - RNA, 22 nt, Human
aaaggaagaugccaggacucug

SEQ ID NO: 965156 - RNA, 22 nt, Human
uaaaaguauacuuucaaaggag

SEQ ID NO: 965157 - RNA, 22 nt, Human
aggaaaaagaguugcugccuuc

SEQ ID NO: 965158 - RNA, 22 nt, Human
cagggccaaguuggugccuuuu

SEQ ID NO: 965159 - RNA, 22 nt, Human
uacaacauuguguugcuucaua

SEQ ID NO: 965160 - RNA, 22 nt, Human
agaaguuaccacauacuucucu

SEQ ID NO: 965161 - RNA, 22 nt, Human
cccaugagguggagguugcagu

SEQ ID NO: 965162 - RNA, 22 nt, Human
cagcuagcuaagaaggccagag

SEQ ID NO: 965163 - RNA, 22 nt, Human
uuugucagucaugucugcuuuu

SEQ ID NO: 965164 - RNA, 22 nt, Human
ggagccaggggaccuucacaga

SEQ ID NO: 965165 - RNA, 22 nt, Human
cucuggccuggggccugcuccc

SEQ ID NO: 965166 - RNA, 22 nt, Human
uguuggcaucucugagagaguu

SEQ ID NO: 965167 - RNA, 22 nt, Human
uccucugcucagcauuccucac

SEQ ID NO: 965168 - RNA, 20 nt, Human
uugauaggcagcuugucagg

SEQ ID NO: 965169 - RNA, 21 nt, Human
cccaggagaagaaaagaugca

SEQ ID NO: 965170 - RNA, 22 nt, Human
gugccuggcacacagaaggcaa

SEQ ID NO: 965171 - RNA, 22 nt, Human
ggcucagggaaugaggaagaau

SEQ ID NO: 965172 - RNA, 22 nt, Human
uagaaaagaauuuuauuugaua

SEQ ID NO: 965173 - RNA, 22 nt, Human
agccagugcaacagcagugaag

SEQ ID NO: 965174 - RNA, 22 nt, Human
gcugucuguucgagcguguguu

SEQ ID NO: 965175 - RNA, 22 nt, Human
aacuuuguguguuuaauauggc

SEQ ID NO: 965176 - RNA, 22 nt, Human
ugcaggaaauuccaggguggcc

SEQ ID NO: 965177 - RNA, 22 nt, Human
uuuauaaguacuuugucugcuu

SEQ ID NO: 965178 - RNA, 22 nt, Human
cuucuccucugaguccugggag

SEQ ID NO: 965179 - RNA, 22 nt, Human
aaaucugggagcagcucggcca

SEQ ID NO: 965180 - RNA, 21 nt, Human
uuugaauagaaauagugcuua

SEQ ID NO: 965181 - RNA, 22 nt, Human
acagaggaaggcugagcugccc

SEQ ID NO: 965182 - RNA, 22 nt, Human
aaucuucacagagaaaauuagg

SEQ ID NO: 965183 - RNA, 22 nt, Human
ugcucugugguccaagauggcu

SEQ ID NO: 965184 - RNA, 21 nt, Human
uuagaaagcucacuacaguua

SEQ ID NO: 965185 - RNA, 22 nt, Human
ccagggcaugggaagaacugaa

SEQ ID NO: 965186 - RNA, 22 nt, Human
augcaccugaacuccaucagcu

SEQ ID NO: 965187 - RNA, 19 nt, Human
ugcucaggccaaggagccc

SEQ ID NO: 965188 - RNA, 22 nt, Human
uccaugaguuugaggaaaagag

SEQ ID NO: 965189 - RNA, 22 nt, Human
ugagaggccccagcucuuggcc

SEQ ID NO: 965190 - RNA, 22 nt, Human
auaugaaaauguuuuagcugua

SEQ ID NO: 965191 - RNA, 22 nt, Human
aggcugggaaaccugaaguugu

SEQ ID NO: 965192 - RNA, 22 nt, Human
acacuucuauucccugcacaaa

SEQ ID NO: 965193 - RNA, 22 nt, Human
ugccaggggaccuagggauguc

SEQ ID NO: 965194 - RNA, 22 nt, Human
cugagccaaggggacagugaca

SEQ ID NO: 965195 - RNA, 22 nt, Human
cagccagcugaauguaccauga

SEQ ID NO: 965196 - RNA, 22 nt, Human
augcccugaggaaugucacgcu

SEQ ID NO: 965197 - RNA, 22 nt, Human
gccuugggauucuuggaugcuc

SEQ ID NO: 965198 - RNA, 22 nt, Human
ccagggcagggaccacgugucu

SEQ ID NO: 965199 - RNA, 22 nt, Human
ucauaacagcuaagucccuuuc

SEQ ID NO: 965200 - RNA, 22 nt, Human
agccaggaaugcaugcucugcu

SEQ ID NO: 965201 - RNA, 22 nt, Human
agccuggagaggcgccauacac

SEQ ID NO: 965202 - RNA, 22 nt, Human
auucagaaauagaaaauuugau

SEQ ID NO: 965203 - RNA, 22 nt, Human
uucacagacauugcagacugaa

SEQ ID NO: 965204 - RNA, 22 nt, Human
gaaaugugaccuacuuccuugu

SEQ ID NO: 965205 - RNA, 22 nt, Human
uuuuaacuuaaaauacauagau

SEQ ID NO: 965206 - RNA, 22 nt, Human
acagcauucaauaaauaauaac

SEQ ID NO: 965207 - RNA, 22 nt, Human
cugagggucaacuugauuguau

SEQ ID NO: 965208 - RNA, 22 nt, Human
ggggaugguagaccggugacgu

SEQ ID NO: 965209 - RNA, 22 nt, Human
ugccagcacuucuggcugucug

SEQ ID NO: 965210 - RNA, 22 nt, Human
aaaugugcuucuuacucucaau

SEQ ID NO: 965211 - RNA, 22 nt, Human
uugaaaguagcagcugcauaug

SEQ ID NO: 965212 - RNA, 22 nt, Human
uccuugaagaaugauucuugga

SEQ ID NO: 965213 - RNA, 22 nt, Human
uaugcacacauuagcacagggu

SEQ ID NO: 965214 - RNA, 22 nt, Human
gagcucuguguagccugagggu

SEQ ID NO: 965215 - RNA, 22 nt, Human
ucuccucaccaccagcagcaga

SEQ ID NO: 965216 - RNA, 22 nt, Human
aaacacuucaaggacuucuguc

SEQ ID NO: 965217 - RNA, 22 nt, Human
agacaggaugcauacucuuggu

SEQ ID NO: 965218 - RNA, 22 nt, Human
gcuggccugggcagccugucgg

SEQ ID NO: 965219 - RNA, 22 nt, Human
ugaggcagcaauugauuauuca

SEQ ID NO: 965220 - RNA, 22 nt, Human
gccugagcaggcguggaccaug

SEQ ID NO: 965221 - RNA, 22 nt, Human
gcucccugaaaagaacaaaguc

SEQ ID NO: 965222 - RNA, 22 nt, Human
agagccaggcaggcaauguuga

SEQ ID NO: 965223 - RNA, 22 nt, Human
acuccugggugcauuucugauu

SEQ ID NO: 965224 - RNA, 22 nt, Human
ugaaggccagcucuuuaucagc

SEQ ID NO: 965225 - RNA, 22 nt, Human
agaggccggccgagcccauggg

SEQ ID NO: 965226 - RNA, 22 nt, Human
ugacacagaaauuaagcuguca

SEQ ID NO: 965227 - RNA, 18 nt, Human
caggucagccuggccuca

SEQ ID NO: 965228 - RNA, 22 nt, Human
ugcugggggugucucaccaggc

SEQ ID NO: 965229 - RNA, 22 nt, Human
ccagagccagagaggugccugc

SEQ ID NO: 965230 - RNA, 22 nt, Human
ucuguaucacccguucccagaa

SEQ ID NO: 965231 - RNA, 17 nt, Human
gccaggagguuugagcu

SEQ ID NO: 965232 - RNA, 22 nt, Human
uggucaaaagaaagcucagaac

SEQ ID NO: 965233 - RNA, 22 nt, Human
agacagggucuugaucagagcu

SEQ ID NO: 965234 - RNA, 22 nt, Human
ggcacgugccuaaggagcaggc

SEQ ID NO: 965235 - RNA, 22 nt, Human
acagugucaugucguguucccc

SEQ ID NO: 965236 - RNA, 22 nt, Human
cagcugagucugagguucuuug

SEQ ID NO: 965237 - RNA, 22 nt, Human
cccagcacuuugaauaugucac

SEQ ID NO: 965238 - RNA, 22 nt, Human
aggguaggaacugaguggaagg

SEQ ID NO: 965239 - RNA, 22 nt, Human
cugguccuugacgcgugggagg

SEQ ID NO: 965240 - RNA, 22 nt, Human
uacagaaaaacuggcauugaag

SEQ ID NO: 965241 - RNA, 22 nt, Human
uuaguuuucccaucuuuauggu

SEQ ID NO: 965242 - RNA, 22 nt, Human
agcugagcauuugauccaccuc

SEQ ID NO: 965243 - RNA, 22 nt, Human
agcccuccucacaucagcgucc

SEQ ID NO: 965244 - RNA, 22 nt, Human
gagcucauccccaugguccguc

SEQ ID NO: 965245 - RNA, 22 nt, Human
caucagcacuaugauuaaagua

SEQ ID NO: 965246 - RNA, 22 nt, Human
aaagccuuggucaucugguucc

SEQ ID NO: 965247 - RNA, 19 nt, Human
uaucuguuuccugcuuguc

SEQ ID NO: 965248 - RNA, 22 nt, Human
uggcucugccacuaacuuggua

SEQ ID NO: 965249 - RNA, 22 nt, Human
aggcugcuucagcugcagggag

SEQ ID NO: 965250 - RNA, 22 nt, Human
gguggccaggccagcucuggcc

SEQ ID NO: 965251 - RNA, 22 nt, Human
augcugagugagugaaacccag

SEQ ID NO: 965252 - RNA, 22 nt, Human
gcagcuggagccagccagacac

SEQ ID NO: 965253 - RNA, 22 nt, Human
caggccugagacaucugagaua

SEQ ID NO: 965254 - RNA, 22 nt, Human
aagagggcugcaaucuuauugc

SEQ ID NO: 965255 - RNA, 22 nt, Human
ugugcccauuccacuugaguac

SEQ ID NO: 965256 - RNA, 22 nt, Human
aacuccagggcauugucuccug

SEQ ID NO: 965257 - RNA, 22 nt, Human
cagagcagaagcgguccucaca

SEQ ID NO: 965258 - RNA, 22 nt, Human
ccccaggacguggcccucauag

SEQ ID NO: 965259 - RNA, 22 nt, Human
acuuucuauggcuuauuaugag

SEQ ID NO: 965260 - RNA, 22 nt, Human
gcugguaggaagugcuccugcc

SEQ ID NO: 965261 - RNA, 22 nt, Human
aggggugugcauccuggaggau

SEQ ID NO: 965262 - RNA, 22 nt, Human
uauuccagguauucuucaagag

SEQ ID NO: 965263 - RNA, 22 nt, Human
auuauuaggugcucucugacaa

SEQ ID NO: 965264 - RNA, 22 nt, Human
gaugggggccagggccugcuuu

SEQ ID NO: 965265 - RNA, 22 nt, Human
gaccaaggaagaggggagccag

SEQ ID NO: 965266 - RNA, 22 nt, Human
agcaccugucacaagcagaagg

SEQ ID NO: 965267 - RNA, 20 nt, Human
gagauggcuaagugcugaac

SEQ ID NO: 965268 - RNA, 22 nt, Human
gcuguccagagcaugggagcaa

SEQ ID NO: 965269 - RNA, 22 nt, Human
ucacaucucccuggaggacaca

SEQ ID NO: 965270 - RNA, 22 nt, Human
aagggagguaaagcuauuuaaa

SEQ ID NO: 965271 - RNA, 22 nt, Human
gagggagggccaggucccaacc

SEQ ID NO: 965272 - RNA, 22 nt, Human
agugaaaugauaguguaaauac

SEQ ID NO: 965273 - RNA, 19 nt, Human
ugaaauggcaguugcuaaa

SEQ ID NO: 965274 - RNA, 22 nt, Human
uguggaaaagaauaagggagau

SEQ ID NO: 965275 - RNA, 20 nt, Human
cuggcaggagcgagucuacc

SEQ ID NO: 965276 - RNA, 22 nt, Human
uccuggccaggaugaccuaaca

SEQ ID NO: 965277 - RNA, 22 nt, Human
aaguggacuaauacaaggacua

SEQ ID NO: 965278 - RNA, 22 nt, Human
caggcacugugccucgcucccu

SEQ ID NO: 965279 - RNA, 20 nt, Human
uggucuggagccagugagga

SEQ ID NO: 965280 - RNA, 22 nt, Human
cagcacugcuucgcagccaggg

SEQ ID NO: 965281 - RNA, 20 nt, Human
aggagaaauucgggacaccu

SEQ ID NO: 965282 - RNA, 22 nt, Human
gguggccuuucaguggaucagg

SEQ ID NO: 965283 - RNA, 21 nt, Human
aguucauacugaguaacaaaa

SEQ ID NO: 965284 - RNA, 22 nt, Human
uauccaggaggaacucauuuug

SEQ ID NO: 965285 - RNA, 17 nt, Human
ugguggcuggagucagg

SEQ ID NO: 965286 - RNA, 22 nt, Human
agccuucaaccuagcuagagca

SEQ ID NO: 965287 - RNA, 22 nt, Human
ccucuggggugagugggccacu

SEQ ID NO: 965288 - RNA, 22 nt, Human
ccuggcagacagcacugaagcu

SEQ ID NO: 965289 - RNA, 22 nt, Human
aaaacucugcaguuaguuucua

SEQ ID NO: 965290 - RNA, 22 nt, Human
cugccagucuaugcugcucggc

SEQ ID NO: 965291 - RNA, 22 nt, Human
aauaauuuugagagccuggaaa

SEQ ID NO: 965292 - RNA, 22 nt, Human
ucagaagcaaacaucacucuag

SEQ ID NO: 965293 - RNA, 22 nt, Human
ucagggaaugaugcacacaguu

SEQ ID NO: 965294 - RNA, 22 nt, Human
aaaguuugagugauuugacaca

SEQ ID NO: 965295 - RNA, 22 nt, Human
ugaggggagguuggggcacauc

SEQ ID NO: 965296 - RNA, 21 nt, Human
gggaaugagauucuuggagau

SEQ ID NO: 965297 - RNA, 21 nt, Human
ccaggcagagcugugaguucu

SEQ ID NO: 965298 - RNA, 22 nt, Human
uagggauguggugagaacugag

SEQ ID NO: 965299 - RNA, 22 nt, Human
cacugugggguuuggcuggaac

SEQ ID NO: 965300 - RNA, 23 nt, Human
ugggcaucuccucugugccaggc

SEQ ID NO: 965301 - RNA, 23 nt, Human
aagcuuccuucacgucuccuggg

SEQ ID NO: 965302 - RNA, 22 nt, Human
guccagggaaauagcgacaggg

SEQ ID NO: 965303 - RNA, 18 nt, Human
caggagcaggaguugaac

SEQ ID NO: 965304 - RNA, 22 nt, Human
gggcaugguggugcacaccugu

SEQ ID NO: 965305 - RNA, 22 nt, Human
uccacugcagcuucugauggaa

SEQ ID NO: 965306 - RNA, 22 nt, Human
gagcaguagaguacauggcucc

SEQ ID NO: 965307 - RNA, 22 nt, Human
ccugcagcuccggauuucuggg

SEQ ID NO: 965308 - RNA, 22 nt, Human
gucaggaucucccaguacauau

SEQ ID NO: 965309 - RNA, 20 nt, Human
cugcugugugugccucagcc

SEQ ID NO: 965310 - RNA, 22 nt, Human
aggucaaaccacagcucuaggc

SEQ ID NO: 965311 - RNA, 22 nt, Human
ccuggugcuuaccagagcuuuu

SEQ ID NO: 965312 - RNA, 20 nt, Human
aauaaaagaagccuucaccc

SEQ ID NO: 965313 - RNA, 22 nt, Human
acauguaaaaggaacaugcaug

SEQ ID NO: 965314 - RNA, 22 nt, Human
acaaaguuugugguauuccaag

SEQ ID NO: 965315 - RNA, 22 nt, Human
uuucauuaguaugacagcacgc

SEQ ID NO: 965316 - RNA, 22 nt, Human
aauguguauaugaacauacagg

SEQ ID NO: 965317 - RNA, 22 nt, Human
guuguuuuuguucucuauagcu

SEQ ID NO: 965318 - RNA, 22 nt, Human
ucuugggaucaccuccuggcuu

SEQ ID NO: 965319 - RNA, 23 nt, Human
uuugaaguugacugccuuccaga

SEQ ID NO: 965320 - RNA, 22 nt, Human
cucuuucugauucgcugggacc

SEQ ID NO: 965321 - RNA, 22 nt, Human
augcacuacuagaugcaaaagu

SEQ ID NO: 965322 - RNA, 22 nt, Human
agugccaggagcaaggagcucc

SEQ ID NO: 965323 - RNA, 22 nt, Human
acacaugcugauaagaauauaa

SEQ ID NO: 965324 - RNA, 21 nt, Human
ugcagagauaucugaagcaga

SEQ ID NO: 965325 - RNA, 22 nt, Human
ccuucugcuggucaucccagug

SEQ ID NO: 965326 - RNA, 21 nt, Human
ugccaggccugagcugggguc

SEQ ID NO: 965327 - RNA, 22 nt, Human
cacauggggcgcugcauuggcc

SEQ ID NO: 965328 - RNA, 22 nt, Human
uauucacaaaaugagguccuca

SEQ ID NO: 965329 - RNA, 22 nt, Human
gcuggagcugcagccugggccu

SEQ ID NO: 965330 - RNA, 22 nt, Human
ccuucauugcaucuuuaagaga

SEQ ID NO: 965331 - RNA, 22 nt, Human
uuaugcuaguauaguccuuaga

SEQ ID NO: 965332 - RNA, 23 nt, Human
uugcuucugugcaauucaguacu

SEQ ID NO: 965333 - RNA, 22 nt, Human
ucauuuguucucauucucuacu

SEQ ID NO: 965334 - RNA, 22 nt, Human
uuccuguaguugugcaauguac

SEQ ID NO: 965335 - RNA, 18 nt, Human
gggcaagcggcugucacc

SEQ ID NO: 965336 - RNA, 22 nt, Human
uuugaagucagacacugcuuug

SEQ ID NO: 965337 - RNA, 22 nt, Human
aagaauuauugcaauacuagau

SEQ ID NO: 965338 - RNA, 22 nt, Human
ccaaagucuggagcagcagagc

SEQ ID NO: 965339 - RNA, 22 nt, Human
ucauuuguaccauuuuuuaaga

SEQ ID NO: 965340 - RNA, 23 nt, Human
cuugcagggcuggaggcuuagaa

SEQ ID NO: 965341 - RNA, 22 nt, Human
uccucagaugcucuuggacgcc

SEQ ID NO: 965342 - RNA, 22 nt, Human
uuacaaaguucugaguucaaac

SEQ ID NO: 965343 - RNA, 22 nt, Human
cguguacagucuaucuuuuuuc

SEQ ID NO: 965344 - RNA, 22 nt, Human
agccuccuggaguuucugggau

SEQ ID NO: 965345 - RNA, 22 nt, Human
gagcgauguggguauguagaag

SEQ ID NO: 965346 - RNA, 22 nt, Human
acugccugcauccuuaggguag

SEQ ID NO: 965347 - RNA, 22 nt, Human
uucuucuccgaggagggcuggu

SEQ ID NO: 965348 - RNA, 22 nt, Human
gauuucuugauaaguaguguga

SEQ ID NO: 965349 - RNA, 22 nt, Human
uaaagugcuggauuugaguaaa

SEQ ID NO: 965350 - RNA, 19 nt, Human
gcucugcuacuauuaccac

SEQ ID NO: 965351 - RNA, 22 nt, Human
gccagagcagaauagaguggcc

SEQ ID NO: 965352 - RNA, 22 nt, Human
ucaccagucuuucuuaccauug

SEQ ID NO: 965353 - RNA, 22 nt, Human
ucccaggacuuccaguuggagg

SEQ ID NO: 965354 - RNA, 22 nt, Human
agcugcucuuugaaggacacuu

SEQ ID NO: 965355 - RNA, 22 nt, Human
gcucagagaugucugcugccuu

SEQ ID NO: 965356 - RNA, 19 nt, Human
ggaugagggucaggcauag

SEQ ID NO: 965357 - RNA, 22 nt, Human
ggucagggggaucugugaggua

SEQ ID NO: 965358 - RNA, 22 nt, Human
gcaggagaacaaagcaagcugc

SEQ ID NO: 965359 - RNA, 22 nt, Human
ugaagcaggaaacuucuuguuu

SEQ ID NO: 965360 - RNA, 22 nt, Human
agccuggauccauguggcuacc

SEQ ID NO: 965361 - RNA, 22 nt, Human
aguauuuccuggcuuaucugcu

SEQ ID NO: 965362 - RNA, 22 nt, Human
gccuucugauaucucuuggcau

SEQ ID NO: 965363 - RNA, 22 nt, Human
aaaggcuccuucucccaugacc

SEQ ID NO: 965364 - RNA, 22 nt, Human
augcugagcagagcugacaugc

SEQ ID NO: 965365 - RNA, 22 nt, Human
cagggccaagccccuuuggcug

SEQ ID NO: 965366 - RNA, 22 nt, Human
ucucagagugguggucccucug

SEQ ID NO: 965367 - RNA, 22 nt, Human
uuuccucuccggggccuccagg

SEQ ID NO: 965368 - RNA, 22 nt, Human
ucaaaccaccuuguuacugggg

SEQ ID NO: 965369 - RNA, 22 nt, Human
uucuucuuaauguccugggaac

SEQ ID NO: 965370 - RNA, 22 nt, Human
agaggagguccuuuucugaugu

SEQ ID NO: 965371 - RNA, 22 nt, Human
cccuggcagaaugucucugggc

SEQ ID NO: 965372 - RNA, 22 nt, Human
ccuugggacagccagcuucaga

SEQ ID NO: 965373 - RNA, 22 nt, Human
cccaggaggcagagguugcagu

SEQ ID NO: 965374 - RNA, 22 nt, Human
uggcuggcaaggcuggagucag

SEQ ID NO: 965375 - RNA, 22 nt, Human
acugaaggucucagcaaggaug

SEQ ID NO: 965376 - RNA, 21 nt, Human
uucaauacuauuucaauaguc

SEQ ID NO: 965377 - RNA, 22 nt, Human
cagcugcaguucaaugcuugcu

SEQ ID NO: 965378 - RNA, 22 nt, Human
uauguuauuuucauacaacaga

SEQ ID NO: 965379 - RNA, 22 nt, Human
ugagggaggcccuuugagcaga

SEQ ID NO: 965380 - RNA, 19 nt, Human
cuugguuaugguaugaugc

SEQ ID NO: 965381 - RNA, 21 nt, Human
auacuuugaauuacagccuug

SEQ ID NO: 965382 - RNA, 22 nt, Human
ucagguggcuucggggaguggc

SEQ ID NO: 965383 - RNA, 22 nt, Human
uguuucuaggucaauaauuuuu

SEQ ID NO: 965384 - RNA, 17 nt, Human
gauuuccugaaguucuu

SEQ ID NO: 965385 - RNA, 17 nt, Human
cccagagaugcugccuu

SEQ ID NO: 965386 - RNA, 22 nt, Human
gaggcagcgggucaggaccgug

SEQ ID NO: 965387 - RNA, 22 nt, Human
cagacuggccacaucugcacug

SEQ ID NO: 965388 - RNA, 22 nt, Human
acacugaauaauugagaguuga

SEQ ID NO: 965389 - RNA, 19 nt, Human
ugucucugaaagaugagcu

SEQ ID NO: 965390 - RNA, 22 nt, Human
cugcucugugguccaugagaca

SEQ ID NO: 965391 - RNA, 22 nt, Human
aauguacaauaagacaaagagg

SEQ ID NO: 965392 - RNA, 22 nt, Human
ccagagcugcauccagcagguu

SEQ ID NO: 965393 - RNA, 22 nt, Human
aggggugaaagagggcccucaa

SEQ ID NO: 965394 - RNA, 22 nt, Human
ggcaggcugggugucauggagu

SEQ ID NO: 965395 - RNA, 19 nt, Human
caugagcugcucacuuccc

SEQ ID NO: 965396 - RNA, 22 nt, Human
acaucucaugaaugauaaauca

SEQ ID NO: 965397 - RNA, 22 nt, Human
ugagccaggaguuugaggcugu

SEQ ID NO: 965398 - RNA, 22 nt, Human
aaaguuugaaugauauauuagu

SEQ ID NO: 965399 - RNA, 22 nt, Human
agugauggagcuuccucugcua

SEQ ID NO: 965400 - RNA, 22 nt, Human
uuucaaagucaauaucauuacc

SEQ ID NO: 965401 - RNA, 22 nt, Human
agcaccuucacaggcucucagg

SEQ ID NO: 965402 - RNA, 22 nt, Human
ucugccugagggagcugaggaa

SEQ ID NO: 965403 - RNA, 20 nt, Human
agccugccagcuggcccaga

SEQ ID NO: 965404 - RNA, 22 nt, Human
uccaagggaaugugggcaaugc

SEQ ID NO: 965405 - RNA, 22 nt, Human
gagcagggccacuucuguaccu

SEQ ID NO: 965406 - RNA, 22 nt, Human
aaccuuuugcaagugccuugac

SEQ ID NO: 965407 - RNA, 22 nt, Human
uuggcugaagguuaagugcugg

SEQ ID NO: 965408 - RNA, 22 nt, Human
uagccuucucaagacaaaguug

SEQ ID NO: 965409 - RNA, 22 nt, Human
uuaaagagucuacugcacaucc

SEQ ID NO: 965410 - RNA, 22 nt, Human
caguucucuuuccacuggaggc

SEQ ID NO: 965411 - RNA, 22 nt, Human
ucuggcuccacuuucuucauuu

SEQ ID NO: 965412 - RNA, 22 nt, Human
cagaaccaggaacugauggaga

SEQ ID NO: 965413 - RNA, 22 nt, Human
uucucuuuucaccaguugcuaa

SEQ ID NO: 965414 - RNA, 22 nt, Human
aucaguuuuguucacuacuaua

SEQ ID NO: 965415 - RNA, 22 nt, Human
ugcuuggccuacuuguccuuug

SEQ ID NO: 965416 - RNA, 22 nt, Human
gauuucuacuugaacuugcuaa

SEQ ID NO: 965417 - RNA, 22 nt, Human
acuguguggaaauuugugaggg

SEQ ID NO: 965418 - RNA, 22 nt, Human
auuauuagacuuauaugguagu

SEQ ID NO: 965419 - RNA, 22 nt, Human
gagaggccaccugacgagcagu

SEQ ID NO: 965420 - RNA, 22 nt, Human
gaaucauagaacauuaauagaa

SEQ ID NO: 965421 - RNA, 22 nt, Human
accugggagucacaccugagaa

SEQ ID NO: 965422 - RNA, 19 nt, Human
uggaggcaagacauggagg

SEQ ID NO: 965423 - RNA, 20 nt, Human
gcugcucuccacggucugca

SEQ ID NO: 965424 - RNA, 21 nt, Human
agagaagggacucuuccaguc

SEQ ID NO: 965425 - RNA, 22 nt, Human
gcuggggucugugaggagggcu

SEQ ID NO: 965426 - RNA, 22 nt, Human
agcuaggaaauugaggcugaga

SEQ ID NO: 965427 - RNA, 22 nt, Human
guaucuuuuacaccaggaaauu

SEQ ID NO: 965428 - RNA, 22 nt, Human
auccuugaacuuagacacuagg

SEQ ID NO: 965429 - RNA, 22 nt, Human
uuuugaaagggugauuuggcuu

SEQ ID NO: 965430 - RNA, 22 nt, Human
aaaauguguuuaugcauuucgu

SEQ ID NO: 965431 - RNA, 22 nt, Human
cuucucagaucucagcuuugag

SEQ ID NO: 965432 - RNA, 22 nt, Human
aggcagcguagcaaggcuagua

SEQ ID NO: 965433 - RNA, 20 nt, Human
ucccuggaggugguggcauc

SEQ ID NO: 965434 - RNA, 22 nt, Human
gugcuucucuucacacccaacu

SEQ ID NO: 965435 - RNA, 22 nt, Human
ugagcugggcugggcugagcug

SEQ ID NO: 965436 - RNA, 22 nt, Human
ugcugucugauucagggugauu

SEQ ID NO: 965437 - RNA, 17 nt, Human
uccuucagugccucugc

SEQ ID NO: 965438 - RNA, 22 nt, Human
uuucugcugugcuuucuugcgu

SEQ ID NO: 965439 - RNA, 22 nt, Human
aaaaaguauuggccaugguuga

SEQ ID NO: 965440 - RNA, 22 nt, Human
cgcugccaggauccccugccgg

SEQ ID NO: 965441 - RNA, 22 nt, Human
gcuggagauaguaggauccaua

SEQ ID NO: 965442 - RNA, 22 nt, Human
cagugccucuuaagugucaccc

SEQ ID NO: 965443 - RNA, 22 nt, Human
acuccuggguucuaaauuugaa

SEQ ID NO: 965444 - RNA, 22 nt, Human
uggcucagaacuacuucuaguu

SEQ ID NO: 965445 - RNA, 22 nt, Human
aauuuagaauucgcuagcuaau

SEQ ID NO: 965446 - RNA, 22 nt, Human
cagagccacuuggagaugagaa

SEQ ID NO: 965447 - RNA, 22 nt, Human
aggccuggcuuugguuugcuga

SEQ ID NO: 965448 - RNA, 22 nt, Human
aacucagcauccugcacagaga

SEQ ID NO: 965449 - RNA, 22 nt, Human
ccuuccuggagcccaugcagau

SEQ ID NO: 965450 - RNA, 22 nt, Human
guuugcauaucugugaaaugga

SEQ ID NO: 965451 - RNA, 22 nt, Human
uucacagggcagcagcugagcc

SEQ ID NO: 965452 - RNA, 22 nt, Human
ggccaaaucuguaaggcaagau

SEQ ID NO: 965453 - RNA, 22 nt, Human
ugcagaccucccauggcugccu

SEQ ID NO: 965454 - RNA, 18 nt, Human
ggcagggaaaagauaggg

SEQ ID NO: 965455 - RNA, 22 nt, Human
uacaguagaauuuuuaguaacu

SEQ ID NO: 965456 - RNA, 22 nt, Human
caaauacuaaacauaagauuuu

SEQ ID NO: 965457 - RNA, 22 nt, Human
aaagcaguauauugguaguugu

SEQ ID NO: 965458 - RNA, 21 nt, Human
agggagcuauuuauaguaagc

SEQ ID NO: 965459 - RNA, 22 nt, Human
aggcaucugaguuugcaagcuu

SEQ ID NO: 965460 - RNA, 22 nt, Human
caggaggaggugagguagaacu

SEQ ID NO: 965461 - RNA, 22 nt, Human
agggcagccugagugcuggccc

SEQ ID NO: 965462 - RNA, 22 nt, Human
uauguacaguccuuaacuuaaa

SEQ ID NO: 965463 - RNA, 22 nt, Human
agagauaugcugccuaaauuua

SEQ ID NO: 965464 - RNA, 22 nt, Human
aaggcagagggcuggaucagag

SEQ ID NO: 965465 - RNA, 22 nt, Human
agcucuggaauaaugaugugau

SEQ ID NO: 965466 - RNA, 22 nt, Human
aagaugcagcuuccacuuuugc

SEQ ID NO: 965467 - RNA, 22 nt, Human
gaagcacauggcuauagcuauu

SEQ ID NO: 965468 - RNA, 22 nt, Human
aggcccugagaaaaucccugca

SEQ ID NO: 965469 - RNA, 22 nt, Human
agcagcaacuuauuuuucuuau

SEQ ID NO: 965470 - RNA, 22 nt, Human
gugcuuccaucuagagggucac

SEQ ID NO: 965471 - RNA, 22 nt, Human
uguguuugggggagaugcauuu

SEQ ID NO: 965472 - RNA, 22 nt, Human
ugaagcagauggucuggucauu

SEQ ID NO: 965473 - RNA, 17 nt, Human
ccaggagagaugcuugu

SEQ ID NO: 965474 - RNA, 22 nt, Human
uggcugccuuucaccucaucuc

SEQ ID NO: 965475 - RNA, 22 nt, Human
uugcaaaagccgaggcacucca

SEQ ID NO: 965476 - RNA, 22 nt, Human
agacgagggccuggcacacagu

SEQ ID NO: 965477 - RNA, 22 nt, Human
ggugccaggcucccagcucagg

SEQ ID NO: 965478 - RNA, 22 nt, Human
ucauuucaaugauacuacuaag

SEQ ID NO: 965479 - RNA, 22 nt, Human
uucacauuagugguucuauaua

SEQ ID NO: 965480 - RNA, 22 nt, Human
ugggagagugcucaaugugcaa

SEQ ID NO: 965481 - RNA, 22 nt, Human
acauuugugcacaugugcaugg

SEQ ID NO: 965482 - RNA, 22 nt, Human
aggcccugcaggaagcaggaug

SEQ ID NO: 965483 - RNA, 22 nt, Human
cugugucuucugcuuacagucu

SEQ ID NO: 965484 - RNA, 22 nt, Human
ggcaccuggagguuuacuggau

SEQ ID NO: 965485 - RNA, 22 nt, Human
augauguuauuuucagaaacau

SEQ ID NO: 965486 - RNA, 22 nt, Human
uuugaaauuaagauauugucca

SEQ ID NO: 965487 - RNA, 22 nt, Human
ccugucugaaggcagggggaug

SEQ ID NO: 965488 - RNA, 22 nt, Human
acacucuguaaugucacacucc

SEQ ID NO: 965489 - RNA, 22 nt, Human
ucagcuggagaugagaaccgaa

SEQ ID NO: 965490 - RNA, 22 nt, Human
uucuuccucagcagggcugccu

SEQ ID NO: 965491 - RNA, 22 nt, Human
cagagccaaaugcugugguuau

SEQ ID NO: 965492 - RNA, 22 nt, Human
auuguaucuugucauuaugcau

SEQ ID NO: 965493 - RNA, 22 nt, Human
acauuucucagggaguuuugcu

SEQ ID NO: 965494 - RNA, 22 nt, Human
acuugcauuauauuuaucacaa

SEQ ID NO: 965495 - RNA, 22 nt, Human
cuggcaguguccagcucgugau

SEQ ID NO: 965496 - RNA, 21 nt, Human
uguuguuuuauggcuaugaau

SEQ ID NO: 965497 - RNA, 22 nt, Human
uacaaaguuuucuuggauugag

SEQ ID NO: 965498 - RNA, 22 nt, Human
gcagggcucaacaggacacccc

SEQ ID NO: 965499 - RNA, 22 nt, Human
aggagggugauccgggcugguc

SEQ ID NO: 965500 - RNA, 22 nt, Human
uuucaaagacagccauauuugu

SEQ ID NO: 965501 - RNA, 22 nt, Human
cugcagagaauuguggggcuuc

SEQ ID NO: 965502 - RNA, 22 nt, Human
ucuugccucuuccccuuuccau

SEQ ID NO: 965503 - RNA, 22 nt, Human
uuggcagugucacuagggagcc

SEQ ID NO: 965504 - RNA, 22 nt, Human
ucagucucaucaacucuauucc

SEQ ID NO: 965505 - RNA, 19 nt, Human
auuucaagagguuuauugg

SEQ ID NO: 965506 - RNA, 22 nt, Human
agaauaugaggaaacugugaau

SEQ ID NO: 965507 - RNA, 22 nt, Human
cuuccucugcggcgccgggcgc

SEQ ID NO: 965508 - RNA, 22 nt, Human
gccuggcugagguggggaggca

SEQ ID NO: 965509 - RNA, 22 nt, Human
auuaaggaauguaggcaagaag

SEQ ID NO: 965510 - RNA, 22 nt, Human
uaaaugaaaggguuuaauuuau

SEQ ID NO: 965511 - RNA, 22 nt, Human
gagcuucccucugcagucccug

SEQ ID NO: 965512 - RNA, 22 nt, Human
cuggccugaggccgccuucaga

SEQ ID NO: 965513 - RNA, 22 nt, Human
ggcugggcugcugggucagagc

SEQ ID NO: 965514 - RNA, 22 nt, Human
aguuuuaugcaguguucugaua

SEQ ID NO: 965515 - RNA, 22 nt, Human
cagcuggcguggagugauugca

SEQ ID NO: 965516 - RNA, 22 nt, Human
agcugcuguccuaggcacugua

SEQ ID NO: 965517 - RNA, 22 nt, Human
cagucuucuaaccuagcagccu

SEQ ID NO: 965518 - RNA, 22 nt, Human
cagacuugacggcagcugcuuu

SEQ ID NO: 965519 - RNA, 22 nt, Human
cagcuggcuccaccucugggcu

SEQ ID NO: 965520 - RNA, 22 nt, Human
ucucugcuaagauugugucuag

SEQ ID NO: 965521 - RNA, 22 nt, Human
cuuaacagagagaaguguugcu

SEQ ID NO: 965522 - RNA, 18 nt, Human
auguauguacauauuuau

SEQ ID NO: 965523 - RNA, 22 nt, Human
gaagagcugacagugucauccu

SEQ ID NO: 965524 - RNA, 22 nt, Human
ccucugagagaaggccuucagc

SEQ ID NO: 965525 - RNA, 22 nt, Human
gcucaggacccaggugugaccu

SEQ ID NO: 965526 - RNA, 22 nt, Human
auucuucauacagacaaguccu

SEQ ID NO: 965527 - RNA, 22 nt, Human
ucuccucuauuucuguauguau

SEQ ID NO: 965528 - RNA, 22 nt, Human
ugcugccagagagacagggacu

SEQ ID NO: 965529 - RNA, 20 nt, Human
uccugcaguuccuaggaggg

SEQ ID NO: 965530 - RNA, 19 nt, Human
aauccaggauaagccccuu

SEQ ID NO: 965531 - RNA, 22 nt, Human
cagagaccccuggcaugguggu

SEQ ID NO: 965532 - RNA, 22 nt, Human
gcauucaucuuccuccaugcag

SEQ ID NO: 965533 - RNA, 22 nt, Human
gcagggcuauuggaaggagaug

SEQ ID NO: 965534 - RNA, 22 nt, Human
auuaggcaauucugggcaucuc

SEQ ID NO: 965535 - RNA, 22 nt, Human
ugggacugcucuugcugggguc

SEQ ID NO: 965536 - RNA, 22 nt, Human
ccacagaggacaacugccuggc

SEQ ID NO: 965537 - RNA, 22 nt, Human
ucccaggauguuggcggcaggu

SEQ ID NO: 965538 - RNA, 22 nt, Human
uaaaucagggagucaucugcga

SEQ ID NO: 965539 - RNA, 22 nt, Human
gcucuauguugaccuucagugg

SEQ ID NO: 965540 - RNA, 22 nt, Human
ugggggagccuucacaguagcu

SEQ ID NO: 965541 - RNA, 22 nt, Human
guacauuucauuuaaaugaugu

SEQ ID NO: 965542 - RNA, 21 nt, Human
ccugggagaauuggguguggc

SEQ ID NO: 965543 - RNA, 22 nt, Human
cucacagaugcugugggucagg

SEQ ID NO: 965544 - RNA, 22 nt, Human
cauuaaguauuucaguuacugu

SEQ ID NO: 965545 - RNA, 22 nt, Human
uugugucuggauuucagcuuuc

SEQ ID NO: 965546 - RNA, 22 nt, Human
gaagucuucauucucucugaga

SEQ ID NO: 965547 - RNA, 22 nt, Human
gaugguuuaugauagaugggaa

SEQ ID NO: 965548 - RNA, 22 nt, Human
agggcacaucugcugggaaugg

SEQ ID NO: 965549 - RNA, 23 nt, Human
aaaguugauuugcaguuuaagag

SEQ ID NO: 965550 - RNA, 22 nt, Human
uggagccaggagccugggaguc

SEQ ID NO: 965551 - RNA, 22 nt, Human
ugcauggaggaagaugaaugca

SEQ ID NO: 965552 - RNA, 22 nt, Human
auucuucagaauaucuggcacu

SEQ ID NO: 965553 - RNA, 22 nt, Human
guggcaggagacuggaagaugg

SEQ ID NO: 965554 - RNA, 22 nt, Human
cccugggcagucugcacuucag

SEQ ID NO: 965555 - RNA, 22 nt, Human
ucaaugauaucagcaggaugug

SEQ ID NO: 965556 - RNA, 22 nt, Human
ugcagaaggccugacauugcac

SEQ ID NO: 965557 - RNA, 22 nt, Human
ggcagcugagcauggcuaccuu

SEQ ID NO: 965558 - RNA, 22 nt, Human
ggaggggauuuaguagaugcua

SEQ ID NO: 965559 - RNA, 20 nt, Human
ucugcccaccccggcuccca

SEQ ID NO: 965560 - RNA, 22 nt, Human
aguggggaagagcaugggcccu

SEQ ID NO: 965561 - RNA, 21 nt, Human
gcauggcaggucacuggggca

SEQ ID NO: 965562 - RNA, 22 nt, Human
agcaggaguuugaugcuuuuau

SEQ ID NO: 965563 - RNA, 22 nt, Human
uuuauuuauccuucuggauugc

SEQ ID NO: 965564 - RNA, 22 nt, Human
aacaaauggaacacaaaucuuu

SEQ ID NO: 965565 - RNA, 22 nt, Human
uaauaauuggcuaacccuggga

SEQ ID NO: 965566 - RNA, 22 nt, Human
accacaggacccaugagucagu

SEQ ID NO: 965567 - RNA, 20 nt, Human
agucucuguagugccugaga

SEQ ID NO: 965568 - RNA, 22 nt, Human
acaggagaauuaucuggaacaa

SEQ ID NO: 965569 - RNA, 22 nt, Human
uacccaggagaaacagcagggc

SEQ ID NO: 965570 - RNA, 22 nt, Human
ugggacaggaugaccagaaggu

SEQ ID NO: 965571 - RNA, 20 nt, Human
agaggcuuccuugggaggag

SEQ ID NO: 965572 - RNA, 22 nt, Human
auuuguaacacgugacagguug

SEQ ID NO: 965573 - RNA, 22 nt, Human
aggggaugauccucccgcagcg

SEQ ID NO: 965574 - RNA, 22 nt, Human
agucagugaaggcauugcucaa

SEQ ID NO: 965575 - RNA, 22 nt, Human
ccuguggcucucuuuggagguc

SEQ ID NO: 965576 - RNA, 22 nt, Human
gcuagaaaucgacuucagaauu

SEQ ID NO: 965577 - RNA, 22 nt, Human
ccugcaggggagagacuucuag

SEQ ID NO: 965578 - RNA, 22 nt, Human
uuuggaaugguaccuucaguug

SEQ ID NO: 965579 - RNA, 22 nt, Human
cucugggcaaguuucuucauga

SEQ ID NO: 965580 - RNA, 19 nt, Human
gagaggccugugcuugaag

SEQ ID NO: 965581 - RNA, 22 nt, Human
cucugugccucaguuuucuucu

SEQ ID NO: 965582 - RNA, 22 nt, Human
agauggggcucaguguggaggc

SEQ ID NO: 965583 - RNA, 22 nt, Human
ucugagcuggagcccaucaccu

SEQ ID NO: 965584 - RNA, 22 nt, Human
ggcuucccagcagagggcgcac

SEQ ID NO: 965585 - RNA, 22 nt, Human
ccacagagacagagcccagggu

SEQ ID NO: 965586 - RNA, 22 nt, Human
uaggcaggugugcacugcccac

SEQ ID NO: 965587 - RNA, 22 nt, Human
ugcauuaucuuuaauguucuca

SEQ ID NO: 965588 - RNA, 22 nt, Human
aaaugcacagaaaggaugugga

SEQ ID NO: 965589 - RNA, 22 nt, Human
ugagcuuacgugggaacagacu

SEQ ID NO: 965590 - RNA, 23 nt, Human
aggauccugguacaggagcagag

SEQ ID NO: 965591 - RNA, 22 nt, Human
ccugggcuugcaucugugcugg

SEQ ID NO: 965592 - RNA, 22 nt, Human
uguuuauuacaguucuuggaau

SEQ ID NO: 965593 - RNA, 22 nt, Human
auuuguagugaagugaaaauaa

SEQ ID NO: 965594 - RNA, 22 nt, Human
gggcagcuagcccucuagccca

SEQ ID NO: 965595 - RNA, 22 nt, Human
cgaggcagaggcugaaacggcu

SEQ ID NO: 965596 - RNA, 22 nt, Human
uugaagcaugguacuuguucaa

SEQ ID NO: 965597 - RNA, 22 nt, Human
aggcugccucgugagcucgcug

SEQ ID NO: 965598 - RNA, 22 nt, Human
aaguucaagagugacauauuag

SEQ ID NO: 965599 - RNA, 22 nt, Human
ucucaggguuuguacaagugua

SEQ ID NO: 965600 - RNA, 22 nt, Human
aacauacagugagcaguggacu

SEQ ID NO: 965601 - RNA, 22 nt, Human
guaucacuuuugagagugagaa

SEQ ID NO: 965602 - RNA, 22 nt, Human
cagggagggacaauugucaccu

SEQ ID NO: 965603 - RNA, 22 nt, Human
cugccuccuggcugauggguag

SEQ ID NO: 965604 - RNA, 22 nt, Human
ccugucugcggaggaguggaag

SEQ ID NO: 965605 - RNA, 22 nt, Human
uccagccuaauguucuucccac

SEQ ID NO: 965606 - RNA, 22 nt, Human
uuugaaguggaaaaggauuuaa

SEQ ID NO: 965607 - RNA, 22 nt, Human
ucugcagaaguggcugggccac

SEQ ID NO: 965608 - RNA, 22 nt, Human
uaagacaugguugaucuagugu

SEQ ID NO: 965609 - RNA, 22 nt, Human
cagcccuggugccaagguuccc

SEQ ID NO: 965610 - RNA, 22 nt, Human
aguuaaagucugaaauagagaa

SEQ ID NO: 965611 - RNA, 22 nt, Human
guuuuauaauugcuucauaaga

SEQ ID NO: 965612 - RNA, 17 nt, Human
acagagcacaucaagau

SEQ ID NO: 965613 - RNA, 19 nt, Human
cugaagucuuuucagcugg

SEQ ID NO: 965614 - RNA, 22 nt, Human
gaggcaggcagauugcuugagg

SEQ ID NO: 965615 - RNA, 22 nt, Human
cuugcuuuguccagaaauucag

SEQ ID NO: 965616 - RNA, 22 nt, Human
ucagagaguuagugucuuagcu

SEQ ID NO: 965617 - RNA, 22 nt, Human
aaguugagaugucauaggagac

SEQ ID NO: 965618 - RNA, 22 nt, Human
ugaacccaggagguugcaguga

SEQ ID NO: 965619 - RNA, 22 nt, Human
gacacauagaucuaucucacuc

SEQ ID NO: 965620 - RNA, 22 nt, Human
gugcauauaugcacauaugugu

SEQ ID NO: 965621 - RNA, 19 nt, Human
cgcaggagccgaggugacc

SEQ ID NO: 965622 - RNA, 22 nt, Human
auauucuucuuguucagacuau

SEQ ID NO: 965623 - RNA, 22 nt, Human
uucugggacaucuggacaguuu

SEQ ID NO: 965624 - RNA, 22 nt, Human
cuggcuccaucacugggugaug

SEQ ID NO: 965625 - RNA, 22 nt, Human
ggcugccuacuuucccagaguu

SEQ ID NO: 965626 - RNA, 22 nt, Human
uuguaaaugaccuuuucuaauu

SEQ ID NO: 965627 - RNA, 22 nt, Human
ggagcagagcugggcuuggcug

SEQ ID NO: 965628 - RNA, 22 nt, Human
aagauuuccuggauguaauucc

SEQ ID NO: 965629 - RNA, 22 nt, Human
agagagcccgggccagggcaca

SEQ ID NO: 965630 - RNA, 22 nt, Human
augcaguggcagcuccuggugu

SEQ ID NO: 965631 - RNA, 22 nt, Human
aucaggauuauuaaaucuggau

SEQ ID NO: 965632 - RNA, 22 nt, Human
cagcauggggcuuggagucagc

SEQ ID NO: 965633 - RNA, 22 nt, Human
cuccagggggcauccacacagc

SEQ ID NO: 965634 - RNA, 22 nt, Human
gccugaaguuucaugccucuau

SEQ ID NO: 965635 - RNA, 22 nt, Human
uccugggccuguacuccauccg

SEQ ID NO: 965636 - RNA, 22 nt, Human
aggugauguccacagcuugcag

SEQ ID NO: 965637 - RNA, 22 nt, Human
ucacuucacacccacuaucaug

SEQ ID NO: 965638 - RNA, 22 nt, Human
cccucccaagcacucugacaua

SEQ ID NO: 965639 - RNA, 22 nt, Human
ucuuuccauggccacacagucu

SEQ ID NO: 965640 - RNA, 22 nt, Human
gauuuggccuuucgcaugguau

SEQ ID NO: 965641 - RNA, 22 nt, Human
agucucugugagcucccaaugg

SEQ ID NO: 965642 - RNA, 22 nt, Human
cugggacagagcagcagugggg

SEQ ID NO: 965643 - RNA, 22 nt, Human
ucugucuccucugaggugccag

SEQ ID NO: 965644 - RNA, 22 nt, Human
augauugguggucagcaguaug

SEQ ID NO: 965645 - RNA, 22 nt, Human
gcuggccacacugcugauggag

SEQ ID NO: 965646 - RNA, 22 nt, Human
cagccucucuguaucucaggau

SEQ ID NO: 965647 - RNA, 22 nt, Human
agcugcagagguuugugcaaca

SEQ ID NO: 965648 - RNA, 22 nt, Human
uuggccaaccagaacggagguc

SEQ ID NO: 965649 - RNA, 22 nt, Human
augguguagcaugugauaugac

SEQ ID NO: 965650 - RNA, 22 nt, Human
gcuggccucuggagaagggcuu

SEQ ID NO: 965651 - RNA, 22 nt, Human
caagugucuauaucagugcuug

SEQ ID NO: 965652 - RNA, 22 nt, Human
agcccagcagaaaguccagccu

SEQ ID NO: 965653 - RNA, 22 nt, Human
cguguggucccggcaaggcaag

SEQ ID NO: 965654 - RNA, 22 nt, Human
acaaauauuuacugaauccacu

SEQ ID NO: 965655 - RNA, 22 nt, Human
agcuuccuacaaccaucucaga

SEQ ID NO: 965656 - RNA, 21 nt, Human
cucuggaggcaagggagagug

SEQ ID NO: 965657 - RNA, 22 nt, Human
caaaagauacuugcaucuaacu

SEQ ID NO: 965658 - RNA, 22 nt, Human
cucugcuaagcaugaacaauua

SEQ ID NO: 965659 - RNA, 22 nt, Human
agcaugcgcuugaucagcucca

SEQ ID NO: 965660 - RNA, 22 nt, Human
agcagggguaacagaaggaaag

SEQ ID NO: 965661 - RNA, 22 nt, Human
gcccucucuucugcagccucca

SEQ ID NO: 965662 - RNA, 22 nt, Human
cagaaauguacugacaugcagu

SEQ ID NO: 965663 - RNA, 22 nt, Human
aggggcucaaagugugcaggga

SEQ ID NO: 965664 - RNA, 22 nt, Human
augcuguagaucuuagccucua

SEQ ID NO: 965665 - RNA, 22 nt, Human
acauucuaacauuguacagaua

SEQ ID NO: 965666 - RNA, 19 nt, Human
gcugugugaccuugggcaa

SEQ ID NO: 965667 - RNA, 19 nt, Human
agaggcagucuccaacagg

SEQ ID NO: 965668 - RNA, 22 nt, Human
caaagggcucuagacucagcag

SEQ ID NO: 965669 - RNA, 22 nt, Human
cugggcugucccaaccccaucc

SEQ ID NO: 965670 - RNA, 23 nt, Human
cagaagcaccuguugacugcugc

SEQ ID NO: 965671 - RNA, 22 nt, Human
uauuugaaaguguacaaaaacu

SEQ ID NO: 965672 - RNA, 22 nt, Human
agagccuggggauuggcaaggg

SEQ ID NO: 965673 - RNA, 22 nt, Human
augauggugagguugagcacag

SEQ ID NO: 965674 - RNA, 20 nt, Human
cacaagagaauacacacugg

SEQ ID NO: 965675 - RNA, 22 nt, Human
acucugcuuaauuaaaaccagg

SEQ ID NO: 965676 - RNA, 22 nt, Human
aggcuuccucgugccuuagaua

SEQ ID NO: 965677 - RNA, 22 nt, Human
gcugagagaaaagugagguucu

SEQ ID NO: 965678 - RNA, 22 nt, Human
agcagcagaggucagaaaggua

SEQ ID NO: 965679 - RNA, 22 nt, Human
gaggcagagaccuucaggaccu

SEQ ID NO: 965680 - RNA, 22 nt, Human
agaucucaccucuguguauuau

SEQ ID NO: 965681 - RNA, 22 nt, Human
gugcaggggaucagguugcagc

SEQ ID NO: 965682 - RNA, 22 nt, Human
aaaaguauuuauggcuauguaa

SEQ ID NO: 965683 - RNA, 22 nt, Human
acuaaggaauaugacaaacuca

SEQ ID NO: 965684 - RNA, 22 nt, Human
gaggacagcuuagggcuuccug

SEQ ID NO: 965685 - RNA, 22 nt, Human
uucaggagcuggcugcgaagga

SEQ ID NO: 965686 - RNA, 22 nt, Human
cuggugugauugagcccaggug

SEQ ID NO: 965687 - RNA, 22 nt, Human
aggcucuggacagugaggaguu

SEQ ID NO: 965688 - RNA, 22 nt, Human
gccaggaggucagccccucaac

SEQ ID NO: 965689 - RNA, 22 nt, Human
uuaaacaguguuucaugugggg

SEQ ID NO: 965690 - RNA, 22 nt, Human
caggcagcugcgacaagagagc

SEQ ID NO: 965691 - RNA, 22 nt, Human
auggaaagccaguguuccauca

SEQ ID NO: 965692 - RNA, 17 nt, Human
agaugcuggccacaugu

SEQ ID NO: 965693 - RNA, 20 nt, Human
gaggcucugggcauggcgcc

SEQ ID NO: 965694 - RNA, 22 nt, Human
agugugucgagggaggguccag

SEQ ID NO: 965695 - RNA, 22 nt, Human
aggcacugggaauaugcugagg

SEQ ID NO: 965696 - RNA, 22 nt, Human
uccugaggaaaguucaugaaug

SEQ ID NO: 965697 - RNA, 22 nt, Human
cugagccuuauucaccagcccu

SEQ ID NO: 965698 - RNA, 22 nt, Human
gcugcagccaaauucauuguca

SEQ ID NO: 965699 - RNA, 22 nt, Human
uuugaacuucuccauucugaug

SEQ ID NO: 965700 - RNA, 22 nt, Human
ccagggcauguccaagacuuag

SEQ ID NO: 965701 - RNA, 22 nt, Human
cauggcagggcugugggcaggu

SEQ ID NO: 965702 - RNA, 22 nt, Human
cacugagcugauagaauuccag

SEQ ID NO: 965703 - RNA, 22 nt, Human
ucugccugcggcugcagguggc

SEQ ID NO: 965704 - RNA, 22 nt, Human
uggggacaggagacuuacagcu

SEQ ID NO: 965705 - RNA, 22 nt, Human
uuuguuaaaaugcagauucugu

SEQ ID NO: 965706 - RNA, 22 nt, Human
agucaauucuuuucaacucaag

SEQ ID NO: 965707 - RNA, 22 nt, Human
ggagcaggagucucuugaauuu

SEQ ID NO: 965708 - RNA, 22 nt, Human
ggcugccugaggcagugagaga

SEQ ID NO: 965709 - RNA, 22 nt, Human
ucucagggccccaaaggcuagu

SEQ ID NO: 965710 - RNA, 22 nt, Human
acuggccagguucaaaauacag

SEQ ID NO: 965711 - RNA, 22 nt, Human
cagguggcaugacugccuacaa

SEQ ID NO: 965712 - RNA, 22 nt, Human
uauugaaauucuucauguccuc

SEQ ID NO: 965713 - RNA, 23 nt, Human
agaugaaagcuucccaucacagu

SEQ ID NO: 965714 - RNA, 19 nt, Human
ggcagcuugggaagguagc

SEQ ID NO: 965715 - RNA, 23 nt, Human
aaacugcuuccaauuccugccau

SEQ ID NO: 965716 - RNA, 18 nt, Human
augugcaauuuuguauuu

SEQ ID NO: 965717 - RNA, 22 nt, Human
ccagccagcugcccuuggggcc

SEQ ID NO: 965718 - RNA, 22 nt, Human
accucugcaguagggcugugcc

SEQ ID NO: 965719 - RNA, 22 nt, Human
aauguuaaaaccuucagugcuu

SEQ ID NO: 965720 - RNA, 22 nt, Human
ccaaaguccauaguuuacauaa

SEQ ID NO: 965721 - RNA, 22 nt, Human
gccucugcugacaagauggaca

SEQ ID NO: 965722 - RNA, 22 nt, Human
gaggcucagagggagcaugguc

SEQ ID NO: 965723 - RNA, 22 nt, Human
ccugggugucaugggcagcugg

SEQ ID NO: 965724 - RNA, 22 nt, Human
cuggcaggucucgcugacgugu

SEQ ID NO: 965725 - RNA, 22 nt, Human
ugcaggggcuugucugggccug

SEQ ID NO: 965726 - RNA, 22 nt, Human
aguccaaggagagacagcauuu

SEQ ID NO: 965727 - RNA, 22 nt, Human
gcaggaguguauuugcauguaa

SEQ ID NO: 965728 - RNA, 15 nt, Human
cuccaugauuuugca

SEQ ID NO: 965729 - RNA, 23 nt, Human
gagcugggauacaggcuuacugc

SEQ ID NO: 965730 - RNA, 22 nt, Human
agccaaagagaccccauaucca

SEQ ID NO: 965731 - RNA, 22 nt, Human
gauuucaaaaguagauccauca

SEQ ID NO: 965732 - RNA, 22 nt, Human
auuugcaugcuucuauugugaa

SEQ ID NO: 965733 - RNA, 22 nt, Human
aagagcuggauggaaucuggga

SEQ ID NO: 965734 - RNA, 22 nt, Human
caguugcuggaugugcagcucu

SEQ ID NO: 965735 - RNA, 20 nt, Human
ucucuucuggggagauaaaa

SEQ ID NO: 965736 - RNA, 22 nt, Human
uggcaggguuggccaccuuacc

SEQ ID NO: 965737 - RNA, 22 nt, Human
uccauuuuucaugacuccucaa

SEQ ID NO: 965738 - RNA, 22 nt, Human
ugauuuccccagucuugcugcu

SEQ ID NO: 965739 - RNA, 22 nt, Human
ucccagcccagauuugugugac

SEQ ID NO: 965740 - RNA, 22 nt, Human
agcuauguaacagugccaugga

SEQ ID NO: 965741 - RNA, 22 nt, Human
gcugccugauguccagcaggac

SEQ ID NO: 965742 - RNA, 22 nt, Human
ucacaugcuacugagccagacc

SEQ ID NO: 965743 - RNA, 22 nt, Human
agggucccgaaggagacagcaa

SEQ ID NO: 965744 - RNA, 22 nt, Human
uggcagccaucugagggugggg

SEQ ID NO: 965745 - RNA, 22 nt, Human
cagccaggacagggaaacuagu

SEQ ID NO: 965746 - RNA, 22 nt, Human
uuucacagguacaaacacuccu

SEQ ID NO: 965747 - RNA, 17 nt, Human
aaggccauuuccaccca

SEQ ID NO: 965748 - RNA, 22 nt, Human
gggagccaaggagagaggccuu

SEQ ID NO: 965749 - RNA, 22 nt, Human
cuucagaggggacucaaaguca

SEQ ID NO: 965750 - RNA, 22 nt, Human
gggcuggcucccagguguugaa

SEQ ID NO: 965751 - RNA, 22 nt, Human
gaggggcagaaugugaucaggg

SEQ ID NO: 965752 - RNA, 22 nt, Human
cccaggaccgcgcggcugagcg

SEQ ID NO: 965753 - RNA, 22 nt, Human
gcucugcucuugacuuaccagg

SEQ ID NO: 965754 - RNA, 22 nt, Human
uuauuagguuauucucuguacu

SEQ ID NO: 965755 - RNA, 22 nt, Human
gaggucagucagaccaggguuu

SEQ ID NO: 965756 - RNA, 22 nt, Human
uuuccuaugauauucuaugugu

SEQ ID NO: 965757 - RNA, 22 nt, Human
gcaggagugacauggaugugga

SEQ ID NO: 965758 - RNA, 22 nt, Human
ugccuucaaucaggauggucuc

SEQ ID NO: 965759 - RNA, 22 nt, Human
ugucucugcuuuccuugcaggg

SEQ ID NO: 965760 - RNA, 22 nt, Human
ugggcuggagcuuguugcuucc

SEQ ID NO: 965761 - RNA, 22 nt, Human
auccaguucucagugcuuacag

SEQ ID NO: 965762 - RNA, 19 nt, Human
auagucuuuccaauuauac

SEQ ID NO: 965763 - RNA, 22 nt, Human
aaguuugugucagagcuguuac

SEQ ID NO: 965764 - RNA, 23 nt, Human
cuggcucuguagguggcauccuu

SEQ ID NO: 965765 - RNA, 20 nt, Human
cacaggcuauaugagagcca

SEQ ID NO: 965766 - RNA, 23 nt, Human
aacugagauaauguauguaaagc

SEQ ID NO: 965767 - RNA, 22 nt, Human
cccagcaggaggagguugcagu

SEQ ID NO: 965768 - RNA, 22 nt, Human
uuccaggaauucagcucucagu

SEQ ID NO: 965769 - RNA, 22 nt, Human
augggaugcauggcuguggcca

SEQ ID NO: 965770 - RNA, 22 nt, Human
acagggaacaggaauauacaaa

SEQ ID NO: 965771 - RNA, 22 nt, Human
accaaggaguuugguauuuuag

SEQ ID NO: 965772 - RNA, 22 nt, Human
gaaaucugaacucuguauccuu

SEQ ID NO: 965773 - RNA, 21 nt, Human
gcagaggcacggcaccaaggg

SEQ ID NO: 965774 - RNA, 22 nt, Human
ucuugggauugcccugcaguuc

SEQ ID NO: 965775 - RNA, 22 nt, Human
guggcucucgccagccugcggg

SEQ ID NO: 965776 - RNA, 22 nt, Human
aaauacagaguugcuuaaaagc

SEQ ID NO: 965777 - RNA, 22 nt, Human
uuggcaucaguguaggaccugu

SEQ ID NO: 965778 - RNA, 22 nt, Human
ucaggagaacuuccuucuaccc

SEQ ID NO: 965779 - RNA, 22 nt, Human
gcaggaguuaggcgucguggau

SEQ ID NO: 965780 - RNA, 20 nt, Human
agucccagaucaaauuucug

SEQ ID NO: 965781 - RNA, 22 nt, Human
gucccuggggaaucagcuggag

SEQ ID NO: 965782 - RNA, 22 nt, Human
uggcagcauuaauuauucaggu

SEQ ID NO: 965783 - RNA, 22 nt, Human
uuugcauuguuucaaaagugaa

SEQ ID NO: 965784 - RNA, 22 nt, Human
cagcuugggaguuugguuuuau

SEQ ID NO: 965785 - RNA, 22 nt, Human
auggcagccuguggacagucaa

SEQ ID NO: 965786 - RNA, 22 nt, Human
gcugcucuuuucagagaugaga

SEQ ID NO: 965787 - RNA, 22 nt, Human
agggggaggcugugcugcgucu

SEQ ID NO: 965788 - RNA, 22 nt, Human
aggcaggcucaaugcccagucu

SEQ ID NO: 965789 - RNA, 23 nt, Human
ucagcugcuuccuccugccugcc

SEQ ID NO: 965790 - RNA, 22 nt, Human
guccugggaaggaagccaggga

SEQ ID NO: 965791 - RNA, 22 nt, Human
cugucucagcaggaagucauca

SEQ ID NO: 965792 - RNA, 22 nt, Human
ugccugucuccucugcagggug

SEQ ID NO: 965793 - RNA, 22 nt, Human
caggaacacaaguucagggaug

SEQ ID NO: 965794 - RNA, 22 nt, Human
uugcuguguaacuccuggccug

SEQ ID NO: 965795 - RNA, 22 nt, Human
ucucauugguauauacaugugu

SEQ ID NO: 965796 - RNA, 22 nt, Human
ccagagccugcugagccccauu

SEQ ID NO: 965797 - RNA, 22 nt, Human
aagcaauauacugauaugauua

SEQ ID NO: 965798 - RNA, 22 nt, Human
agcacauucugccuugcuuugc

SEQ ID NO: 965799 - RNA, 22 nt, Human
ugcaauaacuacuuuaauguug

SEQ ID NO: 965800 - RNA, 22 nt, Human
uggggguguccuggugcacaca

SEQ ID NO: 965801 - RNA, 22 nt, Human
ugcucauuggcgaucugaggga

SEQ ID NO: 965802 - RNA, 22 nt, Human
agcagggcucuguggagggugg

SEQ ID NO: 965803 - RNA, 22 nt, Human
uggccggggcugauggacagug

SEQ ID NO: 965804 - RNA, 21 nt, Human
ucagacuugagcucuucuaca

SEQ ID NO: 965805 - RNA, 22 nt, Human
gcagaggccaggccaccagcaa

SEQ ID NO: 965806 - RNA, 18 nt, Human
ugucucugaauuccagug

SEQ ID NO: 965807 - RNA, 22 nt, Human
acugaaagauaaaucaguuagc

SEQ ID NO: 965808 - RNA, 22 nt, Human
uggguggaauaaaucaguucug

SEQ ID NO: 965809 - RNA, 22 nt, Human
uugcaccaaaugaguuaaaauu

SEQ ID NO: 965810 - RNA, 22 nt, Human
cagcacuggggccacuggaguu

SEQ ID NO: 965811 - RNA, 22 nt, Human
cucucugggcccaguuggcacc

SEQ ID NO: 965812 - RNA, 22 nt, Human
uuuccuaaucccaaugacauuu

SEQ ID NO: 965813 - RNA, 22 nt, Human
cuggcuggccggaggcaucccu

SEQ ID NO: 965814 - RNA, 22 nt, Human
cuccuucccuucaaguguuccu

SEQ ID NO: 965815 - RNA, 22 nt, Human
uucugagcugcaacacuaacau

SEQ ID NO: 965816 - RNA, 22 nt, Human
auauuaggaguuaaauguauua

SEQ ID NO: 965817 - RNA, 22 nt, Human
auuaaaagcuucccaagaguua

SEQ ID NO: 965818 - RNA, 22 nt, Human
uggcucagugacauuccuccca

SEQ ID NO: 965819 - RNA, 17 nt, Human
gaaagguccuagaaauc

SEQ ID NO: 965820 - RNA, 22 nt, Human
uuuauuugaaucaggggagaau

SEQ ID NO: 965821 - RNA, 22 nt, Human
gcaaaaaaugcuuguugcuuag

SEQ ID NO: 965822 - RNA, 22 nt, Human
cugcuguguuucugcuagaaaa

SEQ ID NO: 965823 - RNA, 19 nt, Human
ggucacagggguuacaagg

SEQ ID NO: 965824 - RNA, 22 nt, Human
uccucuucugcccaucagaggc

SEQ ID NO: 965825 - RNA, 20 nt, Human
aagggcagagggaacagacu

SEQ ID NO: 965826 - RNA, 22 nt, Human
ggggccuguagagcuucaggga

SEQ ID NO: 965827 - RNA, 20 nt, Human
aucagcaacugccacucagu

SEQ ID NO: 965828 - RNA, 22 nt, Human
acagcauugcuccaucucaaga

SEQ ID NO: 965829 - RNA, 22 nt, Human
gggagccaugcuggucuucuuu

SEQ ID NO: 965830 - RNA, 22 nt, Human
guccucaguaagagggccucug

SEQ ID NO: 965831 - RNA, 22 nt, Human
ggcucaggcuggagugcagugg

SEQ ID NO: 965832 - RNA, 22 nt, Human
uuacuggcugggccugagggcu

SEQ ID NO: 965833 - RNA, 22 nt, Human
uuuguaaaggccugaauuucag

SEQ ID NO: 965834 - RNA, 18 nt, Human
aaggcuucaaagaguaga

SEQ ID NO: 965835 - RNA, 22 nt, Human
cagcccuuuccuucucagcuuu

SEQ ID NO: 965836 - RNA, 22 nt, Human
ucauuugugugagugauuugac

SEQ ID NO: 965837 - RNA, 22 nt, Human
ucccagaagugaaauuucuaga

SEQ ID NO: 965838 - RNA, 22 nt, Human
agccucucuuucugguggcuaa

SEQ ID NO: 965839 - RNA, 22 nt, Human
ugcagggccgcuggaggucaug

SEQ ID NO: 965840 - RNA, 22 nt, Human
cugaaauuccauuucagccaca

SEQ ID NO: 965841 - RNA, 22 nt, Human
uuggcauaccuuagugguggag

SEQ ID NO: 965842 - RNA, 22 nt, Human
aggcugccuguuccaaucuccu

SEQ ID NO: 965843 - RNA, 22 nt, Human
aaaagcagaucuccaaagucua

SEQ ID NO: 965844 - RNA, 22 nt, Human
gucccuaguggaaagacaugau

SEQ ID NO: 965845 - RNA, 22 nt, Human
ucugagccaaaauaaacagcau

SEQ ID NO: 965846 - RNA, 22 nt, Human
auggcacugaccucccuuguaa

SEQ ID NO: 965847 - RNA, 22 nt, Human
gcccaggauggcuggaggugcu

SEQ ID NO: 965848 - RNA, 22 nt, Human
gagguggaaggcaggaacaaau

SEQ ID NO: 965849 - RNA, 22 nt, Human
ccuucucuacuccugaugcaug

SEQ ID NO: 965850 - RNA, 22 nt, Human
gagcccugauuugcagcauuug

SEQ ID NO: 965851 - RNA, 22 nt, Human
gagggcugauaacaggaauaca

SEQ ID NO: 965852 - RNA, 20 nt, Human
uccugggguaagccaugguc

SEQ ID NO: 965853 - RNA, 22 nt, Human
ucccagagcaguacuccaggag

SEQ ID NO: 965854 - RNA, 22 nt, Human
aauuuguuaaaagugagugaca

SEQ ID NO: 965855 - RNA, 22 nt, Human
agagcugggacuuggacucaau

SEQ ID NO: 965856 - RNA, 22 nt, Human
uugcauuucccauugaguaaug

SEQ ID NO: 965857 - RNA, 22 nt, Human
aggcugggaagguaaaguugua

SEQ ID NO: 965858 - RNA, 21 nt, Human
uucuccccagcgaauccucgg

SEQ ID NO: 965859 - RNA, 22 nt, Human
gcugugagggcuucugaggcau

SEQ ID NO: 965860 - RNA, 22 nt, Human
auuagcauauuaaauagucauu

SEQ ID NO: 965861 - RNA, 22 nt, Human
cuggcagcuuccuuugcaucug

SEQ ID NO: 965862 - RNA, 22 nt, Human
gcccugcugcuggcagaggcgc

SEQ ID NO: 965863 - RNA, 22 nt, Human
aggggccauuguucugcccgcu

SEQ ID NO: 965864 - RNA, 22 nt, Human
cugugucuucacauuugugugc

SEQ ID NO: 965865 - RNA, 22 nt, Human
uuuuucauugcagccucucucc

SEQ ID NO: 965866 - RNA, 22 nt, Human
uacauuuauaaggcuucucugu

SEQ ID NO: 965867 - RNA, 19 nt, Human
agaaaucucgagauuuguu

SEQ ID NO: 965868 - RNA, 22 nt, Human
cacaggcuuccaguccccagcu

SEQ ID NO: 965869 - RNA, 22 nt, Human
gugauuccuauuaguacaugca

SEQ ID NO: 965870 - RNA, 22 nt, Human
cagaagcacuaggaggaaacgu

SEQ ID NO: 965871 - RNA, 22 nt, Human
ucugucacuuuuauuuacugaa

SEQ ID NO: 965872 - RNA, 21 nt, Human
acagaacuguauagugauaaa

SEQ ID NO: 965873 - RNA, 22 nt, Human
cugcugugacagcugccguguu

SEQ ID NO: 965874 - RNA, 19 nt, Human
aggcaggugcagagguccc

SEQ ID NO: 965875 - RNA, 18 nt, Human
cugcugcaggcacucagg

SEQ ID NO: 965876 - RNA, 22 nt, Human
uacaaaugaaccaacuuugaug

SEQ ID NO: 965877 - RNA, 22 nt, Human
accaggaguaacagugaguggu

SEQ ID NO: 965878 - RNA, 22 nt, Human
acaggugguaaaauggacuguc

SEQ ID NO: 965879 - RNA, 22 nt, Human
cucagugugaaugcucaguaaa

SEQ ID NO: 965880 - RNA, 22 nt, Human
agggagcugagcugugagcagc

SEQ ID NO: 965881 - RNA, 23 nt, Human
ugacacauuuccuuuccacugca

SEQ ID NO: 965882 - RNA, 22 nt, Human
uuuuaguguagucaccgugggu

SEQ ID NO: 965883 - RNA, 22 nt, Human
ggcugggcucgcugauuggcug

SEQ ID NO: 965884 - RNA, 22 nt, Human
gaggccugaggcugccuggagc

SEQ ID NO: 965885 - RNA, 21 nt, Human
uggcucugcucagagcagucc

SEQ ID NO: 965886 - RNA, 22 nt, Human
cuucuugcaauuuucaucuuau

SEQ ID NO: 965887 - RNA, 22 nt, Human
uccuggagagugggcgagcaca

SEQ ID NO: 965888 - RNA, 22 nt, Human
aaguuuguguaguuuagcaucc

SEQ ID NO: 965889 - RNA, 22 nt, Human
gugucccaggccucuggaauua

SEQ ID NO: 965890 - RNA, 22 nt, Human
acugaaggcuuaacucuuucau

SEQ ID NO: 965891 - RNA, 22 nt, Human
caguaugucuacuggacaaagu

SEQ ID NO: 965892 - RNA, 22 nt, Human
auggacaggaacucccuuggca

SEQ ID NO: 965893 - RNA, 22 nt, Human
agggcucugagugggaaagagg

SEQ ID NO: 965894 - RNA, 22 nt, Human
acauuugagaugccuuuuaggu

SEQ ID NO: 965895 - RNA, 22 nt, Human
uuuaguaaguucacugcaaagc

SEQ ID NO: 965896 - RNA, 19 nt, Human
ucauaaggagagaggaaau

SEQ ID NO: 965897 - RNA, 22 nt, Human
cagaggcucuuccucacugccc

SEQ ID NO: 965898 - RNA, 19 nt, Human
ccuuccuccccagggccau

SEQ ID NO: 965899 - RNA, 22 nt, Human
augguacaaaauguauaaaguc

SEQ ID NO: 965900 - RNA, 22 nt, Human
acauuucuucccuuuagcagaa

SEQ ID NO: 965901 - RNA, 22 nt, Human
acuggccaggagcuggaaauac

SEQ ID NO: 965902 - RNA, 20 nt, Human
uccucagaagacauuugggg

SEQ ID NO: 965903 - RNA, 22 nt, Human
aaguauaagcuauucuucauga

SEQ ID NO: 965904 - RNA, 22 nt, Human
gugucccagccccacaggccug

SEQ ID NO: 965905 - RNA, 21 nt, Human
uugaaggaucacuucuguacc

SEQ ID NO: 965906 - RNA, 22 nt, Human
acauugaugaaaagguaucauu

SEQ ID NO: 965907 - RNA, 22 nt, Human
aaagcugcugccaaucaggcuu

SEQ ID NO: 965908 - RNA, 22 nt, Human
ucuuucucucuaaucaagcaca

SEQ ID NO: 965909 - RNA, 22 nt, Human
agaagugccauacuguggucca

SEQ ID NO: 965910 - RNA, 22 nt, Human
gcaggagcccuggcauguucuu

SEQ ID NO: 965911 - RNA, 22 nt, Human
cugugcuucgcaacuccaaggu

SEQ ID NO: 965912 - RNA, 19 nt, Human
ccugggagucagcugaagg

SEQ ID NO: 965913 - RNA, 22 nt, Human
cagaagcauugacuccuugcuc

SEQ ID NO: 965914 - RNA, 18 nt, Human
aagccagagaccacugcc

SEQ ID NO: 965915 - RNA, 22 nt, Human
ucaggcugaggucaucugcauc

SEQ ID NO: 965916 - RNA, 22 nt, Human
cauuugcagagggugacacucu

SEQ ID NO: 965917 - RNA, 22 nt, Human
cauuuccugucuggaggucaaa

SEQ ID NO: 965918 - RNA, 22 nt, Human
ugaagcagcuucuuucugucaa

SEQ ID NO: 965919 - RNA, 22 nt, Human
acagggcaugugcaagagacau

SEQ ID NO: 965920 - RNA, 22 nt, Human
cuuuggaagugaccacaauccu

SEQ ID NO: 965921 - RNA, 22 nt, Human
agagcccugaagcagagcuaaa

SEQ ID NO: 965922 - RNA, 22 nt, Human
uucaagauggcugcaaauacuu

SEQ ID NO: 965923 - RNA, 22 nt, Human
uggaccugcuggaugggcaggu

SEQ ID NO: 965924 - RNA, 22 nt, Human
ggaagugaggaaauauuuuguu

SEQ ID NO: 965925 - RNA, 22 nt, Human
aaacagucaugguugcuguuca

SEQ ID NO: 965926 - RNA, 22 nt, Human
uuccuggcaccaccacuucuag

SEQ ID NO: 965927 - RNA, 22 nt, Human
gcucugcucccucaaaugacau

SEQ ID NO: 965928 - RNA, 18 nt, Human
uggccuggagacaacucu

SEQ ID NO: 965929 - RNA, 22 nt, Human
aauuucagagguagagauucua

SEQ ID NO: 965930 - RNA, 23 nt, Human
auucuucauuaucuucuagaaaa

SEQ ID NO: 965931 - RNA, 22 nt, Human
cugccagcacugccuccugagg

SEQ ID NO: 965932 - RNA, 22 nt, Human
agcugccauccgaggugucaga

SEQ ID NO: 965933 - RNA, 22 nt, Human
gaaaugcagaaccugagaccau

SEQ ID NO: 965934 - RNA, 17 nt, Human
gagauggguggaucacc

SEQ ID NO: 965935 - RNA, 22 nt, Human
cuggcagcucuacucagagccu

SEQ ID NO: 965936 - RNA, 22 nt, Human
gacagggccgcagauggagacu

SEQ ID NO: 965937 - RNA, 22 nt, Human
cuuauuagaguuguguucuguu

SEQ ID NO: 965938 - RNA, 22 nt, Human
agcagagccugggcuaggggug

SEQ ID NO: 965939 - RNA, 22 nt, Human
ucccaggaaaacacucgaggac

SEQ ID NO: 965940 - RNA, 22 nt, Human
aggcacugauucuguuuuccau

SEQ ID NO: 965941 - RNA, 22 nt, Human
uucagcaaauggacuguucagg

SEQ ID NO: 965942 - RNA, 22 nt, Human
cugaaggagaaggccacuguuc

SEQ ID NO: 965943 - RNA, 22 nt, Human
cuggggcugcggacgggagccc

SEQ ID NO: 965944 - RNA, 22 nt, Human
cagggagaaaucuccaggaggu

SEQ ID NO: 965945 - RNA, 22 nt, Human
uauuccagaugaaaucauucag

SEQ ID NO: 965946 - RNA, 22 nt, Human
ucugcgcugccuugauccuugg

SEQ ID NO: 965947 - RNA, 22 nt, Human
ggagccuggcaaugcugcgucc

SEQ ID NO: 965948 - RNA, 22 nt, Human
cuggcagcgcagcaugaagucg

SEQ ID NO: 965949 - RNA, 22 nt, Human
ggccugcuggcuccagcgcccg

SEQ ID NO: 965950 - RNA, 22 nt, Human
gccugccugcugugugcaaguu

SEQ ID NO: 965951 - RNA, 22 nt, Human
uuuuaguuguacugucaacagu

SEQ ID NO: 965952 - RNA, 22 nt, Human
ccuggccagccagggcuggggu

SEQ ID NO: 965953 - RNA, 19 nt, Human
acucaagucuaaugaaauc

SEQ ID NO: 965954 - RNA, 22 nt, Human
auucaaguccagcuucucuaca

SEQ ID NO: 965955 - RNA, 21 nt, Human
uauuucuuugacucucucccu

SEQ ID NO: 965956 - RNA, 22 nt, Human
uuccuuccauagcaaaacaugc

SEQ ID NO: 965957 - RNA, 20 nt, Human
uuggcagcagcucagccacc

SEQ ID NO: 965958 - RNA, 22 nt, Human
ggagccuguggccgucacgacu

SEQ ID NO: 965959 - RNA, 22 nt, Human
ucuuugcaaauguuauuaucuu

SEQ ID NO: 965960 - RNA, 22 nt, Human
gaggcugcggggaggagccugc

SEQ ID NO: 965961 - RNA, 22 nt, Human
gggaaauugugugagaucuuug

SEQ ID NO: 965962 - RNA, 22 nt, Human
gugucauguagaaauugaugaa

SEQ ID NO: 965963 - RNA, 22 nt, Human
agaggcggagcuugcagugagc

SEQ ID NO: 965964 - RNA, 22 nt, Human
gccuccuggauuuuagugccau

SEQ ID NO: 965965 - RNA, 22 nt, Human
agcaggguauguuagagcugua

SEQ ID NO: 965966 - RNA, 19 nt, Human
ucauucaggaccaguggau

SEQ ID NO: 965967 - RNA, 22 nt, Human
gaggcagugcauugucuagggg

SEQ ID NO: 965968 - RNA, 22 nt, Human
cuuacauuuaaucaugugucau

SEQ ID NO: 965969 - RNA, 22 nt, Human
guguugacucuuggacuucaag

SEQ ID NO: 965970 - RNA, 22 nt, Human
uggccuuggcagugagaagagu

SEQ ID NO: 965971 - RNA, 22 nt, Human
uagcagugccaggauuuugcug

SEQ ID NO: 965972 - RNA, 22 nt, Human
aguaaugugccugaaauacuug

SEQ ID NO: 965973 - RNA, 22 nt, Human
ucccagggacaccaagcuguuu

SEQ ID NO: 965974 - RNA, 22 nt, Human
cauagaaaagaguagguaaugu

SEQ ID NO: 965975 - RNA, 22 nt, Human
uucuucaaaauccagcaugauu

SEQ ID NO: 965976 - RNA, 22 nt, Human
ggagccuugggcgcucucccau

SEQ ID NO: 965977 - RNA, 22 nt, Human
cagcaggagcagucagacuccu

SEQ ID NO: 965978 - RNA, 21 nt, Human
uggcccuggccacggcugcca

SEQ ID NO: 965979 - RNA, 20 nt, Human
ucugugugccaucaccuaac

SEQ ID NO: 965980 - RNA, 22 nt, Human
ucuguuccauguuuuguuccau

SEQ ID NO: 965981 - RNA, 23 nt, Human
uccagcagagccuuccaggaggg

SEQ ID NO: 965982 - RNA, 22 nt, Human
accuuguuaaaaugaggauucu

SEQ ID NO: 965983 - RNA, 22 nt, Human
acugggccggugcagaguaguu

SEQ ID NO: 965984 - RNA, 22 nt, Human
uugcucaggcuuagagcuacua

SEQ ID NO: 965985 - RNA, 22 nt, Human
gaaaggucaguuccacuuccau

SEQ ID NO: 965986 - RNA, 22 nt, Human
ucugccagaaguucugagagua

SEQ ID NO: 965987 - RNA, 22 nt, Human
aaaguucaugguguuauagaaa

SEQ ID NO: 965988 - RNA, 22 nt, Human
gccucugccaagggggcugcgg

SEQ ID NO: 965989 - RNA, 22 nt, Human
uugacaaugcacugugcuaagu

SEQ ID NO: 965990 - RNA, 22 nt, Human
gggcugugagaguggggcugcu

SEQ ID NO: 965991 - RNA, 20 nt, Human
uaugaagauaugugaacagc

SEQ ID NO: 965992 - RNA, 22 nt, Human
uggagcugacucacaccagcua

SEQ ID NO: 965993 - RNA, 22 nt, Human
aaugcugcaagaggugaaaaga

SEQ ID NO: 965994 - RNA, 22 nt, Human
ccagggccaagagaccucgagg

SEQ ID NO: 965995 - RNA, 22 nt, Human
ucuccuggcucaccaggcugga

SEQ ID NO: 965996 - RNA, 22 nt, Human
ccagcugcagguguuccagaug

SEQ ID NO: 965997 - RNA, 22 nt, Human
ucauuguuauguuuugcugucu

SEQ ID NO: 965998 - RNA, 20 nt, Human
gcaggcagggaaugggggug

SEQ ID NO: 965999 - RNA, 22 nt, Human
auagacauuuugcauucaagca

SEQ ID NO: 966000 - RNA, 22 nt, Human
ugcagaagcagagaguugccaa

SEQ ID NO: 966001 - RNA, 22 nt, Human
aaaugucuaucuggcauauucc

SEQ ID NO: 966002 - RNA, 22 nt, Human
ugggcuguccagcaccugggcu

SEQ ID NO: 966003 - RNA, 20 nt, Human
gugcuucagaagccauugcu

SEQ ID NO: 966004 - RNA, 20 nt, Human
ucagacuugauucuaugcua

SEQ ID NO: 966005 - RNA, 22 nt, Human
augggcugugagguccggcagg

SEQ ID NO: 966006 - RNA, 22 nt, Human
ccugagcugaacuaagcaguuu

SEQ ID NO: 966007 - RNA, 22 nt, Human
ccugggagguggagguugcagu

SEQ ID NO: 966008 - RNA, 22 nt, Human
cuguagcagugugcucuuuuuc

SEQ ID NO: 966009 - RNA, 18 nt, Human
uucaccagugugaugggu

SEQ ID NO: 966010 - RNA, 22 nt, Human
caagauggguguugugaugguu

SEQ ID NO: 966011 - RNA, 20 nt, Human
uuugucuguuaaguguuucu

SEQ ID NO: 966012 - RNA, 22 nt, Human
aggacaggauugagcugaacug

SEQ ID NO: 966013 - RNA, 21 nt, Human
uuugaaagcccuauguuuuca

SEQ ID NO: 966014 - RNA, 22 nt, Human
aaauaguuagcccugcauauau

SEQ ID NO: 966015 - RNA, 22 nt, Human
gccuuucaguuccaucaaagga

SEQ ID NO: 966016 - RNA, 22 nt, Human
ucagcagggaggcucugugccc

SEQ ID NO: 966017 - RNA, 22 nt, Human
acucugcaauguggcaagaaca

SEQ ID NO: 966018 - RNA, 22 nt, Human
gacagcaggagaucaugauaga

SEQ ID NO: 966019 - RNA, 22 nt, Human
guacaaaguggaccugauagua

SEQ ID NO: 966020 - RNA, 22 nt, Human
gcuguauuuaacaacuggcuca

SEQ ID NO: 966021 - RNA, 22 nt, Human
uaugcacaguuacaagaauauc

SEQ ID NO: 966022 - RNA, 22 nt, Human
cuuuggcaaugaaacacaagaa

SEQ ID NO: 966023 - RNA, 22 nt, Human
aggguccaucaaggacugcaca

SEQ ID NO: 966024 - RNA, 22 nt, Human
aaggguggauuucugagcucua

SEQ ID NO: 966025 - RNA, 22 nt, Human
agcucccugagaugccacagca

SEQ ID NO: 966026 - RNA, 22 nt, Human
agcagccagagaaugaugcagu

SEQ ID NO: 966027 - RNA, 22 nt, Human
augcaguagauaggcacuuuua

SEQ ID NO: 966028 - RNA, 22 nt, Human
aagagcuggagcugcuacagga

SEQ ID NO: 966029 - RNA, 22 nt, Human
cuggcccagucucagaguguca

SEQ ID NO: 966030 - RNA, 22 nt, Human
guagcccaccuggggagggcga

SEQ ID NO: 966031 - RNA, 22 nt, Human
ggucuugcuauguugcccaggc

SEQ ID NO: 966032 - RNA, 22 nt, Human
cuccucacuuuccagacugggc

SEQ ID NO: 966033 - RNA, 22 nt, Human
uuuucauuguaaaucaggaaac

SEQ ID NO: 966034 - RNA, 22 nt, Human
uuagcugcauuaucaaaguuau

SEQ ID NO: 966035 - RNA, 22 nt, Human
cuggccugggagcugcuagcgu

SEQ ID NO: 966036 - RNA, 22 nt, Human
aggcucugacccaugggaccca

SEQ ID NO: 966037 - RNA, 22 nt, Human
ucuuugcacacaucccuucccg

SEQ ID NO: 966038 - RNA, 22 nt, Human
gcugccucccccauggcuggaa

SEQ ID NO: 966039 - RNA, 22 nt, Human
agucauguguucaucuuucauu

SEQ ID NO: 966040 - RNA, 22 nt, Human
gcuggaccaggugugcacaggc

SEQ ID NO: 966041 - RNA, 22 nt, Human
uucuugcaggucacucacugag

SEQ ID NO: 966042 - RNA, 22 nt, Human
caagaacauugugaucacuuca

SEQ ID NO: 966043 - RNA, 22 nt, Human
ucugaggcccugcaggcagugu

SEQ ID NO: 966044 - RNA, 19 nt, Human
ugcucauggggacuucucc

SEQ ID NO: 966045 - RNA, 20 nt, Human
uuggcagcaguuccaaguga

SEQ ID NO: 966046 - RNA, 22 nt, Human
uuucaugagauuccuccacauc

SEQ ID NO: 966047 - RNA, 18 nt, Human
cugcuugggagacgucag

SEQ ID NO: 966048 - RNA, 22 nt, Human
aggcuggcccuacuggcugccu

SEQ ID NO: 966049 - RNA, 22 nt, Human
aacaaaugauaccaguucucaa

SEQ ID NO: 966050 - RNA, 22 nt, Human
caaaagucuuccuauucucuua

SEQ ID NO: 966051 - RNA, 22 nt, Human
caggccugcaggaaaggcuccc

SEQ ID NO: 966052 - RNA, 20 nt, Human
aaguuuucuccaaauacagu

SEQ ID NO: 966053 - RNA, 22 nt, Human
uuucaguuguccuguuaauagc

SEQ ID NO: 966054 - RNA, 22 nt, Human
ggcauggcuggguucuggugag

SEQ ID NO: 966055 - RNA, 22 nt, Human
cagggaggaugggcuguuuugc

SEQ ID NO: 966056 - RNA, 22 nt, Human
cuggccuuuaaaaugaccuuau

SEQ ID NO: 966057 - RNA, 22 nt, Human
aucauucuaguccuuauggucu

SEQ ID NO: 966058 - RNA, 22 nt, Human
uucucauguaaaugccaucauc

SEQ ID NO: 966059 - RNA, 22 nt, Human
gggacugggagauccuccuggc

SEQ ID NO: 966060 - RNA, 22 nt, Human
aggagcugaagucucugcacuc

SEQ ID NO: 966061 - RNA, 22 nt, Human
ggugauuuucgaguuucauguu

SEQ ID NO: 966062 - RNA, 22 nt, Human
ccucagggacuccaugcugcag

SEQ ID NO: 966063 - RNA, 22 nt, Human
cuacccaggcuggagugcagua

SEQ ID NO: 966064 - RNA, 23 nt, Human
ucaguuuuggcuguucaguguug

SEQ ID NO: 966065 - RNA, 22 nt, Human
uuucauugcagagucugugugc

SEQ ID NO: 966066 - RNA, 22 nt, Human
uguguuaaggugcaucuagugc

SEQ ID NO: 966067 - RNA, 22 nt, Human
gcucccugacucaguuccugag

SEQ ID NO: 966068 - RNA, 22 nt, Human
gcugagagugagcacuggauau

SEQ ID NO: 966069 - RNA, 22 nt, Human
uccuaggcaguuggugcuccau

SEQ ID NO: 966070 - RNA, 22 nt, Human
cuucucagcauuuugucagucu

SEQ ID NO: 966071 - RNA, 22 nt, Human
cugagcugggaguagagacucu

SEQ ID NO: 966072 - RNA, 22 nt, Human
caggaaugacugcagauggggc

SEQ ID NO: 966073 - RNA, 22 nt, Human
ggaccuggcaauuugcaucucu

SEQ ID NO: 966074 - RNA, 22 nt, Human
gcugccagccaacuugcugugc

SEQ ID NO: 966075 - RNA, 22 nt, Human
agagccagcauuugggcccugc

SEQ ID NO: 966076 - RNA, 22 nt, Human
ucccaggaucugagggcagaga

SEQ ID NO: 966077 - RNA, 22 nt, Human
uucauuccuucuguaccuugcc

SEQ ID NO: 966078 - RNA, 22 nt, Human
aaggaguuuggguagucauaca

SEQ ID NO: 966079 - RNA, 22 nt, Human
ccagagagaaauggauuugagu

SEQ ID NO: 966080 - RNA, 22 nt, Human
aacacauauuuauauaugcaca

SEQ ID NO: 966081 - RNA, 22 nt, Human
gcccaggaguucaagucuagug

SEQ ID NO: 966082 - RNA, 22 nt, Human
aagguacaguuuuaagaauaag

SEQ ID NO: 966083 - RNA, 21 nt, Human
uggagacucugguucuuugug

SEQ ID NO: 966084 - RNA, 22 nt, Human
agucagacacguuuuccauuag

SEQ ID NO: 966085 - RNA, 22 nt, Human
gugucacaugguuuacugcagc

SEQ ID NO: 966086 - RNA, 22 nt, Human
uggcuucagacuucugcuacgu

SEQ ID NO: 966087 - RNA, 22 nt, Human
uaccuucaccagcgaauguuug

SEQ ID NO: 966088 - RNA, 22 nt, Human
uuguaacacuuuucuauuaaua

SEQ ID NO: 966089 - RNA, 22 nt, Human
uccuucuuugacaaguggcaga

SEQ ID NO: 966090 - RNA, 19 nt, Human
gggcucuggccucaguggg

SEQ ID NO: 966091 - RNA, 22 nt, Human
ggccucucuccagucagugcag

SEQ ID NO: 966092 - RNA, 22 nt, Human
ucugcuggccuuagcaggucua

SEQ ID NO: 966093 - RNA, 20 nt, Human
cagcaggcuauggggcaccc

SEQ ID NO: 966094 - RNA, 22 nt, Human
aucauucugauggucaaugcua

SEQ ID NO: 966095 - RNA, 22 nt, Human
gcugucacauuuggagcacugg

SEQ ID NO: 966096 - RNA, 22 nt, Human
gaggcugggaaguccaagacca

SEQ ID NO: 966097 - RNA, 22 nt, Human
cagucccacuagugccaauacc

SEQ ID NO: 966098 - RNA, 22 nt, Human
uggcugccuagugucugagcag

SEQ ID NO: 966099 - RNA, 22 nt, Human
gcugccucugcgacucugggcg

SEQ ID NO: 966100 - RNA, 22 nt, Human
auuguguaauuuucagcucaua

SEQ ID NO: 966101 - RNA, 22 nt, Human
gcccaggaaguugaggcugccg

SEQ ID NO: 966102 - RNA, 22 nt, Human
aucagacucugcauugcagucu

SEQ ID NO: 966103 - RNA, 22 nt, Human
uuaaacagacaguaaaugaaac

SEQ ID NO: 966104 - RNA, 22 nt, Human
uuauccaaacuggugaaucauu

SEQ ID NO: 966105 - RNA, 22 nt, Human
gcagacagccagacugcacugg

SEQ ID NO: 966106 - RNA, 22 nt, Human
agcuguguggugucugacagcu

SEQ ID NO: 966107 - RNA, 22 nt, Human
ccugaccuccaaguggcucugg

SEQ ID NO: 966108 - RNA, 22 nt, Human
ucagcugcucuguugagcugaa

SEQ ID NO: 966109 - RNA, 21 nt, Human
uuucaauguguucuuuguagu

SEQ ID NO: 966110 - RNA, 22 nt, Human
uuucaguggguuuauuucaugu

SEQ ID NO: 966111 - RNA, 22 nt, Human
gcagugugaccgagcuugcuuc

SEQ ID NO: 966112 - RNA, 22 nt, Human
augcagcugucagggagaacau

SEQ ID NO: 966113 - RNA, 22 nt, Human
gcauaauauacaugcuugaucc

SEQ ID NO: 966114 - RNA, 22 nt, Human
gccugcagaggugcugcuagcu

SEQ ID NO: 966115 - RNA, 22 nt, Human
cagagaccccgcugcccuucug

SEQ ID NO: 966116 - RNA, 22 nt, Human
cucuuaaauaacaucauugcuu

SEQ ID NO: 966117 - RNA, 22 nt, Human
gggcaggaugcaguuucagaga

SEQ ID NO: 966118 - RNA, 22 nt, Human
uccaggcuggacaugaggcggg

SEQ ID NO: 966119 - RNA, 22 nt, Human
aguggcagagguugacugcagu

SEQ ID NO: 966120 - RNA, 21 nt, Human
ugagagccuccaaccggcuac

SEQ ID NO: 966121 - RNA, 22 nt, Human
aucuggguucaccaugcuccug

SEQ ID NO: 966122 - RNA, 22 nt, Human
cuccucccucuuugccacacau

SEQ ID NO: 966123 - RNA, 21 nt, Human
gccaggaguagauuacauuua

SEQ ID NO: 966124 - RNA, 22 nt, Human
accaggaggaaguguuaaugau

SEQ ID NO: 966125 - RNA, 22 nt, Human
agaagcugacagaugcagcagg

SEQ ID NO: 966126 - RNA, 22 nt, Human
guacauguugguuguuuccagu

SEQ ID NO: 966127 - RNA, 22 nt, Human
acuccuggugcugaugaagaga

SEQ ID NO: 966128 - RNA, 22 nt, Human
gcugucaccaaagcaggcacug

SEQ ID NO: 966129 - RNA, 23 nt, Human
uuuuccagaaucgacucuguaga

SEQ ID NO: 966130 - RNA, 22 nt, Human
gaagcccauuuguacagcacau

SEQ ID NO: 966131 - RNA, 19 nt, Human
agacagagcucaguggguu

SEQ ID NO: 966132 - RNA, 22 nt, Human
gcucugggugaacuuggagcaa

SEQ ID NO: 966133 - RNA, 22 nt, Human
gcuguggcuguacagagaccau

SEQ ID NO: 966134 - RNA, 22 nt, Human
cuucuauaaacugugaucuuuc

SEQ ID NO: 966135 - RNA, 20 nt, Human
ugucaugcauuagaugaaga

SEQ ID NO: 966136 - RNA, 22 nt, Human
ggaugcaggacggcauggaugu

SEQ ID NO: 966137 - RNA, 22 nt, Human
gcugggaagugcaagaucaagg

SEQ ID NO: 966138 - RNA, 22 nt, Human
aaagcagagguugcagugagcu

SEQ ID NO: 966139 - RNA, 22 nt, Human
agcacagauucugaagaguccu

SEQ ID NO: 966140 - RNA, 22 nt, Human
cuccaggccauggcugcggagg

SEQ ID NO: 966141 - RNA, 22 nt, Human
cagggcaguuuuacuucucucu

SEQ ID NO: 966142 - RNA, 22 nt, Human
gcaagauguuaacauagggaga

SEQ ID NO: 966143 - RNA, 22 nt, Human
auccaugauuaguaggauaaag

SEQ ID NO: 966144 - RNA, 22 nt, Human
auguuuuauguuccacucaagg

SEQ ID NO: 966145 - RNA, 22 nt, Human
agugcuuuagcauccaacuguc

SEQ ID NO: 966146 - RNA, 22 nt, Human
gugucauuaaccaccaugcaaa

SEQ ID NO: 966147 - RNA, 20 nt, Human
gagccuuccccucaccacug

SEQ ID NO: 966148 - RNA, 22 nt, Human
gguggccucucaugcaagguag

SEQ ID NO: 966149 - RNA, 22 nt, Human
aggagaggguggcauuaaguuu

SEQ ID NO: 966150 - RNA, 22 nt, Human
cuggcucaugugaugagggcaa

SEQ ID NO: 966151 - RNA, 22 nt, Human
ggcucagagaccugcgaucuga

SEQ ID NO: 966152 - RNA, 22 nt, Human
acugucugcccugagaugccag

SEQ ID NO: 966153 - RNA, 22 nt, Human
uugaagcacaaugucuuuuauc

SEQ ID NO: 966154 - RNA, 22 nt, Human
uccucaggucaaagcaggagaa

SEQ ID NO: 966155 - RNA, 22 nt, Human
agaaauguuacaguuguuauuu

SEQ ID NO: 966156 - RNA, 21 nt, Human
ugcauuccuccauccaacagg

SEQ ID NO: 966157 - RNA, 22 nt, Human
aagucauucuauuucucuaugu

SEQ ID NO: 966158 - RNA, 22 nt, Human
cucaggaucgcuugcccuaggg

SEQ ID NO: 966159 - RNA, 22 nt, Human
aauaugucugcuaauuguuucu

SEQ ID NO: 966160 - RNA, 22 nt, Human
gcacucuguuucuccugucagc

SEQ ID NO: 966161 - RNA, 22 nt, Human
guuauaaaaugcacaguuguuu

SEQ ID NO: 966162 - RNA, 22 nt, Human
uaucuuguaauagguccacuug

SEQ ID NO: 966163 - RNA, 22 nt, Human
gacucguucauaguuccaauuu

SEQ ID NO: 966164 - RNA, 22 nt, Human
cacagcuucugagugaggauuu

SEQ ID NO: 966165 - RNA, 22 nt, Human
aaucucuugggaggaaugaauu

SEQ ID NO: 966166 - RNA, 22 nt, Human
uacaaaguuugagaaugcuuuc

SEQ ID NO: 966167 - RNA, 22 nt, Human
uacuuuaaaaacugauaauuca

SEQ ID NO: 966168 - RNA, 19 nt, Human
ugccuggcaccagcuccac

SEQ ID NO: 966169 - RNA, 22 nt, Human
agcugcucuugggugacuucaa

SEQ ID NO: 966170 - RNA, 22 nt, Human
uugaaaaguuuugaaacacucu

SEQ ID NO: 966171 - RNA, 22 nt, Human
cauugcuguuaauugucucuag

SEQ ID NO: 966172 - RNA, 22 nt, Human
cggagggguuugaacagaggag

SEQ ID NO: 966173 - RNA, 22 nt, Human
uucagaaguagcuaagcaguca

SEQ ID NO: 966174 - RNA, 22 nt, Human
ucacaugcucaccuaagccaca

SEQ ID NO: 966175 - RNA, 22 nt, Human
aggagcuggaguccaggcaagu

SEQ ID NO: 966176 - RNA, 22 nt, Human
uaacagaaauauuuccagguga

SEQ ID NO: 966177 - RNA, 22 nt, Human
ugucuguacaaauuuucugugu

SEQ ID NO: 966178 - RNA, 22 nt, Human
cugucccagauguucucagcac

SEQ ID NO: 966179 - RNA, 22 nt, Human
ugcuggagaucauuaauguuca

SEQ ID NO: 966180 - RNA, 22 nt, Human
gaggaguguauuccacaccacu

SEQ ID NO: 966181 - RNA, 22 nt, Human
cccagcaggucggugcugccug

SEQ ID NO: 966182 - RNA, 22 nt, Human
guagcuuauuagggauaauagu

SEQ ID NO: 966183 - RNA, 23 nt, Human
ggacagggcccugcccuauggcc

SEQ ID NO: 966184 - RNA, 22 nt, Human
uagcccagaagagggaagcaac

SEQ ID NO: 966185 - RNA, 22 nt, Human
uccaggagucuagccucaggcc

SEQ ID NO: 966186 - RNA, 22 nt, Human
gggcagcuggcuuauagguuug

SEQ ID NO: 966187 - RNA, 22 nt, Human
ccugccugguguaagucuaagg

SEQ ID NO: 966188 - RNA, 22 nt, Human
ggcagcaggagccaucugguag

SEQ ID NO: 966189 - RNA, 19 nt, Human
aaaugugaugguacaauuc

SEQ ID NO: 966190 - RNA, 22 nt, Human
gcugccagucuaaugggaaaca

SEQ ID NO: 966191 - RNA, 22 nt, Human
cagugauggauauggagaaguc

SEQ ID NO: 966192 - RNA, 22 nt, Human
uccguauuugacuauugcaccg

SEQ ID NO: 966193 - RNA, 22 nt, Human
ugcucuguauucuauggcaguu

SEQ ID NO: 966194 - RNA, 22 nt, Human
ccaggagacaaagaugacugcu

SEQ ID NO: 966195 - RNA, 22 nt, Human
ccuggcugucguuuugugaaau

SEQ ID NO: 966196 - RNA, 22 nt, Human
gucagaggggcagcugccaggc

SEQ ID NO: 966197 - RNA, 19 nt, Human
ugcugcuguccuugcaggg

SEQ ID NO: 966198 - RNA, 22 nt, Human
ucaauuaugccauugcaauauu

SEQ ID NO: 966199 - RNA, 22 nt, Human
uuuauuagauuaucaaagaggu

SEQ ID NO: 966200 - RNA, 22 nt, Human
aagccgaggccacacagcagga

SEQ ID NO: 966201 - RNA, 22 nt, Human
cuaaauaaucccucuggucuua

SEQ ID NO: 966202 - RNA, 22 nt, Human
uaaggccaaggggccauagucu

SEQ ID NO: 966203 - RNA, 22 nt, Human
ucuuggagacucuuguauauuu

SEQ ID NO: 966204 - RNA, 22 nt, Human
agcugcaggcccaugcucaguc

SEQ ID NO: 966205 - RNA, 22 nt, Human
cucccugguguccccuccagga

SEQ ID NO: 966206 - RNA, 22 nt, Human
caggaaugaggucguaaguguc

SEQ ID NO: 966207 - RNA, 22 nt, Human
uauuaguagcuugaaauuggug

SEQ ID NO: 966208 - RNA, 22 nt, Human
aaaacuacauuugacauuuugu

SEQ ID NO: 966209 - RNA, 22 nt, Human
uguggccuugcagccuggaggu

SEQ ID NO: 966210 - RNA, 22 nt, Human
gaugcacagugacccugccagu

SEQ ID NO: 966211 - RNA, 22 nt, Human
ggccugccucacagucagcacc

SEQ ID NO: 966212 - RNA, 22 nt, Human
ugggggugacuaucucgggaau

SEQ ID NO: 966213 - RNA, 22 nt, Human
uuucagaucauuuuuuaaguac

SEQ ID NO: 966214 - RNA, 22 nt, Human
agcuuccucaccucagaggucu

SEQ ID NO: 966215 - RNA, 22 nt, Human
ggucccagcuggucacugucag

SEQ ID NO: 966216 - RNA, 22 nt, Human
uuauuuaaaauguagguuggga

SEQ ID NO: 966217 - RNA, 22 nt, Human
ugcucugucaagaaaagaugcc

SEQ ID NO: 966218 - RNA, 22 nt, Human
gaggcugcaggcaaugcugccc

SEQ ID NO: 966219 - RNA, 22 nt, Human
ugcccaagcagaggagugauuc

SEQ ID NO: 966220 - RNA, 22 nt, Human
uucagaaugugaccuuauuugg

SEQ ID NO: 966221 - RNA, 22 nt, Human
uauguuuuucaagugcacacua

SEQ ID NO: 966222 - RNA, 22 nt, Human
agaagucauuuauguuagauga

SEQ ID NO: 966223 - RNA, 22 nt, Human
uccucugccaaagggaguugcc

SEQ ID NO: 966224 - RNA, 22 nt, Human
cugagagucagcuucuccuccu

SEQ ID NO: 966225 - RNA, 22 nt, Human
aaauguguauaugaaacaugau

SEQ ID NO: 966226 - RNA, 22 nt, Human
uggugcugacaguucugagugc

SEQ ID NO: 966227 - RNA, 22 nt, Human
uguugauuaguguuuagacuua

SEQ ID NO: 966228 - RNA, 22 nt, Human
caggguuucaccauguuagcag

SEQ ID NO: 966229 - RNA, 22 nt, Human
cccaggaacagggcucagaccc

SEQ ID NO: 966230 - RNA, 22 nt, Human
ucuugaaggggggcaguguuga

SEQ ID NO: 966231 - RNA, 22 nt, Human
gagagcccugcuccuaucccag

SEQ ID NO: 966232 - RNA, 22 nt, Human
uagacacaagagaaggguauaa

SEQ ID NO: 966233 - RNA, 22 nt, Human
caguuuaaaugagugacugcag

SEQ ID NO: 966234 - RNA, 21 nt, Human
uucaaaguuugccuaaagauu

SEQ ID NO: 966235 - RNA, 22 nt, Human
caagaaauuucuuaagaacuaa

SEQ ID NO: 966236 - RNA, 22 nt, Human
uaguuuaauggucaacuaauga

SEQ ID NO: 966237 - RNA, 22 nt, Human
ccugccugcggcccgcggggag

SEQ ID NO: 966238 - RNA, 22 nt, Human
gccaggcauucuagaaguagug

SEQ ID NO: 966239 - RNA, 20 nt, Human
augugucuguaaacaacucu

SEQ ID NO: 966240 - RNA, 18 nt, Human
aggccagcccugcuacug

SEQ ID NO: 966241 - RNA, 23 nt, Human
aucaaacuggugagaaugucagu

SEQ ID NO: 966242 - RNA, 22 nt, Human
uccaagggcucauggacacuuu

SEQ ID NO: 966243 - RNA, 22 nt, Human
agaggcuccuagccacuggcuu

SEQ ID NO: 966244 - RNA, 18 nt, Human
uaggagagaauuuauuua

SEQ ID NO: 966245 - RNA, 22 nt, Human
gcucugcucuaacauuccugac

SEQ ID NO: 966246 - RNA, 22 nt, Human
gcugucucggggcuuucuccug

SEQ ID NO: 966247 - RNA, 22 nt, Human
ccaggcugggcuacaaguugag

SEQ ID NO: 966248 - RNA, 22 nt, Human
gggucugaggaguaccauuguc

SEQ ID NO: 966249 - RNA, 22 nt, Human
agcagagccaggucucucugua

SEQ ID NO: 966250 - RNA, 22 nt, Human
ucaaauguucccuguacuggcc

SEQ ID NO: 966251 - RNA, 23 nt, Human
cauuucugggagauuuauaaaau

SEQ ID NO: 966252 - RNA, 22 nt, Human
aguggccagugcugcucugggg

SEQ ID NO: 966253 - RNA, 22 nt, Human
aggcagcaugggccccagcucc

SEQ ID NO: 966254 - RNA, 22 nt, Human
gaaggucaccuccccucucugg

SEQ ID NO: 966255 - RNA, 22 nt, Human
agcagcuguacuuucaucuguu

SEQ ID NO: 966256 - RNA, 22 nt, Human
uucaaugagcccaagaacguga

SEQ ID NO: 966257 - RNA, 22 nt, Human
gagugugggcacgggggccuug

SEQ ID NO: 966258 - RNA, 20 nt, Human
gccuggcacccggggcuggc

SEQ ID NO: 966259 - RNA, 22 nt, Human
agcagggccucuggcacugguc

SEQ ID NO: 966260 - RNA, 22 nt, Human
cugggcugcaucaaagaggcau

SEQ ID NO: 966261 - RNA, 22 nt, Human
ugaacaguuucaagaaaacuuu

SEQ ID NO: 966262 - RNA, 22 nt, Human
aaauaguuguuuggaucaauaa

SEQ ID NO: 966263 - RNA, 20 nt, Human
gcagagccucacugcaaggg

SEQ ID NO: 966264 - RNA, 22 nt, Human
ucuacccagagcuaugaccuga

SEQ ID NO: 966265 - RNA, 22 nt, Human
ggcuuggaccagucacaguggu

SEQ ID NO: 966266 - RNA, 22 nt, Human
cugggguggaggagcuccccug

SEQ ID NO: 966267 - RNA, 22 nt, Human
ucagagaguuggaaagaauuaa

SEQ ID NO: 966268 - RNA, 22 nt, Human
gagagcugucagcguagcaccg

SEQ ID NO: 966269 - RNA, 22 nt, Human
cuugcugggguaagucugugcu

SEQ ID NO: 966270 - RNA, 22 nt, Human
ugcuuaauauugugauguaaua

SEQ ID NO: 966271 - RNA, 22 nt, Human
augggcaugcuucuaguugaaa

SEQ ID NO: 966272 - RNA, 22 nt, Human
ugauuuccaugaagcugaaggc

SEQ ID NO: 966273 - RNA, 22 nt, Human
uggcuguggacucagauggcuc

SEQ ID NO: 966274 - RNA, 22 nt, Human
uucuuaagaggaacauuuuugu

SEQ ID NO: 966275 - RNA, 22 nt, Human
aagaugcuuauugcuccugcag

SEQ ID NO: 966276 - RNA, 22 nt, Human
gggcagggguagcauuccaagu

SEQ ID NO: 966277 - RNA, 22 nt, Human
aaugccaguguguugauuccag

SEQ ID NO: 966278 - RNA, 22 nt, Human
ccuccugguccagcaucucuuu

SEQ ID NO: 966279 - RNA, 22 nt, Human
acugugcaaugaguaauaaacu

SEQ ID NO: 966280 - RNA, 22 nt, Human
aggagagagaacacuugggucc

SEQ ID NO: 966281 - RNA, 22 nt, Human
gucaggaugcuauuguuauuaa

SEQ ID NO: 966282 - RNA, 22 nt, Human
acacugcucacuucuucccuug

SEQ ID NO: 966283 - RNA, 22 nt, Human
acuuugcacuaaguuacucauu

SEQ ID NO: 966284 - RNA, 22 nt, Human
aaguuacuggcaagggcugcag

SEQ ID NO: 966285 - RNA, 22 nt, Human
uucaacuagauuuauacaauuc

SEQ ID NO: 966286 - RNA, 22 nt, Human
cagcacuggggggauucggagc

SEQ ID NO: 966287 - RNA, 22 nt, Human
gcaguaaaaaaggauaugugca

SEQ ID NO: 966288 - RNA, 22 nt, Human
uauuggauagcuugugcagaau

SEQ ID NO: 966289 - RNA, 22 nt, Human
aaauuagucgguuuaggaauuu

SEQ ID NO: 966290 - RNA, 22 nt, Human
ugucuucagcaaaugccuuucu

SEQ ID NO: 966291 - RNA, 22 nt, Human
gccaccaggagcccaguccaaa

SEQ ID NO: 966292 - RNA, 22 nt, Human
cccaggaaacccgaaggcgacc

SEQ ID NO: 966293 - RNA, 22 nt, Human
auggaaagggaagcaaggaaca

SEQ ID NO: 966294 - RNA, 22 nt, Human
gugcugugugauccaugcuggc

SEQ ID NO: 966295 - RNA, 22 nt, Human
uacaaacuuguuuuaaguaagu

SEQ ID NO: 966296 - RNA, 22 nt, Human
ugccugugucacagugauguuu

SEQ ID NO: 966297 - RNA, 23 nt, Human
gggggcugguugacucucugcag

SEQ ID NO: 966298 - RNA, 21 nt, Human
cagagcagcguucugcugugg

SEQ ID NO: 966299 - RNA, 20 nt, Human
uaugaguauuacuuucagga

SEQ ID NO: 966300 - RNA, 22 nt, Human
gaaggagacccugaagaugcug

SEQ ID NO: 966301 - RNA, 18 nt, Human
ccucagggagagagacgc

SEQ ID NO: 966302 - RNA, 22 nt, Human
uuuucucuacaaaauaaccagc

SEQ ID NO: 966303 - RNA, 22 nt, Human
agcagcauguugggaugugaaa

SEQ ID NO: 966304 - RNA, 22 nt, Human
cuggagccccagacagggagag

SEQ ID NO: 966305 - RNA, 22 nt, Human
ucuacugugguccuuguaacca

SEQ ID NO: 966306 - RNA, 22 nt, Human
auauauaagcugaugagccaca

SEQ ID NO: 966307 - RNA, 22 nt, Human
gacaauaaaaugaucuuacagu

SEQ ID NO: 966308 - RNA, 22 nt, Human
cgaggcagacaaaaguuggaag

SEQ ID NO: 966309 - RNA, 22 nt, Human
gcugcccagcaggccccagggg

SEQ ID NO: 966310 - RNA, 22 nt, Human
cugaaggacuuggugauaguug

SEQ ID NO: 966311 - RNA, 22 nt, Human
ccucuggguaucuguggaagua

SEQ ID NO: 966312 - RNA, 22 nt, Human
agucugcuuccuggagaacuca

SEQ ID NO: 966313 - RNA, 22 nt, Human
aggggagcuaacaccagagccc

SEQ ID NO: 966314 - RNA, 17 nt, Human
cgagggcuugcuggcuc

SEQ ID NO: 966315 - RNA, 22 nt, Human
uggcucagauaauucaaggggc

SEQ ID NO: 966316 - RNA, 22 nt, Human
ucauugcagugauguuguaugu

SEQ ID NO: 966317 - RNA, 22 nt, Human
aagcacagaaaaggagcaugga

SEQ ID NO: 966318 - RNA, 22 nt, Human
cuccugugggucaccaauaggc

SEQ ID NO: 966319 - RNA, 22 nt, Human
auggcagggcagccucucagag

SEQ ID NO: 966320 - RNA, 22 nt, Human
uggagggcaugcuguccauggg

SEQ ID NO: 966321 - RNA, 22 nt, Human
gagagcuguaauagucaugucu

SEQ ID NO: 966322 - RNA, 22 nt, Human
uggaggcaucagagugcuuggc

SEQ ID NO: 966323 - RNA, 22 nt, Human
auuuaagauugcguauucaugu

SEQ ID NO: 966324 - RNA, 22 nt, Human
aggcagcuucugauuagcagcg

SEQ ID NO: 966325 - RNA, 22 nt, Human
uaacuuugauaagaaucaggga

SEQ ID NO: 966326 - RNA, 22 nt, Human
auaguauuuaauaguuagcuca

SEQ ID NO: 966327 - RNA, 22 nt, Human
aucuucaacuugaucauuugaa

SEQ ID NO: 966328 - RNA, 22 nt, Human
agagucuuuugucaguaauguu

SEQ ID NO: 966329 - RNA, 22 nt, Human
aggcagcauccagaggagaaug

SEQ ID NO: 966330 - RNA, 22 nt, Human
gaaaggccauuucugaggguuu

SEQ ID NO: 966331 - RNA, 22 nt, Human
aggcacugaaagguggccagag

SEQ ID NO: 966332 - RNA, 22 nt, Human
gucucagggacugcuucugggg

SEQ ID NO: 966333 - RNA, 20 nt, Human
caggccagagguuugauggc

SEQ ID NO: 966334 - RNA, 22 nt, Human
cugcaucaguggauaugauggu

SEQ ID NO: 966335 - RNA, 22 nt, Human
cccacaggcuagggguagggca

SEQ ID NO: 966336 - RNA, 22 nt, Human
auguguuuguaccuuuaaauau

SEQ ID NO: 966337 - RNA, 18 nt, Human
ugagagugugugcucuug

SEQ ID NO: 966338 - RNA, 22 nt, Human
ggaggggaacuaaucccgugac

SEQ ID NO: 966339 - RNA, 22 nt, Human
ugauucuuugaccaaaaaauug

SEQ ID NO: 966340 - RNA, 22 nt, Human
aggggcugacuggaaagugcca

SEQ ID NO: 966341 - RNA, 22 nt, Human
guguuuccucuagaagccaugg

SEQ ID NO: 966342 - RNA, 22 nt, Human
augucuuuauaaauguauaaug

SEQ ID NO: 966343 - RNA, 22 nt, Human
ugcaccuucauuuuaggcagcu

SEQ ID NO: 966344 - RNA, 22 nt, Human
acucugcuguuuacucucuaua

SEQ ID NO: 966345 - RNA, 22 nt, Human
uaugaaauuuaaacacagauca

SEQ ID NO: 966346 - RNA, 22 nt, Human
gcugagcugaggcagggcuggg

SEQ ID NO: 966347 - RNA, 22 nt, Human
cugucaucacaguugagcagcc

SEQ ID NO: 966348 - RNA, 20 nt, Human
gucaggauuaguaaacucug

SEQ ID NO: 966349 - RNA, 22 nt, Human
cccuggagugccggaaucaaga

SEQ ID NO: 966350 - RNA, 22 nt, Human
cacuguguaagaagaugggcuu

SEQ ID NO: 966351 - RNA, 22 nt, Human
uaaggccagccagcaaaucugu

SEQ ID NO: 966352 - RNA, 22 nt, Human
cagcauggugccagugagucca

SEQ ID NO: 966353 - RNA, 21 nt, Human
ugauuuccaucuuaaaauaaa

SEQ ID NO: 966354 - RNA, 22 nt, Human
guuuacauauuuuaauugguga

SEQ ID NO: 966355 - RNA, 23 nt, Human
aggagccaggugcagcccuugug

SEQ ID NO: 966356 - RNA, 22 nt, Human
aaggcacuguacuaguuaguua

SEQ ID NO: 966357 - RNA, 22 nt, Human
ucagggacuaggugcugccuga

SEQ ID NO: 966358 - RNA, 22 nt, Human
cuucagaacuauaaaaaguacu

SEQ ID NO: 966359 - RNA, 22 nt, Human
gcacagaacuucucuuaguagg

SEQ ID NO: 966360 - RNA, 22 nt, Human
gcagagcccuggggguauggug

SEQ ID NO: 966361 - RNA, 17 nt, Human
uuccccugaccaagccu

SEQ ID NO: 966362 - RNA, 22 nt, Human
uugaaagaggcaaaguuugauc

SEQ ID NO: 966363 - RNA, 22 nt, Human
cucagaguccccaguggguuug

SEQ ID NO: 966364 - RNA, 22 nt, Human
ugaugggacugccagcugcuga

SEQ ID NO: 966365 - RNA, 22 nt, Human
aguuuuucugcuggucucacua

SEQ ID NO: 966366 - RNA, 22 nt, Human
aagggcaggugggcauuucugg

SEQ ID NO: 966367 - RNA, 22 nt, Human
gcccaggagguugggcugugca

SEQ ID NO: 966368 - RNA, 22 nt, Human
uuaacagauguuuauggagcau

SEQ ID NO: 966369 - RNA, 20 nt, Human
agcugguuaucuuaauucuu

SEQ ID NO: 966370 - RNA, 22 nt, Human
uuccaguugguagaauguaagg

SEQ ID NO: 966371 - RNA, 17 nt, Human
uggcucugaggcugaau

SEQ ID NO: 966372 - RNA, 22 nt, Human
gauauuuugagaaauccuauga

SEQ ID NO: 966373 - RNA, 22 nt, Human
aggcagcuuuaacugguaguag

SEQ ID NO: 966374 - RNA, 22 nt, Human
gacccagcuuaagucacauguu

SEQ ID NO: 966375 - RNA, 22 nt, Human
aagcugccaccagcccagggca

SEQ ID NO: 966376 - RNA, 22 nt, Human
agcuggcagucauccuagugag

SEQ ID NO: 966377 - RNA, 22 nt, Human
ucaguuuuguauguuguaaguc

SEQ ID NO: 966378 - RNA, 22 nt, Human
agucucagccacacagaccuau

SEQ ID NO: 966379 - RNA, 22 nt, Human
uggcccugcuguaucaucugcu

SEQ ID NO: 966380 - RNA, 21 nt, Human
ucucugggcccuccugugggg

SEQ ID NO: 966381 - RNA, 22 nt, Human
cuagccugggauuugaacuuau

SEQ ID NO: 966382 - RNA, 22 nt, Human
ugagagagccugaaucucuuac

SEQ ID NO: 966383 - RNA, 22 nt, Human
cuggcugcuggccugaggaugc

SEQ ID NO: 966384 - RNA, 22 nt, Human
uuugcauaagucauguccagug

SEQ ID NO: 966385 - RNA, 22 nt, Human
ucagaagccggaagugcuccuc

SEQ ID NO: 966386 - RNA, 22 nt, Human
aacuaaaucuggcauuuagagc

SEQ ID NO: 966387 - RNA, 22 nt, Human
uggaucucggcaaugcgggacu

SEQ ID NO: 966388 - RNA, 22 nt, Human
cucugggcacauuuuccaggac

SEQ ID NO: 966389 - RNA, 22 nt, Human
agugcagugguuaggagccagg

SEQ ID NO: 966390 - RNA, 18 nt, Human
gcagcuagccaggggggc

SEQ ID NO: 966391 - RNA, 22 nt, Human
cuguccuguagcuccaucaguc

SEQ ID NO: 966392 - RNA, 21 nt, Human
uuugaaagcuacaucuauagc

SEQ ID NO: 966393 - RNA, 22 nt, Human
ccagaggaaaaauaucucccua

SEQ ID NO: 966394 - RNA, 22 nt, Human
cccucugccucugaguaggaca

SEQ ID NO: 966395 - RNA, 22 nt, Human
aggcccugcccagagcuccucg

SEQ ID NO: 966396 - RNA, 22 nt, Human
uuauuccauuauuucacuuagg

SEQ ID NO: 966397 - RNA, 22 nt, Human
ccuggagcacagcccaguccca

SEQ ID NO: 966398 - RNA, 22 nt, Human
ggagaggcgaugagucacagcc

SEQ ID NO: 966399 - RNA, 22 nt, Human
gagccuggagcuggaacgaagc

SEQ ID NO: 966400 - RNA, 22 nt, Human
gaaggccauuuuuagguagaau

SEQ ID NO: 966401 - RNA, 22 nt, Human
cccucagcuucucccugcagcu

SEQ ID NO: 966402 - RNA, 22 nt, Human
cccugcagaaccacagacaaac

SEQ ID NO: 966403 - RNA, 22 nt, Human
ggcccuguuagagcucccacaa

SEQ ID NO: 966404 - RNA, 22 nt, Human
gcugucaggccaugugggccuu

SEQ ID NO: 966405 - RNA, 22 nt, Human
uccagccuaggggaacagcugc

SEQ ID NO: 966406 - RNA, 22 nt, Human
uugaaggacaucuuguuucuag

SEQ ID NO: 966407 - RNA, 22 nt, Human
agccacagguguuggccagugu

SEQ ID NO: 966408 - RNA, 22 nt, Human
aucuggcucauucagggaacgg

SEQ ID NO: 966409 - RNA, 19 nt, Human
cuuugucagaacaugcuuc

SEQ ID NO: 966410 - RNA, 22 nt, Human
cccaguuucaacuuuccagugg

SEQ ID NO: 966411 - RNA, 22 nt, Human
agcagccaauuggaggaugaag

SEQ ID NO: 966412 - RNA, 22 nt, Human
ccacagggccuuuccugcuggc

SEQ ID NO: 966413 - RNA, 22 nt, Human
cauuuguacagaacagcuuuau

SEQ ID NO: 966414 - RNA, 22 nt, Human
cuagaaaugcucaagagaaagu

SEQ ID NO: 966415 - RNA, 22 nt, Human
auuuucuaagccugucagacuu

SEQ ID NO: 966416 - RNA, 22 nt, Human
agaagauuuagguugacgcuau

SEQ ID NO: 966417 - RNA, 22 nt, Human
uugcuauuuugagagucauagu

SEQ ID NO: 966418 - RNA, 22 nt, Human
gggcagcuggccagguauucug

SEQ ID NO: 966419 - RNA, 22 nt, Human
guacuucccugggaggcaagca

SEQ ID NO: 966420 - RNA, 22 nt, Human
gcaccugauugauuucacugcu

SEQ ID NO: 966421 - RNA, 22 nt, Human
cagcugacagugaggugggggc

SEQ ID NO: 966422 - RNA, 22 nt, Human
uguauauucugccuaaaagcuu

SEQ ID NO: 966423 - RNA, 22 nt, Human
uccuuuuuaagucguuguggua

SEQ ID NO: 966424 - RNA, 22 nt, Human
uuugaaagcaccauuugaguag

SEQ ID NO: 966425 - RNA, 22 nt, Human
cagagcugcacauucuaugaug

SEQ ID NO: 966426 - RNA, 22 nt, Human
agaaaucauucccaaacccaua

SEQ ID NO: 966427 - RNA, 22 nt, Human
auucacaaaugcugccccauuc

SEQ ID NO: 966428 - RNA, 22 nt, Human
ucaagagagugcugcuuggggu

SEQ ID NO: 966429 - RNA, 22 nt, Human
gggagggaucugcuaggcaaug

SEQ ID NO: 966430 - RNA, 22 nt, Human
uccuguuuaucugugugacucg

SEQ ID NO: 966431 - RNA, 22 nt, Human
augugucucuaccaaugcaauu

SEQ ID NO: 966432 - RNA, 22 nt, Human
cagcaggcguugggagaaagac

SEQ ID NO: 966433 - RNA, 22 nt, Human
gaugcacuuucuuuucaacagu

SEQ ID NO: 966434 - RNA, 22 nt, Human
ucuuugcaucccuuccauaguu

SEQ ID NO: 966435 - RNA, 22 nt, Human
uuuccuuccaaaugcccgggag

SEQ ID NO: 966436 - RNA, 22 nt, Human
uuuauuuauaagccacuugcug

SEQ ID NO: 966437 - RNA, 22 nt, Human
aggcccuggucaggucuggcug

SEQ ID NO: 966438 - RNA, 22 nt, Human
aaggcagccgugugacugcaug

SEQ ID NO: 966439 - RNA, 22 nt, Human
cugagccagcgggcucacuuuu

SEQ ID NO: 966440 - RNA, 22 nt, Human
aaaguguugggauuacaggugu

SEQ ID NO: 966441 - RNA, 22 nt, Human
ccagaggcuggcagccagcuga

SEQ ID NO: 966442 - RNA, 22 nt, Human
cacacuagucuauccauuagcu

SEQ ID NO: 966443 - RNA, 22 nt, Human
cagaaauggagcccaggaaucu

SEQ ID NO: 966444 - RNA, 22 nt, Human
gccugucaauuuuguguacaau

SEQ ID NO: 966445 - RNA, 22 nt, Human
ugggugaggaugaugaggcagc

SEQ ID NO: 966446 - RNA, 22 nt, Human
gcugccugaagugucuacacug

SEQ ID NO: 966447 - RNA, 19 nt, Human
acuuccugcccgcuccuuu

SEQ ID NO: 966448 - RNA, 22 nt, Human
gagucuuugguaaagucugcug

SEQ ID NO: 966449 - RNA, 20 nt, Human
ucacagaaacaaauagagaa

SEQ ID NO: 966450 - RNA, 18 nt, Human
agcagaauucuaggguuc

SEQ ID NO: 966451 - RNA, 22 nt, Human
ggcucagguuuaaagugcuuua

SEQ ID NO: 966452 - RNA, 22 nt, Human
gccaggcauuuguuaggugcug

SEQ ID NO: 966453 - RNA, 22 nt, Human
ugcugggcuugaaagcugcuaa

SEQ ID NO: 966454 - RNA, 23 nt, Human
cugcugugaaacaugguuuuggu

SEQ ID NO: 966455 - RNA, 22 nt, Human
aguauacauauauuagccuucg

SEQ ID NO: 966456 - RNA, 22 nt, Human
cuugcaggcagggccuccugga

SEQ ID NO: 966457 - RNA, 18 nt, Human
ugaauagggguuugcaga

SEQ ID NO: 966458 - RNA, 22 nt, Human
uagggcagccuuauagcuccca

SEQ ID NO: 966459 - RNA, 22 nt, Human
cagucacacaaguggacuuggg

SEQ ID NO: 966460 - RNA, 22 nt, Human
acagaaauuagcagugaguuua

SEQ ID NO: 966461 - RNA, 23 nt, Human
ucucaagaggaagcagggcucau

SEQ ID NO: 966462 - RNA, 22 nt, Human
gcucccacaaccuucuugcucc

SEQ ID NO: 966463 - RNA, 22 nt, Human
gggcugacucugcacugagcca

SEQ ID NO: 966464 - RNA, 22 nt, Human
cugucacacugauaucaggcuu

SEQ ID NO: 966465 - RNA, 21 nt, Human
caggaaaagcggaagucuagc

SEQ ID NO: 966466 - RNA, 22 nt, Human
uagauuuuaggagauuuuacug

SEQ ID NO: 966467 - RNA, 22 nt, Human
uuuaggaucucucuuguuacau

SEQ ID NO: 966468 - RNA, 22 nt, Human
ugcuagaauaccuaccuggagg

SEQ ID NO: 966469 - RNA, 22 nt, Human
gcugggaggaucucucccuguc

SEQ ID NO: 966470 - RNA, 22 nt, Human
uagauuucucauucauagauug

SEQ ID NO: 966471 - RNA, 22 nt, Human
cacucugccugauguuacaugg

SEQ ID NO: 966472 - RNA, 22 nt, Human
aauagcucacugauuucucuuu

SEQ ID NO: 966473 - RNA, 22 nt, Human
uagcagggccaggcugggaacc

SEQ ID NO: 966474 - RNA, 22 nt, Human
uugucugaaagaucauuacauu

SEQ ID NO: 966475 - RNA, 22 nt, Human
cugaagcaaaugaaacagcucu

SEQ ID NO: 966476 - RNA, 22 nt, Human
gcucugaggcugugaggugcug

SEQ ID NO: 966477 - RNA, 22 nt, Human
cagauccacccuuguagugaca

SEQ ID NO: 966478 - RNA, 22 nt, Human
cuggccugaggucggcuguagg

SEQ ID NO: 966479 - RNA, 22 nt, Human
ugguuuugcuccaguauaaaua

SEQ ID NO: 966480 - RNA, 23 nt, Human
cugcuguguuggucucgauggga

SEQ ID NO: 966481 - RNA, 22 nt, Human
uaacacugauuuguucucaggg

SEQ ID NO: 966482 - RNA, 20 nt, Human
uuggcagcuucaggguacua

SEQ ID NO: 966483 - RNA, 22 nt, Human
auggagggugucagagagcgaa

SEQ ID NO: 966484 - RNA, 22 nt, Human
ccuggcagcagcacaugccuuc

SEQ ID NO: 966485 - RNA, 22 nt, Human
auagauacauuagguaacuugu

SEQ ID NO: 966486 - RNA, 22 nt, Human
cacaauuuccuugcuucacuuu

SEQ ID NO: 966487 - RNA, 19 nt, Human
ggaagagaggaaaggugga

SEQ ID NO: 966488 - RNA, 22 nt, Human
aaaaccaggcguuuccuauuau

SEQ ID NO: 966489 - RNA, 17 nt, Human
acagggcagaaacagcu

SEQ ID NO: 966490 - RNA, 22 nt, Human
caggggacauuaaagcuccaua

SEQ ID NO: 966491 - RNA, 22 nt, Human
agggacaguuacaucaucagac

SEQ ID NO: 966492 - RNA, 22 nt, Human
cuggcagucacggccaugugcu

SEQ ID NO: 966493 - RNA, 22 nt, Human
gccucugggcucugccccuggc

SEQ ID NO: 966494 - RNA, 22 nt, Human
ggacacagcugcagccacaccc

SEQ ID NO: 966495 - RNA, 22 nt, Human
gcaggcuccaggccggccccuu

SEQ ID NO: 966496 - RNA, 18 nt, Human
uccuggccacacuaccuu

SEQ ID NO: 966497 - RNA, 22 nt, Human
agggccagggaagcuguauuuu

SEQ ID NO: 966498 - RNA, 23 nt, Human
caggcaggaugaggacuacacuc

SEQ ID NO: 966499 - RNA, 22 nt, Human
ccuccagcugccucagucucuu

SEQ ID NO: 966500 - RNA, 22 nt, Human
gugcaugugcauccauguguac

SEQ ID NO: 966501 - RNA, 22 nt, Human
accuggcacuacaggcaccugu

SEQ ID NO: 966502 - RNA, 19 nt, Human
uuucaauggcuuagagaaa

SEQ ID NO: 966503 - RNA, 22 nt, Human
aggaggccgauuucagaggucg

SEQ ID NO: 966504 - RNA, 22 nt, Human
caacagcugaucuuugaugaag

SEQ ID NO: 966505 - RNA, 22 nt, Human
ggccuggagaaggcccagggag

SEQ ID NO: 966506 - RNA, 22 nt, Human
auguaauaggguaacauaacau

SEQ ID NO: 966507 - RNA, 22 nt, Human
uauuuccaccuauuauuuucug

SEQ ID NO: 966508 - RNA, 22 nt, Human
aaucagaaaauucaguggaauu

SEQ ID NO: 966509 - RNA, 22 nt, Human
cugggcuucucccccuggcaga

SEQ ID NO: 966510 - RNA, 22 nt, Human
gcuggccuccugcuagauggaa

SEQ ID NO: 966511 - RNA, 22 nt, Human
gagccuggauagccuuguucca

SEQ ID NO: 966512 - RNA, 22 nt, Human
ccugggagugucagacuugcuu

SEQ ID NO: 966513 - RNA, 22 nt, Human
ggcauguuucaucacaucaaga

SEQ ID NO: 966514 - RNA, 22 nt, Human
uuuaaauggcauuuucccagau

SEQ ID NO: 966515 - RNA, 22 nt, Human
aggagcugacuuguaaagcauu

SEQ ID NO: 966516 - RNA, 22 nt, Human
gaggcccaguccugcaagcacg

SEQ ID NO: 966517 - RNA, 21 nt, Human
uuucacaaaaguaugugacaa

SEQ ID NO: 966518 - RNA, 22 nt, Human
auauuucuggggguguguuucu

SEQ ID NO: 966519 - RNA, 22 nt, Human
caggcagccaggggaccugucc

SEQ ID NO: 966520 - RNA, 22 nt, Human
cagucccuaguggagcucacag

SEQ ID NO: 966521 - RNA, 22 nt, Human
cugagcugcucccgcugcagcg

SEQ ID NO: 966522 - RNA, 22 nt, Human
uuuccucacuucaugagaguuu

SEQ ID NO: 966523 - RNA, 22 nt, Human
ggacagaggguugacagaguau

SEQ ID NO: 966524 - RNA, 22 nt, Human
gccaggcuguggggaacuugaa

SEQ ID NO: 966525 - RNA, 22 nt, Human
ggguccagacacuccagaggaa

SEQ ID NO: 966526 - RNA, 22 nt, Human
ucugggaacacacgucacuuca

SEQ ID NO: 966527 - RNA, 22 nt, Human
gucaggauuauuuuauuaaaag

SEQ ID NO: 966528 - RNA, 22 nt, Human
caggagugucuccacacagcaa

SEQ ID NO: 966529 - RNA, 22 nt, Human
ucugccaccuucauccuccacu

SEQ ID NO: 966530 - RNA, 17 nt, Human
ugagcaguagaagaugc

SEQ ID NO: 966531 - RNA, 19 nt, Human
acacugaauguagaauugg

SEQ ID NO: 966532 - RNA, 20 nt, Human
uauuugaaauggccaagugu

SEQ ID NO: 966533 - RNA, 22 nt, Human
ugucauguguucuuaaauacau

SEQ ID NO: 966534 - RNA, 22 nt, Human
uuggcagcccagcuuacuagca

SEQ ID NO: 966535 - RNA, 21 nt, Human
cucaaagaccaaaaguguaga

SEQ ID NO: 966536 - RNA, 22 nt, Human
guuuucugauuagcaaaucuga

SEQ ID NO: 966537 - RNA, 20 nt, Human
ugcucaggauggagaggugu

SEQ ID NO: 966538 - RNA, 22 nt, Human
aaaucacuaaguuauagugugg

SEQ ID NO: 966539 - RNA, 22 nt, Human
gucccuggaauggacucugcgc

SEQ ID NO: 966540 - RNA, 22 nt, Human
agaccauggccauccuaggaaa

SEQ ID NO: 966541 - RNA, 23 nt, Human
acagaggcuuaaaugaguggcag

SEQ ID NO: 966542 - RNA, 22 nt, Human
agugggcagcccaggaggucuu

SEQ ID NO: 966543 - RNA, 22 nt, Human
gagugcagaugccagccccagu

SEQ ID NO: 966544 - RNA, 22 nt, Human
gggauggcucaaaggagucagg

SEQ ID NO: 966545 - RNA, 22 nt, Human
cagaggugcauacaggucauua

SEQ ID NO: 966546 - RNA, 22 nt, Human
gacagcaggaugugaggggaug

SEQ ID NO: 966547 - RNA, 22 nt, Human
cucuucuuauggccguggcuga

SEQ ID NO: 966548 - RNA, 22 nt, Human
ugcuggcuguauaugugagagu

SEQ ID NO: 966549 - RNA, 23 nt, Human
ggcagagagcauggcuggggccc

SEQ ID NO: 966550 - RNA, 22 nt, Human
ucacaaauauuuuaacaguagg

SEQ ID NO: 966551 - RNA, 22 nt, Human
agggagcugcucugcuuccgug

SEQ ID NO: 966552 - RNA, 22 nt, Human
ucuccuggucaccucagaaguc

SEQ ID NO: 966553 - RNA, 22 nt, Human
cagaguggcagucccaggccca

SEQ ID NO: 966554 - RNA, 22 nt, Human
uacaaaguaauguauaauaucg

SEQ ID NO: 966555 - RNA, 22 nt, Human
uaauuuaauuucaugccagccu

SEQ ID NO: 966556 - RNA, 22 nt, Human
uggcagcuuccugcucauagga

SEQ ID NO: 966557 - RNA, 22 nt, Human
gcagagugaggaagagcuucca

SEQ ID NO: 966558 - RNA, 22 nt, Human
agguaagggucacaguucauau

SEQ ID NO: 966559 - RNA, 22 nt, Human
ccugcagacacuuguccagcaa

SEQ ID NO: 966560 - RNA, 22 nt, Human
acagugugugcuuucccuuacg

SEQ ID NO: 966561 - RNA, 22 nt, Human
ucagagguaagggcugagagga

SEQ ID NO: 966562 - RNA, 22 nt, Human
gagagugucgggggccccagga

SEQ ID NO: 966563 - RNA, 22 nt, Human
gccagguggucuggcuccagag

SEQ ID NO: 966564 - RNA, 22 nt, Human
cacagcuuaugccacugauugg

SEQ ID NO: 966565 - RNA, 20 nt, Human
uugaggagauauugaauacu

SEQ ID NO: 966566 - RNA, 22 nt, Human
agagacaggauaucugcucaug

SEQ ID NO: 966567 - RNA, 22 nt, Human
caugaaaauaacauuguuguga

SEQ ID NO: 966568 - RNA, 22 nt, Human
gaggggcuggcacgauggcugc

SEQ ID NO: 966569 - RNA, 22 nt, Human
cugauuccugauucaugcucuu

SEQ ID NO: 966570 - RNA, 22 nt, Human
gaauguaauagucaguagaaca

SEQ ID NO: 966571 - RNA, 22 nt, Human
aucaaaguucguaacugauaac

SEQ ID NO: 966572 - RNA, 22 nt, Human
uccaggagguugagacugcagu

SEQ ID NO: 966573 - RNA, 21 nt, Human
cagaggccucaugcucugugc

SEQ ID NO: 966574 - RNA, 22 nt, Human
gaaacuguauguaguuuuuggg

SEQ ID NO: 966575 - RNA, 19 nt, Human
ugaagcaggcagagaagau

SEQ ID NO: 966576 - RNA, 22 nt, Human
gcaggccuccccugcuggagcu

SEQ ID NO: 966577 - RNA, 22 nt, Human
gagagggauacugaguuuuggu

SEQ ID NO: 966578 - RNA, 23 nt, Human
uggggcugauggagacggaccag

SEQ ID NO: 966579 - RNA, 22 nt, Human
cagcagggcccccgggugcgcc

SEQ ID NO: 966580 - RNA, 22 nt, Human
agagccagguguagucucggag

SEQ ID NO: 966581 - RNA, 22 nt, Human
aaagcagaggugauaugacuua

SEQ ID NO: 966582 - RNA, 22 nt, Human
aaagguuugcauggaauuuacc

SEQ ID NO: 966583 - RNA, 21 nt, Human
uccucugcucucauaccacaa

SEQ ID NO: 966584 - RNA, 22 nt, Human
ucacucugguccauccgagagc

SEQ ID NO: 966585 - RNA, 17 nt, Human
ggcagccucaggcguuu

SEQ ID NO: 966586 - RNA, 22 nt, Human
aaaagucugcucucauuucaga

SEQ ID NO: 966587 - RNA, 22 nt, Human
uaacagaaguuguucauugugg

SEQ ID NO: 966588 - RNA, 22 nt, Human
ugucaccucuuuggcugcagcu

SEQ ID NO: 966589 - RNA, 22 nt, Human
acauuucuuccacaugcugcug

SEQ ID NO: 966590 - RNA, 22 nt, Human
gcagggaggaagagaugcuucc

SEQ ID NO: 966591 - RNA, 22 nt, Human
uaaugcacauagaaguacuuag

SEQ ID NO: 966592 - RNA, 22 nt, Human
ugucuuaauaugugcauucugu

SEQ ID NO: 966593 - RNA, 22 nt, Human
ucacucugacuuggccuccaac

SEQ ID NO: 966594 - RNA, 22 nt, Human
aggagucauugagagggguccu

SEQ ID NO: 966595 - RNA, 22 nt, Human
gcucaggauuucauccaugugu

SEQ ID NO: 966596 - RNA, 22 nt, Human
ucucagagcuucaguuauuuuc

SEQ ID NO: 966597 - RNA, 22 nt, Human
gugugcaugcauagacaccaca

SEQ ID NO: 966598 - RNA, 22 nt, Human
ggcucaggccuguaauccuagc

SEQ ID NO: 966599 - RNA, 17 nt, Human
aggccagaugaggcaag

SEQ ID NO: 966600 - RNA, 22 nt, Human
cugacccauauaagaguggagg

SEQ ID NO: 966601 - RNA, 22 nt, Human
gguagcagggcugugagucaga

SEQ ID NO: 966602 - RNA, 22 nt, Human
uuggccaagggaucgagguugg

SEQ ID NO: 966603 - RNA, 22 nt, Human
gcagcuggaagugacacucugu

SEQ ID NO: 966604 - RNA, 22 nt, Human
aguuucaauucuuuucacaaag

SEQ ID NO: 966605 - RNA, 22 nt, Human
ggccugcuauuggugggcagac

SEQ ID NO: 966606 - RNA, 22 nt, Human
caggcagggagcuggaaaggau

SEQ ID NO: 966607 - RNA, 22 nt, Human
caagauggacauaaggagagaa

SEQ ID NO: 966608 - RNA, 22 nt, Human
cauucugugauucuaaaucccu

SEQ ID NO: 966609 - RNA, 22 nt, Human
uguacauacauagauauacaca

SEQ ID NO: 966610 - RNA, 17 nt, Human
gccuuccuuccuccaca

SEQ ID NO: 966611 - RNA, 18 nt, Human
cugcuuugccuucauucc

SEQ ID NO: 966612 - RNA, 22 nt, Human
ucugucucaaguucuugcacuc

SEQ ID NO: 966613 - RNA, 22 nt, Human
uguaccuuuuucugugcaugcu

SEQ ID NO: 966614 - RNA, 22 nt, Human
aaaaguuaccucuguaauauaa

SEQ ID NO: 966615 - RNA, 22 nt, Human
caagauggagaagcagcaaggg

SEQ ID NO: 966616 - RNA, 22 nt, Human
agaguguuuuucugucaaggac

SEQ ID NO: 966617 - RNA, 22 nt, Human
cugggagcaagaggcugcaaau

SEQ ID NO: 966618 - RNA, 22 nt, Human
cucuugaaaauuggaacacaga

SEQ ID NO: 966619 - RNA, 22 nt, Human
ucacagcaaaagugugcagagc

SEQ ID NO: 966620 - RNA, 19 nt, Human
ucaucucacagggccuggc

SEQ ID NO: 966621 - RNA, 22 nt, Human
agcucccagcuccuuugagaga

SEQ ID NO: 966622 - RNA, 22 nt, Human
uaggaugacacagcaaguauag

SEQ ID NO: 966623 - RNA, 22 nt, Human
ucuuccaagguugcacacuauc

SEQ ID NO: 966624 - RNA, 22 nt, Human
cuggcuuucucugugguguuca

SEQ ID NO: 966625 - RNA, 22 nt, Human
ccugaggggcugcaggccagcu

SEQ ID NO: 966626 - RNA, 22 nt, Human
cugggccuuggauugacacugu

SEQ ID NO: 966627 - RNA, 22 nt, Human
uuaacagagaacauagaaguag

SEQ ID NO: 966628 - RNA, 22 nt, Human
uuagcuaaacuguaacuagaau

SEQ ID NO: 966629 - RNA, 22 nt, Human
ggccucaguuucuucaacugua

SEQ ID NO: 966630 - RNA, 22 nt, Human
caagggcucacggucugcuggg

SEQ ID NO: 966631 - RNA, 22 nt, Human
cugccacuagcuuucacaucuu

SEQ ID NO: 966632 - RNA, 22 nt, Human
ugugucugaacuaguugcucuc

SEQ ID NO: 966633 - RNA, 22 nt, Human
aacuccagugucagcugcaaug

SEQ ID NO: 966634 - RNA, 22 nt, Human
cagagccaggccugcccucuuu

SEQ ID NO: 966635 - RNA, 22 nt, Human
auacaagacucagcacagacgg

SEQ ID NO: 966636 - RNA, 22 nt, Human
ccuccuggccugugcagagccc

SEQ ID NO: 966637 - RNA, 22 nt, Human
uuuaaauuuagaagaaacacug

SEQ ID NO: 966638 - RNA, 22 nt, Human
acaauucuggguauuuauauag

SEQ ID NO: 966639 - RNA, 22 nt, Human
gaggcaguguuuacugcccugu

SEQ ID NO: 966640 - RNA, 22 nt, Human
ucucugcugagaagggcuggca

SEQ ID NO: 966641 - RNA, 22 nt, Human
uggcuggcuuguucacugacug

SEQ ID NO: 966642 - RNA, 22 nt, Human
aacacugcugcuggguucugug

SEQ ID NO: 966643 - RNA, 22 nt, Human
caaaugaagaaccuucucaccu

SEQ ID NO: 966644 - RNA, 22 nt, Human
accccaagacaguagaagagaa

SEQ ID NO: 966645 - RNA, 22 nt, Human
uuugcuauaaaagggucacacg

SEQ ID NO: 966646 - RNA, 21 nt, Human
cucuuuauauaguaaagauau

SEQ ID NO: 966647 - RNA, 22 nt, Human
agagauaugaguaguugugaca

SEQ ID NO: 966648 - RNA, 22 nt, Human
uggagcuggaauuucugggccu

SEQ ID NO: 966649 - RNA, 22 nt, Human
agaaaugcauuagcacauauag

SEQ ID NO: 966650 - RNA, 20 nt, Human
aggcucugccauugucccug

SEQ ID NO: 966651 - RNA, 22 nt, Human
acauuucuggaguuucucaaca

SEQ ID NO: 966652 - RNA, 22 nt, Human
ggaggccaccugaccugcuguu

SEQ ID NO: 966653 - RNA, 22 nt, Human
uuuucuuaugugcagcuauaug

SEQ ID NO: 966654 - RNA, 22 nt, Human
cuggccaauccauuaauuuguu

SEQ ID NO: 966655 - RNA, 18 nt, Human
uugauaaacaauuucauu

SEQ ID NO: 966656 - RNA, 22 nt, Human
agucccagcucugccacuuacu

SEQ ID NO: 966657 - RNA, 22 nt, Human
gauacaaauucaugucugaauu

SEQ ID NO: 966658 - RNA, 23 nt, Human
caguggagacucaugcuuccuua

SEQ ID NO: 966659 - RNA, 22 nt, Human
gugaaggacuagcauggagggc

SEQ ID NO: 966660 - RNA, 22 nt, Human
cugcugugagcacuccagccug

SEQ ID NO: 966661 - RNA, 22 nt, Human
uuaacauacaucaugaacaaug

SEQ ID NO: 966662 - RNA, 22 nt, Human
uauuagcgcuuacugaguugcc

SEQ ID NO: 966663 - RNA, 22 nt, Human
ggcugccuucagacuccagcuu

SEQ ID NO: 966664 - RNA, 22 nt, Human
ucagggcaggacaguguaggcc

SEQ ID NO: 966665 - RNA, 22 nt, Human
uccaggccacugcagaggcucu

SEQ ID NO: 966666 - RNA, 22 nt, Human
ccugcuguucuguuuagugaac

SEQ ID NO: 966667 - RNA, 22 nt, Human
uggcagagguauauugggagga

SEQ ID NO: 966668 - RNA, 22 nt, Human
cugcucugacccuuucaccuuc

SEQ ID NO: 966669 - RNA, 22 nt, Human
ugaaggagcucaaugaugaugc

SEQ ID NO: 966670 - RNA, 22 nt, Human
ugcagcugaggccagcuaugcc

SEQ ID NO: 966671 - RNA, 22 nt, Human
ggggcagccuccaggaaagcug

SEQ ID NO: 966672 - RNA, 21 nt, Human
ucacaugcccauuacuggagc

SEQ ID NO: 966673 - RNA, 22 nt, Human
auuuucaaaacaucugcugugu

SEQ ID NO: 966674 - RNA, 22 nt, Human
ucaccgccuugcccggccgggc

SEQ ID NO: 966675 - RNA, 21 nt, Human
aaaaagcuggggcaugcaugc

SEQ ID NO: 966676 - RNA, 22 nt, Human
ucaguuuuuguuugccagauag

SEQ ID NO: 966677 - RNA, 22 nt, Human
cugggcaguuuauucaguucug

SEQ ID NO: 966678 - RNA, 22 nt, Human
aggccagaaauuuggaguaugu

SEQ ID NO: 966679 - RNA, 22 nt, Human
ccugggcaacauagugagaccu

SEQ ID NO: 966680 - RNA, 22 nt, Human
gcaggggaguggaugauggauu

SEQ ID NO: 966681 - RNA, 22 nt, Human
agcagacaacccagaugaccca

SEQ ID NO: 966682 - RNA, 22 nt, Human
uugggugcugucauggggcacg

SEQ ID NO: 966683 - RNA, 22 nt, Human
cuuucauucuuagauauuagug

SEQ ID NO: 966684 - RNA, 22 nt, Human
uuccucuccucacaugagucac

SEQ ID NO: 966685 - RNA, 22 nt, Human
agcauaaguugguacagccacu

SEQ ID NO: 966686 - RNA, 22 nt, Human
agcagcagauccaaaaaaugug

SEQ ID NO: 966687 - RNA, 22 nt, Human
cagccuuuuccauguauuguug

SEQ ID NO: 966688 - RNA, 21 nt, Human
ccaggguccagcugccauggu

SEQ ID NO: 966689 - RNA, 22 nt, Human
agagcagugcugaagaguaggg

SEQ ID NO: 966690 - RNA, 19 nt, Human
gcucugugaugcugagggg

SEQ ID NO: 966691 - RNA, 22 nt, Human
cucugggcaccaaagagcagcu

SEQ ID NO: 966692 - RNA, 22 nt, Human
uauguacauggagagcaauuga

SEQ ID NO: 966693 - RNA, 22 nt, Human
gaaauaagaguccaugccaggu

SEQ ID NO: 966694 - RNA, 20 nt, Human
agagccuggaaaaagacauc

SEQ ID NO: 966695 - RNA, 22 nt, Human
ggguggagcuuggacaccagua

SEQ ID NO: 966696 - RNA, 22 nt, Human
cugcccuguuuggacagcccgg

SEQ ID NO: 966697 - RNA, 22 nt, Human
gcccugagacugagcauggguu

SEQ ID NO: 966698 - RNA, 22 nt, Human
guguccaucagcagccacugug

SEQ ID NO: 966699 - RNA, 22 nt, Human
uugaacugguaguuggaaaucu

SEQ ID NO: 966700 - RNA, 22 nt, Human
cugcuguggccagccaggucaa

SEQ ID NO: 966701 - RNA, 22 nt, Human
uggggcuguggauucucacgaa

SEQ ID NO: 966702 - RNA, 22 nt, Human
ucagcugccuuucccaugcuag

SEQ ID NO: 966703 - RNA, 22 nt, Human
ucccagggcagcuguccagaag

SEQ ID NO: 966704 - RNA, 22 nt, Human
ccaggcagcucugauuuauguc

SEQ ID NO: 966705 - RNA, 22 nt, Human
ugggcugcggauaggccucgga

SEQ ID NO: 966706 - RNA, 22 nt, Human
agggggcccuugcaggugagcg

SEQ ID NO: 966707 - RNA, 22 nt, Human
uggcagagagacucuccuugau

SEQ ID NO: 966708 - RNA, 22 nt, Human
ugcauuucagaagaaaauucgg

SEQ ID NO: 966709 - RNA, 18 nt, Human
agaguguucucagugaaa

SEQ ID NO: 966710 - RNA, 22 nt, Human
gcagagccugugucugagcaaa

SEQ ID NO: 966711 - RNA, 22 nt, Human
ccacucugauuucaagggagau

SEQ ID NO: 966712 - RNA, 22 nt, Human
agccuccaaaugucaggucccg

SEQ ID NO: 966713 - RNA, 22 nt, Human
gagucaguaauggauaugucau

SEQ ID NO: 966714 - RNA, 22 nt, Human
uggccgggccgggcgccuccac

SEQ ID NO: 966715 - RNA, 22 nt, Human
gcauccagagguagccacugug

SEQ ID NO: 966716 - RNA, 22 nt, Human
guucuucaucauuuuagauagg

SEQ ID NO: 966717 - RNA, 22 nt, Human
uaagaacaguguuucaucucua

SEQ ID NO: 966718 - RNA, 22 nt, Human
cuuaagaauauugaaguugugg

SEQ ID NO: 966719 - RNA, 22 nt, Human
ccugacucuggccaggccagcu

SEQ ID NO: 966720 - RNA, 21 nt, Human
gccucugcugucuuauuguga

SEQ ID NO: 966721 - RNA, 22 nt, Human
agucucugagguucagaugccu

SEQ ID NO: 966722 - RNA, 22 nt, Human
aguguccaacucagcuugucaa

SEQ ID NO: 966723 - RNA, 22 nt, Human
uuuaaauaggacuccugggggu

SEQ ID NO: 966724 - RNA, 22 nt, Human
aagagagagcauucuucuguua

SEQ ID NO: 966725 - RNA, 22 nt, Human
uggccugggccggcagauauac

SEQ ID NO: 966726 - RNA, 22 nt, Human
gcuccuggugcaaaguuucuuc

SEQ ID NO: 966727 - RNA, 22 nt, Human
cccaggagaauauaauguucuu

SEQ ID NO: 966728 - RNA, 22 nt, Human
auggccaagcaugccuguggcc

SEQ ID NO: 966729 - RNA, 22 nt, Human
caugcugugcaucuugaugacc

SEQ ID NO: 966730 - RNA, 22 nt, Human
uauuuaguuaucuuucauaaaa

SEQ ID NO: 966731 - RNA, 22 nt, Human
gaucaaaagcuggguucuaaaa

SEQ ID NO: 966732 - RNA, 22 nt, Human
gcucuggguagccacugccugg

SEQ ID NO: 966733 - RNA, 22 nt, Human
cccagcaucuccaggcauggcc

SEQ ID NO: 966734 - RNA, 22 nt, Human
augagacuaccuguaauguggc

SEQ ID NO: 966735 - RNA, 18 nt, Human
gcagcugacacuggaguu

SEQ ID NO: 966736 - RNA, 22 nt, Human
aacucaguucuuuccacaaugc

SEQ ID NO: 966737 - RNA, 22 nt, Human
uggcucaguuucaguccugguu

SEQ ID NO: 966738 - RNA, 20 nt, Human
ccuccuggucaggugugcag

SEQ ID NO: 966739 - RNA, 22 nt, Human
uuggcaggaauauugcagaggu

SEQ ID NO: 966740 - RNA, 22 nt, Human
ggcaaaguuuucaucucauaac

SEQ ID NO: 966741 - RNA, 22 nt, Human
gccugccucaaaaucccaguuc

SEQ ID NO: 966742 - RNA, 22 nt, Human
gagaggccaaaaucccugcccc

SEQ ID NO: 966743 - RNA, 22 nt, Human
gugugccaacaaaagacagugc

SEQ ID NO: 966744 - RNA, 22 nt, Human
guauacauagaugaugaacaag

SEQ ID NO: 966745 - RNA, 22 nt, Human
gcaggcugauagaggauuccau

SEQ ID NO: 966746 - RNA, 22 nt, Human
cagcuggcauaccugggcccgg

SEQ ID NO: 966747 - RNA, 22 nt, Human
ugaagcagaggggucuugagcu

SEQ ID NO: 966748 - RNA, 22 nt, Human
accucaggauguggacacagaa

SEQ ID NO: 966749 - RNA, 22 nt, Human
acacacaacucauuguguaaua

SEQ ID NO: 966750 - RNA, 22 nt, Human
uuccaugaaagugaaauggagc

SEQ ID NO: 966751 - RNA, 22 nt, Human
uacauaguauucacauuguuuu

SEQ ID NO: 966752 - RNA, 22 nt, Human
cagcucccagagugaccagcag

SEQ ID NO: 966753 - RNA, 21 nt, Human
agcucagccgggcacaguggc

SEQ ID NO: 966754 - RNA, 22 nt, Human
gucuaauuccugcucuuacuca

SEQ ID NO: 966755 - RNA, 22 nt, Human
ggagccagggaagcugcuuccu

SEQ ID NO: 966756 - RNA, 20 nt, Human
guggcaggcagugaaggagc

SEQ ID NO: 966757 - RNA, 22 nt, Human
aagggcaggaaaagauggaugu

SEQ ID NO: 966758 - RNA, 22 nt, Human
uauuucagcaagaagaaugugg

SEQ ID NO: 966759 - RNA, 19 nt, Human
gggaugggcccucacccuc

SEQ ID NO: 966760 - RNA, 22 nt, Human
uucagcagucguccaggaaaag

SEQ ID NO: 966761 - RNA, 22 nt, Human
uuauauacugugguaguacugu

SEQ ID NO: 966762 - RNA, 22 nt, Human
gcagcuaccacccaggaaggac

SEQ ID NO: 966763 - RNA, 22 nt, Human
gccaccucuuugucucugccgc

SEQ ID NO: 966764 - RNA, 22 nt, Human
gcagaacauuucacaguaucuu

SEQ ID NO: 966765 - RNA, 22 nt, Human
aggagcugggcugcugcuggga

SEQ ID NO: 966766 - RNA, 22 nt, Human
acauuuaaauaccuauguuucu

SEQ ID NO: 966767 - RNA, 22 nt, Human
ucucuggaguauaaccagggau

SEQ ID NO: 966768 - RNA, 22 nt, Human
ggaggcaggaaagacagguuca

SEQ ID NO: 966769 - RNA, 22 nt, Human
ucauucuuuaccaaguugucac

SEQ ID NO: 966770 - RNA, 22 nt, Human
accuguuuguguccauuaguga

SEQ ID NO: 966771 - RNA, 22 nt, Human
gcauuccuacaggcugcuauga

SEQ ID NO: 966772 - RNA, 20 nt, Human
aggcucugcauuucugagug

SEQ ID NO: 966773 - RNA, 22 nt, Human
acucugggccccagguggagcu

SEQ ID NO: 966774 - RNA, 22 nt, Human
gagucacauuaauuuaauuuua

SEQ ID NO: 966775 - RNA, 22 nt, Human
gcauguguugguuuaugcaugu

SEQ ID NO: 966776 - RNA, 22 nt, Human
uuauguaccugaauuaguaaag

SEQ ID NO: 966777 - RNA, 22 nt, Human
aaguuugacagaaguuucuaau

SEQ ID NO: 966778 - RNA, 22 nt, Human
uuguuuguaugcugagaagaau

SEQ ID NO: 966779 - RNA, 22 nt, Human
ucagcaggcaggaggcaugcca

SEQ ID NO: 966780 - RNA, 22 nt, Human
cucagagucccuucccucgugg

SEQ ID NO: 966781 - RNA, 22 nt, Human
auucuucaaagagugucaaagu

SEQ ID NO: 966782 - RNA, 22 nt, Human
uuaguaaauaaagucuacuuuc

SEQ ID NO: 966783 - RNA, 22 nt, Human
aacagugagaagguggacagga

SEQ ID NO: 966784 - RNA, 22 nt, Human
cuuccagagauagggccucaag

SEQ ID NO: 966785 - RNA, 22 nt, Human
gcagaggcauuucugacgcugc

SEQ ID NO: 966786 - RNA, 22 nt, Human
agagacagaggcaauauagcuu

SEQ ID NO: 966787 - RNA, 23 nt, Human
acagcugcaccuggccgccuggc

SEQ ID NO: 966788 - RNA, 22 nt, Human
gccaggagcaugucauuguuga

SEQ ID NO: 966789 - RNA, 22 nt, Human
caugucuguguacacaugcaca

SEQ ID NO: 966790 - RNA, 22 nt, Human
ggcuccugauaggagaaugcgg

SEQ ID NO: 966791 - RNA, 22 nt, Human
aaccuucacuugcuucauuuga

SEQ ID NO: 966792 - RNA, 22 nt, Human
uccucagggcggccuccgucuu

SEQ ID NO: 966793 - RNA, 22 nt, Human
cuauuagguaugcagccuauuu

SEQ ID NO: 966794 - RNA, 22 nt, Human
agccugccuugggcugcuugag

SEQ ID NO: 966795 - RNA, 22 nt, Human
gcucccuccaugaggcagaccg

SEQ ID NO: 966796 - RNA, 22 nt, Human
uggccucuuacgacauagccuu

SEQ ID NO: 966797 - RNA, 22 nt, Human
uagcacauacauaauagauaga

SEQ ID NO: 966798 - RNA, 22 nt, Human
ucuguucaguugauuagacaga

SEQ ID NO: 966799 - RNA, 22 nt, Human
ucagggcaagucucagaagguu

SEQ ID NO: 966800 - RNA, 22 nt, Human
ugcugaugaguccuucuaucgc

SEQ ID NO: 966801 - RNA, 22 nt, Human
cuguaguugaugauuucugaua

SEQ ID NO: 966802 - RNA, 22 nt, Human
ugggcugcugcggugcucuugg

SEQ ID NO: 966803 - RNA, 22 nt, Human
ugagaacugaggauuugaauuc

SEQ ID NO: 966804 - RNA, 22 nt, Human
cugugugugucugcagcauacu

SEQ ID NO: 966805 - RNA, 22 nt, Human
aggaccagaggccagagucagc

SEQ ID NO: 966806 - RNA, 22 nt, Human
ugcauugcaguuaacucaguau

SEQ ID NO: 966807 - RNA, 22 nt, Human
ucagcugaaguggagaagcaga

SEQ ID NO: 966808 - RNA, 22 nt, Human
gcacagggcugccaggcggcuu

SEQ ID NO: 966809 - RNA, 22 nt, Human
agcugagcuaguaguuccagug

SEQ ID NO: 966810 - RNA, 22 nt, Human
uccaggagguuuggaggaagca

SEQ ID NO: 966811 - RNA, 22 nt, Human
gcccaggaguuugcauuuuaac

SEQ ID NO: 966812 - RNA, 22 nt, Human
gugagcaucuuggcagauauga

SEQ ID NO: 966813 - RNA, 22 nt, Human
gcugcucuacccaugcaucugu

SEQ ID NO: 966814 - RNA, 22 nt, Human
aggagucauaaaugugaacaaa

SEQ ID NO: 966815 - RNA, 23 nt, Human
uuucuguuggguauauauccaag

SEQ ID NO: 966816 - RNA, 22 nt, Human
uaaauuuacccaaggaacaugu

SEQ ID NO: 966817 - RNA, 21 nt, Human
uucugagcacucaucacuguc

SEQ ID NO: 966818 - RNA, 22 nt, Human
uuucucugcugccugugucgau

SEQ ID NO: 966819 - RNA, 22 nt, Human
auuuggaaacaauuauauucuu

SEQ ID NO: 966820 - RNA, 22 nt, Human
uucauauauaugcacuacguac

SEQ ID NO: 966821 - RNA, 22 nt, Human
ccuggccucagccuagggcuga

SEQ ID NO: 966822 - RNA, 22 nt, Human
ugugugaaggaauauauacuca

SEQ ID NO: 966823 - RNA, 22 nt, Human
aagaggaaaugauugacuauau

SEQ ID NO: 966824 - RNA, 22 nt, Human
uaaagcacgucuauuuaaugau

SEQ ID NO: 966825 - RNA, 22 nt, Human
uacuacauuaauaaaacauuca

SEQ ID NO: 966826 - RNA, 22 nt, Human
aagauuucagaguuugggggaa

SEQ ID NO: 966827 - RNA, 22 nt, Human
ggcagcugauuagcaucaagga

SEQ ID NO: 966828 - RNA, 22 nt, Human
aaagauaugucuccaaagagau

SEQ ID NO: 966829 - RNA, 22 nt, Human
acagaauugaaaguauaaucug

SEQ ID NO: 966830 - RNA, 22 nt, Human
ccaaggagaaaugcugugcuuu

SEQ ID NO: 966831 - RNA, 22 nt, Human
caguacuucuuggaaacuggau

SEQ ID NO: 966832 - RNA, 22 nt, Human
gugggcaaggucccugccagcu

SEQ ID NO: 966833 - RNA, 22 nt, Human
ggcagccuugacuagugacuua

SEQ ID NO: 966834 - RNA, 22 nt, Human
gccucucucuacccaguaugau

SEQ ID NO: 966835 - RNA, 22 nt, Human
cccugccugugggcaucaacau

SEQ ID NO: 966836 - RNA, 22 nt, Human
acuuguuuacaagcaguucuga

SEQ ID NO: 966837 - RNA, 22 nt, Human
aauguucaguagaauaggaaug

SEQ ID NO: 966838 - RNA, 22 nt, Human
uuaaauauuauguugucugcaa

SEQ ID NO: 966839 - RNA, 22 nt, Human
ucugggaauuuauuggcacuuu

SEQ ID NO: 966840 - RNA, 22 nt, Human
acugcagccuagggaccacagu

SEQ ID NO: 966841 - RNA, 22 nt, Human
uuagcucagaaaauuuaaacuu

SEQ ID NO: 966842 - RNA, 20 nt, Human
aggcacuggauuucuuauau

SEQ ID NO: 966843 - RNA, 23 nt, Human
gugcaugugucuuuacaguagca

SEQ ID NO: 966844 - RNA, 22 nt, Human
ucuggcucaggagcuguguuca

SEQ ID NO: 966845 - RNA, 19 nt, Human
guggccucggagcgcgcgg

SEQ ID NO: 966846 - RNA, 23 nt, Human
uccaagggcuacaaacacagacc

SEQ ID NO: 966847 - RNA, 22 nt, Human
auaaugugauauuucauuuaca

SEQ ID NO: 966848 - RNA, 17 nt, Human
ccugggaggaguuauga

SEQ ID NO: 966849 - RNA, 22 nt, Human
uagaacagaggguugcccagau

SEQ ID NO: 966850 - RNA, 22 nt, Human
ugccugagugauguggcagcca

SEQ ID NO: 966851 - RNA, 22 nt, Human
ggagccaggcaaucuguacuuu

SEQ ID NO: 966852 - RNA, 22 nt, Human
cuugcaggauuuugcugcugua

SEQ ID NO: 966853 - RNA, 22 nt, Human
acauacauaugacaacuuuccu

SEQ ID NO: 966854 - RNA, 22 nt, Human
ccuggagccccucuggccagcc

SEQ ID NO: 966855 - RNA, 22 nt, Human
cuucuucauaggcaguccuguu

SEQ ID NO: 966856 - RNA, 22 nt, Human
ugcccugcagugagugcgucug

SEQ ID NO: 966857 - RNA, 22 nt, Human
ggccugcucuggcuguggucag

SEQ ID NO: 966858 - RNA, 22 nt, Human
ucagggcagccuaaggcaccuc

SEQ ID NO: 966859 - RNA, 22 nt, Human
uuuauucuugagagugagaaga

SEQ ID NO: 966860 - RNA, 22 nt, Human
aaucaguuucuuggcaaguuua

SEQ ID NO: 966861 - RNA, 22 nt, Human
cagcugucuaaguugagcagga

SEQ ID NO: 966862 - RNA, 22 nt, Human
ccaggcaucacgggcauguggc

SEQ ID NO: 966863 - RNA, 19 nt, Human
auacacauacguaaacuga

SEQ ID NO: 966864 - RNA, 22 nt, Human
gccugggaacucugaucuccug

SEQ ID NO: 966865 - RNA, 21 nt, Human
ucauuugugaucugauuucca

SEQ ID NO: 966866 - RNA, 22 nt, Human
ccagcuggugacauccccaacc

SEQ ID NO: 966867 - RNA, 22 nt, Human
agcaaggcagucagcuggcugg

SEQ ID NO: 966868 - RNA, 22 nt, Human
aagaggaggacgguucccagaa

SEQ ID NO: 966869 - RNA, 22 nt, Human
augagcugugggauuccagagg

SEQ ID NO: 966870 - RNA, 22 nt, Human
ggccagagaagucagacccuug

SEQ ID NO: 966871 - RNA, 22 nt, Human
uuugcagcaaggagagagcauu

SEQ ID NO: 966872 - RNA, 22 nt, Human
agcuggguggagggcccacggu

SEQ ID NO: 966873 - RNA, 22 nt, Human
gcugggagccguaccugucacg

SEQ ID NO: 966874 - RNA, 22 nt, Human
gggagcuggagcuggaagacuc

SEQ ID NO: 966875 - RNA, 22 nt, Human
caggccuggguucaaaucccuu

SEQ ID NO: 966876 - RNA, 22 nt, Human
aucugcaggaaugugugcagag

SEQ ID NO: 966877 - RNA, 22 nt, Human
ucucuggguuuuuguccuguac

SEQ ID NO: 966878 - RNA, 22 nt, Human
ggcagcaucacuugucuccagc

SEQ ID NO: 966879 - RNA, 22 nt, Human
aaaccgcaauuacuuuugcguc

SEQ ID NO: 966880 - RNA, 18 nt, Human
agcuggcccuggcugccg

SEQ ID NO: 966881 - RNA, 22 nt, Human
ugggagcaggaagcaggaagua

SEQ ID NO: 966882 - RNA, 22 nt, Human
gcccauggacacccaagugcca

SEQ ID NO: 966883 - RNA, 22 nt, Human
guuuauuaacugucaagugauu

SEQ ID NO: 966884 - RNA, 22 nt, Human
agcaggcuuguuaugucugaga

SEQ ID NO: 966885 - RNA, 17 nt, Human
uucaaagcuuaucaagg

SEQ ID NO: 966886 - RNA, 22 nt, Human
acacaaauuguaggauaauugc

SEQ ID NO: 966887 - RNA, 20 nt, Human
uucaaaguguaugauaugca

SEQ ID NO: 966888 - RNA, 22 nt, Human
cagcagugucuccagcaucaca

SEQ ID NO: 966889 - RNA, 22 nt, Human
acuuuguauaagacaauaaaga

SEQ ID NO: 966890 - RNA, 22 nt, Human
ccuggagcacucucccuggcug

SEQ ID NO: 966891 - RNA, 17 nt, Human
guccugggaggagagag

SEQ ID NO: 966892 - RNA, 19 nt, Human
accucugcagagauguuua

SEQ ID NO: 966893 - RNA, 22 nt, Human
agcuccaggugcaagucauggu

SEQ ID NO: 966894 - RNA, 22 nt, Human
acuuuguugaugaaauaguuuu

SEQ ID NO: 966895 - RNA, 23 nt, Human
cugaggccugcugcguucagguu

SEQ ID NO: 966896 - RNA, 23 nt, Human
caugccaguuugugcaggcagau

SEQ ID NO: 966897 - RNA, 22 nt, Human
cugagaggugacagcgugcugg

SEQ ID NO: 966898 - RNA, 22 nt, Human
aaaaucugcuuccuuuuacaga

SEQ ID NO: 966899 - RNA, 22 nt, Human
ggagacaguauggcuuguagcu

SEQ ID NO: 966900 - RNA, 22 nt, Human
aggaagccugcaggugacugcu

SEQ ID NO: 966901 - RNA, 22 nt, Human
uggcuggcaguaggcuaguggc

SEQ ID NO: 966902 - RNA, 22 nt, Human
gcugcugucacggugcuaaggg

SEQ ID NO: 966903 - RNA, 22 nt, Human
ugugccagaaaauaugcugagg

SEQ ID NO: 966904 - RNA, 22 nt, Human
ccuggagcucacugggagccgg

SEQ ID NO: 966905 - RNA, 22 nt, Human
aaacaugagcaucucuucaagc

SEQ ID NO: 966906 - RNA, 23 nt, Human
gacaccuuugccagaucaagaug

SEQ ID NO: 966907 - RNA, 22 nt, Human
agaggagugggaagcagugcaa

SEQ ID NO: 966908 - RNA, 21 nt, Human
agaugaggauacugaggccua

SEQ ID NO: 966909 - RNA, 22 nt, Human
ugccucugugugcaggugagca

SEQ ID NO: 966910 - RNA, 22 nt, Human
ugucuuuggaauauuuagcuga

SEQ ID NO: 966911 - RNA, 22 nt, Human
ggccucuggucaagacaagcau

SEQ ID NO: 966912 - RNA, 22 nt, Human
ucuccugcucagaacagccuca

SEQ ID NO: 966913 - RNA, 22 nt, Human
agcugcuacugcucugccagag

SEQ ID NO: 966914 - RNA, 20 nt, Human
aggauuugagaaggcgucuu

SEQ ID NO: 966915 - RNA, 22 nt, Human
cagcaauauacacagucuaugg

SEQ ID NO: 966916 - RNA, 22 nt, Human
agugaaauaaagcugccuaugg

SEQ ID NO: 966917 - RNA, 22 nt, Human
gcuggccugcaaagcccggcug

SEQ ID NO: 966918 - RNA, 22 nt, Human
acacugcagaugaaagcauaag

SEQ ID NO: 966919 - RNA, 22 nt, Human
agaacagcaguuaugguucauu

SEQ ID NO: 966920 - RNA, 20 nt, Human
ggcucugcuugugagcagcc

SEQ ID NO: 966921 - RNA, 22 nt, Human
gucugucaucugagauggagug

SEQ ID NO: 966922 - RNA, 22 nt, Human
cacauacaaggcacacuggagg

SEQ ID NO: 966923 - RNA, 22 nt, Human
aaaguuuccugcuaagugcuau

SEQ ID NO: 966924 - RNA, 22 nt, Human
ucuuagaaguuuauggcacgga

SEQ ID NO: 966925 - RNA, 22 nt, Human
cagcugcccauccugggaaaug

SEQ ID NO: 966926 - RNA, 22 nt, Human
ccugggcaaaugccagagacaa

SEQ ID NO: 966927 - RNA, 19 nt, Human
cauaauacaguggaucuga

SEQ ID NO: 966928 - RNA, 22 nt, Human
cagcccagcagucuuagccugc

SEQ ID NO: 966929 - RNA, 20 nt, Human
ucacucugaugcuagggugg

SEQ ID NO: 966930 - RNA, 22 nt, Human
ucacaaauagcuauauuaagga

SEQ ID NO: 966931 - RNA, 22 nt, Human
acauuuuuauucaucaaagcag

SEQ ID NO: 966932 - RNA, 22 nt, Human
acaggagaaaucuggucaaaag

SEQ ID NO: 966933 - RNA, 22 nt, Human
uucuuaaguuuagcaacuugug

SEQ ID NO: 966934 - RNA, 22 nt, Human
uggagccaugccuggccuuucc

SEQ ID NO: 966935 - RNA, 22 nt, Human
cagcagcaaaucuagaagagga

SEQ ID NO: 966936 - RNA, 22 nt, Human
acuugggauuucagaugcugug

SEQ ID NO: 966937 - RNA, 22 nt, Human
gucaugccagcggagcucggga

SEQ ID NO: 966938 - RNA, 22 nt, Human
gcugggagccccgagccagcgc

SEQ ID NO: 966939 - RNA, 22 nt, Human
ucacguuuuacugagugagaua

SEQ ID NO: 966940 - RNA, 22 nt, Human
ggcacugggagaggugagacgg

SEQ ID NO: 966941 - RNA, 22 nt, Human
acaaagucucuaauaaucuucu

SEQ ID NO: 966942 - RNA, 22 nt, Human
ucaggagacuggcagugcccac

SEQ ID NO: 966943 - RNA, 22 nt, Human
uuugaaauaugugucuuuugaa

SEQ ID NO: 966944 - RNA, 22 nt, Human
gggcucuggauggagccugcag

SEQ ID NO: 966945 - RNA, 22 nt, Human
ucuguucaucaucuggacacau

SEQ ID NO: 966946 - RNA, 22 nt, Human
ucuucuuccucauuuauacaua

SEQ ID NO: 966947 - RNA, 22 nt, Human
agguggaacguucaggugcuag

SEQ ID NO: 966948 - RNA, 22 nt, Human
uccucaggugacuagguaucuu

SEQ ID NO: 966949 - RNA, 22 nt, Human
auguuuccagguucuuccuaug

SEQ ID NO: 966950 - RNA, 22 nt, Human
aggcuggaguacaguggcuauu

SEQ ID NO: 966951 - RNA, 22 nt, Human
uagagcuggaauuugcagcaag

SEQ ID NO: 966952 - RNA, 22 nt, Human
acacagggaggaggugcugugc

SEQ ID NO: 966953 - RNA, 23 nt, Human
cccuggaguaaauucuuggaagg

SEQ ID NO: 966954 - RNA, 22 nt, Human
ccagggugggguccaggaacca

SEQ ID NO: 966955 - RNA, 22 nt, Human
gcagggucgcucuaggagauca

SEQ ID NO: 966956 - RNA, 18 nt, Human
gcagcugcaguuguagcu

SEQ ID NO: 966957 - RNA, 22 nt, Human
caguggguggcuaaguggcuga

SEQ ID NO: 966958 - RNA, 22 nt, Human
auacauucagcagugcucauga

SEQ ID NO: 966959 - RNA, 22 nt, Human
uggcucagcgcggccuggucuu

SEQ ID NO: 966960 - RNA, 22 nt, Human
agcuggccuccgggugccuggg

SEQ ID NO: 966961 - RNA, 22 nt, Human
gaggggcuggguagggcaaccc

SEQ ID NO: 966962 - RNA, 22 nt, Human
gcuuggcauugaccauuaucau

SEQ ID NO: 966963 - RNA, 22 nt, Human
gacagaggcaagaccagaagcc

SEQ ID NO: 966964 - RNA, 22 nt, Human
gccuuccugcagcucugagcgu

SEQ ID NO: 966965 - RNA, 22 nt, Human
uuugaaucugauauggcagcau

SEQ ID NO: 966966 - RNA, 22 nt, Human
gcagcagagcuuuguccuggcu

SEQ ID NO: 966967 - RNA, 23 nt, Human
uagggcagcugggagggacaugc

SEQ ID NO: 966968 - RNA, 22 nt, Human
ccccuggguccaggcuucucug

SEQ ID NO: 966969 - RNA, 22 nt, Human
gaggccagcgcgcagcacuuuu

SEQ ID NO: 966970 - RNA, 22 nt, Human
uccaggaguccugggagugauu

SEQ ID NO: 966971 - RNA, 20 nt, Human
aggagggaccuggauuggcg

SEQ ID NO: 966972 - RNA, 22 nt, Human
uggcccugaggacccagugugg

SEQ ID NO: 966973 - RNA, 22 nt, Human
aaugcuuuuugcgaaaugugca

SEQ ID NO: 966974 - RNA, 22 nt, Human
gcuggcugggucccugagaggc

SEQ ID NO: 966975 - RNA, 22 nt, Human
ucuccugggaggacaaggaagg

SEQ ID NO: 966976 - RNA, 22 nt, Human
agcugccacaugcccaagggca

SEQ ID NO: 966977 - RNA, 22 nt, Human
gaggggagacagggaaaucagu

SEQ ID NO: 966978 - RNA, 22 nt, Human
caggacaguauaggcuuuagga

SEQ ID NO: 966979 - RNA, 22 nt, Human
uacaaagagguaauugcauaua

SEQ ID NO: 966980 - RNA, 22 nt, Human
gcugccaguguggcaugaugca

SEQ ID NO: 966981 - RNA, 21 nt, Human
uucaagauauuuaaaaggugg

SEQ ID NO: 966982 - RNA, 22 nt, Human
ccaggacuucgaggcuacagug

SEQ ID NO: 966983 - RNA, 22 nt, Human
agggcacagccuaaagccuaug

SEQ ID NO: 966984 - RNA, 22 nt, Human
gcagggcuaauggggcaaguag

SEQ ID NO: 966985 - RNA, 22 nt, Human
gcuggagcuugagaggacaggg

SEQ ID NO: 966986 - RNA, 22 nt, Human
agaggcaggaagagcugauuuu

SEQ ID NO: 966987 - RNA, 22 nt, Human
cacagcuuccauuagaaugaga

SEQ ID NO: 966988 - RNA, 22 nt, Human
gacaucauagggugggaggaaa

SEQ ID NO: 966989 - RNA, 22 nt, Human
uuucacaaucaaauggugaaau

SEQ ID NO: 966990 - RNA, 22 nt, Human
aggcacugugcugaugucuuau

SEQ ID NO: 966991 - RNA, 22 nt, Human
cugggaggcagucucucuagaa

SEQ ID NO: 966992 - RNA, 21 nt, Human
ugcuuuaugggaaaaauguca

SEQ ID NO: 966993 - RNA, 22 nt, Human
ggcagcagggucuagauugaug

SEQ ID NO: 966994 - RNA, 22 nt, Human
acuguacacgugucauuuacag

SEQ ID NO: 966995 - RNA, 22 nt, Human
cuuaagauuugagauaccuaau

SEQ ID NO: 966996 - RNA, 22 nt, Human
cagcaggggaacugugggccag

SEQ ID NO: 966997 - RNA, 22 nt, Human
uucuccgcuaaguucucugcag

SEQ ID NO: 966998 - RNA, 22 nt, Human
uuguguccugauuugacacaau

SEQ ID NO: 966999 - RNA, 22 nt, Human
agcugguuagcaaucuaaguga

SEQ ID NO: 967000 - RNA, 22 nt, Human
ggcaugcugcguacagaugaac

SEQ ID NO: 967001 - RNA, 22 nt, Human
ccaggccuccugugaguggacc

SEQ ID NO: 967002 - RNA, 22 nt, Human
acagaguacauucagagacuau

SEQ ID NO: 967003 - RNA, 22 nt, Human
uccucagaagaaccccuagauu

SEQ ID NO: 967004 - RNA, 22 nt, Human
agcagcugucccuuaacaucag

SEQ ID NO: 967005 - RNA, 22 nt, Human
aggaaagguagcgugccagcag

SEQ ID NO: 967006 - RNA, 22 nt, Human
acaaaugugucuaauugugccu

SEQ ID NO: 967007 - RNA, 22 nt, Human
cuuuccaagaaugcagauaccu

SEQ ID NO: 967008 - RNA, 22 nt, Human
auacacauuacuuucugucuga

SEQ ID NO: 967009 - RNA, 22 nt, Human
gggccaugagagguucaucaac

SEQ ID NO: 967010 - RNA, 22 nt, Human
cugagccaaaaagcagagcuug

SEQ ID NO: 967011 - RNA, 22 nt, Human
aaaugcagcagcuaauugaaaa

SEQ ID NO: 967012 - RNA, 22 nt, Human
gcacugugaucaaggcuaagca

SEQ ID NO: 967013 - RNA, 22 nt, Human
agcagccaagguaaccugugcu

SEQ ID NO: 967014 - RNA, 22 nt, Human
cugaaggagguagagugacaua

SEQ ID NO: 967015 - RNA, 19 nt, Human
aaaaacuuaguccagaaag

SEQ ID NO: 967016 - RNA, 22 nt, Human
aagggaaaucauauggugcagu

SEQ ID NO: 967017 - RNA, 20 nt, Human
ugagugauggaggcggguca

SEQ ID NO: 967018 - RNA, 22 nt, Human
agagcugggugaagugccauca

SEQ ID NO: 967019 - RNA, 22 nt, Human
aucugguuuggggauccuugug

SEQ ID NO: 967020 - RNA, 22 nt, Human
uugaagcauuugcuauagcauu

SEQ ID NO: 967021 - RNA, 22 nt, Human
ugucuucaucucagacacaguu

SEQ ID NO: 967022 - RNA, 22 nt, Human
guuuauuauucaacuucauguu

SEQ ID NO: 967023 - RNA, 22 nt, Human
uuacaaagagaaguuguagaau

SEQ ID NO: 967024 - RNA, 22 nt, Human
uugugaguagugccgcaauaaa

SEQ ID NO: 967025 - RNA, 22 nt, Human
gcagggaaggggcaugcuggag

SEQ ID NO: 967026 - RNA, 22 nt, Human
aguucuucauaaccuuacugug

SEQ ID NO: 967027 - RNA, 22 nt, Human
acagauguacacucauauauaa

SEQ ID NO: 967028 - RNA, 22 nt, Human
agcagcucaaagccugcaagga

SEQ ID NO: 967029 - RNA, 22 nt, Human
auuugucugcuugcugccuucc

SEQ ID NO: 967030 - RNA, 22 nt, Human
ccagucccaggcagaaauccag

SEQ ID NO: 967031 - RNA, 22 nt, Human
ugucuuauuccuucuguucagc

SEQ ID NO: 967032 - RNA, 20 nt, Human
ugaagcagccuugauucugu

SEQ ID NO: 967033 - RNA, 22 nt, Human
cugugucggacgugggcagcag

SEQ ID NO: 967034 - RNA, 22 nt, Human
ccagcccuugcugaaggguggc

SEQ ID NO: 967035 - RNA, 22 nt, Human
uggggcugaggagccucacucu

SEQ ID NO: 967036 - RNA, 22 nt, Human
uguggucucguuauguugccca

SEQ ID NO: 967037 - RNA, 22 nt, Human
caggagugaguuggggucuaca

SEQ ID NO: 967038 - RNA, 22 nt, Human
agaggcggagguugcagugagc

SEQ ID NO: 967039 - RNA, 22 nt, Human
ucucccacugcaagcccaggcu

SEQ ID NO: 967040 - RNA, 22 nt, Human
aauagaauguaaucuaauacau

SEQ ID NO: 967041 - RNA, 22 nt, Human
ccacaaguuucagcacccagag

SEQ ID NO: 967042 - RNA, 23 nt, Human
ucugucaccuauggcugcucuuc

SEQ ID NO: 967043 - RNA, 22 nt, Human
uggccugaggcucggcaugggu

SEQ ID NO: 967044 - RNA, 22 nt, Human
uugcaucuagggcaacccagag

SEQ ID NO: 967045 - RNA, 21 nt, Human
aggcuguccuuugccagcccu

SEQ ID NO: 967046 - RNA, 22 nt, Human
gcugccugauuuacauagugaa

SEQ ID NO: 967047 - RNA, 22 nt, Human
aaggcacugaacuuaaauucug

SEQ ID NO: 967048 - RNA, 22 nt, Human
gcugcucugaaaaugacuguug

SEQ ID NO: 967049 - RNA, 17 nt, Human
aggugcagaggcagagc

SEQ ID NO: 967050 - RNA, 22 nt, Human
auaucuuuuagagcaagcuugu

SEQ ID NO: 967051 - RNA, 22 nt, Human
uccuggccuccguucucugcau

SEQ ID NO: 967052 - RNA, 22 nt, Human
cccagcucaucaggagccgccc

SEQ ID NO: 967053 - RNA, 22 nt, Human
gucauugcaguggcaaaucaca

SEQ ID NO: 967054 - RNA, 22 nt, Human
auuuauuauugugguuacuucu

SEQ ID NO: 967055 - RNA, 22 nt, Human
gcucccaccuuugcuaucagua

SEQ ID NO: 967056 - RNA, 22 nt, Human
aggcacuugaauugaugauguu

SEQ ID NO: 967057 - RNA, 19 nt, Human
ccauggagagagaugcauu

SEQ ID NO: 967058 - RNA, 22 nt, Human
aggcucagcccaagguggagag

SEQ ID NO: 967059 - RNA, 22 nt, Human
ucacucugcugcccgagggcug

SEQ ID NO: 967060 - RNA, 22 nt, Human
ccuggccaaucuagggcuguua

SEQ ID NO: 967061 - RNA, 22 nt, Human
ccagugggugcugggcucugcc

SEQ ID NO: 967062 - RNA, 22 nt, Human
aucuggcuuuuaccccacggcc

SEQ ID NO: 967063 - RNA, 22 nt, Human
ccucaggcuuacgggcaaugga

SEQ ID NO: 967064 - RNA, 22 nt, Human
uaaguucagaguucucauuugu

SEQ ID NO: 967065 - RNA, 22 nt, Human
ggcuggaaguccaagaucaagg

SEQ ID NO: 967066 - RNA, 22 nt, Human
uugaaaggugacauuguuagag

SEQ ID NO: 967067 - RNA, 22 nt, Human
uucaaacaguguagaauauaug

SEQ ID NO: 967068 - RNA, 22 nt, Human
uuauuaguguugauauuaggau

SEQ ID NO: 967069 - RNA, 22 nt, Human
ugcccuuggguaacuugcugau

SEQ ID NO: 967070 - RNA, 22 nt, Human
accgaguuagccaggauggucu

SEQ ID NO: 967071 - RNA, 18 nt, Human
uccagagcuacuguggug

SEQ ID NO: 967072 - RNA, 22 nt, Human
caaaaagcuuagguaacaagcc

SEQ ID NO: 967073 - RNA, 22 nt, Human
gucaucuuugcccugugcagga

SEQ ID NO: 967074 - RNA, 22 nt, Human
aaaauacuacugucuucuuccc

SEQ ID NO: 967075 - RNA, 22 nt, Human
auguccuuccauuuugaucugu

SEQ ID NO: 967076 - RNA, 22 nt, Human
aaugaacaaaauaugcuuugca

SEQ ID NO: 967077 - RNA, 22 nt, Human
cuggcucaauaaauauuagcug

SEQ ID NO: 967078 - RNA, 22 nt, Human
uauucacaguugauuuacaguu

SEQ ID NO: 967079 - RNA, 22 nt, Human
gcagugaaucuggcaagaauuu

SEQ ID NO: 967080 - RNA, 22 nt, Human
aggcagcagucaugaggaaaga

SEQ ID NO: 967081 - RNA, 22 nt, Human
cuggcugugcagucuuccagaa

SEQ ID NO: 967082 - RNA, 22 nt, Human
cuguauuuucaugccuacguac

SEQ ID NO: 967083 - RNA, 22 nt, Human
aauagaauuuguacuguguuuu

SEQ ID NO: 967084 - RNA, 20 nt, Human
auacacuugcccagcuugug

SEQ ID NO: 967085 - RNA, 22 nt, Human
ggcagcuccaaaaggaaacacu

SEQ ID NO: 967086 - RNA, 22 nt, Human
aaauguguuuagaugguuuauu

SEQ ID NO: 967087 - RNA, 23 nt, Human
uuucacaaugagcauuacagaau

SEQ ID NO: 967088 - RNA, 22 nt, Human
cauuuagacauuugauuugggg

SEQ ID NO: 967089 - RNA, 23 nt, Human
aaauucaguccuucaacucugag

SEQ ID NO: 967090 - RNA, 22 nt, Human
ccaggcucugcgcuggacaugg

SEQ ID NO: 967091 - RNA, 22 nt, Human
cugcccuggucccauggcugau

SEQ ID NO: 967092 - RNA, 22 nt, Human
cauuacaugguccaggauauau

SEQ ID NO: 967093 - RNA, 22 nt, Human
gagagcugcauucucagacaca

SEQ ID NO: 967094 - RNA, 22 nt, Human
agugaccaaucaugguuagauu

SEQ ID NO: 967095 - RNA, 22 nt, Human
ucagggaacaauguuauggcuu

SEQ ID NO: 967096 - RNA, 22 nt, Human
uccauugucuuugguccuagcc

SEQ ID NO: 967097 - RNA, 20 nt, Human
cuucuucaguaguuuguucu

SEQ ID NO: 967098 - RNA, 21 nt, Human
ugggaugggucugggaccagc

SEQ ID NO: 967099 - RNA, 22 nt, Human
ccaggagcagauauggacauaa

SEQ ID NO: 967100 - RNA, 21 nt, Human
gcaggcuggucaaaccucagu

SEQ ID NO: 967101 - RNA, 22 nt, Human
agggcagagggugccucaccug

SEQ ID NO: 967102 - RNA, 22 nt, Human
uucacagacuuuccauagauug

SEQ ID NO: 967103 - RNA, 22 nt, Human
aggcccagggcugcucucugaa

SEQ ID NO: 967104 - RNA, 22 nt, Human
cuuuguagcugcuucugauuua

SEQ ID NO: 967105 - RNA, 22 nt, Human
cuggcugcuuguagacucgacu

SEQ ID NO: 967106 - RNA, 22 nt, Human
guggaggacaaaagaagccuuu

SEQ ID NO: 967107 - RNA, 22 nt, Human
cccaggaggguggccucugccc

SEQ ID NO: 967108 - RNA, 22 nt, Human
cccauggcuuaggagggagugu

SEQ ID NO: 967109 - RNA, 22 nt, Human
cuccucagucaggucuaggguc

SEQ ID NO: 967110 - RNA, 19 nt, Human
uagaggagaagggaagugg

SEQ ID NO: 967111 - RNA, 22 nt, Human
agaguguaauaagggcaagggc

SEQ ID NO: 967112 - RNA, 22 nt, Human
gccugggagggcagcagugugg

SEQ ID NO: 967113 - RNA, 22 nt, Human
uuucacauuuuauacuuaagcc

SEQ ID NO: 967114 - RNA, 22 nt, Human
agagcuggcugguagcccugau

SEQ ID NO: 967115 - RNA, 22 nt, Human
ucugagggugggagaaggagcu

SEQ ID NO: 967116 - RNA, 22 nt, Human
ggauggcauguugggcucuguu

SEQ ID NO: 967117 - RNA, 22 nt, Human
ccuggaccaaacacuggccugg

SEQ ID NO: 967118 - RNA, 22 nt, Human
gcuguauuccugcacuguauag

SEQ ID NO: 967119 - RNA, 22 nt, Human
gaaaugugggucaugacccauu

SEQ ID NO: 967120 - RNA, 22 nt, Human
guuuaagaggguuucauuccca

SEQ ID NO: 967121 - RNA, 22 nt, Human
uggagggaacccaggcugcucu

SEQ ID NO: 967122 - RNA, 22 nt, Human
uugaagcaaggcgaaucuugug

SEQ ID NO: 967123 - RNA, 22 nt, Human
auauuuucacagaacuugcaaa

SEQ ID NO: 967124 - RNA, 22 nt, Human
gcucccaccaggcagaccuacc

SEQ ID NO: 967125 - RNA, 22 nt, Human
ucuucagauaaagggagaguau

SEQ ID NO: 967126 - RNA, 22 nt, Human
auguuuaaucggcugccuuucc

SEQ ID NO: 967127 - RNA, 22 nt, Human
auuuccauacacccauuucuga

SEQ ID NO: 967128 - RNA, 22 nt, Human
agcccagcaaagggagguucag

SEQ ID NO: 967129 - RNA, 22 nt, Human
aagucagagcaacugagacauu

SEQ ID NO: 967130 - RNA, 22 nt, Human
ggccagcugggccaccaggugc

SEQ ID NO: 967131 - RNA, 22 nt, Human
agaaaugaagcaggaguuauua

SEQ ID NO: 967132 - RNA, 22 nt, Human
uaccauuucauucuuuccucau

SEQ ID NO: 967133 - RNA, 22 nt, Human
acucugcucuuauaguguuaua

SEQ ID NO: 967134 - RNA, 22 nt, Human
cggaggggauacauuuucugaa

SEQ ID NO: 967135 - RNA, 22 nt, Human
ucugagagucucugaggcagau

SEQ ID NO: 967136 - RNA, 22 nt, Human
cugggccaucagaggggcugga

SEQ ID NO: 967137 - RNA, 22 nt, Human
uuccucugaaauggcuuggaaa

SEQ ID NO: 967138 - RNA, 22 nt, Human
ccaggccuggccaggggaugcc

SEQ ID NO: 967139 - RNA, 22 nt, Human
gaagcagcaaaucugcaguauc

SEQ ID NO: 967140 - RNA, 22 nt, Human
cagcagagguuggaacaguucu

SEQ ID NO: 967141 - RNA, 22 nt, Human
gacauucacaguuuccgauggu

SEQ ID NO: 967142 - RNA, 22 nt, Human
auaucuuuguuuuugccaagau

SEQ ID NO: 967143 - RNA, 22 nt, Human
gcugguccacucccuggaggcu

SEQ ID NO: 967144 - RNA, 22 nt, Human
ggugccagccuagugcaguggu

SEQ ID NO: 967145 - RNA, 23 nt, Human
ugcugggcagagcuggugcugag

SEQ ID NO: 967146 - RNA, 21 nt, Human
augacagaugcugcagaucgu

SEQ ID NO: 967147 - RNA, 22 nt, Human
agugucauuuuguccaucuucu

SEQ ID NO: 967148 - RNA, 22 nt, Human
ucagagaugcagugccaccuac

SEQ ID NO: 967149 - RNA, 20 nt, Human
agugccagggcaggugagag

SEQ ID NO: 967150 - RNA, 22 nt, Human
uggagcagcuaagccucugaga

SEQ ID NO: 967151 - RNA, 18 nt, Human
aggaagcaggaggaaggc

SEQ ID NO: 967152 - RNA, 22 nt, Human
uaggcacugggcuaggacaggu

SEQ ID NO: 967153 - RNA, 22 nt, Human
ccagcaugagacgaugaugaag

SEQ ID NO: 967154 - RNA, 22 nt, Human
uuucauaaggguuucuagacuu

SEQ ID NO: 967155 - RNA, 22 nt, Human
gcuguucaagacuaggaaauuu

SEQ ID NO: 967156 - RNA, 23 nt, Human
ugugucugaggauauaugugcau

SEQ ID NO: 967157 - RNA, 22 nt, Human
ucccuuaaaacucauguguugu

SEQ ID NO: 967158 - RNA, 22 nt, Human
ugggcucugugccagguuggug

SEQ ID NO: 967159 - RNA, 22 nt, Human
ggccugaggcaauagucagaca

SEQ ID NO: 967160 - RNA, 22 nt, Human
cccaggaugaucgagaguggga

SEQ ID NO: 967161 - RNA, 22 nt, Human
cuucaguucuaaaguagaaugu

SEQ ID NO: 967162 - RNA, 22 nt, Human
uuucaggguacauggagcaaau

SEQ ID NO: 967163 - RNA, 22 nt, Human
gagcuuccugaugccgaccagu

SEQ ID NO: 967164 - RNA, 22 nt, Human
ugauuuccucuacuagcaauua

SEQ ID NO: 967165 - RNA, 22 nt, Human
ccagggcagcagaauuggggca

SEQ ID NO: 967166 - RNA, 19 nt, Human
agcagccauagacaauaug

SEQ ID NO: 967167 - RNA, 23 nt, Human
ccagcccuccaccagcucuaggc

SEQ ID NO: 967168 - RNA, 22 nt, Human
gcacccagccagcaucucagag

SEQ ID NO: 967169 - RNA, 23 nt, Human
cccauuuucauguuaacuccugg

SEQ ID NO: 967170 - RNA, 22 nt, Human
ccuguucagagcuaagcaucau

SEQ ID NO: 967171 - RNA, 19 nt, Human
cucagcuguagcucaugug

SEQ ID NO: 967172 - RNA, 22 nt, Human
agagcugaggauccagcugagc

SEQ ID NO: 967173 - RNA, 22 nt, Human
cagggugcgccacucagaugua

SEQ ID NO: 967174 - RNA, 22 nt, Human
cagggccagcgucucgggcuau

SEQ ID NO: 967175 - RNA, 22 nt, Human
gagggcugcaaugagacagaga

SEQ ID NO: 967176 - RNA, 22 nt, Human
uggcgagccccgacugaguguu

SEQ ID NO: 967177 - RNA, 22 nt, Human
cuggcuguauuaguuugauccu

SEQ ID NO: 967178 - RNA, 18 nt, Human
gggcaucauucacaaagu

SEQ ID NO: 967179 - RNA, 22 nt, Human
gccuugggccagcugcucugga

SEQ ID NO: 967180 - RNA, 22 nt, Human
acagcuguggccacuugcaucc

SEQ ID NO: 967181 - RNA, 20 nt, Human
uucuuucaucuacacguugu

SEQ ID NO: 967182 - RNA, 22 nt, Human
agcaacaggaaauagcugauua

SEQ ID NO: 967183 - RNA, 22 nt, Human
cugggcaggagggcucuaugga

SEQ ID NO: 967184 - RNA, 22 nt, Human
caggucagaggcgcagccccca

SEQ ID NO: 967185 - RNA, 22 nt, Human
gauuauauaauggaagcucuug

SEQ ID NO: 967186 - RNA, 22 nt, Human
aggggccucgcaggaccgcucc

SEQ ID NO: 967187 - RNA, 23 nt, Human
uggcucuguggaucccucaggag

SEQ ID NO: 967188 - RNA, 22 nt, Human
ccuggccagcuaauugcccauc

SEQ ID NO: 967189 - RNA, 22 nt, Human
augccaggccccacgcugggca

SEQ ID NO: 967190 - RNA, 22 nt, Human
aggauccuuuggccacuucuua

SEQ ID NO: 967191 - RNA, 22 nt, Human
aucugcuugaaugagcaacagg

SEQ ID NO: 967192 - RNA, 22 nt, Human
cagcaggcugcgauugcucauu

SEQ ID NO: 967193 - RNA, 22 nt, Human
agagccugucugccuuucuacc

SEQ ID NO: 967194 - RNA, 22 nt, Human
uagaaacacagagagacccaug

SEQ ID NO: 967195 - RNA, 22 nt, Human
gaaguacaguuuuaucuagcca

SEQ ID NO: 967196 - RNA, 20 nt, Human
ccugggguacacuggcaugu

SEQ ID NO: 967197 - RNA, 22 nt, Human
ggaggcagaauagagugugggu

SEQ ID NO: 967198 - RNA, 22 nt, Human
ggaugcuggggaccaaucucug

SEQ ID NO: 967199 - RNA, 21 nt, Human
aggcaucuaaagagaguagac

SEQ ID NO: 967200 - RNA, 22 nt, Human
gcuccuggauguucaagucggc

SEQ ID NO: 967201 - RNA, 22 nt, Human
caaagcucaugcucuuagccau

SEQ ID NO: 967202 - RNA, 22 nt, Human
gaagagcugcucagaacaugau

SEQ ID NO: 967203 - RNA, 22 nt, Human
gacuccuggcuuucccucuuag

SEQ ID NO: 967204 - RNA, 22 nt, Human
gaggcagcaucuauggugggaa

SEQ ID NO: 967205 - RNA, 22 nt, Human
ucuucuucccaucccucaaaug

SEQ ID NO: 967206 - RNA, 22 nt, Human
gcccucugcacagcucugagca

SEQ ID NO: 967207 - RNA, 22 nt, Human
gugccagggggcacugaacaga

SEQ ID NO: 967208 - RNA, 22 nt, Human
ccugcucugguuuagucagucu

SEQ ID NO: 967209 - RNA, 22 nt, Human
uucagcaagaauuuacugagcu

SEQ ID NO: 967210 - RNA, 19 nt, Human
gcuguauuaaagauacaug

SEQ ID NO: 967211 - RNA, 22 nt, Human
ggucccagcugcucaagaggcu

SEQ ID NO: 967212 - RNA, 22 nt, Human
cugcccagaaucacucacucga

SEQ ID NO: 967213 - RNA, 22 nt, Human
augcuuuuaugucacaugguca

SEQ ID NO: 967214 - RNA, 22 nt, Human
ucuuugcaggccaaauuguuaa

SEQ ID NO: 967215 - RNA, 22 nt, Human
ugcagcuucuuguccugugauu

SEQ ID NO: 967216 - RNA, 22 nt, Human
aaauguuagguuguacugaguc

SEQ ID NO: 967217 - RNA, 22 nt, Human
gccugucugcgucacgcuuauu

SEQ ID NO: 967218 - RNA, 22 nt, Human
aaagaauacccugggucauaaa

SEQ ID NO: 967219 - RNA, 20 nt, Human
aggcaccugucacaggugag

SEQ ID NO: 967220 - RNA, 22 nt, Human
cccaggagagagacuugaaucu

SEQ ID NO: 967221 - RNA, 18 nt, Human
agucuucugauccauuuu

SEQ ID NO: 967222 - RNA, 22 nt, Human
uccacagaauguaagauccaca

SEQ ID NO: 967223 - RNA, 21 nt, Human
gcugucucuggcuccugggaa

SEQ ID NO: 967224 - RNA, 19 nt, Human
uccaaaggacccaccucca

SEQ ID NO: 967225 - RNA, 22 nt, Human
cucagggccaaggaugcuguug

SEQ ID NO: 967226 - RNA, 22 nt, Human
acuuucuaggucucaguccuuu

SEQ ID NO: 967227 - RNA, 19 nt, Human
gcacccugaggucauggcc

SEQ ID NO: 967228 - RNA, 20 nt, Human
agcaggaaugaugcuuucau

SEQ ID NO: 967229 - RNA, 23 nt, Human
aguuccagaaaaaugcucaagca

SEQ ID NO: 967230 - RNA, 22 nt, Human
aguuacuugagacguuuaugaa

SEQ ID NO: 967231 - RNA, 22 nt, Human
uaugcacauugguuuccucauu

SEQ ID NO: 967232 - RNA, 22 nt, Human
uuagaaaucaccucugaagauc

SEQ ID NO: 967233 - RNA, 22 nt, Human
uugcaccauuucacuuccauua

SEQ ID NO: 967234 - RNA, 22 nt, Human
agcagcugcagagggcuccccc

SEQ ID NO: 967235 - RNA, 22 nt, Human
gaggaggcuggcgccgccugcc

SEQ ID NO: 967236 - RNA, 22 nt, Human
ggagccuguggcugcuugaagc

SEQ ID NO: 967237 - RNA, 22 nt, Human
ccaggcuggauuuugcaguuca

SEQ ID NO: 967238 - RNA, 21 nt, Human
ucccacucuaaauggacugaa

SEQ ID NO: 967239 - RNA, 22 nt, Human
cauuucauaguugucacaauaa

SEQ ID NO: 967240 - RNA, 22 nt, Human
gcagcaugagcuauacaaagua

SEQ ID NO: 967241 - RNA, 22 nt, Human
acccaggagcaggcugggcagu

SEQ ID NO: 967242 - RNA, 22 nt, Human
ugggagcagccucagcuucggg

SEQ ID NO: 967243 - RNA, 22 nt, Human
ggucugaguggugcugacucag

SEQ ID NO: 967244 - RNA, 22 nt, Human
uuggaggcaaugggaaggaggc

SEQ ID NO: 967245 - RNA, 22 nt, Human
acacauuuacauguuuacguau

SEQ ID NO: 967246 - RNA, 22 nt, Human
ucucagagaggggccgggccuu

SEQ ID NO: 967247 - RNA, 22 nt, Human
gcacccagggacuuggcuggcc

SEQ ID NO: 967248 - RNA, 22 nt, Human
gaaggccacggaauggagcugg

SEQ ID NO: 967249 - RNA, 22 nt, Human
ucagggcaucaucaugaauaua

SEQ ID NO: 967250 - RNA, 22 nt, Human
ucuuugcaaaauacaacaaugg

SEQ ID NO: 967251 - RNA, 22 nt, Human
uuuaagaaguuauguuauaaau

SEQ ID NO: 967252 - RNA, 22 nt, Human
acagccagucaucucagcaggg

SEQ ID NO: 967253 - RNA, 22 nt, Human
ugucucugaacagcuuacuaaa

SEQ ID NO: 967254 - RNA, 22 nt, Human
acucaggaauggggcugggacu

SEQ ID NO: 967255 - RNA, 22 nt, Human
ucagcagugcagggugaggcag

SEQ ID NO: 967256 - RNA, 22 nt, Human
gaaccucagugaaacuggaggu

SEQ ID NO: 967257 - RNA, 22 nt, Human
cuuguauuccccuaucucuaaa

SEQ ID NO: 967258 - RNA, 22 nt, Human
ccugggagagccaucuguggcc

SEQ ID NO: 967259 - RNA, 19 nt, Human
gcuccugggccucacucau

SEQ ID NO: 967260 - RNA, 22 nt, Human
gacuucuauuaauaccucuacu

SEQ ID NO: 967261 - RNA, 22 nt, Human
ugggagcagccaacauggccuu

SEQ ID NO: 967262 - RNA, 22 nt, Human
gcagcagaugcuuucauggaca

SEQ ID NO: 967263 - RNA, 22 nt, Human
agucuugcauuuucugaagaug

SEQ ID NO: 967264 - RNA, 22 nt, Human
gugucaugcacacucaguguug

SEQ ID NO: 967265 - RNA, 22 nt, Human
ccuugcugcgugcuagcacaga

SEQ ID NO: 967266 - RNA, 22 nt, Human
ccugggaggcuguuuccagccu

SEQ ID NO: 967267 - RNA, 22 nt, Human
cuuguacauagagaagaagccu

SEQ ID NO: 967268 - RNA, 18 nt, Human
ugcuuggagcauuuacca

SEQ ID NO: 967269 - RNA, 22 nt, Human
aauggacaggagagcauaguca

SEQ ID NO: 967270 - RNA, 22 nt, Human
caaggccaugagcagcgagugu

SEQ ID NO: 967271 - RNA, 22 nt, Human
agggcagagcugucuaaauggc

SEQ ID NO: 967272 - RNA, 22 nt, Human
ggcucccugccuguccucaguc

SEQ ID NO: 967273 - RNA, 22 nt, Human
uaguccagccuuggguguagcc

SEQ ID NO: 967274 - RNA, 22 nt, Human
agggugccugcugcagguucag

SEQ ID NO: 967275 - RNA, 19 nt, Human
agccuggagggcuggucac

SEQ ID NO: 967276 - RNA, 22 nt, Human
ucuguucagcugccucagggua

SEQ ID NO: 967277 - RNA, 22 nt, Human
uuuauauuucccaggauuggcc

SEQ ID NO: 967278 - RNA, 22 nt, Human
agcugccaucagccuuuggaug

SEQ ID NO: 967279 - RNA, 22 nt, Human
gcugcaggggggucuggacuug

SEQ ID NO: 967280 - RNA, 22 nt, Human
cuuaagauuugcgauaccuaau

SEQ ID NO: 967281 - RNA, 22 nt, Human
aguuuuuccguggcuacgauaa

SEQ ID NO: 967282 - RNA, 22 nt, Human
gcagaggcagggcccuccucca

SEQ ID NO: 967283 - RNA, 22 nt, Human
uccauggggcccaggaugagag

SEQ ID NO: 967284 - RNA, 22 nt, Human
cauugcaccacauugcaucccu

SEQ ID NO: 967285 - RNA, 22 nt, Human
augauggugggagaugacccag

SEQ ID NO: 967286 - RNA, 22 nt, Human
cugcuuuguggaaucacacugg

SEQ ID NO: 967287 - RNA, 22 nt, Human
uggaagagguggaaguggcuuc

SEQ ID NO: 967288 - RNA, 22 nt, Human
agauauuuguaucuugcuauug

SEQ ID NO: 967289 - RNA, 22 nt, Human
gcuguguuggugaagcuguagc

SEQ ID NO: 967290 - RNA, 22 nt, Human
agccuggcuguaaccucauggu

SEQ ID NO: 967291 - RNA, 22 nt, Human
gagggaggcaucaugaauccag

SEQ ID NO: 967292 - RNA, 22 nt, Human
ucuggaaguuagaggaggaaag

SEQ ID NO: 967293 - RNA, 22 nt, Human
acagggcagagugaaaugcuau

SEQ ID NO: 967294 - RNA, 22 nt, Human
aauggcucugauguuguuguga

SEQ ID NO: 967295 - RNA, 22 nt, Human
cugcuuuggcucagugacauca

SEQ ID NO: 967296 - RNA, 22 nt, Human
ccugggcaucucaugcaccugc

SEQ ID NO: 967297 - RNA, 22 nt, Human
ucuucccuaaucaccaucuuca

SEQ ID NO: 967298 - RNA, 22 nt, Human
uccaggaguuugaccugugggc

SEQ ID NO: 967299 - RNA, 22 nt, Human
augaggauuaacuguugucaua

SEQ ID NO: 967300 - RNA, 22 nt, Human
ucacaguaaaagcauggaagag

SEQ ID NO: 967301 - RNA, 22 nt, Human
cugcauucauaucagauagaag

SEQ ID NO: 967302 - RNA, 20 nt, Human
aacagggggcugcagagggc

SEQ ID NO: 967303 - RNA, 22 nt, Human
cagccaucaguaaagacagcuu

SEQ ID NO: 967304 - RNA, 22 nt, Human
auguuucaaugcacuuuagccu

SEQ ID NO: 967305 - RNA, 22 nt, Human
uccuucaguuaaagaucucaca

SEQ ID NO: 967306 - RNA, 22 nt, Human
agcuuguuaaggaugcauauua

SEQ ID NO: 967307 - RNA, 22 nt, Human
ccaggguggcguagaugcuggg

SEQ ID NO: 967308 - RNA, 22 nt, Human
uuucagaaagcaucaucaaagu

SEQ ID NO: 967309 - RNA, 22 nt, Human
ucucuucuugauuuucacugga

SEQ ID NO: 967310 - RNA, 22 nt, Human
aggagcugagucagcccgacag

SEQ ID NO: 967311 - RNA, 22 nt, Human
ucaagcaggguagcaagcuggu

SEQ ID NO: 967312 - RNA, 22 nt, Human
aaucaguuaggguguuaaugag

SEQ ID NO: 967313 - RNA, 22 nt, Human
gguuugcauucugaaaggcuca

SEQ ID NO: 967314 - RNA, 18 nt, Human
ggccugaggauuucagca

SEQ ID NO: 967315 - RNA, 22 nt, Human
ucugaggcauacccaggccccc

SEQ ID NO: 967316 - RNA, 22 nt, Human
aagaauguuaguuucugauaca

SEQ ID NO: 967317 - RNA, 22 nt, Human
ugaaaugaagggcuuguucugg

SEQ ID NO: 967318 - RNA, 21 nt, Human
uggcucugaaagagugcugca

SEQ ID NO: 967319 - RNA, 22 nt, Human
gaguuauugaguauagaaugua

SEQ ID NO: 967320 - RNA, 22 nt, Human
ggaggggagguccagcugaucu

SEQ ID NO: 967321 - RNA, 21 nt, Human
acagggcaugcagcuggcugu

SEQ ID NO: 967322 - RNA, 22 nt, Human
acugggagggucuugaagaggg

SEQ ID NO: 967323 - RNA, 22 nt, Human
ccucugcaccauagccuucagc

SEQ ID NO: 967324 - RNA, 22 nt, Human
uccauuggucucugugcccagg

SEQ ID NO: 967325 - RNA, 22 nt, Human
uucacagggccacuggcaggag

SEQ ID NO: 967326 - RNA, 22 nt, Human
auugagaauccauuugagauga

SEQ ID NO: 967327 - RNA, 22 nt, Human
aucuggcuuacgaagcacuggu

SEQ ID NO: 967328 - RNA, 22 nt, Human
uacuuuagaaggaaauaaguuc

SEQ ID NO: 967329 - RNA, 22 nt, Human
gggccaggucggugaaugguca

SEQ ID NO: 967330 - RNA, 20 nt, Human
augugagggguugaaguggg

SEQ ID NO: 967331 - RNA, 22 nt, Human
ggagagagaugccgccuugcuc

SEQ ID NO: 967332 - RNA, 22 nt, Human
gggcugugggacccggcacuuu

SEQ ID NO: 967333 - RNA, 22 nt, Human
ugccugggggacuaaggccaaa

SEQ ID NO: 967334 - RNA, 23 nt, Human
ucguugaauagcaauagcacaac

SEQ ID NO: 967335 - RNA, 22 nt, Human
gagggaaagguuaauacaugau

SEQ ID NO: 967336 - RNA, 22 nt, Human
aguggcagagcugugucuugaa

SEQ ID NO: 967337 - RNA, 20 nt, Human
ucaccuuuguugguauucau

SEQ ID NO: 967338 - RNA, 22 nt, Human
uguucuugagccuuuagaccua

SEQ ID NO: 967339 - RNA, 22 nt, Human
cagagggcacaugguuuccuca

SEQ ID NO: 967340 - RNA, 21 nt, Human
uccugccuuaguccagagcag

SEQ ID NO: 967341 - RNA, 22 nt, Human
ucacugcagagaccucuaguca

SEQ ID NO: 967342 - RNA, 22 nt, Human
uuucuaguccucaugcaucauu

SEQ ID NO: 967343 - RNA, 22 nt, Human
aaaacagacagccaguguagag

SEQ ID NO: 967344 - RNA, 22 nt, Human
agggacagucuacuguucacug

SEQ ID NO: 967345 - RNA, 22 nt, Human
gugccugguuuggggaauguuc

SEQ ID NO: 967346 - RNA, 20 nt, Human
ugaaggccauuuguuccaga

SEQ ID NO: 967347 - RNA, 22 nt, Human
caugaagcuugaagcaguccac

SEQ ID NO: 967348 - RNA, 22 nt, Human
cugggagcggcugucacugguu

SEQ ID NO: 967349 - RNA, 22 nt, Human
caaaaguaauggcgguuuuuac

SEQ ID NO: 967350 - RNA, 22 nt, Human
ucauaaaacacaccagguaguu

SEQ ID NO: 967351 - RNA, 22 nt, Human
gcauacagagaggauguggcau

SEQ ID NO: 967352 - RNA, 22 nt, Human
auugcuguaaauuaucuuauua

SEQ ID NO: 967353 - RNA, 22 nt, Human
ucagaagucccuugcaucuuag

SEQ ID NO: 967354 - RNA, 22 nt, Human
caguugcuacaguucaagugug

SEQ ID NO: 967355 - RNA, 22 nt, Human
gaggaaggucccaucagaauuu

SEQ ID NO: 967356 - RNA, 22 nt, Human
cugccuguuagucuagcaguua

SEQ ID NO: 967357 - RNA, 20 nt, Human
gacauucauaguuauuacca

SEQ ID NO: 967358 - RNA, 22 nt, Human
ccagcaccuugaucuuggaguu

SEQ ID NO: 967359 - RNA, 17 nt, Human
ggcagcugccacuuuuu

SEQ ID NO: 967360 - RNA, 23 nt, Human
aguacauucgaaaaauucuguga

SEQ ID NO: 967361 - RNA, 22 nt, Human
aaggccaggacaccaggggacu

SEQ ID NO: 967362 - RNA, 22 nt, Human
ucuucaaacugaaaauuuagaa

SEQ ID NO: 967363 - RNA, 22 nt, Human
gccaggcuggucuugaacuccu

SEQ ID NO: 967364 - RNA, 22 nt, Human
aauguucauugauuaaaugaau

SEQ ID NO: 967365 - RNA, 22 nt, Human
uggcagggccugcucaucaucc

SEQ ID NO: 967366 - RNA, 19 nt, Human
ucccaggaaccuuuuauuu

SEQ ID NO: 967367 - RNA, 22 nt, Human
ugcagaaggaggaggaaaucca

SEQ ID NO: 967368 - RNA, 22 nt, Human
gagggcugaagauuguggcccc

SEQ ID NO: 967369 - RNA, 19 nt, Human
aagggcugggcaccucacu

SEQ ID NO: 967370 - RNA, 22 nt, Human
aucacugucgucaucugagauu

SEQ ID NO: 967371 - RNA, 22 nt, Human
uacagucuuuggaaagagauag

SEQ ID NO: 967372 - RNA, 22 nt, Human
cagggccagccauccugcuggg

SEQ ID NO: 967373 - RNA, 22 nt, Human
cccaggcugauguucagcgggu

SEQ ID NO: 967374 - RNA, 22 nt, Human
uggcuuccugcacagugucugc

SEQ ID NO: 967375 - RNA, 22 nt, Human
uguuggcauuagaggguuauug

SEQ ID NO: 967376 - RNA, 22 nt, Human
uaaagguacgaagugagggauu

SEQ ID NO: 967377 - RNA, 22 nt, Human
cuggcagcugcccgagaugccc

SEQ ID NO: 967378 - RNA, 22 nt, Human
acuuugcagagccagaagagaa

SEQ ID NO: 967379 - RNA, 22 nt, Human
aaggcucuuggagugaaugcag

SEQ ID NO: 967380 - RNA, 22 nt, Human
ucuagaaacaugacauugaucu

SEQ ID NO: 967381 - RNA, 20 nt, Human
ggcugugcccuuccguggcc

SEQ ID NO: 967382 - RNA, 22 nt, Human
ggugaaggaggaagcugaugga

SEQ ID NO: 967383 - RNA, 22 nt, Human
aaggcucucugauggcagcagu

SEQ ID NO: 967384 - RNA, 23 nt, Human
uggcucugagcuuccugguggcc

SEQ ID NO: 967385 - RNA, 22 nt, Human
accaggcugugaagugagacua

SEQ ID NO: 967386 - RNA, 21 nt, Human
ugccagggauuuacagagccu

SEQ ID NO: 967387 - RNA, 22 nt, Human
caggugggaccaugauagggca

SEQ ID NO: 967388 - RNA, 22 nt, Human
cuggcacacaaguauuuccuuu

SEQ ID NO: 967389 - RNA, 22 nt, Human
gggagggguugcauguuugagu

SEQ ID NO: 967390 - RNA, 22 nt, Human
ucaguagcagaaagcaaugagu

SEQ ID NO: 967391 - RNA, 22 nt, Human
aggcaguguauugcuagcggcu

SEQ ID NO: 967392 - RNA, 20 nt, Human
ggccugagcauggcuggcag

SEQ ID NO: 967393 - RNA, 22 nt, Human
cccugagaugccucacccuagu

SEQ ID NO: 967394 - RNA, 18 nt, Human
uccagagguguuggagcc

SEQ ID NO: 967395 - RNA, 22 nt, Human
aaauuucaguuaccuuuacguu

SEQ ID NO: 967396 - RNA, 22 nt, Human
ggccuugggaggagggucagaa

SEQ ID NO: 967397 - RNA, 22 nt, Human
ccugagaggcccucucacuguc

SEQ ID NO: 967398 - RNA, 22 nt, Human
cccaggaugucgaggcugcagu

SEQ ID NO: 967399 - RNA, 21 nt, Human
agagaauugccuuagauguuc

SEQ ID NO: 967400 - RNA, 21 nt, Human
augaagucuaugcuucugugu

SEQ ID NO: 967401 - RNA, 22 nt, Human
ugcucagacaagcugaacagua

SEQ ID NO: 967402 - RNA, 22 nt, Human
aguuacaaccaugacacaagca

SEQ ID NO: 967403 - RNA, 22 nt, Human
acaggggauugauuggaagucu

SEQ ID NO: 967404 - RNA, 22 nt, Human
uuccagaaaucuuucagcucaa

SEQ ID NO: 967405 - RNA, 22 nt, Human
uuuccagagcaugucugcucag

SEQ ID NO: 967406 - RNA, 18 nt, Human
gagaggagccagaauuuu

SEQ ID NO: 967407 - RNA, 22 nt, Human
uucuuacagaguuuacagagcc

SEQ ID NO: 967408 - RNA, 22 nt, Human
caauaugcaagcuauuaaguau

SEQ ID NO: 967409 - RNA, 22 nt, Human
ucucuucuagcuucuugugguu

SEQ ID NO: 967410 - RNA, 22 nt, Human
gaccuggaggauccucuucuug

SEQ ID NO: 967411 - RNA, 22 nt, Human
ccucuggggguccucagagucu

SEQ ID NO: 967412 - RNA, 22 nt, Human
ugaaggaagaauaggcaguguu

SEQ ID NO: 967413 - RNA, 22 nt, Human
cugaggccagcugcagagcucu

SEQ ID NO: 967414 - RNA, 22 nt, Human
uaagaacauaaauucauacggg

SEQ ID NO: 967415 - RNA, 22 nt, Human
uuuauugcauacacaaauguca

SEQ ID NO: 967416 - RNA, 22 nt, Human
gaggccaggaagcccaagauca

SEQ ID NO: 967417 - RNA, 22 nt, Human
gagguagcgaguggacagugca

SEQ ID NO: 967418 - RNA, 18 nt, Human
acugugugaauuagcucc

SEQ ID NO: 967419 - RNA, 22 nt, Human
aggaagccaugguggacgucua

SEQ ID NO: 967420 - RNA, 20 nt, Human
uggcuccucuuggcuguggc

SEQ ID NO: 967421 - RNA, 22 nt, Human
aguaccaugcuuccugacuggu

SEQ ID NO: 967422 - RNA, 22 nt, Human
uccagcagggaauuaguagucu

SEQ ID NO: 967423 - RNA, 22 nt, Human
cuccuggcuucugaaaucgugg

SEQ ID NO: 967424 - RNA, 22 nt, Human
cugcccagaagccagaugggca

SEQ ID NO: 967425 - RNA, 22 nt, Human
acuguguguuugucuagcacag

SEQ ID NO: 967426 - RNA, 22 nt, Human
ucagggaacuacuucucccuau

SEQ ID NO: 967427 - RNA, 22 nt, Human
ucucucagucagaugcuaaaga

SEQ ID NO: 967428 - RNA, 22 nt, Human
aggcacaggaaugucauccagu

SEQ ID NO: 967429 - RNA, 22 nt, Human
ucaggggacagccagcuggagg

SEQ ID NO: 967430 - RNA, 22 nt, Human
ugggcucauggcccagcacugg

SEQ ID NO: 967431 - RNA, 22 nt, Human
uuguaacagcuguuuauauagu

SEQ ID NO: 967432 - RNA, 22 nt, Human
uggaaagaaaguaaaggcguau

SEQ ID NO: 967433 - RNA, 22 nt, Human
uggcucaggguccccaaauggu

SEQ ID NO: 967434 - RNA, 22 nt, Human
ggccugagcucuggggaggcaa

SEQ ID NO: 967435 - RNA, 22 nt, Human
caaauucacaugauugcuucug

SEQ ID NO: 967436 - RNA, 22 nt, Human
gggguggauuccuacaggucca

SEQ ID NO: 967437 - RNA, 22 nt, Human
cuccucuggaaauuccucugcc

SEQ ID NO: 967438 - RNA, 21 nt, Human
uccuggccagggcacuaggca

SEQ ID NO: 967439 - RNA, 22 nt, Human
gggagacacgcugcaggcauaa

SEQ ID NO: 967440 - RNA, 22 nt, Human
uuucuguaaguggcaaauaaug

SEQ ID NO: 967441 - RNA, 22 nt, Human
gcucugcugggugggcaguuau

SEQ ID NO: 967442 - RNA, 22 nt, Human
cugcagagcaaguaacauccuc

SEQ ID NO: 967443 - RNA, 22 nt, Human
cucccaggggaacuaucaagua

SEQ ID NO: 967444 - RNA, 21 nt, Human
acagacagggccagugucccc

SEQ ID NO: 967445 - RNA, 22 nt, Human
ugcugguggagaaaguggaggu

SEQ ID NO: 967446 - RNA, 22 nt, Human
uuccagagcaguuuucagauca

SEQ ID NO: 967447 - RNA, 22 nt, Human
ugaggugaagaguggagcucag

SEQ ID NO: 967448 - RNA, 22 nt, Human
ggcagugaaugaaacagaggcu

SEQ ID NO: 967449 - RNA, 22 nt, Human
aagcagccaccucaucuccacu

SEQ ID NO: 967450 - RNA, 22 nt, Human
uuccuggccccaccccuggaga

SEQ ID NO: 967451 - RNA, 22 nt, Human
agcugucugucuccugaggaga

SEQ ID NO: 967452 - RNA, 22 nt, Human
ugcaaacuauugguagagaugg

SEQ ID NO: 967453 - RNA, 22 nt, Human
uacaaagcuguauagccugguc

SEQ ID NO: 967454 - RNA, 22 nt, Human
uuucaacauauaccauaaugcc

SEQ ID NO: 967455 - RNA, 22 nt, Human
uggcuucaucugcagcacugcc

SEQ ID NO: 967456 - RNA, 22 nt, Human
ggcuuccuuucacuacccucag

SEQ ID NO: 967457 - RNA, 22 nt, Human
ccacaggggcccacgagccgcu

SEQ ID NO: 967458 - RNA, 22 nt, Human
uccugccuucauacugcuguau

SEQ ID NO: 967459 - RNA, 22 nt, Human
cuuauuauaaaauccuguuuga

SEQ ID NO: 967460 - RNA, 22 nt, Human
cccauuuaucccaagguuacuc

SEQ ID NO: 967461 - RNA, 22 nt, Human
cugggcacaggggagcagaguc

SEQ ID NO: 967462 - RNA, 22 nt, Human
ucaugaauauugaaugcuucau

SEQ ID NO: 967463 - RNA, 22 nt, Human
uuaagacauucagauauuucua

SEQ ID NO: 967464 - RNA, 22 nt, Human
uuucacaucagagguagauuag

SEQ ID NO: 967465 - RNA, 21 nt, Human
cagcagaguaaugcauucgua

SEQ ID NO: 967466 - RNA, 22 nt, Human
gagauuucuuuugaugccuguc

SEQ ID NO: 967467 - RNA, 22 nt, Human
ugaggggagcccgcccuggacg

SEQ ID NO: 967468 - RNA, 22 nt, Human
gauuuuauauggcauacugugg

SEQ ID NO: 967469 - RNA, 22 nt, Human
uaccuuggguugaguucauucu

SEQ ID NO: 967470 - RNA, 22 nt, Human
ucuuuguaacugucuauugaga

SEQ ID NO: 967471 - RNA, 20 nt, Human
uccuugaaagugggguauau

SEQ ID NO: 967472 - RNA, 22 nt, Human
ucucuggaauuggcugaggcaa

SEQ ID NO: 967473 - RNA, 22 nt, Human
ccugugaggucaucugugguaa

SEQ ID NO: 967474 - RNA, 22 nt, Human
ccuaagaauuaaugaauacacc

SEQ ID NO: 967475 - RNA, 22 nt, Human
gggcuacagacaugcucuaagc

SEQ ID NO: 967476 - RNA, 22 nt, Human
acacagggucuagaguuaggcc

SEQ ID NO: 967477 - RNA, 22 nt, Human
uaaggcauucucaugcugugaa

SEQ ID NO: 967478 - RNA, 22 nt, Human
cacagggcuucucauggggugc

SEQ ID NO: 967479 - RNA, 22 nt, Human
auuugcuucugugaaaucaagu

SEQ ID NO: 967480 - RNA, 22 nt, Human
ccagcugcugugcagggaggcu

SEQ ID NO: 967481 - RNA, 22 nt, Human
ugggagagcacugcagccccgg

SEQ ID NO: 967482 - RNA, 22 nt, Human
uuuugugagcccauaaaugcca

SEQ ID NO: 967483 - RNA, 22 nt, Human
ggcuguagguuggugcuggaca

SEQ ID NO: 967484 - RNA, 22 nt, Human
cccagcccagcguucgaggggu

SEQ ID NO: 967485 - RNA, 18 nt, Human
cggcagagugcuucuagc

SEQ ID NO: 967486 - RNA, 22 nt, Human
uagggcagaguccaggaugggc

SEQ ID NO: 967487 - RNA, 22 nt, Human
auccauggaggacaagagcaau

SEQ ID NO: 967488 - RNA, 17 nt, Human
uccuucagggccucaca

SEQ ID NO: 967489 - RNA, 22 nt, Human
cagagccaacgccaccugccca

SEQ ID NO: 967490 - RNA, 22 nt, Human
uggcugugugccaggcugucug

SEQ ID NO: 967491 - RNA, 22 nt, Human
ucuccugggugcuuuaucagaa

SEQ ID NO: 967492 - RNA, 22 nt, Human
cccacucccugcacgccugccg

SEQ ID NO: 967493 - RNA, 22 nt, Human
uuccaggauggcaauaaugaau

SEQ ID NO: 967494 - RNA, 22 nt, Human
cugccugcuuaccaugcaucag

SEQ ID NO: 967495 - RNA, 22 nt, Human
uggccugcagcucucagggaag

SEQ ID NO: 967496 - RNA, 22 nt, Human
uucaggauucucucccauuuac

SEQ ID NO: 967497 - RNA, 20 nt, Human
guggccucucacauucugag

SEQ ID NO: 967498 - RNA, 22 nt, Human
ggagcagagcauuucacagccu

SEQ ID NO: 967499 - RNA, 23 nt, Human
ucugagagaacaaugccuccuau

SEQ ID NO: 967500 - RNA, 22 nt, Human
uuugaaagggaaauaaacuccu

SEQ ID NO: 967501 - RNA, 22 nt, Human
cugggccaguuaugucucaucu

SEQ ID NO: 967502 - RNA, 22 nt, Human
uaagaauuguguugaauagagu

SEQ ID NO: 967503 - RNA, 22 nt, Human
auguuuuucauaccaguguugg

SEQ ID NO: 967504 - RNA, 22 nt, Human
gggcugcugccaccagguggau

SEQ ID NO: 967505 - RNA, 22 nt, Human
cauuuauucauuugcuagggcu

SEQ ID NO: 967506 - RNA, 22 nt, Human
aucaggaucacagaaacuuuua

SEQ ID NO: 967507 - RNA, 22 nt, Human
augcaguaaauguucuaguuug

SEQ ID NO: 967508 - RNA, 22 nt, Human
uggcagcugccauguccacgug

SEQ ID NO: 967509 - RNA, 22 nt, Human
guggguggaggcgucgagggca

SEQ ID NO: 967510 - RNA, 22 nt, Human
cagcuggccugaucccuguggc

SEQ ID NO: 967511 - RNA, 22 nt, Human
caguauguacucuuaucaugua

SEQ ID NO: 967512 - RNA, 22 nt, Human
cagaagaggacuggguagcuca

SEQ ID NO: 967513 - RNA, 22 nt, Human
cuggagggugagccucaucucu

SEQ ID NO: 967514 - RNA, 22 nt, Human
ugcagccaccaccucugcugaa

SEQ ID NO: 967515 - RNA, 22 nt, Human
uuuccaagagcuuauuucugaa

SEQ ID NO: 967516 - RNA, 23 nt, Human
ugggccuggaaagccuuagagag

SEQ ID NO: 967517 - RNA, 22 nt, Human
gcugagguggcugccuuaguaa

SEQ ID NO: 967518 - RNA, 22 nt, Human
uaaaugcagcaguuucuguucu

SEQ ID NO: 967519 - RNA, 22 nt, Human
cugcugugcuuguggccacccg

SEQ ID NO: 967520 - RNA, 23 nt, Human
gccucagagaaacagcugcacac

SEQ ID NO: 967521 - RNA, 18 nt, Human
aaaugcuaggcuacauga

SEQ ID NO: 967522 - RNA, 22 nt, Human
uacuguauuugauaagugaagu

SEQ ID NO: 967523 - RNA, 22 nt, Human
agcagcaggagccgugggguga

SEQ ID NO: 967524 - RNA, 22 nt, Human
gaucuucuagcagaaguaauuu

SEQ ID NO: 967525 - RNA, 22 nt, Human
cuuccuguugucacagucugcg

SEQ ID NO: 967526 - RNA, 22 nt, Human
ugaauauguuccucacaaguuc

SEQ ID NO: 967527 - RNA, 22 nt, Human
ccucuccaguuuuaacgugacc

SEQ ID NO: 967528 - RNA, 22 nt, Human
uugugucuaaauaaggagaccu

SEQ ID NO: 967529 - RNA, 22 nt, Human
acaccagggccuagccagggcg

SEQ ID NO: 967530 - RNA, 22 nt, Human
aucagcugaaaaacaggcagca

SEQ ID NO: 967531 - RNA, 23 nt, Human
acucagcuuugggagaugacuca

SEQ ID NO: 967532 - RNA, 22 nt, Human
auucacaaauaacaggugcaga

SEQ ID NO: 967533 - RNA, 18 nt, Human
uggugaaggguggaggag

SEQ ID NO: 967534 - RNA, 22 nt, Human
aaaggaagauugagcuuuucca

SEQ ID NO: 967535 - RNA, 22 nt, Human
gcagagccaggagagacccuug

SEQ ID NO: 967536 - RNA, 22 nt, Human
gaaggggacuggcagcugcaga

SEQ ID NO: 967537 - RNA, 22 nt, Human
uguggccuccccacuucugggg

SEQ ID NO: 967538 - RNA, 22 nt, Human
ugcugaaacaauaacauacugg

SEQ ID NO: 967539 - RNA, 22 nt, Human
ccucagggaaugggaggcuggg

SEQ ID NO: 967540 - RNA, 22 nt, Human
aagauaaacucuugauuucuga

SEQ ID NO: 967541 - RNA, 22 nt, Human
cucaggauagauuguccucuca

SEQ ID NO: 967542 - RNA, 22 nt, Human
uaacaguguggacuugagaucu

SEQ ID NO: 967543 - RNA, 22 nt, Human
gaggcugccccuuccucagcug

SEQ ID NO: 967544 - RNA, 22 nt, Human
gagcaccgccuccacgaugccc

SEQ ID NO: 967545 - RNA, 22 nt, Human
ggccugcuucucagugagcuug

SEQ ID NO: 967546 - RNA, 20 nt, Human
ccagacagcaccugccuggu

SEQ ID NO: 967547 - RNA, 22 nt, Human
uuaauaaacaggugcagcugaa

SEQ ID NO: 967548 - RNA, 22 nt, Human
acugugcuuucucuggaggcau

SEQ ID NO: 967549 - RNA, 22 nt, Human
cccagggagguagcaggagaaa

SEQ ID NO: 967550 - RNA, 22 nt, Human
gguacaaggagugaagguuugg

SEQ ID NO: 967551 - RNA, 22 nt, Human
gcugagcugggacaguccuggg

SEQ ID NO: 967552 - RNA, 22 nt, Human
aaggcugagagucacaguccua

SEQ ID NO: 967553 - RNA, 22 nt, Human
gggcucugggauucagagcaag

SEQ ID NO: 967554 - RNA, 22 nt, Human
gggcagcugccaagugcaucgc

SEQ ID NO: 967555 - RNA, 22 nt, Human
uggcucuguuuguuaacuagac

SEQ ID NO: 967556 - RNA, 22 nt, Human
ugcucagggacaauggagaggg

SEQ ID NO: 967557 - RNA, 22 nt, Human
cagcaucuaaucuucaugccgg

SEQ ID NO: 967558 - RNA, 22 nt, Human
gcaaagcugggugugaaugcac

SEQ ID NO: 967559 - RNA, 22 nt, Human
ucagacuugccuuuuuauaaaa

SEQ ID NO: 967560 - RNA, 22 nt, Human
ucugacauuuugagaaugacau

SEQ ID NO: 967561 - RNA, 23 nt, Human
cuucuggcucuauaucagaauuc

SEQ ID NO: 967562 - RNA, 22 nt, Human
auaaugaggauuugcauauuag

SEQ ID NO: 967563 - RNA, 22 nt, Human
aaugcauauguaggcaagcagu

SEQ ID NO: 967564 - RNA, 22 nt, Human
ucagagugugacuuggucauga

SEQ ID NO: 967565 - RNA, 21 nt, Human
uuucugucucugccacuaguu

SEQ ID NO: 967566 - RNA, 22 nt, Human
uaggacaggugaggggcugugg

SEQ ID NO: 967567 - RNA, 22 nt, Human
gcacagccagcaucugagggau

SEQ ID NO: 967568 - RNA, 22 nt, Human
uggaggccagagguacugggac

SEQ ID NO: 967569 - RNA, 22 nt, Human
caaagugcuaggauuacaggcc

SEQ ID NO: 967570 - RNA, 22 nt, Human
aguugacauccauaacaggaag

SEQ ID NO: 967571 - RNA, 22 nt, Human
gcaaagguagccaaggagcuca

SEQ ID NO: 967572 - RNA, 22 nt, Human
cacagguguaugaauaugucca

SEQ ID NO: 967573 - RNA, 22 nt, Human
ugcauuguugaugaguugaaua

SEQ ID NO: 967574 - RNA, 20 nt, Human
cagccuccacucacucagcu

SEQ ID NO: 967575 - RNA, 23 nt, Human
ccuggcuggauucucugcauuca

SEQ ID NO: 967576 - RNA, 22 nt, Human
ccucugcucccuggugucugag

SEQ ID NO: 967577 - RNA, 20 nt, Human
cugcuguguuauuguagaac

SEQ ID NO: 967578 - RNA, 22 nt, Human
cccagagcugagucugauauau

SEQ ID NO: 967579 - RNA, 22 nt, Human
gugugccagacaugaugcuaug

SEQ ID NO: 967580 - RNA, 22 nt, Human
uggcugucagcugccuggugcg

SEQ ID NO: 967581 - RNA, 22 nt, Human
aggggccugguuggccucuguu

SEQ ID NO: 967582 - RNA, 22 nt, Human
ucacagacacagggagaagcau

SEQ ID NO: 967583 - RNA, 17 nt, Human
cuggagccuccaacucc

SEQ ID NO: 967584 - RNA, 22 nt, Human
ugggcagaguugugaugaacug

SEQ ID NO: 967585 - RNA, 22 nt, Human
ugucaucuuuuuaaagaagaga

SEQ ID NO: 967586 - RNA, 22 nt, Human
uggcucaggcuugaaaauagau

SEQ ID NO: 967587 - RNA, 22 nt, Human
agccucugcuggcccuggcacu

SEQ ID NO: 967588 - RNA, 22 nt, Human
accucugcucaagaccccuccg

SEQ ID NO: 967589 - RNA, 22 nt, Human
uagcagggaagaugaucagaau

SEQ ID NO: 967590 - RNA, 22 nt, Human
cacugcagcaccaugcagggcu

SEQ ID NO: 967591 - RNA, 22 nt, Human
cccagggucccugcucucugug

SEQ ID NO: 967592 - RNA, 20 nt, Human
agaauucuuacccuuugaug

SEQ ID NO: 967593 - RNA, 22 nt, Human
gagcuguccuaccaggaguccu

SEQ ID NO: 967594 - RNA, 22 nt, Human
acugggccuggauuggcguguc

SEQ ID NO: 967595 - RNA, 21 nt, Human
gggucugaauaucuggugcug

SEQ ID NO: 967596 - RNA, 22 nt, Human
gugugcccuggcuccagcacca

SEQ ID NO: 967597 - RNA, 22 nt, Human
agagccugaggaugucccagcu

SEQ ID NO: 967598 - RNA, 22 nt, Human
gcucaggaaaacagucuaguaa

SEQ ID NO: 967599 - RNA, 22 nt, Human
uugcauuugagaaaguucuccu

SEQ ID NO: 967600 - RNA, 22 nt, Human
ugaaccaggaggcagccagcac

SEQ ID NO: 967601 - RNA, 22 nt, Human
uaccugagcccagugcagcaua

SEQ ID NO: 967602 - RNA, 22 nt, Human
gccaggaggcugcuguguaggc

SEQ ID NO: 967603 - RNA, 22 nt, Human
acaagcaugggcuuugacauca

SEQ ID NO: 967604 - RNA, 22 nt, Human
acaggcugcccgcuccccaccu

SEQ ID NO: 967605 - RNA, 22 nt, Human
cucaaauauguggucagaaagc

SEQ ID NO: 967606 - RNA, 22 nt, Human
gucacacuagggccaaguggag

SEQ ID NO: 967607 - RNA, 22 nt, Human
cuuauuagaaagaaaagacaug

SEQ ID NO: 967608 - RNA, 22 nt, Human
uuacauaacgguaugaaaaaug

SEQ ID NO: 967609 - RNA, 22 nt, Human
caugugucaaaugauguagcug

SEQ ID NO: 967610 - RNA, 22 nt, Human
gagagcugugguuugaccaggc

SEQ ID NO: 967611 - RNA, 22 nt, Human
cuggcuucugggccagggcaga

SEQ ID NO: 967612 - RNA, 22 nt, Human
uucuucaaccaucuacauaaac

SEQ ID NO: 967613 - RNA, 22 nt, Human
uuucaguuuccagcuuugucau

SEQ ID NO: 967614 - RNA, 22 nt, Human
ucuugggaucucuucaccaccu

SEQ ID NO: 967615 - RNA, 22 nt, Human
gggcucuggaaggugcaccaug

SEQ ID NO: 967616 - RNA, 22 nt, Human
gaggacugcagaugggugcauc

SEQ ID NO: 967617 - RNA, 22 nt, Human
gggcugagggguaucucauggg

SEQ ID NO: 967618 - RNA, 20 nt, Human
uaacauaguccagagaacga

SEQ ID NO: 967619 - RNA, 19 nt, Human
cagcugcaccgugaccauc

SEQ ID NO: 967620 - RNA, 22 nt, Human
cccaggaaugagcaggcagggg

SEQ ID NO: 967621 - RNA, 22 nt, Human
ugggagcaagcuacuuagggaa

SEQ ID NO: 967622 - RNA, 22 nt, Human
uuuccucuucuucccaugucau

SEQ ID NO: 967623 - RNA, 22 nt, Human
ucuucagacuccaaauguuuua

SEQ ID NO: 967624 - RNA, 22 nt, Human
acacaguaugaaaagucuaguu

SEQ ID NO: 967625 - RNA, 22 nt, Human
gugcagagaaaugagaagucga

SEQ ID NO: 967626 - RNA, 22 nt, Human
gagcucauucauucauugccug

SEQ ID NO: 967627 - RNA, 22 nt, Human
ccauuugucaccucugcacucc

SEQ ID NO: 967628 - RNA, 22 nt, Human
aacagaaugcaggggaugcugc

SEQ ID NO: 967629 - RNA, 22 nt, Human
aaaugauggaaaugaggcugaa

SEQ ID NO: 967630 - RNA, 22 nt, Human
gcuggcuguaucaccuggccag

SEQ ID NO: 967631 - RNA, 22 nt, Human
uccuggccuugcgucuugggag

SEQ ID NO: 967632 - RNA, 22 nt, Human
caagacaagaucuaagcaugcu

SEQ ID NO: 967633 - RNA, 22 nt, Human
cugcccugagucaugccagaug

SEQ ID NO: 967634 - RNA, 22 nt, Human
aggcccuguuaugagccacugu

SEQ ID NO: 967635 - RNA, 22 nt, Human
aggcccuguaagguguggagau

SEQ ID NO: 967636 - RNA, 21 nt, Human
ggcagccugacccccagagag

SEQ ID NO: 967637 - RNA, 22 nt, Human
uggagaggagcaccauggccau

SEQ ID NO: 967638 - RNA, 22 nt, Human
cacucugacuggcccugcagga

SEQ ID NO: 967639 - RNA, 22 nt, Human
ucuguucauaguaguguauaug

SEQ ID NO: 967640 - RNA, 22 nt, Human
cccagcuccagagccagaaaca

SEQ ID NO: 967641 - RNA, 22 nt, Human
ucuggagauaagacagacagau

SEQ ID NO: 967642 - RNA, 22 nt, Human
uucaagaucuuccaaaggauac

SEQ ID NO: 967643 - RNA, 22 nt, Human
ugucaucugauauuacuuauag

SEQ ID NO: 967644 - RNA, 22 nt, Human
ucacugcaaggaggcuucucaa

SEQ ID NO: 967645 - RNA, 22 nt, Human
ucaucacuguaucauugauaga

SEQ ID NO: 967646 - RNA, 22 nt, Human
gcuuugaagacuuuuccagggu

SEQ ID NO: 967647 - RNA, 22 nt, Human
uggcuagcccuuguggggagag

SEQ ID NO: 967648 - RNA, 22 nt, Human
uggaagagggagcuggguggcc

SEQ ID NO: 967649 - RNA, 22 nt, Human
uauaguaaaauuuucauuuaug

SEQ ID NO: 967650 - RNA, 22 nt, Human
aagauuuccuucaguagagcua

SEQ ID NO: 967651 - RNA, 22 nt, Human
cauggaaggcaaaagacacaga

SEQ ID NO: 967652 - RNA, 22 nt, Human
uuccugaugcacacagucauuu

SEQ ID NO: 967653 - RNA, 22 nt, Human
uuguacaaauaggaaccucuga

SEQ ID NO: 967654 - RNA, 22 nt, Human
cagucucucuuguagugcagcu

SEQ ID NO: 967655 - RNA, 19 nt, Human
cagucccaaauucuuguca

SEQ ID NO: 967656 - RNA, 22 nt, Human
gcagcccaaaaaagagguagau

SEQ ID NO: 967657 - RNA, 22 nt, Human
aacucugcagugacuuauaaag

SEQ ID NO: 967658 - RNA, 17 nt, Human
aggcagcucagaacauc

SEQ ID NO: 967659 - RNA, 22 nt, Human
agagaaaacucauugagguguc

SEQ ID NO: 967660 - RNA, 22 nt, Human
cagggcagagggaaacuccuuu

SEQ ID NO: 967661 - RNA, 22 nt, Human
ugagauuuggaaaauuugauau

SEQ ID NO: 967662 - RNA, 23 nt, Human
aggcacugaaugugucagugagu

SEQ ID NO: 967663 - RNA, 22 nt, Human
gcagagcuguuaauggagcuga

SEQ ID NO: 967664 - RNA, 22 nt, Human
gagggagggacuagcauucucu

SEQ ID NO: 967665 - RNA, 22 nt, Human
gaugauggacaaagcauuggug

SEQ ID NO: 967666 - RNA, 22 nt, Human
ccucaggguggcaucagaucuu

SEQ ID NO: 967667 - RNA, 17 nt, Human
gaggacagggaaguagg

SEQ ID NO: 967668 - RNA, 22 nt, Human
uagggcagcugcaucaggcacu

SEQ ID NO: 967669 - RNA, 22 nt, Human
gucccaggcagagucaggaggg

SEQ ID NO: 967670 - RNA, 22 nt, Human
gggcugggauggcuugaagauu

SEQ ID NO: 967671 - RNA, 22 nt, Human
uggugcaagucucugaggaggg

SEQ ID NO: 967672 - RNA, 16 nt, Human
gagggcagaggcggaa

SEQ ID NO: 967673 - RNA, 21 nt, Human
ucuccuggguccaacccaugc

SEQ ID NO: 967674 - RNA, 22 nt, Human
uguguacaggccuugcuagacu

SEQ ID NO: 967675 - RNA, 22 nt, Human
guucacaagaguuacagacaga

SEQ ID NO: 967676 - RNA, 22 nt, Human
caaggccacugcucagguuucc

SEQ ID NO: 967677 - RNA, 22 nt, Human
agcccuucaaccugccuacucc

SEQ ID NO: 967678 - RNA, 22 nt, Human
uguuuucagucauauagcaggu

SEQ ID NO: 967679 - RNA, 22 nt, Human
guucuucagauuccauuucagu

SEQ ID NO: 967680 - RNA, 22 nt, Human
aggagcugcagauucugccuug

SEQ ID NO: 967681 - RNA, 17 nt, Human
aagagaggcugagcugg

SEQ ID NO: 967682 - RNA, 22 nt, Human
uugacacagaucaauauucaac

SEQ ID NO: 967683 - RNA, 22 nt, Human
ugaaagcagcaccaauaccauu

SEQ ID NO: 967684 - RNA, 22 nt, Human
ucaggaguccugccugcagccu

SEQ ID NO: 967685 - RNA, 22 nt, Human
aucaaaguaggcauauguuuuu

SEQ ID NO: 967686 - RNA, 22 nt, Human
ccaggaaauggcuugcuucuuu

SEQ ID NO: 967687 - RNA, 22 nt, Human
ugccugggccucugaggaaggc

SEQ ID NO: 967688 - RNA, 23 nt, Human
cauggcagcaagagcucauggcc

SEQ ID NO: 967689 - RNA, 22 nt, Human
uugcauuuccuguacuguuuga

SEQ ID NO: 967690 - RNA, 22 nt, Human
auaaaugauucagcaggaaaua

SEQ ID NO: 967691 - RNA, 22 nt, Human
ucagagucauugcaaguagaag

SEQ ID NO: 967692 - RNA, 22 nt, Human
augcagagacagauguggcaug

SEQ ID NO: 967693 - RNA, 22 nt, Human
uuaauuaaauucaugagcauug

SEQ ID NO: 967694 - RNA, 22 nt, Human
gccugaugagcuuccagcugag

SEQ ID NO: 967695 - RNA, 18 nt, Human
uagaauauaggucauucu

SEQ ID NO: 967696 - RNA, 22 nt, Human
gaggcauggccugaggcuagga

SEQ ID NO: 967697 - RNA, 22 nt, Human
uaagauaauaaguaugucuaug

SEQ ID NO: 967698 - RNA, 22 nt, Human
ucuuccaguguagacaucugcc

SEQ ID NO: 967699 - RNA, 22 nt, Human
auaaggcaagcugucaguuugu

SEQ ID NO: 967700 - RNA, 22 nt, Human
accaggagagauuuuauugaga

SEQ ID NO: 967701 - RNA, 22 nt, Human
guggaaugaauagauuugcauu

SEQ ID NO: 967702 - RNA, 22 nt, Human
gucaucuuccuaguguuaacua

SEQ ID NO: 967703 - RNA, 22 nt, Human
ugggagcaguugugaagcucag

SEQ ID NO: 967704 - RNA, 22 nt, Human
ucuucacaccgggcagcaggaa

SEQ ID NO: 967705 - RNA, 22 nt, Human
cuggccaguugccuuccugggu

SEQ ID NO: 967706 - RNA, 22 nt, Human
uuugacauggaauaacucauuu

SEQ ID NO: 967707 - RNA, 22 nt, Human
ccuggccucgugcucacggcuc

SEQ ID NO: 967708 - RNA, 22 nt, Human
cagucauuggcuaaagcucccu

SEQ ID NO: 967709 - RNA, 22 nt, Human
cagagguagaaggcaugcagug

SEQ ID NO: 967710 - RNA, 22 nt, Human
gauuucuuuagguguaauagug

SEQ ID NO: 967711 - RNA, 22 nt, Human
cagggccucauccucagagauu

SEQ ID NO: 967712 - RNA, 22 nt, Human
uggccucugugggagcugagca

SEQ ID NO: 967713 - RNA, 22 nt, Human
ugcugaugcuguucuguuagga

SEQ ID NO: 967714 - RNA, 22 nt, Human
augggaggcagacacuaaguuc

SEQ ID NO: 967715 - RNA, 22 nt, Human
uucuucucucauagauuaaggu

SEQ ID NO: 967716 - RNA, 22 nt, Human
gugcuaggauuacaggcauggg

SEQ ID NO: 967717 - RNA, 22 nt, Human
ccugccaggacauugcuugaag

SEQ ID NO: 967718 - RNA, 22 nt, Human
ugccaggauauaagagugcgau

SEQ ID NO: 967719 - RNA, 22 nt, Human
uauuugaaggcauacauuuuga

SEQ ID NO: 967720 - RNA, 20 nt, Human
uccuggccucccuggggcuc

SEQ ID NO: 967721 - RNA, 22 nt, Human
ucuggcucuuugggugauugua

SEQ ID NO: 967722 - RNA, 22 nt, Human
augaggcauuccacucaaacuc

SEQ ID NO: 967723 - RNA, 22 nt, Human
uuucacaauuuuaaggagcaaa

SEQ ID NO: 967724 - RNA, 22 nt, Human
aaaugcauuuuuaauuagaccc

SEQ ID NO: 967725 - RNA, 22 nt, Human
uaaaauagcaugugcagugaaa

SEQ ID NO: 967726 - RNA, 22 nt, Human
ugcuaucucuauauccauuuau

SEQ ID NO: 967727 - RNA, 23 nt, Human
agaagcagcuucuggaguaucgg

SEQ ID NO: 967728 - RNA, 22 nt, Human
aaggcacucauucaaggagaua

SEQ ID NO: 967729 - RNA, 22 nt, Human
cacaggagagcugggaggugcc

SEQ ID NO: 967730 - RNA, 22 nt, Human
aggaagcuuagugaaaggacca

SEQ ID NO: 967731 - RNA, 22 nt, Human
uugcugugaaaccaugggaagu

SEQ ID NO: 967732 - RNA, 22 nt, Human
gcagggaagacccggagcagcg

SEQ ID NO: 967733 - RNA, 22 nt, Human
ccagacaggaacacacaucucc

SEQ ID NO: 967734 - RNA, 22 nt, Human
ucugagcauugaauuuucuucc

SEQ ID NO: 967735 - RNA, 22 nt, Human
auacuguuuugugacuuaucuu

SEQ ID NO: 967736 - RNA, 22 nt, Human
guggugcaggccagcaggggcg

SEQ ID NO: 967737 - RNA, 22 nt, Human
agccacaggaaacagagacagc

SEQ ID NO: 967738 - RNA, 22 nt, Human
cagcuuugcccuuugcccaauc

SEQ ID NO: 967739 - RNA, 22 nt, Human
ugucccagcagcuggguucucu

SEQ ID NO: 967740 - RNA, 23 nt, Human
auagucauguaaaauauuugaag

SEQ ID NO: 967741 - RNA, 22 nt, Human
uucauucaucucuaaaaugccu

SEQ ID NO: 967742 - RNA, 22 nt, Human
gcugcucucagagcucaugcug

SEQ ID NO: 967743 - RNA, 22 nt, Human
uccaggagaaaacugacggugg

SEQ ID NO: 967744 - RNA, 22 nt, Human
gagacagaguuucacucuuguu

SEQ ID NO: 967745 - RNA, 22 nt, Human
aaggcagcaacuaauggaucuc

SEQ ID NO: 967746 - RNA, 21 nt, Human
accagcaggagaucagaagga

SEQ ID NO: 967747 - RNA, 22 nt, Human
aaugggagguaguaugggaggu

SEQ ID NO: 967748 - RNA, 22 nt, Human
cauucauuagaauagauaugua

SEQ ID NO: 967749 - RNA, 22 nt, Human
agaggacaaaaugagaagugcu

SEQ ID NO: 967750 - RNA, 22 nt, Human
gagaggugaauguggaugccac

SEQ ID NO: 967751 - RNA, 22 nt, Human
aggcagcuagagagugaaacug

SEQ ID NO: 967752 - RNA, 22 nt, Human
accuggccauccagcuggcauc

SEQ ID NO: 967753 - RNA, 22 nt, Human
gcccaggauggagaauaguggu

SEQ ID NO: 967754 - RNA, 22 nt, Human
cucaggauuaaggaaucuaaau

SEQ ID NO: 967755 - RNA, 22 nt, Human
ugguuucccauuaucugcagga

SEQ ID NO: 967756 - RNA, 22 nt, Human
acaaagguggaccauguggcuu

SEQ ID NO: 967757 - RNA, 22 nt, Human
ccaaggagcaaguuuacaccug

SEQ ID NO: 967758 - RNA, 23 nt, Human
agaggcaggaguggcuugcccgg

SEQ ID NO: 967759 - RNA, 22 nt, Human
gugaagauaaggaugcugcagu

SEQ ID NO: 967760 - RNA, 22 nt, Human
ucucaagagggaggcaaucaug

SEQ ID NO: 967761 - RNA, 22 nt, Human
gaucauuuugaugcccuuuuag

SEQ ID NO: 967762 - RNA, 19 nt, Human
ugcaagcuuuuucuuguua

SEQ ID NO: 967763 - RNA, 22 nt, Human
agaaugcaguuugaaauaaggu

SEQ ID NO: 967764 - RNA, 22 nt, Human
uagcagcuuccagagagggcag

SEQ ID NO: 967765 - RNA, 21 nt, Human
uagaaaucagcuggugccucu

SEQ ID NO: 967766 - RNA, 22 nt, Human
cuguuacacggaccuucaaauc

SEQ ID NO: 967767 - RNA, 22 nt, Human
agagaacaaauuaaaggugguu

SEQ ID NO: 967768 - RNA, 19 nt, Human
uuuggcacucugaaguguu

SEQ ID NO: 967769 - RNA, 22 nt, Human
uccagggacagcgcuggagcua

SEQ ID NO: 967770 - RNA, 22 nt, Human
agagggcagucucagauuggga

SEQ ID NO: 967771 - RNA, 22 nt, Human
agcagccacacgccuccuucuc

SEQ ID NO: 967772 - RNA, 22 nt, Human
guccaggaaucaaaagauggaa

SEQ ID NO: 967773 - RNA, 22 nt, Human
uuucauaaugucacagucaaaa

SEQ ID NO: 967774 - RNA, 22 nt, Human
acaaagucuuuuacaacaguca

SEQ ID NO: 967775 - RNA, 22 nt, Human
aaggcuaugaucuuuuucauga

SEQ ID NO: 967776 - RNA, 22 nt, Human
uacccaggggcugagcagaggu

SEQ ID NO: 967777 - RNA, 22 nt, Human
uguuucuagagaaaauauuuac

SEQ ID NO: 967778 - RNA, 22 nt, Human
ucucaggaagauuagggcuaag

SEQ ID NO: 967779 - RNA, 22 nt, Human
ggagcugcuccuucagccaagu

SEQ ID NO: 967780 - RNA, 22 nt, Human
uaugcuuuacuuuucauuguga

SEQ ID NO: 967781 - RNA, 22 nt, Human
gagccuguguuuccuguagcca

SEQ ID NO: 967782 - RNA, 22 nt, Human
cagagcugacccaaggauugaa

SEQ ID NO: 967783 - RNA, 22 nt, Human
aagcagcacaguaauauuggug

SEQ ID NO: 967784 - RNA, 22 nt, Human
gagggcagagucuaaugaugca

SEQ ID NO: 967785 - RNA, 22 nt, Human
cagagggagcccuccaggagca

SEQ ID NO: 967786 - RNA, 22 nt, Human
cugaaggauuagagagcacuua

SEQ ID NO: 967787 - RNA, 22 nt, Human
ugucuuaauuuggaugauguuu

SEQ ID NO: 967788 - RNA, 22 nt, Human
cugaugcuauaagccacagugg

SEQ ID NO: 967789 - RNA, 22 nt, Human
uggcagcagacaucugaggucu

SEQ ID NO: 967790 - RNA, 17 nt, Human
aagacagaagccaugag

SEQ ID NO: 967791 - RNA, 22 nt, Human
ucuggcuccacucugugcaugc

SEQ ID NO: 967792 - RNA, 22 nt, Human
ucuccuggagcaggaagguggg

SEQ ID NO: 967793 - RNA, 22 nt, Human
aggucauuuuugccuucuauuu

SEQ ID NO: 967794 - RNA, 22 nt, Human
aggcugggaaauguauuccagc

SEQ ID NO: 967795 - RNA, 22 nt, Human
ugaagccagcuuuggaagacac

SEQ ID NO: 967796 - RNA, 22 nt, Human
gugucaugggguuuguuauaca

SEQ ID NO: 967797 - RNA, 22 nt, Human
ucuuuuuauauugacaaaaggu

SEQ ID NO: 967798 - RNA, 22 nt, Human
ugcugugagguugagaaggaag

SEQ ID NO: 967799 - RNA, 22 nt, Human
uucacaggaauguaggggucuu

SEQ ID NO: 967800 - RNA, 22 nt, Human
uuaugcuaaaugaaucaaguca

SEQ ID NO: 967801 - RNA, 22 nt, Human
cuguugcucugaacaggucuug

SEQ ID NO: 967802 - RNA, 18 nt, Human
ugaacagaugaguugaag

SEQ ID NO: 967803 - RNA, 22 nt, Human
gagcagugaagacagaaguaca

SEQ ID NO: 967804 - RNA, 23 nt, Human
agaaaagcuuggacacauggccu

SEQ ID NO: 967805 - RNA, 23 nt, Human
ucucuuucaagagcuuaaugugc

SEQ ID NO: 967806 - RNA, 22 nt, Human
aaauuggauuuuaaacuguugg

SEQ ID NO: 967807 - RNA, 22 nt, Human
uugaagcagcucaggaggcuua

SEQ ID NO: 967808 - RNA, 22 nt, Human
ucccagacaaucauuggccacc

SEQ ID NO: 967809 - RNA, 22 nt, Human
cuaaaugcccuacaaugacugg

SEQ ID NO: 967810 - RNA, 22 nt, Human
acagacauucagcuaagucuau

SEQ ID NO: 967811 - RNA, 22 nt, Human
cuugaaagucacaugcagcccu

SEQ ID NO: 967812 - RNA, 23 nt, Human
aggaggccugaaacugaggcuga

SEQ ID NO: 967813 - RNA, 22 nt, Human
caggggccggcuguccgugccc

SEQ ID NO: 967814 - RNA, 22 nt, Human
caggagaggcuguacguuucuc

SEQ ID NO: 967815 - RNA, 22 nt, Human
agcuuccuguugagagagggag

SEQ ID NO: 967816 - RNA, 22 nt, Human
caggcagauuugcugcccucca

SEQ ID NO: 967817 - RNA, 22 nt, Human
cucacuggcaagacuacaggug

SEQ ID NO: 967818 - RNA, 22 nt, Human
ccaggaagccucagaugcugag

SEQ ID NO: 967819 - RNA, 20 nt, Human
aagagaagaagucuuugaaa

SEQ ID NO: 967820 - RNA, 22 nt, Human
gagacagugguugcagaagcuc

SEQ ID NO: 967821 - RNA, 23 nt, Human
aggcccaacucugugagggcugc

SEQ ID NO: 967822 - RNA, 22 nt, Human
gccaccagggggcuccagugag

SEQ ID NO: 967823 - RNA, 22 nt, Human
cagacuuucaaggagugaaggc

SEQ ID NO: 967824 - RNA, 19 nt, Human
ugcagccacgugagagacu

SEQ ID NO: 967825 - RNA, 22 nt, Human
agaauguagucuuggagauuua

SEQ ID NO: 967826 - RNA, 22 nt, Human
aggucagcaggccaggggcgaa

SEQ ID NO: 967827 - RNA, 22 nt, Human
cagagccugcucacgucucugu

SEQ ID NO: 967828 - RNA, 22 nt, Human
auuggcaggaaccgaggagggg

SEQ ID NO: 967829 - RNA, 22 nt, Human
gcuggccugggcagaggcuaug

SEQ ID NO: 967830 - RNA, 22 nt, Human
ugucaccagcugcuccucagga

SEQ ID NO: 967831 - RNA, 22 nt, Human
gauuuccucacuaacauccauc

SEQ ID NO: 967832 - RNA, 22 nt, Human
cacaggguuguucugaggauuc

SEQ ID NO: 967833 - RNA, 23 nt, Human
ugcagagggacugaagccagcuu

SEQ ID NO: 967834 - RNA, 22 nt, Human
aggagccccucuucaguccugg

SEQ ID NO: 967835 - RNA, 22 nt, Human
agaaaauauucauugagaggcu

SEQ ID NO: 967836 - RNA, 22 nt, Human
ucagcuuggacagcuugguuga

SEQ ID NO: 967837 - RNA, 22 nt, Human
gcacugugcuagaagccagggg

SEQ ID NO: 967838 - RNA, 22 nt, Human
cauuaagauuuuuuucuacugg

SEQ ID NO: 967839 - RNA, 22 nt, Human
auuugcuuuaagguauaaaagg

SEQ ID NO: 967840 - RNA, 23 nt, Human
auuucuaggggauuuucuggugc

SEQ ID NO: 967841 - RNA, 22 nt, Human
uugaaaggugcugugugcugau

SEQ ID NO: 967842 - RNA, 19 nt, Human
gcucagagggcccugugcu

SEQ ID NO: 967843 - RNA, 19 nt, Human
ucucuggggacacuuucac

SEQ ID NO: 967844 - RNA, 23 nt, Human
cucugcaggagagugggcagggc

SEQ ID NO: 967845 - RNA, 22 nt, Human
ggcuucugaaaucucugugcgu

SEQ ID NO: 967846 - RNA, 22 nt, Human
uugugaaauguuucaaaauagu

SEQ ID NO: 967847 - RNA, 22 nt, Human
agucucugccagcuuguccucu

SEQ ID NO: 967848 - RNA, 19 nt, Human
acagagcucucugcuucug

SEQ ID NO: 967849 - RNA, 22 nt, Human
acugugcaugaaccgaaacaaa

SEQ ID NO: 967850 - RNA, 17 nt, Human
aauagcugcucagagag

SEQ ID NO: 967851 - RNA, 22 nt, Human
agaggaaguaaucaggaccugc

SEQ ID NO: 967852 - RNA, 22 nt, Human
ugccuuggugcuucuucaugug

SEQ ID NO: 967853 - RNA, 22 nt, Human
ugaagacagaccaaggagaaug

SEQ ID NO: 967854 - RNA, 22 nt, Human
auaguacacauccuacaauguu

SEQ ID NO: 967855 - RNA, 22 nt, Human
agcugucuaccugcagaguccu

SEQ ID NO: 967856 - RNA, 22 nt, Human
uauuucugucagccagauaugg

SEQ ID NO: 967857 - RNA, 22 nt, Human
uaucuguuccaggcacucagcu

SEQ ID NO: 967858 - RNA, 22 nt, Human
ucugagaggcaucugcacuucu

SEQ ID NO: 967859 - RNA, 22 nt, Human
ucccagagucagagguggggcc

SEQ ID NO: 967860 - RNA, 22 nt, Human
gucaggggccaugggccaagga

SEQ ID NO: 967861 - RNA, 19 nt, Human
ucuuucauuucuagcucug

SEQ ID NO: 967862 - RNA, 22 nt, Human
caggaucccuggccuccgccca

SEQ ID NO: 967863 - RNA, 22 nt, Human
gugcuuccccaagccacagccu

SEQ ID NO: 967864 - RNA, 22 nt, Human
cacugaguucccugacauuuca

SEQ ID NO: 967865 - RNA, 22 nt, Human
cucuuccucucaugcggucaua

SEQ ID NO: 967866 - RNA, 22 nt, Human
gcaguggcaccgcuggcucugg

SEQ ID NO: 967867 - RNA, 22 nt, Human
ugagccagcaggccuccagugg

SEQ ID NO: 967868 - RNA, 22 nt, Human
ugcagccaauucauucauucuu

SEQ ID NO: 967869 - RNA, 23 nt, Human
ucacaggggccagcgcucugugg

SEQ ID NO: 967870 - RNA, 22 nt, Human
uuaaguaagaccuuaugucuug

SEQ ID NO: 967871 - RNA, 21 nt, Human
ugggggagaauugguugcuuu

SEQ ID NO: 967872 - RNA, 22 nt, Human
cuccuuccccuacucagcaucc

SEQ ID NO: 967873 - RNA, 22 nt, Human
acauaugugcuuauauccauga

SEQ ID NO: 967874 - RNA, 19 nt, Human
ucaaggcucccugagggau

SEQ ID NO: 967875 - RNA, 22 nt, Human
ccagaggcauguucaaagcaau

SEQ ID NO: 967876 - RNA, 22 nt, Human
cucuucuuggcccccaugaggg

SEQ ID NO: 967877 - RNA, 22 nt, Human
gcacagccacugagugagaacc

SEQ ID NO: 967878 - RNA, 22 nt, Human
cuugugcaauugacauugaauc

SEQ ID NO: 967879 - RNA, 22 nt, Human
agcagcaugaugacagagucuc

SEQ ID NO: 967880 - RNA, 22 nt, Human
uccugagcuucaaaacacuuug

SEQ ID NO: 967881 - RNA, 22 nt, Human
caggguacagaguuuucuaaac

SEQ ID NO: 967882 - RNA, 22 nt, Human
cgugucaucugagccuugggcg

SEQ ID NO: 967883 - RNA, 23 nt, Human
acuuuauugaccccaggucaguu

SEQ ID NO: 967884 - RNA, 22 nt, Human
uucaaaacagcuagauauugga

SEQ ID NO: 967885 - RNA, 22 nt, Human
uuguuucuucauuuagaagcuu

SEQ ID NO: 967886 - RNA, 22 nt, Human
agcaggaaguagucuguaagca

SEQ ID NO: 967887 - RNA, 22 nt, Human
ugccacccagccaggaguggga

SEQ ID NO: 967888 - RNA, 22 nt, Human
gcucccaggaagagaagggcca

SEQ ID NO: 967889 - RNA, 22 nt, Human
gccuggaguucagccaaguccc

SEQ ID NO: 967890 - RNA, 22 nt, Human
guguaucaaagcacagacuuca

SEQ ID NO: 967891 - RNA, 22 nt, Human
gcagcuggugcaaaugucacuc

SEQ ID NO: 967892 - RNA, 22 nt, Human
cuggagcagguuuaggaguccc

SEQ ID NO: 967893 - RNA, 22 nt, Human
uuugacaguaauaaagcacaag

SEQ ID NO: 967894 - RNA, 22 nt, Human
gcagcugaaagggaucucuaca

SEQ ID NO: 967895 - RNA, 22 nt, Human
gcugccugccuugccuggagga

SEQ ID NO: 967896 - RNA, 22 nt, Human
agaugcugcuccacaggccagg

SEQ ID NO: 967897 - RNA, 22 nt, Human
agagaagagcaaugauaaauuu

SEQ ID NO: 967898 - RNA, 22 nt, Human
ggucccagguugacagggagac

SEQ ID NO: 967899 - RNA, 22 nt, Human
aaggcaguagguguuucaaacu

SEQ ID NO: 967900 - RNA, 22 nt, Human
cugccagcaaugugaccaugcu

SEQ ID NO: 967901 - RNA, 22 nt, Human
aaauaacuuaugaucgucuggc

SEQ ID NO: 967902 - RNA, 22 nt, Human
aaguguagauuauggagugucu

SEQ ID NO: 967903 - RNA, 22 nt, Human
cauuuuaagaugaccugguuuc

SEQ ID NO: 967904 - RNA, 22 nt, Human
augcccgauaccuaguuaacuc

SEQ ID NO: 967905 - RNA, 23 nt, Human
uguagcaucucuuauuucucagc

SEQ ID NO: 967906 - RNA, 22 nt, Human
ggcugcugguggaaugguaggc

SEQ ID NO: 967907 - RNA, 22 nt, Human
aggggacacggcuucuccaggg

SEQ ID NO: 967908 - RNA, 22 nt, Human
agggcagagaucugagugggca

SEQ ID NO: 967909 - RNA, 22 nt, Human
ucccagaguucaaugggaaggu

SEQ ID NO: 967910 - RNA, 22 nt, Human
auacuaaaguauagaacuuagu

SEQ ID NO: 967911 - RNA, 22 nt, Human
aacuagucagugauucucagaa

SEQ ID NO: 967912 - RNA, 22 nt, Human
acugaguguaggacuuugaguu

SEQ ID NO: 967913 - RNA, 22 nt, Human
uaaauuauggcuggcagagcag

SEQ ID NO: 967914 - RNA, 18 nt, Human
gcugccugcauuccucac

SEQ ID NO: 967915 - RNA, 22 nt, Human
aaugauggucauggcaacuuuu

SEQ ID NO: 967916 - RNA, 22 nt, Human
ccucuucugagugagacucccu

SEQ ID NO: 967917 - RNA, 22 nt, Human
guguguuuagcauuagcagggg

SEQ ID NO: 967918 - RNA, 23 nt, Human
gggagaauaugaggaugauggug

SEQ ID NO: 967919 - RNA, 20 nt, Human
aggcugccaggucucacauc

SEQ ID NO: 967920 - RNA, 22 nt, Human
cauuaaauuccuuguucucaaa

SEQ ID NO: 967921 - RNA, 18 nt, Human
gcccagaggucugggccc

SEQ ID NO: 967922 - RNA, 22 nt, Human
ccaggcugcagucaaggggcau

SEQ ID NO: 967923 - RNA, 22 nt, Human
cagagagggcggcccuggcuuc

SEQ ID NO: 967924 - RNA, 22 nt, Human
uggugugggcguggcaggcaag

SEQ ID NO: 967925 - RNA, 22 nt, Human
agcucccagggcugggcaaguu

SEQ ID NO: 967926 - RNA, 21 nt, Human
aaaaugugagcgugaugcuua

SEQ ID NO: 967927 - RNA, 22 nt, Human
agauaugacuagaagcucauuu

SEQ ID NO: 967928 - RNA, 22 nt, Human
aaaggcuaugagauagaagaua

SEQ ID NO: 967929 - RNA, 22 nt, Human
gugugucuugaccaggaucgga

SEQ ID NO: 967930 - RNA, 22 nt, Human
uaggagaggugaauggcacacu

SEQ ID NO: 967931 - RNA, 22 nt, Human
cccaaggaagacgcuugugaua

SEQ ID NO: 967932 - RNA, 20 nt, Human
aagaaacuugaaaguacaag

SEQ ID NO: 967933 - RNA, 22 nt, Human
cccaggaagagugaguggcauu

SEQ ID NO: 967934 - RNA, 22 nt, Human
uggagcaggugggaugucguga

SEQ ID NO: 967935 - RNA, 18 nt, Human
uggcagccagcugcuccu

SEQ ID NO: 967936 - RNA, 23 nt, Human
acugucugauauguuuuccauca

SEQ ID NO: 967937 - RNA, 20 nt, Human
caggaggcaaggucaagguc

SEQ ID NO: 967938 - RNA, 22 nt, Human
cugucuguucagauucauuacu

SEQ ID NO: 967939 - RNA, 22 nt, Human
cccugaggggaguggugaggug

SEQ ID NO: 967940 - RNA, 22 nt, Human
aguguguguuugggcgguuuau

SEQ ID NO: 967941 - RNA, 22 nt, Human
uuugcauuucucguaaggaaac

SEQ ID NO: 967942 - RNA, 22 nt, Human
ccucacagggccaggccccuca

SEQ ID NO: 967943 - RNA, 22 nt, Human
uucugagacaauugagagucua

SEQ ID NO: 967944 - RNA, 22 nt, Human
ggaaggaggaugcucuggccuu

SEQ ID NO: 967945 - RNA, 22 nt, Human
guguauaacuaucuaucuagua

SEQ ID NO: 967946 - RNA, 22 nt, Human
ugggaggagcccucugggaagg

SEQ ID NO: 967947 - RNA, 22 nt, Human
ugccugaugcaggaguaucaga

SEQ ID NO: 967948 - RNA, 22 nt, Human
agccacagagagggagcugcaa

SEQ ID NO: 967949 - RNA, 22 nt, Human
cugcugagcccuggcacaggug

SEQ ID NO: 967950 - RNA, 22 nt, Human
guauuaggagguggagccuuug

SEQ ID NO: 967951 - RNA, 22 nt, Human
acaaaaaccguggauucagcau

SEQ ID NO: 967952 - RNA, 22 nt, Human
uggcagcacuagguacugagcu

SEQ ID NO: 967953 - RNA, 22 nt, Human
cagaggcagugggguugcuccu

SEQ ID NO: 967954 - RNA, 22 nt, Human
acuuggcaaguaucuauaaagu

SEQ ID NO: 967955 - RNA, 22 nt, Human
uuucuuaaauauuugcaggaca

SEQ ID NO: 967956 - RNA, 22 nt, Human
agaccaagaaaggaugaggauc

SEQ ID NO: 967957 - RNA, 22 nt, Human
acuuagaacaggcagaauucca

SEQ ID NO: 967958 - RNA, 22 nt, Human
agggggcaucagguccuggcuc

SEQ ID NO: 967959 - RNA, 20 nt, Human
cccagugaagcauggaagag

SEQ ID NO: 967960 - RNA, 22 nt, Human
aagcagccucauuugugguaag

SEQ ID NO: 967961 - RNA, 22 nt, Human
aaaugcacucugcuucugugac

SEQ ID NO: 967962 - RNA, 22 nt, Human
cagaggaggccaccgcauaggc

SEQ ID NO: 967963 - RNA, 22 nt, Human
gggcccuggauuuaagcaugga

SEQ ID NO: 967964 - RNA, 22 nt, Human
gccauuuagggaggcaagguga

SEQ ID NO: 967965 - RNA, 22 nt, Human
ugucaguguauacauacaguau

SEQ ID NO: 967966 - RNA, 22 nt, Human
auuuauuaccucggaguuucug

SEQ ID NO: 967967 - RNA, 22 nt, Human
uggcucuguugugcugagccag

SEQ ID NO: 967968 - RNA, 22 nt, Human
cucucugcaaguuuugaaauag

SEQ ID NO: 967969 - RNA, 22 nt, Human
ccugggugacccgugagcgucc

SEQ ID NO: 967970 - RNA, 21 nt, Human
ggugggcacaggagagcagag

SEQ ID NO: 967971 - RNA, 22 nt, Human
cagcuugcaguacuuguuuuug

SEQ ID NO: 967972 - RNA, 22 nt, Human
uucaggauggcggauguugggg

SEQ ID NO: 967973 - RNA, 22 nt, Human
cucucuggcuuggcacggagau

SEQ ID NO: 967974 - RNA, 22 nt, Human
agcagcaggcuguguggacuga

SEQ ID NO: 967975 - RNA, 22 nt, Human
cuucucaaaguugugaaucagg

SEQ ID NO: 967976 - RNA, 22 nt, Human
agccuggccugggcaggcacau

SEQ ID NO: 967977 - RNA, 22 nt, Human
gcagccuguuguaccagccugu

SEQ ID NO: 967978 - RNA, 22 nt, Human
gaggaccacagaugagccugca

SEQ ID NO: 967979 - RNA, 23 nt, Human
cagaaaguuugagaagauacauc

SEQ ID NO: 967980 - RNA, 22 nt, Human
agagagccugaguggcagcuau

SEQ ID NO: 967981 - RNA, 22 nt, Human
auccccagaaaauaggugccua

SEQ ID NO: 967982 - RNA, 22 nt, Human
cuacauuucccagcugccuucc

SEQ ID NO: 967983 - RNA, 22 nt, Human
ggagcuguuggcagcuaucuug

SEQ ID NO: 967984 - RNA, 22 nt, Human
cccaggagguuggggcuacagu

SEQ ID NO: 967985 - RNA, 22 nt, Human
augggcagcagcugccauucau

SEQ ID NO: 967986 - RNA, 22 nt, Human
cagcugaauucuucagacucca

SEQ ID NO: 967987 - RNA, 22 nt, Human
uggccugacugucaggcuguau

SEQ ID NO: 967988 - RNA, 20 nt, Human
uccagcugucuuucagagac

SEQ ID NO: 967989 - RNA, 22 nt, Human
gagcuuccacucuagaaggagu

SEQ ID NO: 967990 - RNA, 22 nt, Human
gcuggagguagggagguccugu

SEQ ID NO: 967991 - RNA, 22 nt, Human
ggcccugggaugcucagcagug

SEQ ID NO: 967992 - RNA, 22 nt, Human
ggaggcucccacgcagcucaca

SEQ ID NO: 967993 - RNA, 22 nt, Human
cuugaaagauuuggccucugug

SEQ ID NO: 967994 - RNA, 22 nt, Human
agugggcagugcgcucggaugc

SEQ ID NO: 967995 - RNA, 22 nt, Human
aggcaggcaaccaccugggaag

SEQ ID NO: 967996 - RNA, 22 nt, Human
acagcuugcaauggcuuucaac

SEQ ID NO: 967997 - RNA, 22 nt, Human
caggcuggagugcaguugugca

SEQ ID NO: 967998 - RNA, 22 nt, Human
cugaggccccucuugugagcau

SEQ ID NO: 967999 - RNA, 22 nt, Human
ugccaggcccugugcuggaugc

SEQ ID NO: 968000 - RNA, 22 nt, Human
ccagccaggcauugcaaacuga

SEQ ID NO: 968001 - RNA, 22 nt, Human
uucucugaaggccaugcucacu

SEQ ID NO: 968002 - RNA, 22 nt, Human
ggcuguggucugggugcucccc

SEQ ID NO: 968003 - RNA, 22 nt, Human
ucccucagggugcaguugcuuu

SEQ ID NO: 968004 - RNA, 22 nt, Human
cucccaagggguaagggagcug

SEQ ID NO: 968005 - RNA, 22 nt, Human
cagcaucuuucucuucuggagu

SEQ ID NO: 968006 - RNA, 22 nt, Human
ucauuuguggaagugauugugg

SEQ ID NO: 968007 - RNA, 22 nt, Human
aucaaaguggaaguuuacuagg

SEQ ID NO: 968008 - RNA, 22 nt, Human
uaacagaaacagauaaguguaa

SEQ ID NO: 968009 - RNA, 22 nt, Human
ggucugaguagagggcuggcga

SEQ ID NO: 968010 - RNA, 22 nt, Human
uggcucuggauuaaucuaggaa

SEQ ID NO: 968011 - RNA, 22 nt, Human
cugggcugugguguggcccaaa

SEQ ID NO: 968012 - RNA, 22 nt, Human
acugcccucccaucuauugcaa

SEQ ID NO: 968013 - RNA, 22 nt, Human
uuaaguccuugguaauuuucuu

SEQ ID NO: 968014 - RNA, 22 nt, Human
aguaaaaauugaggugcaaaau

SEQ ID NO: 968015 - RNA, 22 nt, Human
uggcuucuugggaugggucauu

SEQ ID NO: 968016 - RNA, 22 nt, Human
ucugccugcaguguggcagggc

SEQ ID NO: 968017 - RNA, 22 nt, Human
uuuuagauaguuuaacugcacu

SEQ ID NO: 968018 - RNA, 22 nt, Human
uggccugggucacaccaggguc

SEQ ID NO: 968019 - RNA, 22 nt, Human
acucccagguugccuggcaggc

SEQ ID NO: 968020 - RNA, 22 nt, Human
ggccugcugggccccacagucc

SEQ ID NO: 968021 - RNA, 22 nt, Human
uggcucuggcgugaagcccaga

SEQ ID NO: 968022 - RNA, 22 nt, Human
cccagcugcaccucuauggccu

SEQ ID NO: 968023 - RNA, 22 nt, Human
cagcaggcccaggugcugguga

SEQ ID NO: 968024 - RNA, 22 nt, Human
cacugccaccugcaugcccuga

SEQ ID NO: 968025 - RNA, 22 nt, Human
aagaauucacugguagagucaa

SEQ ID NO: 968026 - RNA, 22 nt, Human
gccaggcugaggcucuggaaga

SEQ ID NO: 968027 - RNA, 22 nt, Human
gaaaucugaacaacagcuguca

SEQ ID NO: 968028 - RNA, 22 nt, Human
uguggaaaauuggaacguuccu

SEQ ID NO: 968029 - RNA, 20 nt, Human
uccugagauuuaagggguuc

SEQ ID NO: 968030 - RNA, 22 nt, Human
aggaggggcaaugauagucugg

SEQ ID NO: 968031 - RNA, 22 nt, Human
accaucagagcacaguccgugc

SEQ ID NO: 968032 - RNA, 22 nt, Human
ucacuggggccuuuggucagga

SEQ ID NO: 968033 - RNA, 22 nt, Human
aaugugguuaacccauuuaaga

SEQ ID NO: 968034 - RNA, 22 nt, Human
cccacagguccccaugaacucg

SEQ ID NO: 968035 - RNA, 22 nt, Human
accugccucagugcagcuggau

SEQ ID NO: 968036 - RNA, 22 nt, Human
guguggcuaccucagaggagca

SEQ ID NO: 968037 - RNA, 22 nt, Human
gcagagccugggggucugcgga

SEQ ID NO: 968038 - RNA, 21 nt, Human
gcaggaugcaucuuggugucu

SEQ ID NO: 968039 - RNA, 22 nt, Human
ucuggcuccguguccgcuccca

SEQ ID NO: 968040 - RNA, 22 nt, Human
ccacaggcugcugcaggucccg

SEQ ID NO: 968041 - RNA, 22 nt, Human
caucacugacgcugagauucca

SEQ ID NO: 968042 - RNA, 22 nt, Human
ccuggagcacauggcaggaggc

SEQ ID NO: 968043 - RNA, 21 nt, Human
cccacggaaugaugaggcacu

SEQ ID NO: 968044 - RNA, 22 nt, Human
uugcuucauuuuaaauaaagac

SEQ ID NO: 968045 - RNA, 22 nt, Human
agccaggauuggcugagccuua

SEQ ID NO: 968046 - RNA, 22 nt, Human
uuucacauacaguguauaguag

SEQ ID NO: 968047 - RNA, 22 nt, Human
uguuuuaugagccauauaaccu

SEQ ID NO: 968048 - RNA, 22 nt, Human
ccccagcugcauacuugccaag

SEQ ID NO: 968049 - RNA, 22 nt, Human
guucuucaguaaaauuaaaugu

SEQ ID NO: 968050 - RNA, 22 nt, Human
guucacauccuugugaggauuu

SEQ ID NO: 968051 - RNA, 22 nt, Human
ucugacauuagauuaauuggaa

SEQ ID NO: 968052 - RNA, 22 nt, Human
cauauuuauagaucuggcauuu

SEQ ID NO: 968053 - RNA, 22 nt, Human
uaauguguccugaaagcuucug

SEQ ID NO: 968054 - RNA, 22 nt, Human
agaaaugugaauuucauuuccu

SEQ ID NO: 968055 - RNA, 22 nt, Human
gccuggagacaaggacaaaggg

SEQ ID NO: 968056 - RNA, 22 nt, Human
ugaaggaaugagggaguggguc

SEQ ID NO: 968057 - RNA, 22 nt, Human
ggcucaggggccaggccugucc

SEQ ID NO: 968058 - RNA, 22 nt, Human
gccuugggaaagugggaggaga

SEQ ID NO: 968059 - RNA, 22 nt, Human
ugcucuagagcuauuggcuucc

SEQ ID NO: 968060 - RNA, 22 nt, Human
ucccagaggacuguuggugcua

SEQ ID NO: 968061 - RNA, 22 nt, Human
uaaauguguguagccaucugug

SEQ ID NO: 968062 - RNA, 23 nt, Human
uagagcagggaaaucugucagag

SEQ ID NO: 968063 - RNA, 22 nt, Human
gggcauguagugugcauagaga

SEQ ID NO: 968064 - RNA, 22 nt, Human
aaaucuaggcucauccuggucc

SEQ ID NO: 968065 - RNA, 22 nt, Human
cagggccaguucucgcagcagu

SEQ ID NO: 968066 - RNA, 22 nt, Human
ugagccuggguggucgaggcug

SEQ ID NO: 968067 - RNA, 22 nt, Human
agaugggcgcccuggacugagg

SEQ ID NO: 968068 - RNA, 22 nt, Human
ugcauauugugaaaauguagau

SEQ ID NO: 968069 - RNA, 21 nt, Human
agcuggugucagagcucuggg

SEQ ID NO: 968070 - RNA, 22 nt, Human
gcacacagccagcugagggcua

SEQ ID NO: 968071 - RNA, 22 nt, Human
aaacagcuaauggccaggaaua

SEQ ID NO: 968072 - RNA, 22 nt, Human
ugccugaguuuaacccucagag

SEQ ID NO: 968073 - RNA, 22 nt, Human
uauuucugggaguucagaaauu

SEQ ID NO: 968074 - RNA, 22 nt, Human
cagcaggcucugaguggcugcc

SEQ ID NO: 968075 - RNA, 22 nt, Human
gaggugagaagggggucagaug

SEQ ID NO: 968076 - RNA, 22 nt, Human
uuugggaacucuaucauggaaa

SEQ ID NO: 968077 - RNA, 22 nt, Human
ccaaaaagcucagagauauguu

SEQ ID NO: 968078 - RNA, 22 nt, Human
cugggugguuuugaugugaauu

SEQ ID NO: 968079 - RNA, 22 nt, Human
gaggccugucgcuaggccucug

SEQ ID NO: 968080 - RNA, 22 nt, Human
ucuuggccagguguggugccuc

SEQ ID NO: 968081 - RNA, 22 nt, Human
ugagguaggugguaagagauac

SEQ ID NO: 968082 - RNA, 22 nt, Human
uaacauuagguagacauaagcc

SEQ ID NO: 968083 - RNA, 22 nt, Human
agguacagaugaaagucuaguu

SEQ ID NO: 968084 - RNA, 22 nt, Human
cuggagaggccccaagauauuu

SEQ ID NO: 968085 - RNA, 22 nt, Human
agugaccauuuucagcuagagg

SEQ ID NO: 968086 - RNA, 22 nt, Human
agguggcuccucccauggcugg

SEQ ID NO: 968087 - RNA, 22 nt, Human
ucucuggccgagagucccuggg

SEQ ID NO: 968088 - RNA, 22 nt, Human
cuggagagauccuccugaaaaa

SEQ ID NO: 968089 - RNA, 22 nt, Human
ugggccuguggcuuggcucuag

SEQ ID NO: 968090 - RNA, 20 nt, Human
uccagcugggaacagcugau

SEQ ID NO: 968091 - RNA, 22 nt, Human
cauuucugcagaauugcucuuc

SEQ ID NO: 968092 - RNA, 22 nt, Human
aguccagaccccggcagcuggu

SEQ ID NO: 968093 - RNA, 22 nt, Human
gucaggauuggggucaugaguc

SEQ ID NO: 968094 - RNA, 22 nt, Human
uugauacaggcucuauuucauc

SEQ ID NO: 968095 - RNA, 22 nt, Human
uacaaagugugcccaugcugag

SEQ ID NO: 968096 - RNA, 22 nt, Human
ucugugaacaucacauugacag

SEQ ID NO: 968097 - RNA, 22 nt, Human
auaaaaacugacccauccuuug

SEQ ID NO: 968098 - RNA, 22 nt, Human
agggucuguggaugcaucuggg

SEQ ID NO: 968099 - RNA, 22 nt, Human
cauuuguuaauuacuauuaucu

SEQ ID NO: 968100 - RNA, 22 nt, Human
aaaauugucgaacaguaguaac

SEQ ID NO: 968101 - RNA, 22 nt, Human
gcugucagcgcccaaggagcuc

SEQ ID NO: 968102 - RNA, 22 nt, Human
auauauaaccuggauaaggcuu

SEQ ID NO: 968103 - RNA, 22 nt, Human
ugggugggagcgcccugucugg

SEQ ID NO: 968104 - RNA, 22 nt, Human
cacagacccagaagggaugaag

SEQ ID NO: 968105 - RNA, 22 nt, Human
gcacugggugugaggcagcguc

SEQ ID NO: 968106 - RNA, 22 nt, Human
ucucuguaguugggcagcugcu

SEQ ID NO: 968107 - RNA, 22 nt, Human
ccagcccuugagauggaaggga

SEQ ID NO: 968108 - RNA, 22 nt, Human
uaggcacugaguacauauuggu

SEQ ID NO: 968109 - RNA, 22 nt, Human
uugauuucuauucagauguaga

SEQ ID NO: 968110 - RNA, 19 nt, Human
gugaggauacugcucagag

SEQ ID NO: 968111 - RNA, 22 nt, Human
ugaacaaacugcauucuucacu

SEQ ID NO: 968112 - RNA, 18 nt, Human
caaagcucacguuccauc

SEQ ID NO: 968113 - RNA, 22 nt, Human
ggggcugguggugguuucucca

SEQ ID NO: 968114 - RNA, 23 nt, Human
uggcuaaaggcucuaguccugcu

SEQ ID NO: 968115 - RNA, 22 nt, Human
cugggguggugcaggccucaug

SEQ ID NO: 968116 - RNA, 22 nt, Human
ugaaaaggaguccuuguuuuca

SEQ ID NO: 968117 - RNA, 22 nt, Human
uggcucagaguucaucuuuuag

SEQ ID NO: 968118 - RNA, 22 nt, Human
acaacauucuuaaauacacuga

SEQ ID NO: 968119 - RNA, 22 nt, Human
gcagcugagagaagaacagggc

SEQ ID NO: 968120 - RNA, 21 nt, Human
ugguggagugugcugagcaug

SEQ ID NO: 968121 - RNA, 22 nt, Human
uuuauguaguuacggacuauca

SEQ ID NO: 968122 - RNA, 22 nt, Human
aggaggugacagccugcaucug

SEQ ID NO: 968123 - RNA, 22 nt, Human
uucucugagauagacuaagugg

SEQ ID NO: 968124 - RNA, 22 nt, Human
cuugucugugucggauaaaacu

SEQ ID NO: 968125 - RNA, 22 nt, Human
gaaggaaaacagaucugccuga

SEQ ID NO: 968126 - RNA, 22 nt, Human
gcagggaagggaaacagagacc

SEQ ID NO: 968127 - RNA, 22 nt, Human
ucagcugagcuccagcucauag

SEQ ID NO: 968128 - RNA, 22 nt, Human
uacauuaucuuguuaucuuuca

SEQ ID NO: 968129 - RNA, 22 nt, Human
uucggcuuggguauuucucagg

SEQ ID NO: 968130 - RNA, 18 nt, Human
aaaaugcaggcgacaugg

SEQ ID NO: 968131 - RNA, 22 nt, Human
aaggccaugcacauccuaggca

SEQ ID NO: 968132 - RNA, 22 nt, Human
agggagcaugggugaagcaggc

SEQ ID NO: 968133 - RNA, 22 nt, Human
agggacugagcuaggaucuagu

SEQ ID NO: 968134 - RNA, 22 nt, Human
gaguggggcguggauccagcgu

SEQ ID NO: 968135 - RNA, 22 nt, Human
gccagggggucagcaggcacuu

SEQ ID NO: 968136 - RNA, 22 nt, Human
ccugugugcugaugacgacaga

SEQ ID NO: 968137 - RNA, 22 nt, Human
uugugucuggaaugcguggagc

SEQ ID NO: 968138 - RNA, 22 nt, Human
gggacaggccccucgcuagcuu

SEQ ID NO: 968139 - RNA, 22 nt, Human
ccugccagcauggcuuaucucc

SEQ ID NO: 968140 - RNA, 22 nt, Human
guggccaggacauugccaggca

SEQ ID NO: 968141 - RNA, 22 nt, Human
ccugcagaccacacucaguccu

SEQ ID NO: 968142 - RNA, 22 nt, Human
agucccagccuaggcugugcug

SEQ ID NO: 968143 - RNA, 22 nt, Human
agcugcugagagucugccgggc

SEQ ID NO: 968144 - RNA, 22 nt, Human
uaguccauuuucacacugcuga

SEQ ID NO: 968145 - RNA, 22 nt, Human
agagaugaaaaguggagacugg

SEQ ID NO: 968146 - RNA, 22 nt, Human
gagcagcugagcuggaaugaga

SEQ ID NO: 968147 - RNA, 22 nt, Human
gggacuggcacagggcugggag

SEQ ID NO: 968148 - RNA, 18 nt, Human
gguggccuugacuucucu

SEQ ID NO: 968149 - RNA, 22 nt, Human
aaguaaaagcuuuaccaugcgc

SEQ ID NO: 968150 - RNA, 22 nt, Human
ggcuccugggaugggacugagc

SEQ ID NO: 968151 - RNA, 22 nt, Human
uuacuuuguucucaagauaugu

SEQ ID NO: 968152 - RNA, 21 nt, Human
agcagcugcaguuucuaucug

SEQ ID NO: 968153 - RNA, 22 nt, Human
aaucaguuguucacucugaaaa

SEQ ID NO: 968154 - RNA, 22 nt, Human
cagccaucccagccugugguuc

SEQ ID NO: 968155 - RNA, 22 nt, Human
gccucccuguucuuccacaaua

SEQ ID NO: 968156 - RNA, 22 nt, Human
aggucaaggccaaaagaguggu

SEQ ID NO: 968157 - RNA, 17 nt, Human
gcagccagugcagcagg

SEQ ID NO: 968158 - RNA, 22 nt, Human
aaggaaagacauauaaaugacu

SEQ ID NO: 968159 - RNA, 20 nt, Human
gccuggaggcagagauaaag

SEQ ID NO: 968160 - RNA, 22 nt, Human
caggaugugaggaggccauuug

SEQ ID NO: 968161 - RNA, 22 nt, Human
uuugaaagaauuuauguacuuu

SEQ ID NO: 968162 - RNA, 22 nt, Human
gccuucaguaguauccucauga

SEQ ID NO: 968163 - RNA, 22 nt, Human
cuggcccuucucuugcuuccug

SEQ ID NO: 968164 - RNA, 22 nt, Human
uccaggagggguaggcaguaug

SEQ ID NO: 968165 - RNA, 22 nt, Human
cuaauuuucccaaggccuucua

SEQ ID NO: 968166 - RNA, 19 nt, Human
gcuuuuuguugucaaaggu

SEQ ID NO: 968167 - RNA, 22 nt, Human
uacaguauggaaaauguauagu

SEQ ID NO: 968168 - RNA, 22 nt, Human
caaucuauaaauaucaguuucc

SEQ ID NO: 968169 - RNA, 22 nt, Human
ucugguaaccuuuaucccuccu

SEQ ID NO: 968170 - RNA, 22 nt, Human
uggccacacccaccuagaggag

SEQ ID NO: 968171 - RNA, 22 nt, Human
gggcauggugaugugcaccugu

SEQ ID NO: 968172 - RNA, 22 nt, Human
cagucuuuguucccauuacuga

SEQ ID NO: 968173 - RNA, 22 nt, Human
ugugccuucucaguccugcuca

SEQ ID NO: 968174 - RNA, 22 nt, Human
aaggccagcuuguagggcuggu

SEQ ID NO: 968175 - RNA, 22 nt, Human
ggccugcucugcagccucuaca

SEQ ID NO: 968176 - RNA, 22 nt, Human
uagggaugacgaaaggacagag

SEQ ID NO: 968177 - RNA, 17 nt, Human
ucugggcuucagugguc

SEQ ID NO: 968178 - RNA, 22 nt, Human
acauagcuuaaaugagaagaua

SEQ ID NO: 968179 - RNA, 22 nt, Human
ggacagcauaucagcagggcag

SEQ ID NO: 968180 - RNA, 22 nt, Human
ucagcugccucucccuggaaga

SEQ ID NO: 968181 - RNA, 22 nt, Human
aaauauuagggagaacagggac

SEQ ID NO: 968182 - RNA, 22 nt, Human
cuguagcaaguuauucaauaaa

SEQ ID NO: 968183 - RNA, 23 nt, Human
cuggcucauccugguugcagugg

SEQ ID NO: 968184 - RNA, 22 nt, Human
uggaugcuguaggacacgcucu

SEQ ID NO: 968185 - RNA, 22 nt, Human
cagaacauuccaugugcccugc

SEQ ID NO: 968186 - RNA, 22 nt, Human
ccagcauggcaccugagaugag

SEQ ID NO: 968187 - RNA, 22 nt, Human
uuucacagcuggguggcagagu

SEQ ID NO: 968188 - RNA, 22 nt, Human
agaggggaaggaugugauguga

SEQ ID NO: 968189 - RNA, 22 nt, Human
gcaggaaagguugagacuuugc

SEQ ID NO: 968190 - RNA, 22 nt, Human
gagcucuggcagggcaggucug

SEQ ID NO: 968191 - RNA, 22 nt, Human
aggcacaguuucauccccgggc

SEQ ID NO: 968192 - RNA, 22 nt, Human
ccacagggaacaugacagccuu

SEQ ID NO: 968193 - RNA, 22 nt, Human
caggaugagaagggcucuuacg

SEQ ID NO: 968194 - RNA, 22 nt, Human
uaugugcaaauuaauugcuaga

SEQ ID NO: 968195 - RNA, 22 nt, Human
caaguaugagaaagcuauuacc

SEQ ID NO: 968196 - RNA, 22 nt, Human
aauauucaaguuauucuuucuu

SEQ ID NO: 968197 - RNA, 22 nt, Human
ucagcuggcaguucagaggcug

SEQ ID NO: 968198 - RNA, 22 nt, Human
uccaggacuagcauuucugaua

SEQ ID NO: 968199 - RNA, 22 nt, Human
acaaugcaccagcaucuucacc

SEQ ID NO: 968200 - RNA, 22 nt, Human
cgccugggaguccacaccugcu

SEQ ID NO: 968201 - RNA, 22 nt, Human
acagaccucuagauuacauuug

SEQ ID NO: 968202 - RNA, 22 nt, Human
gccugcaguucugugcuaggca

SEQ ID NO: 968203 - RNA, 19 nt, Human
uuucacaaagagagcguga

SEQ ID NO: 968204 - RNA, 22 nt, Human
aaaaauaggucaaccguguaug

SEQ ID NO: 968205 - RNA, 20 nt, Human
cagauggcacgucagggcau

SEQ ID NO: 968206 - RNA, 22 nt, Human
ugcuagugcaggguuuucaguu

SEQ ID NO: 968207 - RNA, 22 nt, Human
ugucauaaaacacaagcuguug

SEQ ID NO: 968208 - RNA, 22 nt, Human
ucauugaacgaagagcuccauu

SEQ ID NO: 968209 - RNA, 22 nt, Human
uugcaggaaacugagugugagc

SEQ ID NO: 968210 - RNA, 22 nt, Human
uaaggccaggcuguggucggca

SEQ ID NO: 968211 - RNA, 23 nt, Human
gcauugucuccccacuucugggc

SEQ ID NO: 968212 - RNA, 22 nt, Human
acauuugaggauguuaagaaug

SEQ ID NO: 968213 - RNA, 22 nt, Human
cagguaaaaauaaauuugugag

SEQ ID NO: 968214 - RNA, 22 nt, Human
aggagccaugagugacaucaca

SEQ ID NO: 968215 - RNA, 22 nt, Human
ucccagagccucugccacucug

SEQ ID NO: 968216 - RNA, 20 nt, Human
agacccuguguccuguggcc

SEQ ID NO: 968217 - RNA, 22 nt, Human
gaugccugcauuucaggagagu

SEQ ID NO: 968218 - RNA, 23 nt, Human
uuauugaggguguagauuggugu

SEQ ID NO: 968219 - RNA, 19 nt, Human
caguggagauuggaggagg

SEQ ID NO: 968220 - RNA, 22 nt, Human
gcugaaugaauguauuuuaaaa

SEQ ID NO: 968221 - RNA, 22 nt, Human
aagaguuuucuauaaucuuggc

SEQ ID NO: 968222 - RNA, 22 nt, Human
gcccagaaguugaggcugcagu

SEQ ID NO: 968223 - RNA, 22 nt, Human
ggugaagggccuuaggagacag

SEQ ID NO: 968224 - RNA, 22 nt, Human
uagaauaugauuaauuuucuua

SEQ ID NO: 968225 - RNA, 22 nt, Human
gugucaugggagucagaaguga

SEQ ID NO: 968226 - RNA, 22 nt, Human
ggagggaaugucuagcauucuu

SEQ ID NO: 968227 - RNA, 22 nt, Human
ucacgagaggcacagaauagag

SEQ ID NO: 968228 - RNA, 22 nt, Human
uaagaacaagauguuccuguuu

SEQ ID NO: 968229 - RNA, 22 nt, Human
ggaagaagggucauuggcagcc

SEQ ID NO: 968230 - RNA, 22 nt, Human
ucuggccaacccucaaguugua

SEQ ID NO: 968231 - RNA, 21 nt, Human
ucauuuuuauugcuaccuugc

SEQ ID NO: 968232 - RNA, 22 nt, Human
aagauuucugcuuuuggaggca

SEQ ID NO: 968233 - RNA, 22 nt, Human
gauguguuuccaggauuuguuu

SEQ ID NO: 968234 - RNA, 22 nt, Human
ggagguggcagggaacauaauu

SEQ ID NO: 968235 - RNA, 22 nt, Human
uuuuaucuaccuaugcucauuu

SEQ ID NO: 968236 - RNA, 22 nt, Human
cccagcuaccucugcuaggaga

SEQ ID NO: 968237 - RNA, 20 nt, Human
ccuggcugcauucaggacgg

SEQ ID NO: 968238 - RNA, 22 nt, Human
ucuggcuccugaguccaugcuc

SEQ ID NO: 968239 - RNA, 22 nt, Human
ugcucuccggcuuccguggccu

SEQ ID NO: 968240 - RNA, 22 nt, Human
acagagccacuuuggugccuac

SEQ ID NO: 968241 - RNA, 22 nt, Human
cagcagcuucuguugaucagaa

SEQ ID NO: 968242 - RNA, 22 nt, Human
caaggagauaaaauguugagcu

SEQ ID NO: 968243 - RNA, 22 nt, Human
caaauguaaauucuuuugaagc

SEQ ID NO: 968244 - RNA, 22 nt, Human
accaaggaagaaucuauuugag

SEQ ID NO: 968245 - RNA, 22 nt, Human
gcccaggagccuggagaugugu

SEQ ID NO: 968246 - RNA, 22 nt, Human
gguggcagucuuaagagaucuu

SEQ ID NO: 968247 - RNA, 21 nt, Human
guguuuccuguuuauggcuug

SEQ ID NO: 968248 - RNA, 22 nt, Human
gucccuggucuaccguggcuuc

SEQ ID NO: 968249 - RNA, 22 nt, Human
agugugggugagggaggcccuc

SEQ ID NO: 968250 - RNA, 22 nt, Human
aagucuuacauaaacaggaaau

SEQ ID NO: 968251 - RNA, 22 nt, Human
cagcagggggcagcgcagauca

SEQ ID NO: 968252 - RNA, 22 nt, Human
uuagccaugcccuagaagagga

SEQ ID NO: 968253 - RNA, 21 nt, Human
acagucuccccagaucucucc

SEQ ID NO: 968254 - RNA, 22 nt, Human
aagauuuagggccaguuuacau

SEQ ID NO: 968255 - RNA, 22 nt, Human
uggccacagccucugccaguuc

SEQ ID NO: 968256 - RNA, 20 nt, Human
accuugaacccgccagccau

SEQ ID NO: 968257 - RNA, 22 nt, Human
gucuucuuguuuugaaggaaau

SEQ ID NO: 968258 - RNA, 22 nt, Human
gaggucaggcuugcagcagggu

SEQ ID NO: 968259 - RNA, 20 nt, Human
auuugcaucugaauaacuua

SEQ ID NO: 968260 - RNA, 22 nt, Human
cauugcugugggcauuugcugc

SEQ ID NO: 968261 - RNA, 23 nt, Human
gcugucaguuguuuuugucucua

SEQ ID NO: 968262 - RNA, 22 nt, Human
cccuccagcucaaagcaaccgg

SEQ ID NO: 968263 - RNA, 22 nt, Human
cccagacuccucuggcuggugg

SEQ ID NO: 968264 - RNA, 22 nt, Human
uauuucuucgggauucaagcua

SEQ ID NO: 968265 - RNA, 22 nt, Human
uugcauugaaugcacauuuuua

SEQ ID NO: 968266 - RNA, 22 nt, Human
aagggccuccuggggagccugg

SEQ ID NO: 968267 - RNA, 21 nt, Human
uagggcaggcauuggaagaga

SEQ ID NO: 968268 - RNA, 22 nt, Human
ugggcccaagagagucuccaac

SEQ ID NO: 968269 - RNA, 22 nt, Human
ugggcucuccuggaggacaaca

SEQ ID NO: 968270 - RNA, 22 nt, Human
ggucaugcugugaaucagugcu

SEQ ID NO: 968271 - RNA, 22 nt, Human
uauugaguuacagaaaauacuu

SEQ ID NO: 968272 - RNA, 22 nt, Human
acuggcagccacaacuggcagg

SEQ ID NO: 968273 - RNA, 22 nt, Human
auucuucauuuacuguuacuug

SEQ ID NO: 968274 - RNA, 22 nt, Human
aacucaguuacauauuagaaua

SEQ ID NO: 968275 - RNA, 22 nt, Human
cagggcagggauguugcggcag

SEQ ID NO: 968276 - RNA, 22 nt, Human
ucuucaauuagauuuaccaauu

SEQ ID NO: 968277 - RNA, 22 nt, Human
cccaggcuggauuucgguggca

SEQ ID NO: 968278 - RNA, 19 nt, Human
cugagagaugcuucacaca

SEQ ID NO: 968279 - RNA, 19 nt, Human
ccugcagggaugagagguu

SEQ ID NO: 968280 - RNA, 22 nt, Human
agacccugucaguguuaggaaa

SEQ ID NO: 968281 - RNA, 22 nt, Human
uucucagaauugacugggagca

SEQ ID NO: 968282 - RNA, 22 nt, Human
uuccauauguauauagcuguua

SEQ ID NO: 968283 - RNA, 22 nt, Human
cuguuucaagugaagucagaca

SEQ ID NO: 968284 - RNA, 22 nt, Human
gugccaggugcuaagcugugcu

SEQ ID NO: 968285 - RNA, 22 nt, Human
gggcagugguccaggcuacagc

SEQ ID NO: 968286 - RNA, 22 nt, Human
agggccuggcuucacuuucuca

SEQ ID NO: 968287 - RNA, 22 nt, Human
ucccagccugacagugcaucaa

SEQ ID NO: 968288 - RNA, 22 nt, Human
agauggcagggguaccuggaag

SEQ ID NO: 968289 - RNA, 23 nt, Human
ggccacaaauagucuccccuggc

SEQ ID NO: 968290 - RNA, 22 nt, Human
ggcagggagagcaugcugauaa

SEQ ID NO: 968291 - RNA, 22 nt, Human
guguccagggccguguugucuu

SEQ ID NO: 968292 - RNA, 22 nt, Human
gucuucaacaauaacuaccacu

SEQ ID NO: 968293 - RNA, 22 nt, Human
uauuagugaaagaauuaguuug

SEQ ID NO: 968294 - RNA, 22 nt, Human
gacagccucaugaggagcaaaa

SEQ ID NO: 968295 - RNA, 22 nt, Human
auuacaguaacagcuacaaugc

SEQ ID NO: 968296 - RNA, 22 nt, Human
uuuuugaaggcugaugugauua

SEQ ID NO: 968297 - RNA, 22 nt, Human
cuucacaaucaccuuuucggaa

SEQ ID NO: 968298 - RNA, 22 nt, Human
aaauugugagcuauagaucuag

SEQ ID NO: 968299 - RNA, 22 nt, Human
ugaagucuauuaacugauuucu

SEQ ID NO: 968300 - RNA, 22 nt, Human
gccugcuggauguggccaggcc

SEQ ID NO: 968301 - RNA, 22 nt, Human
gcucugcuguguuuguucagca

SEQ ID NO: 968302 - RNA, 22 nt, Human
gcugugcagucuuuggugugcc

SEQ ID NO: 968303 - RNA, 22 nt, Human
ccagugcuuccaggaauacggu

SEQ ID NO: 968304 - RNA, 22 nt, Human
aggcacugauucucagaguuac

SEQ ID NO: 968305 - RNA, 22 nt, Human
uagcagcucacagccucccauu

SEQ ID NO: 968306 - RNA, 22 nt, Human
ccugucuggccaccagggcgau

SEQ ID NO: 968307 - RNA, 22 nt, Human
gcagaagggaauaaggagcuuu

SEQ ID NO: 968308 - RNA, 22 nt, Human
uagggcaguuucauguuaucuu

SEQ ID NO: 968309 - RNA, 22 nt, Human
aagcaagacagaaguuacugcc

SEQ ID NO: 968310 - RNA, 22 nt, Human
agaggcagcagucauacuacag

SEQ ID NO: 968311 - RNA, 22 nt, Human
uuaaauuccagccucauaauag

SEQ ID NO: 968312 - RNA, 22 nt, Human
auggccugggcccgcuucagau

SEQ ID NO: 968313 - RNA, 22 nt, Human
augauugaccaucugcugggcu

SEQ ID NO: 968314 - RNA, 22 nt, Human
gcagagaacccagcagauuggc

SEQ ID NO: 968315 - RNA, 20 nt, Human
caucaucacaugagccaauu

SEQ ID NO: 968316 - RNA, 22 nt, Human
cugaggucucuuuccauaguga

SEQ ID NO: 968317 - RNA, 20 nt, Human
ugcugcaguuucaugggacu

SEQ ID NO: 968318 - RNA, 22 nt, Human
gugcauuuggugacucucaccc

SEQ ID NO: 968319 - RNA, 22 nt, Human
caguagcaggcaggugcuuuug

SEQ ID NO: 968320 - RNA, 22 nt, Human
cuuguagaauugaaauggucuc

SEQ ID NO: 968321 - RNA, 22 nt, Human
auccagagacccaaggacagaa

SEQ ID NO: 968322 - RNA, 22 nt, Human
ccuccuggauggauuuggugga

SEQ ID NO: 968323 - RNA, 22 nt, Human
ugccuugcuggaugucaguuuu

SEQ ID NO: 968324 - RNA, 22 nt, Human
ccuuuucaacuaagauucugca

SEQ ID NO: 968325 - RNA, 22 nt, Human
auggcacuaagagggagcugga

SEQ ID NO: 968326 - RNA, 22 nt, Human
agaaaacuugucacagcucuca

SEQ ID NO: 968327 - RNA, 22 nt, Human
ugccugggaaccaauccuggcu

SEQ ID NO: 968328 - RNA, 22 nt, Human
gaggccaggacaugaaagcuga

SEQ ID NO: 968329 - RNA, 22 nt, Human
aguaaugucccuuaaauguggu

SEQ ID NO: 968330 - RNA, 22 nt, Human
gaaugcacacgugugugcaugc

SEQ ID NO: 968331 - RNA, 22 nt, Human
cuccaggagggggauggcugua

SEQ ID NO: 968332 - RNA, 22 nt, Human
ggagccagagucugcaguguaa

SEQ ID NO: 968333 - RNA, 21 nt, Human
ucuuuccugcccaguugcccu

SEQ ID NO: 968334 - RNA, 22 nt, Human
ggccaggagaggagggcacuga

SEQ ID NO: 968335 - RNA, 22 nt, Human
uuguuuucacagcuuugcccgg

SEQ ID NO: 968336 - RNA, 22 nt, Human
agaccuggauuccaauccuacc

SEQ ID NO: 968337 - RNA, 22 nt, Human
agaaggggagaagcuaccagga

SEQ ID NO: 968338 - RNA, 22 nt, Human
gccuggcaggaaucucagugcu

SEQ ID NO: 968339 - RNA, 19 nt, Human
gccugagccagccaugcaa

SEQ ID NO: 968340 - RNA, 18 nt, Human
acagaacucaggggcacc

SEQ ID NO: 968341 - RNA, 22 nt, Human
ucaguucugcuagaaaaacagu

SEQ ID NO: 968342 - RNA, 22 nt, Human
aaaucagugcucauuugaaagg

SEQ ID NO: 968343 - RNA, 21 nt, Human
ucacuuauaauguauuugcug

SEQ ID NO: 968344 - RNA, 22 nt, Human
uuaugcuaagugcaacaagcca

SEQ ID NO: 968345 - RNA, 22 nt, Human
aggggcucaguuacuuuggcag

SEQ ID NO: 968346 - RNA, 22 nt, Human
cacaggcuccggccuugcagcc

SEQ ID NO: 968347 - RNA, 21 nt, Human
ggccucugucauccugggaag

SEQ ID NO: 968348 - RNA, 22 nt, Human
ucuggcucuauaacuccuagcu

SEQ ID NO: 968349 - RNA, 22 nt, Human
gccugugcuuaacugacgugag

SEQ ID NO: 968350 - RNA, 22 nt, Human
gggcuggagccagcuguggcug

SEQ ID NO: 968351 - RNA, 22 nt, Human
guggcccugucccaggccuccu

SEQ ID NO: 968352 - RNA, 22 nt, Human
ucuggccacuaauaggucucac

SEQ ID NO: 968353 - RNA, 22 nt, Human
auacaucuuccuuuuaaaaugc

SEQ ID NO: 968354 - RNA, 22 nt, Human
ucuuguuaaagugaagauacug

SEQ ID NO: 968355 - RNA, 22 nt, Human
agcuuuauucaugauuucaggg

SEQ ID NO: 968356 - RNA, 21 nt, Human
cugcucugacagugaggccag

SEQ ID NO: 968357 - RNA, 22 nt, Human
guagggagcccagagcccagug

SEQ ID NO: 968358 - RNA, 21 nt, Human
uuuauuaacaacuguggacgu

SEQ ID NO: 968359 - RNA, 19 nt, Human
cucugccucuggcuguggc

SEQ ID NO: 968360 - RNA, 22 nt, Human
cagauggcaacagcucugugac

SEQ ID NO: 968361 - RNA, 22 nt, Human
ccagcugagaaguguaaaguga

SEQ ID NO: 968362 - RNA, 22 nt, Human
cugccugcacugccuggcucca

SEQ ID NO: 968363 - RNA, 22 nt, Human
ccaggagcaacuugaaggcaag

SEQ ID NO: 968364 - RNA, 22 nt, Human
ccagggucuuggagaggagugc

SEQ ID NO: 968365 - RNA, 22 nt, Human
ggagaggaaaugccagcacuuc

SEQ ID NO: 968366 - RNA, 22 nt, Human
uguauuagagcaguagaauuau

SEQ ID NO: 968367 - RNA, 22 nt, Human
aggcagcucuguggccucccag

SEQ ID NO: 968368 - RNA, 22 nt, Human
uggcccugcugggucagagcug

SEQ ID NO: 968369 - RNA, 22 nt, Human
gucugcugcagagcauggcuuu

SEQ ID NO: 968370 - RNA, 22 nt, Human
ccugccugcagaaaguaucucc

SEQ ID NO: 968371 - RNA, 22 nt, Human
gcucugcuggagggaaagagaa

SEQ ID NO: 968372 - RNA, 22 nt, Human
ucucagggugaggaaagaauuu

SEQ ID NO: 968373 - RNA, 22 nt, Human
agacagaacagaauaauuguug

SEQ ID NO: 968374 - RNA, 22 nt, Human
ucacucuguggcccaggcagug

SEQ ID NO: 968375 - RNA, 22 nt, Human
ugguuugcccacucgagugauu

SEQ ID NO: 968376 - RNA, 22 nt, Human
ccugcugugaagccaggccugu

SEQ ID NO: 968377 - RNA, 22 nt, Human
ucugccuggaugauggcagggc

SEQ ID NO: 968378 - RNA, 22 nt, Human
cagaaauucccauuucagauuc

SEQ ID NO: 968379 - RNA, 22 nt, Human
ugcuucagaggaaaggcaaaag

SEQ ID NO: 968380 - RNA, 22 nt, Human
ccugccugauuccaggauggcu

SEQ ID NO: 968381 - RNA, 22 nt, Human
uggaggaaguugcuggaaguca

SEQ ID NO: 968382 - RNA, 22 nt, Human
uguuuuaaagccauugccuuuc

SEQ ID NO: 968383 - RNA, 22 nt, Human
cacauauuguaguucaccagga

SEQ ID NO: 968384 - RNA, 22 nt, Human
uuuauguaaguggaaugaugcc

SEQ ID NO: 968385 - RNA, 22 nt, Human
agcccagggacagggcggaugu

SEQ ID NO: 968386 - RNA, 22 nt, Human
ugcagggcuaagucagagccug

SEQ ID NO: 968387 - RNA, 22 nt, Human
gcuggccugaccagccacaggc

SEQ ID NO: 968388 - RNA, 22 nt, Human
auuugcuugugcuaugaaaguu

SEQ ID NO: 968389 - RNA, 22 nt, Human
gacagcauggugucuguucagg

SEQ ID NO: 968390 - RNA, 22 nt, Human
ucacagaauagcacuguaagcg

SEQ ID NO: 968391 - RNA, 22 nt, Human
uccuggauucugcccugaaggc

SEQ ID NO: 968392 - RNA, 22 nt, Human
aaauaauguuaggccuuugcuc

SEQ ID NO: 968393 - RNA, 22 nt, Human
uggcagcaaaaccagaaucaga

SEQ ID NO: 968394 - RNA, 22 nt, Human
agugcuuugaacgaaaggcuga

SEQ ID NO: 968395 - RNA, 19 nt, Human
uggcagggagugauauuag

SEQ ID NO: 968396 - RNA, 22 nt, Human
uuggccaaggaccuuuuuggag

SEQ ID NO: 968397 - RNA, 22 nt, Human
cacaaauggccguguucaaaga

SEQ ID NO: 968398 - RNA, 22 nt, Human
gccaggcagcaggaagccagug

SEQ ID NO: 968399 - RNA, 22 nt, Human
gugggagccauuuccaguaugc

SEQ ID NO: 968400 - RNA, 22 nt, Human
uggcuuccacugugugcccccu

SEQ ID NO: 968401 - RNA, 22 nt, Human
acuacuuugggccauuuguuua

SEQ ID NO: 968402 - RNA, 22 nt, Human
cagccaggcccccgagucguug

SEQ ID NO: 968403 - RNA, 22 nt, Human
agcagccacccagcugcucauu

SEQ ID NO: 968404 - RNA, 22 nt, Human
guacacauugucuguuuacuuc

SEQ ID NO: 968405 - RNA, 22 nt, Human
uggccuggugucugcgaggccu

SEQ ID NO: 968406 - RNA, 19 nt, Human
aggcucugagcuccuggag

SEQ ID NO: 968407 - RNA, 21 nt, Human
gagccuucccucugcccuuuc

SEQ ID NO: 968408 - RNA, 22 nt, Human
ucaguuuucauuucaugagcag

SEQ ID NO: 968409 - RNA, 22 nt, Human
aaagaacaaauuagcuguuuua

SEQ ID NO: 968410 - RNA, 22 nt, Human
agucugcacucagguggagguc

SEQ ID NO: 968411 - RNA, 22 nt, Human
ucucuucuaacacuagaaauuc

SEQ ID NO: 968412 - RNA, 22 nt, Human
ggcucuggcguccaauggagcg

SEQ ID NO: 968413 - RNA, 22 nt, Human
uaacagaaaggggacagaaaua

SEQ ID NO: 968414 - RNA, 22 nt, Human
acagcagccuuguugguuucga

SEQ ID NO: 968415 - RNA, 22 nt, Human
ucagccugcuccaagugcugcc

SEQ ID NO: 968416 - RNA, 22 nt, Human
ugcacacaguucucaggaaaga

SEQ ID NO: 968417 - RNA, 23 nt, Human
agcacagacuagaaaggucuuuc

SEQ ID NO: 968418 - RNA, 22 nt, Human
uuucuaggucuuccauacugcc

SEQ ID NO: 968419 - RNA, 22 nt, Human
uucugaaagccaauucauugaa

SEQ ID NO: 968420 - RNA, 22 nt, Human
agaggaggaagagcuuuaaaau

SEQ ID NO: 968421 - RNA, 19 nt, Human
gccugggaugggcagaacu

SEQ ID NO: 968422 - RNA, 21 nt, Human
agucccaggggugagugaugu

SEQ ID NO: 968423 - RNA, 22 nt, Human
acaugcaugucuaugggcaggu

SEQ ID NO: 968424 - RNA, 22 nt, Human
ugucucaggcccaagccaguaa

SEQ ID NO: 968425 - RNA, 22 nt, Human
guuugcauuccaauuuagggga

SEQ ID NO: 968426 - RNA, 18 nt, Human
gcaggagauggguggggu

SEQ ID NO: 968427 - RNA, 22 nt, Human
acauuucuccuacuuguuauuu

SEQ ID NO: 968428 - RNA, 22 nt, Human
uuguuaguuuauauaauguagu

SEQ ID NO: 968429 - RNA, 22 nt, Human
ggcugcucugccuuccagcugg

SEQ ID NO: 968430 - RNA, 22 nt, Human
gucuccugagacugcagucacc

SEQ ID NO: 968431 - RNA, 21 nt, Human
ucagcagcaucugccuagagu

SEQ ID NO: 968432 - RNA, 23 nt, Human
cagaaaacccagagcucaguccc

SEQ ID NO: 968433 - RNA, 22 nt, Human
uaguuuuacuugcgaugauaau

SEQ ID NO: 968434 - RNA, 22 nt, Human
agcaggaggguuuuguagaguc

SEQ ID NO: 968435 - RNA, 22 nt, Human
aggaaaaauaaggcagcagggc

SEQ ID NO: 968436 - RNA, 22 nt, Human
ucuuuccuacuuuauugugaac

SEQ ID NO: 968437 - RNA, 22 nt, Human
aagaaauuaaugugccauuacu

SEQ ID NO: 968438 - RNA, 22 nt, Human
ugacagcugagccccaggcaag

SEQ ID NO: 968439 - RNA, 22 nt, Human
aggccugggcaagaaggggcgu

SEQ ID NO: 968440 - RNA, 22 nt, Human
ugccagggugucaggagagcua

SEQ ID NO: 968441 - RNA, 22 nt, Human
cucagaauuacaucccauuuua

SEQ ID NO: 968442 - RNA, 22 nt, Human
uacagaaaucacaucgcuuuga

SEQ ID NO: 968443 - RNA, 22 nt, Human
auuccaguucuccucucuaaag

SEQ ID NO: 968444 - RNA, 23 nt, Human
auguuauuauuagcagucuugcc

SEQ ID NO: 968445 - RNA, 22 nt, Human
gauuucuugaccccugucucag

SEQ ID NO: 968446 - RNA, 22 nt, Human
uacauggugguggcacuugacu

SEQ ID NO: 968447 - RNA, 22 nt, Human
cugccaggcacgugcagcauca

SEQ ID NO: 968448 - RNA, 22 nt, Human
ggcuggcucagggcuugagaga

SEQ ID NO: 968449 - RNA, 21 nt, Human
gcaggggauagaaauggucug

SEQ ID NO: 968450 - RNA, 22 nt, Human
aguuucauauuaccaugucacc

SEQ ID NO: 968451 - RNA, 22 nt, Human
aggcacugguccauuuucugca

SEQ ID NO: 968452 - RNA, 22 nt, Human
aauaugaauuauuguuacaagu

SEQ ID NO: 968453 - RNA, 22 nt, Human
agucucuuccuucaaggcuggu

SEQ ID NO: 968454 - RNA, 18 nt, Human
ucagggaaucuuggccuu

SEQ ID NO: 968455 - RNA, 22 nt, Human
uuccaaauuaaaauguacaaug

SEQ ID NO: 968456 - RNA, 22 nt, Human
augcuuuuccuaaaaugaugcc

SEQ ID NO: 968457 - RNA, 22 nt, Human
ccucagggccaucucugucccu

SEQ ID NO: 968458 - RNA, 22 nt, Human
aaauguguuucgaaaacuggug

SEQ ID NO: 968459 - RNA, 22 nt, Human
uugagucaguaauuccauuucu

SEQ ID NO: 968460 - RNA, 22 nt, Human
aggccaaauugaucaucuuuag

SEQ ID NO: 968461 - RNA, 22 nt, Human
ucuggauggucagcucuuccug

SEQ ID NO: 968462 - RNA, 22 nt, Human
ugcccaaaccucuccuagcucu

SEQ ID NO: 968463 - RNA, 22 nt, Human
uuuaccaagcuuuaauuacaua

SEQ ID NO: 968464 - RNA, 22 nt, Human
cccaggaagaggggucaggugu

SEQ ID NO: 968465 - RNA, 22 nt, Human
aggcacuguggaagacaugguu

SEQ ID NO: 968466 - RNA, 22 nt, Human
uaggcacuuggcguguuggaga

SEQ ID NO: 968467 - RNA, 22 nt, Human
aacaucuuguccuuagauuaaa

SEQ ID NO: 968468 - RNA, 22 nt, Human
gaagcagcuuucuggugaggag

SEQ ID NO: 968469 - RNA, 22 nt, Human
agggcuggcaucucuaaugcug

SEQ ID NO: 968470 - RNA, 22 nt, Human
gcugcagcuguaggacacaauu

SEQ ID NO: 968471 - RNA, 22 nt, Human
ccugccagcccgcguucaugcc

SEQ ID NO: 968472 - RNA, 18 nt, Human
guucaaggucaagagaga

SEQ ID NO: 968473 - RNA, 22 nt, Human
ucuggcaggucaaucauucuuu

SEQ ID NO: 968474 - RNA, 22 nt, Human
cuagggaguggcagagcuggga

SEQ ID NO: 968475 - RNA, 22 nt, Human
auaaacaguagagaaagguggu

SEQ ID NO: 968476 - RNA, 22 nt, Human
uuaggcauauggcacaugauag

SEQ ID NO: 968477 - RNA, 22 nt, Human
ugcaggagcugugcggugaggg

SEQ ID NO: 968478 - RNA, 22 nt, Human
aggugcagcaugaguccaacgg

SEQ ID NO: 968479 - RNA, 22 nt, Human
ucugggaaugaauaagaccugu

SEQ ID NO: 968480 - RNA, 22 nt, Human
cccuggccagcucaugucugag

SEQ ID NO: 968481 - RNA, 22 nt, Human
agguggggccaaaugcuacagu

SEQ ID NO: 968482 - RNA, 22 nt, Human
ccuuucucuggcagcaggacag

SEQ ID NO: 968483 - RNA, 20 nt, Human
ugcguguguauuuauuuucu

SEQ ID NO: 968484 - RNA, 22 nt, Human
ccuuccaggagucucugcaggu

SEQ ID NO: 968485 - RNA, 22 nt, Human
auguucuuguucaaaugucagu

SEQ ID NO: 968486 - RNA, 22 nt, Human
aucuuucaguuucauaccaauu

SEQ ID NO: 968487 - RNA, 22 nt, Human
gccaggaggcuuaacuggacag

SEQ ID NO: 968488 - RNA, 22 nt, Human
cugcucuggucucuucauguuu

SEQ ID NO: 968489 - RNA, 17 nt, Human
uccagagcacagagcuc

SEQ ID NO: 968490 - RNA, 22 nt, Human
ccuggcugugcauugccggccc

SEQ ID NO: 968491 - RNA, 22 nt, Human
uuuaguagaaauauuugggccu

SEQ ID NO: 968492 - RNA, 22 nt, Human
cagugucuuauuuguagcucag

SEQ ID NO: 968493 - RNA, 20 nt, Human
cugagcugagcuccaugggu

SEQ ID NO: 968494 - RNA, 22 nt, Human
uuuccucugaugcugacuugga

SEQ ID NO: 968495 - RNA, 22 nt, Human
caggaaagagcugccaggcagg

SEQ ID NO: 968496 - RNA, 22 nt, Human
caggguccggcugccuggcugu

SEQ ID NO: 968497 - RNA, 22 nt, Human
ggcccagcacagugcuuggggg

SEQ ID NO: 968498 - RNA, 22 nt, Human
ccuccuuuccuguuuuccugag

SEQ ID NO: 968499 - RNA, 18 nt, Human
uacaucuauauaguguuu

SEQ ID NO: 968500 - RNA, 22 nt, Human
aauucacauguugaaguccuaa

SEQ ID NO: 968501 - RNA, 22 nt, Human
ccagccaguccagcauuggugu

SEQ ID NO: 968502 - RNA, 22 nt, Human
ucucagaggugcccuggcaucu

SEQ ID NO: 968503 - RNA, 22 nt, Human
acaaaugccauauauaaauucu

SEQ ID NO: 968504 - RNA, 22 nt, Human
ucagggcagguuaacuugggug

SEQ ID NO: 968505 - RNA, 22 nt, Human
augaagauaagaccaggcugga

SEQ ID NO: 968506 - RNA, 22 nt, Human
acuguucauuuguccuguaucu

SEQ ID NO: 968507 - RNA, 22 nt, Human
acccagaggugucuagcaagcu

SEQ ID NO: 968508 - RNA, 22 nt, Human
uggcucagaagaaaagguaaac

SEQ ID NO: 968509 - RNA, 22 nt, Human
gcugccuguggcccuucugggu

SEQ ID NO: 968510 - RNA, 22 nt, Human
uuauguaauuuguuugcucuuc

SEQ ID NO: 968511 - RNA, 17 nt, Human
gguggccugcaguggcu

SEQ ID NO: 968512 - RNA, 22 nt, Human
ccacugucugcaggccucagca

SEQ ID NO: 968513 - RNA, 22 nt, Human
cagugucuccagaugcuccaau

SEQ ID NO: 968514 - RNA, 22 nt, Human
ucuguccucuuugaagcugcuc

SEQ ID NO: 968515 - RNA, 22 nt, Human
gugcuuucugcaugguuccuac

SEQ ID NO: 968516 - RNA, 20 nt, Human
gaggaaaagcugccaggccu

SEQ ID NO: 968517 - RNA, 20 nt, Human
cucuggcuccgcgugaccgc

SEQ ID NO: 968518 - RNA, 21 nt, Human
ugcucacagaugugcucagug

SEQ ID NO: 968519 - RNA, 23 nt, Human
aggaggaaaaguuaucugcugag

SEQ ID NO: 968520 - RNA, 22 nt, Human
gcucagagcacucagacucagc

SEQ ID NO: 968521 - RNA, 22 nt, Human
cccuggagucagguuggccugg

SEQ ID NO: 968522 - RNA, 22 nt, Human
aaagucauacauggugcuuacu

SEQ ID NO: 968523 - RNA, 22 nt, Human
accuuggggugaugcugaaaga

SEQ ID NO: 968524 - RNA, 22 nt, Human
gggcuaggcuuggccagcacug

SEQ ID NO: 968525 - RNA, 22 nt, Human
aaggcagauauaaagacuagag

SEQ ID NO: 968526 - RNA, 23 nt, Human
uuccuggcagguacaacuuuuac

SEQ ID NO: 968527 - RNA, 22 nt, Human
agcugcuccuuuccugcaggcg

SEQ ID NO: 968528 - RNA, 22 nt, Human
gccugguggacacugggcauca

SEQ ID NO: 968529 - RNA, 22 nt, Human
cccagccagccucuucccauau

SEQ ID NO: 968530 - RNA, 22 nt, Human
aagaggaacugggggcugaguc

SEQ ID NO: 968531 - RNA, 22 nt, Human
aggcaacuuuuggggaugaugg

SEQ ID NO: 968532 - RNA, 22 nt, Human
aaccaggugacucauggugagc

SEQ ID NO: 968533 - RNA, 22 nt, Human
aaacuccugcauacucagaagc

SEQ ID NO: 968534 - RNA, 22 nt, Human
ccaugagacagcaacugaaagu

SEQ ID NO: 968535 - RNA, 22 nt, Human
uuguacacaauucuuaacauac

SEQ ID NO: 968536 - RNA, 22 nt, Human
cugcucacgccaccguucauca

SEQ ID NO: 968537 - RNA, 22 nt, Human
ggagccagaggcugcugcugug

SEQ ID NO: 968538 - RNA, 22 nt, Human
ugcauuuccagauuucuggagu

SEQ ID NO: 968539 - RNA, 22 nt, Human
auuugucuucaguagguucuuc

SEQ ID NO: 968540 - RNA, 23 nt, Human
uccucccaaauuucagccucauu

SEQ ID NO: 968541 - RNA, 22 nt, Human
ucagguguuagaagaaauuuca

SEQ ID NO: 968542 - RNA, 22 nt, Human
ucugcugugauuugcuaccugu

SEQ ID NO: 968543 - RNA, 22 nt, Human
aucuucucauguguaaugaggu

SEQ ID NO: 968544 - RNA, 22 nt, Human
ccuggaugauccaugucaugga

SEQ ID NO: 968545 - RNA, 22 nt, Human
aagagcugcccaaggugaacag

SEQ ID NO: 968546 - RNA, 21 nt, Human
gcucagaguauugcacuguuu

SEQ ID NO: 968547 - RNA, 22 nt, Human
cugagcuuggccaggaaugaau

SEQ ID NO: 968548 - RNA, 22 nt, Human
uuuucaguaaugucuacauaau

SEQ ID NO: 968549 - RNA, 22 nt, Human
uuuuuuauaucaacugaagucu

SEQ ID NO: 968550 - RNA, 22 nt, Human
ucccacugcuuugcucugcuca

SEQ ID NO: 968551 - RNA, 22 nt, Human
gagagggagccagccaggaacc

SEQ ID NO: 968552 - RNA, 20 nt, Human
gcccuggagccuuguccugg

SEQ ID NO: 968553 - RNA, 22 nt, Human
ggagggcaucaaucaggccugg

SEQ ID NO: 968554 - RNA, 22 nt, Human
acagcagcacuauugacauuuu

SEQ ID NO: 968555 - RNA, 22 nt, Human
uauuuccagcaguaagaagaca

SEQ ID NO: 968556 - RNA, 17 nt, Human
uuucuccuuccaucuca

SEQ ID NO: 968557 - RNA, 22 nt, Human
guugaguggguuaggaugcuga

SEQ ID NO: 968558 - RNA, 22 nt, Human
agucucugcaugccugcugugc

SEQ ID NO: 968559 - RNA, 22 nt, Human
agugcagccgagaucaggugcu

SEQ ID NO: 968560 - RNA, 21 nt, Human
gcagagccugagguucuugag

SEQ ID NO: 968561 - RNA, 22 nt, Human
ggaggccaugaggcucuaggug

SEQ ID NO: 968562 - RNA, 22 nt, Human
gcaggagcucguuuccaggcug

SEQ ID NO: 968563 - RNA, 22 nt, Human
uggcucuguuuuaugaguacca

SEQ ID NO: 968564 - RNA, 22 nt, Human
ucagagaggcaauacuguuuaa

SEQ ID NO: 968565 - RNA, 22 nt, Human
ugauuuccugugcgcccuuagg

SEQ ID NO: 968566 - RNA, 22 nt, Human
gcugcuucucugauggagucca

SEQ ID NO: 968567 - RNA, 22 nt, Human
uuccaggagacuuccagaaaua

SEQ ID NO: 968568 - RNA, 22 nt, Human
ucaugcccagagcaguaaauua

SEQ ID NO: 968569 - RNA, 22 nt, Human
gcugaguguaaugauggcagag

SEQ ID NO: 968570 - RNA, 22 nt, Human
ugcauuguuuagaacucuuugg

SEQ ID NO: 968571 - RNA, 22 nt, Human
agccucuggcccuagacugcuu

SEQ ID NO: 968572 - RNA, 22 nt, Human
ggaggggagucucccaaagccg

SEQ ID NO: 968573 - RNA, 22 nt, Human
aggccuagaggaauggccaggg

SEQ ID NO: 968574 - RNA, 22 nt, Human
aggcugggcuccgcccaacucc

SEQ ID NO: 968575 - RNA, 22 nt, Human
aggaagcucaaagccaugaugu

SEQ ID NO: 968576 - RNA, 22 nt, Human
ccugcugugaccggggagcagg

SEQ ID NO: 968577 - RNA, 22 nt, Human
cugcugggcagaggcugcauga

SEQ ID NO: 968578 - RNA, 21 nt, Human
aaguuuguucuuguauagucu

SEQ ID NO: 968579 - RNA, 22 nt, Human
guugcacaguuccucaagcagg

SEQ ID NO: 968580 - RNA, 22 nt, Human
caggaacagcaccaggagcuag

SEQ ID NO: 968581 - RNA, 22 nt, Human
gcucagaggaugcuccuuuaug

SEQ ID NO: 968582 - RNA, 22 nt, Human
cuuuccuagauggccaucuuuc

SEQ ID NO: 968583 - RNA, 17 nt, Human
caagagagaugacugga

SEQ ID NO: 968584 - RNA, 22 nt, Human
aagagcuggcucuugcagcagc

SEQ ID NO: 968585 - RNA, 22 nt, Human
gggcacugcuggaggcucccug

SEQ ID NO: 968586 - RNA, 17 nt, Human
augugucuagugcaacc

SEQ ID NO: 968587 - RNA, 21 nt, Human
ugaggcuguuguaccagggag

SEQ ID NO: 968588 - RNA, 22 nt, Human
agugcauuauauguuucaaugg

SEQ ID NO: 968589 - RNA, 22 nt, Human
caggggcuagcacuuaauguuu

SEQ ID NO: 968590 - RNA, 22 nt, Human
cauggcagcaauuuuccugacu

SEQ ID NO: 968591 - RNA, 22 nt, Human
cuuccaaacccaggguaugggc

SEQ ID NO: 968592 - RNA, 22 nt, Human
aggcugcugaggccaccacgcu

SEQ ID NO: 968593 - RNA, 22 nt, Human
uggagcugaacuuugaggccag

SEQ ID NO: 968594 - RNA, 19 nt, Human
ggcaggcuggauagagagg

SEQ ID NO: 968595 - RNA, 22 nt, Human
uccagucuucuugcagcuacau

SEQ ID NO: 968596 - RNA, 22 nt, Human
uugauagguuuuauguauaguu

SEQ ID NO: 968597 - RNA, 22 nt, Human
auccugggaagcugacauugaa

SEQ ID NO: 968598 - RNA, 22 nt, Human
uuucaugugcaauuagcaauau

SEQ ID NO: 968599 - RNA, 22 nt, Human
cugggagacaagagagggcuga

SEQ ID NO: 968600 - RNA, 19 nt, Human
cagcucaguuugauucucu

SEQ ID NO: 968601 - RNA, 22 nt, Human
aauguguguauuucuaggcgag

SEQ ID NO: 968602 - RNA, 22 nt, Human
gagaagccgagucagcugagcc

SEQ ID NO: 968603 - RNA, 22 nt, Human
aguuuucacacucaccaaaagg

SEQ ID NO: 968604 - RNA, 21 nt, Human
gggccuggcugcgcaggacgg

SEQ ID NO: 968605 - RNA, 23 nt, Human
cccuguagcccaggacaggcuuu

SEQ ID NO: 968606 - RNA, 22 nt, Human
ccuugcaggggaacaggcagug

SEQ ID NO: 968607 - RNA, 22 nt, Human
agccacaccuguccugccagcu

SEQ ID NO: 968608 - RNA, 22 nt, Human
ccuccaaguuugacucaggaca

SEQ ID NO: 968609 - RNA, 22 nt, Human
cuggagccggaccagggacggu

SEQ ID NO: 968610 - RNA, 22 nt, Human
ccacagcaugcaggccugacac

SEQ ID NO: 968611 - RNA, 20 nt, Human
uugagcuuuuaguacagaca

SEQ ID NO: 968612 - RNA, 22 nt, Human
aacugcauuuaacaaauacucu

SEQ ID NO: 968613 - RNA, 21 nt, Human
cccaggaggcugagaagagca

SEQ ID NO: 968614 - RNA, 22 nt, Human
caguggcaugguugacugcagu

SEQ ID NO: 968615 - RNA, 22 nt, Human
ccugucacgaugacugcacucu

SEQ ID NO: 968616 - RNA, 22 nt, Human
cccuugcaucccauguguggcc

SEQ ID NO: 968617 - RNA, 22 nt, Human
acugucuccucaucaugccugg

SEQ ID NO: 968618 - RNA, 22 nt, Human
gaggccugguuugcaugagaau

SEQ ID NO: 968619 - RNA, 22 nt, Human
gcaggcaggcuuccuugaacug

SEQ ID NO: 968620 - RNA, 22 nt, Human
ccuccuggaggcucuaagggag

SEQ ID NO: 968621 - RNA, 22 nt, Human
ugaagggggagauauaugugug

SEQ ID NO: 968622 - RNA, 22 nt, Human
guuuucuuugaaugcuucuaga

SEQ ID NO: 968623 - RNA, 22 nt, Human
aguguguccagaaaucuguauu

SEQ ID NO: 968624 - RNA, 22 nt, Human
uggcagcucauuuggaaaugga

SEQ ID NO: 968625 - RNA, 22 nt, Human
cagggcacaguuauggaggugg

SEQ ID NO: 968626 - RNA, 22 nt, Human
cagaagcaaaugccuugcugag

SEQ ID NO: 968627 - RNA, 22 nt, Human
aggcugcuucaauggauaagau

SEQ ID NO: 968628 - RNA, 22 nt, Human
acacagggauauuucagguggu

SEQ ID NO: 968629 - RNA, 22 nt, Human
uuuagaaauucaucuauggccu

SEQ ID NO: 968630 - RNA, 22 nt, Human
ggcuccuggcaucuggugggua

SEQ ID NO: 968631 - RNA, 22 nt, Human
acaggcugacuuccugccaugu

SEQ ID NO: 968632 - RNA, 20 nt, Human
accaauguuagcuuaguacu

SEQ ID NO: 968633 - RNA, 22 nt, Human
cucaggaaaggccaugcaaggg

SEQ ID NO: 968634 - RNA, 22 nt, Human
ggagcuguugcgcaugcgcucg

SEQ ID NO: 968635 - RNA, 20 nt, Human
gaugggaaucggagcuggua

SEQ ID NO: 968636 - RNA, 22 nt, Human
aguuuauguaaaauuaguaaug

SEQ ID NO: 968637 - RNA, 22 nt, Human
ucuuuacaaucuaagcauaguu

SEQ ID NO: 968638 - RNA, 22 nt, Human
uuaacaauagaguuucuucagg

SEQ ID NO: 968639 - RNA, 22 nt, Human
uucuggagcuaaaguccacucu

SEQ ID NO: 968640 - RNA, 23 nt, Human
uccuccuuuugcuugugcuuccc

SEQ ID NO: 968641 - RNA, 22 nt, Human
ucuccuuuaagauuuccucagg

SEQ ID NO: 968642 - RNA, 22 nt, Human
ccagcugggauuaagggaaaau

SEQ ID NO: 968643 - RNA, 22 nt, Human
ucagucucuggggcuucuguuu

SEQ ID NO: 968644 - RNA, 22 nt, Human
cugcuuugauuagaagaguaca

SEQ ID NO: 968645 - RNA, 22 nt, Human
aggagcagcuucugaaccaugu

SEQ ID NO: 968646 - RNA, 22 nt, Human
aggagccaggaaaccugcucug

SEQ ID NO: 968647 - RNA, 22 nt, Human
cagcaauaagccagguuagaca

SEQ ID NO: 968648 - RNA, 22 nt, Human
cacuccuguuccacuaaaugag

SEQ ID NO: 968649 - RNA, 22 nt, Human
uccucaggaugugggguagaau

SEQ ID NO: 968650 - RNA, 22 nt, Human
agcuguccuggcucaggcugug

SEQ ID NO: 968651 - RNA, 22 nt, Human
acacaugagaaacaucaguugu

SEQ ID NO: 968652 - RNA, 22 nt, Human
ggccaaauuuggccaugagcau

SEQ ID NO: 968653 - RNA, 22 nt, Human
gagcuggcuccgccaugcugcu

SEQ ID NO: 968654 - RNA, 22 nt, Human
acuuucucccacccacccgucu

SEQ ID NO: 968655 - RNA, 22 nt, Human
agaccaagacuauaaugagagg

SEQ ID NO: 968656 - RNA, 22 nt, Human
gaaaugcagauucugauucugu

SEQ ID NO: 968657 - RNA, 22 nt, Human
aggcugggcaccguuuugaucc

SEQ ID NO: 968658 - RNA, 22 nt, Human
cuccagggagcuuggaaagacc

SEQ ID NO: 968659 - RNA, 22 nt, Human
ucaucucaaaacccaaggggca

SEQ ID NO: 968660 - RNA, 22 nt, Human
gagggaggggagcuccacccuc

SEQ ID NO: 968661 - RNA, 22 nt, Human
aauguuguuuuucugcaugucu

SEQ ID NO: 968662 - RNA, 22 nt, Human
acuggcagaggauagcacuaau

SEQ ID NO: 968663 - RNA, 22 nt, Human
uccugagcugccgcaucagcag

SEQ ID NO: 968664 - RNA, 22 nt, Human
ccagguggugaaagugggcccu

SEQ ID NO: 968665 - RNA, 22 nt, Human
aggugagugugacugcaagaga

SEQ ID NO: 968666 - RNA, 22 nt, Human
aaacauugcuaaauaaugcugc

SEQ ID NO: 968667 - RNA, 22 nt, Human
ugaugguugauuauaaaucagu

SEQ ID NO: 968668 - RNA, 22 nt, Human
ccuuuccuuuuuagugugggag

SEQ ID NO: 968669 - RNA, 22 nt, Human
aaggcccuggccccagcuucuu

SEQ ID NO: 968670 - RNA, 22 nt, Human
gaggaaccaaaucagcuugcac

SEQ ID NO: 968671 - RNA, 22 nt, Human
aagcagaauuucccacuaguug

SEQ ID NO: 968672 - RNA, 22 nt, Human
uggugcugauaauggcaggauu

SEQ ID NO: 968673 - RNA, 22 nt, Human
agccacagucaaccuguccaua

SEQ ID NO: 968674 - RNA, 22 nt, Human
agggcacaagacucugagcccc

SEQ ID NO: 968675 - RNA, 22 nt, Human
aaaugcaucagcucauaagaga

SEQ ID NO: 968676 - RNA, 22 nt, Human
ucagccucucugaguccagacc

SEQ ID NO: 968677 - RNA, 20 nt, Human
cccucugcacauggcugugg

SEQ ID NO: 968678 - RNA, 22 nt, Human
ucugagggcuugaggggaagua

SEQ ID NO: 968679 - RNA, 23 nt, Human
ccagcucccaggucugaggacug

SEQ ID NO: 968680 - RNA, 22 nt, Human
acaugcauacaagcacauguag

SEQ ID NO: 968681 - RNA, 22 nt, Human
ugccagcaguagcaguaggcca

SEQ ID NO: 968682 - RNA, 22 nt, Human
uaaugaugugugcaaacugaau

SEQ ID NO: 968683 - RNA, 22 nt, Human
ccucuccuugcacccgucccgc

SEQ ID NO: 968684 - RNA, 20 nt, Human
ucauccaggacaggaguggc

SEQ ID NO: 968685 - RNA, 22 nt, Human
ggugagggaguggaacgaggug

SEQ ID NO: 968686 - RNA, 20 nt, Human
gggcuggcgcauggggaaag

SEQ ID NO: 968687 - RNA, 19 nt, Human
ugcauccaaagccccacca

SEQ ID NO: 968688 - RNA, 22 nt, Human
gacaggaggcagagcucaggug

SEQ ID NO: 968689 - RNA, 22 nt, Human
gcugucaggaacaugccuuggu

SEQ ID NO: 968690 - RNA, 21 nt, Human
cugugcuucuuccuaagccag

SEQ ID NO: 968691 - RNA, 22 nt, Human
ucugcucuaguugcuuccugcc

SEQ ID NO: 968692 - RNA, 22 nt, Human
cagggugacugcccuggccacu

SEQ ID NO: 968693 - RNA, 23 nt, Human
ucagagaaguuguaggcugggga

SEQ ID NO: 968694 - RNA, 22 nt, Human
agguggguccuggcucugccau

SEQ ID NO: 968695 - RNA, 22 nt, Human
aucauaaagugcuaucugauug

SEQ ID NO: 968696 - RNA, 22 nt, Human
cccagcuugcccaggacugagg

SEQ ID NO: 968697 - RNA, 22 nt, Human
uggccaggggaguuccccucca

SEQ ID NO: 968698 - RNA, 22 nt, Human
acaggcuuuuuuagaaugacau

SEQ ID NO: 968699 - RNA, 19 nt, Human
acaaaugauguugcacuga

SEQ ID NO: 968700 - RNA, 22 nt, Human
uucauugugauucuuggcuagc

SEQ ID NO: 968701 - RNA, 22 nt, Human
cucucugcuguauccuuaggcu

SEQ ID NO: 968702 - RNA, 22 nt, Human
auguuuaaaggagucagagacu

SEQ ID NO: 968703 - RNA, 22 nt, Human
ugcagcagacugaguaugagaa

SEQ ID NO: 968704 - RNA, 22 nt, Human
caggcagccuucucgucucaca

SEQ ID NO: 968705 - RNA, 22 nt, Human
uccucagaaaccccugugaggu

SEQ ID NO: 968706 - RNA, 22 nt, Human
cauucuaucuuggacuggaucu

SEQ ID NO: 968707 - RNA, 22 nt, Human
cagcaucaccgccauuucugau

SEQ ID NO: 968708 - RNA, 22 nt, Human
caggccuccacuccacgcagac

SEQ ID NO: 968709 - RNA, 22 nt, Human
aacuaacagucauuaaaagaac

SEQ ID NO: 968710 - RNA, 22 nt, Human
ucugaaaugcaaauuugacuga

SEQ ID NO: 968711 - RNA, 22 nt, Human
auacauacguacauacguaugu

SEQ ID NO: 968712 - RNA, 22 nt, Human
acauuucucagguaagucauuu

SEQ ID NO: 968713 - RNA, 22 nt, Human
agccagccaguucacuaggaaa

SEQ ID NO: 968714 - RNA, 22 nt, Human
gagcuggugaucagcuggagga

SEQ ID NO: 968715 - RNA, 22 nt, Human
auccugggcagugugucacucu

SEQ ID NO: 968716 - RNA, 22 nt, Human
auugucuguacuuuaaaaaugu

SEQ ID NO: 968717 - RNA, 22 nt, Human
gcucacugcaaccucugcuucc

SEQ ID NO: 968718 - RNA, 22 nt, Human
gcuggcuuugcacugggugcau

SEQ ID NO: 968719 - RNA, 22 nt, Human
cugggagcuagcucugagcuga

SEQ ID NO: 968720 - RNA, 22 nt, Human
ugcauuccauguguuuccugag

SEQ ID NO: 968721 - RNA, 22 nt, Human
ccaggcauccauugcuuccucu

SEQ ID NO: 968722 - RNA, 22 nt, Human
guucagggagggacagaugaag

SEQ ID NO: 968723 - RNA, 17 nt, Human
gcuggcugacccaugcc

SEQ ID NO: 968724 - RNA, 22 nt, Human
uggcagagcuggcugcggauga

SEQ ID NO: 968725 - RNA, 22 nt, Human
uauaucauggagauuaacauuc

SEQ ID NO: 968726 - RNA, 22 nt, Human
ggccugcugacccaaguccugu

SEQ ID NO: 968727 - RNA, 19 nt, Human
accaggaguaucagagcug

SEQ ID NO: 968728 - RNA, 22 nt, Human
caucugcugcugaagccagcau

SEQ ID NO: 968729 - RNA, 20 nt, Human
uguugauuggugucaucuca

SEQ ID NO: 968730 - RNA, 22 nt, Human
aucugccuggcuccaggugagc

SEQ ID NO: 968731 - RNA, 22 nt, Human
cuuuauguccuugaagaguugu

SEQ ID NO: 968732 - RNA, 22 nt, Human
agagggcccauguugggcugcu

SEQ ID NO: 968733 - RNA, 22 nt, Human
gagcugccuacauugccaagag

SEQ ID NO: 968734 - RNA, 22 nt, Human
ccagcuccgggaguugcugcug

SEQ ID NO: 968735 - RNA, 17 nt, Human
cccacggaggugugaaa

SEQ ID NO: 968736 - RNA, 22 nt, Human
aggcaguggagcuggaauaggc

SEQ ID NO: 968737 - RNA, 22 nt, Human
ccugccugcaccuucucugggg

SEQ ID NO: 968738 - RNA, 22 nt, Human
caggccugugacaccgugucug

SEQ ID NO: 968739 - RNA, 22 nt, Human
aaggugucacugggacaggaaa

SEQ ID NO: 968740 - RNA, 22 nt, Human
uuucccagagguaugaauaagu

SEQ ID NO: 968741 - RNA, 22 nt, Human
ccaggacaaguguggccauggc

SEQ ID NO: 968742 - RNA, 21 nt, Human
uugaagcaaggguggcucuga

SEQ ID NO: 968743 - RNA, 22 nt, Human
cagggugccuguccucagcaaa

SEQ ID NO: 968744 - RNA, 22 nt, Human
uccaagggcaacaauggaacac

SEQ ID NO: 968745 - RNA, 22 nt, Human
ggaaccaggaguuacacgaguu

SEQ ID NO: 968746 - RNA, 22 nt, Human
cuggggcugcagcgaucuucau

SEQ ID NO: 968747 - RNA, 22 nt, Human
acagagccuccaggagugcugg

SEQ ID NO: 968748 - RNA, 18 nt, Human
ccuggcuuccaucuuggu

SEQ ID NO: 968749 - RNA, 19 nt, Human
acagaaauuaguuauuuuc

SEQ ID NO: 968750 - RNA, 22 nt, Human
ugccaggauggccagggggcca

SEQ ID NO: 968751 - RNA, 22 nt, Human
uccaggagacacccuugugugu

SEQ ID NO: 968752 - RNA, 22 nt, Human
aauuucaaacuaauaggaacca

SEQ ID NO: 968753 - RNA, 22 nt, Human
aagccgggccugagaaaugaca

SEQ ID NO: 968754 - RNA, 22 nt, Human
uuucaaauaccauaaaccuaau

SEQ ID NO: 968755 - RNA, 22 nt, Human
ugaggugaccgcagaugggaag

SEQ ID NO: 968756 - RNA, 22 nt, Human
cugaaggacacgugaggagcca

SEQ ID NO: 968757 - RNA, 22 nt, Human
gccuguccacuaaacagccaag

SEQ ID NO: 968758 - RNA, 22 nt, Human
uaaggccaaacuauuauaguuc

SEQ ID NO: 968759 - RNA, 22 nt, Human
ugcaggugugguuccucagcca

SEQ ID NO: 968760 - RNA, 22 nt, Human
ucuuugcacugugcaagcagaa

SEQ ID NO: 968761 - RNA, 22 nt, Human
cuuggcagauccaaaaaugaca

SEQ ID NO: 968762 - RNA, 21 nt, Human
gccauuguuuucuaccuggag

SEQ ID NO: 968763 - RNA, 22 nt, Human
acuuugcagggcuugauaucca

SEQ ID NO: 968764 - RNA, 22 nt, Human
caggugggagcggagacugauu

SEQ ID NO: 968765 - RNA, 22 nt, Human
auggccaagcauauacagauug

SEQ ID NO: 968766 - RNA, 22 nt, Human
aagaaauuaaggaaugcaacga

SEQ ID NO: 968767 - RNA, 22 nt, Human
agagcuggauggucaagauggc

SEQ ID NO: 968768 - RNA, 22 nt, Human
agucucagggccacccggggaa

SEQ ID NO: 968769 - RNA, 22 nt, Human
ggcagcuggguuggccagaaac

SEQ ID NO: 968770 - RNA, 22 nt, Human
caaaugcauagaaagaugaaac

SEQ ID NO: 968771 - RNA, 22 nt, Human
acuuuuuacaggguguauacca

SEQ ID NO: 968772 - RNA, 22 nt, Human
aagaacagguucuagaaccauu

SEQ ID NO: 968773 - RNA, 22 nt, Human
gcucugggaacugacugccuuc

SEQ ID NO: 968774 - RNA, 22 nt, Human
gugccugccccacuccucagca

SEQ ID NO: 968775 - RNA, 22 nt, Human
uuucucugaggcuggccucccu

SEQ ID NO: 968776 - RNA, 22 nt, Human
cucagggcuugaguguccagga

SEQ ID NO: 968777 - RNA, 21 nt, Human
agguggggcugcaccucugcu

SEQ ID NO: 968778 - RNA, 22 nt, Human
gagcagagacaguacaacuggc

SEQ ID NO: 968779 - RNA, 22 nt, Human
uugcugugucugauggcugaga

SEQ ID NO: 968780 - RNA, 21 nt, Human
auucugaguugucagucuuca

SEQ ID NO: 968781 - RNA, 22 nt, Human
gcagcugaauguccauugcugc

SEQ ID NO: 968782 - RNA, 22 nt, Human
uucaggauccccaccgcguuua

SEQ ID NO: 968783 - RNA, 22 nt, Human
uauauuaacacccacuugccuc

SEQ ID NO: 968784 - RNA, 22 nt, Human
gcauccagucuuggcuccugga

SEQ ID NO: 968785 - RNA, 22 nt, Human
aggcagacaaggucccuggucu

SEQ ID NO: 968786 - RNA, 22 nt, Human
ccuguucaauauucuuccuugu

SEQ ID NO: 968787 - RNA, 22 nt, Human
cauuugaaugagauugcuguaa

SEQ ID NO: 968788 - RNA, 22 nt, Human
aaguuacaggagaaagagauca

SEQ ID NO: 968789 - RNA, 22 nt, Human
ggaggugguggcagugacaauu

SEQ ID NO: 968790 - RNA, 22 nt, Human
aaauacaguguguguucuuuga

SEQ ID NO: 968791 - RNA, 22 nt, Human
ggcagcugcaaaucugcucugu

SEQ ID NO: 968792 - RNA, 22 nt, Human
gcccagcugucuggcagggaug

SEQ ID NO: 968793 - RNA, 22 nt, Human
uggcagcucuguucaacaugag

SEQ ID NO: 968794 - RNA, 20 nt, Human
ugggagcuggugaggucuca

SEQ ID NO: 968795 - RNA, 22 nt, Human
gaggcagcaaaauauaucauaa

SEQ ID NO: 968796 - RNA, 22 nt, Human
acagugacguuuauuugagacg

SEQ ID NO: 968797 - RNA, 22 nt, Human
ccagccagccuugaucugagua

SEQ ID NO: 968798 - RNA, 22 nt, Human
cacaggagguuaggaagugguc

SEQ ID NO: 968799 - RNA, 22 nt, Human
aggcaguuuauccccagagccu

SEQ ID NO: 968800 - RNA, 22 nt, Human
ugggcuacucugggagccuaac

SEQ ID NO: 968801 - RNA, 22 nt, Human
caguuuaaccuauccauuaugu

SEQ ID NO: 968802 - RNA, 22 nt, Human
uugacagcuauuuugcuuugau

SEQ ID NO: 968803 - RNA, 22 nt, Human
uuggccuuguuaaggaggcccu

SEQ ID NO: 968804 - RNA, 22 nt, Human
cauuugaaauucuuagaacaaa

SEQ ID NO: 968805 - RNA, 22 nt, Human
augugucucuaaaauuuaguaa

SEQ ID NO: 968806 - RNA, 22 nt, Human
cuguagccaguuuggccucacc

SEQ ID NO: 968807 - RNA, 22 nt, Human
uggcccugcacccagagcaguu

SEQ ID NO: 968808 - RNA, 22 nt, Human
gugauuuucuccuccuagaagu

SEQ ID NO: 968809 - RNA, 22 nt, Human
guggccaauuuccaucuguaag

SEQ ID NO: 968810 - RNA, 22 nt, Human
cagggagcacugcgagcggcag

SEQ ID NO: 968811 - RNA, 22 nt, Human
ugaggcaggacugagcgggaug

SEQ ID NO: 968812 - RNA, 22 nt, Human
ggaggggagauguuugggcuca

SEQ ID NO: 968813 - RNA, 22 nt, Human
uucaugaaaguguaucuugugg

SEQ ID NO: 968814 - RNA, 22 nt, Human
cccagcagaccgcugugauggc

SEQ ID NO: 968815 - RNA, 22 nt, Human
ucugggagagcacguggcugac

SEQ ID NO: 968816 - RNA, 22 nt, Human
caaugauggcuaggcagcugcu

SEQ ID NO: 968817 - RNA, 22 nt, Human
caaugugucaggaaaagggcca

SEQ ID NO: 968818 - RNA, 20 nt, Human
uccaagggcagcagaaucag

SEQ ID NO: 968819 - RNA, 22 nt, Human
cgaggcaggcaggcggaggaua

SEQ ID NO: 968820 - RNA, 22 nt, Human
gccugggagagggauagugcag

SEQ ID NO: 968821 - RNA, 22 nt, Human
ccucaggggucacugugaggag

SEQ ID NO: 968822 - RNA, 22 nt, Human
uggccugggugcugcugacauc

SEQ ID NO: 968823 - RNA, 22 nt, Human
gaaauauuacaguggaggggau

SEQ ID NO: 968824 - RNA, 22 nt, Human
gcagcuggucuggccuagagua

SEQ ID NO: 968825 - RNA, 22 nt, Human
agcucccagucuccucuccaug

SEQ ID NO: 968826 - RNA, 16 nt, Human
ccccaggacuuggcac

SEQ ID NO: 968827 - RNA, 22 nt, Human
uugaagcaaauucugugcagua

SEQ ID NO: 968828 - RNA, 22 nt, Human
uacucugccccagccaauaaug

SEQ ID NO: 968829 - RNA, 22 nt, Human
cugucugcuagaacaucuauac

SEQ ID NO: 968830 - RNA, 22 nt, Human
gcuugggagaggguccccagga

SEQ ID NO: 968831 - RNA, 22 nt, Human
ugccugcucuuaccacucuccc

SEQ ID NO: 968832 - RNA, 22 nt, Human
ggcucagaccucccagcuccag

SEQ ID NO: 968833 - RNA, 22 nt, Human
uuguaacaggcacucugugcca

SEQ ID NO: 968834 - RNA, 22 nt, Human
guggcagcaaaugccuggacua

SEQ ID NO: 968835 - RNA, 22 nt, Human
uggacucaaguccaaguucacg

SEQ ID NO: 968836 - RNA, 22 nt, Human
cacauuucucuaccucacacaa

SEQ ID NO: 968837 - RNA, 22 nt, Human
acucagaaccauuuacucugag

SEQ ID NO: 968838 - RNA, 17 nt, Human
cugucugcgcaugaggu

SEQ ID NO: 968839 - RNA, 19 nt, Human
ccagcagacacagcugccc

SEQ ID NO: 968840 - RNA, 22 nt, Human
gcagggugauagugaggcucag

SEQ ID NO: 968841 - RNA, 22 nt, Human
accugccuaguugguucugccc

SEQ ID NO: 968842 - RNA, 22 nt, Human
aggcagagaaaaaccagauaug

SEQ ID NO: 968843 - RNA, 22 nt, Human
aggcccugcauuguacugaggg

SEQ ID NO: 968844 - RNA, 22 nt, Human
ucccuguccugggcaaucccag

SEQ ID NO: 968845 - RNA, 22 nt, Human
aucagcaaguccuguuaauucu

SEQ ID NO: 968846 - RNA, 22 nt, Human
cuuguucaguccugacuuccug

SEQ ID NO: 968847 - RNA, 22 nt, Human
aucuggcuuggguguggguagc

SEQ ID NO: 968848 - RNA, 22 nt, Human
caggcaccccaggugagcacug

SEQ ID NO: 968849 - RNA, 22 nt, Human
aggggaggagcuuuucuugccu

SEQ ID NO: 968850 - RNA, 22 nt, Human
ggcugccuugacccuggcuccg

SEQ ID NO: 968851 - RNA, 22 nt, Human
ucacaacucuuuccauuuaaua

SEQ ID NO: 968852 - RNA, 22 nt, Human
gccugccuuuuggaggcacauu

SEQ ID NO: 968853 - RNA, 22 nt, Human
aggcuccuuguucaucauccau

SEQ ID NO: 968854 - RNA, 21 nt, Human
cugcaucucauagaacauguc

SEQ ID NO: 968855 - RNA, 21 nt, Human
cucaggcauuugaggagaguc

SEQ ID NO: 968856 - RNA, 22 nt, Human
cggcagagcuuccugcucagcg

SEQ ID NO: 968857 - RNA, 22 nt, Human
agccccugggaguagcugcugc

SEQ ID NO: 968858 - RNA, 22 nt, Human
acagaauucucucugcagaggc

SEQ ID NO: 968859 - RNA, 22 nt, Human
cagguggaucucuaaggacuga

SEQ ID NO: 968860 - RNA, 22 nt, Human
uagaaauguugguauuaacauu

SEQ ID NO: 968861 - RNA, 22 nt, Human
ucaguuuuucuauacuuuguag

SEQ ID NO: 968862 - RNA, 18 nt, Human
cuuguucuucucuuggcg

SEQ ID NO: 968863 - RNA, 22 nt, Human
cuggcacaaugucacuuuugcu

SEQ ID NO: 968864 - RNA, 22 nt, Human
auggccaacugaaaugaaagau

SEQ ID NO: 968865 - RNA, 22 nt, Human
cuuggccucuucucaggguggg

SEQ ID NO: 968866 - RNA, 22 nt, Human
aguucuuuugugaacauaugcu

SEQ ID NO: 968867 - RNA, 22 nt, Human
ugaaaucuuagccauucugccu

SEQ ID NO: 968868 - RNA, 21 nt, Human
aggcagcaggauccagggaca

SEQ ID NO: 968869 - RNA, 22 nt, Human
aaguauuucguucugaaaaagu

SEQ ID NO: 968870 - RNA, 20 nt, Human
aagcacauuucuacaauaau

SEQ ID NO: 968871 - RNA, 22 nt, Human
accaggagaggcacuugcaaug

SEQ ID NO: 968872 - RNA, 22 nt, Human
gucucagauucagacaucuaca

SEQ ID NO: 968873 - RNA, 18 nt, Human
uccuccuuuggccuuuuc

SEQ ID NO: 968874 - RNA, 22 nt, Human
ccuggccauagggcccaggaaa

SEQ ID NO: 968875 - RNA, 22 nt, Human
gggagggaaagcuugaucuguc

SEQ ID NO: 968876 - RNA, 22 nt, Human
uacacauguuuggcaaguaugu

SEQ ID NO: 968877 - RNA, 17 nt, Human
ggaaaaggaugauacag

SEQ ID NO: 968878 - RNA, 22 nt, Human
aaaauaucagcaaagggugaca

SEQ ID NO: 968879 - RNA, 18 nt, Human
cccagcuccacuucccuc

SEQ ID NO: 968880 - RNA, 22 nt, Human
uggcucaguuuagcagcucagu

SEQ ID NO: 968881 - RNA, 22 nt, Human
uaagcauucaaugcuuagcacu

SEQ ID NO: 968882 - RNA, 20 nt, Human
uauauaggaaauauuguguu

SEQ ID NO: 968883 - RNA, 22 nt, Human
uccaggagggggagccgugccg

SEQ ID NO: 968884 - RNA, 22 nt, Human
uaaaaguaggaaugaaacgcau

SEQ ID NO: 968885 - RNA, 22 nt, Human
aggguagggcccggagacagac

SEQ ID NO: 968886 - RNA, 22 nt, Human
accucccagcucugagcuuggg

SEQ ID NO: 968887 - RNA, 22 nt, Human
acagaaugcguagugcauguug

SEQ ID NO: 968888 - RNA, 17 nt, Human
gcugccaccuuuggagc

SEQ ID NO: 968889 - RNA, 22 nt, Human
aggcauguauaugugcacaugu

SEQ ID NO: 968890 - RNA, 22 nt, Human
aggcugaggcagguggaucauu

SEQ ID NO: 968891 - RNA, 21 nt, Human
gcagggacaaagcuucaggag

SEQ ID NO: 968892 - RNA, 20 nt, Human
acagaaagagagaaugucag

SEQ ID NO: 968893 - RNA, 21 nt, Human
aaacugaccuugccugagaca

SEQ ID NO: 968894 - RNA, 22 nt, Human
ggaaccaguggaaugauaugcu

SEQ ID NO: 968895 - RNA, 21 nt, Human
gcagccagacgggauucaguu

SEQ ID NO: 968896 - RNA, 22 nt, Human
uauuuaauaaaacuauggcaug

SEQ ID NO: 968897 - RNA, 22 nt, Human
gggacaggcugagacuugagcu

SEQ ID NO: 968898 - RNA, 22 nt, Human
ucauacauaacuuguacaguga

SEQ ID NO: 968899 - RNA, 22 nt, Human
gugcgccagcucaaggggaggc

SEQ ID NO: 968900 - RNA, 22 nt, Human
ucugcagcuucuugccagagag

SEQ ID NO: 968901 - RNA, 17 nt, Human
agcagcugaagcagcca

SEQ ID NO: 968902 - RNA, 18 nt, Human
gagaggcccggcugugcc

SEQ ID NO: 968903 - RNA, 22 nt, Human
caucagcagucacaugaugcug

SEQ ID NO: 968904 - RNA, 22 nt, Human
ugcaguggcgccaucucagcuc

SEQ ID NO: 968905 - RNA, 22 nt, Human
cucugugccagucugcacucgg

SEQ ID NO: 968906 - RNA, 22 nt, Human
aaggcugaggagggccugcagg

SEQ ID NO: 968907 - RNA, 22 nt, Human
aaguucaaucagaugaaaaagc

SEQ ID NO: 968908 - RNA, 22 nt, Human
agggcuggcaagggauugaaau

SEQ ID NO: 968909 - RNA, 22 nt, Human
acccaggagcucugggguccuc

SEQ ID NO: 968910 - RNA, 22 nt, Human
ugaggaggucagagucuggcug

SEQ ID NO: 968911 - RNA, 22 nt, Human
ccaggccucuggcugcuuaguc

SEQ ID NO: 968912 - RNA, 22 nt, Human
caaaugugguuucucagcauuc

SEQ ID NO: 968913 - RNA, 22 nt, Human
cuugaacucaaugugaggaaga

SEQ ID NO: 968914 - RNA, 22 nt, Human
uuggcaguagugguaguacauu

SEQ ID NO: 968915 - RNA, 22 nt, Human
uuuuauauugagugagaguucc

SEQ ID NO: 968916 - RNA, 22 nt, Human
uauuucaacguaugaaaagcug

SEQ ID NO: 968917 - RNA, 18 nt, Human
uguuccaaggaaggaauc

SEQ ID NO: 968918 - RNA, 22 nt, Human
cugcaggcugagcgccugccgg

SEQ ID NO: 968919 - RNA, 17 nt, Human
gucugggcuuuagagac

SEQ ID NO: 968920 - RNA, 22 nt, Human
ugcagcugcuggcccaggugcu

SEQ ID NO: 968921 - RNA, 22 nt, Human
gcugugggugcuggcuccaccc

SEQ ID NO: 968922 - RNA, 22 nt, Human
ucacaugaguauuauuuuccaa

SEQ ID NO: 968923 - RNA, 22 nt, Human
cacugaagccacuggaagagga

SEQ ID NO: 968924 - RNA, 22 nt, Human
auugaaaguccuaucuaaggga

SEQ ID NO: 968925 - RNA, 23 nt, Human
cagguggcuccacgagggguggg

SEQ ID NO: 968926 - RNA, 22 nt, Human
gaggccagggaugcaaugagag

SEQ ID NO: 968927 - RNA, 18 nt, Human
uccauuguucuacuguga

SEQ ID NO: 968928 - RNA, 22 nt, Human
uaaauguauaggcacuaaaccu

SEQ ID NO: 968929 - RNA, 22 nt, Human
gcuucucuggccugcagggcau

SEQ ID NO: 968930 - RNA, 22 nt, Human
aaaucagucccucuuggaauuu

SEQ ID NO: 968931 - RNA, 22 nt, Human
gcccagugguaaaagcaggccu

SEQ ID NO: 968932 - RNA, 22 nt, Human
cagcaugguuggguucugggga

SEQ ID NO: 968933 - RNA, 22 nt, Human
uuccagggcuaauuccugugga

SEQ ID NO: 968934 - RNA, 22 nt, Human
cugcagccucaaccuccugagc

SEQ ID NO: 968935 - RNA, 22 nt, Human
ugcucacagcccagaacauaau

SEQ ID NO: 968936 - RNA, 22 nt, Human
auuguuuuauuaaaugagcccu

SEQ ID NO: 968937 - RNA, 22 nt, Human
aacacauaggcagagcaugaca

SEQ ID NO: 968938 - RNA, 18 nt, Human
cccggcuaauuuuuggua

SEQ ID NO: 968939 - RNA, 17 nt, Human
uuugaaaggaugucagu

SEQ ID NO: 968940 - RNA, 22 nt, Human
ugccucuguggaaauggugguc

SEQ ID NO: 968941 - RNA, 22 nt, Human
ugcucugguccucccucggcgc

SEQ ID NO: 968942 - RNA, 19 nt, Human
ucaaagucugagucacuuu

SEQ ID NO: 968943 - RNA, 22 nt, Human
gccagagcugagugagguucuu

SEQ ID NO: 968944 - RNA, 22 nt, Human
aaguuuaagguggaaguggugg

SEQ ID NO: 968945 - RNA, 22 nt, Human
caguguccucagccagcagcua

SEQ ID NO: 968946 - RNA, 22 nt, Human
gcuguccucugaucucuggagg

SEQ ID NO: 968947 - RNA, 22 nt, Human
ucuaaaaaagucuguucacuug

SEQ ID NO: 968948 - RNA, 22 nt, Human
guggccaaacaccaguuuagga

SEQ ID NO: 968949 - RNA, 22 nt, Human
ccagaggcuggguucaccucag

SEQ ID NO: 968950 - RNA, 22 nt, Human
uccaggaggccucauuuccugu

SEQ ID NO: 968951 - RNA, 22 nt, Human
cagccagggagcaaagaguuga

SEQ ID NO: 968952 - RNA, 22 nt, Human
gccuggagcccaguguggggcu

SEQ ID NO: 968953 - RNA, 22 nt, Human
uuucauuauucaugcuaguuau

SEQ ID NO: 968954 - RNA, 18 nt, Human
ugcuggguaacuguaugg

SEQ ID NO: 968955 - RNA, 22 nt, Human
gcagcugcaggcaggcuugcug

SEQ ID NO: 968956 - RNA, 22 nt, Human
uuuuuccuuagggguuacucac

SEQ ID NO: 968957 - RNA, 22 nt, Human
agcauuuaauuacaguuuaauu

SEQ ID NO: 968958 - RNA, 22 nt, Human
ggcauggcucggagucagaaca

SEQ ID NO: 968959 - RNA, 22 nt, Human
auacauuagaaucugguacuca

SEQ ID NO: 968960 - RNA, 22 nt, Human
ugugaaagauacuaggcagagg

SEQ ID NO: 968961 - RNA, 22 nt, Human
cagcuggaucccugcagaacuu

SEQ ID NO: 968962 - RNA, 22 nt, Human
uucuuuccacagaggggaugau

SEQ ID NO: 968963 - RNA, 22 nt, Human
auuucuguaguccacauucuuu

SEQ ID NO: 968964 - RNA, 22 nt, Human
cugcugcugagaaugccucagg

SEQ ID NO: 968965 - RNA, 22 nt, Human
uucuuauucuugaaauguggga

SEQ ID NO: 968966 - RNA, 22 nt, Human
caguacuuugcaucauuccacu

SEQ ID NO: 968967 - RNA, 22 nt, Human
ugcuggaggccugacuguguuu

SEQ ID NO: 968968 - RNA, 22 nt, Human
cugagcugggcucucuugaggg

SEQ ID NO: 968969 - RNA, 18 nt, Human
gcacucugacugcagagc

SEQ ID NO: 968970 - RNA, 22 nt, Human
gcugucacucaccaggccugca

SEQ ID NO: 968971 - RNA, 22 nt, Human
uggaggaaaaaaccaggcagag

SEQ ID NO: 968972 - RNA, 22 nt, Human
cacauggccuguguggccagac

SEQ ID NO: 968973 - RNA, 19 nt, Human
cugaggcccauguaccaug

SEQ ID NO: 968974 - RNA, 22 nt, Human
cagugauguuucugcaucagag

SEQ ID NO: 968975 - RNA, 22 nt, Human
ggcucagguuaccagucccucc

SEQ ID NO: 968976 - RNA, 22 nt, Human
ucaggcugagaaaaucuggacc

SEQ ID NO: 968977 - RNA, 22 nt, Human
ugggccugugaugcugggcuau

SEQ ID NO: 968978 - RNA, 22 nt, Human
cccuggaguccuggcaguugau

SEQ ID NO: 968979 - RNA, 22 nt, Human
uuuaaauuauaguuaaugucug

SEQ ID NO: 968980 - RNA, 22 nt, Human
aaagauuuaagaauaauuugug

SEQ ID NO: 968981 - RNA, 22 nt, Human
ugagccugggagauggaggcug

SEQ ID NO: 968982 - RNA, 22 nt, Human
gaaaucugaaucuucuguuggu

SEQ ID NO: 968983 - RNA, 22 nt, Human
cugccuugguuucuagcagggc

SEQ ID NO: 968984 - RNA, 22 nt, Human
cccagacucaucccugggagcu

SEQ ID NO: 968985 - RNA, 22 nt, Human
gaggggcucuugggcaugaagg

SEQ ID NO: 968986 - RNA, 22 nt, Human
uccugucuaaagaccugcaggc

SEQ ID NO: 968987 - RNA, 22 nt, Human
agugcugaagacuggcuaggga

SEQ ID NO: 968988 - RNA, 22 nt, Human
auacacauguguaugugcaugc

SEQ ID NO: 968989 - RNA, 22 nt, Human
uguguuaacacugcaugauaau

SEQ ID NO: 968990 - RNA, 22 nt, Human
aagagagaacucccuucgccag

SEQ ID NO: 968991 - RNA, 22 nt, Human
ucugaacuccagcccugcucuc

SEQ ID NO: 968992 - RNA, 22 nt, Human
uggcagaggagaauuaagauua

SEQ ID NO: 968993 - RNA, 22 nt, Human
ucccaaggcacagggcagggac

SEQ ID NO: 968994 - RNA, 22 nt, Human
cagcaugguggagcugcucuuu

SEQ ID NO: 968995 - RNA, 22 nt, Human
uagucccauuuugagguauuug

SEQ ID NO: 968996 - RNA, 22 nt, Human
caguaaagcauguaugucuuca

SEQ ID NO: 968997 - RNA, 22 nt, Human
aggagaggucucccuuccccag

SEQ ID NO: 968998 - RNA, 19 nt, Human
ugucccagacuccgugucu

SEQ ID NO: 968999 - RNA, 21 nt, Human
gugguuauuuucauuagcauc

SEQ ID NO: 969000 - RNA, 22 nt, Human
aaucuuucccuauuaaaugugg

SEQ ID NO: 969001 - RNA, 19 nt, Human
gaggucagcaagaaguauu

SEQ ID NO: 969002 - RNA, 22 nt, Human
gcucugagagugggugauucug

SEQ ID NO: 969003 - RNA, 22 nt, Human
uagaaagcuugggguguuuaaa

SEQ ID NO: 969004 - RNA, 22 nt, Human
aaaauguaaagcuugaguguag

SEQ ID NO: 969005 - RNA, 22 nt, Human
cugcuuugaggggcucuguaua

SEQ ID NO: 969006 - RNA, 22 nt, Human
ucagguggcuuggagggggacg

SEQ ID NO: 969007 - RNA, 22 nt, Human
uagcacaucuucuuggccugca

SEQ ID NO: 969008 - RNA, 22 nt, Human
uuuuuggguccaggcuguaucu

SEQ ID NO: 969009 - RNA, 22 nt, Human
ccagcucccugaagccuggucu

SEQ ID NO: 969010 - RNA, 19 nt, Human
gagcagcugcacccauuga

SEQ ID NO: 969011 - RNA, 22 nt, Human
caaauucucuuacuguuugaca

SEQ ID NO: 969012 - RNA, 22 nt, Human
ccagcucugcagggccuggggu

SEQ ID NO: 969013 - RNA, 22 nt, Human
uacauuugggacaauaagagaa

SEQ ID NO: 969014 - RNA, 22 nt, Human
cagaggcucaccagccuuucac

SEQ ID NO: 969015 - RNA, 22 nt, Human
guaaaauagaauaacguggcua

SEQ ID NO: 969016 - RNA, 22 nt, Human
ucuucagacccuuagcugugau

SEQ ID NO: 969017 - RNA, 22 nt, Human
cugagcauggccgguccauggu

SEQ ID NO: 969018 - RNA, 22 nt, Human
gucaaguuuauccgcucauuca

SEQ ID NO: 969019 - RNA, 22 nt, Human
ucaacacucuuuggcacaguua

SEQ ID NO: 969020 - RNA, 22 nt, Human
ugaaaggugacauuucuuggau

SEQ ID NO: 969021 - RNA, 22 nt, Human
gaggagagggcugcgggcccac

SEQ ID NO: 969022 - RNA, 22 nt, Human
aucaguuucugugaagaacaca

SEQ ID NO: 969023 - RNA, 22 nt, Human
aggagagucuugagucacuggu

SEQ ID NO: 969024 - RNA, 22 nt, Human
uggucuaaauauggcucuaaau

SEQ ID NO: 969025 - RNA, 22 nt, Human
acagguggcuuauuggcugauu

SEQ ID NO: 969026 - RNA, 22 nt, Human
agagccuggucugagauaggac

SEQ ID NO: 969027 - RNA, 22 nt, Human
augggagugacagggccacugg

SEQ ID NO: 969028 - RNA, 22 nt, Human
gucauuccuuauguugauucag

SEQ ID NO: 969029 - RNA, 22 nt, Human
ucuuugcaggagcccuuugaac

SEQ ID NO: 969030 - RNA, 22 nt, Human
acagaguauuggaaaggcagug

SEQ ID NO: 969031 - RNA, 18 nt, Human
uggagcaggaagccuggc

SEQ ID NO: 969032 - RNA, 22 nt, Human
ggcuccuguggcaagacagcuu

SEQ ID NO: 969033 - RNA, 22 nt, Human
caugccaguuuugagaugcacc

SEQ ID NO: 969034 - RNA, 22 nt, Human
ugcugcucuucaccauggccuc

SEQ ID NO: 969035 - RNA, 22 nt, Human
aaagcuaugaggcaugcauuuc

SEQ ID NO: 969036 - RNA, 22 nt, Human
cacugcauggaugauggcugua

SEQ ID NO: 969037 - RNA, 22 nt, Human
aggguggcuggaggaaucagaa

SEQ ID NO: 969038 - RNA, 22 nt, Human
ggcagcuuccuaggagagggca

SEQ ID NO: 969039 - RNA, 22 nt, Human
aggcacuguacuagguacaggg

SEQ ID NO: 969040 - RNA, 18 nt, Human
gaaaugugauucuagggc

SEQ ID NO: 969041 - RNA, 22 nt, Human
ggcugcuucucacucauuugca

SEQ ID NO: 969042 - RNA, 22 nt, Human
uccucagggggccaacccagcc

SEQ ID NO: 969043 - RNA, 22 nt, Human
guuccacaaaauguacccaguu

SEQ ID NO: 969044 - RNA, 22 nt, Human
uuggccaauuccagaggaucau

SEQ ID NO: 969045 - RNA, 22 nt, Human
auucaaauuaaguuaauucagc

SEQ ID NO: 969046 - RNA, 22 nt, Human
agcagaaccacagcacuguuga

SEQ ID NO: 969047 - RNA, 22 nt, Human
cacagggcaccaguuggccauc

SEQ ID NO: 969048 - RNA, 21 nt, Human
gauuucacuuaccuucauuua

SEQ ID NO: 969049 - RNA, 22 nt, Human
ccugggcuggaguacagcagug

SEQ ID NO: 969050 - RNA, 21 nt, Human
uccucagggccccagagcacu

SEQ ID NO: 969051 - RNA, 22 nt, Human
gccaccagccccaugcgcugug

SEQ ID NO: 969052 - RNA, 20 nt, Human
uccagccacuuccgcugguc

SEQ ID NO: 969053 - RNA, 22 nt, Human
ugagaaccaugaaaagcuguca

SEQ ID NO: 969054 - RNA, 22 nt, Human
uuagaaacccagacucuuaggu

SEQ ID NO: 969055 - RNA, 22 nt, Human
cuguucacacacuuguacucuc

SEQ ID NO: 969056 - RNA, 22 nt, Human
cagauggcugccaagaugggcu

SEQ ID NO: 969057 - RNA, 22 nt, Human
gcccaggagaggccagggcuga

SEQ ID NO: 969058 - RNA, 22 nt, Human
agggccucugacgcccccagcc

SEQ ID NO: 969059 - RNA, 22 nt, Human
cugcugugauugggagaaaccg

SEQ ID NO: 969060 - RNA, 22 nt, Human
cucaggaugcaauuccaucaag

SEQ ID NO: 969061 - RNA, 22 nt, Human
cacaggaggaggccagagcgua

SEQ ID NO: 969062 - RNA, 22 nt, Human
uuuccuguugccaucaagaaug

SEQ ID NO: 969063 - RNA, 18 nt, Human
ggcugccuguuccugaag

SEQ ID NO: 969064 - RNA, 22 nt, Human
uaccuugggguuuuguugcucu

SEQ ID NO: 969065 - RNA, 22 nt, Human
agcagcauagaagcugggagga

SEQ ID NO: 969066 - RNA, 21 nt, Human
uagagaaaagaagcuguuccu

SEQ ID NO: 969067 - RNA, 22 nt, Human
uaugccagggacuguuucacca

SEQ ID NO: 969068 - RNA, 22 nt, Human
gcuuccuggagggagagagcug

SEQ ID NO: 969069 - RNA, 22 nt, Human
cuggagcaggcuugucccagcu

SEQ ID NO: 969070 - RNA, 22 nt, Human
ucuuccucuagaucugaggccc

SEQ ID NO: 969071 - RNA, 20 nt, Human
ccagcauguacacaugugga

SEQ ID NO: 969072 - RNA, 22 nt, Human
uucucuucaucucaguaaaugu

SEQ ID NO: 969073 - RNA, 22 nt, Human
ggcuucucucuucacauggcuu

SEQ ID NO: 969074 - RNA, 22 nt, Human
auaugucgcuacaucauuagau

SEQ ID NO: 969075 - RNA, 22 nt, Human
ccagcacugcucucagacugag

SEQ ID NO: 969076 - RNA, 20 nt, Human
agauggugaaggccagggag

SEQ ID NO: 969077 - RNA, 22 nt, Human
agucuccuuggccucaaugccu

SEQ ID NO: 969078 - RNA, 22 nt, Human
cagcuucccuuggcugagcaga

SEQ ID NO: 969079 - RNA, 22 nt, Human
uucaacacaggaacaugauaua

SEQ ID NO: 969080 - RNA, 22 nt, Human
aggcagauauuggggugaugug

SEQ ID NO: 969081 - RNA, 22 nt, Human
uauuuucuggacagucuugcuu

SEQ ID NO: 969082 - RNA, 22 nt, Human
cacauuuaaagguugaagcuga

SEQ ID NO: 969083 - RNA, 22 nt, Human
gcagaggcugggugucccaguc

SEQ ID NO: 969084 - RNA, 22 nt, Human
aaagagcuaacauugccgagau

SEQ ID NO: 969085 - RNA, 22 nt, Human
agaggauguucuaggcacucau

SEQ ID NO: 969086 - RNA, 22 nt, Human
gcaggggcugcugggaacucgg

SEQ ID NO: 969087 - RNA, 22 nt, Human
ucuguggauuuuaguguucaug

SEQ ID NO: 969088 - RNA, 22 nt, Human
guuugcauuuauuagucuucug

SEQ ID NO: 969089 - RNA, 21 nt, Human
uauacaugugugcauacgugu

SEQ ID NO: 969090 - RNA, 22 nt, Human
ggccuggcauggggacuaaggg

SEQ ID NO: 969091 - RNA, 22 nt, Human
acuuguuuuaucugucaauaga

SEQ ID NO: 969092 - RNA, 22 nt, Human
accugagggcccaaacuuggua

SEQ ID NO: 969093 - RNA, 22 nt, Human
uaggauaugguagaaaucauuc

SEQ ID NO: 969094 - RNA, 22 nt, Human
ccagcuggaagagugcagaacu

SEQ ID NO: 969095 - RNA, 22 nt, Human
uuacauuuggcuauguccucua

SEQ ID NO: 969096 - RNA, 21 nt, Human
aguugcauaggccagccaucc

SEQ ID NO: 969097 - RNA, 22 nt, Human
ggaaggucgagcugcaucuggc

SEQ ID NO: 969098 - RNA, 22 nt, Human
ggcugcaguuugucuuuugcuu

SEQ ID NO: 969099 - RNA, 23 nt, Human
uauggcaugguacuuccagcaga

SEQ ID NO: 969100 - RNA, 21 nt, Human
aacaaagggaugcucaucuuu

SEQ ID NO: 969101 - RNA, 22 nt, Human
aaagguuaagguguucaagaaa

SEQ ID NO: 969102 - RNA, 22 nt, Human
gaguggggcccacugcugggug

SEQ ID NO: 969103 - RNA, 22 nt, Human
gcugggcaccggagagacccca

SEQ ID NO: 969104 - RNA, 22 nt, Human
ugcagcauucuuggccacuacu

SEQ ID NO: 969105 - RNA, 22 nt, Human
agcaggagcccuuaucaccagg

SEQ ID NO: 969106 - RNA, 22 nt, Human
cccugcagaccaaugccauaga

SEQ ID NO: 969107 - RNA, 22 nt, Human
ccaggguggggcaggcccacug

SEQ ID NO: 969108 - RNA, 22 nt, Human
ucaugcaaggcugaaacauggu

SEQ ID NO: 969109 - RNA, 19 nt, Human
gcugucugaugcugagguc

SEQ ID NO: 969110 - RNA, 22 nt, Human
uguggccuggaaggggcugcuc

SEQ ID NO: 969111 - RNA, 22 nt, Human
ugaggcagugauguuuaagcac

SEQ ID NO: 969112 - RNA, 22 nt, Human
ggcagucuuaucagcauuggac

SEQ ID NO: 969113 - RNA, 22 nt, Human
cagcauggacccaucgcugagu

SEQ ID NO: 969114 - RNA, 22 nt, Human
cacugcuuaguugguaaaugug

SEQ ID NO: 969115 - RNA, 22 nt, Human
cagggagggaggaaaauuugcu

SEQ ID NO: 969116 - RNA, 22 nt, Human
ggagaggggcaaguuuaucuag

SEQ ID NO: 969117 - RNA, 22 nt, Human
uuuagaguugaguauucauugg

SEQ ID NO: 969118 - RNA, 18 nt, Human
aggcaggugcuggaaguc

SEQ ID NO: 969119 - RNA, 22 nt, Human
aggcaguuuaggcagcgauuua

SEQ ID NO: 969120 - RNA, 22 nt, Human
agggucugcauuccaacuuggg

SEQ ID NO: 969121 - RNA, 21 nt, Human
ggauggauagggaagagauuu

SEQ ID NO: 969122 - RNA, 22 nt, Human
gcuguuaggugcccugaccuug

SEQ ID NO: 969123 - RNA, 22 nt, Human
ggcagagcuuguuccuucuguu

SEQ ID NO: 969124 - RNA, 21 nt, Human
ggcugcugggagagcugcgug

SEQ ID NO: 969125 - RNA, 22 nt, Human
caacagaaggaagcagggucag

SEQ ID NO: 969126 - RNA, 19 nt, Human
caagugaagccugggaugg

SEQ ID NO: 969127 - RNA, 22 nt, Human
ucuuuccuuagaauaauucuuu

SEQ ID NO: 969128 - RNA, 22 nt, Human
uccucaggauguggaguagaau

SEQ ID NO: 969129 - RNA, 22 nt, Human
uagagugguuaacaguuuagaa

SEQ ID NO: 969130 - RNA, 22 nt, Human
gggcacagaagucuaagacauc

SEQ ID NO: 969131 - RNA, 22 nt, Human
aaaugucuguuagucauaucau

SEQ ID NO: 969132 - RNA, 22 nt, Human
guguacauagaauugugcuuug

SEQ ID NO: 969133 - RNA, 22 nt, Human
cagagcugcaaaugccccuccg

SEQ ID NO: 969134 - RNA, 22 nt, Human
auuuagaaguuggagggcaaga

SEQ ID NO: 969135 - RNA, 22 nt, Human
gguggccuccagggcauaggug

SEQ ID NO: 969136 - RNA, 19 nt, Human
acuggcaguuucugcaugg

SEQ ID NO: 969137 - RNA, 22 nt, Human
gggugggccacugagcagcgug

SEQ ID NO: 969138 - RNA, 22 nt, Human
aaucauaauuguauacauucau

SEQ ID NO: 969139 - RNA, 22 nt, Human
ggcugcagggcagcuggugugg

SEQ ID NO: 969140 - RNA, 22 nt, Human
gcaaggaccuuugagcgugcca

SEQ ID NO: 969141 - RNA, 22 nt, Human
agcuggccuguuagagcugagu

SEQ ID NO: 969142 - RNA, 22 nt, Human
ugggcucugcugcguaccaguu

SEQ ID NO: 969143 - RNA, 22 nt, Human
guccucugggcagcugccccac

SEQ ID NO: 969144 - RNA, 22 nt, Human
cugggagcucagcccuggggug

SEQ ID NO: 969145 - RNA, 22 nt, Human
acccaggaggugacacagggcu

SEQ ID NO: 969146 - RNA, 22 nt, Human
uggcacugccuggcagggcccc

SEQ ID NO: 969147 - RNA, 22 nt, Human
aguuuuuccugauuuuacagaa

SEQ ID NO: 969148 - RNA, 22 nt, Human
gcuaugcaggagccuaaugaca

SEQ ID NO: 969149 - RNA, 22 nt, Human
uuuaguagaugcagcauuauuu

SEQ ID NO: 969150 - RNA, 22 nt, Human
uuugaaauuggcucauugguuu

SEQ ID NO: 969151 - RNA, 22 nt, Human
uagaaaugauugguugagcucu

SEQ ID NO: 969152 - RNA, 22 nt, Human
cuuauguaaacuacagauaaua

SEQ ID NO: 969153 - RNA, 22 nt, Human
auaugugugaugcauggacuaa

SEQ ID NO: 969154 - RNA, 22 nt, Human
cauguacaaaaggcaaaugccu

SEQ ID NO: 969155 - RNA, 19 nt, Human
ggcagcuggacgcuguuca

SEQ ID NO: 969156 - RNA, 22 nt, Human
guucauuuaugauguaacaugu

SEQ ID NO: 969157 - RNA, 22 nt, Human
uauuagguaaaggacuugcagg

SEQ ID NO: 969158 - RNA, 22 nt, Human
cugucaccuguucacugcagca

SEQ ID NO: 969159 - RNA, 20 nt, Human
cuggguggcaagcaaggggg

SEQ ID NO: 969160 - RNA, 22 nt, Human
caggcagcaggagcccugcucg

SEQ ID NO: 969161 - RNA, 22 nt, Human
uccagggcuggguuggcucagc

SEQ ID NO: 969162 - RNA, 22 nt, Human
caguccagcucaucaguggcac

SEQ ID NO: 969163 - RNA, 19 nt, Human
acacagggaucagaggguu

SEQ ID NO: 969164 - RNA, 22 nt, Human
acaaagcuagagaagagaauug

SEQ ID NO: 969165 - RNA, 22 nt, Human
agauuuccaucuuuuucaugug

SEQ ID NO: 969166 - RNA, 22 nt, Human
cccaggaucaccuggucaaggg

SEQ ID NO: 969167 - RNA, 22 nt, Human
ucuggcucaaaauacguacucu

SEQ ID NO: 969168 - RNA, 22 nt, Human
ugaggcagccugcauuaaagag

SEQ ID NO: 969169 - RNA, 22 nt, Human
cucagagcccaggguacacccg

SEQ ID NO: 969170 - RNA, 22 nt, Human
aaauuauuaugccccucuauaa

SEQ ID NO: 969171 - RNA, 23 nt, Human
uggccucuccccaccuggcagaa

SEQ ID NO: 969172 - RNA, 22 nt, Human
gcugcccuaauaucacauguua

SEQ ID NO: 969173 - RNA, 22 nt, Human
guggguggaucaccugagguca

SEQ ID NO: 969174 - RNA, 22 nt, Human
cagagcucagagcagggcacuc

SEQ ID NO: 969175 - RNA, 22 nt, Human
gcuguucaaaagccacaguuac

SEQ ID NO: 969176 - RNA, 22 nt, Human
ucagaggauugccucagcgagc

SEQ ID NO: 969177 - RNA, 22 nt, Human
ugccagaagugcuuuauaagug

SEQ ID NO: 969178 - RNA, 22 nt, Human
agcugggagcagagccacagcc

SEQ ID NO: 969179 - RNA, 22 nt, Human
gagccuggccuccugccucagc

SEQ ID NO: 969180 - RNA, 22 nt, Human
caggcucccacccuccugcagc

SEQ ID NO: 969181 - RNA, 22 nt, Human
caaagcaaggcucaguuugaac

SEQ ID NO: 969182 - RNA, 22 nt, Human
aguuuaauauccuucaacuuuc

SEQ ID NO: 969183 - RNA, 17 nt, Human
auguuaauuucacauuu

SEQ ID NO: 969184 - RNA, 22 nt, Human
guccaugacugugacucacaug

SEQ ID NO: 969185 - RNA, 22 nt, Human
cauugaaaaacguugacugagu

SEQ ID NO: 969186 - RNA, 22 nt, Human
auggggagagaagggcugagcu

SEQ ID NO: 969187 - RNA, 20 nt, Human
cccagguaggugccaugagu

SEQ ID NO: 969188 - RNA, 22 nt, Human
aauaugcauguauacaugugua

SEQ ID NO: 969189 - RNA, 22 nt, Human
ugcaugcagcuggugauaagaa

SEQ ID NO: 969190 - RNA, 18 nt, Human
cuccagggaacucaguca

SEQ ID NO: 969191 - RNA, 22 nt, Human
cgcuggccauagccuccugugu

SEQ ID NO: 969192 - RNA, 22 nt, Human
uuucucuaaauagggaggcuua

SEQ ID NO: 969193 - RNA, 22 nt, Human
ggcugcagcagagggacucacg

SEQ ID NO: 969194 - RNA, 22 nt, Human
guauuagggccaaaggcaggaa

SEQ ID NO: 969195 - RNA, 22 nt, Human
uaacagaauagcagaaacagaa

SEQ ID NO: 969196 - RNA, 22 nt, Human
agagccugugggagaugcagcu

SEQ ID NO: 969197 - RNA, 22 nt, Human
agugucugaaccaccggggcau

SEQ ID NO: 969198 - RNA, 22 nt, Human
gagaggccauggcugugcagug

SEQ ID NO: 969199 - RNA, 22 nt, Human
gggcuggcaggaccugggcuga

SEQ ID NO: 969200 - RNA, 22 nt, Human
cuggccuuggugcuugcagaca

SEQ ID NO: 969201 - RNA, 22 nt, Human
ccugucaguugcugucagggau

SEQ ID NO: 969202 - RNA, 22 nt, Human
auggccaaaucuaaacuguugg

SEQ ID NO: 969203 - RNA, 22 nt, Human
gccagucuucauauucauggug

SEQ ID NO: 969204 - RNA, 22 nt, Human
agccugguguggggcugcagag

SEQ ID NO: 969205 - RNA, 22 nt, Human
uagaggugucacuuugggaagu

SEQ ID NO: 969206 - RNA, 22 nt, Human
acucugugugaguagagccugu

SEQ ID NO: 969207 - RNA, 22 nt, Human
ugagauguaagguaugcuuacu

SEQ ID NO: 969208 - RNA, 22 nt, Human
auguuauuuuggaaaauacaaa

SEQ ID NO: 969209 - RNA, 22 nt, Human
gcagggcugggugggagacaga

SEQ ID NO: 969210 - RNA, 21 nt, Human
cagagcuguccaaacccugac

SEQ ID NO: 969211 - RNA, 22 nt, Human
aaacauucucagcccugcuugc

SEQ ID NO: 969212 - RNA, 22 nt, Human
uugcauuccaguccccacugug

SEQ ID NO: 969213 - RNA, 22 nt, Human
ggcugagcaauuuugaugacau

SEQ ID NO: 969214 - RNA, 22 nt, Human
ugcuggcugggcugcuggagac

SEQ ID NO: 969215 - RNA, 22 nt, Human
gggcugucaugugucagugacc

SEQ ID NO: 969216 - RNA, 22 nt, Human
ccaggccauucccagaguugcu

SEQ ID NO: 969217 - RNA, 22 nt, Human
uuccucucgcucuccggggccc

SEQ ID NO: 969218 - RNA, 22 nt, Human
acuuucauuugugaagacugua

SEQ ID NO: 969219 - RNA, 22 nt, Human
gcuuccaaaucuguucaaaaug

SEQ ID NO: 969220 - RNA, 22 nt, Human
ccccagcacuuggaguggggag

SEQ ID NO: 969221 - RNA, 22 nt, Human
ggcucaggccagaccacgacuc

SEQ ID NO: 969222 - RNA, 22 nt, Human
ggaccugccagaacucaggcua

SEQ ID NO: 969223 - RNA, 17 nt, Human
uuccucucacauuuuuu

SEQ ID NO: 969224 - RNA, 22 nt, Human
ugggcacaaacaucugccuguu

SEQ ID NO: 969225 - RNA, 22 nt, Human
cagcuucucagaaagcugaggu

SEQ ID NO: 969226 - RNA, 22 nt, Human
uaggcaauauuagacuuugucu

SEQ ID NO: 969227 - RNA, 22 nt, Human
cuucuucaucuguaaaacuugg

SEQ ID NO: 969228 - RNA, 22 nt, Human
ucacuguauuugcugaugcaua

SEQ ID NO: 969229 - RNA, 22 nt, Human
cuggagcuaauaauccaucuga

SEQ ID NO: 969230 - RNA, 21 nt, Human
aaugcauuaacauaaagcuga

SEQ ID NO: 969231 - RNA, 22 nt, Human
gguuauauaauucagugcuuuc

SEQ ID NO: 969232 - RNA, 22 nt, Human
cuggagccaugucuugacugcu

SEQ ID NO: 969233 - RNA, 22 nt, Human
agaggcaguauacaauccgagc

SEQ ID NO: 969234 - RNA, 22 nt, Human
agaauucuuggugguuagaaua

SEQ ID NO: 969235 - RNA, 22 nt, Human
ccugagggaggguauaggcugu

SEQ ID NO: 969236 - RNA, 22 nt, Human
ucugucacccaggcuggagugc

SEQ ID NO: 969237 - RNA, 22 nt, Human
ugccugucuuggaguccuggcc

SEQ ID NO: 969238 - RNA, 22 nt, Human
gcugugagccgcugcugagcau

SEQ ID NO: 969239 - RNA, 22 nt, Human
cagaggauucccuagugaccug

SEQ ID NO: 969240 - RNA, 23 nt, Human
ucaggauauugugugccaaggug

SEQ ID NO: 969241 - RNA, 17 nt, Human
ccucccacaccgcccug

SEQ ID NO: 969242 - RNA, 22 nt, Human
ucuggagaacuugcaagaggau

SEQ ID NO: 969243 - RNA, 22 nt, Human
agaaaucugacugcugugcaca

SEQ ID NO: 969244 - RNA, 22 nt, Human
uagggagcucuggcagaaggaa

SEQ ID NO: 969245 - RNA, 22 nt, Human
auggaguucuuuaaauucacag

SEQ ID NO: 969246 - RNA, 21 nt, Human
aaguaaaucagagaaauaacc

SEQ ID NO: 969247 - RNA, 22 nt, Human
ccuggagcgcgggucaagcugg

SEQ ID NO: 969248 - RNA, 22 nt, Human
ucacuuuugaucccuaugcagu

SEQ ID NO: 969249 - RNA, 22 nt, Human
cuguauuuaguuaaaaugcuaa

SEQ ID NO: 969250 - RNA, 22 nt, Human
cuugcaggccuuucuagcucua

SEQ ID NO: 969251 - RNA, 22 nt, Human
gucuuugcugucuuugcucuca

SEQ ID NO: 969252 - RNA, 22 nt, Human
aguguuguaugggaugacugcu

SEQ ID NO: 969253 - RNA, 22 nt, Human
uagaaaucagcaggcauaugua

SEQ ID NO: 969254 - RNA, 22 nt, Human
ugccugucuuuccucccucgua

SEQ ID NO: 969255 - RNA, 22 nt, Human
uggcagagaauaaaucuugacu

SEQ ID NO: 969256 - RNA, 19 nt, Human
gggcuuggggcugaagccu

SEQ ID NO: 969257 - RNA, 22 nt, Human
uggagggaacaaaggaguccca

SEQ ID NO: 969258 - RNA, 22 nt, Human
cagguggagcugacugagggca

SEQ ID NO: 969259 - RNA, 22 nt, Human
ugcaggcuguaaucugaggcua

SEQ ID NO: 969260 - RNA, 22 nt, Human
gaggcagaaguugcagugagca

SEQ ID NO: 969261 - RNA, 22 nt, Human
guuauguaugagggaaugauua

SEQ ID NO: 969262 - RNA, 22 nt, Human
aguggggcggacaggaccagga

SEQ ID NO: 969263 - RNA, 22 nt, Human
cugggaggcaccgcgucgugcu

SEQ ID NO: 969264 - RNA, 22 nt, Human
cuuuggcaacacaugugggaca

SEQ ID NO: 969265 - RNA, 22 nt, Human
gccugccuguuggcugaggugc

SEQ ID NO: 969266 - RNA, 22 nt, Human
cagggcagggccacacccccug

SEQ ID NO: 969267 - RNA, 22 nt, Human
gcagcccagguguagcucuuug

SEQ ID NO: 969268 - RNA, 22 nt, Human
agcuucuugggcuuuacacaaa

SEQ ID NO: 969269 - RNA, 22 nt, Human
ucuuggcaauuugaucucaguu

SEQ ID NO: 969270 - RNA, 22 nt, Human
gcagggacagggcagggccuuu

SEQ ID NO: 969271 - RNA, 22 nt, Human
uaugucacauuguaacagugug

SEQ ID NO: 969272 - RNA, 22 nt, Human
ucaggagacaaagggugcggag

SEQ ID NO: 969273 - RNA, 22 nt, Human
ggcugagcucaggggcagcagg

SEQ ID NO: 969274 - RNA, 22 nt, Human
uuucacaacugcuuauuugaga

SEQ ID NO: 969275 - RNA, 22 nt, Human
cuuccugcaggacagccaucug

SEQ ID NO: 969276 - RNA, 19 nt, Human
uagaaugcccacuuaaaaa

SEQ ID NO: 969277 - RNA, 22 nt, Human
augcuguguauuuuacucuuuc

SEQ ID NO: 969278 - RNA, 22 nt, Human
cugggccagauccagccucaca

SEQ ID NO: 969279 - RNA, 22 nt, Human
ggcuggguuauuuauggccaag

SEQ ID NO: 969280 - RNA, 22 nt, Human
uuuuccuacugauaaacaguua

SEQ ID NO: 969281 - RNA, 22 nt, Human
cugggcugcagcgggagcgacg

SEQ ID NO: 969282 - RNA, 22 nt, Human
uggaggaugccuggggaggccu

SEQ ID NO: 969283 - RNA, 22 nt, Human
uggcuuccuccagagcaggagg

SEQ ID NO: 969284 - RNA, 22 nt, Human
gcugcccagacauugaaucagg

SEQ ID NO: 969285 - RNA, 20 nt, Human
cagaggcauuuucagacucu

SEQ ID NO: 969286 - RNA, 22 nt, Human
uguaucaaaccaaauuaauucu

SEQ ID NO: 969287 - RNA, 22 nt, Human
agaauuguugggguaauaaaag

SEQ ID NO: 969288 - RNA, 22 nt, Human
uuugaaaauuuaagugcuacac

SEQ ID NO: 969289 - RNA, 22 nt, Human
uaaguaaauuuauaaugugauu

SEQ ID NO: 969290 - RNA, 22 nt, Human
cucuuccuacagucugcuaugc

SEQ ID NO: 969291 - RNA, 22 nt, Human
uagagcugggcagugcucugag

SEQ ID NO: 969292 - RNA, 22 nt, Human
cugugggcugaaagugcucccg

SEQ ID NO: 969293 - RNA, 22 nt, Human
gaggcagcaauaaaaagaauuu

SEQ ID NO: 969294 - RNA, 22 nt, Human
aaaugcauguagaauaauagag

SEQ ID NO: 969295 - RNA, 22 nt, Human
aggcuuauuaauaugauucugc

SEQ ID NO: 969296 - RNA, 22 nt, Human
gugggccuugcagggugcaggg

SEQ ID NO: 969297 - RNA, 22 nt, Human
uuggccaagucacugguuaaug

SEQ ID NO: 969298 - RNA, 22 nt, Human
ucaaucacguguuccauguucu

SEQ ID NO: 969299 - RNA, 22 nt, Human
uggcagagugcagaagaggcau

SEQ ID NO: 969300 - RNA, 22 nt, Human
ccacagcugaccgcaggugagc

SEQ ID NO: 969301 - RNA, 22 nt, Human
ucaggagagaguuggguaggcu

SEQ ID NO: 969302 - RNA, 22 nt, Human
ugcuggcuggccuggccuggac

SEQ ID NO: 969303 - RNA, 22 nt, Human
aucuacagcugucugcacagua

SEQ ID NO: 969304 - RNA, 22 nt, Human
uuucuguaaggacuuaaugcaa

SEQ ID NO: 969305 - RNA, 22 nt, Human
aggagcugcauggauaccuggu

SEQ ID NO: 969306 - RNA, 22 nt, Human
acugcagggcauccuggccaag

SEQ ID NO: 969307 - RNA, 22 nt, Human
ccaggaguuugaggcugcagug

SEQ ID NO: 969308 - RNA, 22 nt, Human
cccagcauuucugggcugcacu

SEQ ID NO: 969309 - RNA, 22 nt, Human
uuuaaauucugucugccgcuua

SEQ ID NO: 969310 - RNA, 18 nt, Human
cucucugggugaggacaa

SEQ ID NO: 969311 - RNA, 22 nt, Human
ccagcuccucuucccaguguca

SEQ ID NO: 969312 - RNA, 22 nt, Human
uccuggccuugcuccugaugcc

SEQ ID NO: 969313 - RNA, 22 nt, Human
ggcugccauaacagaguaccac

SEQ ID NO: 969314 - RNA, 22 nt, Human
gcucccucugcucaggcacuug

SEQ ID NO: 969315 - RNA, 22 nt, Human
gagcagaacaggccggguggga

SEQ ID NO: 969316 - RNA, 22 nt, Human
acacugaauguuuaagaacuug

SEQ ID NO: 969317 - RNA, 22 nt, Human
acagugucuccugguacccagu

SEQ ID NO: 969318 - RNA, 22 nt, Human
caaaggagguaaugggugugag

SEQ ID NO: 969319 - RNA, 22 nt, Human
uccaggcugggcugaagggugc

SEQ ID NO: 969320 - RNA, 22 nt, Human
cuuaacagauacaucugugguu

SEQ ID NO: 969321 - RNA, 22 nt, Human
gauguuucaugcuagcaugugu

SEQ ID NO: 969322 - RNA, 22 nt, Human
cccaggagagaggggauaaagc

SEQ ID NO: 969323 - RNA, 22 nt, Human
caggauccuggcugcauggacg

SEQ ID NO: 969324 - RNA, 22 nt, Human
caggaacacaaugagucucaaa

SEQ ID NO: 969325 - RNA, 22 nt, Human
uuguguuucuggccaagaugga

SEQ ID NO: 969326 - RNA, 19 nt, Human
agguggucuaggcuggaga

SEQ ID NO: 969327 - RNA, 22 nt, Human
aaucuucuuucuuaacaguaca

SEQ ID NO: 969328 - RNA, 22 nt, Human
cagagcugcagauugaaggcau

SEQ ID NO: 969329 - RNA, 22 nt, Human
augugucuuggaguuuuaaugu

SEQ ID NO: 969330 - RNA, 22 nt, Human
gccugagauucugcauuucuaa

SEQ ID NO: 969331 - RNA, 22 nt, Human
ggagaggagcuauugggggcuc

SEQ ID NO: 969332 - RNA, 22 nt, Human
agucugucuacuuaaagucugu

SEQ ID NO: 969333 - RNA, 22 nt, Human
guuauguaaucuaacacucagu

SEQ ID NO: 969334 - RNA, 22 nt, Human
ggagaggugaauggcugcucua

SEQ ID NO: 969335 - RNA, 22 nt, Human
auuguauuuguacaagacaugu

SEQ ID NO: 969336 - RNA, 22 nt, Human
uacuuugucauucuaaccuucc

SEQ ID NO: 969337 - RNA, 22 nt, Human
uuugaaugcaggacauacagaa

SEQ ID NO: 969338 - RNA, 21 nt, Human
ugcucaugcaaugcaugucca

SEQ ID NO: 969339 - RNA, 22 nt, Human
uuccuggcgccacggagccggu

SEQ ID NO: 969340 - RNA, 22 nt, Human
ugcagccaggaaauauuugcug

SEQ ID NO: 969341 - RNA, 22 nt, Human
uugaaaggccuguuuauccagc

SEQ ID NO: 969342 - RNA, 22 nt, Human
uuucacaaugcaauccuacuuc

SEQ ID NO: 969343 - RNA, 17 nt, Human
ucaggauguagcaguag

SEQ ID NO: 969344 - RNA, 22 nt, Human
uugggcugaacccugcagcuga

SEQ ID NO: 969345 - RNA, 22 nt, Human
aguggcagaagucacuggguag

SEQ ID NO: 969346 - RNA, 22 nt, Human
ucccacugugaauccaaggccu

SEQ ID NO: 969347 - RNA, 22 nt, Human
ccaggaguuggagguugcagug

SEQ ID NO: 969348 - RNA, 22 nt, Human
aggaaucccgcaccagcugcug

SEQ ID NO: 969349 - RNA, 17 nt, Human
ggucuggggccauuggc

SEQ ID NO: 969350 - RNA, 18 nt, Human
gggcccuggcguccgccc

SEQ ID NO: 969351 - RNA, 22 nt, Human
cuguggaguuuguggcgcugac

SEQ ID NO: 969352 - RNA, 22 nt, Human
cuguccugcaguugggggcagg

SEQ ID NO: 969353 - RNA, 22 nt, Human
acuggcaguggcagcagaaaga

SEQ ID NO: 969354 - RNA, 22 nt, Human
agagauucauguuuacuguagg

SEQ ID NO: 969355 - RNA, 22 nt, Human
aaggcaguuugggccaccaucu

SEQ ID NO: 969356 - RNA, 23 nt, Human
aaacuugcuauggcugaaaucau

SEQ ID NO: 969357 - RNA, 22 nt, Human
ccugggaggcugugggucugcu

SEQ ID NO: 969358 - RNA, 22 nt, Human
aaaugaugcucacagauuagug

SEQ ID NO: 969359 - RNA, 22 nt, Human
aacucaguguguuucuuaguau

SEQ ID NO: 969360 - RNA, 22 nt, Human
agcuugaguuuuggaugaagug

SEQ ID NO: 969361 - RNA, 22 nt, Human
ugcugagguuucgucugcuugc

SEQ ID NO: 969362 - RNA, 22 nt, Human
acacaggggcucggcugggugc

SEQ ID NO: 969363 - RNA, 19 nt, Human
cuuauuagagugagagcuu

SEQ ID NO: 969364 - RNA, 22 nt, Human
acagaaagaagguguauuugag

SEQ ID NO: 969365 - RNA, 22 nt, Human
cuuguacaggaauccaugguau

SEQ ID NO: 969366 - RNA, 22 nt, Human
ggcagcugucucugaguuagca

SEQ ID NO: 969367 - RNA, 22 nt, Human
ugccuggcaacuguggugggcu

SEQ ID NO: 969368 - RNA, 22 nt, Human
aggacagggauucaaacuccca

SEQ ID NO: 969369 - RNA, 22 nt, Human
agcugguguccuccuggagcug

SEQ ID NO: 969370 - RNA, 22 nt, Human
gugggagcccucagggaggugc

SEQ ID NO: 969371 - RNA, 21 nt, Human
uggccucccacacuuccaugg

SEQ ID NO: 969372 - RNA, 22 nt, Human
auaaacaucuguuucucuucug

SEQ ID NO: 969373 - RNA, 22 nt, Human
auaucacaaacaagucuguacu

SEQ ID NO: 969374 - RNA, 22 nt, Human
gcacccagaggucagcagugcu

SEQ ID NO: 969375 - RNA, 22 nt, Human
ucugcaggcucuagaugagguu

SEQ ID NO: 969376 - RNA, 22 nt, Human
aguguauugauuggaacagccu

SEQ ID NO: 969377 - RNA, 22 nt, Human
cauuuacagugagaguuuuuac

SEQ ID NO: 969378 - RNA, 22 nt, Human
uaggcacuguguuuguaggagu

SEQ ID NO: 969379 - RNA, 22 nt, Human
ugggcuggcugaggcauucacu

SEQ ID NO: 969380 - RNA, 22 nt, Human
ggguccagcgacagcaggcuca

SEQ ID NO: 969381 - RNA, 22 nt, Human
agugugcuauugcaccaucaua

SEQ ID NO: 969382 - RNA, 22 nt, Human
ugaggggauacgguacacauug

SEQ ID NO: 969383 - RNA, 22 nt, Human
ugcaguggaaucuggagagcag

SEQ ID NO: 969384 - RNA, 22 nt, Human
auuucacucuuaauugcuuccu

SEQ ID NO: 969385 - RNA, 22 nt, Human
agcccaggucucaaaguacagg

SEQ ID NO: 969386 - RNA, 22 nt, Human
cacagccugcugcacucaagaa

SEQ ID NO: 969387 - RNA, 22 nt, Human
cucaggauauugggcuggagca

SEQ ID NO: 969388 - RNA, 22 nt, Human
augcugugaaaaagaaggcuga

SEQ ID NO: 969389 - RNA, 21 nt, Human
ucuuugcaucaguuguuuucu

SEQ ID NO: 969390 - RNA, 19 nt, Human
ggccaggcugacugugguc

SEQ ID NO: 969391 - RNA, 22 nt, Human
augguacaauguguuuguuagg

SEQ ID NO: 969392 - RNA, 22 nt, Human
caggaaggcccaccuguccugu

SEQ ID NO: 969393 - RNA, 22 nt, Human
gucccagaugucuggaacuccc

SEQ ID NO: 969394 - RNA, 21 nt, Human
agggaaagaaaaugagcuaau

SEQ ID NO: 969395 - RNA, 22 nt, Human
uugauuccuugaaauauccuug

SEQ ID NO: 969396 - RNA, 22 nt, Human
ucucagagaacaguuggugcuu

SEQ ID NO: 969397 - RNA, 22 nt, Human
agcagcuggguccggcggagca

SEQ ID NO: 969398 - RNA, 22 nt, Human
ccaaggcuggagugcaguggcg

SEQ ID NO: 969399 - RNA, 22 nt, Human
ccagggcaauaggaacacuuuu

SEQ ID NO: 969400 - RNA, 22 nt, Human
cagggcccaagacacaaugagg

SEQ ID NO: 969401 - RNA, 22 nt, Human
gcccaggagguggaggugcagu

SEQ ID NO: 969402 - RNA, 22 nt, Human
uagauuucaggcuggcuugcgg

SEQ ID NO: 969403 - RNA, 22 nt, Human
gagccuucaucgcagccuuguu

SEQ ID NO: 969404 - RNA, 22 nt, Human
uauuccuauuucuaaacauaug

SEQ ID NO: 969405 - RNA, 22 nt, Human
cuucaagauauuucuagaauca

SEQ ID NO: 969406 - RNA, 22 nt, Human
ucaaaguccuugcuuuuucugu

SEQ ID NO: 969407 - RNA, 22 nt, Human
aguugaauaauuagacauaucu

SEQ ID NO: 969408 - RNA, 22 nt, Human
acccaggccugagagacaggag

SEQ ID NO: 969409 - RNA, 17 nt, Human
uuaagguggaucagcac

SEQ ID NO: 969410 - RNA, 22 nt, Human
aaaggccacacugcucuuucuc

SEQ ID NO: 969411 - RNA, 21 nt, Human
ugcagccauucagcccuaugc

SEQ ID NO: 969412 - RNA, 22 nt, Human
agauggguaacuggagucugcu

SEQ ID NO: 969413 - RNA, 22 nt, Human
gaaaagagaacaucugaggauc

SEQ ID NO: 969414 - RNA, 22 nt, Human
uggucuuuaagguagcugucau

SEQ ID NO: 969415 - RNA, 22 nt, Human
uuagaaagaacuuuagauauca

SEQ ID NO: 969416 - RNA, 22 nt, Human
ccucuugccaaucagcuacaga

SEQ ID NO: 969417 - RNA, 22 nt, Human
ccaggccucccuuuuccagcca

SEQ ID NO: 969418 - RNA, 21 nt, Human
gauugaaaccauggcagugag

SEQ ID NO: 969419 - RNA, 22 nt, Human
ugaugaauaaacuugagaguca

SEQ ID NO: 969420 - RNA, 22 nt, Human
gcacagggagacagccguggcc

SEQ ID NO: 969421 - RNA, 20 nt, Human
cucuccuugccgacuuggca

SEQ ID NO: 969422 - RNA, 22 nt, Human
aggcucagcugguggugaucgc

SEQ ID NO: 969423 - RNA, 22 nt, Human
aucacgucaugguuugaucugg

SEQ ID NO: 969424 - RNA, 22 nt, Human
ucccagccggugccuggguccc

SEQ ID NO: 969425 - RNA, 22 nt, Human
gcagacaggcccaguggaggga

SEQ ID NO: 969426 - RNA, 18 nt, Human
agcuucccucugagaggg

SEQ ID NO: 969427 - RNA, 22 nt, Human
gcuggccagggcugcucgcgga

SEQ ID NO: 969428 - RNA, 21 nt, Human
ccuccaggugauuccgugcuc

SEQ ID NO: 969429 - RNA, 22 nt, Human
gguagcacauugcauuaggaga

SEQ ID NO: 969430 - RNA, 22 nt, Human
cuggcuccauccuugagcucug

SEQ ID NO: 969431 - RNA, 22 nt, Human
uucagcagugcagacacccagu

SEQ ID NO: 969432 - RNA, 22 nt, Human
auugucgcuuauuuaggugcuu

SEQ ID NO: 969433 - RNA, 19 nt, Human
ccagcagcuuugauucucu

SEQ ID NO: 969434 - RNA, 22 nt, Human
cuugaaagaagggucuuuuaau

SEQ ID NO: 969435 - RNA, 22 nt, Human
aagccagguuccauggaggagc

SEQ ID NO: 969436 - RNA, 22 nt, Human
auaaggaaugauguaucaguuu

SEQ ID NO: 969437 - RNA, 22 nt, Human
uccuggaguauuucuguggugu

SEQ ID NO: 969438 - RNA, 22 nt, Human
agucauaauuauaaacaucagu

SEQ ID NO: 969439 - RNA, 22 nt, Human
ucuggagcuuccucauuuacag

SEQ ID NO: 969440 - RNA, 22 nt, Human
gcaggggcugagcaccagcggg

SEQ ID NO: 969441 - RNA, 22 nt, Human
uggcuggggccugaauccugca

SEQ ID NO: 969442 - RNA, 22 nt, Human
cuggcccagagcucuggccuuu

SEQ ID NO: 969443 - RNA, 22 nt, Human
aggcagcaaagaaaugaugcug

SEQ ID NO: 969444 - RNA, 22 nt, Human
uuugcauuucuaaugagcuccg

SEQ ID NO: 969445 - RNA, 22 nt, Human
acugugugacuguuauuacugu

SEQ ID NO: 969446 - RNA, 22 nt, Human
gagugcaucguggccauuuuaa

SEQ ID NO: 969447 - RNA, 22 nt, Human
acuuccugcuaugagcuucugu

SEQ ID NO: 969448 - RNA, 20 nt, Human
agugucuggugcagggccuc

SEQ ID NO: 969449 - RNA, 22 nt, Human
acagggcagaaauguugcaucu

SEQ ID NO: 969450 - RNA, 22 nt, Human
gauggcagcagcagccagggau

SEQ ID NO: 969451 - RNA, 22 nt, Human
ccugucucuuucaaucugagag

SEQ ID NO: 969452 - RNA, 22 nt, Human
ggcacugaaguggguguugggu

SEQ ID NO: 969453 - RNA, 22 nt, Human
cugcugggucuaugcaagugga

SEQ ID NO: 969454 - RNA, 22 nt, Human
uaaggccaccguuauagaacca

SEQ ID NO: 969455 - RNA, 22 nt, Human
gugucccacucuggaggugaag

SEQ ID NO: 969456 - RNA, 22 nt, Human
agcugguaugaacaggauagga

SEQ ID NO: 969457 - RNA, 22 nt, Human
caaaugcagucccuuuguugcu

SEQ ID NO: 969458 - RNA, 22 nt, Human
augauuuccaguuguugcuaag

SEQ ID NO: 969459 - RNA, 22 nt, Human
ggcuggcacucuguccaguguc

SEQ ID NO: 969460 - RNA, 22 nt, Human
cauggcaggugugggguuuuau

SEQ ID NO: 969461 - RNA, 22 nt, Human
aggagucagauaugggaaaguu

SEQ ID NO: 969462 - RNA, 22 nt, Human
ccuccugggacucauuagcacc

SEQ ID NO: 969463 - RNA, 22 nt, Human
acaaagucaaauugcagccgcc

SEQ ID NO: 969464 - RNA, 22 nt, Human
ugaggcagugugagauaauaaa

SEQ ID NO: 969465 - RNA, 22 nt, Human
auucuuaauugccaugcuguau

SEQ ID NO: 969466 - RNA, 22 nt, Human
caggaggcaucauggagcggac

SEQ ID NO: 969467 - RNA, 22 nt, Human
ucccaggcuaggccucugcguu

SEQ ID NO: 969468 - RNA, 22 nt, Human
aggcaguggcugagaccagggg

SEQ ID NO: 969469 - RNA, 22 nt, Human
cccugcaggggaccugcagccu

SEQ ID NO: 969470 - RNA, 22 nt, Human
uuggcagcagggaguuggccgc

SEQ ID NO: 969471 - RNA, 22 nt, Human
gucuuucuaugaugaacuguug

SEQ ID NO: 969472 - RNA, 22 nt, Human
cccagcccccgagugucuggaa

SEQ ID NO: 969473 - RNA, 22 nt, Human
agauacauuguucuaagcauug

SEQ ID NO: 969474 - RNA, 22 nt, Human
uaucuaaauggaauauuccaga

SEQ ID NO: 969475 - RNA, 22 nt, Human
gaaggaggcguuagcccuagga

SEQ ID NO: 969476 - RNA, 22 nt, Human
auggacaggcugagcuuccuca

SEQ ID NO: 969477 - RNA, 22 nt, Human
uuguuucugaguuuucauguau

SEQ ID NO: 969478 - RNA, 22 nt, Human
uucuuugaguuaguacagucca

SEQ ID NO: 969479 - RNA, 22 nt, Human
agagggauggccccguaacuca

SEQ ID NO: 969480 - RNA, 22 nt, Human
gcuggccugucuagagccuuac

SEQ ID NO: 969481 - RNA, 22 nt, Human
aaggcagcucagcucauggcag

SEQ ID NO: 969482 - RNA, 22 nt, Human
ugagagugaaaugucacauguc

SEQ ID NO: 969483 - RNA, 22 nt, Human
uuugucuuauccaaucucucag

SEQ ID NO: 969484 - RNA, 22 nt, Human
cuccucaguugucccauggaga

SEQ ID NO: 969485 - RNA, 22 nt, Human
uucuccuuuguaauucucaucc

SEQ ID NO: 969486 - RNA, 22 nt, Human
cuccagggcagcauggcagugg

SEQ ID NO: 969487 - RNA, 22 nt, Human
ugaagcaggguggccagauugu

SEQ ID NO: 969488 - RNA, 20 nt, Human
uuucuguaaggcauuaaucu

SEQ ID NO: 969489 - RNA, 22 nt, Human
uuucauuuugguuaugccauaa

SEQ ID NO: 969490 - RNA, 22 nt, Human
gccaggagaaaaggcgaaugau

SEQ ID NO: 969491 - RNA, 22 nt, Human
cugucuguuucugauucaaccu

SEQ ID NO: 969492 - RNA, 22 nt, Human
caacccaagguuaguuggucuu

SEQ ID NO: 969493 - RNA, 19 nt, Human
ugcuagaaauucugugacu

SEQ ID NO: 969494 - RNA, 23 nt, Human
cccagcagagaugaggagggguc

SEQ ID NO: 969495 - RNA, 22 nt, Human
gcuggcagggacagcugcgugu

SEQ ID NO: 969496 - RNA, 22 nt, Human
uauauagaaaagcagauguugg

SEQ ID NO: 969497 - RNA, 22 nt, Human
ggcagggaggaggugaaaguga

SEQ ID NO: 969498 - RNA, 22 nt, Human
cagcucugcugggaggaugcag

SEQ ID NO: 969499 - RNA, 22 nt, Human
gauggcacacagacauccccgc

SEQ ID NO: 969500 - RNA, 22 nt, Human
aacaaaugaccugauuucuucc

SEQ ID NO: 969501 - RNA, 22 nt, Human
aaauacauaaagguuguaccag

SEQ ID NO: 969502 - RNA, 22 nt, Human
cugaggaugguguggucuucuc

SEQ ID NO: 969503 - RNA, 23 nt, Human
ucuccuccuagauacagucaugg

SEQ ID NO: 969504 - RNA, 22 nt, Human
ccaugagcuuccuauauagggu

SEQ ID NO: 969505 - RNA, 22 nt, Human
uucuuuucuuuaggcauugugu

SEQ ID NO: 969506 - RNA, 22 nt, Human
cucuucuugaaagaggaauuca

SEQ ID NO: 969507 - RNA, 20 nt, Human
agcuggccuguccuaggccu

SEQ ID NO: 969508 - RNA, 22 nt, Human
caaugguggugucagaagagau

SEQ ID NO: 969509 - RNA, 22 nt, Human
gagagugauucccucccauaga

SEQ ID NO: 969510 - RNA, 22 nt, Human
cugccugggccggccacccucu

SEQ ID NO: 969511 - RNA, 22 nt, Human
agcaggugacccaagcaggcug

SEQ ID NO: 969512 - RNA, 22 nt, Human
uuucaugaggggcaaaaucuca

SEQ ID NO: 969513 - RNA, 22 nt, Human
ugccagaagauucucuaucaga

SEQ ID NO: 969514 - RNA, 22 nt, Human
uaagauaaguggguugagaugg

SEQ ID NO: 969515 - RNA, 22 nt, Human
cugcagugaaaucaggaagcaa

SEQ ID NO: 969516 - RNA, 22 nt, Human
aagcugccacacggugaguacu

SEQ ID NO: 969517 - RNA, 22 nt, Human
uucuuucccuuccagcagcucc

SEQ ID NO: 969518 - RNA, 22 nt, Human
cauguacauucuguagauggag

SEQ ID NO: 969519 - RNA, 22 nt, Human
aagucauuaucucuucuaaucu

SEQ ID NO: 969520 - RNA, 22 nt, Human
cuggcagcccaaccuagagucu

SEQ ID NO: 969521 - RNA, 22 nt, Human
agguacagggugaaaguuuaug

SEQ ID NO: 969522 - RNA, 22 nt, Human
cauuguauugaggauacuuaag

SEQ ID NO: 969523 - RNA, 22 nt, Human
uuguuucaugaguguaaaggga

SEQ ID NO: 969524 - RNA, 21 nt, Human
gagcucucaggcaagaagcag

SEQ ID NO: 969525 - RNA, 22 nt, Human
cauuuguaguaucuguuuauau

SEQ ID NO: 969526 - RNA, 22 nt, Human
cccaggaaaugaacuucugauu

SEQ ID NO: 969527 - RNA, 22 nt, Human
uuaguaggagagcuuguucauu

SEQ ID NO: 969528 - RNA, 22 nt, Human
agccagcugugggcucaggcgg

SEQ ID NO: 969529 - RNA, 22 nt, Human
uggaaagaugaagauguuuaag

SEQ ID NO: 969530 - RNA, 22 nt, Human
ugcugcacaauuggaaaguauc

SEQ ID NO: 969531 - RNA, 22 nt, Human
ggaggccaucagggagggcauu

SEQ ID NO: 969532 - RNA, 22 nt, Human
uacauucaacaugucacuaugu

SEQ ID NO: 969533 - RNA, 22 nt, Human
caaaugcauaguuuauaagaag

SEQ ID NO: 969534 - RNA, 22 nt, Human
gggugggaucuguggagccuca

SEQ ID NO: 969535 - RNA, 22 nt, Human
gguggagcuggaccaggagagg

SEQ ID NO: 969536 - RNA, 22 nt, Human
uuuauauagagauuugugcaug

SEQ ID NO: 969537 - RNA, 22 nt, Human
uugucuguccaggcaccccaag

SEQ ID NO: 969538 - RNA, 22 nt, Human
uugauacauuuuuaggauaaac

SEQ ID NO: 969539 - RNA, 22 nt, Human
uggcuguguuaccacuucaugu

SEQ ID NO: 969540 - RNA, 22 nt, Human
cuagcaucagaugagaagcugu

SEQ ID NO: 969541 - RNA, 22 nt, Human
augcuuuuccaggagaaauaua

SEQ ID NO: 969542 - RNA, 22 nt, Human
uucaagaugucuucacaauagu

SEQ ID NO: 969543 - RNA, 23 nt, Human
auauuagggagauuagcccucua

SEQ ID NO: 969544 - RNA, 22 nt, Human
aauugcuaaagauuauguuuuc

SEQ ID NO: 969545 - RNA, 23 nt, Human
ugcugggguaguuuguggcacag

SEQ ID NO: 969546 - RNA, 22 nt, Human
aaagcagcagcaccugcauuuc

SEQ ID NO: 969547 - RNA, 22 nt, Human
cagcuccccaugguuccugaag

SEQ ID NO: 969548 - RNA, 22 nt, Human
cagaagccugccucagaugcac

SEQ ID NO: 969549 - RNA, 22 nt, Human
cucacagguaccagcacccucc

SEQ ID NO: 969550 - RNA, 22 nt, Human
uggcugcuuguuuuagugaggc

SEQ ID NO: 969551 - RNA, 22 nt, Human
ugucccaguuuaucugggacug

SEQ ID NO: 969552 - RNA, 17 nt, Human
agguggguggaucaccu

SEQ ID NO: 969553 - RNA, 22 nt, Human
cacagcuaggaggaaagcagag

SEQ ID NO: 969554 - RNA, 22 nt, Human
aaguucaaguguaaucuuuauu

SEQ ID NO: 969555 - RNA, 22 nt, Human
aagggaggccagagguuuugca

SEQ ID NO: 969556 - RNA, 22 nt, Human
aaauuguugaucuacaguaagg

SEQ ID NO: 969557 - RNA, 22 nt, Human
ggcaugcucuuuguccacagua

SEQ ID NO: 969558 - RNA, 23 nt, Human
acagcaagaggaccagaugugag

SEQ ID NO: 969559 - RNA, 22 nt, Human
auuauucuuaugucaucauggc

SEQ ID NO: 969560 - RNA, 22 nt, Human
guauuugauagauuucaaagga

SEQ ID NO: 969561 - RNA, 22 nt, Human
gccuuugccugcgacguggcug

SEQ ID NO: 969562 - RNA, 22 nt, Human
acagcaugucuaguuaaauacu

SEQ ID NO: 969563 - RNA, 22 nt, Human
cacucugcagcugaagggcugg

SEQ ID NO: 969564 - RNA, 22 nt, Human
ugggugcuucgucagcucugag

SEQ ID NO: 969565 - RNA, 22 nt, Human
uuucauaugggcauuggcaaua

SEQ ID NO: 969566 - RNA, 22 nt, Human
ggaggccaaggagggcggauca

SEQ ID NO: 969567 - RNA, 22 nt, Human
aaagauuucacaucccaagccu

SEQ ID NO: 969568 - RNA, 22 nt, Human
ucuggcugcugcgugagugcuu

SEQ ID NO: 969569 - RNA, 22 nt, Human
uuauguacucugcaauguuuga

SEQ ID NO: 969570 - RNA, 22 nt, Human
gcuggccagcccucuuccucca

SEQ ID NO: 969571 - RNA, 22 nt, Human
aaggcaguacuuuauguccaua

SEQ ID NO: 969572 - RNA, 22 nt, Human
gcugagagcaaagcaugucuag

SEQ ID NO: 969573 - RNA, 23 nt, Human
cacaccaggagccgucugggcca

SEQ ID NO: 969574 - RNA, 22 nt, Human
uaaauacuuuuacuccacugau

SEQ ID NO: 969575 - RNA, 22 nt, Human
gucagaggaauggaugagugau

SEQ ID NO: 969576 - RNA, 17 nt, Human
agauggcaggaggcaga

SEQ ID NO: 969577 - RNA, 22 nt, Human
ggacacaagcuccggggcugca

SEQ ID NO: 969578 - RNA, 22 nt, Human
uggcugcucaagggaggaggcu

SEQ ID NO: 969579 - RNA, 19 nt, Human
ucauaaaaaugguaaccca

SEQ ID NO: 969580 - RNA, 17 nt, Human
auuagguuuugucauga

SEQ ID NO: 969581 - RNA, 19 nt, Human
aauacaguguuauagaauu

SEQ ID NO: 969582 - RNA, 22 nt, Human
aagcagcauaauugcuauuuua

SEQ ID NO: 969583 - RNA, 22 nt, Human
uucuguaagggauuuauucuga

SEQ ID NO: 969584 - RNA, 22 nt, Human
cagacaggcuagccagacucac

SEQ ID NO: 969585 - RNA, 22 nt, Human
uacagaguggugagaucuuuug

SEQ ID NO: 969586 - RNA, 22 nt, Human
uacaaaguauauuucuagcugu

SEQ ID NO: 969587 - RNA, 22 nt, Human
gccuggagacagcagaggcggc

SEQ ID NO: 969588 - RNA, 22 nt, Human
cucagcuggcaauucuggcucc

SEQ ID NO: 969589 - RNA, 21 nt, Human
gagacagcccagugccagggc

SEQ ID NO: 969590 - RNA, 22 nt, Human
aggccuggguguucaccagaag

SEQ ID NO: 969591 - RNA, 22 nt, Human
agcagacauaucucaugucaca

SEQ ID NO: 969592 - RNA, 22 nt, Human
aaguuaugaaauuuggacagcu

SEQ ID NO: 969593 - RNA, 22 nt, Human
acauucuagaagucuuugcaau

SEQ ID NO: 969594 - RNA, 22 nt, Human
aaguaugacauuuaagacaauu

SEQ ID NO: 969595 - RNA, 21 nt, Human
agaaauguaucauucuuuucc

SEQ ID NO: 969596 - RNA, 21 nt, Human
ucccagggccaggugccauca

SEQ ID NO: 969597 - RNA, 22 nt, Human
aacuagaaccacuuguauuucc

SEQ ID NO: 969598 - RNA, 22 nt, Human
cugucagguuggucucagagcu

SEQ ID NO: 969599 - RNA, 22 nt, Human
gaugaagccugacuucucggug

SEQ ID NO: 969600 - RNA, 22 nt, Human
gagcagaacuacucacauaucg

SEQ ID NO: 969601 - RNA, 22 nt, Human
aaggcacucagccuugggacag

SEQ ID NO: 969602 - RNA, 22 nt, Human
uggcucagucauggaugaguaa

SEQ ID NO: 969603 - RNA, 22 nt, Human
ggagcagcuugcaugcucaggg

SEQ ID NO: 969604 - RNA, 22 nt, Human
aagagcuggauugugcugcaga

SEQ ID NO: 969605 - RNA, 22 nt, Human
agggcagcagcccauggcucug

SEQ ID NO: 969606 - RNA, 22 nt, Human
uucuuuaaaauagugagaaaga

SEQ ID NO: 969607 - RNA, 22 nt, Human
cuggcucacuagcccugcccug

SEQ ID NO: 969608 - RNA, 18 nt, Human
gaggauggaaggagaugc

SEQ ID NO: 969609 - RNA, 19 nt, Human
uccaggaggcugccauuga

SEQ ID NO: 969610 - RNA, 23 nt, Human
acugcuuuauucaugaggcucuc

SEQ ID NO: 969611 - RNA, 22 nt, Human
cagaggccuauccaguguccau

SEQ ID NO: 969612 - RNA, 22 nt, Human
uaauguauaacaaauacucauc

SEQ ID NO: 969613 - RNA, 22 nt, Human
gaaaauguuuccuguuauuugc

SEQ ID NO: 969614 - RNA, 22 nt, Human
cucugaagggagggccaagccc

SEQ ID NO: 969615 - RNA, 22 nt, Human
gcuggcaccugcaccaagcagg

SEQ ID NO: 969616 - RNA, 22 nt, Human
gccuggcucugagggagcuccu

SEQ ID NO: 969617 - RNA, 22 nt, Human
acugaaggguaaugugggagcc

SEQ ID NO: 969618 - RNA, 22 nt, Human
caggcaggucagugaagaagga

SEQ ID NO: 969619 - RNA, 22 nt, Human
agaaaucaauaucuauauguug

SEQ ID NO: 969620 - RNA, 19 nt, Human
ucaaagcaagcauguucug

SEQ ID NO: 969621 - RNA, 22 nt, Human
agaagccaauucugugugaguc

SEQ ID NO: 969622 - RNA, 23 nt, Human
ugucacauuuaguuggcauuguu

SEQ ID NO: 969623 - RNA, 22 nt, Human
auaaauaucacuguugucccuc

SEQ ID NO: 969624 - RNA, 22 nt, Human
uggcagaaguucacuaguagcu

SEQ ID NO: 969625 - RNA, 22 nt, Human
ugagccaggcacugcuccugga

SEQ ID NO: 969626 - RNA, 20 nt, Human
gcuuccuucccagcccccac

SEQ ID NO: 969627 - RNA, 22 nt, Human
caguacuuauuucuauuuaggg

SEQ ID NO: 969628 - RNA, 22 nt, Human
aauuaggaaaugagaguauuug

SEQ ID NO: 969629 - RNA, 22 nt, Human
uuugcauaggauggacauuuua

SEQ ID NO: 969630 - RNA, 22 nt, Human
gagcaggcuugcagagaagggg

SEQ ID NO: 969631 - RNA, 22 nt, Human
aucauaaaccacuuuguaaucu

SEQ ID NO: 969632 - RNA, 22 nt, Human
cagagccagcccacuguucccg

SEQ ID NO: 969633 - RNA, 22 nt, Human
aaugcacauauauguguauaca

SEQ ID NO: 969634 - RNA, 22 nt, Human
ggccucugguucacagggagga

SEQ ID NO: 969635 - RNA, 22 nt, Human
ucagagccccuccgcuguccca

SEQ ID NO: 969636 - RNA, 22 nt, Human
ggucccugaagaggccuggggu

SEQ ID NO: 969637 - RNA, 22 nt, Human
gagcagaugugugccaggaugc

SEQ ID NO: 969638 - RNA, 23 nt, Human
ccagugauugccuggaaggaggu

SEQ ID NO: 969639 - RNA, 22 nt, Human
ugucccaguuggguauugaauu

SEQ ID NO: 969640 - RNA, 22 nt, Human
gguggcagcgucuaucugacau

SEQ ID NO: 969641 - RNA, 22 nt, Human
ccuggcagguggagguugcagu

SEQ ID NO: 969642 - RNA, 22 nt, Human
gaaggaggugucaguuggacug

SEQ ID NO: 969643 - RNA, 22 nt, Human
aggcuccuugcucacaggcuca

SEQ ID NO: 969644 - RNA, 22 nt, Human
guuccaaacaagucauaaagua

SEQ ID NO: 969645 - RNA, 22 nt, Human
agcuacccgaggacaggcuaag

SEQ ID NO: 969646 - RNA, 22 nt, Human
uguuuauugagugccuacuaua

SEQ ID NO: 969647 - RNA, 22 nt, Human
aaggagcucccggcagaccagg

SEQ ID NO: 969648 - RNA, 22 nt, Human
aggacagaccuaggacuggagc

SEQ ID NO: 969649 - RNA, 22 nt, Human
ggugcuucugggcauagcagga

SEQ ID NO: 969650 - RNA, 22 nt, Human
aggccuguuccuuccugggcac

SEQ ID NO: 969651 - RNA, 22 nt, Human
gcgaaaaauguguaaauauguu

SEQ ID NO: 969652 - RNA, 22 nt, Human
ccugccagucacuaugucaccu

SEQ ID NO: 969653 - RNA, 22 nt, Human
gaggccuggaauuccagccugg

SEQ ID NO: 969654 - RNA, 22 nt, Human
caguaugagaguugaaucaagg

SEQ ID NO: 969655 - RNA, 22 nt, Human
ggcacugagcgggcucugagcg

SEQ ID NO: 969656 - RNA, 22 nt, Human
gcucugcuggaaguucucugga

SEQ ID NO: 969657 - RNA, 22 nt, Human
gcugucuucacuuccugguuuc

SEQ ID NO: 969658 - RNA, 22 nt, Human
gagggaaggacccauuuuaagu

SEQ ID NO: 969659 - RNA, 22 nt, Human
gaaaugugugacaaguuucaau

SEQ ID NO: 969660 - RNA, 22 nt, Human
gcaaggcagcgcggaguagcua

SEQ ID NO: 969661 - RNA, 22 nt, Human
gaggccaaucaauagggcaaua

SEQ ID NO: 969662 - RNA, 22 nt, Human
uuaugggagcaauuggggaggu

SEQ ID NO: 969663 - RNA, 22 nt, Human
caggcccugggcaggaucagcc

SEQ ID NO: 969664 - RNA, 22 nt, Human
cagcuggcugcaugaugccaaa

SEQ ID NO: 969665 - RNA, 19 nt, Human
ucuaagccucaauguuuuc

SEQ ID NO: 969666 - RNA, 22 nt, Human
uucagcaaacacgaugcuuguu

SEQ ID NO: 969667 - RNA, 22 nt, Human
ccugcagagccacgugccagcg

SEQ ID NO: 969668 - RNA, 22 nt, Human
uucagaaagugaaucuuguuau

SEQ ID NO: 969669 - RNA, 22 nt, Human
gccagggaacccaagggccuca

SEQ ID NO: 969670 - RNA, 22 nt, Human
cuccuuccugccccagugauaa

SEQ ID NO: 969671 - RNA, 22 nt, Human
uucaaugaggauagaacuggau

SEQ ID NO: 969672 - RNA, 22 nt, Human
acccaggauaaucuguguaucu

SEQ ID NO: 969673 - RNA, 22 nt, Human
acucagaagauauaaugacuca

SEQ ID NO: 969674 - RNA, 22 nt, Human
aagauuauuuaagacaggaacc

SEQ ID NO: 969675 - RNA, 22 nt, Human
agagcuguucagcagccagguu

SEQ ID NO: 969676 - RNA, 19 nt, Human
gagcccucuccauggccac

SEQ ID NO: 969677 - RNA, 21 nt, Human
uaacuuuugugccuaucuugu

SEQ ID NO: 969678 - RNA, 22 nt, Human
uucauucauuacgugccaggca

SEQ ID NO: 969679 - RNA, 22 nt, Human
gauuucuaguucauuaucuauu

SEQ ID NO: 969680 - RNA, 22 nt, Human
cccagggaaugacucuggccuu

SEQ ID NO: 969681 - RNA, 22 nt, Human
uccucuggcccagcugccucug

SEQ ID NO: 969682 - RNA, 22 nt, Human
gcuucucucucagacugcaagc

SEQ ID NO: 969683 - RNA, 22 nt, Human
uggcacugcacuuuaagauuua

SEQ ID NO: 969684 - RNA, 19 nt, Human
uuagaaacuguugacacug

SEQ ID NO: 969685 - RNA, 22 nt, Human
aggagccaguuccaccccagga

SEQ ID NO: 969686 - RNA, 22 nt, Human
ugcagugccucggcagugcagc

SEQ ID NO: 969687 - RNA, 22 nt, Human
gggaugucacugugccuggcac

SEQ ID NO: 969688 - RNA, 22 nt, Human
agagccagagaccuggguucac

SEQ ID NO: 969689 - RNA, 22 nt, Human
cugcagagcuaggcugagugaa

SEQ ID NO: 969690 - RNA, 20 nt, Human
ugcuguaagauuagagagcu

SEQ ID NO: 969691 - RNA, 21 nt, Human
aagcaggacauaugaugcccu

SEQ ID NO: 969692 - RNA, 22 nt, Human
acuguucauuuggauuucucug

SEQ ID NO: 969693 - RNA, 22 nt, Human
ucuuuguaaaugccuagcauaa

SEQ ID NO: 969694 - RNA, 20 nt, Human
uggagcuccagcguccaugu

SEQ ID NO: 969695 - RNA, 22 nt, Human
auuccaggcagaccagagagau

SEQ ID NO: 969696 - RNA, 22 nt, Human
gcaucuaaauaaacgugggagu

SEQ ID NO: 969697 - RNA, 22 nt, Human
aaagauuauggcauugaaauac

SEQ ID NO: 969698 - RNA, 22 nt, Human
aaggacagaaacagauugcugg

SEQ ID NO: 969699 - RNA, 22 nt, Human
gugcauugcgaugcagacgacc

SEQ ID NO: 969700 - RNA, 22 nt, Human
uccuuucccuuuccauccuggc

SEQ ID NO: 969701 - RNA, 23 nt, Human
cccuggccuuggggcacaggcug

SEQ ID NO: 969702 - RNA, 23 nt, Human
uuucuucagaagccuugcgaggc

SEQ ID NO: 969703 - RNA, 20 nt, Human
agagaauucccuuuggagau

SEQ ID NO: 969704 - RNA, 22 nt, Human
acacauuuaaaaaggaacauau

SEQ ID NO: 969705 - RNA, 23 nt, Human
cccagcgcugagcccugcaggca

SEQ ID NO: 969706 - RNA, 22 nt, Human
aagaauguucauuaaacuguug

SEQ ID NO: 969707 - RNA, 22 nt, Human
gacuguguccaugugcuggauu

SEQ ID NO: 969708 - RNA, 23 nt, Human
ggcuggcccggggcugcuccuga

SEQ ID NO: 969709 - RNA, 22 nt, Human
uugaaucuauguauucagugua

SEQ ID NO: 969710 - RNA, 22 nt, Human
cagggacauugguggccagguu

SEQ ID NO: 969711 - RNA, 22 nt, Human
aauaaaaugaacugguagaguu

SEQ ID NO: 969712 - RNA, 22 nt, Human
ccugucugagccagggugggca

SEQ ID NO: 969713 - RNA, 22 nt, Human
ccugggcaggaugggcccggug

SEQ ID NO: 969714 - RNA, 22 nt, Human
gcccugucccuuggcuucuagg

SEQ ID NO: 969715 - RNA, 22 nt, Human
ucugccucgcuaacagcagcca

SEQ ID NO: 969716 - RNA, 22 nt, Human
cugagcuuccaguuccuccagg

SEQ ID NO: 969717 - RNA, 22 nt, Human
cucagccugugaagagcagagg

SEQ ID NO: 969718 - RNA, 22 nt, Human
gcaggcaggagcccaacugccu

SEQ ID NO: 969719 - RNA, 22 nt, Human
ggcagauggagaagcagcaggu

SEQ ID NO: 969720 - RNA, 22 nt, Human
ucccagaggucucugcugguuc

SEQ ID NO: 969721 - RNA, 22 nt, Human
ugcucccaggcauucucuguug

SEQ ID NO: 969722 - RNA, 22 nt, Human
ugcugccuugaccuccugggcu

SEQ ID NO: 969723 - RNA, 22 nt, Human
ugccugccaugcagaaagcuga

SEQ ID NO: 969724 - RNA, 22 nt, Human
agacuuugagcucuuagagaag

SEQ ID NO: 969725 - RNA, 22 nt, Human
ggaaggaggggcaaagcaguuc

SEQ ID NO: 969726 - RNA, 22 nt, Human
ugccugucuucaggagugucac

SEQ ID NO: 969727 - RNA, 22 nt, Human
auucucuuuguauaacaucuug

SEQ ID NO: 969728 - RNA, 22 nt, Human
aucaggaucagggcuagcagag

SEQ ID NO: 969729 - RNA, 22 nt, Human
aaaugcuucaccucauuaaacu

SEQ ID NO: 969730 - RNA, 22 nt, Human
cuuuagugguauuuuagcaagu

SEQ ID NO: 969731 - RNA, 20 nt, Human
cucugcugcccgccggcugc

SEQ ID NO: 969732 - RNA, 22 nt, Human
aagcaugugcuggggcuuuuug

SEQ ID NO: 969733 - RNA, 22 nt, Human
ugagcuucaaaauaugugaauc

SEQ ID NO: 969734 - RNA, 22 nt, Human
agugucauaugccacugcaucc

SEQ ID NO: 969735 - RNA, 22 nt, Human
gcacagggcccugugcguaggu

SEQ ID NO: 969736 - RNA, 22 nt, Human
uuauuauugugaccugagaaug

SEQ ID NO: 969737 - RNA, 22 nt, Human
agagccuggacuuuucugagcc

SEQ ID NO: 969738 - RNA, 22 nt, Human
uugcauugugauuacagaggug

SEQ ID NO: 969739 - RNA, 22 nt, Human
agccauugaguuuuaugugcua

SEQ ID NO: 969740 - RNA, 22 nt, Human
gcagcuguggguuccaagucua

SEQ ID NO: 969741 - RNA, 22 nt, Human
aaguaaauguuggagcucaaau

SEQ ID NO: 969742 - RNA, 23 nt, Human
aaaguguagccagguuaagaacc

SEQ ID NO: 969743 - RNA, 22 nt, Human
gcaggagcugcucuccugacga

SEQ ID NO: 969744 - RNA, 22 nt, Human
ugcagaaguauuccaggcccca

SEQ ID NO: 969745 - RNA, 22 nt, Human
agguaaaauagauaguauuucu

SEQ ID NO: 969746 - RNA, 22 nt, Human
acaaacagcuaacauauguuaa

SEQ ID NO: 969747 - RNA, 22 nt, Human
aggcuggguaccugucauaugc

SEQ ID NO: 969748 - RNA, 22 nt, Human
acuggccaggcgaaccacacug

SEQ ID NO: 969749 - RNA, 22 nt, Human
aaggcagcuucaccacagcauu

SEQ ID NO: 969750 - RNA, 22 nt, Human
uugaacauuggcaauuucauau

SEQ ID NO: 969751 - RNA, 22 nt, Human
aacaugaagguaggaugguuuu

SEQ ID NO: 969752 - RNA, 22 nt, Human
cugggacuuuacccuguggccc

SEQ ID NO: 969753 - RNA, 22 nt, Human
ugagccagucugucugggugaa

SEQ ID NO: 969754 - RNA, 22 nt, Human
gcaggcagucaucuuucauauu

SEQ ID NO: 969755 - RNA, 21 nt, Human
guauucuuuaugaagugaaaa

SEQ ID NO: 969756 - RNA, 22 nt, Human
agcaugcugguguucauggcag

SEQ ID NO: 969757 - RNA, 22 nt, Human
cugcucugagaggcucuuccua

SEQ ID NO: 969758 - RNA, 22 nt, Human
ggcagcuuccugagccagcagc

SEQ ID NO: 969759 - RNA, 22 nt, Human
uggcucaguaaucgagucuccu

SEQ ID NO: 969760 - RNA, 22 nt, Human
agccauggcgccacuagaggga

SEQ ID NO: 969761 - RNA, 22 nt, Human
agaagcuuccuacauuguucuu

SEQ ID NO: 969762 - RNA, 22 nt, Human
agugugcugcuuaaacaguugu

SEQ ID NO: 969763 - RNA, 22 nt, Human
gcagccacuaguuuuccuguuu

SEQ ID NO: 969764 - RNA, 22 nt, Human
caggcacugugcuagauccuug

SEQ ID NO: 969765 - RNA, 22 nt, Human
aaugcacaugucuuggccucac

SEQ ID NO: 969766 - RNA, 22 nt, Human
agggugccuggaagccacucac

SEQ ID NO: 969767 - RNA, 22 nt, Human
caugcaggcccgccugaauggg

SEQ ID NO: 969768 - RNA, 22 nt, Human
uagugcuuggcccuaccagaua

SEQ ID NO: 969769 - RNA, 22 nt, Human
uacaaaugaccauagccacuua

SEQ ID NO: 969770 - RNA, 22 nt, Human
ucagccuggcaggauggccugg

SEQ ID NO: 969771 - RNA, 22 nt, Human
uccagggacacagaguccuucu

SEQ ID NO: 969772 - RNA, 22 nt, Human
acagggccauuaucuguucuag

SEQ ID NO: 969773 - RNA, 23 nt, Human
ccacuagcaccuguucaacuucu

SEQ ID NO: 969774 - RNA, 22 nt, Human
uuucuagaggcuccaggggagu

SEQ ID NO: 969775 - RNA, 22 nt, Human
uuucaguucaguuuauuauauc

SEQ ID NO: 969776 - RNA, 22 nt, Human
gcugucugucucugugacuuaa

SEQ ID NO: 969777 - RNA, 22 nt, Human
uguguuuugaacucaucuacug

SEQ ID NO: 969778 - RNA, 22 nt, Human
agccaagcacucaacuccugga

SEQ ID NO: 969779 - RNA, 22 nt, Human
ccugugccagcugggcccugcc

SEQ ID NO: 969780 - RNA, 22 nt, Human
aaggccuggauuuagguuguga

SEQ ID NO: 969781 - RNA, 22 nt, Human
acagagguguuccagaccuagg

SEQ ID NO: 969782 - RNA, 22 nt, Human
uucuucuuuaucucaguauccu

SEQ ID NO: 969783 - RNA, 22 nt, Human
gcuguauuuauuuucuaggguu

SEQ ID NO: 969784 - RNA, 22 nt, Human
cagggccaccguguuugcugcu

SEQ ID NO: 969785 - RNA, 21 nt, Human
acagaugggaugagcacacug

SEQ ID NO: 969786 - RNA, 19 nt, Human
uucacaauuaugaaauuag

SEQ ID NO: 969787 - RNA, 22 nt, Human
uaugaagauauaucugaucucu

SEQ ID NO: 969788 - RNA, 22 nt, Human
uuucaucuuccuuggcauaggu

SEQ ID NO: 969789 - RNA, 22 nt, Human
cuucucucugcauaggcauggg

SEQ ID NO: 969790 - RNA, 22 nt, Human
gaaguucaggugggaauugagc

SEQ ID NO: 969791 - RNA, 22 nt, Human
guaucuuucccaccaaucacaa

SEQ ID NO: 969792 - RNA, 22 nt, Human
aggucauuacaauuaucauuuu

SEQ ID NO: 969793 - RNA, 17 nt, Human
uagcugccccgaaugcu

SEQ ID NO: 969794 - RNA, 22 nt, Human
gucaggauuuuaaaaucccagu

SEQ ID NO: 969795 - RNA, 22 nt, Human
cucuuucaguucugauagucuc

SEQ ID NO: 969796 - RNA, 21 nt, Human
ggccuuggcgggggccgaauu

SEQ ID NO: 969797 - RNA, 22 nt, Human
cauugcacucuggcuggaacgg

SEQ ID NO: 969798 - RNA, 20 nt, Human
gauuucaaagcagaguggcc

SEQ ID NO: 969799 - RNA, 22 nt, Human
ucacugcagacaaccucaguca

SEQ ID NO: 969800 - RNA, 22 nt, Human
guuauugcaguauagaggucua

SEQ ID NO: 969801 - RNA, 22 nt, Human
cauacuuugggauaagagugga

SEQ ID NO: 969802 - RNA, 22 nt, Human
agggaaggaaaagcugucgcuu

SEQ ID NO: 969803 - RNA, 22 nt, Human
uaugaaaagguggccaauguag

SEQ ID NO: 969804 - RNA, 22 nt, Human
ugcugccucagcuuccugggcu

SEQ ID NO: 969805 - RNA, 22 nt, Human
aacucagucauaaagcgaaugc

SEQ ID NO: 969806 - RNA, 18 nt, Human
ccuggagcuccacagcaa

SEQ ID NO: 969807 - RNA, 22 nt, Human
aggcccugggagcagagaugca

SEQ ID NO: 969808 - RNA, 22 nt, Human
cugcucaguaauaguccuaucu

SEQ ID NO: 969809 - RNA, 22 nt, Human
gcagcuggacccacacggcuua

SEQ ID NO: 969810 - RNA, 22 nt, Human
cuucccugauaagagccucaga

SEQ ID NO: 969811 - RNA, 22 nt, Human
cuggccugagcacagcggcugc

SEQ ID NO: 969812 - RNA, 22 nt, Human
ugggaaauguguuucuggacca

SEQ ID NO: 969813 - RNA, 22 nt, Human
gccuggagaggaagccggugga

SEQ ID NO: 969814 - RNA, 22 nt, Human
gccagagccggcuucacaggau

SEQ ID NO: 969815 - RNA, 22 nt, Human
cugcagcuccccugagaucaag

SEQ ID NO: 969816 - RNA, 22 nt, Human
ccaaggaguagagcaggaagcu

SEQ ID NO: 969817 - RNA, 22 nt, Human
cacugagaggucucauuuccaa

SEQ ID NO: 969818 - RNA, 22 nt, Human
aauaugugagguauguucagug

SEQ ID NO: 969819 - RNA, 22 nt, Human
caggagaucuuaggaauucuua

SEQ ID NO: 969820 - RNA, 21 nt, Human
uacagaaugcgcuucagucug

SEQ ID NO: 969821 - RNA, 22 nt, Human
ggucccagaauugguuagcaca

SEQ ID NO: 969822 - RNA, 21 nt, Human
acagcagggcuggcaugacag

SEQ ID NO: 969823 - RNA, 22 nt, Human
ucucagucuuugcaaggaugcu

SEQ ID NO: 969824 - RNA, 22 nt, Human
acuuggagagcauugcugggga

SEQ ID NO: 969825 - RNA, 22 nt, Human
caacugcugacaccaucacucc

SEQ ID NO: 969826 - RNA, 22 nt, Human
aauucuuguuguuaguauauuu

SEQ ID NO: 969827 - RNA, 22 nt, Human
agggaagcccuggcugagaccc

SEQ ID NO: 969828 - RNA, 22 nt, Human
augaaacaguguguauagcaaa

SEQ ID NO: 969829 - RNA, 22 nt, Human
auaaaaguuuccaaucaugccu

SEQ ID NO: 969830 - RNA, 22 nt, Human
acagauugaucuugagaauuau

SEQ ID NO: 969831 - RNA, 19 nt, Human
agcauuuggaauucuacac

SEQ ID NO: 969832 - RNA, 22 nt, Human
caaaguccuagaacagugcuug

SEQ ID NO: 969833 - RNA, 21 nt, Human
ugaaaugagaaugcugagcac

SEQ ID NO: 969834 - RNA, 23 nt, Human
ugggccuggccucccaguccagc

SEQ ID NO: 969835 - RNA, 22 nt, Human
accaguccgcggagcuccgggg

SEQ ID NO: 969836 - RNA, 22 nt, Human
ugccuaggaaaccucaugcuuc

SEQ ID NO: 969837 - RNA, 22 nt, Human
cccaugccuucugacucacagg

SEQ ID NO: 969838 - RNA, 22 nt, Human
uucacagaauggcaaguuaugg

SEQ ID NO: 969839 - RNA, 22 nt, Human
aaggagagagcuuugcuggaac

SEQ ID NO: 969840 - RNA, 19 nt, Human
acugccugaggcucacagg

SEQ ID NO: 969841 - RNA, 15 nt, Human
caggagaggaagguu

SEQ ID NO: 969842 - RNA, 19 nt, Human
uccuccuuacuuccucuug

SEQ ID NO: 969843 - RNA, 22 nt, Human
ugagggcugcuuccagagcuag

SEQ ID NO: 969844 - RNA, 22 nt, Human
gggagggaagguaccuguguga

SEQ ID NO: 969845 - RNA, 22 nt, Human
gcucaggaaauaguuuaguguu

SEQ ID NO: 969846 - RNA, 22 nt, Human
uuauagaaggagcauucacuua

SEQ ID NO: 969847 - RNA, 22 nt, Human
augaaggcuguguagauggaug

SEQ ID NO: 969848 - RNA, 22 nt, Human
aaauuaguacauugcaaagucc

SEQ ID NO: 969849 - RNA, 22 nt, Human
gccuggcaggccuguuggggcu

SEQ ID NO: 969850 - RNA, 22 nt, Human
agaaugcaagauaaacuuuauu

SEQ ID NO: 969851 - RNA, 22 nt, Human
agagccaggaugucuucugggg

SEQ ID NO: 969852 - RNA, 22 nt, Human
aacugcauucagaaagcucacu

SEQ ID NO: 969853 - RNA, 22 nt, Human
gccucugcccauccaccaucag

SEQ ID NO: 969854 - RNA, 22 nt, Human
aaugagacacgugaagcagaug

SEQ ID NO: 969855 - RNA, 22 nt, Human
uuuuaguuguaguuggugagga

SEQ ID NO: 969856 - RNA, 22 nt, Human
uuuacagaaugucaauuucuau

SEQ ID NO: 969857 - RNA, 20 nt, Human
cuaucuccuggcgugccuuc

SEQ ID NO: 969858 - RNA, 22 nt, Human
agcagggcuuugcagacuuggg

SEQ ID NO: 969859 - RNA, 22 nt, Human
agucccagagaggucggggcca

SEQ ID NO: 969860 - RNA, 22 nt, Human
agcucccagaaggcccugcgcc

SEQ ID NO: 969861 - RNA, 22 nt, Human
uagagcugcuggacuguaacag

SEQ ID NO: 969862 - RNA, 22 nt, Human
cauagaaacugagacaaggauu

SEQ ID NO: 969863 - RNA, 22 nt, Human
caguuuuugccauuaagaguaa

SEQ ID NO: 969864 - RNA, 22 nt, Human
gcugggagcaaguacucaucuu

SEQ ID NO: 969865 - RNA, 22 nt, Human
uacuuuuagccuauuugauucu

SEQ ID NO: 969866 - RNA, 20 nt, Human
ugucauuguuucuaggaccu

SEQ ID NO: 969867 - RNA, 22 nt, Human
gcucccugcagcugagaguucc

SEQ ID NO: 969868 - RNA, 22 nt, Human
gaaggcugaugacagauucugc

SEQ ID NO: 969869 - RNA, 22 nt, Human
ugggccacggggguggagagcu

SEQ ID NO: 969870 - RNA, 22 nt, Human
cugccucugcgucccacagagu

SEQ ID NO: 969871 - RNA, 22 nt, Human
gcagcuuggugaaaggugaugg

SEQ ID NO: 969872 - RNA, 23 nt, Human
cauguacagaguuugauaaagug

SEQ ID NO: 969873 - RNA, 22 nt, Human
uuguccuuggaugaagcuggga

SEQ ID NO: 969874 - RNA, 22 nt, Human
uuuauaagaagcaaugucugag

SEQ ID NO: 969875 - RNA, 22 nt, Human
cauuucugggagacaugcuaga

SEQ ID NO: 969876 - RNA, 22 nt, Human
gcugaagagagaugcguccagc

SEQ ID NO: 969877 - RNA, 22 nt, Human
ccugagccugaguggugcaggg

SEQ ID NO: 969878 - RNA, 21 nt, Human
uuuuuucuugcgugaggccug

SEQ ID NO: 969879 - RNA, 22 nt, Human
uugcagcuucgagucuaucugu

SEQ ID NO: 969880 - RNA, 22 nt, Human
ugcugaggucaccuugcugcua

SEQ ID NO: 969881 - RNA, 22 nt, Human
gacugucauucuagugcccaug

SEQ ID NO: 969882 - RNA, 18 nt, Human
ccagagcuggcuccucgc

SEQ ID NO: 969883 - RNA, 23 nt, Human
ucuuuacauacugaugaguucuc

SEQ ID NO: 969884 - RNA, 18 nt, Human
cagucccaaaccuuagga

SEQ ID NO: 969885 - RNA, 22 nt, Human
cagagagaggccacugcuauua

SEQ ID NO: 969886 - RNA, 22 nt, Human
ggcaguggaggacccugugucu

SEQ ID NO: 969887 - RNA, 22 nt, Human
uggagcucaaaggccuguggga

SEQ ID NO: 969888 - RNA, 22 nt, Human
ucuucagugcauguuaccuaua

SEQ ID NO: 969889 - RNA, 18 nt, Human
cauuguacaaugcuuuau

SEQ ID NO: 969890 - RNA, 22 nt, Human
uuuucagaggccuaagagguuu

SEQ ID NO: 969891 - RNA, 22 nt, Human
caggucccgccccgggcugacc

SEQ ID NO: 969892 - RNA, 22 nt, Human
ggugaggggagagugaaagaaa

SEQ ID NO: 969893 - RNA, 22 nt, Human
guugaaagcuuuucauuuaguu

SEQ ID NO: 969894 - RNA, 22 nt, Human
acuggccaugggauuuauauuu

SEQ ID NO: 969895 - RNA, 22 nt, Human
uaaaguauauuuuuucucaaua

SEQ ID NO: 969896 - RNA, 22 nt, Human
uuugaaauaugaggcauuauga

SEQ ID NO: 969897 - RNA, 22 nt, Human
augcuguggaugccuugcccca

SEQ ID NO: 969898 - RNA, 22 nt, Human
uuucaacagcucucaaaugauc

SEQ ID NO: 969899 - RNA, 21 nt, Human
aaugaaguggcuauuuugagg

SEQ ID NO: 969900 - RNA, 22 nt, Human
aaguaugcaaaucgucuuagaa

SEQ ID NO: 969901 - RNA, 22 nt, Human
gccuggcuccuaaggacuggcu

SEQ ID NO: 969902 - RNA, 22 nt, Human
uuaaauuauuucuagugaggug

SEQ ID NO: 969903 - RNA, 22 nt, Human
uggcagagaacacacaugauuc

SEQ ID NO: 969904 - RNA, 20 nt, Human
aguaccuuuuguauguuacc

SEQ ID NO: 969905 - RNA, 22 nt, Human
acaccuuucagguccagacagu

SEQ ID NO: 969906 - RNA, 22 nt, Human
ucaaguguaguggugucagguc

SEQ ID NO: 969907 - RNA, 18 nt, Human
ggcagcuugacuagcaac

SEQ ID NO: 969908 - RNA, 22 nt, Human
ggagggacccacucuagaggug

SEQ ID NO: 969909 - RNA, 22 nt, Human
aaauuuaagaagugugugcgug

SEQ ID NO: 969910 - RNA, 22 nt, Human
cccagacauaacagcagagagg

SEQ ID NO: 969911 - RNA, 22 nt, Human
cagugcagaacacauggaaaau

SEQ ID NO: 969912 - RNA, 22 nt, Human
ggcuagaauaauugacuucauu

SEQ ID NO: 969913 - RNA, 22 nt, Human
aacagaauaguugauguacagu

SEQ ID NO: 969914 - RNA, 22 nt, Human
aggaggcugguucaggccauau

SEQ ID NO: 969915 - RNA, 19 nt, Human
agaggcugucaccuguagc

SEQ ID NO: 969916 - RNA, 18 nt, Human
uggacaggguggagaaaa

SEQ ID NO: 969917 - RNA, 22 nt, Human
guuuauaaggcccaauauuucu

SEQ ID NO: 969918 - RNA, 22 nt, Human
ggguuggggcccagcagucugc

SEQ ID NO: 969919 - RNA, 22 nt, Human
aguuggagugaacaugagauug

SEQ ID NO: 969920 - RNA, 22 nt, Human
aaucaguauugguauagaauga

SEQ ID NO: 969921 - RNA, 22 nt, Human
aggugccaauuuucagugaaca

SEQ ID NO: 969922 - RNA, 22 nt, Human
uggcucaguuaggucagaaaca

SEQ ID NO: 969923 - RNA, 22 nt, Human
aggaaaaucgagucuggaggca

SEQ ID NO: 969924 - RNA, 22 nt, Human
aucugcuuccuccuuagggaaa

SEQ ID NO: 969925 - RNA, 22 nt, Human
uaaauuauguuccauguccuuu

SEQ ID NO: 969926 - RNA, 22 nt, Human
cauugcacuuuggguccaggac

SEQ ID NO: 969927 - RNA, 20 nt, Human
cuuuggcaaugagaacaggg

SEQ ID NO: 969928 - RNA, 22 nt, Human
cagagccaggucuaggagucuc

SEQ ID NO: 969929 - RNA, 22 nt, Human
agaccaagugcaggugccacua

SEQ ID NO: 969930 - RNA, 22 nt, Human
aauucacaaaaccagauugcuu

SEQ ID NO: 969931 - RNA, 22 nt, Human
uccaggaggcaccuuuggacca

SEQ ID NO: 969932 - RNA, 21 nt, Human
agaggccuuacaggauagacc

SEQ ID NO: 969933 - RNA, 22 nt, Human
gcagugcuuuagucuguccuuu

SEQ ID NO: 969934 - RNA, 22 nt, Human
ccuucagaccuagacaggaauc

SEQ ID NO: 969935 - RNA, 22 nt, Human
gaggagcuggcagcgucuccgc

SEQ ID NO: 969936 - RNA, 22 nt, Human
ugugugcaauucuuaacauaca

SEQ ID NO: 969937 - RNA, 22 nt, Human
accaggaguugggggugggacc

SEQ ID NO: 969938 - RNA, 22 nt, Human
gagacaaaaguuggagugcaag

SEQ ID NO: 969939 - RNA, 22 nt, Human
cagaugaggcaaccucauugcu

SEQ ID NO: 969940 - RNA, 20 nt, Human
gccagcacagggagcaguuc

SEQ ID NO: 969941 - RNA, 19 nt, Human
ggcagucucaagcagcaca

SEQ ID NO: 969942 - RNA, 22 nt, Human
gggccugggaacuugcauuuag

SEQ ID NO: 969943 - RNA, 22 nt, Human
ugcaguggaggccgugagacag

SEQ ID NO: 969944 - RNA, 22 nt, Human
aggccaggcaacauucugaagu

SEQ ID NO: 969945 - RNA, 22 nt, Human
uucuucucggcugucagauagu

SEQ ID NO: 969946 - RNA, 22 nt, Human
agcagagcugcaguggccugcu

SEQ ID NO: 969947 - RNA, 21 nt, Human
uucucagagucuauuacaguu

SEQ ID NO: 969948 - RNA, 22 nt, Human
ggcuggcacugaggagagcucu

SEQ ID NO: 969949 - RNA, 20 nt, Human
uaacagaaguagaagugggu

SEQ ID NO: 969950 - RNA, 22 nt, Human
uccaaggcauagacacagugcc

SEQ ID NO: 969951 - RNA, 22 nt, Human
augaccccuaaaauuuacuguc

SEQ ID NO: 969952 - RNA, 22 nt, Human
cugccucuauaggaguccacca

SEQ ID NO: 969953 - RNA, 22 nt, Human
agagcuggaaucagaccucagg

SEQ ID NO: 969954 - RNA, 22 nt, Human
ugccugcuaggcccugcugggu

SEQ ID NO: 969955 - RNA, 22 nt, Human
agggcucugggguggcagagau

SEQ ID NO: 969956 - RNA, 22 nt, Human
aucuggcugacuuugugggaca

SEQ ID NO: 969957 - RNA, 22 nt, Human
gcuugcuggugccugcaggcuc

SEQ ID NO: 969958 - RNA, 22 nt, Human
uguguauuaccauuuuacagcu

SEQ ID NO: 969959 - RNA, 22 nt, Human
gagguggucgaggagggguacc

SEQ ID NO: 969960 - RNA, 21 nt, Human
aagcuucccugcucuccaggg

SEQ ID NO: 969961 - RNA, 22 nt, Human
agagcagaggcauggccguggg

SEQ ID NO: 969962 - RNA, 22 nt, Human
cugugccuaagaugcaugucuc

SEQ ID NO: 969963 - RNA, 22 nt, Human
ccaggccagagugcaguggcac

SEQ ID NO: 969964 - RNA, 22 nt, Human
ugcaggugaaaauuaugaggau

SEQ ID NO: 969965 - RNA, 22 nt, Human
aggcucugugacaaucaagcug

SEQ ID NO: 969966 - RNA, 22 nt, Human
cugaagccaugugcucacuggu

SEQ ID NO: 969967 - RNA, 22 nt, Human
cugcccugucugcagccuggcu

SEQ ID NO: 969968 - RNA, 22 nt, Human
uggcucagaggggaagugguuu

SEQ ID NO: 969969 - RNA, 22 nt, Human
agggacacacuccaguguuauu

SEQ ID NO: 969970 - RNA, 22 nt, Human
ggaagagggaaccacgacugua

SEQ ID NO: 969971 - RNA, 22 nt, Human
aaacagaaauuuccucaugcuc

SEQ ID NO: 969972 - RNA, 22 nt, Human
uccuuagagacaagaccaguuu

SEQ ID NO: 969973 - RNA, 22 nt, Human
acaugucaauuuaguacucuua

SEQ ID NO: 969974 - RNA, 22 nt, Human
ugcaucuguucagagcugucga

SEQ ID NO: 969975 - RNA, 22 nt, Human
gggcaagcucuucagaagcucu

SEQ ID NO: 969976 - RNA, 22 nt, Human
ccagcuggugggucuuucucug

SEQ ID NO: 969977 - RNA, 19 nt, Human
gccacuccugaugcugccc

SEQ ID NO: 969978 - RNA, 22 nt, Human
cagcuggcaaguggagcagggu

SEQ ID NO: 969979 - RNA, 22 nt, Human
caagggaccugagauggucucu

SEQ ID NO: 969980 - RNA, 22 nt, Human
cugaaggaagcagaagcgaggu

SEQ ID NO: 969981 - RNA, 22 nt, Human
uccaggagugcugguuagagua

SEQ ID NO: 969982 - RNA, 22 nt, Human
cccagcucucgcacuuacuagc

SEQ ID NO: 969983 - RNA, 22 nt, Human
ggcuccuguccuccuggagcuc

SEQ ID NO: 969984 - RNA, 19 nt, Human
auuccucaaggacagaaau

SEQ ID NO: 969985 - RNA, 21 nt, Human
ucuuccuccacagcgugccac

SEQ ID NO: 969986 - RNA, 22 nt, Human
cucaucugauaaaucacucuua

SEQ ID NO: 969987 - RNA, 22 nt, Human
uucagcaaugacagccuauaua

SEQ ID NO: 969988 - RNA, 22 nt, Human
ucauugaaugcucugcagguug

SEQ ID NO: 969989 - RNA, 22 nt, Human
ggccuugggauguggcugcagc

SEQ ID NO: 969990 - RNA, 22 nt, Human
aauacaguaauuuugaugaguu

SEQ ID NO: 969991 - RNA, 22 nt, Human
aagacaagcaucaaaucaggca

SEQ ID NO: 969992 - RNA, 17 nt, Human
gaggagcuccaguaggu

SEQ ID NO: 969993 - RNA, 22 nt, Human
auaauuuacaacugcuuuuaau

SEQ ID NO: 969994 - RNA, 22 nt, Human
uaacacacugaaggugagaugg

SEQ ID NO: 969995 - RNA, 22 nt, Human
uggucucuucuuccaagauggc

SEQ ID NO: 969996 - RNA, 22 nt, Human
uccuucaggccucauucucaua

SEQ ID NO: 969997 - RNA, 22 nt, Human
uggcacugagcagccgcggcag

SEQ ID NO: 969998 - RNA, 22 nt, Human
aaggcacuugcccagagcugca

SEQ ID NO: 969999 - RNA, 21 nt, Human
ugauuuccagaaaauuggccc

SEQ ID NO: 970000 - RNA, 22 nt, Human
uucucuuagcuguaaagucaau

SEQ ID NO: 970001 - RNA, 22 nt, Human
aacaucagaauauccauguugg

SEQ ID NO: 970002 - RNA, 22 nt, Human
ucacccuugauaauguucuucu

SEQ ID NO: 970003 - RNA, 22 nt, Human
cucagagaaaaggagcaagggu

SEQ ID NO: 970004 - RNA, 22 nt, Human
augcugugauuguagaaauauu

SEQ ID NO: 970005 - RNA, 22 nt, Human
guuguauagagggcaugaaucu

SEQ ID NO: 970006 - RNA, 22 nt, Human
ucugugcucuucucaguaucac

SEQ ID NO: 970007 - RNA, 22 nt, Human
gggcuggaggagauccagaggc

SEQ ID NO: 970008 - RNA, 22 nt, Human
uagggaugagccaguggguagu

SEQ ID NO: 970009 - RNA, 21 nt, Human
ggcagaaguagcauggacggg

SEQ ID NO: 970010 - RNA, 22 nt, Human
ugcagaagcagagccgguggcc

SEQ ID NO: 970011 - RNA, 22 nt, Human
gugcauuucucauacacuaaau

SEQ ID NO: 970012 - RNA, 22 nt, Human
gaggcaggguguugauuacaga

SEQ ID NO: 970013 - RNA, 22 nt, Human
agcucauggugcuaucucaggg

SEQ ID NO: 970014 - RNA, 22 nt, Human
caaggugcagcguugucaagcu

SEQ ID NO: 970015 - RNA, 20 nt, Human
uauuuagauucaaguaugga

SEQ ID NO: 970016 - RNA, 22 nt, Human
ccacagggauaggaauggggcu

SEQ ID NO: 970017 - RNA, 22 nt, Human
ggagcuguucaggacugcuuca

SEQ ID NO: 970018 - RNA, 22 nt, Human
gcaggagcuggaaagugauguu

SEQ ID NO: 970019 - RNA, 22 nt, Human
cagugcauagauccugaggccu

SEQ ID NO: 970020 - RNA, 22 nt, Human
ccuuuucuaaucuuaagaaugu

SEQ ID NO: 970021 - RNA, 21 nt, Human
uucucagaucgaguagugaga

SEQ ID NO: 970022 - RNA, 22 nt, Human
ggagccugggcauuaguaauuu

SEQ ID NO: 970023 - RNA, 22 nt, Human
auucacaaugauacauaagcga

SEQ ID NO: 970024 - RNA, 22 nt, Human
gaggccuggcugggaggaggug

SEQ ID NO: 970025 - RNA, 22 nt, Human
aagcaucucuauguggagagug

SEQ ID NO: 970026 - RNA, 22 nt, Human
ugcauugccucuauucauuaua

SEQ ID NO: 970027 - RNA, 22 nt, Human
gccagagacacuuggagguaga

SEQ ID NO: 970028 - RNA, 22 nt, Human
cccuggagcugcuugcauguug

SEQ ID NO: 970029 - RNA, 23 nt, Human
aacaauagguuuuggcagaauag

SEQ ID NO: 970030 - RNA, 22 nt, Human
uagcagcucugauucugggccc

SEQ ID NO: 970031 - RNA, 22 nt, Human
gcuggucacucugggagcugcu

SEQ ID NO: 970032 - RNA, 22 nt, Human
aucuaggauuugaaugcacagu

SEQ ID NO: 970033 - RNA, 22 nt, Human
acuaacauguuaaucaaaagaa

SEQ ID NO: 970034 - RNA, 22 nt, Human
cuauuagguuggugcaaaagua

SEQ ID NO: 970035 - RNA, 22 nt, Human
acaagagacaagagguucuucu

SEQ ID NO: 970036 - RNA, 22 nt, Human
cccaccaguacagaugguagau

SEQ ID NO: 970037 - RNA, 22 nt, Human
uugaaaugcagauuccaaucca

SEQ ID NO: 970038 - RNA, 22 nt, Human
ugugccuuaugaauucuuucug

SEQ ID NO: 970039 - RNA, 22 nt, Human
cagcagugaugugugaggguuc

SEQ ID NO: 970040 - RNA, 22 nt, Human
uguacauagaucuugaaaauua

SEQ ID NO: 970041 - RNA, 22 nt, Human
aacucugccagguuucaggagc

SEQ ID NO: 970042 - RNA, 22 nt, Human
cucuggagggaggcugagcugg

SEQ ID NO: 970043 - RNA, 22 nt, Human
cugagcugcggcaggcaccugg

SEQ ID NO: 970044 - RNA, 22 nt, Human
gggcucagccccauugaaccag

SEQ ID NO: 970045 - RNA, 22 nt, Human
ggacacaguggaagacagcuug

SEQ ID NO: 970046 - RNA, 19 nt, Human
uggcugggcgugccuccgu

SEQ ID NO: 970047 - RNA, 22 nt, Human
ggcuccugaaagacuaugggaa

SEQ ID NO: 970048 - RNA, 22 nt, Human
uggggcuccuccuggcaggagg

SEQ ID NO: 970049 - RNA, 22 nt, Human
acagucuugagcaucagccaga

SEQ ID NO: 970050 - RNA, 22 nt, Human
cacagaaaaaggcuugaaaauc

SEQ ID NO: 970051 - RNA, 22 nt, Human
caucacagauguuguguggagu

SEQ ID NO: 970052 - RNA, 22 nt, Human
ucugagccaauuucugugucca

SEQ ID NO: 970053 - RNA, 22 nt, Human
uuccaaagaaauugaccaagac

SEQ ID NO: 970054 - RNA, 20 nt, Human
uuucaguuaucuugaccuuc

SEQ ID NO: 970055 - RNA, 18 nt, Human
ccucaggggaccuggcag

SEQ ID NO: 970056 - RNA, 22 nt, Human
aaggucauggcaaauuacuuuu

SEQ ID NO: 970057 - RNA, 22 nt, Human
uguuccuguguggaaaagggcc

SEQ ID NO: 970058 - RNA, 22 nt, Human
gggcugugcugaguaggaggug

SEQ ID NO: 970059 - RNA, 22 nt, Human
uccaggaccucccaggcuagag

SEQ ID NO: 970060 - RNA, 22 nt, Human
ccugccagauccccugagcuga

SEQ ID NO: 970061 - RNA, 22 nt, Human
ggccugagucccaccuggcugu

SEQ ID NO: 970062 - RNA, 22 nt, Human
cagcccuggaacagcugacuca

SEQ ID NO: 970063 - RNA, 22 nt, Human
ucuggcucccagccugcucuca

SEQ ID NO: 970064 - RNA, 20 nt, Human
cccagggaccugagcuccau

SEQ ID NO: 970065 - RNA, 22 nt, Human
gagacugcauuguccaaggguu

SEQ ID NO: 970066 - RNA, 20 nt, Human
uguccuaauagacaagcaga

SEQ ID NO: 970067 - RNA, 22 nt, Human
uuuccauauuuggucuuuggga

SEQ ID NO: 970068 - RNA, 22 nt, Human
gggccuguguguucaggagccu

SEQ ID NO: 970069 - RNA, 23 nt, Human
gcccaugcuguugggcccgagca

SEQ ID NO: 970070 - RNA, 22 nt, Human
aggaugaauaacugaaauggug

SEQ ID NO: 970071 - RNA, 22 nt, Human
uaggcagcugcaaacuucgguc

SEQ ID NO: 970072 - RNA, 22 nt, Human
auggccuccgacccaugacgug

SEQ ID NO: 970073 - RNA, 22 nt, Human
ugaguuuugucuugcuagaagu

SEQ ID NO: 970074 - RNA, 22 nt, Human
auuucaguguuuuaagaguuca

SEQ ID NO: 970075 - RNA, 22 nt, Human
ggcuucugagugcucugcuguu

SEQ ID NO: 970076 - RNA, 22 nt, Human
agcagcauucucugguaugggg

SEQ ID NO: 970077 - RNA, 22 nt, Human
aaaguauucuugacuguuuuuc

SEQ ID NO: 970078 - RNA, 22 nt, Human
uugaaaggugaacaugaugcac

SEQ ID NO: 970079 - RNA, 22 nt, Human
agcuuuauauuuaaugaauucu

SEQ ID NO: 970080 - RNA, 22 nt, Human
agcaguggaccucagugcuauu

SEQ ID NO: 970081 - RNA, 22 nt, Human
cuuggggcugucacucuggcau

SEQ ID NO: 970082 - RNA, 22 nt, Human
uauuuguauguguguacauaua

SEQ ID NO: 970083 - RNA, 23 nt, Human
ggcucugugcugggccugcagga

SEQ ID NO: 970084 - RNA, 22 nt, Human
aacaaauguguuuuguaauuaa

SEQ ID NO: 970085 - RNA, 22 nt, Human
agagaaaagaguucaggcuuug

SEQ ID NO: 970086 - RNA, 22 nt, Human
cuguuuaucccuuuggucagca

SEQ ID NO: 970087 - RNA, 22 nt, Human
uaucuuuagaggaagagaaucu

SEQ ID NO: 970088 - RNA, 22 nt, Human
agccuggauucgugcauccaca

SEQ ID NO: 970089 - RNA, 21 nt, Human
ggucuuccaaauaaggagaaa

SEQ ID NO: 970090 - RNA, 22 nt, Human
ggagaggacauggcucccacag

SEQ ID NO: 970091 - RNA, 22 nt, Human
caugcugugugguuagaacugu

SEQ ID NO: 970092 - RNA, 22 nt, Human
aggccagagaggggaccagccu

SEQ ID NO: 970093 - RNA, 22 nt, Human
cuucagaaugggacuguguuug

SEQ ID NO: 970094 - RNA, 17 nt, Human
cagacaggcugucaccc

SEQ ID NO: 970095 - RNA, 22 nt, Human
ucucacugcaaauauuauguau

SEQ ID NO: 970096 - RNA, 22 nt, Human
cugugcccuggccaggccucuc

SEQ ID NO: 970097 - RNA, 22 nt, Human
agcugccaaguuucucaguuua

SEQ ID NO: 970098 - RNA, 22 nt, Human
aucugucuggaggccuggcaug

SEQ ID NO: 970099 - RNA, 21 nt, Human
ugcuucucuagaucaacuacu

SEQ ID NO: 970100 - RNA, 22 nt, Human
ggacagcucugccaggagcuca

SEQ ID NO: 970101 - RNA, 22 nt, Human
caggcacuggggaugcugggau

SEQ ID NO: 970102 - RNA, 22 nt, Human
ucugaagccaccucugcuuguc

SEQ ID NO: 970103 - RNA, 22 nt, Human
auucaguaggucuagaauaaga

SEQ ID NO: 970104 - RNA, 22 nt, Human
acagccuguguaccagcuggga

SEQ ID NO: 970105 - RNA, 20 nt, Human
acaaaauagguacuggguag

SEQ ID NO: 970106 - RNA, 22 nt, Human
ggguccagcuacaucagggugg

SEQ ID NO: 970107 - RNA, 23 nt, Human
ugaugggaaggaacgacuaccac

SEQ ID NO: 970108 - RNA, 22 nt, Human
gcaaagcauucuguggagucua

SEQ ID NO: 970109 - RNA, 22 nt, Human
aaaugugcuugugaucagcugu

SEQ ID NO: 970110 - RNA, 22 nt, Human
gucacuggggccacaugcagaa

SEQ ID NO: 970111 - RNA, 21 nt, Human
ucuuggccuaaguucacugaa

SEQ ID NO: 970112 - RNA, 22 nt, Human
caggcugccgugaagcaggccu

SEQ ID NO: 970113 - RNA, 22 nt, Human
ggaguaggaguagaacucauca

SEQ ID NO: 970114 - RNA, 22 nt, Human
ccagguggaggugugagguccu

SEQ ID NO: 970115 - RNA, 22 nt, Human
gccuggcaggccucaugagggg

SEQ ID NO: 970116 - RNA, 22 nt, Human
ucagaagagcuggugcugccug

SEQ ID NO: 970117 - RNA, 22 nt, Human
augcagcaguuuacaaagcaau

SEQ ID NO: 970118 - RNA, 19 nt, Human
uagcugccuguuaccucca

SEQ ID NO: 970119 - RNA, 22 nt, Human
gcuuuuaauuaguugcuuccau

SEQ ID NO: 970120 - RNA, 22 nt, Human
ugcauggacucaucagacaaga

SEQ ID NO: 970121 - RNA, 22 nt, Human
auucuucaccauggauaauuug

SEQ ID NO: 970122 - RNA, 22 nt, Human
ggcugugccucaaggcuacuca

SEQ ID NO: 970123 - RNA, 23 nt, Human
agggcacugaagcuggaauuggg

SEQ ID NO: 970124 - RNA, 22 nt, Human
acauucuuaacaguuaaaaacu

SEQ ID NO: 970125 - RNA, 22 nt, Human
cagucccacaagaucuccacaa

SEQ ID NO: 970126 - RNA, 22 nt, Human
cuccucuggcuuccuggaggca

SEQ ID NO: 970127 - RNA, 22 nt, Human
uucaagauggccccagugagcc

SEQ ID NO: 970128 - RNA, 22 nt, Human
ggggcagcuaccggaaguaggg

SEQ ID NO: 970129 - RNA, 22 nt, Human
gcugccaguaguuggagcucca

SEQ ID NO: 970130 - RNA, 22 nt, Human
aggagcagaacugauucugacu

SEQ ID NO: 970131 - RNA, 22 nt, Human
auccuuggaugugucuuuuugu

SEQ ID NO: 970132 - RNA, 22 nt, Human
cugcugugcagacagacucucu

SEQ ID NO: 970133 - RNA, 22 nt, Human
gagcucuggguggcaggugucu

SEQ ID NO: 970134 - RNA, 22 nt, Human
aagagggcagcacagguggguc

SEQ ID NO: 970135 - RNA, 22 nt, Human
uggggacauagccagucuggcu

SEQ ID NO: 970136 - RNA, 22 nt, Human
cuccaggagcugugucuuucuu

SEQ ID NO: 970137 - RNA, 22 nt, Human
ucuggccagugaaaugcagaau

SEQ ID NO: 970138 - RNA, 22 nt, Human
gccucugcugcaagccugguug

SEQ ID NO: 970139 - RNA, 22 nt, Human
gaggccuggguuggaggugcau

SEQ ID NO: 970140 - RNA, 22 nt, Human
uauuccagugugaucuuuguag

SEQ ID NO: 970141 - RNA, 22 nt, Human
aaucacaauuacuuuugcacca

SEQ ID NO: 970142 - RNA, 22 nt, Human
gauuuauuggucuuucauuggu

SEQ ID NO: 970143 - RNA, 22 nt, Human
ccuguucaaugcccuggcuuca

SEQ ID NO: 970144 - RNA, 22 nt, Human
uucuuauagaagcaaccauugu

SEQ ID NO: 970145 - RNA, 22 nt, Human
ugagccagaguggagugugccu

SEQ ID NO: 970146 - RNA, 22 nt, Human
uucaggauucuuucagacuggg

SEQ ID NO: 970147 - RNA, 22 nt, Human
uuccucucucuugccagaaugu

SEQ ID NO: 970148 - RNA, 22 nt, Human
cugggcacuuuggggagccuac

SEQ ID NO: 970149 - RNA, 22 nt, Human
uggaagcacuuggguuuuguug

SEQ ID NO: 970150 - RNA, 22 nt, Human
cugcccaggcugaaggaacauc

SEQ ID NO: 970151 - RNA, 18 nt, Human
ccgggcuuuggugacaca

SEQ ID NO: 970152 - RNA, 22 nt, Human
gggcacugaaugccaagcuagg

SEQ ID NO: 970153 - RNA, 22 nt, Human
gcccaggaucugcucagaucau

SEQ ID NO: 970154 - RNA, 22 nt, Human
ucgcugugguuucuguacaugg

SEQ ID NO: 970155 - RNA, 22 nt, Human
ggccucugguucguggugaccu

SEQ ID NO: 970156 - RNA, 18 nt, Human
agaaggagcuaugggcag

SEQ ID NO: 970157 - RNA, 22 nt, Human
agaggcaggagguugacuugag

SEQ ID NO: 970158 - RNA, 22 nt, Human
accuuuuuucagaacucuaaag

SEQ ID NO: 970159 - RNA, 22 nt, Human
acucuugucucaacuuuuguau

SEQ ID NO: 970160 - RNA, 22 nt, Human
aggggcuggcuuaucugagagu

SEQ ID NO: 970161 - RNA, 22 nt, Human
ucagauggcacacagagccugc

SEQ ID NO: 970162 - RNA, 23 nt, Human
agggaaaguaguaauggccuuug

SEQ ID NO: 970163 - RNA, 22 nt, Human
uuucauuauacagcuucauaaa

SEQ ID NO: 970164 - RNA, 22 nt, Human
agugcuuucccugaaaccuucc

SEQ ID NO: 970165 - RNA, 22 nt, Human
caugggaggucugcaaggugcu

SEQ ID NO: 970166 - RNA, 22 nt, Human
cccugccucugaagcugcucag

SEQ ID NO: 970167 - RNA, 22 nt, Human
cauuuguuggucagauuguagu

SEQ ID NO: 970168 - RNA, 23 nt, Human
cccagagcacagccuccagaugc

SEQ ID NO: 970169 - RNA, 21 nt, Human
agggcagauuagcuguaagag

SEQ ID NO: 970170 - RNA, 20 nt, Human
agguauaagaaaugugauuu

SEQ ID NO: 970171 - RNA, 22 nt, Human
guguguuucagaagccaggugu

SEQ ID NO: 970172 - RNA, 19 nt, Human
uggcugggugccaauggcc

SEQ ID NO: 970173 - RNA, 22 nt, Human
cugcugcucagugucaucaugu

SEQ ID NO: 970174 - RNA, 22 nt, Human
ccugagagcagcuuccugcuua

SEQ ID NO: 970175 - RNA, 22 nt, Human
cucuggaguucucaugaggaac

SEQ ID NO: 970176 - RNA, 22 nt, Human
gccugccuuuguaugacccuga

SEQ ID NO: 970177 - RNA, 22 nt, Human
uagcccagagucccaauuccag

SEQ ID NO: 970178 - RNA, 21 nt, Human
gcucccugcucagcuccuggg

SEQ ID NO: 970179 - RNA, 22 nt, Human
uccaguggcacuggagacuaga

SEQ ID NO: 970180 - RNA, 22 nt, Human
uguauacauuuaacuagauaga

SEQ ID NO: 970181 - RNA, 22 nt, Human
ucuaggagcaugaagggaaggc

SEQ ID NO: 970182 - RNA, 22 nt, Human
ggcagcagaacuggcccuguau

SEQ ID NO: 970183 - RNA, 22 nt, Human
ugaggaugacgauggcaauggc

SEQ ID NO: 970184 - RNA, 22 nt, Human
cuggaggcacccuuagagaggc

SEQ ID NO: 970185 - RNA, 17 nt, Human
uugggagagaaagguau

SEQ ID NO: 970186 - RNA, 22 nt, Human
aacagaacccgagugugaaucu

SEQ ID NO: 970187 - RNA, 20 nt, Human
uggggccuguuucugugguu

SEQ ID NO: 970188 - RNA, 22 nt, Human
uuaagucauuucugauuauaga

SEQ ID NO: 970189 - RNA, 22 nt, Human
uagugaaacaguuaucaaucug

SEQ ID NO: 970190 - RNA, 22 nt, Human
aauccagguggcggagguugug

SEQ ID NO: 970191 - RNA, 22 nt, Human
aguauguagugcaaucagucag

SEQ ID NO: 970192 - RNA, 22 nt, Human
ggcugcaggcaggguauccacu

SEQ ID NO: 970193 - RNA, 22 nt, Human
acagagccaaaaggacauagua

SEQ ID NO: 970194 - RNA, 22 nt, Human
uuccuguaugucagugaagagc

SEQ ID NO: 970195 - RNA, 19 nt, Human
acccucucagugccugagg

SEQ ID NO: 970196 - RNA, 22 nt, Human
auggggcucugcggcugcuccc

SEQ ID NO: 970197 - RNA, 22 nt, Human
uugcauaaagauuuuauugcau

SEQ ID NO: 970198 - RNA, 22 nt, Human
gagagcugcaagguagggcggg

SEQ ID NO: 970199 - RNA, 22 nt, Human
aggauguuaucugugcaggugg

SEQ ID NO: 970200 - RNA, 22 nt, Human
uaaagcaggccacauaugugau

SEQ ID NO: 970201 - RNA, 19 nt, Human
ccugugugggguagagauc

SEQ ID NO: 970202 - RNA, 22 nt, Human
aaguuugagaagcuuauagaua

SEQ ID NO: 970203 - RNA, 22 nt, Human
agugaaauacugucguuuuuag

SEQ ID NO: 970204 - RNA, 22 nt, Human
ccucagggaggccucuguggcu

SEQ ID NO: 970205 - RNA, 22 nt, Human
uacuuucuguccuucuguuaaa

SEQ ID NO: 970206 - RNA, 22 nt, Human
gggagggaaggaccuuaugaau

SEQ ID NO: 970207 - RNA, 22 nt, Human
uacagggguaacaguggggaau

SEQ ID NO: 970208 - RNA, 22 nt, Human
guuuauuagaguuuucugucug

SEQ ID NO: 970209 - RNA, 22 nt, Human
ccagguggcuucugcccgaugu

SEQ ID NO: 970210 - RNA, 22 nt, Human
uagauuucgcugcaucucaauc

SEQ ID NO: 970211 - RNA, 22 nt, Human
cuauugaauuaacuauuaaagu

SEQ ID NO: 970212 - RNA, 22 nt, Human
gccagagguucaacaacugucu

SEQ ID NO: 970213 - RNA, 22 nt, Human
aauaagaauuuacuugucaaga

SEQ ID NO: 970214 - RNA, 22 nt, Human
cuggccuuuagccccagugucu

SEQ ID NO: 970215 - RNA, 22 nt, Human
ugaugggaaaaugaggccuggg

SEQ ID NO: 970216 - RNA, 22 nt, Human
augugucuggcauggaaagugu

SEQ ID NO: 970217 - RNA, 22 nt, Human
ugaggccaaugacccugggcag

SEQ ID NO: 970218 - RNA, 22 nt, Human
gcuuagucaauuauaaauaggc

SEQ ID NO: 970219 - RNA, 22 nt, Human
augccagccucuaagcacuuua

SEQ ID NO: 970220 - RNA, 22 nt, Human
aaggcaguuaauuuggcuagaa

SEQ ID NO: 970221 - RNA, 22 nt, Human
guuuuguugcugcagagcucaa

SEQ ID NO: 970222 - RNA, 22 nt, Human
guuuuucuuugugugaagacaa

SEQ ID NO: 970223 - RNA, 22 nt, Human
gaggccuuagagcuuuucuaga

SEQ ID NO: 970224 - RNA, 19 nt, Human
gcucagcagacccagugcu

SEQ ID NO: 970225 - RNA, 22 nt, Human
ccaggaugacccccacuuuccu

SEQ ID NO: 970226 - RNA, 22 nt, Human
uuaauaggcuucuaacauagcu

SEQ ID NO: 970227 - RNA, 22 nt, Human
cuggccagcauuuuugcuuuag

SEQ ID NO: 970228 - RNA, 22 nt, Human
acuguagcugccacuggaugca

SEQ ID NO: 970229 - RNA, 23 nt, Human
ucuugaaaagccuacagcaguuc

SEQ ID NO: 970230 - RNA, 22 nt, Human
gcugcucugcuguguaagcagg

SEQ ID NO: 970231 - RNA, 22 nt, Human
gagguauguaugcuacauucuu

SEQ ID NO: 970232 - RNA, 22 nt, Human
agagccugcuguguaagucaca

SEQ ID NO: 970233 - RNA, 22 nt, Human
caaguaaacaauaugugauuca

SEQ ID NO: 970234 - RNA, 22 nt, Human
ugcauuccuccaccuccugcac

SEQ ID NO: 970235 - RNA, 22 nt, Human
ggagcuggcuacagagaacucc

SEQ ID NO: 970236 - RNA, 22 nt, Human
uuuaaaaaacuagucugagucu

SEQ ID NO: 970237 - RNA, 22 nt, Human
aacucuggagcacgcccuggcc

SEQ ID NO: 970238 - RNA, 22 nt, Human
uagcuuuacaaagugcugcacc

SEQ ID NO: 970239 - RNA, 22 nt, Human
auuguggcuagacagucacaau

SEQ ID NO: 970240 - RNA, 19 nt, Human
gccugcagaaaaggcaggg

SEQ ID NO: 970241 - RNA, 22 nt, Human
ucugagcuacgaugccugucac

SEQ ID NO: 970242 - RNA, 22 nt, Human
cuggagccgcauggagcaggga

SEQ ID NO: 970243 - RNA, 22 nt, Human
agccagcuguucuggggcagca

SEQ ID NO: 970244 - RNA, 22 nt, Human
acagagcucccagccaucuccu

SEQ ID NO: 970245 - RNA, 22 nt, Human
aauuaggaauaaaugaguacuu

SEQ ID NO: 970246 - RNA, 22 nt, Human
ucaggaugguguggaggaaaua

SEQ ID NO: 970247 - RNA, 22 nt, Human
ugaaggccuaacuuccagugcu

SEQ ID NO: 970248 - RNA, 22 nt, Human
agggagaaugaccaagguauau

SEQ ID NO: 970249 - RNA, 22 nt, Human
gacagggcgagacucagucuca

SEQ ID NO: 970250 - RNA, 22 nt, Human
aaagguaguacuucuagaaggg

SEQ ID NO: 970251 - RNA, 22 nt, Human
gcucugugggugaguagaaucu

SEQ ID NO: 970252 - RNA, 22 nt, Human
gggcagagagcuggaacuccuu

SEQ ID NO: 970253 - RNA, 19 nt, Human
cccaggagucuggcugguu

SEQ ID NO: 970254 - RNA, 22 nt, Human
cacucuccagcacaccccauuu

SEQ ID NO: 970255 - RNA, 22 nt, Human
gagagaagggggauaugagccu

SEQ ID NO: 970256 - RNA, 22 nt, Human
cugcucugcaaggcacagugau

SEQ ID NO: 970257 - RNA, 22 nt, Human
acuuugcaauacuuaauacaaa

SEQ ID NO: 970258 - RNA, 22 nt, Human
ugugccuggcauucugggcuuc

SEQ ID NO: 970259 - RNA, 22 nt, Human
aggcaccuugagagcaggagcu

SEQ ID NO: 970260 - RNA, 22 nt, Human
cccaggaaccuaccagcucgag

SEQ ID NO: 970261 - RNA, 22 nt, Human
ucacauacacuaggauauuuuu

SEQ ID NO: 970262 - RNA, 22 nt, Human
uucaagauaauaggaaugaaaa

SEQ ID NO: 970263 - RNA, 22 nt, Human
uugauacaggccuucuagauga

SEQ ID NO: 970264 - RNA, 22 nt, Human
aucuucaaagcacaucguuugu

SEQ ID NO: 970265 - RNA, 22 nt, Human
agagugggccucugagucccag

SEQ ID NO: 970266 - RNA, 23 nt, Human
uuuauccaacucuguaaucucuc

SEQ ID NO: 970267 - RNA, 17 nt, Human
cuccuggccaccccucu

SEQ ID NO: 970268 - RNA, 22 nt, Human
aagugacauaccuuacauaugu

SEQ ID NO: 970269 - RNA, 21 nt, Human
uggaaagauucaaagaccagg

SEQ ID NO: 970270 - RNA, 22 nt, Human
acaaauaugguacucggagaaa

SEQ ID NO: 970271 - RNA, 22 nt, Human
acuguucacuagugaggguuga

SEQ ID NO: 970272 - RNA, 20 nt, Human
aaacauucauguacaaguga

SEQ ID NO: 970273 - RNA, 22 nt, Human
uuuacuuuugguaaggucauuu

SEQ ID NO: 970274 - RNA, 19 nt, Human
ucccaggaagcaaauguca

SEQ ID NO: 970275 - RNA, 22 nt, Human
uggcacauagaaaaggaucaau

SEQ ID NO: 970276 - RNA, 22 nt, Human
uaacuccaucucugugucugcu

SEQ ID NO: 970277 - RNA, 22 nt, Human
ucccagaggaaauggcagcuga

SEQ ID NO: 970278 - RNA, 22 nt, Human
ucuucuccagugcuucugcaca

SEQ ID NO: 970279 - RNA, 22 nt, Human
uucacagaugccugaugugugg

SEQ ID NO: 970280 - RNA, 20 nt, Human
ucucugcuguccacauuugc

SEQ ID NO: 970281 - RNA, 22 nt, Human
gaugagcauuguuucauguguu

SEQ ID NO: 970282 - RNA, 22 nt, Human
agccacagagcaggagaccuuu

SEQ ID NO: 970283 - RNA, 22 nt, Human
uccagccaugcaugacaaucac

SEQ ID NO: 970284 - RNA, 22 nt, Human
uaggaugaaaauccagcuuaua

SEQ ID NO: 970285 - RNA, 22 nt, Human
gugggaugcaguggugaguggc

SEQ ID NO: 970286 - RNA, 22 nt, Human
cccagccucagcuuuacuucca

SEQ ID NO: 970287 - RNA, 22 nt, Human
ucucccacagucucccauggcu

SEQ ID NO: 970288 - RNA, 22 nt, Human
gaucuguuucauucacagucug

SEQ ID NO: 970289 - RNA, 22 nt, Human
gucagagagggcacgugcacac

SEQ ID NO: 970290 - RNA, 22 nt, Human
ggacagagcccugguggccuaa

SEQ ID NO: 970291 - RNA, 21 nt, Human
uccucugcagugagguggccu

SEQ ID NO: 970292 - RNA, 20 nt, Human
cucugcagcaaggccugggu

SEQ ID NO: 970293 - RNA, 22 nt, Human
ugauuuccaauaaggagaaugu

SEQ ID NO: 970294 - RNA, 22 nt, Human
gcacugggaagaaugagccugu

SEQ ID NO: 970295 - RNA, 22 nt, Human
cagacaggcaggugcugcuuug

SEQ ID NO: 970296 - RNA, 22 nt, Human
aggcagacucaauggcuagaua

SEQ ID NO: 970297 - RNA, 22 nt, Human
uuuacagagaauguacauaaag

SEQ ID NO: 970298 - RNA, 22 nt, Human
agggucaggagacacuggcaac

SEQ ID NO: 970299 - RNA, 20 nt, Human
ucaggaugugcugagugaag

SEQ ID NO: 970300 - RNA, 22 nt, Human
aggcacugacucaagggagcca

SEQ ID NO: 970301 - RNA, 23 nt, Human
gcagauggccccagagugcugcc

SEQ ID NO: 970302 - RNA, 22 nt, Human
ccacagagagugucagccuuug

SEQ ID NO: 970303 - RNA, 22 nt, Human
gaauagcuuccuuuuuuccaaa

SEQ ID NO: 970304 - RNA, 22 nt, Human
gugugcaagggcauguacauug

SEQ ID NO: 970305 - RNA, 22 nt, Human
aaguguauauaugacuuauaaa

SEQ ID NO: 970306 - RNA, 22 nt, Human
uaggccaguggcagguugugug

SEQ ID NO: 970307 - RNA, 22 nt, Human
agaaguaggcagggcuguauca

SEQ ID NO: 970308 - RNA, 22 nt, Human
uauuggugggggcagagagaga

SEQ ID NO: 970309 - RNA, 23 nt, Human
cccuggagcuagucugagcagag

SEQ ID NO: 970310 - RNA, 22 nt, Human
uuaaacagucccagaggcugac

SEQ ID NO: 970311 - RNA, 22 nt, Human
gcuggccugaccugaggcuggg

SEQ ID NO: 970312 - RNA, 22 nt, Human
aaguucaaggcagguccugagg

SEQ ID NO: 970313 - RNA, 22 nt, Human
aaaugcauugguuucuacuugu

SEQ ID NO: 970314 - RNA, 22 nt, Human
ccuccaggaacuugagagacac

SEQ ID NO: 970315 - RNA, 22 nt, Human
uggccaaauuugguguaacuug

SEQ ID NO: 970316 - RNA, 19 nt, Human
agggcugcucuggccuggg

SEQ ID NO: 970317 - RNA, 22 nt, Human
acucaggaagaaagcagcuggu

SEQ ID NO: 970318 - RNA, 22 nt, Human
uauuuuaaagacugccagccua

SEQ ID NO: 970319 - RNA, 22 nt, Human
agcccaagcuaugaggugaccu

SEQ ID NO: 970320 - RNA, 22 nt, Human
augcuuugauuugguuucucua

SEQ ID NO: 970321 - RNA, 22 nt, Human
cauuuagagucuugcaauuuua

SEQ ID NO: 970322 - RNA, 19 nt, Human
auaaauaaaaagugggaga

SEQ ID NO: 970323 - RNA, 20 nt, Human
ccugucugcaauggagguca

SEQ ID NO: 970324 - RNA, 22 nt, Human
aggagagagcugagcuuugcug

SEQ ID NO: 970325 - RNA, 22 nt, Human
uccaagggaauuuaaaguugcu

SEQ ID NO: 970326 - RNA, 22 nt, Human
gcaaaugcuaaaguguagagac

SEQ ID NO: 970327 - RNA, 22 nt, Human
gcccagcuggcuuccagcacau

SEQ ID NO: 970328 - RNA, 22 nt, Human
cucacugugaccucagcagaca

SEQ ID NO: 970329 - RNA, 22 nt, Human
agcucccagcagagcuggccac

SEQ ID NO: 970330 - RNA, 22 nt, Human
gcugccuccugaaagcgcucug

SEQ ID NO: 970331 - RNA, 22 nt, Human
ugaggcagcaauuguauuguau

SEQ ID NO: 970332 - RNA, 22 nt, Human
aggaccaguaugagagcaucug

SEQ ID NO: 970333 - RNA, 19 nt, Human
caguggccuggaggucucu

SEQ ID NO: 970334 - RNA, 22 nt, Human
cauguuuacuaccaggagaaug

SEQ ID NO: 970335 - RNA, 22 nt, Human
acagggaaguucugcaacagga

SEQ ID NO: 970336 - RNA, 22 nt, Human
ggcugaaacagauuucaagaca

SEQ ID NO: 970337 - RNA, 22 nt, Human
aagaaaagaaaccugaggcuuu

SEQ ID NO: 970338 - RNA, 19 nt, Human
uccccagcaccucugaguc

SEQ ID NO: 970339 - RNA, 22 nt, Human
gagcagugacuggagcaugaga

SEQ ID NO: 970340 - RNA, 22 nt, Human
uauauuaaccauaggguucuag

SEQ ID NO: 970341 - RNA, 22 nt, Human
ucucagagggaggauuacugcc

SEQ ID NO: 970342 - RNA, 22 nt, Human
acaauauuguacccagaaguuu

SEQ ID NO: 970343 - RNA, 22 nt, Human
caagaaauguuuacugagcauc

SEQ ID NO: 970344 - RNA, 22 nt, Human
ucugggcccuaaaccagcucua

SEQ ID NO: 970345 - RNA, 23 nt, Human
cugcccugaucuugaucuauugu

SEQ ID NO: 970346 - RNA, 21 nt, Human
ugcagcagaguaagcagggga

SEQ ID NO: 970347 - RNA, 22 nt, Human
cucuccuugcagauggcugccu

SEQ ID NO: 970348 - RNA, 22 nt, Human
gagggauggugugagaggcuca

SEQ ID NO: 970349 - RNA, 23 nt, Human
cagggaggagauacuguguaucu

SEQ ID NO: 970350 - RNA, 22 nt, Human
cagccuguagaauacaguaaau

SEQ ID NO: 970351 - RNA, 22 nt, Human
uugaaggaggcuccuuuuuaaa

SEQ ID NO: 970352 - RNA, 22 nt, Human
caggaugaagggcaaaggcaag

SEQ ID NO: 970353 - RNA, 22 nt, Human
ggcagcagcaagguuggagcug

SEQ ID NO: 970354 - RNA, 22 nt, Human
gagaagguggaccugaaggagc

SEQ ID NO: 970355 - RNA, 22 nt, Human
uggcucuguucgccaucaggag

SEQ ID NO: 970356 - RNA, 22 nt, Human
aacauuucagcaaauaagaaca

SEQ ID NO: 970357 - RNA, 22 nt, Human
cagcuuuuuagaaucuagggca

SEQ ID NO: 970358 - RNA, 22 nt, Human
gugugucccuccucuccugagu

SEQ ID NO: 970359 - RNA, 22 nt, Human
agaggccuccgaaaggugggcu

SEQ ID NO: 970360 - RNA, 22 nt, Human
uccagaaacuuuuccagucuca

SEQ ID NO: 970361 - RNA, 22 nt, Human
gaagcagccacggggagacaga

SEQ ID NO: 970362 - RNA, 22 nt, Human
ucucugguuauuaacuaacucc

SEQ ID NO: 970363 - RNA, 22 nt, Human
ucacaacuugaagcugauuuaa

SEQ ID NO: 970364 - RNA, 22 nt, Human
cacaugugugcugaggacugug

SEQ ID NO: 970365 - RNA, 21 nt, Human
auccuugaucagaagagugcu

SEQ ID NO: 970366 - RNA, 22 nt, Human
ggagcggagggagggccacugu

SEQ ID NO: 970367 - RNA, 22 nt, Human
ugaaugugaugcuaaacauaug

SEQ ID NO: 970368 - RNA, 22 nt, Human
auucuucacauggauaggaucu

SEQ ID NO: 970369 - RNA, 20 nt, Human
ccugaggguuuguguucuuu

SEQ ID NO: 970370 - RNA, 23 nt, Human
uggcucugugucacauacaggau

SEQ ID NO: 970371 - RNA, 22 nt, Human
uaugcauauagaugcacacaca

SEQ ID NO: 970372 - RNA, 22 nt, Human
ggccugagcagacagcaugaug

SEQ ID NO: 970373 - RNA, 20 nt, Human
uaaggcuguuuuguauuccu

SEQ ID NO: 970374 - RNA, 22 nt, Human
gcucuggacccuggaguggcug

SEQ ID NO: 970375 - RNA, 22 nt, Human
uaauacuuuugccuuguauuca

SEQ ID NO: 970376 - RNA, 22 nt, Human
gcagcugaagcugcaguuccag

SEQ ID NO: 970377 - RNA, 22 nt, Human
ucugggagaagcugaugugaag

SEQ ID NO: 970378 - RNA, 22 nt, Human
cauguguaugcauucauacaua

SEQ ID NO: 970379 - RNA, 22 nt, Human
gcugguuuccuuaucuauaaag

SEQ ID NO: 970380 - RNA, 22 nt, Human
acagaaauauucguggugcuug

SEQ ID NO: 970381 - RNA, 22 nt, Human
aaauguaguauguugcauguau

SEQ ID NO: 970382 - RNA, 22 nt, Human
ucacaggauaagguggcaucac

SEQ ID NO: 970383 - RNA, 22 nt, Human
uuugaaagcaggugugggaggg

SEQ ID NO: 970384 - RNA, 23 nt, Human
aagaauaaaugacauuaaaggug

SEQ ID NO: 970385 - RNA, 22 nt, Human
gcaggagccaggccgagcuggu

SEQ ID NO: 970386 - RNA, 22 nt, Human
guucacaauuuuuacugauugg

SEQ ID NO: 970387 - RNA, 22 nt, Human
ucauugcagacuaacaaucuca

SEQ ID NO: 970388 - RNA, 22 nt, Human
uagcuuuccuuguugccugugc

SEQ ID NO: 970389 - RNA, 22 nt, Human
ugcaguggugguaaagaugcuc

SEQ ID NO: 970390 - RNA, 22 nt, Human
ucaccugggagggcugugguag

SEQ ID NO: 970391 - RNA, 22 nt, Human
agcuaccuggcuuaucacuguc

SEQ ID NO: 970392 - RNA, 22 nt, Human
uuuaucuuuggaucuucagaaa

SEQ ID NO: 970393 - RNA, 22 nt, Human
ugagaaagugggugccuagcaa

SEQ ID NO: 970394 - RNA, 22 nt, Human
cuuucucugugugguaaagggc

SEQ ID NO: 970395 - RNA, 22 nt, Human
ggcuggcuggcugguagacaag

SEQ ID NO: 970396 - RNA, 22 nt, Human
agaauucuguucuucgggugug

SEQ ID NO: 970397 - RNA, 22 nt, Human
ugcuauacauguacauauuagu

SEQ ID NO: 970398 - RNA, 22 nt, Human
cugcugggcuccucaugugacu

SEQ ID NO: 970399 - RNA, 22 nt, Human
cugugcaguaggucagggcugg

SEQ ID NO: 970400 - RNA, 22 nt, Human
uauugacaauaggcaacugagg

SEQ ID NO: 970401 - RNA, 22 nt, Human
aguugaaauuagaguccuggcu

SEQ ID NO: 970402 - RNA, 22 nt, Human
ggcgaggccgggacaggcugga

SEQ ID NO: 970403 - RNA, 22 nt, Human
agagugcagauaagagaauguu

SEQ ID NO: 970404 - RNA, 22 nt, Human
aauucacaggagguauuugucc

SEQ ID NO: 970405 - RNA, 22 nt, Human
cugaccaucauggugaaacccc

SEQ ID NO: 970406 - RNA, 22 nt, Human
auauacuuggagacuaucauug

SEQ ID NO: 970407 - RNA, 22 nt, Human
acagaguaggugcugucgacug

SEQ ID NO: 970408 - RNA, 22 nt, Human
ugucucaggggcauugaaauaa

SEQ ID NO: 970409 - RNA, 22 nt, Human
ugcuguagcccugcacagugca

SEQ ID NO: 970410 - RNA, 17 nt, Human
ucauuuguugugacuag

SEQ ID NO: 970411 - RNA, 19 nt, Human
ugcccaggccagguugggc

SEQ ID NO: 970412 - RNA, 22 nt, Human
aggguccugggugcaguugcuu

SEQ ID NO: 970413 - RNA, 22 nt, Human
aggucauuggggacuaucuccg

SEQ ID NO: 970414 - RNA, 20 nt, Human
cagagcuguuauggaugaug

SEQ ID NO: 970415 - RNA, 22 nt, Human
auacaacuuuaucuguaaugag

SEQ ID NO: 970416 - RNA, 23 nt, Human
ggccuggcccagggcccugauga

SEQ ID NO: 970417 - RNA, 22 nt, Human
gacagggcaagacucugucuaa

SEQ ID NO: 970418 - RNA, 22 nt, Human
caaggcugcugcgggucgcacc

SEQ ID NO: 970419 - RNA, 22 nt, Human
uccuccagugucuggggccuug

SEQ ID NO: 970420 - RNA, 22 nt, Human
ucccagagugagccaggggcag

SEQ ID NO: 970421 - RNA, 22 nt, Human
ugcuuccuugagcucuccaauc

SEQ ID NO: 970422 - RNA, 22 nt, Human
gacccugccaugagugacaggg

SEQ ID NO: 970423 - RNA, 22 nt, Human
cagcugugaauugucuuaucua

SEQ ID NO: 970424 - RNA, 22 nt, Human
ucuugauuacaaauaacaucau

SEQ ID NO: 970425 - RNA, 22 nt, Human
gaagccuugaacugcaaacccc

SEQ ID NO: 970426 - RNA, 22 nt, Human
cauaacuagagugaaauguuga

SEQ ID NO: 970427 - RNA, 22 nt, Human
aggauuugaaccugcauccagu

SEQ ID NO: 970428 - RNA, 22 nt, Human
ugucugagugugccugggcauu

SEQ ID NO: 970429 - RNA, 20 nt, Human
cugccuggaggccucuaccu

SEQ ID NO: 970430 - RNA, 22 nt, Human
ugcagcuguuacggacccuguc

SEQ ID NO: 970431 - RNA, 22 nt, Human
auuugcuuaucuccacaguugu

SEQ ID NO: 970432 - RNA, 22 nt, Human
ggugcagaggagccagcugggg

SEQ ID NO: 970433 - RNA, 22 nt, Human
gccagcccagcuccaggggaaa

SEQ ID NO: 970434 - RNA, 22 nt, Human
gugcaugugucuuuauaguaga

SEQ ID NO: 970435 - RNA, 21 nt, Human
gccagccuguuuaccuguggu

SEQ ID NO: 970436 - RNA, 22 nt, Human
ugcuguggcaguuuauguauag

SEQ ID NO: 970437 - RNA, 21 nt, Human
aagagcugucaggaaggcugc

SEQ ID NO: 970438 - RNA, 22 nt, Human
uugcugugucauuuguuuaauc

SEQ ID NO: 970439 - RNA, 20 nt, Human
ccaagagcaugcaugaggaa

SEQ ID NO: 970440 - RNA, 22 nt, Human
ugcugagaaucacagguuauaa

SEQ ID NO: 970441 - RNA, 22 nt, Human
gcccaucaucacuguggaggcu

SEQ ID NO: 970442 - RNA, 22 nt, Human
aaacacauuuuaggaaaaucua

SEQ ID NO: 970443 - RNA, 22 nt, Human
accagcagaguugaggaggaca

SEQ ID NO: 970444 - RNA, 22 nt, Human
gugcagugacccuggagagcug

SEQ ID NO: 970445 - RNA, 20 nt, Human
aggacagcagcugccacuug

SEQ ID NO: 970446 - RNA, 22 nt, Human
aucaggaucacugggagucuug

SEQ ID NO: 970447 - RNA, 18 nt, Human
cccucuccugcuaguggg

SEQ ID NO: 970448 - RNA, 22 nt, Human
cauaaguuggguaauauaauga

SEQ ID NO: 970449 - RNA, 22 nt, Human
ggcuucauggaggaggugaguc

SEQ ID NO: 970450 - RNA, 22 nt, Human
ucauuuguugaacuuuagugcg

SEQ ID NO: 970451 - RNA, 22 nt, Human
uuccucagagggcgcuggggaa

SEQ ID NO: 970452 - RNA, 22 nt, Human
agccagcaugaagacagaggcc

SEQ ID NO: 970453 - RNA, 22 nt, Human
aucccugcccucauggagcuua

SEQ ID NO: 970454 - RNA, 22 nt, Human
gaaaaaugcuccaaaucugugg

SEQ ID NO: 970455 - RNA, 22 nt, Human
uggcacauaguaggugcucaau

SEQ ID NO: 970456 - RNA, 22 nt, Human
gacccaggguauccagagcugc

SEQ ID NO: 970457 - RNA, 22 nt, Human
caaauguauaaauguacuuucu

SEQ ID NO: 970458 - RNA, 22 nt, Human
cuccuguauguugggcuucaca

SEQ ID NO: 970459 - RNA, 22 nt, Human
uuucuucuugauuuaaacaggg

SEQ ID NO: 970460 - RNA, 22 nt, Human
cccuguccuuggcugugaggcu

SEQ ID NO: 970461 - RNA, 22 nt, Human
guucucucugcuuccaagaugg

SEQ ID NO: 970462 - RNA, 22 nt, Human
aagccagguguuuaggccagcg

SEQ ID NO: 970463 - RNA, 22 nt, Human
gcuguucugcgucccaggcugg

SEQ ID NO: 970464 - RNA, 22 nt, Human
cccagagcuccgguccugccca

SEQ ID NO: 970465 - RNA, 22 nt, Human
aaaguuagaaugauaucaacga

SEQ ID NO: 970466 - RNA, 22 nt, Human
gccucugcaucuucgccgcacu

SEQ ID NO: 970467 - RNA, 20 nt, Human
aggaaaaauggaaacuggag

SEQ ID NO: 970468 - RNA, 23 nt, Human
agucuucauuguauuuccagacc

SEQ ID NO: 970469 - RNA, 22 nt, Human
cugggggcaagcagacagcugu

SEQ ID NO: 970470 - RNA, 22 nt, Human
accuauuuaugcaauuaugaaa

SEQ ID NO: 970471 - RNA, 22 nt, Human
ggagaggagauuguggcauuuu

SEQ ID NO: 970472 - RNA, 22 nt, Human
ugaggcagucacccccuccugc

SEQ ID NO: 970473 - RNA, 22 nt, Human
augugucuugcggcaguuggua

SEQ ID NO: 970474 - RNA, 22 nt, Human
ugcuuugggucucucuaguuuc

SEQ ID NO: 970475 - RNA, 22 nt, Human
cauccagggcagccauggccug

SEQ ID NO: 970476 - RNA, 22 nt, Human
gcuggccacauugugccguccu

SEQ ID NO: 970477 - RNA, 22 nt, Human
caggcugcggucggcucugguc

SEQ ID NO: 970478 - RNA, 20 nt, Human
ggagagcagggaagacagua

SEQ ID NO: 970479 - RNA, 20 nt, Human
ucccucaggucauugggcug

SEQ ID NO: 970480 - RNA, 22 nt, Human
agacaucagcuugugugcaggg

SEQ ID NO: 970481 - RNA, 22 nt, Human
cuggccugcugggugagguccu

SEQ ID NO: 970482 - RNA, 21 nt, Human
gagacagacuuucguccccug

SEQ ID NO: 970483 - RNA, 22 nt, Human
cacacuuuuggcauguuugguu

SEQ ID NO: 970484 - RNA, 22 nt, Human
cugaagagcucuccuguccccu

SEQ ID NO: 970485 - RNA, 22 nt, Human
ugucccucugaggcuucccugg

SEQ ID NO: 970486 - RNA, 22 nt, Human
gcugucuugcucacucuugcag

SEQ ID NO: 970487 - RNA, 22 nt, Human
ccagcccugucaccaacuggag

SEQ ID NO: 970488 - RNA, 22 nt, Human
uuucuguauuuaaaagaucugg

SEQ ID NO: 970489 - RNA, 22 nt, Human
gagccaagaucgcaccacugca

SEQ ID NO: 970490 - RNA, 22 nt, Human
aggaaaugcugaugcuccugga

SEQ ID NO: 970491 - RNA, 22 nt, Human
gugauuuugagaccuauauagu

SEQ ID NO: 970492 - RNA, 22 nt, Human
acacauuucuaaauuuuuaccg

SEQ ID NO: 970493 - RNA, 22 nt, Human
agcuggcuccagaaggagucgu

SEQ ID NO: 970494 - RNA, 22 nt, Human
caucucaugggcaugccaagcu

SEQ ID NO: 970495 - RNA, 21 nt, Human
agcuuguguguaucacagugu

SEQ ID NO: 970496 - RNA, 22 nt, Human
aggcucugaaggagaaccuguu

SEQ ID NO: 970497 - RNA, 22 nt, Human
gugggagcugcggaggccuggg

SEQ ID NO: 970498 - RNA, 22 nt, Human
agguaacacuacuuaguauacu

SEQ ID NO: 970499 - RNA, 22 nt, Human
uggaggaaucagggcuuaggcu

SEQ ID NO: 970500 - RNA, 22 nt, Human
agggaaugcuccguauaaaucu

SEQ ID NO: 970501 - RNA, 17 nt, Human
gcuuccugugcugggga

SEQ ID NO: 970502 - RNA, 22 nt, Human
uugaacaguuuugucagguuca

SEQ ID NO: 970503 - RNA, 22 nt, Human
aagcagcugauuucacagcuca

SEQ ID NO: 970504 - RNA, 22 nt, Human
ucagugugaguaccaugcucag

SEQ ID NO: 970505 - RNA, 22 nt, Human
gaagaacacuucaugauucauu

SEQ ID NO: 970506 - RNA, 22 nt, Human
ucacuuaaaaauucuaguuaug

SEQ ID NO: 970507 - RNA, 22 nt, Human
ggccucucauguccugggcuuc

SEQ ID NO: 970508 - RNA, 22 nt, Human
gcugccaccguggagaugagug

SEQ ID NO: 970509 - RNA, 22 nt, Human
agaggccuaauugcuacccuuu

SEQ ID NO: 970510 - RNA, 22 nt, Human
gaggaaugucagcacaggccuc

SEQ ID NO: 970511 - RNA, 22 nt, Human
gcagauggaaagugcuugaggg

SEQ ID NO: 970512 - RNA, 22 nt, Human
gugagggguggcugagcaguuu

SEQ ID NO: 970513 - RNA, 22 nt, Human
augagcuguaagguggcuuccu

SEQ ID NO: 970514 - RNA, 22 nt, Human
agaaugcauuuuguguagcuau

SEQ ID NO: 970515 - RNA, 22 nt, Human
acccaggaugauaauguucaca

SEQ ID NO: 970516 - RNA, 22 nt, Human
gcugcccaggagagguggggcu

SEQ ID NO: 970517 - RNA, 22 nt, Human
acauucaaggccuucugacaca

SEQ ID NO: 970518 - RNA, 22 nt, Human
ugggcaggaugcguugauucuu

SEQ ID NO: 970519 - RNA, 22 nt, Human
cuccaggaaagccugaggcccg

SEQ ID NO: 970520 - RNA, 22 nt, Human
cugccuggagcauucugaaggu

SEQ ID NO: 970521 - RNA, 22 nt, Human
ggcaggagauaaaauauuaguu

SEQ ID NO: 970522 - RNA, 22 nt, Human
cccagccaaggugcugguguug

SEQ ID NO: 970523 - RNA, 22 nt, Human
gcccacagcucguuccucuccu

SEQ ID NO: 970524 - RNA, 22 nt, Human
cagcuugggucaggugccugcu

SEQ ID NO: 970525 - RNA, 22 nt, Human
uaggagggcccugaaaauggca

SEQ ID NO: 970526 - RNA, 21 nt, Human
ggacagcugcgcgcagggcuc

SEQ ID NO: 970527 - RNA, 22 nt, Human
aaaugguauuuacucuguauua

SEQ ID NO: 970528 - RNA, 22 nt, Human
uggaggaaaauuacuggggucu

SEQ ID NO: 970529 - RNA, 22 nt, Human
gaaauguguuguucauuucuaa

SEQ ID NO: 970530 - RNA, 22 nt, Human
auucacaaaaugauauagauac

SEQ ID NO: 970531 - RNA, 22 nt, Human
ucuacuuuucccuauacaguuu

SEQ ID NO: 970532 - RNA, 22 nt, Human
uuuuuccuagcgauuugucagc

SEQ ID NO: 970533 - RNA, 22 nt, Human
auucugagaaaugcauugucag

SEQ ID NO: 970534 - RNA, 22 nt, Human
cuguuuaucuaggaguugcagg

SEQ ID NO: 970535 - RNA, 22 nt, Human
acuccugguuuguguccuggcu

SEQ ID NO: 970536 - RNA, 22 nt, Human
cagcaaaauuugaggauugccu

SEQ ID NO: 970537 - RNA, 22 nt, Human
auguggaggaaaugaguguaca

SEQ ID NO: 970538 - RNA, 22 nt, Human
cacugucuuuugugaagacaau

SEQ ID NO: 970539 - RNA, 22 nt, Human
gugcaugugucuuuauaguagc

SEQ ID NO: 970540 - RNA, 22 nt, Human
gcaaaacagucgaugccuccca

SEQ ID NO: 970541 - RNA, 22 nt, Human
uccuucaguucaauuaguccgu

SEQ ID NO: 970542 - RNA, 22 nt, Human
gucuucuuuaaccuacuaaagc

SEQ ID NO: 970543 - RNA, 22 nt, Human
auuuauguaucuguguagauca

SEQ ID NO: 970544 - RNA, 22 nt, Human
cuucuuaaugacagauuaaaau

SEQ ID NO: 970545 - RNA, 22 nt, Human
uucuucaauuuuccauauacug

SEQ ID NO: 970546 - RNA, 22 nt, Human
ccugccugucaucgccugcgcc

SEQ ID NO: 970547 - RNA, 22 nt, Human
uuuggccacagauccuuggggg

SEQ ID NO: 970548 - RNA, 22 nt, Human
uggcagcugucuguggggucuc

SEQ ID NO: 970549 - RNA, 22 nt, Human
acauuucugagcagggagcugu

SEQ ID NO: 970550 - RNA, 22 nt, Human
gcuguucagggcacucaugggc

SEQ ID NO: 970551 - RNA, 21 nt, Human
ggcccugguuacgccuccucu

SEQ ID NO: 970552 - RNA, 22 nt, Human
acagaaauauagaagguaggaa

SEQ ID NO: 970553 - RNA, 22 nt, Human
auacauguaacugcauuguaau

SEQ ID NO: 970554 - RNA, 22 nt, Human
agugcuuucuugcuccaucagu

SEQ ID NO: 970555 - RNA, 22 nt, Human
gggacagcuguagugcuuggcu

SEQ ID NO: 970556 - RNA, 22 nt, Human
ucauugucuugauaugauuguc

SEQ ID NO: 970557 - RNA, 22 nt, Human
acagaauuaaaguguuugugga

SEQ ID NO: 970558 - RNA, 22 nt, Human
aaguucaagucugcaucuuuuu

SEQ ID NO: 970559 - RNA, 22 nt, Human
cagcugagcucccaggccauca

SEQ ID NO: 970560 - RNA, 22 nt, Human
agcugcccagauaggaggaggc

SEQ ID NO: 970561 - RNA, 18 nt, Human
acccaggcucaugguccu

SEQ ID NO: 970562 - RNA, 22 nt, Human
aucacauuguuagcauagacug

SEQ ID NO: 970563 - RNA, 22 nt, Human
aaggcugcuuuuaacaugcaua

SEQ ID NO: 970564 - RNA, 22 nt, Human
acacagggcaaugcuuugaccu

SEQ ID NO: 970565 - RNA, 22 nt, Human
cucacaggcaucucaucaggcu

SEQ ID NO: 970566 - RNA, 22 nt, Human
cagggcugaaaucaagguguag

SEQ ID NO: 970567 - RNA, 22 nt, Human
agcagaaccugcagaccugucu

SEQ ID NO: 970568 - RNA, 22 nt, Human
ucaaagucucugcuucuguaac

SEQ ID NO: 970569 - RNA, 22 nt, Human
uaguuucagcuccuucauccug

SEQ ID NO: 970570 - RNA, 22 nt, Human
uugggcuggcagagguggucuu

SEQ ID NO: 970571 - RNA, 22 nt, Human
auguacauuuuccuaauguuuu

SEQ ID NO: 970572 - RNA, 22 nt, Human
uugaggagcaggaugggaggcu

SEQ ID NO: 970573 - RNA, 22 nt, Human
agcaugaaagcauaggacaguc

SEQ ID NO: 970574 - RNA, 22 nt, Human
aauuucaaugcacucaugguug

SEQ ID NO: 970575 - RNA, 22 nt, Human
acuuaguauuuuucagcuuuga

SEQ ID NO: 970576 - RNA, 22 nt, Human
gaggaggcacuugagcagaugu

SEQ ID NO: 970577 - RNA, 22 nt, Human
uguuaaucaaucaacaguauua

SEQ ID NO: 970578 - RNA, 22 nt, Human
ugcccugucuaagcugucagua

SEQ ID NO: 970579 - RNA, 22 nt, Human
gaggacagugugaucugccagc

SEQ ID NO: 970580 - RNA, 19 nt, Human
aucagcaagguaggaugug

SEQ ID NO: 970581 - RNA, 22 nt, Human
cuugaaagcuuugcgucuucua

SEQ ID NO: 970582 - RNA, 22 nt, Human
uggcucugaccagguagaggag

SEQ ID NO: 970583 - RNA, 22 nt, Human
cugcuguguuucacaccucugg

SEQ ID NO: 970584 - RNA, 22 nt, Human
agguaaagacagugaaagaggg

SEQ ID NO: 970585 - RNA, 22 nt, Human
augcugcacaagccacauguag

SEQ ID NO: 970586 - RNA, 22 nt, Human
guucuucagcauuagaagucau

SEQ ID NO: 970587 - RNA, 22 nt, Human
uucuagaugauaaaccagcagc

SEQ ID NO: 970588 - RNA, 22 nt, Human
cugggagcugucaggagcgugu

SEQ ID NO: 970589 - RNA, 22 nt, Human
uuugaaaucuaaucaaggaaca

SEQ ID NO: 970590 - RNA, 20 nt, Human
uuccagagaucugcauuuua

SEQ ID NO: 970591 - RNA, 22 nt, Human
ugccugugguuccaguuuuuuc

SEQ ID NO: 970592 - RNA, 20 nt, Human
accccagccccucuaucuga

SEQ ID NO: 970593 - RNA, 22 nt, Human
gaucauuuacuuguucuggacu

SEQ ID NO: 970594 - RNA, 22 nt, Human
aggaaagcucccaguagggcuc

SEQ ID NO: 970595 - RNA, 22 nt, Human
cuucuucacacuggucugaagc

SEQ ID NO: 970596 - RNA, 22 nt, Human
ugugccuggaucucugugacaa

SEQ ID NO: 970597 - RNA, 22 nt, Human
ucuguucaagacugaggugaca

SEQ ID NO: 970598 - RNA, 22 nt, Human
ggcucuggcaaggggaggcuac

SEQ ID NO: 970599 - RNA, 22 nt, Human
aaugaacaggugaaugucagau

SEQ ID NO: 970600 - RNA, 22 nt, Human
ugucuagggagcugcucaggcu

SEQ ID NO: 970601 - RNA, 22 nt, Human
uccagcagaaaagagguaggga

SEQ ID NO: 970602 - RNA, 22 nt, Human
uagauuuccucuuccucauucc

SEQ ID NO: 970603 - RNA, 22 nt, Human
aauggcugggaguguauuuugg

SEQ ID NO: 970604 - RNA, 22 nt, Human
gcugucagugaggugagacaug

SEQ ID NO: 970605 - RNA, 20 nt, Human
caccaggcgcucugagaaca

SEQ ID NO: 970606 - RNA, 22 nt, Human
agcagcugaucaaagcacuuau

SEQ ID NO: 970607 - RNA, 22 nt, Human
gccugcuguuaacugcaggaau

SEQ ID NO: 970608 - RNA, 22 nt, Human
cauuaaaauaucucaugguguu

SEQ ID NO: 970609 - RNA, 22 nt, Human
ucaaagucauggcuaguaauga

SEQ ID NO: 970610 - RNA, 22 nt, Human
agcuccugaaaagcgcuugcuu

SEQ ID NO: 970611 - RNA, 22 nt, Human
gugccucagcaccgccugcagc

SEQ ID NO: 970612 - RNA, 22 nt, Human
agaagccacuggagguugagau

SEQ ID NO: 970613 - RNA, 18 nt, Human
uuccaugauuccuuucac

SEQ ID NO: 970614 - RNA, 22 nt, Human
aaaaguguccagauuaugaaga

SEQ ID NO: 970615 - RNA, 22 nt, Human
cucugagcagaggccguggcua

SEQ ID NO: 970616 - RNA, 22 nt, Human
gguggguauugaauacaggugu

SEQ ID NO: 970617 - RNA, 22 nt, Human
uggagacugugcuaagggaguu

SEQ ID NO: 970618 - RNA, 22 nt, Human
acccaggcuggagugcaguagc

SEQ ID NO: 970619 - RNA, 22 nt, Human
ggcagaagaaaggcuaagucuc

SEQ ID NO: 970620 - RNA, 22 nt, Human
aaaucagagucugauuuuaagg

SEQ ID NO: 970621 - RNA, 22 nt, Human
ugucuuauggcauguccacugg

SEQ ID NO: 970622 - RNA, 19 nt, Human
cagaacagaggucauggcc

SEQ ID NO: 970623 - RNA, 22 nt, Human
cccagcuccuuggaugggcagg

SEQ ID NO: 970624 - RNA, 22 nt, Human
uggacaggugagugacucaggg

SEQ ID NO: 970625 - RNA, 21 nt, Human
uacauuugagagcuauaagcu

SEQ ID NO: 970626 - RNA, 22 nt, Human
ccugccugcaaaaugggacaag

SEQ ID NO: 970627 - RNA, 22 nt, Human
cagcuggcagcccuggcccugc

SEQ ID NO: 970628 - RNA, 22 nt, Human
ugggccugggagggcagacgcu

SEQ ID NO: 970629 - RNA, 22 nt, Human
aggagugcaaauaguccagaga

SEQ ID NO: 970630 - RNA, 23 nt, Human
acuauaaaguuguucugauuuac

SEQ ID NO: 970631 - RNA, 22 nt, Human
ugggcagagucauacaggagac

SEQ ID NO: 970632 - RNA, 17 nt, Human
ugccagccugucccagg

SEQ ID NO: 970633 - RNA, 22 nt, Human
aaugauguauuaguacaacaca

SEQ ID NO: 970634 - RNA, 22 nt, Human
agaaaugcucuuccugaccaga

SEQ ID NO: 970635 - RNA, 22 nt, Human
gccucugcucucagguagccuc

SEQ ID NO: 970636 - RNA, 22 nt, Human
agccaucauuucugucacuggc

SEQ ID NO: 970637 - RNA, 22 nt, Human
uuugaaaggaauuaggaugaca

SEQ ID NO: 970638 - RNA, 22 nt, Human
uacauguaggugacauuuuaau

SEQ ID NO: 970639 - RNA, 22 nt, Human
uggccagguugggcuuugcagc

SEQ ID NO: 970640 - RNA, 22 nt, Human
uuccauuuauucuuguccagau

SEQ ID NO: 970641 - RNA, 22 nt, Human
ucacucugggccagcgcaggua

SEQ ID NO: 970642 - RNA, 22 nt, Human
acauguuagaaaugcagaaucu

SEQ ID NO: 970643 - RNA, 22 nt, Human
uguuucagucccuguguucaau

SEQ ID NO: 970644 - RNA, 22 nt, Human
cugaaaugacgguuuggggcaa

SEQ ID NO: 970645 - RNA, 22 nt, Human
ccaguucuaaacauaaagcuaa

SEQ ID NO: 970646 - RNA, 22 nt, Human
gcugucucauacaaggcccugc

SEQ ID NO: 970647 - RNA, 22 nt, Human
ucuggagcaacagagcaggaca

SEQ ID NO: 970648 - RNA, 22 nt, Human
ugcccaaguguuuggcugaguc

SEQ ID NO: 970649 - RNA, 22 nt, Human
cagccugcagggcugccuguug

SEQ ID NO: 970650 - RNA, 22 nt, Human
ucugggcagcagcagcuaguag

SEQ ID NO: 970651 - RNA, 22 nt, Human
uucaguaaaacacugcaauguc

SEQ ID NO: 970652 - RNA, 22 nt, Human
aggcagggucuugcuauguugc

SEQ ID NO: 970653 - RNA, 22 nt, Human
ucucagagcuucagaaagcacc

SEQ ID NO: 970654 - RNA, 22 nt, Human
uggcaacaccuggaagacaugg

SEQ ID NO: 970655 - RNA, 22 nt, Human
aaauguagaccuauagggaccu

SEQ ID NO: 970656 - RNA, 22 nt, Human
aagugaagaaauacaugagaau

SEQ ID NO: 970657 - RNA, 22 nt, Human
aaugcacaugccacauguggua

SEQ ID NO: 970658 - RNA, 22 nt, Human
aagacuguacauuuuccagucu

SEQ ID NO: 970659 - RNA, 22 nt, Human
cuuaagaugaggucaugcuaua

SEQ ID NO: 970660 - RNA, 22 nt, Human
ucagcugccccaguggccccag

SEQ ID NO: 970661 - RNA, 22 nt, Human
gcuggccaggaagagucucaga

SEQ ID NO: 970662 - RNA, 22 nt, Human
uggcagagaugaagaguuguuu

SEQ ID NO: 970663 - RNA, 22 nt, Human
cacauguaguaagcaggcaaug

SEQ ID NO: 970664 - RNA, 22 nt, Human
uucuuucagaacacaagugauu

SEQ ID NO: 970665 - RNA, 22 nt, Human
gggcuuggcacaugggcucagc

SEQ ID NO: 970666 - RNA, 22 nt, Human
ccagaccacccuggccaugcac

SEQ ID NO: 970667 - RNA, 22 nt, Human
gcagugccuugcuucucugucu

SEQ ID NO: 970668 - RNA, 22 nt, Human
uguccucuuccagugcuccuuc

SEQ ID NO: 970669 - RNA, 22 nt, Human
agagccagcaagugaauaguga

SEQ ID NO: 970670 - RNA, 22 nt, Human
aagugaguggccuggagaggug

SEQ ID NO: 970671 - RNA, 22 nt, Human
guggccagaagacugcaaugcu

SEQ ID NO: 970672 - RNA, 22 nt, Human
aggaggcuguggagcacuccau

SEQ ID NO: 970673 - RNA, 22 nt, Human
gcugccuggcuuuaguccacuu

SEQ ID NO: 970674 - RNA, 22 nt, Human
cagacagacagccguggccacc

SEQ ID NO: 970675 - RNA, 21 nt, Human
ugauccuuucccccauguugc

SEQ ID NO: 970676 - RNA, 22 nt, Human
aaaguguggagauugaacuaaa

SEQ ID NO: 970677 - RNA, 21 nt, Human
ucacagacuggucagugaggc

SEQ ID NO: 970678 - RNA, 22 nt, Human
aggacagcccuugagagcacau

SEQ ID NO: 970679 - RNA, 20 nt, Human
uccuggccuucucgggcagu

SEQ ID NO: 970680 - RNA, 22 nt, Human
ugcccaggauugugaggucagg

SEQ ID NO: 970681 - RNA, 22 nt, Human
uucaaauacauucuuugccacu

SEQ ID NO: 970682 - RNA, 22 nt, Human
aauacaaucaaauucacuagca

SEQ ID NO: 970683 - RNA, 22 nt, Human
gggaaccagccgcuuccgccuc

SEQ ID NO: 970684 - RNA, 19 nt, Human
acuuugcaugugugucuaa

SEQ ID NO: 970685 - RNA, 22 nt, Human
ucagcagggcugugguguggcu

SEQ ID NO: 970686 - RNA, 22 nt, Human
auuguuaugaaaauaagauguu

SEQ ID NO: 970687 - RNA, 22 nt, Human
uuuuauugucaaugaagacaga

SEQ ID NO: 970688 - RNA, 22 nt, Human
cuuaaaaucuggcaguuagcua

SEQ ID NO: 970689 - RNA, 22 nt, Human
gccuucugugcuccuggccuuu

SEQ ID NO: 970690 - RNA, 22 nt, Human
cccuggaggcggauguugcagu

SEQ ID NO: 970691 - RNA, 22 nt, Human
gcagacagacugcagugauuuu

SEQ ID NO: 970692 - RNA, 22 nt, Human
ggagccuggucagguuggcucc

SEQ ID NO: 970693 - RNA, 22 nt, Human
agccauuggcugccuggugcgu

SEQ ID NO: 970694 - RNA, 22 nt, Human
gcuguucacggaggaggauggg

SEQ ID NO: 970695 - RNA, 23 nt, Human
agggguggucaguacccgcagug

SEQ ID NO: 970696 - RNA, 22 nt, Human
gcagagguggcaucugggcucu

SEQ ID NO: 970697 - RNA, 22 nt, Human
gccugccugaaggcuguaccag

SEQ ID NO: 970698 - RNA, 22 nt, Human
uucuucuugaaacuuuagguug

SEQ ID NO: 970699 - RNA, 20 nt, Human
gcccacucuaauccacuguc

SEQ ID NO: 970700 - RNA, 22 nt, Human
ggcagcuuuuaucccugacaga

SEQ ID NO: 970701 - RNA, 22 nt, Human
agacagcugggaaauggagugu

SEQ ID NO: 970702 - RNA, 22 nt, Human
uggguggcacuucuggggucca

SEQ ID NO: 970703 - RNA, 22 nt, Human
guauuagguuggugcaaaauug

SEQ ID NO: 970704 - RNA, 22 nt, Human
ggccuguguccuccuugcccug

SEQ ID NO: 970705 - RNA, 22 nt, Human
acagcacaaucugagucccaga

SEQ ID NO: 970706 - RNA, 22 nt, Human
uuaaaugaacgagauaugcaac

SEQ ID NO: 970707 - RNA, 22 nt, Human
gagagcugauagaugagcuacu

SEQ ID NO: 970708 - RNA, 17 nt, Human
agaaagaggauccacag

SEQ ID NO: 970709 - RNA, 22 nt, Human
uguuggcagauugucuaggguu

SEQ ID NO: 970710 - RNA, 22 nt, Human
ccuggccagcagccccuuccuc

SEQ ID NO: 970711 - RNA, 22 nt, Human
ccaggagaauaauggcagauua

SEQ ID NO: 970712 - RNA, 22 nt, Human
agcaccaucagaugcaauaucu

SEQ ID NO: 970713 - RNA, 22 nt, Human
ccuguucaagguauuaauuauc

SEQ ID NO: 970714 - RNA, 22 nt, Human
augguuuguguggcccagauga

SEQ ID NO: 970715 - RNA, 22 nt, Human
accuacccuuagaucacaaggg

SEQ ID NO: 970716 - RNA, 16 nt, Human
gcucugcugaggccca

SEQ ID NO: 970717 - RNA, 22 nt, Human
gaaucucaaggcuugugaggau

SEQ ID NO: 970718 - RNA, 19 nt, Human
uccauaagcuuguguucau

SEQ ID NO: 970719 - RNA, 22 nt, Human
cgcaccacugaauuccagccug

SEQ ID NO: 970720 - RNA, 22 nt, Human
cauccugguuaccccauaguca

SEQ ID NO: 970721 - RNA, 22 nt, Human
gacaguuuuuaauccuuucaug

SEQ ID NO: 970722 - RNA, 22 nt, Human
accuuuuauguaaauauauguu

SEQ ID NO: 970723 - RNA, 22 nt, Human
ucuucauuccguagauauuuau

SEQ ID NO: 970724 - RNA, 22 nt, Human
ggagcugggaauuggaucaucu

SEQ ID NO: 970725 - RNA, 22 nt, Human
auagucacucuguuagguguuu

SEQ ID NO: 970726 - RNA, 22 nt, Human
ggagacagugacuuagagacug

SEQ ID NO: 970727 - RNA, 22 nt, Human
ucacauuuucuacuacuguacg

SEQ ID NO: 970728 - RNA, 22 nt, Human
agaggggcucauauccugucau

SEQ ID NO: 970729 - RNA, 22 nt, Human
gagcagugguugaacagaggca

SEQ ID NO: 970730 - RNA, 22 nt, Human
agggaaaggcugaugcuguggg

SEQ ID NO: 970731 - RNA, 22 nt, Human
acacauuaugagcaguugucuu

SEQ ID NO: 970732 - RNA, 22 nt, Human
gagagaaaugugcaguuugggc

SEQ ID NO: 970733 - RNA, 22 nt, Human
ugucaugccaggaaauaguccc

SEQ ID NO: 970734 - RNA, 22 nt, Human
agagccugggaauuugcauguu

SEQ ID NO: 970735 - RNA, 22 nt, Human
ccuggagagagaggccaacugc

SEQ ID NO: 970736 - RNA, 23 nt, Human
ugaaggccuggaggacgcguugu

SEQ ID NO: 970737 - RNA, 22 nt, Human
gaucuucuauguaaugaagugu

SEQ ID NO: 970738 - RNA, 22 nt, Human
auauaauaguuucauaaaggcu

SEQ ID NO: 970739 - RNA, 23 nt, Human
uccuucagagccucccuccaagc

SEQ ID NO: 970740 - RNA, 22 nt, Human
uggcuggcgccgggcuagccac

SEQ ID NO: 970741 - RNA, 22 nt, Human
aaugcuguaaagaugcuaucug

SEQ ID NO: 970742 - RNA, 22 nt, Human
aaacuuuaagacaguccucaag

SEQ ID NO: 970743 - RNA, 22 nt, Human
ucuuaaagcagcuuguaaaaug

SEQ ID NO: 970744 - RNA, 22 nt, Human
gcugcccugugguccagcaggu

SEQ ID NO: 970745 - RNA, 22 nt, Human
uuggcucaggaccccugugacu

SEQ ID NO: 970746 - RNA, 22 nt, Human
aauucuauguucuugaguaaga

SEQ ID NO: 970747 - RNA, 22 nt, Human
ucacugcaaccucugccuuccg

SEQ ID NO: 970748 - RNA, 22 nt, Human
ggcuggccucaggguccucgcu

SEQ ID NO: 970749 - RNA, 22 nt, Human
ugcucugcaagcaggagcaaga

SEQ ID NO: 970750 - RNA, 22 nt, Human
uugugguuaaccgcacauuuuu

SEQ ID NO: 970751 - RNA, 22 nt, Human
ggaggcugagaaguccaagauc

SEQ ID NO: 970752 - RNA, 22 nt, Human
cugggagcccgcguccuggugg

SEQ ID NO: 970753 - RNA, 22 nt, Human
uuacugaaaauucuucaggauu

SEQ ID NO: 970754 - RNA, 22 nt, Human
auacauacauguacacauaaau

SEQ ID NO: 970755 - RNA, 22 nt, Human
cucuucuugucucugguuagaa

SEQ ID NO: 970756 - RNA, 22 nt, Human
cuggugggaggcaagguggaag

SEQ ID NO: 970757 - RNA, 22 nt, Human
gcauggcagugaggauggugcu

SEQ ID NO: 970758 - RNA, 22 nt, Human
ugcucuguugugcaugugggau

SEQ ID NO: 970759 - RNA, 22 nt, Human
agcaacuguuacaagaacaaca

SEQ ID NO: 970760 - RNA, 23 nt, Human
gccaggcuccggucuguggccac

SEQ ID NO: 970761 - RNA, 22 nt, Human
cagaguguuagcgcugguuggg

SEQ ID NO: 970762 - RNA, 22 nt, Human
ccaggccugcaucugcugcgca

SEQ ID NO: 970763 - RNA, 22 nt, Human
ucugggagguggcagggugcau

SEQ ID NO: 970764 - RNA, 22 nt, Human
uaaacaugugagugugcauaua

SEQ ID NO: 970765 - RNA, 22 nt, Human
ucuuugcaugcauuuucccuua

SEQ ID NO: 970766 - RNA, 22 nt, Human
aggcagcuuucuggugcaccau

SEQ ID NO: 970767 - RNA, 20 nt, Human
ucagugauuuugaagaggaa

SEQ ID NO: 970768 - RNA, 22 nt, Human
caaagguaaagaucugcugugg

SEQ ID NO: 970769 - RNA, 22 nt, Human
uuuucuaacaucuaguaauuug

SEQ ID NO: 970770 - RNA, 22 nt, Human
aucaggauucaccccagagcug

SEQ ID NO: 970771 - RNA, 22 nt, Human
auugacaaucuacuauguucug

SEQ ID NO: 970772 - RNA, 22 nt, Human
guuccauaucacagcagacgaa

SEQ ID NO: 970773 - RNA, 19 nt, Human
uuucuuaggccuuuggccu

SEQ ID NO: 970774 - RNA, 22 nt, Human
ugcugccacauuuaaagagggg

SEQ ID NO: 970775 - RNA, 22 nt, Human
uggagccugagucagcggaggc

SEQ ID NO: 970776 - RNA, 22 nt, Human
ccucuguccuggggaguggagc

SEQ ID NO: 970777 - RNA, 22 nt, Human
agggcugcugaggaagccuugc

SEQ ID NO: 970778 - RNA, 22 nt, Human
ccagccuggguguuagaagaca

SEQ ID NO: 970779 - RNA, 22 nt, Human
gcagagccgugaauggauuuca

SEQ ID NO: 970780 - RNA, 22 nt, Human
ugcauuauacuuuuagaaauuu

SEQ ID NO: 970781 - RNA, 22 nt, Human
caacccaaaagcguuuccauuu

SEQ ID NO: 970782 - RNA, 22 nt, Human
ucuuugaauucaaacuguucaa

SEQ ID NO: 970783 - RNA, 22 nt, Human
aucacuguguauguauaugcag

SEQ ID NO: 970784 - RNA, 22 nt, Human
auguuuuugagauacaaacaga

SEQ ID NO: 970785 - RNA, 22 nt, Human
uccucugcuguucugguucuuu

SEQ ID NO: 970786 - RNA, 22 nt, Human
ggccaaaugaaaucugagcaau

SEQ ID NO: 970787 - RNA, 22 nt, Human
cagaacauucacucauaugugg

SEQ ID NO: 970788 - RNA, 22 nt, Human
uagagaaauaagcuuugccuug

SEQ ID NO: 970789 - RNA, 22 nt, Human
uggcucaguuugggggauugaa

SEQ ID NO: 970790 - RNA, 22 nt, Human
acauuucucuugaugucucuau

SEQ ID NO: 970791 - RNA, 22 nt, Human
gagaggauccacaaaccaggaa

SEQ ID NO: 970792 - RNA, 18 nt, Human
acaaaggucugcaagacc

SEQ ID NO: 970793 - RNA, 22 nt, Human
uguuacuuaucucacgugaugc

SEQ ID NO: 970794 - RNA, 22 nt, Human
uaguuaggguucugcagagaca

SEQ ID NO: 970795 - RNA, 22 nt, Human
auguacacaugcaugcaugugc

SEQ ID NO: 970796 - RNA, 22 nt, Human
aaggcacugaaaaauugugugu

SEQ ID NO: 970797 - RNA, 21 nt, Human
uucaaugaaaacaaagugagg

SEQ ID NO: 970798 - RNA, 22 nt, Human
agagcucaagacgcucacagua

SEQ ID NO: 970799 - RNA, 22 nt, Human
aggcugcagugcagguaggauu

SEQ ID NO: 970800 - RNA, 22 nt, Human
cuaugaaaggauuuggaguugu

SEQ ID NO: 970801 - RNA, 22 nt, Human
ccagcccuguaaggaugaggca

SEQ ID NO: 970802 - RNA, 23 nt, Human
aggcgagcucuucuccagcacgu

SEQ ID NO: 970803 - RNA, 22 nt, Human
augcagcuucaggauuaugaug

SEQ ID NO: 970804 - RNA, 22 nt, Human
uaaaucccuacaucuguguuuu

SEQ ID NO: 970805 - RNA, 22 nt, Human
uuauuauaaugagggauaaaaa

SEQ ID NO: 970806 - RNA, 22 nt, Human
gcccagccuccaagcuccaagg

SEQ ID NO: 970807 - RNA, 20 nt, Human
uacagaaacaggacuuuugg

SEQ ID NO: 970808 - RNA, 19 nt, Human
augauggucccauucaccu

SEQ ID NO: 970809 - RNA, 22 nt, Human
ugcuuggcuuucugagcuucug

SEQ ID NO: 970810 - RNA, 22 nt, Human
cugggucuggugucaggcgacg

SEQ ID NO: 970811 - RNA, 22 nt, Human
uuauuucuugucuauguagcca

SEQ ID NO: 970812 - RNA, 22 nt, Human
caagagcuuuagaaaugcucau

SEQ ID NO: 970813 - RNA, 22 nt, Human
agggagccagaguugggagcuc

SEQ ID NO: 970814 - RNA, 22 nt, Human
uggagccuguguuucugcccag

SEQ ID NO: 970815 - RNA, 20 nt, Human
ugugugcacacaugacauuc

SEQ ID NO: 970816 - RNA, 22 nt, Human
gcagcaaucuucacagugucau

SEQ ID NO: 970817 - RNA, 22 nt, Human
uauugaugcuuggauugggcca

SEQ ID NO: 970818 - RNA, 22 nt, Human
augacacaauuuuagagcugaa

SEQ ID NO: 970819 - RNA, 22 nt, Human
uagaaacagagagauaugcccc

SEQ ID NO: 970820 - RNA, 22 nt, Human
gcugcugcgcuugucuacuguu

SEQ ID NO: 970821 - RNA, 22 nt, Human
uccucacaagcaagcacaggua

SEQ ID NO: 970822 - RNA, 22 nt, Human
aggucaccauggcaugcuccac

SEQ ID NO: 970823 - RNA, 23 nt, Human
cuccucguaacucuguggugggu

SEQ ID NO: 970824 - RNA, 22 nt, Human
ugaagccaucaggaagccagca

SEQ ID NO: 970825 - RNA, 22 nt, Human
cuucagggugacgcaggcugca

SEQ ID NO: 970826 - RNA, 22 nt, Human
ugcaagcacucaaugcaaacag

SEQ ID NO: 970827 - RNA, 22 nt, Human
uuucuuaggcucuaaaaugacu

SEQ ID NO: 970828 - RNA, 22 nt, Human
cuuaauaaaugguagcuguuau

SEQ ID NO: 970829 - RNA, 20 nt, Human
ugucagugccugaggcacag

SEQ ID NO: 970830 - RNA, 17 nt, Human
cauguguaugugggagu

SEQ ID NO: 970831 - RNA, 22 nt, Human
gcugagagcaguguggccuuaa

SEQ ID NO: 970832 - RNA, 23 nt, Human
ccucccaccuauuucacuuucuu

SEQ ID NO: 970833 - RNA, 22 nt, Human
gcaaagucugcaucuggaucag

SEQ ID NO: 970834 - RNA, 22 nt, Human
aaaauaguuaacguucagagua

SEQ ID NO: 970835 - RNA, 22 nt, Human
ucucucugccaacucacagcca

SEQ ID NO: 970836 - RNA, 22 nt, Human
agcccaagcauaggagggaggc

SEQ ID NO: 970837 - RNA, 22 nt, Human
ucucagaggucuucagccucug

SEQ ID NO: 970838 - RNA, 20 nt, Human
uuggccaaaucuuagucaug

SEQ ID NO: 970839 - RNA, 22 nt, Human
ucauuuguucaucugcucuucu

SEQ ID NO: 970840 - RNA, 22 nt, Human
ugaucagucccaugaucuucca

SEQ ID NO: 970841 - RNA, 22 nt, Human
uagcagggaaggugugcugagc

SEQ ID NO: 970842 - RNA, 22 nt, Human
uucaagaucgaguuuaaaguga

SEQ ID NO: 970843 - RNA, 22 nt, Human
gaggcugcugagagcccuguuu

SEQ ID NO: 970844 - RNA, 22 nt, Human
gagcugcuucugugugccgggu

SEQ ID NO: 970845 - RNA, 22 nt, Human
ucacaauuuggauacagcuaug

SEQ ID NO: 970846 - RNA, 22 nt, Human
caggccucuauggucagcugag

SEQ ID NO: 970847 - RNA, 22 nt, Human
ucacucuguguuucccugggac

SEQ ID NO: 970848 - RNA, 22 nt, Human
guccucugcuucaugcccugau

SEQ ID NO: 970849 - RNA, 22 nt, Human
uugcucagcacuggagccagcu

SEQ ID NO: 970850 - RNA, 22 nt, Human
gagaaguuucugguuugcauag

SEQ ID NO: 970851 - RNA, 22 nt, Human
cccucuggcucuucucaggccg

SEQ ID NO: 970852 - RNA, 23 nt, Human
aucauucuccaaucuggagcagg

SEQ ID NO: 970853 - RNA, 22 nt, Human
agaaaguucugugaguuguuca

SEQ ID NO: 970854 - RNA, 22 nt, Human
aagaugauagaucugucaaugu

SEQ ID NO: 970855 - RNA, 22 nt, Human
ugcacauucacuuagguauugu

SEQ ID NO: 970856 - RNA, 22 nt, Human
uaaguucaaugaacucaguucu

SEQ ID NO: 970857 - RNA, 22 nt, Human
gagaggcugaaaucacaggagc

SEQ ID NO: 970858 - RNA, 22 nt, Human
uucuucaaaacaacacuggccu

SEQ ID NO: 970859 - RNA, 22 nt, Human
uuugaaaggagcuuuauccaga

SEQ ID NO: 970860 - RNA, 23 nt, Human
ugcugguguuuuugggaccaggg

SEQ ID NO: 970861 - RNA, 22 nt, Human
uauuuaaaaagaggccagcugg

SEQ ID NO: 970862 - RNA, 22 nt, Human
caaggaaaacagaugaucaaca

SEQ ID NO: 970863 - RNA, 22 nt, Human
acacccagagcgccagugccga

SEQ ID NO: 970864 - RNA, 22 nt, Human
ucaaaaaguugaagaguugggg

SEQ ID NO: 970865 - RNA, 22 nt, Human
uaggcagcauggauucugaaua

SEQ ID NO: 970866 - RNA, 22 nt, Human
ugccacagaggugaagcccacu

SEQ ID NO: 970867 - RNA, 22 nt, Human
aaacuacuggauuaguaacuua

SEQ ID NO: 970868 - RNA, 19 nt, Human
cccagagcauccugaacuu

SEQ ID NO: 970869 - RNA, 18 nt, Human
uggagcagguaggcauga

SEQ ID NO: 970870 - RNA, 22 nt, Human
ucucugcuugguguaugugagu

SEQ ID NO: 970871 - RNA, 22 nt, Human
ggucuaaaaugagucuuccuag

SEQ ID NO: 970872 - RNA, 22 nt, Human
ggcuuccuggagaaggucugag

SEQ ID NO: 970873 - RNA, 22 nt, Human
gccugagacagugugguccaau

SEQ ID NO: 970874 - RNA, 22 nt, Human
ugugaaagcaagucuaguucuc

SEQ ID NO: 970875 - RNA, 22 nt, Human
cuggcucuucagugcuugguuc

SEQ ID NO: 970876 - RNA, 22 nt, Human
uggcagucauuaucgcugaguc

SEQ ID NO: 970877 - RNA, 22 nt, Human
agcccagguugaggcugcagug

SEQ ID NO: 970878 - RNA, 22 nt, Human
uucuucaauuauuggaaagaaa

SEQ ID NO: 970879 - RNA, 22 nt, Human
uuaacagacauauauauuugua

SEQ ID NO: 970880 - RNA, 22 nt, Human
gaagccaacauuccaaguagaa

SEQ ID NO: 970881 - RNA, 22 nt, Human
uaacccaaaggcaaugucucga

SEQ ID NO: 970882 - RNA, 22 nt, Human
ucugucccugagagcucaggag

SEQ ID NO: 970883 - RNA, 22 nt, Human
aucaguuucacuugcuugcaaa

SEQ ID NO: 970884 - RNA, 19 nt, Human
uucuccagccugaccugag

SEQ ID NO: 970885 - RNA, 22 nt, Human
uugacaaaaauaacacagcaua

SEQ ID NO: 970886 - RNA, 22 nt, Human
ucagaagacuacuaggacacau

SEQ ID NO: 970887 - RNA, 22 nt, Human
agcugcugcgccucacccuggc

SEQ ID NO: 970888 - RNA, 20 nt, Human
uucauucauuccacaacuuc

SEQ ID NO: 970889 - RNA, 22 nt, Human
acaggcugggcgcuuccugcgg

SEQ ID NO: 970890 - RNA, 22 nt, Human
cccuuagcucaauuucuugccc

SEQ ID NO: 970891 - RNA, 22 nt, Human
cugcccugcuugaugacagcga

SEQ ID NO: 970892 - RNA, 22 nt, Human
gcugccuuugugagccaagggg

SEQ ID NO: 970893 - RNA, 22 nt, Human
guucuucaucauuaacacucug

SEQ ID NO: 970894 - RNA, 21 nt, Human
ugugucacuaacuagaggcua

SEQ ID NO: 970895 - RNA, 17 nt, Human
cugcuuugugcaacgcu

SEQ ID NO: 970896 - RNA, 22 nt, Human
cccccaggcucugacacaggag

SEQ ID NO: 970897 - RNA, 22 nt, Human
aaauugcaaaaguacuuuuagg

SEQ ID NO: 970898 - RNA, 22 nt, Human
cuggccugagaaugcuacccuu

SEQ ID NO: 970899 - RNA, 22 nt, Human
gcugggcaagugccuuggguuu

SEQ ID NO: 970900 - RNA, 22 nt, Human
uggcaaccagguggucuagggu

SEQ ID NO: 970901 - RNA, 22 nt, Human
ccuggccuuaagggcagggagc

SEQ ID NO: 970902 - RNA, 23 nt, Human
cccaggagccugaguccucucug

SEQ ID NO: 970903 - RNA, 22 nt, Human
guaaaguucuacuagaaucaac

SEQ ID NO: 970904 - RNA, 22 nt, Human
uaauuuacuugcaaauaacaau

SEQ ID NO: 970905 - RNA, 22 nt, Human
acagaguagcucaagaagauug

SEQ ID NO: 970906 - RNA, 22 nt, Human
agcuggguguguaucagauaaa

SEQ ID NO: 970907 - RNA, 22 nt, Human
cuccaggaaaauagggaaugag

SEQ ID NO: 970908 - RNA, 22 nt, Human
uagggcuauucugaguaauaau

SEQ ID NO: 970909 - RNA, 22 nt, Human
guggcugcagcccagcggcacg

SEQ ID NO: 970910 - RNA, 22 nt, Human
ugggcagaguagcucagaagaa

SEQ ID NO: 970911 - RNA, 21 nt, Human
agaaaaguagaguuuucagag

SEQ ID NO: 970912 - RNA, 22 nt, Human
caggcugcagcagcaguggccc

SEQ ID NO: 970913 - RNA, 22 nt, Human
cucaggauucucgacacucaca

SEQ ID NO: 970914 - RNA, 22 nt, Human
gaaacccaaacuaagacaguag

SEQ ID NO: 970915 - RNA, 22 nt, Human
uuaauguggaaagcucuugagu

SEQ ID NO: 970916 - RNA, 22 nt, Human
gauuucaaggauguuagaggug

SEQ ID NO: 970917 - RNA, 22 nt, Human
uugaauaguguuuucaguauac

SEQ ID NO: 970918 - RNA, 21 nt, Human
acaggcuuuagaaaaugacuc

SEQ ID NO: 970919 - RNA, 22 nt, Human
uguaggauuuucaccagaccuu

SEQ ID NO: 970920 - RNA, 22 nt, Human
agauggagaccuuggaugaacu

SEQ ID NO: 970921 - RNA, 22 nt, Human
aggcccuggguuagggcccacu

SEQ ID NO: 970922 - RNA, 22 nt, Human
caguuucuuaucuucaaaauug

SEQ ID NO: 970923 - RNA, 22 nt, Human
agaccacagucaggcuccuggu

SEQ ID NO: 970924 - RNA, 20 nt, Human
acaggggcagcacaauaaug

SEQ ID NO: 970925 - RNA, 23 nt, Human
agacagaggcugaggcuggccgc

SEQ ID NO: 970926 - RNA, 22 nt, Human
cccaggcuggagugcaauggca

SEQ ID NO: 970927 - RNA, 22 nt, Human
agguaaagacugcaaggagaau

SEQ ID NO: 970928 - RNA, 22 nt, Human
acugugugggccgcucacuggg

SEQ ID NO: 970929 - RNA, 19 nt, Human
ugucacugucauggcccag

SEQ ID NO: 970930 - RNA, 22 nt, Human
uguggcugcucaggugcagacc

SEQ ID NO: 970931 - RNA, 20 nt, Human
acagaauaugcugguugugg

SEQ ID NO: 970932 - RNA, 20 nt, Human
ucucaggccccaguuuucuu

SEQ ID NO: 970933 - RNA, 22 nt, Human
aaaucaguaaauguucauuaac

SEQ ID NO: 970934 - RNA, 19 nt, Human
agcaccugugagagccugg

SEQ ID NO: 970935 - RNA, 22 nt, Human
ucuuagaaauuccccaguggcu

SEQ ID NO: 970936 - RNA, 22 nt, Human
uauugaaauccauuacguucuu

SEQ ID NO: 970937 - RNA, 23 nt, Human
uuucaacaaugcuuagagaaaac

SEQ ID NO: 970938 - RNA, 22 nt, Human
gagcacagaaucuucccaugca

SEQ ID NO: 970939 - RNA, 22 nt, Human
cagaggcauauaauugcugggg

SEQ ID NO: 970940 - RNA, 22 nt, Human
ucagcugcucaaauuuauguca

SEQ ID NO: 970941 - RNA, 22 nt, Human
cccaagagguggagguugcagu

SEQ ID NO: 970942 - RNA, 22 nt, Human
ugcuggggauccguaccaaccc

SEQ ID NO: 970943 - RNA, 22 nt, Human
ucuucauuuuacaggcagaccu

SEQ ID NO: 970944 - RNA, 22 nt, Human
cagagccauccaggugccuguu

SEQ ID NO: 970945 - RNA, 22 nt, Human
acacacagguaaaggagccugg

SEQ ID NO: 970946 - RNA, 22 nt, Human
cugugucccuugucccagagcc

SEQ ID NO: 970947 - RNA, 19 nt, Human
ccuggcccugcugcgcggg

SEQ ID NO: 970948 - RNA, 22 nt, Human
gaggcagcugggcuggugguuu

SEQ ID NO: 970949 - RNA, 22 nt, Human
agccugagagccaagcugugca

SEQ ID NO: 970950 - RNA, 22 nt, Human
gcaaauucuuaacuggacugug

SEQ ID NO: 970951 - RNA, 22 nt, Human
agggagcucacaguccaguaga

SEQ ID NO: 970952 - RNA, 21 nt, Human
ggagauggguaucgccugggc

SEQ ID NO: 970953 - RNA, 23 nt, Human
acagaaaucauuuguaagguacc

SEQ ID NO: 970954 - RNA, 21 nt, Human
gcugccaccgcgugcuccagg

SEQ ID NO: 970955 - RNA, 22 nt, Human
gcugggcuugguuucccugcuu

SEQ ID NO: 970956 - RNA, 21 nt, Human
cuggacugaggagacagucgc

SEQ ID NO: 970957 - RNA, 22 nt, Human
uggcagcugauuagauggugcc

SEQ ID NO: 970958 - RNA, 22 nt, Human
gcaggcucuucuuucugcccag

SEQ ID NO: 970959 - RNA, 22 nt, Human
uaaaauugcggugaauauuucc

SEQ ID NO: 970960 - RNA, 22 nt, Human
uccuuagagauacugucuugaa

SEQ ID NO: 970961 - RNA, 19 nt, Human
aggcagcaggccagggaug

SEQ ID NO: 970962 - RNA, 22 nt, Human
gagcugccaagauuacaaucag

SEQ ID NO: 970963 - RNA, 22 nt, Human
auucuucauuguugauucaugu

SEQ ID NO: 970964 - RNA, 22 nt, Human
cuguuaaucugcuugcaugaug

SEQ ID NO: 970965 - RNA, 19 nt, Human
ggcucagggcgcugccgcc

SEQ ID NO: 970966 - RNA, 22 nt, Human
ugcugggggcuuucuggauacc

SEQ ID NO: 970967 - RNA, 22 nt, Human
gacagcagacagaacuaccugc

SEQ ID NO: 970968 - RNA, 22 nt, Human
uuugcagugucagcuucugugu

SEQ ID NO: 970969 - RNA, 22 nt, Human
uuguauuagcuguaaauuuucu

SEQ ID NO: 970970 - RNA, 22 nt, Human
cugagccaugagccugcgccca

SEQ ID NO: 970971 - RNA, 22 nt, Human
ucaaaguuuguggcaauuuauu

SEQ ID NO: 970972 - RNA, 22 nt, Human
uccaggagauacacugcaccag

SEQ ID NO: 970973 - RNA, 22 nt, Human
ggcgugggaaguggggcuucug

SEQ ID NO: 970974 - RNA, 22 nt, Human
ggcucuggugcccuggcuccca

SEQ ID NO: 970975 - RNA, 22 nt, Human
uuucaaaguugggaauuguaau

SEQ ID NO: 970976 - RNA, 23 nt, Human
acugagccagggccugggucagc

SEQ ID NO: 970977 - RNA, 22 nt, Human
aaguuucauguggagguagacu

SEQ ID NO: 970978 - RNA, 22 nt, Human
agauuucaaugugagcauuagu

SEQ ID NO: 970979 - RNA, 22 nt, Human
gaaaaguaaacacuagggguca

SEQ ID NO: 970980 - RNA, 22 nt, Human
agucucugcugguugugccuau

SEQ ID NO: 970981 - RNA, 22 nt, Human
cacuguaucuuuuccaaagucu

SEQ ID NO: 970982 - RNA, 22 nt, Human
cagcagagcugugugggaaggg

SEQ ID NO: 970983 - RNA, 22 nt, Human
ggagagcaggguccugagauac

SEQ ID NO: 970984 - RNA, 22 nt, Human
uugaccauaccuccaggcaguu

SEQ ID NO: 970985 - RNA, 22 nt, Human
auucaucaacugauagccauag

SEQ ID NO: 970986 - RNA, 22 nt, Human
aggcugagauagguggaucauu

SEQ ID NO: 970987 - RNA, 22 nt, Human
gcacagagggcagugagccucu

SEQ ID NO: 970988 - RNA, 22 nt, Human
augugucuuauuugauuccaca

SEQ ID NO: 970989 - RNA, 22 nt, Human
aaaggucaaaaucgugacauug

SEQ ID NO: 970990 - RNA, 17 nt, Human
agcugaaauugcugaag

SEQ ID NO: 970991 - RNA, 22 nt, Human
ggagccugugggaugagaugug

SEQ ID NO: 970992 - RNA, 22 nt, Human
uugaaucucuugaaucucuguu

SEQ ID NO: 970993 - RNA, 18 nt, Human
gucaccuggaucagauua

SEQ ID NO: 970994 - RNA, 22 nt, Human
accagagauggggcuucucugu

SEQ ID NO: 970995 - RNA, 22 nt, Human
aagaacuuccuaauauauuuuc

SEQ ID NO: 970996 - RNA, 22 nt, Human
gcagggucuugagaggcagcca

SEQ ID NO: 970997 - RNA, 22 nt, Human
ugaauaagaauuauuauaauga

SEQ ID NO: 970998 - RNA, 22 nt, Human
ugggcagcuuccacuuaguuag

SEQ ID NO: 970999 - RNA, 23 nt, Human
acagacaacacugaugagagaaa

SEQ ID NO: 971000 - RNA, 22 nt, Human
ggcaggugcaccugagccaucu

SEQ ID NO: 971001 - RNA, 22 nt, Human
cugggagauugcuagagaugca

SEQ ID NO: 971002 - RNA, 22 nt, Human
ccugccugcguccucugagggc

SEQ ID NO: 971003 - RNA, 22 nt, Human
cugaaugucgaucagcuugggu

SEQ ID NO: 971004 - RNA, 22 nt, Human
gaggcucugugaugugccaggc

SEQ ID NO: 971005 - RNA, 22 nt, Human
ugugugccugagccgugccugg

SEQ ID NO: 971006 - RNA, 22 nt, Human
ucgugucagaucagagguuccu

SEQ ID NO: 971007 - RNA, 22 nt, Human
augugucugguuauugacaugc

SEQ ID NO: 971008 - RNA, 22 nt, Human
gaguuauucuagguccuuugua

SEQ ID NO: 971009 - RNA, 23 nt, Human
gugagucuugccuuugcugugga

SEQ ID NO: 971010 - RNA, 22 nt, Human
agccugcaggaugggcagcacc

SEQ ID NO: 971011 - RNA, 22 nt, Human
uaacaauaguguuugcuaguca

SEQ ID NO: 971012 - RNA, 22 nt, Human
ugcugccaugcagagcaacaga

SEQ ID NO: 971013 - RNA, 22 nt, Human
ugugcaggugcaggaagggggc

SEQ ID NO: 971014 - RNA, 22 nt, Human
uguguauagcaguuuccagucu

SEQ ID NO: 971015 - RNA, 22 nt, Human
uuccaugacaccgagggaaguc

SEQ ID NO: 971016 - RNA, 22 nt, Human
cccaggagauaacguucccaag

SEQ ID NO: 971017 - RNA, 22 nt, Human
gaccaggagauuugagcuaggc

SEQ ID NO: 971018 - RNA, 22 nt, Human
ugagagucucagaccuccuggu

SEQ ID NO: 971019 - RNA, 22 nt, Human
uuuuguuguaauauaccuaucc

SEQ ID NO: 971020 - RNA, 22 nt, Human
ccuuuuucccuggagggacagc

SEQ ID NO: 971021 - RNA, 22 nt, Human
ucccagagcagaugugcuaaag

SEQ ID NO: 971022 - RNA, 22 nt, Human
uacaccuuaaucauaugugucu

SEQ ID NO: 971023 - RNA, 22 nt, Human
ugggaauggaugcuaagugcua

SEQ ID NO: 971024 - RNA, 22 nt, Human
ggcuagaacuuuacacuuugca

SEQ ID NO: 971025 - RNA, 22 nt, Human
caauacuuccuuguuagaggca

SEQ ID NO: 971026 - RNA, 22 nt, Human
gaggagagagggacugucugca

SEQ ID NO: 971027 - RNA, 22 nt, Human
ucucaagcuuguugguauguuu

SEQ ID NO: 971028 - RNA, 22 nt, Human
aguguuccuugcuuucccagag

SEQ ID NO: 971029 - RNA, 22 nt, Human
ucacaguuauagucuguagaau

SEQ ID NO: 971030 - RNA, 22 nt, Human
ucacuaagugccgaguuuaguu

SEQ ID NO: 971031 - RNA, 21 nt, Human
uggagcugaauuuuuggcauc

SEQ ID NO: 971032 - RNA, 22 nt, Human
cuggcagcguguuuaugaacau

SEQ ID NO: 971033 - RNA, 15 nt, Human
uucaggauaugacuc

SEQ ID NO: 971034 - RNA, 22 nt, Human
ugccucagaguugucccuacca

SEQ ID NO: 971035 - RNA, 22 nt, Human
gcucugcuuucuggggggaucc

SEQ ID NO: 971036 - RNA, 22 nt, Human
cacagcuucuccuugauaucgc

SEQ ID NO: 971037 - RNA, 22 nt, Human
cacagcagaaaguguaggagga

SEQ ID NO: 971038 - RNA, 22 nt, Human
acauuucucaucuaguagagua

SEQ ID NO: 971039 - RNA, 22 nt, Human
agucaauuaucucuaggucauc

SEQ ID NO: 971040 - RNA, 22 nt, Human
aggccugagcagaggaguggac

SEQ ID NO: 971041 - RNA, 22 nt, Human
agcauggggcuccgcaaugaac

SEQ ID NO: 971042 - RNA, 22 nt, Human
ucugagaggauuccugucccga

SEQ ID NO: 971043 - RNA, 22 nt, Human
aggcaguggaaggagaaagcaa

SEQ ID NO: 971044 - RNA, 22 nt, Human
guggccaagggacucuaaggca

SEQ ID NO: 971045 - RNA, 23 nt, Human
cccagggacacgaugacaccucc

SEQ ID NO: 971046 - RNA, 22 nt, Human
gccucccuggcccacagcagcg

SEQ ID NO: 971047 - RNA, 22 nt, Human
aucaaaguuucccagaaguugu

SEQ ID NO: 971048 - RNA, 22 nt, Human
uauuagagaaaagauggaugug

SEQ ID NO: 971049 - RNA, 22 nt, Human
cugggugguucuaacuguugau

SEQ ID NO: 971050 - RNA, 18 nt, Human
gugacagcugcuagcuca

SEQ ID NO: 971051 - RNA, 22 nt, Human
agacaaagaaaccguagaagca

SEQ ID NO: 971052 - RNA, 22 nt, Human
gaggagagccugcacuuugacc

SEQ ID NO: 971053 - RNA, 22 nt, Human
cucaaggacuuauucaugccug

SEQ ID NO: 971054 - RNA, 22 nt, Human
uggccacccagcugacgccuuc

SEQ ID NO: 971055 - RNA, 22 nt, Human
uaacaucuuuagcagcucgaac

SEQ ID NO: 971056 - RNA, 22 nt, Human
aagugacaaaaggguauccaaa

SEQ ID NO: 971057 - RNA, 22 nt, Human
uugacaagaaucguugccuugg

SEQ ID NO: 971058 - RNA, 22 nt, Human
cuucaucaacucuaacaaaugu

SEQ ID NO: 971059 - RNA, 22 nt, Human
gagagcaggaggcagcgggacg

SEQ ID NO: 971060 - RNA, 22 nt, Human
uggcaauuucagaaaauagaau

SEQ ID NO: 971061 - RNA, 20 nt, Human
acuccugguaacuuuuguga

SEQ ID NO: 971062 - RNA, 22 nt, Human
agcugccacagagccuggccag

SEQ ID NO: 971063 - RNA, 22 nt, Human
guucacaucacuucacugaacc

SEQ ID NO: 971064 - RNA, 22 nt, Human
ucuccuggauggaccuucucuu

SEQ ID NO: 971065 - RNA, 22 nt, Human
agggccagcccauaaugccaaa

SEQ ID NO: 971066 - RNA, 22 nt, Human
agucuucagagaaauuaacucu

SEQ ID NO: 971067 - RNA, 22 nt, Human
ugcugggcuagaagcugaggcc

SEQ ID NO: 971068 - RNA, 22 nt, Human
gggccacauugaagggugggua

SEQ ID NO: 971069 - RNA, 22 nt, Human
agggacacugaugagaaauucu

SEQ ID NO: 971070 - RNA, 22 nt, Human
gugccuggcaugcgccggugcu

SEQ ID NO: 971071 - RNA, 22 nt, Human
auugucuuuccacugagaaguu

SEQ ID NO: 971072 - RNA, 22 nt, Human
cuggcagggugggcuuugcuuu

SEQ ID NO: 971073 - RNA, 22 nt, Human
aggcaagcauuuaaccacucau

SEQ ID NO: 971074 - RNA, 20 nt, Human
uuaggcauuuggauuggcuu

SEQ ID NO: 971075 - RNA, 21 nt, Human
cauuucaugauuauagaaaug

SEQ ID NO: 971076 - RNA, 22 nt, Human
ugcugccaggucuugcugucca

SEQ ID NO: 971077 - RNA, 22 nt, Human
ugcugcuguuuccuacaucuca

SEQ ID NO: 971078 - RNA, 22 nt, Human
ugaggcucaaggucugguggag

SEQ ID NO: 971079 - RNA, 22 nt, Human
aucuagaaaguguugaagauca

SEQ ID NO: 971080 - RNA, 22 nt, Human
cagagguauugcaaaagccuag

SEQ ID NO: 971081 - RNA, 22 nt, Human
uguuaaauguuccuuuacugga

SEQ ID NO: 971082 - RNA, 22 nt, Human
gagcuuccauggacgccaucug

SEQ ID NO: 971083 - RNA, 22 nt, Human
gcacugugacccagagcaggug

SEQ ID NO: 971084 - RNA, 22 nt, Human
acaggugugagaacaugccuug

SEQ ID NO: 971085 - RNA, 22 nt, Human
uacauucuggaaaggcacagac

SEQ ID NO: 971086 - RNA, 22 nt, Human
uauuaugagguauuuggacuuu

SEQ ID NO: 971087 - RNA, 22 nt, Human
cugugccaucugcacucucguc

SEQ ID NO: 971088 - RNA, 22 nt, Human
aaucaguuaaauauugaguaca

SEQ ID NO: 971089 - RNA, 22 nt, Human
uuaggcauuggaaggucagcuu

SEQ ID NO: 971090 - RNA, 23 nt, Human
ugggggugcacgggccacaucuu

SEQ ID NO: 971091 - RNA, 22 nt, Human
uuauuaggaaaaggucagaugu

SEQ ID NO: 971092 - RNA, 22 nt, Human
uauucacaggcuggagugaugu

SEQ ID NO: 971093 - RNA, 22 nt, Human
uuuccucugagugagcugggag

SEQ ID NO: 971094 - RNA, 22 nt, Human
uuugcauuugcaaauaaugaaa

SEQ ID NO: 971095 - RNA, 22 nt, Human
agccacagcuccuugguggaga

SEQ ID NO: 971096 - RNA, 22 nt, Human
aguuuauguagaauuggcaaua

SEQ ID NO: 971097 - RNA, 22 nt, Human
aaggagucucagcugggccuga

SEQ ID NO: 971098 - RNA, 22 nt, Human
aaaucuguaagcaauugcucag

SEQ ID NO: 971099 - RNA, 22 nt, Human
ugugcuucuugcagcuccugua

SEQ ID NO: 971100 - RNA, 21 nt, Human
ucuguacaucauugagucccc

SEQ ID NO: 971101 - RNA, 22 nt, Human
gcacccaggccggcgacugcag

SEQ ID NO: 971102 - RNA, 22 nt, Human
aggacugggugcagagggcauc

SEQ ID NO: 971103 - RNA, 22 nt, Human
ggcugccugcuccuccugcacg

SEQ ID NO: 971104 - RNA, 22 nt, Human
cuuguaauuauaauguacuguu

SEQ ID NO: 971105 - RNA, 22 nt, Human
agccuucagcaguucaggugcc

SEQ ID NO: 971106 - RNA, 22 nt, Human
ucagggugaaccaggcaggaau

SEQ ID NO: 971107 - RNA, 18 nt, Human
gucauugcaacauacugu

SEQ ID NO: 971108 - RNA, 22 nt, Human
uaaaaguggauaagcuguagga

SEQ ID NO: 971109 - RNA, 22 nt, Human
cuuccucccggcccaugcucug

SEQ ID NO: 971110 - RNA, 22 nt, Human
ucggagcuguagaugaaacccu

SEQ ID NO: 971111 - RNA, 22 nt, Human
cagggcuggauccuccagacuc

SEQ ID NO: 971112 - RNA, 22 nt, Human
aaagucauguaaugauaugauu

SEQ ID NO: 971113 - RNA, 22 nt, Human
auugaauagaugcauuauacua

SEQ ID NO: 971114 - RNA, 22 nt, Human
uugaaagugccaaguccuagug

SEQ ID NO: 971115 - RNA, 22 nt, Human
uuagccauuuuauacaagugua

SEQ ID NO: 971116 - RNA, 22 nt, Human
agcuucuggaaggcaaggcuug

SEQ ID NO: 971117 - RNA, 23 nt, Human
cuuuuaacuugaucugagaccag

SEQ ID NO: 971118 - RNA, 22 nt, Human
ugacagaaagaauaugucaauc

SEQ ID NO: 971119 - RNA, 22 nt, Human
uggcucaagugauccuccugcc

SEQ ID NO: 971120 - RNA, 20 nt, Human
gagagcuggggaugaggcug

SEQ ID NO: 971121 - RNA, 22 nt, Human
aaagccauugaacuguacuuua

SEQ ID NO: 971122 - RNA, 22 nt, Human
ugagguguguccccagggaggu

SEQ ID NO: 971123 - RNA, 22 nt, Human
uauaguacauggaaucuucaua

SEQ ID NO: 971124 - RNA, 22 nt, Human
ggcagcaguccauggcccaagg

SEQ ID NO: 971125 - RNA, 22 nt, Human
ugcacagcgggugucugucagg

SEQ ID NO: 971126 - RNA, 22 nt, Human
uggcagggucuugcuguguugc

SEQ ID NO: 971127 - RNA, 19 nt, Human
uggcuucuguuuucauguu

SEQ ID NO: 971128 - RNA, 22 nt, Human
agccucucuguuagucacuggg

SEQ ID NO: 971129 - RNA, 22 nt, Human
cccagcuccuuacagggccgaa

SEQ ID NO: 971130 - RNA, 22 nt, Human
uugggagcauuuagaaaagacg

SEQ ID NO: 971131 - RNA, 22 nt, Human
acagagagaaacaaucagcagc

SEQ ID NO: 971132 - RNA, 22 nt, Human
ggaguuggugagcaccaggcuu

SEQ ID NO: 971133 - RNA, 22 nt, Human
ucuucucucauguaggagggaa

SEQ ID NO: 971134 - RNA, 22 nt, Human
caguacuuuucuggcuuucuac

SEQ ID NO: 971135 - RNA, 22 nt, Human
auguagcaucuauccugauaaa

SEQ ID NO: 971136 - RNA, 22 nt, Human
uguuugaaagcaccuacauuuu

SEQ ID NO: 971137 - RNA, 22 nt, Human
cccaggaaugaggggcggaggc

SEQ ID NO: 971138 - RNA, 22 nt, Human
uugcauguagaauacucaacuu

SEQ ID NO: 971139 - RNA, 22 nt, Human
cacccagcagcacuuaagacua

SEQ ID NO: 971140 - RNA, 22 nt, Human
ugcacacaaguuggagaaugaa

SEQ ID NO: 971141 - RNA, 22 nt, Human
ugaggcagaguaagauacauga

SEQ ID NO: 971142 - RNA, 22 nt, Human
ccuggagauuucuucaagcuuu

SEQ ID NO: 971143 - RNA, 22 nt, Human
uuuagaaauugcagagugggug

SEQ ID NO: 971144 - RNA, 22 nt, Human
cucuggagcgcugcuucccgcg

SEQ ID NO: 971145 - RNA, 22 nt, Human
aguacuucagaggcugcccagg

SEQ ID NO: 971146 - RNA, 22 nt, Human
auacagaauacuaauuccugag

SEQ ID NO: 971147 - RNA, 22 nt, Human
cugaggcuuggaggggucuggu

SEQ ID NO: 971148 - RNA, 19 nt, Human
cucucacucgccacauccu

SEQ ID NO: 971149 - RNA, 22 nt, Human
caaggccugccucuggcagaaa

SEQ ID NO: 971150 - RNA, 22 nt, Human
agcaggugggaucaagcuggca

SEQ ID NO: 971151 - RNA, 22 nt, Human
gaggccacgguuuuccuugggg

SEQ ID NO: 971152 - RNA, 22 nt, Human
uggcagcaauuugugauguuga

SEQ ID NO: 971153 - RNA, 22 nt, Human
caugcuguguguuuuagcucca

SEQ ID NO: 971154 - RNA, 22 nt, Human
auuugucuuugagugcccugcu

SEQ ID NO: 971155 - RNA, 23 nt, Human
gaagcagaugucugaguaggcag

SEQ ID NO: 971156 - RNA, 22 nt, Human
cagcuuccgaccgggggcugca

SEQ ID NO: 971157 - RNA, 22 nt, Human
gagccucguggcggccacugcg

SEQ ID NO: 971158 - RNA, 23 nt, Human
ucucaggacacacaugucuauca

SEQ ID NO: 971159 - RNA, 20 nt, Human
agugugcauuuagagucugc

SEQ ID NO: 971160 - RNA, 22 nt, Human
aagcugccagauucagucugcu

SEQ ID NO: 971161 - RNA, 22 nt, Human
aaggccaacuaggaugagcuag

SEQ ID NO: 971162 - RNA, 22 nt, Human
uggcucagcugucacagccugg

SEQ ID NO: 971163 - RNA, 21 nt, Human
ugacauaauccauaguacaaa

SEQ ID NO: 971164 - RNA, 21 nt, Human
cugguguagcacucaggugcu

SEQ ID NO: 971165 - RNA, 22 nt, Human
ugagccaguggaagauggcagu

SEQ ID NO: 971166 - RNA, 20 nt, Human
aaagucuuaugguuaauuuu

SEQ ID NO: 971167 - RNA, 22 nt, Human
ugucacaaacauacauuauaga

SEQ ID NO: 971168 - RNA, 22 nt, Human
gagguggugguggaggcauagc

SEQ ID NO: 971169 - RNA, 22 nt, Human
cucagagucugcauuucuguca

SEQ ID NO: 971170 - RNA, 22 nt, Human
ggggauggauuccgggucccug

SEQ ID NO: 971171 - RNA, 22 nt, Human
uacauacacaaauauacuguuu

SEQ ID NO: 971172 - RNA, 22 nt, Human
uuagugauuacuacauagauga

SEQ ID NO: 971173 - RNA, 22 nt, Human
acuguucaagcaaaugacauug

SEQ ID NO: 971174 - RNA, 22 nt, Human
ggaggccagggacccagucagc

SEQ ID NO: 971175 - RNA, 16 nt, Human
auucacaaggcaucgg

SEQ ID NO: 971176 - RNA, 22 nt, Human
guauucauauuaaacauaucaa

SEQ ID NO: 971177 - RNA, 22 nt, Human
aggccagacagcuagaaacagg

SEQ ID NO: 971178 - RNA, 23 nt, Human
uccaggagaauuccagggcccgg

SEQ ID NO: 971179 - RNA, 22 nt, Human
acugucaccaucagagcgggaa

SEQ ID NO: 971180 - RNA, 23 nt, Human
gccucugcucugcguuggggacu

SEQ ID NO: 971181 - RNA, 22 nt, Human
gcugucugggaugucacugcug

SEQ ID NO: 971182 - RNA, 22 nt, Human
gcagcugguuaaugggagaauu

SEQ ID NO: 971183 - RNA, 22 nt, Human
uguuuaaucuauaaaauggaga

SEQ ID NO: 971184 - RNA, 22 nt, Human
aaaguuuuagaacuaggaagca

SEQ ID NO: 971185 - RNA, 22 nt, Human
uccucucagugugguuguggga

SEQ ID NO: 971186 - RNA, 22 nt, Human
aacauucuauuuugcuaaaaca

SEQ ID NO: 971187 - RNA, 22 nt, Human
gccuuggcugaugugcgaauga

SEQ ID NO: 971188 - RNA, 22 nt, Human
uggagcugggaguccugggcug

SEQ ID NO: 971189 - RNA, 22 nt, Human
uguaucaaggguuuauguaagc

SEQ ID NO: 971190 - RNA, 22 nt, Human
gugucccaggagaggagacaau

SEQ ID NO: 971191 - RNA, 22 nt, Human
ugggcucucuggcaggaaggcu

SEQ ID NO: 971192 - RNA, 22 nt, Human
agugauggugagugagaagcuc

SEQ ID NO: 971193 - RNA, 22 nt, Human
ucacuuauugcucaucucaugc

SEQ ID NO: 971194 - RNA, 22 nt, Human
agggacuggcucucugagcagg

SEQ ID NO: 971195 - RNA, 22 nt, Human
uaaaagacauauaacuguagga

SEQ ID NO: 971196 - RNA, 22 nt, Human
cagggccagagagggcuggcug

SEQ ID NO: 971197 - RNA, 22 nt, Human
uaugcacgucuauuuaugaaga

SEQ ID NO: 971198 - RNA, 22 nt, Human
agaagaaacugucggggauauu

SEQ ID NO: 971199 - RNA, 22 nt, Human
ucagugugaggucuuccacccg

SEQ ID NO: 971200 - RNA, 22 nt, Human
cugccagcucucuggaggcucu

SEQ ID NO: 971201 - RNA, 22 nt, Human
auccaaagauggaaagaacuuu

SEQ ID NO: 971202 - RNA, 22 nt, Human
ucuggagcuuguuucagauggu

SEQ ID NO: 971203 - RNA, 22 nt, Human
uugcaguugucuuuccuaauuu

SEQ ID NO: 971204 - RNA, 22 nt, Human
gcaggaagaugagcucagguaa

SEQ ID NO: 971205 - RNA, 22 nt, Human
uggccuggaaccuggcagggac

SEQ ID NO: 971206 - RNA, 22 nt, Human
aguaaaaucaccaucucuuugu

SEQ ID NO: 971207 - RNA, 22 nt, Human
ggcaguggguuccccaaggcac

SEQ ID NO: 971208 - RNA, 22 nt, Human
aggcuucccaagcagcugcaaa

SEQ ID NO: 971209 - RNA, 22 nt, Human
ccucaggaaaugaauaaauggc

SEQ ID NO: 971210 - RNA, 22 nt, Human
caagaugggcaccccagcaccu

SEQ ID NO: 971211 - RNA, 22 nt, Human
gucccagaggcuuuggccacag

SEQ ID NO: 971212 - RNA, 22 nt, Human
cuggcagcauggagccugugcu

SEQ ID NO: 971213 - RNA, 22 nt, Human
aaaguuuggauuagcaguuaga

SEQ ID NO: 971214 - RNA, 22 nt, Human
gcagcuguguaaugagcccaca

SEQ ID NO: 971215 - RNA, 19 nt, Human
augagcuggcauuucaggu

SEQ ID NO: 971216 - RNA, 19 nt, Human
caggagagcaugcacuuug

SEQ ID NO: 971217 - RNA, 22 nt, Human
agcagggcuucugugccugugc

SEQ ID NO: 971218 - RNA, 22 nt, Human
aggcugcucugcgaagucagcu

SEQ ID NO: 971219 - RNA, 22 nt, Human
gaggcagcaggcugaggaggau

SEQ ID NO: 971220 - RNA, 22 nt, Human
uauuucuugaguggucaguuuc

SEQ ID NO: 971221 - RNA, 22 nt, Human
cacucugcaggccaaaccaaag

SEQ ID NO: 971222 - RNA, 22 nt, Human
uucaggaugcagagguuguagu

SEQ ID NO: 971223 - RNA, 22 nt, Human
ucccuggguccugcuugcucuc

SEQ ID NO: 971224 - RNA, 22 nt, Human
gggcagagguucaacuucaaca

SEQ ID NO: 971225 - RNA, 23 nt, Human
cauccaggagcugagucugacug

SEQ ID NO: 971226 - RNA, 22 nt, Human
ucccaggaugaagacaguguug

SEQ ID NO: 971227 - RNA, 22 nt, Human
ucauugaauuucacagcuuuau

SEQ ID NO: 971228 - RNA, 22 nt, Human
guuauuuucauuggcucagacu

SEQ ID NO: 971229 - RNA, 22 nt, Human
aagacugugucuauggcuacuc

SEQ ID NO: 971230 - RNA, 22 nt, Human
uggagcaagcuggagagaacau

SEQ ID NO: 971231 - RNA, 19 nt, Human
ggcauccagaacuaccagu

SEQ ID NO: 971232 - RNA, 22 nt, Human
uggcagaguuauggguauuuau

SEQ ID NO: 971233 - RNA, 22 nt, Human
cuggccaggcuugggacagaca

SEQ ID NO: 971234 - RNA, 22 nt, Human
uaaauucuacaacuucaaagau

SEQ ID NO: 971235 - RNA, 22 nt, Human
agcugccagggacugggcaugg

SEQ ID NO: 971236 - RNA, 22 nt, Human
cccucugccugggaccaagucc

SEQ ID NO: 971237 - RNA, 22 nt, Human
uuauacuaaaacgcauugaauu

SEQ ID NO: 971238 - RNA, 22 nt, Human
gcugccucuguagcuuuggacc

SEQ ID NO: 971239 - RNA, 22 nt, Human
ugagagugguucagcucagaag

SEQ ID NO: 971240 - RNA, 22 nt, Human
aaguaaauaucuguuuauagca

SEQ ID NO: 971241 - RNA, 22 nt, Human
acagcagagugugagauagcca

SEQ ID NO: 971242 - RNA, 22 nt, Human
acaguuauucuuuaugcaacca

SEQ ID NO: 971243 - RNA, 22 nt, Human
aggccaaagugcuccuuuuaga

SEQ ID NO: 971244 - RNA, 22 nt, Human
ucagaggucacacagcaaguuu

SEQ ID NO: 971245 - RNA, 22 nt, Human
guuaucaugcuucaucaucacu

SEQ ID NO: 971246 - RNA, 22 nt, Human
aauaauguacauacauauuucg

SEQ ID NO: 971247 - RNA, 18 nt, Human
ccuggcagccaugcgcgc

SEQ ID NO: 971248 - RNA, 22 nt, Human
uucucauucugacucaguguag

SEQ ID NO: 971249 - RNA, 18 nt, Human
uuaaggauaagcagacua

SEQ ID NO: 971250 - RNA, 22 nt, Human
gcuguccucuuggacucagggc

SEQ ID NO: 971251 - RNA, 22 nt, Human
uuauuccaauuucuccuacaaa

SEQ ID NO: 971252 - RNA, 22 nt, Human
ccuggcuggauggagccccugg

SEQ ID NO: 971253 - RNA, 22 nt, Human
cagacaggaauucuggcguggu

SEQ ID NO: 971254 - RNA, 22 nt, Human
ucccagcagcauagcucagaau

SEQ ID NO: 971255 - RNA, 22 nt, Human
uugauacauagcacaguuuagg

SEQ ID NO: 971256 - RNA, 22 nt, Human
ccgggcgggggcucucgucacc

SEQ ID NO: 971257 - RNA, 22 nt, Human
gagaaacuuggaguuauucugg

SEQ ID NO: 971258 - RNA, 22 nt, Human
aaggagaaaugguagaugugca

SEQ ID NO: 971259 - RNA, 22 nt, Human
uagcucuucauuucaucugauu

SEQ ID NO: 971260 - RNA, 23 nt, Human
aagcugccuucgcaguuggucug

SEQ ID NO: 971261 - RNA, 22 nt, Human
augaggcaguacacacaaagcc

SEQ ID NO: 971262 - RNA, 22 nt, Human
gcugagguggagauugcaguga

SEQ ID NO: 971263 - RNA, 22 nt, Human
caggugcucccagagaagugcu

SEQ ID NO: 971264 - RNA, 22 nt, Human
gcccaggcuagcguagagugca

SEQ ID NO: 971265 - RNA, 22 nt, Human
ucagagucucccccaguuuggg

SEQ ID NO: 971266 - RNA, 21 nt, Human
uucugggaaaugagcuggggc

SEQ ID NO: 971267 - RNA, 22 nt, Human
cuguccugauggugccacuggu

SEQ ID NO: 971268 - RNA, 22 nt, Human
uacaugcucaguaacuuucagu

SEQ ID NO: 971269 - RNA, 22 nt, Human
uuauguacaauguuaauguaaa

SEQ ID NO: 971270 - RNA, 21 nt, Human
agggagcuggccacacagccu

SEQ ID NO: 971271 - RNA, 22 nt, Human
uccaagggcuuuggcgugaagu

SEQ ID NO: 971272 - RNA, 22 nt, Human
uugggagcuuggacuuagugug

SEQ ID NO: 971273 - RNA, 22 nt, Human
gcccagcagaucucagugucuc

SEQ ID NO: 971274 - RNA, 23 nt, Human
uuugcaaauuggacacaaccaca

SEQ ID NO: 971275 - RNA, 21 nt, Human
ggagcugcaggagccgaaggc

SEQ ID NO: 971276 - RNA, 23 nt, Human
uagcuguggcguaaggcucagcu

SEQ ID NO: 971277 - RNA, 22 nt, Human
cagcaggguauacagggaauuu

SEQ ID NO: 971278 - RNA, 22 nt, Human
uauuuuaaagugaagggucuug

SEQ ID NO: 971279 - RNA, 21 nt, Human
cuacuuaaguaggggauuagg

SEQ ID NO: 971280 - RNA, 20 nt, Human
cccugagaccagagagcagc

SEQ ID NO: 971281 - RNA, 22 nt, Human
aaggccagacaggaccacaucu

SEQ ID NO: 971282 - RNA, 21 nt, Human
auuuggauauugcuggcaaau

SEQ ID NO: 971283 - RNA, 22 nt, Human
uaaaucuuguggcaaugcuucu

SEQ ID NO: 971284 - RNA, 22 nt, Human
ugcucuggggagcuccucugcg

SEQ ID NO: 971285 - RNA, 22 nt, Human
gccauaaauugcuggucaaaau

SEQ ID NO: 971286 - RNA, 22 nt, Human
ggagaggauguuuuaguaacuu

SEQ ID NO: 971287 - RNA, 22 nt, Human
cuuucacaguccugacugagcg

SEQ ID NO: 971288 - RNA, 22 nt, Human
caaugauguuuagauaaaaucc

SEQ ID NO: 971289 - RNA, 22 nt, Human
ugucccucauugacgcugugcc

SEQ ID NO: 971290 - RNA, 22 nt, Human
cacugggcguguccugggugag

SEQ ID NO: 971291 - RNA, 23 nt, Human
cagcugaagcagccugggcugga

SEQ ID NO: 971292 - RNA, 22 nt, Human
gagagcugggaaagccguggag

SEQ ID NO: 971293 - RNA, 22 nt, Human
gcugucugucuucacaucucgc

SEQ ID NO: 971294 - RNA, 22 nt, Human
cuggggcccaucgagggcugag

SEQ ID NO: 971295 - RNA, 22 nt, Human
acuuccugcaaucguccacucc

SEQ ID NO: 971296 - RNA, 22 nt, Human
ggcugugggccagcuagacccu

SEQ ID NO: 971297 - RNA, 22 nt, Human
ucacaugcagucacugagcagg

SEQ ID NO: 971298 - RNA, 22 nt, Human
cggccaaauugcagagagaagc

SEQ ID NO: 971299 - RNA, 22 nt, Human
uuuccucuaaacgcauuugcuu

SEQ ID NO: 971300 - RNA, 22 nt, Human
ugguaauuuacgcauuucugua

SEQ ID NO: 971301 - RNA, 22 nt, Human
ccagcugguguuccuuaggacc

SEQ ID NO: 971302 - RNA, 19 nt, Human
uuucccagcccuugcugug

SEQ ID NO: 971303 - RNA, 22 nt, Human
cugggagucaccaggagcaagg

SEQ ID NO: 971304 - RNA, 22 nt, Human
cuggggccacaacggcgcacgc

SEQ ID NO: 971305 - RNA, 22 nt, Human
cagggcaggaugcugugauuau

SEQ ID NO: 971306 - RNA, 20 nt, Human
ucucccaggcucagggaaga

SEQ ID NO: 971307 - RNA, 22 nt, Human
gcugcagcucgccuuccggccu

SEQ ID NO: 971308 - RNA, 22 nt, Human
gccagcucagaugcaggaagga

SEQ ID NO: 971309 - RNA, 22 nt, Human
gcaggcaguugcaguuuucuag

SEQ ID NO: 971310 - RNA, 22 nt, Human
caagggccuccaccuugcucgu

SEQ ID NO: 971311 - RNA, 22 nt, Human
auggauaagaacaaauaucuga

SEQ ID NO: 971312 - RNA, 22 nt, Human
agugagaguauuaaugugaacu

SEQ ID NO: 971313 - RNA, 22 nt, Human
uuuaauguucaucucaaaggau

SEQ ID NO: 971314 - RNA, 22 nt, Human
uuggaauucaaguuguagcuua

SEQ ID NO: 971315 - RNA, 22 nt, Human
uaggauuuggcuuuagucaggu

SEQ ID NO: 971316 - RNA, 22 nt, Human
gcagagacuccacugucuugug

SEQ ID NO: 971317 - RNA, 22 nt, Human
acagagcaguucuggagcuggc

SEQ ID NO: 971318 - RNA, 19 nt, Human
ccucugccagcccgccucu

SEQ ID NO: 971319 - RNA, 22 nt, Human
cucucaggcuugggucguggca

SEQ ID NO: 971320 - RNA, 23 nt, Human
ggagaggggugugggcaucuuua

SEQ ID NO: 971321 - RNA, 22 nt, Human
cagaggcaaaagagguggaggu

SEQ ID NO: 971322 - RNA, 22 nt, Human
ugcauauuuguaugauguuuag

SEQ ID NO: 971323 - RNA, 22 nt, Human
ugaacgcagguccacauggcuc

SEQ ID NO: 971324 - RNA, 22 nt, Human
aucugcagaggacaggcgagga

SEQ ID NO: 971325 - RNA, 22 nt, Human
cugggcuacguguugacagcau

SEQ ID NO: 971326 - RNA, 22 nt, Human
cagcaggaggugagaugugacc

SEQ ID NO: 971327 - RNA, 21 nt, Human
cagaaguaaggguaacuucuc

SEQ ID NO: 971328 - RNA, 22 nt, Human
ugggccugggucuuugcugcca

SEQ ID NO: 971329 - RNA, 22 nt, Human
gagggugguggcuuaaggugcu

SEQ ID NO: 971330 - RNA, 22 nt, Human
gcagagaaaguuuuguccucag

SEQ ID NO: 971331 - RNA, 20 nt, Human
ugaugguucuuuccggguug

SEQ ID NO: 971332 - RNA, 22 nt, Human
gcuuuggagccuguguucugcc

SEQ ID NO: 971333 - RNA, 18 nt, Human
ccagcaugccagaggcug

SEQ ID NO: 971334 - RNA, 22 nt, Human
ccagcugcugugaggaccacag

SEQ ID NO: 971335 - RNA, 22 nt, Human
guucuucacauuucauugagga

SEQ ID NO: 971336 - RNA, 22 nt, Human
cauugaaaccuaacauaggcug

SEQ ID NO: 971337 - RNA, 22 nt, Human
agccagagcugaugucauucuc

SEQ ID NO: 971338 - RNA, 22 nt, Human
uugcugaaaacaguggguauug

SEQ ID NO: 971339 - RNA, 22 nt, Human
aagagcugauuaagucaugagg

SEQ ID NO: 971340 - RNA, 22 nt, Human
uguacuuccccaaugacagcac

SEQ ID NO: 971341 - RNA, 22 nt, Human
ugauuuccaaaaggcuucuaag

SEQ ID NO: 971342 - RNA, 22 nt, Human
aaauauagugacacuuauaguc

SEQ ID NO: 971343 - RNA, 22 nt, Human
ucugccuuggcaaccacagcuu

SEQ ID NO: 971344 - RNA, 22 nt, Human
gcccucugcuggccucaccucg

SEQ ID NO: 971345 - RNA, 22 nt, Human
ugugccugucacccucagagag

SEQ ID NO: 971346 - RNA, 22 nt, Human
agccuggacagcuacggagaac

SEQ ID NO: 971347 - RNA, 22 nt, Human
ucugggagguaaccaugcugau

SEQ ID NO: 971348 - RNA, 22 nt, Human
cuggcuggcaaguagaacacaa

SEQ ID NO: 971349 - RNA, 23 nt, Human
agcagggccagaauacuugcugu

SEQ ID NO: 971350 - RNA, 22 nt, Human
aguuauauuccauagauucaga

SEQ ID NO: 971351 - RNA, 22 nt, Human
cccucccaggaguggccagaga

SEQ ID NO: 971352 - RNA, 20 nt, Human
cugcugugauucccuccucc

SEQ ID NO: 971353 - RNA, 22 nt, Human
cuuuguaucuaaauaucuugaa

SEQ ID NO: 971354 - RNA, 22 nt, Human
cugcaagauuggaagaugcaau

SEQ ID NO: 971355 - RNA, 22 nt, Human
cccuggcauaaaacuucuccag

SEQ ID NO: 971356 - RNA, 22 nt, Human
uacauuccauguguguguauuc

SEQ ID NO: 971357 - RNA, 22 nt, Human
aucuuucagggccauuuguauu

SEQ ID NO: 971358 - RNA, 22 nt, Human
ucucugcucaggcaccagcccu

SEQ ID NO: 971359 - RNA, 22 nt, Human
augcuguguuugagaaccuagg

SEQ ID NO: 971360 - RNA, 22 nt, Human
cuggcagcauuaacagagagca

SEQ ID NO: 971361 - RNA, 22 nt, Human
uuuuauagcugaauaguauucc

SEQ ID NO: 971362 - RNA, 22 nt, Human
uccugccucuccaugcuaacua

SEQ ID NO: 971363 - RNA, 22 nt, Human
auuaggauuuuguccaaguagc

SEQ ID NO: 971364 - RNA, 20 nt, Human
aaaaacaguaaugcugaaga

SEQ ID NO: 971365 - RNA, 17 nt, Human
uggacccuugggccucc

SEQ ID NO: 971366 - RNA, 22 nt, Human
gcagagcugggucuguauccaa

SEQ ID NO: 971367 - RNA, 22 nt, Human
ucugggugcccuuugcucuguu

SEQ ID NO: 971368 - RNA, 22 nt, Human
uuuggaauuggcauucuauucu

SEQ ID NO: 971369 - RNA, 22 nt, Human
auuuuucucuccacuccauuaa

SEQ ID NO: 971370 - RNA, 21 nt, Human
gccacugcacuccagccuggg

SEQ ID NO: 971371 - RNA, 22 nt, Human
cuguccuugcuggccagguaug

SEQ ID NO: 971372 - RNA, 22 nt, Human
ugggcuggcugaacuucaaccu

SEQ ID NO: 971373 - RNA, 22 nt, Human
agggucugacaaugugacuuag

SEQ ID NO: 971374 - RNA, 22 nt, Human
cccaggauggggcugcaguuau

SEQ ID NO: 971375 - RNA, 22 nt, Human
ugguaaauauguccauucucuu

SEQ ID NO: 971376 - RNA, 22 nt, Human
gucucccaucguuugugaggaa

SEQ ID NO: 971377 - RNA, 20 nt, Human
gccugagcuccgccuccugu

SEQ ID NO: 971378 - RNA, 22 nt, Human
uuccauaaucaccuuauucuuu

SEQ ID NO: 971379 - RNA, 22 nt, Human
ucaccaggcuggaaugcagugg

SEQ ID NO: 971380 - RNA, 22 nt, Human
aggcucugaucagguggcugug

SEQ ID NO: 971381 - RNA, 22 nt, Human
cugagucucccggcaguggagg

SEQ ID NO: 971382 - RNA, 22 nt, Human
aggcugggaaauguagucuucc

SEQ ID NO: 971383 - RNA, 22 nt, Human
ugccucugcugcuguggcauca

SEQ ID NO: 971384 - RNA, 22 nt, Human
uucccucucacuuaaagcuugg

SEQ ID NO: 971385 - RNA, 22 nt, Human
agguggguaucaugagagauua

SEQ ID NO: 971386 - RNA, 22 nt, Human
guuugcauauuugcacaggaau

SEQ ID NO: 971387 - RNA, 22 nt, Human
uauaacaguuuaggugguguca

SEQ ID NO: 971388 - RNA, 22 nt, Human
auuagggaaggauuuggccuga

SEQ ID NO: 971389 - RNA, 22 nt, Human
uggcucagcaagacauugaccu

SEQ ID NO: 971390 - RNA, 22 nt, Human
ugcagaagugagucaugaggaa

SEQ ID NO: 971391 - RNA, 22 nt, Human
aaauaauugaguuggucaauau

SEQ ID NO: 971392 - RNA, 22 nt, Human
ccaggccuggaccaugccaggg

SEQ ID NO: 971393 - RNA, 22 nt, Human
uuccagaagccuccauauuacu

SEQ ID NO: 971394 - RNA, 22 nt, Human
uugguuuagagagugugguuac

SEQ ID NO: 971395 - RNA, 22 nt, Human
uguuuguucccucucuuuccug

SEQ ID NO: 971396 - RNA, 22 nt, Human
ugcagauucaaaugaaaugcaa

SEQ ID NO: 971397 - RNA, 19 nt, Human
ugacaggcuguugccuuga

SEQ ID NO: 971398 - RNA, 22 nt, Human
aaagccuugagauccuauaguu

SEQ ID NO: 971399 - RNA, 22 nt, Human
uggaggagggcuggugucugua

SEQ ID NO: 971400 - RNA, 22 nt, Human
uuucacuagaacguucuuguuu

SEQ ID NO: 971401 - RNA, 22 nt, Human
cccaggaggcagagcuugcagu

SEQ ID NO: 971402 - RNA, 22 nt, Human
uguuuuaagagcgcacuuuaua

SEQ ID NO: 971403 - RNA, 19 nt, Human
ccagcccugucacuucuug

SEQ ID NO: 971404 - RNA, 22 nt, Human
accagguggccccagcgugguu

SEQ ID NO: 971405 - RNA, 22 nt, Human
gggccuggggugacguaccccu

SEQ ID NO: 971406 - RNA, 22 nt, Human
cuuauguaugcuacuuuguggu

SEQ ID NO: 971407 - RNA, 22 nt, Human
ccaggaggcagaaguugcagug

SEQ ID NO: 971408 - RNA, 22 nt, Human
gaacuguaguuaauacuacaca

SEQ ID NO: 971409 - RNA, 22 nt, Human
ucagccagugccuugaucuugc

SEQ ID NO: 971410 - RNA, 22 nt, Human
uggacaaaugauuucuaccuuu

SEQ ID NO: 971411 - RNA, 22 nt, Human
gacauacagcauggucuaugaa

SEQ ID NO: 971412 - RNA, 22 nt, Human
augaugugugcugaucaagcuu

SEQ ID NO: 971413 - RNA, 22 nt, Human
augccuggacugacaugcacug

SEQ ID NO: 971414 - RNA, 22 nt, Human
aaugucugagucucuguauccc

SEQ ID NO: 971415 - RNA, 22 nt, Human
aacagaaaagguagguggcuuu

SEQ ID NO: 971416 - RNA, 22 nt, Human
gaggaggccaguggaaggaagc

SEQ ID NO: 971417 - RNA, 22 nt, Human
cuccaggcuucaagggccggcc

SEQ ID NO: 971418 - RNA, 22 nt, Human
cagagacaguuucacagggucu

SEQ ID NO: 971419 - RNA, 21 nt, Human
aacauuucugggagaacucac

SEQ ID NO: 971420 - RNA, 22 nt, Human
acauuucugcuagaauagguga

SEQ ID NO: 971421 - RNA, 19 nt, Human
uauggcaggccgaggcacu

SEQ ID NO: 971422 - RNA, 22 nt, Human
agguaggggguuugggaacugc

SEQ ID NO: 971423 - RNA, 23 nt, Human
ugcucugggaggcccuggagagc

SEQ ID NO: 971424 - RNA, 22 nt, Human
cuucacauguuggaguccuuug

SEQ ID NO: 971425 - RNA, 22 nt, Human
gaggugggagggcagucccuaa

SEQ ID NO: 971426 - RNA, 21 nt, Human
uccuggcccacucuaucccca

SEQ ID NO: 971427 - RNA, 16 nt, Human
ccagaggccuggccuc

SEQ ID NO: 971428 - RNA, 22 nt, Human
ucugauuagagcauucuugagu

SEQ ID NO: 971429 - RNA, 22 nt, Human
uggcaggguggcaacuuuuggu

SEQ ID NO: 971430 - RNA, 22 nt, Human
uuauguuuuaaguguguaucuu

SEQ ID NO: 971431 - RNA, 22 nt, Human
ggcugccugugcccaggcacac

SEQ ID NO: 971432 - RNA, 22 nt, Human
ccuugcauauauuauaucuuug

SEQ ID NO: 971433 - RNA, 22 nt, Human
aaaggccuugagcugggugcca

SEQ ID NO: 971434 - RNA, 22 nt, Human
gucuggaggaggaagaaggcac

SEQ ID NO: 971435 - RNA, 22 nt, Human
acagcagcauaaacugacuaag

SEQ ID NO: 971436 - RNA, 22 nt, Human
aucaggaugacaacugcugggu

SEQ ID NO: 971437 - RNA, 22 nt, Human
uauagagguggaaacugagguu

SEQ ID NO: 971438 - RNA, 22 nt, Human
aacaaauguguggcaguguggg

SEQ ID NO: 971439 - RNA, 22 nt, Human
ccauuuguucgcccagcuccaa

SEQ ID NO: 971440 - RNA, 22 nt, Human
agggaggaucugcuccuugucu

SEQ ID NO: 971441 - RNA, 22 nt, Human
ucaggggcugugcauuucccag

SEQ ID NO: 971442 - RNA, 22 nt, Human
ugaaaugagauaauuuaagugc

SEQ ID NO: 971443 - RNA, 22 nt, Human
acuucuugggacccuggcaccg

SEQ ID NO: 971444 - RNA, 22 nt, Human
cagcccagcagggucuggcccu

SEQ ID NO: 971445 - RNA, 23 nt, Human
aaugggugcaacuauccaugaca

SEQ ID NO: 971446 - RNA, 23 nt, Human
uacuuaggaauggggacggcaag

SEQ ID NO: 971447 - RNA, 22 nt, Human
aagcccaguuucacacugagac

SEQ ID NO: 971448 - RNA, 21 nt, Human
uaagaacauuaucuucuuccu

SEQ ID NO: 971449 - RNA, 22 nt, Human
aaaaacuguaauuacuuuugca

SEQ ID NO: 971450 - RNA, 22 nt, Human
ccugagguggcugcagcacugc

SEQ ID NO: 971451 - RNA, 22 nt, Human
gugccugcagcaauccauggca

SEQ ID NO: 971452 - RNA, 22 nt, Human
ucugggaagcugguccuguucu

SEQ ID NO: 971453 - RNA, 22 nt, Human
cuucucagaggccagaagcuau

SEQ ID NO: 971454 - RNA, 22 nt, Human
cagacagaccugcaagggcaca

SEQ ID NO: 971455 - RNA, 22 nt, Human
aggaucuugcuguagaggauag

SEQ ID NO: 971456 - RNA, 22 nt, Human
aauuagagaucaguucuuugac

SEQ ID NO: 971457 - RNA, 22 nt, Human
ggcagggucuggacugaaagcu

SEQ ID NO: 971458 - RNA, 22 nt, Human
cagaggccaccuguggccacug

SEQ ID NO: 971459 - RNA, 22 nt, Human
ccuggccaggcucucagcacug

SEQ ID NO: 971460 - RNA, 22 nt, Human
ugauugaagaggugaggaaguu

SEQ ID NO: 971461 - RNA, 23 nt, Human
uggccacagggugcuccauugua

SEQ ID NO: 971462 - RNA, 18 nt, Human
ucugcugcugcguccugc

SEQ ID NO: 971463 - RNA, 22 nt, Human
gcaguggggcgcugggaguugg

SEQ ID NO: 971464 - RNA, 22 nt, Human
cccuggagcaucucugcugucu

SEQ ID NO: 971465 - RNA, 22 nt, Human
uuucaucuucccagagaccuug

SEQ ID NO: 971466 - RNA, 22 nt, Human
cagggcuguaaauuagugcuga

SEQ ID NO: 971467 - RNA, 22 nt, Human
ggcuugcuucuuguccaggaau

SEQ ID NO: 971468 - RNA, 22 nt, Human
ugggccuggguuccuccugggc

SEQ ID NO: 971469 - RNA, 22 nt, Human
acagcagcuaaaggugucuccu

SEQ ID NO: 971470 - RNA, 22 nt, Human
cagcagugugcaggugugcugg

SEQ ID NO: 971471 - RNA, 22 nt, Human
cucagagaagucuuugcuaaac

SEQ ID NO: 971472 - RNA, 22 nt, Human
cugaggcucccucgggucugcu

SEQ ID NO: 971473 - RNA, 22 nt, Human
agggcuggcuccguuaccuuga

SEQ ID NO: 971474 - RNA, 22 nt, Human
ccccagccagcaggaccucuga

SEQ ID NO: 971475 - RNA, 22 nt, Human
gcuggcugcgucaucacagggc

SEQ ID NO: 971476 - RNA, 22 nt, Human
cugcacugagcucucccagccc

SEQ ID NO: 971477 - RNA, 22 nt, Human
aggcuagcaaugggagaugagu

SEQ ID NO: 971478 - RNA, 22 nt, Human
cacccacauggaaauucacagu

SEQ ID NO: 971479 - RNA, 22 nt, Human
auuaaauuuucacuaggcuccc

SEQ ID NO: 971480 - RNA, 22 nt, Human
cugucuuuuacuaucauuuacu

SEQ ID NO: 971481 - RNA, 22 nt, Human
gggcuggugaggcugcccugca

SEQ ID NO: 971482 - RNA, 22 nt, Human
uaaaacugaauacauacugagg

SEQ ID NO: 971483 - RNA, 22 nt, Human
ugagcccaggaguuggagaccg

SEQ ID NO: 971484 - RNA, 22 nt, Human
gcagagccaggagcccaggauc

SEQ ID NO: 971485 - RNA, 22 nt, Human
ccagggcacuuaggcccagccc

SEQ ID NO: 971486 - RNA, 22 nt, Human
ccuagagcucugcuuuaucuaa

SEQ ID NO: 971487 - RNA, 22 nt, Human
aaaucuggccccuugccuauuu

SEQ ID NO: 971488 - RNA, 22 nt, Human
cauauuaaggucuguaaggggu

SEQ ID NO: 971489 - RNA, 22 nt, Human
ucaaauaaugccauucaucauc

SEQ ID NO: 971490 - RNA, 21 nt, Human
ccagaggccucucuuggccac

SEQ ID NO: 971491 - RNA, 22 nt, Human
ucaaaguagggguaagccaggc

SEQ ID NO: 971492 - RNA, 22 nt, Human
ggcagccuugagggaggccugg

SEQ ID NO: 971493 - RNA, 23 nt, Human
ugucccagagggagggauaggcu

SEQ ID NO: 971494 - RNA, 22 nt, Human
auuuauuaugggauuuggcuca

SEQ ID NO: 971495 - RNA, 22 nt, Human
auaguggugagcugcauuuaug

SEQ ID NO: 971496 - RNA, 22 nt, Human
ggcccagcugugcuuccagccc

SEQ ID NO: 971497 - RNA, 22 nt, Human
ucuggcucucauacucgccagu

SEQ ID NO: 971498 - RNA, 18 nt, Human
ugggauggagaguaacug

SEQ ID NO: 971499 - RNA, 22 nt, Human
gcaggguaggugacagguaguc

SEQ ID NO: 971500 - RNA, 22 nt, Human
auuugcagagcucugaauuuug

SEQ ID NO: 971501 - RNA, 22 nt, Human
gagccagcgccuugccucuggg

SEQ ID NO: 971502 - RNA, 22 nt, Human
cuagucacucagcacugacaaa

SEQ ID NO: 971503 - RNA, 19 nt, Human
cagagccucagagcuagaa

SEQ ID NO: 971504 - RNA, 22 nt, Human
ucaaugaugcugaagguagcgu

SEQ ID NO: 971505 - RNA, 22 nt, Human
uauugacagagggucagaagag

SEQ ID NO: 971506 - RNA, 22 nt, Human
ccuggcagcauugguagagauu

SEQ ID NO: 971507 - RNA, 22 nt, Human
aggaccuguaccucagcaucua

SEQ ID NO: 971508 - RNA, 22 nt, Human
cccugggacccgcugcagaggc

SEQ ID NO: 971509 - RNA, 22 nt, Human
auaauuaauuucaguaaucucc

SEQ ID NO: 971510 - RNA, 22 nt, Human
ggcccacuugaaauggagcuca

SEQ ID NO: 971511 - RNA, 22 nt, Human
ugucaugcccaggagcaaggua

SEQ ID NO: 971512 - RNA, 22 nt, Human
ccagcugcgggcaucgagaguu

SEQ ID NO: 971513 - RNA, 22 nt, Human
ggucagagggugggcugccugu

SEQ ID NO: 971514 - RNA, 20 nt, Human
acagccagaggaggcagaca

SEQ ID NO: 971515 - RNA, 22 nt, Human
guauuaggaaauaugaagaaag

SEQ ID NO: 971516 - RNA, 22 nt, Human
caagcccaggauuccccaguua

SEQ ID NO: 971517 - RNA, 22 nt, Human
cagagcugagaauguugaugcu

SEQ ID NO: 971518 - RNA, 22 nt, Human
uggcagagcccagacuccaguc

SEQ ID NO: 971519 - RNA, 22 nt, Human
aucuucucaagcagcauccugu

SEQ ID NO: 971520 - RNA, 22 nt, Human
auuuaaauuuucugauggagag

SEQ ID NO: 971521 - RNA, 22 nt, Human
cagaacugggcagggagcagag

SEQ ID NO: 971522 - RNA, 22 nt, Human
uuagaaaggagcuuauuucuuu

SEQ ID NO: 971523 - RNA, 22 nt, Human
acauuucuccuugcaggaguca

SEQ ID NO: 971524 - RNA, 17 nt, Human
augugucugaguguccu

SEQ ID NO: 971525 - RNA, 22 nt, Human
ugucaugccaccguuucccaga

SEQ ID NO: 971526 - RNA, 22 nt, Human
ucucaggacuuugggaagcuca

SEQ ID NO: 971527 - RNA, 22 nt, Human
ccccaggagaaaucuuaaacua

SEQ ID NO: 971528 - RNA, 22 nt, Human
gagggucccugcucagggccag

SEQ ID NO: 971529 - RNA, 22 nt, Human
uugcuucaguagcucuuuaaag

SEQ ID NO: 971530 - RNA, 22 nt, Human
gcagcguggggacaggagcuca

SEQ ID NO: 971531 - RNA, 22 nt, Human
ugcauuguuugauaggugaauu

SEQ ID NO: 971532 - RNA, 17 nt, Human
cagcugugagagccuua

SEQ ID NO: 971533 - RNA, 22 nt, Human
gagccagccgcaagagcuguga

SEQ ID NO: 971534 - RNA, 22 nt, Human
uucauucugggcucuaaggaac

SEQ ID NO: 971535 - RNA, 22 nt, Human
ugcugaaaacucaaccauugug

SEQ ID NO: 971536 - RNA, 22 nt, Human
uggcagcagccauggaaggccc

SEQ ID NO: 971537 - RNA, 22 nt, Human
agagugaaguucaucgugcagc

SEQ ID NO: 971538 - RNA, 22 nt, Human
uuuccucugucaugacagcuga

SEQ ID NO: 971539 - RNA, 22 nt, Human
aagggcuggccacauucugggu

SEQ ID NO: 971540 - RNA, 22 nt, Human
uuugaaagccuggcuuuucucu

SEQ ID NO: 971541 - RNA, 22 nt, Human
cuggugcaggaaggagcuggca

SEQ ID NO: 971542 - RNA, 22 nt, Human
ugcugaaauuagaacauugagg

SEQ ID NO: 971543 - RNA, 22 nt, Human
cacauuucugugagucaauauu

SEQ ID NO: 971544 - RNA, 22 nt, Human
ucuugggaagcccauuuccacc

SEQ ID NO: 971545 - RNA, 22 nt, Human
uggcagcucccagagcuuccaa

SEQ ID NO: 971546 - RNA, 22 nt, Human
ucugggggcgaccagggacugc

SEQ ID NO: 971547 - RNA, 22 nt, Human
cagcagggaagcugugcuguuu

SEQ ID NO: 971548 - RNA, 22 nt, Human
aucuacaggcugaggugggagg

SEQ ID NO: 971549 - RNA, 22 nt, Human
cgccucagccguggucaucuuc

SEQ ID NO: 971550 - RNA, 22 nt, Human
cagcauuggguuaccuuuguuu

SEQ ID NO: 971551 - RNA, 22 nt, Human
agugugagcccuggaguggugc

SEQ ID NO: 971552 - RNA, 22 nt, Human
acugugugcccugacgccaggg

SEQ ID NO: 971553 - RNA, 22 nt, Human
ugagugaggaagcgguggagga

SEQ ID NO: 971554 - RNA, 22 nt, Human
gagugcaggccugagcaccauc

SEQ ID NO: 971555 - RNA, 22 nt, Human
cucuccucagaacaggcccucu

SEQ ID NO: 971556 - RNA, 22 nt, Human
gcugcagcagaaguucucagag

SEQ ID NO: 971557 - RNA, 22 nt, Human
cucugagcccgcugcagcccca

SEQ ID NO: 971558 - RNA, 22 nt, Human
cugugucugaauaacucugugu

SEQ ID NO: 971559 - RNA, 22 nt, Human
gacaggggucccucugggcugu

SEQ ID NO: 971560 - RNA, 20 nt, Human
ucacaucuggcagcugauga

SEQ ID NO: 971561 - RNA, 22 nt, Human
uacuuuuuagcacagugugugc

SEQ ID NO: 971562 - RNA, 22 nt, Human
ugggcagaaugugggauccaga

SEQ ID NO: 971563 - RNA, 22 nt, Human
cuuugcauacaauuuuuagaaa

SEQ ID NO: 971564 - RNA, 22 nt, Human
aaaaucuaaguagcgaguaagg

SEQ ID NO: 971565 - RNA, 22 nt, Human
gcucacuggccugaagaggacg

SEQ ID NO: 971566 - RNA, 22 nt, Human
ggcuggagugggcuccagaguu

SEQ ID NO: 971567 - RNA, 22 nt, Human
acuuucauguuggugaaggguu

SEQ ID NO: 971568 - RNA, 22 nt, Human
accauguguuuuacacauggua

SEQ ID NO: 971569 - RNA, 18 nt, Human
acauuucuaugcuucugg

SEQ ID NO: 971570 - RNA, 22 nt, Human
caggagcccguugcuccggcgg

SEQ ID NO: 971571 - RNA, 19 nt, Human
acagaagcauagaaaagga

SEQ ID NO: 971572 - RNA, 22 nt, Human
uggagaugaauauguguaccug

SEQ ID NO: 971573 - RNA, 22 nt, Human
gggagcugagcuggaagagaau

SEQ ID NO: 971574 - RNA, 22 nt, Human
ugucacauaauuuaucuguagg

SEQ ID NO: 971575 - RNA, 22 nt, Human
gccaggcucucagugacugccc

SEQ ID NO: 971576 - RNA, 18 nt, Human
cugcccagagcauuucau

SEQ ID NO: 971577 - RNA, 17 nt, Human
cucuccuuccucugagg

SEQ ID NO: 971578 - RNA, 22 nt, Human
gcaggggaguggcaggcccgga

SEQ ID NO: 971579 - RNA, 21 nt, Human
aggaggggucuuucccacuga

SEQ ID NO: 971580 - RNA, 22 nt, Human
aauguuauuacacuugugaaau

SEQ ID NO: 971581 - RNA, 22 nt, Human
auuuuucucucacacuuaccag

SEQ ID NO: 971582 - RNA, 22 nt, Human
gaggccugguuuccagcauccu

SEQ ID NO: 971583 - RNA, 21 nt, Human
cugcucuggggaccggcugug

SEQ ID NO: 971584 - RNA, 22 nt, Human
gguuugcacgauauuuccaugg

SEQ ID NO: 971585 - RNA, 22 nt, Human
uacaaaguagaaauucaguaaa

SEQ ID NO: 971586 - RNA, 22 nt, Human
agcugggaggugggcagugaga

SEQ ID NO: 971587 - RNA, 22 nt, Human
uguggccuccuguuccugggua

SEQ ID NO: 971588 - RNA, 22 nt, Human
cuauuaggcuuccauuucaugc

SEQ ID NO: 971589 - RNA, 22 nt, Human
uggacucagugcugccauuccc

SEQ ID NO: 971590 - RNA, 22 nt, Human
ugaacauauucaccucuaaaua

SEQ ID NO: 971591 - RNA, 22 nt, Human
gauuucaagcccccagagauuc

SEQ ID NO: 971592 - RNA, 22 nt, Human
agaaaugaagagagucaagguu

SEQ ID NO: 971593 - RNA, 22 nt, Human
ucugggagcagaugaugguaua

SEQ ID NO: 971594 - RNA, 22 nt, Human
gggcaugguggcaggcaccugu

SEQ ID NO: 971595 - RNA, 22 nt, Human
uaacagaagaugaaacuucuuu

SEQ ID NO: 971596 - RNA, 22 nt, Human
ucucagggcgcagugaggcagu

SEQ ID NO: 971597 - RNA, 22 nt, Human
ucaggcagaccaccgugggcag

SEQ ID NO: 971598 - RNA, 22 nt, Human
ggagauggcucugcaaggucua

SEQ ID NO: 971599 - RNA, 22 nt, Human
ucuugggauagugucucauggc

SEQ ID NO: 971600 - RNA, 22 nt, Human
uuugaaagucaaccuuccaguu

SEQ ID NO: 971601 - RNA, 22 nt, Human
caggcugggcagccuccccggc

SEQ ID NO: 971602 - RNA, 21 nt, Human
acuguucaucuguucagaagc

SEQ ID NO: 971603 - RNA, 22 nt, Human
ugggcagagucguggggaauag

SEQ ID NO: 971604 - RNA, 22 nt, Human
uagugaaauuuaugcacagcua

SEQ ID NO: 971605 - RNA, 22 nt, Human
cucuccuccaacagcccugccg

SEQ ID NO: 971606 - RNA, 22 nt, Human
gauuucuguaacacuucagaua

SEQ ID NO: 971607 - RNA, 22 nt, Human
ucugagagagggucagaugcua

SEQ ID NO: 971608 - RNA, 18 nt, Human
ucugucucuguccuugcu

SEQ ID NO: 971609 - RNA, 22 nt, Human
agagagggcauagaaaaaggga

SEQ ID NO: 971610 - RNA, 22 nt, Human
uuaaaugaggcugauguagauu

SEQ ID NO: 971611 - RNA, 22 nt, Human
uuugcauuuuagauuuaggccu

SEQ ID NO: 971612 - RNA, 22 nt, Human
ggcucuggugugaagcagccuc

SEQ ID NO: 971613 - RNA, 22 nt, Human
uggccuggcucacagugagauu

SEQ ID NO: 971614 - RNA, 22 nt, Human
uaggauaggauggagacagaau

SEQ ID NO: 971615 - RNA, 22 nt, Human
auuuuuccaauuaggauaaaga

SEQ ID NO: 971616 - RNA, 22 nt, Human
cugcuaaaccucucugagagcu

SEQ ID NO: 971617 - RNA, 17 nt, Human
ugcauuguaggcuagcc

SEQ ID NO: 971618 - RNA, 22 nt, Human
uuacaguauuguuaaacucuuu

SEQ ID NO: 971619 - RNA, 22 nt, Human
auggcuggcauccaggugggcu

SEQ ID NO: 971620 - RNA, 22 nt, Human
acuggacagaggaaauauggag

SEQ ID NO: 971621 - RNA, 22 nt, Human
ggggcuggcucacuaagagacu

SEQ ID NO: 971622 - RNA, 22 nt, Human
ggcugggccagggccuguggac

SEQ ID NO: 971623 - RNA, 22 nt, Human
acagagauggcacagagaaggu

SEQ ID NO: 971624 - RNA, 22 nt, Human
cagggccaagcugcagcaucug

SEQ ID NO: 971625 - RNA, 22 nt, Human
gagagaagaaagccaugguccu

SEQ ID NO: 971626 - RNA, 22 nt, Human
cuggguggcuguccagccagcc

SEQ ID NO: 971627 - RNA, 22 nt, Human
uuucuaaggccagagacugcug

SEQ ID NO: 971628 - RNA, 21 nt, Human
ugcccacagcaaaugcagagg

SEQ ID NO: 971629 - RNA, 22 nt, Human
uacaugcuccacuuucuccugu

SEQ ID NO: 971630 - RNA, 22 nt, Human
ugguggccaauucacagggcuc

SEQ ID NO: 971631 - RNA, 22 nt, Human
agcuggaggauaacucacuucu

SEQ ID NO: 971632 - RNA, 22 nt, Human
aggcagugcucaagacagcagc

SEQ ID NO: 971633 - RNA, 22 nt, Human
gcuggcccagggucaccuagga

SEQ ID NO: 971634 - RNA, 22 nt, Human
cauuucugucacguucuuuuau

SEQ ID NO: 971635 - RNA, 22 nt, Human
caggagugaaaugaggcccagg

SEQ ID NO: 971636 - RNA, 22 nt, Human
uggagccagagcgcagccuggg

SEQ ID NO: 971637 - RNA, 22 nt, Human
cagcuggaugggagaccauguu

SEQ ID NO: 971638 - RNA, 22 nt, Human
gccugccugcugucaucugccu

SEQ ID NO: 971639 - RNA, 22 nt, Human
uccuugaaaaucuugguuuaga

SEQ ID NO: 971640 - RNA, 22 nt, Human
ggccucugggguccugagccca

SEQ ID NO: 971641 - RNA, 22 nt, Human
gcaggaugggagcuucacucug

SEQ ID NO: 971642 - RNA, 22 nt, Human
uuccaggaagauucaacaaaag

SEQ ID NO: 971643 - RNA, 22 nt, Human
agagugaucagauaucaggugu

SEQ ID NO: 971644 - RNA, 22 nt, Human
ucuggccagcaugagaccuggu

SEQ ID NO: 971645 - RNA, 22 nt, Human
uguauagaguuggaagaugacu

SEQ ID NO: 971646 - RNA, 22 nt, Human
ccaaagucugcauuuuaacaug

SEQ ID NO: 971647 - RNA, 22 nt, Human
ugaaggcauugaugaaggaauc

SEQ ID NO: 971648 - RNA, 22 nt, Human
ucuucagauggccaguuguccc

SEQ ID NO: 971649 - RNA, 22 nt, Human
gugcugcagagucucgugccgc

SEQ ID NO: 971650 - RNA, 22 nt, Human
cuuaagaaauugcauucuaauc

SEQ ID NO: 971651 - RNA, 22 nt, Human
uccuucagucuucugagccaua

SEQ ID NO: 971652 - RNA, 22 nt, Human
uuuggccacuugggaguccagg

SEQ ID NO: 971653 - RNA, 22 nt, Human
cugggagaugacucagagcagg

SEQ ID NO: 971654 - RNA, 22 nt, Human
agcugcccugggcuggagaugg

SEQ ID NO: 971655 - RNA, 22 nt, Human
ugauuuccacagucaggggugc

SEQ ID NO: 971656 - RNA, 22 nt, Human
agauuucagaugcucggcaguu

SEQ ID NO: 971657 - RNA, 22 nt, Human
cugucccucaucaccucugggu

SEQ ID NO: 971658 - RNA, 22 nt, Human
auuucuguauccugcugucaga

SEQ ID NO: 971659 - RNA, 22 nt, Human
ggcuccucucuggccgcucccg

SEQ ID NO: 971660 - RNA, 22 nt, Human
ucuggccugaaaguccaugcuu

SEQ ID NO: 971661 - RNA, 22 nt, Human
auuguuuuccaaagaugcugcu

SEQ ID NO: 971662 - RNA, 22 nt, Human
ucucagaggcccgacguucucc

SEQ ID NO: 971663 - RNA, 19 nt, Human
uaaaaugucuguggucagu

SEQ ID NO: 971664 - RNA, 22 nt, Human
aaaccuauuggcaagaauaaua

SEQ ID NO: 971665 - RNA, 22 nt, Human
uuauguauggauggcugaaagu

SEQ ID NO: 971666 - RNA, 22 nt, Human
cacugaagccugggaguaagac

SEQ ID NO: 971667 - RNA, 22 nt, Human
augcaagauguauagaagacuu

SEQ ID NO: 971668 - RNA, 22 nt, Human
uccugagggcgauucagcaggu

SEQ ID NO: 971669 - RNA, 22 nt, Human
cucugagagagcuggugagcac

SEQ ID NO: 971670 - RNA, 22 nt, Human
gagaagcaaucaguggccaccc

SEQ ID NO: 971671 - RNA, 22 nt, Human
ucacagacauggugagguaaca

SEQ ID NO: 971672 - RNA, 22 nt, Human
ucccagaguuuccuguguccca

SEQ ID NO: 971673 - RNA, 19 nt, Human
gccucugcuggggacaggc

SEQ ID NO: 971674 - RNA, 22 nt, Human
ucucccacgguacaggauaaac

SEQ ID NO: 971675 - RNA, 22 nt, Human
ugaagcaggcauugacugauga

SEQ ID NO: 971676 - RNA, 22 nt, Human
cucagggcaguauggcugagag

SEQ ID NO: 971677 - RNA, 22 nt, Human
ugaaggugucuuugugaacauc

SEQ ID NO: 971678 - RNA, 22 nt, Human
ucucagaguuugaaucuggagu

SEQ ID NO: 971679 - RNA, 22 nt, Human
ggagcagcacugauuagcgguu

SEQ ID NO: 971680 - RNA, 22 nt, Human
aaagaauuuguacacccuacua

SEQ ID NO: 971681 - RNA, 22 nt, Human
agaauaaacugcuuuagggcag

SEQ ID NO: 971682 - RNA, 22 nt, Human
acauacauauguuuaaaugcau

SEQ ID NO: 971683 - RNA, 22 nt, Human
acccaggagacggaggugcagu

SEQ ID NO: 971684 - RNA, 22 nt, Human
uuagugauaggaagccagauug

SEQ ID NO: 971685 - RNA, 22 nt, Human
cccuggaggaccccaauguggc

SEQ ID NO: 971686 - RNA, 22 nt, Human
uguucuugggaaucuuacaguu

SEQ ID NO: 971687 - RNA, 23 nt, Human
uguugaaguaacuguuacauaga

SEQ ID NO: 971688 - RNA, 22 nt, Human
cugggcugcgggcgccccucca

SEQ ID NO: 971689 - RNA, 23 nt, Human
ggccuccuggucuaggcuagacu

SEQ ID NO: 971690 - RNA, 17 nt, Human
gcgcagcuccuggcgcg

SEQ ID NO: 971691 - RNA, 22 nt, Human
gagcugcccugagcuuugcaug

SEQ ID NO: 971692 - RNA, 22 nt, Human
aagcagaggguauggccagguu

SEQ ID NO: 971693 - RNA, 22 nt, Human
auucuuauuuaaauagagucug

SEQ ID NO: 971694 - RNA, 22 nt, Human
uccuuuccaugcuucuagaggc

SEQ ID NO: 971695 - RNA, 22 nt, Human
uagcagcuuaaguaauuagaau

SEQ ID NO: 971696 - RNA, 22 nt, Human
ggcuggcauccagggaaaucca

SEQ ID NO: 971697 - RNA, 22 nt, Human
agcugguucauucauucauggu

SEQ ID NO: 971698 - RNA, 22 nt, Human
uugaauucauuucucauugagu

SEQ ID NO: 971699 - RNA, 22 nt, Human
augcacuugcguguuugcaaau

SEQ ID NO: 971700 - RNA, 22 nt, Human
agccugagugcuuaggacuguu

SEQ ID NO: 971701 - RNA, 22 nt, Human
aaaggugacugcagcagcuauu

SEQ ID NO: 971702 - RNA, 22 nt, Human
uucaggauaugugauaucugaa

SEQ ID NO: 971703 - RNA, 22 nt, Human
cuugccuucuguuccuauagaa

SEQ ID NO: 971704 - RNA, 22 nt, Human
agaggccuuucuguugagugaa

SEQ ID NO: 971705 - RNA, 22 nt, Human
uccugagaugagacagugcugc

SEQ ID NO: 971706 - RNA, 17 nt, Human
ugaagaugcauggcagc

SEQ ID NO: 971707 - RNA, 23 nt, Human
aagcugccagucugaagccuggg

SEQ ID NO: 971708 - RNA, 22 nt, Human
ccugagccuggcucaugcacuc

SEQ ID NO: 971709 - RNA, 22 nt, Human
cccuugggccccagcucagggc

SEQ ID NO: 971710 - RNA, 22 nt, Human
ugaggcacuccaggaugcuguu

SEQ ID NO: 971711 - RNA, 22 nt, Human
ucagggcauggcugcacuuggc

SEQ ID NO: 971712 - RNA, 22 nt, Human
cagcagaggaaagcaaaucuaa

SEQ ID NO: 971713 - RNA, 22 nt, Human
aagggcagcugacagaugcuua

SEQ ID NO: 971714 - RNA, 22 nt, Human
cccaggccagaacuugguugcu

SEQ ID NO: 971715 - RNA, 22 nt, Human
cuucuucaguugcauguauugg

SEQ ID NO: 971716 - RNA, 22 nt, Human
uuguguuucugugauauguaaa

SEQ ID NO: 971717 - RNA, 22 nt, Human
ucuuggccccaccugugccagc

SEQ ID NO: 971718 - RNA, 20 nt, Human
acuggagccaucucagccua

SEQ ID NO: 971719 - RNA, 22 nt, Human
ucuggcucuccagugcucuuag

SEQ ID NO: 971720 - RNA, 22 nt, Human
acccaggaaaacauggugcaga

SEQ ID NO: 971721 - RNA, 22 nt, Human
gccugguguccagaggcgagug

SEQ ID NO: 971722 - RNA, 22 nt, Human
ucccagagaagagcuggaugga

SEQ ID NO: 971723 - RNA, 22 nt, Human
gguggccucugcaggccucgac

SEQ ID NO: 971724 - RNA, 22 nt, Human
ccuugcugaccaucaccuuuga

SEQ ID NO: 971725 - RNA, 22 nt, Human
aaguaacaaugcuguugaauug

SEQ ID NO: 971726 - RNA, 19 nt, Human
caaggccaccauuucuccg

SEQ ID NO: 971727 - RNA, 22 nt, Human
aggcaggggagcuggaagggua

SEQ ID NO: 971728 - RNA, 22 nt, Human
agggcagaaaucgauuacaccu

SEQ ID NO: 971729 - RNA, 22 nt, Human
uacuuagagcgauaauuuauac

SEQ ID NO: 971730 - RNA, 22 nt, Human
agucacuguucugucaugucaa

SEQ ID NO: 971731 - RNA, 22 nt, Human
ggcacugacugugcagcgcacc

SEQ ID NO: 971732 - RNA, 22 nt, Human
ucagagugcagcgggaggcugg

SEQ ID NO: 971733 - RNA, 22 nt, Human
aagaaugucguugguauuuuaa

SEQ ID NO: 971734 - RNA, 22 nt, Human
uucucagguagugcugaugcug

SEQ ID NO: 971735 - RNA, 22 nt, Human
agagcugagaauguggcuuccu

SEQ ID NO: 971736 - RNA, 22 nt, Human
gccuggaggggccaggguggua

SEQ ID NO: 971737 - RNA, 22 nt, Human
ucaggauaaaauguaauggcaa

SEQ ID NO: 971738 - RNA, 22 nt, Human
agugcuuugagcguuugaaaag

SEQ ID NO: 971739 - RNA, 22 nt, Human
gggauggggggaagcguccaug

SEQ ID NO: 971740 - RNA, 22 nt, Human
gagggcaggggucuugcacggu

SEQ ID NO: 971741 - RNA, 22 nt, Human
uggcucagcgguggcagcagac

SEQ ID NO: 971742 - RNA, 22 nt, Human
ggcagcucacugauuagcaauu

SEQ ID NO: 971743 - RNA, 22 nt, Human
uacacacagaggccaugggauu

SEQ ID NO: 971744 - RNA, 22 nt, Human
gcuggcagguccaagauagagc

SEQ ID NO: 971745 - RNA, 22 nt, Human
uaguuauuauuguuacuaucag

SEQ ID NO: 971746 - RNA, 22 nt, Human
acugaaauacugcucuuggauu

SEQ ID NO: 971747 - RNA, 22 nt, Human
acaguaccugcucucaagcaaa

SEQ ID NO: 971748 - RNA, 22 nt, Human
caacagaagguguacuacugaa

SEQ ID NO: 971749 - RNA, 22 nt, Human
aaucuucauuuugacaagauuc

SEQ ID NO: 971750 - RNA, 22 nt, Human
uccugggaagagaccugagcau

SEQ ID NO: 971751 - RNA, 22 nt, Human
gaggcagcagaacauggaagag

SEQ ID NO: 971752 - RNA, 22 nt, Human
cacaugcauaaggauaauuacu

SEQ ID NO: 971753 - RNA, 22 nt, Human
gagcagcuguccccaaagcuuc

SEQ ID NO: 971754 - RNA, 22 nt, Human
ucuggccuauuucugucagauc

SEQ ID NO: 971755 - RNA, 22 nt, Human
ggggggugcugaucaguggagc

SEQ ID NO: 971756 - RNA, 19 nt, Human
accuugggcaagugccuuc

SEQ ID NO: 971757 - RNA, 22 nt, Human
aacacuuucuuccuugcucagg

SEQ ID NO: 971758 - RNA, 17 nt, Human
agccccucagcgucacc

SEQ ID NO: 971759 - RNA, 21 nt, Human
gugcuuuuccuuaauguucuu

SEQ ID NO: 971760 - RNA, 22 nt, Human
agguggggugagcugcagacua

SEQ ID NO: 971761 - RNA, 22 nt, Human
agucucuuuguggacucugccu

SEQ ID NO: 971762 - RNA, 22 nt, Human
cugccagugaaauugugucagu

SEQ ID NO: 971763 - RNA, 22 nt, Human
ucuggcccagccccugagguca

SEQ ID NO: 971764 - RNA, 22 nt, Human
cuguuuauuacacuggauagca

SEQ ID NO: 971765 - RNA, 22 nt, Human
acccuuucuuacucacacgcuc

SEQ ID NO: 971766 - RNA, 22 nt, Human
uucuuuccucccagccuuugga

SEQ ID NO: 971767 - RNA, 20 nt, Human
uuucuugucggcuguugcug

SEQ ID NO: 971768 - RNA, 22 nt, Human
cagagcugguaagugguagagg

SEQ ID NO: 971769 - RNA, 22 nt, Human
uggcccugccacucacugcuga

SEQ ID NO: 971770 - RNA, 22 nt, Human
acuggccaggcacagcuguggg

SEQ ID NO: 971771 - RNA, 22 nt, Human
gaggcagugucgguggcaggau

SEQ ID NO: 971772 - RNA, 22 nt, Human
cugggacaugauagaaacagau

SEQ ID NO: 971773 - RNA, 22 nt, Human
caggcagcugaggacuuugcua

SEQ ID NO: 971774 - RNA, 23 nt, Human
cugcagccgcguggggacgugga

SEQ ID NO: 971775 - RNA, 21 nt, Human
gcaaccagaccacagggcagu

SEQ ID NO: 971776 - RNA, 22 nt, Human
uccagugguuugaaaggggugu

SEQ ID NO: 971777 - RNA, 22 nt, Human
ccccaccugugcgucugccgca

SEQ ID NO: 971778 - RNA, 22 nt, Human
gaggcagagugcaccccaggag

SEQ ID NO: 971779 - RNA, 22 nt, Human
uacaugcaugucacagaaugaa

SEQ ID NO: 971780 - RNA, 22 nt, Human
ccaggcugggcggggaaccugg

SEQ ID NO: 971781 - RNA, 22 nt, Human
acagcagcgucaacuuaaaauu

SEQ ID NO: 971782 - RNA, 22 nt, Human
uuugcauugccucugacuuaug

SEQ ID NO: 971783 - RNA, 20 nt, Human
uggcuccugcgguggaacca

SEQ ID NO: 971784 - RNA, 22 nt, Human
ggagugaaucacuagaugcaga

SEQ ID NO: 971785 - RNA, 22 nt, Human
aucuucaaagggauguccaugg

SEQ ID NO: 971786 - RNA, 19 nt, Human
caggaugaucccaugacac

SEQ ID NO: 971787 - RNA, 22 nt, Human
cuuuauguucaguacaaugcuu

SEQ ID NO: 971788 - RNA, 22 nt, Human
cagccagagaaagggcacugcc

SEQ ID NO: 971789 - RNA, 22 nt, Human
cugcagccuccugggguacaug

SEQ ID NO: 971790 - RNA, 22 nt, Human
ucauccaguaccauggaaggca

SEQ ID NO: 971791 - RNA, 22 nt, Human
acaacaggguaaggcaggccau

SEQ ID NO: 971792 - RNA, 22 nt, Human
gauuuccuugcauauugguaau

SEQ ID NO: 971793 - RNA, 22 nt, Human
ugggggagauuagagcuucuua

SEQ ID NO: 971794 - RNA, 22 nt, Human
cuggcagugacauugcaggugc

SEQ ID NO: 971795 - RNA, 22 nt, Human
accaaggagaaggugcaagcuu

SEQ ID NO: 971796 - RNA, 22 nt, Human
gccagguggcugagugacugag

SEQ ID NO: 971797 - RNA, 22 nt, Human
gaguccaguuguucacagaggc

SEQ ID NO: 971798 - RNA, 22 nt, Human
agaccagcugccucccagggcc

SEQ ID NO: 971799 - RNA, 22 nt, Human
ugggagcagcuuugcgagggag

SEQ ID NO: 971800 - RNA, 22 nt, Human
ccaaaugcuccacugacuuugg

SEQ ID NO: 971801 - RNA, 22 nt, Human
ggucagccuuggauuugguagc

SEQ ID NO: 971802 - RNA, 22 nt, Human
uggcccugaaucaaggccagca

SEQ ID NO: 971803 - RNA, 22 nt, Human
cagugcagccaaggacaggcac

SEQ ID NO: 971804 - RNA, 22 nt, Human
ucuaaagaagaggguucugcgg

SEQ ID NO: 971805 - RNA, 22 nt, Human
gacauaaaauucaauaauuugu

SEQ ID NO: 971806 - RNA, 22 nt, Human
ggucccaggauugguugcgcag

SEQ ID NO: 971807 - RNA, 22 nt, Human
ccuccuggagcauuggugagga

SEQ ID NO: 971808 - RNA, 22 nt, Human
guuaggauuauauaucccauga

SEQ ID NO: 971809 - RNA, 21 nt, Human
uccuucaguucugcacuuucu

SEQ ID NO: 971810 - RNA, 22 nt, Human
gagaggaguaggcugauggugc

SEQ ID NO: 971811 - RNA, 21 nt, Human
cgggcuggccgggcccucacc

SEQ ID NO: 971812 - RNA, 22 nt, Human
ccuggauucaagucuuucuuuc

SEQ ID NO: 971813 - RNA, 22 nt, Human
aggucagaagugccagggaauu

SEQ ID NO: 971814 - RNA, 19 nt, Human
cugccuguuauggagagaa

SEQ ID NO: 971815 - RNA, 22 nt, Human
ucuauuuacagaaagcagaauu

SEQ ID NO: 971816 - RNA, 21 nt, Human
aggcucagcagguguauaaag

SEQ ID NO: 971817 - RNA, 22 nt, Human
acgagagguccuuagaaucugu

SEQ ID NO: 971818 - RNA, 22 nt, Human
gggugggccugucuggccaugu

SEQ ID NO: 971819 - RNA, 22 nt, Human
acauuguuugagaauacagaug

SEQ ID NO: 971820 - RNA, 22 nt, Human
cagccuucugaaugaacguacu

SEQ ID NO: 971821 - RNA, 22 nt, Human
cauguacaguuuuucuguccug

SEQ ID NO: 971822 - RNA, 22 nt, Human
augauugaaaaugacauugcca

SEQ ID NO: 971823 - RNA, 22 nt, Human
ugaggccaggaucccaggcucu

SEQ ID NO: 971824 - RNA, 22 nt, Human
ugacucuguaccugucugccuu

SEQ ID NO: 971825 - RNA, 22 nt, Human
ucagggcaccaaaaaagaugcc

SEQ ID NO: 971826 - RNA, 22 nt, Human
aauaacuucaguucuuacauua

SEQ ID NO: 971827 - RNA, 22 nt, Human
auuugucuuuggaccugugaga

SEQ ID NO: 971828 - RNA, 22 nt, Human
gcucagaggagcaucauaagga

SEQ ID NO: 971829 - RNA, 22 nt, Human
auuagcugaccucuaaggagcc

SEQ ID NO: 971830 - RNA, 22 nt, Human
auguguaggugaaucgaggcug

SEQ ID NO: 971831 - RNA, 22 nt, Human
uagauuuuacuucugucauuac

SEQ ID NO: 971832 - RNA, 22 nt, Human
gcugucuggaggcucugaggga

SEQ ID NO: 971833 - RNA, 22 nt, Human
uuagaaauacaagugagguuga

SEQ ID NO: 971834 - RNA, 22 nt, Human
ccagcuccugggucuuagucag

SEQ ID NO: 971835 - RNA, 22 nt, Human
agacaggagagggaacugccgg

SEQ ID NO: 971836 - RNA, 22 nt, Human
uggcacaaaucuagucccuggu

SEQ ID NO: 971837 - RNA, 22 nt, Human
cagcugcaggaacaaaaaugug

SEQ ID NO: 971838 - RNA, 22 nt, Human
ggcugucugugguggagcguug

SEQ ID NO: 971839 - RNA, 22 nt, Human
cuggccaauauagggaaaucuu

SEQ ID NO: 971840 - RNA, 22 nt, Human
uauacuuuccugcaacuuugau

SEQ ID NO: 971841 - RNA, 22 nt, Human
cauucucaauaguagaugagua

SEQ ID NO: 971842 - RNA, 22 nt, Human
acccucccauuuccauguagca

SEQ ID NO: 971843 - RNA, 22 nt, Human
guccugggccugcugaggcuga

SEQ ID NO: 971844 - RNA, 22 nt, Human
gaagcagcgaaguggaagggac

SEQ ID NO: 971845 - RNA, 20 nt, Human
aggaggcauagucuggaaag

SEQ ID NO: 971846 - RNA, 22 nt, Human
cauugacaucaggcuuggccaa

SEQ ID NO: 971847 - RNA, 22 nt, Human
ccaggugggaggaaagcagaga

SEQ ID NO: 971848 - RNA, 22 nt, Human
cauaagaaauaaugaugaugac

SEQ ID NO: 971849 - RNA, 21 nt, Human
aaauguguuccauaaugcuuu

SEQ ID NO: 971850 - RNA, 22 nt, Human
ccucacuuuccuuucuccuggg

SEQ ID NO: 971851 - RNA, 22 nt, Human
uaccugggcccaccagugccug

SEQ ID NO: 971852 - RNA, 17 nt, Human
gcugacccuggagaagu

SEQ ID NO: 971853 - RNA, 22 nt, Human
acagaggucauggagaguucuc

SEQ ID NO: 971854 - RNA, 22 nt, Human
gaaggaaaucugugauuuaugc

SEQ ID NO: 971855 - RNA, 22 nt, Human
guugggaaggcaagaaguagaa

SEQ ID NO: 971856 - RNA, 22 nt, Human
auaagcauguuagaauauuuga

SEQ ID NO: 971857 - RNA, 22 nt, Human
guuaauaaagguauagaaucag

SEQ ID NO: 971858 - RNA, 22 nt, Human
agagcugcccacacagcagauu

SEQ ID NO: 971859 - RNA, 22 nt, Human
auucacaaagucacccuuacac

SEQ ID NO: 971860 - RNA, 22 nt, Human
acaguguccuuguggucccugu

SEQ ID NO: 971861 - RNA, 21 nt, Human
ccaggcuccugaggcugguca

SEQ ID NO: 971862 - RNA, 22 nt, Human
ucagugcagaauagugaugcau

SEQ ID NO: 971863 - RNA, 22 nt, Human
ggcagagcuugcagugagccga

SEQ ID NO: 971864 - RNA, 22 nt, Human
uaaaaaguagugagaauggcgc

SEQ ID NO: 971865 - RNA, 20 nt, Human
ugcagaagaacguucugguu

SEQ ID NO: 971866 - RNA, 22 nt, Human
augcuguggccagaguucaacu

SEQ ID NO: 971867 - RNA, 22 nt, Human
caggagcugggucuggaagcag

SEQ ID NO: 971868 - RNA, 22 nt, Human
caagggcuucaaguggccaaga

SEQ ID NO: 971869 - RNA, 22 nt, Human
gcccugggauuggguggaggcu

SEQ ID NO: 971870 - RNA, 22 nt, Human
auuuguugcuagcagcacugau

SEQ ID NO: 971871 - RNA, 19 nt, Human
ucugaggguccagaugcau

SEQ ID NO: 971872 - RNA, 22 nt, Human
uggcaucucaaacaggcagauu

SEQ ID NO: 971873 - RNA, 22 nt, Human
agcccaggucuggcccagccug

SEQ ID NO: 971874 - RNA, 22 nt, Human
aaggucauuguugcauguucuc

SEQ ID NO: 971875 - RNA, 22 nt, Human
acaggcagggaccuuggcuaag

SEQ ID NO: 971876 - RNA, 22 nt, Human
ugcuggggucauggggcgcccg

SEQ ID NO: 971877 - RNA, 22 nt, Human
auauuaauuauuuacacaugag

SEQ ID NO: 971878 - RNA, 22 nt, Human
uguguucuggaaagcucacuga

SEQ ID NO: 971879 - RNA, 22 nt, Human
agaccaugggcucugaagagca

SEQ ID NO: 971880 - RNA, 22 nt, Human
uccucagacacccugcuggcuu

SEQ ID NO: 971881 - RNA, 22 nt, Human
cccaggcagggacgugcucugg

SEQ ID NO: 971882 - RNA, 22 nt, Human
ucauuuaauaauuuuugaguag

SEQ ID NO: 971883 - RNA, 22 nt, Human
agggcagcuagcuguagaaaga

SEQ ID NO: 971884 - RNA, 22 nt, Human
aaagauguuuuauaaguuaugg

SEQ ID NO: 971885 - RNA, 22 nt, Human
uuuccuuccagguuccuaaggc

SEQ ID NO: 971886 - RNA, 22 nt, Human
ccaggagaaugggauuacccua

SEQ ID NO: 971887 - RNA, 22 nt, Human
cugugcaagcccaagauaaaac

SEQ ID NO: 971888 - RNA, 22 nt, Human
caaaaguaaucguggcuuuugc

SEQ ID NO: 971889 - RNA, 22 nt, Human
uggcugcuagccagagcuucag

SEQ ID NO: 971890 - RNA, 22 nt, Human
ucuuaaagccaagcauaaacca

SEQ ID NO: 971891 - RNA, 22 nt, Human
gagcugugagggacacauugcu

SEQ ID NO: 971892 - RNA, 22 nt, Human
acuuugugcccaacagaaagaa

SEQ ID NO: 971893 - RNA, 19 nt, Human
agcauccagucaugggauc

SEQ ID NO: 971894 - RNA, 22 nt, Human
uucuugauuucaugcaguuaag

SEQ ID NO: 971895 - RNA, 22 nt, Human
cauggcagagaaggggaacugg

SEQ ID NO: 971896 - RNA, 22 nt, Human
acuccuggaaaagaacgcaggg

SEQ ID NO: 971897 - RNA, 22 nt, Human
gggcacagcugcuacccagugc

SEQ ID NO: 971898 - RNA, 22 nt, Human
uaggccaggacagagcuuccag

SEQ ID NO: 971899 - RNA, 22 nt, Human
uucagcaacauuuguugagugc

SEQ ID NO: 971900 - RNA, 22 nt, Human
agacccagaaagcagcugcauu

SEQ ID NO: 971901 - RNA, 22 nt, Human
acaguaauuaaaauggaucugc

SEQ ID NO: 971902 - RNA, 22 nt, Human
ucuggcucggauuugucuagca

SEQ ID NO: 971903 - RNA, 19 nt, Human
ggucucagugcagcugcag

SEQ ID NO: 971904 - RNA, 17 nt, Human
aggccucccuccaggcc

SEQ ID NO: 971905 - RNA, 22 nt, Human
caggccucagagaguggcgggg

SEQ ID NO: 971906 - RNA, 20 nt, Human
cauuggacuuggcuucaugg

SEQ ID NO: 971907 - RNA, 22 nt, Human
ggccccaggaccuccacggucc

SEQ ID NO: 971908 - RNA, 22 nt, Human
augcugugccuggaaagcggcu

SEQ ID NO: 971909 - RNA, 22 nt, Human
cuggcucaguucuugguuuuca

SEQ ID NO: 971910 - RNA, 22 nt, Human
aagcuuccugaaugcucauuua

SEQ ID NO: 971911 - RNA, 22 nt, Human
gcugccuguugaagggucugug

SEQ ID NO: 971912 - RNA, 22 nt, Human
aagaagagaacuggcauccuaa

SEQ ID NO: 971913 - RNA, 22 nt, Human
cagcaggacauggaggaguaaa

SEQ ID NO: 971914 - RNA, 22 nt, Human
ggaggaccccagcagcucccca

SEQ ID NO: 971915 - RNA, 22 nt, Human
uugcauaaaagaguauaucuua

SEQ ID NO: 971916 - RNA, 22 nt, Human
ucagggcauacucuucaagguc

SEQ ID NO: 971917 - RNA, 22 nt, Human
gcugucugacuccaaguuggag

SEQ ID NO: 971918 - RNA, 22 nt, Human
gggauggggagcuggaaagggg

SEQ ID NO: 971919 - RNA, 22 nt, Human
cucugguguccuuuagaauuua

SEQ ID NO: 971920 - RNA, 22 nt, Human
agggcugcccagugugagagcu

SEQ ID NO: 971921 - RNA, 22 nt, Human
aaauguuucuacuugugagcau

SEQ ID NO: 971922 - RNA, 23 nt, Human
gugcucugcggucugcuagucug

SEQ ID NO: 971923 - RNA, 22 nt, Human
uauugucuguccgggucaaagc

SEQ ID NO: 971924 - RNA, 20 nt, Human
aggcagacaaggagucuguu

SEQ ID NO: 971925 - RNA, 22 nt, Human
gcacuugggcagagacgcacag

SEQ ID NO: 971926 - RNA, 22 nt, Human
ucucugcucugugccucaguuu

SEQ ID NO: 971927 - RNA, 22 nt, Human
agcagagguuuguuggaaaccu

SEQ ID NO: 971928 - RNA, 22 nt, Human
gggacuguaaauucauauggcc

SEQ ID NO: 971929 - RNA, 21 nt, Human
agcagcugggcaacauggagg

SEQ ID NO: 971930 - RNA, 22 nt, Human
uguaggauguaaggcaggcauc

SEQ ID NO: 971931 - RNA, 22 nt, Human
uuauuuucuccucagaaagugg

SEQ ID NO: 971932 - RNA, 22 nt, Human
ucacaugcuugaggaaagaaaa

SEQ ID NO: 971933 - RNA, 20 nt, Human
cuuccacacaagaagcacag

SEQ ID NO: 971934 - RNA, 18 nt, Human
agcuggggccucuggucc

SEQ ID NO: 971935 - RNA, 21 nt, Human
ggccucugccuugccccacuc

SEQ ID NO: 971936 - RNA, 22 nt, Human
uuagauaauguuauuguaauuu

SEQ ID NO: 971937 - RNA, 20 nt, Human
agauuauuccuaagauuucu

SEQ ID NO: 971938 - RNA, 22 nt, Human
acugucuucaaaugaauauauu

SEQ ID NO: 971939 - RNA, 22 nt, Human
gcccagagagaugcuguagacc

SEQ ID NO: 971940 - RNA, 22 nt, Human
aagauucagccaaauuguucau

SEQ ID NO: 971941 - RNA, 22 nt, Human
agcugcccuuaauaggcauuca

SEQ ID NO: 971942 - RNA, 22 nt, Human
ucucagagagaugaaacuucca

SEQ ID NO: 971943 - RNA, 22 nt, Human
uucagcaagugucucuacuguc

SEQ ID NO: 971944 - RNA, 22 nt, Human
auacaucuugucagauucaugu

SEQ ID NO: 971945 - RNA, 20 nt, Human
uaggcagcuugacccuuggu

SEQ ID NO: 971946 - RNA, 22 nt, Human
auucuccaucaccacuggcacu

SEQ ID NO: 971947 - RNA, 22 nt, Human
ucuguucuauuggucuaugugu

SEQ ID NO: 971948 - RNA, 23 nt, Human
aguuuguaaagaaauauuugcac

SEQ ID NO: 971949 - RNA, 22 nt, Human
aggguggggugcuacaucuuua

SEQ ID NO: 971950 - RNA, 22 nt, Human
ugucaccaugccagcuucugcc

SEQ ID NO: 971951 - RNA, 22 nt, Human
cccuggagguggagguugcagg

SEQ ID NO: 971952 - RNA, 22 nt, Human
ccaggccaaauucagucagcag

SEQ ID NO: 971953 - RNA, 22 nt, Human
ugcugugcuggcggcagaggcc

SEQ ID NO: 971954 - RNA, 22 nt, Human
aaaggccacuugaaggauuuuu

SEQ ID NO: 971955 - RNA, 22 nt, Human
ccugggcagguguggcuucccc

SEQ ID NO: 971956 - RNA, 22 nt, Human
ucccuggccauuccucuaggcc

SEQ ID NO: 971957 - RNA, 21 nt, Human
auuucagagcacacaaguaaa

SEQ ID NO: 971958 - RNA, 19 nt, Human
cacagggcaggucucaugu

SEQ ID NO: 971959 - RNA, 22 nt, Human
gcagagcucuguucuuaucucc

SEQ ID NO: 971960 - RNA, 22 nt, Human
ucagaaauagucuuuaaaauga

SEQ ID NO: 971961 - RNA, 22 nt, Human
ugaggcaggagaaucaccggaa

SEQ ID NO: 971962 - RNA, 22 nt, Human
auggcaguuguaugggcuguau

SEQ ID NO: 971963 - RNA, 22 nt, Human
aucugccugagucuagguuuuc

SEQ ID NO: 971964 - RNA, 22 nt, Human
acuuauuucauggaucauaaug

SEQ ID NO: 971965 - RNA, 22 nt, Human
uugauguacagaauuguucaca

SEQ ID NO: 971966 - RNA, 22 nt, Human
ccucaggauacaggagccacag

SEQ ID NO: 971967 - RNA, 22 nt, Human
uuggccaaaaaagucauuagaa

SEQ ID NO: 971968 - RNA, 22 nt, Human
aucauuccacauguaccacuag

SEQ ID NO: 971969 - RNA, 21 nt, Human
ggagucagggucuggcugggg

SEQ ID NO: 971970 - RNA, 22 nt, Human
acuuucugcaguguuggaaaug

SEQ ID NO: 971971 - RNA, 22 nt, Human
auaauguagguauguguauuua

SEQ ID NO: 971972 - RNA, 23 nt, Human
augcucugggcugugggaccugc

SEQ ID NO: 971973 - RNA, 22 nt, Human
cagcgucucguugugggccucg

SEQ ID NO: 971974 - RNA, 22 nt, Human
caauguguguguuuuucucaac

SEQ ID NO: 971975 - RNA, 22 nt, Human
uggccugauuuugcuaagagaa

SEQ ID NO: 971976 - RNA, 22 nt, Human
ucccagagaaagucaaggucuu

SEQ ID NO: 971977 - RNA, 22 nt, Human
caggaccuggaaugcuugugaa

SEQ ID NO: 971978 - RNA, 22 nt, Human
ugccaggagagugcaugcaggg

SEQ ID NO: 971979 - RNA, 22 nt, Human
gagaaccucuccacaagucugg

SEQ ID NO: 971980 - RNA, 22 nt, Human
gagccaggcccguacuugcugu

SEQ ID NO: 971981 - RNA, 21 nt, Human
aggggacagaguagcuccagg

SEQ ID NO: 971982 - RNA, 22 nt, Human
ucugucaccauucagcuugaau

SEQ ID NO: 971983 - RNA, 22 nt, Human
gggggcuggacuuucccacaca

SEQ ID NO: 971984 - RNA, 22 nt, Human
agagcaggcauaaagcuuugaa

SEQ ID NO: 971985 - RNA, 22 nt, Human
ugagagauugcuguauguuuug

SEQ ID NO: 971986 - RNA, 22 nt, Human
agguacaguagacagacaguua

SEQ ID NO: 971987 - RNA, 22 nt, Human
cagaauuuagcacaauguaugg

SEQ ID NO: 971988 - RNA, 22 nt, Human
uccuuggcuuucuggagcuucu

SEQ ID NO: 971989 - RNA, 19 nt, Human
uuacaucugcaacacuggu

SEQ ID NO: 971990 - RNA, 22 nt, Human
cagucccagacauaguaaggga

SEQ ID NO: 971991 - RNA, 22 nt, Human
cuggccuagcucucugcuugaa

SEQ ID NO: 971992 - RNA, 22 nt, Human
aguggggucuccuccagccccc

SEQ ID NO: 971993 - RNA, 23 nt, Human
aaguaacagggauaauagcaguu

SEQ ID NO: 971994 - RNA, 22 nt, Human
uggcccugucccuggagccugg

SEQ ID NO: 971995 - RNA, 22 nt, Human
cucagaguucuccugggaggug

SEQ ID NO: 971996 - RNA, 22 nt, Human
gcucugagcacugugcggcugg

SEQ ID NO: 971997 - RNA, 22 nt, Human
ucugagagccucuagccuaagu

SEQ ID NO: 971998 - RNA, 22 nt, Human
auaauuuaauuuucacaguggu

SEQ ID NO: 971999 - RNA, 22 nt, Human
agugcauaaaggaaaaacugaa

SEQ ID NO: 972000 - RNA, 22 nt, Human
ugggcagaaggaagagccaccu

SEQ ID NO: 972001 - RNA, 22 nt, Human
agcaggaaagaaaaaucugugu

SEQ ID NO: 972002 - RNA, 22 nt, Human
gucagcucucuuauccaugagg

SEQ ID NO: 972003 - RNA, 22 nt, Human
uucugaggcacuggcucuccca

SEQ ID NO: 972004 - RNA, 23 nt, Human
aggcagagccaaggucaaaaccc

SEQ ID NO: 972005 - RNA, 22 nt, Human
gaggcagcucuucugaaugggg

SEQ ID NO: 972006 - RNA, 21 nt, Human
uucaaaaugguguguuugucu

SEQ ID NO: 972007 - RNA, 22 nt, Human
auauguuucaguauucaaguca

SEQ ID NO: 972008 - RNA, 22 nt, Human
ggaagugaggaauuagguuuau

SEQ ID NO: 972009 - RNA, 22 nt, Human
cugccaggacugacgucuucag

SEQ ID NO: 972010 - RNA, 16 nt, Human
gagccaggugccuuga

SEQ ID NO: 972011 - RNA, 22 nt, Human
aggcagcuggcagcacccaggg

SEQ ID NO: 972012 - RNA, 22 nt, Human
uccagggaaggugugaggcugg

SEQ ID NO: 972013 - RNA, 22 nt, Human
cuggagaggcugggaacagguu

SEQ ID NO: 972014 - RNA, 22 nt, Human
aauauaaugcuguuuuaugcca

SEQ ID NO: 972015 - RNA, 22 nt, Human
aaccaggacaauuuugaaagua

SEQ ID NO: 972016 - RNA, 22 nt, Human
cuccuuccugguuagcaccuua

SEQ ID NO: 972017 - RNA, 22 nt, Human
uggaggcauuuuagguugucac

SEQ ID NO: 972018 - RNA, 22 nt, Human
uuugggaaacuuaggggucaga

SEQ ID NO: 972019 - RNA, 22 nt, Human
uggcacugccaaccugcuaggu

SEQ ID NO: 972020 - RNA, 17 nt, Human
aggugcuggagcaucag

SEQ ID NO: 972021 - RNA, 22 nt, Human
cucuggcuuugcucaugcaucc

SEQ ID NO: 972022 - RNA, 22 nt, Human
gagccaggucgggccgcggcga

SEQ ID NO: 972023 - RNA, 22 nt, Human
uauagaagagacaugugcauag

SEQ ID NO: 972024 - RNA, 22 nt, Human
agcugcugagccaggcugaugu

SEQ ID NO: 972025 - RNA, 22 nt, Human
auggccaagcuuacucuguugu

SEQ ID NO: 972026 - RNA, 22 nt, Human
augugcauuaaaugucaauguu

SEQ ID NO: 972027 - RNA, 22 nt, Human
cuucacaaaauauuucauuaua

SEQ ID NO: 972028 - RNA, 22 nt, Human
ggguggcacaggugcagagggu

SEQ ID NO: 972029 - RNA, 22 nt, Human
cugucagcacucuacuacagau

SEQ ID NO: 972030 - RNA, 22 nt, Human
guuuuauuggaacacagccaug

SEQ ID NO: 972031 - RNA, 22 nt, Human
acuuucauuuguaauaaacuuc

SEQ ID NO: 972032 - RNA, 22 nt, Human
agugcuuuauguuguugugcaa

SEQ ID NO: 972033 - RNA, 22 nt, Human
uccuuuuugguccaaggugacc

SEQ ID NO: 972034 - RNA, 22 nt, Human
agcuggcacagaccaggagauc

SEQ ID NO: 972035 - RNA, 19 nt, Human
ccaggaaccccuagcuacc

SEQ ID NO: 972036 - RNA, 22 nt, Human
agcugccccaugagaggcaggu

SEQ ID NO: 972037 - RNA, 22 nt, Human
ccuccugguaauuagcgaaagg

SEQ ID NO: 972038 - RNA, 22 nt, Human
gaacagaauuaccgaagaucug

SEQ ID NO: 972039 - RNA, 22 nt, Human
gcccaggaaagauagggccuca

SEQ ID NO: 972040 - RNA, 22 nt, Human
uggcagggaauacagauguuua

SEQ ID NO: 972041 - RNA, 22 nt, Human
guggccaacucaauguuuuuca

SEQ ID NO: 972042 - RNA, 22 nt, Human
gggccuggugcuucugacuccu

SEQ ID NO: 972043 - RNA, 22 nt, Human
cccaaacaguuccugugguacu

SEQ ID NO: 972044 - RNA, 22 nt, Human
uguccucagauaugucuacucu

SEQ ID NO: 972045 - RNA, 20 nt, Human
ugccagggccagcagaggcu

SEQ ID NO: 972046 - RNA, 22 nt, Human
cauauuugguauaacuuaagca

SEQ ID NO: 972047 - RNA, 22 nt, Human
ucauuuauaaggaugcaauuaa

SEQ ID NO: 972048 - RNA, 20 nt, Human
auggccaaccugcuuaugac

SEQ ID NO: 972049 - RNA, 22 nt, Human
gaggaggaaacccuguuccucu

SEQ ID NO: 972050 - RNA, 22 nt, Human
caguggggaggccaggauagaa

SEQ ID NO: 972051 - RNA, 22 nt, Human
uccuggccucacaguccugggu

SEQ ID NO: 972052 - RNA, 22 nt, Human
uuuacaaccucauauucugaug

SEQ ID NO: 972053 - RNA, 22 nt, Human
aggcucauucuugccucugagc

SEQ ID NO: 972054 - RNA, 21 nt, Human
guuugcaugaacaagucagcc

SEQ ID NO: 972055 - RNA, 22 nt, Human
acagaagagcacauuuaguaug

SEQ ID NO: 972056 - RNA, 22 nt, Human
gccugccuuugugaggaagcgg

SEQ ID NO: 972057 - RNA, 21 nt, Human
ggacuuacauagguaaggggu

SEQ ID NO: 972058 - RNA, 22 nt, Human
ccauggccgccgcugcucagga

SEQ ID NO: 972059 - RNA, 23 nt, Human
ccaaagucgaagucuaguccaga

SEQ ID NO: 972060 - RNA, 22 nt, Human
gugugucuuuauaagaagaggg

SEQ ID NO: 972061 - RNA, 22 nt, Human
guguuuccaguucagaaagcaa

SEQ ID NO: 972062 - RNA, 22 nt, Human
gcaggagaaaugaagauugggu

SEQ ID NO: 972063 - RNA, 22 nt, Human
cuguccucuguccucagcagga

SEQ ID NO: 972064 - RNA, 20 nt, Human
ucagaugggagugagccauc

SEQ ID NO: 972065 - RNA, 22 nt, Human
uuaauuuugaugagguucaguu

SEQ ID NO: 972066 - RNA, 22 nt, Human
gaugcacaugugaguauagaag

SEQ ID NO: 972067 - RNA, 22 nt, Human
ucagcaauccucccacaggugg

SEQ ID NO: 972068 - RNA, 22 nt, Human
uuuguaaggcuaaauaauauuc

SEQ ID NO: 972069 - RNA, 22 nt, Human
uauuucagacacugaucuugca

SEQ ID NO: 972070 - RNA, 21 nt, Human
auucagaguaauucaucuuua

SEQ ID NO: 972071 - RNA, 22 nt, Human
auguguccacaggugugagaga

SEQ ID NO: 972072 - RNA, 22 nt, Human
aggugaguuacaggaggagguc

SEQ ID NO: 972073 - RNA, 22 nt, Human
uuccuugaaugagucauggaaa

SEQ ID NO: 972074 - RNA, 22 nt, Human
cucuuaaagaauguuccagcug

SEQ ID NO: 972075 - RNA, 22 nt, Human
uaaaacuagugguugggacuaa

SEQ ID NO: 972076 - RNA, 22 nt, Human
agcugccuguccuaggccauca

SEQ ID NO: 972077 - RNA, 22 nt, Human
aaagaaggaccuggaggaggau

SEQ ID NO: 972078 - RNA, 22 nt, Human
acagagguguguguaggacagu

SEQ ID NO: 972079 - RNA, 22 nt, Human
uggcucaggaucuaagcagaau

SEQ ID NO: 972080 - RNA, 22 nt, Human
cagggcaggacagauacauuac

SEQ ID NO: 972081 - RNA, 22 nt, Human
caucuucagguucauggucaua

SEQ ID NO: 972082 - RNA, 22 nt, Human
ccuccuggaaaaauucccuggc

SEQ ID NO: 972083 - RNA, 22 nt, Human
gguggagcuguggacaggaagg

SEQ ID NO: 972084 - RNA, 22 nt, Human
gaaggccauugcguccugggau

SEQ ID NO: 972085 - RNA, 22 nt, Human
ucauuuguacuugugugcuugu

SEQ ID NO: 972086 - RNA, 22 nt, Human
ggagccugacagugcccagcau

SEQ ID NO: 972087 - RNA, 22 nt, Human
cugcucagcggaaggaagagcg

SEQ ID NO: 972088 - RNA, 22 nt, Human
aaucuggcucagaagaagauga

SEQ ID NO: 972089 - RNA, 20 nt, Human
agcaagaguaaggacagcga

SEQ ID NO: 972090 - RNA, 22 nt, Human
gaagagcuauguccagggagca

SEQ ID NO: 972091 - RNA, 22 nt, Human
gcugccaauccagcugugggag

SEQ ID NO: 972092 - RNA, 21 nt, Human
aggcagcuggaaggccuggcu

SEQ ID NO: 972093 - RNA, 22 nt, Human
uccaggaguggggcagaggucu

SEQ ID NO: 972094 - RNA, 21 nt, Human
ugggcacugagggugcugcuc

SEQ ID NO: 972095 - RNA, 22 nt, Human
aguuuccaaagcauguucacac

SEQ ID NO: 972096 - RNA, 22 nt, Human
aguaaaauuaauggaucagaag

SEQ ID NO: 972097 - RNA, 22 nt, Human
aagucauugguagcuugauagg

SEQ ID NO: 972098 - RNA, 22 nt, Human
agacagguaaauagagaugcug

SEQ ID NO: 972099 - RNA, 22 nt, Human
gccagcaguccugcugugugcc

SEQ ID NO: 972100 - RNA, 22 nt, Human
auacuuucugaccaauuaauug

SEQ ID NO: 972101 - RNA, 22 nt, Human
ucuggagcuggcagggcccugg

SEQ ID NO: 972102 - RNA, 22 nt, Human
cuacauaaauuuaucacagacu

SEQ ID NO: 972103 - RNA, 22 nt, Human
uggaagagaaaggaguggaucu

SEQ ID NO: 972104 - RNA, 22 nt, Human
ucaggaaagaagaugcucagug

SEQ ID NO: 972105 - RNA, 22 nt, Human
ugucaucuucaucauaaguaaa

SEQ ID NO: 972106 - RNA, 16 nt, Human
agcagccagcacugga

SEQ ID NO: 972107 - RNA, 22 nt, Human
guggccugaugccagcccugug

SEQ ID NO: 972108 - RNA, 21 nt, Human
ucucugggaggacuugugaga

SEQ ID NO: 972109 - RNA, 22 nt, Human
agauggagaaugacaauuaagg

SEQ ID NO: 972110 - RNA, 22 nt, Human
accaggaguagaauaucuguga

SEQ ID NO: 972111 - RNA, 22 nt, Human
ggauuuggaagaccgggucaca

SEQ ID NO: 972112 - RNA, 22 nt, Human
aggcacugcagauuacaggcgc

SEQ ID NO: 972113 - RNA, 22 nt, Human
ucacugcucucuaagcaucgcc

SEQ ID NO: 972114 - RNA, 22 nt, Human
ccagagccucuuaugaagaucg

SEQ ID NO: 972115 - RNA, 22 nt, Human
ucaguuuucaauuucaucagag

SEQ ID NO: 972116 - RNA, 22 nt, Human
gagcagcucugugccuggagac

SEQ ID NO: 972117 - RNA, 22 nt, Human
uggcucuguugagguauggauu

SEQ ID NO: 972118 - RNA, 22 nt, Human
aggagccaagcagaacuaagga

SEQ ID NO: 972119 - RNA, 22 nt, Human
cagguaggauggaagggcucaa

SEQ ID NO: 972120 - RNA, 22 nt, Human
ugugaaaggggucacagggaaa

SEQ ID NO: 972121 - RNA, 22 nt, Human
ucuggagcuggagggcaaggca

SEQ ID NO: 972122 - RNA, 22 nt, Human
ucaggaugguccuuuaugagaa

SEQ ID NO: 972123 - RNA, 22 nt, Human
ucagcagauggguuguguuggc

SEQ ID NO: 972124 - RNA, 17 nt, Human
uuucaucugggaccacc

SEQ ID NO: 972125 - RNA, 22 nt, Human
ggcacugauuccauucaugaag

SEQ ID NO: 972126 - RNA, 22 nt, Human
ucuuugaacuuggcugaucucu

SEQ ID NO: 972127 - RNA, 22 nt, Human
uuuugucuaagaacuuugcaaa

SEQ ID NO: 972128 - RNA, 22 nt, Human
cccaugagauucugaauuuggc

SEQ ID NO: 972129 - RNA, 22 nt, Human
cuccuggcuuucccagaccagg

SEQ ID NO: 972130 - RNA, 22 nt, Human
aucagcaaggcaaucacugcag

SEQ ID NO: 972131 - RNA, 20 nt, Human
gccugagcuauugccaggau

SEQ ID NO: 972132 - RNA, 22 nt, Human
cagaggccccauuggcugugcg

SEQ ID NO: 972133 - RNA, 22 nt, Human
ugaaaucuuauacuuugguagu

SEQ ID NO: 972134 - RNA, 19 nt, Human
augucuggguaacagcugc

SEQ ID NO: 972135 - RNA, 22 nt, Human
aaacauuguuaugauaaauuac

SEQ ID NO: 972136 - RNA, 22 nt, Human
uaacauuccucaaaguuuucag

SEQ ID NO: 972137 - RNA, 22 nt, Human
agaggaggcagcuuaacucagu

SEQ ID NO: 972138 - RNA, 22 nt, Human
agccucugugacucacagguca

SEQ ID NO: 972139 - RNA, 22 nt, Human
caggcacuggccagucagcaca

SEQ ID NO: 972140 - RNA, 18 nt, Human
ucugucuguacaaguauc

SEQ ID NO: 972141 - RNA, 22 nt, Human
uccaaagaagucacaaacgaag

SEQ ID NO: 972142 - RNA, 22 nt, Human
acagaggcugcgcuugggaacg

SEQ ID NO: 972143 - RNA, 18 nt, Human
cacaggcucccagugagg

SEQ ID NO: 972144 - RNA, 22 nt, Human
ggguggagaggcuaaguccagu

SEQ ID NO: 972145 - RNA, 22 nt, Human
ucagcagaggggaaggcaucug

SEQ ID NO: 972146 - RNA, 22 nt, Human
gcugucacucuccggccuuccc

SEQ ID NO: 972147 - RNA, 22 nt, Human
aaaaguauuggccaccauuucu

SEQ ID NO: 972148 - RNA, 22 nt, Human
gggcagcucucacagcagccaa

SEQ ID NO: 972149 - RNA, 23 nt, Human
ucaaacauauugugagacacagg

SEQ ID NO: 972150 - RNA, 22 nt, Human
agggcagccauugagggauucu

SEQ ID NO: 972151 - RNA, 22 nt, Human
ggccuucacgugaccuggcgug

SEQ ID NO: 972152 - RNA, 22 nt, Human
acuucuggauagagucagcuuu

SEQ ID NO: 972153 - RNA, 22 nt, Human
ccacugggggcugcaggcacuc

SEQ ID NO: 972154 - RNA, 22 nt, Human
ccugaggacacacgcugcagga

SEQ ID NO: 972155 - RNA, 22 nt, Human
uagcugcccaucuuuccuuuag

SEQ ID NO: 972156 - RNA, 21 nt, Human
cagagguggccugaccucuga

SEQ ID NO: 972157 - RNA, 22 nt, Human
ggcugccuucccugagccccgg

SEQ ID NO: 972158 - RNA, 22 nt, Human
uucccaggcugugcuaccagag

SEQ ID NO: 972159 - RNA, 17 nt, Human
ugauaguucauuuuaag

SEQ ID NO: 972160 - RNA, 22 nt, Human
cugaggcuggggaagggaagug

SEQ ID NO: 972161 - RNA, 22 nt, Human
uucuucuuucccccugugguac

SEQ ID NO: 972162 - RNA, 22 nt, Human
aaagauuuaugaaguucaauua

SEQ ID NO: 972163 - RNA, 22 nt, Human
guggccaagaggggacuggaua

SEQ ID NO: 972164 - RNA, 19 nt, Human
acaggcagaauugggugug

SEQ ID NO: 972165 - RNA, 22 nt, Human
aaagccagagcaagcugucaca

SEQ ID NO: 972166 - RNA, 22 nt, Human
ugggcucugcaucagugcccau

SEQ ID NO: 972167 - RNA, 22 nt, Human
cuccuugguguaguacugagca

SEQ ID NO: 972168 - RNA, 22 nt, Human
aaaguguugauaugugacaucc

SEQ ID NO: 972169 - RNA, 22 nt, Human
ggaggggaggauuaaugacaaa

SEQ ID NO: 972170 - RNA, 22 nt, Human
uuuuuccaccguacuuccugag

SEQ ID NO: 972171 - RNA, 22 nt, Human
gccuggcacucacugaagaggc

SEQ ID NO: 972172 - RNA, 22 nt, Human
auuauauaggacuugcccuucc

SEQ ID NO: 972173 - RNA, 22 nt, Human
ggaagggcaaaagagaugaacu

SEQ ID NO: 972174 - RNA, 22 nt, Human
uaugugcaguuugcucuuaaca

SEQ ID NO: 972175 - RNA, 22 nt, Human
ucucagagauuuuguuucccuu

SEQ ID NO: 972176 - RNA, 22 nt, Human
gcagggcugcugaaacuuguuu

SEQ ID NO: 972177 - RNA, 22 nt, Human
ucucuucuuguguuuuccugcc

SEQ ID NO: 972178 - RNA, 18 nt, Human
ucuuggaguaaugaucaa

SEQ ID NO: 972179 - RNA, 22 nt, Human
cugucauuuaagacauucugga

SEQ ID NO: 972180 - RNA, 22 nt, Human
ggcuggcuuucucuccgcaccu

SEQ ID NO: 972181 - RNA, 22 nt, Human
acaaagucugaaaccugaggca

SEQ ID NO: 972182 - RNA, 17 nt, Human
ggcagcugugugcaugc

SEQ ID NO: 972183 - RNA, 22 nt, Human
ucaaggaggugcuuggcuucac

SEQ ID NO: 972184 - RNA, 22 nt, Human
ccugccuggaucagccauccug

SEQ ID NO: 972185 - RNA, 19 nt, Human
uacuuuuucaggacagagu

SEQ ID NO: 972186 - RNA, 22 nt, Human
acuugauuuugaaccuuucuac

SEQ ID NO: 972187 - RNA, 20 nt, Human
ccaggcacugucccaugcag

SEQ ID NO: 972188 - RNA, 22 nt, Human
gaucuguuauaaucucuuuuau

SEQ ID NO: 972189 - RNA, 22 nt, Human
ggcucugcgcgguaaagugacu

SEQ ID NO: 972190 - RNA, 22 nt, Human
cugcccugacugaccuuuugaa

SEQ ID NO: 972191 - RNA, 22 nt, Human
gccagcugguaggcaccuagcc

SEQ ID NO: 972192 - RNA, 22 nt, Human
gagaggggcccaagccacauag

SEQ ID NO: 972193 - RNA, 22 nt, Human
agaaaugaauauguagugguua

SEQ ID NO: 972194 - RNA, 22 nt, Human
ccucccaccguaucucaguggc

SEQ ID NO: 972195 - RNA, 22 nt, Human
agucccaggcagccgagccggu

SEQ ID NO: 972196 - RNA, 22 nt, Human
gcugugcuugggaagaaucucu

SEQ ID NO: 972197 - RNA, 22 nt, Human
gugggugauguacuggaggcca

SEQ ID NO: 972198 - RNA, 22 nt, Human
ggggcagaguagcuggggugug

SEQ ID NO: 972199 - RNA, 22 nt, Human
cccagacugcagagcgggcaga

SEQ ID NO: 972200 - RNA, 17 nt, Human
uuuucucucuuggauuc

SEQ ID NO: 972201 - RNA, 18 nt, Human
agccuggaggguugaagu

SEQ ID NO: 972202 - RNA, 22 nt, Human
cagcaggaccauugaggcauca

SEQ ID NO: 972203 - RNA, 22 nt, Human
auauguguacgugcaguauaua

SEQ ID NO: 972204 - RNA, 23 nt, Human
ggggccugcaccggucugcgcgg

SEQ ID NO: 972205 - RNA, 22 nt, Human
ccuggcagcgccgaagcuggcc

SEQ ID NO: 972206 - RNA, 22 nt, Human
acauguguacauauauaugugc

SEQ ID NO: 972207 - RNA, 22 nt, Human
agggcuggagccacagcuggga

SEQ ID NO: 972208 - RNA, 22 nt, Human
uagaauguaaauuccaagggca

SEQ ID NO: 972209 - RNA, 22 nt, Human
ggccucugccucaucugggcac

SEQ ID NO: 972210 - RNA, 22 nt, Human
ccagggcagcgccccuccacgc

SEQ ID NO: 972211 - RNA, 22 nt, Human
agagcccucucauuggcuuauu

SEQ ID NO: 972212 - RNA, 22 nt, Human
aaugaugguuucaucacuugaa

SEQ ID NO: 972213 - RNA, 22 nt, Human
uagaauaaguugaugauauaug

SEQ ID NO: 972214 - RNA, 22 nt, Human
gcagggagguuugcugaccugg

SEQ ID NO: 972215 - RNA, 22 nt, Human
ucucuuucuauugcaccaugcu

SEQ ID NO: 972216 - RNA, 22 nt, Human
ccucacucugcacccugcagca

SEQ ID NO: 972217 - RNA, 22 nt, Human
auaauuuaaauuaguaugugau

SEQ ID NO: 972218 - RNA, 22 nt, Human
augcagaaggagccaugcuugc

SEQ ID NO: 972219 - RNA, 22 nt, Human
gccuucaggaaaucaguccuug

SEQ ID NO: 972220 - RNA, 22 nt, Human
ccaggcugugguuuagauagag

SEQ ID NO: 972221 - RNA, 22 nt, Human
auugcacaaacacagucagacu

SEQ ID NO: 972222 - RNA, 22 nt, Human
auaaaaccaaagcagcaguguu

SEQ ID NO: 972223 - RNA, 22 nt, Human
uacuaucucuucuaacuucaga

SEQ ID NO: 972224 - RNA, 22 nt, Human
uaaaugugucuuuuuaaggccu

SEQ ID NO: 972225 - RNA, 22 nt, Human
aguucucagcuuaguaugcugu

SEQ ID NO: 972226 - RNA, 22 nt, Human
guaauaaugguccccaaacacu

SEQ ID NO: 972227 - RNA, 22 nt, Human
uuuauuacaccagguuaacuca

SEQ ID NO: 972228 - RNA, 22 nt, Human
acuucaugcagaagagagcugu

SEQ ID NO: 972229 - RNA, 22 nt, Human
uaaugcaguacugauauaaaca

SEQ ID NO: 972230 - RNA, 22 nt, Human
gaggcaccucgcgggaggaggc

SEQ ID NO: 972231 - RNA, 22 nt, Human
uuucacaacacaaucucguuaa

SEQ ID NO: 972232 - RNA, 22 nt, Human
guccucagucaguuuggugggg

SEQ ID NO: 972233 - RNA, 22 nt, Human
acaccuuugugaagugaugaug

SEQ ID NO: 972234 - RNA, 22 nt, Human
cagugcaguuucccagaugcug

SEQ ID NO: 972235 - RNA, 22 nt, Human
agcugccaaguuggaguagcaa

SEQ ID NO: 972236 - RNA, 22 nt, Human
aggcucagauccuuguguccug

SEQ ID NO: 972237 - RNA, 22 nt, Human
agcagagguguuuauuauggga

SEQ ID NO: 972238 - RNA, 22 nt, Human
accugagcaugccaggagagug

SEQ ID NO: 972239 - RNA, 22 nt, Human
ggggccuuuucugaauguggaa

SEQ ID NO: 972240 - RNA, 22 nt, Human
guguaaggccccagguucuuua

SEQ ID NO: 972241 - RNA, 22 nt, Human
aggacagcaguuggugagguuc

SEQ ID NO: 972242 - RNA, 18 nt, Human
uugcuuuguaagcuugca

SEQ ID NO: 972243 - RNA, 22 nt, Human
gcaugggcaagaggacuggggg

SEQ ID NO: 972244 - RNA, 22 nt, Human
cagaagcagugagagaugugca

SEQ ID NO: 972245 - RNA, 22 nt, Human
cacaagagagugcgcguugcaa

SEQ ID NO: 972246 - RNA, 22 nt, Human
gcuuagaaguuccuauaaaaug

SEQ ID NO: 972247 - RNA, 23 nt, Human
auacauacagucuuacugacuuu

SEQ ID NO: 972248 - RNA, 18 nt, Human
aggagccuuugcacugga

SEQ ID NO: 972249 - RNA, 22 nt, Human
gcaggagcagucaggggcagcu

SEQ ID NO: 972250 - RNA, 22 nt, Human
ggggccuuggaucugugccccg

SEQ ID NO: 972251 - RNA, 22 nt, Human
ccuggaagauucaccacuacca

SEQ ID NO: 972252 - RNA, 22 nt, Human
ucucaggaguagugggauccau

SEQ ID NO: 972253 - RNA, 22 nt, Human
auauaauacaaccugcuaagug

SEQ ID NO: 972254 - RNA, 22 nt, Human
cacacaugucucuccaugcucu

SEQ ID NO: 972255 - RNA, 22 nt, Human
uucauucugcaguucucagcuc

SEQ ID NO: 972256 - RNA, 22 nt, Human
guggccaaaucaugucaaaggc

SEQ ID NO: 972257 - RNA, 22 nt, Human
acccugagucagacagccugac

SEQ ID NO: 972258 - RNA, 23 nt, Human
uggcuucugccccauucucucca

SEQ ID NO: 972259 - RNA, 22 nt, Human
uggcugggugcuauccaguacu

SEQ ID NO: 972260 - RNA, 22 nt, Human
caguauuuauggcuugaguauu

SEQ ID NO: 972261 - RNA, 22 nt, Human
auugcuguacacuucuagaucu

SEQ ID NO: 972262 - RNA, 22 nt, Human
agggcagauggaacuuccccga

SEQ ID NO: 972263 - RNA, 22 nt, Human
ggcagcuucucccaggcuguuu

SEQ ID NO: 972264 - RNA, 22 nt, Human
caugaguuuuuuaguucaugca

SEQ ID NO: 972265 - RNA, 22 nt, Human
uaacuaacuaguguucaaaaua

SEQ ID NO: 972266 - RNA, 22 nt, Human
guucacaauggcuuuaccuaag

SEQ ID NO: 972267 - RNA, 22 nt, Human
acuuucuaggugcuauugugau

SEQ ID NO: 972268 - RNA, 22 nt, Human
gcaggguccauggaggcagccc

SEQ ID NO: 972269 - RNA, 20 nt, Human
ucacuaguaaccaucugcuu

SEQ ID NO: 972270 - RNA, 22 nt, Human
gcugugugcucacguaguggaa

SEQ ID NO: 972271 - RNA, 22 nt, Human
ggcagccagagggcagcuggau

SEQ ID NO: 972272 - RNA, 22 nt, Human
ugagugccugaacauagaguag

SEQ ID NO: 972273 - RNA, 22 nt, Human
cauuuucaugaguuucuguuca

SEQ ID NO: 972274 - RNA, 22 nt, Human
cuugggaaugcuaacagaugac

SEQ ID NO: 972275 - RNA, 22 nt, Human
gccuggaguacuccuugaagug

SEQ ID NO: 972276 - RNA, 22 nt, Human
gcagaggccuagguggaaggcc

SEQ ID NO: 972277 - RNA, 22 nt, Human
uaaccuuucaggcauguagguu

SEQ ID NO: 972278 - RNA, 22 nt, Human
ccaaaauguuugaaugcaugug

SEQ ID NO: 972279 - RNA, 22 nt, Human
aagaugauaggacuugcuuaag

SEQ ID NO: 972280 - RNA, 22 nt, Human
gagaggggcgcgcagcucgcga

SEQ ID NO: 972281 - RNA, 22 nt, Human
aggcuucuuagauuggcuggag

SEQ ID NO: 972282 - RNA, 22 nt, Human
acaggcucuggggcaggauggc

SEQ ID NO: 972283 - RNA, 22 nt, Human
aggagggacaccaauauauguu

SEQ ID NO: 972284 - RNA, 18 nt, Human
aaugcacacauuuacucc

SEQ ID NO: 972285 - RNA, 22 nt, Human
ucccuggagauaacuucuggga

SEQ ID NO: 972286 - RNA, 22 nt, Human
agaguguuauuugcucuguauu

SEQ ID NO: 972287 - RNA, 22 nt, Human
uuucuucagccuucacaaccug

SEQ ID NO: 972288 - RNA, 20 nt, Human
guucucacugaucugcaggg

SEQ ID NO: 972289 - RNA, 22 nt, Human
aggaugggccugggauaugcuu

SEQ ID NO: 972290 - RNA, 22 nt, Human
aaauaguucagcuuguaaaccc

SEQ ID NO: 972291 - RNA, 22 nt, Human
agcucucaagauaagaaagaac

SEQ ID NO: 972292 - RNA, 22 nt, Human
cucucccccacagcagccuucu

SEQ ID NO: 972293 - RNA, 22 nt, Human
gucugucucccugugacugaga

SEQ ID NO: 972294 - RNA, 22 nt, Human
gaagagcugugauucaggcuua

SEQ ID NO: 972295 - RNA, 22 nt, Human
uggcccugacacgugguacugg

SEQ ID NO: 972296 - RNA, 22 nt, Human
gcagagcaguacucucuugacu

SEQ ID NO: 972297 - RNA, 22 nt, Human
gccuggaggaauguagcugagg

SEQ ID NO: 972298 - RNA, 22 nt, Human
auuucauagauuguaaaucccu

SEQ ID NO: 972299 - RNA, 22 nt, Human
acccugggucauauacagugug

SEQ ID NO: 972300 - RNA, 22 nt, Human
aagcagaguccccuucccaugg

SEQ ID NO: 972301 - RNA, 23 nt, Human
agucuuaauacagcucuuuucua

SEQ ID NO: 972302 - RNA, 22 nt, Human
ccagggcauccucacaucgcag

SEQ ID NO: 972303 - RNA, 22 nt, Human
caucacuguccucagcauucca

SEQ ID NO: 972304 - RNA, 22 nt, Human
accuggagucauuugaggagua

SEQ ID NO: 972305 - RNA, 22 nt, Human
ucugcagcuugcacaggcaggc

SEQ ID NO: 972306 - RNA, 22 nt, Human
aacuccugaggaaauggucuca

SEQ ID NO: 972307 - RNA, 22 nt, Human
gccccagguugccugucccagg

SEQ ID NO: 972308 - RNA, 22 nt, Human
ccagggcagaaaaagagggaau

SEQ ID NO: 972309 - RNA, 21 nt, Human
acauccaggguccucacugcc

SEQ ID NO: 972310 - RNA, 22 nt, Human
uuucaaagaccauuaacuauca

SEQ ID NO: 972311 - RNA, 22 nt, Human
cuacauuuggagaguauaggaa

SEQ ID NO: 972312 - RNA, 19 nt, Human
ggaggccuggguauuugcc

SEQ ID NO: 972313 - RNA, 22 nt, Human
gcaccugggacccagaggcacc

SEQ ID NO: 972314 - RNA, 22 nt, Human
gcugucacaucaaggcacuaaa

SEQ ID NO: 972315 - RNA, 22 nt, Human
cuuauguacacacauauauugu

SEQ ID NO: 972316 - RNA, 22 nt, Human
ucaggcacugcuuucugauaug

SEQ ID NO: 972317 - RNA, 21 nt, Human
ugcagaggcacaaacaagccc

SEQ ID NO: 972318 - RNA, 22 nt, Human
cccugcagccggccagcucauu

SEQ ID NO: 972319 - RNA, 17 nt, Human
gguguauggggagggaa

SEQ ID NO: 972320 - RNA, 22 nt, Human
aauguguacuuuuucaugcuca

SEQ ID NO: 972321 - RNA, 22 nt, Human
gcucugucauuuugcagacacu

SEQ ID NO: 972322 - RNA, 22 nt, Human
auucuccacacauccagaccuu

SEQ ID NO: 972323 - RNA, 22 nt, Human
ugagccuguccugugcauguga

SEQ ID NO: 972324 - RNA, 20 nt, Human
aggcacuggggauagguaag

SEQ ID NO: 972325 - RNA, 22 nt, Human
agccuggauccuaggcucagcu

SEQ ID NO: 972326 - RNA, 22 nt, Human
gcuggagccaagcugcucuugg

SEQ ID NO: 972327 - RNA, 22 nt, Human
ucaguguccggagccugagugc

SEQ ID NO: 972328 - RNA, 22 nt, Human
aguuuuucugggaggcacugcu

SEQ ID NO: 972329 - RNA, 22 nt, Human
cacacaggaugaagcagcagaa

SEQ ID NO: 972330 - RNA, 22 nt, Human
uccuugaagcaacgugcagaca

SEQ ID NO: 972331 - RNA, 22 nt, Human
ugaggcaggaggauugcaggau

SEQ ID NO: 972332 - RNA, 22 nt, Human
agaagccauucccuguaggcuc

SEQ ID NO: 972333 - RNA, 22 nt, Human
gccuggaguagcauggcaagcc

SEQ ID NO: 972334 - RNA, 22 nt, Human
uguacauuuagagcucaauaga

SEQ ID NO: 972335 - RNA, 20 nt, Human
gagauggacagaugaagggg

SEQ ID NO: 972336 - RNA, 22 nt, Human
aaauaaguaguuuaguguugug

SEQ ID NO: 972337 - RNA, 22 nt, Human
aaaagcuagucaaugauguauu

SEQ ID NO: 972338 - RNA, 22 nt, Human
gcacuuggauauacaaaugaag

SEQ ID NO: 972339 - RNA, 22 nt, Human
aaaagggacuacucucagcucc

SEQ ID NO: 972340 - RNA, 22 nt, Human
uggcuaggcuccaagagcugga

SEQ ID NO: 972341 - RNA, 22 nt, Human
uggcucucagcucccagcagcc

SEQ ID NO: 972342 - RNA, 22 nt, Human
aacuuucaggcaaugaauauuu

SEQ ID NO: 972343 - RNA, 22 nt, Human
cuugcugugugguguucucaga

SEQ ID NO: 972344 - RNA, 22 nt, Human
gcacacaguauaugcucauuaa

SEQ ID NO: 972345 - RNA, 22 nt, Human
cagaccuggaaaacaggcuugc

SEQ ID NO: 972346 - RNA, 22 nt, Human
guuugcauguguacuuaauugg

SEQ ID NO: 972347 - RNA, 22 nt, Human
auuguacuuuuauuacauguag

SEQ ID NO: 972348 - RNA, 22 nt, Human
guccucaggaaagcagauaaca

SEQ ID NO: 972349 - RNA, 22 nt, Human
ggcaccugcucaucuggacuca

SEQ ID NO: 972350 - RNA, 22 nt, Human
aacuuucagaauccuaugcauu

SEQ ID NO: 972351 - RNA, 22 nt, Human
ccacacagucaguuuccaagaa

SEQ ID NO: 972352 - RNA, 22 nt, Human
ugaaaugaucaguuugguuacu

SEQ ID NO: 972353 - RNA, 22 nt, Human
cugcucuguuucuuagcugggu

SEQ ID NO: 972354 - RNA, 22 nt, Human
cucccugggcagauguggcucu

SEQ ID NO: 972355 - RNA, 19 nt, Human
aauaauguucaugagauug

SEQ ID NO: 972356 - RNA, 22 nt, Human
ucaggugguccuaagugccauc

SEQ ID NO: 972357 - RNA, 22 nt, Human
cccaucaggaacccaggagccc

SEQ ID NO: 972358 - RNA, 22 nt, Human
uuuccucuucgauuaaguuugg

SEQ ID NO: 972359 - RNA, 18 nt, Human
caguuuuuauaucuggca

SEQ ID NO: 972360 - RNA, 22 nt, Human
aaacucaaauuaaacuagcuua

SEQ ID NO: 972361 - RNA, 22 nt, Human
cagcccuggccccagguggucu

SEQ ID NO: 972362 - RNA, 22 nt, Human
ggcucuggguucugcaaugcgu

SEQ ID NO: 972363 - RNA, 22 nt, Human
cuggagcugcuguccuugggug

SEQ ID NO: 972364 - RNA, 22 nt, Human
cucuugggauuugcaggcucag

SEQ ID NO: 972365 - RNA, 22 nt, Human
cugaaaauguuacacaggaaga

SEQ ID NO: 972366 - RNA, 22 nt, Human
caagaacaguuugccaaauugg

SEQ ID NO: 972367 - RNA, 22 nt, Human
cagggccacccucugcugggug

SEQ ID NO: 972368 - RNA, 22 nt, Human
agccaagcugaucuccugcuga

SEQ ID NO: 972369 - RNA, 22 nt, Human
uagauaaauuagaaaguuuacu

SEQ ID NO: 972370 - RNA, 22 nt, Human
cucugugggggagaggcagcug

SEQ ID NO: 972371 - RNA, 22 nt, Human
ccuggcuggcaagaucgugaag

SEQ ID NO: 972372 - RNA, 22 nt, Human
acagggcagagggcaguuggua

SEQ ID NO: 972373 - RNA, 22 nt, Human
agccuauuccaggaugagcuca

SEQ ID NO: 972374 - RNA, 22 nt, Human
agccaagcaccacuggcacucg

SEQ ID NO: 972375 - RNA, 22 nt, Human
auuucagcccaguaugagcccc

SEQ ID NO: 972376 - RNA, 22 nt, Human
aacaaauguaaaaugcagaugc

SEQ ID NO: 972377 - RNA, 22 nt, Human
ggagcacuauaauagagauuuu

SEQ ID NO: 972378 - RNA, 22 nt, Human
uaggccagcccuuaguccuguc

SEQ ID NO: 972379 - RNA, 22 nt, Human
uuuauuccaugugucuaugacc

SEQ ID NO: 972380 - RNA, 22 nt, Human
ucagagcuaaggggagagcaaa

SEQ ID NO: 972381 - RNA, 22 nt, Human
cauucacucagcgaugccagua

SEQ ID NO: 972382 - RNA, 22 nt, Human
ccuggagauuauuugguccaau

SEQ ID NO: 972383 - RNA, 22 nt, Human
uucaugugaucacagauuguaa

SEQ ID NO: 972384 - RNA, 22 nt, Human
aggcugugggaauggcugcuug

SEQ ID NO: 972385 - RNA, 21 nt, Human
gaacauuuggguuguuucuac

SEQ ID NO: 972386 - RNA, 19 nt, Human
caucuggaugauucuccug

SEQ ID NO: 972387 - RNA, 22 nt, Human
cuaucuuucgauucuagcuuaa

SEQ ID NO: 972388 - RNA, 22 nt, Human
caguacuuaacuuauaggagag

SEQ ID NO: 972389 - RNA, 22 nt, Human
uuuauuauguacaggcacuaua

SEQ ID NO: 972390 - RNA, 22 nt, Human
ugccucagucuaaagucucuca

SEQ ID NO: 972391 - RNA, 22 nt, Human
gaagcccaggcuuccuuggcuu

SEQ ID NO: 972392 - RNA, 22 nt, Human
ucugcuguaaagaauuucugcc

SEQ ID NO: 972393 - RNA, 22 nt, Human
ggccucuguuuggagccaggau

SEQ ID NO: 972394 - RNA, 22 nt, Human
uccuuccugcaggccaaguccu

SEQ ID NO: 972395 - RNA, 22 nt, Human
gccugccuggagcuugagguga

SEQ ID NO: 972396 - RNA, 22 nt, Human
aggccugagguuccugugcuca

SEQ ID NO: 972397 - RNA, 22 nt, Human
gacuccugggccucugagaggc

SEQ ID NO: 972398 - RNA, 22 nt, Human
augaagcugguuuuggcuuggg

SEQ ID NO: 972399 - RNA, 22 nt, Human
guuuuauaggcuguugcuauau

SEQ ID NO: 972400 - RNA, 22 nt, Human
gucaaauauacuaagagguaaa

SEQ ID NO: 972401 - RNA, 22 nt, Human
agccacagggggugagggacaa

SEQ ID NO: 972402 - RNA, 21 nt, Human
uaucuacuggugucuuucaga

SEQ ID NO: 972403 - RNA, 22 nt, Human
ggcagcaugagccuggugaauu

SEQ ID NO: 972404 - RNA, 22 nt, Human
auguguuuugguaauuucugcu

SEQ ID NO: 972405 - RNA, 23 nt, Human
ugcuguccaacagacuggccaug

SEQ ID NO: 972406 - RNA, 22 nt, Human
gggcucugcgcucagcuccagc

SEQ ID NO: 972407 - RNA, 22 nt, Human
aucauguugcucaaaauuaaac

SEQ ID NO: 972408 - RNA, 22 nt, Human
ucacucuguuuuacucacuguu

SEQ ID NO: 972409 - RNA, 22 nt, Human
aucagcaagauguaauuucuau

SEQ ID NO: 972410 - RNA, 22 nt, Human
aaugauggauuuagacaagcug

SEQ ID NO: 972411 - RNA, 22 nt, Human
ccagggaguuuccaaucugaga

SEQ ID NO: 972412 - RNA, 22 nt, Human
ggggacccucaggacugcgucu

SEQ ID NO: 972413 - RNA, 22 nt, Human
aucuuguuaaaaugcagaaacu

SEQ ID NO: 972414 - RNA, 22 nt, Human
gaguuguucaacgugugugaaa

SEQ ID NO: 972415 - RNA, 20 nt, Human
gcaaggcacagugaggaggg

SEQ ID NO: 972416 - RNA, 22 nt, Human
ugaaggaauggaggaucagagc

SEQ ID NO: 972417 - RNA, 22 nt, Human
cagagcaggcccacugcccucc

SEQ ID NO: 972418 - RNA, 22 nt, Human
ugcaccauacccauuccccucu

SEQ ID NO: 972419 - RNA, 22 nt, Human
agcuguguagggaaucagagaa

SEQ ID NO: 972420 - RNA, 22 nt, Human
cccaaggcugcagugagcauga

SEQ ID NO: 972421 - RNA, 22 nt, Human
ggugaggcuaagugacacaggg

SEQ ID NO: 972422 - RNA, 22 nt, Human
cugggaggcacuauucaggagg

SEQ ID NO: 972423 - RNA, 22 nt, Human
cugagaggaacaucuuaugcuu

SEQ ID NO: 972424 - RNA, 22 nt, Human
ugucuuuucuacuguaagcaua

SEQ ID NO: 972425 - RNA, 19 nt, Human
ucaaaacacaaaugguuga

SEQ ID NO: 972426 - RNA, 22 nt, Human
ucuuuuauccuacauuuagcuc

SEQ ID NO: 972427 - RNA, 22 nt, Human
caggaacauuuaaccacagggu

SEQ ID NO: 972428 - RNA, 22 nt, Human
uaugcacauauaaccugcacug

SEQ ID NO: 972429 - RNA, 22 nt, Human
ucuggagagucacagugccaga

SEQ ID NO: 972430 - RNA, 22 nt, Human
cagcugccugucuggaggcaau

SEQ ID NO: 972431 - RNA, 22 nt, Human
augcuguguggccaccuccaug

SEQ ID NO: 972432 - RNA, 22 nt, Human
aaaaacugcaauuacuuuuguc

SEQ ID NO: 972433 - RNA, 22 nt, Human
cugagagugcucuuugauguca

SEQ ID NO: 972434 - RNA, 18 nt, Human
guccugagcucugcugua

SEQ ID NO: 972435 - RNA, 22 nt, Human
cuggagcccugaaugggcagga

SEQ ID NO: 972436 - RNA, 22 nt, Human
ccagcuccaggacugggagcug

SEQ ID NO: 972437 - RNA, 22 nt, Human
uaaagucaucuuuacaucuuug

SEQ ID NO: 972438 - RNA, 22 nt, Human
uuugggcaguagauguaucacu

SEQ ID NO: 972439 - RNA, 23 nt, Human
aaagacugcugagaauuuuagga

SEQ ID NO: 972440 - RNA, 22 nt, Human
uagccucuggaauccuuucucu

SEQ ID NO: 972441 - RNA, 22 nt, Human
cugugcuuaccugcccagguga

SEQ ID NO: 972442 - RNA, 22 nt, Human
cucaggggaccuggcuccgagu

SEQ ID NO: 972443 - RNA, 22 nt, Human
uggggcugucccgguuuggcga

SEQ ID NO: 972444 - RNA, 22 nt, Human
uggagcaggccggaaguggcuu

SEQ ID NO: 972445 - RNA, 22 nt, Human
aagggcuggcccugggaagagu

SEQ ID NO: 972446 - RNA, 22 nt, Human
aaauuagucauguuguauuacu

SEQ ID NO: 972447 - RNA, 22 nt, Human
cugcugcauuacucuucucaag

SEQ ID NO: 972448 - RNA, 22 nt, Human
ccccuuccacagugcuuccuaa

SEQ ID NO: 972449 - RNA, 21 nt, Human
uuuauuuauauaggacacaug

SEQ ID NO: 972450 - RNA, 22 nt, Human
ccuggaggagcgcugaccagcu

SEQ ID NO: 972451 - RNA, 22 nt, Human
ucccaguguggcaggccaugga

SEQ ID NO: 972452 - RNA, 22 nt, Human
gcugcccugucugcagcaggac

SEQ ID NO: 972453 - RNA, 22 nt, Human
uggcucugcugaaccuagugca

SEQ ID NO: 972454 - RNA, 22 nt, Human
uuauucaggcucucuuuggcua

SEQ ID NO: 972455 - RNA, 22 nt, Human
aggcaaaauuacaaaguuauua

SEQ ID NO: 972456 - RNA, 22 nt, Human
ugcauugauagaaaaacaugga

SEQ ID NO: 972457 - RNA, 22 nt, Human
acgcuuuuacuauuuugagcuc

SEQ ID NO: 972458 - RNA, 19 nt, Human
gacagugcaguuguaguac

SEQ ID NO: 972459 - RNA, 22 nt, Human
ucuuuacacaagacaagaauaa

SEQ ID NO: 972460 - RNA, 22 nt, Human
gcccagcaggacagagugguuu

SEQ ID NO: 972461 - RNA, 22 nt, Human
ugggcagacgcuguuggaaggc

SEQ ID NO: 972462 - RNA, 22 nt, Human
ccacuguuuuucaguuaacuuu

SEQ ID NO: 972463 - RNA, 22 nt, Human
uccuucaguuaucacaguacug

SEQ ID NO: 972464 - RNA, 22 nt, Human
aaggagugcaugacucagagua

SEQ ID NO: 972465 - RNA, 18 nt, Human
aggcaggcuggagugacu

SEQ ID NO: 972466 - RNA, 22 nt, Human
aggcugcagaacagucaggugc

SEQ ID NO: 972467 - RNA, 22 nt, Human
ucugcuguucauucuuuuagcu

SEQ ID NO: 972468 - RNA, 22 nt, Human
uccuucagugucccgcucaggu

SEQ ID NO: 972469 - RNA, 22 nt, Human
ccugcagguaaggcuaacugcc

SEQ ID NO: 972470 - RNA, 22 nt, Human
ggcagugguuagaaacaugagc

SEQ ID NO: 972471 - RNA, 22 nt, Human
cugccuuugcccuugacacugu

SEQ ID NO: 972472 - RNA, 22 nt, Human
gcucugcugauccgcagccauc

SEQ ID NO: 972473 - RNA, 22 nt, Human
auauuguugacuauaagaguaa

SEQ ID NO: 972474 - RNA, 22 nt, Human
uuuguaaaaggaggaagcaugg

SEQ ID NO: 972475 - RNA, 22 nt, Human
uuugacaucaauacccuagaau

SEQ ID NO: 972476 - RNA, 22 nt, Human
cucaggauguacuacagaaggc

SEQ ID NO: 972477 - RNA, 22 nt, Human
gccagggaggcuguaggguccu

SEQ ID NO: 972478 - RNA, 22 nt, Human
gcuggugcauuagcugcaguuc

SEQ ID NO: 972479 - RNA, 20 nt, Human
ugaaaaggucaggagacaug

SEQ ID NO: 972480 - RNA, 22 nt, Human
ggcugcuguacugaugucaguu

SEQ ID NO: 972481 - RNA, 22 nt, Human
ucuccuggaagugauuccccug

SEQ ID NO: 972482 - RNA, 22 nt, Human
gggucagcugcugggggcugac

SEQ ID NO: 972483 - RNA, 22 nt, Human
ggccuuggugcucuguguugca

SEQ ID NO: 972484 - RNA, 22 nt, Human
auguaguguagagauuagucuc

SEQ ID NO: 972485 - RNA, 22 nt, Human
ccuggcaggccccuccuggauu

SEQ ID NO: 972486 - RNA, 22 nt, Human
acucugcuugggccauaucugg

SEQ ID NO: 972487 - RNA, 22 nt, Human
ccuuuggguucaaucucggucu

SEQ ID NO: 972488 - RNA, 19 nt, Human
agccacagaacuugcagga

SEQ ID NO: 972489 - RNA, 22 nt, Human
uaguuuaaaaguuagggaugau

SEQ ID NO: 972490 - RNA, 22 nt, Human
aguggcagaucucuggucugga

SEQ ID NO: 972491 - RNA, 22 nt, Human
guuuucuuccugcaauuggcau

SEQ ID NO: 972492 - RNA, 22 nt, Human
agccuggagcuugaguuaugag

SEQ ID NO: 972493 - RNA, 22 nt, Human
agucugucugucacuucugcag

SEQ ID NO: 972494 - RNA, 22 nt, Human
cucuucucugcagccuuugaag

SEQ ID NO: 972495 - RNA, 22 nt, Human
aggcacuggucuaccccuuagu

SEQ ID NO: 972496 - RNA, 22 nt, Human
auuugucuagugguauucacgu

SEQ ID NO: 972497 - RNA, 22 nt, Human
ucagaagcauguggggagccug

SEQ ID NO: 972498 - RNA, 22 nt, Human
cauacauaugcauguguguaua

SEQ ID NO: 972499 - RNA, 22 nt, Human
aauguguauacuggcaauuaag

SEQ ID NO: 972500 - RNA, 22 nt, Human
uggccuggcagagcaaggccug

SEQ ID NO: 972501 - RNA, 22 nt, Human
uuuuaucugcuucauuaguuga

SEQ ID NO: 972502 - RNA, 22 nt, Human
gcagagccccauugcuggcggg

SEQ ID NO: 972503 - RNA, 22 nt, Human
auggagacgcaagggaccuagg

SEQ ID NO: 972504 - RNA, 22 nt, Human
ugugcuucaucacuucucaguu

SEQ ID NO: 972505 - RNA, 22 nt, Human
agagugucugguagcugcucug

SEQ ID NO: 972506 - RNA, 22 nt, Human
ugucucugccagcuagcagaau

SEQ ID NO: 972507 - RNA, 22 nt, Human
gaggagaggggcucccaagagc

SEQ ID NO: 972508 - RNA, 22 nt, Human
gaacaauagugguaacaaagcc

SEQ ID NO: 972509 - RNA, 22 nt, Human
acagggcuuagaaaucuguugc

SEQ ID NO: 972510 - RNA, 22 nt, Human
aaauguauugcauaggauauuu

SEQ ID NO: 972511 - RNA, 22 nt, Human
aggaaaacacaguauugaugga

SEQ ID NO: 972512 - RNA, 21 nt, Human
cagggcacacagaggauggua

SEQ ID NO: 972513 - RNA, 20 nt, Human
ggcucuggaaucuggugggc

SEQ ID NO: 972514 - RNA, 22 nt, Human
aguccuuugggaaaaaugacua

SEQ ID NO: 972515 - RNA, 22 nt, Human
uuagaaaucugcugccaugcaa

SEQ ID NO: 972516 - RNA, 22 nt, Human
cccagccugucuuucccaauga

SEQ ID NO: 972517 - RNA, 22 nt, Human
ggauggagaugaccauggugac

SEQ ID NO: 972518 - RNA, 22 nt, Human
guaaaguucuauuugaauuuag

SEQ ID NO: 972519 - RNA, 21 nt, Human
aggaaguggccagauugggaa

SEQ ID NO: 972520 - RNA, 21 nt, Human
agcugcuccagggagcucagg

SEQ ID NO: 972521 - RNA, 21 nt, Human
cauuaaguaccagggcacugu

SEQ ID NO: 972522 - RNA, 22 nt, Human
ugcugccacaaauucagcugcc

SEQ ID NO: 972523 - RNA, 22 nt, Human
agaccgagaaguucuccaggcc

SEQ ID NO: 972524 - RNA, 22 nt, Human
gcuggcauuacaggagagaacc

SEQ ID NO: 972525 - RNA, 22 nt, Human
uugcauugaaaauauauuuuaa

SEQ ID NO: 972526 - RNA, 22 nt, Human
acagguggccccgagggagugg

SEQ ID NO: 972527 - RNA, 22 nt, Human
gucccuggaucugggacagcug

SEQ ID NO: 972528 - RNA, 22 nt, Human
cugggaguguucuaggucacau

SEQ ID NO: 972529 - RNA, 22 nt, Human
agggcagagauuaauuaagaca

SEQ ID NO: 972530 - RNA, 22 nt, Human
cagagccaggugguguuggggc

SEQ ID NO: 972531 - RNA, 22 nt, Human
ugaggggagacagaguggacuc

SEQ ID NO: 972532 - RNA, 22 nt, Human
agggcuggccacaugauuuggu

SEQ ID NO: 972533 - RNA, 22 nt, Human
auuguguccucauugaccuuca

SEQ ID NO: 972534 - RNA, 22 nt, Human
cccuuggggcucuuugccaggc

SEQ ID NO: 972535 - RNA, 22 nt, Human
uugagaagaggcuuuguaggaa

SEQ ID NO: 972536 - RNA, 22 nt, Human
ucuguucagacacuuuacaugu

SEQ ID NO: 972537 - RNA, 22 nt, Human
uggggaagggcacccuggagac

SEQ ID NO: 972538 - RNA, 22 nt, Human
ucaaagucuaucuguaauuacu

SEQ ID NO: 972539 - RNA, 21 nt, Human
ugaggcaggggugcuuuuguc

SEQ ID NO: 972540 - RNA, 22 nt, Human
agguggagacccagagaaggcg

SEQ ID NO: 972541 - RNA, 22 nt, Human
uaugucuugcauuuuucaaacu

SEQ ID NO: 972542 - RNA, 22 nt, Human
ggcaagcauaaccuguacagcc

SEQ ID NO: 972543 - RNA, 22 nt, Human
caggguggggcuggcuaucaaa

SEQ ID NO: 972544 - RNA, 22 nt, Human
gugugcagugagcaaaagaucu

SEQ ID NO: 972545 - RNA, 22 nt, Human
caugcuuugggucagaaaugcc

SEQ ID NO: 972546 - RNA, 22 nt, Human
gggagggaggugcugguucacg

SEQ ID NO: 972547 - RNA, 22 nt, Human
caugcuccaaaaacaagagaau

SEQ ID NO: 972548 - RNA, 22 nt, Human
ugaagcagcaaaugaugggaga

SEQ ID NO: 972549 - RNA, 22 nt, Human
agggugcagaaggagccuagga

SEQ ID NO: 972550 - RNA, 22 nt, Human
ucucagaguuuuuuuccaggac

SEQ ID NO: 972551 - RNA, 22 nt, Human
agcagcucugagaggccagcac

SEQ ID NO: 972552 - RNA, 22 nt, Human
ucucuggagggcuccaggcggg

SEQ ID NO: 972553 - RNA, 22 nt, Human
ugccucuguugagccuuggcug

SEQ ID NO: 972554 - RNA, 22 nt, Human
gcugggagacagacuuggaacc

SEQ ID NO: 972555 - RNA, 22 nt, Human
cagcaugcaaguccagaugugg

SEQ ID NO: 972556 - RNA, 22 nt, Human
agggcccaggacagcaucaggg

SEQ ID NO: 972557 - RNA, 22 nt, Human
acaaaauuguguuaaacuuuau

SEQ ID NO: 972558 - RNA, 22 nt, Human
ggcugccucugaugugcagacg

SEQ ID NO: 972559 - RNA, 22 nt, Human
cucagagcaaugaacaugcaaa

SEQ ID NO: 972560 - RNA, 22 nt, Human
gacccaggguuucugcacaggg

SEQ ID NO: 972561 - RNA, 22 nt, Human
aggauccuuuuucugcuguuug

SEQ ID NO: 972562 - RNA, 20 nt, Human
caaugcacacagcugcuucu

SEQ ID NO: 972563 - RNA, 22 nt, Human
uggcuuccugcauggauccucu

SEQ ID NO: 972564 - RNA, 22 nt, Human
ugaaaaggguagaucccuaagu

SEQ ID NO: 972565 - RNA, 22 nt, Human
agucuuuccugcuugacuguuc

SEQ ID NO: 972566 - RNA, 19 nt, Human
uggagaggaaaugcugcuc

SEQ ID NO: 972567 - RNA, 22 nt, Human
gaguggagcaaaagagguagau

SEQ ID NO: 972568 - RNA, 22 nt, Human
augucaaaucaguuuuaucaga

SEQ ID NO: 972569 - RNA, 22 nt, Human
ugugccaggcacuugcccaggc

SEQ ID NO: 972570 - RNA, 22 nt, Human
gccucuggggcagcugagucau

SEQ ID NO: 972571 - RNA, 22 nt, Human
ggcuucuguccucuggaucugu

SEQ ID NO: 972572 - RNA, 22 nt, Human
agcagcuauuucuuccagagag

SEQ ID NO: 972573 - RNA, 23 nt, Human
uuacaguaggaguuggaaaacca

SEQ ID NO: 972574 - RNA, 22 nt, Human
ggcagcuguaagaugagugaau

SEQ ID NO: 972575 - RNA, 22 nt, Human
caguugccuacuacauggcagg

SEQ ID NO: 972576 - RNA, 22 nt, Human
ccagucccagcucugccaugcu

SEQ ID NO: 972577 - RNA, 22 nt, Human
ccuggagcuuuuccauccugga

SEQ ID NO: 972578 - RNA, 22 nt, Human
agacagcaugauacaugaugcu

SEQ ID NO: 972579 - RNA, 22 nt, Human
aggagaggcaucaagaaaaucg

SEQ ID NO: 972580 - RNA, 22 nt, Human
aaaguuugcaauuuauguuaau

SEQ ID NO: 972581 - RNA, 20 nt, Human
uccagggcaacuagagugug

SEQ ID NO: 972582 - RNA, 22 nt, Human
agucuuaugugauuuaucuuuc

SEQ ID NO: 972583 - RNA, 22 nt, Human
cagcccugagaaggaggaucuc

SEQ ID NO: 972584 - RNA, 22 nt, Human
augagcuucccagacaggaugg

SEQ ID NO: 972585 - RNA, 22 nt, Human
cauggcagaaaccugagcugcu

SEQ ID NO: 972586 - RNA, 22 nt, Human
caggcuggaguuaccuuuaggg

SEQ ID NO: 972587 - RNA, 22 nt, Human
aguaauaauuuauauuagggag

SEQ ID NO: 972588 - RNA, 22 nt, Human
agccucucuuuauucccagcua

SEQ ID NO: 972589 - RNA, 20 nt, Human
ccuccaggcacacccaugug

SEQ ID NO: 972590 - RNA, 22 nt, Human
gcuaggagauugagcucugaag

SEQ ID NO: 972591 - RNA, 22 nt, Human
uuucuucauucaccuucacccc

SEQ ID NO: 972592 - RNA, 22 nt, Human
gccuggagugcaguggcgugau

SEQ ID NO: 972593 - RNA, 22 nt, Human
gcccaggaugguguguaguggu

SEQ ID NO: 972594 - RNA, 22 nt, Human
ucuggcucauacaagccugcaa

SEQ ID NO: 972595 - RNA, 22 nt, Human
accacaggaauugcucuguggu

SEQ ID NO: 972596 - RNA, 22 nt, Human
uccaggagucagacagauggug

SEQ ID NO: 972597 - RNA, 22 nt, Human
cuuagaaaugcagauucucagg

SEQ ID NO: 972598 - RNA, 22 nt, Human
ugcaauaaguuguguuaucacu

SEQ ID NO: 972599 - RNA, 22 nt, Human
uucacaggugacuggggauaac

SEQ ID NO: 972600 - RNA, 22 nt, Human
ggucucagaucuuuauuaaggc

SEQ ID NO: 972601 - RNA, 20 nt, Human
uuguuucugcuauuuucuaa

SEQ ID NO: 972602 - RNA, 22 nt, Human
auauucuuccaaaacaucauuu

SEQ ID NO: 972603 - RNA, 22 nt, Human
cagaaggcuuuguggaguagac

SEQ ID NO: 972604 - RNA, 22 nt, Human
ucauccaguaugacuggugucu

SEQ ID NO: 972605 - RNA, 22 nt, Human
cuugcacacauguacaugugua

SEQ ID NO: 972606 - RNA, 22 nt, Human
cccaggagguggagguugcagc

SEQ ID NO: 972607 - RNA, 21 nt, Human
ugcaugcuauguuuuuauuuc

SEQ ID NO: 972608 - RNA, 17 nt, Human
guccuacccauggucua

SEQ ID NO: 972609 - RNA, 22 nt, Human
auuaggaagaggaugucagcau

SEQ ID NO: 972610 - RNA, 22 nt, Human
uaaaucaguagauaugguauag

SEQ ID NO: 972611 - RNA, 22 nt, Human
gccaggcugcuccagggaggcc

SEQ ID NO: 972612 - RNA, 22 nt, Human
ggcucagguugggucacaugac

SEQ ID NO: 972613 - RNA, 22 nt, Human
ugagaggcagaauggugccugc

SEQ ID NO: 972614 - RNA, 22 nt, Human
ugaaccagagucuccagugguu

SEQ ID NO: 972615 - RNA, 22 nt, Human
gcuggccauggccugcgccauc

SEQ ID NO: 972616 - RNA, 22 nt, Human
uccuggguccauggcagccgaa

SEQ ID NO: 972617 - RNA, 22 nt, Human
uugagaagaauguguugaguuu

SEQ ID NO: 972618 - RNA, 22 nt, Human
uucaugugaauauauuugucuu

SEQ ID NO: 972619 - RNA, 22 nt, Human
uggcccgaccucugcucaugca

SEQ ID NO: 972620 - RNA, 22 nt, Human
ugggcugcacccucagccucug

SEQ ID NO: 972621 - RNA, 22 nt, Human
uccucagggaagaugagccuca

SEQ ID NO: 972622 - RNA, 22 nt, Human
gacaugcaacaauuuggcauuu

SEQ ID NO: 972623 - RNA, 22 nt, Human
ccaggagcagggcuggcugcac

SEQ ID NO: 972624 - RNA, 22 nt, Human
ugaggcaggacauggacaacug

SEQ ID NO: 972625 - RNA, 22 nt, Human
uugcauuuaaguagauguuaca

SEQ ID NO: 972626 - RNA, 22 nt, Human
agaggccaguggcugugcuguc

SEQ ID NO: 972627 - RNA, 22 nt, Human
gaggagcuugaggcuaggagcc

SEQ ID NO: 972628 - RNA, 22 nt, Human
uuaauucuuccggacugugaaa

SEQ ID NO: 972629 - RNA, 22 nt, Human
guggcugggcuccgagcggcuu

SEQ ID NO: 972630 - RNA, 22 nt, Human
ucucccaggugggugccuggag

SEQ ID NO: 972631 - RNA, 21 nt, Human
gugucaugguugacuuuggca

SEQ ID NO: 972632 - RNA, 22 nt, Human
cugugcuggagaugggccagag

SEQ ID NO: 972633 - RNA, 22 nt, Human
agagaggcgaguuaccugugcu

SEQ ID NO: 972634 - RNA, 22 nt, Human
cucucuggaccucaacuauuuu

SEQ ID NO: 972635 - RNA, 21 nt, Human
gugugucuaauguaguggaaa

SEQ ID NO: 972636 - RNA, 22 nt, Human
gcacaugagcugcugggauggg

SEQ ID NO: 972637 - RNA, 22 nt, Human
agauacauuaguaguuacuugu

SEQ ID NO: 972638 - RNA, 22 nt, Human
uuugacaggacuaacauauggc

SEQ ID NO: 972639 - RNA, 22 nt, Human
ggggcagaaguagugccccuga

SEQ ID NO: 972640 - RNA, 22 nt, Human
cagggcuggcucaugaaaaguu

SEQ ID NO: 972641 - RNA, 22 nt, Human
cugaaggauguguggugggagu

SEQ ID NO: 972642 - RNA, 22 nt, Human
gucugaggaagaugcaggggga

SEQ ID NO: 972643 - RNA, 22 nt, Human
aauguguguucggggcccagag

SEQ ID NO: 972644 - RNA, 22 nt, Human
cuggggcuucaaugcuucggug

SEQ ID NO: 972645 - RNA, 22 nt, Human
ugggauggcauccugggccuug

SEQ ID NO: 972646 - RNA, 22 nt, Human
cugugcaagacuuacuuuaaua

SEQ ID NO: 972647 - RNA, 22 nt, Human
aggcugcuggcaggcguggacg

SEQ ID NO: 972648 - RNA, 22 nt, Human
auacuuugcuaguaucagugug

SEQ ID NO: 972649 - RNA, 22 nt, Human
uccuuggggacgcugacaucgu

SEQ ID NO: 972650 - RNA, 22 nt, Human
agggugggcuagacucuucccc

SEQ ID NO: 972651 - RNA, 22 nt, Human
agagugaaguuuuugaaaguga

SEQ ID NO: 972652 - RNA, 22 nt, Human
ugggcaagucacuucugucuuu

SEQ ID NO: 972653 - RNA, 22 nt, Human
aaugcuguucugagucugcagg

SEQ ID NO: 972654 - RNA, 22 nt, Human
gagccugggacugggggucaug

SEQ ID NO: 972655 - RNA, 22 nt, Human
uaggcagggauuaggguugauu

SEQ ID NO: 972656 - RNA, 22 nt, Human
cacuggcccauuccugucuggc

SEQ ID NO: 972657 - RNA, 22 nt, Human
ccuggccaggcauggagucaca

SEQ ID NO: 972658 - RNA, 22 nt, Human
uuccaggacuggguguuugaag

SEQ ID NO: 972659 - RNA, 22 nt, Human
uuauuccauagaagucaaggaa

SEQ ID NO: 972660 - RNA, 22 nt, Human
gcugcugucagugguggcaguu

SEQ ID NO: 972661 - RNA, 22 nt, Human
cucagggucugguccuuagauu

SEQ ID NO: 972662 - RNA, 22 nt, Human
ugcuccagugagcuggccaucc

SEQ ID NO: 972663 - RNA, 22 nt, Human
gccccugggagcagagccacca

SEQ ID NO: 972664 - RNA, 16 nt, Human
auuuccagauuaugca

SEQ ID NO: 972665 - RNA, 22 nt, Human
ucucagagcaucauuuucuuag

SEQ ID NO: 972666 - RNA, 22 nt, Human
ccagggcaucacauccaguguu

SEQ ID NO: 972667 - RNA, 22 nt, Human
gggcagcugccacuccgcuugc

SEQ ID NO: 972668 - RNA, 22 nt, Human
aaaccauggaguaaguucacau

SEQ ID NO: 972669 - RNA, 22 nt, Human
auuucaaggcuauuaauauaaa

SEQ ID NO: 972670 - RNA, 22 nt, Human
cccaggagguggagcuugcagu

SEQ ID NO: 972671 - RNA, 22 nt, Human
uggagcaggacugcugcccuca

SEQ ID NO: 972672 - RNA, 22 nt, Human
acauuucagcgugcaugacaug

SEQ ID NO: 972673 - RNA, 22 nt, Human
uugaaguuguaguucagugaag

SEQ ID NO: 972674 - RNA, 22 nt, Human
agauuucacaugcugcucuauu

SEQ ID NO: 972675 - RNA, 22 nt, Human
uugcacuuuauagaaacuuuug

SEQ ID NO: 972676 - RNA, 22 nt, Human
gugugccaccagucaaggugaa

SEQ ID NO: 972677 - RNA, 22 nt, Human
caggagagauaugaguccccac

SEQ ID NO: 972678 - RNA, 22 nt, Human
acugucugcaaaacucauacuc

SEQ ID NO: 972679 - RNA, 22 nt, Human
uaacagaaauagaaaugagagu

SEQ ID NO: 972680 - RNA, 22 nt, Human
cagcuucugcuaucgaacaucu

SEQ ID NO: 972681 - RNA, 19 nt, Human
uggagggguuugaaugugg

SEQ ID NO: 972682 - RNA, 21 nt, Human
cugccuugaaugguacuggga

SEQ ID NO: 972683 - RNA, 22 nt, Human
gccuggugaaaggcagagagcg

SEQ ID NO: 972684 - RNA, 22 nt, Human
uggaagggagugacagucagag

SEQ ID NO: 972685 - RNA, 22 nt, Human
uucucugaguacguuucagugu

SEQ ID NO: 972686 - RNA, 22 nt, Human
ccugggaguggcacucacagca

SEQ ID NO: 972687 - RNA, 22 nt, Human
agucccagugagaugagccacg

SEQ ID NO: 972688 - RNA, 22 nt, Human
agcaggugaugugagucuggaa

SEQ ID NO: 972689 - RNA, 22 nt, Human
cagcucugaggaacacuccuuu

SEQ ID NO: 972690 - RNA, 22 nt, Human
caaggccaguccauuuuggaag

SEQ ID NO: 972691 - RNA, 22 nt, Human
ucucuuucuauaugugagucuu

SEQ ID NO: 972692 - RNA, 22 nt, Human
cucuggaauuaaggaagccugu

SEQ ID NO: 972693 - RNA, 22 nt, Human
uaaaguguccuagcuaggaggc

SEQ ID NO: 972694 - RNA, 22 nt, Human
uauuuuguauuuaugcaagaaa

SEQ ID NO: 972695 - RNA, 22 nt, Human
ccuccuggggugaaggauggga

SEQ ID NO: 972696 - RNA, 17 nt, Human
ugcugccaagucccaac

SEQ ID NO: 972697 - RNA, 23 nt, Human
uuucaacuccugccauuauuucu

SEQ ID NO: 972698 - RNA, 22 nt, Human
auggcagcaaaugucuggcugg

SEQ ID NO: 972699 - RNA, 22 nt, Human
aggcaccuugcgguccagugaa

SEQ ID NO: 972700 - RNA, 22 nt, Human
guuugcauuucuugaacuauau

SEQ ID NO: 972701 - RNA, 22 nt, Human
caaagucccagcugcuuagaga

SEQ ID NO: 972702 - RNA, 20 nt, Human
cagagccaagagcagcaucu

SEQ ID NO: 972703 - RNA, 22 nt, Human
agccccaguaagggagggccug

SEQ ID NO: 972704 - RNA, 22 nt, Human
gagcagcuggacaggccucccu

SEQ ID NO: 972705 - RNA, 22 nt, Human
uaucaauacauguuaucagugu

SEQ ID NO: 972706 - RNA, 22 nt, Human
uuaaaaugcagauuaugacuca

SEQ ID NO: 972707 - RNA, 22 nt, Human
acaaggcugaacagugaagccg

SEQ ID NO: 972708 - RNA, 22 nt, Human
cuucucaguugcaagugucaga

SEQ ID NO: 972709 - RNA, 23 nt, Human
uauuagggccaggacuggcaaau

SEQ ID NO: 972710 - RNA, 22 nt, Human
gcuggcaucacuggcuucggug

SEQ ID NO: 972711 - RNA, 18 nt, Human
acugugguuuauguguag

SEQ ID NO: 972712 - RNA, 20 nt, Human
aggaagcugagauguagagg

SEQ ID NO: 972713 - RNA, 22 nt, Human
aaauguguguauguacauauau

SEQ ID NO: 972714 - RNA, 22 nt, Human
gugccugggguugagcuaugaa

SEQ ID NO: 972715 - RNA, 22 nt, Human
agcccaggaaucugcaucuuga

SEQ ID NO: 972716 - RNA, 22 nt, Human
acagaaggcggggacaaggcgg

SEQ ID NO: 972717 - RNA, 19 nt, Human
ucucugcuucucuuggcau

SEQ ID NO: 972718 - RNA, 22 nt, Human
gccaggcuccccggaucccugg

SEQ ID NO: 972719 - RNA, 22 nt, Human
uuuguucugaaaacucaagucc

SEQ ID NO: 972720 - RNA, 22 nt, Human
uucuucaaagaugucuguugga

SEQ ID NO: 972721 - RNA, 23 nt, Human
cuucacaaucaaaaucaguucug

SEQ ID NO: 972722 - RNA, 22 nt, Human
caggaaccuaaugaaggcucac

SEQ ID NO: 972723 - RNA, 22 nt, Human
gggucccaggaaggagcagugu

SEQ ID NO: 972724 - RNA, 22 nt, Human
agagaaggucacuaaggaccca

SEQ ID NO: 972725 - RNA, 22 nt, Human
ccagccucacuggcaucaccua

SEQ ID NO: 972726 - RNA, 18 nt, Human
agggaguuuuagggaagg

SEQ ID NO: 972727 - RNA, 22 nt, Human
ucugcuguauuagguugaacug

SEQ ID NO: 972728 - RNA, 22 nt, Human
uuccaggaagcaguuagcagcc

SEQ ID NO: 972729 - RNA, 22 nt, Human
aguuuaaaucauguuuuguaac

SEQ ID NO: 972730 - RNA, 22 nt, Human
ccagcuugaagaugugcugguu

SEQ ID NO: 972731 - RNA, 19 nt, Human
ugcaggaggacugagcaga

SEQ ID NO: 972732 - RNA, 22 nt, Human
ucuucacauggaacaugaagcu

SEQ ID NO: 972733 - RNA, 22 nt, Human
gccaggaguguguggcuauguu

SEQ ID NO: 972734 - RNA, 21 nt, Human
cacaggugggucagugaggcc

SEQ ID NO: 972735 - RNA, 22 nt, Human
cccucugcugccuggcuggguc

SEQ ID NO: 972736 - RNA, 22 nt, Human
gagggugggccagauaugaggg

SEQ ID NO: 972737 - RNA, 22 nt, Human
gaggcagagucacaaagagucu

SEQ ID NO: 972738 - RNA, 22 nt, Human
uggucaaaaacucucaguggac

SEQ ID NO: 972739 - RNA, 19 nt, Human
ucaaaugccaaugucacag

SEQ ID NO: 972740 - RNA, 22 nt, Human
ugagagggcccagagcacacca

SEQ ID NO: 972741 - RNA, 22 nt, Human
caggcagcugcuggguucagcc

SEQ ID NO: 972742 - RNA, 22 nt, Human
acauuucucauucuccccuaac

SEQ ID NO: 972743 - RNA, 22 nt, Human
uugaaugaccaugaugcaaggg

SEQ ID NO: 972744 - RNA, 22 nt, Human
ucuguucagaaauggaagugcc

SEQ ID NO: 972745 - RNA, 22 nt, Human
aggcaggcacuccggaaguguc

SEQ ID NO: 972746 - RNA, 22 nt, Human
gguggcaggcccugagcauccc

SEQ ID NO: 972747 - RNA, 22 nt, Human
uggcacccugaaguuggucacu

SEQ ID NO: 972748 - RNA, 19 nt, Human
uauucaggaugauggcaca

SEQ ID NO: 972749 - RNA, 22 nt, Human
ucugcugucacucauuugcuuc

SEQ ID NO: 972750 - RNA, 22 nt, Human
ucagagcugcccaugcaagggg

SEQ ID NO: 972751 - RNA, 22 nt, Human
gcuggccucgcaggcaggaugu

SEQ ID NO: 972752 - RNA, 22 nt, Human
ugggccugccccaggcuucagc

SEQ ID NO: 972753 - RNA, 22 nt, Human
ucugccuuuucacugccacuaa

SEQ ID NO: 972754 - RNA, 22 nt, Human
agaggacagguuuuccaugggc

SEQ ID NO: 972755 - RNA, 22 nt, Human
cuggcugaggucaccaguagcu

SEQ ID NO: 972756 - RNA, 22 nt, Human
ucagagcuuuggagaccaggaa

SEQ ID NO: 972757 - RNA, 22 nt, Human
uuuccucuuuguaccuugacua

SEQ ID NO: 972758 - RNA, 22 nt, Human
ccaggaaauagugcugugaucu

SEQ ID NO: 972759 - RNA, 17 nt, Human
ccucacagggaccagac

SEQ ID NO: 972760 - RNA, 22 nt, Human
ggcaguggugggaggcucgcuc

SEQ ID NO: 972761 - RNA, 22 nt, Human
auguccuuugcuucucuggucc

SEQ ID NO: 972762 - RNA, 22 nt, Human
aaagugacaaccauuuauuaag

SEQ ID NO: 972763 - RNA, 22 nt, Human
ugcuuuauguuaucagaagggu

SEQ ID NO: 972764 - RNA, 22 nt, Human
caguacuuugaagauauuuuag

SEQ ID NO: 972765 - RNA, 22 nt, Human
aaaaugcucaucagcgauggcu

SEQ ID NO: 972766 - RNA, 22 nt, Human
ugcagcugcuugauucaucuug

SEQ ID NO: 972767 - RNA, 22 nt, Human
cuucugcaauaaguuuuggucc

SEQ ID NO: 972768 - RNA, 22 nt, Human
aguuuguaucaauuugcuuuau

SEQ ID NO: 972769 - RNA, 22 nt, Human
aggcacaguggcucacaccugu

SEQ ID NO: 972770 - RNA, 22 nt, Human
gugcuuccugccuggugccuuu

SEQ ID NO: 972771 - RNA, 19 nt, Human
uucauucucuuauuguugu

SEQ ID NO: 972772 - RNA, 22 nt, Human
uggaggaugccauccaggauac

SEQ ID NO: 972773 - RNA, 21 nt, Human
ucauccagguccugcuucuuc

SEQ ID NO: 972774 - RNA, 22 nt, Human
aauaauuuccagccaacuggaa

SEQ ID NO: 972775 - RNA, 22 nt, Human
ccugaggcccuggcugugcuga

SEQ ID NO: 972776 - RNA, 22 nt, Human
uuacuuugcuuucucauuacag

SEQ ID NO: 972777 - RNA, 22 nt, Human
ccagggcacguugggacaguac

SEQ ID NO: 972778 - RNA, 22 nt, Human
uuagaaaugauuucaccucuuu

SEQ ID NO: 972779 - RNA, 22 nt, Human
gcuguuccugcuuagaggucgg

SEQ ID NO: 972780 - RNA, 22 nt, Human
guaggcagugguuggaagagaa

SEQ ID NO: 972781 - RNA, 22 nt, Human
ucaguaacuuacuuauucaccu

SEQ ID NO: 972782 - RNA, 22 nt, Human
agccaggaauuggacaacacau

SEQ ID NO: 972783 - RNA, 22 nt, Human
ccauuguaguaucuguuuuagu

SEQ ID NO: 972784 - RNA, 22 nt, Human
ucuguucaguuguaccuucccc

SEQ ID NO: 972785 - RNA, 22 nt, Human
guuugaaaaaagcaguauguaa

SEQ ID NO: 972786 - RNA, 21 nt, Human
aagaaguuuggauuuuguccu

SEQ ID NO: 972787 - RNA, 20 nt, Human
auacacauauucuugcaacu

SEQ ID NO: 972788 - RNA, 22 nt, Human
ccacucugauuuuggcuccacu

SEQ ID NO: 972789 - RNA, 22 nt, Human
uccuucagccaugggcucucca

SEQ ID NO: 972790 - RNA, 22 nt, Human
guggaauguccuugaucauaag

SEQ ID NO: 972791 - RNA, 22 nt, Human
uaaaaguuuuaguuguacauaa

SEQ ID NO: 972792 - RNA, 22 nt, Human
gugugccaggaacuggcugcug

SEQ ID NO: 972793 - RNA, 22 nt, Human
ugguggcaauguccuggagaag

SEQ ID NO: 972794 - RNA, 22 nt, Human
aacugccuggccaggcugcaac

SEQ ID NO: 972795 - RNA, 22 nt, Human
auccuugagccaaugacugauu

SEQ ID NO: 972796 - RNA, 22 nt, Human
guuuuuaucuaauagcaguuau

SEQ ID NO: 972797 - RNA, 22 nt, Human
auggaaagcuaagccauuuacc

SEQ ID NO: 972798 - RNA, 22 nt, Human
gcagaggcuguagggaagguug

SEQ ID NO: 972799 - RNA, 22 nt, Human
ugcagaggagucagccugggca

SEQ ID NO: 972800 - RNA, 22 nt, Human
gcugcaggagcuggagcugugg

SEQ ID NO: 972801 - RNA, 22 nt, Human
gcuccuggcaggcagugugugu

SEQ ID NO: 972802 - RNA, 22 nt, Human
uggugagcgaugcugcauguuc

SEQ ID NO: 972803 - RNA, 22 nt, Human
uguccugggaaugggaugcagu

SEQ ID NO: 972804 - RNA, 22 nt, Human
gcugcagcuuuaggauccagug

SEQ ID NO: 972805 - RNA, 22 nt, Human
uuuagaaguucacacauuuaaa

SEQ ID NO: 972806 - RNA, 22 nt, Human
aguguuucuggcaaaugaaagu

SEQ ID NO: 972807 - RNA, 22 nt, Human
cagagagcuuagugugcugcau

SEQ ID NO: 972808 - RNA, 22 nt, Human
uuccauuguuucugucuucacu

SEQ ID NO: 972809 - RNA, 22 nt, Human
uguggccucaaggcugcccuca

SEQ ID NO: 972810 - RNA, 17 nt, Human
aaucuguuuacagucag

SEQ ID NO: 972811 - RNA, 22 nt, Human
caaagaugcugauguuggauca

SEQ ID NO: 972812 - RNA, 22 nt, Human
ccaggaggcggaagguacagug

SEQ ID NO: 972813 - RNA, 18 nt, Human
aguggucuguuauaucau

SEQ ID NO: 972814 - RNA, 22 nt, Human
gcaggcugugaggcucagaugg

SEQ ID NO: 972815 - RNA, 22 nt, Human
ugcuggcucaguuugcagacuc

SEQ ID NO: 972816 - RNA, 20 nt, Human
agagcagcaguuggugaggu

SEQ ID NO: 972817 - RNA, 22 nt, Human
aaagauuugaaauuaggcauca

SEQ ID NO: 972818 - RNA, 22 nt, Human
cagguggggcagcugugggagc

SEQ ID NO: 972819 - RNA, 22 nt, Human
cugcugugagugguucuugccu

SEQ ID NO: 972820 - RNA, 22 nt, Human
acaaaaauuagcugggcauggu

SEQ ID NO: 972821 - RNA, 22 nt, Human
uacagucaacauugaugaugau

SEQ ID NO: 972822 - RNA, 22 nt, Human
gguugccggggcaggacuggaa

SEQ ID NO: 972823 - RNA, 22 nt, Human
ggcugcuguuucagagacuguu

SEQ ID NO: 972824 - RNA, 22 nt, Human
aggcucugugcagccugcaucu

SEQ ID NO: 972825 - RNA, 22 nt, Human
cucugggcaggaccaguggacc

SEQ ID NO: 972826 - RNA, 22 nt, Human
gcauugaguccacucugucuuu

SEQ ID NO: 972827 - RNA, 22 nt, Human
uggcagcagggccccuggagga

SEQ ID NO: 972828 - RNA, 22 nt, Human
aggggcugccuggcuuggcacu

SEQ ID NO: 972829 - RNA, 22 nt, Human
ggcuggaaaagacaaagcuauu

SEQ ID NO: 972830 - RNA, 22 nt, Human
caagaugccccugguagggauc

SEQ ID NO: 972831 - RNA, 22 nt, Human
uaaccaaagggccuaaggaaug

SEQ ID NO: 972832 - RNA, 22 nt, Human
agcuucccaagguuggaagguu

SEQ ID NO: 972833 - RNA, 23 nt, Human
ggaguuggauuguacuugcugcu

SEQ ID NO: 972834 - RNA, 22 nt, Human
guccucuggccuuucccaggac

SEQ ID NO: 972835 - RNA, 22 nt, Human
acugagcugcaagucagggagg

SEQ ID NO: 972836 - RNA, 19 nt, Human
cugugcaggccgggcugag

SEQ ID NO: 972837 - RNA, 22 nt, Human
ugcagggccuucuagaccaugg

SEQ ID NO: 972838 - RNA, 22 nt, Human
acugggagucaugaggaaggag

SEQ ID NO: 972839 - RNA, 22 nt, Human
aaacaccagcacuguuuacaaa

SEQ ID NO: 972840 - RNA, 22 nt, Human
agaggucagaacaggaaagugu

SEQ ID NO: 972841 - RNA, 22 nt, Human
auacaguauuaccuguucagga

SEQ ID NO: 972842 - RNA, 22 nt, Human
uucacauuggugauauguuucu

SEQ ID NO: 972843 - RNA, 22 nt, Human
gacagcuggcaguggaaaggug

SEQ ID NO: 972844 - RNA, 22 nt, Human
aauauaguucugguauuguuaa

SEQ ID NO: 972845 - RNA, 22 nt, Human
ccaggguggaggcuggauggag

SEQ ID NO: 972846 - RNA, 22 nt, Human
aggccuccugcagggaugagug

SEQ ID NO: 972847 - RNA, 22 nt, Human
ucagacaguuugcagugugccu

SEQ ID NO: 972848 - RNA, 22 nt, Human
uuaaaauagccagugccccucu

SEQ ID NO: 972849 - RNA, 22 nt, Human
cuucaaacccagauuaaaugca

SEQ ID NO: 972850 - RNA, 22 nt, Human
aucacaggugguaggaaaagaa

SEQ ID NO: 972851 - RNA, 22 nt, Human
aucuguucuucaaaauauuaca

SEQ ID NO: 972852 - RNA, 20 nt, Human
agguccugggacuggcagag

SEQ ID NO: 972853 - RNA, 22 nt, Human
ccagagccuaagaucugauccu

SEQ ID NO: 972854 - RNA, 22 nt, Human
gagaggcugacuggcuguccug

SEQ ID NO: 972855 - RNA, 22 nt, Human
ucugucugacaggguaugaacu

SEQ ID NO: 972856 - RNA, 22 nt, Human
gauuuccuagacauggggcaga

SEQ ID NO: 972857 - RNA, 22 nt, Human
ggggacaguuaaagaccaagac

SEQ ID NO: 972858 - RNA, 22 nt, Human
gaacccaaccucacuuggggua

SEQ ID NO: 972859 - RNA, 22 nt, Human
caggaacaauguaagucucauu

SEQ ID NO: 972860 - RNA, 22 nt, Human
cuccuggaagcccgcccugcug

SEQ ID NO: 972861 - RNA, 20 nt, Human
ccuaggcaugcugagucucc

SEQ ID NO: 972862 - RNA, 22 nt, Human
aagucuuacauaauaguuugga

SEQ ID NO: 972863 - RNA, 22 nt, Human
auaaguaggaaaauuugaauau

SEQ ID NO: 972864 - RNA, 22 nt, Human
gcugcucuccauggccgugagu

SEQ ID NO: 972865 - RNA, 17 nt, Human
agaacuguaguagcucc

SEQ ID NO: 972866 - RNA, 20 nt, Human
uugauucccucuaaacucgc

SEQ ID NO: 972867 - RNA, 22 nt, Human
acuugggaguucuggaagccug

SEQ ID NO: 972868 - RNA, 22 nt, Human
uuuacauuucccucugucaguu

SEQ ID NO: 972869 - RNA, 22 nt, Human
gcccagaguucaaggcugcagu

SEQ ID NO: 972870 - RNA, 22 nt, Human
cugaggccucucuccugggcuu

SEQ ID NO: 972871 - RNA, 22 nt, Human
cuggccaggcucucacgugguc

SEQ ID NO: 972872 - RNA, 22 nt, Human
cacaaaugugcagaaaugugag

SEQ ID NO: 972873 - RNA, 22 nt, Human
ugcaggccucacaccuggcacc

SEQ ID NO: 972874 - RNA, 22 nt, Human
acuugcugguggcauuuacagu

SEQ ID NO: 972875 - RNA, 22 nt, Human
ugucauugaggaaaacuaggug

SEQ ID NO: 972876 - RNA, 22 nt, Human
uaaagguagugugacauauugu

SEQ ID NO: 972877 - RNA, 22 nt, Human
cucugcaugccuugcucagaca

SEQ ID NO: 972878 - RNA, 22 nt, Human
uauuucuguaugcauaaaagga

SEQ ID NO: 972879 - RNA, 22 nt, Human
ucugagccaccugccagugcug

SEQ ID NO: 972880 - RNA, 22 nt, Human
augagcugggccauccagugau

SEQ ID NO: 972881 - RNA, 22 nt, Human
guuucuaaauguucugaguuuu

SEQ ID NO: 972882 - RNA, 22 nt, Human
uguucuuucaguuagacacagu

SEQ ID NO: 972883 - RNA, 22 nt, Human
uuuauucaucaucuguucauau

SEQ ID NO: 972884 - RNA, 22 nt, Human
cauagagugauguaagguaugu

SEQ ID NO: 972885 - RNA, 22 nt, Human
ucaggugggaccugcuaggaca

SEQ ID NO: 972886 - RNA, 22 nt, Human
ugggcugccggcaggcucugcc

SEQ ID NO: 972887 - RNA, 22 nt, Human
agcuauguauuuguguguuaaa

SEQ ID NO: 972888 - RNA, 23 nt, Human
auuugagaaaguauuuuuaagac

SEQ ID NO: 972889 - RNA, 17 nt, Human
ucaggcugugccuggua

SEQ ID NO: 972890 - RNA, 22 nt, Human
cacccuggaaagaaggucuggg

SEQ ID NO: 972891 - RNA, 21 nt, Human
ugccagcauguaggcuaguug

SEQ ID NO: 972892 - RNA, 23 nt, Human
uucuuauuuacuuuggaaucucc

SEQ ID NO: 972893 - RNA, 22 nt, Human
ggaggccaaggcagguggauca

SEQ ID NO: 972894 - RNA, 22 nt, Human
gaaaugugcagaauguguuaga

SEQ ID NO: 972895 - RNA, 23 nt, Human
ugagcugguauuguccaucucca

SEQ ID NO: 972896 - RNA, 22 nt, Human
caguggagagacuuuuacucuu

SEQ ID NO: 972897 - RNA, 22 nt, Human
ccacccagccagaugcaggaag

SEQ ID NO: 972898 - RNA, 22 nt, Human
uaaaacuuaacuauccagauua

SEQ ID NO: 972899 - RNA, 22 nt, Human
uaugaguacaaggacucugucu

SEQ ID NO: 972900 - RNA, 22 nt, Human
cuggagccugcaguuuucacuu

SEQ ID NO: 972901 - RNA, 22 nt, Human
cuggcugcaggaaggagugggc

SEQ ID NO: 972902 - RNA, 22 nt, Human
guuuucaauuauaagauggcuu

SEQ ID NO: 972903 - RNA, 21 nt, Human
ccugcugugaucuuagugagu

SEQ ID NO: 972904 - RNA, 22 nt, Human
uuccggaagguucucuagaauu

SEQ ID NO: 972905 - RNA, 22 nt, Human
uggcagcaauuagcuagagcug

SEQ ID NO: 972906 - RNA, 22 nt, Human
accagagcuggcucugagcacc

SEQ ID NO: 972907 - RNA, 22 nt, Human
gagggaggugauacugaacgua

SEQ ID NO: 972908 - RNA, 22 nt, Human
acugcagccuugaacucugggc

SEQ ID NO: 972909 - RNA, 22 nt, Human
ugcagcagguuccaaaggguua

SEQ ID NO: 972910 - RNA, 22 nt, Human
gcagacagcauguugggcuauu

SEQ ID NO: 972911 - RNA, 22 nt, Human
ggccuggccuccagaugugggc

SEQ ID NO: 972912 - RNA, 22 nt, Human
ucuucucuacaccagcagcccc

SEQ ID NO: 972913 - RNA, 22 nt, Human
caggcagcucugcuuuuccuaa

SEQ ID NO: 972914 - RNA, 22 nt, Human
agguaaggcuguaagcuaagcc

SEQ ID NO: 972915 - RNA, 21 nt, Human
ucagggcagcugcucuucaga

SEQ ID NO: 972916 - RNA, 22 nt, Human
agcacauucuugccuuaaccuc

SEQ ID NO: 972917 - RNA, 22 nt, Human
cacugccuggaaggagagacau

SEQ ID NO: 972918 - RNA, 22 nt, Human
ggaggagacccugugucaguuu

SEQ ID NO: 972919 - RNA, 22 nt, Human
ugcaggugccucuugagcuugu

SEQ ID NO: 972920 - RNA, 23 nt, Human
uugauacagaagaaucaguuugu

SEQ ID NO: 972921 - RNA, 22 nt, Human
uccauggguagcccugguugag

SEQ ID NO: 972922 - RNA, 22 nt, Human
ucagagagugcaaaauauagcu

SEQ ID NO: 972923 - RNA, 22 nt, Human
ggccaggcuggucucagacuuc

SEQ ID NO: 972924 - RNA, 22 nt, Human
ggagagcagggaggcugcucug

SEQ ID NO: 972925 - RNA, 22 nt, Human
ugaaggaaugaguauacuguuu

SEQ ID NO: 972926 - RNA, 22 nt, Human
caggaaaggugugucaugaugg

SEQ ID NO: 972927 - RNA, 22 nt, Human
cuuuuccacugagccucacaaa

SEQ ID NO: 972928 - RNA, 21 nt, Human
ucucugguuggaguugugcca

SEQ ID NO: 972929 - RNA, 22 nt, Human
uuauuuagucuagaugaauuuu

SEQ ID NO: 972930 - RNA, 22 nt, Human
ucuccuggauagauacuaucca

SEQ ID NO: 972931 - RNA, 22 nt, Human
uugaaaguuaucuagauucuga

SEQ ID NO: 972932 - RNA, 22 nt, Human
ccucugggugggaggccgggcg

SEQ ID NO: 972933 - RNA, 20 nt, Human
ccuggaagagcuccccaggc

SEQ ID NO: 972934 - RNA, 22 nt, Human
auggccaagaauauuucucaac

SEQ ID NO: 972935 - RNA, 22 nt, Human
ucuguucaugaaauaucuuuuu

SEQ ID NO: 972936 - RNA, 21 nt, Human
ccuucuccacagggucuccgg

SEQ ID NO: 972937 - RNA, 22 nt, Human
gccaggaguucagaugcauguu

SEQ ID NO: 972938 - RNA, 22 nt, Human
uggcccugaggggcugugcccc

SEQ ID NO: 972939 - RNA, 22 nt, Human
auucaaguucuucugucuuugc

SEQ ID NO: 972940 - RNA, 22 nt, Human
ugggacagugugccuugcuccu

SEQ ID NO: 972941 - RNA, 22 nt, Human
ugcagaggaccauuguccugga

SEQ ID NO: 972942 - RNA, 22 nt, Human
auccaugaagguacuucucagg

SEQ ID NO: 972943 - RNA, 22 nt, Human
ccuguucaugaaacugcuuucc

SEQ ID NO: 972944 - RNA, 22 nt, Human
cagagccccucagcucucuccc

SEQ ID NO: 972945 - RNA, 22 nt, Human
ggcucaggaccugggauugcca

SEQ ID NO: 972946 - RNA, 22 nt, Human
gcugagggcuguaacagcagag

SEQ ID NO: 972947 - RNA, 22 nt, Human
cagacacagauaugcauauggc

SEQ ID NO: 972948 - RNA, 22 nt, Human
aucagugcuaaagcaaaugccc

SEQ ID NO: 972949 - RNA, 22 nt, Human
uugaagcauuucuuugagcuuc

SEQ ID NO: 972950 - RNA, 22 nt, Human
cugacucuccucaagcauaaau

SEQ ID NO: 972951 - RNA, 22 nt, Human
gauggcagguaguggucucauc

SEQ ID NO: 972952 - RNA, 19 nt, Human
uguuggugcggauguggag

SEQ ID NO: 972953 - RNA, 22 nt, Human
cucucugaggaaggagcaucug

SEQ ID NO: 972954 - RNA, 22 nt, Human
auucuaggcuugaaacaugaag

SEQ ID NO: 972955 - RNA, 22 nt, Human
guacaugucaaaaaaugcauaa

SEQ ID NO: 972956 - RNA, 22 nt, Human
uggagccauaacccuuucguac

SEQ ID NO: 972957 - RNA, 22 nt, Human
auuagguaagauaaagcagagg

SEQ ID NO: 972958 - RNA, 22 nt, Human
ccagcccugccucucagggccc

SEQ ID NO: 972959 - RNA, 22 nt, Human
uuucuucucgacaccuuauccc

SEQ ID NO: 972960 - RNA, 22 nt, Human
uugaaaggaauacagaggccua

SEQ ID NO: 972961 - RNA, 22 nt, Human
gagcagcugguaggugaaccca

SEQ ID NO: 972962 - RNA, 22 nt, Human
ggcugcugugaccucaggugau

SEQ ID NO: 972963 - RNA, 22 nt, Human
ggaggggccggcugccugccac

SEQ ID NO: 972964 - RNA, 22 nt, Human
uaaaugcaguacaaauuguucu

SEQ ID NO: 972965 - RNA, 22 nt, Human
uguauuuuuaggaaugcgcuau

SEQ ID NO: 972966 - RNA, 22 nt, Human
ccaucagcuccaguaucuucug

SEQ ID NO: 972967 - RNA, 22 nt, Human
gcucccagcauugcugcugaau

SEQ ID NO: 972968 - RNA, 23 nt, Human
cccaggaguuucacugcaaaggu

SEQ ID NO: 972969 - RNA, 22 nt, Human
gccugcagaacugugaggcaau

SEQ ID NO: 972970 - RNA, 22 nt, Human
guugaaagaugucuugguuccc

SEQ ID NO: 972971 - RNA, 23 nt, Human
gggugggccaaauuagguagccu

SEQ ID NO: 972972 - RNA, 22 nt, Human
uucaugcuuuuaccgcuguuaa

SEQ ID NO: 972973 - RNA, 22 nt, Human
ugagccagguuaagacaggagc

SEQ ID NO: 972974 - RNA, 22 nt, Human
cgggcuggcugcagcugcugga

SEQ ID NO: 972975 - RNA, 22 nt, Human
uccugccucaggcucuggagua

SEQ ID NO: 972976 - RNA, 22 nt, Human
cacugcuuuuuuggcuauguac

SEQ ID NO: 972977 - RNA, 18 nt, Human
gugcugugggcaguggcc

SEQ ID NO: 972978 - RNA, 22 nt, Human
ugccuugcacauaauauacauu

SEQ ID NO: 972979 - RNA, 22 nt, Human
ucccagaguauuagcaauugcu

SEQ ID NO: 972980 - RNA, 22 nt, Human
ccuguccuccaagagcacaucu

SEQ ID NO: 972981 - RNA, 22 nt, Human
aggcggcugguguccugcaggu

SEQ ID NO: 972982 - RNA, 18 nt, Human
ucucagaggccauccuag

SEQ ID NO: 972983 - RNA, 22 nt, Human
uuuucuuauggugaagcacaaa

SEQ ID NO: 972984 - RNA, 23 nt, Human
gugcugugagccccuuggccucc

SEQ ID NO: 972985 - RNA, 22 nt, Human
gcagaggcaaucagguaugugg

SEQ ID NO: 972986 - RNA, 22 nt, Human
ucagaaauuuucucaguaguuc

SEQ ID NO: 972987 - RNA, 22 nt, Human
aaaugcuacauacacaucaggg

SEQ ID NO: 972988 - RNA, 22 nt, Human
ccacugaaggucaacauagagc

SEQ ID NO: 972989 - RNA, 22 nt, Human
ccuggcagguggcgcccucggc

SEQ ID NO: 972990 - RNA, 22 nt, Human
auuauuauuguugauguuaggg

SEQ ID NO: 972991 - RNA, 22 nt, Human
gaauauuaguaucaguuauacc

SEQ ID NO: 972992 - RNA, 22 nt, Human
ugaaucauggauaaauagcuua

SEQ ID NO: 972993 - RNA, 22 nt, Human
ccuggccaguuuccaggcccug

SEQ ID NO: 972994 - RNA, 22 nt, Human
gggcagcagcaggaggucucug

SEQ ID NO: 972995 - RNA, 22 nt, Human
cugcacagagcagggcagacac

SEQ ID NO: 972996 - RNA, 22 nt, Human
ccugucugcagauaucucaggu

SEQ ID NO: 972997 - RNA, 22 nt, Human
gaaugugucacccugucccaug

SEQ ID NO: 972998 - RNA, 22 nt, Human
uuacaucuaaacugugaacaau

SEQ ID NO: 972999 - RNA, 22 nt, Human
cacucaggguacaauggagggc

SEQ ID NO: 973000 - RNA, 22 nt, Human
uaaauguguuguggaugaaguu

SEQ ID NO: 973001 - RNA, 22 nt, Human
guucacaagcugauugucuuuc

SEQ ID NO: 973002 - RNA, 22 nt, Human
agcaggguuccaggaguugcag

SEQ ID NO: 973003 - RNA, 22 nt, Human
aagauuuacuagcauaauagcu

SEQ ID NO: 973004 - RNA, 22 nt, Human
ugucucugagaugacucccacc

SEQ ID NO: 973005 - RNA, 22 nt, Human
aggacuucuccgauaagucaga

SEQ ID NO: 973006 - RNA, 22 nt, Human
cugcuguguuggcauuggauag

SEQ ID NO: 973007 - RNA, 22 nt, Human
aaaguuacuaucacaaugaaau

SEQ ID NO: 973008 - RNA, 22 nt, Human
uagucaaaccucagaauacccc

SEQ ID NO: 973009 - RNA, 22 nt, Human
auuuccuaggguagaugucaca

SEQ ID NO: 973010 - RNA, 22 nt, Human
acaggugaccugcucauaugaa

SEQ ID NO: 973011 - RNA, 21 nt, Human
ggggcagagcuaggcccugca

SEQ ID NO: 973012 - RNA, 17 nt, Human
ucagagggaugagcagg

SEQ ID NO: 973013 - RNA, 22 nt, Human
uuuuaauugcaauuaugguccc

SEQ ID NO: 973014 - RNA, 22 nt, Human
aaagucauuguaauauaugcua

SEQ ID NO: 973015 - RNA, 22 nt, Human
ggagauuuauagcacacuucag

SEQ ID NO: 973016 - RNA, 22 nt, Human
ugcucucucaggccuggcccac

SEQ ID NO: 973017 - RNA, 22 nt, Human
gugucacaagagcccaggaaac

SEQ ID NO: 973018 - RNA, 18 nt, Human
gcugagguggugucagag

SEQ ID NO: 973019 - RNA, 22 nt, Human
uaagauuuuuaaaauguccuca

SEQ ID NO: 973020 - RNA, 22 nt, Human
uugcauugauguuccuucuugc

SEQ ID NO: 973021 - RNA, 22 nt, Human
uuucaauguaugucuuucugag

SEQ ID NO: 973022 - RNA, 22 nt, Human
uauuuauaaucugccaaagaga

SEQ ID NO: 973023 - RNA, 22 nt, Human
cuguauuucccacauucucuau

SEQ ID NO: 973024 - RNA, 22 nt, Human
uuaugacaggaaaaucacagaa

SEQ ID NO: 973025 - RNA, 22 nt, Human
gcucaggaaggcucaaccagga

SEQ ID NO: 973026 - RNA, 22 nt, Human
ccagccuggagggcaguggugg

SEQ ID NO: 973027 - RNA, 20 nt, Human
uuugagaccagucugcccaa

SEQ ID NO: 973028 - RNA, 22 nt, Human
ugcugccauggucgcugguguc

SEQ ID NO: 973029 - RNA, 22 nt, Human
aagugccaucauagcauggcug

SEQ ID NO: 973030 - RNA, 22 nt, Human
auucucaaaacauaacuucacu

SEQ ID NO: 973031 - RNA, 22 nt, Human
uacuuuguggagauuaaaaaua

SEQ ID NO: 973032 - RNA, 22 nt, Human
gaugugggguugagggaccagc

SEQ ID NO: 973033 - RNA, 22 nt, Human
gugcugggcuccaccccagagg

SEQ ID NO: 973034 - RNA, 18 nt, Human
aagaggaggagcagguug

SEQ ID NO: 973035 - RNA, 22 nt, Human
gcucuggaagcaucugagagga

SEQ ID NO: 973036 - RNA, 22 nt, Human
ggucuuccgagaggccugugcu

SEQ ID NO: 973037 - RNA, 22 nt, Human
ccaugagcuucaacugacacag

SEQ ID NO: 973038 - RNA, 22 nt, Human
cugaggccuguguuggggcagu

SEQ ID NO: 973039 - RNA, 22 nt, Human
agcuucuugaccaagccuguaa

SEQ ID NO: 973040 - RNA, 21 nt, Human
gcucucugcaugguggcucag

SEQ ID NO: 973041 - RNA, 22 nt, Human
acuuuauuuccuauugcaucca

SEQ ID NO: 973042 - RNA, 17 nt, Human
auuucacuuagcaugag

SEQ ID NO: 973043 - RNA, 22 nt, Human
aaaguguggcacaagucacauc

SEQ ID NO: 973044 - RNA, 22 nt, Human
ccuguguggaaaccgcaugacg

SEQ ID NO: 973045 - RNA, 22 nt, Human
aaaugaguuuccucaauguccu

SEQ ID NO: 973046 - RNA, 22 nt, Human
cagcucuggcgucagggagcga

SEQ ID NO: 973047 - RNA, 22 nt, Human
gcuguucagaugcgauucagga

SEQ ID NO: 973048 - RNA, 22 nt, Human
gcacagcaauuucuauaagcuc

SEQ ID NO: 973049 - RNA, 22 nt, Human
guguuuccucacuucucugacu

SEQ ID NO: 973050 - RNA, 22 nt, Human
uggcugcugcuuggucuucuuc

SEQ ID NO: 973051 - RNA, 22 nt, Human
uaguaucuuucuauauuuccca

SEQ ID NO: 973052 - RNA, 22 nt, Human
auaucuuuguaugguucagcag

SEQ ID NO: 973053 - RNA, 22 nt, Human
ucaggauccauagacucccaaa

SEQ ID NO: 973054 - RNA, 22 nt, Human
aaugggagagaacacaaagucc

SEQ ID NO: 973055 - RNA, 22 nt, Human
cuggcugggagcgagcugcuca

SEQ ID NO: 973056 - RNA, 22 nt, Human
cccuggaggcuggaggcaguag

SEQ ID NO: 973057 - RNA, 22 nt, Human
aggcacugcuucuaaguaggaa

SEQ ID NO: 973058 - RNA, 22 nt, Human
auccaggcugcgggucucaagu

SEQ ID NO: 973059 - RNA, 22 nt, Human
gcaggggcuaaggacacagaga

SEQ ID NO: 973060 - RNA, 22 nt, Human
gucaccagucccagcuccugaa

SEQ ID NO: 973061 - RNA, 22 nt, Human
acuggcucagaguuccuagaga

SEQ ID NO: 973062 - RNA, 21 nt, Human
agcagccauggaugguaugua

SEQ ID NO: 973063 - RNA, 21 nt, Human
acugccugucuccauagucua

SEQ ID NO: 973064 - RNA, 19 nt, Human
aauguaguguuaugucaac

SEQ ID NO: 973065 - RNA, 21 nt, Human
uggcucaguugcugggcacag

SEQ ID NO: 973066 - RNA, 22 nt, Human
gugcauauguguguauacaaac

SEQ ID NO: 973067 - RNA, 22 nt, Human
gccccagcucugccacaacuag

SEQ ID NO: 973068 - RNA, 22 nt, Human
acagguggaggcuuuaggaggu

SEQ ID NO: 973069 - RNA, 22 nt, Human
cuggcacaugcucccugagugg

SEQ ID NO: 973070 - RNA, 22 nt, Human
uguccauggauagagcugcucg

SEQ ID NO: 973071 - RNA, 22 nt, Human
uuugaaguaccugguucugacu

SEQ ID NO: 973072 - RNA, 22 nt, Human
cagcugacccagugaggaggca

SEQ ID NO: 973073 - RNA, 22 nt, Human
uguaggacauguacuuguaaca

SEQ ID NO: 973074 - RNA, 22 nt, Human
ucaugccacuuacaaaauaaug

SEQ ID NO: 973075 - RNA, 17 nt, Human
uaugcuuuucuucucca

SEQ ID NO: 973076 - RNA, 22 nt, Human
acucugcugucugauggcagga

SEQ ID NO: 973077 - RNA, 21 nt, Human
aucagcaaaugccugucuccc

SEQ ID NO: 973078 - RNA, 22 nt, Human
cuuagaaauaaugguuucaguu

SEQ ID NO: 973079 - RNA, 22 nt, Human
cagggccacuguagaugaggag

SEQ ID NO: 973080 - RNA, 22 nt, Human
uaggauaugugaaaucauauua

SEQ ID NO: 973081 - RNA, 22 nt, Human
uccuucagggcugaccacaggc

SEQ ID NO: 973082 - RNA, 22 nt, Human
auauuagguuggugcaaaagua

SEQ ID NO: 973083 - RNA, 22 nt, Human
gagcugccugugugccaugaug

SEQ ID NO: 973084 - RNA, 22 nt, Human
auuuccucaugaucauaaugca

SEQ ID NO: 973085 - RNA, 22 nt, Human
cugccuggcauggagaagagaa

SEQ ID NO: 973086 - RNA, 22 nt, Human
gcaccuuuuucuaggagaaugu

SEQ ID NO: 973087 - RNA, 22 nt, Human
gaagccccaaacccucgccauc

SEQ ID NO: 973088 - RNA, 22 nt, Human
uggcugcugagaaggcagcugu

SEQ ID NO: 973089 - RNA, 22 nt, Human
uggggcuggggaucuugagccu

SEQ ID NO: 973090 - RNA, 22 nt, Human
cugccuuggaaaaugugguaau

SEQ ID NO: 973091 - RNA, 22 nt, Human
gaggcacugcaguacagugacu

SEQ ID NO: 973092 - RNA, 22 nt, Human
ccagcagcucccucaggguccg

SEQ ID NO: 973093 - RNA, 22 nt, Human
uuagauaaauuaagacuuuaca

SEQ ID NO: 973094 - RNA, 22 nt, Human
aggcauggcuuuaggcaggcgu

SEQ ID NO: 973095 - RNA, 21 nt, Human
uucuucaaagaagaaggcaca

SEQ ID NO: 973096 - RNA, 22 nt, Human
cuugugcauuucauuccucagg

SEQ ID NO: 973097 - RNA, 22 nt, Human
uccuucaagaugccacagcuuu

SEQ ID NO: 973098 - RNA, 22 nt, Human
uauagaaguaagcauugugaug

SEQ ID NO: 973099 - RNA, 20 nt, Human
aaaguguaagcauauaauua

SEQ ID NO: 973100 - RNA, 22 nt, Human
acuccuggguugcaguccucaa

SEQ ID NO: 973101 - RNA, 22 nt, Human
gggaggugauuaggaccaugua

SEQ ID NO: 973102 - RNA, 22 nt, Human
ugcugaaagucccaaaucucau

SEQ ID NO: 973103 - RNA, 22 nt, Human
caggaggcccaaagggcgcaga

SEQ ID NO: 973104 - RNA, 22 nt, Human
uggaaggcaugggaacuguucu

SEQ ID NO: 973105 - RNA, 18 nt, Human
ucagggaagagaauauga

SEQ ID NO: 973106 - RNA, 22 nt, Human
aaaugauugucaaaguucuguu

SEQ ID NO: 973107 - RNA, 22 nt, Human
gaugaaaaaagacgagcauaua

SEQ ID NO: 973108 - RNA, 22 nt, Human
aggccugaaggaagaugagcug

SEQ ID NO: 973109 - RNA, 22 nt, Human
gugcuuucugcugcauuccucu

SEQ ID NO: 973110 - RNA, 22 nt, Human
ugcugcugaucauuuauagucu

SEQ ID NO: 973111 - RNA, 22 nt, Human
agacaugagaaacccaccagag

SEQ ID NO: 973112 - RNA, 22 nt, Human
ugaggcagcccacuuuccuuag

SEQ ID NO: 973113 - RNA, 22 nt, Human
aaaccaaacauuugcgguggug

SEQ ID NO: 973114 - RNA, 23 nt, Human
gcugagguacauuuacaggaaga

SEQ ID NO: 973115 - RNA, 22 nt, Human
uuaaauauuuucagcaggguca

SEQ ID NO: 973116 - RNA, 22 nt, Human
uagggcuauaagagaauaagac

SEQ ID NO: 973117 - RNA, 22 nt, Human
ggaggcucugcuccguguguuc

SEQ ID NO: 973118 - RNA, 23 nt, Human
cugcuguuuucuguaccugaagc

SEQ ID NO: 973119 - RNA, 22 nt, Human
ccuggccacagggcucugcauu

SEQ ID NO: 973120 - RNA, 22 nt, Human
aggcucagauucacauuugguu

SEQ ID NO: 973121 - RNA, 22 nt, Human
gaagcccagggcguggccgggc

SEQ ID NO: 973122 - RNA, 19 nt, Human
agccagggugagaaggagc

SEQ ID NO: 973123 - RNA, 22 nt, Human
cagagcaguaaaucuggggcac

SEQ ID NO: 973124 - RNA, 22 nt, Human
ccugggagagucuguggucucc

SEQ ID NO: 973125 - RNA, 22 nt, Human
ugcuuuggaucuauuugcugag

SEQ ID NO: 973126 - RNA, 22 nt, Human
ggccucuguucugcauuccucc

SEQ ID NO: 973127 - RNA, 22 nt, Human
accccagcccugcuucugggag

SEQ ID NO: 973128 - RNA, 22 nt, Human
gccuucugaucgcuggacugac

SEQ ID NO: 973129 - RNA, 22 nt, Human
cagccagguucaaguccuuaua

SEQ ID NO: 973130 - RNA, 22 nt, Human
acucugcuaaauguaaguuggu

SEQ ID NO: 973131 - RNA, 22 nt, Human
uuuauuauagugguggggacug

SEQ ID NO: 973132 - RNA, 22 nt, Human
ggucaggguauaaucaagugag

SEQ ID NO: 973133 - RNA, 22 nt, Human
caggccuggagugcaauggcac

SEQ ID NO: 973134 - RNA, 22 nt, Human
guggcucuccauugacauggaa

SEQ ID NO: 973135 - RNA, 18 nt, Human
aggcagacacuagagguc

SEQ ID NO: 973136 - RNA, 22 nt, Human
caaauguguagagcuuuugggg

SEQ ID NO: 973137 - RNA, 22 nt, Human
aagcagaaaaacugagcuccaa

SEQ ID NO: 973138 - RNA, 22 nt, Human
uuggcaguaaaagaaaaugcuu

SEQ ID NO: 973139 - RNA, 22 nt, Human
ugaaggcccagccacagaaugg

SEQ ID NO: 973140 - RNA, 22 nt, Human
cuccugcgguacuacugugcuu

SEQ ID NO: 973141 - RNA, 22 nt, Human
uccagcagaccaucaaggcuca

SEQ ID NO: 973142 - RNA, 17 nt, Human
acacagccagguucucc

SEQ ID NO: 973143 - RNA, 22 nt, Human
uggcuuccgccgcgggccucgg

SEQ ID NO: 973144 - RNA, 22 nt, Human
gagccagcagccggcaccacca

SEQ ID NO: 973145 - RNA, 22 nt, Human
aaaauuauucauggcuuuugga

SEQ ID NO: 973146 - RNA, 22 nt, Human
ucaggcagaggauggggagcgu

SEQ ID NO: 973147 - RNA, 22 nt, Human
gggcagccucggugccugcugc

SEQ ID NO: 973148 - RNA, 22 nt, Human
cagaaguaagauuacugugaga

SEQ ID NO: 973149 - RNA, 20 nt, Human
aucagacuugcauuucagga

SEQ ID NO: 973150 - RNA, 19 nt, Human
aggguggcaaaggagggug

SEQ ID NO: 973151 - RNA, 22 nt, Human
uaaaugaagaaauggagauugu

SEQ ID NO: 973152 - RNA, 22 nt, Human
uuugcauucuagaaaaauuucu

SEQ ID NO: 973153 - RNA, 22 nt, Human
ccacagggugucaucagcuuga

SEQ ID NO: 973154 - RNA, 22 nt, Human
ccugugggaggggccuggcgcg

SEQ ID NO: 973155 - RNA, 22 nt, Human
cgcagaagagguugucuagucc

SEQ ID NO: 973156 - RNA, 22 nt, Human
agccagccgggggaccacagug

SEQ ID NO: 973157 - RNA, 22 nt, Human
gcauuccugagaaugcagagug

SEQ ID NO: 973158 - RNA, 22 nt, Human
uggcucaguuucugcccagcug

SEQ ID NO: 973159 - RNA, 22 nt, Human
ucugagccguauggcuuggcua

SEQ ID NO: 973160 - RNA, 22 nt, Human
gcugagcugcuguucauccugc

SEQ ID NO: 973161 - RNA, 21 nt, Human
uggcucugagccucauggcug

SEQ ID NO: 973162 - RNA, 22 nt, Human
uccauguggccagacacuggca

SEQ ID NO: 973163 - RNA, 22 nt, Human
ugaguucuaguggcugcagauu

SEQ ID NO: 973164 - RNA, 22 nt, Human
aggcagaaaauagucauccaaa

SEQ ID NO: 973165 - RNA, 22 nt, Human
cuuuggcaaggguuuuaauugu

SEQ ID NO: 973166 - RNA, 22 nt, Human
augcaaaagacuauuuguugcu

SEQ ID NO: 973167 - RNA, 22 nt, Human
cggggcugcgcucuuccugccg

SEQ ID NO: 973168 - RNA, 22 nt, Human
aguaggaggcgggagcaugaag

SEQ ID NO: 973169 - RNA, 22 nt, Human
ggcugcugaguuggccaggaga

SEQ ID NO: 973170 - RNA, 22 nt, Human
uauuagguuggugcaacaguaa

SEQ ID NO: 973171 - RNA, 22 nt, Human
ggagccuuccagacugcccaca

SEQ ID NO: 973172 - RNA, 22 nt, Human
ugugcagagcccacaggcagcu

SEQ ID NO: 973173 - RNA, 22 nt, Human
uuugaaaguccuaggagagucc

SEQ ID NO: 973174 - RNA, 22 nt, Human
cauugcacuccagcuugggcaa

SEQ ID NO: 973175 - RNA, 22 nt, Human
gcagcacauauaaacaaagaga

SEQ ID NO: 973176 - RNA, 18 nt, Human
gccuggcuucggagccgc

SEQ ID NO: 973177 - RNA, 21 nt, Human
ggcagcguguggacaggaagg

SEQ ID NO: 973178 - RNA, 22 nt, Human
guccaugauucugugacacccu

SEQ ID NO: 973179 - RNA, 22 nt, Human
ccuggcagacugugagggcagg

SEQ ID NO: 973180 - RNA, 22 nt, Human
ucagagaguuacacaaauuguu

SEQ ID NO: 973181 - RNA, 22 nt, Human
ccuggagcuuggucacgcugcg

SEQ ID NO: 973182 - RNA, 22 nt, Human
gcuguucauuagaaauagaaug

SEQ ID NO: 973183 - RNA, 22 nt, Human
aauugacagaaaguuuacgagg

SEQ ID NO: 973184 - RNA, 22 nt, Human
cugggaggauucauugagguga

SEQ ID NO: 973185 - RNA, 22 nt, Human
agcuagccuaggcagagugcau

SEQ ID NO: 973186 - RNA, 20 nt, Human
gcugccagugccugaugcuu

SEQ ID NO: 973187 - RNA, 22 nt, Human
ggcacugggugagggucacugg

SEQ ID NO: 973188 - RNA, 22 nt, Human
cccaggagagaggccaguuggc

SEQ ID NO: 973189 - RNA, 22 nt, Human
ccagagcccagggucaugcagg

SEQ ID NO: 973190 - RNA, 22 nt, Human
ccaggagagcucuaaauggcug

SEQ ID NO: 973191 - RNA, 22 nt, Human
uuuuaaucaugcuucuaugucc

SEQ ID NO: 973192 - RNA, 22 nt, Human
uuccauaacugaccgaaugcau

SEQ ID NO: 973193 - RNA, 22 nt, Human
ugggcagacauugaguuuguuc

SEQ ID NO: 973194 - RNA, 19 nt, Human
ggcugggucuggcagguuc

SEQ ID NO: 973195 - RNA, 22 nt, Human
uauuaggguaaauuugacaugc

SEQ ID NO: 973196 - RNA, 22 nt, Human
cugggagcuuuuagaaaugcag

SEQ ID NO: 973197 - RNA, 22 nt, Human
cugcagcuuuggaaaccuguuu

SEQ ID NO: 973198 - RNA, 22 nt, Human
acauuucuaauuuaauguaaca

SEQ ID NO: 973199 - RNA, 22 nt, Human
ucaggggaaaucucucagcgaa

SEQ ID NO: 973200 - RNA, 22 nt, Human
cuucugugauuugguuaggaua

SEQ ID NO: 973201 - RNA, 22 nt, Human
aaacuguauauuuauggcaugu

SEQ ID NO: 973202 - RNA, 22 nt, Human
cuuugaauuccaguacaauaac

SEQ ID NO: 973203 - RNA, 22 nt, Human
gaaaaguauguuuauuuugacu

SEQ ID NO: 973204 - RNA, 22 nt, Human
agcagccacagcagaucugagu

SEQ ID NO: 973205 - RNA, 22 nt, Human
cagcuggggcagccacgugcgg

SEQ ID NO: 973206 - RNA, 22 nt, Human
uugcaaaugaccauugccacau

SEQ ID NO: 973207 - RNA, 22 nt, Human
caaggaaaaagcgagcucgggg

SEQ ID NO: 973208 - RNA, 22 nt, Human
ggagcugcuuugaucugaagaa

SEQ ID NO: 973209 - RNA, 22 nt, Human
cuccugggcucaagugauccuc

SEQ ID NO: 973210 - RNA, 22 nt, Human
ccuggcugccgagugugcagcg

SEQ ID NO: 973211 - RNA, 22 nt, Human
ccucugccugcacaucauccug

SEQ ID NO: 973212 - RNA, 22 nt, Human
caggccuggcugcagcucgccu

SEQ ID NO: 973213 - RNA, 22 nt, Human
uaugcauaauuggauaaguaga

SEQ ID NO: 973214 - RNA, 22 nt, Human
augauacaucuucaugucagug

SEQ ID NO: 973215 - RNA, 22 nt, Human
gccuuccuuuuaccaccagcca

SEQ ID NO: 973216 - RNA, 22 nt, Human
uugccaggagcucaucugaggg

SEQ ID NO: 973217 - RNA, 19 nt, Human
agggaguuuauauuugcac

SEQ ID NO: 973218 - RNA, 22 nt, Human
cauuuguaauacugacuugcag

SEQ ID NO: 973219 - RNA, 22 nt, Human
ggucucuguugccuccaucaag

SEQ ID NO: 973220 - RNA, 22 nt, Human
agucccagugagaugaaccagg

SEQ ID NO: 973221 - RNA, 22 nt, Human
acaacuucucacagauaaauuu

SEQ ID NO: 973222 - RNA, 22 nt, Human
cccagcuccgagcuccgagccg

SEQ ID NO: 973223 - RNA, 22 nt, Human
aucuuucaaucaggaaaaaucu

SEQ ID NO: 973224 - RNA, 22 nt, Human
uugcaaaggggaauaaagcaau

SEQ ID NO: 973225 - RNA, 22 nt, Human
aggaagcuggugugaggaugaa

SEQ ID NO: 973226 - RNA, 22 nt, Human
agccagggacgcugcaggcuac

SEQ ID NO: 973227 - RNA, 20 nt, Human
uccaagcccuccuuccauuc

SEQ ID NO: 973228 - RNA, 22 nt, Human
caugagcugcugggagccuguc

SEQ ID NO: 973229 - RNA, 22 nt, Human
caggcucccugggcaguggcag

SEQ ID NO: 973230 - RNA, 22 nt, Human
cagaguccugcaccagcuccag

SEQ ID NO: 973231 - RNA, 22 nt, Human
uaacagaaauaguaggugaggg

SEQ ID NO: 973232 - RNA, 22 nt, Human
cuggaagaggaagccagcugga

SEQ ID NO: 973233 - RNA, 22 nt, Human
ugucugugaccucuuuggagcc

SEQ ID NO: 973234 - RNA, 22 nt, Human
agggcagcacaaggcauggacu

SEQ ID NO: 973235 - RNA, 22 nt, Human
gcaggagucacugacuuggucc

SEQ ID NO: 973236 - RNA, 22 nt, Human
ucucaggccccugaguuucucu

SEQ ID NO: 973237 - RNA, 21 nt, Human
gauuuuaaagagacugccaca

SEQ ID NO: 973238 - RNA, 22 nt, Human
aauaucaacaguguccuucuaa

SEQ ID NO: 973239 - RNA, 22 nt, Human
uggcuggggagccccgacuccc

SEQ ID NO: 973240 - RNA, 22 nt, Human
ggagugggcagcacugcccugu

SEQ ID NO: 973241 - RNA, 22 nt, Human
guuagaauaaaaggucagagag

SEQ ID NO: 973242 - RNA, 22 nt, Human
uuucuagggcucuugucuucug

SEQ ID NO: 973243 - RNA, 22 nt, Human
uuuuauuggagugauaccaagc

SEQ ID NO: 973244 - RNA, 23 nt, Human
uggagcugacagucagagggagg

SEQ ID NO: 973245 - RNA, 22 nt, Human
aaacuguaaacacagcaguaca

SEQ ID NO: 973246 - RNA, 22 nt, Human
gccugagagacccauggggcaa

SEQ ID NO: 973247 - RNA, 20 nt, Human
ggccgaaauaauaguggcuu

SEQ ID NO: 973248 - RNA, 22 nt, Human
agagccugcaucuagccucaga

SEQ ID NO: 973249 - RNA, 22 nt, Human
uguuuuuacugugauccagaaa

SEQ ID NO: 973250 - RNA, 20 nt, Human
cuuugccuauucucugccug

SEQ ID NO: 973251 - RNA, 22 nt, Human
ugggcugcccugaugguccuca

SEQ ID NO: 973252 - RNA, 22 nt, Human
uugcagcuucuaccacuguuuc

SEQ ID NO: 973253 - RNA, 22 nt, Human
cugggccucaaucucagaguuu

SEQ ID NO: 973254 - RNA, 22 nt, Human
acccaggagguggaggcugcag

SEQ ID NO: 973255 - RNA, 22 nt, Human
augcugugagugugccgcagag

SEQ ID NO: 973256 - RNA, 22 nt, Human
auugaaagauauacuguucuca

SEQ ID NO: 973257 - RNA, 22 nt, Human
ccaccagcuucagcagccgcgg

SEQ ID NO: 973258 - RNA, 22 nt, Human
uccuggcccaaucugcccauga

SEQ ID NO: 973259 - RNA, 22 nt, Human
aaugaaauguagcuuauccaua

SEQ ID NO: 973260 - RNA, 22 nt, Human
cuucuuuccuuccuccaguggc

SEQ ID NO: 973261 - RNA, 22 nt, Human
uuaauuuuuauguauagugugu

SEQ ID NO: 973262 - RNA, 22 nt, Human
gacggcagaaacucaugagguc

SEQ ID NO: 973263 - RNA, 22 nt, Human
aaauucuaugucaauguuuauu

SEQ ID NO: 973264 - RNA, 22 nt, Human
uuaucauugucgcagucuaauu

SEQ ID NO: 973265 - RNA, 22 nt, Human
gcaggauggugcccuuucugcc

SEQ ID NO: 973266 - RNA, 22 nt, Human
ggagcuggucagccuugagcau

SEQ ID NO: 973267 - RNA, 19 nt, Human
aguguguacugaaagcacu

SEQ ID NO: 973268 - RNA, 19 nt, Human
gcagcugcuugaaaagaaa

SEQ ID NO: 973269 - RNA, 21 nt, Human
gagugucuaauccaggcuguc

SEQ ID NO: 973270 - RNA, 19 nt, Human
ggcagaagguguaggggga

SEQ ID NO: 973271 - RNA, 22 nt, Human
cuuuuuaucucuuaaugauguu

SEQ ID NO: 973272 - RNA, 18 nt, Human
acaggccucaguccugca

SEQ ID NO: 973273 - RNA, 21 nt, Human
gcacagcaugaguguuggcau

SEQ ID NO: 973274 - RNA, 22 nt, Human
uguggcugacuccuggucccca

SEQ ID NO: 973275 - RNA, 22 nt, Human
ugcaccccauuuuacauuuaca

SEQ ID NO: 973276 - RNA, 22 nt, Human
cagggcagccaggccccguggg

SEQ ID NO: 973277 - RNA, 22 nt, Human
cucuccucugaaguggugaccc

SEQ ID NO: 973278 - RNA, 18 nt, Human
aaauguacuguccauggc

SEQ ID NO: 973279 - RNA, 18 nt, Human
ggcugagguugacuagaa

SEQ ID NO: 973280 - RNA, 22 nt, Human
ucuuguccuaagagcuggauuc

SEQ ID NO: 973281 - RNA, 22 nt, Human
ucuguaguagguuguaguucuu

SEQ ID NO: 973282 - RNA, 21 nt, Human
uuuauguacuucauagaguag

SEQ ID NO: 973283 - RNA, 22 nt, Human
uccaggagagguagaggguucc

SEQ ID NO: 973284 - RNA, 22 nt, Human
ccucugaguccucccugguugc

SEQ ID NO: 973285 - RNA, 21 nt, Human
ucaaagcacauauuugcacau

SEQ ID NO: 973286 - RNA, 22 nt, Human
cauuagaagaacaguuauauua

SEQ ID NO: 973287 - RNA, 22 nt, Human
uccugagauguggagcuccaug

SEQ ID NO: 973288 - RNA, 22 nt, Human
aagaaauaagacuucucugucc

SEQ ID NO: 973289 - RNA, 22 nt, Human
uuucccaguucccugcucuaua

SEQ ID NO: 973290 - RNA, 22 nt, Human
ugccaggcauauggccucuuug

SEQ ID NO: 973291 - RNA, 22 nt, Human
uggccuggugcucaggcaguag

SEQ ID NO: 973292 - RNA, 22 nt, Human
uggcagcauguuauguaaggaa

SEQ ID NO: 973293 - RNA, 22 nt, Human
ggcagggcuugucucugugaug

SEQ ID NO: 973294 - RNA, 22 nt, Human
acgcagaagggccuggcgugcc

SEQ ID NO: 973295 - RNA, 22 nt, Human
guuucuuaaauguagcaggacc

SEQ ID NO: 973296 - RNA, 22 nt, Human
uagccggguguugugucaugca

SEQ ID NO: 973297 - RNA, 22 nt, Human
cucccuggaggugagcuggcac

SEQ ID NO: 973298 - RNA, 22 nt, Human
ugaaggccucugguacaugcca

SEQ ID NO: 973299 - RNA, 21 nt, Human
aucauucuggaaaauucaagc

SEQ ID NO: 973300 - RNA, 22 nt, Human
ggcaggagggcggacaaugacc

SEQ ID NO: 973301 - RNA, 22 nt, Human
uauguacauaacaugaaaugca

SEQ ID NO: 973302 - RNA, 22 nt, Human
cagaggcaggaagaugggcagu

SEQ ID NO: 973303 - RNA, 22 nt, Human
ggccugcuuuccgagccugcag

SEQ ID NO: 973304 - RNA, 22 nt, Human
agaaaucaugacuaagagcagu

SEQ ID NO: 973305 - RNA, 22 nt, Human
ccagugcuucuuugcuagcugg

SEQ ID NO: 973306 - RNA, 22 nt, Human
aggcuuccuggaggaagaggua

SEQ ID NO: 973307 - RNA, 22 nt, Human
cauucauuuacuuucaacagcu

SEQ ID NO: 973308 - RNA, 22 nt, Human
aaugcucaaaauguuucaucua

SEQ ID NO: 973309 - RNA, 22 nt, Human
ccugggugaugugcugcccucg

SEQ ID NO: 973310 - RNA, 21 nt, Human
gcaugccugcaucuuaguguu

SEQ ID NO: 973311 - RNA, 22 nt, Human
uuugacaaaggaaaaaugcaca

SEQ ID NO: 973312 - RNA, 22 nt, Human
auguauuucuauguagugaaga

SEQ ID NO: 973313 - RNA, 22 nt, Human
cauuuguaucauauguaucuua

SEQ ID NO: 973314 - RNA, 22 nt, Human
ggugaguugggguucacagguc

SEQ ID NO: 973315 - RNA, 22 nt, Human
ccuaugccugucacucugcgcu

SEQ ID NO: 973316 - RNA, 22 nt, Human
gauggcaggugauagccgaguc

SEQ ID NO: 973317 - RNA, 22 nt, Human
cuggcagcucugagucccuucu

SEQ ID NO: 973318 - RNA, 22 nt, Human
ggcacagggagccgcaguugca

SEQ ID NO: 973319 - RNA, 22 nt, Human
uuccgcuggggccgccuggcgg

SEQ ID NO: 973320 - RNA, 22 nt, Human
aggcuggcuuggcucuccugug

SEQ ID NO: 973321 - RNA, 22 nt, Human
uaaaaaguugaaaggacuuauc

SEQ ID NO: 973322 - RNA, 22 nt, Human
cacagggcagugauuguccaca

SEQ ID NO: 973323 - RNA, 22 nt, Human
uaaguggaagguuauaugcuaa

SEQ ID NO: 973324 - RNA, 22 nt, Human
ucacucuggccucugcagcagu

SEQ ID NO: 973325 - RNA, 22 nt, Human
cagagaaaaaauccugcucuca

SEQ ID NO: 973326 - RNA, 22 nt, Human
uggugguuaugcgcuuuguggg

SEQ ID NO: 973327 - RNA, 22 nt, Human
aauggccagcaacaggagugaa

SEQ ID NO: 973328 - RNA, 22 nt, Human
cuuuauguccaccagacugcaa

SEQ ID NO: 973329 - RNA, 22 nt, Human
cauuuuauccucugggaagcua

SEQ ID NO: 973330 - RNA, 22 nt, Human
cugaaggauucaaaauggcagg

SEQ ID NO: 973331 - RNA, 22 nt, Human
ucaggagagagaaauuggggcu

SEQ ID NO: 973332 - RNA, 22 nt, Human
gccaggcucagcagucaaccug

SEQ ID NO: 973333 - RNA, 18 nt, Human
agagcagcggcaucacac

SEQ ID NO: 973334 - RNA, 22 nt, Human
gggcagaggcucuggcccaucc

SEQ ID NO: 973335 - RNA, 22 nt, Human
ggccucagaccggagcuggcca

SEQ ID NO: 973336 - RNA, 19 nt, Human
uucuccaggcugcagaggg

SEQ ID NO: 973337 - RNA, 22 nt, Human
gcagcagagaacacaaugaugg

SEQ ID NO: 973338 - RNA, 22 nt, Human
ccuuaaauucuccauuugaaag

SEQ ID NO: 973339 - RNA, 22 nt, Human
gugauuucagguuuuucauacu

SEQ ID NO: 973340 - RNA, 22 nt, Human
auucuuaauuccaaagacugag

SEQ ID NO: 973341 - RNA, 22 nt, Human
ggcugcagagcugggugggccu

SEQ ID NO: 973342 - RNA, 22 nt, Human
caggauggagaguuguugguug

SEQ ID NO: 973343 - RNA, 20 nt, Human
ucuggcaggugaacgagcug

SEQ ID NO: 973344 - RNA, 22 nt, Human
ggccaggagcugcacagggcuc

SEQ ID NO: 973345 - RNA, 22 nt, Human
agggcagagaaauguaguugag

SEQ ID NO: 973346 - RNA, 22 nt, Human
uauccaaaguuucucagaaacu

SEQ ID NO: 973347 - RNA, 22 nt, Human
cucuccagaucugcugagccag

SEQ ID NO: 973348 - RNA, 22 nt, Human
cagagcagguaucuuuggugaa

SEQ ID NO: 973349 - RNA, 22 nt, Human
ggauggagguucucagaugcuc

SEQ ID NO: 973350 - RNA, 22 nt, Human
gauggccuguauuugggccaga

SEQ ID NO: 973351 - RNA, 23 nt, Human
uccugagaugagacagugcugcc

SEQ ID NO: 973352 - RNA, 22 nt, Human
cuuucagagguuacucaggaaa

SEQ ID NO: 973353 - RNA, 22 nt, Human
auucuucaucacuaccuuguga

SEQ ID NO: 973354 - RNA, 22 nt, Human
ggccucacccaucggugccuuu

SEQ ID NO: 973355 - RNA, 22 nt, Human
aaugcacauaaauauggucuua

SEQ ID NO: 973356 - RNA, 22 nt, Human
gagugcagaugaacagaagauu

SEQ ID NO: 973357 - RNA, 22 nt, Human
accuuaaaacugacacauggag

SEQ ID NO: 973358 - RNA, 22 nt, Human
aaaaugaggucaauauccuuuu

SEQ ID NO: 973359 - RNA, 22 nt, Human
ugcagggcacacgcacgggugu

SEQ ID NO: 973360 - RNA, 22 nt, Human
ccucuggucccagcucugcugc

SEQ ID NO: 973361 - RNA, 22 nt, Human
agcuggcccucgagagccaauu

SEQ ID NO: 973362 - RNA, 22 nt, Human
aaaaagauguccugaaguuuag

SEQ ID NO: 973363 - RNA, 22 nt, Human
acauuuaaccaaacuguuuaau

SEQ ID NO: 973364 - RNA, 22 nt, Human
agggcugccugcucugcauuga

SEQ ID NO: 973365 - RNA, 22 nt, Human
ugcagaguaaaagcagaugcua

SEQ ID NO: 973366 - RNA, 22 nt, Human
gucccaggcuuauguggagcuu

SEQ ID NO: 973367 - RNA, 22 nt, Human
aagccagguguugugguaagag

SEQ ID NO: 973368 - RNA, 22 nt, Human
ugcugcacgauaaauaauuucu

SEQ ID NO: 973369 - RNA, 22 nt, Human
gcuggccugcugggcaccaccg

SEQ ID NO: 973370 - RNA, 22 nt, Human
acaggccacaguggagucucug

SEQ ID NO: 973371 - RNA, 22 nt, Human
agccagagagccccagguucua

SEQ ID NO: 973372 - RNA, 22 nt, Human
caggccugaguguggaagucuu

SEQ ID NO: 973373 - RNA, 22 nt, Human
aggaagcuaaccagggagugag

SEQ ID NO: 973374 - RNA, 22 nt, Human
ggcaucuccaaaacaugaacuc

SEQ ID NO: 973375 - RNA, 22 nt, Human
ccagcagagggucuuggccauu

SEQ ID NO: 973376 - RNA, 22 nt, Human
ugccugggagugaccaagacuc

SEQ ID NO: 973377 - RNA, 22 nt, Human
uuaggaguccagaugucuuggg

SEQ ID NO: 973378 - RNA, 22 nt, Human
uccaguggagugugggggugaa

SEQ ID NO: 973379 - RNA, 22 nt, Human
cccccagccagcagugcucagc

SEQ ID NO: 973380 - RNA, 18 nt, Human
auccuugaugagaggucu

SEQ ID NO: 973381 - RNA, 22 nt, Human
aggcucugugauccacaaugag

SEQ ID NO: 973382 - RNA, 21 nt, Human
auacauucuauuaagcauuua

SEQ ID NO: 973383 - RNA, 18 nt, Human
gucuggaggucaggagcu

SEQ ID NO: 973384 - RNA, 21 nt, Human
gaggccacuaauaggggcaga

SEQ ID NO: 973385 - RNA, 22 nt, Human
caaggagaguaauugaaugaga

SEQ ID NO: 973386 - RNA, 22 nt, Human
cugagccagagggagucggguc

SEQ ID NO: 973387 - RNA, 22 nt, Human
uccuugaaaggggcugcagggc

SEQ ID NO: 973388 - RNA, 22 nt, Human
cagcuuggaggaggaucuaaga

SEQ ID NO: 973389 - RNA, 22 nt, Human
aggagcuguuuuguucagcaaa

SEQ ID NO: 973390 - RNA, 22 nt, Human
aaggccugggaggccucucuuc

SEQ ID NO: 973391 - RNA, 22 nt, Human
aagucaauuuauguucucagac

SEQ ID NO: 973392 - RNA, 22 nt, Human
aaaguucugggggagaagaacg

SEQ ID NO: 973393 - RNA, 22 nt, Human
ucuggcuccaccuccuuuacua

SEQ ID NO: 973394 - RNA, 22 nt, Human
uagcuguguaagcuugguaaga

SEQ ID NO: 973395 - RNA, 22 nt, Human
ccugagacaugaaccaggcucc

SEQ ID NO: 973396 - RNA, 22 nt, Human
uagaaaugaauguuuaaaaguc

SEQ ID NO: 973397 - RNA, 22 nt, Human
ggugcagcugcagccugggagc

SEQ ID NO: 973398 - RNA, 22 nt, Human
ucagagugguagccuauuuucu

SEQ ID NO: 973399 - RNA, 22 nt, Human
acaaaugucuccucuuuuguua

SEQ ID NO: 973400 - RNA, 22 nt, Human
cuggccacuggagguggcaccc

SEQ ID NO: 973401 - RNA, 22 nt, Human
caaaaguaauugcaguuuuugc

SEQ ID NO: 973402 - RNA, 22 nt, Human
aucuacagugcacaggacagcc

SEQ ID NO: 973403 - RNA, 22 nt, Human
uguaugcaaauuuauuagcaca

SEQ ID NO: 973404 - RNA, 22 nt, Human
agagacugcgugucagcgcugg

SEQ ID NO: 973405 - RNA, 22 nt, Human
uugucccaggacuugcauagau

SEQ ID NO: 973406 - RNA, 22 nt, Human
cugccucuguugggcauggucu

SEQ ID NO: 973407 - RNA, 22 nt, Human
aauguacaaaagucagccaacu

SEQ ID NO: 973408 - RNA, 20 nt, Human
cucaguguggccugaguguu

SEQ ID NO: 973409 - RNA, 22 nt, Human
gagcacugauuuauuuuugucu

SEQ ID NO: 973410 - RNA, 22 nt, Human
gaggccagcuaguccaggaagu

SEQ ID NO: 973411 - RNA, 22 nt, Human
ucuggcucaucucuccagguaa

SEQ ID NO: 973412 - RNA, 22 nt, Human
ggcucagacucccaggcccucu

SEQ ID NO: 973413 - RNA, 23 nt, Human
uggaggaaacacaucagaagacc

SEQ ID NO: 973414 - RNA, 23 nt, Human
uucuuucaagaaguucacagugc

SEQ ID NO: 973415 - RNA, 22 nt, Human
auugucuuuggugcuuccagga

SEQ ID NO: 973416 - RNA, 22 nt, Human
agaggcugagaaacccucuucu

SEQ ID NO: 973417 - RNA, 22 nt, Human
uuucaguuuaugucuugaauua

SEQ ID NO: 973418 - RNA, 22 nt, Human
aaguugaagcaugaaccaaggu

SEQ ID NO: 973419 - RNA, 22 nt, Human
uggccugccccgagauccuggc

SEQ ID NO: 973420 - RNA, 22 nt, Human
uuuacugugcauuagaaucacc

SEQ ID NO: 973421 - RNA, 21 nt, Human
gcagagccggggcgagaaggc

SEQ ID NO: 973422 - RNA, 22 nt, Human
ugggagcagcagggagaugcgg

SEQ ID NO: 973423 - RNA, 22 nt, Human
ccagccuccauguagauagcug

SEQ ID NO: 973424 - RNA, 22 nt, Human
gcuggugagcaaaggagaagga

SEQ ID NO: 973425 - RNA, 20 nt, Human
uggagccacagucagguucc

SEQ ID NO: 973426 - RNA, 22 nt, Human
ugcugccaccugguggcugaag

SEQ ID NO: 973427 - RNA, 22 nt, Human
gccucugcaccaguacugugcc

SEQ ID NO: 973428 - RNA, 22 nt, Human
cagcugaguuuccaagucugcc

SEQ ID NO: 973429 - RNA, 22 nt, Human
ugggcacuguagcuggugcugg

SEQ ID NO: 973430 - RNA, 22 nt, Human
uuagauauguuuuugcuaaugc

SEQ ID NO: 973431 - RNA, 22 nt, Human
ggggauggaauguaguagugau

SEQ ID NO: 973432 - RNA, 18 nt, Human
uuucacaaccuccagagg

SEQ ID NO: 973433 - RNA, 22 nt, Human
uagcagaagaaauucagaguug

SEQ ID NO: 973434 - RNA, 22 nt, Human
ggagcugcucagagccaguccc

SEQ ID NO: 973435 - RNA, 22 nt, Human
acaauguaggauauguacuugu

SEQ ID NO: 973436 - RNA, 22 nt, Human
cagcaagauuuuuaaagcaagg

SEQ ID NO: 973437 - RNA, 22 nt, Human
uggcucugggaaucuguugcuu

SEQ ID NO: 973438 - RNA, 22 nt, Human
uccucacauggugagccacaca

SEQ ID NO: 973439 - RNA, 22 nt, Human
ucaggcaguagaauugcuugaa

SEQ ID NO: 973440 - RNA, 21 nt, Human
cauugucgacauuuuccccuc

SEQ ID NO: 973441 - RNA, 22 nt, Human
gcucugcugcuuacuagauggu

SEQ ID NO: 973442 - RNA, 22 nt, Human
cuucugaggcagcuauucaguu

SEQ ID NO: 973443 - RNA, 22 nt, Human
ugaaaugagcauuuauucuuua

SEQ ID NO: 973444 - RNA, 20 nt, Human
uguuccaagcuaaugaauga

SEQ ID NO: 973445 - RNA, 22 nt, Human
auuuguaagcuagagccaugau

SEQ ID NO: 973446 - RNA, 20 nt, Human
acaggagaucugaggaaagg

SEQ ID NO: 973447 - RNA, 22 nt, Human
cagugcaugaaacaauaugcag

SEQ ID NO: 973448 - RNA, 22 nt, Human
gaggcagcggcucacagagaaa

SEQ ID NO: 973449 - RNA, 18 nt, Human
gagagggaucccucagga

SEQ ID NO: 973450 - RNA, 22 nt, Human
gagggucccgagcccugucaga

SEQ ID NO: 973451 - RNA, 22 nt, Human
auguaucagaaauagcauuggc

SEQ ID NO: 973452 - RNA, 22 nt, Human
ccagggugaggaggcucccacg

SEQ ID NO: 973453 - RNA, 22 nt, Human
agugcacaccuuaguacaaagu

SEQ ID NO: 973454 - RNA, 22 nt, Human
gagcucagcacuaaaaucaugu

SEQ ID NO: 973455 - RNA, 22 nt, Human
ugacuucaaaggcucuacuccu

SEQ ID NO: 973456 - RNA, 22 nt, Human
ugcuugagacacauaugaauuu

SEQ ID NO: 973457 - RNA, 22 nt, Human
aaugauguauguauaaggcagg

SEQ ID NO: 973458 - RNA, 22 nt, Human
cuggccgguauuugccucuggg

SEQ ID NO: 973459 - RNA, 23 nt, Human
uccaggagaaccccugucugucc

SEQ ID NO: 973460 - RNA, 22 nt, Human
gcaaugauauugaagugaugaa

SEQ ID NO: 973461 - RNA, 21 nt, Human
agauuguauggaggugagagg

SEQ ID NO: 973462 - RNA, 22 nt, Human
uggcccugacugauguggaggg

SEQ ID NO: 973463 - RNA, 22 nt, Human
uggagcccagacacuggcauug

SEQ ID NO: 973464 - RNA, 22 nt, Human
aggauccuccuuagaaaagacc

SEQ ID NO: 973465 - RNA, 22 nt, Human
cagggcagagccaggauuucaa

SEQ ID NO: 973466 - RNA, 18 nt, Human
ucauuuguuuugcaugaa

SEQ ID NO: 973467 - RNA, 22 nt, Human
gaaggcuggcuuucugagagca

SEQ ID NO: 973468 - RNA, 22 nt, Human
cugcugcaggaugggcacucug

SEQ ID NO: 973469 - RNA, 22 nt, Human
gccucugcacuguggcacacca

SEQ ID NO: 973470 - RNA, 22 nt, Human
cagcagagcugggcuuugaauu

SEQ ID NO: 973471 - RNA, 22 nt, Human
ucacaaaagcuuuugaauuugg

SEQ ID NO: 973472 - RNA, 22 nt, Human
cuguccuccggccaccuacagu

SEQ ID NO: 973473 - RNA, 22 nt, Human
ucuuagaaguucauguuccagc

SEQ ID NO: 973474 - RNA, 22 nt, Human
gggaggaggaauguuuugugua

SEQ ID NO: 973475 - RNA, 22 nt, Human
auuuucagagacaucuggacuu

SEQ ID NO: 973476 - RNA, 22 nt, Human
cacugcuuucacaguuuguucc

SEQ ID NO: 973477 - RNA, 18 nt, Human
cuucagugacagucuggc

SEQ ID NO: 973478 - RNA, 22 nt, Human
agcaccugcuuaaugugcagug

SEQ ID NO: 973479 - RNA, 22 nt, Human
cuuccugaacaaugccaucaau

SEQ ID NO: 973480 - RNA, 22 nt, Human
uuccuuaguugacugucuuagu

SEQ ID NO: 973481 - RNA, 22 nt, Human
cugaggaagacagcagcugugu

SEQ ID NO: 973482 - RNA, 22 nt, Human
gccugugacucgucuugggcca

SEQ ID NO: 973483 - RNA, 22 nt, Human
uggaagcaucacuucuugccug

SEQ ID NO: 973484 - RNA, 19 nt, Human
agacacacuugauaugugu

SEQ ID NO: 973485 - RNA, 22 nt, Human
uaaauaaguucuucauuguuug

SEQ ID NO: 973486 - RNA, 22 nt, Human
gcucuguacgcaggaugagggg

SEQ ID NO: 973487 - RNA, 22 nt, Human
cugagccaccggcagggacauc

SEQ ID NO: 973488 - RNA, 22 nt, Human
aggcaggcucaggcccaugcuu

SEQ ID NO: 973489 - RNA, 22 nt, Human
uauuucagcacaugggauaggu

SEQ ID NO: 973490 - RNA, 22 nt, Human
ucagggacuuacaaaccagaag

SEQ ID NO: 973491 - RNA, 22 nt, Human
aggccuggccccaguugcuagg

SEQ ID NO: 973492 - RNA, 22 nt, Human
ccucucuguaagggucccuccc

SEQ ID NO: 973493 - RNA, 22 nt, Human
ccaagggcucugacuugccugc

SEQ ID NO: 973494 - RNA, 22 nt, Human
cccuggaggagcuuagagcuug

SEQ ID NO: 973495 - RNA, 22 nt, Human
agagaauuacagaagaauguca

SEQ ID NO: 973496 - RNA, 22 nt, Human
agauacauugaguuuccuccug

SEQ ID NO: 973497 - RNA, 22 nt, Human
agggugguucuuuuaguggaag

SEQ ID NO: 973498 - RNA, 22 nt, Human
ugaaaugagagcacagaauaaa

SEQ ID NO: 973499 - RNA, 20 nt, Human
cccaggagugagcagcuuua

SEQ ID NO: 973500 - RNA, 22 nt, Human
agaggccagguccagaguuugu

SEQ ID NO: 973501 - RNA, 22 nt, Human
uuuauuguuuagaagggggcug

SEQ ID NO: 973502 - RNA, 22 nt, Human
uugguuuacuaggauucaaauu

SEQ ID NO: 973503 - RNA, 22 nt, Human
aggaagcuagagccaccggacu

SEQ ID NO: 973504 - RNA, 23 nt, Human
ggaaagagaggaguugugcauag

SEQ ID NO: 973505 - RNA, 22 nt, Human
guccuggguccccgcaggucag

SEQ ID NO: 973506 - RNA, 22 nt, Human
caggcgagugaacagacucuca

SEQ ID NO: 973507 - RNA, 22 nt, Human
cccaggaggugugcccaacucg

SEQ ID NO: 973508 - RNA, 22 nt, Human
gcccagcuuuuugaggcaggca

SEQ ID NO: 973509 - RNA, 22 nt, Human
gcaucuaaacuugcaucauugu

SEQ ID NO: 973510 - RNA, 22 nt, Human
uagaaucuaguucauucauuug

SEQ ID NO: 973511 - RNA, 21 nt, Human
acagaggcauacagcuuaagg

SEQ ID NO: 973512 - RNA, 21 nt, Human
ggagucauuagucauuuccuu

SEQ ID NO: 973513 - RNA, 22 nt, Human
uaacagaaaggcucaggugcuc

SEQ ID NO: 973514 - RNA, 22 nt, Human
caggcacucagucuggaucccu

SEQ ID NO: 973515 - RNA, 22 nt, Human
guccuggcuuaguucgcuguaa

SEQ ID NO: 973516 - RNA, 22 nt, Human
cugccuggucucaggcaugggg

SEQ ID NO: 973517 - RNA, 22 nt, Human
agaggcacagaggcaguccccu

SEQ ID NO: 973518 - RNA, 22 nt, Human
ucacucugagaggucacuggaa

SEQ ID NO: 973519 - RNA, 22 nt, Human
ccuggcucucugcagauccugg

SEQ ID NO: 973520 - RNA, 22 nt, Human
aauuuuaaucaguggugcugag

SEQ ID NO: 973521 - RNA, 22 nt, Human
acagagcacugcccugugccgc

SEQ ID NO: 973522 - RNA, 22 nt, Human
acuggcagagguuggacaccau

SEQ ID NO: 973523 - RNA, 22 nt, Human
cagaggcuaagaugagugggug

SEQ ID NO: 973524 - RNA, 22 nt, Human
uuuacuguuuacagcuaaugca

SEQ ID NO: 973525 - RNA, 22 nt, Human
uuuguaagcaaguuaacauuuu

SEQ ID NO: 973526 - RNA, 22 nt, Human
ggguguguuccuaaggaaacca

SEQ ID NO: 973527 - RNA, 22 nt, Human
ggaugcugacuuuggagcaugg

SEQ ID NO: 973528 - RNA, 22 nt, Human
ugucucagaguaucccugaacu

SEQ ID NO: 973529 - RNA, 22 nt, Human
ccagagccuggcaucugcauaa

SEQ ID NO: 973530 - RNA, 22 nt, Human
ggccagcucuuguccacggagg

SEQ ID NO: 973531 - RNA, 22 nt, Human
gccaggcagcagcgaggauggu

SEQ ID NO: 973532 - RNA, 22 nt, Human
cuuggcugucuauaggaaagag

SEQ ID NO: 973533 - RNA, 22 nt, Human
ggagugucagaaacaguguccu

SEQ ID NO: 973534 - RNA, 22 nt, Human
aaauuucaagcaaaguagcuau

SEQ ID NO: 973535 - RNA, 22 nt, Human
gauucugagcugguguuuuacg

SEQ ID NO: 973536 - RNA, 21 nt, Human
uguaugcacgcacaugcacac

SEQ ID NO: 973537 - RNA, 22 nt, Human
cugcucucuguuccccuggauc

SEQ ID NO: 973538 - RNA, 22 nt, Human
cugcugcauuccucuuuaugag

SEQ ID NO: 973539 - RNA, 22 nt, Human
gccuggcaggggccugggagug

SEQ ID NO: 973540 - RNA, 22 nt, Human
cuguccccgcgaguccagagcu

SEQ ID NO: 973541 - RNA, 22 nt, Human
ugcagagguguugcugagauaa

SEQ ID NO: 973542 - RNA, 22 nt, Human
aggccagggucccacacucgca

SEQ ID NO: 973543 - RNA, 22 nt, Human
aaucagucauuagcucugaccu

SEQ ID NO: 973544 - RNA, 22 nt, Human
uucaaucauuagaaucucaggc

SEQ ID NO: 973545 - RNA, 22 nt, Human
gaguuuaaauaacacauuucca

SEQ ID NO: 973546 - RNA, 23 nt, Human
auaauaacgucugucuugucucu

SEQ ID NO: 973547 - RNA, 21 nt, Human
cccuugccugcacuccucggc

SEQ ID NO: 973548 - RNA, 21 nt, Human
uaaauaauaaguugcugagau

SEQ ID NO: 973549 - RNA, 22 nt, Human
uccagggauguccuguagcacu

SEQ ID NO: 973550 - RNA, 22 nt, Human
cuguacaggugaggagggggcu

SEQ ID NO: 973551 - RNA, 22 nt, Human
uccaggcauaaugcccaguggu

SEQ ID NO: 973552 - RNA, 22 nt, Human
cagcugccccgcuggcugacca

SEQ ID NO: 973553 - RNA, 22 nt, Human
agaugaaaauacgugacuuuaa

SEQ ID NO: 973554 - RNA, 22 nt, Human
uauuuauucauucagcaagcau

SEQ ID NO: 973555 - RNA, 22 nt, Human
agugcuuuaccuagauaauguu

SEQ ID NO: 973556 - RNA, 22 nt, Human
uagugcuuaacacaaagugauu

SEQ ID NO: 973557 - RNA, 22 nt, Human
uggggcgcgagguccuggcucc

SEQ ID NO: 973558 - RNA, 22 nt, Human
gccucugcgccucagccgaccu

SEQ ID NO: 973559 - RNA, 22 nt, Human
ugcauuauuugcaugugccugu

SEQ ID NO: 973560 - RNA, 22 nt, Human
ggcaaaaaccacaauuacuuuu

SEQ ID NO: 973561 - RNA, 22 nt, Human
gccaggcuggaaagaacagaca

SEQ ID NO: 973562 - RNA, 22 nt, Human
ggccuggcucuugcccagccug

SEQ ID NO: 973563 - RNA, 22 nt, Human
agagcuuagaauuucagaugau

SEQ ID NO: 973564 - RNA, 22 nt, Human
ugaggcagcuuuuucugugugu

SEQ ID NO: 973565 - RNA, 22 nt, Human
ugaaaugauaucugauaacaaa

SEQ ID NO: 973566 - RNA, 22 nt, Human
caaucagauaugugacauauuu

SEQ ID NO: 973567 - RNA, 22 nt, Human
uggcucagucuggguugacuga

SEQ ID NO: 973568 - RNA, 17 nt, Human
ggcugcugugcuggugc

SEQ ID NO: 973569 - RNA, 22 nt, Human
guccugucccccaaggcugugg

SEQ ID NO: 973570 - RNA, 22 nt, Human
gaccauuuuuacagagcauuca

SEQ ID NO: 973571 - RNA, 22 nt, Human
aaauugugcucacacugauauu

SEQ ID NO: 973572 - RNA, 22 nt, Human
aacuucuugguccugagcuguu

SEQ ID NO: 973573 - RNA, 22 nt, Human
uuugcaguagacaucuuauuuu

SEQ ID NO: 973574 - RNA, 22 nt, Human
uugcauugggagugaggagacc

SEQ ID NO: 973575 - RNA, 22 nt, Human
cgcuggggcuuuuugcuugaga

SEQ ID NO: 973576 - RNA, 22 nt, Human
uucugaaccauugagcacugcc

SEQ ID NO: 973577 - RNA, 22 nt, Human
uuccuucucagcccucgaggau

SEQ ID NO: 973578 - RNA, 18 nt, Human
gaggcagcuagcaauuuu

SEQ ID NO: 973579 - RNA, 22 nt, Human
augucacagcucccauuccucc

SEQ ID NO: 973580 - RNA, 17 nt, Human
ucuccuggcucuaucag

SEQ ID NO: 973581 - RNA, 22 nt, Human
agaauaguggcaaugacugcac

SEQ ID NO: 973582 - RNA, 22 nt, Human
cagcccugccauggagccuccu

SEQ ID NO: 973583 - RNA, 22 nt, Human
gagcagcucgagaaggaagcag

SEQ ID NO: 973584 - RNA, 19 nt, Human
uuuaggauaaagucuggac

SEQ ID NO: 973585 - RNA, 22 nt, Human
acuguucauauucuuagaaauu

SEQ ID NO: 973586 - RNA, 22 nt, Human
gccaggugcuaucccugcgcug

SEQ ID NO: 973587 - RNA, 19 nt, Human
cuggggcuuugguacugcc

SEQ ID NO: 973588 - RNA, 22 nt, Human
ggcagcuaguuuaagaaagagg

SEQ ID NO: 973589 - RNA, 22 nt, Human
ggucacaggggagaagagugau

SEQ ID NO: 973590 - RNA, 22 nt, Human
uaacacugguauuucauuuagu

SEQ ID NO: 973591 - RNA, 22 nt, Human
cccacucuggcucccuucuagu

SEQ ID NO: 973592 - RNA, 22 nt, Human
guugaaagaucauguggcugcc

SEQ ID NO: 973593 - RNA, 22 nt, Human
cuggcagcagcuucuggaucga

SEQ ID NO: 973594 - RNA, 22 nt, Human
ucuccuggaagaauaccacacu

SEQ ID NO: 973595 - RNA, 22 nt, Human
cagggugccucccgcucgccgg

SEQ ID NO: 973596 - RNA, 22 nt, Human
gcuggcuguguuucaucucuga

SEQ ID NO: 973597 - RNA, 22 nt, Human
uuauguagcagaaagauguuug

SEQ ID NO: 973598 - RNA, 22 nt, Human
guggcugcuaagucuccuuccu

SEQ ID NO: 973599 - RNA, 22 nt, Human
ugaagcagagaauuugacaguc

SEQ ID NO: 973600 - RNA, 22 nt, Human
uucauguauuuaucauguaaau

SEQ ID NO: 973601 - RNA, 22 nt, Human
ggaaaugacuuggugcuucguu

SEQ ID NO: 973602 - RNA, 22 nt, Human
uauaucaccaaaaacaguucug

SEQ ID NO: 973603 - RNA, 22 nt, Human
gucccagggaagaaggcagcac

SEQ ID NO: 973604 - RNA, 22 nt, Human
aaaucugguucaguaaguccuc

SEQ ID NO: 973605 - RNA, 22 nt, Human
uauuuccaaaagccuauuauga

SEQ ID NO: 973606 - RNA, 22 nt, Human
uacugccuggagcauuggugcu

SEQ ID NO: 973607 - RNA, 22 nt, Human
uuguuuaauaucgugaaguacu

SEQ ID NO: 973608 - RNA, 22 nt, Human
auuugucucugcacuuuacuca

SEQ ID NO: 973609 - RNA, 22 nt, Human
uuuaucagagauauguguggac

SEQ ID NO: 973610 - RNA, 22 nt, Human
caugcacagugauaucugaaga

SEQ ID NO: 973611 - RNA, 22 nt, Human
cugagcuggucuauggacuugg

SEQ ID NO: 973612 - RNA, 22 nt, Human
uuauccaagcagaagcugcaca

SEQ ID NO: 973613 - RNA, 22 nt, Human
agucucugcacaguaagaagca

SEQ ID NO: 973614 - RNA, 22 nt, Human
ccugggucuugguucaugcucu

SEQ ID NO: 973615 - RNA, 22 nt, Human
uggcagcuauuacaaggaaguc

SEQ ID NO: 973616 - RNA, 22 nt, Human
uauuauguagaguaaggguuaa

SEQ ID NO: 973617 - RNA, 22 nt, Human
cagcagguauguuuguucagca

SEQ ID NO: 973618 - RNA, 22 nt, Human
acaaaguuauucuuucagagga

SEQ ID NO: 973619 - RNA, 22 nt, Human
uuccucaucugugcaccucacu

SEQ ID NO: 973620 - RNA, 22 nt, Human
cucugugcccuacugcucagcu

SEQ ID NO: 973621 - RNA, 22 nt, Human
gagagucuaggaaccucauaua

SEQ ID NO: 973622 - RNA, 22 nt, Human
cugggaaggggaagguccucuc

SEQ ID NO: 973623 - RNA, 22 nt, Human
gggcauggaggucugucugcag

SEQ ID NO: 973624 - RNA, 22 nt, Human
ggacaagccugugaguggguuu

SEQ ID NO: 973625 - RNA, 22 nt, Human
guccucuggaagaugaguucuu

SEQ ID NO: 973626 - RNA, 22 nt, Human
ccuccagcgcgauccacuccgg

SEQ ID NO: 973627 - RNA, 22 nt, Human
agaaaugggccuugggacacaa

SEQ ID NO: 973628 - RNA, 22 nt, Human
uugaaaggguuaaagugguaaa

SEQ ID NO: 973629 - RNA, 22 nt, Human
agccaugcaccuuacucuugcu

SEQ ID NO: 973630 - RNA, 17 nt, Human
cagggcugucugccuag

SEQ ID NO: 973631 - RNA, 22 nt, Human
gagugaaaaaggaagggccaua

SEQ ID NO: 973632 - RNA, 22 nt, Human
cgcagggauuucaaggggccuu

SEQ ID NO: 973633 - RNA, 22 nt, Human
gagaggcuaugagguucugugu

SEQ ID NO: 973634 - RNA, 22 nt, Human
ggcugcagauagccagccacca

SEQ ID NO: 973635 - RNA, 22 nt, Human
cugucuguuuuaccuucuccag

SEQ ID NO: 973636 - RNA, 22 nt, Human
guccuggggauuauagaguguu

SEQ ID NO: 973637 - RNA, 17 nt, Human
gagugcugguggagcuc

SEQ ID NO: 973638 - RNA, 22 nt, Human
auggccuggggagcaugggaag

SEQ ID NO: 973639 - RNA, 22 nt, Human
gggcccuggggccugauuugca

SEQ ID NO: 973640 - RNA, 20 nt, Human
caguccaaucagaggccacc

SEQ ID NO: 973641 - RNA, 22 nt, Human
auuuuacuacuccaauuaauga

SEQ ID NO: 973642 - RNA, 22 nt, Human
ggggcacacuuuugguagauau

SEQ ID NO: 973643 - RNA, 22 nt, Human
ugaaaucugucccacuuuagcu

SEQ ID NO: 973644 - RNA, 22 nt, Human
ucuggagccuuggaugggaaag

SEQ ID NO: 973645 - RNA, 22 nt, Human
gugcagugagcagugcagcacc

SEQ ID NO: 973646 - RNA, 22 nt, Human
uuugacauugccaauuugcuca

SEQ ID NO: 973647 - RNA, 22 nt, Human
ccagccuucugagcugccugga

SEQ ID NO: 973648 - RNA, 17 nt, Human
gccuggcccagccuggc

SEQ ID NO: 973649 - RNA, 22 nt, Human
aauaaauguuaagauugucuca

SEQ ID NO: 973650 - RNA, 22 nt, Human
cauaacauccuugcuacuuuga

SEQ ID NO: 973651 - RNA, 22 nt, Human
uacaaagugagcaaccucuuuu

SEQ ID NO: 973652 - RNA, 22 nt, Human
gagccagcuauguagcaagagg

SEQ ID NO: 973653 - RNA, 22 nt, Human
ucacaggguuuggaagccuccu

SEQ ID NO: 973654 - RNA, 22 nt, Human
cuuuaagagaucaccaaucaca

SEQ ID NO: 973655 - RNA, 22 nt, Human
ugugucagaaggcaauggggau

SEQ ID NO: 973656 - RNA, 22 nt, Human
agagcuguagcuuccuagagcc

SEQ ID NO: 973657 - RNA, 22 nt, Human
aacuacuaccacagucaagaca

SEQ ID NO: 973658 - RNA, 22 nt, Human
ugaggggagcuagcaugccuug

SEQ ID NO: 973659 - RNA, 22 nt, Human
agggcugccauuucuggcccaa

SEQ ID NO: 973660 - RNA, 22 nt, Human
gcagcugcuggagggaggcagg

SEQ ID NO: 973661 - RNA, 22 nt, Human
ugucccagucaaggcugucauc

SEQ ID NO: 973662 - RNA, 22 nt, Human
uguagcucuccagccagcaagg

SEQ ID NO: 973663 - RNA, 22 nt, Human
agacuucucaguuuuauuagua

SEQ ID NO: 973664 - RNA, 22 nt, Human
cuuuggcacagucucauuugau

SEQ ID NO: 973665 - RNA, 22 nt, Human
ggaggccaaggcaggcggauca

SEQ ID NO: 973666 - RNA, 22 nt, Human
gucacacucagaaugacuagag

SEQ ID NO: 973667 - RNA, 22 nt, Human
uccauuuuagagaugaagaaac

SEQ ID NO: 973668 - RNA, 22 nt, Human
aggagggaccuaggaauauugc

SEQ ID NO: 973669 - RNA, 22 nt, Human
cacagggcuaaaugaaggguug

SEQ ID NO: 973670 - RNA, 22 nt, Human
gcaggaagcauagaagaaugcc

SEQ ID NO: 973671 - RNA, 22 nt, Human
cagguggggagaguguggagca

SEQ ID NO: 973672 - RNA, 22 nt, Human
gcugucugagaacaugguggaa

SEQ ID NO: 973673 - RNA, 23 nt, Human
gggcaguuauguuguccuuggcu

SEQ ID NO: 973674 - RNA, 22 nt, Human
ucuggccuacuggaguccauga

SEQ ID NO: 973675 - RNA, 22 nt, Human
ggccucaguuucuccauggguu

SEQ ID NO: 973676 - RNA, 22 nt, Human
aguggcaguagaugagcugguu

SEQ ID NO: 973677 - RNA, 22 nt, Human
auguauguuaguguauuaucua

SEQ ID NO: 973678 - RNA, 22 nt, Human
cagggcagaacauauagauagu

SEQ ID NO: 973679 - RNA, 19 nt, Human
ggccccucucacaggaguu

SEQ ID NO: 973680 - RNA, 22 nt, Human
aagcaauagcaacaacuuuaca

SEQ ID NO: 973681 - RNA, 22 nt, Human
augcaguaaaauaggagguaau

SEQ ID NO: 973682 - RNA, 22 nt, Human
cccaaggacacgggcagggaca

SEQ ID NO: 973683 - RNA, 22 nt, Human
gacuccugccuccucuguuugc

SEQ ID NO: 973684 - RNA, 22 nt, Human
uccauucauucauugaugaaca

SEQ ID NO: 973685 - RNA, 22 nt, Human
aaggagcuuguucgccuuccuc

SEQ ID NO: 973686 - RNA, 22 nt, Human
cagccuuuuaggacuauuugug

SEQ ID NO: 973687 - RNA, 22 nt, Human
gacagaagaggaacuuggacag

SEQ ID NO: 973688 - RNA, 22 nt, Human
augcacccagugucuggacuau

SEQ ID NO: 973689 - RNA, 22 nt, Human
ugaaguccuagaacuccuggua

SEQ ID NO: 973690 - RNA, 22 nt, Human
uuucagugcuucuguuuaccgg

SEQ ID NO: 973691 - RNA, 22 nt, Human
auaucaguaucuauguauuugu

SEQ ID NO: 973692 - RNA, 22 nt, Human
guggccugccgcaccccaauau

SEQ ID NO: 973693 - RNA, 22 nt, Human
aagcugcagacccccugucuca

SEQ ID NO: 973694 - RNA, 22 nt, Human
cagcaccaggcagaccuggagc

SEQ ID NO: 973695 - RNA, 22 nt, Human
aauuaacagagggcuuauuacu

SEQ ID NO: 973696 - RNA, 22 nt, Human
gggguugguuuaaaugcuugag

SEQ ID NO: 973697 - RNA, 21 nt, Human
cugagggccgcagcugggcuc

SEQ ID NO: 973698 - RNA, 22 nt, Human
uuauuuaauuuucucacucaga

SEQ ID NO: 973699 - RNA, 22 nt, Human
uugcacuaggaaaaggcagcca

SEQ ID NO: 973700 - RNA, 22 nt, Human
uccucccacauaggacaauggg

SEQ ID NO: 973701 - RNA, 22 nt, Human
uucaacuauuaugaauaaaauu

SEQ ID NO: 973702 - RNA, 22 nt, Human
accaggagccauagagucaggc

SEQ ID NO: 973703 - RNA, 18 nt, Human
agcugcagaccaggaggu

SEQ ID NO: 973704 - RNA, 22 nt, Human
aagaagagaaaugugcugcugg

SEQ ID NO: 973705 - RNA, 22 nt, Human
ugguccugccccgugcacagag

SEQ ID NO: 973706 - RNA, 22 nt, Human
guauuaggaggaacacaggccu

SEQ ID NO: 973707 - RNA, 22 nt, Human
uuauauaaagauaacuuuucuu

SEQ ID NO: 973708 - RNA, 22 nt, Human
auuuccagugcacugaauagaa

SEQ ID NO: 973709 - RNA, 23 nt, Human
gccugggacugguagugugaccu

SEQ ID NO: 973710 - RNA, 22 nt, Human
cugcuuugaaaauaaacuuguc

SEQ ID NO: 973711 - RNA, 22 nt, Human
cuggccaguuguccuggcuugg

SEQ ID NO: 973712 - RNA, 22 nt, Human
cagagguagccgagugcaaucg

SEQ ID NO: 973713 - RNA, 18 nt, Human
augcuuugcuuacguuau

SEQ ID NO: 973714 - RNA, 22 nt, Human
cuuugcaaacgauuaccacaug

SEQ ID NO: 973715 - RNA, 22 nt, Human
cugcccugggauggucugugcg

SEQ ID NO: 973716 - RNA, 22 nt, Human
cccaaggcauggcaugguggca

SEQ ID NO: 973717 - RNA, 22 nt, Human
augcugaggacaaagagaucaa

SEQ ID NO: 973718 - RNA, 19 nt, Human
ucugccucuggucaggcuc

SEQ ID NO: 973719 - RNA, 20 nt, Human
uauaacaguguugggugugu

SEQ ID NO: 973720 - RNA, 18 nt, Human
ggagagugagaucaaaca

SEQ ID NO: 973721 - RNA, 22 nt, Human
ucacaccuuuuagaauuacuau

SEQ ID NO: 973722 - RNA, 22 nt, Human
agcagcugagaugguaagauuc

SEQ ID NO: 973723 - RNA, 22 nt, Human
caggaugggauguagugggccc

SEQ ID NO: 973724 - RNA, 22 nt, Human
ggcagcaucucuggcagcagcu

SEQ ID NO: 973725 - RNA, 22 nt, Human
ucagaaguacugugcuacaaua

SEQ ID NO: 973726 - RNA, 22 nt, Human
gcagggacgccagggacagcaa

SEQ ID NO: 973727 - RNA, 22 nt, Human
cagggugccaaagaacaaauau

SEQ ID NO: 973728 - RNA, 22 nt, Human
gcucccagcuggagccucaaca

SEQ ID NO: 973729 - RNA, 22 nt, Human
acacauuauaggcaaucaaaag

SEQ ID NO: 973730 - RNA, 22 nt, Human
accaaacaaaauugugcacugu

SEQ ID NO: 973731 - RNA, 22 nt, Human
ugggggugaaagucuggacagu

SEQ ID NO: 973732 - RNA, 22 nt, Human
guucacaagaugugguggggag

SEQ ID NO: 973733 - RNA, 22 nt, Human
aauuuggcagugucuugaagua

SEQ ID NO: 973734 - RNA, 22 nt, Human
agaagccaacagggcaggagag

SEQ ID NO: 973735 - RNA, 22 nt, Human
cacuugggacaaagcuucugcu

SEQ ID NO: 973736 - RNA, 22 nt, Human
uggcaaggcugugggggcagag

SEQ ID NO: 973737 - RNA, 22 nt, Human
uuccaggauagcuuucaggaau

SEQ ID NO: 973738 - RNA, 22 nt, Human
ccacugaggcaggcaguaucua

SEQ ID NO: 973739 - RNA, 20 nt, Human
agcaguaggaccucugggcc

SEQ ID NO: 973740 - RNA, 22 nt, Human
uucauuccuucccuaagcaacu

SEQ ID NO: 973741 - RNA, 22 nt, Human
uugagggucuggaucugcugcu

SEQ ID NO: 973742 - RNA, 22 nt, Human
agcuggagcuucaagcagguaa

SEQ ID NO: 973743 - RNA, 22 nt, Human
ucaucuucuauuaauagggaga

SEQ ID NO: 973744 - RNA, 22 nt, Human
aaaugcacugaacacauguugu

SEQ ID NO: 973745 - RNA, 22 nt, Human
agcugggccugagcuggaagcu

SEQ ID NO: 973746 - RNA, 22 nt, Human
cugcugagguccuugcucagac

SEQ ID NO: 973747 - RNA, 22 nt, Human
ugcagugggccggaggccaggg

SEQ ID NO: 973748 - RNA, 22 nt, Human
agaaauguuuauggcugccuau

SEQ ID NO: 973749 - RNA, 22 nt, Human
auaauucagguuuucuggcaca

SEQ ID NO: 973750 - RNA, 22 nt, Human
agccuggaguucccaggagaag

SEQ ID NO: 973751 - RNA, 22 nt, Human
uucauucuugucuuuguauagu

SEQ ID NO: 973752 - RNA, 22 nt, Human
acacaaugcauauuuuuccaga

SEQ ID NO: 973753 - RNA, 22 nt, Human
gagcccaggcagagguugcagu

SEQ ID NO: 973754 - RNA, 23 nt, Human
uugauuucaaaugcagagaacac

SEQ ID NO: 973755 - RNA, 22 nt, Human
cugggcagugcagcuauagaac

SEQ ID NO: 973756 - RNA, 21 nt, Human
agaaaaaccagcauguuuuca

SEQ ID NO: 973757 - RNA, 21 nt, Human
gcaaggcuuuuguguuuccca

SEQ ID NO: 973758 - RNA, 22 nt, Human
uccaggaggcucugguugacgu

SEQ ID NO: 973759 - RNA, 22 nt, Human
uaaaugugggggccacgggcuu

SEQ ID NO: 973760 - RNA, 22 nt, Human
gcccucagaguuccccacagug

SEQ ID NO: 973761 - RNA, 22 nt, Human
uucacagauguauuggaacucc

SEQ ID NO: 973762 - RNA, 22 nt, Human
cauucuuacacaauauuuuaau

SEQ ID NO: 973763 - RNA, 22 nt, Human
aaggucauuuuuuccucuguug

SEQ ID NO: 973764 - RNA, 19 nt, Human
cccuggcaggcaagccugg

SEQ ID NO: 973765 - RNA, 20 nt, Human
cauuugaaucuccauucugc

SEQ ID NO: 973766 - RNA, 22 nt, Human
augucccuucuuuggugcucag

SEQ ID NO: 973767 - RNA, 22 nt, Human
gugguaauagagcuccaaacua

SEQ ID NO: 973768 - RNA, 22 nt, Human
aaaaugcuauuucauggaggag

SEQ ID NO: 973769 - RNA, 22 nt, Human
cugggccugucagggcuuuuug

SEQ ID NO: 973770 - RNA, 21 nt, Human
ggcagccucuguggaagggga

SEQ ID NO: 973771 - RNA, 22 nt, Human
uccuggccagaggacaaagcug

SEQ ID NO: 973772 - RNA, 22 nt, Human
aagauggagcacgagcagaagc

SEQ ID NO: 973773 - RNA, 22 nt, Human
cugcugcucgaccagucccagg

SEQ ID NO: 973774 - RNA, 22 nt, Human
uuucaguuuuugcucgauguau

SEQ ID NO: 973775 - RNA, 22 nt, Human
aguggcagagccaaguagagcc

SEQ ID NO: 973776 - RNA, 21 nt, Human
gccugccugcgugacccucuu

SEQ ID NO: 973777 - RNA, 22 nt, Human
guggagaccuccuaggaugugu

SEQ ID NO: 973778 - RNA, 19 nt, Human
acauuuaaauucagaucuc

SEQ ID NO: 973779 - RNA, 18 nt, Human
ucaaagucuggcuccacu

SEQ ID NO: 973780 - RNA, 22 nt, Human
uuuaauuaggaaaugggcaggg

SEQ ID NO: 973781 - RNA, 22 nt, Human
gcccacacaccagcucaggagg

SEQ ID NO: 973782 - RNA, 22 nt, Human
acuugggucaaguagcucacag

SEQ ID NO: 973783 - RNA, 22 nt, Human
cagugcauaaucuaaauggggg

SEQ ID NO: 973784 - RNA, 22 nt, Human
uuucuauagcuuucuugggagu

SEQ ID NO: 973785 - RNA, 22 nt, Human
ucuguaaauccugcucagcaac

SEQ ID NO: 973786 - RNA, 22 nt, Human
uccuggcccacuaugccagcau

SEQ ID NO: 973787 - RNA, 22 nt, Human
uccuuuccagccucaccucagc

SEQ ID NO: 973788 - RNA, 23 nt, Human
cuuuccuuucuuugacacccagc

SEQ ID NO: 973789 - RNA, 22 nt, Human
uagcuaucuguguccagaucca

SEQ ID NO: 973790 - RNA, 22 nt, Human
aggcagugcaugcaaaggucgg

SEQ ID NO: 973791 - RNA, 22 nt, Human
auguuucaccaguuuuauaaga

SEQ ID NO: 973792 - RNA, 22 nt, Human
cugugucuguggaauagcgaau

SEQ ID NO: 973793 - RNA, 22 nt, Human
gggaccaggugggugcauuccg

SEQ ID NO: 973794 - RNA, 22 nt, Human
cagacaugauguaagcagaggc

SEQ ID NO: 973795 - RNA, 22 nt, Human
cugcugucgccgagcugcaugc

SEQ ID NO: 973796 - RNA, 22 nt, Human
aaacuguaagagaauaaacuac

SEQ ID NO: 973797 - RNA, 22 nt, Human
caugcuuuaccaaagcagugau

SEQ ID NO: 973798 - RNA, 22 nt, Human
gcugccuuuuaaagccucgcuu

SEQ ID NO: 973799 - RNA, 22 nt, Human
aagauguaucaguuaagucuuc

SEQ ID NO: 973800 - RNA, 22 nt, Human
gcuguccaugucuggccucagu

SEQ ID NO: 973801 - RNA, 22 nt, Human
uguuuuuaaauaaugauagaaa

SEQ ID NO: 973802 - RNA, 22 nt, Human
ugucccagacauaaguggacau

SEQ ID NO: 973803 - RNA, 22 nt, Human
guugacagcuggugagcugcua

SEQ ID NO: 973804 - RNA, 22 nt, Human
ccucucccacguggcagaggcu

SEQ ID NO: 973805 - RNA, 22 nt, Human
uauccuuguacuauaguauuua

SEQ ID NO: 973806 - RNA, 22 nt, Human
aagagcuggucacagguccauu

SEQ ID NO: 973807 - RNA, 22 nt, Human
uuucuucaauugcuaacaagga

SEQ ID NO: 973808 - RNA, 22 nt, Human
cagagcuggagaaguggauuua

SEQ ID NO: 973809 - RNA, 22 nt, Human
gggccccaaaaugccaggcucu

SEQ ID NO: 973810 - RNA, 22 nt, Human
aaagauuaaaucaaauugguca

SEQ ID NO: 973811 - RNA, 20 nt, Human
uugauucaagggcugaugga

SEQ ID NO: 973812 - RNA, 22 nt, Human
ccuggccuccuggccuucucau

SEQ ID NO: 973813 - RNA, 21 nt, Human
guggcccugguguggcugcac

SEQ ID NO: 973814 - RNA, 22 nt, Human
ccuggcagcuaagugcuuugag

SEQ ID NO: 973815 - RNA, 22 nt, Human
agacagugcaagaagagcaggc

SEQ ID NO: 973816 - RNA, 22 nt, Human
acagcagagacacucaggaggc

SEQ ID NO: 973817 - RNA, 22 nt, Human
cagggccagccgcagcauccac

SEQ ID NO: 973818 - RNA, 22 nt, Human
acccaggauagagugcugcagu

SEQ ID NO: 973819 - RNA, 22 nt, Human
guggcugcuacagagcuggagg

SEQ ID NO: 973820 - RNA, 22 nt, Human
uggccuuguguuuuagagaaag

SEQ ID NO: 973821 - RNA, 22 nt, Human
uuuuaaguuaauauaauugagg

SEQ ID NO: 973822 - RNA, 22 nt, Human
uucuucaaugugcccuguuuuc

SEQ ID NO: 973823 - RNA, 22 nt, Human
aaggaaccuggaguagagggag

SEQ ID NO: 973824 - RNA, 22 nt, Human
gcuucccacagcuggacugggg

SEQ ID NO: 973825 - RNA, 22 nt, Human
auuuugaaaccaaguuauuucc

SEQ ID NO: 973826 - RNA, 22 nt, Human
gcucccagggaccgcagggcag

SEQ ID NO: 973827 - RNA, 22 nt, Human
cagaaauguuuauauguggugu

SEQ ID NO: 973828 - RNA, 22 nt, Human
auggagggugguaagacagaga

SEQ ID NO: 973829 - RNA, 22 nt, Human
ccugucagcugauggcuaugua

SEQ ID NO: 973830 - RNA, 22 nt, Human
uuucacaacguuguggugagag

SEQ ID NO: 973831 - RNA, 22 nt, Human
guggccaauaggagcagcuauc

SEQ ID NO: 973832 - RNA, 22 nt, Human
auccuugagccuuaucuuuugu

SEQ ID NO: 973833 - RNA, 22 nt, Human
ggaggccaaagugugggcggcu

SEQ ID NO: 973834 - RNA, 18 nt, Human
aaacuggcuuggccugug

SEQ ID NO: 973835 - RNA, 22 nt, Human
cugggagcgcagcaggcacaac

SEQ ID NO: 973836 - RNA, 22 nt, Human
gaacccaaaccuggaccucccu

SEQ ID NO: 973837 - RNA, 22 nt, Human
cagcuuggcuuccgcuuuacug

SEQ ID NO: 973838 - RNA, 22 nt, Human
aucuggcuuuuacugaauugcu

SEQ ID NO: 973839 - RNA, 22 nt, Human
uuuaacacuaguuucuuuaacu

SEQ ID NO: 973840 - RNA, 20 nt, Human
ucauugcacauaauggaagc

SEQ ID NO: 973841 - RNA, 22 nt, Human
ugaggcuguucuaccagggcca

SEQ ID NO: 973842 - RNA, 22 nt, Human
cugcuguggaugcaggaccuca

SEQ ID NO: 973843 - RNA, 17 nt, Human
ggccuugggcugcucuu

SEQ ID NO: 973844 - RNA, 22 nt, Human
ugcagaggugaaagacuagcaa

SEQ ID NO: 973845 - RNA, 22 nt, Human
gugucccaaagauuagaaauca

SEQ ID NO: 973846 - RNA, 22 nt, Human
ccagggcagccaacccagaugc

SEQ ID NO: 973847 - RNA, 22 nt, Human
ggacaggguaaguacuagugug

SEQ ID NO: 973848 - RNA, 22 nt, Human
uauuucagucacuucuucucug

SEQ ID NO: 973849 - RNA, 22 nt, Human
uuuuugcaccaaccuaauagaa

SEQ ID NO: 973850 - RNA, 22 nt, Human
uauguacauguuaaagggcaaa

SEQ ID NO: 973851 - RNA, 20 nt, Human
ggcagcuugggcagcaguua

SEQ ID NO: 973852 - RNA, 22 nt, Human
gggcagcucagccaccaugcag

SEQ ID NO: 973853 - RNA, 22 nt, Human
ugugacaugugucaucuuuucu

SEQ ID NO: 973854 - RNA, 22 nt, Human
caggcugcagugcaguggcuau

SEQ ID NO: 973855 - RNA, 22 nt, Human
agggggugucucugauuggguu

SEQ ID NO: 973856 - RNA, 22 nt, Human
cucugggcaaguaugauagaaa

SEQ ID NO: 973857 - RNA, 20 nt, Human
aggagaugauccagagucag

SEQ ID NO: 973858 - RNA, 22 nt, Human
gaaugcagauggcugguguaug

SEQ ID NO: 973859 - RNA, 22 nt, Human
uccagggagauacuggcugcca

SEQ ID NO: 973860 - RNA, 22 nt, Human
uuugacagcuuguuacaaaguu

SEQ ID NO: 973861 - RNA, 22 nt, Human
aggugccagcucucaggcagga

SEQ ID NO: 973862 - RNA, 22 nt, Human
ucaaacuagccugacugguauu

SEQ ID NO: 973863 - RNA, 22 nt, Human
ucaaguauaucuagucauuagg

SEQ ID NO: 973864 - RNA, 22 nt, Human
caggugcuguccugcacauguc

SEQ ID NO: 973865 - RNA, 21 nt, Human
uugcaccaugauaaauucaga

SEQ ID NO: 973866 - RNA, 22 nt, Human
ggcagcuccuccuagucugccc

SEQ ID NO: 973867 - RNA, 22 nt, Human
uuuauuauccaguguugucaug

SEQ ID NO: 973868 - RNA, 20 nt, Human
ugaaaggugggaauuguggg

SEQ ID NO: 973869 - RNA, 22 nt, Human
cuccugaguaguagcauuguca

SEQ ID NO: 973870 - RNA, 21 nt, Human
cugcuguggcccccgacaugc

SEQ ID NO: 973871 - RNA, 22 nt, Human
agaggccuaaccaagauguccu

SEQ ID NO: 973872 - RNA, 22 nt, Human
ucacucugggcccuacugggcu

SEQ ID NO: 973873 - RNA, 21 nt, Human
ucucuggaauuagaccauguu

SEQ ID NO: 973874 - RNA, 22 nt, Human
aaagccaugaauguuauagagg

SEQ ID NO: 973875 - RNA, 22 nt, Human
ccaggcagccaagugugugugu

SEQ ID NO: 973876 - RNA, 21 nt, Human
ugaaaguuggagucaaaugua

SEQ ID NO: 973877 - RNA, 22 nt, Human
agggcagcucucaccucuggcc

SEQ ID NO: 973878 - RNA, 22 nt, Human
aaaaucaguacacuuuauuuug

SEQ ID NO: 973879 - RNA, 22 nt, Human
ccugcucagagcgucuugugug

SEQ ID NO: 973880 - RNA, 22 nt, Human
ucauuucaaguucugacagcua

SEQ ID NO: 973881 - RNA, 22 nt, Human
accagagcuggcagaguaucaa

SEQ ID NO: 973882 - RNA, 22 nt, Human
cccaggagguggagguugcagu

SEQ ID NO: 973883 - RNA, 22 nt, Human
agcugccugggcuuguacaccu

SEQ ID NO: 973884 - RNA, 22 nt, Human
aagauucuacaguagguacauu

SEQ ID NO: 973885 - RNA, 22 nt, Human
guggagcccugguagggacccc

SEQ ID NO: 973886 - RNA, 17 nt, Human
acucugcugaaguagaa

SEQ ID NO: 973887 - RNA, 22 nt, Human
ugggagccauuuuagaggcugc

SEQ ID NO: 973888 - RNA, 22 nt, Human
ucagaaaugaucguuauucauu

SEQ ID NO: 973889 - RNA, 19 nt, Human
gcagccaccgcggcggccg

SEQ ID NO: 973890 - RNA, 22 nt, Human
augugaggcagcacggagauua

SEQ ID NO: 973891 - RNA, 22 nt, Human
gaagaagcaggaguguguagca

SEQ ID NO: 973892 - RNA, 22 nt, Human
auguuuaaauuuauagacagug

SEQ ID NO: 973893 - RNA, 22 nt, Human
ccuggcucuguccucgcgcaaa

SEQ ID NO: 973894 - RNA, 22 nt, Human
uggcuuccuggacagaugcggu

SEQ ID NO: 973895 - RNA, 22 nt, Human
uguguuaauuccacaaacauuc

SEQ ID NO: 973896 - RNA, 22 nt, Human
cugggccuagcaacagaggagu

SEQ ID NO: 973897 - RNA, 22 nt, Human
gagggcagugaauuuugaagcu

SEQ ID NO: 973898 - RNA, 22 nt, Human
uucucagauauuuacugagcau

SEQ ID NO: 973899 - RNA, 22 nt, Human
gccuggcccagggcucuuguug

SEQ ID NO: 973900 - RNA, 22 nt, Human
auauauuugagaauauucauga

SEQ ID NO: 973901 - RNA, 22 nt, Human
gaugaaaaucuugagaugucga

SEQ ID NO: 973902 - RNA, 21 nt, Human
aaggaaaagcuuggucucuga

SEQ ID NO: 973903 - RNA, 22 nt, Human
cacagguguucuugcagugaaa

SEQ ID NO: 973904 - RNA, 22 nt, Human
ggucauugucagagccuguacu

SEQ ID NO: 973905 - RNA, 22 nt, Human
aggcucagcaucugauucauau

SEQ ID NO: 973906 - RNA, 22 nt, Human
aggucauugaaguuauuuucuu

SEQ ID NO: 973907 - RNA, 22 nt, Human
uuuguuaaauauuuauugagug

SEQ ID NO: 973908 - RNA, 22 nt, Human
uagcacauuguugaccagaagg

SEQ ID NO: 973909 - RNA, 20 nt, Human
gcuuucaagcuugucauugu

SEQ ID NO: 973910 - RNA, 22 nt, Human
ccucccuggccagagcagcagc

SEQ ID NO: 973911 - RNA, 22 nt, Human
cugggcugcaguuccugguccu

SEQ ID NO: 973912 - RNA, 21 nt, Human
cucuggagucaagagcuucca

SEQ ID NO: 973913 - RNA, 22 nt, Human
aguguuccacacaucuggggaa

SEQ ID NO: 973914 - RNA, 22 nt, Human
gcugccugguuucucagcugca

SEQ ID NO: 973915 - RNA, 22 nt, Human
gcuuccuaaaugcacagggcag

SEQ ID NO: 973916 - RNA, 22 nt, Human
guuuuuccugcugacuuggguc

SEQ ID NO: 973917 - RNA, 22 nt, Human
acagaauugauggaaaucucag

SEQ ID NO: 973918 - RNA, 22 nt, Human
ccuguucaccauggucacgugc

SEQ ID NO: 973919 - RNA, 22 nt, Human
cucagcagcagggaagagguca

SEQ ID NO: 973920 - RNA, 22 nt, Human
aaguucaaggcucuagaguucc

SEQ ID NO: 973921 - RNA, 22 nt, Human
gucaggauguuuauucuccagu

SEQ ID NO: 973922 - RNA, 22 nt, Human
cagacagcugcuuucuugcugu

SEQ ID NO: 973923 - RNA, 22 nt, Human
agauuccagaucccaaaaauga

SEQ ID NO: 973924 - RNA, 22 nt, Human
ggcaagcucaggccucaggugu

SEQ ID NO: 973925 - RNA, 17 nt, Human
uucaagauauugaaaug

SEQ ID NO: 973926 - RNA, 22 nt, Human
ugcagcagcagggaggaggcuc

SEQ ID NO: 973927 - RNA, 22 nt, Human
cuuuauuagauguagacuuucu

SEQ ID NO: 973928 - RNA, 22 nt, Human
ggcuucccuuuccgagaggaga

SEQ ID NO: 973929 - RNA, 22 nt, Human
ugaggcaguucuuacuuguauu

SEQ ID NO: 973930 - RNA, 22 nt, Human
aagcacaaugaacaucuuagau

SEQ ID NO: 973931 - RNA, 22 nt, Human
caggcaggagccagggauucca

SEQ ID NO: 973932 - RNA, 22 nt, Human
cucaggagaugacagaagguau

SEQ ID NO: 973933 - RNA, 22 nt, Human
cagcuuccauaagagauggaga

SEQ ID NO: 973934 - RNA, 22 nt, Human
agaggccagggacacugcucaa

SEQ ID NO: 973935 - RNA, 22 nt, Human
aaucuucacagaaaaaugucug

SEQ ID NO: 973936 - RNA, 22 nt, Human
aggagcagcccacuccuguccu

SEQ ID NO: 973937 - RNA, 22 nt, Human
agcuggagaugcccagcaccgg

SEQ ID NO: 973938 - RNA, 21 nt, Human
cuguggaagggaacuagaggg

SEQ ID NO: 973939 - RNA, 22 nt, Human
agagccuguuuugugggagaug

SEQ ID NO: 973940 - RNA, 22 nt, Human
ucuuagcauuucauaacaacug

SEQ ID NO: 973941 - RNA, 19 nt, Human
ccuggguccacucagacua

SEQ ID NO: 973942 - RNA, 22 nt, Human
ggcagagaugugggucagaauc

SEQ ID NO: 973943 - RNA, 22 nt, Human
ucuuacauauacgucauuuagu

SEQ ID NO: 973944 - RNA, 22 nt, Human
aaggcacuagcaagcugccugg

SEQ ID NO: 973945 - RNA, 22 nt, Human
ucucuucuaauuuucccgagua

SEQ ID NO: 973946 - RNA, 22 nt, Human
ccagcucuuggugcacuuacau

SEQ ID NO: 973947 - RNA, 22 nt, Human
aaaucaaaagacauguguuuua

SEQ ID NO: 973948 - RNA, 22 nt, Human
uaacagaagagcaggcagcccu

SEQ ID NO: 973949 - RNA, 20 nt, Human
ugaaggccagcagcauaggg

SEQ ID NO: 973950 - RNA, 22 nt, Human
gggccuggcaugcagccccguu

SEQ ID NO: 973951 - RNA, 22 nt, Human
auuuaucaccaguuagcugacu

SEQ ID NO: 973952 - RNA, 22 nt, Human
aggcuggcgucaggggcuguac

SEQ ID NO: 973953 - RNA, 22 nt, Human
uugcauguguaauuuuucuaaa

SEQ ID NO: 973954 - RNA, 22 nt, Human
ucccagagcucuggagguugga

SEQ ID NO: 973955 - RNA, 20 nt, Human
ucauuucuugggguuccaag

SEQ ID NO: 973956 - RNA, 22 nt, Human
cagagcuggagcuugaauggag

SEQ ID NO: 973957 - RNA, 22 nt, Human
ucucucuuuuuaaucauguaau

SEQ ID NO: 973958 - RNA, 22 nt, Human
ggcuucuuccugugaacauguu

SEQ ID NO: 973959 - RNA, 22 nt, Human
ucauugcaguugaguuguguua

SEQ ID NO: 973960 - RNA, 22 nt, Human
uccuuggcaugccgucuucucc

SEQ ID NO: 973961 - RNA, 22 nt, Human
cccagccugugacagccguccu

SEQ ID NO: 973962 - RNA, 21 nt, Human
aacugcuggucuuuucugucu

SEQ ID NO: 973963 - RNA, 22 nt, Human
uggcaaacuggaggaagcccug

SEQ ID NO: 973964 - RNA, 22 nt, Human
agcaggugcauggcgagcgcgg

SEQ ID NO: 973965 - RNA, 22 nt, Human
uuuauguuugacaaugaucugg

SEQ ID NO: 973966 - RNA, 22 nt, Human
gagagugagauccuccugggga

SEQ ID NO: 973967 - RNA, 22 nt, Human
auauuaggugcucaauacaugc

SEQ ID NO: 973968 - RNA, 22 nt, Human
cauuucugugacacuuccaucu

SEQ ID NO: 973969 - RNA, 22 nt, Human
ccugacgaaaggcgugcuggag

SEQ ID NO: 973970 - RNA, 22 nt, Human
uacagccucacauuuacuuaca

SEQ ID NO: 973971 - RNA, 22 nt, Human
uagcugccagaccauucuuacu

SEQ ID NO: 973972 - RNA, 22 nt, Human
aggcuagcuuuggcucaguaaa

SEQ ID NO: 973973 - RNA, 22 nt, Human
ccucugaggucauggacuuggc

SEQ ID NO: 973974 - RNA, 17 nt, Human
gcagcagagagacccuc

SEQ ID NO: 973975 - RNA, 22 nt, Human
gcagggucugaggccacagagg

SEQ ID NO: 973976 - RNA, 22 nt, Human
aggccaaagcacagagcuggaa

SEQ ID NO: 973977 - RNA, 22 nt, Human
ccaggugguucaggucaccaua

SEQ ID NO: 973978 - RNA, 22 nt, Human
aaaaaugcugugguagcugugu

SEQ ID NO: 973979 - RNA, 22 nt, Human
uccugggcuuaagugauccucc

SEQ ID NO: 973980 - RNA, 22 nt, Human
auggccaaagccacagcagagg

SEQ ID NO: 973981 - RNA, 22 nt, Human
ggaggggcagccauggaacucc

SEQ ID NO: 973982 - RNA, 22 nt, Human
ccuuugggugaauuccucucuu

SEQ ID NO: 973983 - RNA, 22 nt, Human
gagcucugggaaacaaagugua

SEQ ID NO: 973984 - RNA, 22 nt, Human
cacaagacuuauuuguguagaa

SEQ ID NO: 973985 - RNA, 22 nt, Human
gucaggaucaaauugaaguuau

SEQ ID NO: 973986 - RNA, 22 nt, Human
gcagugggcaacaagagcugga

SEQ ID NO: 973987 - RNA, 22 nt, Human
aaaagguaguugccaaauaagg

SEQ ID NO: 973988 - RNA, 17 nt, Human
uuccuggaagucauucc

SEQ ID NO: 973989 - RNA, 22 nt, Human
ugucucaguauacgaaacacuu

SEQ ID NO: 973990 - RNA, 22 nt, Human
ucuuuuggguucuuaugauuua

SEQ ID NO: 973991 - RNA, 22 nt, Human
cuggggcucucuggaaugcuug

SEQ ID NO: 973992 - RNA, 22 nt, Human
uuucaaugacacaaaagagaaa

SEQ ID NO: 973993 - RNA, 22 nt, Human
uguuuaguaggaguuuaauacu

SEQ ID NO: 973994 - RNA, 22 nt, Human
agugcuguccaguuucacaggu

SEQ ID NO: 973995 - RNA, 22 nt, Human
ugugaagcuggauccuggagcu

SEQ ID NO: 973996 - RNA, 22 nt, Human
acauuucucuuagaguuggacu

SEQ ID NO: 973997 - RNA, 22 nt, Human
ucacuuagauggggaucaucac

SEQ ID NO: 973998 - RNA, 22 nt, Human
cagggcagcuuccuuuguuagg

SEQ ID NO: 973999 - RNA, 22 nt, Human
acaaaagugagugugucucaga

SEQ ID NO: 974000 - RNA, 22 nt, Human
ucucuucuaauuaggguccaug

SEQ ID NO: 974001 - RNA, 22 nt, Human
uuaguuaggaaacaaaguuguu

SEQ ID NO: 974002 - RNA, 22 nt, Human
uuggccaauuuagaacguguug

SEQ ID NO: 974003 - RNA, 22 nt, Human
ugaaagggguugaguuacagcu

SEQ ID NO: 974004 - RNA, 22 nt, Human
aggccaaagcucaccugcagcu

SEQ ID NO: 974005 - RNA, 22 nt, Human
uggcucagccagcccuaggaac

SEQ ID NO: 974006 - RNA, 20 nt, Human
uggagccaaggugugucugg

SEQ ID NO: 974007 - RNA, 22 nt, Human
agaggggaguccuaaucugauu

SEQ ID NO: 974008 - RNA, 22 nt, Human
aagaugauguuguguuuucacu

SEQ ID NO: 974009 - RNA, 21 nt, Human
agcagcagaucuggugagggc

SEQ ID NO: 974010 - RNA, 22 nt, Human
cucugcagaggcccaaggcuga

SEQ ID NO: 974011 - RNA, 22 nt, Human
guuucaaauagguuucagcaaa

SEQ ID NO: 974012 - RNA, 22 nt, Human
ucccucuguguugggcaugccu

SEQ ID NO: 974013 - RNA, 22 nt, Human
gcugcccauuccacuggauggu

SEQ ID NO: 974014 - RNA, 22 nt, Human
ugugugcauucacaugcaugcc

SEQ ID NO: 974015 - RNA, 22 nt, Human
gcugcccaguucugcugcugcc

SEQ ID NO: 974016 - RNA, 22 nt, Human
ggcugccuccucgagacaggau

SEQ ID NO: 974017 - RNA, 22 nt, Human
agaggcagccguauuucaaagg

SEQ ID NO: 974018 - RNA, 22 nt, Human
cugugugcugaaaugcagugag

SEQ ID NO: 974019 - RNA, 22 nt, Human
cccaggagguggaguucacagu

SEQ ID NO: 974020 - RNA, 22 nt, Human
agggccugcaucaggagcuugg

SEQ ID NO: 974021 - RNA, 22 nt, Human
agcugaugccauguggaacagu

SEQ ID NO: 974022 - RNA, 22 nt, Human
uccagccaacugccuagggagc

SEQ ID NO: 974023 - RNA, 22 nt, Human
gaggcagaggaagguggucucu

SEQ ID NO: 974024 - RNA, 19 nt, Human
agucuuucccacucgucuu

SEQ ID NO: 974025 - RNA, 22 nt, Human
gcugagucuugagcacugagca

SEQ ID NO: 974026 - RNA, 22 nt, Human
agguccagcuguugcagccucc

SEQ ID NO: 974027 - RNA, 23 nt, Human
auggagcugguacuagcuaccuc

SEQ ID NO: 974028 - RNA, 22 nt, Human
gggcugggauugcuugcuguga

SEQ ID NO: 974029 - RNA, 22 nt, Human
ugagcccaggaguuggaggcug

SEQ ID NO: 974030 - RNA, 21 nt, Human
gcacagggacagaucaucaca

SEQ ID NO: 974031 - RNA, 22 nt, Human
gugggcuggacccuccugcucc

SEQ ID NO: 974032 - RNA, 22 nt, Human
aagccaggcugcacuugcuggg

SEQ ID NO: 974033 - RNA, 22 nt, Human
cugggcuggcgcauccgacacg

SEQ ID NO: 974034 - RNA, 22 nt, Human
acagcagcaauagcagugacau

SEQ ID NO: 974035 - RNA, 22 nt, Human
aucagcaaucaaauugcagagu

SEQ ID NO: 974036 - RNA, 22 nt, Human
gauaaugaugacaaugacaacc

SEQ ID NO: 974037 - RNA, 22 nt, Human
uggagcagagaugguggccuuc

SEQ ID NO: 974038 - RNA, 22 nt, Human
auccaggcgaaugcagaaggcc

SEQ ID NO: 974039 - RNA, 22 nt, Human
ugccaaucuuugugauaauugc

SEQ ID NO: 974040 - RNA, 19 nt, Human
ucuggagcugaugcaggug

SEQ ID NO: 974041 - RNA, 22 nt, Human
ccacucugauuggucaccucug

SEQ ID NO: 974042 - RNA, 22 nt, Human
cuuggggcagugcuuggcacau

SEQ ID NO: 974043 - RNA, 20 nt, Human
cacagcuugccuuuuaugac

SEQ ID NO: 974044 - RNA, 22 nt, Human
gaggcagcugaaggagugacag

SEQ ID NO: 974045 - RNA, 22 nt, Human
gcuggccauggggagugaggag

SEQ ID NO: 974046 - RNA, 22 nt, Human
ccuggcugcuauagcagcaugu

SEQ ID NO: 974047 - RNA, 22 nt, Human
ucauacaucuuguauaucuauc

SEQ ID NO: 974048 - RNA, 22 nt, Human
ugagcccagagcccuuguaggg

SEQ ID NO: 974049 - RNA, 22 nt, Human
caagagcugcaaauagcgugac

SEQ ID NO: 974050 - RNA, 22 nt, Human
gugcauuuaggucacaugaugu

SEQ ID NO: 974051 - RNA, 22 nt, Human
uggcuggcuagugggcaggauu

SEQ ID NO: 974052 - RNA, 22 nt, Human
uccugccuaccuugcggaggug

SEQ ID NO: 974053 - RNA, 22 nt, Human
uagaaaugcccagauucugcua

SEQ ID NO: 974054 - RNA, 20 nt, Human
gaggccucagccucagcucc

SEQ ID NO: 974055 - RNA, 22 nt, Human
aaacacaucauucaugucguca

SEQ ID NO: 974056 - RNA, 18 nt, Human
ggucuuuaggucaguguc

SEQ ID NO: 974057 - RNA, 22 nt, Human
cucauacauaugccauuccugc

SEQ ID NO: 974058 - RNA, 22 nt, Human
agggcagagagaugaaugggau

SEQ ID NO: 974059 - RNA, 22 nt, Human
ucauccagaaaaaugucuuagc

SEQ ID NO: 974060 - RNA, 22 nt, Human
gcauuuguguucuuccuagagc

SEQ ID NO: 974061 - RNA, 22 nt, Human
gccucugcaggugcgguuaucc

SEQ ID NO: 974062 - RNA, 21 nt, Human
ccugggccaaauucccuggac

SEQ ID NO: 974063 - RNA, 22 nt, Human
gaguuauuuguagggauuauau

SEQ ID NO: 974064 - RNA, 22 nt, Human
uuuuaauucaaagugaauagug

SEQ ID NO: 974065 - RNA, 22 nt, Human
gggcugcacguauucugcucac

SEQ ID NO: 974066 - RNA, 22 nt, Human
ggccaggaagggaagaucagca

SEQ ID NO: 974067 - RNA, 22 nt, Human
gaaggagcuaaagggagcccug

SEQ ID NO: 974068 - RNA, 22 nt, Human
uguaauggaagugggauugcau

SEQ ID NO: 974069 - RNA, 22 nt, Human
gcuucuggaggagcugggcuga

SEQ ID NO: 974070 - RNA, 22 nt, Human
cuccaguaucuguaggaaaagg

SEQ ID NO: 974071 - RNA, 22 nt, Human
acuggccagaacuaagucacau

SEQ ID NO: 974072 - RNA, 22 nt, Human
acauaucuuucccucuccugaa

SEQ ID NO: 974073 - RNA, 20 nt, Human
ucuguucaaaucuuaguucc

SEQ ID NO: 974074 - RNA, 22 nt, Human
uaaaugauaauaaugcuagugu

SEQ ID NO: 974075 - RNA, 22 nt, Human
gauuucaaguaucuugggcgag

SEQ ID NO: 974076 - RNA, 22 nt, Human
aggccaaagcaagacccuguaa

SEQ ID NO: 974077 - RNA, 22 nt, Human
aggauguucgggucacauagcc

SEQ ID NO: 974078 - RNA, 22 nt, Human
caggggcuuaagugacagaagg

SEQ ID NO: 974079 - RNA, 22 nt, Human
gaaaggccagcucacagaugag

SEQ ID NO: 974080 - RNA, 20 nt, Human
cugcucugcuuugcaggugg

SEQ ID NO: 974081 - RNA, 22 nt, Human
uccaggagagguguggggacug

SEQ ID NO: 974082 - RNA, 22 nt, Human
ccucgaccuccccaggcucagg

SEQ ID NO: 974083 - RNA, 22 nt, Human
gcagaggggaagcugaggaauu

SEQ ID NO: 974084 - RNA, 22 nt, Human
cgagcaugaugacggcuguggc

SEQ ID NO: 974085 - RNA, 22 nt, Human
caagcagagacuagauagcugu

SEQ ID NO: 974086 - RNA, 22 nt, Human
gccuaggaguacagaaugguuu

SEQ ID NO: 974087 - RNA, 22 nt, Human
gggagagaugcugauugccaau

SEQ ID NO: 974088 - RNA, 22 nt, Human
cugucauugagccugucagggc

SEQ ID NO: 974089 - RNA, 23 nt, Human
cacugggcccaggguguggaggc

SEQ ID NO: 974090 - RNA, 22 nt, Human
agcucagggcgaucugucucgg

SEQ ID NO: 974091 - RNA, 22 nt, Human
aaugaugggaaggagaaaagca

SEQ ID NO: 974092 - RNA, 22 nt, Human
ucuccugguauguaugcaccug

SEQ ID NO: 974093 - RNA, 22 nt, Human
uagaauaugugguaggaucugg

SEQ ID NO: 974094 - RNA, 22 nt, Human
cacccugggcugggccuguuaa

SEQ ID NO: 974095 - RNA, 22 nt, Human
ugugcccauuacacagaggcau

SEQ ID NO: 974096 - RNA, 22 nt, Human
uguguacagcaggauuucucaa

SEQ ID NO: 974097 - RNA, 22 nt, Human
aguuauagaaccagguccucac

SEQ ID NO: 974098 - RNA, 22 nt, Human
cucaggauagcugcgcagccug

SEQ ID NO: 974099 - RNA, 22 nt, Human
ugcugucugcaacaguacuaca

SEQ ID NO: 974100 - RNA, 22 nt, Human
uuugcauuaucucacuuauaua

SEQ ID NO: 974101 - RNA, 17 nt, Human
aggcuggcucacaggga

SEQ ID NO: 974102 - RNA, 19 nt, Human
ugcagcucagggcaggggc

SEQ ID NO: 974103 - RNA, 22 nt, Human
gaggccuggucuaugagauguu

SEQ ID NO: 974104 - RNA, 22 nt, Human
uuucauuacguguuugacuugu

SEQ ID NO: 974105 - RNA, 22 nt, Human
auaaaacuuauuagaauugugu

SEQ ID NO: 974106 - RNA, 22 nt, Human
uaaaccuugguagcaucuugcu

SEQ ID NO: 974107 - RNA, 22 nt, Human
uucugugauugacauguggcuu

SEQ ID NO: 974108 - RNA, 22 nt, Human
uuguuaaagaugcagauuccau

SEQ ID NO: 974109 - RNA, 22 nt, Human
cagaaugagauaacccagauug

SEQ ID NO: 974110 - RNA, 22 nt, Human
uuuaucuuuaggacuuugcaga

SEQ ID NO: 974111 - RNA, 22 nt, Human
uaugucuuuguccaugugcagu

SEQ ID NO: 974112 - RNA, 22 nt, Human
aggccucagugaucaucaucag

SEQ ID NO: 974113 - RNA, 22 nt, Human
uuugcauuauauuuauagaaga

SEQ ID NO: 974114 - RNA, 22 nt, Human
cacugaaggcugcagcucagcc

SEQ ID NO: 974115 - RNA, 22 nt, Human
cuauugaaaguguacaauucaa

SEQ ID NO: 974116 - RNA, 22 nt, Human
agggaaagguagugaggucaca

SEQ ID NO: 974117 - RNA, 22 nt, Human
ugucacuucaggaaugcaggga

SEQ ID NO: 974118 - RNA, 22 nt, Human
cccagggcccuggacagcuaca

SEQ ID NO: 974119 - RNA, 22 nt, Human
acaugauuuuaguaucauaaua

SEQ ID NO: 974120 - RNA, 22 nt, Human
cugcaggaauucaaagugagcu

SEQ ID NO: 974121 - RNA, 22 nt, Human
cugaacucuuuaugacagcuug

SEQ ID NO: 974122 - RNA, 21 nt, Human
ucacauuucucauggguaaau

SEQ ID NO: 974123 - RNA, 22 nt, Human
cccuuagcuccaagggguuugg

SEQ ID NO: 974124 - RNA, 22 nt, Human
uccuuuuuauaguuagagaaac

SEQ ID NO: 974125 - RNA, 22 nt, Human
gcuccugggcccugggcuaacu

SEQ ID NO: 974126 - RNA, 22 nt, Human
uuagauaacaguagaauaucaa

SEQ ID NO: 974127 - RNA, 22 nt, Human
acuucauuguaauauuauagca

SEQ ID NO: 974128 - RNA, 22 nt, Human
ucauuauuuuggacuggagugu

SEQ ID NO: 974129 - RNA, 22 nt, Human
ccacaucucgguccccucuuug

SEQ ID NO: 974130 - RNA, 22 nt, Human
cugucccaggagcuguaagaca

SEQ ID NO: 974131 - RNA, 22 nt, Human
uggcccugcuaugauccugcaa

SEQ ID NO: 974132 - RNA, 21 nt, Human
uuccagagauuguuucaccug

SEQ ID NO: 974133 - RNA, 22 nt, Human
uauuugaagauucuucugaugu

SEQ ID NO: 974134 - RNA, 22 nt, Human
uuucuauaacuggacuggauug

SEQ ID NO: 974135 - RNA, 20 nt, Human
cugcccagccacugagggau

SEQ ID NO: 974136 - RNA, 22 nt, Human
ucuccuuugaaaguuaggacug

SEQ ID NO: 974137 - RNA, 22 nt, Human
augaaauguuggucccaaucgc

SEQ ID NO: 974138 - RNA, 22 nt, Human
guacauuucucuuguucuuauu

SEQ ID NO: 974139 - RNA, 20 nt, Human
aggcaguuagaaggagauga

SEQ ID NO: 974140 - RNA, 22 nt, Human
gcucacugccauucucuagaug

SEQ ID NO: 974141 - RNA, 22 nt, Human
uucagugugugauaccugcugu

SEQ ID NO: 974142 - RNA, 22 nt, Human
agcucacaguguccuuccucaa

SEQ ID NO: 974143 - RNA, 19 nt, Human
ggcugucucggcccagcca

SEQ ID NO: 974144 - RNA, 22 nt, Human
uugcccagaguccacagcguac

SEQ ID NO: 974145 - RNA, 22 nt, Human
ccagccugaaaugccucauccu

SEQ ID NO: 974146 - RNA, 22 nt, Human
ugaaagcacucacuucugcucu

SEQ ID NO: 974147 - RNA, 22 nt, Human
agagccagccuucucagcuuac

SEQ ID NO: 974148 - RNA, 22 nt, Human
uaagaacagauaaaguuucccc

SEQ ID NO: 974149 - RNA, 19 nt, Human
uggcauugguccagauaaa

SEQ ID NO: 974150 - RNA, 20 nt, Human
cagaccugcacccacuucga

SEQ ID NO: 974151 - RNA, 22 nt, Human
auguguuuauaauuacucaauc

SEQ ID NO: 974152 - RNA, 22 nt, Human
aauuucaagucuugaagaagua

SEQ ID NO: 974153 - RNA, 22 nt, Human
gcuccugggcucuaccuugcua

SEQ ID NO: 974154 - RNA, 22 nt, Human
uauguuuauacuuugauguacu

SEQ ID NO: 974155 - RNA, 22 nt, Human
uuuuuguagucauuagaagagg

SEQ ID NO: 974156 - RNA, 22 nt, Human
uacauguauugauuucucuucu

SEQ ID NO: 974157 - RNA, 22 nt, Human
gcauggcauuaacaagauggaa

SEQ ID NO: 974158 - RNA, 22 nt, Human
agaaauaugcugauuagaugaa

SEQ ID NO: 974159 - RNA, 22 nt, Human
agggcugccugacuccagagcc

SEQ ID NO: 974160 - RNA, 22 nt, Human
acauuucugucuuagggacugu

SEQ ID NO: 974161 - RNA, 22 nt, Human
uacauauagacaguuacucuag

SEQ ID NO: 974162 - RNA, 22 nt, Human
cagagccugccucuggcugugg

SEQ ID NO: 974163 - RNA, 22 nt, Human
ucccugggagaugaugaugagg

SEQ ID NO: 974164 - RNA, 22 nt, Human
aaaugcagaucccugaaucuca

SEQ ID NO: 974165 - RNA, 22 nt, Human
aaacagcuggucucaaauguuc

SEQ ID NO: 974166 - RNA, 22 nt, Human
caucuuuaacaauuuacaaugu

SEQ ID NO: 974167 - RNA, 22 nt, Human
acaggcuucucacagaaaaggg

SEQ ID NO: 974168 - RNA, 22 nt, Human
cagguccccuccccuaccaggc

SEQ ID NO: 974169 - RNA, 22 nt, Human
aucaggauguuuggcugucaua

SEQ ID NO: 974170 - RNA, 22 nt, Human
aaggcaggaugggaaaagauuu

SEQ ID NO: 974171 - RNA, 22 nt, Human
uucacaggcuuggagguggggg

SEQ ID NO: 974172 - RNA, 22 nt, Human
ccacagggucagccacucugca

SEQ ID NO: 974173 - RNA, 22 nt, Human
uuuuagauugggaaauguaaag

SEQ ID NO: 974174 - RNA, 22 nt, Human
gcccuggccuucaucucagaca

SEQ ID NO: 974175 - RNA, 22 nt, Human
aaaagaggagugguuuaugaca

SEQ ID NO: 974176 - RNA, 22 nt, Human
acugggagagcgaccagauucu

SEQ ID NO: 974177 - RNA, 20 nt, Human
caggcacacucauuccugcu

SEQ ID NO: 974178 - RNA, 22 nt, Human
uucagggagagcgggacgggug

SEQ ID NO: 974179 - RNA, 22 nt, Human
cuccagggaugagacagaguag

SEQ ID NO: 974180 - RNA, 22 nt, Human
ugcuggcuacugauggcaggcc

SEQ ID NO: 974181 - RNA, 22 nt, Human
gccuggagaagauggaacuagc

SEQ ID NO: 974182 - RNA, 22 nt, Human
ucugggagauccaagcagaacu

SEQ ID NO: 974183 - RNA, 22 nt, Human
ugugugucagagucuccauggu

SEQ ID NO: 974184 - RNA, 22 nt, Human
auugaaagauaggcuacugugg

SEQ ID NO: 974185 - RNA, 16 nt, Human
cuuccucuucacuggc

SEQ ID NO: 974186 - RNA, 22 nt, Human
uccucaugccgggucucacgcu

SEQ ID NO: 974187 - RNA, 22 nt, Human
uugcauugaugucuauacgcug

SEQ ID NO: 974188 - RNA, 22 nt, Human
aaauucagcagugaaaugcccc

SEQ ID NO: 974189 - RNA, 22 nt, Human
uuugaaagacagaauauuuuug

SEQ ID NO: 974190 - RNA, 22 nt, Human
cuggagccacugggucuuguau

SEQ ID NO: 974191 - RNA, 22 nt, Human
agguagagcuccaguagaaaau

SEQ ID NO: 974192 - RNA, 22 nt, Human
auaguuugaaggcuguucuacu

SEQ ID NO: 974193 - RNA, 22 nt, Human
auauucuugugauuauaaagua

SEQ ID NO: 974194 - RNA, 22 nt, Human
uuugcauaaaggagcauuucuc

SEQ ID NO: 974195 - RNA, 22 nt, Human
uacaagagguauauagaaacag

SEQ ID NO: 974196 - RNA, 22 nt, Human
caggccacaaguuggguucaag

SEQ ID NO: 974197 - RNA, 22 nt, Human
caaaaugugagucccaccucaa

SEQ ID NO: 974198 - RNA, 22 nt, Human
gcagcguggggcugagucagcu

SEQ ID NO: 974199 - RNA, 22 nt, Human
agcuuccugaugcaagagggcu

SEQ ID NO: 974200 - RNA, 22 nt, Human
uaggaugagggguggccaagua

SEQ ID NO: 974201 - RNA, 21 nt, Human
gucagcagauccagcacuugu

SEQ ID NO: 974202 - RNA, 22 nt, Human
uuucuauaugaggagcuaaagu

SEQ ID NO: 974203 - RNA, 22 nt, Human
ccugguccuuacgucauugcuu

SEQ ID NO: 974204 - RNA, 22 nt, Human
aggagcugagggagcgcccuug

SEQ ID NO: 974205 - RNA, 22 nt, Human
ucuucacaugaccuucaugucu

SEQ ID NO: 974206 - RNA, 22 nt, Human
agcuauguuauagcauguauca

SEQ ID NO: 974207 - RNA, 22 nt, Human
caucacccggaacugugucugc

SEQ ID NO: 974208 - RNA, 22 nt, Human
gcugcuuccuuuccugcugacc

SEQ ID NO: 974209 - RNA, 22 nt, Human
caccagggcucugagcucugaa

SEQ ID NO: 974210 - RNA, 22 nt, Human
aggagaggaaucauuauuacaa

SEQ ID NO: 974211 - RNA, 22 nt, Human
ggccccugcggacugccuagag

SEQ ID NO: 974212 - RNA, 22 nt, Human
ugggaggcagguaggugaugau

SEQ ID NO: 974213 - RNA, 22 nt, Human
gcacugcagguggguggagagg

SEQ ID NO: 974214 - RNA, 22 nt, Human
uucucagagcucacuguaguaa

SEQ ID NO: 974215 - RNA, 20 nt, Human
cuucuucauuaacccuacug

SEQ ID NO: 974216 - RNA, 22 nt, Human
aaaagacaucuauuucaggcag

SEQ ID NO: 974217 - RNA, 21 nt, Human
accaggcuugugggagggagc

SEQ ID NO: 974218 - RNA, 22 nt, Human
ugcacacacaugaaguagcaug

SEQ ID NO: 974219 - RNA, 22 nt, Human
gaggggaaaguucugcacaagg

SEQ ID NO: 974220 - RNA, 22 nt, Human
uuugauaacagugaauaucaug

SEQ ID NO: 974221 - RNA, 22 nt, Human
uuuuuccuuggaugugucucuc

SEQ ID NO: 974222 - RNA, 22 nt, Human
acuugggaugguggccagagcg

SEQ ID NO: 974223 - RNA, 22 nt, Human
gcucugggauuaccagccuuag

SEQ ID NO: 974224 - RNA, 22 nt, Human
uugcaucuaccauaucaaagau

SEQ ID NO: 974225 - RNA, 22 nt, Human
ugccugucucugacugccauua

SEQ ID NO: 974226 - RNA, 22 nt, Human
guguacauauugagucugcuga

SEQ ID NO: 974227 - RNA, 22 nt, Human
ggaugcugggagacagcaggca

SEQ ID NO: 974228 - RNA, 22 nt, Human
acuccuggggauccauuccuuu

SEQ ID NO: 974229 - RNA, 22 nt, Human
uauuucugauugcucaugaggc

SEQ ID NO: 974230 - RNA, 22 nt, Human
gagauuggauuuaauggccaaa

SEQ ID NO: 974231 - RNA, 22 nt, Human
caugauuuugucuuguguuaau

SEQ ID NO: 974232 - RNA, 22 nt, Human
gcuggccucaucacugacuucu

SEQ ID NO: 974233 - RNA, 22 nt, Human
cauucacaucuuguuccaucac

SEQ ID NO: 974234 - RNA, 22 nt, Human
agggaguuagaaauccaggaua

SEQ ID NO: 974235 - RNA, 20 nt, Human
ggguggaguugcggucugug

SEQ ID NO: 974236 - RNA, 22 nt, Human
gggcugagucugcugccuguca

SEQ ID NO: 974237 - RNA, 22 nt, Human
ggagauggaauagauucugacu

SEQ ID NO: 974238 - RNA, 22 nt, Human
uguguucaagauuaguucuagu

SEQ ID NO: 974239 - RNA, 22 nt, Human
cagcugccugcaacacaagcuu

SEQ ID NO: 974240 - RNA, 23 nt, Human
ucacacagcuggucagguacaga

SEQ ID NO: 974241 - RNA, 22 nt, Human
guauuugauacaugaaauggug

SEQ ID NO: 974242 - RNA, 22 nt, Human
uagggauguaaacauaguaauu

SEQ ID NO: 974243 - RNA, 22 nt, Human
agggcccauagaucgucagcuu

SEQ ID NO: 974244 - RNA, 22 nt, Human
ggagcugcauuuagggagccuu

SEQ ID NO: 974245 - RNA, 22 nt, Human
ggccagagagccgcuguuagga

SEQ ID NO: 974246 - RNA, 22 nt, Human
agcaucuggucaugagugagaa

SEQ ID NO: 974247 - RNA, 22 nt, Human
aaucauaauucaaauaagcuua

SEQ ID NO: 974248 - RNA, 22 nt, Human
gcagaugguggggcaggaaaau

SEQ ID NO: 974249 - RNA, 22 nt, Human
aaaguauuuuugacaggcauua

SEQ ID NO: 974250 - RNA, 22 nt, Human
ccuggccugugaaucugagagc

SEQ ID NO: 974251 - RNA, 22 nt, Human
ugaaaucugcaugcaaaguccu

SEQ ID NO: 974252 - RNA, 22 nt, Human
caguggcugugaccagggaccu

SEQ ID NO: 974253 - RNA, 22 nt, Human
ucugucugcucauuuaccucag

SEQ ID NO: 974254 - RNA, 22 nt, Human
uguguacaagaguguuuacugu

SEQ ID NO: 974255 - RNA, 22 nt, Human
uuuauagggacaguucuuggag

SEQ ID NO: 974256 - RNA, 22 nt, Human
auuuggcacacuggguucucgu

SEQ ID NO: 974257 - RNA, 22 nt, Human
uggagcagagaugggagcccaa

SEQ ID NO: 974258 - RNA, 22 nt, Human
cacagcuugggcucugacaaua

SEQ ID NO: 974259 - RNA, 22 nt, Human
caguagcacucugucagugaag

SEQ ID NO: 974260 - RNA, 22 nt, Human
ggcuguggggccggguacagug

SEQ ID NO: 974261 - RNA, 20 nt, Human
aguaggggaaugcaagagca

SEQ ID NO: 974262 - RNA, 22 nt, Human
aggcaagcugcagagaguccuu

SEQ ID NO: 974263 - RNA, 22 nt, Human
cuuccucacggugcaacaggaa

SEQ ID NO: 974264 - RNA, 22 nt, Human
ggcucugguugaccaugauggc

SEQ ID NO: 974265 - RNA, 22 nt, Human
cauuuacuguugaaucccuagc

SEQ ID NO: 974266 - RNA, 22 nt, Human
uuucaaaccuacuuguauguuu

SEQ ID NO: 974267 - RNA, 22 nt, Human
gggaaauugucaacacucucaa

SEQ ID NO: 974268 - RNA, 21 nt, Human
gagugcagcaagguagagucu

SEQ ID NO: 974269 - RNA, 22 nt, Human
gaugcaaagcauuuuugugugu

SEQ ID NO: 974270 - RNA, 22 nt, Human
ucucagggaccaugaugaugac

SEQ ID NO: 974271 - RNA, 23 nt, Human
aggcccugccugucccucuuuuu

SEQ ID NO: 974272 - RNA, 22 nt, Human
guacuuccagccaagugagaca

SEQ ID NO: 974273 - RNA, 22 nt, Human
aggcaguuguagagagggcucu

SEQ ID NO: 974274 - RNA, 22 nt, Human
acaugauuggacuccuuccccu

SEQ ID NO: 974275 - RNA, 18 nt, Human
ucucuuuuccccucauug

SEQ ID NO: 974276 - RNA, 22 nt, Human
ccugggagguggagguugcagc

SEQ ID NO: 974277 - RNA, 21 nt, Human
ugcaggcaggcagagaugcug

SEQ ID NO: 974278 - RNA, 22 nt, Human
acaaaguuaacaguuggauagu

SEQ ID NO: 974279 - RNA, 22 nt, Human
auuucuucaggucagaaauaga

SEQ ID NO: 974280 - RNA, 22 nt, Human
ugaagaugucagcagggguggu

SEQ ID NO: 974281 - RNA, 21 nt, Human
agagaagaggacuuucucaca

SEQ ID NO: 974282 - RNA, 22 nt, Human
gcugaagcccacguggcuugua

SEQ ID NO: 974283 - RNA, 22 nt, Human
gcagugcuaaguagcuggccca

SEQ ID NO: 974284 - RNA, 22 nt, Human
cauggggagacaccuagggaaa

SEQ ID NO: 974285 - RNA, 22 nt, Human
ccauaaggagccagacauucca

SEQ ID NO: 974286 - RNA, 22 nt, Human
uuugcuauuuuucugugcagcu

SEQ ID NO: 974287 - RNA, 22 nt, Human
gcuuuguguagaaggaggaugg

SEQ ID NO: 974288 - RNA, 22 nt, Human
acugugggagcgcaguggcagc

SEQ ID NO: 974289 - RNA, 22 nt, Human
cucccuggcacagcgagagguu

SEQ ID NO: 974290 - RNA, 22 nt, Human
agagucuuccaggcagccugag

SEQ ID NO: 974291 - RNA, 22 nt, Human
ggcugagccuggagcaucuggu

SEQ ID NO: 974292 - RNA, 22 nt, Human
ugaccaaaaaauucccugugag

SEQ ID NO: 974293 - RNA, 22 nt, Human
uguaugugcuugagaagguggg

SEQ ID NO: 974294 - RNA, 22 nt, Human
uuauuauuuuguguacagcaaa

SEQ ID NO: 974295 - RNA, 22 nt, Human
agccacagucuguagccagcuu

SEQ ID NO: 974296 - RNA, 22 nt, Human
cauuuccagcuccugcaucaug

SEQ ID NO: 974297 - RNA, 22 nt, Human
uugaaauauggauugaccuuga

SEQ ID NO: 974298 - RNA, 20 nt, Human
aguguuccggaagacuggca

SEQ ID NO: 974299 - RNA, 22 nt, Human
ucugggagagcugcugucagag

SEQ ID NO: 974300 - RNA, 20 nt, Human
gagacagcaaaagccucucc

SEQ ID NO: 974301 - RNA, 22 nt, Human
uagcugccuuugggcuccugcu

SEQ ID NO: 974302 - RNA, 22 nt, Human
gccugcuggaggagccucaggg

SEQ ID NO: 974303 - RNA, 21 nt, Human
uguucacauggagcagaaugu

SEQ ID NO: 974304 - RNA, 22 nt, Human
cuggugccauucuguggccuag

SEQ ID NO: 974305 - RNA, 22 nt, Human
cuguggugagcaacugacugaa

SEQ ID NO: 974306 - RNA, 22 nt, Human
gcagccacccucaaggcugaau

SEQ ID NO: 974307 - RNA, 22 nt, Human
uuucaguguaagguuuccagga

SEQ ID NO: 974308 - RNA, 18 nt, Human
ggcaucugcacagcagcc

SEQ ID NO: 974309 - RNA, 22 nt, Human
ucugaaggugcuagagaaagcu

SEQ ID NO: 974310 - RNA, 22 nt, Human
gcagggcucugcuguaguccua

SEQ ID NO: 974311 - RNA, 22 nt, Human
uugaagagugccuuccagacau

SEQ ID NO: 974312 - RNA, 22 nt, Human
agcugggucuugggccaggaga

SEQ ID NO: 974313 - RNA, 22 nt, Human
aaucuggcauguaagcuuagag

SEQ ID NO: 974314 - RNA, 22 nt, Human
aggcaagcccccagugaggcuc

SEQ ID NO: 974315 - RNA, 22 nt, Human
ccuggccucagacagagggugg

SEQ ID NO: 974316 - RNA, 22 nt, Human
gggcugcacagaucuucaaggg

SEQ ID NO: 974317 - RNA, 22 nt, Human
aacacaaagaagcugcaggauc

SEQ ID NO: 974318 - RNA, 22 nt, Human
ggagggcugccagguggagcgg

SEQ ID NO: 974319 - RNA, 22 nt, Human
aaaacuccugaaauuguuuccc

SEQ ID NO: 974320 - RNA, 22 nt, Human
ugagcccagucugucugacaug

SEQ ID NO: 974321 - RNA, 22 nt, Human
acagggcagugucuugaaaaau

SEQ ID NO: 974322 - RNA, 22 nt, Human
ccuccuggugacaaggcaaagc

SEQ ID NO: 974323 - RNA, 22 nt, Human
cucuugggagugcucuggagaa

SEQ ID NO: 974324 - RNA, 22 nt, Human
uaguaacagauuuauacagucu

SEQ ID NO: 974325 - RNA, 18 nt, Human
aggauauuaagaguacag

SEQ ID NO: 974326 - RNA, 22 nt, Human
aacaacugaaaagcuuuuucug

SEQ ID NO: 974327 - RNA, 22 nt, Human
ucucuggagcugcagauccagg

SEQ ID NO: 974328 - RNA, 22 nt, Human
caggucagagucccccuguccu

SEQ ID NO: 974329 - RNA, 22 nt, Human
aaaugugugcacaaagacagcu

SEQ ID NO: 974330 - RNA, 22 nt, Human
auaccuuuuagacauguaguug

SEQ ID NO: 974331 - RNA, 22 nt, Human
gucagcaggguccccuugagug

SEQ ID NO: 974332 - RNA, 22 nt, Human
cccuccagagcuugaccugcug

SEQ ID NO: 974333 - RNA, 22 nt, Human
cuuagaaaucgaacucagguua

SEQ ID NO: 974334 - RNA, 20 nt, Human
cccucccagaugcuucccaa

SEQ ID NO: 974335 - RNA, 22 nt, Human
ucucgacagccuggcacagugg

SEQ ID NO: 974336 - RNA, 22 nt, Human
caaagugcuggaauuacaggug

SEQ ID NO: 974337 - RNA, 22 nt, Human
agccccucuguggcucugccuc

SEQ ID NO: 974338 - RNA, 22 nt, Human
gcagccacucucauuccacgug

SEQ ID NO: 974339 - RNA, 22 nt, Human
agggcugcugcuccgggcccag

SEQ ID NO: 974340 - RNA, 22 nt, Human
agugacucacuagcucucagug

SEQ ID NO: 974341 - RNA, 22 nt, Human
cugcccugggaguaccuguccu

SEQ ID NO: 974342 - RNA, 22 nt, Human
gaaaagggcaagagagagggca

SEQ ID NO: 974343 - RNA, 22 nt, Human
cucuugaagggcaucugaguua

SEQ ID NO: 974344 - RNA, 22 nt, Human
ggcugggcaggucugcacaggg

SEQ ID NO: 974345 - RNA, 22 nt, Human
gcagggcacagacagugccaag

SEQ ID NO: 974346 - RNA, 22 nt, Human
uggguagagcaggcuggggcuu

SEQ ID NO: 974347 - RNA, 22 nt, Human
cacugcagaucagaggcugaga

SEQ ID NO: 974348 - RNA, 22 nt, Human
ggauggcaggacaaggacccag

SEQ ID NO: 974349 - RNA, 22 nt, Human
ggauccuucuuugaccucacag

SEQ ID NO: 974350 - RNA, 22 nt, Human
auucaguucuaaggucagugcc

SEQ ID NO: 974351 - RNA, 19 nt, Human
agcaaauauaauaguguuc

SEQ ID NO: 974352 - RNA, 22 nt, Human
uccugggcuuuguuucucuccu

SEQ ID NO: 974353 - RNA, 22 nt, Human
ccaggaguggcuggugaccuuc

SEQ ID NO: 974354 - RNA, 22 nt, Human
uggcagcuaucuuuaaugagau

SEQ ID NO: 974355 - RNA, 22 nt, Human
cagagcuguccaaacccugaca

SEQ ID NO: 974356 - RNA, 22 nt, Human
ucacugcucuccaauguggagu

SEQ ID NO: 974357 - RNA, 22 nt, Human
cagagcuguugcggggcuuggc

SEQ ID NO: 974358 - RNA, 22 nt, Human
ggcucagaaacuaaaggcgcug

SEQ ID NO: 974359 - RNA, 22 nt, Human
ggaggcuccacugcucuuccug

SEQ ID NO: 974360 - RNA, 22 nt, Human
cccugggcaagcccuauuuucc

SEQ ID NO: 974361 - RNA, 21 nt, Human
agagcugggacuugccugaga

SEQ ID NO: 974362 - RNA, 22 nt, Human
cuggugcuggagccuagucccu

SEQ ID NO: 974363 - RNA, 23 nt, Human
ccuccugggcacaggccugaugg

SEQ ID NO: 974364 - RNA, 19 nt, Human
aggguccagggagcggcuc

SEQ ID NO: 974365 - RNA, 22 nt, Human
acucaggaaauugagauaaugg

SEQ ID NO: 974366 - RNA, 22 nt, Human
gccuccuggccuuugcuccuca

SEQ ID NO: 974367 - RNA, 22 nt, Human
cuggcuggccggagcgaggcgg

SEQ ID NO: 974368 - RNA, 22 nt, Human
uuccuuaggcuguuugcagugc

SEQ ID NO: 974369 - RNA, 23 nt, Human
ucuguucaaggcuuucuccuuga

SEQ ID NO: 974370 - RNA, 22 nt, Human
ucucugggugauggcagggcac

SEQ ID NO: 974371 - RNA, 22 nt, Human
uggccuuggacagagcgcuccu

SEQ ID NO: 974372 - RNA, 22 nt, Human
uaaugucagcauaguuuauuuu

SEQ ID NO: 974373 - RNA, 22 nt, Human
gcaggcugaugacuggaguugg

SEQ ID NO: 974374 - RNA, 22 nt, Human
uccucagaauggauggcagggg

SEQ ID NO: 974375 - RNA, 22 nt, Human
cugcagaggguuugagcauccu

SEQ ID NO: 974376 - RNA, 18 nt, Human
cagggccccagaauuauc

SEQ ID NO: 974377 - RNA, 22 nt, Human
ggcuucugguaaagaccacacc

SEQ ID NO: 974378 - RNA, 22 nt, Human
agugaaauuuguuuagauaggu

SEQ ID NO: 974379 - RNA, 21 nt, Human
uuagcaaagcaaacacaugcu

SEQ ID NO: 974380 - RNA, 22 nt, Human
cugugccaggcccagcugacuu

SEQ ID NO: 974381 - RNA, 22 nt, Human
uggcagaguggaccauacucaa

SEQ ID NO: 974382 - RNA, 22 nt, Human
gaaauuuauuaucuacaucauu

SEQ ID NO: 974383 - RNA, 22 nt, Human
agggagcuguggucagcucagu

SEQ ID NO: 974384 - RNA, 19 nt, Human
uaaggccaaaaguaagugu

SEQ ID NO: 974385 - RNA, 22 nt, Human
gcagaggccugaagguggcggg

SEQ ID NO: 974386 - RNA, 22 nt, Human
ugucauuuaguccucugugugu

SEQ ID NO: 974387 - RNA, 22 nt, Human
uuagccauuaauguccugugca

SEQ ID NO: 974388 - RNA, 22 nt, Human
cccucaggagaugucagcugga

SEQ ID NO: 974389 - RNA, 22 nt, Human
aaaagucagucucuccuagcuc

SEQ ID NO: 974390 - RNA, 22 nt, Human
uucagcaauuuuuuaagcuaau

SEQ ID NO: 974391 - RNA, 22 nt, Human
uuaaaagaauccuguuauccuc

SEQ ID NO: 974392 - RNA, 22 nt, Human
ggaggcgauccugggaaacacc

SEQ ID NO: 974393 - RNA, 22 nt, Human
cauaccuuucucaagcacaugu

SEQ ID NO: 974394 - RNA, 22 nt, Human
auguuguagcauaugaaauaua

SEQ ID NO: 974395 - RNA, 22 nt, Human
ucagaaaagguagcugugacaa

SEQ ID NO: 974396 - RNA, 22 nt, Human
aggcucugcagaccccagcugu

SEQ ID NO: 974397 - RNA, 22 nt, Human
uagugcuugagucucuccguac

SEQ ID NO: 974398 - RNA, 22 nt, Human
cucccuggaggcccagaccugg

SEQ ID NO: 974399 - RNA, 22 nt, Human
uuguuauaaagacuaaauaugu

SEQ ID NO: 974400 - RNA, 15 nt, Human
aaucuggcggcaagu

SEQ ID NO: 974401 - RNA, 22 nt, Human
acaccuuuuauucgccaggcac

SEQ ID NO: 974402 - RNA, 20 nt, Human
ccugccuguguuugugauga

SEQ ID NO: 974403 - RNA, 22 nt, Human
uuuuagcacuaagugauaugcu

SEQ ID NO: 974404 - RNA, 22 nt, Human
cucuguccuugcacaguuccua

SEQ ID NO: 974405 - RNA, 22 nt, Human
cgggcagaucacacagggcuug

SEQ ID NO: 974406 - RNA, 22 nt, Human
gcagcuggggccacacuuaggc

SEQ ID NO: 974407 - RNA, 22 nt, Human
cagacacaccaggcccauucug

SEQ ID NO: 974408 - RNA, 22 nt, Human
uuuauuagugcuuguaucacug

SEQ ID NO: 974409 - RNA, 22 nt, Human
gccugagaaggauaggaagcga

SEQ ID NO: 974410 - RNA, 19 nt, Human
acagaaauguaagugagac

SEQ ID NO: 974411 - RNA, 22 nt, Human
ugggcagaggcagcagaaaccu

SEQ ID NO: 974412 - RNA, 22 nt, Human
aggcagcaugggcccagagucc

SEQ ID NO: 974413 - RNA, 22 nt, Human
accauccugaaaccuucaugcu

SEQ ID NO: 974414 - RNA, 22 nt, Human
uucaagaugacccagucacacg

SEQ ID NO: 974415 - RNA, 22 nt, Human
uaaugcacagaauugacauggg

SEQ ID NO: 974416 - RNA, 22 nt, Human
ccuggagguggagguugcagug

SEQ ID NO: 974417 - RNA, 22 nt, Human
gucauggaggauugugaguggu

SEQ ID NO: 974418 - RNA, 22 nt, Human
uggugccuugggccuacagcgc

SEQ ID NO: 974419 - RNA, 22 nt, Human
aacaugcucuguuucuuggaug

SEQ ID NO: 974420 - RNA, 22 nt, Human
acaggccugacacacagagggc

SEQ ID NO: 974421 - RNA, 22 nt, Human
gcccaggacucagggugucgcg

SEQ ID NO: 974422 - RNA, 22 nt, Human
ugacagcauaacacuggucuug

SEQ ID NO: 974423 - RNA, 22 nt, Human
gggcagcugccagaggccaugg

SEQ ID NO: 974424 - RNA, 22 nt, Human
uggccugcuuucauuugaugcu

SEQ ID NO: 974425 - RNA, 22 nt, Human
cccaggagauggagguugcagu

SEQ ID NO: 974426 - RNA, 22 nt, Human
aggggugaaggcccgauaggag

SEQ ID NO: 974427 - RNA, 22 nt, Human
cugugucuucaauguacuggga

SEQ ID NO: 974428 - RNA, 22 nt, Human
aauaaacugcucaauugcauca

SEQ ID NO: 974429 - RNA, 22 nt, Human
uccugccucacaguugaaguuu

SEQ ID NO: 974430 - RNA, 22 nt, Human
uugcauuugaucuuggguucuc

SEQ ID NO: 974431 - RNA, 22 nt, Human
uugcacuccagcccgagcaaca

SEQ ID NO: 974432 - RNA, 20 nt, Human
ugaggcaggagaauggcaug

SEQ ID NO: 974433 - RNA, 22 nt, Human
ccauaagguuuggggccaugca

SEQ ID NO: 974434 - RNA, 21 nt, Human
agaaaauggcguuuuagauuu

SEQ ID NO: 974435 - RNA, 22 nt, Human
aggcugaggcagguggaucacc

SEQ ID NO: 974436 - RNA, 22 nt, Human
uggcacuggcgcaggauggcgg

SEQ ID NO: 974437 - RNA, 22 nt, Human
aagcugaggcccauggcaaggu

SEQ ID NO: 974438 - RNA, 22 nt, Human
acacugaagagcacuuucaaag

SEQ ID NO: 974439 - RNA, 22 nt, Human
ugcugggcuaggguggagcucu

SEQ ID NO: 974440 - RNA, 22 nt, Human
ggugcugguucaggguggcugu

SEQ ID NO: 974441 - RNA, 22 nt, Human
uuacuuugaugaucaaugagcg

SEQ ID NO: 974442 - RNA, 22 nt, Human
ccagggcagugggagaaggugc

SEQ ID NO: 974443 - RNA, 22 nt, Human
cauuuguauagugcuuagacca

SEQ ID NO: 974444 - RNA, 22 nt, Human
auauauuuugcggucacguggc

SEQ ID NO: 974445 - RNA, 22 nt, Human
ucacacagguuugcaaugauuu

SEQ ID NO: 974446 - RNA, 22 nt, Human
ccuggcacgaagggcugagguu

SEQ ID NO: 974447 - RNA, 22 nt, Human
gcugauccuuuuaugucuagcu

SEQ ID NO: 974448 - RNA, 22 nt, Human
agggaagaaaauccaucgcugc

SEQ ID NO: 974449 - RNA, 20 nt, Human
gucucaaguaucucacaguc

SEQ ID NO: 974450 - RNA, 22 nt, Human
uuaaaucaggcaucauuucagu

SEQ ID NO: 974451 - RNA, 22 nt, Human
cccuguggaggaggagagcagu

SEQ ID NO: 974452 - RNA, 21 nt, Human
ucucugugucuuuaagcugga

SEQ ID NO: 974453 - RNA, 21 nt, Human
agccuguugguuuacugcuca

SEQ ID NO: 974454 - RNA, 22 nt, Human
agagaugucgccuugcccaggg

SEQ ID NO: 974455 - RNA, 20 nt, Human
cuguggaauuuuaccaugcg

SEQ ID NO: 974456 - RNA, 22 nt, Human
cugcaggcaucuaacugugggc

SEQ ID NO: 974457 - RNA, 19 nt, Human
ugccuggacaaaugugggg

SEQ ID NO: 974458 - RNA, 22 nt, Human
gaauuacauuguuagccuuccu

SEQ ID NO: 974459 - RNA, 23 nt, Human
acuuaaaugguucuuuaucucag

SEQ ID NO: 974460 - RNA, 22 nt, Human
ucucaggggccuggaguccugg

SEQ ID NO: 974461 - RNA, 22 nt, Human
guggccucaugucuauaaagag

SEQ ID NO: 974462 - RNA, 22 nt, Human
ucccugggccacagcugugagc

SEQ ID NO: 974463 - RNA, 22 nt, Human
aaacccaucugucugucugcag

SEQ ID NO: 974464 - RNA, 22 nt, Human
aucuggcucccuuggaauccgu

SEQ ID NO: 974465 - RNA, 22 nt, Human
ucuuagcacagcuauauaaguu

SEQ ID NO: 974466 - RNA, 22 nt, Human
cacagcuggugcacuagcucug

SEQ ID NO: 974467 - RNA, 22 nt, Human
agggagcucuaaguagagggac

SEQ ID NO: 974468 - RNA, 22 nt, Human
acugagcugcuugaagugaacu

SEQ ID NO: 974469 - RNA, 22 nt, Human
gcuggggaggcagcagagaaca

SEQ ID NO: 974470 - RNA, 22 nt, Human
uauugaaaugaaugacagugau

SEQ ID NO: 974471 - RNA, 22 nt, Human
uucugucacuuaggaggucaua

SEQ ID NO: 974472 - RNA, 22 nt, Human
ugagccagaggaggcugugugg

SEQ ID NO: 974473 - RNA, 22 nt, Human
uuauuuauuguguaccuacugu

SEQ ID NO: 974474 - RNA, 22 nt, Human
auucuucacauaagugcuguac

SEQ ID NO: 974475 - RNA, 22 nt, Human
uccuugaauugugccacuuacc

SEQ ID NO: 974476 - RNA, 22 nt, Human
aauacugccugugagguaacuc

SEQ ID NO: 974477 - RNA, 22 nt, Human
ucuggcaggcaaucggcucugg

SEQ ID NO: 974478 - RNA, 22 nt, Human
cugcccuggcagccuaccaugg

SEQ ID NO: 974479 - RNA, 22 nt, Human
guuuaauaauguugaauuacua

SEQ ID NO: 974480 - RNA, 21 nt, Human
auuuggcaaaggcgaugcaca

SEQ ID NO: 974481 - RNA, 22 nt, Human
cagucucucagcuuucagcugu

SEQ ID NO: 974482 - RNA, 22 nt, Human
cccaugagaccugguuuaaggc

SEQ ID NO: 974483 - RNA, 22 nt, Human
cucuggacagcaggugcugugg

SEQ ID NO: 974484 - RNA, 22 nt, Human
cuguuuauacgacagguggagg

SEQ ID NO: 974485 - RNA, 20 nt, Human
ggccuuggguuucgccuguu

SEQ ID NO: 974486 - RNA, 21 nt, Human
gggcuggacaugguggcucau

SEQ ID NO: 974487 - RNA, 23 nt, Human
gucagcuugaccaguggagaguc

SEQ ID NO: 974488 - RNA, 22 nt, Human
agagcccuuucuccaggcaccu

SEQ ID NO: 974489 - RNA, 18 nt, Human
cgaggcaggcggaucacg

SEQ ID NO: 974490 - RNA, 22 nt, Human
uuucuaaaauagauuuuauggu

SEQ ID NO: 974491 - RNA, 22 nt, Human
caaaggcaguuacugaaugaag

SEQ ID NO: 974492 - RNA, 22 nt, Human
ugcuauaagaauuauauuacuc

SEQ ID NO: 974493 - RNA, 22 nt, Human
uugcugaaguuaaugcuugcaa

SEQ ID NO: 974494 - RNA, 22 nt, Human
uuaagauagaacccaguagucu

SEQ ID NO: 974495 - RNA, 23 nt, Human
uggcaaggaaugggauggagacu

SEQ ID NO: 974496 - RNA, 22 nt, Human
ccucagagccuccagaaggaau

SEQ ID NO: 974497 - RNA, 22 nt, Human
acauuuguaugcguuuuuacug

SEQ ID NO: 974498 - RNA, 22 nt, Human
aggcucaguuugguuuccauug

SEQ ID NO: 974499 - RNA, 22 nt, Human
gggcguggauggucagugcagg

SEQ ID NO: 974500 - RNA, 22 nt, Human
guuuauuauacaacaaaagcua

SEQ ID NO: 974501 - RNA, 22 nt, Human
cacuuaagcaguuaauuuaucu

SEQ ID NO: 974502 - RNA, 17 nt, Human
gccaaaggguuccaauc

SEQ ID NO: 974503 - RNA, 22 nt, Human
uggagcugggguuugaaucugg

SEQ ID NO: 974504 - RNA, 22 nt, Human
ggcacugauaauguccucucuc

SEQ ID NO: 974505 - RNA, 22 nt, Human
agaaauguauagugaauuuuuc

SEQ ID NO: 974506 - RNA, 22 nt, Human
ucauugcaggcauuccccugcc

SEQ ID NO: 974507 - RNA, 22 nt, Human
cagcugccaugacauguccugc

SEQ ID NO: 974508 - RNA, 22 nt, Human
ccauggcaauggucagucuauu

SEQ ID NO: 974509 - RNA, 21 nt, Human
ugcauaaagaaauacaaauac

SEQ ID NO: 974510 - RNA, 22 nt, Human
aaaaaugucauuauggaacuga

SEQ ID NO: 974511 - RNA, 22 nt, Human
caggggcucccugggugccagu

SEQ ID NO: 974512 - RNA, 22 nt, Human
cugggccacaagccugugugau

SEQ ID NO: 974513 - RNA, 22 nt, Human
gugugcccuuguucagcagagu

SEQ ID NO: 974514 - RNA, 22 nt, Human
acagugaaugcccaagaaaagu

SEQ ID NO: 974515 - RNA, 22 nt, Human
ggcugcuugcuguuucuuggau

SEQ ID NO: 974516 - RNA, 22 nt, Human
caaacugagcaucagaaaguuu

SEQ ID NO: 974517 - RNA, 22 nt, Human
gcuucauuacugacagucugug

SEQ ID NO: 974518 - RNA, 22 nt, Human
uucaagauggcaccagugagug

SEQ ID NO: 974519 - RNA, 22 nt, Human
cuugccuguggcuaguuggcuc

SEQ ID NO: 974520 - RNA, 22 nt, Human
cacaguuagcuccagucuuagc

SEQ ID NO: 974521 - RNA, 23 nt, Human
ccugaagggucaggguccucagc

SEQ ID NO: 974522 - RNA, 22 nt, Human
cucugcugcccaggccugcuag

SEQ ID NO: 974523 - RNA, 22 nt, Human
ggccagagaauaugccuuacgu

SEQ ID NO: 974524 - RNA, 22 nt, Human
gaacaguaaauuuaugcagcac

SEQ ID NO: 974525 - RNA, 22 nt, Human
uagcugucagcaaucaaguggu

SEQ ID NO: 974526 - RNA, 23 nt, Human
gccucuggagccccagugcucag

SEQ ID NO: 974527 - RNA, 20 nt, Human
uagaaaucuuauaaaagacu

SEQ ID NO: 974528 - RNA, 21 nt, Human
gccugcagaccccaccaggcu

SEQ ID NO: 974529 - RNA, 22 nt, Human
ccuggagggcgccgcacagucc

SEQ ID NO: 974530 - RNA, 22 nt, Human
ccucugccaccucccacgaggc

SEQ ID NO: 974531 - RNA, 22 nt, Human
aaucuguucuacucuauucaga

SEQ ID NO: 974532 - RNA, 22 nt, Human
ugaaggccagggauuugcagcc

SEQ ID NO: 974533 - RNA, 22 nt, Human
gagcucagauucuggugucaga

SEQ ID NO: 974534 - RNA, 21 nt, Human
ggcagcccgcccucuccuggc

SEQ ID NO: 974535 - RNA, 22 nt, Human
agaugguguuuccccaggugga

SEQ ID NO: 974536 - RNA, 22 nt, Human
gggagcaggagccugccugcca

SEQ ID NO: 974537 - RNA, 20 nt, Human
aggcagcugggaaaugaggg

SEQ ID NO: 974538 - RNA, 22 nt, Human
gucucagagagcuacucucuua

SEQ ID NO: 974539 - RNA, 22 nt, Human
gcugguuagaaaacagagcuca

SEQ ID NO: 974540 - RNA, 22 nt, Human
acagggucaagggugcuacaag

SEQ ID NO: 974541 - RNA, 22 nt, Human
cugcugugugaccauggacagg

SEQ ID NO: 974542 - RNA, 22 nt, Human
ggucccaguccucucccugcua

SEQ ID NO: 974543 - RNA, 22 nt, Human
cuuacauuaaguaagagauuga

SEQ ID NO: 974544 - RNA, 22 nt, Human
gaggcaugucuggccuguccca

SEQ ID NO: 974545 - RNA, 22 nt, Human
aaaugugucaguuucauucucu

SEQ ID NO: 974546 - RNA, 22 nt, Human
cuucccuuggugaacagagcau

SEQ ID NO: 974547 - RNA, 22 nt, Human
agcaauauaaauguuggguaga

SEQ ID NO: 974548 - RNA, 22 nt, Human
aaugcacagcguuccaugcuug

SEQ ID NO: 974549 - RNA, 22 nt, Human
uacaguaagaugaaauagcaau

SEQ ID NO: 974550 - RNA, 22 nt, Human
cccagcccaucucaaaggucua

SEQ ID NO: 974551 - RNA, 22 nt, Human
cucuggccagagccugcgggaa

SEQ ID NO: 974552 - RNA, 22 nt, Human
uuagauaaauugcaacuugauu

SEQ ID NO: 974553 - RNA, 21 nt, Human
augucaaaugcuuuauuuuau

SEQ ID NO: 974554 - RNA, 22 nt, Human
caggcacugugcaagggucucg

SEQ ID NO: 974555 - RNA, 23 nt, Human
uggcagagacccagaaucuacau

SEQ ID NO: 974556 - RNA, 23 nt, Human
ucuuuccucagcacacaccaaga

SEQ ID NO: 974557 - RNA, 22 nt, Human
ggggcccagcaccccuccucgc

SEQ ID NO: 974558 - RNA, 21 nt, Human
acucaggagacuaacuauguc

SEQ ID NO: 974559 - RNA, 22 nt, Human
uaugucuuguguuugcuaaucu

SEQ ID NO: 974560 - RNA, 22 nt, Human
agauuucccacuccauguauug

SEQ ID NO: 974561 - RNA, 22 nt, Human
gcugaagcugcagcaggaggaa

SEQ ID NO: 974562 - RNA, 22 nt, Human
ggcuggcaagugucugcucaug

SEQ ID NO: 974563 - RNA, 22 nt, Human
cuggguggaucgcagccccagg

SEQ ID NO: 974564 - RNA, 22 nt, Human
augcuguguggucaaguuaauu

SEQ ID NO: 974565 - RNA, 22 nt, Human
ugacacaggcagcucccagcac

SEQ ID NO: 974566 - RNA, 22 nt, Human
ccagagugacgugaagugugaa

SEQ ID NO: 974567 - RNA, 22 nt, Human
uacaguucacaguaucauaaau

SEQ ID NO: 974568 - RNA, 22 nt, Human
cacagggcaggccccaggccuc

SEQ ID NO: 974569 - RNA, 22 nt, Human
gagcugucucuauaugaaugcu

SEQ ID NO: 974570 - RNA, 22 nt, Human
cauguguagugaaauaagcagu

SEQ ID NO: 974571 - RNA, 22 nt, Human
uuuccaagacuccaguucuccc

SEQ ID NO: 974572 - RNA, 22 nt, Human
ugaacaacugcaaaaaucucca

SEQ ID NO: 974573 - RNA, 22 nt, Human
cuagagggauguuaggauagca

SEQ ID NO: 974574 - RNA, 21 nt, Human
ggcagcucagcagauggggac

SEQ ID NO: 974575 - RNA, 22 nt, Human
uccucaggagagcuccuaugcc

SEQ ID NO: 974576 - RNA, 22 nt, Human
aggaagaauguuuacauaucaa

SEQ ID NO: 974577 - RNA, 22 nt, Human
cuggccuucagacucggacuga

SEQ ID NO: 974578 - RNA, 22 nt, Human
uccuugaaugaauguucucucc

SEQ ID NO: 974579 - RNA, 22 nt, Human
ucaggagaaagccaauuagagu

SEQ ID NO: 974580 - RNA, 22 nt, Human
cuccacagcucaggcucagagu

SEQ ID NO: 974581 - RNA, 19 nt, Human
uggcagggagaguuugaag

SEQ ID NO: 974582 - RNA, 22 nt, Human
auugcuaggaacagguugcacc

SEQ ID NO: 974583 - RNA, 22 nt, Human
guucuguacuccaagcucuucc

SEQ ID NO: 974584 - RNA, 22 nt, Human
gcuuccucgcugggcagaggca

SEQ ID NO: 974585 - RNA, 22 nt, Human
gaugcugagagguggagggaac

SEQ ID NO: 974586 - RNA, 22 nt, Human
gagggccagcagccucagcaug

SEQ ID NO: 974587 - RNA, 22 nt, Human
ugauugaacugagcuucaagau

SEQ ID NO: 974588 - RNA, 22 nt, Human
ugagagaugaaguuaguuguuc

SEQ ID NO: 974589 - RNA, 22 nt, Human
gcugcccaggguggagccggcu

SEQ ID NO: 974590 - RNA, 22 nt, Human
cugggagcuuggagccuuuggu

SEQ ID NO: 974591 - RNA, 22 nt, Human
aucauucuauuguugagcugcc

SEQ ID NO: 974592 - RNA, 22 nt, Human
aucaggauagugguuaccuggg

SEQ ID NO: 974593 - RNA, 22 nt, Human
uggcgcaacucauucauggugu

SEQ ID NO: 974594 - RNA, 22 nt, Human
gugggagcuucaucaagcaguu

SEQ ID NO: 974595 - RNA, 22 nt, Human
cagggcagugaagaacacacgu

SEQ ID NO: 974596 - RNA, 22 nt, Human
aggcagaugggagcuggaaguu

SEQ ID NO: 974597 - RNA, 22 nt, Human
aacaucuacuaagugccaggca

SEQ ID NO: 974598 - RNA, 22 nt, Human
gcuggccagugucccagggauc

SEQ ID NO: 974599 - RNA, 22 nt, Human
uagaagcaguaauagaaauagg

SEQ ID NO: 974600 - RNA, 21 nt, Human
aagccucaagcagaagacaga

SEQ ID NO: 974601 - RNA, 21 nt, Human
guggcucugccaggacugaaa

SEQ ID NO: 974602 - RNA, 22 nt, Human
aaggcagucugguuucaaagca

SEQ ID NO: 974603 - RNA, 22 nt, Human
cucucagacugaagggccugug

SEQ ID NO: 974604 - RNA, 22 nt, Human
agcugguucagaaauuagaugg

SEQ ID NO: 974605 - RNA, 22 nt, Human
caucugccuaaguggcccuguu

SEQ ID NO: 974606 - RNA, 22 nt, Human
gaagagcuaaaggcacaggcuu

SEQ ID NO: 974607 - RNA, 21 nt, Human
gccugggauaguggccuccgg

SEQ ID NO: 974608 - RNA, 22 nt, Human
gaaaggucuuccggucuuccag

SEQ ID NO: 974609 - RNA, 22 nt, Human
ucugggaguuucugugggagcu

SEQ ID NO: 974610 - RNA, 22 nt, Human
ugaaaugaaugugauucgauag

SEQ ID NO: 974611 - RNA, 22 nt, Human
ucuggcucagggcucugaggga

SEQ ID NO: 974612 - RNA, 22 nt, Human
cagcaggauaugguggagagag

SEQ ID NO: 974613 - RNA, 19 nt, Human
uggaagaggaagggaaaua

SEQ ID NO: 974614 - RNA, 22 nt, Human
aggcagaucacuugaggccagg

SEQ ID NO: 974615 - RNA, 22 nt, Human
gcagagcuaucuucuggauuug

SEQ ID NO: 974616 - RNA, 23 nt, Human
agucucagcuggaaacauguguc

SEQ ID NO: 974617 - RNA, 22 nt, Human
cugcuuccauaaauaaugugcu

SEQ ID NO: 974618 - RNA, 22 nt, Human
caugucuuggcuuaggcacaga

SEQ ID NO: 974619 - RNA, 22 nt, Human
cagaguguggcaucuuccaacu

SEQ ID NO: 974620 - RNA, 19 nt, Human
guggccugcgcugggugcg

SEQ ID NO: 974621 - RNA, 22 nt, Human
cagugguggaaugaggaauugu

SEQ ID NO: 974622 - RNA, 22 nt, Human
gggcugcuguagagaacauguu

SEQ ID NO: 974623 - RNA, 22 nt, Human
acagacagggcaccugccuccu

SEQ ID NO: 974624 - RNA, 22 nt, Human
aggaccuguagggccugcaucc

SEQ ID NO: 974625 - RNA, 22 nt, Human
cacccaggcagguggcugagaa

SEQ ID NO: 974626 - RNA, 18 nt, Human
ucugggcuucccgaggcu

SEQ ID NO: 974627 - RNA, 22 nt, Human
ugggcacacugaaucugcuauu

SEQ ID NO: 974628 - RNA, 22 nt, Human
gcauuuccugugcuuggcauau

SEQ ID NO: 974629 - RNA, 22 nt, Human
agaaaucagaacccugaaguuc

SEQ ID NO: 974630 - RNA, 22 nt, Human
uaaguauguuagaaaaucaagu

SEQ ID NO: 974631 - RNA, 22 nt, Human
aagcuggcaugucaccugagaa

SEQ ID NO: 974632 - RNA, 22 nt, Human
auguauguaguguacauauaca

SEQ ID NO: 974633 - RNA, 22 nt, Human
agugaaauagcauuuaugaagc

SEQ ID NO: 974634 - RNA, 22 nt, Human
aaggcagccuuuugaguugauu

SEQ ID NO: 974635 - RNA, 22 nt, Human
aaaugcacagguuuuaaauccu

SEQ ID NO: 974636 - RNA, 22 nt, Human
ucccaggaagaucccagggacc

SEQ ID NO: 974637 - RNA, 22 nt, Human
agcauuuaguuaguaaauguuu

SEQ ID NO: 974638 - RNA, 22 nt, Human
gucucagauaacauguauucua

SEQ ID NO: 974639 - RNA, 22 nt, Human
aucuggcuuucuuaaugacuua

SEQ ID NO: 974640 - RNA, 22 nt, Human
uucacauugguucuugauagcu

SEQ ID NO: 974641 - RNA, 22 nt, Human
gccugggagugcacagugaggu

SEQ ID NO: 974642 - RNA, 22 nt, Human
agccacagagguugaugugguu

SEQ ID NO: 974643 - RNA, 22 nt, Human
aggcagucuaguccccaggcaa

SEQ ID NO: 974644 - RNA, 22 nt, Human
ccacucugcugugcuccaugau

SEQ ID NO: 974645 - RNA, 22 nt, Human
acugucuguccugcucuccgug

SEQ ID NO: 974646 - RNA, 22 nt, Human
uaacagaaauuuuaguuagggg

SEQ ID NO: 974647 - RNA, 22 nt, Human
ucacagugagccaugucagaga

SEQ ID NO: 974648 - RNA, 22 nt, Human
ugcccacauggugccauggcca

SEQ ID NO: 974649 - RNA, 22 nt, Human
aggaaaaaagucugugauuaua

SEQ ID NO: 974650 - RNA, 20 nt, Human
cagcccuccaguggaggcag

SEQ ID NO: 974651 - RNA, 20 nt, Human
cagcaguggaugagaguuuu

SEQ ID NO: 974652 - RNA, 22 nt, Human
acauuaaugaggugaugacaca

SEQ ID NO: 974653 - RNA, 22 nt, Human
aggccagaaaugucagggagug

SEQ ID NO: 974654 - RNA, 22 nt, Human
cagagccuaaaacgacuccacu

SEQ ID NO: 974655 - RNA, 22 nt, Human
gcuccuucaggugguagcuguu

SEQ ID NO: 974656 - RNA, 22 nt, Human
ggggugggguuacucauugugc

SEQ ID NO: 974657 - RNA, 22 nt, Human
aggaaacuccccuacaucucaa

SEQ ID NO: 974658 - RNA, 22 nt, Human
acucugaggagugacuagaggu

SEQ ID NO: 974659 - RNA, 22 nt, Human
ccugggagguggauguugcggu

SEQ ID NO: 974660 - RNA, 22 nt, Human
gcagggccuuagcagcggcugc

SEQ ID NO: 974661 - RNA, 20 nt, Human
gucaucgccggcagcaaaga

SEQ ID NO: 974662 - RNA, 22 nt, Human
gagcagcuccagccgcaugacu

SEQ ID NO: 974663 - RNA, 22 nt, Human
gcuccagguauuugcccuuuua

SEQ ID NO: 974664 - RNA, 22 nt, Human
ggcccaaggcccaggucgagcu

SEQ ID NO: 974665 - RNA, 20 nt, Human
acauggaaggucaaacuauc

SEQ ID NO: 974666 - RNA, 22 nt, Human
auucacaauagcagcuugcaug

SEQ ID NO: 974667 - RNA, 22 nt, Human
uggcagaggaaaaagucacugg

SEQ ID NO: 974668 - RNA, 22 nt, Human
uuuuuccuagugcuuucuggua

SEQ ID NO: 974669 - RNA, 22 nt, Human
aggucauuccuugucuucuugc

SEQ ID NO: 974670 - RNA, 23 nt, Human
uggaccugaaccagugccucugu

SEQ ID NO: 974671 - RNA, 22 nt, Human
ccagggcauguaacuaauggug

SEQ ID NO: 974672 - RNA, 16 nt, Human
ucucugcuucauaggu

SEQ ID NO: 974673 - RNA, 22 nt, Human
uugcuuccaguccaagucuguu

SEQ ID NO: 974674 - RNA, 22 nt, Human
ugcagcugguuuagaacuagau

SEQ ID NO: 974675 - RNA, 22 nt, Human
cugcucuggggaagccagaugu

SEQ ID NO: 974676 - RNA, 22 nt, Human
gauuucuucauucauuagaugg

SEQ ID NO: 974677 - RNA, 22 nt, Human
agcagugaugcaugacagccua

SEQ ID NO: 974678 - RNA, 22 nt, Human
agggccagaaucccucagucua

SEQ ID NO: 974679 - RNA, 22 nt, Human
acauuucuaguuguucaucucc

SEQ ID NO: 974680 - RNA, 22 nt, Human
ugggagcugggguuggacgucu

SEQ ID NO: 974681 - RNA, 21 nt, Human
uucuuuccccagaggacuaaa

SEQ ID NO: 974682 - RNA, 22 nt, Human
uggcucugugcuucuaguaucu

SEQ ID NO: 974683 - RNA, 22 nt, Human
ccagggugugagaaggaaguag

SEQ ID NO: 974684 - RNA, 22 nt, Human
aaugugcaggcucaaaccuugu

SEQ ID NO: 974685 - RNA, 22 nt, Human
gcucagagcaucccagugaaug

SEQ ID NO: 974686 - RNA, 22 nt, Human
gcagagcagugcuugcccagcg

SEQ ID NO: 974687 - RNA, 22 nt, Human
ccugagggaaggaugcuaccca

SEQ ID NO: 974688 - RNA, 22 nt, Human
gcagggccagugcagagaggaa

SEQ ID NO: 974689 - RNA, 22 nt, Human
caguugaugggacucauguggg

SEQ ID NO: 974690 - RNA, 22 nt, Human
ucucucuugucaccccaucugc

SEQ ID NO: 974691 - RNA, 22 nt, Human
ugggcagacgggagcuugccuu

SEQ ID NO: 974692 - RNA, 22 nt, Human
guuagaaacacauucuuauuga

SEQ ID NO: 974693 - RNA, 22 nt, Human
ggcucugcaugugagugggugg

SEQ ID NO: 974694 - RNA, 22 nt, Human
uggccaagaaugauaugugaag

SEQ ID NO: 974695 - RNA, 20 nt, Human
ggcaggcuuuauauggaggg

SEQ ID NO: 974696 - RNA, 22 nt, Human
agcagcuuacauguggccuauc

SEQ ID NO: 974697 - RNA, 22 nt, Human
aaaauauuuuagggccaggaga

SEQ ID NO: 974698 - RNA, 22 nt, Human
gcucuguguccacagcuggaaa

SEQ ID NO: 974699 - RNA, 20 nt, Human
aaaauauguauaacucuucu

SEQ ID NO: 974700 - RNA, 22 nt, Human
aaacauuugcaacucgguuugg

SEQ ID NO: 974701 - RNA, 22 nt, Human
uugcaaauauguucuccuauuc

SEQ ID NO: 974702 - RNA, 22 nt, Human
ggaaagaggauaguggguaggu

SEQ ID NO: 974703 - RNA, 22 nt, Human
guggccaaggcagagaaagagc

SEQ ID NO: 974704 - RNA, 22 nt, Human
aaggcugagggcuguaccuggc

SEQ ID NO: 974705 - RNA, 18 nt, Human
cugccuguugcugagagg

SEQ ID NO: 974706 - RNA, 22 nt, Human
ccagcagcuuuauuggcucucc

SEQ ID NO: 974707 - RNA, 22 nt, Human
ggcagcaggcgacuucccuauu

SEQ ID NO: 974708 - RNA, 22 nt, Human
auggucuguuaggagcuacuuu

SEQ ID NO: 974709 - RNA, 22 nt, Human
uuaacagagugccuggcaugua

SEQ ID NO: 974710 - RNA, 22 nt, Human
ucugucugcgcuugcccuggug

SEQ ID NO: 974711 - RNA, 22 nt, Human
acauuguauaaugauuaucaca

SEQ ID NO: 974712 - RNA, 20 nt, Human
cccugagacaaaggaggggc

SEQ ID NO: 974713 - RNA, 22 nt, Human
uagagcuauuuagagcauuuua

SEQ ID NO: 974714 - RNA, 22 nt, Human
cuggcagcgguuugcagccugg

SEQ ID NO: 974715 - RNA, 22 nt, Human
uggagcugagaaguggagcucu

SEQ ID NO: 974716 - RNA, 22 nt, Human
ggcuccuguccccucagcugcu

SEQ ID NO: 974717 - RNA, 22 nt, Human
agccuugaacacugacugaagg

SEQ ID NO: 974718 - RNA, 22 nt, Human
uguucagagacagaaauucuaa

SEQ ID NO: 974719 - RNA, 22 nt, Human
cugaggugcuagggucccugcu

SEQ ID NO: 974720 - RNA, 22 nt, Human
cuaaaugccuuuccuaccuaac

SEQ ID NO: 974721 - RNA, 22 nt, Human
uucuaacucuguuauguguuuc

SEQ ID NO: 974722 - RNA, 22 nt, Human
uuucaaaauuuugcagugguaa

SEQ ID NO: 974723 - RNA, 22 nt, Human
ugaguuuuuucaacauaugaag

SEQ ID NO: 974724 - RNA, 22 nt, Human
uggccagguguggguucucaga

SEQ ID NO: 974725 - RNA, 22 nt, Human
auucuucacuguuucagaauga

SEQ ID NO: 974726 - RNA, 22 nt, Human
gggcagagaaauggacaguugg

SEQ ID NO: 974727 - RNA, 22 nt, Human
gguccuggaaauugacggaaag

SEQ ID NO: 974728 - RNA, 22 nt, Human
cugccagguuggcgcucgcucu

SEQ ID NO: 974729 - RNA, 20 nt, Human
ucagcucugugccugggaug

SEQ ID NO: 974730 - RNA, 22 nt, Human
gcugccuguccugaggaguccg

SEQ ID NO: 974731 - RNA, 22 nt, Human
aagggccauaacuugcaguguu

SEQ ID NO: 974732 - RNA, 22 nt, Human
augggaggaugcucgggugcuc

SEQ ID NO: 974733 - RNA, 22 nt, Human
agcugcccugggucuugcugcu

SEQ ID NO: 974734 - RNA, 22 nt, Human
cuucagaagaaaagcagugugu

SEQ ID NO: 974735 - RNA, 22 nt, Human
caagagcuggagaggcagucua

SEQ ID NO: 974736 - RNA, 18 nt, Human
uaaaugcauguuaauaac

SEQ ID NO: 974737 - RNA, 22 nt, Human
gccugucucuuggaacuuggua

SEQ ID NO: 974738 - RNA, 22 nt, Human
cagcaggcagccauuucacugu

SEQ ID NO: 974739 - RNA, 22 nt, Human
caugaagcacagcucucuuuuu

SEQ ID NO: 974740 - RNA, 22 nt, Human
cugaggcugcccagggccaggu

SEQ ID NO: 974741 - RNA, 22 nt, Human
uccagucauuuccauuguuccc

SEQ ID NO: 974742 - RNA, 22 nt, Human
ggccagcagucacagggucaga

SEQ ID NO: 974743 - RNA, 22 nt, Human
aguaacucauguaaaccucaca

SEQ ID NO: 974744 - RNA, 22 nt, Human
ggagccaguuuagaccucaguu

SEQ ID NO: 974745 - RNA, 22 nt, Human
gccuggccugaacuaggaggug

SEQ ID NO: 974746 - RNA, 22 nt, Human
aagugacacauggcacuucuau

SEQ ID NO: 974747 - RNA, 22 nt, Human
uccaagggcagcagccauagcc

SEQ ID NO: 974748 - RNA, 22 nt, Human
augaaaacuuuagccucauuag

SEQ ID NO: 974749 - RNA, 23 nt, Human
ccagcuccgugagccucgggcuc

SEQ ID NO: 974750 - RNA, 22 nt, Human
agcaucuggugagggccuaguu

SEQ ID NO: 974751 - RNA, 22 nt, Human
aaaacauugaauugcacacuau

SEQ ID NO: 974752 - RNA, 22 nt, Human
uuccuuccgggcaccaggcacu

SEQ ID NO: 974753 - RNA, 22 nt, Human
gauuucaauccagcuuucuucu

SEQ ID NO: 974754 - RNA, 22 nt, Human
cagagcagcagagcuuccaugg

SEQ ID NO: 974755 - RNA, 22 nt, Human
ggcuggcaggcacaguaugcaa

SEQ ID NO: 974756 - RNA, 22 nt, Human
accaaggagccacauacaaccu

SEQ ID NO: 974757 - RNA, 22 nt, Human
uaagaacaguagaacaguaggu

SEQ ID NO: 974758 - RNA, 22 nt, Human
uaugcacaauaugaucuauuug

SEQ ID NO: 974759 - RNA, 22 nt, Human
guuuuauuuccaugagagaccg

SEQ ID NO: 974760 - RNA, 22 nt, Human
gaggcagcuuaggguacugacu

SEQ ID NO: 974761 - RNA, 22 nt, Human
ugucacagggauaccauggggc

SEQ ID NO: 974762 - RNA, 22 nt, Human
uccagaggcuccaaagggagau

SEQ ID NO: 974763 - RNA, 22 nt, Human
cagaggaugaucuggccucucu

SEQ ID NO: 974764 - RNA, 22 nt, Human
cuggcucuaucuccaaggcugg

SEQ ID NO: 974765 - RNA, 22 nt, Human
gugaggugguacaauauuaacu

SEQ ID NO: 974766 - RNA, 22 nt, Human
ccaggagaagcaucugagugua

SEQ ID NO: 974767 - RNA, 22 nt, Human
gugcugucaauugcuuucagua

SEQ ID NO: 974768 - RNA, 22 nt, Human
gaguuauuuugagcagaugguu

SEQ ID NO: 974769 - RNA, 22 nt, Human
cauuggaaugcauuugaagaga

SEQ ID NO: 974770 - RNA, 22 nt, Human
gugugcaguagagaaagagcag

SEQ ID NO: 974771 - RNA, 18 nt, Human
agcagcugucagaaugcc

SEQ ID NO: 974772 - RNA, 22 nt, Human
cccagcaguuguuggugcacau

SEQ ID NO: 974773 - RNA, 22 nt, Human
gagaugaauguaaacaaaggca

SEQ ID NO: 974774 - RNA, 18 nt, Human
ucuggcucaggacugaac

SEQ ID NO: 974775 - RNA, 22 nt, Human
uuucaagcauaacugggaagag

SEQ ID NO: 974776 - RNA, 22 nt, Human
ccagggccucguguucugagug

SEQ ID NO: 974777 - RNA, 22 nt, Human
ccaggagagcagaagcccaggc

SEQ ID NO: 974778 - RNA, 18 nt, Human
uccugccugugccccagg

SEQ ID NO: 974779 - RNA, 22 nt, Human
cauuguuaauugguaucuuaca

SEQ ID NO: 974780 - RNA, 22 nt, Human
ugucucugggugauucaguccu

SEQ ID NO: 974781 - RNA, 22 nt, Human
cucacuguuuaauagcuggauc

SEQ ID NO: 974782 - RNA, 22 nt, Human
cucagaaucugccaaguucagg

SEQ ID NO: 974783 - RNA, 21 nt, Human
uggaccaaaguaauuugccuu

SEQ ID NO: 974784 - RNA, 22 nt, Human
caggcugagcucuggccugggc

SEQ ID NO: 974785 - RNA, 22 nt, Human
uggcucuggggacaguaagucc

SEQ ID NO: 974786 - RNA, 22 nt, Human
uuaauuuucucaucugugaaau

SEQ ID NO: 974787 - RNA, 22 nt, Human
cccaggaaaucaggcuuucuag

SEQ ID NO: 974788 - RNA, 22 nt, Human
uugcuagcugguguaugcauug

SEQ ID NO: 974789 - RNA, 23 nt, Human
gugauuucagggaacagaaucag

SEQ ID NO: 974790 - RNA, 22 nt, Human
cuggcccauggugagcucuggg

SEQ ID NO: 974791 - RNA, 22 nt, Human
caaagugcugagauuacaggua

SEQ ID NO: 974792 - RNA, 22 nt, Human
acccagagccagggucaggagc

SEQ ID NO: 974793 - RNA, 22 nt, Human
ggcgcuggccacgguggcucug

SEQ ID NO: 974794 - RNA, 22 nt, Human
ugagccuggcggaagcagcgug

SEQ ID NO: 974795 - RNA, 22 nt, Human
aguuucuaccgguacauucagg

SEQ ID NO: 974796 - RNA, 22 nt, Human
cagcuggguuuaguggggugug

SEQ ID NO: 974797 - RNA, 22 nt, Human
caaaaguagugaaguuguacau

SEQ ID NO: 974798 - RNA, 22 nt, Human
cccaggagguagagguugcagu

SEQ ID NO: 974799 - RNA, 22 nt, Human
gcugggagucgcgucuguggcc

SEQ ID NO: 974800 - RNA, 22 nt, Human
aguaaacauaauuuaccuguag

SEQ ID NO: 974801 - RNA, 22 nt, Human
auggccaaggggccuaggcagg

SEQ ID NO: 974802 - RNA, 18 nt, Human
ucagcuggggcugcagcc

SEQ ID NO: 974803 - RNA, 22 nt, Human
ccagcccugccagagagagcug

SEQ ID NO: 974804 - RNA, 22 nt, Human
agggcugcaucugccuggugaa

SEQ ID NO: 974805 - RNA, 22 nt, Human
cugcugugaguuuggaggucua

SEQ ID NO: 974806 - RNA, 22 nt, Human
ugaagcuuuccuguggucagga

SEQ ID NO: 974807 - RNA, 22 nt, Human
ugcagccuugccuccucccagc

SEQ ID NO: 974808 - RNA, 21 nt, Human
acagcagacaggcuuaggacc

SEQ ID NO: 974809 - RNA, 17 nt, Human
gugcagggaugaaggau

SEQ ID NO: 974810 - RNA, 22 nt, Human
cagagccugccaccuuucuccc

SEQ ID NO: 974811 - RNA, 22 nt, Human
gugggagcugcuaccuccuucc

SEQ ID NO: 974812 - RNA, 22 nt, Human
uggagcccagggugagaaggag

SEQ ID NO: 974813 - RNA, 22 nt, Human
augaaauugaucuugaacuuuu

SEQ ID NO: 974814 - RNA, 22 nt, Human
ucaaagucauggcaggcucaga

SEQ ID NO: 974815 - RNA, 22 nt, Human
ccagggcugagcugugaccaug

SEQ ID NO: 974816 - RNA, 22 nt, Human
aagaacauguuaaaagauucac

SEQ ID NO: 974817 - RNA, 22 nt, Human
ugcucuguaaggucagaaaagg

SEQ ID NO: 974818 - RNA, 22 nt, Human
guagcuuaugaaaugugagggg

SEQ ID NO: 974819 - RNA, 20 nt, Human
ucugaggcugagcucuacuu

SEQ ID NO: 974820 - RNA, 22 nt, Human
agcugaguuaauucaucacuua

SEQ ID NO: 974821 - RNA, 22 nt, Human
uccagagggcgauggcuggggg

SEQ ID NO: 974822 - RNA, 22 nt, Human
aagauauucaaagauuuauuag

SEQ ID NO: 974823 - RNA, 22 nt, Human
cauuuugugcuagacacuaugg

SEQ ID NO: 974824 - RNA, 22 nt, Human
agcuggcaguaugacuggugac

SEQ ID NO: 974825 - RNA, 22 nt, Human
ggccuugguaaagggaugcaug

SEQ ID NO: 974826 - RNA, 22 nt, Human
agcaccugccugcauuggcuau

SEQ ID NO: 974827 - RNA, 22 nt, Human
cacuggggaaaacaggcuucuu

SEQ ID NO: 974828 - RNA, 22 nt, Human
aagcagaaguugaucuaccaua

SEQ ID NO: 974829 - RNA, 22 nt, Human
acccaggaggcagagguugcag

SEQ ID NO: 974830 - RNA, 22 nt, Human
uuucauaauacuguacaugaaa

SEQ ID NO: 974831 - RNA, 22 nt, Human
cugcucuggcuguguacuucag

SEQ ID NO: 974832 - RNA, 22 nt, Human
cucagggggaaucaggucacag

SEQ ID NO: 974833 - RNA, 22 nt, Human
agagggauaauauguauuguaa

SEQ ID NO: 974834 - RNA, 22 nt, Human
ucugccuguucaagucuucuag

SEQ ID NO: 974835 - RNA, 22 nt, Human
ucacauuuuccuugguaucugu

SEQ ID NO: 974836 - RNA, 22 nt, Human
cagccagaaccuaggaugagcu

SEQ ID NO: 974837 - RNA, 22 nt, Human
uuaauaaaguaugaauuggaaa

SEQ ID NO: 974838 - RNA, 22 nt, Human
ucacucuguuagaggaaagugc

SEQ ID NO: 974839 - RNA, 22 nt, Human
uggugucugcacucccuggcgu

SEQ ID NO: 974840 - RNA, 22 nt, Human
agagcuguucaacguagcaaug

SEQ ID NO: 974841 - RNA, 22 nt, Human
uuguuuaaaauguagcaagaaa

SEQ ID NO: 974842 - RNA, 22 nt, Human
uaaccauauuuuccauuaaguu

SEQ ID NO: 974843 - RNA, 22 nt, Human
gcugugugacugagagccuggc

SEQ ID NO: 974844 - RNA, 22 nt, Human
auaaguucagguaaagaaauca

SEQ ID NO: 974845 - RNA, 22 nt, Human
uauuucuuguuauucucguuga

SEQ ID NO: 974846 - RNA, 22 nt, Human
uugcauuguugcaaugaaguau

SEQ ID NO: 974847 - RNA, 22 nt, Human
cugucugucaaguucaucucca

SEQ ID NO: 974848 - RNA, 22 nt, Human
caguccuggggaccaggcugag

SEQ ID NO: 974849 - RNA, 22 nt, Human
uuuuagaaauacugauuuagug

SEQ ID NO: 974850 - RNA, 22 nt, Human
uccugggcugugugccacucug

SEQ ID NO: 974851 - RNA, 22 nt, Human
auuuaaaugcuuaagaggguuu

SEQ ID NO: 974852 - RNA, 22 nt, Human
uggagcaggugcucaggguaau

SEQ ID NO: 974853 - RNA, 22 nt, Human
aguuauaugugaaaacacguau

SEQ ID NO: 974854 - RNA, 22 nt, Human
gggagggacacaaagaguuccc

SEQ ID NO: 974855 - RNA, 22 nt, Human
ucauucuccucuggaaaaggca

SEQ ID NO: 974856 - RNA, 22 nt, Human
cagagcuguuacuauucaugaa

SEQ ID NO: 974857 - RNA, 22 nt, Human
agggccugugcuuccugagaua

SEQ ID NO: 974858 - RNA, 22 nt, Human
aauucuugguccuaguguauaa

SEQ ID NO: 974859 - RNA, 22 nt, Human
uuaggaaauuaugguuucagau

SEQ ID NO: 974860 - RNA, 22 nt, Human
uacuaggaagcagcugcauugg

SEQ ID NO: 974861 - RNA, 22 nt, Human
aguggcaggcggagauguagga

SEQ ID NO: 974862 - RNA, 22 nt, Human
agggaaauuaaugugagcaaug

SEQ ID NO: 974863 - RNA, 22 nt, Human
aacuuugucuuuuaugcuuaca

SEQ ID NO: 974864 - RNA, 22 nt, Human
guugggaagcagauggaugagc

SEQ ID NO: 974865 - RNA, 22 nt, Human
caaggccacuccagagacuggu

SEQ ID NO: 974866 - RNA, 22 nt, Human
ggucccaggagaauaggugcaa

SEQ ID NO: 974867 - RNA, 22 nt, Human
acccaggacaaaauaaccaggu

SEQ ID NO: 974868 - RNA, 23 nt, Human
uacaugcuauaauuucacccuca

SEQ ID NO: 974869 - RNA, 22 nt, Human
guuggccugaauggucaagagg

SEQ ID NO: 974870 - RNA, 19 nt, Human
aggugaugugacucuagaa

SEQ ID NO: 974871 - RNA, 22 nt, Human
uuacuuuggguccugcuuauaa

SEQ ID NO: 974872 - RNA, 22 nt, Human
auagcuguuagauuggggucga

SEQ ID NO: 974873 - RNA, 22 nt, Human
uuagaaagcuuuccauagucaa

SEQ ID NO: 974874 - RNA, 22 nt, Human
agucagcagccuggccaggaga

SEQ ID NO: 974875 - RNA, 22 nt, Human
gacccuggaacuuucagcagag

SEQ ID NO: 974876 - RNA, 20 nt, Human
cuccagggaacagacuggag

SEQ ID NO: 974877 - RNA, 22 nt, Human
ugagacaguucugcagcugggu

SEQ ID NO: 974878 - RNA, 22 nt, Human
ggaugcugcuaucaggcuucga

SEQ ID NO: 974879 - RNA, 23 nt, Human
aggagccaggaaccagcuucccc

SEQ ID NO: 974880 - RNA, 21 nt, Human
agcugagcccagaagacuggu

SEQ ID NO: 974881 - RNA, 21 nt, Human
agcagaggcugccuggugacu

SEQ ID NO: 974882 - RNA, 22 nt, Human
acugccuuauaugcugugugug

SEQ ID NO: 974883 - RNA, 22 nt, Human
gagcugcugguugcuggugccu

SEQ ID NO: 974884 - RNA, 22 nt, Human
ucgagucauguucucccauuaa

SEQ ID NO: 974885 - RNA, 22 nt, Human
cuguuuucaaagagagagaaug

SEQ ID NO: 974886 - RNA, 22 nt, Human
caggcagcagccacucugguau

SEQ ID NO: 974887 - RNA, 22 nt, Human
ucugggcucuuaguguacccuc

SEQ ID NO: 974888 - RNA, 23 nt, Human
uugcacauuggagcuggucuucu

SEQ ID NO: 974889 - RNA, 22 nt, Human
aguucacauuccgagguacugg

SEQ ID NO: 974890 - RNA, 22 nt, Human
caggugggcguggcgagaaggc

SEQ ID NO: 974891 - RNA, 22 nt, Human
ggcagaggaaggaugaauucac

SEQ ID NO: 974892 - RNA, 22 nt, Human
cucccuggcuuuguccugaggc

SEQ ID NO: 974893 - RNA, 20 nt, Human
ccugucuccucuuaccuggc

SEQ ID NO: 974894 - RNA, 19 nt, Human
ugaguucugugguucucaa

SEQ ID NO: 974895 - RNA, 22 nt, Human
uuuguuuagaaagagauuggug

SEQ ID NO: 974896 - RNA, 23 nt, Human
uucuucucaauuaguugauucag

SEQ ID NO: 974897 - RNA, 22 nt, Human
ugaggccagucucaucacaggc

SEQ ID NO: 974898 - RNA, 22 nt, Human
cagaccagcucuaugaacccaa

SEQ ID NO: 974899 - RNA, 22 nt, Human
ggugugccuggggcuuagcugc

SEQ ID NO: 974900 - RNA, 20 nt, Human
agcugccccugggcacugcc

SEQ ID NO: 974901 - RNA, 22 nt, Human
ggggcacuuccaggcugaggcu

SEQ ID NO: 974902 - RNA, 21 nt, Human
ccugccaggaaacugaguguc

SEQ ID NO: 974903 - RNA, 22 nt, Human
cccaggaguucgaggcuguagu

SEQ ID NO: 974904 - RNA, 20 nt, Human
cccuccagcaaccaggacuu

SEQ ID NO: 974905 - RNA, 22 nt, Human
cuggaguuagaguagacacuga

SEQ ID NO: 974906 - RNA, 22 nt, Human
acagagauguggaugagggauu

SEQ ID NO: 974907 - RNA, 22 nt, Human
cagggagaagucuggucagucc

SEQ ID NO: 974908 - RNA, 22 nt, Human
acagccagaggagccaggcugg

SEQ ID NO: 974909 - RNA, 22 nt, Human
gggugcaggcagcccaggcagg

SEQ ID NO: 974910 - RNA, 22 nt, Human
agcccugggaggccagcuugua

SEQ ID NO: 974911 - RNA, 22 nt, Human
cauggagauaaacugaaauauu

SEQ ID NO: 974912 - RNA, 19 nt, Human
agauggcaaaaugcaaaga

SEQ ID NO: 974913 - RNA, 22 nt, Human
uuggagguuugaaaauaugugu

SEQ ID NO: 974914 - RNA, 19 nt, Human
ugggcagcucccucugucc

SEQ ID NO: 974915 - RNA, 22 nt, Human
guucauuuuacuguaaauagca

SEQ ID NO: 974916 - RNA, 22 nt, Human
cccaggaaagagacugcugggu

SEQ ID NO: 974917 - RNA, 22 nt, Human
guaggaagcucugaggcuaguu

SEQ ID NO: 974918 - RNA, 22 nt, Human
aaauaauuauagcgagucuauc

SEQ ID NO: 974919 - RNA, 22 nt, Human
cauuugaaauaguucauucuug

SEQ ID NO: 974920 - RNA, 22 nt, Human
uccugaggcucacuuugaaugu

SEQ ID NO: 974921 - RNA, 22 nt, Human
ucccccacucuaaaggagccuu

SEQ ID NO: 974922 - RNA, 22 nt, Human
gucuuuauuugagauugucauu

SEQ ID NO: 974923 - RNA, 22 nt, Human
ugggcuggcccaccacaccucg

SEQ ID NO: 974924 - RNA, 22 nt, Human
uagaaacacagaucugguguca

SEQ ID NO: 974925 - RNA, 22 nt, Human
gaggguggguuucuugcacguc

SEQ ID NO: 974926 - RNA, 22 nt, Human
acucugcuuccacuuuugcuaa

SEQ ID NO: 974927 - RNA, 23 nt, Human
gccuucagcucgggaaggcuccc

SEQ ID NO: 974928 - RNA, 22 nt, Human
uagaauaugugguguauacuuu

SEQ ID NO: 974929 - RNA, 22 nt, Human
cugccuccugccgugcagcuuc

SEQ ID NO: 974930 - RNA, 22 nt, Human
agaagccauguuuaguaggaug

SEQ ID NO: 974931 - RNA, 22 nt, Human
gugcaagguacauccuugaugu

SEQ ID NO: 974932 - RNA, 22 nt, Human
ggcugcuggggacgugggagag

SEQ ID NO: 974933 - RNA, 21 nt, Human
uaaggccaagucuauuucugu

SEQ ID NO: 974934 - RNA, 19 nt, Human
ucugcuggcagaauucccu

SEQ ID NO: 974935 - RNA, 22 nt, Human
aagacaauuugauacuaguugc

SEQ ID NO: 974936 - RNA, 22 nt, Human
cacagcagagggagccauugaa

SEQ ID NO: 974937 - RNA, 22 nt, Human
gagagucuagugcaccuaguuu

SEQ ID NO: 974938 - RNA, 22 nt, Human
ucaucugucauccacaaagcug

SEQ ID NO: 974939 - RNA, 22 nt, Human
ccuguucacuuugacuucucca

SEQ ID NO: 974940 - RNA, 22 nt, Human
agccuggccacucagggccuga

SEQ ID NO: 974941 - RNA, 22 nt, Human
cuggagccccaggcugugcaga

SEQ ID NO: 974942 - RNA, 22 nt, Human
cuggccacaacuagcccaggac

SEQ ID NO: 974943 - RNA, 22 nt, Human
agcugcucaggagagccagguc

SEQ ID NO: 974944 - RNA, 23 nt, Human
acaaaugcccauacaucuaguuc

SEQ ID NO: 974945 - RNA, 23 nt, Human
uuggcagcgggucaggcuguggg

SEQ ID NO: 974946 - RNA, 22 nt, Human
aagaauaaauuaagauacuuag

SEQ ID NO: 974947 - RNA, 22 nt, Human
uccagucaucucccuucacauu

SEQ ID NO: 974948 - RNA, 22 nt, Human
cugcucugaguauuaacggagg

SEQ ID NO: 974949 - RNA, 22 nt, Human
uucuguuuuagaaauaaguagu

SEQ ID NO: 974950 - RNA, 22 nt, Human
ucuggcaaaggcaaccacaguu

SEQ ID NO: 974951 - RNA, 22 nt, Human
aagggcugcuguagaagcagag

SEQ ID NO: 974952 - RNA, 22 nt, Human
ugggccuguugggguugaguua

SEQ ID NO: 974953 - RNA, 22 nt, Human
auucuguauggaaaagcacuau

SEQ ID NO: 974954 - RNA, 22 nt, Human
acaaggaggucuggggggcccu

SEQ ID NO: 974955 - RNA, 22 nt, Human
ccucuggcaacuucacagccca

SEQ ID NO: 974956 - RNA, 22 nt, Human
ugaaaugauuauaugguguuug

SEQ ID NO: 974957 - RNA, 21 nt, Human
ccuggccaaucugauaggguu

SEQ ID NO: 974958 - RNA, 22 nt, Human
agcucccagagcucgagaguaa

SEQ ID NO: 974959 - RNA, 22 nt, Human
ugcagcuccucuggcugccuga

SEQ ID NO: 974960 - RNA, 22 nt, Human
gagcaggcauucuaguggcuga

SEQ ID NO: 974961 - RNA, 22 nt, Human
auaugcuuaugaugucucaagu

SEQ ID NO: 974962 - RNA, 22 nt, Human
acccagcuggaugcauggaggc

SEQ ID NO: 974963 - RNA, 22 nt, Human
ucauacaucuguccuggagcuc

SEQ ID NO: 974964 - RNA, 22 nt, Human
gaccagucauuacucaugcccu

SEQ ID NO: 974965 - RNA, 22 nt, Human
auuuaugacuggugaauagaac

SEQ ID NO: 974966 - RNA, 22 nt, Human
ccacagggcacagacaggaagc

SEQ ID NO: 974967 - RNA, 22 nt, Human
aguuuuucuccccuggcuucau

SEQ ID NO: 974968 - RNA, 22 nt, Human
gggcccuggacguggcggcaga

SEQ ID NO: 974969 - RNA, 22 nt, Human
gucuucuuguguugccugucuu

SEQ ID NO: 974970 - RNA, 17 nt, Human
gucauucucagaaaaug

SEQ ID NO: 974971 - RNA, 22 nt, Human
guauuaggugguggaauuguag

SEQ ID NO: 974972 - RNA, 22 nt, Human
ucuccugguacccuuccuagca

SEQ ID NO: 974973 - RNA, 22 nt, Human
uaaaagacccucuagaguccca

SEQ ID NO: 974974 - RNA, 22 nt, Human
agagccuggaccugagcuacaa

SEQ ID NO: 974975 - RNA, 22 nt, Human
uagcacugaaucacaugcugcu

SEQ ID NO: 974976 - RNA, 22 nt, Human
cagcucucacacccuccuccca

SEQ ID NO: 974977 - RNA, 20 nt, Human
cucaggauacugcaaaguug

SEQ ID NO: 974978 - RNA, 22 nt, Human
gggcuggcgggaaaggcaauuc

SEQ ID NO: 974979 - RNA, 22 nt, Human
ugaagcagagugaaggugaauu

SEQ ID NO: 974980 - RNA, 22 nt, Human
cagcagccuacaaugcacagaa

SEQ ID NO: 974981 - RNA, 22 nt, Human
uaugccugauaacugugucucu

SEQ ID NO: 974982 - RNA, 22 nt, Human
ugaaucaguauaaauucucaaa

SEQ ID NO: 974983 - RNA, 22 nt, Human
cucccaggguagggagagacua

SEQ ID NO: 974984 - RNA, 22 nt, Human
cagcugcuguuacugcuuauua

SEQ ID NO: 974985 - RNA, 22 nt, Human
uuauauguuucuguuuggaggc

SEQ ID NO: 974986 - RNA, 18 nt, Human
uugagggaggggcagagu

SEQ ID NO: 974987 - RNA, 22 nt, Human
agagcccucuucacugccccuu

SEQ ID NO: 974988 - RNA, 22 nt, Human
ucaggagaaucagggcuguccu

SEQ ID NO: 974989 - RNA, 22 nt, Human
agcagccaaaugaagauuuuac

SEQ ID NO: 974990 - RNA, 22 nt, Human
cagagccuuccuagcagacucu

SEQ ID NO: 974991 - RNA, 22 nt, Human
uaggcacuagacaugguuacca

SEQ ID NO: 974992 - RNA, 22 nt, Human
acucugcuaaauguguaggcuc

SEQ ID NO: 974993 - RNA, 22 nt, Human
gaggagagaacauuccuccaua

SEQ ID NO: 974994 - RNA, 22 nt, Human
ccugggccugaaaacauuucuc

SEQ ID NO: 974995 - RNA, 22 nt, Human
guuucauacagauuauucaugg

SEQ ID NO: 974996 - RNA, 22 nt, Human
aacauucaccucuaccuccuuc

SEQ ID NO: 974997 - RNA, 22 nt, Human
uaaggccauuauggugggcccg

SEQ ID NO: 974998 - RNA, 22 nt, Human
uugaaagggauauaucuuucug

SEQ ID NO: 974999 - RNA, 22 nt, Human
aaggcugaguaaaacagagaac

SEQ ID NO: 975000 - RNA, 22 nt, Human
ccaucagcaugggagcaugggc

SEQ ID NO: 975001 - RNA, 22 nt, Human
agaccauagggaccucagguug

SEQ ID NO: 975002 - RNA, 22 nt, Human
cagcugccuucugcgggaaguc

SEQ ID NO: 975003 - RNA, 22 nt, Human
uuauuuuuaaaaguucacacag

SEQ ID NO: 975004 - RNA, 22 nt, Human
cugaacuuauugagugcuugcu

SEQ ID NO: 975005 - RNA, 22 nt, Human
auacacauauguguguauaugu

SEQ ID NO: 975006 - RNA, 22 nt, Human
uggaaggggagcuggaaagggg

SEQ ID NO: 975007 - RNA, 22 nt, Human
auguucaaacuuuuuacacacc

SEQ ID NO: 975008 - RNA, 22 nt, Human
auuuucuauguuguaauuguua

SEQ ID NO: 975009 - RNA, 22 nt, Human
ucuuugcagaauuuaacuuugc

SEQ ID NO: 975010 - RNA, 22 nt, Human
uuggcacagagcugcagccugg

SEQ ID NO: 975011 - RNA, 22 nt, Human
cccagccuuugcuuccugguuc

SEQ ID NO: 975012 - RNA, 22 nt, Human
aggagcugcuuaaaugguuggu

SEQ ID NO: 975013 - RNA, 22 nt, Human
gccucugcggagcuguacauca

SEQ ID NO: 975014 - RNA, 17 nt, Human
cccaugagcccacuccc

SEQ ID NO: 975015 - RNA, 21 nt, Human
acacauuaugagcauagacuc

SEQ ID NO: 975016 - RNA, 22 nt, Human
ugugcaguuucuauguugucca

SEQ ID NO: 975017 - RNA, 22 nt, Human
gcagugaaacaauaggaucaaa

SEQ ID NO: 975018 - RNA, 22 nt, Human
aggacuucaucaccuguauaaa

SEQ ID NO: 975019 - RNA, 22 nt, Human
cccaggaaugggaaggaggaau

SEQ ID NO: 975020 - RNA, 22 nt, Human
cuucacaacgacaucugguuag

SEQ ID NO: 975021 - RNA, 22 nt, Human
gggcagcugccccucucugggc

SEQ ID NO: 975022 - RNA, 19 nt, Human
agucugcauuucuagcaag

SEQ ID NO: 975023 - RNA, 22 nt, Human
aggccuuccucggagacaggga

SEQ ID NO: 975024 - RNA, 22 nt, Human
cucaacagcucugccauacucc

SEQ ID NO: 975025 - RNA, 21 nt, Human
uucuucaugaugauuaauggc

SEQ ID NO: 975026 - RNA, 22 nt, Human
guccagggcuaaaucagguucc

SEQ ID NO: 975027 - RNA, 19 nt, Human
uuagccauccacagugaaa

SEQ ID NO: 975028 - RNA, 19 nt, Human
uccucaggggcucacagac

SEQ ID NO: 975029 - RNA, 22 nt, Human
agcuuuaugggagcuuagauaa

SEQ ID NO: 975030 - RNA, 22 nt, Human
acugucugcuggccccugguua

SEQ ID NO: 975031 - RNA, 20 nt, Human
cugggccauccuuuuacaau

SEQ ID NO: 975032 - RNA, 23 nt, Human
guggccuccccggaaugccucgc

SEQ ID NO: 975033 - RNA, 22 nt, Human
uacuccugcugauccugccagc

SEQ ID NO: 975034 - RNA, 22 nt, Human
ugaaaucuucacuaagucucuu

SEQ ID NO: 975035 - RNA, 22 nt, Human
gaggcugcuuugaugacaggag

SEQ ID NO: 975036 - RNA, 22 nt, Human
ccugcuguaaugugucuuuauu

SEQ ID NO: 975037 - RNA, 22 nt, Human
gggagcugaauggcaauggaga

SEQ ID NO: 975038 - RNA, 22 nt, Human
auguacaguuucuagacucaaa

SEQ ID NO: 975039 - RNA, 22 nt, Human
ggggcggggcucugagaagcau

SEQ ID NO: 975040 - RNA, 22 nt, Human
uggccugucuuguugugcuaga

SEQ ID NO: 975041 - RNA, 22 nt, Human
gccuggagggcucuagagaggc

SEQ ID NO: 975042 - RNA, 20 nt, Human
ugcugucguguuuucugcuu

SEQ ID NO: 975043 - RNA, 22 nt, Human
cccaggagauggugcguggucu

SEQ ID NO: 975044 - RNA, 22 nt, Human
ggcagaguggagugcggccucc

SEQ ID NO: 975045 - RNA, 22 nt, Human
gaggcagcuggguccggucggg

SEQ ID NO: 975046 - RNA, 22 nt, Human
uauggcauauaguccagcauaa

SEQ ID NO: 975047 - RNA, 22 nt, Human
ucaugacaucuguuuaucucaa

SEQ ID NO: 975048 - RNA, 22 nt, Human
ccugggcucaagugauccuccu

SEQ ID NO: 975049 - RNA, 22 nt, Human
gcaagcaagcagguagagcuga

SEQ ID NO: 975050 - RNA, 22 nt, Human
gcagcugccgugagcucacgcc

SEQ ID NO: 975051 - RNA, 22 nt, Human
agauggggcagaauggagccau

SEQ ID NO: 975052 - RNA, 22 nt, Human
cuguggaaauaaacaaugcuaa

SEQ ID NO: 975053 - RNA, 20 nt, Human
cugccaugauugauagagug

SEQ ID NO: 975054 - RNA, 19 nt, Human
uucaggauugacccuacug

SEQ ID NO: 975055 - RNA, 19 nt, Human
gccugccuggguuucugag

SEQ ID NO: 975056 - RNA, 22 nt, Human
cuuauguauaauguuccacaua

SEQ ID NO: 975057 - RNA, 22 nt, Human
aucaggaugaagcuguagcgaa

SEQ ID NO: 975058 - RNA, 22 nt, Human
uauucacagcugccgcacucag

SEQ ID NO: 975059 - RNA, 22 nt, Human
ggaggccacgguuuagcaccga

SEQ ID NO: 975060 - RNA, 22 nt, Human
aagagggaggugcgggugcaga

SEQ ID NO: 975061 - RNA, 22 nt, Human
uuuauuaaaacuguuggcucug

SEQ ID NO: 975062 - RNA, 21 nt, Human
uuacuuuugcaccaaccuaau

SEQ ID NO: 975063 - RNA, 22 nt, Human
gccacaugcaauugcagcacgu

SEQ ID NO: 975064 - RNA, 22 nt, Human
aguugacauccagagacauucu

SEQ ID NO: 975065 - RNA, 22 nt, Human
caguucuuaauaccaugugguu

SEQ ID NO: 975066 - RNA, 22 nt, Human
cagcugccacuugcucucggcu

SEQ ID NO: 975067 - RNA, 22 nt, Human
uggcagcagggaggccaguguu

SEQ ID NO: 975068 - RNA, 23 nt, Human
uuugaaaguaucaacucgccuga

SEQ ID NO: 975069 - RNA, 22 nt, Human
auauuagggucucuaaauucua

SEQ ID NO: 975070 - RNA, 22 nt, Human
uacauugugauguuucaauaca

SEQ ID NO: 975071 - RNA, 22 nt, Human
gaaucauuuauuuuugacagca

SEQ ID NO: 975072 - RNA, 22 nt, Human
uggcccugacuuggaggccuga

SEQ ID NO: 975073 - RNA, 22 nt, Human
uaucuugagagacaacacagca

SEQ ID NO: 975074 - RNA, 22 nt, Human
ucaaaguuuuugagaauuacau

SEQ ID NO: 975075 - RNA, 22 nt, Human
auauugaacccuacagacugua

SEQ ID NO: 975076 - RNA, 22 nt, Human
ugccucugaggaagauuguguu

SEQ ID NO: 975077 - RNA, 22 nt, Human
gaaaauguuuguccggagcuga

SEQ ID NO: 975078 - RNA, 22 nt, Human
aacaugaaaguugcuaagugca

SEQ ID NO: 975079 - RNA, 22 nt, Human
agcacaggaccaaggaagcugu

SEQ ID NO: 975080 - RNA, 22 nt, Human
caggggcuguggcacauggugu

SEQ ID NO: 975081 - RNA, 22 nt, Human
gcccuuccuuagacagcaggau

SEQ ID NO: 975082 - RNA, 22 nt, Human
gcuccuggagagauugagaaag

SEQ ID NO: 975083 - RNA, 22 nt, Human
augugucuuugagacucugcua

SEQ ID NO: 975084 - RNA, 22 nt, Human
aucuagauuagguauaagagcu

SEQ ID NO: 975085 - RNA, 22 nt, Human
ccauccugcauugcuauucaga

SEQ ID NO: 975086 - RNA, 22 nt, Human
gucuggccuuuuuagcuugugg

SEQ ID NO: 975087 - RNA, 22 nt, Human
uggccaggcagguagaacggcc

SEQ ID NO: 975088 - RNA, 22 nt, Human
auccuucaaggggcugacagcu

SEQ ID NO: 975089 - RNA, 22 nt, Human
gaagcagcagcuggggacaguu

SEQ ID NO: 975090 - RNA, 22 nt, Human
ccaggagagcgcccucccggcc

SEQ ID NO: 975091 - RNA, 21 nt, Human
ucccugcuuucuggcccaguc

SEQ ID NO: 975092 - RNA, 22 nt, Human
auaguuugugaaacacagcagu

SEQ ID NO: 975093 - RNA, 22 nt, Human
uuuauuaauguagcauccaugg

SEQ ID NO: 975094 - RNA, 22 nt, Human
cuuuuuccagcuucaggguggg

SEQ ID NO: 975095 - RNA, 22 nt, Human
cagaggcauacucccagucuug

SEQ ID NO: 975096 - RNA, 19 nt, Human
agugaaauggaguauucaa

SEQ ID NO: 975097 - RNA, 22 nt, Human
uuuaagagcuaguaugucauuu

SEQ ID NO: 975098 - RNA, 22 nt, Human
acugcaggagacacagcugcug

SEQ ID NO: 975099 - RNA, 22 nt, Human
acauuucugcaucucagagcua

SEQ ID NO: 975100 - RNA, 22 nt, Human
caaaugcuacuaauaggcaagu

SEQ ID NO: 975101 - RNA, 22 nt, Human
aucucagggcuggagcccugga

SEQ ID NO: 975102 - RNA, 22 nt, Human
agggaucaaaaaauguacaugc

SEQ ID NO: 975103 - RNA, 22 nt, Human
uccagccaagggagguuacuag

SEQ ID NO: 975104 - RNA, 22 nt, Human
aaguaugugauacauguuaauu

SEQ ID NO: 975105 - RNA, 22 nt, Human
ugcaccuuguccauuuuuggcc

SEQ ID NO: 975106 - RNA, 22 nt, Human
cacagggcagguacucucagag

SEQ ID NO: 975107 - RNA, 22 nt, Human
ggaggaccugcuggcccugcaa

SEQ ID NO: 975108 - RNA, 19 nt, Human
uugaaauuguuugauaugg

SEQ ID NO: 975109 - RNA, 22 nt, Human
agacucugcuaagaauauaauu

SEQ ID NO: 975110 - RNA, 22 nt, Human
caggagcagaggguggucagca

SEQ ID NO: 975111 - RNA, 22 nt, Human
ugaggcaggaguuaaugugcuc

SEQ ID NO: 975112 - RNA, 22 nt, Human
agccagcuguacugccugcuca

SEQ ID NO: 975113 - RNA, 22 nt, Human
ggaggagacaguaaaaagcacg

SEQ ID NO: 975114 - RNA, 22 nt, Human
ugaacucucucaagugacagaa

SEQ ID NO: 975115 - RNA, 22 nt, Human
cuguuuuugugcugugucuccc

SEQ ID NO: 975116 - RNA, 22 nt, Human
cacugugucaguuugguuagac

SEQ ID NO: 975117 - RNA, 22 nt, Human
gaaaugcauggaucuuggcaga

SEQ ID NO: 975118 - RNA, 20 nt, Human
ucaggcaguggggaaaggca

SEQ ID NO: 975119 - RNA, 22 nt, Human
ucagagcuuaucucuugcugga

SEQ ID NO: 975120 - RNA, 22 nt, Human
aucauuacuccuguaaaauugu

SEQ ID NO: 975121 - RNA, 22 nt, Human
uuuccuuccuugcuagccugag

SEQ ID NO: 975122 - RNA, 22 nt, Human
gcuguucacaucuggaccauuu

SEQ ID NO: 975123 - RNA, 22 nt, Human
ccuccuggaggcucuagggaaa

SEQ ID NO: 975124 - RNA, 22 nt, Human
cugccuggaaggagcaagggga

SEQ ID NO: 975125 - RNA, 22 nt, Human
ggcuguggcagcuggaaguggu

SEQ ID NO: 975126 - RNA, 22 nt, Human
cgucccaguuccagccgcgcug

SEQ ID NO: 975127 - RNA, 22 nt, Human
gacagcuguggagaggcaugug

SEQ ID NO: 975128 - RNA, 23 nt, Human
agucaguguaaguuuggaaugca

SEQ ID NO: 975129 - RNA, 22 nt, Human
cccucugaccuccugccacagu

SEQ ID NO: 975130 - RNA, 22 nt, Human
cacacaggagagugcuggaggu

SEQ ID NO: 975131 - RNA, 22 nt, Human
uccugccugagcguggaggagg

SEQ ID NO: 975132 - RNA, 22 nt, Human
cagagacauuaagugccaugau

SEQ ID NO: 975133 - RNA, 22 nt, Human
uuaaugcagaaaucaaacugac

SEQ ID NO: 975134 - RNA, 22 nt, Human
ucugggaaccagugcggcuggg

SEQ ID NO: 975135 - RNA, 23 nt, Human
guaaaauacgcagugcaguguga

SEQ ID NO: 975136 - RNA, 19 nt, Human
ucucaauguucagaaagcu

SEQ ID NO: 975137 - RNA, 22 nt, Human
aaggcagcccuggcucagccug

SEQ ID NO: 975138 - RNA, 22 nt, Human
caugcacaacauacucaagagg

SEQ ID NO: 975139 - RNA, 20 nt, Human
uuucacaaugaacaugucuc

SEQ ID NO: 975140 - RNA, 22 nt, Human
uuccaguucccaugaggauuaa

SEQ ID NO: 975141 - RNA, 20 nt, Human
cuguggcucaugcaucugcc

SEQ ID NO: 975142 - RNA, 22 nt, Human
aagcacuuagaagagugccugc

SEQ ID NO: 975143 - RNA, 22 nt, Human
ucauccuuuugcaugggaaggc

SEQ ID NO: 975144 - RNA, 22 nt, Human
ucaaaugcuguauuguaguaau

SEQ ID NO: 975145 - RNA, 22 nt, Human
aggcagcuaagauggauaauga

SEQ ID NO: 975146 - RNA, 22 nt, Human
uggcucagcagguuagaaacua

SEQ ID NO: 975147 - RNA, 22 nt, Human
gccuggagcucaugugggcauu

SEQ ID NO: 975148 - RNA, 22 nt, Human
uauuuccugcauggugauguaa

SEQ ID NO: 975149 - RNA, 22 nt, Human
agaaauguauucuguauguuuu

SEQ ID NO: 975150 - RNA, 22 nt, Human
agucuugcucuugcaucugcuu

SEQ ID NO: 975151 - RNA, 21 nt, Human
acaggagaccgccuggcaguc

SEQ ID NO: 975152 - RNA, 22 nt, Human
guaauguguuuugaaaaacagu

SEQ ID NO: 975153 - RNA, 22 nt, Human
aggcagccagauggcagccugc

SEQ ID NO: 975154 - RNA, 22 nt, Human
ccacccuuggguucggaggccg

SEQ ID NO: 975155 - RNA, 22 nt, Human
ccuggcugggccugauuucuca

SEQ ID NO: 975156 - RNA, 22 nt, Human
acaaacuaccuacagauguuca

SEQ ID NO: 975157 - RNA, 22 nt, Human
gggcacugcuuugcucugucac

SEQ ID NO: 975158 - RNA, 22 nt, Human
uucucagauccaucagaagucc

SEQ ID NO: 975159 - RNA, 22 nt, Human
aucaguuugauaauaaggcuug

SEQ ID NO: 975160 - RNA, 22 nt, Human
gggucuggcaugcugagaugga

SEQ ID NO: 975161 - RNA, 22 nt, Human
uugaauaguuuuggauagcaua

SEQ ID NO: 975162 - RNA, 22 nt, Human
ugguuuauuucucugaaagguu

SEQ ID NO: 975163 - RNA, 22 nt, Human
aacaauaauugcgguucucuau

SEQ ID NO: 975164 - RNA, 22 nt, Human
auucacaauuagaaguagauaa

SEQ ID NO: 975165 - RNA, 22 nt, Human
ccuuggcccuagccucaggcaa

SEQ ID NO: 975166 - RNA, 22 nt, Human
cugggccauggaagucucugcc

SEQ ID NO: 975167 - RNA, 22 nt, Human
ccagggcuggguuugucggugu

SEQ ID NO: 975168 - RNA, 22 nt, Human
ggcagagacuggguuggcagag

SEQ ID NO: 975169 - RNA, 22 nt, Human
gcucugaggcugggagcacucu

SEQ ID NO: 975170 - RNA, 22 nt, Human
uauuggaugauucacuuggcag

SEQ ID NO: 975171 - RNA, 22 nt, Human
gcccugcugucuucagaguaua

SEQ ID NO: 975172 - RNA, 22 nt, Human
auguuuauguugggcuauauuu

SEQ ID NO: 975173 - RNA, 22 nt, Human
cuggggacuugcagacacaauu

SEQ ID NO: 975174 - RNA, 22 nt, Human
gcuccucuucucccacugaaug

SEQ ID NO: 975175 - RNA, 22 nt, Human
ucagggcacaggccuguggguu

SEQ ID NO: 975176 - RNA, 19 nt, Human
gccagcagaaugaugaggc

SEQ ID NO: 975177 - RNA, 22 nt, Human
uguacaaugccagggaacacca

SEQ ID NO: 975178 - RNA, 22 nt, Human
ucaucaaagcgcuuggaguagg

SEQ ID NO: 975179 - RNA, 22 nt, Human
uguacaguguagucaugagguu

SEQ ID NO: 975180 - RNA, 22 nt, Human
ugagcuuccucccugcauccau

SEQ ID NO: 975181 - RNA, 22 nt, Human
uacaaaguuugggguccucaaa

SEQ ID NO: 975182 - RNA, 22 nt, Human
gggcagcaucaggaggggcuuu

SEQ ID NO: 975183 - RNA, 23 nt, Human
uggcagugaucaaaagcuuacau

SEQ ID NO: 975184 - RNA, 22 nt, Human
augauguuaccaguacuuagag

SEQ ID NO: 975185 - RNA, 22 nt, Human
uagcugugagcacccaggcugu

SEQ ID NO: 975186 - RNA, 22 nt, Human
gcuggggcugggcugaggaaga

SEQ ID NO: 975187 - RNA, 22 nt, Human
agggcugcuauguugauucaga

SEQ ID NO: 975188 - RNA, 22 nt, Human
uguugagacugagggagucagc

SEQ ID NO: 975189 - RNA, 22 nt, Human
aaagacagagcuguaggggaaa

SEQ ID NO: 975190 - RNA, 22 nt, Human
ccuggcagcgugccgagcugcg

SEQ ID NO: 975191 - RNA, 22 nt, Human
aaagaggaaccaagagcacgug

SEQ ID NO: 975192 - RNA, 22 nt, Human
gcuacugauugaccuuggagag

SEQ ID NO: 975193 - RNA, 22 nt, Human
cucuggagaacuccuugugucu

SEQ ID NO: 975194 - RNA, 22 nt, Human
cuuaaagaaauugaggagagga

SEQ ID NO: 975195 - RNA, 22 nt, Human
ucagcuccacagcuccucugcc

SEQ ID NO: 975196 - RNA, 21 nt, Human
uucuucaguuuaauauaaaau

SEQ ID NO: 975197 - RNA, 22 nt, Human
agggcagccucucagccuaggu

SEQ ID NO: 975198 - RNA, 22 nt, Human
ccaggagauuuuuccauagcac

SEQ ID NO: 975199 - RNA, 22 nt, Human
auuccaguuggguucuaauaca

SEQ ID NO: 975200 - RNA, 22 nt, Human
auuucaguguugguuagcaagc

SEQ ID NO: 975201 - RNA, 22 nt, Human
uggcugggcccccaccugccuc

SEQ ID NO: 975202 - RNA, 22 nt, Human
uucucuuuugugaugugagaug

SEQ ID NO: 975203 - RNA, 22 nt, Human
aggcaggcugcuauggaguaga

SEQ ID NO: 975204 - RNA, 22 nt, Human
cugaggucaauuaaucaacaac

SEQ ID NO: 975205 - RNA, 19 nt, Human
ucucagaggaaaaauugcu

SEQ ID NO: 975206 - RNA, 22 nt, Human
ugaggcuggcaaggcugguauu

SEQ ID NO: 975207 - RNA, 22 nt, Human
cugcccaggaaccagaggggca

SEQ ID NO: 975208 - RNA, 22 nt, Human
uuggccaaagcucaccagugcu

SEQ ID NO: 975209 - RNA, 17 nt, Human
agugaaauuuacauugc

SEQ ID NO: 975210 - RNA, 22 nt, Human
gcuggcaggguucucacugaaa

SEQ ID NO: 975211 - RNA, 22 nt, Human
uaugcacaacaugcagguuugu

SEQ ID NO: 975212 - RNA, 22 nt, Human
agucuuaugguuaaauagaugc

SEQ ID NO: 975213 - RNA, 22 nt, Human
ugaaacauuugaugaucuuugg

SEQ ID NO: 975214 - RNA, 22 nt, Human
agcaagcuaccuagauagucua

SEQ ID NO: 975215 - RNA, 22 nt, Human
ucugggcuuuacacugugcuua

SEQ ID NO: 975216 - RNA, 22 nt, Human
ggugggcacccgagacuggauc

SEQ ID NO: 975217 - RNA, 22 nt, Human
uuuccauauucugcgucugcca

SEQ ID NO: 975218 - RNA, 20 nt, Human
caguuuaacuuugagcaguu

SEQ ID NO: 975219 - RNA, 22 nt, Human
ccagcagcagcguccaaggaga

SEQ ID NO: 975220 - RNA, 22 nt, Human
agcugucagugcugugccugua

SEQ ID NO: 975221 - RNA, 22 nt, Human
cucacagcagcucugcgagaua

SEQ ID NO: 975222 - RNA, 22 nt, Human
ugcucugguaacucacuuccau

SEQ ID NO: 975223 - RNA, 22 nt, Human
aaaaguaauugcaauuuuguag

SEQ ID NO: 975224 - RNA, 22 nt, Human
agcagagccagaauuggaccag

SEQ ID NO: 975225 - RNA, 22 nt, Human
gccuggcucacagagcagccuu

SEQ ID NO: 975226 - RNA, 22 nt, Human
uaggauguagcuaugucaucau

SEQ ID NO: 975227 - RNA, 22 nt, Human
caggagcaaggagcagugggau

SEQ ID NO: 975228 - RNA, 22 nt, Human
ggccuggaaugcuuuccuacca

SEQ ID NO: 975229 - RNA, 22 nt, Human
acuauacauugaauguuaaggu

SEQ ID NO: 975230 - RNA, 22 nt, Human
uuuuacuuaauucuuggucaug

SEQ ID NO: 975231 - RNA, 22 nt, Human
augggaggguggaaaggcucug

SEQ ID NO: 975232 - RNA, 22 nt, Human
ccuggccuggcacucccucugc

SEQ ID NO: 975233 - RNA, 21 nt, Human
agcuggcagauauggugucug

SEQ ID NO: 975234 - RNA, 22 nt, Human
caggcagcgcucguggccuggc

SEQ ID NO: 975235 - RNA, 22 nt, Human
ccaggacuuauuacaguauaac

SEQ ID NO: 975236 - RNA, 22 nt, Human
agcagcugggcucagagcuggg

SEQ ID NO: 975237 - RNA, 22 nt, Human
ucaagucucaauguauuauggu

SEQ ID NO: 975238 - RNA, 22 nt, Human
ucugcuguugccaugaguaaua

SEQ ID NO: 975239 - RNA, 18 nt, Human
ucacagugcucuugccua

SEQ ID NO: 975240 - RNA, 22 nt, Human
ucacaaaucauuuuaucugugu

SEQ ID NO: 975241 - RNA, 22 nt, Human
gcccaggaguugguggcugcag

SEQ ID NO: 975242 - RNA, 22 nt, Human
acagggccucagcugauucugg

SEQ ID NO: 975243 - RNA, 22 nt, Human
uuccuguuucauagaaaacuga

SEQ ID NO: 975244 - RNA, 22 nt, Human
ugucucagaauggcucauaaua

SEQ ID NO: 975245 - RNA, 22 nt, Human
gugcauguuaaugguguacaaa

SEQ ID NO: 975246 - RNA, 22 nt, Human
aggagguggccugagcgugccc

SEQ ID NO: 975247 - RNA, 23 nt, Human
cagugcagggcaacucagacucc

SEQ ID NO: 975248 - RNA, 22 nt, Human
ugaagcaggaaccagcagcauu

SEQ ID NO: 975249 - RNA, 22 nt, Human
aaugucugcucuacucaggagg

SEQ ID NO: 975250 - RNA, 22 nt, Human
uuugaaagagcugauacaugaa

SEQ ID NO: 975251 - RNA, 22 nt, Human
augauguugauaaauuacuuua

SEQ ID NO: 975252 - RNA, 22 nt, Human
gguggguuuggaagagcaggcu

SEQ ID NO: 975253 - RNA, 22 nt, Human
cagggcugguuugucgaagaaa

SEQ ID NO: 975254 - RNA, 22 nt, Human
agaauuagucacaauuauagga

SEQ ID NO: 975255 - RNA, 22 nt, Human
gagcccuguagcaagucauguc

SEQ ID NO: 975256 - RNA, 22 nt, Human
ggcagcuccucaaaaaauuaaa

SEQ ID NO: 975257 - RNA, 20 nt, Human
acugcuucuuucucugaccu

SEQ ID NO: 975258 - RNA, 22 nt, Human
uuugacagacauuuacuacauu

SEQ ID NO: 975259 - RNA, 22 nt, Human
ugucugguggguugacaggcag

SEQ ID NO: 975260 - RNA, 22 nt, Human
auacauguucguguacauguuc

SEQ ID NO: 975261 - RNA, 21 nt, Human
gccuggcagguggaagggcuc

SEQ ID NO: 975262 - RNA, 20 nt, Human
acugugaaugcugaauuagc

SEQ ID NO: 975263 - RNA, 22 nt, Human
ccaaaguccacaguuuacauua

SEQ ID NO: 975264 - RNA, 22 nt, Human
cagaauggcuuuuauggcucag

SEQ ID NO: 975265 - RNA, 22 nt, Human
caaaaguaauguaugcucaucg

SEQ ID NO: 975266 - RNA, 22 nt, Human
gcaugguggccuuaggguagcc

SEQ ID NO: 975267 - RNA, 22 nt, Human
aaaggccauuacuugcuuuuag

SEQ ID NO: 975268 - RNA, 22 nt, Human
acuggcagagacccugauggcc

SEQ ID NO: 975269 - RNA, 22 nt, Human
uauuuugagguauuuuugagcu

SEQ ID NO: 975270 - RNA, 22 nt, Human
cuggcagcuuagcacucugguu

SEQ ID NO: 975271 - RNA, 22 nt, Human
agagaggcugggcguagggcuu

SEQ ID NO: 975272 - RNA, 23 nt, Human
uaugaacugcauugcuggugugu

SEQ ID NO: 975273 - RNA, 22 nt, Human
gcuggcaguaaaggguuuggca

SEQ ID NO: 975274 - RNA, 22 nt, Human
ucaaggugcugugcugugcuag

SEQ ID NO: 975275 - RNA, 22 nt, Human
uggggccuggucagagcugcac

SEQ ID NO: 975276 - RNA, 22 nt, Human
ucugcaucauuuuucagagccg

SEQ ID NO: 975277 - RNA, 22 nt, Human
ucaagauaccaccauuauaugu

SEQ ID NO: 975278 - RNA, 22 nt, Human
auuagagaaauguugccaagau

SEQ ID NO: 975279 - RNA, 22 nt, Human
augugagguaucuaggucuucg

SEQ ID NO: 975280 - RNA, 22 nt, Human
gcaucuaauccaguccagcauc

SEQ ID NO: 975281 - RNA, 22 nt, Human
gucucuggguuaagcagugcau

SEQ ID NO: 975282 - RNA, 22 nt, Human
gagaggaguagacacuuugguu

SEQ ID NO: 975283 - RNA, 22 nt, Human
acucugccccgaguucugggaa

SEQ ID NO: 975284 - RNA, 22 nt, Human
auucugagacaauugccgucag

SEQ ID NO: 975285 - RNA, 22 nt, Human
aggccuggugaaugaaguaucu

SEQ ID NO: 975286 - RNA, 22 nt, Human
ccagcccucacugaggccucuc

SEQ ID NO: 975287 - RNA, 22 nt, Human
aucauucuagcuguuguguuga

SEQ ID NO: 975288 - RNA, 22 nt, Human
ggucccaggcucccucuugucc

SEQ ID NO: 975289 - RNA, 19 nt, Human
cugugcuuuaaacuccuau

SEQ ID NO: 975290 - RNA, 22 nt, Human
caggcagaguuagagcaacugg

SEQ ID NO: 975291 - RNA, 22 nt, Human
acaauucucucauaucuuauua

SEQ ID NO: 975292 - RNA, 20 nt, Human
ggaggguggaagaaagcaag

SEQ ID NO: 975293 - RNA, 19 nt, Human
gagcugccuuuugaagacc

SEQ ID NO: 975294 - RNA, 22 nt, Human
aaggcaggaugcggacccaucu

SEQ ID NO: 975295 - RNA, 22 nt, Human
acaaaguaggucaucaaagcuc

SEQ ID NO: 975296 - RNA, 22 nt, Human
cccucccagaugggcuugaggu

SEQ ID NO: 975297 - RNA, 22 nt, Human
uggcuuucucccccagcuucuc

SEQ ID NO: 975298 - RNA, 22 nt, Human
agccacagcgaaccucucuucc

SEQ ID NO: 975299 - RNA, 22 nt, Human
ugccucugugggcagagcugcc

SEQ ID NO: 975300 - RNA, 22 nt, Human
ggcagcaguaggagcuaaucuu

SEQ ID NO: 975301 - RNA, 22 nt, Human
cagcaggguuaagugacucacc

SEQ ID NO: 975302 - RNA, 22 nt, Human
gucccuuggcucacaaacagcu

SEQ ID NO: 975303 - RNA, 22 nt, Human
cuacacaguucugccuaauggc

SEQ ID NO: 975304 - RNA, 22 nt, Human
uccugagagcagcugcuuugga

SEQ ID NO: 975305 - RNA, 22 nt, Human
uacaguauuaugagugauugaa

SEQ ID NO: 975306 - RNA, 22 nt, Human
gugaggggaguaaagccauguu

SEQ ID NO: 975307 - RNA, 22 nt, Human
agcuccugaaaauccagacugg

SEQ ID NO: 975308 - RNA, 22 nt, Human
agucucugucguagaucagcgu

SEQ ID NO: 975309 - RNA, 20 nt, Human
agaguaacuggcacauaggg

SEQ ID NO: 975310 - RNA, 22 nt, Human
uuuacagaucuguugauuuguu

SEQ ID NO: 975311 - RNA, 22 nt, Human
gaagaacaagcagugcuuuccu

SEQ ID NO: 975312 - RNA, 22 nt, Human
uagugauuaaaggcagaauguu

SEQ ID NO: 975313 - RNA, 22 nt, Human
aaugcagugagccauuaaaugg

SEQ ID NO: 975314 - RNA, 17 nt, Human
agcugagcuggccaggg

SEQ ID NO: 975315 - RNA, 23 nt, Human
aguaaagcaauuguuggcgagag

SEQ ID NO: 975316 - RNA, 22 nt, Human
gcaggagacuggcugugguagu

SEQ ID NO: 975317 - RNA, 22 nt, Human
aaaggcaggcuuucacaucuca

SEQ ID NO: 975318 - RNA, 22 nt, Human
gcagacaucaagcacaggccca

SEQ ID NO: 975319 - RNA, 22 nt, Human
gccugagcccaggugugcagag

SEQ ID NO: 975320 - RNA, 22 nt, Human
uugggagcaaauaggaaagagg

SEQ ID NO: 975321 - RNA, 22 nt, Human
cuguguuggcuuuucucuugua

SEQ ID NO: 975322 - RNA, 22 nt, Human
agcugcagucaagcugggccac

SEQ ID NO: 975323 - RNA, 22 nt, Human
guggccuuuccugaagaaauga

SEQ ID NO: 975324 - RNA, 22 nt, Human
ccuuuuauaaaguuguauugaa

SEQ ID NO: 975325 - RNA, 22 nt, Human
cucucuggcacuucauugcugu

SEQ ID NO: 975326 - RNA, 22 nt, Human
cugagcccaggcgggagcugag

SEQ ID NO: 975327 - RNA, 22 nt, Human
uccaagggaaacugcacuucua

SEQ ID NO: 975328 - RNA, 22 nt, Human
cagcaauaagguaagcuucucc

SEQ ID NO: 975329 - RNA, 22 nt, Human
acauuguagacuuuucauaugu

SEQ ID NO: 975330 - RNA, 22 nt, Human
aaagcagagcagggcacuuaug

SEQ ID NO: 975331 - RNA, 22 nt, Human
gcauuauuaauagcugcaugag

SEQ ID NO: 975332 - RNA, 22 nt, Human
caggagauguaagacuucuguu

SEQ ID NO: 975333 - RNA, 22 nt, Human
ugaaagcacaaguucuaacagg

SEQ ID NO: 975334 - RNA, 22 nt, Human
uccuggccugucuggaguagcu

SEQ ID NO: 975335 - RNA, 22 nt, Human
aggcacugaauauccaguaaaa

SEQ ID NO: 975336 - RNA, 22 nt, Human
uacauuaacuuacguccacaug

SEQ ID NO: 975337 - RNA, 20 nt, Human
guccugggagccacagcaca

SEQ ID NO: 975338 - RNA, 22 nt, Human
cugaggcucaagggcagguggg

SEQ ID NO: 975339 - RNA, 22 nt, Human
aaugucugccugaacuuuauau

SEQ ID NO: 975340 - RNA, 22 nt, Human
gcuugcucaacccccgucucuc

SEQ ID NO: 975341 - RNA, 18 nt, Human
acauuucucucugcguga

SEQ ID NO: 975342 - RNA, 22 nt, Human
acucccacuccagaguagaagc

SEQ ID NO: 975343 - RNA, 21 nt, Human
ccccugggagcccugucagua

SEQ ID NO: 975344 - RNA, 22 nt, Human
ccugagggcgccgagcucccag

SEQ ID NO: 975345 - RNA, 22 nt, Human
ugugaaggcagcagcucugucc

SEQ ID NO: 975346 - RNA, 22 nt, Human
ugcuggcccaugaagacgcagu

SEQ ID NO: 975347 - RNA, 22 nt, Human
ggaagagccuggggugucaggc

SEQ ID NO: 975348 - RNA, 22 nt, Human
gugggccucuugaggguggcua

SEQ ID NO: 975349 - RNA, 22 nt, Human
gaaggaagucauuagugcagac

SEQ ID NO: 975350 - RNA, 22 nt, Human
ccagcagagcauggggaggaag

SEQ ID NO: 975351 - RNA, 22 nt, Human
guggccugggguuuguucugag

SEQ ID NO: 975352 - RNA, 22 nt, Human
ucagcagggagaggagaaugca

SEQ ID NO: 975353 - RNA, 22 nt, Human
aggaccugacuggcuccugcuu

SEQ ID NO: 975354 - RNA, 22 nt, Human
agccagaggccagccugccuca

SEQ ID NO: 975355 - RNA, 22 nt, Human
cagaguacugggagaacagaag

SEQ ID NO: 975356 - RNA, 22 nt, Human
uagaaagugaagguuaauuaau

SEQ ID NO: 975357 - RNA, 22 nt, Human
acuugaaaggaagcucuaaaac

SEQ ID NO: 975358 - RNA, 22 nt, Human
caaagguauaaguuaauauaca

SEQ ID NO: 975359 - RNA, 22 nt, Human
gcuguucauagaaauggucuca

SEQ ID NO: 975360 - RNA, 22 nt, Human
caggagacaauggcuguggggc

SEQ ID NO: 975361 - RNA, 22 nt, Human
ucaggcugguggucagauggcu

SEQ ID NO: 975362 - RNA, 22 nt, Human
cacucugcugaaaucgccuugu

SEQ ID NO: 975363 - RNA, 22 nt, Human
gagauuggccuggcuugccaac

SEQ ID NO: 975364 - RNA, 22 nt, Human
augacaguucuacacuuaaucu

SEQ ID NO: 975365 - RNA, 22 nt, Human
cagacaggguccuguccgucac

SEQ ID NO: 975366 - RNA, 22 nt, Human
uaugaagaaguucugugaaaug

SEQ ID NO: 975367 - RNA, 22 nt, Human
cccaggaggcagagauagcagu

SEQ ID NO: 975368 - RNA, 22 nt, Human
aggaggccgggauucuggagau

SEQ ID NO: 975369 - RNA, 22 nt, Human
auuuugaaaagcauuugaguaa

SEQ ID NO: 975370 - RNA, 22 nt, Human
agggcagaccacgugcaaggau

SEQ ID NO: 975371 - RNA, 22 nt, Human
gugcugugucuaucaggaauaa

SEQ ID NO: 975372 - RNA, 22 nt, Human
cuggccaagcuucucuaagcag

SEQ ID NO: 975373 - RNA, 22 nt, Human
ugauucacagacuucacaaggc

SEQ ID NO: 975374 - RNA, 22 nt, Human
ccaagcuacuuaggagucugag

SEQ ID NO: 975375 - RNA, 22 nt, Human
ugggccuggacaaggccacuag

SEQ ID NO: 975376 - RNA, 22 nt, Human
cugcagcuauauuuucccacag

SEQ ID NO: 975377 - RNA, 22 nt, Human
ggccucucucccuggcuugcag

SEQ ID NO: 975378 - RNA, 22 nt, Human
acagaauucuaguauguggcuu

SEQ ID NO: 975379 - RNA, 18 nt, Human
uggcagggaggaaauaua

SEQ ID NO: 975380 - RNA, 17 nt, Human
aaaauucuguaaagagg

SEQ ID NO: 975381 - RNA, 22 nt, Human
uggcugccuagucccucagccu

SEQ ID NO: 975382 - RNA, 22 nt, Human
cuauuagguaugugguugcuau

SEQ ID NO: 975383 - RNA, 22 nt, Human
acccaggguagagugcaguggc

SEQ ID NO: 975384 - RNA, 22 nt, Human
uaagucauaagucaugauguua

SEQ ID NO: 975385 - RNA, 22 nt, Human
agugaacaaagguagugagcau

SEQ ID NO: 975386 - RNA, 22 nt, Human
ugaugaaacugagguuccaaga

SEQ ID NO: 975387 - RNA, 22 nt, Human
augucacauggccuguacuuug

SEQ ID NO: 975388 - RNA, 22 nt, Human
agcugcaggccucuccugggga

SEQ ID NO: 975389 - RNA, 22 nt, Human
aaggagaguacaggaguuggua

SEQ ID NO: 975390 - RNA, 22 nt, Human
ucccuggguucccguggaagug

SEQ ID NO: 975391 - RNA, 22 nt, Human
gcagcaggcacggucucgacau

SEQ ID NO: 975392 - RNA, 22 nt, Human
ggugaagggugucauggcauuu

SEQ ID NO: 975393 - RNA, 22 nt, Human
cagaaauggaauuuuccaucac

SEQ ID NO: 975394 - RNA, 22 nt, Human
aggguggccaugagggagagau

SEQ ID NO: 975395 - RNA, 22 nt, Human
uuucacaaacucagggugugug

SEQ ID NO: 975396 - RNA, 22 nt, Human
agcugaaagugcuuugaggacu

SEQ ID NO: 975397 - RNA, 22 nt, Human
gaugccuccaaaugagggcaga

SEQ ID NO: 975398 - RNA, 22 nt, Human
aaacucuggagauguuuaugca

SEQ ID NO: 975399 - RNA, 19 nt, Human
gcugugccucucuccugcu

SEQ ID NO: 975400 - RNA, 22 nt, Human
accucugcuucccggguucaag

SEQ ID NO: 975401 - RNA, 22 nt, Human
ccagaagggcuauugcagugac

SEQ ID NO: 975402 - RNA, 22 nt, Human
ucauugcauuuauucacuggca

SEQ ID NO: 975403 - RNA, 22 nt, Human
agacaaaugguaauuaugucua

SEQ ID NO: 975404 - RNA, 22 nt, Human
agauuuagacugccuuaaucau

SEQ ID NO: 975405 - RNA, 20 nt, Human
uuucaagucagcaauucuca

SEQ ID NO: 975406 - RNA, 20 nt, Human
cuguaucagguuacaaagua

SEQ ID NO: 975407 - RNA, 22 nt, Human
cagggagaggcaucauagggaa

SEQ ID NO: 975408 - RNA, 22 nt, Human
caguggguccuaaguacaguuc

SEQ ID NO: 975409 - RNA, 22 nt, Human
auuuucuagauagaugaugcau

SEQ ID NO: 975410 - RNA, 22 nt, Human
acagagcugggaucugaaccca

SEQ ID NO: 975411 - RNA, 22 nt, Human
gcugccugaucauacaccaggg

SEQ ID NO: 975412 - RNA, 22 nt, Human
uuguaacagguacuaaauaacu

SEQ ID NO: 975413 - RNA, 22 nt, Human
cauugcacuccacccuaggcaa

SEQ ID NO: 975414 - RNA, 22 nt, Human
gaggagaggcuggacgcgguga

SEQ ID NO: 975415 - RNA, 22 nt, Human
caggggaguuuuaugcaacaga

SEQ ID NO: 975416 - RNA, 22 nt, Human
cugucaggggcggguggagcgg

SEQ ID NO: 975417 - RNA, 20 nt, Human
aggcagcuggccaggcaggu

SEQ ID NO: 975418 - RNA, 22 nt, Human
gaggcagcaugguaccuuggag

SEQ ID NO: 975419 - RNA, 22 nt, Human
uuauuccagcuaagaguccugg

SEQ ID NO: 975420 - RNA, 22 nt, Human
cuuuggcaaugucauuuucaau

SEQ ID NO: 975421 - RNA, 22 nt, Human
uaaggccaauuacauauguuca

SEQ ID NO: 975422 - RNA, 22 nt, Human
ccagcccugaacccugcugcau

SEQ ID NO: 975423 - RNA, 22 nt, Human
guuugauucaagaacaaagagu

SEQ ID NO: 975424 - RNA, 22 nt, Human
cuggccugaucucaugcugucc

SEQ ID NO: 975425 - RNA, 22 nt, Human
aucagcaagacuaggggaauac

SEQ ID NO: 975426 - RNA, 22 nt, Human
auaauaacaccugaauaggaaa

SEQ ID NO: 975427 - RNA, 22 nt, Human
caaauccagaucccagucguag

SEQ ID NO: 975428 - RNA, 22 nt, Human
auguacaaaaugccacugaauu

SEQ ID NO: 975429 - RNA, 22 nt, Human
uugaagaggacuuugcagcugu

SEQ ID NO: 975430 - RNA, 22 nt, Human
uuucucaguuacuagcuguggu

SEQ ID NO: 975431 - RNA, 22 nt, Human
gcagaagcagcagaugggcgca

SEQ ID NO: 975432 - RNA, 21 nt, Human
ugacugaggcuucuucacaca

SEQ ID NO: 975433 - RNA, 20 nt, Human
gcauggcauguagugaagug

SEQ ID NO: 975434 - RNA, 22 nt, Human
agucaguguucuccggagaggc

SEQ ID NO: 975435 - RNA, 22 nt, Human
auuuccagcagcauauuugucu

SEQ ID NO: 975436 - RNA, 22 nt, Human
auguuauaguuauaaaaugagg

SEQ ID NO: 975437 - RNA, 22 nt, Human
agacagcugcucgcagagcuau

SEQ ID NO: 975438 - RNA, 19 nt, Human
cagcugccuuuucuuugca

SEQ ID NO: 975439 - RNA, 22 nt, Human
aguacuuugcacuuugcucaga

SEQ ID NO: 975440 - RNA, 22 nt, Human
gccugaggaaugcuccugacuu

SEQ ID NO: 975441 - RNA, 17 nt, Human
gagacagcaggagcccc

SEQ ID NO: 975442 - RNA, 22 nt, Human
uuugacaucuaagaauucuuac

SEQ ID NO: 975443 - RNA, 22 nt, Human
agggccugcucuaucacucuca

SEQ ID NO: 975444 - RNA, 22 nt, Human
auuccaaagccugaauaaugga

SEQ ID NO: 975445 - RNA, 21 nt, Human
uucaaagagugggcauuguca

SEQ ID NO: 975446 - RNA, 22 nt, Human
ccagagucuaugaguccucauu

SEQ ID NO: 975447 - RNA, 22 nt, Human
acuucucuucauagguggcaau

SEQ ID NO: 975448 - RNA, 17 nt, Human
ugagaaguaggcaucau

SEQ ID NO: 975449 - RNA, 20 nt, Human
agaaucugacccagagagac

SEQ ID NO: 975450 - RNA, 22 nt, Human
uccuugaacagagggccugggu

SEQ ID NO: 975451 - RNA, 22 nt, Human
cugcuuugacuguuaagaacca

SEQ ID NO: 975452 - RNA, 22 nt, Human
cuggaaggucuguccccacugc

SEQ ID NO: 975453 - RNA, 22 nt, Human
ggcagcuucuuaauauggagac

SEQ ID NO: 975454 - RNA, 22 nt, Human
uuuuuuaguuaggucagaaugu

SEQ ID NO: 975455 - RNA, 22 nt, Human
ucagugcuucggcgagcaccua

SEQ ID NO: 975456 - RNA, 22 nt, Human
aucagcaagcaugguuaggugu

SEQ ID NO: 975457 - RNA, 22 nt, Human
gcccaggaagugacucagaugu

SEQ ID NO: 975458 - RNA, 22 nt, Human
ugcugucuguuuacuggcuaua

SEQ ID NO: 975459 - RNA, 22 nt, Human
agggaagagcuugcaagaaacc

SEQ ID NO: 975460 - RNA, 22 nt, Human
cuuucacauaauugaccuugaa

SEQ ID NO: 975461 - RNA, 22 nt, Human
gucaucuucgcagagugauuuu

SEQ ID NO: 975462 - RNA, 22 nt, Human
cagguggguguaugaaugcaaa

SEQ ID NO: 975463 - RNA, 22 nt, Human
aagcuggaacaucuugaggaag

SEQ ID NO: 975464 - RNA, 22 nt, Human
gcuggcuugauaguuucugcuu

SEQ ID NO: 975465 - RNA, 22 nt, Human
ccugugucuuccccacuggugu

SEQ ID NO: 975466 - RNA, 22 nt, Human
cugcuggggucagagcacuggg

SEQ ID NO: 975467 - RNA, 22 nt, Human
cacaguggcagguguggguugu

SEQ ID NO: 975468 - RNA, 18 nt, Human
gccugcaggcacgggggu

SEQ ID NO: 975469 - RNA, 22 nt, Human
gccagcuggagugagagugggc

SEQ ID NO: 975470 - RNA, 23 nt, Human
agaggccagccuuuggagacacc

SEQ ID NO: 975471 - RNA, 22 nt, Human
cuuuauauccagauguuuggug

SEQ ID NO: 975472 - RNA, 22 nt, Human
ugacauaauaauccaaacauac

SEQ ID NO: 975473 - RNA, 22 nt, Human
agagggcaaguguaguccagua

SEQ ID NO: 975474 - RNA, 18 nt, Human
cccacggugcuguagggc

SEQ ID NO: 975475 - RNA, 22 nt, Human
gggagggaaggaggcgccgugu

SEQ ID NO: 975476 - RNA, 22 nt, Human
gugggcuucuguuagggaggcu

SEQ ID NO: 975477 - RNA, 23 nt, Human
ucccaggaaucugcauuuuuaac

SEQ ID NO: 975478 - RNA, 18 nt, Human
uggcucugcagccagaug

SEQ ID NO: 975479 - RNA, 19 nt, Human
accaggagacagugagcuu

SEQ ID NO: 975480 - RNA, 22 nt, Human
ugacagaaauaguucuuaauuu

SEQ ID NO: 975481 - RNA, 22 nt, Human
uguguauucagcaagcgaaaca

SEQ ID NO: 975482 - RNA, 22 nt, Human
ccuggcagcuguuuggcuuggc

SEQ ID NO: 975483 - RNA, 22 nt, Human
gauuuuauuagcccaaacuuug

SEQ ID NO: 975484 - RNA, 22 nt, Human
gcaccuggcugcccagguggag

SEQ ID NO: 975485 - RNA, 23 nt, Human
acaguuauagcugugaauaacau

SEQ ID NO: 975486 - RNA, 22 nt, Human
aucaguuucuaccauguggaau

SEQ ID NO: 975487 - RNA, 22 nt, Human
aacauuucauuggaagcuaugu

SEQ ID NO: 975488 - RNA, 22 nt, Human
gagccagccuucuucugagguc

SEQ ID NO: 975489 - RNA, 22 nt, Human
aauaauguuaugucauucuucu

SEQ ID NO: 975490 - RNA, 22 nt, Human
cauggccuugagugacugcacu

SEQ ID NO: 975491 - RNA, 22 nt, Human
cagccuuugggucagaagauuc

SEQ ID NO: 975492 - RNA, 22 nt, Human
cucuuaaaauuaccuuugcaaa

SEQ ID NO: 975493 - RNA, 22 nt, Human
aagaauguggguggauaugaug

SEQ ID NO: 975494 - RNA, 22 nt, Human
agugcauugcaucucugcuuca

SEQ ID NO: 975495 - RNA, 22 nt, Human
gucuucuguaagaugagguccc

SEQ ID NO: 975496 - RNA, 22 nt, Human
gagaccaggaaguacagcagcc

SEQ ID NO: 975497 - RNA, 22 nt, Human
ucagccacuacccaccuuaaca

SEQ ID NO: 975498 - RNA, 22 nt, Human
gcugccugcacagagcugcuuu

SEQ ID NO: 975499 - RNA, 22 nt, Human
gccucugcggggcccgagcccg

SEQ ID NO: 975500 - RNA, 22 nt, Human
agcuucuguucaucuuccaggc

SEQ ID NO: 975501 - RNA, 22 nt, Human
aggucauuaaaguuaaaugagg

SEQ ID NO: 975502 - RNA, 22 nt, Human
agucccagaucuccauucgguc

SEQ ID NO: 975503 - RNA, 22 nt, Human
acaaaaagggagaugagguaga

SEQ ID NO: 975504 - RNA, 22 nt, Human
cugcugugcacccaggaaggcu

SEQ ID NO: 975505 - RNA, 22 nt, Human
ggcagcuauuccaagcagcacu

SEQ ID NO: 975506 - RNA, 20 nt, Human
cuguagggugcagcaggcuc

SEQ ID NO: 975507 - RNA, 22 nt, Human
uuccuggcaugaaaaauaucac

SEQ ID NO: 975508 - RNA, 22 nt, Human
acauagaaccuggcacauagua

SEQ ID NO: 975509 - RNA, 22 nt, Human
uccucuggcucuuucccuagga

SEQ ID NO: 975510 - RNA, 22 nt, Human
ugcuucuggaaacaguggcugu

SEQ ID NO: 975511 - RNA, 22 nt, Human
cccugagcccauaguugacauu

SEQ ID NO: 975512 - RNA, 22 nt, Human
caggauagaaaggccauggagu

SEQ ID NO: 975513 - RNA, 22 nt, Human
uaacugauauugaaaaacauca

SEQ ID NO: 975514 - RNA, 22 nt, Human
ugcccagggauaagccuagaga

SEQ ID NO: 975515 - RNA, 22 nt, Human
caagagagaugcagcucacuca

SEQ ID NO: 975516 - RNA, 22 nt, Human
caaauaguaugagcaaugauuc

SEQ ID NO: 975517 - RNA, 22 nt, Human
aaacaugagcacuugcuucaua

SEQ ID NO: 975518 - RNA, 22 nt, Human
uuccauaauaggcuuaagugaa

SEQ ID NO: 975519 - RNA, 19 nt, Human
gagcacagcggcauuuggu

SEQ ID NO: 975520 - RNA, 22 nt, Human
uagaguguuguaauugaaaagg

SEQ ID NO: 975521 - RNA, 22 nt, Human
cugcagaggccucgccuccucu

SEQ ID NO: 975522 - RNA, 22 nt, Human
aggaguggaauuacuggguucu

SEQ ID NO: 975523 - RNA, 20 nt, Human
cugggcagguguuugaucuc

SEQ ID NO: 975524 - RNA, 22 nt, Human
gucacuguauccagguuccagc

SEQ ID NO: 975525 - RNA, 22 nt, Human
aggagagcuggugucuggaauc

SEQ ID NO: 975526 - RNA, 22 nt, Human
uuuucauuguuacuaugagcua

SEQ ID NO: 975527 - RNA, 22 nt, Human
uccucugcuccaggcuggacuu

SEQ ID NO: 975528 - RNA, 22 nt, Human
cccagcagccagaaugaggagc

SEQ ID NO: 975529 - RNA, 20 nt, Human
uaggcagagcugugcagccu

SEQ ID NO: 975530 - RNA, 22 nt, Human
gaggccuggcucugcccuccug

SEQ ID NO: 975531 - RNA, 22 nt, Human
gucccagagagcacuaguccau

SEQ ID NO: 975532 - RNA, 22 nt, Human
acagaauauugguuacuguugc

SEQ ID NO: 975533 - RNA, 22 nt, Human
ugcaagagguaaaaugaaagga

SEQ ID NO: 975534 - RNA, 22 nt, Human
acauaaauagauuauugggagg

SEQ ID NO: 975535 - RNA, 22 nt, Human
uuugugaaaugaagucacaacu

SEQ ID NO: 975536 - RNA, 22 nt, Human
uccugagagcagaguccaggug

SEQ ID NO: 975537 - RNA, 22 nt, Human
uuggcagagaguaugcugaaga

SEQ ID NO: 975538 - RNA, 22 nt, Human
gagguucacaggcuaucacagu

SEQ ID NO: 975539 - RNA, 22 nt, Human
auuguauaacagcauguauuuu

SEQ ID NO: 975540 - RNA, 22 nt, Human
cagagccaucccagccuguggu

SEQ ID NO: 975541 - RNA, 22 nt, Human
cacugaaggaaggacuacugca

SEQ ID NO: 975542 - RNA, 22 nt, Human
augaaugacugucuacuuuggg

SEQ ID NO: 975543 - RNA, 22 nt, Human
gcugagcuagcuaucucagucu

SEQ ID NO: 975544 - RNA, 22 nt, Human
gccagugguagaggggaggccg

SEQ ID NO: 975545 - RNA, 22 nt, Human
auuuauuaugggauuuggcaca

SEQ ID NO: 975546 - RNA, 22 nt, Human
uagagcuggaaaacugcaggua

SEQ ID NO: 975547 - RNA, 22 nt, Human
aagacauuuauuugaaucaauu

SEQ ID NO: 975548 - RNA, 22 nt, Human
agucucuuuaaucacagugucu

SEQ ID NO: 975549 - RNA, 22 nt, Human
guuauaaaugacugcaaaaguu

SEQ ID NO: 975550 - RNA, 22 nt, Human
cugccaucugagccaaaagugc

SEQ ID NO: 975551 - RNA, 22 nt, Human
cucuggcuucuaccuugcaguu

SEQ ID NO: 975552 - RNA, 22 nt, Human
acuuucucaaaucagacuuuaa

SEQ ID NO: 975553 - RNA, 22 nt, Human
uucuuucccaguagaugugaaa

SEQ ID NO: 975554 - RNA, 18 nt, Human
accugccuguucuucucu

SEQ ID NO: 975555 - RNA, 22 nt, Human
uagggcagauucgguggaguuu

SEQ ID NO: 975556 - RNA, 22 nt, Human
uuuguaaagucuguucugaguu

SEQ ID NO: 975557 - RNA, 19 nt, Human
cugagcagcggcagcacuu

SEQ ID NO: 975558 - RNA, 22 nt, Human
ugggcacuauggcucugugcac

SEQ ID NO: 975559 - RNA, 22 nt, Human
gcucaggagcugacagccucaa

SEQ ID NO: 975560 - RNA, 22 nt, Human
agagccuggcucccagcuaccg

SEQ ID NO: 975561 - RNA, 22 nt, Human
ucucccacagccgugcuucaag

SEQ ID NO: 975562 - RNA, 19 nt, Human
gcuggccacgccccaguug

SEQ ID NO: 975563 - RNA, 22 nt, Human
cugggccagucucggccgcucu

SEQ ID NO: 975564 - RNA, 20 nt, Human
ccuggcuuugcaucugugau

SEQ ID NO: 975565 - RNA, 22 nt, Human
cccaggagaucuggaucucguc

SEQ ID NO: 975566 - RNA, 22 nt, Human
accaaggaagagauucucaguu

SEQ ID NO: 975567 - RNA, 22 nt, Human
uggaggcaccacuggcugcccg

SEQ ID NO: 975568 - RNA, 22 nt, Human
ugcucaggaaauaaugucugug

SEQ ID NO: 975569 - RNA, 22 nt, Human
uccagaguacggaagagucauc

SEQ ID NO: 975570 - RNA, 20 nt, Human
uggagcugugguaaggagca

SEQ ID NO: 975571 - RNA, 22 nt, Human
ugaaacacugcgauaaaauccu

SEQ ID NO: 975572 - RNA, 22 nt, Human
ucccuggcagcuaagggugguc

SEQ ID NO: 975573 - RNA, 22 nt, Human
gccuggcccagggcuccgcagg

SEQ ID NO: 975574 - RNA, 22 nt, Human
guccaugauucuguguaguaga

SEQ ID NO: 975575 - RNA, 22 nt, Human
ucagggauugcaaaauucaucc

SEQ ID NO: 975576 - RNA, 22 nt, Human
agccccacacucucucugagaa

SEQ ID NO: 975577 - RNA, 22 nt, Human
agaauucucuuccauugaaaca

SEQ ID NO: 975578 - RNA, 18 nt, Human
ucaagacaucaugaaaua

SEQ ID NO: 975579 - RNA, 22 nt, Human
aggcucuguuugcugugguacc

SEQ ID NO: 975580 - RNA, 22 nt, Human
agcaccuguggcucaugcucgu

SEQ ID NO: 975581 - RNA, 22 nt, Human
cuggccuggucuggccucucca

SEQ ID NO: 975582 - RNA, 22 nt, Human
ccaguggguaggccauggugag

SEQ ID NO: 975583 - RNA, 22 nt, Human
ucaguucuuuauuucacaguga

SEQ ID NO: 975584 - RNA, 22 nt, Human
uuccgcuguuuaguugaaguuu

SEQ ID NO: 975585 - RNA, 22 nt, Human
uauaacacucagaaagaaucau

SEQ ID NO: 975586 - RNA, 22 nt, Human
gagccugaauuugaccugcuua

SEQ ID NO: 975587 - RNA, 22 nt, Human
uaucuguuguccaugcagaaag

SEQ ID NO: 975588 - RNA, 22 nt, Human
ucauuacagagauauaaucuac

SEQ ID NO: 975589 - RNA, 22 nt, Human
ucagggcucaccagccucugcc

SEQ ID NO: 975590 - RNA, 22 nt, Human
uccaggaggaggaaggcugcca

SEQ ID NO: 975591 - RNA, 22 nt, Human
agaugcugugucuguucccuug

SEQ ID NO: 975592 - RNA, 22 nt, Human
aaaugucuuucaauagagaaau

SEQ ID NO: 975593 - RNA, 22 nt, Human
cccaggaaguggagguugcagu

SEQ ID NO: 975594 - RNA, 22 nt, Human
ucuguuuaggcaaaauagcuac

SEQ ID NO: 975595 - RNA, 22 nt, Human
guggagcccugccuugcucaug

SEQ ID NO: 975596 - RNA, 22 nt, Human
uaauuauuugaagacauuagag

SEQ ID NO: 975597 - RNA, 22 nt, Human
ugggaugggaucucgcuguguc

SEQ ID NO: 975598 - RNA, 22 nt, Human
uauuccaagcacagcaacccag

SEQ ID NO: 975599 - RNA, 22 nt, Human
aagcgccacgagaagcuggacc

SEQ ID NO: 975600 - RNA, 22 nt, Human
ucugucacucuagagauggcag

SEQ ID NO: 975601 - RNA, 22 nt, Human
cugcugugccuuaaaaugcaag

SEQ ID NO: 975602 - RNA, 22 nt, Human
agagacaccgcgcaucauggcu

SEQ ID NO: 975603 - RNA, 22 nt, Human
ggucccugcugaagccuuggug

SEQ ID NO: 975604 - RNA, 21 nt, Human
ucugagagcaacugcccuuua

SEQ ID NO: 975605 - RNA, 22 nt, Human
auaaugugaagauaaugcaaga

SEQ ID NO: 975606 - RNA, 22 nt, Human
aaagccauuacaaaauuucaua

SEQ ID NO: 975607 - RNA, 22 nt, Human
auguaagguucagaguauguga

SEQ ID NO: 975608 - RNA, 22 nt, Human
gcucucuguuauuaagaucuuu

SEQ ID NO: 975609 - RNA, 22 nt, Human
agcugucuuucugccuccugau

SEQ ID NO: 975610 - RNA, 22 nt, Human
uucauucuugggaucagagagu

SEQ ID NO: 975611 - RNA, 22 nt, Human
aaaagcucuuucugcuguagau

SEQ ID NO: 975612 - RNA, 22 nt, Human
ucccagccauuccuuuaggugu

SEQ ID NO: 975613 - RNA, 22 nt, Human
aggggagccccugguccuggug

SEQ ID NO: 975614 - RNA, 22 nt, Human
agucccagcuacucaagaggcu

SEQ ID NO: 975615 - RNA, 20 nt, Human
ugggcagcacugcuggcugg

SEQ ID NO: 975616 - RNA, 22 nt, Human
ucugggaagcugcgugccuguu

SEQ ID NO: 975617 - RNA, 19 nt, Human
gaucuuugccaauuuaagc

SEQ ID NO: 975618 - RNA, 22 nt, Human
uggcacugggaugcuacuguua

SEQ ID NO: 975619 - RNA, 22 nt, Human
agagccagcauuugacacuggc

SEQ ID NO: 975620 - RNA, 22 nt, Human
gcugggagcccuggucugcucc

SEQ ID NO: 975621 - RNA, 22 nt, Human
caggcacuucugcugcuugucu

SEQ ID NO: 975622 - RNA, 22 nt, Human
aaaucagacuugaauuuucauc

SEQ ID NO: 975623 - RNA, 22 nt, Human
agacaaauggaguaugagcaac

SEQ ID NO: 975624 - RNA, 23 nt, Human
ucaugcccaggcuccagauguca

SEQ ID NO: 975625 - RNA, 22 nt, Human
aauauuuguuaguguuuuaaug

SEQ ID NO: 975626 - RNA, 22 nt, Human
uggaaggaagccaaggaagguu

SEQ ID NO: 975627 - RNA, 22 nt, Human
ucacugaauacuugucucaucc

SEQ ID NO: 975628 - RNA, 22 nt, Human
gcucugagucucagcuaccaca

SEQ ID NO: 975629 - RNA, 22 nt, Human
gccuccccugcaauuguccuug

SEQ ID NO: 975630 - RNA, 22 nt, Human
uuccaugagcucugaguucaca

SEQ ID NO: 975631 - RNA, 21 nt, Human
uuucuuaggcucuaaaaugac

SEQ ID NO: 975632 - RNA, 20 nt, Human
ccugggcuccaggagccccg

SEQ ID NO: 975633 - RNA, 22 nt, Human
gcucagagggaacaaggggcug

SEQ ID NO: 975634 - RNA, 21 nt, Human
uucagcaagcacucuggacac

SEQ ID NO: 975635 - RNA, 22 nt, Human
ucaguguaaguuauguagaugu

SEQ ID NO: 975636 - RNA, 22 nt, Human
agguuuucagcuguauccugag

SEQ ID NO: 975637 - RNA, 22 nt, Human
auuggcaaggcugcggugucug

SEQ ID NO: 975638 - RNA, 22 nt, Human
acccaggacaugggcacccgug

SEQ ID NO: 975639 - RNA, 22 nt, Human
agggccugggauguccuccuag

SEQ ID NO: 975640 - RNA, 22 nt, Human
uauggcauaucugggagacucu

SEQ ID NO: 975641 - RNA, 22 nt, Human
aggugaaguugaggaggcagaa

SEQ ID NO: 975642 - RNA, 20 nt, Human
gagccugggaagucuaaggu

SEQ ID NO: 975643 - RNA, 22 nt, Human
caggggccaggcugucugcugu

SEQ ID NO: 975644 - RNA, 22 nt, Human
uaaucacaucaggguaaauggg

SEQ ID NO: 975645 - RNA, 22 nt, Human
uaguaaaaguuuaguugaaagu

SEQ ID NO: 975646 - RNA, 22 nt, Human
uggugagcucuuuagacuggga

SEQ ID NO: 975647 - RNA, 22 nt, Human
cuggagccauguauagccuaug

SEQ ID NO: 975648 - RNA, 22 nt, Human
ugcagcccuuccuuccucuggg

SEQ ID NO: 975649 - RNA, 22 nt, Human
uauuucuaagagauaucuguac

SEQ ID NO: 975650 - RNA, 22 nt, Human
cugggccuagaggaagcugaca

SEQ ID NO: 975651 - RNA, 22 nt, Human
aaguuucaugauguaauuauug

SEQ ID NO: 975652 - RNA, 22 nt, Human
ccaggcugcuuagccuuaucuu

SEQ ID NO: 975653 - RNA, 22 nt, Human
cagcagagaaauuaaacuucug

SEQ ID NO: 975654 - RNA, 22 nt, Human
uccaugagcuagcuuuccaaag

SEQ ID NO: 975655 - RNA, 22 nt, Human
cuacauuaaauuggcuuacuua

SEQ ID NO: 975656 - RNA, 22 nt, Human
ucucaggaucuaauacauggua

SEQ ID NO: 975657 - RNA, 22 nt, Human
agaggcccucucucuccugaug

SEQ ID NO: 975658 - RNA, 22 nt, Human
ucagagugaccuuacauggucu

SEQ ID NO: 975659 - RNA, 22 nt, Human
cugagguguugaugaccuaugc

SEQ ID NO: 975660 - RNA, 23 nt, Human
uuccagaguccacaucugccacc

SEQ ID NO: 975661 - RNA, 22 nt, Human
caaaguccauaguuuacaauag

SEQ ID NO: 975662 - RNA, 22 nt, Human
aacagcaugcuggguaacauug

SEQ ID NO: 975663 - RNA, 22 nt, Human
ucagagaaaugaaguagggauu

SEQ ID NO: 975664 - RNA, 20 nt, Human
gcccaggaauuugcauuucu

SEQ ID NO: 975665 - RNA, 22 nt, Human
uuuuccuauaugcaaagaaugc

SEQ ID NO: 975666 - RNA, 22 nt, Human
uugcucaggcuggugugcagug

SEQ ID NO: 975667 - RNA, 22 nt, Human
ccucugggagacugcuacugag

SEQ ID NO: 975668 - RNA, 22 nt, Human
ccugggagaacugcuggguugg

SEQ ID NO: 975669 - RNA, 22 nt, Human
uggcagcuguguccagguagaa

SEQ ID NO: 975670 - RNA, 22 nt, Human
aggcaugugacccuggacucag

SEQ ID NO: 975671 - RNA, 22 nt, Human
ggugaaggucagagcaggaaaa

SEQ ID NO: 975672 - RNA, 22 nt, Human
ucccagagucuucuccuguaau

SEQ ID NO: 975673 - RNA, 22 nt, Human
gggcagcugucuugguucucaa

SEQ ID NO: 975674 - RNA, 22 nt, Human
aagaauguucuuguagucauga

SEQ ID NO: 975675 - RNA, 22 nt, Human
aaucaguucuacaucuuaucca

SEQ ID NO: 975676 - RNA, 23 nt, Human
uucaaaacuggaaaaucagaugc

SEQ ID NO: 975677 - RNA, 22 nt, Human
cugggcagagcuaacaccugag

SEQ ID NO: 975678 - RNA, 22 nt, Human
aagugagauuauauguacggga

SEQ ID NO: 975679 - RNA, 22 nt, Human
ggcucugcccagaugaagagga

SEQ ID NO: 975680 - RNA, 22 nt, Human
aagucuuacagacaagcugaag

SEQ ID NO: 975681 - RNA, 22 nt, Human
acuguguccuauuuccuugaca

SEQ ID NO: 975682 - RNA, 22 nt, Human
gaggggcuggcuguggucccau

SEQ ID NO: 975683 - RNA, 22 nt, Human
uuucuguuaggcaucauuuuaa

SEQ ID NO: 975684 - RNA, 22 nt, Human
cagaaaaccugacucuagaacu

SEQ ID NO: 975685 - RNA, 22 nt, Human
cuguccauuuucgugccuccuu

SEQ ID NO: 975686 - RNA, 22 nt, Human
cuggucugagggcucuugaggc

SEQ ID NO: 975687 - RNA, 22 nt, Human
aggugaguugguaggaaguuug

SEQ ID NO: 975688 - RNA, 22 nt, Human
ugaugcugcugggaguggugcu

SEQ ID NO: 975689 - RNA, 22 nt, Human
uuauuccaguaaucucuguaau

SEQ ID NO: 975690 - RNA, 20 nt, Human
aucuggcucagauccugcag

SEQ ID NO: 975691 - RNA, 22 nt, Human
cucaggauugugccuagggaga

SEQ ID NO: 975692 - RNA, 22 nt, Human
uaagcuauuccugaagaagguu

SEQ ID NO: 975693 - RNA, 22 nt, Human
cugcugagaaaagacugaggga

SEQ ID NO: 975694 - RNA, 22 nt, Human
uguucaaaugaucuucuuaaau

SEQ ID NO: 975695 - RNA, 22 nt, Human
uuuuucuaauggcuuaggaugu

SEQ ID NO: 975696 - RNA, 22 nt, Human
caggugggagccacagcguaca

SEQ ID NO: 975697 - RNA, 22 nt, Human
cccuucagcugagugggacagc

SEQ ID NO: 975698 - RNA, 22 nt, Human
agugugaccuuauuuggaaaca

SEQ ID NO: 975699 - RNA, 22 nt, Human
aauguauaaaguguuaauaacu

SEQ ID NO: 975700 - RNA, 22 nt, Human
aauguguagauguugcauuccu

SEQ ID NO: 975701 - RNA, 22 nt, Human
cccagguggguuggccucuguc

SEQ ID NO: 975702 - RNA, 22 nt, Human
gagcuggugugugcccgagcac

SEQ ID NO: 975703 - RNA, 22 nt, Human
ucuucagugaauggcaagaucu

SEQ ID NO: 975704 - RNA, 17 nt, Human
ucagcaggggccaagcu

SEQ ID NO: 975705 - RNA, 22 nt, Human
cucuuaaagcuuccaguuucaa

SEQ ID NO: 975706 - RNA, 22 nt, Human
ugagggagagggcgaaaaugaa

SEQ ID NO: 975707 - RNA, 22 nt, Human
cuaauacucauuucuguaacuc

SEQ ID NO: 975708 - RNA, 22 nt, Human
ggcugccugggagcccuccucu

SEQ ID NO: 975709 - RNA, 22 nt, Human
gugauaaagacgugucauaauu

SEQ ID NO: 975710 - RNA, 22 nt, Human
gcccaggaggucaaguagcuau

SEQ ID NO: 975711 - RNA, 22 nt, Human
uacaaagccugguagauaucug

SEQ ID NO: 975712 - RNA, 23 nt, Human
ccuggcagcaaacgaggagguua

SEQ ID NO: 975713 - RNA, 22 nt, Human
gcagaagcccggucagcgcacg

SEQ ID NO: 975714 - RNA, 22 nt, Human
uaggcagcuuagguuagaagug

SEQ ID NO: 975715 - RNA, 22 nt, Human
gcaguggcuaggagucuggcgu

SEQ ID NO: 975716 - RNA, 22 nt, Human
ucagaguguuuuacuaaacaag

SEQ ID NO: 975717 - RNA, 22 nt, Human
uuuuccucugagcuuugaauaa

SEQ ID NO: 975718 - RNA, 22 nt, Human
acagagcacauagauuggaguu

SEQ ID NO: 975719 - RNA, 22 nt, Human
aaagcuauuugugaguuauaga

SEQ ID NO: 975720 - RNA, 22 nt, Human
uggaguucauccaugacagcuu

SEQ ID NO: 975721 - RNA, 22 nt, Human
cagcaggaggugaguagcaggu

SEQ ID NO: 975722 - RNA, 23 nt, Human
aaaugcagggucgcagguuacag

SEQ ID NO: 975723 - RNA, 22 nt, Human
ucuccuggcauuugguugagua

SEQ ID NO: 975724 - RNA, 19 nt, Human
cccucaggucugagcaguc

SEQ ID NO: 975725 - RNA, 22 nt, Human
ugagaauuacaaaugagucaca

SEQ ID NO: 975726 - RNA, 22 nt, Human
ugauuuccuaggucuggagaag

SEQ ID NO: 975727 - RNA, 22 nt, Human
guggcugcagagggcacagcau

SEQ ID NO: 975728 - RNA, 22 nt, Human
acagagcuguacaugugccaug

SEQ ID NO: 975729 - RNA, 22 nt, Human
uuuccucuccaccaggaggucu

SEQ ID NO: 975730 - RNA, 22 nt, Human
cuggggugugcucagagcaggg

SEQ ID NO: 975731 - RNA, 22 nt, Human
gugucccaauguucaggacggc

SEQ ID NO: 975732 - RNA, 22 nt, Human
ugucaucucacugauauagaug

SEQ ID NO: 975733 - RNA, 22 nt, Human
cugggagcccugacuagccugg

SEQ ID NO: 975734 - RNA, 22 nt, Human
cucugagaaagcugugagcuaa

SEQ ID NO: 975735 - RNA, 22 nt, Human
gugcaugucggggugcauguca

SEQ ID NO: 975736 - RNA, 22 nt, Human
uuuuaauacugcuauuguagga

SEQ ID NO: 975737 - RNA, 22 nt, Human
ugggcugcagagcccggccuuc

SEQ ID NO: 975738 - RNA, 22 nt, Human
ucagcaguuuuauaugcagcuu

SEQ ID NO: 975739 - RNA, 22 nt, Human
augcccaaugucacaauuuuug

SEQ ID NO: 975740 - RNA, 22 nt, Human
aguuguaagagacagauauaaa

SEQ ID NO: 975741 - RNA, 22 nt, Human
cacagggcagagaccugggugc

SEQ ID NO: 975742 - RNA, 22 nt, Human
gucaucuuaucauuguugcugu

SEQ ID NO: 975743 - RNA, 22 nt, Human
uuuuuccuaagcaguggagcug

SEQ ID NO: 975744 - RNA, 22 nt, Human
ugucccaguuuugcagguuaga

SEQ ID NO: 975745 - RNA, 22 nt, Human
cccugagagugagugccaccuu

SEQ ID NO: 975746 - RNA, 22 nt, Human
ugcaggcuuuagccccauggcu

SEQ ID NO: 975747 - RNA, 22 nt, Human
cugggcacugcaggguguugag

SEQ ID NO: 975748 - RNA, 22 nt, Human
auuucuuuucaagagggugcuu

SEQ ID NO: 975749 - RNA, 22 nt, Human
ggggaggcugaugugggcaaag

SEQ ID NO: 975750 - RNA, 22 nt, Human
cuacauuuuucaccgagccucu

SEQ ID NO: 975751 - RNA, 22 nt, Human
caccaucagcagcaggugucaa

SEQ ID NO: 975752 - RNA, 21 nt, Human
cagaggggcuagccuggcugc

SEQ ID NO: 975753 - RNA, 22 nt, Human
gugguaauuuaauccuacacug

SEQ ID NO: 975754 - RNA, 22 nt, Human
cccagccucugggcucacccaa

SEQ ID NO: 975755 - RNA, 22 nt, Human
aggccaaguagcuagcauugaa

SEQ ID NO: 975756 - RNA, 19 nt, Human
ugaggccaaggucacagau

SEQ ID NO: 975757 - RNA, 22 nt, Human
ggcucugcccagguggacagca

SEQ ID NO: 975758 - RNA, 22 nt, Human
ccacugggcguuucuguccaau

SEQ ID NO: 975759 - RNA, 22 nt, Human
ggccucucuccuuggcuugcag

SEQ ID NO: 975760 - RNA, 22 nt, Human
aggcacuucucaaauucaugcc

SEQ ID NO: 975761 - RNA, 22 nt, Human
ggggccugcgagguucaacuuc

SEQ ID NO: 975762 - RNA, 22 nt, Human
ggccugggcccacugucaagag

SEQ ID NO: 975763 - RNA, 22 nt, Human
auaaggcacacauagauagggu

SEQ ID NO: 975764 - RNA, 22 nt, Human
ugucccuggaacuauggcucca

SEQ ID NO: 975765 - RNA, 22 nt, Human
caaggccaaagggccacuguca

SEQ ID NO: 975766 - RNA, 22 nt, Human
gaugccucuuuuggcugaauua

SEQ ID NO: 975767 - RNA, 19 nt, Human
ugcagaagacacaguggug

SEQ ID NO: 975768 - RNA, 22 nt, Human
ugcaccugagaggucucugagg

SEQ ID NO: 975769 - RNA, 22 nt, Human
guguggcugugggagauguuca

SEQ ID NO: 975770 - RNA, 22 nt, Human
ucagcaguguaguuuaucauuc

SEQ ID NO: 975771 - RNA, 17 nt, Human
cugaggcccagggccca

SEQ ID NO: 975772 - RNA, 22 nt, Human
aggcagugcugugcccugaacc

SEQ ID NO: 975773 - RNA, 22 nt, Human
uauugaggauugaggaaagcac

SEQ ID NO: 975774 - RNA, 22 nt, Human
uauuacugagguuuuauggagu

SEQ ID NO: 975775 - RNA, 22 nt, Human
ucaggagagaaagaauacaauu

SEQ ID NO: 975776 - RNA, 22 nt, Human
gaaauauugggacucagagcuu

SEQ ID NO: 975777 - RNA, 22 nt, Human
uagcagaaccagcagucaauuu

SEQ ID NO: 975778 - RNA, 22 nt, Human
cugugucugccugggauccauu

SEQ ID NO: 975779 - RNA, 22 nt, Human
ucacaccuguaaucccaggccu

SEQ ID NO: 975780 - RNA, 22 nt, Human
uggcagcugcguuguguuucug

SEQ ID NO: 975781 - RNA, 22 nt, Human
uggggaggacgggcgccuuccu

SEQ ID NO: 975782 - RNA, 22 nt, Human
ugugacagaucuuuaaauaaug

SEQ ID NO: 975783 - RNA, 22 nt, Human
gagaggcagaggccugaaaccg

SEQ ID NO: 975784 - RNA, 22 nt, Human
ucuacugcacuggugucucauc

SEQ ID NO: 975785 - RNA, 22 nt, Human
gggcagcucugcccaucagagg

SEQ ID NO: 975786 - RNA, 22 nt, Human
agaggccacuuugccugugaug

SEQ ID NO: 975787 - RNA, 22 nt, Human
acagaggccaugagcugccacc

SEQ ID NO: 975788 - RNA, 22 nt, Human
auacagaagaacuauagccacu

SEQ ID NO: 975789 - RNA, 22 nt, Human
uuucagggagccuagaagagcu

SEQ ID NO: 975790 - RNA, 22 nt, Human
ucaggagauggucuuuauaggc

SEQ ID NO: 975791 - RNA, 22 nt, Human
ugucuguaagguguuuauguua

SEQ ID NO: 975792 - RNA, 22 nt, Human
agcagcugagccccagcuguga

SEQ ID NO: 975793 - RNA, 22 nt, Human
agaaaucuaagaugcucaagga

SEQ ID NO: 975794 - RNA, 22 nt, Human
acagcuguauccccagagcuca

SEQ ID NO: 975795 - RNA, 22 nt, Human
uggcagcuccuggggccagcac

SEQ ID NO: 975796 - RNA, 22 nt, Human
gcggagggcgagcccgcggagc

SEQ ID NO: 975797 - RNA, 22 nt, Human
cucugagagcggucuguggcuu

SEQ ID NO: 975798 - RNA, 21 nt, Human
ggccugagcaccuguccaccu

SEQ ID NO: 975799 - RNA, 22 nt, Human
ggaggagggguuuacauuggaa

SEQ ID NO: 975800 - RNA, 22 nt, Human
cuugcuucauuagugucuuagu

SEQ ID NO: 975801 - RNA, 22 nt, Human
uuagccauggacugaauugacu

SEQ ID NO: 975802 - RNA, 22 nt, Human
cuggguaaguuccuaaggcuca

SEQ ID NO: 975803 - RNA, 22 nt, Human
ugguccuggggaucugcaguga

SEQ ID NO: 975804 - RNA, 22 nt, Human
cagcuuucaucagugacacuca

SEQ ID NO: 975805 - RNA, 22 nt, Human
ucaggaugaccacgagccucua

SEQ ID NO: 975806 - RNA, 22 nt, Human
gcauuuaaauuugaacuucaga

SEQ ID NO: 975807 - RNA, 22 nt, Human
agcugcccccagggcugugcuu

SEQ ID NO: 975808 - RNA, 22 nt, Human
ucuauacaaguuucacuuugac

SEQ ID NO: 975809 - RNA, 22 nt, Human
uuaagacaguguauuuguuuuc

SEQ ID NO: 975810 - RNA, 22 nt, Human
ugugcuucagguugucgccacg

SEQ ID NO: 975811 - RNA, 20 nt, Human
agugucugggccucaggccc

SEQ ID NO: 975812 - RNA, 22 nt, Human
cagcagcugauggggaagugau

SEQ ID NO: 975813 - RNA, 22 nt, Human
uaucuacaggugucagguaaga

SEQ ID NO: 975814 - RNA, 22 nt, Human
gcaaggcuuugugaauuuuaaa

SEQ ID NO: 975815 - RNA, 22 nt, Human
gcugccuucaguucugauucau

SEQ ID NO: 975816 - RNA, 22 nt, Human
cagcagugcuucagugugagau

SEQ ID NO: 975817 - RNA, 22 nt, Human
ucuggcucacuucaggcuucac

SEQ ID NO: 975818 - RNA, 22 nt, Human
aguguggguuuuauggagcccu

SEQ ID NO: 975819 - RNA, 22 nt, Human
ucugucacuuauuaagauggau

SEQ ID NO: 975820 - RNA, 20 nt, Human
uugcauuggaugugcaggug

SEQ ID NO: 975821 - RNA, 16 nt, Human
ccaccugcagcucuca

SEQ ID NO: 975822 - RNA, 22 nt, Human
ucugggagcacacgcagugauc

SEQ ID NO: 975823 - RNA, 22 nt, Human
caggcuugauuauucagacaau

SEQ ID NO: 975824 - RNA, 22 nt, Human
cuggaugcuuccucucugcuag

SEQ ID NO: 975825 - RNA, 22 nt, Human
uguaagauauucagcuuauuga

SEQ ID NO: 975826 - RNA, 22 nt, Human
cuccagggaaaggggcguccgc

SEQ ID NO: 975827 - RNA, 22 nt, Human
gcugcugugccuggcguccugu

SEQ ID NO: 975828 - RNA, 22 nt, Human
cucaggauuuacuaauuucaag

SEQ ID NO: 975829 - RNA, 21 nt, Human
gggugcuguggucaugcagga

SEQ ID NO: 975830 - RNA, 22 nt, Human
cggcagcugauugcagagcacc

SEQ ID NO: 975831 - RNA, 22 nt, Human
ggugaggcagguggcugcugag

SEQ ID NO: 975832 - RNA, 22 nt, Human
ccuggcugcauuuugcuggaug

SEQ ID NO: 975833 - RNA, 22 nt, Human
ugcugcuguauccuuaguguca

SEQ ID NO: 975834 - RNA, 22 nt, Human
aaacuacuaugggaauguacuu

SEQ ID NO: 975835 - RNA, 22 nt, Human
uggguggcggccugguucugag

SEQ ID NO: 975836 - RNA, 22 nt, Human
cuggugggagcagcaggcagcu

SEQ ID NO: 975837 - RNA, 22 nt, Human
cacgggagacgugaucuuggac

SEQ ID NO: 975838 - RNA, 22 nt, Human
agggcagcuaaggugcugacug

SEQ ID NO: 975839 - RNA, 22 nt, Human
caugcuuucuguccaaauguua

SEQ ID NO: 975840 - RNA, 22 nt, Human
aaagguaacaguuauaaccagg

SEQ ID NO: 975841 - RNA, 22 nt, Human
cugggaaauggcuucgagcuca

SEQ ID NO: 975842 - RNA, 22 nt, Human
ggcuggucacaccacugcaggg

SEQ ID NO: 975843 - RNA, 22 nt, Human
caguguacuuggaauguaacag

SEQ ID NO: 975844 - RNA, 22 nt, Human
auaugcacacucugcccacaga

SEQ ID NO: 975845 - RNA, 22 nt, Human
agcauccaacaggagggaaggg

SEQ ID NO: 975846 - RNA, 22 nt, Human
cugggcacacagugacucugca

SEQ ID NO: 975847 - RNA, 22 nt, Human
gccugcagauauauaggauggu

SEQ ID NO: 975848 - RNA, 22 nt, Human
auaacagauacucucugugagg

SEQ ID NO: 975849 - RNA, 22 nt, Human
caggaggaagaacucugcaaca

SEQ ID NO: 975850 - RNA, 22 nt, Human
gcucucuggaggccauggacag

SEQ ID NO: 975851 - RNA, 22 nt, Human
uugccuugauucuucucaugug

SEQ ID NO: 975852 - RNA, 22 nt, Human
uuaauguguguacaggauuuug

SEQ ID NO: 975853 - RNA, 22 nt, Human
accaucagucacauguagagaa

SEQ ID NO: 975854 - RNA, 22 nt, Human
ccaggcaggcgauggugcagug

SEQ ID NO: 975855 - RNA, 22 nt, Human
cccaggagguguagcugcgugg

SEQ ID NO: 975856 - RNA, 22 nt, Human
ugggcuccucgucacucgcugu

SEQ ID NO: 975857 - RNA, 22 nt, Human
gcucaaggcaggcagacaugag

SEQ ID NO: 975858 - RNA, 22 nt, Human
gugggacagcuggagggucccu

SEQ ID NO: 975859 - RNA, 22 nt, Human
gcagggcagccacaggcccccu

SEQ ID NO: 975860 - RNA, 23 nt, Human
agacaguggccgagagguacuag

SEQ ID NO: 975861 - RNA, 22 nt, Human
guguuuccuaguuuaaugaaug

SEQ ID NO: 975862 - RNA, 18 nt, Human
aggccaaacuuguaagca

SEQ ID NO: 975863 - RNA, 23 nt, Human
agcaauaagaagggauacaugug

SEQ ID NO: 975864 - RNA, 22 nt, Human
uagccaggcgaggucagugucg

SEQ ID NO: 975865 - RNA, 22 nt, Human
ggcagauggaagaggcuggguc

SEQ ID NO: 975866 - RNA, 22 nt, Human
cagcaauaacucaaagccauuu

SEQ ID NO: 975867 - RNA, 22 nt, Human
ucuggcucauaggaaggccauu

SEQ ID NO: 975868 - RNA, 22 nt, Human
caggcacagaguuauucauuua

SEQ ID NO: 975869 - RNA, 22 nt, Human
gagcacagcuggagguagcauu

SEQ ID NO: 975870 - RNA, 19 nt, Human
ccagguggaacugagguag

SEQ ID NO: 975871 - RNA, 22 nt, Human
gagcucccuggagguucagaua

SEQ ID NO: 975872 - RNA, 22 nt, Human
gcacugggaaugagggcagcuu

SEQ ID NO: 975873 - RNA, 22 nt, Human
uggcagcacuugaacuugagcc

SEQ ID NO: 975874 - RNA, 22 nt, Human
ugggggcauggaccagccuggc

SEQ ID NO: 975875 - RNA, 22 nt, Human
cuuggcagagggcugggcucag

SEQ ID NO: 975876 - RNA, 20 nt, Human
gugaccagaagacagugggu

SEQ ID NO: 975877 - RNA, 22 nt, Human
acagagguaggacaugagauau

SEQ ID NO: 975878 - RNA, 22 nt, Human
uucagauaaacuacaaauaauu

SEQ ID NO: 975879 - RNA, 22 nt, Human
gcacugggaaugugagcagcug

SEQ ID NO: 975880 - RNA, 22 nt, Human
cuuacagagaagaaaauguagu

SEQ ID NO: 975881 - RNA, 22 nt, Human
auggccaagagucgauuugggg

SEQ ID NO: 975882 - RNA, 22 nt, Human
aacugcauuugcauaaguccau

SEQ ID NO: 975883 - RNA, 22 nt, Human
guguuuuaagaaagaagcucag

SEQ ID NO: 975884 - RNA, 22 nt, Human
uauguguacaucugguugagca

SEQ ID NO: 975885 - RNA, 22 nt, Human
gagagcuggguucaaguagcug

SEQ ID NO: 975886 - RNA, 21 nt, Human
uggcagacuagaguauagaug

SEQ ID NO: 975887 - RNA, 23 nt, Human
ugaguucucaucuuggcuucuau

SEQ ID NO: 975888 - RNA, 22 nt, Human
caguuauuaugaggucauuagg

SEQ ID NO: 975889 - RNA, 22 nt, Human
caaggcaggaagccugucuuau

SEQ ID NO: 975890 - RNA, 22 nt, Human
cugagagccuccuguuggcuag

SEQ ID NO: 975891 - RNA, 21 nt, Human
gagugcaggucugaugccauc

SEQ ID NO: 975892 - RNA, 22 nt, Human
ucucagagggaaaggccaauuu

SEQ ID NO: 975893 - RNA, 22 nt, Human
aguaaaauuguauuggaaaaca

SEQ ID NO: 975894 - RNA, 19 nt, Human
cuguggcugaccucuggcc

SEQ ID NO: 975895 - RNA, 22 nt, Human
uuagagucaagcugcauguucu

SEQ ID NO: 975896 - RNA, 22 nt, Human
uuucaaauagaaucuuuccaaa

SEQ ID NO: 975897 - RNA, 22 nt, Human
cugagccauaagggaggcuggg

SEQ ID NO: 975898 - RNA, 19 nt, Human
augucuguugaauuucaua

SEQ ID NO: 975899 - RNA, 22 nt, Human
ucaagaaagggcuucaccagga

SEQ ID NO: 975900 - RNA, 22 nt, Human
cagucuuagaggugacugugga

SEQ ID NO: 975901 - RNA, 22 nt, Human
uggaggagaauuuauggucgaa

SEQ ID NO: 975902 - RNA, 22 nt, Human
ggugaggcccagugaucugugu

SEQ ID NO: 975903 - RNA, 18 nt, Human
acucaggaaaugaugaca

SEQ ID NO: 975904 - RNA, 22 nt, Human
uggccugggcaugaagcaucgu

SEQ ID NO: 975905 - RNA, 22 nt, Human
gauaccagacagggagggagaa

SEQ ID NO: 975906 - RNA, 22 nt, Human
aaaugcacacaccaggaaacua

SEQ ID NO: 975907 - RNA, 22 nt, Human
aggccugaggaccuucuggagg

SEQ ID NO: 975908 - RNA, 22 nt, Human
uggcucucaggccugcugcguu

SEQ ID NO: 975909 - RNA, 22 nt, Human
ggcaggcuggcuuuguuccagg

SEQ ID NO: 975910 - RNA, 22 nt, Human
uccuggcccuguggccugcagu

SEQ ID NO: 975911 - RNA, 22 nt, Human
uaugugucugucgugcauaaau

SEQ ID NO: 975912 - RNA, 22 nt, Human
auccaguuuaugucauauucuu

SEQ ID NO: 975913 - RNA, 22 nt, Human
ucugucacucccugaugaugaa

SEQ ID NO: 975914 - RNA, 22 nt, Human
ucucacucauuuccuaggucuu

SEQ ID NO: 975915 - RNA, 22 nt, Human
guaacauaguuugugcuucauc

SEQ ID NO: 975916 - RNA, 22 nt, Human
agugaccaacaaugcugagaag

SEQ ID NO: 975917 - RNA, 22 nt, Human
agaggcagaaguguucaaaccc

SEQ ID NO: 975918 - RNA, 22 nt, Human
gcagauggacuguaugaccuga

SEQ ID NO: 975919 - RNA, 21 nt, Human
aaggccugcuuacugcuaguu

SEQ ID NO: 975920 - RNA, 22 nt, Human
cagucacauggaugauggauag

SEQ ID NO: 975921 - RNA, 22 nt, Human
agacaggacacaagcugcauaa

SEQ ID NO: 975922 - RNA, 22 nt, Human
uuugacagauccuuaacucagc

SEQ ID NO: 975923 - RNA, 22 nt, Human
uuagaaaauuugcuucuuugga

SEQ ID NO: 975924 - RNA, 22 nt, Human
gcccuuccaacccagagggcaa

SEQ ID NO: 975925 - RNA, 22 nt, Human
ucucugggauaaacugggccag

SEQ ID NO: 975926 - RNA, 22 nt, Human
auugcagcuggucaggguaauu

SEQ ID NO: 975927 - RNA, 20 nt, Human
auguaaaauuauaaggcuga

SEQ ID NO: 975928 - RNA, 22 nt, Human
ggagcagacauaaccuuacaga

SEQ ID NO: 975929 - RNA, 22 nt, Human
ggcaguagccagggacuggcag

SEQ ID NO: 975930 - RNA, 22 nt, Human
aucaggaucugcaucauaagaa

SEQ ID NO: 975931 - RNA, 22 nt, Human
cuggcuccacucccugccugac

SEQ ID NO: 975932 - RNA, 22 nt, Human
gagaaagacguaggcugggagg

SEQ ID NO: 975933 - RNA, 22 nt, Human
uagaggugacacugagaccaua

SEQ ID NO: 975934 - RNA, 22 nt, Human
agucaaagcuacaggcauuuga

SEQ ID NO: 975935 - RNA, 22 nt, Human
aggcucuggaguguggugcugg

SEQ ID NO: 975936 - RNA, 22 nt, Human
cagugguugguagauacuugag

SEQ ID NO: 975937 - RNA, 22 nt, Human
accugaggccuccccagcagac

SEQ ID NO: 975938 - RNA, 21 nt, Human
gcugagagguugggaaguuca

SEQ ID NO: 975939 - RNA, 19 nt, Human
gcacacccugcaccaccau

SEQ ID NO: 975940 - RNA, 22 nt, Human
aaggcacuuuucuaaagaccuu

SEQ ID NO: 975941 - RNA, 22 nt, Human
ccugggucacucaggcaggcgg

SEQ ID NO: 975942 - RNA, 22 nt, Human
acaugcauaggagaagucuuua

SEQ ID NO: 975943 - RNA, 22 nt, Human
uaugcacaccuggguccuuguc

SEQ ID NO: 975944 - RNA, 22 nt, Human
cuucugugcuucacaguugcca

SEQ ID NO: 975945 - RNA, 22 nt, Human
uccagccuuucuacucacugag

SEQ ID NO: 975946 - RNA, 22 nt, Human
ccugugugcacacgaggccaug

SEQ ID NO: 975947 - RNA, 22 nt, Human
ccuggccaggcuccaaguacug

SEQ ID NO: 975948 - RNA, 22 nt, Human
uggcucaguggcagccgcagcu

SEQ ID NO: 975949 - RNA, 21 nt, Human
uuugaaagugggugauucuuu

SEQ ID NO: 975950 - RNA, 22 nt, Human
gcuuccugucccucagccauga

SEQ ID NO: 975951 - RNA, 22 nt, Human
ucauugcacuccagccugggca

SEQ ID NO: 975952 - RNA, 22 nt, Human
cuucagaauccagaaucagaau

SEQ ID NO: 975953 - RNA, 22 nt, Human
uugcuuuguggugguucuucca

SEQ ID NO: 975954 - RNA, 22 nt, Human
ccugggagcuguggaaaggcug

SEQ ID NO: 975955 - RNA, 22 nt, Human
auaugugugccauuucagcagu

SEQ ID NO: 975956 - RNA, 22 nt, Human
ccagaaaaugcagaacauagaa

SEQ ID NO: 975957 - RNA, 22 nt, Human
gcuuuggaugugugccugaggu

SEQ ID NO: 975958 - RNA, 22 nt, Human
cagaggccuuucuacagugaua

SEQ ID NO: 975959 - RNA, 22 nt, Human
gcuggccauucucuuugagaug

SEQ ID NO: 975960 - RNA, 21 nt, Human
gcagccacagccaccaagcua

SEQ ID NO: 975961 - RNA, 22 nt, Human
agauaauuugaguaaauuaauu

SEQ ID NO: 975962 - RNA, 22 nt, Human
guaacacagaaaugaaauucca

SEQ ID NO: 975963 - RNA, 22 nt, Human
gcuguguuugacaguagcagac

SEQ ID NO: 975964 - RNA, 22 nt, Human
acucugcuauugcagugcaaaa

SEQ ID NO: 975965 - RNA, 22 nt, Human
ccaaaaaguacauuuaggugug

SEQ ID NO: 975966 - RNA, 22 nt, Human
gccagccugugggggcucugug

SEQ ID NO: 975967 - RNA, 22 nt, Human
cuuauggcuguagucuggaagu

SEQ ID NO: 975968 - RNA, 22 nt, Human
ucucagaguuccucuggagucc

SEQ ID NO: 975969 - RNA, 22 nt, Human
ugugugacccccagugaagccu

SEQ ID NO: 975970 - RNA, 22 nt, Human
ucccagcagggccgaccagccu

SEQ ID NO: 975971 - RNA, 22 nt, Human
aagauuucuuacuuauugaugc

SEQ ID NO: 975972 - RNA, 22 nt, Human
cccuuggggaugcugugucugg

SEQ ID NO: 975973 - RNA, 22 nt, Human
guucccauacaguaucagugcu

SEQ ID NO: 975974 - RNA, 22 nt, Human
cccuggugguacggcacuggca

SEQ ID NO: 975975 - RNA, 22 nt, Human
ugcuuuggccacuagaauucag

SEQ ID NO: 975976 - RNA, 22 nt, Human
uaaguucaagucuuggauauaa

SEQ ID NO: 975977 - RNA, 22 nt, Human
cagggccugccugguuccugga

SEQ ID NO: 975978 - RNA, 22 nt, Human
aaguuuguuguacauguuagua

SEQ ID NO: 975979 - RNA, 22 nt, Human
agcucuccacacauaggacuag

SEQ ID NO: 975980 - RNA, 20 nt, Human
auaauuuacccugcaccacu

SEQ ID NO: 975981 - RNA, 19 nt, Human
gcccugcaggagguggggc

SEQ ID NO: 975982 - RNA, 22 nt, Human
gaagagcuuagacagaaucaaa

SEQ ID NO: 975983 - RNA, 22 nt, Human
uccaugaggaccaaauucguag

SEQ ID NO: 975984 - RNA, 18 nt, Human
uuugcaaaggaaguaugg

SEQ ID NO: 975985 - RNA, 22 nt, Human
acagaguaucuaucaggaguau

SEQ ID NO: 975986 - RNA, 22 nt, Human
cacauacaaugguguuauuugg

SEQ ID NO: 975987 - RNA, 22 nt, Human
cuggggcuggugaggcaggcuc

SEQ ID NO: 975988 - RNA, 22 nt, Human
cccaggaggcagaaguugcagu

SEQ ID NO: 975989 - RNA, 22 nt, Human
aguuugaauugaaaugcagaug

SEQ ID NO: 975990 - RNA, 22 nt, Human
gaggcuguuagggccugaggua

SEQ ID NO: 975991 - RNA, 20 nt, Human
gugccuggagaagaggcugu

SEQ ID NO: 975992 - RNA, 22 nt, Human
ugggacaguuguccuccacucu

SEQ ID NO: 975993 - RNA, 19 nt, Human
cugggccagaaucagcuca

SEQ ID NO: 975994 - RNA, 22 nt, Human
cagcucucuaaggucuugcuuu

SEQ ID NO: 975995 - RNA, 22 nt, Human
uacccagcuucaagucaggacu

SEQ ID NO: 975996 - RNA, 22 nt, Human
acugcuuacaaaaggaaagaau

SEQ ID NO: 975997 - RNA, 22 nt, Human
auaauuuuuguuugauguccaa

SEQ ID NO: 975998 - RNA, 22 nt, Human
uuauccuggauuauauauguga

SEQ ID NO: 975999 - RNA, 22 nt, Human
cucuguccuaugcuugauagaa

SEQ ID NO: 976000 - RNA, 22 nt, Human
agcagccagugggagugauaca

SEQ ID NO: 976001 - RNA, 22 nt, Human
agagccugugauugucaucacc

SEQ ID NO: 976002 - RNA, 18 nt, Human
ucuuccaacacugacacc

SEQ ID NO: 976003 - RNA, 22 nt, Human
gcccucagcuccuggacacaug

SEQ ID NO: 976004 - RNA, 22 nt, Human
cuccugggaauuuaguugugag

SEQ ID NO: 976005 - RNA, 22 nt, Human
cacaaugugguuugucaucuuu

SEQ ID NO: 976006 - RNA, 22 nt, Human
cugggcuggagugcaauggcgc

SEQ ID NO: 976007 - RNA, 22 nt, Human
uugggcugaaguagagggcaga

SEQ ID NO: 976008 - RNA, 22 nt, Human
cuggggugagcagaaacagggg

SEQ ID NO: 976009 - RNA, 17 nt, Human
ggugaguguccaggugg

SEQ ID NO: 976010 - RNA, 22 nt, Human
gagcagcuagauaaagcccuuc

SEQ ID NO: 976011 - RNA, 22 nt, Human
aguguuucucagaagggccuau

SEQ ID NO: 976012 - RNA, 22 nt, Human
cagucauuuuauuugaaaauua

SEQ ID NO: 976013 - RNA, 22 nt, Human
uacauauuugucuuuguacugu

SEQ ID NO: 976014 - RNA, 22 nt, Human
gcuguccugggaacaggcacua

SEQ ID NO: 976015 - RNA, 22 nt, Human
uucaaacaaaacuguucccaua

SEQ ID NO: 976016 - RNA, 22 nt, Human
uccugucagugaggcagaugaa

SEQ ID NO: 976017 - RNA, 22 nt, Human
cacagaauaaauugguaucaga

SEQ ID NO: 976018 - RNA, 22 nt, Human
auaugcacauacauacauaggu

SEQ ID NO: 976019 - RNA, 22 nt, Human
cugggcugagccugggcugugu

SEQ ID NO: 976020 - RNA, 22 nt, Human
aaagacuuggcuuaugauuugc

SEQ ID NO: 976021 - RNA, 23 nt, Human
ggguccagagacaggcaugggug

SEQ ID NO: 976022 - RNA, 22 nt, Human
ccacagagcauuagauuucaga

SEQ ID NO: 976023 - RNA, 22 nt, Human
ucccaggaaugucugaaaguga

SEQ ID NO: 976024 - RNA, 22 nt, Human
gcucugcugacagcugggacag

SEQ ID NO: 976025 - RNA, 22 nt, Human
uugaagcagagaaauacuugaa

SEQ ID NO: 976026 - RNA, 22 nt, Human
aaacaugaauagauauuaaaca

SEQ ID NO: 976027 - RNA, 22 nt, Human
gcucuggacuggggccugagaa

SEQ ID NO: 976028 - RNA, 22 nt, Human
uaaaauguguuucuguaugguu

SEQ ID NO: 976029 - RNA, 22 nt, Human
ugccuggcaagaggggcuggcu

SEQ ID NO: 976030 - RNA, 21 nt, Human
gggagcuggaaacugggugac

SEQ ID NO: 976031 - RNA, 22 nt, Human
ccagucagccaagcugcagcgg

SEQ ID NO: 976032 - RNA, 22 nt, Human
aguguugucaaacggcucagca

SEQ ID NO: 976033 - RNA, 22 nt, Human
gccucuggucccucaugcugug

SEQ ID NO: 976034 - RNA, 22 nt, Human
augaacacauguacacauuucu

SEQ ID NO: 976035 - RNA, 22 nt, Human
uggccacaugcgucugugaggc

SEQ ID NO: 976036 - RNA, 22 nt, Human
cuggagcucuguguguuccuga

SEQ ID NO: 976037 - RNA, 22 nt, Human
cagcucaaguuucccaggucag

SEQ ID NO: 976038 - RNA, 20 nt, Human
gggagucuggaugaaagaug

SEQ ID NO: 976039 - RNA, 22 nt, Human
cagcuggcuggucagugcacaa

SEQ ID NO: 976040 - RNA, 22 nt, Human
cugcauuagucaugcuuugcag

SEQ ID NO: 976041 - RNA, 20 nt, Human
cagaggcaaggagacuugga

SEQ ID NO: 976042 - RNA, 22 nt, Human
ugcauuaugcuacccagaagcu

SEQ ID NO: 976043 - RNA, 22 nt, Human
uggcagagucaucacaucugga

SEQ ID NO: 976044 - RNA, 22 nt, Human
gcaggagccacuucagggaugc

SEQ ID NO: 976045 - RNA, 22 nt, Human
aaguucaagaucaagguuccag

SEQ ID NO: 976046 - RNA, 22 nt, Human
cugggcagugguggcaucuuug

SEQ ID NO: 976047 - RNA, 23 nt, Human
ucuccuggcugcacuguggccac

SEQ ID NO: 976048 - RNA, 22 nt, Human
gaggccacagcuaucagggaca

SEQ ID NO: 976049 - RNA, 22 nt, Human
uguauuuuuagaccuuuagacc

SEQ ID NO: 976050 - RNA, 22 nt, Human
aggauccugcgcuuugggggag

SEQ ID NO: 976051 - RNA, 22 nt, Human
ugggaggcuuccagaccuugcu

SEQ ID NO: 976052 - RNA, 22 nt, Human
ugccaggcuaaguggaggacuu

SEQ ID NO: 976053 - RNA, 22 nt, Human
uggagcagcaucacuuugagcu

SEQ ID NO: 976054 - RNA, 22 nt, Human
cugggcuguucugccccugggu

SEQ ID NO: 976055 - RNA, 22 nt, Human
aagcaaagaguuuaguggguga

SEQ ID NO: 976056 - RNA, 22 nt, Human
cccagcaucccagugggcagca

SEQ ID NO: 976057 - RNA, 19 nt, Human
gaaggagagcugaguuagg

SEQ ID NO: 976058 - RNA, 22 nt, Human
cuccucugucuggcccugagcc

SEQ ID NO: 976059 - RNA, 22 nt, Human
uucuggaggccccuuccuucuc

SEQ ID NO: 976060 - RNA, 16 nt, Human
cagaguguaaacagga

SEQ ID NO: 976061 - RNA, 22 nt, Human
agcaguggcuggauggugugcu

SEQ ID NO: 976062 - RNA, 22 nt, Human
caggggaagaugccaagggaga

SEQ ID NO: 976063 - RNA, 22 nt, Human
caaagguauucucauuuuggaa

SEQ ID NO: 976064 - RNA, 22 nt, Human
aggucaaguuuagauagaguua

SEQ ID NO: 976065 - RNA, 22 nt, Human
ggggcagaaagcccacagagug

SEQ ID NO: 976066 - RNA, 22 nt, Human
uuauuacacugaaagaauugcg

SEQ ID NO: 976067 - RNA, 22 nt, Human
uacaguaaagcugcuaugaauu

SEQ ID NO: 976068 - RNA, 22 nt, Human
cuggccuggggccucagcugcu

SEQ ID NO: 976069 - RNA, 22 nt, Human
cuuaaauucuuaaugcccucau

SEQ ID NO: 976070 - RNA, 22 nt, Human
cccaggaguuagagguuguggu

SEQ ID NO: 976071 - RNA, 22 nt, Human
ggaggccaaggugggcggauca

SEQ ID NO: 976072 - RNA, 22 nt, Human
guauguguaaguaugccaccuu

SEQ ID NO: 976073 - RNA, 22 nt, Human
uaugaacucuggagucugagug

SEQ ID NO: 976074 - RNA, 22 nt, Human
ugcagcauugcaaagcagucuu

SEQ ID NO: 976075 - RNA, 22 nt, Human
acucugcucuuuggacaaugcc

SEQ ID NO: 976076 - RNA, 22 nt, Human
ucagaggagaaguugggaaaau

SEQ ID NO: 976077 - RNA, 22 nt, Human
acauuucuauagugcaucuguu

SEQ ID NO: 976078 - RNA, 22 nt, Human
uuugcacuagcauuuguccaug

SEQ ID NO: 976079 - RNA, 22 nt, Human
ucauguaaguauagaaagcagu

SEQ ID NO: 976080 - RNA, 22 nt, Human
guggauggacaugggcaagagg

SEQ ID NO: 976081 - RNA, 21 nt, Human
ccagacuggccuaugugguag

SEQ ID NO: 976082 - RNA, 22 nt, Human
aggcagcagccacaaggccuga

SEQ ID NO: 976083 - RNA, 22 nt, Human
uuggaaggagucaaccagcuga

SEQ ID NO: 976084 - RNA, 22 nt, Human
aagaguuaagcaacagauacca

SEQ ID NO: 976085 - RNA, 21 nt, Human
cucaggauggcggccuggugg

SEQ ID NO: 976086 - RNA, 21 nt, Human
agccagcuaucacacagcauu

SEQ ID NO: 976087 - RNA, 23 nt, Human
uacauuguggauggaguccuggg

SEQ ID NO: 976088 - RNA, 22 nt, Human
uguaugcagggcuuguaugcag

SEQ ID NO: 976089 - RNA, 22 nt, Human
caggugggagcgaggagcuacu

SEQ ID NO: 976090 - RNA, 22 nt, Human
ccucagagaaagguauggcuga

SEQ ID NO: 976091 - RNA, 22 nt, Human
uggaaggagcuaaggaccuggg

SEQ ID NO: 976092 - RNA, 22 nt, Human
aaaggccagguuggcugguauu

SEQ ID NO: 976093 - RNA, 22 nt, Human
auccaugaucaauuuauuacua

SEQ ID NO: 976094 - RNA, 22 nt, Human
ucaggcagaugcagggauggau

SEQ ID NO: 976095 - RNA, 22 nt, Human
aggagcagaccguaguccugca

SEQ ID NO: 976096 - RNA, 22 nt, Human
gcugucugucucugucccacca

SEQ ID NO: 976097 - RNA, 22 nt, Human
gcagauggcucagacacugggg

SEQ ID NO: 976098 - RNA, 22 nt, Human
agagcagcuggggcagagacca

SEQ ID NO: 976099 - RNA, 22 nt, Human
ccagguggacggcgaguacagg

SEQ ID NO: 976100 - RNA, 22 nt, Human
ugcuuccugaggccgucuucuc

SEQ ID NO: 976101 - RNA, 22 nt, Human
gccugccuagaauugcagcuuu

SEQ ID NO: 976102 - RNA, 22 nt, Human
aaauauaauuucugccucaaua

SEQ ID NO: 976103 - RNA, 22 nt, Human
gccagagcugagacacgagucc

SEQ ID NO: 976104 - RNA, 22 nt, Human
ucugugccaccucuccaguguc

SEQ ID NO: 976105 - RNA, 22 nt, Human
ugcagccauuuucugccaaugc

SEQ ID NO: 976106 - RNA, 22 nt, Human
aauauaugugguauugaccagc

SEQ ID NO: 976107 - RNA, 22 nt, Human
aguggcagagugcacucaggca

SEQ ID NO: 976108 - RNA, 23 nt, Human
ggccucuguguucugcccacaug

SEQ ID NO: 976109 - RNA, 22 nt, Human
auuaauaugagaaaguggcaga

SEQ ID NO: 976110 - RNA, 22 nt, Human
aggucacacaacugucagaggc

SEQ ID NO: 976111 - RNA, 22 nt, Human
agcugcaguaaagcucuccagg

SEQ ID NO: 976112 - RNA, 22 nt, Human
gcccaggaguugaagggcugac

SEQ ID NO: 976113 - RNA, 22 nt, Human
uguaugcuuuccaaaaaugcug

SEQ ID NO: 976114 - RNA, 22 nt, Human
ugauuuccacgugcacccaggu

SEQ ID NO: 976115 - RNA, 22 nt, Human
uggguagagacacagucugggg

SEQ ID NO: 976116 - RNA, 22 nt, Human
cagaguggcacucugcuggaug

SEQ ID NO: 976117 - RNA, 22 nt, Human
ugaggcaguugagcuuccugag

SEQ ID NO: 976118 - RNA, 22 nt, Human
uaaggcaccuguccaggcuggg

SEQ ID NO: 976119 - RNA, 22 nt, Human
gaggggcugggcagucccugga

SEQ ID NO: 976120 - RNA, 22 nt, Human
cugcugugugcuuacuuggguu

SEQ ID NO: 976121 - RNA, 22 nt, Human
ucucugauguauaucagagaac

SEQ ID NO: 976122 - RNA, 22 nt, Human
gugcccugguccccagcauaua

SEQ ID NO: 976123 - RNA, 22 nt, Human
cucaagacugaucgcaguggaa

SEQ ID NO: 976124 - RNA, 22 nt, Human
uccagggaucuuuagagucuuu

SEQ ID NO: 976125 - RNA, 22 nt, Human
cuugcuggugguguuuucuaug

SEQ ID NO: 976126 - RNA, 20 nt, Human
aucaggauucuugcuuuguu

SEQ ID NO: 976127 - RNA, 22 nt, Human
gggcuggcaucgguugcugaga

SEQ ID NO: 976128 - RNA, 22 nt, Human
uccaggagauucauuaggucau

SEQ ID NO: 976129 - RNA, 22 nt, Human
gcugugcagccaagugccucug

SEQ ID NO: 976130 - RNA, 22 nt, Human
uccuugaauggacauuacacug

SEQ ID NO: 976131 - RNA, 22 nt, Human
uguucuuuggcuucacagcucu

SEQ ID NO: 976132 - RNA, 22 nt, Human
ccauuguaaagaguauacuuug

SEQ ID NO: 976133 - RNA, 22 nt, Human
gcuuccuagaucugugguacuc

SEQ ID NO: 976134 - RNA, 22 nt, Human
ugaagcaaacgcuucuguuccu

SEQ ID NO: 976135 - RNA, 22 nt, Human
caggaugguggcaugaucagaa

SEQ ID NO: 976136 - RNA, 22 nt, Human
uuuguguuuguacaaugcacua

SEQ ID NO: 976137 - RNA, 22 nt, Human
gacagcagccacagggagaggg

SEQ ID NO: 976138 - RNA, 22 nt, Human
gaaacacaugcagcuccauaga

SEQ ID NO: 976139 - RNA, 22 nt, Human
gccagccugugcuuggccaggc

SEQ ID NO: 976140 - RNA, 22 nt, Human
ccuccaggauaagucagggccu

SEQ ID NO: 976141 - RNA, 22 nt, Human
cuucacaaagcucucuuuaugu

SEQ ID NO: 976142 - RNA, 21 nt, Human
ucccagagugcuugggacugc

SEQ ID NO: 976143 - RNA, 22 nt, Human
ugcauuguugaauauuucauag

SEQ ID NO: 976144 - RNA, 22 nt, Human
gauccuugcaacucugugaggu

SEQ ID NO: 976145 - RNA, 19 nt, Human
uucauucuuucuacuuacc

SEQ ID NO: 976146 - RNA, 22 nt, Human
cagcaggcccagaguuucaugg

SEQ ID NO: 976147 - RNA, 22 nt, Human
aucacauugccagugauuaccc

SEQ ID NO: 976148 - RNA, 22 nt, Human
agcugcccuggcggagcugcuc

SEQ ID NO: 976149 - RNA, 22 nt, Human
cacaugggugugccuggaggaa

SEQ ID NO: 976150 - RNA, 22 nt, Human
aaguguguugacugaauugggg

SEQ ID NO: 976151 - RNA, 22 nt, Human
cuuauguaaaacggaaagggaa

SEQ ID NO: 976152 - RNA, 22 nt, Human
cauucacauucuucuuacuguu

SEQ ID NO: 976153 - RNA, 22 nt, Human
cccaggaacuccagagcuccuc

SEQ ID NO: 976154 - RNA, 22 nt, Human
uggcucaggugugagcugaaga

SEQ ID NO: 976155 - RNA, 22 nt, Human
cucugugauuuugugagccaga

SEQ ID NO: 976156 - RNA, 22 nt, Human
acagcagcuugcgugucugguc

SEQ ID NO: 976157 - RNA, 22 nt, Human
ccagcugguuaaaauagagaaa

SEQ ID NO: 976158 - RNA, 22 nt, Human
uaugcauuuuauagugcaaagc

SEQ ID NO: 976159 - RNA, 22 nt, Human
gcugccaugccacagcacucac

SEQ ID NO: 976160 - RNA, 18 nt, Human
aaguaugccuauguuauu

SEQ ID NO: 976161 - RNA, 22 nt, Human
gagagaggccuccauguacuga

SEQ ID NO: 976162 - RNA, 22 nt, Human
gccaggcuggcaaaaggaaacc

SEQ ID NO: 976163 - RNA, 22 nt, Human
gugcuuaauacaugucaauaac

SEQ ID NO: 976164 - RNA, 22 nt, Human
cugggcagaauuuuaggauggc

SEQ ID NO: 976165 - RNA, 22 nt, Human
acacugaaugcuguuuagaaau

SEQ ID NO: 976166 - RNA, 22 nt, Human
gugucauggaaaauugcaaugg

SEQ ID NO: 976167 - RNA, 22 nt, Human
cacaggaauuagcagccuaaaa

SEQ ID NO: 976168 - RNA, 22 nt, Human
cucucugggggccaugccaaga

SEQ ID NO: 976169 - RNA, 22 nt, Human
ucugggaacucugucauuuccc

SEQ ID NO: 976170 - RNA, 18 nt, Human
ugugguggagcugccuuc

SEQ ID NO: 976171 - RNA, 22 nt, Human
gaggcacugcugggccccugua

SEQ ID NO: 976172 - RNA, 22 nt, Human
cccaggaaaugggcucuugccu

SEQ ID NO: 976173 - RNA, 22 nt, Human
acccugggcuuggccugcucag

SEQ ID NO: 976174 - RNA, 22 nt, Human
ucagaggacaagcucccuggug

SEQ ID NO: 976175 - RNA, 21 nt, Human
uggcagaguugaguaguuaug

SEQ ID NO: 976176 - RNA, 22 nt, Human
gccaggccugcaagugcuggug

SEQ ID NO: 976177 - RNA, 22 nt, Human
aggccugggucucgugccuacc

SEQ ID NO: 976178 - RNA, 22 nt, Human
auguaucaacaaauuguacagu

SEQ ID NO: 976179 - RNA, 22 nt, Human
cuucuuaaagauuacacaauga

SEQ ID NO: 976180 - RNA, 22 nt, Human
cagaccugagguugaguaccag

SEQ ID NO: 976181 - RNA, 22 nt, Human
agucucugggcaugguugugac

SEQ ID NO: 976182 - RNA, 22 nt, Human
gauuauguucgacuuuagaaau

SEQ ID NO: 976183 - RNA, 22 nt, Human
gaaaggugccccauaggcagga

SEQ ID NO: 976184 - RNA, 19 nt, Human
uguagcaguuuaaaacaac

SEQ ID NO: 976185 - RNA, 22 nt, Human
ucugaaaucuguaagcacuagc

SEQ ID NO: 976186 - RNA, 22 nt, Human
ucuuuucuggacucugcaugga

SEQ ID NO: 976187 - RNA, 22 nt, Human
uaggcugggagccugaggcuag

SEQ ID NO: 976188 - RNA, 22 nt, Human
uuacaguaugaucaacuuuuca

SEQ ID NO: 976189 - RNA, 22 nt, Human
cugugaggcccugggugcugga

SEQ ID NO: 976190 - RNA, 22 nt, Human
aauggccagcugggagaguuga

SEQ ID NO: 976191 - RNA, 22 nt, Human
uggccugccucccggcuucuuu

SEQ ID NO: 976192 - RNA, 22 nt, Human
gcacagggaggcuggccuggcc

SEQ ID NO: 976193 - RNA, 21 nt, Human
uagcagaaacaguucaggcca

SEQ ID NO: 976194 - RNA, 22 nt, Human
uguaagauaugaguacauguaa

SEQ ID NO: 976195 - RNA, 22 nt, Human
uuauuucauugauuucuaagac

SEQ ID NO: 976196 - RNA, 22 nt, Human
uccaggagacacaagguacaua

SEQ ID NO: 976197 - RNA, 22 nt, Human
ccugaagagcacucuagaguug

SEQ ID NO: 976198 - RNA, 22 nt, Human
cugucaguucuuccagauagag

SEQ ID NO: 976199 - RNA, 22 nt, Human
aagcugccuuccaugugaggaa

SEQ ID NO: 976200 - RNA, 22 nt, Human
agcuagaauguuccuuuucauu

SEQ ID NO: 976201 - RNA, 22 nt, Human
uaucuguucaauggaagaugac

SEQ ID NO: 976202 - RNA, 22 nt, Human
ccagggcaacgcugucucagag

SEQ ID NO: 976203 - RNA, 22 nt, Human
ccagcuccaaguuugggcauca

SEQ ID NO: 976204 - RNA, 22 nt, Human
agaaauguggaucguuuuaaaa

SEQ ID NO: 976205 - RNA, 22 nt, Human
agauguuccagccaaugggaau

SEQ ID NO: 976206 - RNA, 19 nt, Human
cugggagguguucagagaa

SEQ ID NO: 976207 - RNA, 22 nt, Human
ggccuugggcagacacgucaca

SEQ ID NO: 976208 - RNA, 22 nt, Human
agggccugggguagcuuacugc

SEQ ID NO: 976209 - RNA, 22 nt, Human
aguaaaucagaccucauuaugu

SEQ ID NO: 976210 - RNA, 22 nt, Human
uuaaaugugauuucauuuaugu

SEQ ID NO: 976211 - RNA, 22 nt, Human
acauacuuuuuaaaagauugcu

SEQ ID NO: 976212 - RNA, 22 nt, Human
guguaauugaaauugagaacca

SEQ ID NO: 976213 - RNA, 22 nt, Human
gccacagggcagaugcgcagag

SEQ ID NO: 976214 - RNA, 22 nt, Human
gucaugccuggcuucuuagaca

SEQ ID NO: 976215 - RNA, 22 nt, Human
ucuucaaaaaauauccaucagu

SEQ ID NO: 976216 - RNA, 22 nt, Human
agcucccagaagccagagucgg

SEQ ID NO: 976217 - RNA, 22 nt, Human
aggccuccuggcuccaggccuu

SEQ ID NO: 976218 - RNA, 22 nt, Human
acagucauuagauacaaugucu

SEQ ID NO: 976219 - RNA, 22 nt, Human
ugaaaugaaacagaacauauca

SEQ ID NO: 976220 - RNA, 22 nt, Human
ugggcagaucuuugguggcuag

SEQ ID NO: 976221 - RNA, 22 nt, Human
aaggccugaacaugaggagaug

SEQ ID NO: 976222 - RNA, 22 nt, Human
ucaggagaaggcaauguggaaa

SEQ ID NO: 976223 - RNA, 22 nt, Human
guucacaaaguacuguaugcau

SEQ ID NO: 976224 - RNA, 22 nt, Human
ggaagggccucgggcgugggac

SEQ ID NO: 976225 - RNA, 22 nt, Human
agccuccaguagcugaagagac

SEQ ID NO: 976226 - RNA, 22 nt, Human
uggaagaggcccaugacugccu

SEQ ID NO: 976227 - RNA, 22 nt, Human
gaccuuuuuacuguguacgcug

SEQ ID NO: 976228 - RNA, 22 nt, Human
acagagcaugcucaguguguga

SEQ ID NO: 976229 - RNA, 22 nt, Human
ugccugaggagucagggcaggu

SEQ ID NO: 976230 - RNA, 22 nt, Human
gaagcuucguggcucuucaaau

SEQ ID NO: 976231 - RNA, 22 nt, Human
cuguauuuguccucuauuuauu

SEQ ID NO: 976232 - RNA, 22 nt, Human
gucugucucucuccagagugca

SEQ ID NO: 976233 - RNA, 22 nt, Human
guccucuguuagaaaugugcuu

SEQ ID NO: 976234 - RNA, 22 nt, Human
agggcagagcacugaauuggga

SEQ ID NO: 976235 - RNA, 20 nt, Human
caggagggacauuucagcau

SEQ ID NO: 976236 - RNA, 22 nt, Human
ugagauuuucagcaucacuuca

SEQ ID NO: 976237 - RNA, 22 nt, Human
ggaagaggaggagccaggcuuu

SEQ ID NO: 976238 - RNA, 22 nt, Human
ccuuucucuuggauaccgauug

SEQ ID NO: 976239 - RNA, 22 nt, Human
gcacccagaauaaggacaggac

SEQ ID NO: 976240 - RNA, 22 nt, Human
agagugggugaucucuguuguc

SEQ ID NO: 976241 - RNA, 22 nt, Human
uuaggaaucaccugcagaucuu

SEQ ID NO: 976242 - RNA, 22 nt, Human
cucuggagugcagccugguggc

SEQ ID NO: 976243 - RNA, 22 nt, Human
cagggacagccuugggguggcg

SEQ ID NO: 976244 - RNA, 22 nt, Human
cucaccacagagccuguccagc

SEQ ID NO: 976245 - RNA, 22 nt, Human
caaggcaggcaguucacuugag

SEQ ID NO: 976246 - RNA, 22 nt, Human
aggggcuguggaaaccaacucu

SEQ ID NO: 976247 - RNA, 22 nt, Human
uuauugagcacauaguaugugg

SEQ ID NO: 976248 - RNA, 22 nt, Human
cauugacaguucuuuaaguugc

SEQ ID NO: 976249 - RNA, 22 nt, Human
uuuauuauucucuggagaaugu

SEQ ID NO: 976250 - RNA, 22 nt, Human
aaauuauuacaagcuaguuggc

SEQ ID NO: 976251 - RNA, 22 nt, Human
aucuccaggcauuucaagagac

SEQ ID NO: 976252 - RNA, 22 nt, Human
uauuucuguaacucagggucug

SEQ ID NO: 976253 - RNA, 22 nt, Human
ugugaggagaggcccagcuccc

SEQ ID NO: 976254 - RNA, 22 nt, Human
augaugguaaauucaguauccg

SEQ ID NO: 976255 - RNA, 22 nt, Human
aggccuggccugggcggcauug

SEQ ID NO: 976256 - RNA, 22 nt, Human
ggacucuguuuuccugaucacu

SEQ ID NO: 976257 - RNA, 22 nt, Human
ccugcagcuguaggagaaggcg

SEQ ID NO: 976258 - RNA, 22 nt, Human
uggccugguaccacauagauuu

SEQ ID NO: 976259 - RNA, 22 nt, Human
agcccccaaaagugcuuaugau

SEQ ID NO: 976260 - RNA, 22 nt, Human
uuucuguaauuaaaagggcagg

SEQ ID NO: 976261 - RNA, 22 nt, Human
uacauuguucaugcaugagaaa

SEQ ID NO: 976262 - RNA, 19 nt, Human
gauuucuacaaaugucaga

SEQ ID NO: 976263 - RNA, 22 nt, Human
uuccaggggcagcagugauggu

SEQ ID NO: 976264 - RNA, 22 nt, Human
uugauuaaacaggcauauucaa

SEQ ID NO: 976265 - RNA, 22 nt, Human
cacagaaguuucauagucucga

SEQ ID NO: 976266 - RNA, 22 nt, Human
aggagcccugcgggaggcagag

SEQ ID NO: 976267 - RNA, 22 nt, Human
gaggaagcagggcuuggcugag

SEQ ID NO: 976268 - RNA, 22 nt, Human
cugggccaaaagaaguguucuu

SEQ ID NO: 976269 - RNA, 22 nt, Human
ggcagcuggccuccucgcccac

SEQ ID NO: 976270 - RNA, 20 nt, Human
ggcugcugugggcagagagg

SEQ ID NO: 976271 - RNA, 20 nt, Human
acaauagauuugagcaaagu

SEQ ID NO: 976272 - RNA, 22 nt, Human
ucaguuuucucaucugugaaau

SEQ ID NO: 976273 - RNA, 22 nt, Human
aaaaagcuuaaaugagcaguuc

SEQ ID NO: 976274 - RNA, 22 nt, Human
uuuuucaugagacuagaaguca

SEQ ID NO: 976275 - RNA, 22 nt, Human
aauguucaacagauggauauuu

SEQ ID NO: 976276 - RNA, 23 nt, Human
accaggagccaagaucucccugg

SEQ ID NO: 976277 - RNA, 22 nt, Human
gccaggugcauggcugagucuc

SEQ ID NO: 976278 - RNA, 22 nt, Human
aaaugcacagagccuuagagau

SEQ ID NO: 976279 - RNA, 22 nt, Human
uagcugccuagacagcuauagc

SEQ ID NO: 976280 - RNA, 22 nt, Human
guuauuuuaucucugagagguu

SEQ ID NO: 976281 - RNA, 22 nt, Human
cagaccucaguccucaguagga

SEQ ID NO: 976282 - RNA, 22 nt, Human
uuaggauaugaaacaguauaag

SEQ ID NO: 976283 - RNA, 22 nt, Human
uucugagcuacauaguacuggg

SEQ ID NO: 976284 - RNA, 22 nt, Human
ccaaagugcugggguuacaggc

SEQ ID NO: 976285 - RNA, 22 nt, Human
aagguacagaaauuaacaagga

SEQ ID NO: 976286 - RNA, 19 nt, Human
ccaggagagcuuggagaag

SEQ ID NO: 976287 - RNA, 22 nt, Human
ugccugggguuggcaaacugcu

SEQ ID NO: 976288 - RNA, 22 nt, Human
cugcacaguuugauuucuugcu

SEQ ID NO: 976289 - RNA, 22 nt, Human
cuguuuauaaauagaggggagu

SEQ ID NO: 976290 - RNA, 22 nt, Human
ucccagaaaaaggaggcuauga

SEQ ID NO: 976291 - RNA, 22 nt, Human
ucauauaccagagaguuuauau

SEQ ID NO: 976292 - RNA, 22 nt, Human
ggcuggagauaugucuggaaca

SEQ ID NO: 976293 - RNA, 22 nt, Human
acagccauagaugcuuauguaa

SEQ ID NO: 976294 - RNA, 22 nt, Human
cugcugccggcgagccucccuu

SEQ ID NO: 976295 - RNA, 22 nt, Human
ugccugggugcuggcuggucac

SEQ ID NO: 976296 - RNA, 22 nt, Human
cccuggagugugacgaggcauu

SEQ ID NO: 976297 - RNA, 22 nt, Human
auugacaaggaaacuauaccag

SEQ ID NO: 976298 - RNA, 22 nt, Human
ccagucacagguguguuuauau

SEQ ID NO: 976299 - RNA, 22 nt, Human
ugugccaugaggcucugauaug

SEQ ID NO: 976300 - RNA, 22 nt, Human
cacagguggcuccaaguuagag

SEQ ID NO: 976301 - RNA, 22 nt, Human
cucuggccugcuuccucaggua

SEQ ID NO: 976302 - RNA, 22 nt, Human
uuauggcauauuccucauugua

SEQ ID NO: 976303 - RNA, 22 nt, Human
aaguucaagucuccugaguaua

SEQ ID NO: 976304 - RNA, 22 nt, Human
ugggcagaggcucugaagucca

SEQ ID NO: 976305 - RNA, 22 nt, Human
cugcagggcagggccuccuggc

SEQ ID NO: 976306 - RNA, 22 nt, Human
uuuccucugacugcuccccugc

SEQ ID NO: 976307 - RNA, 22 nt, Human
cagagccccccuucugaucaca

SEQ ID NO: 976308 - RNA, 23 nt, Human
uuuauauuccuaaugucuugagc

SEQ ID NO: 976309 - RNA, 22 nt, Human
gggacgggcaguccaagggguc

SEQ ID NO: 976310 - RNA, 22 nt, Human
acagccuguuugaucuggugcu

SEQ ID NO: 976311 - RNA, 22 nt, Human
ucauucuugaucacuaguuagu

SEQ ID NO: 976312 - RNA, 22 nt, Human
uacuuucuuguuccuuucauaa

SEQ ID NO: 976313 - RNA, 22 nt, Human
gccugagccgccugagcggcgg

SEQ ID NO: 976314 - RNA, 22 nt, Human
ucauaaaaauagacucuaaagu

SEQ ID NO: 976315 - RNA, 22 nt, Human
ggugggcaggucacucugccuc

SEQ ID NO: 976316 - RNA, 22 nt, Human
gaguuauuagucaaauagggaa

SEQ ID NO: 976317 - RNA, 22 nt, Human
augacagaaggccucccugaca

SEQ ID NO: 976318 - RNA, 22 nt, Human
ggcaggaggugaguggcgggug

SEQ ID NO: 976319 - RNA, 17 nt, Human
ccagguggaaucgugga

SEQ ID NO: 976320 - RNA, 22 nt, Human
gcugucagaaggugaaggguaa

SEQ ID NO: 976321 - RNA, 22 nt, Human
acauuucuuagccuaguuccag

SEQ ID NO: 976322 - RNA, 22 nt, Human
ucaaaugcucuuugcagagagg

SEQ ID NO: 976323 - RNA, 22 nt, Human
ucaaagucacaacucucuaauu

SEQ ID NO: 976324 - RNA, 22 nt, Human
gccagaaacauacacaucacuu

SEQ ID NO: 976325 - RNA, 22 nt, Human
uggcaacaugucgaagugcugu

SEQ ID NO: 976326 - RNA, 22 nt, Human
cccuaggguuuggccagagccc

SEQ ID NO: 976327 - RNA, 22 nt, Human
cugggccucauccucagaguuu

SEQ ID NO: 976328 - RNA, 22 nt, Human
gugaaaucugaggcccaugaug

SEQ ID NO: 976329 - RNA, 22 nt, Human
uucuccagaccuugugacuaug

SEQ ID NO: 976330 - RNA, 22 nt, Human
ugcugaggagguggcugugcuu

SEQ ID NO: 976331 - RNA, 20 nt, Human
gagauuuccaaucaugccca

SEQ ID NO: 976332 - RNA, 22 nt, Human
cuggcagcgugagcagcaucca

SEQ ID NO: 976333 - RNA, 22 nt, Human
ucuguucauuugccucggcucu

SEQ ID NO: 976334 - RNA, 22 nt, Human
aaaaugaugcuguaauuuggca

SEQ ID NO: 976335 - RNA, 22 nt, Human
guggauggauugaggcaguggg

SEQ ID NO: 976336 - RNA, 22 nt, Human
acucaggaaaaauguagugaua

SEQ ID NO: 976337 - RNA, 22 nt, Human
cccagggcuuuucucacuagac

SEQ ID NO: 976338 - RNA, 22 nt, Human
gggcugggcaugguguucccuc

SEQ ID NO: 976339 - RNA, 22 nt, Human
aagggacuuugucagcuuucca

SEQ ID NO: 976340 - RNA, 22 nt, Human
uccuugacugugaggaacuagc

SEQ ID NO: 976341 - RNA, 22 nt, Human
cugccacuuucacccagugcuc

SEQ ID NO: 976342 - RNA, 22 nt, Human
uggucaaaaaggccuagacaca

SEQ ID NO: 976343 - RNA, 22 nt, Human
uucaaucauuuuuacauagucc

SEQ ID NO: 976344 - RNA, 22 nt, Human
uuuuuaguagagguggguuuca

SEQ ID NO: 976345 - RNA, 22 nt, Human
auuuguacaaauuuauguuagu

SEQ ID NO: 976346 - RNA, 22 nt, Human
uaagcauaacuaaaaaugauuu

SEQ ID NO: 976347 - RNA, 22 nt, Human
uuccaugaagggcagccucuca

SEQ ID NO: 976348 - RNA, 22 nt, Human
uuagagaaauucugguaaugua

SEQ ID NO: 976349 - RNA, 21 nt, Human
ucucuggaguuagcagagaga

SEQ ID NO: 976350 - RNA, 22 nt, Human
uugcauuguaggauguuagaag

SEQ ID NO: 976351 - RNA, 22 nt, Human
uuaaacagagucugaaauguaa

SEQ ID NO: 976352 - RNA, 22 nt, Human
uguuccauaaguggugcuuugu

SEQ ID NO: 976353 - RNA, 19 nt, Human
aggcagcacccaguccuug

SEQ ID NO: 976354 - RNA, 22 nt, Human
gagggacagcuaaagagaaauu

SEQ ID NO: 976355 - RNA, 23 nt, Human
gcugcagcuguggauguucucag

SEQ ID NO: 976356 - RNA, 22 nt, Human
aacuuucuuggaugucucaaca

SEQ ID NO: 976357 - RNA, 22 nt, Human
cagagccagcaguggggacagg

SEQ ID NO: 976358 - RNA, 22 nt, Human
gggaguggguuuggccuaggcc

SEQ ID NO: 976359 - RNA, 22 nt, Human
ugggagcaagcuggugcuggag

SEQ ID NO: 976360 - RNA, 22 nt, Human
auguguaaaaagugcuuaauau

SEQ ID NO: 976361 - RNA, 22 nt, Human
auuuggcaaauaauuugagggu

SEQ ID NO: 976362 - RNA, 22 nt, Human
gccagccuucuguggccugcaa

SEQ ID NO: 976363 - RNA, 22 nt, Human
aaugaugguauugaugagcuaa

SEQ ID NO: 976364 - RNA, 17 nt, Human
gcuuccucaugcaguuc

SEQ ID NO: 976365 - RNA, 22 nt, Human
aaaaugcugggaaaguuggaau

SEQ ID NO: 976366 - RNA, 22 nt, Human
gcugagcuagaaaaggaccaca

SEQ ID NO: 976367 - RNA, 18 nt, Human
cuuucagauggauaugcu

SEQ ID NO: 976368 - RNA, 22 nt, Human
aaauaaguuaaacuagaaugau

SEQ ID NO: 976369 - RNA, 22 nt, Human
cauuguuauagcauuacacacc

SEQ ID NO: 976370 - RNA, 22 nt, Human
guggccuggaaaggcuggucug

SEQ ID NO: 976371 - RNA, 22 nt, Human
auucacaaguugauggauauuu

SEQ ID NO: 976372 - RNA, 22 nt, Human
uaaaauguuugcaagagaccag

SEQ ID NO: 976373 - RNA, 22 nt, Human
agcccagguucuaaagccaaac

SEQ ID NO: 976374 - RNA, 22 nt, Human
agaggcccugggcuggugugcu

SEQ ID NO: 976375 - RNA, 22 nt, Human
cuggcagucugccucuucacug

SEQ ID NO: 976376 - RNA, 22 nt, Human
aaucaguuagaaggaagagaau

SEQ ID NO: 976377 - RNA, 22 nt, Human
gugcagcugugugagagcucca

SEQ ID NO: 976378 - RNA, 22 nt, Human
ggcucuggagcacagacgucug

SEQ ID NO: 976379 - RNA, 22 nt, Human
aguuauuacucuuuaacauauu

SEQ ID NO: 976380 - RNA, 22 nt, Human
uuagccaugugggaaaaacagc

SEQ ID NO: 976381 - RNA, 22 nt, Human
caggugccucaggaugagacaa

SEQ ID NO: 976382 - RNA, 18 nt, Human
aucucccauuggccaagg

SEQ ID NO: 976383 - RNA, 22 nt, Human
uuucuucagccacuccaaacug

SEQ ID NO: 976384 - RNA, 22 nt, Human
auucuguauggggaaacuagag

SEQ ID NO: 976385 - RNA, 22 nt, Human
caggccagguggcaggcaaaac

SEQ ID NO: 976386 - RNA, 22 nt, Human
aguacuuuacuucuuacaguuu

SEQ ID NO: 976387 - RNA, 22 nt, Human
ggaggaggggcgcuuugucuau

SEQ ID NO: 976388 - RNA, 22 nt, Human
agggcagccaugagccuucagg

SEQ ID NO: 976389 - RNA, 22 nt, Human
aggcacugggggaugagcaagg

SEQ ID NO: 976390 - RNA, 22 nt, Human
agaaggaguguacaggucaugc

SEQ ID NO: 976391 - RNA, 22 nt, Human
caguuucugggcguucacaggu

SEQ ID NO: 976392 - RNA, 22 nt, Human
ugcuuuauuuauaaaauagcaa

SEQ ID NO: 976393 - RNA, 22 nt, Human
gccaggagccagcuucuuagca

SEQ ID NO: 976394 - RNA, 21 nt, Human
ucacucugauuaggugucucu

SEQ ID NO: 976395 - RNA, 22 nt, Human
uuugcauuaguuuagauuucaa

SEQ ID NO: 976396 - RNA, 22 nt, Human
auugacaagcaguaugucuuag

SEQ ID NO: 976397 - RNA, 20 nt, Human
agaggccaguuaggagucua

SEQ ID NO: 976398 - RNA, 22 nt, Human
ucucauucauacccuacaugcu

SEQ ID NO: 976399 - RNA, 22 nt, Human
gagcccuccauggagccaggca

SEQ ID NO: 976400 - RNA, 22 nt, Human
cugcugggaaggucugcucagu

SEQ ID NO: 976401 - RNA, 22 nt, Human
ugcauguggaccccuggugccu

SEQ ID NO: 976402 - RNA, 22 nt, Human
augauacaagcaaaacuaauca

SEQ ID NO: 976403 - RNA, 22 nt, Human
aagagagggguugcauggaaau

SEQ ID NO: 976404 - RNA, 22 nt, Human
caggaggggguggaguuucgcc

SEQ ID NO: 976405 - RNA, 22 nt, Human
agccaggggauucaucagggac

SEQ ID NO: 976406 - RNA, 22 nt, Human
gugccugcugcagagucgcugu

SEQ ID NO: 976407 - RNA, 22 nt, Human
agcccaaggcuucccugcuggc

SEQ ID NO: 976408 - RNA, 22 nt, Human
caaaugugacuuuugggcuucu

SEQ ID NO: 976409 - RNA, 22 nt, Human
cugcagagguugguucuaagau

SEQ ID NO: 976410 - RNA, 22 nt, Human
gaaaauguuagcuucauaguca

SEQ ID NO: 976411 - RNA, 22 nt, Human
auucugaguccaugggggcagg

SEQ ID NO: 976412 - RNA, 22 nt, Human
uggcucugucacugugagcuau

SEQ ID NO: 976413 - RNA, 22 nt, Human
cugagccauccauaccagcuua

SEQ ID NO: 976414 - RNA, 19 nt, Human
uguuuuguuaaagcagucc

SEQ ID NO: 976415 - RNA, 22 nt, Human
gccaucacauccaggcuaccuc

SEQ ID NO: 976416 - RNA, 19 nt, Human
ccuggccagacuucugccc

SEQ ID NO: 976417 - RNA, 23 nt, Human
uggcucagcuaguuuuccauuuc

SEQ ID NO: 976418 - RNA, 22 nt, Human
cccagcucucucaguucugcuu

SEQ ID NO: 976419 - RNA, 22 nt, Human
ggaaggagggcggcaaugauga

SEQ ID NO: 976420 - RNA, 22 nt, Human
gcagugggaagguuggcacaug

SEQ ID NO: 976421 - RNA, 22 nt, Human
ugggcagacugagcccuguccc

SEQ ID NO: 976422 - RNA, 22 nt, Human
gggaggagggugcuggcuaaac

SEQ ID NO: 976423 - RNA, 22 nt, Human
agaggggcucaagcaguggucu

SEQ ID NO: 976424 - RNA, 22 nt, Human
auauuucuugagcaccugguau

SEQ ID NO: 976425 - RNA, 22 nt, Human
uuagccauauagaaaaagagcu

SEQ ID NO: 976426 - RNA, 22 nt, Human
auuaggcagggcaugguggcuc

SEQ ID NO: 976427 - RNA, 22 nt, Human
agcccuggcccggcugugcuuu

SEQ ID NO: 976428 - RNA, 22 nt, Human
gaagcccuauccucuccuggga

SEQ ID NO: 976429 - RNA, 22 nt, Human
gccugcagccucaagggcugag

SEQ ID NO: 976430 - RNA, 21 nt, Human
uggcacugcuuagcagguucc

SEQ ID NO: 976431 - RNA, 22 nt, Human
guggcaggucccauuggagcag

SEQ ID NO: 976432 - RNA, 22 nt, Human
aucuggcucgcuaggcucuggg

SEQ ID NO: 976433 - RNA, 22 nt, Human
uggcagugccccuugaccagug

SEQ ID NO: 976434 - RNA, 22 nt, Human
uguagaaagaauauguuucaua

SEQ ID NO: 976435 - RNA, 22 nt, Human
agcaggagcugugggaagaugg

SEQ ID NO: 976436 - RNA, 22 nt, Human
agagccacugggagacagagca

SEQ ID NO: 976437 - RNA, 22 nt, Human
ggcaaggccuugcccagcauuc

SEQ ID NO: 976438 - RNA, 22 nt, Human
uuucacaaacugaggagacaau

SEQ ID NO: 976439 - RNA, 22 nt, Human
ugcagaagcugcaggucagugg

SEQ ID NO: 976440 - RNA, 23 nt, Human
uuagagaugauuaaaaaaucuug

SEQ ID NO: 976441 - RNA, 22 nt, Human
cuggccauguugccucugagac

SEQ ID NO: 976442 - RNA, 22 nt, Human
gagacauggcaaaagcacuggu

SEQ ID NO: 976443 - RNA, 22 nt, Human
ucagggcaggcgagcagcugcu

SEQ ID NO: 976444 - RNA, 22 nt, Human
uucaagauccagcacaacagug

SEQ ID NO: 976445 - RNA, 22 nt, Human
aggcccugaagucggccccuca

SEQ ID NO: 976446 - RNA, 22 nt, Human
cuguaauucacuagggucagcg

SEQ ID NO: 976447 - RNA, 22 nt, Human
auuuagaacuuuguuugccaau

SEQ ID NO: 976448 - RNA, 22 nt, Human
gcacagggcaacaggucuguua

SEQ ID NO: 976449 - RNA, 22 nt, Human
cucacugucuguacuagcugau

SEQ ID NO: 976450 - RNA, 22 nt, Human
ucugggcacugcugagccugua

SEQ ID NO: 976451 - RNA, 22 nt, Human
ucaggauggcuucugcaucaaa

SEQ ID NO: 976452 - RNA, 22 nt, Human
ggcagccuccagggcacuggug

SEQ ID NO: 976453 - RNA, 22 nt, Human
uggcaccugaacuuagaggugu

SEQ ID NO: 976454 - RNA, 22 nt, Human
guuaggauguggggacuuuggg

SEQ ID NO: 976455 - RNA, 22 nt, Human
agcagcugcagggagggucugc

SEQ ID NO: 976456 - RNA, 18 nt, Human
ugcagcaagugcuaaaua

SEQ ID NO: 976457 - RNA, 22 nt, Human
uucccucuccuacucaggaaag

SEQ ID NO: 976458 - RNA, 22 nt, Human
caagagcucagaaacccuugcu

SEQ ID NO: 976459 - RNA, 22 nt, Human
ggcaagaaggcuucagguagcu

SEQ ID NO: 976460 - RNA, 22 nt, Human
guguccacggcugagaaugauu

SEQ ID NO: 976461 - RNA, 22 nt, Human
cagagcagagugauuguucugg

SEQ ID NO: 976462 - RNA, 20 nt, Human
gggugagauguaggagaggg

SEQ ID NO: 976463 - RNA, 22 nt, Human
ucacacgugagguucuauccug

SEQ ID NO: 976464 - RNA, 22 nt, Human
gaguguuccagaaacuggcccu

SEQ ID NO: 976465 - RNA, 22 nt, Human
aauauuguuucaagaucacaga

SEQ ID NO: 976466 - RNA, 20 nt, Human
ucugcucagcccucaguggc

SEQ ID NO: 976467 - RNA, 22 nt, Human
cagagcugauuggauccagaga

SEQ ID NO: 976468 - RNA, 22 nt, Human
ucacuguaucauguugcacuua

SEQ ID NO: 976469 - RNA, 22 nt, Human
ucaggccacuucacaggugauu

SEQ ID NO: 976470 - RNA, 22 nt, Human
aauuuagauugauaaacaugga

SEQ ID NO: 976471 - RNA, 22 nt, Human
cugugccuggggggcagagcug

SEQ ID NO: 976472 - RNA, 22 nt, Human
cccugccuacaggguuuucuuu

SEQ ID NO: 976473 - RNA, 22 nt, Human
gacccuguuucuacaaauaauu

SEQ ID NO: 976474 - RNA, 22 nt, Human
ggcuggcaagucagugcugaug

SEQ ID NO: 976475 - RNA, 22 nt, Human
ggaggggaugguuugacccugg

SEQ ID NO: 976476 - RNA, 22 nt, Human
aggccagccucaggcagggacc

SEQ ID NO: 976477 - RNA, 22 nt, Human
auguaucagauaaagcaugugg

SEQ ID NO: 976478 - RNA, 22 nt, Human
cagauggaacacagaaaggaga

SEQ ID NO: 976479 - RNA, 22 nt, Human
aagcugccauagaacgagaggu

SEQ ID NO: 976480 - RNA, 22 nt, Human
ggagagugggagcaacuguugc

SEQ ID NO: 976481 - RNA, 22 nt, Human
aggccuguuggcgugggcucua

SEQ ID NO: 976482 - RNA, 21 nt, Human
auugaaagucaacaaucaguu

SEQ ID NO: 976483 - RNA, 22 nt, Human
aucuggcuggauucuuagcguu

SEQ ID NO: 976484 - RNA, 22 nt, Human
ucccugggccuccugcuaugca

SEQ ID NO: 976485 - RNA, 22 nt, Human
uuuuccucugcaauaaaagcag

SEQ ID NO: 976486 - RNA, 23 nt, Human
acucacaaagcaggaucauguug

SEQ ID NO: 976487 - RNA, 22 nt, Human
cucuggaaaaccacuagcagga

SEQ ID NO: 976488 - RNA, 22 nt, Human
ucaaacuguuuacagugagaua

SEQ ID NO: 976489 - RNA, 22 nt, Human
cacuugggagcauugcacaugu

SEQ ID NO: 976490 - RNA, 22 nt, Human
aguguacaguuuguaguacuac

SEQ ID NO: 976491 - RNA, 22 nt, Human
cucccagagagcaggugggccg

SEQ ID NO: 976492 - RNA, 22 nt, Human
augcugugccuucucugugcca

SEQ ID NO: 976493 - RNA, 22 nt, Human
cugagauggaguuuugcucuug

SEQ ID NO: 976494 - RNA, 22 nt, Human
agcaggugaauuccuggaugug

SEQ ID NO: 976495 - RNA, 22 nt, Human
gcucugcuaauauuguaguacc

SEQ ID NO: 976496 - RNA, 22 nt, Human
ccagccagucccgcaugaccgc

SEQ ID NO: 976497 - RNA, 22 nt, Human
ucugggcucugucagcaccucu

SEQ ID NO: 976498 - RNA, 22 nt, Human
aggagacauaacuaugaugaga

SEQ ID NO: 976499 - RNA, 22 nt, Human
caaugugguggcagaugucagu

SEQ ID NO: 976500 - RNA, 22 nt, Human
ugccugggccuucccaccucug

SEQ ID NO: 976501 - RNA, 22 nt, Human
uuuaagacuuagauuuauuggg

SEQ ID NO: 976502 - RNA, 22 nt, Human
ggucaggguuccagguaucuuc

SEQ ID NO: 976503 - RNA, 22 nt, Human
ucuuguuaucaggaaaacagua

SEQ ID NO: 976504 - RNA, 22 nt, Human
cauugcacagcccuguggugau

SEQ ID NO: 976505 - RNA, 22 nt, Human
ccugggcuucugucuagauguu

SEQ ID NO: 976506 - RNA, 22 nt, Human
ugacagggugauuaugagagcu

SEQ ID NO: 976507 - RNA, 22 nt, Human
gaguuauuugguuugcaugcag

SEQ ID NO: 976508 - RNA, 22 nt, Human
aguauugugacucaaguauucu

SEQ ID NO: 976509 - RNA, 22 nt, Human
gcuggccuugugucugaggaag

SEQ ID NO: 976510 - RNA, 22 nt, Human
gccuugcuuugcuucuggacag

SEQ ID NO: 976511 - RNA, 22 nt, Human
guuuaagaaaauucauguuguu

SEQ ID NO: 976512 - RNA, 22 nt, Human
gggcuggaggaccggccucgga

SEQ ID NO: 976513 - RNA, 22 nt, Human
acacagggcagagagcuggcuc

SEQ ID NO: 976514 - RNA, 22 nt, Human
uucuuucccagaagauauguuu

SEQ ID NO: 976515 - RNA, 22 nt, Human
uucaguuucagucuugcaaaaa

SEQ ID NO: 976516 - RNA, 22 nt, Human
ggcacugaauuucuuggcaucu

SEQ ID NO: 976517 - RNA, 22 nt, Human
uuacaguuuaguccaagccaga

SEQ ID NO: 976518 - RNA, 22 nt, Human
gaggcugugugucccucuggac

SEQ ID NO: 976519 - RNA, 22 nt, Human
aaagacauugaagaaggacuua

SEQ ID NO: 976520 - RNA, 22 nt, Human
ucacaaaugaggaaaucgagca

SEQ ID NO: 976521 - RNA, 22 nt, Human
gcagacuguaucaaugucagua

SEQ ID NO: 976522 - RNA, 22 nt, Human
aagcugccugccacgcuagaua

SEQ ID NO: 976523 - RNA, 22 nt, Human
auugacaaauggauguugacau

SEQ ID NO: 976524 - RNA, 22 nt, Human
uuguuuugcuaaagggucauca

SEQ ID NO: 976525 - RNA, 22 nt, Human
caggguggggaaauagcgcccu

SEQ ID NO: 976526 - RNA, 22 nt, Human
ugcagaagaaaacagcugugug

SEQ ID NO: 976527 - RNA, 22 nt, Human
uggcucagccuggcccuuucau

SEQ ID NO: 976528 - RNA, 22 nt, Human
uucaauucugcucugaucuuag

SEQ ID NO: 976529 - RNA, 22 nt, Human
aagccagcauuuucccauuccu

SEQ ID NO: 976530 - RNA, 22 nt, Human
cagcauggagacaaagugggca

SEQ ID NO: 976531 - RNA, 22 nt, Human
acagaaauugggcaaauggaag

SEQ ID NO: 976532 - RNA, 22 nt, Human
ccugucuguccucucaugagcc

SEQ ID NO: 976533 - RNA, 22 nt, Human
acauccagaucucagcauggcu

SEQ ID NO: 976534 - RNA, 22 nt, Human
gagguagccacagauagagacu

SEQ ID NO: 976535 - RNA, 22 nt, Human
guugaaugaaucauucuaugua

SEQ ID NO: 976536 - RNA, 22 nt, Human
ucauguuugagacuaauuuuuc

SEQ ID NO: 976537 - RNA, 20 nt, Human
gcagcagacagacaggggac

SEQ ID NO: 976538 - RNA, 22 nt, Human
aggcagacaaggacacaguggg

SEQ ID NO: 976539 - RNA, 22 nt, Human
ggcagaggagcuggaaacaugg

SEQ ID NO: 976540 - RNA, 18 nt, Human
caugucugcgccacaagg

SEQ ID NO: 976541 - RNA, 22 nt, Human
gggcaguugauggaggucugga

SEQ ID NO: 976542 - RNA, 22 nt, Human
cugaggaguuuggguuguucaa

SEQ ID NO: 976543 - RNA, 22 nt, Human
acauuucuuucuauucaguagc

SEQ ID NO: 976544 - RNA, 22 nt, Human
uugcugaauugaauccuuuggu

SEQ ID NO: 976545 - RNA, 22 nt, Human
ucagcacugauguuucagaaga

SEQ ID NO: 976546 - RNA, 22 nt, Human
aauuucaauuacuuuugcacca

SEQ ID NO: 976547 - RNA, 20 nt, Human
augauuuugcacuaacuuca

SEQ ID NO: 976548 - RNA, 21 nt, Human
acagcaagccuuccuuucagg

SEQ ID NO: 976549 - RNA, 22 nt, Human
uuauugccugauugaggucauu

SEQ ID NO: 976550 - RNA, 22 nt, Human
uguccucuaauuggccucuugc

SEQ ID NO: 976551 - RNA, 22 nt, Human
caucacuguccaaaguucaguu

SEQ ID NO: 976552 - RNA, 22 nt, Human
uguccugcaacugaaggagaag

SEQ ID NO: 976553 - RNA, 22 nt, Human
aggagacaucuaacuguagguu

SEQ ID NO: 976554 - RNA, 22 nt, Human
ucaugcacaugugucaccauca

SEQ ID NO: 976555 - RNA, 22 nt, Human
auuugagaugguaaauaacuuu

SEQ ID NO: 976556 - RNA, 22 nt, Human
aauccugugugacucuggggag

SEQ ID NO: 976557 - RNA, 21 nt, Human
guggccugauuaugaaugggu

SEQ ID NO: 976558 - RNA, 22 nt, Human
cugggacacccaaggaaagagc

SEQ ID NO: 976559 - RNA, 22 nt, Human
uccuuccuggggucucugcugc

SEQ ID NO: 976560 - RNA, 22 nt, Human
gacacagagauaggccuguguu

SEQ ID NO: 976561 - RNA, 22 nt, Human
cagaggcugcucuggguggcau

SEQ ID NO: 976562 - RNA, 22 nt, Human
aguccaggucucugagucacaa

SEQ ID NO: 976563 - RNA, 22 nt, Human
ucuuaaagagcgcaauuugagg

SEQ ID NO: 976564 - RNA, 23 nt, Human
aaguucaagucacagccugucuu

SEQ ID NO: 976565 - RNA, 19 nt, Human
ggaaacaggggccagagga

SEQ ID NO: 976566 - RNA, 22 nt, Human
acaugcuuucuagguccuucug

SEQ ID NO: 976567 - RNA, 22 nt, Human
aggcucugaugcaagcccaggg

SEQ ID NO: 976568 - RNA, 22 nt, Human
aggcacagcacaccuggccccc

SEQ ID NO: 976569 - RNA, 22 nt, Human
uguuuacaaggagaauuugagg

SEQ ID NO: 976570 - RNA, 23 nt, Human
cagagcuggcucagagcugccug

SEQ ID NO: 976571 - RNA, 22 nt, Human
guggcugguuuccugcaugcaa

SEQ ID NO: 976572 - RNA, 22 nt, Human
aggacccagaggcagaggacgu

SEQ ID NO: 976573 - RNA, 22 nt, Human
aggcaguuucugggacagcaua

SEQ ID NO: 976574 - RNA, 22 nt, Human
uguuuaauugggccaacagcgg

SEQ ID NO: 976575 - RNA, 22 nt, Human
caggaaagguagucacaaugua

SEQ ID NO: 976576 - RNA, 22 nt, Human
acacaugcauaagccuucccuu

SEQ ID NO: 976577 - RNA, 22 nt, Human
gaccauuuguugaaaagauuau

SEQ ID NO: 976578 - RNA, 22 nt, Human
ccugggugaaaucucuccugca

SEQ ID NO: 976579 - RNA, 22 nt, Human
guggcucuaggugagcauggag

SEQ ID NO: 976580 - RNA, 22 nt, Human
cagagccacugucugccaggca

SEQ ID NO: 976581 - RNA, 21 nt, Human
ucaggagagcccaucuacaaa

SEQ ID NO: 976582 - RNA, 22 nt, Human
caaaugcaaaauauaacccugu

SEQ ID NO: 976583 - RNA, 19 nt, Human
uggcaucuguaaaauggug

SEQ ID NO: 976584 - RNA, 22 nt, Human
agucucagaaaauaugcuuuuu

SEQ ID NO: 976585 - RNA, 22 nt, Human
cagcuccacuugaguggggccu

SEQ ID NO: 976586 - RNA, 22 nt, Human
uuccaaaggaauggggagcuau

SEQ ID NO: 976587 - RNA, 19 nt, Human
ucaguuuuagucaucaguu

SEQ ID NO: 976588 - RNA, 22 nt, Human
ucucuguacaguacaugccgug

SEQ ID NO: 976589 - RNA, 22 nt, Human
cccagggacagaugggcagcua

SEQ ID NO: 976590 - RNA, 22 nt, Human
ugagccaaacuucuccuugguc

SEQ ID NO: 976591 - RNA, 22 nt, Human
cuggagccuucaccaggggaaa

SEQ ID NO: 976592 - RNA, 22 nt, Human
guauuagguuggugcaaaagua

SEQ ID NO: 976593 - RNA, 23 nt, Human
uguaaaaugggguaguguuacca

SEQ ID NO: 976594 - RNA, 22 nt, Human
ccagagcccagcacacggugcu

SEQ ID NO: 976595 - RNA, 19 nt, Human
gcugcucugggucucaucu

SEQ ID NO: 976596 - RNA, 22 nt, Human
ggucugaaaauggugaccacca

SEQ ID NO: 976597 - RNA, 21 nt, Human
agaagccuggguggagguggg

SEQ ID NO: 976598 - RNA, 23 nt, Human
aggugcagcccuggaccugcccc

SEQ ID NO: 976599 - RNA, 22 nt, Human
guucacaagcuggguuucugca

SEQ ID NO: 976600 - RNA, 22 nt, Human
aagaguaugcaugcauguuugu

SEQ ID NO: 976601 - RNA, 22 nt, Human
ugccagcacaaguuaagagauc

SEQ ID NO: 976602 - RNA, 22 nt, Human
ucagaaguaggagacauucuug

SEQ ID NO: 976603 - RNA, 22 nt, Human
aggugagguuugggagguguca

SEQ ID NO: 976604 - RNA, 22 nt, Human
ucaggggcccuucccucagcag

SEQ ID NO: 976605 - RNA, 22 nt, Human
ucuuggagaauggcagagaagc

SEQ ID NO: 976606 - RNA, 22 nt, Human
cacuacuugaaagaauuacaga

SEQ ID NO: 976607 - RNA, 22 nt, Human
cagcagcccacgcgugcugucc

SEQ ID NO: 976608 - RNA, 22 nt, Human
cuacuucugugaugaaacuaca

SEQ ID NO: 976609 - RNA, 21 nt, Human
ugugugcauaugcauguacau

SEQ ID NO: 976610 - RNA, 22 nt, Human
uucuuacagcccuauuacuaaa

SEQ ID NO: 976611 - RNA, 20 nt, Human
aagauucauuguaauuaggg

SEQ ID NO: 976612 - RNA, 22 nt, Human
aaacagaaggguagguaaacau

SEQ ID NO: 976613 - RNA, 22 nt, Human
agggagcuaggauccugaaggu

SEQ ID NO: 976614 - RNA, 22 nt, Human
gcuggccaggugcuuugguucu

SEQ ID NO: 976615 - RNA, 22 nt, Human
aggagucacucagggcuucauc

SEQ ID NO: 976616 - RNA, 22 nt, Human
aaucagaauuuauugaaucuuu

SEQ ID NO: 976617 - RNA, 22 nt, Human
acucugcuugcccaauggaaac

SEQ ID NO: 976618 - RNA, 22 nt, Human
augccagggucacagucauauu

SEQ ID NO: 976619 - RNA, 22 nt, Human
aaccauuugccauuaucuuaag

SEQ ID NO: 976620 - RNA, 22 nt, Human
ucucaccaaagccuugaccaua

SEQ ID NO: 976621 - RNA, 22 nt, Human
gcugucugcaagccaggaaaug

SEQ ID NO: 976622 - RNA, 22 nt, Human
uuucaaauggagucgugaaaug

SEQ ID NO: 976623 - RNA, 22 nt, Human
cugccuuccaaccccagacucc

SEQ ID NO: 976624 - RNA, 22 nt, Human
gugggagcauggucccagugcc

SEQ ID NO: 976625 - RNA, 22 nt, Human
caaaucuauauguugauauucu

SEQ ID NO: 976626 - RNA, 18 nt, Human
uguacaguuaugagcauu

SEQ ID NO: 976627 - RNA, 22 nt, Human
ggcuucucgugccgaagcaaga

SEQ ID NO: 976628 - RNA, 22 nt, Human
auuaguaaaacauuguauaugu

SEQ ID NO: 976629 - RNA, 22 nt, Human
uuaauuuauguccaaaccagau

SEQ ID NO: 976630 - RNA, 22 nt, Human
cccuggaguccggagcucaccu

SEQ ID NO: 976631 - RNA, 20 nt, Human
aaggcacuaugucugcuagc

SEQ ID NO: 976632 - RNA, 23 nt, Human
caguacuuaguguagcguuaauu

SEQ ID NO: 976633 - RNA, 22 nt, Human
ucacagggauggaauagaaaua

SEQ ID NO: 976634 - RNA, 23 nt, Human
uggggagaguuacccuggaagcg

SEQ ID NO: 976635 - RNA, 22 nt, Human
uuggccuuaaccucucugugcc

SEQ ID NO: 976636 - RNA, 22 nt, Human
ccugcacuaccuggggcugcug

SEQ ID NO: 976637 - RNA, 22 nt, Human
ugaaagcucugucaucauuccu

SEQ ID NO: 976638 - RNA, 22 nt, Human
gaggagggagcuggaagcucuu

SEQ ID NO: 976639 - RNA, 22 nt, Human
gagagugaggccugggaaucua

SEQ ID NO: 976640 - RNA, 22 nt, Human
ucaacacuauccaggcaaucuu

SEQ ID NO: 976641 - RNA, 22 nt, Human
uagccgcuuaauuauuugguga

SEQ ID NO: 976642 - RNA, 22 nt, Human
aggguauaaagagcaagcagaa

SEQ ID NO: 976643 - RNA, 22 nt, Human
ccugucuggccuuccacggggg

SEQ ID NO: 976644 - RNA, 22 nt, Human
gcugugcagguccccacugccu

SEQ ID NO: 976645 - RNA, 22 nt, Human
ggcucuggugggaagguuagau

SEQ ID NO: 976646 - RNA, 22 nt, Human
gaggcaggcccugaaugaguca

SEQ ID NO: 976647 - RNA, 22 nt, Human
aggaccagccuccaggucucuu

SEQ ID NO: 976648 - RNA, 22 nt, Human
gcuggccuuugaggaagcugcg

SEQ ID NO: 976649 - RNA, 22 nt, Human
ggaggccauaguuugggaguca

SEQ ID NO: 976650 - RNA, 22 nt, Human
caagggaguuacugagggcggg

SEQ ID NO: 976651 - RNA, 22 nt, Human
auuaaauuggaucugcauaguu

SEQ ID NO: 976652 - RNA, 22 nt, Human
uggggcacuuaugaugugccac

SEQ ID NO: 976653 - RNA, 22 nt, Human
gaaggccaagaggcuccaagau

SEQ ID NO: 976654 - RNA, 22 nt, Human
cuuccuucugaagcauagaagc

SEQ ID NO: 976655 - RNA, 22 nt, Human
agugaaauggaugcugcuacug

SEQ ID NO: 976656 - RNA, 22 nt, Human
guggccuggauagacuccaucu

SEQ ID NO: 976657 - RNA, 22 nt, Human
ucagugcacagagauuuuuguu

SEQ ID NO: 976658 - RNA, 22 nt, Human
uacacacaugcauuugccuuau

SEQ ID NO: 976659 - RNA, 22 nt, Human
gccuaggaguggggauggcggu

SEQ ID NO: 976660 - RNA, 22 nt, Human
uauuggcagcaugagcuccugg

SEQ ID NO: 976661 - RNA, 22 nt, Human
ccucuucuaggacguccuugug

SEQ ID NO: 976662 - RNA, 22 nt, Human
uacccaggaggaaacugaggcu

SEQ ID NO: 976663 - RNA, 17 nt, Human
agugacuuggaaagagc

SEQ ID NO: 976664 - RNA, 22 nt, Human
uaucuuugaugccagauguuac

SEQ ID NO: 976665 - RNA, 16 nt, Human
ccuuucucugccuucc

SEQ ID NO: 976666 - RNA, 22 nt, Human
aaagccuugggauuugugauca

SEQ ID NO: 976667 - RNA, 22 nt, Human
uucuaaaauaaguuuaucuggu

SEQ ID NO: 976668 - RNA, 22 nt, Human
cugagggcccugaagcuuggca

SEQ ID NO: 976669 - RNA, 22 nt, Human
agugacagcugggaaggugaaa

SEQ ID NO: 976670 - RNA, 22 nt, Human
uguuaacaucuuggacucguga

SEQ ID NO: 976671 - RNA, 22 nt, Human
gauuuuaauuauaggagguccu

SEQ ID NO: 976672 - RNA, 22 nt, Human
uuugcauuacuugacuuuaguu

SEQ ID NO: 976673 - RNA, 22 nt, Human
uuuccagguauuaauacuguau

SEQ ID NO: 976674 - RNA, 21 nt, Human
gccaccucgucucggagcagc

SEQ ID NO: 976675 - RNA, 22 nt, Human
aggguggcugaguagauggaag

SEQ ID NO: 976676 - RNA, 22 nt, Human
ccaggagucaauaaaggaagcu

SEQ ID NO: 976677 - RNA, 22 nt, Human
gggaagcaggugcagcucgccu

SEQ ID NO: 976678 - RNA, 22 nt, Human
gccaggaggggagaguguguca

SEQ ID NO: 976679 - RNA, 22 nt, Human
gguuggggcgagcuggaggccc

SEQ ID NO: 976680 - RNA, 22 nt, Human
auuuuacuuugugaauauugac

SEQ ID NO: 976681 - RNA, 22 nt, Human
cugggccaucuccuuugugugg

SEQ ID NO: 976682 - RNA, 22 nt, Human
agccaaggagugcagguggcuu

SEQ ID NO: 976683 - RNA, 22 nt, Human
uagucuuuugagaaguauaucu

SEQ ID NO: 976684 - RNA, 22 nt, Human
auuuggcauaggcagaggccca

SEQ ID NO: 976685 - RNA, 22 nt, Human
aaugucugccagaacugaucau

SEQ ID NO: 976686 - RNA, 21 nt, Human
ucagggcagugggagguuccu

SEQ ID NO: 976687 - RNA, 20 nt, Human
ugaaauaaggaguuguccuu

SEQ ID NO: 976688 - RNA, 22 nt, Human
gauuuucaugauaaacuuguga

SEQ ID NO: 976689 - RNA, 22 nt, Human
ugucccaguucccaggguugcu

SEQ ID NO: 976690 - RNA, 22 nt, Human
guguaauuauauaaagaucuac

SEQ ID NO: 976691 - RNA, 20 nt, Human
uuucagugguuugugccuag

SEQ ID NO: 976692 - RNA, 22 nt, Human
gagagucacugucugcauuucc

SEQ ID NO: 976693 - RNA, 22 nt, Human
ucuggccaauguugugaucaca

SEQ ID NO: 976694 - RNA, 22 nt, Human
caggugcccagcuccugcugug

SEQ ID NO: 976695 - RNA, 22 nt, Human
uucuuuugggaauuacguaugc

SEQ ID NO: 976696 - RNA, 22 nt, Human
gggagcaggacauaauagcaau

SEQ ID NO: 976697 - RNA, 22 nt, Human
uuuccucuuccgagggggaggc

SEQ ID NO: 976698 - RNA, 22 nt, Human
ucccagagugugggcaucaagg

SEQ ID NO: 976699 - RNA, 22 nt, Human
cuggggggagcugcguccagca

SEQ ID NO: 976700 - RNA, 22 nt, Human
cugcugcugagagcucagccug

SEQ ID NO: 976701 - RNA, 23 nt, Human
auuguuuuuggcucucagggaau

SEQ ID NO: 976702 - RNA, 22 nt, Human
gcugggagugggcaagaugaga

SEQ ID NO: 976703 - RNA, 22 nt, Human
agccagcaggugagugcagccu

SEQ ID NO: 976704 - RNA, 23 nt, Human
acagagguccaaacaguauaagc

SEQ ID NO: 976705 - RNA, 22 nt, Human
caaaaguaauuaugguuuuugc

SEQ ID NO: 976706 - RNA, 22 nt, Human
ugcucccaaacgaccuacugug

SEQ ID NO: 976707 - RNA, 22 nt, Human
ucuccucucuuaccugguacaa

SEQ ID NO: 976708 - RNA, 22 nt, Human
acaggcugcugggcuccgugcu

SEQ ID NO: 976709 - RNA, 22 nt, Human
ccagggugugggcgucggcacg

SEQ ID NO: 976710 - RNA, 22 nt, Human
uucauucccaagaguaaacaua

SEQ ID NO: 976711 - RNA, 22 nt, Human
ugucugugaccucuuaggcaag

SEQ ID NO: 976712 - RNA, 22 nt, Human
ugagacaguuuuucuauuucca

SEQ ID NO: 976713 - RNA, 22 nt, Human
uccagccaccaccuugauugcc

SEQ ID NO: 976714 - RNA, 22 nt, Human
agagggaucacccuguuucugg

SEQ ID NO: 976715 - RNA, 22 nt, Human
cacagggccuggggcagcugcu

SEQ ID NO: 976716 - RNA, 22 nt, Human
ccucauggaccucagacugucc

SEQ ID NO: 976717 - RNA, 22 nt, Human
gagccuggggacccuccugagu

SEQ ID NO: 976718 - RNA, 22 nt, Human
cagaaugcaaauuuuauaauau

SEQ ID NO: 976719 - RNA, 22 nt, Human
gcagggacaaggcagguguucu

SEQ ID NO: 976720 - RNA, 22 nt, Human
augcucugggcaggagcccugg

SEQ ID NO: 976721 - RNA, 22 nt, Human
uggccucucuaccaggcagccu

SEQ ID NO: 976722 - RNA, 22 nt, Human
ucugaaagaagggcagucuuuu

SEQ ID NO: 976723 - RNA, 22 nt, Human
ugcuucaggaagaaacgccagg

SEQ ID NO: 976724 - RNA, 22 nt, Human
ucaaauaaggagucaugaccau

SEQ ID NO: 976725 - RNA, 22 nt, Human
uggcagggaguugcaggauuuc

SEQ ID NO: 976726 - RNA, 22 nt, Human
gggcacuguggggcccaugcug

SEQ ID NO: 976727 - RNA, 22 nt, Human
ugcuauugugaacagugccaca

SEQ ID NO: 976728 - RNA, 22 nt, Human
uacucugccacuaggaguucug

SEQ ID NO: 976729 - RNA, 22 nt, Human
ugagcuguagcagaugcuguug

SEQ ID NO: 976730 - RNA, 22 nt, Human
uuagaaaacauaagugguaaag

SEQ ID NO: 976731 - RNA, 22 nt, Human
uuaucguacgcuucagaaauuu

SEQ ID NO: 976732 - RNA, 22 nt, Human
ccagugcacagccaggcaggug

SEQ ID NO: 976733 - RNA, 22 nt, Human
uuucuuauacuauauugucauc

SEQ ID NO: 976734 - RNA, 22 nt, Human
gcucaggaccgaggggugggaa

SEQ ID NO: 976735 - RNA, 22 nt, Human
ggggaugguggcauuuguaaaa

SEQ ID NO: 976736 - RNA, 22 nt, Human
agaggcacuccagccacugguc

SEQ ID NO: 976737 - RNA, 22 nt, Human
ccaccagcuuugccacccugcu

SEQ ID NO: 976738 - RNA, 22 nt, Human
gcauucuuuuuaggagguuccu

SEQ ID NO: 976739 - RNA, 22 nt, Human
uuccaagaguaaauucaaauug

SEQ ID NO: 976740 - RNA, 22 nt, Human
acagucucuccacacugcaggg

SEQ ID NO: 976741 - RNA, 22 nt, Human
gcucugcuugcaucaugacugc

SEQ ID NO: 976742 - RNA, 22 nt, Human
ccuuuuucaauauagaauugca

SEQ ID NO: 976743 - RNA, 22 nt, Human
acagggucauuuuaugaucugu

SEQ ID NO: 976744 - RNA, 22 nt, Human
ugcuuucaaaggcuuucuagau

SEQ ID NO: 976745 - RNA, 22 nt, Human
cuucagagugcagaagauuggg

SEQ ID NO: 976746 - RNA, 22 nt, Human
cccugccuugggguccacaccg

SEQ ID NO: 976747 - RNA, 20 nt, Human
cugggcugcccagcuauggg

SEQ ID NO: 976748 - RNA, 19 nt, Human
caggaaggggcgaaucugg

SEQ ID NO: 976749 - RNA, 22 nt, Human
gcucucugucguuaugcuucau

SEQ ID NO: 976750 - RNA, 22 nt, Human
uagagcuguaucaaagagccuu

SEQ ID NO: 976751 - RNA, 22 nt, Human
cagagguacaagcuaaguuggg

SEQ ID NO: 976752 - RNA, 20 nt, Human
gggcagcuccccucauucug

SEQ ID NO: 976753 - RNA, 22 nt, Human
agcaccaugaccuugccauuga

SEQ ID NO: 976754 - RNA, 22 nt, Human
gguaaaaugcagauucuuagcc

SEQ ID NO: 976755 - RNA, 22 nt, Human
aaagauaauguuuccuuauucu

SEQ ID NO: 976756 - RNA, 22 nt, Human
aaaaauagcuucucuugucccu

SEQ ID NO: 976757 - RNA, 19 nt, Human
aguagcagaaagugcagug

SEQ ID NO: 976758 - RNA, 22 nt, Human
uggagggcaucuguggucaggc

SEQ ID NO: 976759 - RNA, 22 nt, Human
uugccacugaaccagucuugca

SEQ ID NO: 976760 - RNA, 22 nt, Human
ccuggacucaggcugugggcac

SEQ ID NO: 976761 - RNA, 22 nt, Human
ucuaggagaaccaucagggagg

SEQ ID NO: 976762 - RNA, 22 nt, Human
auguacauuuagaucauuucug

SEQ ID NO: 976763 - RNA, 22 nt, Human
aaggcagccaugugcuuugggu

SEQ ID NO: 976764 - RNA, 21 nt, Human
cggccaaauuccuccuaggga

SEQ ID NO: 976765 - RNA, 22 nt, Human
ucugcaggcuuggaguggcagc

SEQ ID NO: 976766 - RNA, 22 nt, Human
aaaggucagcugccaucguucu

SEQ ID NO: 976767 - RNA, 22 nt, Human
uauucacuguaacucagcaaua

SEQ ID NO: 976768 - RNA, 22 nt, Human
guaacugaggcagcuuuuaaga

SEQ ID NO: 976769 - RNA, 22 nt, Human
caaauguguuuuuucuucuaca

SEQ ID NO: 976770 - RNA, 22 nt, Human
ucagaggucccuagcaggagug

SEQ ID NO: 976771 - RNA, 22 nt, Human
uuggcagucucagucagauggc

SEQ ID NO: 976772 - RNA, 22 nt, Human
ugcaggcaggggaugagcagcc

SEQ ID NO: 976773 - RNA, 22 nt, Human
accaggagccacaggaggagcc

SEQ ID NO: 976774 - RNA, 22 nt, Human
aauguauuccucaugcaagagu

SEQ ID NO: 976775 - RNA, 22 nt, Human
cucucugagugagggacaagcu

SEQ ID NO: 976776 - RNA, 22 nt, Human
ucugugccuccguaacacacca

SEQ ID NO: 976777 - RNA, 22 nt, Human
ccuggcugcuuucacuauggag

SEQ ID NO: 976778 - RNA, 22 nt, Human
uaaaugugaccuucauuuuaua

SEQ ID NO: 976779 - RNA, 22 nt, Human
uggagccaaggccaguucucag

SEQ ID NO: 976780 - RNA, 22 nt, Human
cauugcacuccaucuugggcaa

SEQ ID NO: 976781 - RNA, 22 nt, Human
cuggcugcgucugcucugacag

SEQ ID NO: 976782 - RNA, 22 nt, Human
gccuggcaggccugggccagca

SEQ ID NO: 976783 - RNA, 22 nt, Human
cucugcugggauguaaagucuu

SEQ ID NO: 976784 - RNA, 22 nt, Human
aauuaggaaauucagccauuuu

SEQ ID NO: 976785 - RNA, 22 nt, Human
ugucaaaaauaagagagauugu

SEQ ID NO: 976786 - RNA, 22 nt, Human
cccuugggugccagccacaagu

SEQ ID NO: 976787 - RNA, 22 nt, Human
ccccaggagauuugggagcaca

SEQ ID NO: 976788 - RNA, 22 nt, Human
aggcugcuuccuuacguggcug

SEQ ID NO: 976789 - RNA, 20 nt, Human
gagcagcuguuugcauugca

SEQ ID NO: 976790 - RNA, 22 nt, Human
cugugucuaaucaggucaguca

SEQ ID NO: 976791 - RNA, 22 nt, Human
cuccucccugcgauugcucugc

SEQ ID NO: 976792 - RNA, 22 nt, Human
uuaugaaagacauuucuguugg

SEQ ID NO: 976793 - RNA, 22 nt, Human
uggcagacacugucgaagccua

SEQ ID NO: 976794 - RNA, 22 nt, Human
aaaauggucucagcuggcacca

SEQ ID NO: 976795 - RNA, 22 nt, Human
gcacccagcccagggcgugaug

SEQ ID NO: 976796 - RNA, 22 nt, Human
uggggugccgacagggagggca

SEQ ID NO: 976797 - RNA, 22 nt, Human
caguggcgugaucucugcucac

SEQ ID NO: 976798 - RNA, 22 nt, Human
aggcuggggaauugaauuugcu

SEQ ID NO: 976799 - RNA, 17 nt, Human
uagaauauggugggcug

SEQ ID NO: 976800 - RNA, 19 nt, Human
ccaggagcaguggugagcu

SEQ ID NO: 976801 - RNA, 20 nt, Human
caggaugauuggacacgaug

SEQ ID NO: 976802 - RNA, 22 nt, Human
cuguucaugcugauucuguaug

SEQ ID NO: 976803 - RNA, 22 nt, Human
agacaaagacagcaucucaggu

SEQ ID NO: 976804 - RNA, 22 nt, Human
gaggaguggaguugcuggguug

SEQ ID NO: 976805 - RNA, 22 nt, Human
aggcucaggcaggaauggcgga

SEQ ID NO: 976806 - RNA, 22 nt, Human
gccagcagccacagaagucacu

SEQ ID NO: 976807 - RNA, 22 nt, Human
gcaucuuucuguccauucagca

SEQ ID NO: 976808 - RNA, 22 nt, Human
ugucagugaguuaguugcaagu

SEQ ID NO: 976809 - RNA, 22 nt, Human
cucuguagaaacagggcagaag

SEQ ID NO: 976810 - RNA, 22 nt, Human
ggagucaggagcaggcugggcu

SEQ ID NO: 976811 - RNA, 22 nt, Human
ggugcuggacacguggcacucc

SEQ ID NO: 976812 - RNA, 20 nt, Human
uucuucucuaguuaucuuca

SEQ ID NO: 976813 - RNA, 21 nt, Human
auuauuauuucuguguccagc

SEQ ID NO: 976814 - RNA, 22 nt, Human
gcagcuuggauuucuguaguuu

SEQ ID NO: 976815 - RNA, 22 nt, Human
uguguacauaucuauccuagau

SEQ ID NO: 976816 - RNA, 22 nt, Human
gcugucugggaggccuccacuu

SEQ ID NO: 976817 - RNA, 22 nt, Human
uacaguagacaauguuaguaug

SEQ ID NO: 976818 - RNA, 22 nt, Human
agggaggauaguagucaguuua

SEQ ID NO: 976819 - RNA, 22 nt, Human
uggacaggaucugagacugaga

SEQ ID NO: 976820 - RNA, 22 nt, Human
aggcccugcccagugccacaag

SEQ ID NO: 976821 - RNA, 22 nt, Human
ucaguuuugaaaacauugaaug

SEQ ID NO: 976822 - RNA, 22 nt, Human
uguuccaugucuuuguaggacu

SEQ ID NO: 976823 - RNA, 22 nt, Human
auuguauuuccagcuugaaugu

SEQ ID NO: 976824 - RNA, 22 nt, Human
gggcagugguuacacagcugag

SEQ ID NO: 976825 - RNA, 22 nt, Human
aucuggcuuaccuagggugccu

SEQ ID NO: 976826 - RNA, 22 nt, Human
ucuccuggcucuaaaaggcugu

SEQ ID NO: 976827 - RNA, 22 nt, Human
aaguuauuuccucgugacugaa

SEQ ID NO: 976828 - RNA, 22 nt, Human
caagagcauuuaguuagcuggu

SEQ ID NO: 976829 - RNA, 22 nt, Human
acuaaauaguuuugacagaaca

SEQ ID NO: 976830 - RNA, 21 nt, Human
uggcagggguaguaguacagc

SEQ ID NO: 976831 - RNA, 22 nt, Human
ucugccuucgcugcucccugaa

SEQ ID NO: 976832 - RNA, 19 nt, Human
ucucacaucagcuccuagc

SEQ ID NO: 976833 - RNA, 22 nt, Human
cauuuguauguuccuccuuagg

SEQ ID NO: 976834 - RNA, 22 nt, Human
cacagcagaaauaugaaggcag

SEQ ID NO: 976835 - RNA, 22 nt, Human
uagcugccuaugugauaagaga

SEQ ID NO: 976836 - RNA, 22 nt, Human
cagggccauuggcguggcuguc

SEQ ID NO: 976837 - RNA, 22 nt, Human
cuaggccacuugcucucaugga

SEQ ID NO: 976838 - RNA, 22 nt, Human
cugcugugcauauuuaucuagg

SEQ ID NO: 976839 - RNA, 22 nt, Human
uccaggcuagguuuacaggaca

SEQ ID NO: 976840 - RNA, 22 nt, Human
auaacagagagcuacugaacug

SEQ ID NO: 976841 - RNA, 22 nt, Human
gaauacauuggaaaucagaaua

SEQ ID NO: 976842 - RNA, 22 nt, Human
ugugaaaagcaggcuacuuucu

SEQ ID NO: 976843 - RNA, 20 nt, Human
ucuccuggugacaguaccca

SEQ ID NO: 976844 - RNA, 22 nt, Human
agcagcugaccagugaguccug

SEQ ID NO: 976845 - RNA, 22 nt, Human
uacuuuggauccuuacaauagc

SEQ ID NO: 976846 - RNA, 22 nt, Human
cugcagccuaggugcagcuggg

SEQ ID NO: 976847 - RNA, 17 nt, Human
ucagcaaagacaaagga

SEQ ID NO: 976848 - RNA, 22 nt, Human
aaauguguuccuuugcuacaga

SEQ ID NO: 976849 - RNA, 22 nt, Human
ggccagugugcaggucagagau

SEQ ID NO: 976850 - RNA, 21 nt, Human
gccagagcaguacaaugaggu

SEQ ID NO: 976851 - RNA, 22 nt, Human
ccuggccacccagccuuggcca

SEQ ID NO: 976852 - RNA, 21 nt, Human
ccaggaaggacugagcucccu

SEQ ID NO: 976853 - RNA, 21 nt, Human
gcucuuggaaggggcucagcu

SEQ ID NO: 976854 - RNA, 22 nt, Human
aagggcagaaagggacgcuuug

SEQ ID NO: 976855 - RNA, 22 nt, Human
agaggagcugggaggcccucgu

SEQ ID NO: 976856 - RNA, 21 nt, Human
uuacuuuugcagcaaccuaau

SEQ ID NO: 976857 - RNA, 22 nt, Human
aaaugcagguucuugagccaag

SEQ ID NO: 976858 - RNA, 22 nt, Human
ccaggaggcagagguuacagug

SEQ ID NO: 976859 - RNA, 22 nt, Human
agccugagccccauccagcuga

SEQ ID NO: 976860 - RNA, 22 nt, Human
auguuuuauauuuugcagcagu

SEQ ID NO: 976861 - RNA, 22 nt, Human
cagauggccagaggcagcugca

SEQ ID NO: 976862 - RNA, 22 nt, Human
caagagcucaccggagagcauu

SEQ ID NO: 976863 - RNA, 22 nt, Human
caguggaggcucaagugugcuu

SEQ ID NO: 976864 - RNA, 22 nt, Human
ucuguucuuguccccacuucag

SEQ ID NO: 976865 - RNA, 22 nt, Human
cuaagccacucaaaucuugugg

SEQ ID NO: 976866 - RNA, 22 nt, Human
acaaaaagcuccauuacugucc

SEQ ID NO: 976867 - RNA, 22 nt, Human
aaaugguaagacaacacauuau

SEQ ID NO: 976868 - RNA, 23 nt, Human
gcuguuagauuuaauaagcauuu

SEQ ID NO: 976869 - RNA, 22 nt, Human
gccagugugcaagaggccacca

SEQ ID NO: 976870 - RNA, 18 nt, Human
ggcugugcguggaggcug

SEQ ID NO: 976871 - RNA, 22 nt, Human
acacuuuacagcuuccuuugca

SEQ ID NO: 976872 - RNA, 22 nt, Human
gccugccuucggugcgcagcgg

SEQ ID NO: 976873 - RNA, 22 nt, Human
cagauggcagggcagcucugca

SEQ ID NO: 976874 - RNA, 22 nt, Human
agcuccugcacccagccuugag

SEQ ID NO: 976875 - RNA, 22 nt, Human
cagaauaugacaagauuuuccu

SEQ ID NO: 976876 - RNA, 22 nt, Human
uggcucagccauucguguugcc

SEQ ID NO: 976877 - RNA, 22 nt, Human
gcucucugaggugcuggcagag

SEQ ID NO: 976878 - RNA, 22 nt, Human
uccauaagcagguucuuccuga

SEQ ID NO: 976879 - RNA, 22 nt, Human
agcaggaguguccccuggcugu

SEQ ID NO: 976880 - RNA, 18 nt, Human
cccagcccaccauuucuc

SEQ ID NO: 976881 - RNA, 22 nt, Human
acauaccauacauggugagaug

SEQ ID NO: 976882 - RNA, 22 nt, Human
aggcccugaccugggagaucua

SEQ ID NO: 976883 - RNA, 21 nt, Human
ucugggcccaugcugccucac

SEQ ID NO: 976884 - RNA, 22 nt, Human
aguggcagccgagcaggagaug

SEQ ID NO: 976885 - RNA, 22 nt, Human
aucuggcuccuacacuugaaga

SEQ ID NO: 976886 - RNA, 22 nt, Human
cucuggaauguuuacaugcccu

SEQ ID NO: 976887 - RNA, 22 nt, Human
gguggggccugcuccagcggcc

SEQ ID NO: 976888 - RNA, 22 nt, Human
ggcucagguuuccuucccagcu

SEQ ID NO: 976889 - RNA, 22 nt, Human
gagggguguggagccaucaguu

SEQ ID NO: 976890 - RNA, 22 nt, Human
uggcucugaucagauguccagu

SEQ ID NO: 976891 - RNA, 22 nt, Human
gucuagagugcuuccuagucau

SEQ ID NO: 976892 - RNA, 22 nt, Human
accaggaggccuggagcacaaa

SEQ ID NO: 976893 - RNA, 22 nt, Human
cagugaaaucacaacuuuaguu

SEQ ID NO: 976894 - RNA, 22 nt, Human
gggaggcuggcucuggccacag

SEQ ID NO: 976895 - RNA, 22 nt, Human
cucugagaggugagaagcagca

SEQ ID NO: 976896 - RNA, 22 nt, Human
ucagugucuugaccugggugug

SEQ ID NO: 976897 - RNA, 22 nt, Human
uaaaauguagcuucuaggcugg

SEQ ID NO: 976898 - RNA, 22 nt, Human
cccuggaggucagaggccuggg

SEQ ID NO: 976899 - RNA, 23 nt, Human
ugagcccaggaggucaaggcugc

SEQ ID NO: 976900 - RNA, 22 nt, Human
gccagcagggcccaaaugcugg

SEQ ID NO: 976901 - RNA, 22 nt, Human
cuacccagagugaaucucuuaa

SEQ ID NO: 976902 - RNA, 21 nt, Human
aagggagauaggaaucaggcc

SEQ ID NO: 976903 - RNA, 22 nt, Human
gcagggugugucucauacaguu

SEQ ID NO: 976904 - RNA, 22 nt, Human
uucagucagugacuaagcaguu

SEQ ID NO: 976905 - RNA, 22 nt, Human
aggagggagaugcccauccugg

SEQ ID NO: 976906 - RNA, 22 nt, Human
ccaggagguggagauugcagug

SEQ ID NO: 976907 - RNA, 22 nt, Human
ggcaugggagugagcaaccuua

SEQ ID NO: 976908 - RNA, 22 nt, Human
agaaaucacaggaggcagaagg

SEQ ID NO: 976909 - RNA, 22 nt, Human
augugucuugagggggauggag

SEQ ID NO: 976910 - RNA, 22 nt, Human
uugaagauggaucgccacucuc

SEQ ID NO: 976911 - RNA, 22 nt, Human
cacaguggauugggugaugccc

SEQ ID NO: 976912 - RNA, 22 nt, Human
gcccaguaguucaagguugcag

SEQ ID NO: 976913 - RNA, 22 nt, Human
guguggcugccagccaagaggc

SEQ ID NO: 976914 - RNA, 22 nt, Human
acuugggagggugugggcagcu

SEQ ID NO: 976915 - RNA, 22 nt, Human
augucccuugucugugaugucu

SEQ ID NO: 976916 - RNA, 20 nt, Human
cccuggccuguuucaugccc

SEQ ID NO: 976917 - RNA, 22 nt, Human
acuguucauccuuuuugaacaa

SEQ ID NO: 976918 - RNA, 22 nt, Human
caaguuaucagaaggcacuuuu

SEQ ID NO: 976919 - RNA, 22 nt, Human
gcugcucuggcucugcaguguc

SEQ ID NO: 976920 - RNA, 22 nt, Human
auucacagggacaaugggagag

SEQ ID NO: 976921 - RNA, 22 nt, Human
cucacugcaaguuccaccuacc

SEQ ID NO: 976922 - RNA, 22 nt, Human
cagagacagaaaauggaucuag

SEQ ID NO: 976923 - RNA, 22 nt, Human
agauaaauuccuaagauuucag

SEQ ID NO: 976924 - RNA, 22 nt, Human
acuggcugaaguuuacuuuuug

SEQ ID NO: 976925 - RNA, 22 nt, Human
acugcuuuucagagucugccug

SEQ ID NO: 976926 - RNA, 22 nt, Human
agugaaaacacuaguucuugcc

SEQ ID NO: 976927 - RNA, 22 nt, Human
caguauguuugggagacaugac

SEQ ID NO: 976928 - RNA, 22 nt, Human
ggcugccucaaagcucaagcuc

SEQ ID NO: 976929 - RNA, 22 nt, Human
ucauccaguucacauggugagu

SEQ ID NO: 976930 - RNA, 19 nt, Human
gcugcuggcucuggcugga

SEQ ID NO: 976931 - RNA, 22 nt, Human
uggcuucugggacuugugagca

SEQ ID NO: 976932 - RNA, 22 nt, Human
ucagaagucccagaauucacau

SEQ ID NO: 976933 - RNA, 22 nt, Human
aggccugacuugaauuuagggc

SEQ ID NO: 976934 - RNA, 20 nt, Human
cugcugugguccuuuauuuu

SEQ ID NO: 976935 - RNA, 22 nt, Human
aaaaaugaauucuucaguggca

SEQ ID NO: 976936 - RNA, 22 nt, Human
uuguauucauugcuuacccaau

SEQ ID NO: 976937 - RNA, 22 nt, Human
ggcugccacgucgaggguccaa

SEQ ID NO: 976938 - RNA, 22 nt, Human
acagcagccugcagcccugugu

SEQ ID NO: 976939 - RNA, 22 nt, Human
aacuuuauuguuaggggcuaaa

SEQ ID NO: 976940 - RNA, 22 nt, Human
ugcgcggcucagucaucuccag

SEQ ID NO: 976941 - RNA, 17 nt, Human
ucuggccuuccugaacu

SEQ ID NO: 976942 - RNA, 22 nt, Human
ugcagcuucuccaucuccuugu

SEQ ID NO: 976943 - RNA, 20 nt, Human
cacugaagacuucuugcuca

SEQ ID NO: 976944 - RNA, 22 nt, Human
augugugccccuuuuacucuuu

SEQ ID NO: 976945 - RNA, 22 nt, Human
ugggcugcuuccucagcugaga

SEQ ID NO: 976946 - RNA, 20 nt, Human
cuguccccgaggucaccagg

SEQ ID NO: 976947 - RNA, 22 nt, Human
cagccaggagccucugcaacua

SEQ ID NO: 976948 - RNA, 22 nt, Human
cacauauuugaugaagcuuugu

SEQ ID NO: 976949 - RNA, 20 nt, Human
cuuagaaauuuuuacccugg

SEQ ID NO: 976950 - RNA, 22 nt, Human
aaacaaguuuagaauaaugaau

SEQ ID NO: 976951 - RNA, 22 nt, Human
uccucugcuccaucuuuacugu

SEQ ID NO: 976952 - RNA, 22 nt, Human
auucuuucaaggaauaguuauu

SEQ ID NO: 976953 - RNA, 22 nt, Human
cugguccuccuugccuucagau

SEQ ID NO: 976954 - RNA, 22 nt, Human
ugucucugaggugagggucagc

SEQ ID NO: 976955 - RNA, 22 nt, Human
aaauguggguaaugggacugga

SEQ ID NO: 976956 - RNA, 22 nt, Human
agguggggaggagugucucuuu

SEQ ID NO: 976957 - RNA, 21 nt, Human
ccugagggugguugugaagau

SEQ ID NO: 976958 - RNA, 22 nt, Human
auuagagaaugugcugacauug

SEQ ID NO: 976959 - RNA, 22 nt, Human
ucacaggguguacaucaccuau

SEQ ID NO: 976960 - RNA, 21 nt, Human
cccaggaggagcuccggcucc

SEQ ID NO: 976961 - RNA, 22 nt, Human
acuccaggguuuugcaccugga

SEQ ID NO: 976962 - RNA, 22 nt, Human
cugaagaggacgcagcagcaag

SEQ ID NO: 976963 - RNA, 22 nt, Human
ugguccaagugagguggccucu

SEQ ID NO: 976964 - RNA, 21 nt, Human
auguaggaguuauuggaacag

SEQ ID NO: 976965 - RNA, 22 nt, Human
uggccaguagauaggcaggcaa

SEQ ID NO: 976966 - RNA, 22 nt, Human
aaugaacaucaaaugccuacca

SEQ ID NO: 976967 - RNA, 22 nt, Human
acuggcaguagagggagcgcau

SEQ ID NO: 976968 - RNA, 22 nt, Human
aaaugcacagaggccagagagg

SEQ ID NO: 976969 - RNA, 22 nt, Human
augggaggaaggaggcccuuga

SEQ ID NO: 976970 - RNA, 22 nt, Human
ucuggcucaggucagacaggga

SEQ ID NO: 976971 - RNA, 22 nt, Human
gcaaauauucaagacuuuucca

SEQ ID NO: 976972 - RNA, 22 nt, Human
auuuggaaaugcaucucuugag

SEQ ID NO: 976973 - RNA, 22 nt, Human
auuugcauaauagugauuugua

SEQ ID NO: 976974 - RNA, 22 nt, Human
gagcugucuggggacucugggu

SEQ ID NO: 976975 - RNA, 22 nt, Human
ggaggccaggaaggcucggaga

SEQ ID NO: 976976 - RNA, 22 nt, Human
ggcucugcuggauugaggccag

SEQ ID NO: 976977 - RNA, 22 nt, Human
ccuguucacugcacaguuuccg

SEQ ID NO: 976978 - RNA, 22 nt, Human
ugagcuggucuugaguguagcu

SEQ ID NO: 976979 - RNA, 22 nt, Human
cagagguaccagcagccucugg

SEQ ID NO: 976980 - RNA, 22 nt, Human
uucaaaacaaucuguuugcauu

SEQ ID NO: 976981 - RNA, 22 nt, Human
ugccucugugggccuuccuggc

SEQ ID NO: 976982 - RNA, 22 nt, Human
caggggcucuaaugcaugauca

SEQ ID NO: 976983 - RNA, 22 nt, Human
acauuuuuuagagucccacauu

SEQ ID NO: 976984 - RNA, 22 nt, Human
gugcagcugugguggagccagg

SEQ ID NO: 976985 - RNA, 20 nt, Human
aagagcauaguacaggaaga

SEQ ID NO: 976986 - RNA, 22 nt, Human
gccugaagaacagcugugagga

SEQ ID NO: 976987 - RNA, 22 nt, Human
auccaaagcccuaaguuaacug

SEQ ID NO: 976988 - RNA, 22 nt, Human
uagagcuggccgggacagcugg

SEQ ID NO: 976989 - RNA, 22 nt, Human
ggccuugggcuggcugcaguau

SEQ ID NO: 976990 - RNA, 22 nt, Human
ucagaaauacuaucagcuuuug

SEQ ID NO: 976991 - RNA, 22 nt, Human
uauuccagguuucuuguuguau

SEQ ID NO: 976992 - RNA, 22 nt, Human
cuggcagccaagugggauacuc

SEQ ID NO: 976993 - RNA, 22 nt, Human
ucccaggacaggccacauggaa

SEQ ID NO: 976994 - RNA, 22 nt, Human
agcagaagaaagccacaugacu

SEQ ID NO: 976995 - RNA, 22 nt, Human
ugcaggagcagagauggcugga

SEQ ID NO: 976996 - RNA, 22 nt, Human
cacagugcaugaugggcagaag

SEQ ID NO: 976997 - RNA, 18 nt, Human
aggcuucccaggcaggcc

SEQ ID NO: 976998 - RNA, 22 nt, Human
guuuaaguuucagaagcuaaga

SEQ ID NO: 976999 - RNA, 22 nt, Human
ucuggcagggguucugcacuug

SEQ ID NO: 977000 - RNA, 21 nt, Human
ucagaguggaagacaguuuga

SEQ ID NO: 977001 - RNA, 22 nt, Human
cugaggugagcuucccugggcu

SEQ ID NO: 977002 - RNA, 22 nt, Human
uauauuaguggaaugauaugaa

SEQ ID NO: 977003 - RNA, 22 nt, Human
aaauuauuuucagaauggagaa

SEQ ID NO: 977004 - RNA, 22 nt, Human
cuucaagaagacagcagagcau

SEQ ID NO: 977005 - RNA, 22 nt, Human
gggcagcuccuguggaauccac

SEQ ID NO: 977006 - RNA, 22 nt, Human
auucucaaacaagugguuugau

SEQ ID NO: 977007 - RNA, 22 nt, Human
auuauaaagaacaugugugugg

SEQ ID NO: 977008 - RNA, 23 nt, Human
uuuuaauuuggacauaagaagau

SEQ ID NO: 977009 - RNA, 22 nt, Human
acagccaggagccaugggcagg

SEQ ID NO: 977010 - RNA, 22 nt, Human
ugcagcaggagccaggccuggu

SEQ ID NO: 977011 - RNA, 22 nt, Human
gcccaggaggcagagguugugg

SEQ ID NO: 977012 - RNA, 21 nt, Human
ggcauggcaccucugggcagg

SEQ ID NO: 977013 - RNA, 22 nt, Human
gcagacuggucuucagccuugg

SEQ ID NO: 977014 - RNA, 20 nt, Human
ucuguaaagacuccagaagc

SEQ ID NO: 977015 - RNA, 22 nt, Human
gccaugccugugucuccaggcc

SEQ ID NO: 977016 - RNA, 22 nt, Human
ggcaugggccgaggugccuccu

SEQ ID NO: 977017 - RNA, 22 nt, Human
gagggcugauaaaugcgcaugg

SEQ ID NO: 977018 - RNA, 22 nt, Human
cagggugcagugucgcugcuag

SEQ ID NO: 977019 - RNA, 22 nt, Human
aagacagaccacgugacagggc

SEQ ID NO: 977020 - RNA, 22 nt, Human
aucuggcugcugugcuuaagcu

SEQ ID NO: 977021 - RNA, 21 nt, Human
agcugcuuucagcuccuagag

SEQ ID NO: 977022 - RNA, 22 nt, Human
uuccaggaggcacugacagagg

SEQ ID NO: 977023 - RNA, 22 nt, Human
agccccaggcccggacgccucu

SEQ ID NO: 977024 - RNA, 22 nt, Human
ugccaggcgugguggugcgcac

SEQ ID NO: 977025 - RNA, 22 nt, Human
ugaugguuuuauuaauaggacc

SEQ ID NO: 977026 - RNA, 22 nt, Human
agggccugucagcgguguccug

SEQ ID NO: 977027 - RNA, 22 nt, Human
cugaggucuagacaccccaggg

SEQ ID NO: 977028 - RNA, 22 nt, Human
ugcuggccaacaaggcuccaag

SEQ ID NO: 977029 - RNA, 22 nt, Human
agggcugagacuaaggccagau

SEQ ID NO: 977030 - RNA, 22 nt, Human
agcagcucuuaacaaagcaugg

SEQ ID NO: 977031 - RNA, 22 nt, Human
aguguccccuacagaggcauuc

SEQ ID NO: 977032 - RNA, 22 nt, Human
uaaacauuuguuauucuuguuu

SEQ ID NO: 977033 - RNA, 22 nt, Human
uuugcaaauaccaugaaacuug

SEQ ID NO: 977034 - RNA, 22 nt, Human
ggggcagagagaaggaagcuug

SEQ ID NO: 977035 - RNA, 22 nt, Human
ccugugucagccccugccucca

SEQ ID NO: 977036 - RNA, 21 nt, Human
uagcacuucgcuguaauuggg

SEQ ID NO: 977037 - RNA, 22 nt, Human
ugagccuggagucguggagggg

SEQ ID NO: 977038 - RNA, 22 nt, Human
auguagcagaagauguuuuccu

SEQ ID NO: 977039 - RNA, 23 nt, Human
ugcaugugaauucauacuuguuu

SEQ ID NO: 977040 - RNA, 22 nt, Human
cacagcugaaguagccaugugg

SEQ ID NO: 977041 - RNA, 22 nt, Human
agaauucuggaguugggaggaa

SEQ ID NO: 977042 - RNA, 18 nt, Human
gcagagugcgucucugug

SEQ ID NO: 977043 - RNA, 22 nt, Human
uaggaaaaauacagaauuauau

SEQ ID NO: 977044 - RNA, 22 nt, Human
aaauacagcagacuccuguugu

SEQ ID NO: 977045 - RNA, 22 nt, Human
uccaggagggauugggcugugg

SEQ ID NO: 977046 - RNA, 22 nt, Human
ucagaccauccugcuguuagug

SEQ ID NO: 977047 - RNA, 22 nt, Human
cggccaagccggggccccgaag

SEQ ID NO: 977048 - RNA, 22 nt, Human
uuuuauuaucuuugaaugggac

SEQ ID NO: 977049 - RNA, 22 nt, Human
uugaaggacauccuauuucuag

SEQ ID NO: 977050 - RNA, 22 nt, Human
cagcucugaagaaaggugucua

SEQ ID NO: 977051 - RNA, 22 nt, Human
gagccagcugagcugcacuguc

SEQ ID NO: 977052 - RNA, 22 nt, Human
gcagggcuguggacacuuuggu

SEQ ID NO: 977053 - RNA, 17 nt, Human
uauguaguacuuauaaa

SEQ ID NO: 977054 - RNA, 22 nt, Human
gccaggagacuccauucauuug

SEQ ID NO: 977055 - RNA, 20 nt, Human
accauaauguuaauuacaaa

SEQ ID NO: 977056 - RNA, 22 nt, Human
ugggcucugaagucagucugcu

SEQ ID NO: 977057 - RNA, 23 nt, Human
uccaggagcaugcuggcuggcga

SEQ ID NO: 977058 - RNA, 22 nt, Human
ggaggaugccaagcugugcaca

SEQ ID NO: 977059 - RNA, 22 nt, Human
uggcagcagaacaugaaaccca

SEQ ID NO: 977060 - RNA, 22 nt, Human
ucccaggaugugcgugccgccg

SEQ ID NO: 977061 - RNA, 23 nt, Human
gugagcagcccacuaggaaugcc

SEQ ID NO: 977062 - RNA, 19 nt, Human
ucuaacagaagugucgucc

SEQ ID NO: 977063 - RNA, 22 nt, Human
gcuguucacagacucugcucug

SEQ ID NO: 977064 - RNA, 22 nt, Human
ccuggcucuucagagguuccua

SEQ ID NO: 977065 - RNA, 22 nt, Human
cugggcugcaggaguggggcaa

SEQ ID NO: 977066 - RNA, 22 nt, Human
ucagaaguugagauauucaggg

SEQ ID NO: 977067 - RNA, 22 nt, Human
agcagcuccugccaugagugcu

SEQ ID NO: 977068 - RNA, 22 nt, Human
uguacaauagcuauuaucucca

SEQ ID NO: 977069 - RNA, 22 nt, Human
auugacaagugagcugggcugc

SEQ ID NO: 977070 - RNA, 22 nt, Human
gcuguucccauguggggcucag

SEQ ID NO: 977071 - RNA, 22 nt, Human
gaggcagccagagguucucauu

SEQ ID NO: 977072 - RNA, 22 nt, Human
agcugccacauggugucacugu

SEQ ID NO: 977073 - RNA, 22 nt, Human
ugcaggccggcccuaggccuca

SEQ ID NO: 977074 - RNA, 22 nt, Human
aaagcuauuuuauugcagcucu

SEQ ID NO: 977075 - RNA, 22 nt, Human
uggccuggccacauccagcagg

SEQ ID NO: 977076 - RNA, 22 nt, Human
ccaaaguccauaguuuacauua

SEQ ID NO: 977077 - RNA, 22 nt, Human
cuggcugugcugcaggcuuugg

SEQ ID NO: 977078 - RNA, 22 nt, Human
uucccaugccuggccccuaucc

SEQ ID NO: 977079 - RNA, 22 nt, Human
ggcaaggccaggccuccaagac

SEQ ID NO: 977080 - RNA, 22 nt, Human
gcagaggcacagccccagauga

SEQ ID NO: 977081 - RNA, 22 nt, Human
uaaguuaucggaguguguuuca

SEQ ID NO: 977082 - RNA, 22 nt, Human
auaaggcagucccuuaacaagg

SEQ ID NO: 977083 - RNA, 21 nt, Human
gcugcccaacccugcaucucc

SEQ ID NO: 977084 - RNA, 22 nt, Human
aggugcuggagucugggcagga

SEQ ID NO: 977085 - RNA, 22 nt, Human
guuuagaauucuaacuuuaagg

SEQ ID NO: 977086 - RNA, 20 nt, Human
agcauuugaaauaugacuau

SEQ ID NO: 977087 - RNA, 22 nt, Human
uguaauauuguagugacaguac

SEQ ID NO: 977088 - RNA, 22 nt, Human
aaauaggagcuuaagcacuucu

SEQ ID NO: 977089 - RNA, 22 nt, Human
gaggcaguuugccaugccagga

SEQ ID NO: 977090 - RNA, 22 nt, Human
caggcacuguguuaggcacugu

SEQ ID NO: 977091 - RNA, 22 nt, Human
uuuuccucugcagagcaguuag

SEQ ID NO: 977092 - RNA, 22 nt, Human
gggcaugagagggcagcuggca

SEQ ID NO: 977093 - RNA, 22 nt, Human
ccaaggagcugcaggcacuugu

SEQ ID NO: 977094 - RNA, 22 nt, Human
acucugcucccuaagccaugau

SEQ ID NO: 977095 - RNA, 22 nt, Human
ucuggcucuaacuaggcaucag

SEQ ID NO: 977096 - RNA, 22 nt, Human
auuuggcaacauuaauugaauc

SEQ ID NO: 977097 - RNA, 22 nt, Human
gagccugaugaaacaggcagac

SEQ ID NO: 977098 - RNA, 22 nt, Human
agcugccugcuuaugagcucca

SEQ ID NO: 977099 - RNA, 22 nt, Human
cacaagucuguggucuccaaca

SEQ ID NO: 977100 - RNA, 22 nt, Human
cauugcuuugugcauauuuaaa

SEQ ID NO: 977101 - RNA, 22 nt, Human
ugcaggugcguuuucaagccuc

SEQ ID NO: 977102 - RNA, 17 nt, Human
guuugcaugguguuaac

SEQ ID NO: 977103 - RNA, 22 nt, Human
gcagagcuccccaagacaccaa

SEQ ID NO: 977104 - RNA, 17 nt, Human
ggccuguguggcugcag

SEQ ID NO: 977105 - RNA, 22 nt, Human
caggguggaauggaaugcuggc

SEQ ID NO: 977106 - RNA, 22 nt, Human
agccucugacugucagcaaggu

SEQ ID NO: 977107 - RNA, 22 nt, Human
acacaguauuacaauaggugcu

SEQ ID NO: 977108 - RNA, 22 nt, Human
ccugggcauucuuugaguucuc

SEQ ID NO: 977109 - RNA, 22 nt, Human
ugcagucuggauguccucagau

SEQ ID NO: 977110 - RNA, 22 nt, Human
caucaucaaaacaaauggaguc

SEQ ID NO: 977111 - RNA, 22 nt, Human
uagcucuucaaucacugucucc

SEQ ID NO: 977112 - RNA, 22 nt, Human
gagguggguguaucacagguca

SEQ ID NO: 977113 - RNA, 23 nt, Human
gaggcagcuccugcagugcccug

SEQ ID NO: 977114 - RNA, 22 nt, Human
acagaggccucggccugcccag

SEQ ID NO: 977115 - RNA, 15 nt, Human
ugauuuccuacuaac

SEQ ID NO: 977116 - RNA, 22 nt, Human
uauaaaguuucgaaagauguau

SEQ ID NO: 977117 - RNA, 22 nt, Human
uggaaagaaaaacaggccauga

SEQ ID NO: 977118 - RNA, 22 nt, Human
auacuguagaggcauagcuagu

SEQ ID NO: 977119 - RNA, 22 nt, Human
ugcaggugguuuggacacugcu

SEQ ID NO: 977120 - RNA, 20 nt, Human
agagccuugaggaagaugau

SEQ ID NO: 977121 - RNA, 20 nt, Human
gcacugaaauucaauguuug

SEQ ID NO: 977122 - RNA, 22 nt, Human
cuuguggcccauggcuuccugc

SEQ ID NO: 977123 - RNA, 20 nt, Human
ggaccagguggggcgguggc

SEQ ID NO: 977124 - RNA, 22 nt, Human
caaugauucugcaacugugugc

SEQ ID NO: 977125 - RNA, 22 nt, Human
cagaauuuuucgaauguacugu

SEQ ID NO: 977126 - RNA, 22 nt, Human
cauuuguagcuauuuacuguau

SEQ ID NO: 977127 - RNA, 22 nt, Human
gcaagcugcucuuauguggagg

SEQ ID NO: 977128 - RNA, 22 nt, Human
ugaaaguugcacauaagagaau

SEQ ID NO: 977129 - RNA, 22 nt, Human
agacagcuaauaaaugagugug

SEQ ID NO: 977130 - RNA, 22 nt, Human
gaaagaagcuuuagauggcuau

SEQ ID NO: 977131 - RNA, 22 nt, Human
uucuaugccauguucagcuacu

SEQ ID NO: 977132 - RNA, 22 nt, Human
cauugucacccaaagcucauag

SEQ ID NO: 977133 - RNA, 22 nt, Human
gggacagaaggaagugagcaca

SEQ ID NO: 977134 - RNA, 19 nt, Human
gggcuccuugggccucucu

SEQ ID NO: 977135 - RNA, 22 nt, Human
uuauuaugguauuucuuugcag

SEQ ID NO: 977136 - RNA, 22 nt, Human
gcugugcuauaucucugagugu

SEQ ID NO: 977137 - RNA, 22 nt, Human
uugaaaggcacaggcaccuggg

SEQ ID NO: 977138 - RNA, 22 nt, Human
cagaauuugaaguaauauucca

SEQ ID NO: 977139 - RNA, 22 nt, Human
cacucugagccaaaacuaauuc

SEQ ID NO: 977140 - RNA, 22 nt, Human
ggguggcuccuaugggcauagc

SEQ ID NO: 977141 - RNA, 22 nt, Human
caggguccaucuuucaucacug

SEQ ID NO: 977142 - RNA, 22 nt, Human
uucacaggaggguggaugcaug

SEQ ID NO: 977143 - RNA, 22 nt, Human
ggagguggcagagggacauucu

SEQ ID NO: 977144 - RNA, 22 nt, Human
agcaguggagcgagauguuuaa

SEQ ID NO: 977145 - RNA, 20 nt, Human
gccuguccugagugucaugg

SEQ ID NO: 977146 - RNA, 22 nt, Human
cucaaguaagaaacagaauugg

SEQ ID NO: 977147 - RNA, 22 nt, Human
ggcucaggagaggggcuaaaag

SEQ ID NO: 977148 - RNA, 22 nt, Human
accacugcccauggugaaaacu

SEQ ID NO: 977149 - RNA, 18 nt, Human
cugaaggauccaggugua

SEQ ID NO: 977150 - RNA, 22 nt, Human
gcugccacgaucucugcuguag

SEQ ID NO: 977151 - RNA, 22 nt, Human
ugggcugcuguuacaggggcug

SEQ ID NO: 977152 - RNA, 22 nt, Human
auuaggauguuccuaugcacau

SEQ ID NO: 977153 - RNA, 22 nt, Human
cagagggcucuuggcugccugc

SEQ ID NO: 977154 - RNA, 22 nt, Human
cagcuccugggccaucuccuag

SEQ ID NO: 977155 - RNA, 22 nt, Human
ccagcagcccucuuccaagacu

SEQ ID NO: 977156 - RNA, 22 nt, Human
cagagcugugauaaauagauau

SEQ ID NO: 977157 - RNA, 22 nt, Human
ccuccugggcuccugucugcac

SEQ ID NO: 977158 - RNA, 22 nt, Human
cacuucaauuaacuucagcauu

SEQ ID NO: 977159 - RNA, 22 nt, Human
agucccagcuucccccaugcag

SEQ ID NO: 977160 - RNA, 22 nt, Human
gcaggaugggagcuucacuuug

SEQ ID NO: 977161 - RNA, 22 nt, Human
cacacaugagucuccccauugg

SEQ ID NO: 977162 - RNA, 22 nt, Human
ccagcucuuuuggcugagugag

SEQ ID NO: 977163 - RNA, 22 nt, Human
ggggauggugggaaggcaaucu

SEQ ID NO: 977164 - RNA, 22 nt, Human
agcagcuggggccugugacgau

SEQ ID NO: 977165 - RNA, 19 nt, Human
gcacugaagaguuggucac

SEQ ID NO: 977166 - RNA, 22 nt, Human
ucuccaagcagggcugcaaggc

SEQ ID NO: 977167 - RNA, 22 nt, Human
augugaaacugaagcauccaua

SEQ ID NO: 977168 - RNA, 22 nt, Human
gcacagguugcaaaaguucaca

SEQ ID NO: 977169 - RNA, 22 nt, Human
ugccuugcgguguauuucuggg

SEQ ID NO: 977170 - RNA, 22 nt, Human
agcugagcacauucaaacaggu

SEQ ID NO: 977171 - RNA, 20 nt, Human
cagaaggucuaagcuuuaga

SEQ ID NO: 977172 - RNA, 22 nt, Human
cagccccucacagagcuguccu

SEQ ID NO: 977173 - RNA, 22 nt, Human
cagcucugugcaggccugggga

SEQ ID NO: 977174 - RNA, 22 nt, Human
acccaggacuuggcaaccucau

SEQ ID NO: 977175 - RNA, 22 nt, Human
cuccuggcacugucuugaccca

SEQ ID NO: 977176 - RNA, 22 nt, Human
aguacagaccugucucuuccug

SEQ ID NO: 977177 - RNA, 22 nt, Human
uucuuaaagaggcaaaacacag

SEQ ID NO: 977178 - RNA, 22 nt, Human
ucccuggcuguguucaggugcg

SEQ ID NO: 977179 - RNA, 22 nt, Human
cccaggaguaagugacauuguu

SEQ ID NO: 977180 - RNA, 22 nt, Human
uccagggccaagucauggaacc

SEQ ID NO: 977181 - RNA, 22 nt, Human
ggcacugggcaccggcugaggg

SEQ ID NO: 977182 - RNA, 22 nt, Human
auuuuuccaugauacuuaucug

SEQ ID NO: 977183 - RNA, 22 nt, Human
ugccuguguccccuucuuggca

SEQ ID NO: 977184 - RNA, 22 nt, Human
agaugagggguagaaaggacuu

SEQ ID NO: 977185 - RNA, 22 nt, Human
cuguacauauacauuuuuuucc

SEQ ID NO: 977186 - RNA, 22 nt, Human
ucuccuggguaaaaggguugau

SEQ ID NO: 977187 - RNA, 22 nt, Human
gcuggcagucccaucagcuggg

SEQ ID NO: 977188 - RNA, 22 nt, Human
uuucacaagacagcuacuguug

SEQ ID NO: 977189 - RNA, 22 nt, Human
agaaguauaaagaauguuuaug

SEQ ID NO: 977190 - RNA, 22 nt, Human
gccuucagcggccgcucgcugc

SEQ ID NO: 977191 - RNA, 22 nt, Human
ggccugcugcuaugacuuccug

SEQ ID NO: 977192 - RNA, 22 nt, Human
ugggugcaugugagcacgugca

SEQ ID NO: 977193 - RNA, 22 nt, Human
cagcagcuggugagacacagcc

SEQ ID NO: 977194 - RNA, 22 nt, Human
gagcugagccuggguggaccgc

SEQ ID NO: 977195 - RNA, 22 nt, Human
cccuggagggauuucucaauca

SEQ ID NO: 977196 - RNA, 22 nt, Human
guccucagggaauguggcgggu

SEQ ID NO: 977197 - RNA, 22 nt, Human
aguguacacuaaaugaauacaa

SEQ ID NO: 977198 - RNA, 22 nt, Human
aggcagcccugugcuggaugcu

SEQ ID NO: 977199 - RNA, 20 nt, Human
agccagaagaaggcuggaga

SEQ ID NO: 977200 - RNA, 23 nt, Human
uccagcagccaagaaggguagaa

SEQ ID NO: 977201 - RNA, 22 nt, Human
cagacacagcaauucuguguug

SEQ ID NO: 977202 - RNA, 22 nt, Human
cugccuggaccggcagcccucc

SEQ ID NO: 977203 - RNA, 22 nt, Human
gagaaaugcaugcaugucauca

SEQ ID NO: 977204 - RNA, 22 nt, Human
uggcugaauaaaauaugguguu

SEQ ID NO: 977205 - RNA, 22 nt, Human
aguaacaagugccaacguuaga

SEQ ID NO: 977206 - RNA, 22 nt, Human
ugcagcucauugguguccuggu

SEQ ID NO: 977207 - RNA, 22 nt, Human
gcagcugcuggaaguuccugcc

SEQ ID NO: 977208 - RNA, 22 nt, Human
caacugagcaguagcgucugga

SEQ ID NO: 977209 - RNA, 22 nt, Human
aggcacugaagaacucuuuuug

SEQ ID NO: 977210 - RNA, 22 nt, Human
uacaguaaccuuauuugucauu

SEQ ID NO: 977211 - RNA, 22 nt, Human
cugcucuguucccccaucaucu

SEQ ID NO: 977212 - RNA, 22 nt, Human
ccaaagugcugagauuacaggu

SEQ ID NO: 977213 - RNA, 21 nt, Human
aacauuucaggauccaaauug

SEQ ID NO: 977214 - RNA, 22 nt, Human
ggcaggagcucuccaguuugcc

SEQ ID NO: 977215 - RNA, 22 nt, Human
gcaguggcaugaugugggcuca

SEQ ID NO: 977216 - RNA, 17 nt, Human
uagcuguguuucagcua

SEQ ID NO: 977217 - RNA, 20 nt, Human
uauuuguauuugggaaaguu

SEQ ID NO: 977218 - RNA, 22 nt, Human
gcugccagcucacucuccugag

SEQ ID NO: 977219 - RNA, 22 nt, Human
auucacaaagaagggaaguaca

SEQ ID NO: 977220 - RNA, 22 nt, Human
gggcugcugcugccagcgacac

SEQ ID NO: 977221 - RNA, 22 nt, Human
gacucugcuaggaaaaucucag

SEQ ID NO: 977222 - RNA, 22 nt, Human
guuuccaaccccaccaaagugc

SEQ ID NO: 977223 - RNA, 19 nt, Human
uccuucagucagaucuggg

SEQ ID NO: 977224 - RNA, 22 nt, Human
agugcagcaugcuggggaggcu

SEQ ID NO: 977225 - RNA, 22 nt, Human
aauuuccaaauuucugucacac

SEQ ID NO: 977226 - RNA, 22 nt, Human
ggugggcagcucuuggcaggca

SEQ ID NO: 977227 - RNA, 21 nt, Human
ggucagggggugccuccaggu

SEQ ID NO: 977228 - RNA, 22 nt, Human
ucuuuuggaaaugaugugcagg

SEQ ID NO: 977229 - RNA, 22 nt, Human
ggagccaguauuuaguggucuu

SEQ ID NO: 977230 - RNA, 22 nt, Human
gagggcugccacguugggcgag

SEQ ID NO: 977231 - RNA, 22 nt, Human
ggcagcuggggcagugcccugu

SEQ ID NO: 977232 - RNA, 22 nt, Human
ccagcucugcauguuucccuug

SEQ ID NO: 977233 - RNA, 19 nt, Human
gcuggggccugaccagaca

SEQ ID NO: 977234 - RNA, 17 nt, Human
ugaaacaccaagacugu

SEQ ID NO: 977235 - RNA, 22 nt, Human
aaaggccaauaaagacaagcug

SEQ ID NO: 977236 - RNA, 22 nt, Human
ucucugggaaugggccugggua

SEQ ID NO: 977237 - RNA, 22 nt, Human
acucugcucuguauuucacugu

SEQ ID NO: 977238 - RNA, 19 nt, Human
augauacaggugaaaauug

SEQ ID NO: 977239 - RNA, 22 nt, Human
acugcuuuaucugagaaguccu

SEQ ID NO: 977240 - RNA, 21 nt, Human
cagcaaaucauugggcagacu

SEQ ID NO: 977241 - RNA, 22 nt, Human
uuccuccacgugacaggagcca

SEQ ID NO: 977242 - RNA, 22 nt, Human
uggaggggcaauggagcgcgga

SEQ ID NO: 977243 - RNA, 22 nt, Human
uggguaaacugggucuggagag

SEQ ID NO: 977244 - RNA, 22 nt, Human
gacauguugaagaauauuugga

SEQ ID NO: 977245 - RNA, 22 nt, Human
uaaggcacuucaauguuuagaa

SEQ ID NO: 977246 - RNA, 22 nt, Human
acagggcccuugccagcacaag

SEQ ID NO: 977247 - RNA, 22 nt, Human
gcuccucugucaaaugagagug

SEQ ID NO: 977248 - RNA, 22 nt, Human
gccaggcagccacccucugcga

SEQ ID NO: 977249 - RNA, 22 nt, Human
cagcagaggugguucacauugu

SEQ ID NO: 977250 - RNA, 21 nt, Human
gcacagugccaggcacacagu

SEQ ID NO: 977251 - RNA, 22 nt, Human
accuguuuuccuaucuagauug

SEQ ID NO: 977252 - RNA, 22 nt, Human
cagacagggaccucgcuccaga

SEQ ID NO: 977253 - RNA, 20 nt, Human
ccuggagccuggaaggaguc

SEQ ID NO: 977254 - RNA, 22 nt, Human
gaaaucugcggugaggccugag

SEQ ID NO: 977255 - RNA, 22 nt, Human
gccauccucugagcacuaggca

SEQ ID NO: 977256 - RNA, 22 nt, Human
uagugcuuuaaguuuacagaga

SEQ ID NO: 977257 - RNA, 22 nt, Human
uauuuugucuucugcucaucac

SEQ ID NO: 977258 - RNA, 22 nt, Human
ucccagggucaguggugaggcc

SEQ ID NO: 977259 - RNA, 22 nt, Human
aaauguguuugauaggaauauu

SEQ ID NO: 977260 - RNA, 22 nt, Human
ucuuuacaguccucugucaauc

SEQ ID NO: 977261 - RNA, 22 nt, Human
gggcuugcugauuugggcagga

SEQ ID NO: 977262 - RNA, 22 nt, Human
gagcuggcuaauacugacuuau

SEQ ID NO: 977263 - RNA, 22 nt, Human
auacagaaaaugaugcagaguu

SEQ ID NO: 977264 - RNA, 19 nt, Human
ucacaggcaucuccccaga

SEQ ID NO: 977265 - RNA, 22 nt, Human
cagcugccccauaaaucacagu

SEQ ID NO: 977266 - RNA, 22 nt, Human
ucacuugccuagcccaguucag

SEQ ID NO: 977267 - RNA, 22 nt, Human
ucuucacaggagccugccugcc

SEQ ID NO: 977268 - RNA, 22 nt, Human
gccaggagugucccacucauuu

SEQ ID NO: 977269 - RNA, 22 nt, Human
acuuccuggcguagcugacauu

SEQ ID NO: 977270 - RNA, 22 nt, Human
uggucaacaggcagggaugaaa

SEQ ID NO: 977271 - RNA, 22 nt, Human
uuucagcugguaaaggaguagc

SEQ ID NO: 977272 - RNA, 22 nt, Human
cacaggcucuucucacuugauu

SEQ ID NO: 977273 - RNA, 22 nt, Human
uauaugcaugcccauguauaca

SEQ ID NO: 977274 - RNA, 22 nt, Human
ucccaggauuuuaggcucucag

SEQ ID NO: 977275 - RNA, 22 nt, Human
gccccagccaaggugacacgaa

SEQ ID NO: 977276 - RNA, 22 nt, Human
auguagcagauauuugugcaca

SEQ ID NO: 977277 - RNA, 21 nt, Human
uaauaauuccacuacagagua

SEQ ID NO: 977278 - RNA, 22 nt, Human
auuucagauucagaaauguagg

SEQ ID NO: 977279 - RNA, 22 nt, Human
uaaagguaguuuuaaaggugcu

SEQ ID NO: 977280 - RNA, 22 nt, Human
uuuucuuacugucugugauccu

SEQ ID NO: 977281 - RNA, 23 nt, Human
gugugccaagcacugugccagga

SEQ ID NO: 977282 - RNA, 23 nt, Human
gccucugcagccuaguuaguguc

SEQ ID NO: 977283 - RNA, 22 nt, Human
acagagcauuugggacagagag

SEQ ID NO: 977284 - RNA, 22 nt, Human
uuauuagagauauuugguuagg

SEQ ID NO: 977285 - RNA, 22 nt, Human
guggagccaggggcuguaggua

SEQ ID NO: 977286 - RNA, 22 nt, Human
accaggaggcuacacuguccca

SEQ ID NO: 977287 - RNA, 22 nt, Human
cuccagggagcuguggagguuu

SEQ ID NO: 977288 - RNA, 22 nt, Human
cuggccagaguuggagggugug

SEQ ID NO: 977289 - RNA, 22 nt, Human
cugagcugaaacuugagaggcu

SEQ ID NO: 977290 - RNA, 22 nt, Human
ugagcccuaagggucaagcagg

SEQ ID NO: 977291 - RNA, 22 nt, Human
uuugaaguguuauuucuaucac

SEQ ID NO: 977292 - RNA, 22 nt, Human
ccugggcuuucaaaaccagccu

SEQ ID NO: 977293 - RNA, 22 nt, Human
cagggguguuuuuggccaggag

SEQ ID NO: 977294 - RNA, 22 nt, Human
cauauucuuuaagcaaugcucu

SEQ ID NO: 977295 - RNA, 18 nt, Human
gugagcagagagcaucac

SEQ ID NO: 977296 - RNA, 22 nt, Human
aggcccugagcauccgagggca

SEQ ID NO: 977297 - RNA, 22 nt, Human
ucuucauuuuauagcaucugug

SEQ ID NO: 977298 - RNA, 22 nt, Human
auagaauaaggcacagauucuu

SEQ ID NO: 977299 - RNA, 21 nt, Human
cauuucuauugaugagaaaag

SEQ ID NO: 977300 - RNA, 23 nt, Human
aggucagcaggcaaggaaauggc

SEQ ID NO: 977301 - RNA, 22 nt, Human
cagggagaucuuggcuccuggu

SEQ ID NO: 977302 - RNA, 22 nt, Human
gcugucugcaucucuagagcuu

SEQ ID NO: 977303 - RNA, 22 nt, Human
uuguuacagcagugauuucaga

SEQ ID NO: 977304 - RNA, 22 nt, Human
uuccauauuuguguggcaaaag

SEQ ID NO: 977305 - RNA, 22 nt, Human
cuuuguaagucuuucuccaaga

SEQ ID NO: 977306 - RNA, 22 nt, Human
ggccagggccuggggacugucc

SEQ ID NO: 977307 - RNA, 22 nt, Human
acauguggucaaucuguguagg

SEQ ID NO: 977308 - RNA, 22 nt, Human
aggccugagccccagguuuguu

SEQ ID NO: 977309 - RNA, 22 nt, Human
uaauuauucuagucacauagca

SEQ ID NO: 977310 - RNA, 20 nt, Human
uacuuaggcuuguuuuggcc

SEQ ID NO: 977311 - RNA, 19 nt, Human
gugauuucuuuccacaagc

SEQ ID NO: 977312 - RNA, 22 nt, Human
aaaugcagguaguauuuauuuu

SEQ ID NO: 977313 - RNA, 22 nt, Human
ugaaagaacuagcaucuucaag

SEQ ID NO: 977314 - RNA, 22 nt, Human
aggcagccaucugcaggaagga

SEQ ID NO: 977315 - RNA, 22 nt, Human
agcagugggugacagagcugag

SEQ ID NO: 977316 - RNA, 22 nt, Human
uuaagaauggaaugaggaauuu

SEQ ID NO: 977317 - RNA, 22 nt, Human
caaggccacguucugcaugcgg

SEQ ID NO: 977318 - RNA, 22 nt, Human
agacauaagugcuaugacauug

SEQ ID NO: 977319 - RNA, 22 nt, Human
gauuucaaagguucugcaugcc

SEQ ID NO: 977320 - RNA, 22 nt, Human
ccuguucaaguugcagggcugg

SEQ ID NO: 977321 - RNA, 18 nt, Human
acuaugcugaauaaaugg

SEQ ID NO: 977322 - RNA, 22 nt, Human
gggcucugggaugcucuuagag

SEQ ID NO: 977323 - RNA, 22 nt, Human
guggcuucugcggugugcgcag

SEQ ID NO: 977324 - RNA, 22 nt, Human
caggguagacaguaggugucug

SEQ ID NO: 977325 - RNA, 23 nt, Human
cauguacacacagcuguacagug

SEQ ID NO: 977326 - RNA, 22 nt, Human
uuccucagcuggccugauuggg

SEQ ID NO: 977327 - RNA, 20 nt, Human
gccugcagagaaggucagag

SEQ ID NO: 977328 - RNA, 21 nt, Human
agcaccuuacagcuauaaugg

SEQ ID NO: 977329 - RNA, 22 nt, Human
caaaagcaguucuaucugaguu

SEQ ID NO: 977330 - RNA, 22 nt, Human
gccuggagggauagaaugcaag

SEQ ID NO: 977331 - RNA, 22 nt, Human
agagccugcagcugugaagaaa

SEQ ID NO: 977332 - RNA, 22 nt, Human
uaugcacauuaucuaauccauu

SEQ ID NO: 977333 - RNA, 22 nt, Human
auauguuuugugcuucauuggu

SEQ ID NO: 977334 - RNA, 22 nt, Human
cuacugaguccuucagcugcca

SEQ ID NO: 977335 - RNA, 17 nt, Human
uguuccauuugaccacc

SEQ ID NO: 977336 - RNA, 22 nt, Human
agugcuuuagagaaauggugcu

SEQ ID NO: 977337 - RNA, 22 nt, Human
auagauguucaaucagauauuu

SEQ ID NO: 977338 - RNA, 22 nt, Human
ucaugucaguuucuucuauaaa

SEQ ID NO: 977339 - RNA, 22 nt, Human
gcacagaacagagaaauagcca

SEQ ID NO: 977340 - RNA, 22 nt, Human
acauucuauuucaucaugucua

SEQ ID NO: 977341 - RNA, 20 nt, Human
aagagcugacucacaguggu

SEQ ID NO: 977342 - RNA, 22 nt, Human
ugggccacaagccaugggacca

SEQ ID NO: 977343 - RNA, 22 nt, Human
caggagccccaggcugacaaua

SEQ ID NO: 977344 - RNA, 22 nt, Human
agcuucucaggagucugaggca

SEQ ID NO: 977345 - RNA, 22 nt, Human
ccuuccaggugcaggcaagccu

SEQ ID NO: 977346 - RNA, 22 nt, Human
cagccuccugggacacucaccg

SEQ ID NO: 977347 - RNA, 22 nt, Human
aggcucugggaagcagugaguu

SEQ ID NO: 977348 - RNA, 22 nt, Human
agggaagaagcugguaguaggu

SEQ ID NO: 977349 - RNA, 22 nt, Human
ucccucagaaauucucucugaa

SEQ ID NO: 977350 - RNA, 22 nt, Human
uggcuggacagugggcagugga

SEQ ID NO: 977351 - RNA, 22 nt, Human
ucuggccaggauggcaagacca

SEQ ID NO: 977352 - RNA, 22 nt, Human
ucccacacagcccgcucaccgg

SEQ ID NO: 977353 - RNA, 22 nt, Human
ccuuuuauacucagugauauca

SEQ ID NO: 977354 - RNA, 21 nt, Human
acucugcugcgggcuuggccu

SEQ ID NO: 977355 - RNA, 22 nt, Human
ugcacauuaguguuugagaugc

SEQ ID NO: 977356 - RNA, 22 nt, Human
gugucccaaucuacuuuucccu

SEQ ID NO: 977357 - RNA, 22 nt, Human
acagccugagaguggagcuggc

SEQ ID NO: 977358 - RNA, 22 nt, Human
cacagagagcuacgugcagcgu

SEQ ID NO: 977359 - RNA, 22 nt, Human
uugcugaaaucuaugacauccu

SEQ ID NO: 977360 - RNA, 22 nt, Human
ugaggcaggagaaucacaugaa

SEQ ID NO: 977361 - RNA, 22 nt, Human
gucuggaguggggccugagaau

SEQ ID NO: 977362 - RNA, 22 nt, Human
gggccuggggacaccaccauga

SEQ ID NO: 977363 - RNA, 21 nt, Human
agucuguuaggaugacucuga

SEQ ID NO: 977364 - RNA, 22 nt, Human
ccucccacauugaggacaugcu

SEQ ID NO: 977365 - RNA, 22 nt, Human
ggguggaggagaacaggcccca

SEQ ID NO: 977366 - RNA, 22 nt, Human
ggccauggugguuugagcaccu

SEQ ID NO: 977367 - RNA, 20 nt, Human
auguagaugaaagcaaaggc

SEQ ID NO: 977368 - RNA, 22 nt, Human
auguggcauucuuggucauuuc

SEQ ID NO: 977369 - RNA, 22 nt, Human
gggcaguggguggcugcagccu

SEQ ID NO: 977370 - RNA, 22 nt, Human
caagagcucccagaccugggca

SEQ ID NO: 977371 - RNA, 22 nt, Human
cagcugugcuguauuaagcucu

SEQ ID NO: 977372 - RNA, 22 nt, Human
cucaggcccacagcagacccac

SEQ ID NO: 977373 - RNA, 22 nt, Human
agaggagguggugaugcuuuaa

SEQ ID NO: 977374 - RNA, 22 nt, Human
cucuggagcaccgggcuaucca

SEQ ID NO: 977375 - RNA, 22 nt, Human
ccagguggaaggucugugcucu

SEQ ID NO: 977376 - RNA, 22 nt, Human
ggggcagagaauaaaaaccuaa

SEQ ID NO: 977377 - RNA, 22 nt, Human
cuguguggccucaagccagccu

SEQ ID NO: 977378 - RNA, 22 nt, Human
cucugcauuuuaacagaugauu

SEQ ID NO: 977379 - RNA, 22 nt, Human
ccaggagucuggaugagguguc

SEQ ID NO: 977380 - RNA, 22 nt, Human
uagucucuggagacucuagggg

SEQ ID NO: 977381 - RNA, 22 nt, Human
ucuuugaauccuuuacaucuga

SEQ ID NO: 977382 - RNA, 22 nt, Human
ccuuccagaguucagucugccc

SEQ ID NO: 977383 - RNA, 22 nt, Human
ugcccaggguggagugcagcgg

SEQ ID NO: 977384 - RNA, 22 nt, Human
cugggccugggaggccaggucu

SEQ ID NO: 977385 - RNA, 22 nt, Human
uggaaggcaacggagugagcug

SEQ ID NO: 977386 - RNA, 22 nt, Human
acaggcagcgucauugcugcuc

SEQ ID NO: 977387 - RNA, 22 nt, Human
ucagagugugagacauauugga

SEQ ID NO: 977388 - RNA, 22 nt, Human
ugaggggagaagcagcagccug

SEQ ID NO: 977389 - RNA, 17 nt, Human
uggcuucccugggccac

SEQ ID NO: 977390 - RNA, 22 nt, Human
ugcagaagaauguaggcauaag

SEQ ID NO: 977391 - RNA, 23 nt, Human
auguauuuaaauuucagugauga

SEQ ID NO: 977392 - RNA, 22 nt, Human
uugcauugaucccagcuugggc

SEQ ID NO: 977393 - RNA, 22 nt, Human
agccaaggacacggagccuccu

SEQ ID NO: 977394 - RNA, 20 nt, Human
uggcccaguggggcagggug

SEQ ID NO: 977395 - RNA, 22 nt, Human
cugugucuugaguaauucggug

SEQ ID NO: 977396 - RNA, 22 nt, Human
aacaugucuggguauucacaag

SEQ ID NO: 977397 - RNA, 22 nt, Human
cugcgcagggguggcgccagaa

SEQ ID NO: 977398 - RNA, 22 nt, Human
gcucagggaacuuuuugcaggc

SEQ ID NO: 977399 - RNA, 22 nt, Human
uauauucaaugauuaguaucag

SEQ ID NO: 977400 - RNA, 22 nt, Human
ucugcugcugagcacacuccua

SEQ ID NO: 977401 - RNA, 20 nt, Human
ccagguggugccuggagagg

SEQ ID NO: 977402 - RNA, 22 nt, Human
acaggacuguggaaggaucucu

SEQ ID NO: 977403 - RNA, 22 nt, Human
agcuuguagaaggccacgagca

SEQ ID NO: 977404 - RNA, 22 nt, Human
ccuucugcucccuggccagggc

SEQ ID NO: 977405 - RNA, 22 nt, Human
augugucugauggcccugaauu

SEQ ID NO: 977406 - RNA, 22 nt, Human
aggauuucugugccuggaaaau

SEQ ID NO: 977407 - RNA, 22 nt, Human
acuccagggcuccaucccuugu

SEQ ID NO: 977408 - RNA, 22 nt, Human
uggcucugggcaccguguccac

SEQ ID NO: 977409 - RNA, 22 nt, Human
ugagcuuacuucuguacacaga

SEQ ID NO: 977410 - RNA, 22 nt, Human
ucacaggaaccaucagagaaau

SEQ ID NO: 977411 - RNA, 22 nt, Human
cagacccucgggugaguuggcc

SEQ ID NO: 977412 - RNA, 22 nt, Human
cuguguccugcgucaagccaau

SEQ ID NO: 977413 - RNA, 20 nt, Human
gcauccagacacccagcugc

SEQ ID NO: 977414 - RNA, 22 nt, Human
ugcagccaucgcagagucugua

SEQ ID NO: 977415 - RNA, 22 nt, Human
ucauugaauauggggccauaca

SEQ ID NO: 977416 - RNA, 23 nt, Human
ucagucuucccugucaguaauag

SEQ ID NO: 977417 - RNA, 22 nt, Human
gugcagcagggggaagacagug

SEQ ID NO: 977418 - RNA, 18 nt, Human
ucauuagggauugcaaag

SEQ ID NO: 977419 - RNA, 22 nt, Human
uucauugugaacacauucugcc

SEQ ID NO: 977420 - RNA, 22 nt, Human
gcaggcaguuugcuuuucccuc

SEQ ID NO: 977421 - RNA, 22 nt, Human
uacauuccacuagugacuggcg

SEQ ID NO: 977422 - RNA, 22 nt, Human
auguguacaaccaagcacuaaa

SEQ ID NO: 977423 - RNA, 22 nt, Human
agggcaguucaacuucauagug

SEQ ID NO: 977424 - RNA, 22 nt, Human
aucugacaaccuauugacuuga

SEQ ID NO: 977425 - RNA, 22 nt, Human
gagaaggggugauguggguaau

SEQ ID NO: 977426 - RNA, 22 nt, Human
aacauuuaugauugagguaaau

SEQ ID NO: 977427 - RNA, 22 nt, Human
caggguggcacaucacagcauu

SEQ ID NO: 977428 - RNA, 22 nt, Human
ccacccuggacaggccucugag

SEQ ID NO: 977429 - RNA, 22 nt, Human
acaauucugaugguuucccagu

SEQ ID NO: 977430 - RNA, 22 nt, Human
acagauauaugauuguguaaau

SEQ ID NO: 977431 - RNA, 22 nt, Human
gccccuggcuggccagcuccuc

SEQ ID NO: 977432 - RNA, 22 nt, Human
uggccugguuguugcugccguu

SEQ ID NO: 977433 - RNA, 22 nt, Human
ggcuggagacaacguccugccc

SEQ ID NO: 977434 - RNA, 22 nt, Human
aguggacucuucccagugcuug

SEQ ID NO: 977435 - RNA, 22 nt, Human
ucccagaggcaguugguaacuu

SEQ ID NO: 977436 - RNA, 22 nt, Human
cugcugugccucuuuucacgug

SEQ ID NO: 977437 - RNA, 22 nt, Human
cagggcuccccgcaccgcagcc

SEQ ID NO: 977438 - RNA, 22 nt, Human
uggcacuggaaucguagccuug

SEQ ID NO: 977439 - RNA, 22 nt, Human
ucacaucuuauuagaguaucuc

SEQ ID NO: 977440 - RNA, 22 nt, Human
gggcagcuggauaguuuuaaau

SEQ ID NO: 977441 - RNA, 22 nt, Human
aggccucacucucagagcuucu

SEQ ID NO: 977442 - RNA, 22 nt, Human
ugugucaagacauuuagucauu

SEQ ID NO: 977443 - RNA, 22 nt, Human
cuuacauugucuuaguuuucaa

SEQ ID NO: 977444 - RNA, 22 nt, Human
guuuucaaggggauuuaacuga

SEQ ID NO: 977445 - RNA, 22 nt, Human
gugcugucguggaacugggcug

SEQ ID NO: 977446 - RNA, 22 nt, Human
acugucuuccaggucuggaggu

SEQ ID NO: 977447 - RNA, 22 nt, Human
uucuucuugucugcccucacau

SEQ ID NO: 977448 - RNA, 22 nt, Human
ugggcccugacuucaagcaucc

SEQ ID NO: 977449 - RNA, 22 nt, Human
ucacuaaguuacauuuaguauu

SEQ ID NO: 977450 - RNA, 22 nt, Human
cuguaaaacugcuuaaguaugc

SEQ ID NO: 977451 - RNA, 22 nt, Human
agcauugccugccuauugcuaa

SEQ ID NO: 977452 - RNA, 22 nt, Human
aaugauguuuuuaaagaacaua

SEQ ID NO: 977453 - RNA, 22 nt, Human
aagaggucauaccagauaaggg

SEQ ID NO: 977454 - RNA, 22 nt, Human
caggggacaguaugguggauga

SEQ ID NO: 977455 - RNA, 22 nt, Human
agccagcuggugggucagcugg

SEQ ID NO: 977456 - RNA, 22 nt, Human
uggagccagcccaggccccucu

SEQ ID NO: 977457 - RNA, 22 nt, Human
uccagugguaguaaagaggucu

SEQ ID NO: 977458 - RNA, 22 nt, Human
cugcuguguggugaaacucagu

SEQ ID NO: 977459 - RNA, 22 nt, Human
ugggcagauguccucugaagug

SEQ ID NO: 977460 - RNA, 22 nt, Human
aaaggccacacagagcagggag

SEQ ID NO: 977461 - RNA, 22 nt, Human
aucuuucuccauauacaucuuu

SEQ ID NO: 977462 - RNA, 22 nt, Human
gcugcucuugaggggcucacug

SEQ ID NO: 977463 - RNA, 22 nt, Human
auucuuauuauaguaaaacagu

SEQ ID NO: 977464 - RNA, 22 nt, Human
uagaaaguaaaucaguuuuauu

SEQ ID NO: 977465 - RNA, 22 nt, Human
agggagaacaguugcagcagac

SEQ ID NO: 977466 - RNA, 22 nt, Human
cauugcacuucugcuuuuccuc

SEQ ID NO: 977467 - RNA, 22 nt, Human
gguucacacuaagcuuaagugg

SEQ ID NO: 977468 - RNA, 22 nt, Human
cuggcccaggaagacguguccc

SEQ ID NO: 977469 - RNA, 22 nt, Human
cgggcagauugggaagguucau

SEQ ID NO: 977470 - RNA, 22 nt, Human
uucuggagagaaaccuuacaaa

SEQ ID NO: 977471 - RNA, 22 nt, Human
uccuggagcuuccuucauggua

SEQ ID NO: 977472 - RNA, 19 nt, Human
uuugcagugguuccuuugu

SEQ ID NO: 977473 - RNA, 20 nt, Human
cagcuuggaugagaggcuga

SEQ ID NO: 977474 - RNA, 22 nt, Human
accugagccuagggagguugag

SEQ ID NO: 977475 - RNA, 22 nt, Human
ucauggauggccgggaggugau

SEQ ID NO: 977476 - RNA, 22 nt, Human
cugaagaugucugagaugcuca

SEQ ID NO: 977477 - RNA, 22 nt, Human
cccaggaaaagcagugccagca

SEQ ID NO: 977478 - RNA, 22 nt, Human
gagauggggucagcugggacau

SEQ ID NO: 977479 - RNA, 22 nt, Human
aauguguagcauuuaaugcagu

SEQ ID NO: 977480 - RNA, 21 nt, Human
caugaagccgguucccuguuu

SEQ ID NO: 977481 - RNA, 22 nt, Human
acaguuaucuuugaaauagaga

SEQ ID NO: 977482 - RNA, 22 nt, Human
acauuaucccuggcacaacugc

SEQ ID NO: 977483 - RNA, 22 nt, Human
auacaacagaaaaugauuauuc

SEQ ID NO: 977484 - RNA, 22 nt, Human
acccugagggguauagcagaag

SEQ ID NO: 977485 - RNA, 22 nt, Human
acuccagggcugaacgaggccc

SEQ ID NO: 977486 - RNA, 22 nt, Human
uaauacuuaccuugcagagucu

SEQ ID NO: 977487 - RNA, 22 nt, Human
cauuuacauuuaagguuaauau

SEQ ID NO: 977488 - RNA, 22 nt, Human
cgagaguggacagggcgcagcu

SEQ ID NO: 977489 - RNA, 22 nt, Human
acuccagguuuuuucacugaag

SEQ ID NO: 977490 - RNA, 22 nt, Human
cuguggcugcagccuugguccu

SEQ ID NO: 977491 - RNA, 22 nt, Human
ucuuuuaaaagcccugcugucu

SEQ ID NO: 977492 - RNA, 22 nt, Human
cuggccucaccucagacuuacu

SEQ ID NO: 977493 - RNA, 22 nt, Human
uggauaaacucacuguaaguug

SEQ ID NO: 977494 - RNA, 22 nt, Human
cacugcuuauaaauucuaggca

SEQ ID NO: 977495 - RNA, 22 nt, Human
cagcagaggcacgucugugaau

SEQ ID NO: 977496 - RNA, 22 nt, Human
gccuugccucagccauggaaac

SEQ ID NO: 977497 - RNA, 22 nt, Human
cuggcucccucgcugaggugcu

SEQ ID NO: 977498 - RNA, 22 nt, Human
ucugucugcaccuaagcacagu

SEQ ID NO: 977499 - RNA, 22 nt, Human
gaggccaggggccuggagauga

SEQ ID NO: 977500 - RNA, 23 nt, Human
uggcuggcagaaacugaagcaug

SEQ ID NO: 977501 - RNA, 22 nt, Human
ucaggaggccaccaggaccugu

SEQ ID NO: 977502 - RNA, 22 nt, Human
cuggccuuuuguuucuggagaa

SEQ ID NO: 977503 - RNA, 22 nt, Human
aagauuauggcagauaacaauu

SEQ ID NO: 977504 - RNA, 22 nt, Human
agaaaagguugaaaguaggauu

SEQ ID NO: 977505 - RNA, 22 nt, Human
ucucagagauguuagggaagag

SEQ ID NO: 977506 - RNA, 22 nt, Human
ggcuggcacagagggcuggugu

SEQ ID NO: 977507 - RNA, 21 nt, Human
gacucugcaccaaauuaagcc

SEQ ID NO: 977508 - RNA, 22 nt, Human
uggaaauguauuugggcaugcc

SEQ ID NO: 977509 - RNA, 22 nt, Human
uggcagccacaucucguggauu

SEQ ID NO: 977510 - RNA, 22 nt, Human
cuggggcauugggagaggccug

SEQ ID NO: 977511 - RNA, 22 nt, Human
ucuuugaauuucugacugucuu

SEQ ID NO: 977512 - RNA, 22 nt, Human
uguaaucauuacaguacaugga

SEQ ID NO: 977513 - RNA, 22 nt, Human
gcugucuuccuugcuccaaggg

SEQ ID NO: 977514 - RNA, 22 nt, Human
cagaggcugggaccucaggcau

SEQ ID NO: 977515 - RNA, 22 nt, Human
ccccagccuuccaugggaauug

SEQ ID NO: 977516 - RNA, 22 nt, Human
aggaggggcauagaaauguaau

SEQ ID NO: 977517 - RNA, 22 nt, Human
cugggagagaagcgaagcuggg

SEQ ID NO: 977518 - RNA, 22 nt, Human
auuuccuagccucucuugcagu

SEQ ID NO: 977519 - RNA, 22 nt, Human
guucaaagcuccugguacagua

SEQ ID NO: 977520 - RNA, 22 nt, Human
cucagaguggggcucccugagg

SEQ ID NO: 977521 - RNA, 22 nt, Human
uucaugugauaaaugugugacu

SEQ ID NO: 977522 - RNA, 22 nt, Human
cagcuugcuaauuuugacuuca

SEQ ID NO: 977523 - RNA, 22 nt, Human
aagucaaaccuugcucacagga

SEQ ID NO: 977524 - RNA, 22 nt, Human
agggcaaguugagugugcgugg

SEQ ID NO: 977525 - RNA, 23 nt, Human
uugcauguagcccaugaguaacu

SEQ ID NO: 977526 - RNA, 22 nt, Human
gcagccagccccucugaccucu

SEQ ID NO: 977527 - RNA, 22 nt, Human
ccuggcagucaggggaguccuu

SEQ ID NO: 977528 - RNA, 22 nt, Human
aggcacugaccugcuuccuuga

SEQ ID NO: 977529 - RNA, 22 nt, Human
uuuaacagaugcuaugucuacc

SEQ ID NO: 977530 - RNA, 20 nt, Human
ugugggcccuuggcuggcaa

SEQ ID NO: 977531 - RNA, 22 nt, Human
aggaagcucggagagggcaaau

SEQ ID NO: 977532 - RNA, 22 nt, Human
augaaacaugagaaauggagag

SEQ ID NO: 977533 - RNA, 19 nt, Human
uccaccuuucuucauuugg

SEQ ID NO: 977534 - RNA, 22 nt, Human
cuggcucaccuccgcuccagca

SEQ ID NO: 977535 - RNA, 22 nt, Human
acccaggacacagagaugaccc

SEQ ID NO: 977536 - RNA, 22 nt, Human
ucaguggagcuaagcaugagau

SEQ ID NO: 977537 - RNA, 22 nt, Human
ccaaaguccuuucuccaccugc

SEQ ID NO: 977538 - RNA, 20 nt, Human
ucugccacugcacucugccc

SEQ ID NO: 977539 - RNA, 22 nt, Human
ucucccacuggccuuguaugau

SEQ ID NO: 977540 - RNA, 22 nt, Human
gugacucacacaggccugggcu

SEQ ID NO: 977541 - RNA, 22 nt, Human
aggccugucuggggcucagcca

SEQ ID NO: 977542 - RNA, 22 nt, Human
gcccaggccggagagcagugcu

SEQ ID NO: 977543 - RNA, 22 nt, Human
guucuucaggccauccucccag

SEQ ID NO: 977544 - RNA, 22 nt, Human
cuggcgcaacagaaaaucugga

SEQ ID NO: 977545 - RNA, 17 nt, Human
ccagagcuacugagacu

SEQ ID NO: 977546 - RNA, 22 nt, Human
agagcuuauaucuuggccaucc

SEQ ID NO: 977547 - RNA, 22 nt, Human
aaacugcugguugcuggccagc

SEQ ID NO: 977548 - RNA, 22 nt, Human
uauuuuaucugccagaguggag

SEQ ID NO: 977549 - RNA, 17 nt, Human
auccccagcaucuagaa

SEQ ID NO: 977550 - RNA, 22 nt, Human
guuccaggcaagugggauagga

SEQ ID NO: 977551 - RNA, 22 nt, Human
ugcauauuauguguaucugucu

SEQ ID NO: 977552 - RNA, 22 nt, Human
cuggcucagugccuucagaagu

SEQ ID NO: 977553 - RNA, 22 nt, Human
ucugaggccccugggcaggaug

SEQ ID NO: 977554 - RNA, 22 nt, Human
acaguggagaaggcaugaggcu

SEQ ID NO: 977555 - RNA, 22 nt, Human
ucaguuuugauuccugguucuc

SEQ ID NO: 977556 - RNA, 22 nt, Human
uuccuggugguggugacagcac

SEQ ID NO: 977557 - RNA, 22 nt, Human
agcccaggugagggguucgaaa

SEQ ID NO: 977558 - RNA, 22 nt, Human
uuuauguaauuucauaggugug

SEQ ID NO: 977559 - RNA, 22 nt, Human
ucugcucagugcuuaucucuaa

SEQ ID NO: 977560 - RNA, 22 nt, Human
gaggccuggaccagccacagag

SEQ ID NO: 977561 - RNA, 22 nt, Human
augcagaaugaguucacgaucu

SEQ ID NO: 977562 - RNA, 22 nt, Human
gcuggcuccucuguccucacgg

SEQ ID NO: 977563 - RNA, 22 nt, Human
cauugcuuccuaugucccuucu

SEQ ID NO: 977564 - RNA, 22 nt, Human
cauacuuuugcccugacauucu

SEQ ID NO: 977565 - RNA, 22 nt, Human
gccagcagcccagaaggacuuu

SEQ ID NO: 977566 - RNA, 22 nt, Human
acagucuugcuguauggucagg

SEQ ID NO: 977567 - RNA, 22 nt, Human
uccagccacucagcagggauug

SEQ ID NO: 977568 - RNA, 22 nt, Human
uagacagauuucuuguuagaca

SEQ ID NO: 977569 - RNA, 22 nt, Human
gagucccaugaugauagccaca

SEQ ID NO: 977570 - RNA, 22 nt, Human
cugagccagcuggcaugugcua

SEQ ID NO: 977571 - RNA, 22 nt, Human
gcucaggaaacagcagggcuug

SEQ ID NO: 977572 - RNA, 22 nt, Human
uuugcauuuguucaaguauuga

SEQ ID NO: 977573 - RNA, 22 nt, Human
cagggccugagggcugcucugc

SEQ ID NO: 977574 - RNA, 22 nt, Human
ucacauuuguuccucugcacuu

SEQ ID NO: 977575 - RNA, 22 nt, Human
cagcugcccaagccccagaugu

SEQ ID NO: 977576 - RNA, 21 nt, Human
acagcauguuuguguguuugc

SEQ ID NO: 977577 - RNA, 22 nt, Human
gacagugcauuuccuggcaugg

SEQ ID NO: 977578 - RNA, 22 nt, Human
caggcuggagugaguguagugg

SEQ ID NO: 977579 - RNA, 22 nt, Human
cuggagcuaggaaguccaagau

SEQ ID NO: 977580 - RNA, 22 nt, Human
gaagagcuguagccugcucuuu

SEQ ID NO: 977581 - RNA, 22 nt, Human
ggcuggcagaggggagucugug

SEQ ID NO: 977582 - RNA, 22 nt, Human
augcugugucaggaauuugaua

SEQ ID NO: 977583 - RNA, 22 nt, Human
ucagcaauaugauaggcuuugu

SEQ ID NO: 977584 - RNA, 22 nt, Human
aagagcuggcccaaucugagca

SEQ ID NO: 977585 - RNA, 20 nt, Human
gcugaccccugcugucaugc

SEQ ID NO: 977586 - RNA, 22 nt, Human
uccaagaagucaucuaaacugu

SEQ ID NO: 977587 - RNA, 22 nt, Human
gcucucugguuccagucaggaa

SEQ ID NO: 977588 - RNA, 22 nt, Human
agaggcuccaccuucucugucc

SEQ ID NO: 977589 - RNA, 22 nt, Human
aauuccugucuuaacaguucug

SEQ ID NO: 977590 - RNA, 22 nt, Human
uggagcugagagccaggcuggc

SEQ ID NO: 977591 - RNA, 22 nt, Human
agcaguggcugaagauguuccu

SEQ ID NO: 977592 - RNA, 22 nt, Human
ccagggcaauuauuuggagggu

SEQ ID NO: 977593 - RNA, 22 nt, Human
cugggagauugaggccauggug

SEQ ID NO: 977594 - RNA, 22 nt, Human
aagauguaucuuuccuuuaauu

SEQ ID NO: 977595 - RNA, 22 nt, Human
ggcaggugcucugugggccugg

SEQ ID NO: 977596 - RNA, 22 nt, Human
cuggucaaggagagucucugca

SEQ ID NO: 977597 - RNA, 23 nt, Human
ggcagcucucaucugaugacuga

SEQ ID NO: 977598 - RNA, 22 nt, Human
gucugagaaucuugcauaucau

SEQ ID NO: 977599 - RNA, 22 nt, Human
ggaggugggcuaaggacucucu

SEQ ID NO: 977600 - RNA, 22 nt, Human
aagggcaggcacccacccucac

SEQ ID NO: 977601 - RNA, 22 nt, Human
aggaagcuccuggagagccagu

SEQ ID NO: 977602 - RNA, 22 nt, Human
gccuggguuccaugaucuccag

SEQ ID NO: 977603 - RNA, 22 nt, Human
cauguugaauggccuugauuuu

SEQ ID NO: 977604 - RNA, 22 nt, Human
aagcagcuuuugaagagugagg

SEQ ID NO: 977605 - RNA, 22 nt, Human
aagaugcagcaaacuacuuuuu

SEQ ID NO: 977606 - RNA, 22 nt, Human
ggguggaguagaaagaugaauu

SEQ ID NO: 977607 - RNA, 22 nt, Human
aauucacaauguguagucaugc

SEQ ID NO: 977608 - RNA, 22 nt, Human
uggcagcugagugcacccccuc

SEQ ID NO: 977609 - RNA, 22 nt, Human
uaggagagcugaacuauugucu

SEQ ID NO: 977610 - RNA, 22 nt, Human
aagccagggauuccugagggag

SEQ ID NO: 977611 - RNA, 23 nt, Human
uugaaagguagcuggcagcuaga

SEQ ID NO: 977612 - RNA, 22 nt, Human
ucucuccuuaucauuguguuua

SEQ ID NO: 977613 - RNA, 22 nt, Human
cagcucuguaaauuccuucauc

SEQ ID NO: 977614 - RNA, 22 nt, Human
uccuugaagagugggcggucga

SEQ ID NO: 977615 - RNA, 22 nt, Human
uccugcugagcgucugucauuu

SEQ ID NO: 977616 - RNA, 21 nt, Human
gccacguuucagucuucucag

SEQ ID NO: 977617 - RNA, 22 nt, Human
ucauugcaagcucauuuaucug

SEQ ID NO: 977618 - RNA, 22 nt, Human
ugacuuccugcacucaggugau

SEQ ID NO: 977619 - RNA, 21 nt, Human
gcccagcaaggugagaaggcc

SEQ ID NO: 977620 - RNA, 22 nt, Human
uugauuuuaaaauagugacacu

SEQ ID NO: 977621 - RNA, 22 nt, Human
agcugccaucugaagaacugca

SEQ ID NO: 977622 - RNA, 22 nt, Human
uggcagcuggcucugcgcaggc

SEQ ID NO: 977623 - RNA, 20 nt, Human
ugcuugucaugcacucaggc

SEQ ID NO: 977624 - RNA, 22 nt, Human
uugauaaaaugauaucuucuuu

SEQ ID NO: 977625 - RNA, 22 nt, Human
gcagcagaggcccuacucuuug

SEQ ID NO: 977626 - RNA, 21 nt, Human
ucagaacaauuccaugccucc

SEQ ID NO: 977627 - RNA, 22 nt, Human
uuugaaagggacaaagucacug

SEQ ID NO: 977628 - RNA, 22 nt, Human
ccagagccccugagcuucccug

SEQ ID NO: 977629 - RNA, 22 nt, Human
gacagacauuuccugauccaau

SEQ ID NO: 977630 - RNA, 23 nt, Human
ucagugauguugaaccuagcagu

SEQ ID NO: 977631 - RNA, 22 nt, Human
ggaggccaggguggguggaucg

SEQ ID NO: 977632 - RNA, 22 nt, Human
aggagaguucacacuggucaga

SEQ ID NO: 977633 - RNA, 22 nt, Human
agcuucuggaagccuggcagca

SEQ ID NO: 977634 - RNA, 22 nt, Human
uaguccaguaaaacagcuaacg

SEQ ID NO: 977635 - RNA, 22 nt, Human
gggcagaggggcgcuucccucu

SEQ ID NO: 977636 - RNA, 22 nt, Human
uauaucuuauaugugcagguac

SEQ ID NO: 977637 - RNA, 22 nt, Human
gauguagagggaagauuuuaaa

SEQ ID NO: 977638 - RNA, 21 nt, Human
cugaggcagcacagcuaguca

SEQ ID NO: 977639 - RNA, 22 nt, Human
ucaaugaaagagcaugcauuuu

SEQ ID NO: 977640 - RNA, 22 nt, Human
auuauguagguuaggugguugu

SEQ ID NO: 977641 - RNA, 22 nt, Human
uuuaggauaacuccaguuuucc

SEQ ID NO: 977642 - RNA, 22 nt, Human
aggucacacuuggaucauagaa

SEQ ID NO: 977643 - RNA, 22 nt, Human
ugucuccucauacugucauauu

SEQ ID NO: 977644 - RNA, 22 nt, Human
cagguggggcgcccucaggcag

SEQ ID NO: 977645 - RNA, 22 nt, Human
gcugccuggagcucagccugcc

SEQ ID NO: 977646 - RNA, 22 nt, Human
gcagcagcccagggcucucaga

SEQ ID NO: 977647 - RNA, 22 nt, Human
ugaagccacagagcaucugccu

SEQ ID NO: 977648 - RNA, 18 nt, Human
ccugcagcccaggaggcc

SEQ ID NO: 977649 - RNA, 22 nt, Human
gcagagugauggaaugugggug

SEQ ID NO: 977650 - RNA, 22 nt, Human
ucaucaaagucaaagaaugacu

SEQ ID NO: 977651 - RNA, 22 nt, Human
uuuuauuaguggcuagaugggg

SEQ ID NO: 977652 - RNA, 22 nt, Human
augguuuguaacccaauacucc

SEQ ID NO: 977653 - RNA, 22 nt, Human
ucugaggcuucagacuguacug

SEQ ID NO: 977654 - RNA, 22 nt, Human
gagcugggacauggguccucuc

SEQ ID NO: 977655 - RNA, 22 nt, Human
gcuccuggcuucacugacauca

SEQ ID NO: 977656 - RNA, 22 nt, Human
gcuccuggccagcacagggccc

SEQ ID NO: 977657 - RNA, 22 nt, Human
auuucugugcaguaaaugguga

SEQ ID NO: 977658 - RNA, 22 nt, Human
aucaauucuuaggaaaauagcu

SEQ ID NO: 977659 - RNA, 22 nt, Human
aaagccaugggucuuuggcaua

SEQ ID NO: 977660 - RNA, 22 nt, Human
cugccucuugacagaucguggc

SEQ ID NO: 977661 - RNA, 18 nt, Human
uuccauaauguauguaac

SEQ ID NO: 977662 - RNA, 22 nt, Human
aaacaaguguaaacuagucugu

SEQ ID NO: 977663 - RNA, 22 nt, Human
augucagauguuuaucugauuu

SEQ ID NO: 977664 - RNA, 22 nt, Human
ggucucagacuggcaggcagug

SEQ ID NO: 977665 - RNA, 22 nt, Human
cuuuuacugugaaaagaaacug

SEQ ID NO: 977666 - RNA, 22 nt, Human
caguuucuauggcugggcucug

SEQ ID NO: 977667 - RNA, 22 nt, Human
gagccaggcaccuucuguguug

SEQ ID NO: 977668 - RNA, 22 nt, Human
uucucagaugauucagauaaac

SEQ ID NO: 977669 - RNA, 22 nt, Human
aggugccagaugcacagcugaa

SEQ ID NO: 977670 - RNA, 21 nt, Human
uggcagacaggaggagcucac

SEQ ID NO: 977671 - RNA, 22 nt, Human
cuacagacccaccuuggaagaa

SEQ ID NO: 977672 - RNA, 21 nt, Human
uggcaggcagcuggaagcuug

SEQ ID NO: 977673 - RNA, 22 nt, Human
acaaagugaauugcaucgaguu

SEQ ID NO: 977674 - RNA, 22 nt, Human
uuccaagagcuuuaauuguuga

SEQ ID NO: 977675 - RNA, 22 nt, Human
ccccaggacacauggaccaagu

SEQ ID NO: 977676 - RNA, 22 nt, Human
cugagagcagggacuugagcca

SEQ ID NO: 977677 - RNA, 22 nt, Human
aggcagugcagaguccucuucu

SEQ ID NO: 977678 - RNA, 22 nt, Human
aaggcagcaccgccuccugaaa

SEQ ID NO: 977679 - RNA, 22 nt, Human
ucauguuuggaguuugcucacu

SEQ ID NO: 977680 - RNA, 20 nt, Human
cuuggccuacuuagcuuugu

SEQ ID NO: 977681 - RNA, 22 nt, Human
gggaagauaguguugagggccc

SEQ ID NO: 977682 - RNA, 22 nt, Human
cuggguggaaagugcugagaau

SEQ ID NO: 977683 - RNA, 22 nt, Human
ucuuuccuguaacugcuguuca

SEQ ID NO: 977684 - RNA, 22 nt, Human
gcagguggcagaggugggaucu

SEQ ID NO: 977685 - RNA, 22 nt, Human
ggcagccaugucccagggcuuc

SEQ ID NO: 977686 - RNA, 22 nt, Human
agacauuuauugaacaccuagc

SEQ ID NO: 977687 - RNA, 22 nt, Human
ccagcagcgauagggugagugc

SEQ ID NO: 977688 - RNA, 22 nt, Human
aggcagcugugaggacuggauu

SEQ ID NO: 977689 - RNA, 22 nt, Human
uauuagguaugaacuggcaacc

SEQ ID NO: 977690 - RNA, 22 nt, Human
acugcagcaaagcccgugucuu

SEQ ID NO: 977691 - RNA, 22 nt, Human
ucugucacccagagugcagugg

SEQ ID NO: 977692 - RNA, 22 nt, Human
acccuggguucccgcagcacca

SEQ ID NO: 977693 - RNA, 22 nt, Human
cacucaggcugugucaggagga

SEQ ID NO: 977694 - RNA, 22 nt, Human
cauggacucugguuuggggagc

SEQ ID NO: 977695 - RNA, 22 nt, Human
cuccucacacccacugcaacca

SEQ ID NO: 977696 - RNA, 22 nt, Human
aaaaucugguaauuugaaugug

SEQ ID NO: 977697 - RNA, 22 nt, Human
cugcuuccaugcaauggcaguc

SEQ ID NO: 977698 - RNA, 22 nt, Human
agagccaggacugugucucacu

SEQ ID NO: 977699 - RNA, 22 nt, Human
aaguucaauggaaaagcuuuag

SEQ ID NO: 977700 - RNA, 22 nt, Human
ccuccucugggaagauucagag

SEQ ID NO: 977701 - RNA, 22 nt, Human
cagcugacgccagaguggaauu

SEQ ID NO: 977702 - RNA, 22 nt, Human
aagaacagauucagccugaacu

SEQ ID NO: 977703 - RNA, 22 nt, Human
gucaggauuugaacucaggucu

SEQ ID NO: 977704 - RNA, 22 nt, Human
uuuuaucugugacaucuggcag

SEQ ID NO: 977705 - RNA, 22 nt, Human
uauauuaaaugaccaguuuuaa

SEQ ID NO: 977706 - RNA, 22 nt, Human
uacaguuuguuacauuguuagu

SEQ ID NO: 977707 - RNA, 22 nt, Human
aagaacaguugggaggugagcc

SEQ ID NO: 977708 - RNA, 22 nt, Human
ucagagugggagaaugugccaa

SEQ ID NO: 977709 - RNA, 22 nt, Human
uagaaaauagggccuguggagc

SEQ ID NO: 977710 - RNA, 22 nt, Human
agacccugcaccucucgugggc

SEQ ID NO: 977711 - RNA, 22 nt, Human
aggcucugguuggcaaguaaag

SEQ ID NO: 977712 - RNA, 22 nt, Human
uugguuuaggaacuggcuugga

SEQ ID NO: 977713 - RNA, 22 nt, Human
gcucccacugcagcccugagcc

SEQ ID NO: 977714 - RNA, 22 nt, Human
caagagcugaggcuggagaggu

SEQ ID NO: 977715 - RNA, 22 nt, Human
gagauauguuagaaagcuauug

SEQ ID NO: 977716 - RNA, 22 nt, Human
ugugcucuggaguugccuucac

SEQ ID NO: 977717 - RNA, 22 nt, Human
cagccugcauuuguaucuguau

SEQ ID NO: 977718 - RNA, 22 nt, Human
agcugccauccuguucagcacc

SEQ ID NO: 977719 - RNA, 22 nt, Human
gacagagaggcugagcaguaca

SEQ ID NO: 977720 - RNA, 22 nt, Human
auacaacuuuacaugcaauucc

SEQ ID NO: 977721 - RNA, 22 nt, Human
cacugcaguuccccagugcgca

SEQ ID NO: 977722 - RNA, 20 nt, Human
guguuucaugugauacaaug

SEQ ID NO: 977723 - RNA, 22 nt, Human
uuccucuccucccaccagguga

SEQ ID NO: 977724 - RNA, 22 nt, Human
gguggguauaguuagggccucu

SEQ ID NO: 977725 - RNA, 22 nt, Human
cagcuccagcccaggcagcucc

SEQ ID NO: 977726 - RNA, 22 nt, Human
ucaagagaaggggaaauagacu

SEQ ID NO: 977727 - RNA, 22 nt, Human
ucccagauuguugauggcuuaa

SEQ ID NO: 977728 - RNA, 22 nt, Human
cucuggaguggguggccgggag

SEQ ID NO: 977729 - RNA, 22 nt, Human
uccuggucuacacugcauuggg

SEQ ID NO: 977730 - RNA, 22 nt, Human
uguguacacaaugauugcagag

SEQ ID NO: 977731 - RNA, 22 nt, Human
aacaaaugauuguugguuggag

SEQ ID NO: 977732 - RNA, 22 nt, Human
ucuggccaacaaaaacuaaguc

SEQ ID NO: 977733 - RNA, 22 nt, Human
cuggagccagccagggcccucu

SEQ ID NO: 977734 - RNA, 22 nt, Human
auagauuugaauuuaagacuug

SEQ ID NO: 977735 - RNA, 21 nt, Human
agcaggaggcagucacagcuc

SEQ ID NO: 977736 - RNA, 22 nt, Human
augcagcugugggcaagaaaug

SEQ ID NO: 977737 - RNA, 22 nt, Human
ugaaaugacagucuuaagcucu

SEQ ID NO: 977738 - RNA, 22 nt, Human
agagccagcaacucuagcccug

SEQ ID NO: 977739 - RNA, 22 nt, Human
aggucacccguuugacuaucca

SEQ ID NO: 977740 - RNA, 18 nt, Human
ugcucuguuuaaugauuu

SEQ ID NO: 977741 - RNA, 22 nt, Human
uaggcacuggggaggcagcaug

SEQ ID NO: 977742 - RNA, 22 nt, Human
gucuccugagccuugacugcaa

SEQ ID NO: 977743 - RNA, 22 nt, Human
gccugcugaaccucaugcaguc

SEQ ID NO: 977744 - RNA, 22 nt, Human
acagagcaauaacagggagagg

SEQ ID NO: 977745 - RNA, 22 nt, Human
cagagcuggguuugggaaaccu

SEQ ID NO: 977746 - RNA, 21 nt, Human
ggagggcagcccagacuggcu

SEQ ID NO: 977747 - RNA, 22 nt, Human
agcugagagguggcaagcugua

SEQ ID NO: 977748 - RNA, 22 nt, Human
uguuccuaaauaugaauggaga

SEQ ID NO: 977749 - RNA, 22 nt, Human
ucagagugcagggaguagcagc

SEQ ID NO: 977750 - RNA, 22 nt, Human
ggccucuggcaggcaggcccuc

SEQ ID NO: 977751 - RNA, 22 nt, Human
ggaggccaaggaggagcuugcc

SEQ ID NO: 977752 - RNA, 22 nt, Human
gaguuuaaagcauacauauuuu

SEQ ID NO: 977753 - RNA, 22 nt, Human
uggcagaaguacacaagcaugc

SEQ ID NO: 977754 - RNA, 22 nt, Human
cuggccuguccugacccagccu

SEQ ID NO: 977755 - RNA, 22 nt, Human
auuauguauuugguauaguuug

SEQ ID NO: 977756 - RNA, 22 nt, Human
uccucuggggcgugguccugga

SEQ ID NO: 977757 - RNA, 22 nt, Human
uggcagagaaccugggcuuugu

SEQ ID NO: 977758 - RNA, 22 nt, Human
cucuucuugccugaugaggcag

SEQ ID NO: 977759 - RNA, 22 nt, Human
gaaagagaaccugggccuagau

SEQ ID NO: 977760 - RNA, 22 nt, Human
ucaugaaucguggaaugauuua

SEQ ID NO: 977761 - RNA, 22 nt, Human
ccuuccuggcuguccgccugau

SEQ ID NO: 977762 - RNA, 22 nt, Human
cccuucccuucugggagaucca

SEQ ID NO: 977763 - RNA, 23 nt, Human
uugugggcagauuccauggggag

SEQ ID NO: 977764 - RNA, 22 nt, Human
agugcuguaacaacuuauuugg

SEQ ID NO: 977765 - RNA, 22 nt, Human
gaaggccaguuuugagauaggu

SEQ ID NO: 977766 - RNA, 22 nt, Human
acagggcaccugagguaggaag

SEQ ID NO: 977767 - RNA, 22 nt, Human
guuuggggucugcagagcggcg

SEQ ID NO: 977768 - RNA, 22 nt, Human
ccuguucaagggaugauugacc

SEQ ID NO: 977769 - RNA, 22 nt, Human
guacauuuuacuuuguuugaau

SEQ ID NO: 977770 - RNA, 22 nt, Human
ccagacuguggaguuccuggug

SEQ ID NO: 977771 - RNA, 22 nt, Human
gcaagcaguuguggcuucugag

SEQ ID NO: 977772 - RNA, 22 nt, Human
uucugagccucauucaugaggc

SEQ ID NO: 977773 - RNA, 22 nt, Human
aaagaucagucugaagcaacau

SEQ ID NO: 977774 - RNA, 22 nt, Human
cuggcagguuuggugucuggug

SEQ ID NO: 977775 - RNA, 22 nt, Human
aagcagaugggacuccaaggca

SEQ ID NO: 977776 - RNA, 22 nt, Human
aaacacagggauauauauucca

SEQ ID NO: 977777 - RNA, 22 nt, Human
gcugaaauucagauuccuaggc

SEQ ID NO: 977778 - RNA, 22 nt, Human
gagcucccaggccccagcaagg

SEQ ID NO: 977779 - RNA, 22 nt, Human
gcagauggugccaugucuugug

SEQ ID NO: 977780 - RNA, 22 nt, Human
uaugcacacaucgcagcaggaa

SEQ ID NO: 977781 - RNA, 19 nt, Human
agcagagcccugaagaucc

SEQ ID NO: 977782 - RNA, 22 nt, Human
ucacaggagauuaugugugcua

SEQ ID NO: 977783 - RNA, 22 nt, Human
ugacacauuaaaugcucacaaa

SEQ ID NO: 977784 - RNA, 22 nt, Human
uuauuuauggcacuguuggugg

SEQ ID NO: 977785 - RNA, 22 nt, Human
gaugcacugcaguauauacugu

SEQ ID NO: 977786 - RNA, 22 nt, Human
aguuuaugaaacacagauuuga

SEQ ID NO: 977787 - RNA, 22 nt, Human
ucagaagcaggagugugcacaa

SEQ ID NO: 977788 - RNA, 22 nt, Human
gacucugcugacuaguugacua

SEQ ID NO: 977789 - RNA, 22 nt, Human
cccagcccugaccuauuggaaa

SEQ ID NO: 977790 - RNA, 22 nt, Human
gcuggcagagacaagaagacua

SEQ ID NO: 977791 - RNA, 22 nt, Human
aauauaauuuuauuccuagagu

SEQ ID NO: 977792 - RNA, 22 nt, Human
ucccuggacagccuugccuggg

SEQ ID NO: 977793 - RNA, 22 nt, Human
aaguccaucucugccccacaca

SEQ ID NO: 977794 - RNA, 22 nt, Human
agccucucugaugugacagcua

SEQ ID NO: 977795 - RNA, 22 nt, Human
guccuggcccacuggcaggcug

SEQ ID NO: 977796 - RNA, 21 nt, Human
ccagccucagaucagggagcu

SEQ ID NO: 977797 - RNA, 22 nt, Human
uccuggccgcuggccccugaga

SEQ ID NO: 977798 - RNA, 22 nt, Human
ggcugagggccagggcuagucu

SEQ ID NO: 977799 - RNA, 22 nt, Human
uccuuccucggggacccagauc

SEQ ID NO: 977800 - RNA, 22 nt, Human
ccagggcaggagaaagacucac

SEQ ID NO: 977801 - RNA, 20 nt, Human
acaauuuccucacuauaugc

SEQ ID NO: 977802 - RNA, 22 nt, Human
uuucagaugcaauuaauuuuca

SEQ ID NO: 977803 - RNA, 22 nt, Human
ccaggcugagcaugauuggagc

SEQ ID NO: 977804 - RNA, 19 nt, Human
auggaaaaugccagacuga

SEQ ID NO: 977805 - RNA, 22 nt, Human
gaggccagaguuccccgaguca

SEQ ID NO: 977806 - RNA, 22 nt, Human
aaaugcuugcucuugauuauuu

SEQ ID NO: 977807 - RNA, 22 nt, Human
gagggagggaaaguuuaacacu

SEQ ID NO: 977808 - RNA, 23 nt, Human
aggcugcagaagaauagggucau

SEQ ID NO: 977809 - RNA, 19 nt, Human
uggcucugucgaaggcaca

SEQ ID NO: 977810 - RNA, 22 nt, Human
cuauuucugccuaaugaccugu

SEQ ID NO: 977811 - RNA, 23 nt, Human
cugucuccugggcuagguggaau

SEQ ID NO: 977812 - RNA, 19 nt, Human
auaaggcagugacuuuuuu

SEQ ID NO: 977813 - RNA, 22 nt, Human
agucuuaacuaugcaaguacua

SEQ ID NO: 977814 - RNA, 20 nt, Human
ccaauaaagcucuauaggga

SEQ ID NO: 977815 - RNA, 22 nt, Human
cucuccagaauaugccgccgug

SEQ ID NO: 977816 - RNA, 22 nt, Human
gccaggggacgcggagcgacga

SEQ ID NO: 977817 - RNA, 22 nt, Human
agcuuaggaggaugaugaacau

SEQ ID NO: 977818 - RNA, 22 nt, Human
guaagggauuugaacauagguu

SEQ ID NO: 977819 - RNA, 22 nt, Human
guggccuggaugagcuucgaca

SEQ ID NO: 977820 - RNA, 22 nt, Human
cugcuuugcauagcugccagag

SEQ ID NO: 977821 - RNA, 22 nt, Human
ugggccagcaauugcugcucag

SEQ ID NO: 977822 - RNA, 17 nt, Human
acucaggaucugggagu

SEQ ID NO: 977823 - RNA, 22 nt, Human
cuggaagggucuacuuagcaga

SEQ ID NO: 977824 - RNA, 22 nt, Human
gcaccuuuggaaugaaaaguug

SEQ ID NO: 977825 - RNA, 22 nt, Human
aggcccuggcacugccugggag

SEQ ID NO: 977826 - RNA, 22 nt, Human
acagaacuuccugcuggagugg

SEQ ID NO: 977827 - RNA, 22 nt, Human
uugagggaacaugagaaucauc

SEQ ID NO: 977828 - RNA, 22 nt, Human
aacucacuuuguggcuucugaa

SEQ ID NO: 977829 - RNA, 22 nt, Human
uccaggaguuugagacugcagu

SEQ ID NO: 977830 - RNA, 22 nt, Human
auucugucuuuuuaaaauaaua

SEQ ID NO: 977831 - RNA, 22 nt, Human
cugccagcagaggccagcgcug

SEQ ID NO: 977832 - RNA, 22 nt, Human
auuucagguaccugugggaucc

SEQ ID NO: 977833 - RNA, 19 nt, Human
acauauguggauauacaug

SEQ ID NO: 977834 - RNA, 20 nt, Human
gcugaggucauuaugccuca

SEQ ID NO: 977835 - RNA, 22 nt, Human
gcugccuggaauaacggcuggc

SEQ ID NO: 977836 - RNA, 22 nt, Human
uguguauagguugugcuaauag

SEQ ID NO: 977837 - RNA, 22 nt, Human
augcagauguuugguucauugu

SEQ ID NO: 977838 - RNA, 22 nt, Human
gggcccagcgugguuccaucug

SEQ ID NO: 977839 - RNA, 22 nt, Human
cugccuggaaugccagcuucuc

SEQ ID NO: 977840 - RNA, 21 nt, Human
agacagagugcagucuacaua

SEQ ID NO: 977841 - RNA, 20 nt, Human
uuucugugagaaacacuguu

SEQ ID NO: 977842 - RNA, 22 nt, Human
auuugcaaagucguaucuguga

SEQ ID NO: 977843 - RNA, 17 nt, Human
ucugccgacugccagcu

SEQ ID NO: 977844 - RNA, 22 nt, Human
acucaggagggaucagcuauca

SEQ ID NO: 977845 - RNA, 22 nt, Human
agggcagcagcuccuccuagcu

SEQ ID NO: 977846 - RNA, 22 nt, Human
uugauaaaaugaugaaaucacu

SEQ ID NO: 977847 - RNA, 22 nt, Human
aggcuucuaggguuggcagcgg

SEQ ID NO: 977848 - RNA, 22 nt, Human
aucaguuuggugcuuucaguga

SEQ ID NO: 977849 - RNA, 22 nt, Human
augcugugucuagcaggaacac

SEQ ID NO: 977850 - RNA, 19 nt, Human
gagguggguccccgcagcc

SEQ ID NO: 977851 - RNA, 22 nt, Human
agggcucuguccccagaggccc

SEQ ID NO: 977852 - RNA, 22 nt, Human
gauggcaggcaggugaguagag

SEQ ID NO: 977853 - RNA, 22 nt, Human
caccagcuuugcccacugccca

SEQ ID NO: 977854 - RNA, 22 nt, Human
augcuguguuuuaaauggaaau

SEQ ID NO: 977855 - RNA, 22 nt, Human
uauaugcucugggauccugaaa

SEQ ID NO: 977856 - RNA, 18 nt, Human
aaguaacagaagagcaca

SEQ ID NO: 977857 - RNA, 22 nt, Human
aagggcaggcagagaucauaua

SEQ ID NO: 977858 - RNA, 22 nt, Human
acugggccuugccauggcagcc

SEQ ID NO: 977859 - RNA, 18 nt, Human
gcugucugaggucugagg

SEQ ID NO: 977860 - RNA, 22 nt, Human
ccaggaaugaaauguagauaaa

SEQ ID NO: 977861 - RNA, 22 nt, Human
cagcaguguacaaggugucaga

SEQ ID NO: 977862 - RNA, 23 nt, Human
uuucaaauuacucugcagaugac

SEQ ID NO: 977863 - RNA, 22 nt, Human
ccucuuccacugggccccaucc

SEQ ID NO: 977864 - RNA, 22 nt, Human
ccugccugggcucacuugccag

SEQ ID NO: 977865 - RNA, 22 nt, Human
aaacagcugucauuguuuuaaa

SEQ ID NO: 977866 - RNA, 22 nt, Human
gggugggguguaucggauccua

SEQ ID NO: 977867 - RNA, 22 nt, Human
uccuggccgccgcguggggccg

SEQ ID NO: 977868 - RNA, 22 nt, Human
ucuggcucugaauucacuucug

SEQ ID NO: 977869 - RNA, 22 nt, Human
agggcugcaggcaagauauggc

SEQ ID NO: 977870 - RNA, 22 nt, Human
agugucugccaacugcaugguc

SEQ ID NO: 977871 - RNA, 22 nt, Human
ccuuagagaguacugggcugcc

SEQ ID NO: 977872 - RNA, 22 nt, Human
cuugaaguugcaaaacauuaau

SEQ ID NO: 977873 - RNA, 22 nt, Human
gccuguccuggaugcucugcaa

SEQ ID NO: 977874 - RNA, 19 nt, Human
cucuggagcagacacugga

SEQ ID NO: 977875 - RNA, 22 nt, Human
ugugcccaucccucuggagugu

SEQ ID NO: 977876 - RNA, 22 nt, Human
cacugaagcuuucauucucuug

SEQ ID NO: 977877 - RNA, 22 nt, Human
agcugcucugauaaaccuacuu

SEQ ID NO: 977878 - RNA, 22 nt, Human
uaaaagcucuucuguugaguua

SEQ ID NO: 977879 - RNA, 21 nt, Human
cccuguguuccacagcagaca

SEQ ID NO: 977880 - RNA, 22 nt, Human
aggcacugaaggaagcuugcgc

SEQ ID NO: 977881 - RNA, 22 nt, Human
uuaauacagucuccagaaguaa

SEQ ID NO: 977882 - RNA, 22 nt, Human
aucccuggacggcgccucccca

SEQ ID NO: 977883 - RNA, 22 nt, Human
ugauuucccuguagccucugaa

SEQ ID NO: 977884 - RNA, 22 nt, Human
agccugucugucuccaaagcug

SEQ ID NO: 977885 - RNA, 22 nt, Human
guggccucuguuggcuccuagg

SEQ ID NO: 977886 - RNA, 22 nt, Human
cucagaagccuucagucuuggc

SEQ ID NO: 977887 - RNA, 22 nt, Human
agggacacaugugauuauuuau

SEQ ID NO: 977888 - RNA, 22 nt, Human
aggcugcucaguagauggagcu

SEQ ID NO: 977889 - RNA, 22 nt, Human
uucuucaugcuguugcugcuug

SEQ ID NO: 977890 - RNA, 22 nt, Human
ggccucugaggacagccuuggc

SEQ ID NO: 977891 - RNA, 22 nt, Human
agagcugcaauuucauguggug

SEQ ID NO: 977892 - RNA, 20 nt, Human
gccugccucagcuagcugag

SEQ ID NO: 977893 - RNA, 22 nt, Human
ggagcagggcagugaauucugg

SEQ ID NO: 977894 - RNA, 22 nt, Human
accagagcgcucaagccuuccc

SEQ ID NO: 977895 - RNA, 22 nt, Human
gugaccaucagagaauaacaaa

SEQ ID NO: 977896 - RNA, 22 nt, Human
uuccaggaggagguacuagagg

SEQ ID NO: 977897 - RNA, 22 nt, Human
ccugucaggguuugccucagaa

SEQ ID NO: 977898 - RNA, 22 nt, Human
uuuauuaugauggacaccuucg

SEQ ID NO: 977899 - RNA, 22 nt, Human
cugcuucuaagaaccugcagcu

SEQ ID NO: 977900 - RNA, 22 nt, Human
uggcaguccccugugccuggaa

SEQ ID NO: 977901 - RNA, 22 nt, Human
ucccugcucagcucaccuggca

SEQ ID NO: 977902 - RNA, 22 nt, Human
agaggcuccuucacucuggcac

SEQ ID NO: 977903 - RNA, 22 nt, Human
aagaacugugcuccaggcucca

SEQ ID NO: 977904 - RNA, 22 nt, Human
cacccagccuucacacaggagu

SEQ ID NO: 977905 - RNA, 22 nt, Human
ugcagcauuauucacaguagcc

SEQ ID NO: 977906 - RNA, 22 nt, Human
uggccugaauuauggcagaucu

SEQ ID NO: 977907 - RNA, 23 nt, Human
aacaccaaggcucagagagauaa

SEQ ID NO: 977908 - RNA, 22 nt, Human
caucagcaggcaacacucuugg

SEQ ID NO: 977909 - RNA, 22 nt, Human
uugcauuugacaaauuauuuaa

SEQ ID NO: 977910 - RNA, 22 nt, Human
cagggccagcgcccaggcccag

SEQ ID NO: 977911 - RNA, 22 nt, Human
ucuguucaugucuuuuuaagug

SEQ ID NO: 977912 - RNA, 22 nt, Human
cuggugguucaggagaauggcu

SEQ ID NO: 977913 - RNA, 22 nt, Human
acugccugcucauaacauugcu

SEQ ID NO: 977914 - RNA, 22 nt, Human
acuaaauagccucugguaguug

SEQ ID NO: 977915 - RNA, 20 nt, Human
aggagcugaauuagaggguu

SEQ ID NO: 977916 - RNA, 21 nt, Human
cugugcuuuuuaagugugaug

SEQ ID NO: 977917 - RNA, 22 nt, Human
cuuacauugugugcaugagggg

SEQ ID NO: 977918 - RNA, 22 nt, Human
guuuuucuaggaccaugugauu

SEQ ID NO: 977919 - RNA, 22 nt, Human
ggagugggaacaaugacauggu

SEQ ID NO: 977920 - RNA, 22 nt, Human
ugacauaaaccagugagcaaaa

SEQ ID NO: 977921 - RNA, 22 nt, Human
ggauguugauugaauggccauu

SEQ ID NO: 977922 - RNA, 22 nt, Human
gcacagaagagcuuuggaauga

SEQ ID NO: 977923 - RNA, 22 nt, Human
ccagccugguucagaauuggcu

SEQ ID NO: 977924 - RNA, 20 nt, Human
aacacacugguggcaucagg

SEQ ID NO: 977925 - RNA, 22 nt, Human
auccagucaaaauuaguaaggu

SEQ ID NO: 977926 - RNA, 22 nt, Human
ugggcaaguaucggacucugag

SEQ ID NO: 977927 - RNA, 22 nt, Human
aaggcacugcuuugcugcgccc

SEQ ID NO: 977928 - RNA, 22 nt, Human
caggcagcagaggaguguggga

SEQ ID NO: 977929 - RNA, 22 nt, Human
gcugccacauuuucaggacuaa

SEQ ID NO: 977930 - RNA, 22 nt, Human
ugcccaggcuggaaugcagugg

SEQ ID NO: 977931 - RNA, 22 nt, Human
ugucccagauacuggacauaga

SEQ ID NO: 977932 - RNA, 22 nt, Human
agggagcucaguuggaagcggu

SEQ ID NO: 977933 - RNA, 22 nt, Human
ggagaagggacagacucagcuu

SEQ ID NO: 977934 - RNA, 22 nt, Human
aaccaaauggaugguaagaggg

SEQ ID NO: 977935 - RNA, 22 nt, Human
uacuuucuagcucuccccaguu

SEQ ID NO: 977936 - RNA, 22 nt, Human
acuggcaguuugagaaugcauu

SEQ ID NO: 977937 - RNA, 22 nt, Human
gagagugaaggcuucccagcaa

SEQ ID NO: 977938 - RNA, 22 nt, Human
aaaugcauaucaaagacuugaa

SEQ ID NO: 977939 - RNA, 22 nt, Human
ugauuucaaguagugacaugcu

SEQ ID NO: 977940 - RNA, 22 nt, Human
uagaacaugcucauguauaaau

SEQ ID NO: 977941 - RNA, 22 nt, Human
cccucuacagggaagcgcuuuc

SEQ ID NO: 977942 - RNA, 22 nt, Human
uccuucagaaaaccucagucuu

SEQ ID NO: 977943 - RNA, 22 nt, Human
cuacucugaauugaagugauau

SEQ ID NO: 977944 - RNA, 22 nt, Human
gagugcaguuggggugagggga

SEQ ID NO: 977945 - RNA, 22 nt, Human
ugauuucccucaucauaacaga

SEQ ID NO: 977946 - RNA, 22 nt, Human
uucaggaucaaguugccaguag

SEQ ID NO: 977947 - RNA, 23 nt, Human
ccugggcauuggcugcagcuucu

SEQ ID NO: 977948 - RNA, 22 nt, Human
ugccucccucucugccacugga

SEQ ID NO: 977949 - RNA, 22 nt, Human
ucuggccauggcaagccgagug

SEQ ID NO: 977950 - RNA, 22 nt, Human
aagcaaaggcaggagcuuguga

SEQ ID NO: 977951 - RNA, 22 nt, Human
cauuauguucaguagcuuaaaa

SEQ ID NO: 977952 - RNA, 22 nt, Human
ugcauuuguuaccuuauugcag

SEQ ID NO: 977953 - RNA, 22 nt, Human
agccuugaguucaagugcuggc

SEQ ID NO: 977954 - RNA, 22 nt, Human
cacaggcugcccgcagcuggga

SEQ ID NO: 977955 - RNA, 22 nt, Human
aaggagagguuguccguguugu

SEQ ID NO: 977956 - RNA, 22 nt, Human
ugcaagggcuuagggggcugug

SEQ ID NO: 977957 - RNA, 22 nt, Human
augaagucuagcaagcauugaa

SEQ ID NO: 977958 - RNA, 22 nt, Human
uaaaugugcacuuuacuuuuca

SEQ ID NO: 977959 - RNA, 22 nt, Human
augcaguauaaaucauuucugg

SEQ ID NO: 977960 - RNA, 22 nt, Human
cugggagcuggaugcccugccc

SEQ ID NO: 977961 - RNA, 22 nt, Human
uaucuguuguaguacagaugau

SEQ ID NO: 977962 - RNA, 22 nt, Human
augugucugugggcacacacac

SEQ ID NO: 977963 - RNA, 22 nt, Human
cuggaaauuggagaugauguuu

SEQ ID NO: 977964 - RNA, 22 nt, Human
ugggccuggaguuuguccagag

SEQ ID NO: 977965 - RNA, 22 nt, Human
agcagagcggggccuccggaag

SEQ ID NO: 977966 - RNA, 22 nt, Human
ggccccuggcaccaggcugauu

SEQ ID NO: 977967 - RNA, 22 nt, Human
uccaugagcuagggauucauca

SEQ ID NO: 977968 - RNA, 22 nt, Human
uugcagcuuagugauguuaucu

SEQ ID NO: 977969 - RNA, 22 nt, Human
ugugccauuucuauucugcagc

SEQ ID NO: 977970 - RNA, 22 nt, Human
agcugccagcaaguuucaaaca

SEQ ID NO: 977971 - RNA, 22 nt, Human
cccaggcagugugugcaugcgu

SEQ ID NO: 977972 - RNA, 22 nt, Human
gcaggaugccagggcagcagcg

SEQ ID NO: 977973 - RNA, 22 nt, Human
auuaaagaaacccagcauguga

SEQ ID NO: 977974 - RNA, 19 nt, Human
aguggcagaucuggaagua

SEQ ID NO: 977975 - RNA, 22 nt, Human
uugcuuugccaccagaagucua

SEQ ID NO: 977976 - RNA, 22 nt, Human
agggucugacuccucuggcaag

SEQ ID NO: 977977 - RNA, 22 nt, Human
cugagccuguguuucucuggca

SEQ ID NO: 977978 - RNA, 22 nt, Human
uaagaagcuucugcuaaugccu

SEQ ID NO: 977979 - RNA, 22 nt, Human
aucuggcuugacuuugcgacuu

SEQ ID NO: 977980 - RNA, 22 nt, Human
gagaggugaaggcugcccuggg

SEQ ID NO: 977981 - RNA, 22 nt, Human
agucccagccuguaggauuggg

SEQ ID NO: 977982 - RNA, 22 nt, Human
gcucccugccuacacggaccuu

SEQ ID NO: 977983 - RNA, 22 nt, Human
gaugggaggaaccugggucccu

SEQ ID NO: 977984 - RNA, 19 nt, Human
ugagaggcuuaaggcagcu

SEQ ID NO: 977985 - RNA, 22 nt, Human
cugccuugaggagguuguggga

SEQ ID NO: 977986 - RNA, 22 nt, Human
acugugcacaauucuaaguccu

SEQ ID NO: 977987 - RNA, 22 nt, Human
uuuucauuuuuguagaugcaag

SEQ ID NO: 977988 - RNA, 22 nt, Human
caaaggcaacauauacuuguuu

SEQ ID NO: 977989 - RNA, 22 nt, Human
ccaggagcuggagggugcagug

SEQ ID NO: 977990 - RNA, 22 nt, Human
cccuccccacaaagcuucacac

SEQ ID NO: 977991 - RNA, 22 nt, Human
acguuuucuagagaauaugcag

SEQ ID NO: 977992 - RNA, 19 nt, Human
ggugaccaccuggucagug

SEQ ID NO: 977993 - RNA, 22 nt, Human
auucauucugaccucaagagaa

SEQ ID NO: 977994 - RNA, 22 nt, Human
acagggccucagccagggcaga

SEQ ID NO: 977995 - RNA, 22 nt, Human
agccaggaagaaggucacacca

SEQ ID NO: 977996 - RNA, 21 nt, Human
aguguccuugaucuugccuug

SEQ ID NO: 977997 - RNA, 22 nt, Human
ccucucauagucuguauccuuu

SEQ ID NO: 977998 - RNA, 22 nt, Human
cuguggagcuuguggcaguggg

SEQ ID NO: 977999 - RNA, 22 nt, Human
aaaugcaccuugcugugagacu

SEQ ID NO: 978000 - RNA, 22 nt, Human
ugcccugugugugcaagcacug

SEQ ID NO: 978001 - RNA, 22 nt, Human
cggcuggguagaggugccgggu

SEQ ID NO: 978002 - RNA, 21 nt, Human
aagaagcaauuuauuggaagg

SEQ ID NO: 978003 - RNA, 22 nt, Human
uaguuaaaauaauggagauguu

SEQ ID NO: 978004 - RNA, 19 nt, Human
acauuuagaauguacuugc

SEQ ID NO: 978005 - RNA, 22 nt, Human
agcugccaccucugccuuuggg

SEQ ID NO: 978006 - RNA, 18 nt, Human
gaaaggagagacaguagg

SEQ ID NO: 978007 - RNA, 22 nt, Human
aagugguagacaaagauaauug

SEQ ID NO: 978008 - RNA, 22 nt, Human
gauacauuuuaucuccuaacag

SEQ ID NO: 978009 - RNA, 22 nt, Human
ccaggagagcaaaggucacucu

SEQ ID NO: 978010 - RNA, 19 nt, Human
agaggccucagcagcuggc

SEQ ID NO: 978011 - RNA, 22 nt, Human
aaggcccuaauagagcacauau

SEQ ID NO: 978012 - RNA, 22 nt, Human
ccaggagcaaagaucacuggga

SEQ ID NO: 978013 - RNA, 18 nt, Human
gagguccugcucuagccc

SEQ ID NO: 978014 - RNA, 20 nt, Human
uccaugaguuagagacuaua

SEQ ID NO: 978015 - RNA, 22 nt, Human
uccaugagagguaacuuuacaa

SEQ ID NO: 978016 - RNA, 22 nt, Human
cugccucuggccucaggcccag

SEQ ID NO: 978017 - RNA, 22 nt, Human
uuugagauggagucuugcucug

SEQ ID NO: 978018 - RNA, 22 nt, Human
gaaggaaaggucucaugccuuu

SEQ ID NO: 978019 - RNA, 22 nt, Human
ccugggagggcaagugcugaug

SEQ ID NO: 978020 - RNA, 22 nt, Human
ccaggagauaagcugaguuuau

SEQ ID NO: 978021 - RNA, 22 nt, Human
uuguuuuggaagaacuuacucu

SEQ ID NO: 978022 - RNA, 22 nt, Human
caggcugcagaggccuuucaug

SEQ ID NO: 978023 - RNA, 23 nt, Human
agaggccaacuucuugccccucc

SEQ ID NO: 978024 - RNA, 22 nt, Human
uucuucagucccacuagccaca

SEQ ID NO: 978025 - RNA, 23 nt, Human
auuuccuacuauaaaagagguaa

SEQ ID NO: 978026 - RNA, 22 nt, Human
cacaccuguaauaccagcuacu

SEQ ID NO: 978027 - RNA, 22 nt, Human
uggaaagagguagaggaucugg

SEQ ID NO: 978028 - RNA, 22 nt, Human
uuucuucacaggguauugggug

SEQ ID NO: 978029 - RNA, 22 nt, Human
auuuacagaugaugcuauuuga

SEQ ID NO: 978030 - RNA, 22 nt, Human
ccugagagcauuccacacugaa

SEQ ID NO: 978031 - RNA, 22 nt, Human
ugggauggagccugaguauagu

SEQ ID NO: 978032 - RNA, 22 nt, Human
ccacaggaccagaggagaucac

SEQ ID NO: 978033 - RNA, 22 nt, Human
gcugcuguugauuuaguccaau

SEQ ID NO: 978034 - RNA, 22 nt, Human
cagugcugggcagaggagagcg

SEQ ID NO: 978035 - RNA, 22 nt, Human
auguaacuucugugaaucugac

SEQ ID NO: 978036 - RNA, 22 nt, Human
augaugguuguccuaggugcau

SEQ ID NO: 978037 - RNA, 20 nt, Human
gccuggaggcaaugggaaga

SEQ ID NO: 978038 - RNA, 22 nt, Human
gcagagugggagcccagggcug

SEQ ID NO: 978039 - RNA, 22 nt, Human
ucugcaggacugaggccuguuu

SEQ ID NO: 978040 - RNA, 22 nt, Human
guccuggggauacagaagugaa

SEQ ID NO: 978041 - RNA, 22 nt, Human
ucagugucuugggcuugaaugc

SEQ ID NO: 978042 - RNA, 18 nt, Human
aagcugcccucaggcagg

SEQ ID NO: 978043 - RNA, 22 nt, Human
uggcuucuuagaccaguggccu

SEQ ID NO: 978044 - RNA, 22 nt, Human
cucuuaguuuaucuuugacaaa

SEQ ID NO: 978045 - RNA, 22 nt, Human
uacagauacagaucuagauaca

SEQ ID NO: 978046 - RNA, 20 nt, Human
aauguauauuuuaugccagg

SEQ ID NO: 978047 - RNA, 22 nt, Human
ucugggaacagccuggcugugu

SEQ ID NO: 978048 - RNA, 22 nt, Human
auaaagauuucuuuuucucuac

SEQ ID NO: 978049 - RNA, 22 nt, Human
agcaccugcuaugugucaggga

SEQ ID NO: 978050 - RNA, 22 nt, Human
aaagccuucaaguagauguaag

SEQ ID NO: 978051 - RNA, 22 nt, Human
uucaucaauguguuuaauaaug

SEQ ID NO: 978052 - RNA, 22 nt, Human
caaauacucuggauguguuugu

SEQ ID NO: 978053 - RNA, 22 nt, Human
ccagcccuucccaacuggccag

SEQ ID NO: 978054 - RNA, 22 nt, Human
aggaugaggcuggcaggucuug

SEQ ID NO: 978055 - RNA, 17 nt, Human
aggcugcugggccaggg

SEQ ID NO: 978056 - RNA, 22 nt, Human
gucucccacuuucuggccucuu

SEQ ID NO: 978057 - RNA, 22 nt, Human
acuggccaugaacuugggaucu

SEQ ID NO: 978058 - RNA, 22 nt, Human
agaagccauugaagcagaccuc

SEQ ID NO: 978059 - RNA, 22 nt, Human
ugaaagguuaaaaguaguauug

SEQ ID NO: 978060 - RNA, 22 nt, Human
ucugccugaaauucacauguaa

SEQ ID NO: 978061 - RNA, 22 nt, Human
aucuauuucugcuaauaacaau

SEQ ID NO: 978062 - RNA, 22 nt, Human
ugaaauauuuagagaguaaguu

SEQ ID NO: 978063 - RNA, 22 nt, Human
ggccucgcggcuucugguggcu

SEQ ID NO: 978064 - RNA, 22 nt, Human
ccacagccauuccagggaggcu

SEQ ID NO: 978065 - RNA, 22 nt, Human
gccaggagggaaaggacaauuu

SEQ ID NO: 978066 - RNA, 22 nt, Human
ugggagcucagaaagggagguc

SEQ ID NO: 978067 - RNA, 22 nt, Human
cugugucccccucagccaggug

SEQ ID NO: 978068 - RNA, 22 nt, Human
ggcuguggggggagccugcccg

SEQ ID NO: 978069 - RNA, 23 nt, Human
ccugugugcccuuaauucacagc

SEQ ID NO: 978070 - RNA, 22 nt, Human
uaucuuugcaaauaucucuaag

SEQ ID NO: 978071 - RNA, 22 nt, Human
uaaguucaguuggucgaaguag

SEQ ID NO: 978072 - RNA, 22 nt, Human
aguugcagacgcagagauguug

SEQ ID NO: 978073 - RNA, 22 nt, Human
cucuggaguucuucaagcuacu

SEQ ID NO: 978074 - RNA, 22 nt, Human
acuuguucauugaguacauaug

SEQ ID NO: 978075 - RNA, 18 nt, Human
uggagccagcucuaggau

SEQ ID NO: 978076 - RNA, 22 nt, Human
cggggcuguagcacagcugagc

SEQ ID NO: 978077 - RNA, 22 nt, Human
aaggcagcacagcaacugcuca

SEQ ID NO: 978078 - RNA, 22 nt, Human
uaaugcuuaacagcuggcuuuu

SEQ ID NO: 978079 - RNA, 22 nt, Human
ccagagagauugcuucuaaaga

SEQ ID NO: 978080 - RNA, 22 nt, Human
ccagcagagucuaggaaggagg

SEQ ID NO: 978081 - RNA, 22 nt, Human
ccaaagagcuagaauuauaggc

SEQ ID NO: 978082 - RNA, 22 nt, Human
gaggggcagagguagagaacaa

SEQ ID NO: 978083 - RNA, 22 nt, Human
gaggggcuugaggcccugaugg

SEQ ID NO: 978084 - RNA, 22 nt, Human
aguguuaagagaaaauucugcu

SEQ ID NO: 978085 - RNA, 22 nt, Human
auuuugaugcuaucuaaugaau

SEQ ID NO: 978086 - RNA, 22 nt, Human
uuuaaucaggcaaagcauaaua

SEQ ID NO: 978087 - RNA, 22 nt, Human
gcagggcuguucaggagggugg

SEQ ID NO: 978088 - RNA, 22 nt, Human
cauggccucaaaggacugcaga

SEQ ID NO: 978089 - RNA, 22 nt, Human
uauuucuggcuuugagggugau

SEQ ID NO: 978090 - RNA, 22 nt, Human
uccagcagguuggucaggugca

SEQ ID NO: 978091 - RNA, 22 nt, Human
uaaggcacacaguugcugcaug

SEQ ID NO: 978092 - RNA, 22 nt, Human
uggcucuggugcgggcuccugc

SEQ ID NO: 978093 - RNA, 22 nt, Human
cucaggaggaggaaguucauug

SEQ ID NO: 978094 - RNA, 23 nt, Human
uuacuuuugcaccaaccuaauau

SEQ ID NO: 978095 - RNA, 22 nt, Human
uggcagucuggguuggcaguua

SEQ ID NO: 978096 - RNA, 22 nt, Human
aguccaggaguugggugacauu

SEQ ID NO: 978097 - RNA, 22 nt, Human
acuaggggcucaggcccaggga

SEQ ID NO: 978098 - RNA, 22 nt, Human
ucacaagaauuuguagaugaaa

SEQ ID NO: 978099 - RNA, 23 nt, Human
cuggccuccgacacuggccaaga

SEQ ID NO: 978100 - RNA, 22 nt, Human
ggagauagacuuggugagccac

SEQ ID NO: 978101 - RNA, 22 nt, Human
cauaagaaauuuaacagaacuu

SEQ ID NO: 978102 - RNA, 22 nt, Human
agucauauguggcauuuucuaa

SEQ ID NO: 978103 - RNA, 19 nt, Human
agugucaucagcuacucag

SEQ ID NO: 978104 - RNA, 22 nt, Human
aaucuggcauuugagaguagga

SEQ ID NO: 978105 - RNA, 22 nt, Human
aaagacauuagauuaacguaca

SEQ ID NO: 978106 - RNA, 22 nt, Human
uaauuuauuucaacugccaagg

SEQ ID NO: 978107 - RNA, 22 nt, Human
agccuccacagaugcaaagggc

SEQ ID NO: 978108 - RNA, 22 nt, Human
cucuggagguugagcccagcaa

SEQ ID NO: 978109 - RNA, 19 nt, Human
uggcagaggcaguuuguac

SEQ ID NO: 978110 - RNA, 22 nt, Human
agcagagcgccugcucagaggg

SEQ ID NO: 978111 - RNA, 22 nt, Human
aggcacugacagauucuguguc

SEQ ID NO: 978112 - RNA, 22 nt, Human
uguggugagaaacugguagauu

SEQ ID NO: 978113 - RNA, 22 nt, Human
ucuggccaggggucccugaagg

SEQ ID NO: 978114 - RNA, 22 nt, Human
gaagccaagugcaaaugccuua

SEQ ID NO: 978115 - RNA, 22 nt, Human
ccaggagccacucaggcccaca

SEQ ID NO: 978116 - RNA, 22 nt, Human
aaguucaaggugauaguggcag

SEQ ID NO: 978117 - RNA, 22 nt, Human
ucuagaaaaaaacugcugugga

SEQ ID NO: 978118 - RNA, 18 nt, Human
agagaugguguagaguuu

SEQ ID NO: 978119 - RNA, 22 nt, Human
aaagaacaucggagugggcggg

SEQ ID NO: 978120 - RNA, 20 nt, Human
aggcucagcugagcucuugg

SEQ ID NO: 978121 - RNA, 22 nt, Human
uggcucagcuuacuuuugaggg

SEQ ID NO: 978122 - RNA, 22 nt, Human
ucuccugggcuugguugaaguu

SEQ ID NO: 978123 - RNA, 22 nt, Human
cccaggagacagaaacagaggu

SEQ ID NO: 978124 - RNA, 22 nt, Human
aaagcacauuacaagcucaguc

SEQ ID NO: 978125 - RNA, 22 nt, Human
uccugggcuguggccccgggca

SEQ ID NO: 978126 - RNA, 22 nt, Human
ggccaccuuccaguugccugca

SEQ ID NO: 978127 - RNA, 22 nt, Human
uugcaaaugugaauaauuacac

SEQ ID NO: 978128 - RNA, 22 nt, Human
uuucaagagggaacugaacaca

SEQ ID NO: 978129 - RNA, 22 nt, Human
uccugccugcaaucccagcacu

SEQ ID NO: 978130 - RNA, 22 nt, Human
ugaauaguccuuggaauaacug

SEQ ID NO: 978131 - RNA, 22 nt, Human
uggccugcagaggcuguggggc

SEQ ID NO: 978132 - RNA, 22 nt, Human
ccuccuggguucaagcgauucu

SEQ ID NO: 978133 - RNA, 22 nt, Human
ucagucuucccuccagugcaac

SEQ ID NO: 978134 - RNA, 22 nt, Human
uacuaaauaguuuaauuccuca

SEQ ID NO: 978135 - RNA, 22 nt, Human
cuggcucaggaaaguugcugcu

SEQ ID NO: 978136 - RNA, 22 nt, Human
aacaaauggggccuuguaugaa

SEQ ID NO: 978137 - RNA, 22 nt, Human
gcaggagacaacuguaaggaga

SEQ ID NO: 978138 - RNA, 22 nt, Human
cuccugggagucuuccuggaug

SEQ ID NO: 978139 - RNA, 22 nt, Human
ucauugaauuugguucaauaug

SEQ ID NO: 978140 - RNA, 22 nt, Human
gucaggauuaaugggaguaugc

SEQ ID NO: 978141 - RNA, 22 nt, Human
cugagggugcuauucuugccuu

SEQ ID NO: 978142 - RNA, 22 nt, Human
gaggccagaagugccucgggcu

SEQ ID NO: 978143 - RNA, 22 nt, Human
ccaagaugaucuuuacaguguu

SEQ ID NO: 978144 - RNA, 22 nt, Human
cagggcaggaauuugacauugc

SEQ ID NO: 978145 - RNA, 22 nt, Human
acaguacauaauccugagucug

SEQ ID NO: 978146 - RNA, 22 nt, Human
ugccugucuuaauaucuggaaa

SEQ ID NO: 978147 - RNA, 22 nt, Human
acugccauuggucaaaugagug

SEQ ID NO: 978148 - RNA, 22 nt, Human
uucuucaaauagcagggaguca

SEQ ID NO: 978149 - RNA, 22 nt, Human
augucuuuggcuuugacauggc

SEQ ID NO: 978150 - RNA, 22 nt, Human
ccaggggaaacagggagcacuc

SEQ ID NO: 978151 - RNA, 22 nt, Human
caaaaguaccuugugugcuuug

SEQ ID NO: 978152 - RNA, 22 nt, Human
caggaaagaaaugagaacacca

SEQ ID NO: 978153 - RNA, 22 nt, Human
uguggcugucuguucuccuagg

SEQ ID NO: 978154 - RNA, 23 nt, Human
ccuucagaagaaguaacaggggc

SEQ ID NO: 978155 - RNA, 19 nt, Human
agucccaggcccgaaagag

SEQ ID NO: 978156 - RNA, 22 nt, Human
gucaaacaaauuaacauaucca

SEQ ID NO: 978157 - RNA, 22 nt, Human
agggagugguuaagaaggugca

SEQ ID NO: 978158 - RNA, 21 nt, Human
cucucugcuuaugaauaguga

SEQ ID NO: 978159 - RNA, 22 nt, Human
ccugccaggcuuugggcuucug

SEQ ID NO: 978160 - RNA, 22 nt, Human
aggacuccauguguccuggaga

SEQ ID NO: 978161 - RNA, 22 nt, Human
ucccagcauaacaaacugcccg

SEQ ID NO: 978162 - RNA, 22 nt, Human
guggccugccgugugguauggg

SEQ ID NO: 978163 - RNA, 22 nt, Human
cagggcugagaauuuagagaca

SEQ ID NO: 978164 - RNA, 22 nt, Human
ucauuucccuccuacaaagagg

SEQ ID NO: 978165 - RNA, 22 nt, Human
uaugaaacauucauacaaauaa

SEQ ID NO: 978166 - RNA, 22 nt, Human
ggaaagagcuaaaagggugaga

SEQ ID NO: 978167 - RNA, 20 nt, Human
uccagaggccacauccagug

SEQ ID NO: 978168 - RNA, 22 nt, Human
aacagacauauuuuuaauaugc

SEQ ID NO: 978169 - RNA, 22 nt, Human
ugauuaacugucuauuaaucau

SEQ ID NO: 978170 - RNA, 22 nt, Human
cagagcugcgcuuuuuccuggu

SEQ ID NO: 978171 - RNA, 22 nt, Human
gugggggcaggcagugcuagga

SEQ ID NO: 978172 - RNA, 22 nt, Human
auagaguccaaaguaugaauau

SEQ ID NO: 978173 - RNA, 19 nt, Human
ccaguagagacagcugcag

SEQ ID NO: 978174 - RNA, 22 nt, Human
aagcagccacuggccaguuaua

SEQ ID NO: 978175 - RNA, 22 nt, Human
gccuggcugggcaccaggggag

SEQ ID NO: 978176 - RNA, 22 nt, Human
aauucaugaguagaaucuauau

SEQ ID NO: 978177 - RNA, 22 nt, Human
ggcuuucuagaucuagcucugu

SEQ ID NO: 978178 - RNA, 22 nt, Human
ggaugcaggaguugaagaagga

SEQ ID NO: 978179 - RNA, 22 nt, Human
aauuuuaagcauaugacugguu

SEQ ID NO: 978180 - RNA, 22 nt, Human
uugcagcugcaguaaauguuca

SEQ ID NO: 978181 - RNA, 22 nt, Human
gcagggacugugaucucacaga

SEQ ID NO: 978182 - RNA, 22 nt, Human
gccagggcucgcggucccucgu

SEQ ID NO: 978183 - RNA, 22 nt, Human
agaggucagauuucuccuggug

SEQ ID NO: 978184 - RNA, 22 nt, Human
ugagaaaagguugagaugauaa

SEQ ID NO: 978185 - RNA, 22 nt, Human
ggcagaagauaggacagggaau

SEQ ID NO: 978186 - RNA, 22 nt, Human
guuuacaaauauuuuaaauggu

SEQ ID NO: 978187 - RNA, 22 nt, Human
ccaggauggggagcagauagaa

SEQ ID NO: 978188 - RNA, 22 nt, Human
accaggggaugguuggcacugu

SEQ ID NO: 978189 - RNA, 22 nt, Human
ccacugucagaggggcugugcc

SEQ ID NO: 978190 - RNA, 22 nt, Human
ccucagcucuucccugugcaca

SEQ ID NO: 978191 - RNA, 22 nt, Human
acucugcuggcugcagggcagc

SEQ ID NO: 978192 - RNA, 22 nt, Human
aaugugaaaccgcacagaauaa

SEQ ID NO: 978193 - RNA, 22 nt, Human
ugaggcaggagguugagaacug

SEQ ID NO: 978194 - RNA, 22 nt, Human
ccugccaggagcuggugcugca

SEQ ID NO: 978195 - RNA, 22 nt, Human
gaauacaugauacaugaacugc

SEQ ID NO: 978196 - RNA, 21 nt, Human
gauuugcagaaacuagacagg

SEQ ID NO: 978197 - RNA, 22 nt, Human
cccucugcucaggugcauaggc

SEQ ID NO: 978198 - RNA, 22 nt, Human
gcuggcuguuggagguaccugc

SEQ ID NO: 978199 - RNA, 22 nt, Human
gucucugcucuagagucuguga

SEQ ID NO: 978200 - RNA, 22 nt, Human
aacaucuuuuuguuugcugaaa

SEQ ID NO: 978201 - RNA, 22 nt, Human
agaaaguucacugguauauuuu

SEQ ID NO: 978202 - RNA, 18 nt, Human
cugggucuccaggcugcc

SEQ ID NO: 978203 - RNA, 22 nt, Human
caggcagcccugcaccaagugu

SEQ ID NO: 978204 - RNA, 22 nt, Human
uucaggauuauacucucuuccc

SEQ ID NO: 978205 - RNA, 19 nt, Human
acccagagcccuuugcagg

SEQ ID NO: 978206 - RNA, 23 nt, Human
ucccagccucuucucuugcauac

SEQ ID NO: 978207 - RNA, 22 nt, Human
uucaggaugaaagugugcaaca

SEQ ID NO: 978208 - RNA, 18 nt, Human
cagaagcaggcagugcag

SEQ ID NO: 978209 - RNA, 22 nt, Human
auauaaagagcuuaguauagug

SEQ ID NO: 978210 - RNA, 22 nt, Human
agaauuuuugauuaucuacucg

SEQ ID NO: 978211 - RNA, 22 nt, Human
gugcauuugugcaugcacaugu

SEQ ID NO: 978212 - RNA, 21 nt, Human
aggugccaaggagaagcaggc

SEQ ID NO: 978213 - RNA, 22 nt, Human
uggccuuccuggugacucauga

SEQ ID NO: 978214 - RNA, 22 nt, Human
ucauuucucccggccaaaaacu

SEQ ID NO: 978215 - RNA, 17 nt, Human
cugagcauccgugcucu

SEQ ID NO: 978216 - RNA, 22 nt, Human
agcuguucccucacugcaguca

SEQ ID NO: 978217 - RNA, 22 nt, Human
caacauuucaaggucuuuagga

SEQ ID NO: 978218 - RNA, 22 nt, Human
cugagauggccacugggucuca

SEQ ID NO: 978219 - RNA, 22 nt, Human
ugagccuggccugcagagacca

SEQ ID NO: 978220 - RNA, 22 nt, Human
cuggcucauccagguguugcuc

SEQ ID NO: 978221 - RNA, 22 nt, Human
aggggagguggcagaaaugugc

SEQ ID NO: 978222 - RNA, 22 nt, Human
aaaguucagugccuucuauaca

SEQ ID NO: 978223 - RNA, 22 nt, Human
uucuaaagugcaaucugacaga

SEQ ID NO: 978224 - RNA, 22 nt, Human
uccuuucaccaaaaaguguugu

SEQ ID NO: 978225 - RNA, 22 nt, Human
uccagggcuuggcugggacggu

SEQ ID NO: 978226 - RNA, 21 nt, Human
gcugcugccccuagugaggcc

SEQ ID NO: 978227 - RNA, 22 nt, Human
gccuggagaccugcuccucuac

SEQ ID NO: 978228 - RNA, 22 nt, Human
cguuggagacacuugaggacuu

SEQ ID NO: 978229 - RNA, 22 nt, Human
uuuauuugucuugccauuuagu

SEQ ID NO: 978230 - RNA, 22 nt, Human
cuccuggaggauagugacuggg

SEQ ID NO: 978231 - RNA, 22 nt, Human
ggccacaacuugcuccuagccc

SEQ ID NO: 978232 - RNA, 22 nt, Human
guuguuuugcaggauccuuaca

SEQ ID NO: 978233 - RNA, 20 nt, Human
uuucugugcccaggucuguu

SEQ ID NO: 978234 - RNA, 22 nt, Human
ccagcugauucgguggugguug

SEQ ID NO: 978235 - RNA, 22 nt, Human
gcugcuggcaucuagggggugg

SEQ ID NO: 978236 - RNA, 20 nt, Human
ugcagagcuggcuggcuccu

SEQ ID NO: 978237 - RNA, 22 nt, Human
uacucagagucauugcccuucu

SEQ ID NO: 978238 - RNA, 22 nt, Human
aacaugcugccuuucuacgagu

SEQ ID NO: 978239 - RNA, 22 nt, Human
ucccaggacccaggcauucaca

SEQ ID NO: 978240 - RNA, 22 nt, Human
aguggugcugcgcgcggagcuc

SEQ ID NO: 978241 - RNA, 22 nt, Human
cacauugaaaugacccaauaau

SEQ ID NO: 978242 - RNA, 22 nt, Human
gcaggcuggaggcuguucuggg

SEQ ID NO: 978243 - RNA, 22 nt, Human
cucccuggugacucccaaagcu

SEQ ID NO: 978244 - RNA, 22 nt, Human
ugaaauguguaauguggaugcc

SEQ ID NO: 978245 - RNA, 22 nt, Human
caggccugacccugagcuucac

SEQ ID NO: 978246 - RNA, 22 nt, Human
aguggcaggaaaguggaagaga

SEQ ID NO: 978247 - RNA, 22 nt, Human
gucccucugugucccugcaguc

SEQ ID NO: 978248 - RNA, 22 nt, Human
gcguggugcugcccugcacaca

SEQ ID NO: 978249 - RNA, 22 nt, Human
gugcugcucacaucuggaggua

SEQ ID NO: 978250 - RNA, 22 nt, Human
uggagcaggaagucuauggcug

SEQ ID NO: 978251 - RNA, 22 nt, Human
acaugcauucucuaaaagcaaa

SEQ ID NO: 978252 - RNA, 22 nt, Human
augaguaagaccauaauuuuug

SEQ ID NO: 978253 - RNA, 22 nt, Human
guaagagcacugucuccugcug

SEQ ID NO: 978254 - RNA, 21 nt, Human
ucuugaaaauuguagcaguuu

SEQ ID NO: 978255 - RNA, 22 nt, Human
aggaaaaaccuguuaaugguag

SEQ ID NO: 978256 - RNA, 22 nt, Human
cagcugccuguauuguccucau

SEQ ID NO: 978257 - RNA, 22 nt, Human
gacaggguacgggcuaggcaca

SEQ ID NO: 978258 - RNA, 23 nt, Human
aggaacugaggccuagggaggua

SEQ ID NO: 978259 - RNA, 22 nt, Human
aggccucacauugggcuucaag

SEQ ID NO: 978260 - RNA, 22 nt, Human
agagcugcaggguggacccagg

SEQ ID NO: 978261 - RNA, 22 nt, Human
ccugucuggaacauggccuguu

SEQ ID NO: 978262 - RNA, 22 nt, Human
agcugcccugguaagauugaug

SEQ ID NO: 978263 - RNA, 22 nt, Human
caggauccccaggucgccgucc

SEQ ID NO: 978264 - RNA, 22 nt, Human
cauugcucaggcccagcaggaa

SEQ ID NO: 978265 - RNA, 22 nt, Human
guucuucagaggggaaagaacc

SEQ ID NO: 978266 - RNA, 22 nt, Human
agagaacacgugcaucugcaau

SEQ ID NO: 978267 - RNA, 22 nt, Human
ggcagcugggucacaccgaucu

SEQ ID NO: 978268 - RNA, 22 nt, Human
gcuguggccaacaaaccacuuu

SEQ ID NO: 978269 - RNA, 22 nt, Human
aauccaggguguggccuuucca

SEQ ID NO: 978270 - RNA, 22 nt, Human
aggcuuccgaguagcugggacu

SEQ ID NO: 978271 - RNA, 22 nt, Human
ugucuucaguaaaauacacuau

SEQ ID NO: 978272 - RNA, 20 nt, Human
ucagggcaugggacagcccc

SEQ ID NO: 978273 - RNA, 22 nt, Human
uaugcauagguaucuauacuca

SEQ ID NO: 978274 - RNA, 22 nt, Human
ggcacugaucugauuucccucc

SEQ ID NO: 978275 - RNA, 22 nt, Human
ucucagggccucccucuguuuc

SEQ ID NO: 978276 - RNA, 22 nt, Human
uaggaggguuagagggaaauau

SEQ ID NO: 978277 - RNA, 22 nt, Human
uggugcuguggaggggcagaag

SEQ ID NO: 978278 - RNA, 22 nt, Human
ggccucucuggcauggcugccc

SEQ ID NO: 978279 - RNA, 22 nt, Human
gcuguucacauuuugggccaaa

SEQ ID NO: 978280 - RNA, 22 nt, Human
uuuaggaucaaugagaaagucu

SEQ ID NO: 978281 - RNA, 22 nt, Human
gcaggggaguccacucuaugca

SEQ ID NO: 978282 - RNA, 19 nt, Human
ugucucagugucccuuccu

SEQ ID NO: 978283 - RNA, 22 nt, Human
auuucugauaaacguaagcugc

SEQ ID NO: 978284 - RNA, 22 nt, Human
uccucagcaaacacuucacucu

SEQ ID NO: 978285 - RNA, 22 nt, Human
uuucauaauagugcaguuuguu

SEQ ID NO: 978286 - RNA, 22 nt, Human
gcuggccauauauuuugcuguu

SEQ ID NO: 978287 - RNA, 22 nt, Human
caggacagagcccagacugugu

SEQ ID NO: 978288 - RNA, 22 nt, Human
agcugcccuucucuugcccuug

SEQ ID NO: 978289 - RNA, 22 nt, Human
gggaaggagguggcuugaagug

SEQ ID NO: 978290 - RNA, 22 nt, Human
agcagcauuaugauauaucuua

SEQ ID NO: 978291 - RNA, 22 nt, Human
gugcagggagcccagaaggucc

SEQ ID NO: 978292 - RNA, 22 nt, Human
uuucaaacauaucuucauuacu

SEQ ID NO: 978293 - RNA, 22 nt, Human
ccagggcaggggcuggaguuca

SEQ ID NO: 978294 - RNA, 22 nt, Human
ccugucugaggaggugcucuuu

SEQ ID NO: 978295 - RNA, 22 nt, Human
gccuggagaaaggaagguggga

SEQ ID NO: 978296 - RNA, 22 nt, Human
gucuggggaagucagggcauca

SEQ ID NO: 978297 - RNA, 22 nt, Human
uagcacaggucuuguugccauu

SEQ ID NO: 978298 - RNA, 22 nt, Human
uccuucuuucccccuagucauu

SEQ ID NO: 978299 - RNA, 22 nt, Human
ucccagcauuaaugccugucag

SEQ ID NO: 978300 - RNA, 22 nt, Human
acaggcucucagccaguuggca

SEQ ID NO: 978301 - RNA, 22 nt, Human
cucuucuugcuagacugagugc

SEQ ID NO: 978302 - RNA, 22 nt, Human
gcauuguccugcuucugagugu

SEQ ID NO: 978303 - RNA, 22 nt, Human
gggaagggagggaccucagucu

SEQ ID NO: 978304 - RNA, 22 nt, Human
auaagguaugaaaaguaaaugg

SEQ ID NO: 978305 - RNA, 22 nt, Human
augaagcugaccuugucuugcu

SEQ ID NO: 978306 - RNA, 22 nt, Human
ugcccaggaucuggcgaugcuc

SEQ ID NO: 978307 - RNA, 22 nt, Human
cccaggcugaguuagagguguc

SEQ ID NO: 978308 - RNA, 22 nt, Human
caguggccaugguggcaggggu

SEQ ID NO: 978309 - RNA, 22 nt, Human
aagacauuacuggaaucugacu

SEQ ID NO: 978310 - RNA, 22 nt, Human
agaucaaagccaugagagauuu

SEQ ID NO: 978311 - RNA, 22 nt, Human
ugcuggguuaccuaagccuaaa

SEQ ID NO: 978312 - RNA, 22 nt, Human
ugcugccuuugggaccuggccu

SEQ ID NO: 978313 - RNA, 22 nt, Human
ccugccuggcugucagcagagc

SEQ ID NO: 978314 - RNA, 22 nt, Human
caguacuuguccucagguguua

SEQ ID NO: 978315 - RNA, 21 nt, Human
uggcucuguucaauauaugga

SEQ ID NO: 978316 - RNA, 22 nt, Human
ucaaaacacuauuaccuuuaau

SEQ ID NO: 978317 - RNA, 22 nt, Human
ucugcagguguuggaaggguca

SEQ ID NO: 978318 - RNA, 22 nt, Human
uccaggagguaugaguggcccc

SEQ ID NO: 978319 - RNA, 22 nt, Human
aagcuguucucuaaguuucaug

SEQ ID NO: 978320 - RNA, 22 nt, Human
ucccagccacagguguagcccu

SEQ ID NO: 978321 - RNA, 22 nt, Human
cuucaagagaaugcagggaugu

SEQ ID NO: 978322 - RNA, 22 nt, Human
gugguaaucggauucuuaccgg

SEQ ID NO: 978323 - RNA, 22 nt, Human
cuuaaauuggaugaguuaaguu

SEQ ID NO: 978324 - RNA, 20 nt, Human
cuucaggacccauccucccc

SEQ ID NO: 978325 - RNA, 22 nt, Human
cagucccagaagagccugggag

SEQ ID NO: 978326 - RNA, 22 nt, Human
cucugggcaaagaugccucauc

SEQ ID NO: 978327 - RNA, 22 nt, Human
uguauuuugugaggaucacucu

SEQ ID NO: 978328 - RNA, 22 nt, Human
auauuccauugguuucccuucu

SEQ ID NO: 978329 - RNA, 22 nt, Human
cauguuuucuaggcuuucacaa

SEQ ID NO: 978330 - RNA, 22 nt, Human
ucugucacccgagcaggcgaga

SEQ ID NO: 978331 - RNA, 22 nt, Human
gcuaccugagcaagagcuucaa

SEQ ID NO: 978332 - RNA, 22 nt, Human
gugccuggagcuaauguguaua

SEQ ID NO: 978333 - RNA, 20 nt, Human
gucagugucuucaguaguga

SEQ ID NO: 978334 - RNA, 22 nt, Human
gcagcugcaauaggcaucaagc

SEQ ID NO: 978335 - RNA, 22 nt, Human
uauauuuaaauccagguugaaa

SEQ ID NO: 978336 - RNA, 22 nt, Human
gcagggcagcuuagucccuguc

SEQ ID NO: 978337 - RNA, 22 nt, Human
gugacagaguuuuagaucucau

SEQ ID NO: 978338 - RNA, 22 nt, Human
agcagccagagucugaacauua

SEQ ID NO: 978339 - RNA, 22 nt, Human
uuguuuuuaugaacauccagga

SEQ ID NO: 978340 - RNA, 19 nt, Human
ugcauaaauuauauacuuu

SEQ ID NO: 978341 - RNA, 22 nt, Human
ucuaagccuaggaaaugaguuu

SEQ ID NO: 978342 - RNA, 22 nt, Human
cagagacccuaggcaggugaca

SEQ ID NO: 978343 - RNA, 22 nt, Human
uuucaaagguggaagagugaau

SEQ ID NO: 978344 - RNA, 20 nt, Human
agugacagagacuguguggc

SEQ ID NO: 978345 - RNA, 22 nt, Human
gagagugagauaauuucacaua

SEQ ID NO: 978346 - RNA, 22 nt, Human
gcugccacucugagcuugcuuc

SEQ ID NO: 978347 - RNA, 22 nt, Human
aguuuuauuccaaugugcagca

SEQ ID NO: 978348 - RNA, 22 nt, Human
acugaaggaaagccuuugcaug

SEQ ID NO: 978349 - RNA, 19 nt, Human
gaggcgaggcgugcaggag

SEQ ID NO: 978350 - RNA, 18 nt, Human
cugagggcagccccuggg

SEQ ID NO: 978351 - RNA, 18 nt, Human
gccugccuagagcuugcc

SEQ ID NO: 978352 - RNA, 22 nt, Human
aaaauuauggaguaucccaaag

SEQ ID NO: 978353 - RNA, 22 nt, Human
cuaccuuucugacucuugggau

SEQ ID NO: 978354 - RNA, 20 nt, Human
ggucccugcccucugucauc

SEQ ID NO: 978355 - RNA, 22 nt, Human
ucuguucagaauuguaacacuc

SEQ ID NO: 978356 - RNA, 22 nt, Human
aagcuggagaguuaggugaaua

SEQ ID NO: 978357 - RNA, 22 nt, Human
agagagagggaaacugcuaaac

SEQ ID NO: 978358 - RNA, 22 nt, Human
uuucauuauaaaaaguuggcuu

SEQ ID NO: 978359 - RNA, 22 nt, Human
cagaguggcgacccccucagcu

SEQ ID NO: 978360 - RNA, 22 nt, Human
agaugaagauaucugcaggggc

SEQ ID NO: 978361 - RNA, 19 nt, Human
ggcuccuguggcugcagcc

SEQ ID NO: 978362 - RNA, 18 nt, Human
uccagcgugcuccagggc

SEQ ID NO: 978363 - RNA, 22 nt, Human
cucagaguccauaguuuacagu

SEQ ID NO: 978364 - RNA, 22 nt, Human
aaagcucuuuuccaaguauuga

SEQ ID NO: 978365 - RNA, 22 nt, Human
ugucccagguccuagaugacca

SEQ ID NO: 978366 - RNA, 22 nt, Human
gcugccuguguggccacucacu

SEQ ID NO: 978367 - RNA, 22 nt, Human
uuucaauguaacauuuccaggc

SEQ ID NO: 978368 - RNA, 22 nt, Human
gucauuucuguuucuucagugc

SEQ ID NO: 978369 - RNA, 18 nt, Human
aucuuuccauagcauguu

SEQ ID NO: 978370 - RNA, 22 nt, Human
cagagcugucauuugccaguga

SEQ ID NO: 978371 - RNA, 22 nt, Human
uauuccaaaaucccaaacugcc

SEQ ID NO: 978372 - RNA, 22 nt, Human
ccuugggauuucucaugccaau

SEQ ID NO: 978373 - RNA, 22 nt, Human
aaaacauucugugaacucucaa

SEQ ID NO: 978374 - RNA, 22 nt, Human
uggcaguggcucagagugcaga

SEQ ID NO: 978375 - RNA, 21 nt, Human
cagaggcagguccugggacgg

SEQ ID NO: 978376 - RNA, 22 nt, Human
cccaggucugugccagcucuga

SEQ ID NO: 978377 - RNA, 22 nt, Human
ccaaggagaaugacaccaugga

SEQ ID NO: 978378 - RNA, 22 nt, Human
uggcucaggccuacgacgccuu

SEQ ID NO: 978379 - RNA, 22 nt, Human
ggugacuggagggacccaggcc

SEQ ID NO: 978380 - RNA, 22 nt, Human
cucucugaggcaggccuguggg

SEQ ID NO: 978381 - RNA, 22 nt, Human
uggcaccagcaccuagaugggg

SEQ ID NO: 978382 - RNA, 22 nt, Human
gauuaggagggagaggcaagua

SEQ ID NO: 978383 - RNA, 22 nt, Human
acucugagcaucccaagucuua

SEQ ID NO: 978384 - RNA, 22 nt, Human
uugaaauggaagugaaaauucu

SEQ ID NO: 978385 - RNA, 22 nt, Human
caggggcugugggcggagccuc

SEQ ID NO: 978386 - RNA, 22 nt, Human
ccacacugaaccucagugucuu

SEQ ID NO: 978387 - RNA, 22 nt, Human
caaggccaagucucugugaaga

SEQ ID NO: 978388 - RNA, 21 nt, Human
acuguucauuugaugaacugg

SEQ ID NO: 978389 - RNA, 23 nt, Human
ucuggcucuaugugacagcucuc

SEQ ID NO: 978390 - RNA, 20 nt, Human
uacuugaauguugcagcagu

SEQ ID NO: 978391 - RNA, 22 nt, Human
ucaccuuagcuagaggaagaga

SEQ ID NO: 978392 - RNA, 22 nt, Human
auuuguaauuucuuaucugugu

SEQ ID NO: 978393 - RNA, 20 nt, Human
ucugucucugagcuagacuu

SEQ ID NO: 978394 - RNA, 22 nt, Human
ggagcuguaacgagccauugcu

SEQ ID NO: 978395 - RNA, 22 nt, Human
cuguucauggaaaaauaguugg

SEQ ID NO: 978396 - RNA, 22 nt, Human
uagaauauacacuacagcuuaa

SEQ ID NO: 978397 - RNA, 22 nt, Human
auugacaauguauuuguaucug

SEQ ID NO: 978398 - RNA, 21 nt, Human
acccuggguucuccauacccu

SEQ ID NO: 978399 - RNA, 22 nt, Human
uucuuaagcaccuaaaaagugg

SEQ ID NO: 978400 - RNA, 22 nt, Human
cuuuguauucaguugggcugug

SEQ ID NO: 978401 - RNA, 22 nt, Human
cacugcucgcugcagcauggcc

SEQ ID NO: 978402 - RNA, 22 nt, Human
ucaagagauugaauaauaacug

SEQ ID NO: 978403 - RNA, 22 nt, Human
accucugcaaugcaaugucaug

SEQ ID NO: 978404 - RNA, 22 nt, Human
caggggcuguuugccucaggcc

SEQ ID NO: 978405 - RNA, 22 nt, Human
ugaaaucaauugcaauguuuau

SEQ ID NO: 978406 - RNA, 22 nt, Human
accaugggucagccaccucagc

SEQ ID NO: 978407 - RNA, 22 nt, Human
ugagaguauuuuggcauuauca

SEQ ID NO: 978408 - RNA, 22 nt, Human
aaugucaaaggcuauacauuca

SEQ ID NO: 978409 - RNA, 22 nt, Human
ucugccuggguguggagcagag

SEQ ID NO: 978410 - RNA, 22 nt, Human
augggugugaaaauggucaucu

SEQ ID NO: 978411 - RNA, 22 nt, Human
aagaacauuuaugauggcauuu

SEQ ID NO: 978412 - RNA, 22 nt, Human
cccagggaagccauuucugacu

SEQ ID NO: 978413 - RNA, 22 nt, Human
caaaaguaauugugguuuuugc

SEQ ID NO: 978414 - RNA, 22 nt, Human
caaauucucaagguuuauccca

SEQ ID NO: 978415 - RNA, 22 nt, Human
agaggcugcacuugcucaugau

SEQ ID NO: 978416 - RNA, 22 nt, Human
agagcugaauuuggguggugga

SEQ ID NO: 978417 - RNA, 22 nt, Human
ucccuggcugggggcugccuug

SEQ ID NO: 978418 - RNA, 22 nt, Human
gauuucaaccuaacaguaugac

SEQ ID NO: 978419 - RNA, 22 nt, Human
agaggggaggcgaaccagaguc

SEQ ID NO: 978420 - RNA, 19 nt, Human
uggcuuccaucucucucau

SEQ ID NO: 978421 - RNA, 22 nt, Human
cacagaguggaggcuuggccug

SEQ ID NO: 978422 - RNA, 22 nt, Human
uuggccaauccuauuggguggg

SEQ ID NO: 978423 - RNA, 22 nt, Human
gcaggaguguggugggacaucc

SEQ ID NO: 978424 - RNA, 22 nt, Human
ggaaagaccugagauaggaaua

SEQ ID NO: 978425 - RNA, 22 nt, Human
ggcuucucucccccagcuccac

SEQ ID NO: 978426 - RNA, 20 nt, Human
acauguacuaaugaauacag

SEQ ID NO: 978427 - RNA, 22 nt, Human
uauauuaaagugcuuugcagug

SEQ ID NO: 978428 - RNA, 22 nt, Human
acaggcagcacuaaucucuggu

SEQ ID NO: 978429 - RNA, 22 nt, Human
agcgagggaggucugaggacag

SEQ ID NO: 978430 - RNA, 22 nt, Human
cuugaaagcacuuaguaaauua

SEQ ID NO: 978431 - RNA, 21 nt, Human
ucucuacacuuucacuaggcu

SEQ ID NO: 978432 - RNA, 22 nt, Human
caagggcucuuuugaggaaugu

SEQ ID NO: 978433 - RNA, 22 nt, Human
cuccuggacauggagcggagga

SEQ ID NO: 978434 - RNA, 22 nt, Human
uccaggagcauccaggugaagc

SEQ ID NO: 978435 - RNA, 22 nt, Human
uaagacauuugaaaugugaucc

SEQ ID NO: 978436 - RNA, 22 nt, Human
gcugccaugguccaggcuccag

SEQ ID NO: 978437 - RNA, 22 nt, Human
ucugagaguccaucuccaagcc

SEQ ID NO: 978438 - RNA, 22 nt, Human
acaggggcuccgaaggugaggg

SEQ ID NO: 978439 - RNA, 22 nt, Human
ucagaggaaaggucagauggcu

SEQ ID NO: 978440 - RNA, 22 nt, Human
ggcaugggguguauguggcacg

SEQ ID NO: 978441 - RNA, 22 nt, Human
augugucuuucaagguauagaa

SEQ ID NO: 978442 - RNA, 18 nt, Human
auggucucauacugggag

SEQ ID NO: 978443 - RNA, 20 nt, Human
gccugcagguuggaugggau

SEQ ID NO: 978444 - RNA, 22 nt, Human
uuccaaagucauguugcugaua

SEQ ID NO: 978445 - RNA, 22 nt, Human
aaggucauuuaacaauuuauga

SEQ ID NO: 978446 - RNA, 20 nt, Human
cucuccucacccgugucagg

SEQ ID NO: 978447 - RNA, 22 nt, Human
uuugaaaaaggccuuugguaug

SEQ ID NO: 978448 - RNA, 22 nt, Human
cagcuuccaucuccacugcccu

SEQ ID NO: 978449 - RNA, 22 nt, Human
aaaaguaauugaugcaaucgua

SEQ ID NO: 978450 - RNA, 18 nt, Human
ccuggaccugucuccuuu

SEQ ID NO: 978451 - RNA, 22 nt, Human
ggugggcaacauuuggccugag

SEQ ID NO: 978452 - RNA, 22 nt, Human
agaugaaaagauaagcagcaau

SEQ ID NO: 978453 - RNA, 22 nt, Human
ccacagaguuacaaaacaguca

SEQ ID NO: 978454 - RNA, 22 nt, Human
aagcagccuggcaugaugcuuu

SEQ ID NO: 978455 - RNA, 22 nt, Human
caggcagcucuaauggaaagug

SEQ ID NO: 978456 - RNA, 22 nt, Human
cucugagcugaaacaugagcau

SEQ ID NO: 978457 - RNA, 22 nt, Human
cuucuggaggacacuggcccca

SEQ ID NO: 978458 - RNA, 17 nt, Human
ccuuucucuuucaucuc

SEQ ID NO: 978459 - RNA, 22 nt, Human
caauguguuugcauauuaaaau

SEQ ID NO: 978460 - RNA, 22 nt, Human
ccaggccagcaggcacaccugc

SEQ ID NO: 978461 - RNA, 22 nt, Human
auuucccagcuuugaucaguuu

SEQ ID NO: 978462 - RNA, 22 nt, Human
acucuggcccuccugcugccag

SEQ ID NO: 978463 - RNA, 22 nt, Human
gcucugcugucuucuugcaggc

SEQ ID NO: 978464 - RNA, 22 nt, Human
caucaucaaaagugacagagaa

SEQ ID NO: 978465 - RNA, 22 nt, Human
uggcuccuaucaaggagugggu

SEQ ID NO: 978466 - RNA, 17 nt, Human
uguagcuucuccuucuc

SEQ ID NO: 978467 - RNA, 22 nt, Human
aggauguugcuauuggcagucu

SEQ ID NO: 978468 - RNA, 22 nt, Human
ugccagcccaccuuggggccuc

SEQ ID NO: 978469 - RNA, 22 nt, Human
uggagacucugcaucugugaca

SEQ ID NO: 978470 - RNA, 22 nt, Human
aagaaaugcagaaaugugcugg

SEQ ID NO: 978471 - RNA, 22 nt, Human
agccagcucccuccccugcagg

SEQ ID NO: 978472 - RNA, 22 nt, Human
uuuauuuggcauccagggagaa

SEQ ID NO: 978473 - RNA, 22 nt, Human
auacagauguugaauguuauau

SEQ ID NO: 978474 - RNA, 22 nt, Human
agcucugggccaggaacccuaa

SEQ ID NO: 978475 - RNA, 22 nt, Human
cugguacaaaaugcugauauca

SEQ ID NO: 978476 - RNA, 22 nt, Human
uauucacauguacauaugcuca

SEQ ID NO: 978477 - RNA, 22 nt, Human
uguguuauugccacugaagacc

SEQ ID NO: 978478 - RNA, 22 nt, Human
gcuccuggugcuguagagauuu

SEQ ID NO: 978479 - RNA, 22 nt, Human
gggcagcucuggcugugggaag

SEQ ID NO: 978480 - RNA, 22 nt, Human
agaaggccuaacuugggggcaa

SEQ ID NO: 978481 - RNA, 22 nt, Human
cagauccaucucucagaaagag

SEQ ID NO: 978482 - RNA, 22 nt, Human
uacuuuuugucucuuugaaugu

SEQ ID NO: 978483 - RNA, 22 nt, Human
uuggccaagauacgagcacaua

SEQ ID NO: 978484 - RNA, 22 nt, Human
acucagaaugacugaugcugug

SEQ ID NO: 978485 - RNA, 22 nt, Human
uacauguaagacaugagacucu

SEQ ID NO: 978486 - RNA, 22 nt, Human
uuaaaaugcagauucugauuca

SEQ ID NO: 978487 - RNA, 22 nt, Human
cuggcucacaggugagaugcau

SEQ ID NO: 978488 - RNA, 22 nt, Human
gcucccagacugaccagaggug

SEQ ID NO: 978489 - RNA, 22 nt, Human
cuuguaaaagguacauuaugcu

SEQ ID NO: 978490 - RNA, 22 nt, Human
cagucccaugagcccagaacau

SEQ ID NO: 978491 - RNA, 22 nt, Human
agagggcagggcgguaaguccu

SEQ ID NO: 978492 - RNA, 22 nt, Human
cuggccacugguggucauaggc

SEQ ID NO: 978493 - RNA, 19 nt, Human
ggucagcugggcuagaggc

SEQ ID NO: 978494 - RNA, 22 nt, Human
auaucaaacgaaguuauuuuaa

SEQ ID NO: 978495 - RNA, 17 nt, Human
ucaugcccaacuauuac

SEQ ID NO: 978496 - RNA, 22 nt, Human
ccaugagccaggcugaggaagc

SEQ ID NO: 978497 - RNA, 22 nt, Human
agcauuuaugacuaauguaaaa

SEQ ID NO: 978498 - RNA, 22 nt, Human
ucagagaaguaagguggggugc

SEQ ID NO: 978499 - RNA, 22 nt, Human
gugccugugcggacucagggaa

SEQ ID NO: 978500 - RNA, 22 nt, Human
ggcugcagaaguacuuccggau

SEQ ID NO: 978501 - RNA, 22 nt, Human
ucuccuggcaugugggucaucu

SEQ ID NO: 978502 - RNA, 22 nt, Human
gaguguucccacaccccaguug

SEQ ID NO: 978503 - RNA, 22 nt, Human
gaaggaagugcucauacuaguu

SEQ ID NO: 978504 - RNA, 22 nt, Human
gcuggcagaagagcugguucaa

SEQ ID NO: 978505 - RNA, 22 nt, Human
aguguccccuccaagggccugg

SEQ ID NO: 978506 - RNA, 22 nt, Human
agcugcccagcuaggaagaagg

SEQ ID NO: 978507 - RNA, 22 nt, Human
agaauaaauguuggacuuagga

SEQ ID NO: 978508 - RNA, 22 nt, Human
guacucucuugaaggccuuucu

SEQ ID NO: 978509 - RNA, 22 nt, Human
uuccaggacaagauguuucagg

SEQ ID NO: 978510 - RNA, 22 nt, Human
ucaaauaugugauagaagcuaa

SEQ ID NO: 978511 - RNA, 22 nt, Human
aaucuauucccuuucuguaaaa

SEQ ID NO: 978512 - RNA, 22 nt, Human
aauauguucaaaauagaucacu

SEQ ID NO: 978513 - RNA, 22 nt, Human
gugcucaggaagcuguuccugc

SEQ ID NO: 978514 - RNA, 22 nt, Human
guggagacuucuacuagagacc

SEQ ID NO: 978515 - RNA, 23 nt, Human
cagggcugguagggaagagcgug

SEQ ID NO: 978516 - RNA, 22 nt, Human
caguguuccaggcggcagugaa

SEQ ID NO: 978517 - RNA, 19 nt, Human
ccauggcaaugaucugaug

SEQ ID NO: 978518 - RNA, 22 nt, Human
cagggguggcugcagcagaggu

SEQ ID NO: 978519 - RNA, 22 nt, Human
gcaguccucucauuggccuccu

SEQ ID NO: 978520 - RNA, 22 nt, Human
uucauucuuauuugugaucugg

SEQ ID NO: 978521 - RNA, 23 nt, Human
cauaaaauauuaguaugguagca

SEQ ID NO: 978522 - RNA, 22 nt, Human
uugugucuuaaagauuaaaugg

SEQ ID NO: 978523 - RNA, 22 nt, Human
uuaugacauaugaguacaagua

SEQ ID NO: 978524 - RNA, 20 nt, Human
uguuaaaggacacuugcuuu

SEQ ID NO: 978525 - RNA, 22 nt, Human
ugggccugaaggagcugcgccc

SEQ ID NO: 978526 - RNA, 17 nt, Human
acagaggcaggagugga

SEQ ID NO: 978527 - RNA, 22 nt, Human
uagggcaggugaagaaaagcua

SEQ ID NO: 978528 - RNA, 22 nt, Human
cagagcagucuggagauccagc

SEQ ID NO: 978529 - RNA, 22 nt, Human
cuccaggggccagaagccuggc

SEQ ID NO: 978530 - RNA, 22 nt, Human
ccugaagaugcuguggccuggu

SEQ ID NO: 978531 - RNA, 19 nt, Human
aucugccuguuaucacaua

SEQ ID NO: 978532 - RNA, 22 nt, Human
aaugagcuagaccugcuuccuc

SEQ ID NO: 978533 - RNA, 22 nt, Human
ucagccugcgucauggugacac

SEQ ID NO: 978534 - RNA, 22 nt, Human
cuguccuaugaguacucacuag

SEQ ID NO: 978535 - RNA, 22 nt, Human
gaggccacaguccugaggcauc

SEQ ID NO: 978536 - RNA, 22 nt, Human
caaaugcuaacuucuuuccaaa

SEQ ID NO: 978537 - RNA, 22 nt, Human
agcaacagcccugagguucaug

SEQ ID NO: 978538 - RNA, 22 nt, Human
gcaaggcugagcacauuugcau

SEQ ID NO: 978539 - RNA, 18 nt, Human
cugaggccaacuacacug

SEQ ID NO: 978540 - RNA, 22 nt, Human
aggccucuucagggagcaugga

SEQ ID NO: 978541 - RNA, 22 nt, Human
cauacauugcucauucaguauc

SEQ ID NO: 978542 - RNA, 23 nt, Human
uggcucugagagguucagaugcu

SEQ ID NO: 978543 - RNA, 22 nt, Human
agggccagagucuguguagaua

SEQ ID NO: 978544 - RNA, 22 nt, Human
aaggccagccugagagcuaaca

SEQ ID NO: 978545 - RNA, 22 nt, Human
aaggcaguaggaucuuccacag

SEQ ID NO: 978546 - RNA, 22 nt, Human
ggcuauguggucauauaagaua

SEQ ID NO: 978547 - RNA, 22 nt, Human
agggggugcuacuuccagaguu

SEQ ID NO: 978548 - RNA, 22 nt, Human
acaaagugcacaagaugagaac

SEQ ID NO: 978549 - RNA, 22 nt, Human
ugcagggcccuugggguugaac

SEQ ID NO: 978550 - RNA, 22 nt, Human
ugacaguuaagguauacauuca

SEQ ID NO: 978551 - RNA, 22 nt, Human
cccaggaggcagagguuggagc

SEQ ID NO: 978552 - RNA, 22 nt, Human
ccaggagaugauguuggggauu

SEQ ID NO: 978553 - RNA, 22 nt, Human
uaugcacauucacacaaaaaug

SEQ ID NO: 978554 - RNA, 22 nt, Human
cauguuaaugaauuuuugcagu

SEQ ID NO: 978555 - RNA, 22 nt, Human
uuuggaaaguguacaaauuuga

SEQ ID NO: 978556 - RNA, 17 nt, Human
uguggccuucugagcuu

SEQ ID NO: 978557 - RNA, 22 nt, Human
ugcaauaacccaguaucuguga

SEQ ID NO: 978558 - RNA, 22 nt, Human
cccagaggugcuucagaggugc

SEQ ID NO: 978559 - RNA, 22 nt, Human
ggcagcaguggcugcuauuguc

SEQ ID NO: 978560 - RNA, 22 nt, Human
agugcuguuagguuaauauagu

SEQ ID NO: 978561 - RNA, 22 nt, Human
ugcaaacaggagaguaaguaua

SEQ ID NO: 978562 - RNA, 22 nt, Human
aaaagacauaugugggcauucu

SEQ ID NO: 978563 - RNA, 22 nt, Human
uagaaaugcaguguacuguguc

SEQ ID NO: 978564 - RNA, 22 nt, Human
caguagcagggauuauuuuagg

SEQ ID NO: 978565 - RNA, 22 nt, Human
ugugucuguguauacacggcau

SEQ ID NO: 978566 - RNA, 22 nt, Human
acuucuucuucagcugggggau

SEQ ID NO: 978567 - RNA, 22 nt, Human
caaauguguaaggaaguguuag

SEQ ID NO: 978568 - RNA, 22 nt, Human
cagccagccucucaaccaugca

SEQ ID NO: 978569 - RNA, 22 nt, Human
uugaggaguguuuagggugagg

SEQ ID NO: 978570 - RNA, 22 nt, Human
agugacugacaccuguaauccc

SEQ ID NO: 978571 - RNA, 22 nt, Human
ggcacucagagauucaggcugu

SEQ ID NO: 978572 - RNA, 22 nt, Human
ugagagugauugguucgaaugu

SEQ ID NO: 978573 - RNA, 22 nt, Human
gggcagauggggcacaggcuga

SEQ ID NO: 978574 - RNA, 22 nt, Human
uugagcacaacucuuggagagc

SEQ ID NO: 978575 - RNA, 22 nt, Human
uuucuaaaugguggcugcauug

SEQ ID NO: 978576 - RNA, 22 nt, Human
uugcauguuauuuaaucuguau

SEQ ID NO: 978577 - RNA, 22 nt, Human
caagccucagaaucuucuccau

SEQ ID NO: 978578 - RNA, 22 nt, Human
aucaguuugagugcugugucaa

SEQ ID NO: 978579 - RNA, 19 nt, Human
ucuggcuccgccucuuagu

SEQ ID NO: 978580 - RNA, 22 nt, Human
cagauggcauuuccuuucuggc

SEQ ID NO: 978581 - RNA, 22 nt, Human
cagaguucaaagccugcuggga

SEQ ID NO: 978582 - RNA, 22 nt, Human
acagacagauuuugucugaugu

SEQ ID NO: 978583 - RNA, 22 nt, Human
cagagccaggguugcaccccug

SEQ ID NO: 978584 - RNA, 22 nt, Human
aagagcugcaucuaagccauga

SEQ ID NO: 978585 - RNA, 18 nt, Human
agugugugcccuuucagg

SEQ ID NO: 978586 - RNA, 22 nt, Human
acagguggggaggcugagguuc

SEQ ID NO: 978587 - RNA, 22 nt, Human
auucaguuaaaaacuguacuuc

SEQ ID NO: 978588 - RNA, 22 nt, Human
aucaguuuaaaugggcuguugg

SEQ ID NO: 978589 - RNA, 22 nt, Human
gcaccugcaggaugagccaggg

SEQ ID NO: 978590 - RNA, 22 nt, Human
agccucucuccagcuuggcaga

SEQ ID NO: 978591 - RNA, 22 nt, Human
cugcaucacagcaggaggcaca

SEQ ID NO: 978592 - RNA, 22 nt, Human
gcccaggcuggagugcaguagc

SEQ ID NO: 978593 - RNA, 22 nt, Human
uuugcaauuugugcugcaaaug

SEQ ID NO: 978594 - RNA, 22 nt, Human
gaaggcaggcuucugauuaggu

SEQ ID NO: 978595 - RNA, 22 nt, Human
cuuugaauugccguuucaucug

SEQ ID NO: 978596 - RNA, 22 nt, Human
agggaauccaucuaucuucauu

SEQ ID NO: 978597 - RNA, 22 nt, Human
ucuggccagaaagacuugaugu

SEQ ID NO: 978598 - RNA, 22 nt, Human
gucauucuuaacaacucaguag

SEQ ID NO: 978599 - RNA, 22 nt, Human
ugcagagguuuccaggcaaguu

SEQ ID NO: 978600 - RNA, 22 nt, Human
uccaggaggcagggcugugccc

SEQ ID NO: 978601 - RNA, 23 nt, Human
aggcagcuggguagcaucuuucu

SEQ ID NO: 978602 - RNA, 22 nt, Human
ugagaauaggcauagaaccugg

SEQ ID NO: 978603 - RNA, 22 nt, Human
ucugagaguacgggcugcgcgc

SEQ ID NO: 978604 - RNA, 22 nt, Human
agucuucacucuucacuacuau

SEQ ID NO: 978605 - RNA, 22 nt, Human
cucuuuccaggguaccccaggu

SEQ ID NO: 978606 - RNA, 22 nt, Human
ugcuggguagaaguauuagucu

SEQ ID NO: 978607 - RNA, 22 nt, Human
ugaagcugugggcaguggagcc

SEQ ID NO: 978608 - RNA, 22 nt, Human
guggccaagagauaaaauugug

SEQ ID NO: 978609 - RNA, 22 nt, Human
aaguuugcauagauuaagcauu

SEQ ID NO: 978610 - RNA, 22 nt, Human
uagcauuuauggucaugugucc

SEQ ID NO: 978611 - RNA, 22 nt, Human
ugggugagugggaaaagcccag

SEQ ID NO: 978612 - RNA, 22 nt, Human
acaugaaaccugagucuaacuc

SEQ ID NO: 978613 - RNA, 22 nt, Human
agagggcauuaacucugucuug

SEQ ID NO: 978614 - RNA, 22 nt, Human
acccaggaggcaagguugcagu

SEQ ID NO: 978615 - RNA, 22 nt, Human
cuggaggcugaguugggucucc

SEQ ID NO: 978616 - RNA, 18 nt, Human
cugaggcuggcaggagcc

SEQ ID NO: 978617 - RNA, 22 nt, Human
cagguaagagacggauuggccc

SEQ ID NO: 978618 - RNA, 22 nt, Human
uuguaacagcugcuuaauagag

SEQ ID NO: 978619 - RNA, 22 nt, Human
cucaggaugcaggucacaggac

SEQ ID NO: 978620 - RNA, 22 nt, Human
ucuucucuccugcuuggcagaa

SEQ ID NO: 978621 - RNA, 22 nt, Human
cucccacuccuggcucaccaca

SEQ ID NO: 978622 - RNA, 22 nt, Human
cugggagguggagguugcauug

SEQ ID NO: 978623 - RNA, 22 nt, Human
cugggucuccggcagccucggg

SEQ ID NO: 978624 - RNA, 22 nt, Human
aggcagcauuugaauccagguc

SEQ ID NO: 978625 - RNA, 22 nt, Human
cuugaaagcacuccuuugacug

SEQ ID NO: 978626 - RNA, 19 nt, Human
ucucacaguuuccuugccu

SEQ ID NO: 978627 - RNA, 22 nt, Human
cucacugacgaggaagcugaga

SEQ ID NO: 978628 - RNA, 16 nt, Human
gucuggccuaccugcc

SEQ ID NO: 978629 - RNA, 22 nt, Human
ggccuagggaguggccaugccu

SEQ ID NO: 978630 - RNA, 22 nt, Human
gcuuccuucuaccacaucaugc

SEQ ID NO: 978631 - RNA, 22 nt, Human
cugcuuuggcagaagucagcua

SEQ ID NO: 978632 - RNA, 22 nt, Human
aagcugccuugcugaggagaaa

SEQ ID NO: 978633 - RNA, 22 nt, Human
gggaucagaaacauagcccuga

SEQ ID NO: 978634 - RNA, 22 nt, Human
ccagaggugcugggagaggucu

SEQ ID NO: 978635 - RNA, 22 nt, Human
uggucaaauuuagucucuggaa

SEQ ID NO: 978636 - RNA, 18 nt, Human
accuucauuccuuugccu

SEQ ID NO: 978637 - RNA, 22 nt, Human
gcagcaggcuuuucauaccuug

SEQ ID NO: 978638 - RNA, 22 nt, Human
gacagcagggacauguaggaag

SEQ ID NO: 978639 - RNA, 22 nt, Human
uccagggagauggcagaggcug

SEQ ID NO: 978640 - RNA, 22 nt, Human
cuaaaugacuuccagugguuau

SEQ ID NO: 978641 - RNA, 22 nt, Human
gcacugaaugccaaaguguagg

SEQ ID NO: 978642 - RNA, 22 nt, Human
uuugcauuuccagaguagcaga

SEQ ID NO: 978643 - RNA, 22 nt, Human
cuguuuauagcagagcaagccu

SEQ ID NO: 978644 - RNA, 22 nt, Human
gccuggucucuuucaugucagu

SEQ ID NO: 978645 - RNA, 22 nt, Human
uuguuucagcuguaugcuaugu

SEQ ID NO: 978646 - RNA, 22 nt, Human
uuugaacugauaaucuucuguu

SEQ ID NO: 978647 - RNA, 19 nt, Human
agucucacccaagcagucu

SEQ ID NO: 978648 - RNA, 22 nt, Human
aaaucucaggccucuauuuacu

SEQ ID NO: 978649 - RNA, 22 nt, Human
aauguucaaaagcaucagugaa

SEQ ID NO: 978650 - RNA, 21 nt, Human
gcagacugcccugcugucccc

SEQ ID NO: 978651 - RNA, 22 nt, Human
aaggcagcagugcacgacugau

SEQ ID NO: 978652 - RNA, 22 nt, Human
uuugaaagcuacuuucggguca

SEQ ID NO: 978653 - RNA, 22 nt, Human
ccagugcaggugagcaccaggu

SEQ ID NO: 978654 - RNA, 22 nt, Human
gaagcagcucagauugacugaa

SEQ ID NO: 978655 - RNA, 22 nt, Human
cugggcagccucacacaauguu

SEQ ID NO: 978656 - RNA, 22 nt, Human
ggcugcaggcagaggcugucug

SEQ ID NO: 978657 - RNA, 22 nt, Human
caggcagcugggucaccguccc

SEQ ID NO: 978658 - RNA, 22 nt, Human
ugagccagccucagaagucacg

SEQ ID NO: 978659 - RNA, 22 nt, Human
auucagcaguuccugcuucagu

SEQ ID NO: 978660 - RNA, 22 nt, Human
ucccagagguugagucacuuau

SEQ ID NO: 978661 - RNA, 23 nt, Human
uuucucauccagagagucagucc

SEQ ID NO: 978662 - RNA, 22 nt, Human
uuuuucagccaugaauuacacu

SEQ ID NO: 978663 - RNA, 22 nt, Human
cucuggccgcagcucagcucug

SEQ ID NO: 978664 - RNA, 22 nt, Human
ucaccuugaaugcagcagcgug

SEQ ID NO: 978665 - RNA, 20 nt, Human
gugugaagcccucaggagga

SEQ ID NO: 978666 - RNA, 22 nt, Human
ucucagagggaaacaugaguga

SEQ ID NO: 978667 - RNA, 20 nt, Human
gcagagcuguucugugggga

SEQ ID NO: 978668 - RNA, 22 nt, Human
cagagugagggccugcaccugc

SEQ ID NO: 978669 - RNA, 23 nt, Human
uggcagcuguguaagagaaagca

SEQ ID NO: 978670 - RNA, 22 nt, Human
aagaacauucgaacuauuuucu

SEQ ID NO: 978671 - RNA, 22 nt, Human
guggcugcuguccucucugguu

SEQ ID NO: 978672 - RNA, 22 nt, Human
gggucucucucggcuccacgcg

SEQ ID NO: 978673 - RNA, 22 nt, Human
agagauguucauucagcauguu

SEQ ID NO: 978674 - RNA, 22 nt, Human
cccugcugucaggugcugggag

SEQ ID NO: 978675 - RNA, 22 nt, Human
aaaucucaauuugaauuguagc

SEQ ID NO: 978676 - RNA, 22 nt, Human
acucugcugauagguccucaga

SEQ ID NO: 978677 - RNA, 22 nt, Human
gcauugucaaaagugguaugac

SEQ ID NO: 978678 - RNA, 22 nt, Human
gauuucaccugaucuugucauc

SEQ ID NO: 978679 - RNA, 22 nt, Human
uuuggaauguaguuuaaucauc

SEQ ID NO: 978680 - RNA, 22 nt, Human
aacucugcaaccuauguagacc

SEQ ID NO: 978681 - RNA, 22 nt, Human
gaaaggagggaaacagagcggu

SEQ ID NO: 978682 - RNA, 22 nt, Human
uuauguagugacugacuguuag

SEQ ID NO: 978683 - RNA, 22 nt, Human
acacagaguauuuagaaggggu

SEQ ID NO: 978684 - RNA, 22 nt, Human
ucacucugucccccauugagau

SEQ ID NO: 978685 - RNA, 22 nt, Human
acugucucucuagcaguucagg

SEQ ID NO: 978686 - RNA, 22 nt, Human
ugugggcucccccucacucugu

SEQ ID NO: 978687 - RNA, 18 nt, Human
cugcugugucgucugggc

SEQ ID NO: 978688 - RNA, 22 nt, Human
aagccucuggggccucaucugu

SEQ ID NO: 978689 - RNA, 22 nt, Human
gagcuguccgccccugggccga

SEQ ID NO: 978690 - RNA, 18 nt, Human
gagcacugguguugaggu

SEQ ID NO: 978691 - RNA, 22 nt, Human
agauacauauagaaaacaucaa

SEQ ID NO: 978692 - RNA, 22 nt, Human
ucaguuacuccuuuccuuaggu

SEQ ID NO: 978693 - RNA, 22 nt, Human
uggagagguuuaaacaaaaguu

SEQ ID NO: 978694 - RNA, 22 nt, Human
ucuuacauauagcaugaguaca

SEQ ID NO: 978695 - RNA, 22 nt, Human
cccaagagcuucuaggacgcug

SEQ ID NO: 978696 - RNA, 22 nt, Human
uggcagcugaauggcuggaugg

SEQ ID NO: 978697 - RNA, 15 nt, Human
ucacucuggaaggga

SEQ ID NO: 978698 - RNA, 22 nt, Human
agucauaugacccuucacaaac

SEQ ID NO: 978699 - RNA, 22 nt, Human
agcagggcuugccgcuuguccu

SEQ ID NO: 978700 - RNA, 22 nt, Human
ugaagccuuguguggccucucu

SEQ ID NO: 978701 - RNA, 19 nt, Human
acacagggcuagaguuaca

SEQ ID NO: 978702 - RNA, 22 nt, Human
uccuggccuuauccccaaacug

SEQ ID NO: 978703 - RNA, 22 nt, Human
uacaucuagccuuacaauuauu

SEQ ID NO: 978704 - RNA, 20 nt, Human
accaggagauggaggcaggg

SEQ ID NO: 978705 - RNA, 22 nt, Human
ugggcugcuucuauuggugguc

SEQ ID NO: 978706 - RNA, 15 nt, Human
aggcacugugggacc

SEQ ID NO: 978707 - RNA, 22 nt, Human
aacauuucugagaauaucaguu

SEQ ID NO: 978708 - RNA, 22 nt, Human
agacaugucaccaauucuuacu

SEQ ID NO: 978709 - RNA, 22 nt, Human
acuguauugguuuucuauugcu

SEQ ID NO: 978710 - RNA, 22 nt, Human
ggguggggcccaggaaaucuau

SEQ ID NO: 978711 - RNA, 22 nt, Human
gaaggcuugcagcucuguggca

SEQ ID NO: 978712 - RNA, 22 nt, Human
ggcagaaggccucccagcuccu

SEQ ID NO: 978713 - RNA, 22 nt, Human
accucuggccuucaggcaucau

SEQ ID NO: 978714 - RNA, 22 nt, Human
ggcugcugggaauaugccagcu

SEQ ID NO: 978715 - RNA, 22 nt, Human
gcaagcugcuuaagcucauugu

SEQ ID NO: 978716 - RNA, 22 nt, Human
ucacucugaaugguacugagga

SEQ ID NO: 978717 - RNA, 20 nt, Human
augcuuucuugugugcugcu

SEQ ID NO: 978718 - RNA, 22 nt, Human
ucagggcauucaagaggccugg

SEQ ID NO: 978719 - RNA, 22 nt, Human
uccugccuugccugggacauca

SEQ ID NO: 978720 - RNA, 22 nt, Human
ucucucuucaacccuuaacuag

SEQ ID NO: 978721 - RNA, 22 nt, Human
uggcagagucugggcuugggca

SEQ ID NO: 978722 - RNA, 20 nt, Human
uccaggcagcucagaguguc

SEQ ID NO: 978723 - RNA, 22 nt, Human
guaaaugugcuucuuuuaacuu

SEQ ID NO: 978724 - RNA, 22 nt, Human
ggccagaaaguuaagcuguggc

SEQ ID NO: 978725 - RNA, 22 nt, Human
ucccagagacagagccuccucc

SEQ ID NO: 978726 - RNA, 22 nt, Human
cugcugugcaacauugcaccua

SEQ ID NO: 978727 - RNA, 20 nt, Human
aaaaucucccagaaacuuau

SEQ ID NO: 978728 - RNA, 22 nt, Human
agcaggugacagggcuguggug

SEQ ID NO: 978729 - RNA, 21 nt, Human
ucuguucaaggaacuacggau

SEQ ID NO: 978730 - RNA, 22 nt, Human
cagccuuugugaacaucaggug

SEQ ID NO: 978731 - RNA, 22 nt, Human
ugcauuaugcuugugcuguaua

SEQ ID NO: 978732 - RNA, 22 nt, Human
uuugcauuuguuuagaaccuga

SEQ ID NO: 978733 - RNA, 22 nt, Human
uagacagauuuaaaggaaugga

SEQ ID NO: 978734 - RNA, 22 nt, Human
ggguguccugugccaagcuggg

SEQ ID NO: 978735 - RNA, 22 nt, Human
ucuuaaaaguaugccaauugga

SEQ ID NO: 978736 - RNA, 22 nt, Human
gcugagggcauguguggcgacu

SEQ ID NO: 978737 - RNA, 22 nt, Human
gcagugacagggcugcugccuu

SEQ ID NO: 978738 - RNA, 22 nt, Human
aaagcagauucugaugcaguag

SEQ ID NO: 978739 - RNA, 22 nt, Human
cugcagaguggagccucggcug

SEQ ID NO: 978740 - RNA, 22 nt, Human
ggcugugauugguggaugugaa

SEQ ID NO: 978741 - RNA, 22 nt, Human
gggagagguuacccgagcaacu

SEQ ID NO: 978742 - RNA, 22 nt, Human
agcaggguuuggggauuggcac

SEQ ID NO: 978743 - RNA, 22 nt, Human
uccucugccccagaugaaauuu

SEQ ID NO: 978744 - RNA, 22 nt, Human
cauuuucucaaugaacccucuu

SEQ ID NO: 978745 - RNA, 22 nt, Human
cugagguggaacagaggugaag

SEQ ID NO: 978746 - RNA, 22 nt, Human
cagacauauguuuuaacagauu

SEQ ID NO: 978747 - RNA, 22 nt, Human
auacuuacuuuucuucagacua

SEQ ID NO: 978748 - RNA, 22 nt, Human
ugggauaguggccaggaccccc

SEQ ID NO: 978749 - RNA, 22 nt, Human
ucugcaggccucgacaaggcca

SEQ ID NO: 978750 - RNA, 21 nt, Human
uggcugagccaggugugugga

SEQ ID NO: 978751 - RNA, 22 nt, Human
agggcccuccccgcucagggca

SEQ ID NO: 978752 - RNA, 17 nt, Human
gcccaggaaggacggcc

SEQ ID NO: 978753 - RNA, 22 nt, Human
gacucugcuacaggccgagguu

SEQ ID NO: 978754 - RNA, 22 nt, Human
aauguacacugaaagccuauca

SEQ ID NO: 978755 - RNA, 22 nt, Human
uccauuuucuugcucuagguaa

SEQ ID NO: 978756 - RNA, 22 nt, Human
auaugcauaugucaaaacuuau

SEQ ID NO: 978757 - RNA, 22 nt, Human
ccaggggcuggugcugagcugg

SEQ ID NO: 978758 - RNA, 20 nt, Human
cccuggagagaagcuccacg

SEQ ID NO: 978759 - RNA, 22 nt, Human
ugucccauggauaccaggcuau

SEQ ID NO: 978760 - RNA, 22 nt, Human
uuauuuggaaauauggcuucug

SEQ ID NO: 978761 - RNA, 22 nt, Human
ugcaggagaaaguacggagcgu

SEQ ID NO: 978762 - RNA, 20 nt, Human
aucuucuuggccagcuugcu

SEQ ID NO: 978763 - RNA, 16 nt, Human
auuguuuucaauuaga

SEQ ID NO: 978764 - RNA, 22 nt, Human
acugggaggcaaagagcaagga

SEQ ID NO: 978765 - RNA, 22 nt, Human
aggaagcccuugucauuucugu

SEQ ID NO: 978766 - RNA, 22 nt, Human
caccuggcuggaagugcuccgg

SEQ ID NO: 978767 - RNA, 22 nt, Human
agggguggagaguguugccagu

SEQ ID NO: 978768 - RNA, 22 nt, Human
agccccuuccaguucucagauc

SEQ ID NO: 978769 - RNA, 22 nt, Human
auccuugagaaaauaaaugacc

SEQ ID NO: 978770 - RNA, 22 nt, Human
uguagggaggaaggguuggaaa

SEQ ID NO: 978771 - RNA, 19 nt, Human
aggacucuggaggcaugag

SEQ ID NO: 978772 - RNA, 22 nt, Human
cugccugcguugccucgugccu

SEQ ID NO: 978773 - RNA, 22 nt, Human
gagccugagugcugccuccccu

SEQ ID NO: 978774 - RNA, 22 nt, Human
cagagacagggcagggagugug

SEQ ID NO: 978775 - RNA, 22 nt, Human
gagcccagguucugcuuccagc

SEQ ID NO: 978776 - RNA, 22 nt, Human
guaggcagguggaggagugaag

SEQ ID NO: 978777 - RNA, 22 nt, Human
auucuuuuuuaaggaauagaac

SEQ ID NO: 978778 - RNA, 22 nt, Human
ugucaucuuggucuggaauaag

SEQ ID NO: 978779 - RNA, 22 nt, Human
ucagaggagccaaaguucugag

SEQ ID NO: 978780 - RNA, 22 nt, Human
ccagucugugugccagccugcg

SEQ ID NO: 978781 - RNA, 22 nt, Human
uccucuggggucagggcacuac

SEQ ID NO: 978782 - RNA, 22 nt, Human
cucacugcccugaaguuggguu

SEQ ID NO: 978783 - RNA, 22 nt, Human
aggcugugaguuuugucucaga

SEQ ID NO: 978784 - RNA, 20 nt, Human
ggaagcagagaacuguuuuc

SEQ ID NO: 978785 - RNA, 22 nt, Human
uucauguguauggaacauuuuu

SEQ ID NO: 978786 - RNA, 22 nt, Human
aaagcucacaguaauacaaggc

SEQ ID NO: 978787 - RNA, 23 nt, Human
acuuuagauaaauuaugugcaca

SEQ ID NO: 978788 - RNA, 19 nt, Human
uuggcagcugagauccugc

SEQ ID NO: 978789 - RNA, 22 nt, Human
ucucccagaggaucccagugga

SEQ ID NO: 978790 - RNA, 22 nt, Human
uuuguuaaggaguauugcuucu

SEQ ID NO: 978791 - RNA, 22 nt, Human
gaggcagcugaagcuucaaaga

SEQ ID NO: 978792 - RNA, 22 nt, Human
ugcacacacgcggcacaucugu

SEQ ID NO: 978793 - RNA, 22 nt, Human
ugaacagauggcccagcagagg

SEQ ID NO: 978794 - RNA, 22 nt, Human
uuugggaagaggaaucucugga

SEQ ID NO: 978795 - RNA, 22 nt, Human
cugcccugccuggccagugugg

SEQ ID NO: 978796 - RNA, 23 nt, Human
ggucccaguggagaggccucacc

SEQ ID NO: 978797 - RNA, 22 nt, Human
gggcuccagcccgggaccaggu

SEQ ID NO: 978798 - RNA, 22 nt, Human
ugggcuccagcaccugugcucu

SEQ ID NO: 978799 - RNA, 22 nt, Human
ggggagaguccuuuccaguucc

SEQ ID NO: 978800 - RNA, 22 nt, Human
gcugagaguguaggauguuuac

SEQ ID NO: 978801 - RNA, 18 nt, Human
acagaggcagacauguau

SEQ ID NO: 978802 - RNA, 18 nt, Human
cagaaguccuucaaggcc

SEQ ID NO: 978803 - RNA, 22 nt, Human
cucuuuaaaguaaaauuugucu

SEQ ID NO: 978804 - RNA, 22 nt, Human
gaaaguuucuucauuaagaugu

SEQ ID NO: 978805 - RNA, 22 nt, Human
caaaugauaccuauuacuaggc

SEQ ID NO: 978806 - RNA, 22 nt, Human
uggcagcuugaaugcagucuuu

SEQ ID NO: 978807 - RNA, 22 nt, Human
cgccaggcuugguagcucaugc

SEQ ID NO: 978808 - RNA, 22 nt, Human
cugggagcaccauacuuguuuc

SEQ ID NO: 978809 - RNA, 17 nt, Human
ggccuuggggccucagu

SEQ ID NO: 978810 - RNA, 22 nt, Human
acauuuaaugauccuacuguga

SEQ ID NO: 978811 - RNA, 22 nt, Human
uacaaagucaccagcuucuugc

SEQ ID NO: 978812 - RNA, 22 nt, Human
uggcuccuaggauggugccugg

SEQ ID NO: 978813 - RNA, 22 nt, Human
auacauacauguaugcacauac

SEQ ID NO: 978814 - RNA, 22 nt, Human
acagugcuaaacacuucuugaa

SEQ ID NO: 978815 - RNA, 22 nt, Human
cucagucucuugggcugugaag

SEQ ID NO: 978816 - RNA, 17 nt, Human
cagacagauauccuggg

SEQ ID NO: 978817 - RNA, 22 nt, Human
uuaaauuuuagaaacagacucu

SEQ ID NO: 978818 - RNA, 22 nt, Human
gggcugccaagccugccugccu

SEQ ID NO: 978819 - RNA, 22 nt, Human
ggaggaggcggcagaaguuccu

SEQ ID NO: 978820 - RNA, 22 nt, Human
uuggagcccugaggaucuggau

SEQ ID NO: 978821 - RNA, 22 nt, Human
uccaugucuucaugugucuaac

SEQ ID NO: 978822 - RNA, 22 nt, Human
augaaaacggaccagagcuauu

SEQ ID NO: 978823 - RNA, 22 nt, Human
gagagcugcagccgagaggggg

SEQ ID NO: 978824 - RNA, 22 nt, Human
caggcaggugcagauuccucuu

SEQ ID NO: 978825 - RNA, 22 nt, Human
gggcuucucuuaugcuaacugg

SEQ ID NO: 978826 - RNA, 22 nt, Human
cuaauguggacucuaucaaagu

SEQ ID NO: 978827 - RNA, 22 nt, Human
uaagacacaugcguacaagaua

SEQ ID NO: 978828 - RNA, 22 nt, Human
ccaggacagugaacauguaaga

SEQ ID NO: 978829 - RNA, 23 nt, Human
uugaaggagaaagcuuucuuggu

SEQ ID NO: 978830 - RNA, 22 nt, Human
ugucaugcagguuuguuauaga

SEQ ID NO: 978831 - RNA, 22 nt, Human
cucugcagaauuugagcugcuc

SEQ ID NO: 978832 - RNA, 22 nt, Human
cugucucuguugccuguaggug

SEQ ID NO: 978833 - RNA, 22 nt, Human
gccuggagccucagcaaggagg

SEQ ID NO: 978834 - RNA, 22 nt, Human
gcauguguggaggagaugugcu

SEQ ID NO: 978835 - RNA, 22 nt, Human
uuuuccucuguuauuaguguga

SEQ ID NO: 978836 - RNA, 22 nt, Human
agugacugggcagggcagggcc

SEQ ID NO: 978837 - RNA, 22 nt, Human
ucuuguuucuguauauaaugac

SEQ ID NO: 978838 - RNA, 22 nt, Human
aaggcagccucugccagccggg

SEQ ID NO: 978839 - RNA, 22 nt, Human
auacuuuggggguuaguguaga

SEQ ID NO: 978840 - RNA, 22 nt, Human
cccugaggcaaaggcuagaguu

SEQ ID NO: 978841 - RNA, 22 nt, Human
uugggcaaaguguuucuggagc

SEQ ID NO: 978842 - RNA, 22 nt, Human
ccaggaaaauaccaagcuuuaa

SEQ ID NO: 978843 - RNA, 22 nt, Human
uucuucuuuccuauaauuaauu

SEQ ID NO: 978844 - RNA, 22 nt, Human
aagugguaggaagagagcacug

SEQ ID NO: 978845 - RNA, 22 nt, Human
aucaggaucaugcuggguggga

SEQ ID NO: 978846 - RNA, 22 nt, Human
uguggcccagaugagugugcua

SEQ ID NO: 978847 - RNA, 22 nt, Human
ugaagcagcaccauuuuagagc

SEQ ID NO: 978848 - RNA, 22 nt, Human
acauacuaugaauacauguguc

SEQ ID NO: 978849 - RNA, 22 nt, Human
caccguuugguuuggauuuaca

SEQ ID NO: 978850 - RNA, 22 nt, Human
aaggcugauuagacugauagcu

SEQ ID NO: 978851 - RNA, 22 nt, Human
ucaggcugugggcacuggccau

SEQ ID NO: 978852 - RNA, 22 nt, Human
uggccugggccugccggugcaa

SEQ ID NO: 978853 - RNA, 22 nt, Human
gcucaggaucccaggggugugc

SEQ ID NO: 978854 - RNA, 22 nt, Human
uucugagguccaugcaguacug

SEQ ID NO: 978855 - RNA, 22 nt, Human
ccugucagaugaaguaauugug

SEQ ID NO: 978856 - RNA, 22 nt, Human
ccuccugggagagcacggaggg

SEQ ID NO: 978857 - RNA, 22 nt, Human
uugucugucccagcuugugcau

SEQ ID NO: 978858 - RNA, 22 nt, Human
ccaggcccugcuccucacacca

SEQ ID NO: 978859 - RNA, 19 nt, Human
ucccgcccacugagcgugc

SEQ ID NO: 978860 - RNA, 20 nt, Human
aguuauaguaucuagccaug

SEQ ID NO: 978861 - RNA, 23 nt, Human
agggccugauggcucccgcuggc

SEQ ID NO: 978862 - RNA, 17 nt, Human
uugaacugcugagucag

SEQ ID NO: 978863 - RNA, 22 nt, Human
aucuaagauguauugagcacuu

SEQ ID NO: 978864 - RNA, 22 nt, Human
aaguuauaucaucucauugacg

SEQ ID NO: 978865 - RNA, 22 nt, Human
cagcuccugcagcugcugccgu

SEQ ID NO: 978866 - RNA, 22 nt, Human
uucagugucaauuuuuaaauau

SEQ ID NO: 978867 - RNA, 22 nt, Human
gacaucaauauucugcagggau

SEQ ID NO: 978868 - RNA, 23 nt, Human
uggacgccgacuuuggaggcgcu

SEQ ID NO: 978869 - RNA, 22 nt, Human
aacauucugguucuaaaaaccu

SEQ ID NO: 978870 - RNA, 22 nt, Human
uccaguggugguuugaagggca

SEQ ID NO: 978871 - RNA, 20 nt, Human
gcuguucacauuauuaguag

SEQ ID NO: 978872 - RNA, 22 nt, Human
aagcccagcaucccugcaccag

SEQ ID NO: 978873 - RNA, 22 nt, Human
gcuuuuucaaaugaaagcuggu

SEQ ID NO: 978874 - RNA, 22 nt, Human
ucucagagaccugaacucccug

SEQ ID NO: 978875 - RNA, 22 nt, Human
aggggccuggacauggacgcgc

SEQ ID NO: 978876 - RNA, 22 nt, Human
gcugucuggcauggcguggcug

SEQ ID NO: 978877 - RNA, 22 nt, Human
uugcagagaucagcagguuuga

SEQ ID NO: 978878 - RNA, 22 nt, Human
gaggcacuggaggaaaggagaa

SEQ ID NO: 978879 - RNA, 23 nt, Human
uggcucagggucucuuaugaagu

SEQ ID NO: 978880 - RNA, 22 nt, Human
acuuugcaaugggcagaaccca

SEQ ID NO: 978881 - RNA, 22 nt, Human
cauccaggcaccacaaccagcu

SEQ ID NO: 978882 - RNA, 22 nt, Human
gguuggaggugggaauagcuag

SEQ ID NO: 978883 - RNA, 23 nt, Human
uggcucucucagugcugcagagg

SEQ ID NO: 978884 - RNA, 22 nt, Human
uuaaauuagucaagcuucucug

SEQ ID NO: 978885 - RNA, 21 nt, Human
gacaggggaagaagcaaggag

SEQ ID NO: 978886 - RNA, 22 nt, Human
ggguaauuggggccuugcagug

SEQ ID NO: 978887 - RNA, 22 nt, Human
agugccuggaccccaugacaua

SEQ ID NO: 978888 - RNA, 22 nt, Human
guggcagcaaaauccugcauuc

SEQ ID NO: 978889 - RNA, 22 nt, Human
caguucuuuguggggaguucuc

SEQ ID NO: 978890 - RNA, 22 nt, Human
uagaaacucaggauacucuucc

SEQ ID NO: 978891 - RNA, 22 nt, Human
augucacauggucaccucuagc

SEQ ID NO: 978892 - RNA, 19 nt, Human
aaacacagauuucuuacca

SEQ ID NO: 978893 - RNA, 22 nt, Human
cugccuggguucaaguccuguu

SEQ ID NO: 978894 - RNA, 23 nt, Human
cacugcagcguggucuggcagga

SEQ ID NO: 978895 - RNA, 22 nt, Human
ggcugucucugugacugccacc

SEQ ID NO: 978896 - RNA, 22 nt, Human
cagaagaauggugucugagcuc

SEQ ID NO: 978897 - RNA, 22 nt, Human
cacuggggugggccugguagag

SEQ ID NO: 978898 - RNA, 22 nt, Human
ugucauuuucuaaucuguuguc

SEQ ID NO: 978899 - RNA, 22 nt, Human
cccaaggccucuccuuggcuug

SEQ ID NO: 978900 - RNA, 22 nt, Human
aaucaguuguccaaaguucaca

SEQ ID NO: 978901 - RNA, 22 nt, Human
uggggugggcaugcgcuguccu

SEQ ID NO: 978902 - RNA, 22 nt, Human
aagaaauauugggccuuauaaa

SEQ ID NO: 978903 - RNA, 22 nt, Human
cagcugacuucauaggaagaca

SEQ ID NO: 978904 - RNA, 22 nt, Human
auacaaguugugauaauguaaa

SEQ ID NO: 978905 - RNA, 22 nt, Human
cugccuggggaaugugaggauu

SEQ ID NO: 978906 - RNA, 22 nt, Human
gccgaagcugccgucugguccu

SEQ ID NO: 978907 - RNA, 22 nt, Human
aagagcuguaugccauaugauu

SEQ ID NO: 978908 - RNA, 22 nt, Human
aggggugauuugggacaggaca

SEQ ID NO: 978909 - RNA, 22 nt, Human
aaauuuucagagcacuagagaa

SEQ ID NO: 978910 - RNA, 22 nt, Human
uccagugcuggaccagagcacc

SEQ ID NO: 978911 - RNA, 22 nt, Human
ucucuucucuagugagcaacug

SEQ ID NO: 978912 - RNA, 22 nt, Human
aaaauacuguggaguguugaaa

SEQ ID NO: 978913 - RNA, 22 nt, Human
cccuguccuggaugggagcacu

SEQ ID NO: 978914 - RNA, 22 nt, Human
aagcugcccuguguuagaguuc

SEQ ID NO: 978915 - RNA, 22 nt, Human
cucagcagugacaagagaguau

SEQ ID NO: 978916 - RNA, 22 nt, Human
ggccuugcuuggguuauaugcc

SEQ ID NO: 978917 - RNA, 23 nt, Human
ucugggccacuugucugcacuuc

SEQ ID NO: 978918 - RNA, 22 nt, Human
agugaguggguuacagauggga

SEQ ID NO: 978919 - RNA, 22 nt, Human
gucccauaaguagugcaacuug

SEQ ID NO: 978920 - RNA, 22 nt, Human
cccucugccugcgcccuggugu

SEQ ID NO: 978921 - RNA, 22 nt, Human
gggagucugggcuagacuccuu

SEQ ID NO: 978922 - RNA, 22 nt, Human
gcaggcagagagggguuuccag

SEQ ID NO: 978923 - RNA, 22 nt, Human
uccuucagaggacggcagccag

SEQ ID NO: 978924 - RNA, 22 nt, Human
ugcauuguaggauguuuagcag

SEQ ID NO: 978925 - RNA, 22 nt, Human
uuuucauuuacauuagggaaga

SEQ ID NO: 978926 - RNA, 22 nt, Human
ugcaugcugcacacaugcguag

SEQ ID NO: 978927 - RNA, 22 nt, Human
aacauauaaacucuuaaguuca

SEQ ID NO: 978928 - RNA, 22 nt, Human
augaguugaagcuacaagaggc

SEQ ID NO: 978929 - RNA, 22 nt, Human
gcuggccaguguggugaccacc

SEQ ID NO: 978930 - RNA, 22 nt, Human
uucuucuucaagugcugcauuc

SEQ ID NO: 978931 - RNA, 22 nt, Human
aggcucugcagugcuggaggac

SEQ ID NO: 978932 - RNA, 22 nt, Human
agcucacagaaauccugcagga

SEQ ID NO: 978933 - RNA, 22 nt, Human
gugcagguguuuuggcugccag

SEQ ID NO: 978934 - RNA, 22 nt, Human
cacaauuuguuuuaucaguauu

SEQ ID NO: 978935 - RNA, 22 nt, Human
aaaggagacuucagaucuccuu

SEQ ID NO: 978936 - RNA, 22 nt, Human
uccuccuucgggacugcuugac

SEQ ID NO: 978937 - RNA, 22 nt, Human
ugggcacaggggaauggaugaa

SEQ ID NO: 978938 - RNA, 22 nt, Human
gcccucagaggacagcugacuu

SEQ ID NO: 978939 - RNA, 22 nt, Human
ugcuuccuucccguucuucucc

SEQ ID NO: 978940 - RNA, 22 nt, Human
agagcuggacgucugagcccua

SEQ ID NO: 978941 - RNA, 22 nt, Human
cuguggagugcuuggcucagug

SEQ ID NO: 978942 - RNA, 22 nt, Human
augcaucuauucccaagggcag

SEQ ID NO: 978943 - RNA, 22 nt, Human
aguauuucuaguugguucuacu

SEQ ID NO: 978944 - RNA, 22 nt, Human
cucaggauuuaaaggggcacuc

SEQ ID NO: 978945 - RNA, 22 nt, Human
gaggccugggagccuguccucc

SEQ ID NO: 978946 - RNA, 22 nt, Human
gacccaggcccaaggcugccag

SEQ ID NO: 978947 - RNA, 22 nt, Human
auggggugaccaugagcauuua

SEQ ID NO: 978948 - RNA, 22 nt, Human
cuggcucccguuguccuugaag

SEQ ID NO: 978949 - RNA, 22 nt, Human
agcauuuaggagaauuugagaa

SEQ ID NO: 978950 - RNA, 21 nt, Human
ucacaucuauguuaagcaaac

SEQ ID NO: 978951 - RNA, 22 nt, Human
gcugggcagccuggccgcugcc

SEQ ID NO: 978952 - RNA, 22 nt, Human
gagcugccaguguaugaauucu

SEQ ID NO: 978953 - RNA, 22 nt, Human
ucacauuuucauauucucugag

SEQ ID NO: 978954 - RNA, 22 nt, Human
uggcagcacaagguggcccaug

SEQ ID NO: 978955 - RNA, 22 nt, Human
augugcaacuucagcagaaagg

SEQ ID NO: 978956 - RNA, 22 nt, Human
ggaccagagcucgggcuucuca

SEQ ID NO: 978957 - RNA, 22 nt, Human
aucagcaagcauuuauugagug

SEQ ID NO: 978958 - RNA, 22 nt, Human
cuggagcucuccagagccccgu

SEQ ID NO: 978959 - RNA, 22 nt, Human
cccaggaggaggaaaaagcucg

SEQ ID NO: 978960 - RNA, 22 nt, Human
uaggaaaagucuagauugauga

SEQ ID NO: 978961 - RNA, 22 nt, Human
uggcugggagcuggaacugggc

SEQ ID NO: 978962 - RNA, 22 nt, Human
cugucaguaggcucccaucauu

SEQ ID NO: 978963 - RNA, 22 nt, Human
uaacagaauuugcuaaacuccg

SEQ ID NO: 978964 - RNA, 22 nt, Human
caauaauauccugugcuguuug

SEQ ID NO: 978965 - RNA, 22 nt, Human
aucuacaggauaguuuaauauu

SEQ ID NO: 978966 - RNA, 18 nt, Human
ggcucaggcuauccuaac

SEQ ID NO: 978967 - RNA, 22 nt, Human
guuauauauaguauuucucuga

SEQ ID NO: 978968 - RNA, 22 nt, Human
ccaggcugcuguugguguccgc

SEQ ID NO: 978969 - RNA, 22 nt, Human
uggcucagcuuuccccaucugg

SEQ ID NO: 978970 - RNA, 20 nt, Human
ugggccuguggcagaagucu

SEQ ID NO: 978971 - RNA, 22 nt, Human
acaguaaugauucugagucucu

SEQ ID NO: 978972 - RNA, 22 nt, Human
guccucugaaguugugcaaugc

SEQ ID NO: 978973 - RNA, 22 nt, Human
uguuuaauucaccaucauguuc

SEQ ID NO: 978974 - RNA, 22 nt, Human
acucaagauagggaaaguacaa

SEQ ID NO: 978975 - RNA, 19 nt, Human
ccuuccagcuccuuuucag

SEQ ID NO: 978976 - RNA, 22 nt, Human
uuguuacuaagccuuuaaauag

SEQ ID NO: 978977 - RNA, 20 nt, Human
acguggccaccaguggcuua

SEQ ID NO: 978978 - RNA, 21 nt, Human
uccuuccuugagguccuuucc

SEQ ID NO: 978979 - RNA, 22 nt, Human
aggucagcaugaguagaaggua

SEQ ID NO: 978980 - RNA, 22 nt, Human
uugacacaguuuucucauuaag

SEQ ID NO: 978981 - RNA, 22 nt, Human
aacauaaauuugaaguggcaaa

SEQ ID NO: 978982 - RNA, 22 nt, Human
uaagaacaagcuggggguucca

SEQ ID NO: 978983 - RNA, 22 nt, Human
cuuccaaagcacuuuauggacc

SEQ ID NO: 978984 - RNA, 22 nt, Human
aaaugcagauugucauucagga

SEQ ID NO: 978985 - RNA, 22 nt, Human
uuauuugcccauguuuagcaga

SEQ ID NO: 978986 - RNA, 22 nt, Human
agaagcugccuacaugaccagc

SEQ ID NO: 978987 - RNA, 22 nt, Human
uccaagggcagccauagaacuu

SEQ ID NO: 978988 - RNA, 22 nt, Human
uauagccauuuccaguggcauc

SEQ ID NO: 978989 - RNA, 22 nt, Human
caaggccaguucaccaagggca

SEQ ID NO: 978990 - RNA, 17 nt, Human
ucaggauccaggguucu

SEQ ID NO: 978991 - RNA, 20 nt, Human
cugugcuuuggaaccuggaa

SEQ ID NO: 978992 - RNA, 22 nt, Human
ugcaacauuauuaaacuaagca

SEQ ID NO: 978993 - RNA, 22 nt, Human
gagacagcagggccagggccug

SEQ ID NO: 978994 - RNA, 22 nt, Human
cagaaauguucuaaugauucag

SEQ ID NO: 978995 - RNA, 22 nt, Human
ugucccaggcugaaguacagug

SEQ ID NO: 978996 - RNA, 22 nt, Human
agggauggaagacuugaagacc

SEQ ID NO: 978997 - RNA, 22 nt, Human
agcccaugcaacaggccuagcg

SEQ ID NO: 978998 - RNA, 22 nt, Human
uagcugccauugcuccaggaag

SEQ ID NO: 978999 - RNA, 22 nt, Human
ucugcaggcuuauaggaugggu

SEQ ID NO: 979000 - RNA, 22 nt, Human
cugggcuccuaaccauccaggu

SEQ ID NO: 979001 - RNA, 22 nt, Human
augcacuaugaugagcuagucu

SEQ ID NO: 979002 - RNA, 22 nt, Human
ugacaugcuuguuuuccuugaa

SEQ ID NO: 979003 - RNA, 22 nt, Human
uguuguuuucucauggagaaua

SEQ ID NO: 979004 - RNA, 22 nt, Human
ccuggagaccagaggauacuuc

SEQ ID NO: 979005 - RNA, 22 nt, Human
acagagcuucccagccugagca

SEQ ID NO: 979006 - RNA, 22 nt, Human
caggaggccaacugugggacuu

SEQ ID NO: 979007 - RNA, 22 nt, Human
aggaggcacucacucucagggu

SEQ ID NO: 979008 - RNA, 22 nt, Human
ggcagccauggacacuggcuag

SEQ ID NO: 979009 - RNA, 22 nt, Human
ggcuggcagaagugugcuggcu

SEQ ID NO: 979010 - RNA, 22 nt, Human
ugguggcuucugaggauggcga

SEQ ID NO: 979011 - RNA, 22 nt, Human
auaacagaguugggaagugaaa

SEQ ID NO: 979012 - RNA, 20 nt, Human
ggcagcaggaguuuccucuu

SEQ ID NO: 979013 - RNA, 22 nt, Human
ccucucaucauuaucgcuuugu

SEQ ID NO: 979014 - RNA, 22 nt, Human
cagccugcccuggaagcccagc

SEQ ID NO: 979015 - RNA, 22 nt, Human
gcccaugcacuuucugugaugg

SEQ ID NO: 979016 - RNA, 22 nt, Human
cugcucuguuaauuaaacuuug

SEQ ID NO: 979017 - RNA, 22 nt, Human
aaaaaugaaacggcugguuggc

SEQ ID NO: 979018 - RNA, 22 nt, Human
guaauugacucagcucuguuca

SEQ ID NO: 979019 - RNA, 22 nt, Human
gguuugcaugugauguugggca

SEQ ID NO: 979020 - RNA, 22 nt, Human
gcacagaaguaaaauacaaguc

SEQ ID NO: 979021 - RNA, 22 nt, Human
uccaggaggugaggggaccaaa

SEQ ID NO: 979022 - RNA, 22 nt, Human
ggcugcagguugguuggcagcu

SEQ ID NO: 979023 - RNA, 22 nt, Human
ugucucugugagaucugacgau

SEQ ID NO: 979024 - RNA, 22 nt, Human
uccccagggcugcagagggugu

SEQ ID NO: 979025 - RNA, 22 nt, Human
agcagagcuauucuugugcaau

SEQ ID NO: 979026 - RNA, 22 nt, Human
cuuaaauuuucaucuacaagaa

SEQ ID NO: 979027 - RNA, 17 nt, Human
caggcuccuuccagauu

SEQ ID NO: 979028 - RNA, 22 nt, Human
ggguacuuaauauuuacggggu

SEQ ID NO: 979029 - RNA, 22 nt, Human
ugcugccacugguagucucauu

SEQ ID NO: 979030 - RNA, 22 nt, Human
cacagcauaaugaaauauacuu

SEQ ID NO: 979031 - RNA, 19 nt, Human
cuggccaggccaggggccc

SEQ ID NO: 979032 - RNA, 22 nt, Human
gccuggcaaggcccuguugacu

SEQ ID NO: 979033 - RNA, 22 nt, Human
gcccugagggguggugucugua

SEQ ID NO: 979034 - RNA, 22 nt, Human
aggccaaauagcagguuugcua

SEQ ID NO: 979035 - RNA, 22 nt, Human
gcccugugcgacucuagagguu

SEQ ID NO: 979036 - RNA, 22 nt, Human
cagggccauaucuugugcacca

SEQ ID NO: 979037 - RNA, 22 nt, Human
aagaacaguguccugggacucg

SEQ ID NO: 979038 - RNA, 22 nt, Human
gcacugaacuuuaaucauuucu

SEQ ID NO: 979039 - RNA, 22 nt, Human
uucaagguaugguagcugguca

SEQ ID NO: 979040 - RNA, 22 nt, Human
gacacuaaaguauaggguaucu

SEQ ID NO: 979041 - RNA, 22 nt, Human
gcuugaaaauucauagguauuu

SEQ ID NO: 979042 - RNA, 22 nt, Human
gcugggaguuacugucuccuuu

SEQ ID NO: 979043 - RNA, 18 nt, Human
ugagaggcagguagagga

SEQ ID NO: 979044 - RNA, 22 nt, Human
ucuucagauugcacugagcaag

SEQ ID NO: 979045 - RNA, 22 nt, Human
uguaggaguccaaucaggagac

SEQ ID NO: 979046 - RNA, 22 nt, Human
uucuucuucauuucugacgaug

SEQ ID NO: 979047 - RNA, 22 nt, Human
gcugcaggcauuuuccugggca

SEQ ID NO: 979048 - RNA, 22 nt, Human
aggcacuguucccaguuauccu

SEQ ID NO: 979049 - RNA, 22 nt, Human
uuacaagauaaccugaugcugu

SEQ ID NO: 979050 - RNA, 22 nt, Human
uuucauguuuauggaaaaugag

SEQ ID NO: 979051 - RNA, 23 nt, Human
cacuccuguuucuaagccagcau

SEQ ID NO: 979052 - RNA, 22 nt, Human
cagagcugguguuacaagucca

SEQ ID NO: 979053 - RNA, 20 nt, Human
agggccugcucugugguguc

SEQ ID NO: 979054 - RNA, 22 nt, Human
uuucacauuagauaugucauuu

SEQ ID NO: 979055 - RNA, 22 nt, Human
uccuggcccucugcaaacgcca

SEQ ID NO: 979056 - RNA, 22 nt, Human
aagggaggggauguaagccugg

SEQ ID NO: 979057 - RNA, 23 nt, Human
uucauuugucuacuucacuuguu

SEQ ID NO: 979058 - RNA, 22 nt, Human
uaggccagaggagcagcuuugg

SEQ ID NO: 979059 - RNA, 22 nt, Human
acagcuguggggacucuugccc

SEQ ID NO: 979060 - RNA, 22 nt, Human
gcagcugcagacccucagugcu

SEQ ID NO: 979061 - RNA, 22 nt, Human
uucacauuauaaucaguucugc

SEQ ID NO: 979062 - RNA, 22 nt, Human
gcaucuucacacaaagccagug

SEQ ID NO: 979063 - RNA, 22 nt, Human
uucuggagaucugccuauggga

SEQ ID NO: 979064 - RNA, 22 nt, Human
uguuaucugagcaacgucgacg

SEQ ID NO: 979065 - RNA, 22 nt, Human
cacaauguauauguauaucaaa

SEQ ID NO: 979066 - RNA, 22 nt, Human
aggccugaggaccagauaaaug

SEQ ID NO: 979067 - RNA, 22 nt, Human
cccucugcaggcuggaccugcc

SEQ ID NO: 979068 - RNA, 22 nt, Human
cacugcaguaacucuaggacug

SEQ ID NO: 979069 - RNA, 23 nt, Human
cuggcuccgaagacuccaggauc

SEQ ID NO: 979070 - RNA, 22 nt, Human
agcauggggcaaugcaugugcu

SEQ ID NO: 979071 - RNA, 22 nt, Human
cugaggagagaucacguggugu

SEQ ID NO: 979072 - RNA, 22 nt, Human
gggagggaggugaugcuuggcu

SEQ ID NO: 979073 - RNA, 21 nt, Human
gucaaacuugcaccagugccc

SEQ ID NO: 979074 - RNA, 23 nt, Human
acacaauagaguacuauucagcc

SEQ ID NO: 979075 - RNA, 22 nt, Human
ucaggagggugacaggcccugg

SEQ ID NO: 979076 - RNA, 22 nt, Human
acauucuagauauguuauauuu

SEQ ID NO: 979077 - RNA, 23 nt, Human
aaggucacagaacuuagcaagcc

SEQ ID NO: 979078 - RNA, 22 nt, Human
uucacaggauauaugugcaggg

SEQ ID NO: 979079 - RNA, 22 nt, Human
gaaaauacuucaguguucuggc

SEQ ID NO: 979080 - RNA, 22 nt, Human
uuuccucuucuggcaggcaggg

SEQ ID NO: 979081 - RNA, 22 nt, Human
auuucacucucccugccacuua

SEQ ID NO: 979082 - RNA, 22 nt, Human
uuauacauguguuuugagauga

SEQ ID NO: 979083 - RNA, 23 nt, Human
gcaggugguucgaacagaaguuu

SEQ ID NO: 979084 - RNA, 22 nt, Human
ugccgcagugcggggagggccc

SEQ ID NO: 979085 - RNA, 22 nt, Human
agaagcagacucugaggcaagg

SEQ ID NO: 979086 - RNA, 22 nt, Human
uuggaaggugagucccuggguu

SEQ ID NO: 979087 - RNA, 22 nt, Human
agggagaaaauuggaugcacaa

SEQ ID NO: 979088 - RNA, 22 nt, Human
cuuugcaauagaggcacacaug

SEQ ID NO: 979089 - RNA, 20 nt, Human
accucugcaucaauccuuug

SEQ ID NO: 979090 - RNA, 22 nt, Human
gcugccagcuuuccuuggcuga

SEQ ID NO: 979091 - RNA, 23 nt, Human
cagaggcaucggauucaacauca

SEQ ID NO: 979092 - RNA, 18 nt, Human
ucagagguacagaaaagu

SEQ ID NO: 979093 - RNA, 22 nt, Human
ucauuuccucaaauucaagguu

SEQ ID NO: 979094 - RNA, 22 nt, Human
uuucuggcagcgggacaggggu

SEQ ID NO: 979095 - RNA, 22 nt, Human
gcccaggaguuggaggcugcag

SEQ ID NO: 979096 - RNA, 22 nt, Human
gaugauuuuaugucuugucauu

SEQ ID NO: 979097 - RNA, 22 nt, Human
ccagcuggcacuguggcugccc

SEQ ID NO: 979098 - RNA, 22 nt, Human
aggagaaggaagugcaucacua

SEQ ID NO: 979099 - RNA, 22 nt, Human
gcaggcaguuauuuaguagaau

SEQ ID NO: 979100 - RNA, 22 nt, Human
caggcagcaucagucugcugua

SEQ ID NO: 979101 - RNA, 22 nt, Human
gccuaauaacuagcuguguaac

SEQ ID NO: 979102 - RNA, 22 nt, Human
uucauuccugagcccauauuua

SEQ ID NO: 979103 - RNA, 22 nt, Human
gcugauuauuacaugucugugg

SEQ ID NO: 979104 - RNA, 22 nt, Human
guacacauuaugcuucucuaaa

SEQ ID NO: 979105 - RNA, 22 nt, Human
ucugggugaugaaaugcacugu

SEQ ID NO: 979106 - RNA, 22 nt, Human
ucauggagacuuugagccuguu

SEQ ID NO: 979107 - RNA, 22 nt, Human
agcuggggcugcagagaacagg

SEQ ID NO: 979108 - RNA, 22 nt, Human
agaaagcacucugucuuuuacc

SEQ ID NO: 979109 - RNA, 22 nt, Human
agagcuggcugcugcggugcuu

SEQ ID NO: 979110 - RNA, 22 nt, Human
cccauggggacaccaugaagga

SEQ ID NO: 979111 - RNA, 23 nt, Human
aaucuggcugauguuuuuucucu

SEQ ID NO: 979112 - RNA, 22 nt, Human
acccagagcugggcuuggcaaa

SEQ ID NO: 979113 - RNA, 22 nt, Human
uucucuuugacauuauucaggu

SEQ ID NO: 979114 - RNA, 22 nt, Human
cuggccuuggaagggagcccgu

SEQ ID NO: 979115 - RNA, 22 nt, Human
gggagggauuaguucugccugg

SEQ ID NO: 979116 - RNA, 22 nt, Human
uacaguaaccagucuacuuaga

SEQ ID NO: 979117 - RNA, 22 nt, Human
acagggccaggugagaggugcu

SEQ ID NO: 979118 - RNA, 22 nt, Human
ugaaagcagugccaugauuaug

SEQ ID NO: 979119 - RNA, 22 nt, Human
auuguggugucaguuauaggca

SEQ ID NO: 979120 - RNA, 23 nt, Human
agcccagcagagaaccuaggucc

SEQ ID NO: 979121 - RNA, 22 nt, Human
gcagcuggagcaucuucucauc

SEQ ID NO: 979122 - RNA, 22 nt, Human
gcagccugaugaucuggguugu

SEQ ID NO: 979123 - RNA, 19 nt, Human
ucagaggauuuggcuauga

SEQ ID NO: 979124 - RNA, 22 nt, Human
ccugccuggagcugagugugga

SEQ ID NO: 979125 - RNA, 22 nt, Human
uuuuuauaacucuuuugugaca

SEQ ID NO: 979126 - RNA, 20 nt, Human
cauuuguuagcuuucuacug

SEQ ID NO: 979127 - RNA, 22 nt, Human
uagcaggguccaaugugaggca

SEQ ID NO: 979128 - RNA, 22 nt, Human
gggaagagaccguacccuggcc

SEQ ID NO: 979129 - RNA, 22 nt, Human
auuguacaaugccuggaacauu

SEQ ID NO: 979130 - RNA, 22 nt, Human
aaaugucuuucuucugcuacgu

SEQ ID NO: 979131 - RNA, 22 nt, Human
cugccuugaaaaugaagcuuua

SEQ ID NO: 979132 - RNA, 22 nt, Human
ugugcuucugcagagacuauuu

SEQ ID NO: 979133 - RNA, 22 nt, Human
gaggccugaaaggggaccuaug

SEQ ID NO: 979134 - RNA, 22 nt, Human
ggagugacucacagcugggaca

SEQ ID NO: 979135 - RNA, 22 nt, Human
aaaucaguucucccuuucuuca

SEQ ID NO: 979136 - RNA, 22 nt, Human
ugugugcagacagauauuacuu

SEQ ID NO: 979137 - RNA, 19 nt, Human
agcagagcagggccguggg

SEQ ID NO: 979138 - RNA, 23 nt, Human
gggcugcuccaggccaaggcugg

SEQ ID NO: 979139 - RNA, 22 nt, Human
agccaggauggucucgaucggc

SEQ ID NO: 979140 - RNA, 22 nt, Human
uggacagguuugggugccuguu

SEQ ID NO: 979141 - RNA, 22 nt, Human
uuccuauuuccaugaaacacaa

SEQ ID NO: 979142 - RNA, 22 nt, Human
auggccaagaaauugccgacug

SEQ ID NO: 979143 - RNA, 22 nt, Human
acucugacuggagugagagagg

SEQ ID NO: 979144 - RNA, 22 nt, Human
agggcccucuggcaggccaggc

SEQ ID NO: 979145 - RNA, 22 nt, Human
cagucucuugcuucauuaguug

SEQ ID NO: 979146 - RNA, 22 nt, Human
caucaaauggcaagugaaagcu

SEQ ID NO: 979147 - RNA, 22 nt, Human
uggcugugucaucauagcugug

SEQ ID NO: 979148 - RNA, 21 nt, Human
aaagaacaggcagauguucuu

SEQ ID NO: 979149 - RNA, 22 nt, Human
uaggagcuaaaauauuuuauau

SEQ ID NO: 979150 - RNA, 22 nt, Human
ccagaggcuggggaaggauaca

SEQ ID NO: 979151 - RNA, 22 nt, Human
cauugcacugcagcccgggcaa

SEQ ID NO: 979152 - RNA, 22 nt, Human
ggagacagugguagggccuaag

SEQ ID NO: 979153 - RNA, 22 nt, Human
ccaggagcuggcauguggagag

SEQ ID NO: 979154 - RNA, 22 nt, Human
ugcuggggcucugaccacucca

SEQ ID NO: 979155 - RNA, 22 nt, Human
gcaugucaugucauguaggaau

SEQ ID NO: 979156 - RNA, 22 nt, Human
gccuuccuuacaccugcucagc

SEQ ID NO: 979157 - RNA, 22 nt, Human
augggguggaguccgggcagcg

SEQ ID NO: 979158 - RNA, 22 nt, Human
agacauuuggaagauacacaua

SEQ ID NO: 979159 - RNA, 22 nt, Human
ugguccugagcaccagccugac

SEQ ID NO: 979160 - RNA, 22 nt, Human
acagagcuuaauucaggagcuu

SEQ ID NO: 979161 - RNA, 22 nt, Human
aacugcuguggccuaguacuua

SEQ ID NO: 979162 - RNA, 22 nt, Human
gcagaaggucuggcacuucagg

SEQ ID NO: 979163 - RNA, 22 nt, Human
uucucacuauguauguagauug

SEQ ID NO: 979164 - RNA, 22 nt, Human
ugcugcuccccagcacacagca

SEQ ID NO: 979165 - RNA, 22 nt, Human
aaauauagcaauuaugccuacu

SEQ ID NO: 979166 - RNA, 22 nt, Human
agggcagcacagcugugcuccu

SEQ ID NO: 979167 - RNA, 20 nt, Human
gucagaggacccuagagcga

SEQ ID NO: 979168 - RNA, 22 nt, Human
ugaguagcggcuauguguaacu

SEQ ID NO: 979169 - RNA, 22 nt, Human
agucccagaucuacaggaggga

SEQ ID NO: 979170 - RNA, 22 nt, Human
ucagcuccucagagccucaguu

SEQ ID NO: 979171 - RNA, 22 nt, Human
gagaggaguuacuauuuccgag

SEQ ID NO: 979172 - RNA, 22 nt, Human
auagaaauggcagcuggugcua

SEQ ID NO: 979173 - RNA, 22 nt, Human
agauuucaauggauauugcaag

SEQ ID NO: 979174 - RNA, 22 nt, Human
gccaggcuccaggcccuccuga

SEQ ID NO: 979175 - RNA, 22 nt, Human
gcagggaccugccacugcuguc

SEQ ID NO: 979176 - RNA, 21 nt, Human
ccuggcuucagggugcacugg

SEQ ID NO: 979177 - RNA, 22 nt, Human
cuggccucauagccaagcugug

SEQ ID NO: 979178 - RNA, 22 nt, Human
cagugcaguugguggcaggggu

SEQ ID NO: 979179 - RNA, 22 nt, Human
acaaaccagcuuaagcaagaug

SEQ ID NO: 979180 - RNA, 22 nt, Human
uaucuuuaacuugcaguauuua

SEQ ID NO: 979181 - RNA, 22 nt, Human
guggagacgggacagaagcuaa

SEQ ID NO: 979182 - RNA, 22 nt, Human
auuacacaggauuugccuuacu

SEQ ID NO: 979183 - RNA, 22 nt, Human
uaauuucaauagcuugcauaau

SEQ ID NO: 979184 - RNA, 22 nt, Human
uggcccugacagguccugggca

SEQ ID NO: 979185 - RNA, 22 nt, Human
caccugagugucaguauucuca

SEQ ID NO: 979186 - RNA, 22 nt, Human
ggcagcauuuagagcacagugu

SEQ ID NO: 979187 - RNA, 22 nt, Human
acacagggggcauucuaggagu

SEQ ID NO: 979188 - RNA, 22 nt, Human
agucucagcuacuugggaggcu

SEQ ID NO: 979189 - RNA, 21 nt, Human
gcuccuggugcugcguggcgc

SEQ ID NO: 979190 - RNA, 22 nt, Human
uucucuucuguucagugcccaa

SEQ ID NO: 979191 - RNA, 22 nt, Human
cgcugggggaacagcgagggug

SEQ ID NO: 979192 - RNA, 22 nt, Human
aaaugcacaauaaaguaaaggc

SEQ ID NO: 979193 - RNA, 22 nt, Human
ucuguagcaagugagaggcauu

SEQ ID NO: 979194 - RNA, 22 nt, Human
gccuggagggucccucucugga

SEQ ID NO: 979195 - RNA, 22 nt, Human
ggcucugcagugacuugagggg

SEQ ID NO: 979196 - RNA, 22 nt, Human
acucuuuuauaaagcaucuuga

SEQ ID NO: 979197 - RNA, 22 nt, Human
ugaaggaaagagggaacauccc

SEQ ID NO: 979198 - RNA, 22 nt, Human
ugguccaggguguaguacagag

SEQ ID NO: 979199 - RNA, 22 nt, Human
ugcauguuauuguggcaagaau

SEQ ID NO: 979200 - RNA, 22 nt, Human
gcaggguauaauacuuagguga

SEQ ID NO: 979201 - RNA, 22 nt, Human
ccugcagguugcagaggcggaa

SEQ ID NO: 979202 - RNA, 22 nt, Human
cucaggguaaugaaagacgaau

SEQ ID NO: 979203 - RNA, 22 nt, Human
ucugaggcauaaccuguucugc

SEQ ID NO: 979204 - RNA, 22 nt, Human
aaaugcagauuuugaugcagca

SEQ ID NO: 979205 - RNA, 21 nt, Human
agcuuccugcagugggagguc

SEQ ID NO: 979206 - RNA, 22 nt, Human
ucaaaugcaggucuggucuugg

SEQ ID NO: 979207 - RNA, 18 nt, Human
gcucugcccaggcugccc

SEQ ID NO: 979208 - RNA, 22 nt, Human
agcagggggccacagucacagc

SEQ ID NO: 979209 - RNA, 21 nt, Human
aaagugguaaggauuauuuug

SEQ ID NO: 979210 - RNA, 23 nt, Human
ggagugcaauggcgccaucucgg

SEQ ID NO: 979211 - RNA, 22 nt, Human
aaaugccucugcuguacacaau

SEQ ID NO: 979212 - RNA, 22 nt, Human
cugggcuguaauguggcacuga

SEQ ID NO: 979213 - RNA, 22 nt, Human
uaauuuaauccaaguguuacau

SEQ ID NO: 979214 - RNA, 22 nt, Human
agcuauguauaaauaggccacu

SEQ ID NO: 979215 - RNA, 22 nt, Human
ucuuuacaucacaauuguaugg

SEQ ID NO: 979216 - RNA, 22 nt, Human
uaauuucuagggacuaaggugc

SEQ ID NO: 979217 - RNA, 22 nt, Human
gccugagcuacuagggagucug

SEQ ID NO: 979218 - RNA, 22 nt, Human
gucccugcccuccugggacuca

SEQ ID NO: 979219 - RNA, 22 nt, Human
cccuuccucccaggcuucugug

SEQ ID NO: 979220 - RNA, 22 nt, Human
ucuggcucugacacuacuguua

SEQ ID NO: 979221 - RNA, 22 nt, Human
aucuggcugagcgaggcccaca

SEQ ID NO: 979222 - RNA, 19 nt, Human
ggcugccuggagcgagggc

SEQ ID NO: 979223 - RNA, 22 nt, Human
ggcaucuguccaucucuccagc

SEQ ID NO: 979224 - RNA, 22 nt, Human
uuucuuauauucugucauuguu

SEQ ID NO: 979225 - RNA, 20 nt, Human
uacagaaugcaauaaaaugg

SEQ ID NO: 979226 - RNA, 23 nt, Human
acauacauggagauaaagugaug

SEQ ID NO: 979227 - RNA, 22 nt, Human
cucuggagcauuucaccuacau

SEQ ID NO: 979228 - RNA, 21 nt, Human
ucagaguguguuacagcaagc

SEQ ID NO: 979229 - RNA, 22 nt, Human
ucagcaguggcucucaugcagu

SEQ ID NO: 979230 - RNA, 22 nt, Human
acagcagcuggguucccaccau

SEQ ID NO: 979231 - RNA, 22 nt, Human
auaaaaaggacagauguggucu

SEQ ID NO: 979232 - RNA, 22 nt, Human
aguggggacuuaugccagcauu

SEQ ID NO: 979233 - RNA, 18 nt, Human
aagaggaggaaacccagg

SEQ ID NO: 979234 - RNA, 22 nt, Human
cagagcugcucaugguggccag

SEQ ID NO: 979235 - RNA, 22 nt, Human
aggccagcagcaugacggcauc

SEQ ID NO: 979236 - RNA, 22 nt, Human
gugcucuguguauuaggauguc

SEQ ID NO: 979237 - RNA, 22 nt, Human
ggggugggcgugcagggacacc

SEQ ID NO: 979238 - RNA, 22 nt, Human
ccuuaaaagaacuaucucuucu

SEQ ID NO: 979239 - RNA, 22 nt, Human
uacaguaacauguuguacaagc

SEQ ID NO: 979240 - RNA, 18 nt, Human
aaugcuauuguuauaggg

SEQ ID NO: 979241 - RNA, 21 nt, Human
agggccugugcucuccagguc

SEQ ID NO: 979242 - RNA, 22 nt, Human
gucauuguguggacauggagaa

SEQ ID NO: 979243 - RNA, 22 nt, Human
gcagcugggccccagccucucc

SEQ ID NO: 979244 - RNA, 22 nt, Human
caggcagcucgaugccuuguug

SEQ ID NO: 979245 - RNA, 22 nt, Human
uuagccauuaaauuacaaggug

SEQ ID NO: 979246 - RNA, 22 nt, Human
cagccucuaagcacagccucuc

SEQ ID NO: 979247 - RNA, 22 nt, Human
ucauuuuucacacagggucacc

SEQ ID NO: 979248 - RNA, 22 nt, Human
gaccugccugagcugccucugc

SEQ ID NO: 979249 - RNA, 22 nt, Human
aggcugccaaagcuucugucuc

SEQ ID NO: 979250 - RNA, 22 nt, Human
uaauuucuaauucauuuucagu

SEQ ID NO: 979251 - RNA, 22 nt, Human
ugccugucagggggagugggaa

SEQ ID NO: 979252 - RNA, 22 nt, Human
uaaggcacccauguucauacag

SEQ ID NO: 979253 - RNA, 22 nt, Human
ccuguucacccuccaugcacag

SEQ ID NO: 979254 - RNA, 22 nt, Human
ucuccugcagucagcagucuca

SEQ ID NO: 979255 - RNA, 22 nt, Human
uagugcuuuaggccugaguguc

SEQ ID NO: 979256 - RNA, 22 nt, Human
guggcccaggcuuggcgcuggc

SEQ ID NO: 979257 - RNA, 23 nt, Human
gccagccuugcucuccugcagcc

SEQ ID NO: 979258 - RNA, 22 nt, Human
ccaggccuuucuucuuggucug

SEQ ID NO: 979259 - RNA, 22 nt, Human
gucaggauuauaauccccaugg

SEQ ID NO: 979260 - RNA, 22 nt, Human
accugccuucucaaggacauga

SEQ ID NO: 979261 - RNA, 20 nt, Human
auuaggauuuuaggucauca

SEQ ID NO: 979262 - RNA, 22 nt, Human
uuucuagucucgaucucuuaau

SEQ ID NO: 979263 - RNA, 22 nt, Human
uggcaguguauagguggcuccu

SEQ ID NO: 979264 - RNA, 22 nt, Human
gacagccaugcacuucugcugu

SEQ ID NO: 979265 - RNA, 22 nt, Human
uggggcucaccuaggcuggaag

SEQ ID NO: 979266 - RNA, 22 nt, Human
acaguaauauugaugcucguca

SEQ ID NO: 979267 - RNA, 22 nt, Human
ucugggagguacugggaggugu

SEQ ID NO: 979268 - RNA, 22 nt, Human
auauuucaugggguuccauacu

SEQ ID NO: 979269 - RNA, 22 nt, Human
gugccagcaguuauggugauuu

SEQ ID NO: 979270 - RNA, 22 nt, Human
ucaggaugagcucauaacuaug

SEQ ID NO: 979271 - RNA, 22 nt, Human
gaggggaagacuucuggacagu

SEQ ID NO: 979272 - RNA, 22 nt, Human
ugaaacagucuccagacuugga

SEQ ID NO: 979273 - RNA, 20 nt, Human
gcugucuggauuagaagccu

SEQ ID NO: 979274 - RNA, 22 nt, Human
ccaggcugccgaggaaagaaag

SEQ ID NO: 979275 - RNA, 22 nt, Human
uuaggauagucuguuagaaaag

SEQ ID NO: 979276 - RNA, 21 nt, Human
ccucuggcuugugcugugccc

SEQ ID NO: 979277 - RNA, 22 nt, Human
uccauuuuguagguaugcuaca

SEQ ID NO: 979278 - RNA, 22 nt, Human
uaaggucauggugaauaauaag

SEQ ID NO: 979279 - RNA, 22 nt, Human
acagcaggauuuggcgauguug

SEQ ID NO: 979280 - RNA, 22 nt, Human
agcugccgaugcccagcugcau

SEQ ID NO: 979281 - RNA, 22 nt, Human
aggccagcacgacagccgcagg

SEQ ID NO: 979282 - RNA, 22 nt, Human
ugcucuguaacaaauugacaug

SEQ ID NO: 979283 - RNA, 22 nt, Human
gaggcugauucggggaacagca

SEQ ID NO: 979284 - RNA, 22 nt, Human
uagggaggcuacuucuuguagg

SEQ ID NO: 979285 - RNA, 22 nt, Human
aagccagauagaagaacucauu

SEQ ID NO: 979286 - RNA, 22 nt, Human
uuauuugguugcugacuuggaa

SEQ ID NO: 979287 - RNA, 22 nt, Human
accauuuaauaaguauuuccau

SEQ ID NO: 979288 - RNA, 19 nt, Human
acaagggcaggcaagguga

SEQ ID NO: 979289 - RNA, 22 nt, Human
accacuguaucuccagcacauu

SEQ ID NO: 979290 - RNA, 22 nt, Human
uuggccaauggugauucccggc

SEQ ID NO: 979291 - RNA, 22 nt, Human
aagggcagggaguuugugucua

SEQ ID NO: 979292 - RNA, 21 nt, Human
uggaggaauaaagcacagaag

SEQ ID NO: 979293 - RNA, 22 nt, Human
ugcugcucucagccaccaggaa

SEQ ID NO: 979294 - RNA, 22 nt, Human
gaggccugguagccgagcccca

SEQ ID NO: 979295 - RNA, 22 nt, Human
ugggcagagaucuggaucaaac

SEQ ID NO: 979296 - RNA, 22 nt, Human
ggccaaaccgcaauuauuuuug

SEQ ID NO: 979297 - RNA, 22 nt, Human
agcauuuauuucuuagaaauug

SEQ ID NO: 979298 - RNA, 20 nt, Human
ucugccacuuuuucugucac

SEQ ID NO: 979299 - RNA, 22 nt, Human
uuuaagauucaguaaggcaaac

SEQ ID NO: 979300 - RNA, 22 nt, Human
gccuggaguuguggugaagcca

SEQ ID NO: 979301 - RNA, 22 nt, Human
cauaauaucuccgauuacuugc

SEQ ID NO: 979302 - RNA, 22 nt, Human
uugaaucuggguacuuguaaua

SEQ ID NO: 979303 - RNA, 22 nt, Human
uuccuggccucucucugagcag

SEQ ID NO: 979304 - RNA, 22 nt, Human
uuugacauuauccuguuacugg

SEQ ID NO: 979305 - RNA, 22 nt, Human
guuugcauaaaguggaugcagg

SEQ ID NO: 979306 - RNA, 22 nt, Human
cccaggccccagggcuugucag

SEQ ID NO: 979307 - RNA, 22 nt, Human
auaucaaagcuaguggaaauuu

SEQ ID NO: 979308 - RNA, 22 nt, Human
gcuuuauguaaguccaaaggca

SEQ ID NO: 979309 - RNA, 22 nt, Human
cuggcagguggauggggacucc

SEQ ID NO: 979310 - RNA, 22 nt, Human
uagaaaagauaacauucugugc

SEQ ID NO: 979311 - RNA, 22 nt, Human
uaaaugcuaucgcauaaaaccu

SEQ ID NO: 979312 - RNA, 22 nt, Human
uccucugcuggaagggcaagag

SEQ ID NO: 979313 - RNA, 22 nt, Human
uuuguaugugauaagacuauuc

SEQ ID NO: 979314 - RNA, 22 nt, Human
agcagggcugcagugugucuuu

SEQ ID NO: 979315 - RNA, 22 nt, Human
gaguuuaacacuuggagaaaag

SEQ ID NO: 979316 - RNA, 22 nt, Human
auauaaguuaguggucauguuu

SEQ ID NO: 979317 - RNA, 22 nt, Human
caggggcaggugugagaucauc

SEQ ID NO: 979318 - RNA, 22 nt, Human
cuggagccggcgagccccagcc

SEQ ID NO: 979319 - RNA, 22 nt, Human
auguuuaagaaagucuuccaua

SEQ ID NO: 979320 - RNA, 22 nt, Human
ucccaggguccucuucuggaau

SEQ ID NO: 979321 - RNA, 22 nt, Human
caaggccuccugggcccagaga

SEQ ID NO: 979322 - RNA, 22 nt, Human
gccacguugccacccgggugac

SEQ ID NO: 979323 - RNA, 22 nt, Human
acagaauuaucaggaaauguua

SEQ ID NO: 979324 - RNA, 22 nt, Human
gcagggaagaucuuggagcugc

SEQ ID NO: 979325 - RNA, 22 nt, Human
uuacuuuggauggucaagaaag

SEQ ID NO: 979326 - RNA, 22 nt, Human
aguggaccagaagacugaagcu

SEQ ID NO: 979327 - RNA, 22 nt, Human
aaaaaaucagaucuuugguuaa

SEQ ID NO: 979328 - RNA, 22 nt, Human
ucuugggaaauaaacagauuga

SEQ ID NO: 979329 - RNA, 22 nt, Human
ugcuguguggaugugaagaauc

SEQ ID NO: 979330 - RNA, 22 nt, Human
ccugccagggccuuggaagaaa

SEQ ID NO: 979331 - RNA, 22 nt, Human
gcacccaggcuugggcagcaac

SEQ ID NO: 979332 - RNA, 22 nt, Human
auuuucaucauggguuuaacau

SEQ ID NO: 979333 - RNA, 22 nt, Human
gaaggccacaaaaaaugucaua

SEQ ID NO: 979334 - RNA, 18 nt, Human
aggcacuggaauuaaggg

SEQ ID NO: 979335 - RNA, 21 nt, Human
acaggcucuggggaugcuggg

SEQ ID NO: 979336 - RNA, 22 nt, Human
ccaaggcuccucagcuggucuu

SEQ ID NO: 979337 - RNA, 18 nt, Human
cguuuuuccgggauugca

SEQ ID NO: 979338 - RNA, 18 nt, Human
acauuucuaggugaaagc

SEQ ID NO: 979339 - RNA, 22 nt, Human
gcuuugaagucugugucuuuug

SEQ ID NO: 979340 - RNA, 22 nt, Human
gccucugcccuccugggacugc

SEQ ID NO: 979341 - RNA, 22 nt, Human
gcagggugccgacuucagggau

SEQ ID NO: 979342 - RNA, 19 nt, Human
acuuucuccaggaccuguu

SEQ ID NO: 979343 - RNA, 22 nt, Human
uagcuuuguguaugaugucugu

SEQ ID NO: 979344 - RNA, 22 nt, Human
gcacagggccuggcacauaaga

SEQ ID NO: 979345 - RNA, 18 nt, Human
aggcacagagcauacaua

SEQ ID NO: 979346 - RNA, 22 nt, Human
uaagaacagugacagccaacau

SEQ ID NO: 979347 - RNA, 22 nt, Human
gagacagcacaggccacuggga

SEQ ID NO: 979348 - RNA, 22 nt, Human
uugaaagacuucuccugugaaa

SEQ ID NO: 979349 - RNA, 21 nt, Human
ccuggcagaagccugauaugc

SEQ ID NO: 979350 - RNA, 22 nt, Human
gaaguuuauuucaaucuauuca

SEQ ID NO: 979351 - RNA, 22 nt, Human
cuguguccucccgcugcaccca

SEQ ID NO: 979352 - RNA, 22 nt, Human
agaggcuggauugagcauagac

SEQ ID NO: 979353 - RNA, 22 nt, Human
auguaucaugcaggguccauga

SEQ ID NO: 979354 - RNA, 22 nt, Human
ggaaagagcccagcagugcuug

SEQ ID NO: 979355 - RNA, 22 nt, Human
cagcuccugaggacugcuggga

SEQ ID NO: 979356 - RNA, 22 nt, Human
cauaauauacuacauugaugaa

SEQ ID NO: 979357 - RNA, 21 nt, Human
ucugucucuccacugcccugc

SEQ ID NO: 979358 - RNA, 22 nt, Human
agagacaggguuuugccauguu

SEQ ID NO: 979359 - RNA, 19 nt, Human
ggcugccuuuccuuaccag

SEQ ID NO: 979360 - RNA, 22 nt, Human
aauauuucuccuucguuauagc

SEQ ID NO: 979361 - RNA, 22 nt, Human
caaaguuuggcucucaugacau

SEQ ID NO: 979362 - RNA, 22 nt, Human
cauguacacucauguaacuaua

SEQ ID NO: 979363 - RNA, 22 nt, Human
uguauguaaaguuuguaauaga

SEQ ID NO: 979364 - RNA, 22 nt, Human
agauuucagguuggggcagaag

SEQ ID NO: 979365 - RNA, 22 nt, Human
auacagcagugaauaagauaaa

SEQ ID NO: 979366 - RNA, 22 nt, Human
ggcugcuggaagacugaacaag

SEQ ID NO: 979367 - RNA, 22 nt, Human
aaagaaauagauggcauuuaaa

SEQ ID NO: 979368 - RNA, 22 nt, Human
gcuccuggucuggagcuucaag

SEQ ID NO: 979369 - RNA, 22 nt, Human
cugugccaguguauuccuguga

SEQ ID NO: 979370 - RNA, 22 nt, Human
gccagagcacaggcugguagua

SEQ ID NO: 979371 - RNA, 22 nt, Human
uccuugaagcuuguaucuaaua

SEQ ID NO: 979372 - RNA, 22 nt, Human
gcacuaaaccaacauguaauaa

SEQ ID NO: 979373 - RNA, 22 nt, Human
uauuucagguauggugugaaau

SEQ ID NO: 979374 - RNA, 22 nt, Human
uauacugucgcauuacacucac

SEQ ID NO: 979375 - RNA, 22 nt, Human
ccaggagaugggaaaguagcag

SEQ ID NO: 979376 - RNA, 22 nt, Human
cagcagagaccaagugauuuga

SEQ ID NO: 979377 - RNA, 22 nt, Human
gggccccuuguaucucuggcuc

SEQ ID NO: 979378 - RNA, 22 nt, Human
aacuucuggauguuucaaaugu

SEQ ID NO: 979379 - RNA, 22 nt, Human
uccagagcagguggucagaagg

SEQ ID NO: 979380 - RNA, 22 nt, Human
uaaguuuaaauguacaugaagc

SEQ ID NO: 979381 - RNA, 22 nt, Human
auggaaaggcuguggaaacuua

SEQ ID NO: 979382 - RNA, 22 nt, Human
cagcugccagcuucucuccauc

SEQ ID NO: 979383 - RNA, 20 nt, Human
cagcucugggaaagaggcca

SEQ ID NO: 979384 - RNA, 22 nt, Human
cagggcugcuggccgugcccuc

SEQ ID NO: 979385 - RNA, 22 nt, Human
agaggaugauuuuaaggacacu

SEQ ID NO: 979386 - RNA, 22 nt, Human
ucagagugaggcgucaacauga

SEQ ID NO: 979387 - RNA, 22 nt, Human
ucucagagugacaaugagaauu

SEQ ID NO: 979388 - RNA, 22 nt, Human
uuuugaaagccagguuuguaug

SEQ ID NO: 979389 - RNA, 22 nt, Human
uaaggcaccauaauauauuuaa

SEQ ID NO: 979390 - RNA, 22 nt, Human
gaguuauuggguggaaagguag

SEQ ID NO: 979391 - RNA, 22 nt, Human
ucacaggaggaaccuggccugg

SEQ ID NO: 979392 - RNA, 22 nt, Human
ucaggacagccagggugcagac

SEQ ID NO: 979393 - RNA, 22 nt, Human
caaauacuggguaaguuaauuu

SEQ ID NO: 979394 - RNA, 22 nt, Human
uuugcagugauucuugcaguga

SEQ ID NO: 979395 - RNA, 22 nt, Human
agugacaacaaguugacuagaa

SEQ ID NO: 979396 - RNA, 22 nt, Human
auuuccuauggauacaggcaga

SEQ ID NO: 979397 - RNA, 20 nt, Human
uauuucugggcaaccauuua

SEQ ID NO: 979398 - RNA, 22 nt, Human
uagcacaucuggcgcuuauagg

SEQ ID NO: 979399 - RNA, 22 nt, Human
uccuggaggcaaaugagcacau

SEQ ID NO: 979400 - RNA, 22 nt, Human
ucuggcuccacaccucacugca

SEQ ID NO: 979401 - RNA, 22 nt, Human
uggcagaguuggagguggaaga

SEQ ID NO: 979402 - RNA, 22 nt, Human
gcagauggugggggaggaguac

SEQ ID NO: 979403 - RNA, 19 nt, Human
ggcugcugguuacagaggc

SEQ ID NO: 979404 - RNA, 22 nt, Human
ccuggggagaagagcuuccccc

SEQ ID NO: 979405 - RNA, 22 nt, Human
uuucacaaguuucaggauucug

SEQ ID NO: 979406 - RNA, 19 nt, Human
agaguauugaauuugcccu

SEQ ID NO: 979407 - RNA, 20 nt, Human
cugugccuaaaccuccgggu

SEQ ID NO: 979408 - RNA, 22 nt, Human
gugggaugguagguagguaaua

SEQ ID NO: 979409 - RNA, 22 nt, Human
uuccuaauggcaaaacauguuu

SEQ ID NO: 979410 - RNA, 22 nt, Human
cccaagcagggugcagaggcau

SEQ ID NO: 979411 - RNA, 22 nt, Human
ucugccuggauuuuggaaagcu

SEQ ID NO: 979412 - RNA, 22 nt, Human
gauuucuuuaugaaguacagaa

SEQ ID NO: 979413 - RNA, 19 nt, Human
agccuggcuuugcucugcu

SEQ ID NO: 979414 - RNA, 22 nt, Human
ucuuuccuagaggcugaugagu

SEQ ID NO: 979415 - RNA, 21 nt, Human
uccaggaguucuaauaggugu

SEQ ID NO: 979416 - RNA, 22 nt, Human
ggaggaugagcuacgaggagcu

SEQ ID NO: 979417 - RNA, 22 nt, Human
gagccuggauugaagugggugg

SEQ ID NO: 979418 - RNA, 22 nt, Human
gcccaggaaauaaaagugggcu

SEQ ID NO: 979419 - RNA, 22 nt, Human
cagcucccgccaucgggaggca

SEQ ID NO: 979420 - RNA, 18 nt, Human
uucacaggaaaugucuuu

SEQ ID NO: 979421 - RNA, 22 nt, Human
guagaagugaugucauguuaua

SEQ ID NO: 979422 - RNA, 22 nt, Human
ccagggugagaaaaggcuggau

SEQ ID NO: 979423 - RNA, 22 nt, Human
guccugggcccaggggcugccu

SEQ ID NO: 979424 - RNA, 22 nt, Human
uggcacaugguaagacucagua

SEQ ID NO: 979425 - RNA, 19 nt, Human
cugggccagagcuguccuc

SEQ ID NO: 979426 - RNA, 22 nt, Human
aauauuaauagaagggguucua

SEQ ID NO: 979427 - RNA, 22 nt, Human
uagaaguuaaaggaauacagaa

SEQ ID NO: 979428 - RNA, 22 nt, Human
uaaugaauaaacuugagaguca

SEQ ID NO: 979429 - RNA, 22 nt, Human
guaucuuuccacaucuucagua

SEQ ID NO: 979430 - RNA, 22 nt, Human
gcagcauacagggagaguacuc

SEQ ID NO: 979431 - RNA, 22 nt, Human
aacccagccguguagcugccgc

SEQ ID NO: 979432 - RNA, 22 nt, Human
gaagcucucaaacucuccccuu

SEQ ID NO: 979433 - RNA, 22 nt, Human
gucuuaaaaucagaggauauag

SEQ ID NO: 979434 - RNA, 22 nt, Human
agugcuuugguauagaacuauu

SEQ ID NO: 979435 - RNA, 22 nt, Human
uccuggcccgaucccugugaag

SEQ ID NO: 979436 - RNA, 22 nt, Human
aauucauccaugaacaauucca

SEQ ID NO: 979437 - RNA, 22 nt, Human
ucuucucccaucuccaggcagg

SEQ ID NO: 979438 - RNA, 22 nt, Human
aucaagaauguucauucuucua

SEQ ID NO: 979439 - RNA, 22 nt, Human
ucagaaauguaagcugaugacu

SEQ ID NO: 979440 - RNA, 22 nt, Human
aaaguguugggaagaaagugca

SEQ ID NO: 979441 - RNA, 22 nt, Human
agggccagcacuccuggcagga

SEQ ID NO: 979442 - RNA, 22 nt, Human
ugaaacaggaaguaaacagaca

SEQ ID NO: 979443 - RNA, 22 nt, Human
cuggcucauagagcagcuccaa

SEQ ID NO: 979444 - RNA, 22 nt, Human
aggcugucaucuuugcaggcag

SEQ ID NO: 979445 - RNA, 22 nt, Human
aauguucagaggacaauauaaa

SEQ ID NO: 979446 - RNA, 22 nt, Human
agugaggcuaauaggcaauggu

SEQ ID NO: 979447 - RNA, 22 nt, Human
uugggaaggcguggaagcagaa

SEQ ID NO: 979448 - RNA, 22 nt, Human
cuugaaucuucugaguauuugc

SEQ ID NO: 979449 - RNA, 22 nt, Human
gaccauuugcuaguaaauugca

SEQ ID NO: 979450 - RNA, 22 nt, Human
gaggcaguguugaaaaggagag

SEQ ID NO: 979451 - RNA, 22 nt, Human
gcuuccugagaaacaaucugau

SEQ ID NO: 979452 - RNA, 22 nt, Human
uagcagagcagggaucagagcc

SEQ ID NO: 979453 - RNA, 22 nt, Human
agauguaguagugggucuuuua

SEQ ID NO: 979454 - RNA, 22 nt, Human
gccuucaguagugucagcugua

SEQ ID NO: 979455 - RNA, 19 nt, Human
aucuuacagagcagaguac

SEQ ID NO: 979456 - RNA, 22 nt, Human
gugccuuccccgguggucuguu

SEQ ID NO: 979457 - RNA, 22 nt, Human
uuuccauguuggugaaaugagg

SEQ ID NO: 979458 - RNA, 22 nt, Human
ggcacagggaggcccuggugug

SEQ ID NO: 979459 - RNA, 17 nt, Human
gagaguguauuggaugc

SEQ ID NO: 979460 - RNA, 22 nt, Human
cauuguuaccaucuuuuaccua

SEQ ID NO: 979461 - RNA, 22 nt, Human
cugugcuugcggguguggagcc

SEQ ID NO: 979462 - RNA, 22 nt, Human
uaugcacacauguaugcaugug

SEQ ID NO: 979463 - RNA, 17 nt, Human
uucaaugauuaaugcau

SEQ ID NO: 979464 - RNA, 22 nt, Human
gccuucugauugcuggacugac

SEQ ID NO: 979465 - RNA, 22 nt, Human
cugggcagcuaccaccacugcu

SEQ ID NO: 979466 - RNA, 22 nt, Human
accccagaggcggaggcugcag

SEQ ID NO: 979467 - RNA, 19 nt, Human
agcuggggcgguguguguu

SEQ ID NO: 979468 - RNA, 22 nt, Human
agggccugagcuggcugaccuc

SEQ ID NO: 979469 - RNA, 23 nt, Human
accaggagaaaagcuuugcggga

SEQ ID NO: 979470 - RNA, 22 nt, Human
ugagccuguggggugacaacca

SEQ ID NO: 979471 - RNA, 20 nt, Human
ggcagagcuaugucuguugc

SEQ ID NO: 979472 - RNA, 22 nt, Human
uucuccucuguuggccuucccu

SEQ ID NO: 979473 - RNA, 22 nt, Human
gcuggccucuacaggccggcca

SEQ ID NO: 979474 - RNA, 22 nt, Human
uucuguauauuguaaagacuca

SEQ ID NO: 979475 - RNA, 22 nt, Human
auaaagacaugcuuacuugccc

SEQ ID NO: 979476 - RNA, 22 nt, Human
guuugaaugcaguaugcauuuu

SEQ ID NO: 979477 - RNA, 22 nt, Human
uguguccauucaggcacugacc

SEQ ID NO: 979478 - RNA, 20 nt, Human
caagcccucuuuagccugcc

SEQ ID NO: 979479 - RNA, 22 nt, Human
ucaucuugcugccauugcuuua

SEQ ID NO: 979480 - RNA, 22 nt, Human
acacuuuguuguggcauauacg

SEQ ID NO: 979481 - RNA, 22 nt, Human
agaggugacauaggagaggcuc

SEQ ID NO: 979482 - RNA, 22 nt, Human
gcaggugguccccguggagugg

SEQ ID NO: 979483 - RNA, 23 nt, Human
aggagaagagauuuccacaugca

SEQ ID NO: 979484 - RNA, 22 nt, Human
gccuugggcacaggcagggccc

SEQ ID NO: 979485 - RNA, 22 nt, Human
ugggcacuggaagccugcugug

SEQ ID NO: 979486 - RNA, 22 nt, Human
caggcugaggcaguaggguuug

SEQ ID NO: 979487 - RNA, 22 nt, Human
cacaggugcuccucggggagcu

SEQ ID NO: 979488 - RNA, 22 nt, Human
acugcagccuuugggcucauaa

SEQ ID NO: 979489 - RNA, 22 nt, Human
aguuuauagcccagauucaugg

SEQ ID NO: 979490 - RNA, 22 nt, Human
uggcagggugggcuucagcccc

SEQ ID NO: 979491 - RNA, 22 nt, Human
gagggcuccauuccccgugccc

SEQ ID NO: 979492 - RNA, 22 nt, Human
aauauccacacugugucccugc

SEQ ID NO: 979493 - RNA, 22 nt, Human
guggagccaggaucuccgcaca

SEQ ID NO: 979494 - RNA, 19 nt, Human
aggucauugauagugcagg

SEQ ID NO: 979495 - RNA, 20 nt, Human
uucuggaggcuacaagucug

SEQ ID NO: 979496 - RNA, 22 nt, Human
uguaacaguaagccugugagcu

SEQ ID NO: 979497 - RNA, 22 nt, Human
cccauucauccucgcuuccuuc

SEQ ID NO: 979498 - RNA, 22 nt, Human
uuggcagggccaggcucucucu

SEQ ID NO: 979499 - RNA, 22 nt, Human
aacugcuggggaggccaaacuc

SEQ ID NO: 979500 - RNA, 22 nt, Human
gcagccagaagacucagaacaa

SEQ ID NO: 979501 - RNA, 21 nt, Human
caugcaggauuuaaccuagaa

SEQ ID NO: 979502 - RNA, 22 nt, Human
cagagggaaaaggggaguaaua

SEQ ID NO: 979503 - RNA, 22 nt, Human
agaaugcuccagagcugaaaga

SEQ ID NO: 979504 - RNA, 22 nt, Human
aggagagggguaggauuaauuu

SEQ ID NO: 979505 - RNA, 22 nt, Human
aggcacugugcagucccaagca

SEQ ID NO: 979506 - RNA, 22 nt, Human
gcugugcuggaaggggaccugc

SEQ ID NO: 979507 - RNA, 22 nt, Human
ugggagaagcagcagccaagug

SEQ ID NO: 979508 - RNA, 22 nt, Human
auagugguuggauaugucagag

SEQ ID NO: 979509 - RNA, 22 nt, Human
cuguucucuggcgguggcuguu

SEQ ID NO: 979510 - RNA, 22 nt, Human
agcugcugugugcucaggcagg

SEQ ID NO: 979511 - RNA, 22 nt, Human
gggcugcuuauacugaugauaa

SEQ ID NO: 979512 - RNA, 20 nt, Human
ucacauccucucccaacaug

SEQ ID NO: 979513 - RNA, 23 nt, Human
ccucagcauggcaggagcccagc

SEQ ID NO: 979514 - RNA, 22 nt, Human
ggaaaaggccacagggacacau

SEQ ID NO: 979515 - RNA, 22 nt, Human
gccaggcagauaugugagcuua

SEQ ID NO: 979516 - RNA, 22 nt, Human
cuacuucuaaguacauggugau

SEQ ID NO: 979517 - RNA, 22 nt, Human
aggucccaggcauagcuggucu

SEQ ID NO: 979518 - RNA, 22 nt, Human
uucuucaaacaaaaguggcaug

SEQ ID NO: 979519 - RNA, 23 nt, Human
agaauuguaaauagaauauaccu

SEQ ID NO: 979520 - RNA, 22 nt, Human
uccucuggauauaagccucacc

SEQ ID NO: 979521 - RNA, 22 nt, Human
cgcugccaggucaccaggggua

SEQ ID NO: 979522 - RNA, 22 nt, Human
uuccucucaacaugccugccgg

SEQ ID NO: 979523 - RNA, 22 nt, Human
caaaguuaugaaugauaagauu

SEQ ID NO: 979524 - RNA, 22 nt, Human
ugaugaaaauaugauucugagg

SEQ ID NO: 979525 - RNA, 22 nt, Human
ucaaaugcggucauggcuuuua

SEQ ID NO: 979526 - RNA, 22 nt, Human
ucucaggaaauaggauuugagu

SEQ ID NO: 979527 - RNA, 19 nt, Human
ucgagucaagacacuaggc

SEQ ID NO: 979528 - RNA, 22 nt, Human
cugucucugucuuaacucccag

SEQ ID NO: 979529 - RNA, 22 nt, Human
ugaaugaguuuggcugcuguuc

SEQ ID NO: 979530 - RNA, 22 nt, Human
uuuugaauaauucagaaacagc

SEQ ID NO: 979531 - RNA, 22 nt, Human
cagaguccuggacacagagaca

SEQ ID NO: 979532 - RNA, 22 nt, Human
ucagaacauugacauucuuauu

SEQ ID NO: 979533 - RNA, 18 nt, Human
cuuuaugugcagagcuuu

SEQ ID NO: 979534 - RNA, 20 nt, Human
agugcaagaaagcacagcug

SEQ ID NO: 979535 - RNA, 22 nt, Human
cuuaacagcaagaucuguguca

SEQ ID NO: 979536 - RNA, 22 nt, Human
uaagaacagugucugucucaca

SEQ ID NO: 979537 - RNA, 20 nt, Human
aggcagagcgcacuuuuaga

SEQ ID NO: 979538 - RNA, 22 nt, Human
uucuauaagacucauauuucuu

SEQ ID NO: 979539 - RNA, 22 nt, Human
cuucugggcauucagcugcaca

SEQ ID NO: 979540 - RNA, 22 nt, Human
acaaaugcagcauaaagugaac

SEQ ID NO: 979541 - RNA, 22 nt, Human
acagguggagugguuagcaggc

SEQ ID NO: 979542 - RNA, 22 nt, Human
gggcagcuguaucugagcuuau

SEQ ID NO: 979543 - RNA, 20 nt, Human
cugagccaacucucuucuug

SEQ ID NO: 979544 - RNA, 22 nt, Human
cuggcuuccaugcuguaguggc

SEQ ID NO: 979545 - RNA, 20 nt, Human
acugggcauaccuguccugu

SEQ ID NO: 979546 - RNA, 22 nt, Human
auuaaauuaaguggcuaauuua

SEQ ID NO: 979547 - RNA, 22 nt, Human
ugaguaauaaacugucuugcuc

SEQ ID NO: 979548 - RNA, 22 nt, Human
cccuggaggcggagcuugcagu

SEQ ID NO: 979549 - RNA, 22 nt, Human
aggucauuuccuuagaggcaga

SEQ ID NO: 979550 - RNA, 22 nt, Human
ccugcuucagggaugauggcac

SEQ ID NO: 979551 - RNA, 22 nt, Human
auggauaagucaaagaguaucc

SEQ ID NO: 979552 - RNA, 22 nt, Human
uagcugucaccagaaauggcca

SEQ ID NO: 979553 - RNA, 22 nt, Human
acaaaugcuuaguucaccaaaa

SEQ ID NO: 979554 - RNA, 20 nt, Human
ccucaggaugagggugagca

SEQ ID NO: 979555 - RNA, 22 nt, Human
aggguagggccguagggccaug

SEQ ID NO: 979556 - RNA, 22 nt, Human
agagggagcccagucauagcug

SEQ ID NO: 979557 - RNA, 22 nt, Human
ggcaggcagaggcugagacagg

SEQ ID NO: 979558 - RNA, 22 nt, Human
caggccaggcugcauuugcccc

SEQ ID NO: 979559 - RNA, 22 nt, Human
aaagcagacugauuugcaucac

SEQ ID NO: 979560 - RNA, 22 nt, Human
ggagccuguuaguugagugcuc

SEQ ID NO: 979561 - RNA, 22 nt, Human
ucuggcucuguguccccaccca

SEQ ID NO: 979562 - RNA, 23 nt, Human
uggcagcagaucuuaaagugacc

SEQ ID NO: 979563 - RNA, 22 nt, Human
cccuugcacauuugucuuuaau

SEQ ID NO: 979564 - RNA, 22 nt, Human
uaaauucugaucaaguuccuuc

SEQ ID NO: 979565 - RNA, 22 nt, Human
gaggcuggugguuaguuccauu

SEQ ID NO: 979566 - RNA, 22 nt, Human
gcucugcugaagccccuugcau

SEQ ID NO: 979567 - RNA, 22 nt, Human
uugugugguagcuucauugaac

SEQ ID NO: 979568 - RNA, 22 nt, Human
uauggcauuguuggugaugaua

SEQ ID NO: 979569 - RNA, 22 nt, Human
ugguacuuggaggcagaaaaau

SEQ ID NO: 979570 - RNA, 22 nt, Human
gcugccuuuugcuccucccacc

SEQ ID NO: 979571 - RNA, 22 nt, Human
ugaaauguaaauaggacuagaa

SEQ ID NO: 979572 - RNA, 22 nt, Human
ugagccugaguucaaggcugca

SEQ ID NO: 979573 - RNA, 19 nt, Human
gcucugagaggggcauggg

SEQ ID NO: 979574 - RNA, 22 nt, Human
ucuacagacagagcagguggga

SEQ ID NO: 979575 - RNA, 22 nt, Human
auaauuuacuaagcucuaccuu

SEQ ID NO: 979576 - RNA, 21 nt, Human
uacugagaccucacagugugc

SEQ ID NO: 979577 - RNA, 22 nt, Human
ccucccuuggccauagccagcc

SEQ ID NO: 979578 - RNA, 22 nt, Human
gggaaaggaucagugggaggcu

SEQ ID NO: 979579 - RNA, 20 nt, Human
ccucaguguccuggacuggg

SEQ ID NO: 979580 - RNA, 22 nt, Human
aguucucaagacaauuaccugu

SEQ ID NO: 979581 - RNA, 22 nt, Human
guaguucugcagugucaccuga

SEQ ID NO: 979582 - RNA, 22 nt, Human
gcaggcagaucaccugucagga

SEQ ID NO: 979583 - RNA, 22 nt, Human
uggagugaaguaaagaggacaa

SEQ ID NO: 979584 - RNA, 22 nt, Human
agugcuuuccuucuugugacau

SEQ ID NO: 979585 - RNA, 22 nt, Human
uuuccuaagguagugauaauuu

SEQ ID NO: 979586 - RNA, 22 nt, Human
ugcuuuuaagaacaaugcugcu

SEQ ID NO: 979587 - RNA, 22 nt, Human
auguggcacagcacaguaagag

SEQ ID NO: 979588 - RNA, 22 nt, Human
guguggcugauugacaugguca

SEQ ID NO: 979589 - RNA, 22 nt, Human
cagcccagccgagggccuggcu

SEQ ID NO: 979590 - RNA, 22 nt, Human
caggcagccugagggaucuggg

SEQ ID NO: 979591 - RNA, 22 nt, Human
auccaggccuugaaguaccagu

SEQ ID NO: 979592 - RNA, 22 nt, Human
ugcagaggagcuggaaggcugg

SEQ ID NO: 979593 - RNA, 22 nt, Human
ucuucagaggaagucagucuuu

SEQ ID NO: 979594 - RNA, 22 nt, Human
aaaaagguugauccagauuagg

SEQ ID NO: 979595 - RNA, 22 nt, Human
uauuuguugaguuguuaugucu

SEQ ID NO: 979596 - RNA, 22 nt, Human
acagagcugggugcccccugga

SEQ ID NO: 979597 - RNA, 22 nt, Human
agccuggaggaggaguugagca

SEQ ID NO: 979598 - RNA, 22 nt, Human
gcagcccaauggacugagacag

SEQ ID NO: 979599 - RNA, 22 nt, Human
gacccaggguggucaccugaaa

SEQ ID NO: 979600 - RNA, 22 nt, Human
ugaagguggcauaggagagaug

SEQ ID NO: 979601 - RNA, 22 nt, Human
ucccagggacucucugccuucc

SEQ ID NO: 979602 - RNA, 20 nt, Human
cagucccaauccagggccag

SEQ ID NO: 979603 - RNA, 22 nt, Human
guggauggauuuugaggaaugg

SEQ ID NO: 979604 - RNA, 22 nt, Human
uaggaugaucuuguagagagau

SEQ ID NO: 979605 - RNA, 22 nt, Human
aggccugaaguguggagugggg

SEQ ID NO: 979606 - RNA, 22 nt, Human
aguguuugagacacauuucacu

SEQ ID NO: 979607 - RNA, 22 nt, Human
uuuguuuacucauucauugaug

SEQ ID NO: 979608 - RNA, 23 nt, Human
auaaggcauaaagguacauugga

SEQ ID NO: 979609 - RNA, 22 nt, Human
ccuggagcaggagcugcagagg

SEQ ID NO: 979610 - RNA, 19 nt, Human
gaggagcuaucggagacag

SEQ ID NO: 979611 - RNA, 17 nt, Human
ucaggcugggugcagug

SEQ ID NO: 979612 - RNA, 22 nt, Human
cagcugccacaggacuuucuga

SEQ ID NO: 979613 - RNA, 23 nt, Human
uggcaccaggcauucuaggggua

SEQ ID NO: 979614 - RNA, 19 nt, Human
agggccugagcagauguug

SEQ ID NO: 979615 - RNA, 22 nt, Human
cugccugcuucugagccagagg

SEQ ID NO: 979616 - RNA, 22 nt, Human
ucugcaggaggcuggcugcagg

SEQ ID NO: 979617 - RNA, 22 nt, Human
auaguguguaaagugcagugau

SEQ ID NO: 979618 - RNA, 22 nt, Human
agagcagauggagcuggaagag

SEQ ID NO: 979619 - RNA, 22 nt, Human
guuugcauggaagacagugagu

SEQ ID NO: 979620 - RNA, 22 nt, Human
uggaaagaauuccuaugguuca

SEQ ID NO: 979621 - RNA, 22 nt, Human
ugucaccaguuccaggaaauaa

SEQ ID NO: 979622 - RNA, 21 nt, Human
ucuccaguauccuucucugag

SEQ ID NO: 979623 - RNA, 22 nt, Human
uugcugaagugaagguauguuu

SEQ ID NO: 979624 - RNA, 22 nt, Human
uuucuuaguccuagagugauuu

SEQ ID NO: 979625 - RNA, 22 nt, Human
ugcucuucggggccacugcuug

SEQ ID NO: 979626 - RNA, 22 nt, Human
cuggcucaggguggucuggguc

SEQ ID NO: 979627 - RNA, 22 nt, Human
uuccucagaaaauacuguccaa

SEQ ID NO: 979628 - RNA, 22 nt, Human
acagcuggcaggggggcaugaa

SEQ ID NO: 979629 - RNA, 18 nt, Human
ugacucacccugucagug

SEQ ID NO: 979630 - RNA, 19 nt, Human
gcuccuggaugaccugugg

SEQ ID NO: 979631 - RNA, 22 nt, Human
gagugucugaauuagagcacaa

SEQ ID NO: 979632 - RNA, 22 nt, Human
aacaguaaugugguguuggguu

SEQ ID NO: 979633 - RNA, 22 nt, Human
ccaggagagcucucguucagug

SEQ ID NO: 979634 - RNA, 22 nt, Human
gaggauggaggugugagcuaug

SEQ ID NO: 979635 - RNA, 22 nt, Human
cgcagcagccccgugguaggug

SEQ ID NO: 979636 - RNA, 22 nt, Human
agccuucaguaaauccacugug

SEQ ID NO: 979637 - RNA, 22 nt, Human
cgcugggcgccgaccugcuggc

SEQ ID NO: 979638 - RNA, 22 nt, Human
gaaaaagugaccuugguagcua

SEQ ID NO: 979639 - RNA, 22 nt, Human
auggggugagacuaggauuaaa

SEQ ID NO: 979640 - RNA, 19 nt, Human
acuggcagcuguagucugu

SEQ ID NO: 979641 - RNA, 22 nt, Human
ucucagagagcuguguuuuccu

SEQ ID NO: 979642 - RNA, 22 nt, Human
ugggaggaucgcuugagcccag

SEQ ID NO: 979643 - RNA, 22 nt, Human
gggcuggucuggcuuagucagg

SEQ ID NO: 979644 - RNA, 22 nt, Human
agcaguagugauggccccugag

SEQ ID NO: 979645 - RNA, 22 nt, Human
gccacccccaaguagguggucu

SEQ ID NO: 979646 - RNA, 20 nt, Human
agggucaguagcacagagcu

SEQ ID NO: 979647 - RNA, 22 nt, Human
uugauacagcagccugugaucc

SEQ ID NO: 979648 - RNA, 22 nt, Human
ggaggugggauuaggaccuaaa

SEQ ID NO: 979649 - RNA, 22 nt, Human
caaaugauagagccgauuauca

SEQ ID NO: 979650 - RNA, 22 nt, Human
aggcagcuggacauaacuaacc

SEQ ID NO: 979651 - RNA, 21 nt, Human
gaggcugucugcugcuggccu

SEQ ID NO: 979652 - RNA, 19 nt, Human
cuggcagccugucuguguc

SEQ ID NO: 979653 - RNA, 22 nt, Human
auuugaagucuucaugauuucu

SEQ ID NO: 979654 - RNA, 22 nt, Human
uuucauguuuucuuaaauggca

SEQ ID NO: 979655 - RNA, 22 nt, Human
ugacauaaaucuaaaggaaagg

SEQ ID NO: 979656 - RNA, 22 nt, Human
caggggcaagaaugcugucagc

SEQ ID NO: 979657 - RNA, 22 nt, Human
uccaggaguccuggguggcccc

SEQ ID NO: 979658 - RNA, 22 nt, Human
guguaaggugaaaucaacaaau

SEQ ID NO: 979659 - RNA, 22 nt, Human
auguaacaggugaagcucugag

SEQ ID NO: 979660 - RNA, 20 nt, Human
cccugcagccaugggagugg

SEQ ID NO: 979661 - RNA, 22 nt, Human
caguguggagggagagagccug

SEQ ID NO: 979662 - RNA, 22 nt, Human
ggcacugagaacaggcugacuu

SEQ ID NO: 979663 - RNA, 22 nt, Human
ucaaauacauggucaaucaacu

SEQ ID NO: 979664 - RNA, 21 nt, Human
ucacuagugccuucugucauu

SEQ ID NO: 979665 - RNA, 22 nt, Human
ccagagaccagaacauggggau

SEQ ID NO: 979666 - RNA, 22 nt, Human
agggauguaaauucuucuucuu

SEQ ID NO: 979667 - RNA, 22 nt, Human
uuagcaucugcuguaagcuuau

SEQ ID NO: 979668 - RNA, 22 nt, Human
gucucuaucauagcugaacccu

SEQ ID NO: 979669 - RNA, 22 nt, Human
ccgggccucgggacaccgggua

SEQ ID NO: 979670 - RNA, 22 nt, Human
cugaagcaaaggaucgagcuaa

SEQ ID NO: 979671 - RNA, 22 nt, Human
ugagcuggucacuccuucugaa

SEQ ID NO: 979672 - RNA, 22 nt, Human
cuggagagaccgaaagaggcug

SEQ ID NO: 979673 - RNA, 22 nt, Human
caguuucuguuuuaaauagcag

SEQ ID NO: 979674 - RNA, 17 nt, Human
acagagguuauacagac

SEQ ID NO: 979675 - RNA, 22 nt, Human
uuacauuagacccacuuucaug

SEQ ID NO: 979676 - RNA, 22 nt, Human
cagguacacucccuugugcuga

SEQ ID NO: 979677 - RNA, 22 nt, Human
accaggagacaugaccaaugag

SEQ ID NO: 979678 - RNA, 22 nt, Human
cagguggguacaucacagagac

SEQ ID NO: 979679 - RNA, 22 nt, Human
guuauacauauguguuaacaaa

SEQ ID NO: 979680 - RNA, 18 nt, Human
ucuccuggguaggggccu

SEQ ID NO: 979681 - RNA, 22 nt, Human
auuguauuagcacaauacaauu

SEQ ID NO: 979682 - RNA, 22 nt, Human
caugggagguuggcuuggcaug

SEQ ID NO: 979683 - RNA, 22 nt, Human
caggaaaaaugccaggagucag

SEQ ID NO: 979684 - RNA, 22 nt, Human
uguuuauaccuugguauaacca

SEQ ID NO: 979685 - RNA, 22 nt, Human
aaaacuaaauacgcuuugccuc

SEQ ID NO: 979686 - RNA, 22 nt, Human
gaggcugcccaacuggagugga

SEQ ID NO: 979687 - RNA, 22 nt, Human
agccucugguccucccucagcu

SEQ ID NO: 979688 - RNA, 22 nt, Human
accgaaggaaacuggaaccguu

SEQ ID NO: 979689 - RNA, 22 nt, Human
cauuuaaagguuguggguaaaa

SEQ ID NO: 979690 - RNA, 22 nt, Human
gaggcaggcacuguuaucagca

SEQ ID NO: 979691 - RNA, 22 nt, Human
ggcccacacugacagcugagcu

SEQ ID NO: 979692 - RNA, 22 nt, Human
agcccaggcagagggaugcuug

SEQ ID NO: 979693 - RNA, 22 nt, Human
gaugagggccugguggcugugc

SEQ ID NO: 979694 - RNA, 22 nt, Human
auuucucuuagcaagacauuac

SEQ ID NO: 979695 - RNA, 22 nt, Human
cagucucuaaaucaaucugaau

SEQ ID NO: 979696 - RNA, 22 nt, Human
aacuucugggcuguccaaaacu

SEQ ID NO: 979697 - RNA, 22 nt, Human
agaugcugugaggaagcuagga

SEQ ID NO: 979698 - RNA, 22 nt, Human
ggcuuugccuggaauuuccuug

SEQ ID NO: 979699 - RNA, 22 nt, Human
gcugucccgaaccccugguaau

SEQ ID NO: 979700 - RNA, 22 nt, Human
ccagcuccuucugucuguggag

SEQ ID NO: 979701 - RNA, 22 nt, Human
caauaaguaauaggcaucuaau

SEQ ID NO: 979702 - RNA, 22 nt, Human
uucauuaaguauaaaauguggu

SEQ ID NO: 979703 - RNA, 22 nt, Human
cuuccucaugugcaaugcaagc

SEQ ID NO: 979704 - RNA, 22 nt, Human
aguuugaaauguuggcaauauu

SEQ ID NO: 979705 - RNA, 22 nt, Human
aggcaguguguagcuggaagag

SEQ ID NO: 979706 - RNA, 22 nt, Human
ggcaccuggauguagcagugaa

SEQ ID NO: 979707 - RNA, 22 nt, Human
ggugcucaagagggcauccucu

SEQ ID NO: 979708 - RNA, 22 nt, Human
augcugugcuggcuaaccaugg

SEQ ID NO: 979709 - RNA, 22 nt, Human
ggcugccugaacuuuggggaaa

SEQ ID NO: 979710 - RNA, 22 nt, Human
ugccuuccuggagcugaaggcu

SEQ ID NO: 979711 - RNA, 22 nt, Human
caccuuuugugucugcguuugu

SEQ ID NO: 979712 - RNA, 19 nt, Human
aacuagaaagguuuugaga

SEQ ID NO: 979713 - RNA, 22 nt, Human
aagcugccugggaggaagggcu

SEQ ID NO: 979714 - RNA, 22 nt, Human
cauggcaggugcagauucugug

SEQ ID NO: 979715 - RNA, 22 nt, Human
uucaggaucacuaaacccucca

SEQ ID NO: 979716 - RNA, 22 nt, Human
augugucuucuaagccaagccu

SEQ ID NO: 979717 - RNA, 22 nt, Human
gccugagagucugcauuucuaa

SEQ ID NO: 979718 - RNA, 22 nt, Human
uccugagauucugcauuucuaa

SEQ ID NO: 979719 - RNA, 20 nt, Human
ugcagcugguuucacaggga

SEQ ID NO: 979720 - RNA, 22 nt, Human
ucccaggaauccguccucuaga

SEQ ID NO: 979721 - RNA, 20 nt, Human
agguggcuccugcugggggu

SEQ ID NO: 979722 - RNA, 21 nt, Human
agcagaggggacauguuugau

SEQ ID NO: 979723 - RNA, 22 nt, Human
cauaugaaauaugaguugaaca

SEQ ID NO: 979724 - RNA, 19 nt, Human
cagaguccuugaccagucc

SEQ ID NO: 979725 - RNA, 22 nt, Human
ggagggcucaauugacuccuga

SEQ ID NO: 979726 - RNA, 22 nt, Human
uucacauugugcagauuauggu

SEQ ID NO: 979727 - RNA, 22 nt, Human
uccuuguaaaggagcucuaaca

SEQ ID NO: 979728 - RNA, 22 nt, Human
cugugucuucuguuuugaaguu

SEQ ID NO: 979729 - RNA, 22 nt, Human
auguacaguggaaacuaacaaa

SEQ ID NO: 979730 - RNA, 22 nt, Human
uguucuucuagauugccuuuua

SEQ ID NO: 979731 - RNA, 22 nt, Human
gccaggcuguuuuuauuacugu

SEQ ID NO: 979732 - RNA, 22 nt, Human
auauaguuggguuucauucuac

SEQ ID NO: 979733 - RNA, 22 nt, Human
ggcagaggaagcuggaaguggg

SEQ ID NO: 979734 - RNA, 22 nt, Human
ugaaagcuguccacuaggcugu

SEQ ID NO: 979735 - RNA, 22 nt, Human
ucugccagugguuuggcccuga

SEQ ID NO: 979736 - RNA, 22 nt, Human
aagauacugaugauguaggcua

SEQ ID NO: 979737 - RNA, 22 nt, Human
uucauguaauuccauaagguaa

SEQ ID NO: 979738 - RNA, 22 nt, Human
ucaaaacaacacucagguguaa

SEQ ID NO: 979739 - RNA, 22 nt, Human
ugggugggagcacccugucugg

SEQ ID NO: 979740 - RNA, 18 nt, Human
uggcagcuagguaaagaa

SEQ ID NO: 979741 - RNA, 22 nt, Human
cagggacaauggcagagccuga

SEQ ID NO: 979742 - RNA, 22 nt, Human
cucagcccagcccaggaccagg

SEQ ID NO: 979743 - RNA, 22 nt, Human
ucucagaguuuacggggcugaa

SEQ ID NO: 979744 - RNA, 23 nt, Human
uccugaggguuucccagccuugg

SEQ ID NO: 979745 - RNA, 22 nt, Human
gugggagcuuuggcaucaggcu

SEQ ID NO: 979746 - RNA, 22 nt, Human
uuuuaucaaucauuaagacauu

SEQ ID NO: 979747 - RNA, 22 nt, Human
gcagcuucaguaggugaagaca

SEQ ID NO: 979748 - RNA, 22 nt, Human
gacccaggagagaggguugcau

SEQ ID NO: 979749 - RNA, 22 nt, Human
gucaccaggucugaugcagcca

SEQ ID NO: 979750 - RNA, 22 nt, Human
ccccggaggcggagguugcagu

SEQ ID NO: 979751 - RNA, 22 nt, Human
cccaggaggcgcagguugcggu

SEQ ID NO: 979752 - RNA, 22 nt, Human
agccuggaggccaggagacagu

SEQ ID NO: 979753 - RNA, 22 nt, Human
agcugccacugagggugcacag

SEQ ID NO: 979754 - RNA, 22 nt, Human
uguuuuaaucucccauugcucu

SEQ ID NO: 979755 - RNA, 22 nt, Human
cugcuguguuccuccugcaucu

SEQ ID NO: 979756 - RNA, 22 nt, Human
acauucaugucccacuucuagc

SEQ ID NO: 979757 - RNA, 22 nt, Human
gggugggaacaggaugccagga

SEQ ID NO: 979758 - RNA, 22 nt, Human
uucuuucucaacaugaauguuu

SEQ ID NO: 979759 - RNA, 22 nt, Human
gcugucugcugugcacugagca

SEQ ID NO: 979760 - RNA, 22 nt, Human
agcagccaguucucugugguag

SEQ ID NO: 979761 - RNA, 22 nt, Human
guaggcagggcuguggggagaa

SEQ ID NO: 979762 - RNA, 22 nt, Human
aaaugaccagaauacaggcuuc

SEQ ID NO: 979763 - RNA, 22 nt, Human
auguaugucugcauacacauac

SEQ ID NO: 979764 - RNA, 20 nt, Human
cucucuggaaggugggagcc

SEQ ID NO: 979765 - RNA, 22 nt, Human
uuucuauucuggaucuguggca

SEQ ID NO: 979766 - RNA, 22 nt, Human
gaggcuggcagaaaagcacagg

SEQ ID NO: 979767 - RNA, 22 nt, Human
ucucuucauagugacacccauc

SEQ ID NO: 979768 - RNA, 22 nt, Human
cccuugggguggagguugcagu

SEQ ID NO: 979769 - RNA, 22 nt, Human
uuuaaauguuuaaaacucguga

SEQ ID NO: 979770 - RNA, 22 nt, Human
agccacagugcaagagagaaaa

SEQ ID NO: 979771 - RNA, 22 nt, Human
gucuauauauugcuugaauaau

SEQ ID NO: 979772 - RNA, 22 nt, Human
ccaggcagagggauccccaucc

SEQ ID NO: 979773 - RNA, 22 nt, Human
cugccuuggcccuaguucaugg

SEQ ID NO: 979774 - RNA, 22 nt, Human
ccacagagacaggguccuugcu

SEQ ID NO: 979775 - RNA, 18 nt, Human
gggcacuggggacuggag

SEQ ID NO: 979776 - RNA, 18 nt, Human
ugugaacacauuuuucug

SEQ ID NO: 979777 - RNA, 22 nt, Human
aggccagcccugggcugagaga

SEQ ID NO: 979778 - RNA, 22 nt, Human
caauauucaguggaaaagccau

SEQ ID NO: 979779 - RNA, 22 nt, Human
gggagguucuguucgcacuuga

SEQ ID NO: 979780 - RNA, 22 nt, Human
cuccagggaggucugcaggacu

SEQ ID NO: 979781 - RNA, 22 nt, Human
aggagaaagacuggacagccaa

SEQ ID NO: 979782 - RNA, 22 nt, Human
agaugaaagauuuuuauagaga

SEQ ID NO: 979783 - RNA, 22 nt, Human
uuuccuucaucaucugagagcu

SEQ ID NO: 979784 - RNA, 22 nt, Human
cuucagaagccugcagccuuug

SEQ ID NO: 979785 - RNA, 22 nt, Human
cuggaagguuccucccagcucc

SEQ ID NO: 979786 - RNA, 22 nt, Human
cccauuuagauaacaguucaaa

SEQ ID NO: 979787 - RNA, 22 nt, Human
cagaggccauauuucuucacuc

SEQ ID NO: 979788 - RNA, 22 nt, Human
cugggcaguuuuacaucauugc

SEQ ID NO: 979789 - RNA, 22 nt, Human
uccaggaggacugagggggcug

SEQ ID NO: 979790 - RNA, 22 nt, Human
ccucucucuccugcacacacac

SEQ ID NO: 979791 - RNA, 22 nt, Human
acagcuggaggccccauugucc

SEQ ID NO: 979792 - RNA, 22 nt, Human
aauguggaaucauggacuuuau

SEQ ID NO: 979793 - RNA, 23 nt, Human
uggugccucagaagcagugggcu

SEQ ID NO: 979794 - RNA, 22 nt, Human
acccaggacucucuuccaguag

SEQ ID NO: 979795 - RNA, 22 nt, Human
cugugauuguuaguuccuauac

SEQ ID NO: 979796 - RNA, 22 nt, Human
uggcucagugcauucacaguaa

SEQ ID NO: 979797 - RNA, 21 nt, Human
uggcucuggguaggagagugc

SEQ ID NO: 979798 - RNA, 22 nt, Human
uggagcaggcaucuuucucucu

SEQ ID NO: 979799 - RNA, 22 nt, Human
cucuucaaaagucuaauccuua

SEQ ID NO: 979800 - RNA, 22 nt, Human
uccucaggcugccuggaagacu

SEQ ID NO: 979801 - RNA, 20 nt, Human
uuuacauuuugaaacaguga

SEQ ID NO: 979802 - RNA, 19 nt, Human
uugguggugguuuugguuc

SEQ ID NO: 979803 - RNA, 20 nt, Human
gguagcagcugcugucaucc

SEQ ID NO: 979804 - RNA, 22 nt, Human
ugugcugguacaugugaggaug

SEQ ID NO: 979805 - RNA, 22 nt, Human
gcagaagcugggcagcgaggug

SEQ ID NO: 979806 - RNA, 18 nt, Human
cagcagagacauucaaaa

SEQ ID NO: 979807 - RNA, 22 nt, Human
agcugccagcaucccggaaggg

SEQ ID NO: 979808 - RNA, 17 nt, Human
ucuuuccugccaugcuc

SEQ ID NO: 979809 - RNA, 22 nt, Human
caaggccaguuucuccuaguca

SEQ ID NO: 979810 - RNA, 22 nt, Human
augcugugucaccuuaggauuu

SEQ ID NO: 979811 - RNA, 22 nt, Human
ugaaauguuugaagaccacuga

SEQ ID NO: 979812 - RNA, 22 nt, Human
acagccagggcauugucgccga

SEQ ID NO: 979813 - RNA, 22 nt, Human
uucccaguauuaccuucaggaa

SEQ ID NO: 979814 - RNA, 22 nt, Human
uggcagaguucgcugugccuuu

SEQ ID NO: 979815 - RNA, 22 nt, Human
uccugagauaaaucucauguga

SEQ ID NO: 979816 - RNA, 22 nt, Human
gcugggcuucucaaugcugccu

SEQ ID NO: 979817 - RNA, 22 nt, Human
ucccagagauuuccucuccuuc

SEQ ID NO: 979818 - RNA, 22 nt, Human
agauuuccugcacugccuuuga

SEQ ID NO: 979819 - RNA, 22 nt, Human
caggguggaagcuguagagugg

SEQ ID NO: 979820 - RNA, 22 nt, Human
aaguguguauuguuuaugcugc

SEQ ID NO: 979821 - RNA, 20 nt, Human
cccuaggaacgcagcaggag

SEQ ID NO: 979822 - RNA, 22 nt, Human
auugaaaggcaaaguaggaagc

SEQ ID NO: 979823 - RNA, 22 nt, Human
gaaaaugugucaucccuacugu

SEQ ID NO: 979824 - RNA, 22 nt, Human
uaaaugugcacagguuagaagg

SEQ ID NO: 979825 - RNA, 22 nt, Human
ugaaaguuacaggaaaacagau

SEQ ID NO: 979826 - RNA, 22 nt, Human
uggguagaggaauugggcuacc

SEQ ID NO: 979827 - RNA, 22 nt, Human
aagucuuagcaacuaucgcuuu

SEQ ID NO: 979828 - RNA, 22 nt, Human
gauggcagucaaccaggugagg

SEQ ID NO: 979829 - RNA, 22 nt, Human
ggagccugcgggagcucccauu

SEQ ID NO: 979830 - RNA, 20 nt, Human
agcuucuucugucuaauuuu

SEQ ID NO: 979831 - RNA, 22 nt, Human
ccucccagugccuccagagcag

SEQ ID NO: 979832 - RNA, 22 nt, Human
guaagucugaguguaauucaca

SEQ ID NO: 979833 - RNA, 22 nt, Human
gcucucagguacaaagcugugu

SEQ ID NO: 979834 - RNA, 19 nt, Human
ccagagcccgccagauggg

SEQ ID NO: 979835 - RNA, 22 nt, Human
cagcauugaucccaggcugugg

SEQ ID NO: 979836 - RNA, 22 nt, Human
caagagcuacccugugccauau

SEQ ID NO: 979837 - RNA, 22 nt, Human
auuucuguugcuuauaaauuac

SEQ ID NO: 979838 - RNA, 22 nt, Human
acuuugaaggggaacauuuuaa

SEQ ID NO: 979839 - RNA, 22 nt, Human
uucagcaagaccaccauguacc

SEQ ID NO: 979840 - RNA, 22 nt, Human
aggccuggugugccggaugcag

SEQ ID NO: 979841 - RNA, 18 nt, Human
aggcccuggccucgaaca

SEQ ID NO: 979842 - RNA, 22 nt, Human
aaaguucagauuagacucaaga

SEQ ID NO: 979843 - RNA, 22 nt, Human
cuggcaggaaguuagaugguaa

SEQ ID NO: 979844 - RNA, 22 nt, Human
ccucuucugcuucaggagcacu

SEQ ID NO: 979845 - RNA, 21 nt, Human
cuguuucuugugaagugacac

SEQ ID NO: 979846 - RNA, 22 nt, Human
cacaaaaguaggaggcaggcgg

SEQ ID NO: 979847 - RNA, 20 nt, Human
aggcacuguugucuguaucc

SEQ ID NO: 979848 - RNA, 22 nt, Human
agcccagggaaccaggaagugg

SEQ ID NO: 979849 - RNA, 22 nt, Human
gagauguacaauguguauuaau

SEQ ID NO: 979850 - RNA, 22 nt, Human
ucagagagccucaggcacugcc

SEQ ID NO: 979851 - RNA, 22 nt, Human
gugcagugaaaaaagaaugucc

SEQ ID NO: 979852 - RNA, 21 nt, Human
cagaggcaggcucugugugug

SEQ ID NO: 979853 - RNA, 17 nt, Human
aggcauggucuggggug

SEQ ID NO: 979854 - RNA, 22 nt, Human
aagggcagccugacucacgguc

SEQ ID NO: 979855 - RNA, 18 nt, Human
uggagcugagugcugugc

SEQ ID NO: 979856 - RNA, 22 nt, Human
cugggaugucuauagaacacuu

SEQ ID NO: 979857 - RNA, 22 nt, Human
ggcucuggugaggguaggagau

SEQ ID NO: 979858 - RNA, 22 nt, Human
gugggacucuucuuuggcagug

SEQ ID NO: 979859 - RNA, 22 nt, Human
caaaugauacuguuuuuagucu

SEQ ID NO: 979860 - RNA, 22 nt, Human
ccauccuaucugaccuacuugu

SEQ ID NO: 979861 - RNA, 22 nt, Human
auuuuguggguucugcugaugu

SEQ ID NO: 979862 - RNA, 22 nt, Human
cccuggaggcaaagguugcagu

SEQ ID NO: 979863 - RNA, 22 nt, Human
cuguaaauaugaagaauauaug

SEQ ID NO: 979864 - RNA, 22 nt, Human
ucuucacagaugcauauacuuc

SEQ ID NO: 979865 - RNA, 22 nt, Human
cagcagcuacuuggagcagcag

SEQ ID NO: 979866 - RNA, 22 nt, Human
uuguuacaucuuauguaagugg

SEQ ID NO: 979867 - RNA, 22 nt, Human
uccauuuucaucucauguauaa

SEQ ID NO: 979868 - RNA, 22 nt, Human
caggcagcauuuacucugauga

SEQ ID NO: 979869 - RNA, 22 nt, Human
gccauuuucugucuuguuuauu

SEQ ID NO: 979870 - RNA, 22 nt, Human
auuauaggcuugagccaccgug

SEQ ID NO: 979871 - RNA, 18 nt, Human
cucugcuaaugggcagcu

SEQ ID NO: 979872 - RNA, 22 nt, Human
caggggcucugggugaugugag

SEQ ID NO: 979873 - RNA, 22 nt, Human
agccacagcaacaagugcaauu

SEQ ID NO: 979874 - RNA, 22 nt, Human
accagagcagacuacuggaggu

SEQ ID NO: 979875 - RNA, 22 nt, Human
acucucucacagcuuggcugau

SEQ ID NO: 979876 - RNA, 22 nt, Human
aucaaaaccuugacuuuuaaug

SEQ ID NO: 979877 - RNA, 22 nt, Human
gaaaugcaggcuuggauucagc

SEQ ID NO: 979878 - RNA, 22 nt, Human
ugaagccaucccucagauggcc

SEQ ID NO: 979879 - RNA, 22 nt, Human
agcuguguguuuccacugagcu

SEQ ID NO: 979880 - RNA, 22 nt, Human
ggggacugccuuccacagacac

SEQ ID NO: 979881 - RNA, 22 nt, Human
gacauucacagguaaacauucc

SEQ ID NO: 979882 - RNA, 22 nt, Human
aagcagggugucuugacccaug

SEQ ID NO: 979883 - RNA, 22 nt, Human
aggccagcgcugcuagcucccg

SEQ ID NO: 979884 - RNA, 22 nt, Human
auggggcugggauucuccucgg

SEQ ID NO: 979885 - RNA, 22 nt, Human
augcccugugguucaugugaga

SEQ ID NO: 979886 - RNA, 22 nt, Human
aggacuuagaacauuauguacu

SEQ ID NO: 979887 - RNA, 22 nt, Human
gaaauauuguacuggagauguu

SEQ ID NO: 979888 - RNA, 22 nt, Human
ugcagugguugagagcccagac

SEQ ID NO: 979889 - RNA, 22 nt, Human
aaugcacacauuugguacugaa

SEQ ID NO: 979890 - RNA, 22 nt, Human
caggcugucugaauggaggccc

SEQ ID NO: 979891 - RNA, 22 nt, Human
caaaaguucucacccagacaug

SEQ ID NO: 979892 - RNA, 22 nt, Human
uuggaugaagucuagcuuuagu

SEQ ID NO: 979893 - RNA, 22 nt, Human
gcucaagagagaugcaguucuu

SEQ ID NO: 979894 - RNA, 22 nt, Human
ucuguucagaagaggugaaagu

SEQ ID NO: 979895 - RNA, 22 nt, Human
uuugcauugcauuaaguauucu

SEQ ID NO: 979896 - RNA, 22 nt, Human
ggcugcagcggauuggggauug

SEQ ID NO: 979897 - RNA, 22 nt, Human
aaaucagagugguuggucaucc

SEQ ID NO: 979898 - RNA, 22 nt, Human
ucugaagaacugaguaaacaug

SEQ ID NO: 979899 - RNA, 22 nt, Human
agagcagguggcaacucuggga

SEQ ID NO: 979900 - RNA, 22 nt, Human
ucccagagccaagcuauggaug

SEQ ID NO: 979901 - RNA, 22 nt, Human
gcucccagggcagcgcagaaga

SEQ ID NO: 979902 - RNA, 22 nt, Human
agggaaaguaagcauuucauua

SEQ ID NO: 979903 - RNA, 22 nt, Human
ccagccuggacugggucuugug

SEQ ID NO: 979904 - RNA, 22 nt, Human
ccacagaaaguugucuagagua

SEQ ID NO: 979905 - RNA, 22 nt, Human
uugcaaaugggcaaagcagauc

SEQ ID NO: 979906 - RNA, 22 nt, Human
ugcagugguguccagguguacu

SEQ ID NO: 979907 - RNA, 22 nt, Human
aguuugaaaguauugacagaag

SEQ ID NO: 979908 - RNA, 22 nt, Human
gacagggcgcccagccuguuuc

SEQ ID NO: 979909 - RNA, 22 nt, Human
aaauaugugaucagugaauaaa

SEQ ID NO: 979910 - RNA, 22 nt, Human
cagguggcuucucccuaggcca

SEQ ID NO: 979911 - RNA, 22 nt, Human
cugcaggggccucgagcacagg

SEQ ID NO: 979912 - RNA, 22 nt, Human
uccagagccuauauguucaacu

SEQ ID NO: 979913 - RNA, 22 nt, Human
uggagcagggcaucacugugcg

SEQ ID NO: 979914 - RNA, 22 nt, Human
ucaaagcaucagucaauuuagg

SEQ ID NO: 979915 - RNA, 22 nt, Human
accauuuuggguauuuucagag

SEQ ID NO: 979916 - RNA, 22 nt, Human
augugucuaauuccaggagcac

SEQ ID NO: 979917 - RNA, 22 nt, Human
gagggcugaugcuuacuuauuu

SEQ ID NO: 979918 - RNA, 17 nt, Human
uccaggagaggcaaugg

SEQ ID NO: 979919 - RNA, 22 nt, Human
ggagagaauuccauggacaugu

SEQ ID NO: 979920 - RNA, 22 nt, Human
uaaugcacaugacugaacuauu

SEQ ID NO: 979921 - RNA, 22 nt, Human
aaagguuaguucuuagaagugc

SEQ ID NO: 979922 - RNA, 22 nt, Human
ccagaagaccccguccaccucc

SEQ ID NO: 979923 - RNA, 21 nt, Human
ggcacugagccagauggacuc

SEQ ID NO: 979924 - RNA, 22 nt, Human
cccaggcuggagugcaauggug

SEQ ID NO: 979925 - RNA, 18 nt, Human
ugucucaggcugaaacag

SEQ ID NO: 979926 - RNA, 22 nt, Human
uuccugagggacuuuugagauu

SEQ ID NO: 979927 - RNA, 22 nt, Human
uuagaaaaaggcuguggucuua

SEQ ID NO: 979928 - RNA, 22 nt, Human
augcucuggaguacgugaaauu

SEQ ID NO: 979929 - RNA, 22 nt, Human
uugaaagaagaagcugcgaugu

SEQ ID NO: 979930 - RNA, 22 nt, Human
acagccaggaauucuggagaag

SEQ ID NO: 979931 - RNA, 22 nt, Human
uggaggcauaggccugggcccu

SEQ ID NO: 979932 - RNA, 22 nt, Human
cccaggaacagcacagaacagc

SEQ ID NO: 979933 - RNA, 22 nt, Human
ccagcucuagccccauguggcu

SEQ ID NO: 979934 - RNA, 22 nt, Human
aaaaaucuaugacugcuucucc

SEQ ID NO: 979935 - RNA, 21 nt, Human
ugaaugaggaggauggcauuu

SEQ ID NO: 979936 - RNA, 22 nt, Human
acugagcugugacaaugcuuaa

SEQ ID NO: 979937 - RNA, 19 nt, Human
uuacuuggcaaagucaguc

SEQ ID NO: 979938 - RNA, 22 nt, Human
gagcacaggcuuugguggacac

SEQ ID NO: 979939 - RNA, 22 nt, Human
gaucauuugcaggaaacauuaa

SEQ ID NO: 979940 - RNA, 22 nt, Human
cagugggugaugaguccugggg

SEQ ID NO: 979941 - RNA, 19 nt, Human
uccaggagcaaagccaguu

SEQ ID NO: 979942 - RNA, 22 nt, Human
agcccuagagcuggaggucagu

SEQ ID NO: 979943 - RNA, 22 nt, Human
cugggagggguagccaauccua

SEQ ID NO: 979944 - RNA, 23 nt, Human
gagugcagaauagacaugcagug

SEQ ID NO: 979945 - RNA, 22 nt, Human
ugcauauuuuauaaagauggaa

SEQ ID NO: 979946 - RNA, 22 nt, Human
auuauuagugauguuguuacug

SEQ ID NO: 979947 - RNA, 22 nt, Human
aucucccagccacagcauucuu

SEQ ID NO: 979948 - RNA, 22 nt, Human
ucuuuccuaggugauaugcaau

SEQ ID NO: 979949 - RNA, 21 nt, Human
aaggcagaagcauggaaugag

SEQ ID NO: 979950 - RNA, 22 nt, Human
uagacacauccguggaagcuuc

SEQ ID NO: 979951 - RNA, 17 nt, Human
agcugccagggagugug

SEQ ID NO: 979952 - RNA, 22 nt, Human
ucucuuuuauguacacccugac

SEQ ID NO: 979953 - RNA, 22 nt, Human
auacauguuguaccauauguuu

SEQ ID NO: 979954 - RNA, 22 nt, Human
caggugcugcguggcggagcug

SEQ ID NO: 979955 - RNA, 22 nt, Human
agcccaggaaguugaggcuugc

SEQ ID NO: 979956 - RNA, 22 nt, Human
ggagggagcauccccuugcuga

SEQ ID NO: 979957 - RNA, 22 nt, Human
gagcagugagugaauguugccu

SEQ ID NO: 979958 - RNA, 22 nt, Human
gcaggcagagguggaggagaca

SEQ ID NO: 979959 - RNA, 22 nt, Human
uuucacauguggaaugccaggu

SEQ ID NO: 979960 - RNA, 22 nt, Human
uccagggguaccggccaggcag

SEQ ID NO: 979961 - RNA, 22 nt, Human
gcaggccuuggcaaugagccug

SEQ ID NO: 979962 - RNA, 22 nt, Human
uccuggcccggccgggccugcu

SEQ ID NO: 979963 - RNA, 22 nt, Human
ggcuuggaaaugguaaugagcu

SEQ ID NO: 979964 - RNA, 22 nt, Human
auggauaauggugauaguugca

SEQ ID NO: 979965 - RNA, 22 nt, Human
uucuuaaguauuucagagacug

SEQ ID NO: 979966 - RNA, 19 nt, Human
cagagcugcuggccucguc

SEQ ID NO: 979967 - RNA, 22 nt, Human
agaggaugguugaggaagaccu

SEQ ID NO: 979968 - RNA, 22 nt, Human
aauaauaagauacuaagggagu

SEQ ID NO: 979969 - RNA, 21 nt, Human
gugguucuagagaaacagaau

SEQ ID NO: 979970 - RNA, 23 nt, Human
augcaguauaugucaguaguuua

SEQ ID NO: 979971 - RNA, 22 nt, Human
cagccaggccuggugaccaaag

SEQ ID NO: 979972 - RNA, 22 nt, Human
aaucucuuuggcucaaggaucc

SEQ ID NO: 979973 - RNA, 22 nt, Human
auugacaauuagcccuuaggug

SEQ ID NO: 979974 - RNA, 21 nt, Human
aggcucagagaucaaacagua

SEQ ID NO: 979975 - RNA, 18 nt, Human
gaagggagcuggaaugca

SEQ ID NO: 979976 - RNA, 22 nt, Human
acuuccuguuaugugugccucu

SEQ ID NO: 979977 - RNA, 22 nt, Human
uuuucagugggcaaugauguga

SEQ ID NO: 979978 - RNA, 22 nt, Human
ccaguuuuuccagugcuuucug

SEQ ID NO: 979979 - RNA, 22 nt, Human
ugaaaugacaaagguuuuucuu

SEQ ID NO: 979980 - RNA, 22 nt, Human
ugucaaaaugacuuuacuacag

SEQ ID NO: 979981 - RNA, 19 nt, Human
ucaaugcaugaaaucagcc

SEQ ID NO: 979982 - RNA, 22 nt, Human
ggagcugggacccugucaucug

SEQ ID NO: 979983 - RNA, 22 nt, Human
auacaucuagagucauaaaaac

SEQ ID NO: 979984 - RNA, 22 nt, Human
uuucaacaccagagaccaugcg

SEQ ID NO: 979985 - RNA, 22 nt, Human
uauguacaaucagcaguucaua

SEQ ID NO: 979986 - RNA, 22 nt, Human
auguuuccauuuucuuguauca

SEQ ID NO: 979987 - RNA, 22 nt, Human
uccacauccauugcuugacuuu

SEQ ID NO: 979988 - RNA, 22 nt, Human
gaggcacugaauacuugagggu

SEQ ID NO: 979989 - RNA, 22 nt, Human
cccaggcagucuggcucuaaag

SEQ ID NO: 979990 - RNA, 22 nt, Human
aggauaguugugaagauaggcu

SEQ ID NO: 979991 - RNA, 22 nt, Human
ggcaggagaauggcgugaacuc

SEQ ID NO: 979992 - RNA, 22 nt, Human
ccucugagaccagcucugcacc

SEQ ID NO: 979993 - RNA, 18 nt, Human
gguggcaggucagaugcc

SEQ ID NO: 979994 - RNA, 22 nt, Human
uguuaugugccacacuugaggg

SEQ ID NO: 979995 - RNA, 22 nt, Human
aauuaguauugcgauucauuag

SEQ ID NO: 979996 - RNA, 23 nt, Human
aucaagauaauccagaugaccua

SEQ ID NO: 979997 - RNA, 19 nt, Human
gcauaaaaugucaaugugu

SEQ ID NO: 979998 - RNA, 22 nt, Human
cuggcuuccucaggagcagugg

SEQ ID NO: 979999 - RNA, 22 nt, Human
uagcuuuaccauagaagaguau

SEQ ID NO: 980000 - RNA, 22 nt, Human
ucucaccauggugcuugcuuau

SEQ ID NO: 980001 - RNA, 22 nt, Human
gcacugaaaauguuggauucca

SEQ ID NO: 980002 - RNA, 22 nt, Human
ucagggcaaaagggaaaccauu

SEQ ID NO: 980003 - RNA, 22 nt, Human
cauuugaauuguucugugggaa

SEQ ID NO: 980004 - RNA, 22 nt, Human
cauucuuauauuuacucauuca

SEQ ID NO: 980005 - RNA, 17 nt, Human
cauuuguugaucaguug

SEQ ID NO: 980006 - RNA, 22 nt, Human
cucugcaggggaggcaugcacu

SEQ ID NO: 980007 - RNA, 22 nt, Human
cuugaucuacauagugaaaccc

SEQ ID NO: 980008 - RNA, 22 nt, Human
gccugucugcagggcugucauu

SEQ ID NO: 980009 - RNA, 22 nt, Human
ccaccaggacagcccugagggg

SEQ ID NO: 980010 - RNA, 22 nt, Human
ugagcacaaguuugcaugugug

SEQ ID NO: 980011 - RNA, 21 nt, Human
uuucuucacuuugccccaugu

SEQ ID NO: 980012 - RNA, 22 nt, Human
ggugccaggcuguagucagggu

SEQ ID NO: 980013 - RNA, 22 nt, Human
guuuuccuucucagccauugcc

SEQ ID NO: 980014 - RNA, 22 nt, Human
ggcugccagugagugcagaccg

SEQ ID NO: 980015 - RNA, 22 nt, Human
caggaggaaaugugacccugcu

SEQ ID NO: 980016 - RNA, 22 nt, Human
aaggcacuuuuccugagaugau

SEQ ID NO: 980017 - RNA, 22 nt, Human
uuucuucagagagagcuuuccc

SEQ ID NO: 980018 - RNA, 22 nt, Human
auuaggacacauacauguacag

SEQ ID NO: 980019 - RNA, 22 nt, Human
uccacuuuagcaaugauugaau

SEQ ID NO: 980020 - RNA, 22 nt, Human
augaaagaugauuuaaaguacu

SEQ ID NO: 980021 - RNA, 21 nt, Human
cucuugugucagagccagagg

SEQ ID NO: 980022 - RNA, 22 nt, Human
ucuuuaaucauaaccaagaugg

SEQ ID NO: 980023 - RNA, 22 nt, Human
cuucucagcaugguuacuguga

SEQ ID NO: 980024 - RNA, 22 nt, Human
gggcuuauggagggcuuuguac

SEQ ID NO: 980025 - RNA, 22 nt, Human
acauuuacagugcuagacaauc

SEQ ID NO: 980026 - RNA, 22 nt, Human
caugggcucuucuggacugcac

SEQ ID NO: 980027 - RNA, 22 nt, Human
aaagucauuggaauauuaauga

SEQ ID NO: 980028 - RNA, 22 nt, Human
ccugucugcaugaucccugcca

SEQ ID NO: 980029 - RNA, 22 nt, Human
aagcuuucagagcagaauguga

SEQ ID NO: 980030 - RNA, 22 nt, Human
guacauuuugagguuaaaacaa

SEQ ID NO: 980031 - RNA, 22 nt, Human
cugcuggccuagcccauccucu

SEQ ID NO: 980032 - RNA, 22 nt, Human
ccugugggagggagcggcugga

SEQ ID NO: 980033 - RNA, 22 nt, Human
gagcugaguuaccuccagauca

SEQ ID NO: 980034 - RNA, 21 nt, Human
ucaggggcuguguuuuccauc

SEQ ID NO: 980035 - RNA, 22 nt, Human
guggcuucuggcugggccucag

SEQ ID NO: 980036 - RNA, 22 nt, Human
ccuggguggcagagguugcagu

SEQ ID NO: 980037 - RNA, 22 nt, Human
uggggugguaauacaccguucu

SEQ ID NO: 980038 - RNA, 23 nt, Human
ucagagagcuguugagagcugcc

SEQ ID NO: 980039 - RNA, 22 nt, Human
ucuucucaguuucucuaggaug

SEQ ID NO: 980040 - RNA, 22 nt, Human
gaaaucugcccagugcacuggu

SEQ ID NO: 980041 - RNA, 22 nt, Human
aguauucuggaauucuauguga

SEQ ID NO: 980042 - RNA, 22 nt, Human
agcugcccuguggggaggguug

SEQ ID NO: 980043 - RNA, 22 nt, Human
agagcuguggauaguccuggau

SEQ ID NO: 980044 - RNA, 22 nt, Human
uucauacaguggcugcacucca

SEQ ID NO: 980045 - RNA, 22 nt, Human
uggagggcucuuucaccuggua

SEQ ID NO: 980046 - RNA, 22 nt, Human
cagcaguguggaagcugagggg

SEQ ID NO: 980047 - RNA, 22 nt, Human
aggguggcaccuggaagggaug

SEQ ID NO: 980048 - RNA, 21 nt, Human
uggcugccuacaugcugcagg

SEQ ID NO: 980049 - RNA, 22 nt, Human
ugccucagagugggcuugcuau

SEQ ID NO: 980050 - RNA, 22 nt, Human
gacauuucaaucucauuauggg

SEQ ID NO: 980051 - RNA, 22 nt, Human
augucccagcugagagacaacu

SEQ ID NO: 980052 - RNA, 22 nt, Human
gaggcagcuuggggcugugggu

SEQ ID NO: 980053 - RNA, 23 nt, Human
agggcugaugccauugcagcucu

SEQ ID NO: 980054 - RNA, 22 nt, Human
aauauugagaaccagcauguuu

SEQ ID NO: 980055 - RNA, 22 nt, Human
acagguggcauaggcaguuuga

SEQ ID NO: 980056 - RNA, 22 nt, Human
ugacagaacagguugggagcaa

SEQ ID NO: 980057 - RNA, 22 nt, Human
uuuaugagcaccuuggcccaga

SEQ ID NO: 980058 - RNA, 19 nt, Human
ggcucucccuugagagagc

SEQ ID NO: 980059 - RNA, 22 nt, Human
ugcuauacggagcaucuucagg

SEQ ID NO: 980060 - RNA, 22 nt, Human
gcagcuggcucagagagguggg

SEQ ID NO: 980061 - RNA, 22 nt, Human
gucccagaaacauauugcuggu

SEQ ID NO: 980062 - RNA, 22 nt, Human
uuaaaaccaucagcuguaagau

SEQ ID NO: 980063 - RNA, 22 nt, Human
uuccagaauuuuguucugcuug

SEQ ID NO: 980064 - RNA, 22 nt, Human
uaguuuuuucaacaaauggugc

SEQ ID NO: 980065 - RNA, 22 nt, Human
caggccuggggcuggcuuccag

SEQ ID NO: 980066 - RNA, 22 nt, Human
gcagaggcuccauuuuacagau

SEQ ID NO: 980067 - RNA, 22 nt, Human
ggcagcucaccucugguccagg

SEQ ID NO: 980068 - RNA, 22 nt, Human
caccagcuacagacuacugugu

SEQ ID NO: 980069 - RNA, 22 nt, Human
ucagaggguggcugggagcauc

SEQ ID NO: 980070 - RNA, 22 nt, Human
uggacagguugaguaggaggag

SEQ ID NO: 980071 - RNA, 22 nt, Human
uccugccuagcaggugaccuau

SEQ ID NO: 980072 - RNA, 22 nt, Human
gagucacaaagccuuucuuauu

SEQ ID NO: 980073 - RNA, 22 nt, Human
agcccucauggaacagcuccua

SEQ ID NO: 980074 - RNA, 22 nt, Human
aauguugaggauaucagaaaau

SEQ ID NO: 980075 - RNA, 17 nt, Human
gcugcagcgguaggcag

SEQ ID NO: 980076 - RNA, 22 nt, Human
uucuuguauauaaaaaucauuu

SEQ ID NO: 980077 - RNA, 22 nt, Human
caggagugcagguggugaggca

SEQ ID NO: 980078 - RNA, 22 nt, Human
cccaggaagaaauucugauuug

SEQ ID NO: 980079 - RNA, 22 nt, Human
agcacagguacggagaugcuac

SEQ ID NO: 980080 - RNA, 22 nt, Human
uauuucagggagaauaaauuug

SEQ ID NO: 980081 - RNA, 22 nt, Human
gcagacagggcuacagagguac

SEQ ID NO: 980082 - RNA, 22 nt, Human
acccaggagccgugagagguua

SEQ ID NO: 980083 - RNA, 22 nt, Human
gcuggcaggagccuuucccuuu

SEQ ID NO: 980084 - RNA, 22 nt, Human
guggccugccagcagauggcgc

SEQ ID NO: 980085 - RNA, 22 nt, Human
ccaggccuguguuguguggagg

SEQ ID NO: 980086 - RNA, 22 nt, Human
acugccuugucucuugccuguu

SEQ ID NO: 980087 - RNA, 22 nt, Human
ggagccagugcccucuggugga

SEQ ID NO: 980088 - RNA, 22 nt, Human
ccuguucauuuuuugacucugc

SEQ ID NO: 980089 - RNA, 22 nt, Human
gagagcuguuuaucuucuucaa

SEQ ID NO: 980090 - RNA, 22 nt, Human
cucuggaguuagugaucugggc

SEQ ID NO: 980091 - RNA, 20 nt, Human
ccugucuggagacaaagaga

SEQ ID NO: 980092 - RNA, 22 nt, Human
gaguaagagcuggcuuuggugu

SEQ ID NO: 980093 - RNA, 23 nt, Human
accaggaguugucucaggaaaca

SEQ ID NO: 980094 - RNA, 22 nt, Human
uccaguggguugcugagggagg

SEQ ID NO: 980095 - RNA, 22 nt, Human
cagcagcugggaaggaggcuga

SEQ ID NO: 980096 - RNA, 23 nt, Human
agacccagagacuggcucugcuc

SEQ ID NO: 980097 - RNA, 22 nt, Human
uaaaugcagauuccugagccua

SEQ ID NO: 980098 - RNA, 22 nt, Human
gagcaggcucugccuguguguc

SEQ ID NO: 980099 - RNA, 22 nt, Human
aaaguguaaggaauuuaaguaa

SEQ ID NO: 980100 - RNA, 22 nt, Human
gcucugcugagauaucugggag

SEQ ID NO: 980101 - RNA, 22 nt, Human
acucacuuuccauucaagcacc

SEQ ID NO: 980102 - RNA, 22 nt, Human
acauugcugcauucuccuuccc

SEQ ID NO: 980103 - RNA, 21 nt, Human
aaggagccuaggaggcucagg

SEQ ID NO: 980104 - RNA, 22 nt, Human
gcugucacaagcaucuggggca

SEQ ID NO: 980105 - RNA, 22 nt, Human
cuguguuugaugagaagccacc

SEQ ID NO: 980106 - RNA, 22 nt, Human
acagggcauuuccucuaugugu

SEQ ID NO: 980107 - RNA, 22 nt, Human
cugcuguggugucaagcaucuc

SEQ ID NO: 980108 - RNA, 22 nt, Human
ccaaagucagugcucagucguc

SEQ ID NO: 980109 - RNA, 20 nt, Human
uagauuucauacuucucuuu

SEQ ID NO: 980110 - RNA, 22 nt, Human
gccuggagcucggcugagggcg

SEQ ID NO: 980111 - RNA, 22 nt, Human
uuaaaaugaauauugauuagca

SEQ ID NO: 980112 - RNA, 22 nt, Human
gagcugggcacacgccacuuga

SEQ ID NO: 980113 - RNA, 22 nt, Human
cugagauggaguuucgcucuuc

SEQ ID NO: 980114 - RNA, 22 nt, Human
acauuucuuuucaucucuauau

SEQ ID NO: 980115 - RNA, 22 nt, Human
gcugccugccuaguuccacagu

SEQ ID NO: 980116 - RNA, 19 nt, Human
cugucaggggcuggauguu

SEQ ID NO: 980117 - RNA, 21 nt, Human
ugcugaugucagagaagcaag

SEQ ID NO: 980118 - RNA, 22 nt, Human
gguucacacuuucaugauuuca

SEQ ID NO: 980119 - RNA, 22 nt, Human
cauuacauuucaaaauguuucc

SEQ ID NO: 980120 - RNA, 22 nt, Human
ucuugggaaauguuugcgagcu

SEQ ID NO: 980121 - RNA, 22 nt, Human
agucuucucauuucacaugcuu

SEQ ID NO: 980122 - RNA, 22 nt, Human
aggcuguggugcugaaggaggg

SEQ ID NO: 980123 - RNA, 22 nt, Human
gaggacaggagacucacuguuu

SEQ ID NO: 980124 - RNA, 22 nt, Human
auauuucuccaaauguuuucaa

SEQ ID NO: 980125 - RNA, 19 nt, Human
ccuguucaugacucugucc

SEQ ID NO: 980126 - RNA, 19 nt, Human
cauuuuaagcauccccagu

SEQ ID NO: 980127 - RNA, 22 nt, Human
caagaaaugggauuugacugcc

SEQ ID NO: 980128 - RNA, 22 nt, Human
cugcuccacaccuccauuuccu

SEQ ID NO: 980129 - RNA, 22 nt, Human
ccaggccugauugggaaucuug

SEQ ID NO: 980130 - RNA, 22 nt, Human
cucagggacguuagaggacagg

SEQ ID NO: 980131 - RNA, 22 nt, Human
ggccagaggugguacauagcuu

SEQ ID NO: 980132 - RNA, 22 nt, Human
guggccucugugcuccugccua

SEQ ID NO: 980133 - RNA, 17 nt, Human
cacccuggcuagucuga

SEQ ID NO: 980134 - RNA, 17 nt, Human
aggcaggcagagcggga

SEQ ID NO: 980135 - RNA, 22 nt, Human
uagaaacaucagcuaaccaaaa

SEQ ID NO: 980136 - RNA, 22 nt, Human
agccagcagggcuuagaggaca

SEQ ID NO: 980137 - RNA, 22 nt, Human
ugccugcugcuaagcucuuugu

SEQ ID NO: 980138 - RNA, 22 nt, Human
gcuuuccuggcccugucccugc

SEQ ID NO: 980139 - RNA, 22 nt, Human
gaagaacaccugcugcccagug

SEQ ID NO: 980140 - RNA, 22 nt, Human
cuccaggccagggaaguggaca

SEQ ID NO: 980141 - RNA, 22 nt, Human
gcaaggagacuguagggccaag

SEQ ID NO: 980142 - RNA, 22 nt, Human
gcaaaugaguuguaacauaaaa

SEQ ID NO: 980143 - RNA, 22 nt, Human
aaaucacuguuauugaucuuaa

SEQ ID NO: 980144 - RNA, 22 nt, Human
gcugccugggcaggaggcgcug

SEQ ID NO: 980145 - RNA, 22 nt, Human
aggcagagagcaguggccgucu

SEQ ID NO: 980146 - RNA, 22 nt, Human
uuuauuuaaagucguguguuaa

SEQ ID NO: 980147 - RNA, 22 nt, Human
gagcccucucuguaggcaagua

SEQ ID NO: 980148 - RNA, 22 nt, Human
cacuggugacuucugagcugga

SEQ ID NO: 980149 - RNA, 22 nt, Human
ugacccugcuucuuggugcagg

SEQ ID NO: 980150 - RNA, 22 nt, Human
uucagagaugacaccugguguu

SEQ ID NO: 980151 - RNA, 22 nt, Human
uucaagaucuggguuuucagcu

SEQ ID NO: 980152 - RNA, 22 nt, Human
gcuggcucuucaguggagauag

SEQ ID NO: 980153 - RNA, 23 nt, Human
aggcuuccuaucuuagagcuggg

SEQ ID NO: 980154 - RNA, 22 nt, Human
uggcaccaggcgggguggcugu

SEQ ID NO: 980155 - RNA, 17 nt, Human
cucugcagugcauggcu

SEQ ID NO: 980156 - RNA, 22 nt, Human
aauuucuaauugaaucucucuu

SEQ ID NO: 980157 - RNA, 22 nt, Human
aucaggauucaguaucuccagc

SEQ ID NO: 980158 - RNA, 22 nt, Human
gcagauggcugagccugcagau

SEQ ID NO: 980159 - RNA, 22 nt, Human
ggagcugcacgcucugaagccu

SEQ ID NO: 980160 - RNA, 22 nt, Human
aucuggcuauugacauguuaua

SEQ ID NO: 980161 - RNA, 20 nt, Human
ucuccuggucugguccgugc

SEQ ID NO: 980162 - RNA, 22 nt, Human
gagacacacacaggagguggca

SEQ ID NO: 980163 - RNA, 22 nt, Human
cugcucugcagcuuggacuccc

SEQ ID NO: 980164 - RNA, 22 nt, Human
uggggacacagagguucguugg

SEQ ID NO: 980165 - RNA, 22 nt, Human
ccaggaagcugucugauaugaa

SEQ ID NO: 980166 - RNA, 22 nt, Human
aaagcccauguggaaguacagg

SEQ ID NO: 980167 - RNA, 22 nt, Human
gacucagugauuugacaugccu

SEQ ID NO: 980168 - RNA, 22 nt, Human
agucagugaaaacuagaauguu

SEQ ID NO: 980169 - RNA, 22 nt, Human
cugccugugccaaugcuccuuu

SEQ ID NO: 980170 - RNA, 22 nt, Human
gccagcagguggagagaucaag

SEQ ID NO: 980171 - RNA, 22 nt, Human
gcagccacagaggagggaugca

SEQ ID NO: 980172 - RNA, 22 nt, Human
gggccuccggggugagcugugg

SEQ ID NO: 980173 - RNA, 22 nt, Human
uguacaguauauuucaaagcca

SEQ ID NO: 980174 - RNA, 22 nt, Human
gagugagggcagcaggggcugc

SEQ ID NO: 980175 - RNA, 22 nt, Human
uaaaucagccuuugcuauuuua

SEQ ID NO: 980176 - RNA, 22 nt, Human
ucuguggcacgauugcacugca

SEQ ID NO: 980177 - RNA, 22 nt, Human
uguauguguauguacauaugca

SEQ ID NO: 980178 - RNA, 22 nt, Human
aagggcagcuuaaauugguagc

SEQ ID NO: 980179 - RNA, 22 nt, Human
gaggaaccaaucugugauauuc

SEQ ID NO: 980180 - RNA, 22 nt, Human
aagggaggaggauuuauuguac

SEQ ID NO: 980181 - RNA, 22 nt, Human
ccccuuccuuccucagacagcc

SEQ ID NO: 980182 - RNA, 22 nt, Human
uucuuaggacuaguauagcaug

SEQ ID NO: 980183 - RNA, 22 nt, Human
gcuguggucugugagcuccaaa

SEQ ID NO: 980184 - RNA, 22 nt, Human
uucauugucucuguuugccuuc

SEQ ID NO: 980185 - RNA, 22 nt, Human
ccaaaguccauaguuuacuuua

SEQ ID NO: 980186 - RNA, 22 nt, Human
ucccagagacaucauuucuccg

SEQ ID NO: 980187 - RNA, 22 nt, Human
ucagacuucaguuuuuaguugu

SEQ ID NO: 980188 - RNA, 22 nt, Human
uccaggccaauguagcaggccc

SEQ ID NO: 980189 - RNA, 22 nt, Human
aacuucaaaugugacuuugcau

SEQ ID NO: 980190 - RNA, 22 nt, Human
ggacuggacucucaggcucaca

SEQ ID NO: 980191 - RNA, 22 nt, Human
aaagcucuuauagcagagugug

SEQ ID NO: 980192 - RNA, 21 nt, Human
gcagccagccgagaccaugcc

SEQ ID NO: 980193 - RNA, 22 nt, Human
ucuuccagcaaugugaaaucac

SEQ ID NO: 980194 - RNA, 17 nt, Human
cccugccaccaggaagc

SEQ ID NO: 980195 - RNA, 22 nt, Human
uaaccuuuggugaaauauuaac

SEQ ID NO: 980196 - RNA, 22 nt, Human
uccuugaaaagaaugucuccau

SEQ ID NO: 980197 - RNA, 22 nt, Human
ccauaagguugaaaacuguaca

SEQ ID NO: 980198 - RNA, 23 nt, Human
ugcagcugccucuggcgggccgg

SEQ ID NO: 980199 - RNA, 23 nt, Human
ugcagccacucaggagcucagug

SEQ ID NO: 980200 - RNA, 23 nt, Human
aucaaaguggaaaucaauuaucu

SEQ ID NO: 980201 - RNA, 22 nt, Human
uuucuauuuuaaaggcauaugg

SEQ ID NO: 980202 - RNA, 22 nt, Human
uggcuuccaaaggaaugggccu

SEQ ID NO: 980203 - RNA, 22 nt, Human
agggaugguggagguugcaagu

SEQ ID NO: 980204 - RNA, 21 nt, Human
aggcugcuggcucaggguccu

SEQ ID NO: 980205 - RNA, 20 nt, Human
ucucaggguucagcaaagua

SEQ ID NO: 980206 - RNA, 22 nt, Human
aacagcuuugcuucuggagaca

SEQ ID NO: 980207 - RNA, 22 nt, Human
ucagggcagaauccaaagaauu

SEQ ID NO: 980208 - RNA, 22 nt, Human
ggcagucagugugguucauaaa

SEQ ID NO: 980209 - RNA, 22 nt, Human
uccaggagaaggccauccagcg

SEQ ID NO: 980210 - RNA, 22 nt, Human
ucugcugcacaaauucaucucu

SEQ ID NO: 980211 - RNA, 19 nt, Human
ggcuggcaagugacagugu

SEQ ID NO: 980212 - RNA, 22 nt, Human
ugggcagacuaaggucaaagcu

SEQ ID NO: 980213 - RNA, 17 nt, Human
cagcucugcaucuuccu

SEQ ID NO: 980214 - RNA, 22 nt, Human
ccuggcaguggugaagaagagg

SEQ ID NO: 980215 - RNA, 22 nt, Human
aggcaggcacacuuccuccagg

SEQ ID NO: 980216 - RNA, 22 nt, Human
gcugugagggucuagugaggug

SEQ ID NO: 980217 - RNA, 22 nt, Human
aaggcagcagaggaaaggugcu

SEQ ID NO: 980218 - RNA, 22 nt, Human
acuggagcccguggaggcgcag

SEQ ID NO: 980219 - RNA, 22 nt, Human
aaacuccugggcucaagcaguu

SEQ ID NO: 980220 - RNA, 22 nt, Human
gggggcuggaauauccaucaac

SEQ ID NO: 980221 - RNA, 18 nt, Human
acagaaauagcugugccu

SEQ ID NO: 980222 - RNA, 22 nt, Human
ugagccugcugucgcuggaccc

SEQ ID NO: 980223 - RNA, 21 nt, Human
uggccaaacuggagcauuuga

SEQ ID NO: 980224 - RNA, 22 nt, Human
uaaauguguaaaccuccauuac

SEQ ID NO: 980225 - RNA, 22 nt, Human
cccagccuggugcacugugggg

SEQ ID NO: 980226 - RNA, 17 nt, Human
gcuguaguuugauaaga

SEQ ID NO: 980227 - RNA, 22 nt, Human
cagaagaaaguggggagacaag

SEQ ID NO: 980228 - RNA, 22 nt, Human
ggcagcuguggacgucgucauu

SEQ ID NO: 980229 - RNA, 22 nt, Human
aaggaagacacagaugaaguga

SEQ ID NO: 980230 - RNA, 22 nt, Human
agugaaaugauucugagcaaga

SEQ ID NO: 980231 - RNA, 22 nt, Human
ccugguguugugaaguagccgu

SEQ ID NO: 980232 - RNA, 22 nt, Human
uuauuuggguuugaguguggca

SEQ ID NO: 980233 - RNA, 20 nt, Human
ugcagcugcaggaggguggg

SEQ ID NO: 980234 - RNA, 22 nt, Human
ugccuggcaaugccagaagcca

SEQ ID NO: 980235 - RNA, 22 nt, Human
aagacuuucucccaaauccuca

SEQ ID NO: 980236 - RNA, 22 nt, Human
aagggcaggagaagacggauau

SEQ ID NO: 980237 - RNA, 22 nt, Human
ugcagaagacacaagguaacgu

SEQ ID NO: 980238 - RNA, 18 nt, Human
ccagguggugacagagau

SEQ ID NO: 980239 - RNA, 22 nt, Human
uuggcagugaugcagcuuguuc

SEQ ID NO: 980240 - RNA, 22 nt, Human
ucuggcucuguguccucaccca

SEQ ID NO: 980241 - RNA, 22 nt, Human
uggcagggugccaguugcgagu

SEQ ID NO: 980242 - RNA, 22 nt, Human
uugaaaguccuucuugaguuac

SEQ ID NO: 980243 - RNA, 22 nt, Human
uacauguaauuuucauaguaag

SEQ ID NO: 980244 - RNA, 22 nt, Human
aacauuuaugguagucauugca

SEQ ID NO: 980245 - RNA, 22 nt, Human
auuaggauuugguauggucaua

SEQ ID NO: 980246 - RNA, 22 nt, Human
caggccugugaguugaggcccc

SEQ ID NO: 980247 - RNA, 22 nt, Human
gcugucugcugggucgcucagg

SEQ ID NO: 980248 - RNA, 20 nt, Human
aggcucagagcaguaguaca

SEQ ID NO: 980249 - RNA, 22 nt, Human
uucucugaucuugcuagacuga

SEQ ID NO: 980250 - RNA, 19 nt, Human
accaggcuuauggucagug

SEQ ID NO: 980251 - RNA, 22 nt, Human
cuuccugcauugugccagaguu

SEQ ID NO: 980252 - RNA, 22 nt, Human
aacagaauugcugcugccaaug

SEQ ID NO: 980253 - RNA, 21 nt, Human
ucagcagcuuuugcagucccu

SEQ ID NO: 980254 - RNA, 22 nt, Human
gcuugggauaugcugauguaaa

SEQ ID NO: 980255 - RNA, 22 nt, Human
acaauacaggcuucuggacuua

SEQ ID NO: 980256 - RNA, 22 nt, Human
ggggcuguuuuuggaauggcug

SEQ ID NO: 980257 - RNA, 22 nt, Human
agggcugguauguccaugaaag

SEQ ID NO: 980258 - RNA, 22 nt, Human
ucauugaagugacugaaagauu

SEQ ID NO: 980259 - RNA, 19 nt, Human
cagaccuguccagccugug

SEQ ID NO: 980260 - RNA, 22 nt, Human
gagcuuugcuggaagccugggg

SEQ ID NO: 980261 - RNA, 23 nt, Human
uugugucuacuuccuaucuaggg

SEQ ID NO: 980262 - RNA, 22 nt, Human
ggcagcuccucucagcaaaaga

SEQ ID NO: 980263 - RNA, 22 nt, Human
cccaggaggccaagguugcagu

SEQ ID NO: 980264 - RNA, 22 nt, Human
gcuggccauagaagccaaagag

SEQ ID NO: 980265 - RNA, 22 nt, Human
ucuccuggcccugucgccaucu

SEQ ID NO: 980266 - RNA, 22 nt, Human
uugcaauagccuuauuuccaaa

SEQ ID NO: 980267 - RNA, 22 nt, Human
cagaggcagaggucaucucugg

SEQ ID NO: 980268 - RNA, 22 nt, Human
ggacuucuaagugccagacacu

SEQ ID NO: 980269 - RNA, 22 nt, Human
aucuacaggauuuuacagaguu

SEQ ID NO: 980270 - RNA, 22 nt, Human
uugaacuguaagcaugucugcc

SEQ ID NO: 980271 - RNA, 22 nt, Human
cugggagcaagucaggaaaggu

SEQ ID NO: 980272 - RNA, 21 nt, Human
aggucagcccagcucuggaag

SEQ ID NO: 980273 - RNA, 22 nt, Human
uuagugucuucuucauccucug

SEQ ID NO: 980274 - RNA, 22 nt, Human
uaaauguguuagucaugguuuu

SEQ ID NO: 980275 - RNA, 21 nt, Human
cauauuaaaucggugccuuua

SEQ ID NO: 980276 - RNA, 22 nt, Human
auguuauuaaaguacagauucu

SEQ ID NO: 980277 - RNA, 22 nt, Human
uggcugaacuaaugugcuguuu

SEQ ID NO: 980278 - RNA, 22 nt, Human
uggcagcagacaaaaggccauu

SEQ ID NO: 980279 - RNA, 22 nt, Human
gacagggcauggugcagaguuc

SEQ ID NO: 980280 - RNA, 22 nt, Human
gcugaagggagugcugagucug

SEQ ID NO: 980281 - RNA, 22 nt, Human
aggcccaguuauccuacuuguu

SEQ ID NO: 980282 - RNA, 23 nt, Human
ccugucugugcuggguggacaca

SEQ ID NO: 980283 - RNA, 20 nt, Human
uaagaacaagacuaggaagc

SEQ ID NO: 980284 - RNA, 22 nt, Human
aguuauauaacuaucuagaugc

SEQ ID NO: 980285 - RNA, 22 nt, Human
uuugcaaagugacuauuauaug

SEQ ID NO: 980286 - RNA, 22 nt, Human
cuucacaaauggccuagaguuc

SEQ ID NO: 980287 - RNA, 19 nt, Human
guggccagggcaggggcug

SEQ ID NO: 980288 - RNA, 22 nt, Human
uggagaggaaagugcaguuuug

SEQ ID NO: 980289 - RNA, 20 nt, Human
uugcaaauaucuauugauug

SEQ ID NO: 980290 - RNA, 22 nt, Human
cagaggcacaagaaagcaaggc

SEQ ID NO: 980291 - RNA, 22 nt, Human
cagaggcuguguaggcagacug

SEQ ID NO: 980292 - RNA, 22 nt, Human
agggauggaagcucgucugcaa

SEQ ID NO: 980293 - RNA, 22 nt, Human
uggcagcauuuuuuccagaaca

SEQ ID NO: 980294 - RNA, 22 nt, Human
ucacaggguaucugggauggau

SEQ ID NO: 980295 - RNA, 21 nt, Human
aaauacagaaacuuguuuuca

SEQ ID NO: 980296 - RNA, 22 nt, Human
uuccuggcugaacugaacuccu

SEQ ID NO: 980297 - RNA, 22 nt, Human
ucaugcuuauugcauauuugga

SEQ ID NO: 980298 - RNA, 22 nt, Human
uaaacauggauucugaucacag

SEQ ID NO: 980299 - RNA, 22 nt, Human
gaggcacugagagugggggaug

SEQ ID NO: 980300 - RNA, 22 nt, Human
auacaucucauguaagagauaa

SEQ ID NO: 980301 - RNA, 22 nt, Human
uggcugaaucugcagcaggaag

SEQ ID NO: 980302 - RNA, 22 nt, Human
gucuuguuugggauguggaugg

SEQ ID NO: 980303 - RNA, 22 nt, Human
aaugaacacagcccucuacuuu

SEQ ID NO: 980304 - RNA, 22 nt, Human
gucccagggaugcagacaugag

SEQ ID NO: 980305 - RNA, 22 nt, Human
aguacauuuauuaaugguaaaa

SEQ ID NO: 980306 - RNA, 22 nt, Human
cggcagcaaaggaagccagguc

SEQ ID NO: 980307 - RNA, 22 nt, Human
gcucccagaaccaaggcugggg

SEQ ID NO: 980308 - RNA, 22 nt, Human
ucuggccacuugcuucacacug

SEQ ID NO: 980309 - RNA, 23 nt, Human
ggcugagacuacaggcgcuugcc

SEQ ID NO: 980310 - RNA, 22 nt, Human
cacugcuuuaaggcugaguaac

SEQ ID NO: 980311 - RNA, 22 nt, Human
acaagaauuuacauguagugga

SEQ ID NO: 980312 - RNA, 22 nt, Human
aaugccuuggagagccuagagg

SEQ ID NO: 980313 - RNA, 22 nt, Human
gcagggacaucuuugucuagua

SEQ ID NO: 980314 - RNA, 22 nt, Human
cucucccagucaggcucaggau

SEQ ID NO: 980315 - RNA, 22 nt, Human
ucagggacauuuagacacugau

SEQ ID NO: 980316 - RNA, 22 nt, Human
cugccucucagccugaccgcca

SEQ ID NO: 980317 - RNA, 22 nt, Human
aagggcagagggaaucccacau

SEQ ID NO: 980318 - RNA, 22 nt, Human
ugcuugaggggaauaaaaagaa

SEQ ID NO: 980319 - RNA, 22 nt, Human
accuuauuuugaaauagauugu

SEQ ID NO: 980320 - RNA, 22 nt, Human
augugacaauauuuggucuuau

SEQ ID NO: 980321 - RNA, 22 nt, Human
caggguggcccuguggucucau

SEQ ID NO: 980322 - RNA, 22 nt, Human
ucaaaugcacguagagaaaaua

SEQ ID NO: 980323 - RNA, 22 nt, Human
agucucugcaugaugcagcaca

SEQ ID NO: 980324 - RNA, 22 nt, Human
aggcagauuuaggagaaaagaa

SEQ ID NO: 980325 - RNA, 22 nt, Human
gcccagcacauugcugaggacc

SEQ ID NO: 980326 - RNA, 22 nt, Human
agcagccagaaagggcagucga

SEQ ID NO: 980327 - RNA, 19 nt, Human
guugaaaguaggugagggu

SEQ ID NO: 980328 - RNA, 21 nt, Human
cagcuccacuaaagcagcugu

SEQ ID NO: 980329 - RNA, 22 nt, Human
guucuucaaagugacaacuaaa

SEQ ID NO: 980330 - RNA, 21 nt, Human
uaaaugugagcagggcugggc

SEQ ID NO: 980331 - RNA, 22 nt, Human
ugccuguguugauuacuuuguc

SEQ ID NO: 980332 - RNA, 22 nt, Human
ggccaugguuggggaagacaug

SEQ ID NO: 980333 - RNA, 22 nt, Human
uggccuggggaccugugagacc

SEQ ID NO: 980334 - RNA, 22 nt, Human
uccaucagauucccuccugaga

SEQ ID NO: 980335 - RNA, 22 nt, Human
ccccuuccaggaagcagaaucg

SEQ ID NO: 980336 - RNA, 22 nt, Human
gucacuguuuccuauuauauuu

SEQ ID NO: 980337 - RNA, 21 nt, Human
cugcuuuacuucagaggaucu

SEQ ID NO: 980338 - RNA, 22 nt, Human
ggcuucaccgcgggguugcagg

SEQ ID NO: 980339 - RNA, 20 nt, Human
gacaucauguacacauugcc

SEQ ID NO: 980340 - RNA, 22 nt, Human
ugcacacaaaugugaacgugcc

SEQ ID NO: 980341 - RNA, 22 nt, Human
guguacaugagaaaucaacuuu

SEQ ID NO: 980342 - RNA, 22 nt, Human
aaguugaaugcguacgugacau

SEQ ID NO: 980343 - RNA, 22 nt, Human
uagaaauguuagauguauugag

SEQ ID NO: 980344 - RNA, 22 nt, Human
uuauuuacaacucuucucuucc

SEQ ID NO: 980345 - RNA, 21 nt, Human
cucaggaucuuauauauuagu

SEQ ID NO: 980346 - RNA, 22 nt, Human
ugacagaaugugacucucagau

SEQ ID NO: 980347 - RNA, 22 nt, Human
auucuucacaaauauauagaag

SEQ ID NO: 980348 - RNA, 22 nt, Human
uuucauggcuaggacuagagug

SEQ ID NO: 980349 - RNA, 22 nt, Human
ugaagacacauacaagggaaug

SEQ ID NO: 980350 - RNA, 22 nt, Human
agaugcugucacacacacuguu

SEQ ID NO: 980351 - RNA, 22 nt, Human
ccucaggggcuuuucguuguug

SEQ ID NO: 980352 - RNA, 23 nt, Human
uugucugugcuuuuccaguugcu

SEQ ID NO: 980353 - RNA, 22 nt, Human
ggcugccuggaccuccucuuuc

SEQ ID NO: 980354 - RNA, 22 nt, Human
cugcuguguugccagugucacc

SEQ ID NO: 980355 - RNA, 22 nt, Human
cacugaaggcuaggauuagaug

SEQ ID NO: 980356 - RNA, 22 nt, Human
cuggccugugggcugucuccgg

SEQ ID NO: 980357 - RNA, 22 nt, Human
gcucugucaacagcuagcugug

SEQ ID NO: 980358 - RNA, 22 nt, Human
guuauguaucuugauugggugg

SEQ ID NO: 980359 - RNA, 22 nt, Human
cuccuggaccagggcuauuggg

SEQ ID NO: 980360 - RNA, 22 nt, Human
cacugcaggucugagauggggg

SEQ ID NO: 980361 - RNA, 22 nt, Influenza B virus
agauuagguaguugucugauuu

SEQ ID NO: 980362 - RNA, 22 nt, Human
aaacccaucugucugucugcag

SEQ ID NO: 980363 - RNA, 22 nt, Human
uuugcaaaaugucuuguguuag

SEQ ID NO: 980364 - RNA, 22 nt, Human
aaagucauugcuguuaucaaug

SEQ ID NO: 980365 - RNA, 23 nt, Human
ugauuaggucuacucuuggcucc

SEQ ID NO: 980366 - RNA, 22 nt, Human
uauucacauguacauaugcuca

SEQ ID NO: 980367 - RNA, 22 nt, Human
acucugcuaaauguguaggcuc

SEQ ID NO: 980368 - RNA, 22 nt, Human
auucacaauuagaaguagauaa

SEQ ID NO: 980369 - RNA, 22 nt, Human
ugcucccagggacucuggcugg

SEQ ID NO: 980370 - RNA, 22 nt, Human
uaacauuccucaaaguuuucag

SEQ ID NO: 980371 - RNA, 22 nt, Human
uauauuaacuugugauccugga

SEQ ID NO: 980372 - RNA, 22 nt, Human
acucuuuuauaaagcaucuuga

SEQ ID NO: 980373 - RNA, 22 nt, Human
uacucugccccagccaauaaug

SEQ ID NO: 980374 - RNA, 22 nt, Human
cugcacaguuugauuucuugcu

SEQ ID NO: 980375 - RNA, 19 nt, Human
gucaucuuuuaauaaugug

SEQ ID NO: 980376 - RNA, 22 nt, Human
guuaggauauggugaaauggag

SEQ ID NO: 980377 - RNA, 22 nt, Human
gcuccuggcucuggccaaggga

SEQ ID NO: 980378 - RNA, 22 nt, Human
guucacaagcuggguuucugca

SEQ ID NO: 980379 - RNA, 22 nt, Human
agcuauguuauagcauguauca

SEQ ID NO: 980380 - RNA, 22 nt, Human
ccuccugggacucauuagcacc

SEQ ID NO: 980381 - RNA, 22 nt, Human
aauucacaaaaccagauugcuu

SEQ ID NO: 980382 - RNA, 22 nt, Human
acucugcaauguggcaagaaca

SEQ ID NO: 980383 - RNA, 22 nt, Human
acauuuaaauaccuauguuucu

SEQ ID NO: 980384 - RNA, 22 nt, Human
cuguuuaucuaggaguugcagg

SEQ ID NO: 980385 - RNA, 22 nt, Human
uugacaaugcacugugcuaagu

SEQ ID NO: 980386 - RNA, 22 nt, Human
ccuccugguccagcaucucuuu

SEQ ID NO: 980387 - RNA, 22 nt, Human
auuuauuaugggauuuggcuca

SEQ ID NO: 980388 - RNA, 22 nt, Human
uauuagcgcuuacugaguugcc

SEQ ID NO: 980389 - RNA, 18 nt, Human
uugauaaacaauuucauu

SEQ ID NO: 980390 - RNA, 22 nt, Human
uuucuauucuggaucuguggca

SEQ ID NO: 980391 - RNA, 22 nt, Human
ucuggccagugaaaugcagaau

SEQ ID NO: 980392 - RNA, 22 nt, Human
gcuccuggguguggcugccccu

SEQ ID NO: 980393 - RNA, 22 nt, Human
ggauuugggcuugcagcagagc

SEQ ID NO: 980394 - RNA, 21 nt, Human
cauauuaaaucggugccuuua

SEQ ID NO: 980395 - RNA, 22 nt, Human
guggccaaaucaugucaaaggc

SEQ ID NO: 980396 - RNA, 22 nt, Human
gcuggccaguguggugaccacc

SEQ ID NO: 980397 - RNA, 18 nt, Human
gaaaggagagacaguagg

SEQ ID NO: 980398 - RNA, 22 nt, Human
auuagagaaugugcugacauug

SEQ ID NO: 980399 - RNA, 22 nt, Human
aaacaaguuuagaauaaugaau

SEQ ID NO: 980400 - RNA, 22 nt, Human
aagucuguagaaaaacaguuua

SEQ ID NO: 980401 - RNA, 22 nt, Human
ugcaaaugaguugcagaucagg

SEQ ID NO: 980402 - RNA, 22 nt, Human
aggauuuguuuauaggucuuaa

SEQ ID NO: 980403 - RNA, 22 nt, Human
guuugaaugcaguaugcauuuu

SEQ ID NO: 980404 - RNA, 22 nt, Human
acacauuauagagaguauaaua

SEQ ID NO: 980405 - RNA, 22 nt, Human
aauucacaaaaguuagauccau

SEQ ID NO: 980406 - RNA, 22 nt, Human
auaaauaucacuguugucccuc

SEQ ID NO: 980407 - RNA, 22 nt, Human
ccuccuggguucaagcgauucu

SEQ ID NO: 980408 - RNA, 18 nt, Human
auguauguacauauuuau

SEQ ID NO: 980409 - RNA, 22 nt, Human
cccauggcuuaggagggagugu

SEQ ID NO: 980410 - RNA, 22 nt, Human
agccauuggcugccuggugcgu

SEQ ID NO: 980411 - RNA, 22 nt, Human
gagccaagaucgcaccacugca

SEQ ID NO: 980412 - RNA, 22 nt, Human
gaggaaagcugguuuaaaguau

SEQ ID NO: 980413 - RNA, 22 nt, Human
ucuggccaggggucccugaagg

SEQ ID NO: 980414 - RNA, 23 nt, Human
uuauugaggguguagauuggugu

SEQ ID NO: 980415 - RNA, 22 nt, Human
ugcaccuuguugcuuuuacgaa

SEQ ID NO: 980416 - RNA, 22 nt, Human
uggccauagcucagcuccuuca

SEQ ID NO: 980417 - RNA, 22 nt, Human
cuggccuaaaauugcuucugca

SEQ ID NO: 980418 - RNA, 22 nt, Human
aacucugcaaccuauguagacc

SEQ ID NO: 980419 - RNA, 22 nt, Human
aggauuuugacuuauucaggga

SEQ ID NO: 980420 - RNA, 22 nt, Human
ucugagccacagauguccuguu

SEQ ID NO: 980421 - RNA, 22 nt, Human
uuaauguggaaagcucuugagu

SEQ ID NO: 980422 - RNA, 22 nt, Human
cuucacaaaauauuucauuaua

SEQ ID NO: 980423 - RNA, 22 nt, Human
uuuuauauugagugagaguucc

SEQ ID NO: 980424 - RNA, 22 nt, Human
cagacaggaauucuggcguggu

SEQ ID NO: 980425 - RNA, 22 nt, Human
uugaaaugcagauuccaaucca

SEQ ID NO: 980426 - RNA, 22 nt, Human
uuaaaaugcagauucugauuca

SEQ ID NO: 980427 - RNA, 21 nt, Human
ccuggccaaucugauaggguu

SEQ ID NO: 980428 - RNA, 22 nt, Human
uacaucuagccuuacaauuauu

SEQ ID NO: 980429 - RNA, 22 nt, Human
gucaucuuccuaguguuaacua

SEQ ID NO: 980430 - RNA, 22 nt, Human
cuguuuaucccuuuggucagca

SEQ ID NO: 980431 - RNA, 22 nt, Human
ggaagugaggaaauauuuuguu

SEQ ID NO: 980432 - RNA, 22 nt, Human
aaagcuauuuuauugcagcucu

SEQ ID NO: 980433 - RNA, 22 nt, Human
uggcacauagcagguacucagu

SEQ ID NO: 980434 - RNA, 22 nt, Human
gcuccuggcuucacugacauca

SEQ ID NO: 980435 - RNA, 22 nt, Human
ccacucugauuucaagggagau

SEQ ID NO: 980436 - RNA, 22 nt, Human
caauagaaaacucaauacuuaa

SEQ ID NO: 980437 - RNA, 22 nt, Human
ggcaagcauaaccuguacagcc

SEQ ID NO: 980438 - RNA, 22 nt, Human
acaccuuucagguccagacagu

SEQ ID NO: 980439 - RNA, 22 nt, Human
aauuaggaauaaaugaguacuu

SEQ ID NO: 980440 - RNA, 22 nt, Human
gcuggccauggggagugaggag

SEQ ID NO: 980441 - RNA, 22 nt, Human
gccaugaggaacuguaagacaa

SEQ ID NO: 980442 - RNA, 22 nt, Human
aacuccagggcauugucuccug

SEQ ID NO: 980443 - RNA, 22 nt, Human
agaggaaguaaucaggaccugc

SEQ ID NO: 980444 - RNA, 22 nt, Human
uaacccaaaggcaaugucucga

SEQ ID NO: 980445 - RNA, 22 nt, Human
auauuaggcaaggagauuauuu

SEQ ID NO: 980446 - RNA, 22 nt, Human
aaacaccagcacuguuuacaaa

SEQ ID NO: 980447 - RNA, 21 nt, Human
ucuccuggguccaacccaugc

SEQ ID NO: 980448 - RNA, 22 nt, Human
aaacccugcccuucccaagaug

SEQ ID NO: 980449 - RNA, 22 nt, Human
aauguacaaaagucagccaacu

SEQ ID NO: 980450 - RNA, 22 nt, Human
gcuggccauggccugcgccauc

SEQ ID NO: 980451 - RNA, 22 nt, Human
ucucugcugagaagggcuggca

SEQ ID NO: 980452 - RNA, 22 nt, Human
acacuuuuguguauauccaguu

SEQ ID NO: 980453 - RNA, 22 nt, Human
caacccaaaagcguuuccauuu

SEQ ID NO: 980454 - RNA, 19 nt, Human
uauucaggaugauggcaca

SEQ ID NO: 980455 - RNA, 21 nt, Human
acucugcugcgggcuuggccu

SEQ ID NO: 980456 - RNA, 22 nt, Human
gaguuauuagucaaauagggaa

SEQ ID NO: 980457 - RNA, 22 nt, Human
aacauuucugagaauaucaguu

SEQ ID NO: 980458 - RNA, 22 nt, Human
augauguuauuuucagaaacau

SEQ ID NO: 980459 - RNA, 22 nt, Human
uauucacauuaauaagucuuca

SEQ ID NO: 980460 - RNA, 22 nt, Human
ccuggccagccagggcuggggu

SEQ ID NO: 980461 - RNA, 22 nt, Human
aguguacacuaaaugaauacaa

SEQ ID NO: 980462 - RNA, 22 nt, Human
aaagaacaauguggaaucuccu

SEQ ID NO: 980463 - RNA, 22 nt, Human
guuuaauaauguugaauuacua

SEQ ID NO: 980464 - RNA, 22 nt, Human
ccucugcucccuggugucugag

SEQ ID NO: 980465 - RNA, 22 nt, Human
aaguuuguguaguuuagcaucc

SEQ ID NO: 980466 - RNA, 22 nt, Human
uauuggcagcaugagcuccugg

SEQ ID NO: 980467 - RNA, 22 nt, Human
caugucuuggcuuaggcacaga

SEQ ID NO: 980468 - RNA, 18 nt, Human
ucuuggcagcaucuggca

SEQ ID NO: 980469 - RNA, 22 nt, Human
acagcauugcuccaucucaaga

SEQ ID NO: 980470 - RNA, 23 nt, Human
uucuuauuuacuuuggaaucucc

SEQ ID NO: 980471 - RNA, 22 nt, Human
uuucaacaggaugauaauaggc

SEQ ID NO: 980472 - RNA, 22 nt, Human
ggcagacaccuuuaugucuaau

SEQ ID NO: 980473 - RNA, 22 nt, Human
cccaaacaguuccugugguacu

SEQ ID NO: 980474 - RNA, 21 nt, Human
ccucugcucgggcaugcguuu

SEQ ID NO: 980475 - RNA, 22 nt, Human
aaagguaacaguuauaaccagg

SEQ ID NO: 980476 - RNA, 22 nt, Human
auguuuaaaggagucagagacu

SEQ ID NO: 980477 - RNA, 22 nt, Human
uauauuaaagugcuuugcagug

SEQ ID NO: 980478 - RNA, 22 nt, Human
cuggcacaugcucccugagugg

SEQ ID NO: 980479 - RNA, 22 nt, Human
ucuggccaauguugugaucaca

SEQ ID NO: 980480 - RNA, 22 nt, Human
uuaaaugaugcauaucauuuag

SEQ ID NO: 980481 - RNA, 22 nt, Human
acuggccaggcacagcuguggg

SEQ ID NO: 980482 - RNA, 22 nt, Human
ucuggccagcaugagaccuggu

SEQ ID NO: 980483 - RNA, 22 nt, Human
gucaucuugcuguuuuagaucu

SEQ ID NO: 980484 - RNA, 22 nt, Human
guacauuucauuuaaaugaugu

SEQ ID NO: 980485 - RNA, 22 nt, Human
ucaaauaaggagucaugaccau

SEQ ID NO: 980486 - RNA, 22 nt, Human
ucauugaauuugguucaauaug

SEQ ID NO: 980487 - RNA, 20 nt, Human
aauauaauucucugaauuua

SEQ ID NO: 980488 - RNA, 22 nt, Human
ccuccuggcuuuucccauugaa

SEQ ID NO: 980489 - RNA, 22 nt, Human
uuuauguaauuucauaggugug

SEQ ID NO: 980490 - RNA, 22 nt, Human
gauguuucaugcuagcaugugu

SEQ ID NO: 980491 - RNA, 22 nt, Human
auaugaaaguaagcaugugugu

SEQ ID NO: 980492 - RNA, 20 nt, Human
ccuuuauuauuuguaugaug

SEQ ID NO: 980493 - RNA, 22 nt, Human
aacagacauauuuuuaauaugc

SEQ ID NO: 980494 - RNA, 22 nt, Human
accuguuuuccuaucuagauug

SEQ ID NO: 980495 - RNA, 22 nt, Human
uaugcacaauaugaucuauuug

SEQ ID NO: 980496 - RNA, 22 nt, Human
ucucuggccgagagucccuggg

SEQ ID NO: 980497 - RNA, 22 nt, Human
ccuccugggccuugcucuguga

SEQ ID NO: 980498 - RNA, 23 nt, Human
ucuccuggcugcacuguggccac

SEQ ID NO: 980499 - RNA, 22 nt, Human
uccaagggaaacugcacuucua

SEQ ID NO: 980500 - RNA, 22 nt, Human
gcucugcugacagcugggacag

SEQ ID NO: 980501 - RNA, 22 nt, Human
acaggacuguggaaggaucucu

SEQ ID NO: 980502 - RNA, 22 nt, Human
gaaaaagugaccuugguagcua

SEQ ID NO: 980503 - RNA, 22 nt, Human
uucuuaggacuaguauagcaug

SEQ ID NO: 980504 - RNA, 20 nt, Human
cugagccaacucucuucuug

SEQ ID NO: 980505 - RNA, 22 nt, Human
cuggccaauauagggaaaucuu

SEQ ID NO: 980506 - RNA, 22 nt, Human
acuccuggguuccggagauucu

SEQ ID NO: 980507 - RNA, 22 nt, Human
agacaggcagaggcugcagagg

SEQ ID NO: 980508 - RNA, 20 nt, Human
aaaaacaguaaugcugaaga

SEQ ID NO: 980509 - RNA, 22 nt, Human
uuaaaacagcgugaaucuggca

SEQ ID NO: 980510 - RNA, 22 nt, Human
cuugaaaugacaggagcacauc

SEQ ID NO: 980511 - RNA, 20 nt, Human
uugaggagauauugaauacu

SEQ ID NO: 980512 - RNA, 17 nt, Human
ugaagaugcauggcagc

SEQ ID NO: 980513 - RNA, 22 nt, Human
auuaggaagaggaugucagcau

SEQ ID NO: 980514 - RNA, 22 nt, Human
gagggcuccucacauucucuau

SEQ ID NO: 980515 - RNA, 22 nt, Human
uuccuggccccaccccuggaga

SEQ ID NO: 980516 - RNA, 22 nt, Human
cacacuuuuggcauguuugguu

SEQ ID NO: 980517 - RNA, 22 nt, Human
uaacuccacaccccucuuggug

SEQ ID NO: 980518 - RNA, 22 nt, Human
gcaaaacagucgaugccuccca

SEQ ID NO: 980519 - RNA, 22 nt, Human
ucuguaaauccugcucagcaac

SEQ ID NO: 980520 - RNA, 22 nt, Human
cauagaaaagaguagguaaugu

SEQ ID NO: 980521 - RNA, 22 nt, Human
auguuauaguuauaaaaugagg

SEQ ID NO: 980522 - RNA, 22 nt, Human
augaaaaguucgaucuagaagg

SEQ ID NO: 980523 - RNA, 22 nt, Human
uuccuugaaugagucauggaaa

SEQ ID NO: 980524 - RNA, 20 nt, Human
ucugccacuuuuucugucac

SEQ ID NO: 980525 - RNA, 22 nt, Human
agacaugagaaacccaccagag

SEQ ID NO: 980526 - RNA, 22 nt, Human
uccuggccuuauccccaaacug

SEQ ID NO: 980527 - RNA, 22 nt, Human
aagauauuuuagaacauucacu

SEQ ID NO: 980528 - RNA, 22 nt, Human
guaauguguuuugaaaaacagu

SEQ ID NO: 980529 - RNA, 22 nt, Human
ucuucaaacugaaaauuuagaa

SEQ ID NO: 980530 - RNA, 22 nt, Human
gcaccuuucuauauucaguggc

SEQ ID NO: 980531 - RNA, 22 nt, Human
gcagggaagggaaacagagacc

SEQ ID NO: 980532 - RNA, 22 nt, Human
gaaauauucuugucuuguuuuc

SEQ ID NO: 980533 - RNA, 19 nt, Human
ugaggccaaggucacagau

SEQ ID NO: 980534 - RNA, 22 nt, Human
aagauguaucuuuccuuuaauu

SEQ ID NO: 980535 - RNA, 22 nt, Human
uuuuaacuuaaaauacauagau

SEQ ID NO: 980536 - RNA, 22 nt, Human
aucaggauccaccuugagccug

SEQ ID NO: 980537 - RNA, 22 nt, Human
uuuauuauguacaggcacuaua

SEQ ID NO: 980538 - RNA, 22 nt, Human
aucauaaaccacuuuguaaucu

SEQ ID NO: 980539 - RNA, 22 nt, Human
cuccugggagucuuccuggaug

SEQ ID NO: 980540 - RNA, 22 nt, Human
uucagcaacauuuguugagugc

SEQ ID NO: 980541 - RNA, 22 nt, Human
acuccuggaaaagaacgcaggg

SEQ ID NO: 980542 - RNA, 23 nt, Human
acagaaaguucugcuggacagag

SEQ ID NO: 980543 - RNA, 22 nt, Human
gcucugcucuaacauuccugac

SEQ ID NO: 980544 - RNA, 22 nt, Human
acuccagguuuuuucacugaag

SEQ ID NO: 980545 - RNA, 22 nt, Human
gaguuauuugguuugcaugcag

SEQ ID NO: 980546 - RNA, 22 nt, Human
guggccaacucaauguuuuuca

SEQ ID NO: 980547 - RNA, 22 nt, Human
ucucugcucaggcaccagcccu

SEQ ID NO: 980548 - RNA, 22 nt, Human
cuuuuacugugaaaagaaacug

SEQ ID NO: 980549 - RNA, 22 nt, Human
uaaccuuuguucaauguaagau

SEQ ID NO: 980550 - RNA, 22 nt, Human
ucugaagccaccucugcuuguc

SEQ ID NO: 980551 - RNA, 21 nt, Human
acugccugucuccauagucua

SEQ ID NO: 980552 - RNA, 22 nt, Human
ugcauuccauguguuuccugag

SEQ ID NO: 980553 - RNA, 22 nt, Human
aguuuaauauccuucaacuuuc

SEQ ID NO: 980554 - RNA, 22 nt, Human
cauuccuuaacguggggagucu

SEQ ID NO: 980555 - RNA, 22 nt, Human
aaauauuauugcuuaaggggag

SEQ ID NO: 980556 - RNA, 19 nt, Human
gcucugcuacuauuaccac

SEQ ID NO: 980557 - RNA, 22 nt, Human
cacucugcugaaaucgccuugu

SEQ ID NO: 980558 - RNA, 22 nt, Human
uggagccagagcgcagccuggg

SEQ ID NO: 980559 - RNA, 22 nt, Human
augucacauggccuguacuuug

SEQ ID NO: 980560 - RNA, 22 nt, Human
ucugugccucaucugguucagg

SEQ ID NO: 980561 - RNA, 22 nt, Human
ccuggccaggcucucagcacug

SEQ ID NO: 980562 - RNA, 22 nt, Human
aagcaugugcuggggcuuuuug

SEQ ID NO: 980563 - RNA, 22 nt, Human
aagggcugagcacagugagcca

SEQ ID NO: 980564 - RNA, 22 nt, Human
uccugugccuccaccugcuccg

SEQ ID NO: 980565 - RNA, 22 nt, Human
ccuccuggugacaaggcaaagc

SEQ ID NO: 980566 - RNA, 23 nt, Human
cagaaaguuugagaagauacauc

SEQ ID NO: 980567 - RNA, 22 nt, Human
uuccuggccucucucugagcag

SEQ ID NO: 980568 - RNA, 22 nt, Human
ucugaaaucuguaagcacuagc

SEQ ID NO: 980569 - RNA, 21 nt, Human
ucugagagcaacugcccuuua

SEQ ID NO: 980570 - RNA, 22 nt, Human
gcuccugggcucuaccuugcua

SEQ ID NO: 980571 - RNA, 22 nt, Human
agacaggaugcauacucuuggu

SEQ ID NO: 980572 - RNA, 22 nt, Human
cauguguagugaaauaagcagu

SEQ ID NO: 980573 - RNA, 18 nt, Human
augugcaauuuuguauuu

SEQ ID NO: 980574 - RNA, 21 nt, Human
uguaaguuucaucugaauugg

SEQ ID NO: 980575 - RNA, 21 nt, Human
ugacauaauccauaguacaaa

SEQ ID NO: 980576 - RNA, 22 nt, Human
uccaagggaaugugggcaaugc

SEQ ID NO: 980577 - RNA, 22 nt, Human
aacauaaauuugaaguggcaaa

SEQ ID NO: 980578 - RNA, 22 nt, Human
uaugcacaacaugcagguuugu

SEQ ID NO: 980579 - RNA, 22 nt, Human
uuagauaacaguagaauaucaa

SEQ ID NO: 980580 - RNA, 22 nt, Human
ucaaauaaugccauucaucauc

SEQ ID NO: 980581 - RNA, 22 nt, Human
uacaucuauacugaucuacauu

SEQ ID NO: 980582 - RNA, 22 nt, Human
gacaucaauauucugcagggau

SEQ ID NO: 980583 - RNA, 22 nt, Human
cuacucugaauugaagugauau

SEQ ID NO: 980584 - RNA, 22 nt, Human
uucugagcugcaacacuaacau

SEQ ID NO: 980585 - RNA, 22 nt, Human
auggccaagagucgauuugggg

SEQ ID NO: 980586 - RNA, 22 nt, Human
gcacucugccaggucuccugau

SEQ ID NO: 980587 - RNA, 22 nt, Human
uggucaaaaaggccuagacaca

SEQ ID NO: 980588 - RNA, 22 nt, Human
uuuaguagaugcagcauuauuu

SEQ ID NO: 980589 - RNA, 22 nt, Human
uuuauuaaaacuguuggcucug

SEQ ID NO: 980590 - RNA, 22 nt, Human
ugucaucuucaucauaaguaaa

SEQ ID NO: 980591 - RNA, 22 nt, Human
ucuuuauuuuaugcuugugcaa

SEQ ID NO: 980592 - RNA, 22 nt, Human
agcagacauaucucaugucaca

SEQ ID NO: 980593 - RNA, 22 nt, Human
ugaggccagucucaucacaggc

SEQ ID NO: 980594 - RNA, 20 nt, Human
ccuggccaaugagauaggaa

SEQ ID NO: 980595 - RNA, 22 nt, Human
gacagagaggcugagcaguaca

SEQ ID NO: 980596 - RNA, 22 nt, Human
aggauauuugcuuaagauagcu

SEQ ID NO: 980597 - RNA, 22 nt, Human
gcuccuggcaggcagugugugu

SEQ ID NO: 980598 - RNA, 22 nt, Human
ucugagcccucuuuugcagccc

SEQ ID NO: 980599 - RNA, 22 nt, Human
aggucacccguuugacuaucca

SEQ ID NO: 980600 - RNA, 22 nt, Human
aauccuggaauacaagagugaa

SEQ ID NO: 980601 - RNA, 22 nt, Human
aaccuuuugcaagugccuugac

SEQ ID NO: 980602 - RNA, 20 nt, Human
ucucugcuguccacauuugc

SEQ ID NO: 980603 - RNA, 22 nt, Human
uugcaaaugaccauugccacau

SEQ ID NO: 980604 - RNA, 22 nt, Human
augugcuaaacucaacaaaucu

SEQ ID NO: 980605 - RNA, 22 nt, Human
acuaaauagccucugguaguug

SEQ ID NO: 980606 - RNA, 22 nt, Human
acagacauuuucuguauugccu

SEQ ID NO: 980607 - RNA, 22 nt, Human
cuggcacacaaguauuuccuuu

SEQ ID NO: 980608 - RNA, 22 nt, Human
caguuuaaaugagugacugcag

SEQ ID NO: 980609 - RNA, 22 nt, Human
aauguucaguagaauaggaaug

SEQ ID NO: 980610 - RNA, 22 nt, Human
uaccuauagguacaauuacaag

SEQ ID NO: 980611 - RNA, 22 nt, Human
auucuuuucccaacugcuuuaa

SEQ ID NO: 980612 - RNA, 19 nt, Human
auaaauaaaaagugggaga

SEQ ID NO: 980613 - RNA, 21 nt, Human
auguaggaguuauuggaacag

SEQ ID NO: 980614 - RNA, 22 nt, Human
ucugagccuauuucaaauuccu

SEQ ID NO: 980615 - RNA, 22 nt, Human
caaaaguaaucguggcuuuugc

SEQ ID NO: 980616 - RNA, 22 nt, Human
cagccuuuuaggacuauuugug

SEQ ID NO: 980617 - RNA, 22 nt, Human
guucacaagaguuacagacaga

SEQ ID NO: 980618 - RNA, 22 nt, Human
uaaaacugaauacauacugagg

SEQ ID NO: 980619 - RNA, 22 nt, Human
augcacuacuagaugcaaaagu

SEQ ID NO: 980620 - RNA, 22 nt, Human
agcuuguagaaggccacgagca

SEQ ID NO: 980621 - RNA, 22 nt, Human
aacauuucuucugaaacugagu

SEQ ID NO: 980622 - RNA, 22 nt, Human
uggcaacaugucgaagugcugu

SEQ ID NO: 980623 - RNA, 22 nt, Human
uguguuaacacugcaugauaau

SEQ ID NO: 980624 - RNA, 20 nt, Human
ucuccuggugacaguaccca

SEQ ID NO: 980625 - RNA, 17 nt, Human
uucugagccacuuccuu

SEQ ID NO: 980626 - RNA, 22 nt, Human
uggcacauagaaaaggaucaau

SEQ ID NO: 980627 - RNA, 17 nt, Human
agcugaaauugcugaag

SEQ ID NO: 980628 - RNA, 22 nt, Human
ccugugccagcugggcccugcc

SEQ ID NO: 980629 - RNA, 22 nt, Human
aucaggaucugcaucauaagaa

SEQ ID NO: 980630 - RNA, 22 nt, Human
aggccaaagugcuccuuuuaga

SEQ ID NO: 980631 - RNA, 22 nt, Human
aggccaaagcaagacccuguaa

SEQ ID NO: 980632 - RNA, 22 nt, Human
uggcaccagcaccuagaugggg

SEQ ID NO: 980633 - RNA, 22 nt, Human
acaaacagcuaacauauguuaa

SEQ ID NO: 980634 - RNA, 22 nt, Human
aaaguuugcaauuuauguuaau

SEQ ID NO: 980635 - RNA, 22 nt, Human
cauauuaaggucuguaaggggu

SEQ ID NO: 980636 - RNA, 22 nt, Human
uugcuucauuuuaaauaaagac

SEQ ID NO: 980637 - RNA, 22 nt, Human
guccaaauaaguugcaaaauag

SEQ ID NO: 980638 - RNA, 22 nt, Human
uauuagguaugaacuggcaacc

SEQ ID NO: 980639 - RNA, 22 nt, Human
uguuuauuacaguucuuggaau

SEQ ID NO: 980640 - RNA, 22 nt, Human
aaacauucucagcccugcuugc

SEQ ID NO: 980641 - RNA, 22 nt, Human
uaagucaugauucuguguuacu

SEQ ID NO: 980642 - RNA, 22 nt, Human
aauguggaaucauggacuuuau

SEQ ID NO: 980643 - RNA, 22 nt, Human
auauaaagagcuuaguauagug

SEQ ID NO: 980644 - RNA, 22 nt, Human
uccugagcugccgcaucagcag

SEQ ID NO: 980645 - RNA, 22 nt, Human
auuuauuaugggauuuggcaca

SEQ ID NO: 980646 - RNA, 22 nt, Human
uacaaagagguaauugcauaua

SEQ ID NO: 980647 - RNA, 22 nt, Human
auagaauagcauagaaaauuga

SEQ ID NO: 980648 - RNA, 22 nt, Human
ucuuuuauccuacauuuagcuc

SEQ ID NO: 980649 - RNA, 22 nt, Human
uagggauggaaacuaggaaucu

SEQ ID NO: 980650 - RNA, 22 nt, Human
cugggccaagaaguuguguaug

SEQ ID NO: 980651 - RNA, 21 nt, Human
gggaaugagauucuuggagau

SEQ ID NO: 980652 - RNA, 22 nt, Human
ccuguuuagugaggugaggagu

SEQ ID NO: 980653 - RNA, 22 nt, Human
guauuaggaaauaugaagaaag

SEQ ID NO: 980654 - RNA, 22 nt, Human
cuuuagugguauuuuagcaagu

SEQ ID NO: 980655 - RNA, 19 nt, Human
uggaagaggaagggaaaua

SEQ ID NO: 980656 - RNA, 22 nt, Human
cauaacauccuugcuacuuuga

SEQ ID NO: 980657 - RNA, 22 nt, Human
gcaggagagucugugccagguu

SEQ ID NO: 980658 - RNA, 22 nt, Human
gcucugcugcuuacuagauggu

SEQ ID NO: 980659 - RNA, 22 nt, Human
aaauaacuuaugaucgucuggc

SEQ ID NO: 980660 - RNA, 22 nt, Human
guaaauaacugguaauuggggu

SEQ ID NO: 980661 - RNA, 22 nt, Human
ucucugcucugugccucaguuu

SEQ ID NO: 980662 - RNA, 22 nt, Human
uggaagagguggaaguggcuuc

SEQ ID NO: 980663 - RNA, 22 nt, Human
augaaauguuggucccaaucgc

SEQ ID NO: 980664 - RNA, 22 nt, Human
aaagucauuguaauauaugcua

SEQ ID NO: 980665 - RNA, 22 nt, Human
auaaaaccaaagcagcaguguu

SEQ ID NO: 980666 - RNA, 22 nt, Human
uucaaacaguguagaauauaug

SEQ ID NO: 980667 - RNA, 20 nt, Human
aggauuugagaaggcgucuu

SEQ ID NO: 980668 - RNA, 22 nt, Human
uacuaggaagcagcugcauugg

SEQ ID NO: 980669 - RNA, 22 nt, Human
uaaugaugugugcaaacugaau

SEQ ID NO: 980670 - RNA, 22 nt, Human
uggcagacuuuagggucuacau

SEQ ID NO: 980671 - RNA, 19 nt, Human
cauuaggauuagagacaag

SEQ ID NO: 980672 - RNA, 22 nt, Human
cagccuuugggucagaagauuc

SEQ ID NO: 980673 - RNA, 22 nt, Human
gaaauauugggacucagagcuu

SEQ ID NO: 980674 - RNA, 22 nt, Human
gucaucuuaucauuguugcugu

SEQ ID NO: 980675 - RNA, 18 nt, Human
auggucucauacugggag

SEQ ID NO: 980676 - RNA, 17 nt, Human
ccacucaguaauuucuc

SEQ ID NO: 980677 - RNA, 22 nt, Human
acuugaaaggaagcucuaaaac

SEQ ID NO: 980678 - RNA, 22 nt, Human
uaauaggagccaggucacauag

SEQ ID NO: 980679 - RNA, 22 nt, Human
uugcaaaugggcaaagcagauc

SEQ ID NO: 980680 - RNA, 22 nt, Human
aaccuucacuugcuucauuuga

SEQ ID NO: 980681 - RNA, 22 nt, Human
cugcucacgccaccguucauca

SEQ ID NO: 980682 - RNA, 22 nt, Human
uccuggcccgaucccugugaag

SEQ ID NO: 980683 - RNA, 22 nt, Human
aaacacuagcaggaagcacuga

SEQ ID NO: 980684 - RNA, 22 nt, Human
aaaguuuggauuagcaguuaga

SEQ ID NO: 980685 - RNA, 22 nt, Human
aaugauguauuaguacaacaca

SEQ ID NO: 980686 - RNA, 23 nt, Human
uuccuggcagguacaacuuuuac

SEQ ID NO: 980687 - RNA, 22 nt, Human
uuaaaaugcagauuaugacuca

SEQ ID NO: 980688 - RNA, 22 nt, Human
ugagccaaacuucuccuugguc

SEQ ID NO: 980689 - RNA, 22 nt, Human
gaggaaggucccaucagaauuu

SEQ ID NO: 980690 - RNA, 22 nt, Human
uuugcaauuugugcugcaaaug

SEQ ID NO: 980691 - RNA, 20 nt, Human
ucuccuggucugguccgugc

SEQ ID NO: 980692 - RNA, 22 nt, Human
uggcaccaggcgggguggcugu

SEQ ID NO: 980693 - RNA, 22 nt, Human
gaagccuugaacugcaaacccc

SEQ ID NO: 980694 - RNA, 23 nt, Human
uacuuaggaauggggacggcaag

SEQ ID NO: 980695 - RNA, 22 nt, Human
cacucugcagcugaagggcugg

SEQ ID NO: 980696 - RNA, 22 nt, Human
ucuccuggagcaggaagguggg

SEQ ID NO: 980697 - RNA, 23 nt, Human
gacaccuuugccagaucaagaug

SEQ ID NO: 980698 - RNA, 22 nt, Human
aguuucuuuagauagaaaguuc

SEQ ID NO: 980699 - RNA, 22 nt, Human
ccucugcugcuguugagcaccg

SEQ ID NO: 980700 - RNA, 22 nt, Human
uuggccaaggaaguagcaacgg

SEQ ID NO: 980701 - RNA, 22 nt, Human
uuaggauaugaaacaguauaag

SEQ ID NO: 980702 - RNA, 22 nt, Human
aguugcagacgcagagauguug

SEQ ID NO: 980703 - RNA, 21 nt, Human
ugcuggaaaaagugguucuag

SEQ ID NO: 980704 - RNA, 22 nt, Human
uucaucaauguguuuaauaaug

SEQ ID NO: 980705 - RNA, 22 nt, Human
aaaugaguuuccucaauguccu

SEQ ID NO: 980706 - RNA, 22 nt, Human
cauuucauaguugucacaauaa

SEQ ID NO: 980707 - RNA, 22 nt, Human
acuucuggauagagucagcuuu

SEQ ID NO: 980708 - RNA, 22 nt, Human
aauguacaauaagacaaagagg

SEQ ID NO: 980709 - RNA, 22 nt, Human
aauuucaaguggcaucuuugau

SEQ ID NO: 980710 - RNA, 22 nt, Human
agacauuuggaagauacacaua

SEQ ID NO: 980711 - RNA, 22 nt, Human
uuaguaggagagcuuguucauu

SEQ ID NO: 980712 - RNA, 22 nt, Human
cagacauauguuuuaacagauu

SEQ ID NO: 980713 - RNA, 22 nt, Human
augaaauaucuugaagaaauuc

SEQ ID NO: 980714 - RNA, 22 nt, Human
acucugcucuuauaguguuaua

SEQ ID NO: 980715 - RNA, 22 nt, Human
ucugccacuagugguuaccuua

SEQ ID NO: 980716 - RNA, 22 nt, Human
cuuuauuagauguagacuuucu

SEQ ID NO: 980717 - RNA, 22 nt, Human
aaacugccuccugggcaacuaa

SEQ ID NO: 980718 - RNA, 22 nt, Human
gcucugcuaauauuguaguacc

SEQ ID NO: 980719 - RNA, 22 nt, Human
cagcugcaguucaaugcuugcu

SEQ ID NO: 980720 - RNA, 22 nt, Human
uuucacaaugcaauccuacuuc

SEQ ID NO: 980721 - RNA, 22 nt, Human
agaaauguggaggaacagggcu

SEQ ID NO: 980722 - RNA, 22 nt, Human
guauuagguuggugcaaaauug

SEQ ID NO: 980723 - RNA, 22 nt, Human
uauauuaaaugaccaguuuuaa

SEQ ID NO: 980724 - RNA, 22 nt, Human
agaaaugaagcaggaguuauua

SEQ ID NO: 980725 - RNA, 22 nt, Human
cuuaauaaaugguagcuguuau

SEQ ID NO: 980726 - RNA, 22 nt, Human
aggccaaauagcagguuugcua

SEQ ID NO: 980727 - RNA, 17 nt, Human
cuccuggccaccccucu

SEQ ID NO: 980728 - RNA, 22 nt, Human
uauguagguaaacacagacaua

SEQ ID NO: 980729 - RNA, 22 nt, Human
cagagacauuaagugccaugau

SEQ ID NO: 980730 - RNA, 22 nt, Human
cuccuuggccguuaaugucaca

SEQ ID NO: 980731 - RNA, 23 nt, Human
cacuccuguuucuaagccagcau

SEQ ID NO: 980732 - RNA, 22 nt, Human
gcucugcuugcaucaugacugc

SEQ ID NO: 980733 - RNA, 22 nt, Human
uagaaacagcauauauuagccc

SEQ ID NO: 980734 - RNA, 22 nt, Human
aaaguaaccuaguaauaguguc

SEQ ID NO: 980735 - RNA, 22 nt, Human
guucacaaauaugcacuuacga

SEQ ID NO: 980736 - RNA, 22 nt, Human
guggccaaacaccaguuuagga

SEQ ID NO: 980737 - RNA, 22 nt, Human
cugaaaugguugccuggagaau

SEQ ID NO: 980738 - RNA, 22 nt, Human
gauuucuuuagguguaauagug

SEQ ID NO: 980739 - RNA, 22 nt, Human
gacuccuggcuuucccucuuag

SEQ ID NO: 980740 - RNA, 20 nt, Human
acugggcauaccuguccugu

SEQ ID NO: 980741 - RNA, 22 nt, Human
aggauuugaaccugcauccagu

SEQ ID NO: 980742 - RNA, 22 nt, Human
ucuuguuacaguuuauuacaug

SEQ ID NO: 980743 - RNA, 22 nt, Human
uuucuuaguccuagagugauuu

SEQ ID NO: 980744 - RNA, 22 nt, Human
agacagugcaagaagagcaggc

SEQ ID NO: 980745 - RNA, 22 nt, Human
uucugagguccaugcaguacug

SEQ ID NO: 980746 - RNA, 22 nt, Human
gacucugcuaggaaaaucucag

SEQ ID NO: 980747 - RNA, 22 nt, Human
uuaaaaugaauauugauuagca

SEQ ID NO: 980748 - RNA, 22 nt, Human
acagcauucaauaaauaauaac

SEQ ID NO: 980749 - RNA, 22 nt, Human
auaaacaucuguuucucuucug

SEQ ID NO: 980750 - RNA, 22 nt, Human
uugaauaauuaauuacacucag

SEQ ID NO: 980751 - RNA, 22 nt, Human
aauaauguacauacauauuucg

SEQ ID NO: 980752 - RNA, 22 nt, Human
auggccaaggggccuaggcagg

SEQ ID NO: 980753 - RNA, 22 nt, Human
cagcuuugcccuuugcccaauc

SEQ ID NO: 980754 - RNA, 22 nt, Human
cugggccagcaacugcaaugga

SEQ ID NO: 980755 - RNA, 22 nt, Human
ucuggccacuaauaggucucac

SEQ ID NO: 980756 - RNA, 22 nt, Human
uauucacagguucuggggauca

SEQ ID NO: 980757 - RNA, 22 nt, Human
uuggccaagggcucuuuaggcu

SEQ ID NO: 980758 - RNA, 22 nt, Human
ugcaacauuauuaaacuaagca

SEQ ID NO: 980759 - RNA, 22 nt, Human
aaauauguaaccaaggugaagu

SEQ ID NO: 980760 - RNA, 22 nt, Human
ucacucuggaguccgcuaccag

SEQ ID NO: 980761 - RNA, 22 nt, Human
ugaaaaacuuuaauccauaaag

SEQ ID NO: 980762 - RNA, 22 nt, Human
ugaauauguuccucacaaguuc

SEQ ID NO: 980763 - RNA, 22 nt, Human
gagaggggcgcgcagcucgcga

SEQ ID NO: 980764 - RNA, 22 nt, Human
uguguauagcaguuuccagucu

SEQ ID NO: 980765 - RNA, 22 nt, Human
uccuggccagaggacaaagcug

SEQ ID NO: 980766 - RNA, 22 nt, Human
cacuccuguuccacuaaaugag

SEQ ID NO: 980767 - RNA, 22 nt, Human
guuuuauuuccaugagagaccg

SEQ ID NO: 980768 - RNA, 22 nt, Human
augugcaacuucagcagaaagg

SEQ ID NO: 980769 - RNA, 22 nt, Human
aguuggcauuuuauuuaaguau

SEQ ID NO: 980770 - RNA, 22 nt, Human
gagagcuguuuaucuucuucaa

SEQ ID NO: 980771 - RNA, 22 nt, Human
ugaaggugucuuugugaacauc

SEQ ID NO: 980772 - RNA, 22 nt, Human
aauauccagguagaugucuucu

SEQ ID NO: 980773 - RNA, 22 nt, Human
aacuucuggauguuucaaaugu

SEQ ID NO: 980774 - RNA, 22 nt, Human
acauaaauagauuauugggagg

SEQ ID NO: 980775 - RNA, 22 nt, Human
auuaggauuugguauggucaua

SEQ ID NO: 980776 - RNA, 22 nt, Human
gcuggccacauugugccguccu

SEQ ID NO: 980777 - RNA, 22 nt, Human
uuguuacuaagccuuuaaauag

SEQ ID NO: 980778 - RNA, 22 nt, Human
agauaaauuccuaagauuucag

SEQ ID NO: 980779 - RNA, 23 nt, Human
aacuccugaaucgugagccaucu

SEQ ID NO: 980780 - RNA, 22 nt, Human
uucaggauggcggauguugggg

SEQ ID NO: 980781 - RNA, 22 nt, Human
ugcauguuauuguggcaagaau

SEQ ID NO: 980782 - RNA, 22 nt, Human
uuggcagcccagcuuacuagca

SEQ ID NO: 980783 - RNA, 22 nt, Human
augguacaauguguuuguuagg

SEQ ID NO: 980784 - RNA, 22 nt, Human
ucacucugcaggaaggagcagc

SEQ ID NO: 980785 - RNA, 22 nt, Human
uucuuagaugauuaaugauggg

SEQ ID NO: 980786 - RNA, 22 nt, Human
aauagaauuuguacuguguuuu

SEQ ID NO: 980787 - RNA, 19 nt, Human
agucucacccaagcagucu

SEQ ID NO: 980788 - RNA, 18 nt, Human
aggccaaacuuguaagca

SEQ ID NO: 980789 - RNA, 22 nt, Human
guggccaaggugcagagcagcu

SEQ ID NO: 980790 - RNA, 22 nt, Human
ucugagccagccaccuccuuca

SEQ ID NO: 980791 - RNA, 22 nt, Human
acucugcucuuuggacaaugcc

SEQ ID NO: 980792 - RNA, 22 nt, Human
gcuggccaaaguguaccuggag

SEQ ID NO: 980793 - RNA, 22 nt, Human
cagcuccugaggacugcuggga

SEQ ID NO: 980794 - RNA, 22 nt, Human
cuccugaguaguagcauuguca

SEQ ID NO: 980795 - RNA, 22 nt, Human
acucugcuauugcagugcaaaa

SEQ ID NO: 980796 - RNA, 22 nt, Human
ucugagaggcaucugcacuucu

SEQ ID NO: 980797 - RNA, 22 nt, Human
uuggccaaauaaucuugcagau

SEQ ID NO: 980798 - RNA, 22 nt, Human
uccuggcccucugcaaacgcca

SEQ ID NO: 980799 - RNA, 22 nt, Human
cagucucagaggugggaguggg

SEQ ID NO: 980800 - RNA, 22 nt, Human
uuaaguaagaccuuaugucuug

SEQ ID NO: 980801 - RNA, 22 nt, Human
gaguuauugaguauagaaugua

SEQ ID NO: 980802 - RNA, 22 nt, Human
ucugugccuccguaacacacca

SEQ ID NO: 980803 - RNA, 22 nt, Human
gaaaaugugucaucccuacugu

SEQ ID NO: 980804 - RNA, 22 nt, Human
aaaugauggaaaugaggcugaa

SEQ ID NO: 980805 - RNA, 22 nt, Human
aauaagauugacacaaguaccu

SEQ ID NO: 980806 - RNA, 22 nt, Human
aaugauguauguauaaggcagg

SEQ ID NO: 980807 - RNA, 22 nt, Human
ucacucuguguuucccugggac

SEQ ID NO: 980808 - RNA, 22 nt, Human
uagcacaggucuuguugccauu

SEQ ID NO: 980809 - RNA, 22 nt, Human
aauuaggaaauucagccauuuu

SEQ ID NO: 980810 - RNA, 22 nt, Human
ugucuuaauaugugcauucugu

SEQ ID NO: 980811 - RNA, 22 nt, Human
cagcuuuguccugcaaaccuga

SEQ ID NO: 980812 - RNA, 21 nt, Human
acuggccaccacuggcagggg

SEQ ID NO: 980813 - RNA, 22 nt, Human
auuuggauucuuauuuagcacu

SEQ ID NO: 980814 - RNA, 22 nt, Human
uuaauuuuuauguauagugugu

SEQ ID NO: 980815 - RNA, 22 nt, Human
cugagccagcgggcucacuuuu

SEQ ID NO: 980816 - RNA, 22 nt, Human
cuccuggcacugucuugaccca

SEQ ID NO: 980817 - RNA, 22 nt, Human
uccaagggcaacaauggaacac

SEQ ID NO: 980818 - RNA, 22 nt, Human
cagucauuggcuaaagcucccu

SEQ ID NO: 980819 - RNA, 20 nt, Human
cugggccauccuuuuacaau

SEQ ID NO: 980820 - RNA, 21 nt, Human
auucugaguugucagucuuca

SEQ ID NO: 980821 - RNA, 22 nt, Human
auucacaaagucacccuuacac

SEQ ID NO: 980822 - RNA, 22 nt, Human
uggcagacacugucgaagccua

SEQ ID NO: 980823 - RNA, 22 nt, Human
auuacacacucaaguccuguua

SEQ ID NO: 980824 - RNA, 23 nt, Human
ccagucucuuuccaaaaucacau

SEQ ID NO: 980825 - RNA, 22 nt, Human
uccugggcaaaaguaucuguga

SEQ ID NO: 980826 - RNA, 22 nt, Human
uuugauaacagugaauaucaug

SEQ ID NO: 980827 - RNA, 23 nt, Human
uuuuaauuuggacauaagaagau

SEQ ID NO: 980828 - RNA, 22 nt, Human
uucagcaagaauuuacugagcu

SEQ ID NO: 980829 - RNA, 22 nt, Human
uagcuuuguguaugaugucugu

SEQ ID NO: 980830 - RNA, 22 nt, Human
cagaggaguucaguacacagcc

SEQ ID NO: 980831 - RNA, 22 nt, Human
cuuuuauuuugaauuaagggcu

SEQ ID NO: 980832 - RNA, 22 nt, Human
uucaugcuuuuaccgcuguuaa

SEQ ID NO: 980833 - RNA, 22 nt, Human
aauucacaggagguauuugucc

SEQ ID NO: 980834 - RNA, 20 nt, Human
aacacacugguggcaucagg

SEQ ID NO: 980835 - RNA, 22 nt, Human
cuuuguauucaguugggcugug

SEQ ID NO: 980836 - RNA, 22 nt, Human
ggucugaguggggccugagauu

SEQ ID NO: 980837 - RNA, 22 nt, Human
cuuuuuaucucuuaaugauguu

SEQ ID NO: 980838 - RNA, 21 nt, Human
ccacucugaguguugaacaga

SEQ ID NO: 980839 - RNA, 22 nt, Human
ccuggccauagggcccaggaaa

SEQ ID NO: 980840 - RNA, 22 nt, Human
gaguuuaaaacgcuuguauuua

SEQ ID NO: 980841 - RNA, 22 nt, Human
ugcugaaagucccaaaucucau

SEQ ID NO: 980842 - RNA, 22 nt, Human
uggccaaauuugguguaacuug

SEQ ID NO: 980843 - RNA, 22 nt, Human
uuaggcauauggcacaugauag

SEQ ID NO: 980844 - RNA, 22 nt, Human
agacagguaaauagagaugcug

SEQ ID NO: 980845 - RNA, 22 nt, Human
aagacagagacucugcaacagg

SEQ ID NO: 980846 - RNA, 22 nt, Human
aaaaagcuuaaaugagcaguuc

SEQ ID NO: 980847 - RNA, 22 nt, Human
acucugcuguuuacucucuaua

SEQ ID NO: 980848 - RNA, 22 nt, Human
uagaauguaaauuccaagggca

SEQ ID NO: 980849 - RNA, 22 nt, Human
gcucugcugaagccccuugcau

SEQ ID NO: 980850 - RNA, 22 nt, Human
gacucugcugacuaguugacua

SEQ ID NO: 980851 - RNA, 22 nt, Human
auagucaaccuuguaauuagcc

SEQ ID NO: 980852 - RNA, 22 nt, Human
uaaaugauaauaaugcuagugu

SEQ ID NO: 980853 - RNA, 22 nt, Human
ugaggccagcuucagcagugga

SEQ ID NO: 980854 - RNA, 22 nt, Human
ucacucugggccagcgcaggua

SEQ ID NO: 980855 - RNA, 22 nt, Human
guuaggauguggggacuuuggg

SEQ ID NO: 980856 - RNA, 22 nt, Human
uaaaagacccucuagaguccca

SEQ ID NO: 980857 - RNA, 22 nt, Human
ucugccaccuucauccuccacu

SEQ ID NO: 980858 - RNA, 22 nt, Human
aguuucaauucuuuucacaaag

SEQ ID NO: 980859 - RNA, 22 nt, Human
aaaaguaauugaugcaaucgua

SEQ ID NO: 980860 - RNA, 22 nt, Human
aucugaagcuaucugcacuuca

SEQ ID NO: 980861 - RNA, 22 nt, Human
uuccuggcaugaaaaauaucac

SEQ ID NO: 980862 - RNA, 22 nt, Human
aaacaugagcacuugcuucaua

SEQ ID NO: 980863 - RNA, 18 nt, Human
cugaggccaacuacacug

SEQ ID NO: 980864 - RNA, 23 nt, Human
ccagucucacguauacaggauuu

SEQ ID NO: 980865 - RNA, 17 nt, Human
ucuccuggcucuaucag

SEQ ID NO: 980866 - RNA, 22 nt, Human
guucacaaaauucuggccagug

SEQ ID NO: 980867 - RNA, 22 nt, Human
auuagagaaauguugccaagau

SEQ ID NO: 980868 - RNA, 22 nt, Human
cuucacaaagcucucuuuaugu

SEQ ID NO: 980869 - RNA, 21 nt, Human
gacucugcaccaaauuaagcc

SEQ ID NO: 980870 - RNA, 22 nt, Human
uuccuggcaccaccacuucuag

SEQ ID NO: 980871 - RNA, 22 nt, Human
guggccaaaaggaagaagguua

SEQ ID NO: 980872 - RNA, 22 nt, Human
ucugccaccaccuacacuagua

SEQ ID NO: 980873 - RNA, 22 nt, Human
ucagggaacuacuucucccuau

SEQ ID NO: 980874 - RNA, 22 nt, Human
acaaaguaggucaucaaagcuc

SEQ ID NO: 980875 - RNA, 22 nt, Human
gcuggccauagaagccaaagag

SEQ ID NO: 980876 - RNA, 22 nt, Human
aaauuagucauguuguauuacu

SEQ ID NO: 980877 - RNA, 22 nt, Human
auucacaacaaaaggauaugag

SEQ ID NO: 980878 - RNA, 22 nt, Human
guuauuagaagugaaggauugu

SEQ ID NO: 980879 - RNA, 22 nt, Human
uggacaaaugauuucuaccuuu

SEQ ID NO: 980880 - RNA, 22 nt, Human
cuccuggcccugagcucccagg

SEQ ID NO: 980881 - RNA, 22 nt, Human
guggccaauaggagcagcuauc

SEQ ID NO: 980882 - RNA, 22 nt, Human
uuaaaagagcagcccagcauau

SEQ ID NO: 980883 - RNA, 22 nt, Human
uguuggcaucucugagagaguu

SEQ ID NO: 980884 - RNA, 22 nt, Human
uggcacaugguaagacucagua

SEQ ID NO: 980885 - RNA, 22 nt, Human
uaguuaggguucugcagagaca

SEQ ID NO: 980886 - RNA, 22 nt, Human
cugugccaguguauuccuguga

SEQ ID NO: 980887 - RNA, 22 nt, Human
agaaaugacacacaugagacau

SEQ ID NO: 980888 - RNA, 22 nt, Human
acucugcuugggccauaucugg

SEQ ID NO: 980889 - RNA, 17 nt, Human
cuccuggcagccucagg

SEQ ID NO: 980890 - RNA, 22 nt, Human
ugcaugcugcacacaugcguag

SEQ ID NO: 980891 - RNA, 22 nt, Human
cugguccauucucucccugaag

SEQ ID NO: 980892 - RNA, 22 nt, Human
uggcagcagggccccuggagga

SEQ ID NO: 980893 - RNA, 22 nt, Human
aacacauauuuauauaugcaca

SEQ ID NO: 980894 - RNA, 22 nt, Human
aaauaguaaagugguagccauc

SEQ ID NO: 980895 - RNA, 22 nt, Human
uuuacugugcauuagaaucacc

SEQ ID NO: 980896 - RNA, 22 nt, Human
gcaccuuuuucuaggagaaugu

SEQ ID NO: 980897 - RNA, 22 nt, Human
uguuuaauugggccaacagcgg

SEQ ID NO: 980898 - RNA, 22 nt, Human
ugagaauaggcauagaaccugg

SEQ ID NO: 980899 - RNA, 22 nt, Human
uguagaaagaauauguuucaua

SEQ ID NO: 980900 - RNA, 22 nt, Human
auggccaagaaauugccgacug

SEQ ID NO: 980901 - RNA, 19 nt, Human
uuuaggauaaagucuggac

SEQ ID NO: 980902 - RNA, 22 nt, Human
caucuuuuggccuauucugagg

SEQ ID NO: 980903 - RNA, 22 nt, Human
gaguuuaaauaacacauuucca

SEQ ID NO: 980904 - RNA, 22 nt, Human
ggucagccuuggauuugguagc

SEQ ID NO: 980905 - RNA, 22 nt, Human
ugcugagaaucacagguuauaa

SEQ ID NO: 980906 - RNA, 17 nt, Human
auuagguuuugucauga

SEQ ID NO: 980907 - RNA, 22 nt, Human
ucuccuggucaccucagaaguc

SEQ ID NO: 980908 - RNA, 22 nt, Human
aaugugcaggcucaaaccuugu

SEQ ID NO: 980909 - RNA, 22 nt, Human
uugagggaacaugagaaucauc

SEQ ID NO: 980910 - RNA, 22 nt, Human
uauaaagaaguguaaacaggaa

SEQ ID NO: 980911 - RNA, 22 nt, Human
guacacauugucuguuuacuuc

SEQ ID NO: 980912 - RNA, 22 nt, Human
uauuggaugauucacuuggcag

SEQ ID NO: 980913 - RNA, 22 nt, Human
cauccugguuaccccauaguca

SEQ ID NO: 980914 - RNA, 22 nt, Human
ugaaacacuuucaauuacauau

SEQ ID NO: 980915 - RNA, 22 nt, Human
aauuaggagaaaacuguugucu

SEQ ID NO: 980916 - RNA, 22 nt, Human
ggauuuggaagaccgggucaca

SEQ ID NO: 980917 - RNA, 22 nt, Human
uauuuaauaaaacuauggcaug

SEQ ID NO: 980918 - RNA, 22 nt, Human
auuauuaggugcucucugacaa

SEQ ID NO: 980919 - RNA, 22 nt, Human
cauaagaaauuuaacagaacuu

SEQ ID NO: 980920 - RNA, 22 nt, Human
augaaagaugauuuaaaguacu

SEQ ID NO: 980921 - RNA, 22 nt, Human
ugucaucuuuuuaaagaagaga

SEQ ID NO: 980922 - RNA, 22 nt, Human
uauuagguaaaggacuugcagg

SEQ ID NO: 980923 - RNA, 19 nt, Human
acugccugaggcucacagg

SEQ ID NO: 980924 - RNA, 22 nt, Human
agccuugaacacugacugaagg

SEQ ID NO: 980925 - RNA, 22 nt, Human
caccuuguggcccagucagguu

SEQ ID NO: 980926 - RNA, 22 nt, Human
caaaaguaauugugguuuuugc

SEQ ID NO: 980927 - RNA, 22 nt, Human
agcacucuucugugauaguugu

SEQ ID NO: 980928 - RNA, 22 nt, Human
uaggauuuggcuuuagucaggu

SEQ ID NO: 980929 - RNA, 22 nt, Human
uuugaauaucacaaacuuucaa

SEQ ID NO: 980930 - RNA, 22 nt, Human
cagcaggguagguuguaucagu

SEQ ID NO: 980931 - RNA, 22 nt, Human
guauuagguuggugcaaaagua

SEQ ID NO: 980932 - RNA, 22 nt, Human
aaacagaaauuuccucaugcuc

SEQ ID NO: 980933 - RNA, 22 nt, Human
uaacuccaucucugugucugcu

SEQ ID NO: 980934 - RNA, 22 nt, Human
accucugcaacccuggaauggg

SEQ ID NO: 980935 - RNA, 22 nt, Human
acacucuguaaugucacacucc

SEQ ID NO: 980936 - RNA, 22 nt, Human
cauucacauucuucuuacuguu

SEQ ID NO: 980937 - RNA, 22 nt, Human
ugaaagcacaaguucuaacagg

SEQ ID NO: 980938 - RNA, 22 nt, Human
gcuccuggugcaaaguuucuuc

SEQ ID NO: 980939 - RNA, 22 nt, Human
auguuuaagaaagucuuccaua

SEQ ID NO: 980940 - RNA, 22 nt, Human
uauuggucuuggaagguuuugu

SEQ ID NO: 980941 - RNA, 22 nt, Human
ucuggccaacccucaaguugua

SEQ ID NO: 980942 - RNA, 22 nt, Human
cuggccaauccauuaauuuguu

SEQ ID NO: 980943 - RNA, 22 nt, Human
uugaaauauggauugaccuuga

SEQ ID NO: 980944 - RNA, 22 nt, Human
gcuggccagggcugcucgcgga

SEQ ID NO: 980945 - RNA, 22 nt, Human
cagggucuuauaaggccaauuu

SEQ ID NO: 980946 - RNA, 22 nt, Human
uuccuguuucauagaaaacuga

SEQ ID NO: 980947 - RNA, 22 nt, Human
guucacaauggcuuuaccuaag

SEQ ID NO: 980948 - RNA, 19 nt, Human
gcuccugggccucacucau

SEQ ID NO: 980949 - RNA, 22 nt, Human
aaauaugaaugauaagaguuau

SEQ ID NO: 980950 - RNA, 22 nt, Human
uggccaagaaugauaugugaag

SEQ ID NO: 980951 - RNA, 22 nt, Human
uucagcaaugacagccuauaua

SEQ ID NO: 980952 - RNA, 22 nt, Human
uuggccaauuccagaggaucau

SEQ ID NO: 980953 - RNA, 22 nt, Human
uagagcugggcagugcucugag

SEQ ID NO: 980954 - RNA, 22 nt, Human
aagaugcagcaaacuacuuuuu

SEQ ID NO: 980955 - RNA, 22 nt, Human
uccuggccuagcucacccugga

SEQ ID NO: 980956 - RNA, 22 nt, Human
uuauuaugguauuucuuugcag

SEQ ID NO: 980957 - RNA, 22 nt, Human
cucuugaaaauuggaacacaga

SEQ ID NO: 980958 - RNA, 22 nt, Human
aacuccugaggaaauggucuca

SEQ ID NO: 980959 - RNA, 22 nt, Human
acacucugugaggcauguaaug

SEQ ID NO: 980960 - RNA, 22 nt, Human
cugaaaugacgguuuggggcaa

SEQ ID NO: 980961 - RNA, 22 nt, Human
guauguauguauauguuuaaga

SEQ ID NO: 980962 - RNA, 22 nt, Human
aaagucauuggaauauuaauga

SEQ ID NO: 980963 - RNA, 22 nt, Human
uuuauauuucccaggauuggcc

SEQ ID NO: 980964 - RNA, 22 nt, Human
uggcaaacuggaggaagcccug

SEQ ID NO: 980965 - RNA, 22 nt, Human
agucauguguucaucuuucauu

SEQ ID NO: 980966 - RNA, 22 nt, Human
ucuccuggcaugugggucaucu

SEQ ID NO: 980967 - RNA, 22 nt, Human
cacucugccugauguuacaugg

SEQ ID NO: 980968 - RNA, 22 nt, Human
cuggccaagcacuggggucaaa

SEQ ID NO: 980969 - RNA, 20 nt, Human
auuaggauuuuaggucauca

SEQ ID NO: 980970 - RNA, 22 nt, Human
aaauauaguaaaugcauaguuc

SEQ ID NO: 980971 - RNA, 22 nt, Human
ccuccuggaaaaauucccuggc

SEQ ID NO: 980972 - RNA, 22 nt, Human
uaaguuaucggaguguguuuca

SEQ ID NO: 980973 - RNA, 22 nt, Human
cugggccaucuccuuugugugg

SEQ ID NO: 980974 - RNA, 22 nt, Human
acauaaugaaaugcagaaauca

SEQ ID NO: 980975 - RNA, 22 nt, Human
auuuggcaaauaauuugagggu

SEQ ID NO: 980976 - RNA, 22 nt, Human
acucugcuuaauuaaaaccagg

SEQ ID NO: 980977 - RNA, 22 nt, Human
aaacacaucauucaugucguca

SEQ ID NO: 980978 - RNA, 22 nt, Human
ucauaaaaugcuccugauauug

SEQ ID NO: 980979 - RNA, 22 nt, Human
ucuccugguacccuuccuagca

SEQ ID NO: 980980 - RNA, 22 nt, Human
ucuggccauggcaagccgagug

SEQ ID NO: 980981 - RNA, 22 nt, Human
ccuaggcccauuaauuccccuu

SEQ ID NO: 980982 - RNA, 22 nt, Human
auggccaacugaaaugaaagau

SEQ ID NO: 980983 - RNA, 22 nt, Human
augauugaaaaugacauugcca

SEQ ID NO: 980984 - RNA, 18 nt, Human
uagaauauaggucauucu

SEQ ID NO: 980985 - RNA, 22 nt, Human
cuuuauauccagauguuuggug

SEQ ID NO: 980986 - RNA, 22 nt, Human
gaguuuaaagcauacauauuuu

SEQ ID NO: 980987 - RNA, 19 nt, Human
ucucugcuucucuuggcau

SEQ ID NO: 980988 - RNA, 22 nt, Human
cuggccaguugccuuccugggu

SEQ ID NO: 980989 - RNA, 22 nt, Human
gcucugcugauccgcagccauc

SEQ ID NO: 980990 - RNA, 22 nt, Human
cuccacagcucaggcucagagu

SEQ ID NO: 980991 - RNA, 22 nt, Human
ccuccugggagagcacggaggg

SEQ ID NO: 980992 - RNA, 22 nt, Human
ucuggccagaaagacuugaugu

SEQ ID NO: 980993 - RNA, 22 nt, Human
acauaaaguacugagagacucu

SEQ ID NO: 980994 - RNA, 22 nt, Human
ccuggccaggcuccaaguacug

SEQ ID NO: 980995 - RNA, 22 nt, Human
cauucacaucuuguuccaucac

SEQ ID NO: 980996 - RNA, 22 nt, Human
aaagaauacccugggucauaaa

SEQ ID NO: 980997 - RNA, 22 nt, Human
acauuaaugaggugaugacaca

SEQ ID NO: 980998 - RNA, 22 nt, Human
gcuccuggcauccugcuuuuaa

SEQ ID NO: 980999 - RNA, 22 nt, Human
auguuuaaucggcugccuuucc

SEQ ID NO: 981000 - RNA, 22 nt, Human
aaugccuuggagagccuagagg

SEQ ID NO: 981001 - RNA, 22 nt, Human
guggccaagaaaauagaugcau

SEQ ID NO: 981002 - RNA, 22 nt, Human
gucugucucccugugacugaga

SEQ ID NO: 981003 - RNA, 22 nt, Human
ugcugaaauuagaacauugagg

SEQ ID NO: 981004 - RNA, 22 nt, Human
acucucugguauuggcaaguuu

SEQ ID NO: 981005 - RNA, 22 nt, Human
uagcuuuguuagaaugucuuca

SEQ ID NO: 981006 - RNA, 22 nt, Human
uuucaacauauaccauaaugcc

SEQ ID NO: 981007 - RNA, 22 nt, Human
cuggccaaugccuggggaauag

SEQ ID NO: 981008 - RNA, 22 nt, Human
uucagcaacucaaaccuauuag

SEQ ID NO: 981009 - RNA, 22 nt, Human
uacuccugcugauccugccagc

SEQ ID NO: 981010 - RNA, 18 nt, Human
ugcagcaagugcuaaaua

SEQ ID NO: 981011 - RNA, 22 nt, Human
auucacaaaaugauauagauac

SEQ ID NO: 981012 - RNA, 22 nt, Human
uauauuaaccauaggguucuag

SEQ ID NO: 981013 - RNA, 22 nt, Human
uugcauguagaauacucaacuu

SEQ ID NO: 981014 - RNA, 22 nt, Human
guggccaauuuccaucuguaag

SEQ ID NO: 981015 - RNA, 22 nt, Human
uuucacaagacagcuacuguug

SEQ ID NO: 981016 - RNA, 22 nt, Human
uaaagacaugguguaggugaac

SEQ ID NO: 981017 - RNA, 22 nt, Human
ucuccuggccuuuagguuaagg

SEQ ID NO: 981018 - RNA, 22 nt, Human
ucuuuuaaaagcccugcugucu

SEQ ID NO: 981019 - RNA, 22 nt, Human
ccacucugauuggucaccucug

SEQ ID NO: 981020 - RNA, 22 nt, Human
ucacaaaucauuuuaucugugu

SEQ ID NO: 981021 - RNA, 22 nt, Human
ugcuuccuauccacacaaugcc

SEQ ID NO: 981022 - RNA, 22 nt, Human
agacagugauguaagcaggagu

SEQ ID NO: 981023 - RNA, 22 nt, Human
acuuugaaggggaacauuuuaa

SEQ ID NO: 981024 - RNA, 22 nt, Human
uugaaauacugcauuguucagu

SEQ ID NO: 981025 - RNA, 22 nt, Human
auguuuuacccuuugcacaaac

SEQ ID NO: 981026 - RNA, 22 nt, Human
agcuauguauuuguguguuaaa

SEQ ID NO: 981027 - RNA, 22 nt, Human
cacaugugugcugaggacugug

SEQ ID NO: 981028 - RNA, 20 nt, Human
acauggaaggucaaacuauc

SEQ ID NO: 981029 - RNA, 22 nt, Human
caucuuuaacaauuuacaaugu

SEQ ID NO: 981030 - RNA, 22 nt, Human
ucuuuuuauauugacaaaaggu

SEQ ID NO: 981031 - RNA, 22 nt, Human
aaguaugugauacauguuaauu

SEQ ID NO: 981032 - RNA, 18 nt, Human
augcuuugcuuacguuau

SEQ ID NO: 981033 - RNA, 22 nt, Human
cuucugaggcagcuauucaguu

SEQ ID NO: 981034 - RNA, 20 nt, Human
uaacauaguccagagaacga

SEQ ID NO: 981035 - RNA, 22 nt, Human
guucacaagaugugguggggag

SEQ ID NO: 981036 - RNA, 22 nt, Human
ccuggccacccagccuuggcca

SEQ ID NO: 981037 - RNA, 22 nt, Human
aaauaguuacuucugcugucuu

SEQ ID NO: 981038 - RNA, 22 nt, Human
aacucugccagguuucaggagc

SEQ ID NO: 981039 - RNA, 22 nt, Human
guugaaauccuaacccccuagu

SEQ ID NO: 981040 - RNA, 22 nt, Human
ucagggaaauuuccauguguuu

SEQ ID NO: 981041 - RNA, 22 nt, Human
ggucugaguggugcugacucag

SEQ ID NO: 981042 - RNA, 22 nt, Human
cagcuccucacgagucuugaaa

SEQ ID NO: 981043 - RNA, 22 nt, Human
acacauuaugagcaguugucuu

SEQ ID NO: 981044 - RNA, 22 nt, Human
aggauuuuagauaagacagcaa

SEQ ID NO: 981045 - RNA, 22 nt, Human
cuuagaaaugcagauucucagg

SEQ ID NO: 981046 - RNA, 22 nt, Human
ucugcuguccuuuauauagauu

SEQ ID NO: 981047 - RNA, 22 nt, Human
aaacuccugggcucaagcaguu

SEQ ID NO: 981048 - RNA, 22 nt, Human
uuugauucuguaaaauaacagg

SEQ ID NO: 981049 - RNA, 22 nt, Human
ccuccugguugcaaugaaaugg

SEQ ID NO: 981050 - RNA, 22 nt, Human
cuauuuaugugcuauuuuguau

SEQ ID NO: 981051 - RNA, 22 nt, Human
acucugcuaucuuagcaaaagg

SEQ ID NO: 981052 - RNA, 22 nt, Human
gacauacagcauggucuaugaa

SEQ ID NO: 981053 - RNA, 17 nt, Human
uagaauauggugggcug

SEQ ID NO: 981054 - RNA, 22 nt, Human
aaauaguuguuuggaucaauaa

SEQ ID NO: 981055 - RNA, 22 nt, Human
uagaaacaucagcuaaccaaaa

SEQ ID NO: 981056 - RNA, 22 nt, Human
ugucccaguuggguauugaauu

SEQ ID NO: 981057 - RNA, 22 nt, Human
ugcccaaaccucuccuagcucu

SEQ ID NO: 981058 - RNA, 22 nt, Human
auggccaaaucuaaacuguugg

SEQ ID NO: 981059 - RNA, 22 nt, Human
ucuuaaaaguaugccaauugga

SEQ ID NO: 981060 - RNA, 22 nt, Human
augucacauggucaccucuagc

SEQ ID NO: 981061 - RNA, 16 nt, Human
gcucugcugaggccca

SEQ ID NO: 981062 - RNA, 22 nt, Human
uuggccaagacucauguccuau

SEQ ID NO: 981063 - RNA, 22 nt, Human
ccuguuuacaucaucaaggacu

SEQ ID NO: 981064 - RNA, 22 nt, Human
cuccugggcucauaucauucag

SEQ ID NO: 981065 - RNA, 22 nt, Human
uugcuucagagggagacacuuu

SEQ ID NO: 981066 - RNA, 22 nt, Human
uaguuuaaaaguuagggaugau

SEQ ID NO: 981067 - RNA, 22 nt, Human
uuguacacaauucuuaacauac

SEQ ID NO: 981068 - RNA, 22 nt, Human
ucuuuaaucauaaccaagaugg

SEQ ID NO: 981069 - RNA, 22 nt, Human
uuggcagagaguaugcugaaga

SEQ ID NO: 981070 - RNA, 22 nt, Human
aacauguugcuuuaauaauauu

SEQ ID NO: 981071 - RNA, 22 nt, Human
ccacucugauuuuggcuccacu

SEQ ID NO: 981072 - RNA, 22 nt, Human
cuucaaacccagauuaaaugca

SEQ ID NO: 981073 - RNA, 22 nt, Human
aauaugaauuauuguuacaagu

SEQ ID NO: 981074 - RNA, 22 nt, Human
gaauuacauuguuagccuuccu

SEQ ID NO: 981075 - RNA, 22 nt, Human
ugaagucuauuaacugauuucu

SEQ ID NO: 981076 - RNA, 22 nt, Human
gcuggccauucucuuugagaug

SEQ ID NO: 981077 - RNA, 22 nt, Human
cuccuggaccagggcuauuggg

SEQ ID NO: 981078 - RNA, 22 nt, Human
ucuggccaguagauguggguug

SEQ ID NO: 981079 - RNA, 22 nt, Human
ccacucugcugugcuccaugau

SEQ ID NO: 981080 - RNA, 22 nt, Human
accuacccuuagaucacaaggg

SEQ ID NO: 981081 - RNA, 21 nt, Human
ugcauuccuccauccaacagg

SEQ ID NO: 981082 - RNA, 22 nt, Human
gcccucugcacagcucugagca

SEQ ID NO: 981083 - RNA, 22 nt, Human
acauccugaagucagucauuug

SEQ ID NO: 981084 - RNA, 22 nt, Human
aauaggcaguuggauaugcaag

SEQ ID NO: 981085 - RNA, 22 nt, Human
aaacuacuaugggaauguacuu

SEQ ID NO: 981086 - RNA, 22 nt, Human
uccugagcuucaaaacacuuug

SEQ ID NO: 981087 - RNA, 22 nt, Human
ucauugaagugacugaaagauu

SEQ ID NO: 981088 - RNA, 22 nt, Human
aucaggaucagggcuagcagag

SEQ ID NO: 981089 - RNA, 20 nt, Human
uuggcagcaguuccaaguga

SEQ ID NO: 981090 - RNA, 22 nt, Human
uggcagcacuagguacugagcu

SEQ ID NO: 981091 - RNA, 22 nt, Human
aaguuuaagguggaaguggugg

SEQ ID NO: 981092 - RNA, 22 nt, Human
aacauuucauuggaagcuaugu

SEQ ID NO: 981093 - RNA, 18 nt, Human
uacaucuauauaguguuu

SEQ ID NO: 981094 - RNA, 22 nt, Human
uuuaggaucaaugagaaagucu

SEQ ID NO: 981095 - RNA, 20 nt, Human
caguuuaacuuugagcaguu

SEQ ID NO: 981096 - RNA, 22 nt, Human
ucacucuguguuugaacucaag

SEQ ID NO: 981097 - RNA, 22 nt, Human
uucaaaacaaucuguuugcauu

SEQ ID NO: 981098 - RNA, 22 nt, Human
ucagggaaugaugcacacaguu

SEQ ID NO: 981099 - RNA, 21 nt, Human
cuggccgaccccucugugcuc

SEQ ID NO: 981100 - RNA, 22 nt, Human
aggauguugcuauuggcagucu

SEQ ID NO: 981101 - RNA, 22 nt, Human
uuuauuagugcuuguaucacug

SEQ ID NO: 981102 - RNA, 22 nt, Human
cuucacaaucaccuuuucggaa

SEQ ID NO: 981103 - RNA, 22 nt, Human
augcuuccaaggcuaagacaag

SEQ ID NO: 981104 - RNA, 22 nt, Human
uaggauaggauggagacagaau

SEQ ID NO: 981105 - RNA, 20 nt, Human
guauuaggagguaaauguaa

SEQ ID NO: 981106 - RNA, 22 nt, Human
uaaaaguauacuuucaaaggag

SEQ ID NO: 981107 - RNA, 22 nt, Human
uauuagugaaagaauuaguuug

SEQ ID NO: 981108 - RNA, 21 nt, Human
cucuuuauauaguaaagauau

SEQ ID NO: 981109 - RNA, 22 nt, Human
acuccugggugcugaccagcgu

SEQ ID NO: 981110 - RNA, 22 nt, Human
cuuauaguaugauguugagaau

SEQ ID NO: 981111 - RNA, 22 nt, Human
auuauuagugauguuguuacug

SEQ ID NO: 981112 - RNA, 22 nt, Human
aaauguuagguuguacugaguc

SEQ ID NO: 981113 - RNA, 22 nt, Human
cuggcccagagcucuggccuuu

SEQ ID NO: 981114 - RNA, 22 nt, Human
agacauuuauugaacaccuagc

SEQ ID NO: 981115 - RNA, 22 nt, Human
uuuaggauaacuccaguuuucc

SEQ ID NO: 981116 - RNA, 22 nt, Human
uuugaaauguaucaguauaggu

SEQ ID NO: 981117 - RNA, 22 nt, Human
cuccugggcucaagugauccuc

SEQ ID NO: 981118 - RNA, 23 nt, Human
guuguaauggauaaugcaaauug

SEQ ID NO: 981119 - RNA, 22 nt, Human
guuaggauuauauaucccauga

SEQ ID NO: 981120 - RNA, 22 nt, Human
uagaauaugugguaggaucugg

SEQ ID NO: 981121 - RNA, 22 nt, Human
guggccaagaggggacuggaua

SEQ ID NO: 981122 - RNA, 22 nt, Human
ccugguccuuacgucauugcuu

SEQ ID NO: 981123 - RNA, 22 nt, Human
gaugcaaagcauuuuugugugu

SEQ ID NO: 981124 - RNA, 20 nt, Human
aggcucugcauuucugagug

SEQ ID NO: 981125 - RNA, 22 nt, Human
cugagccauccauaccagcuua

SEQ ID NO: 981126 - RNA, 22 nt, Human
cacagcuaggaggaaagcagag

SEQ ID NO: 981127 - RNA, 22 nt, Human
uuuaguagugacagauucuggg

SEQ ID NO: 981128 - RNA, 22 nt, Human
aggccaaauugaucaucuuuag

SEQ ID NO: 981129 - RNA, 22 nt, Human
gcuguuaggugcccugaccuug

SEQ ID NO: 981130 - RNA, 22 nt, Human
uuauuuaaaauguagguuggga

SEQ ID NO: 981131 - RNA, 22 nt, Human
uggaagagaaaggaguggaucu

SEQ ID NO: 981132 - RNA, 22 nt, Human
accuuauuaaaaugaugaugua

SEQ ID NO: 981133 - RNA, 20 nt, Human
ccagucucuaucagaaauaa

SEQ ID NO: 981134 - RNA, 22 nt, Human
cagcuccugggccaucuccuag

SEQ ID NO: 981135 - RNA, 22 nt, Human
uuauuaggaacucaggauuuuu

SEQ ID NO: 981136 - RNA, 22 nt, Human
augcugagugagugaaacccag

SEQ ID NO: 981137 - RNA, 22 nt, Human
uauuagguuggugcaacaguaa

SEQ ID NO: 981138 - RNA, 18 nt, Human
uccuggccacacuaccuu

SEQ ID NO: 981139 - RNA, 22 nt, Human
aacuccagugucagcugcaaug

SEQ ID NO: 981140 - RNA, 17 nt, Human
uuccacaauaguuuguc

SEQ ID NO: 981141 - RNA, 22 nt, Human
gaaauauuacaguggaggggau

SEQ ID NO: 981142 - RNA, 20 nt, Human
uccagggcaacuagagugug

SEQ ID NO: 981143 - RNA, 22 nt, Human
uauuagagaaaagauggaugug

SEQ ID NO: 981144 - RNA, 22 nt, Human
auauuagguuggugcaaaagua

SEQ ID NO: 981145 - RNA, 22 nt, Human
uggccacacccaccuagaggag

SEQ ID NO: 981146 - RNA, 22 nt, Human
uuuuaugauugagcuggcuaca

SEQ ID NO: 981147 - RNA, 22 nt, Human
gagccaggggucagcuccgagg

SEQ ID NO: 981148 - RNA, 22 nt, Human
auuaggcaauucugggcaucuc

SEQ ID NO: 981149 - RNA, 22 nt, Human
ucugccacuuuugcuuacuggg

SEQ ID NO: 981150 - RNA, 21 nt, Human
gggucugaauaucuggugcug

SEQ ID NO: 981151 - RNA, 22 nt, Human
acuccuggggcugccaucacag

SEQ ID NO: 981152 - RNA, 22 nt, Human
cuggccauguugccucugagac

SEQ ID NO: 981153 - RNA, 22 nt, Human
ugauaauauuuugaaucauaag

SEQ ID NO: 981154 - RNA, 22 nt, Human
cuuaggauuuaauuucagacuc

SEQ ID NO: 981155 - RNA, 22 nt, Human
gcuccuggagagauugagaaag

SEQ ID NO: 981156 - RNA, 22 nt, Human
gcagcauauuguacuggccugc

SEQ ID NO: 981157 - RNA, 22 nt, Human
aggcucugcagugcuggaggac

SEQ ID NO: 981158 - RNA, 22 nt, Human
auauuagggucucuaaauucua

SEQ ID NO: 981159 - RNA, 22 nt, Human
acagggaaguucugcaacagga

SEQ ID NO: 981160 - RNA, 22 nt, Human
gucucuaucauagcugaacccu

SEQ ID NO: 981161 - RNA, 22 nt, Human
acgcuuuuacuauuuugagcuc

SEQ ID NO: 981162 - RNA, 22 nt, Human
agagacugcgugucagcgcugg

SEQ ID NO: 981163 - RNA, 22 nt, Human
uaacuccagagaauccauccau

SEQ ID NO: 981164 - RNA, 22 nt, Human
augauugguggucagcaguaug

SEQ ID NO: 981165 - RNA, 22 nt, Human
aaauguggguaaugggacugga

SEQ ID NO: 981166 - RNA, 22 nt, Human
ucugcuguugccaugaguaaua

SEQ ID NO: 981167 - RNA, 22 nt, Human
uucaccuugaauaugucuuaaa

SEQ ID NO: 981168 - RNA, 22 nt, Human
ggaugcacgaaggcgccucgga

SEQ ID NO: 981169 - RNA, 22 nt, Human
uuggccaaacagaguucaacag

SEQ ID NO: 981170 - RNA, 19 nt, Human
ucauaaaaaugguaaccca

SEQ ID NO: 981171 - RNA, 22 nt, Human
gaucuuggggggaucaccaugg

SEQ ID NO: 981172 - RNA, 22 nt, Human
ucauugaauauggggccauaca

SEQ ID NO: 981173 - RNA, 22 nt, Human
aggcucugugcagccugcaucu

SEQ ID NO: 981174 - RNA, 22 nt, Human
uuuaugagcaccuuggcccaga

SEQ ID NO: 981175 - RNA, 22 nt, Human
uuauguagcagaaagauguuug

SEQ ID NO: 981176 - RNA, 22 nt, Human
guggccaaggcagagaaagagc

SEQ ID NO: 981177 - RNA, 22 nt, Human
uccuggucuacacugcauuggg

SEQ ID NO: 981178 - RNA, 22 nt, Human
uuaauguguguacaggauuuug

SEQ ID NO: 981179 - RNA, 18 nt, Human
uuaaggauaagcagacua

SEQ ID NO: 981180 - RNA, 22 nt, Human
auuuacagaagcauguaauagc

SEQ ID NO: 981181 - RNA, 17 nt, Human
auguuaauuucacauuu

SEQ ID NO: 981182 - RNA, 22 nt, Human
cugcugagaaaagacugaggga

SEQ ID NO: 981183 - RNA, 22 nt, Human
uaagaacaguagaacaguaggu

SEQ ID NO: 981184 - RNA, 22 nt, Human
ucuccuggaagaauaccacacu

SEQ ID NO: 981185 - RNA, 20 nt, Human
uccuggccuucucgggcagu

SEQ ID NO: 981186 - RNA, 22 nt, Human
uaagccugguucauaauuugcu

SEQ ID NO: 981187 - RNA, 22 nt, Human
acacagaguauuuagaaggggu

SEQ ID NO: 981188 - RNA, 22 nt, Human
auacagcagugaauaagauaaa

SEQ ID NO: 981189 - RNA, 22 nt, Human
acugccugcucauaacauugcu

SEQ ID NO: 981190 - RNA, 22 nt, Human
aggauguuaucugugcaggugg

SEQ ID NO: 981191 - RNA, 22 nt, Human
cugagggugcuauucuugccuu

SEQ ID NO: 981192 - RNA, 22 nt, Human
uuggcacagagcugcagccugg

SEQ ID NO: 981193 - RNA, 22 nt, Human
aggauuucugugccuggaaaau

SEQ ID NO: 981194 - RNA, 22 nt, Human
gcuggccauauauuuugcuguu

SEQ ID NO: 981195 - RNA, 22 nt, Human
accuuguuaaaaugaggauucu

SEQ ID NO: 981196 - RNA, 22 nt, Human
gaaauguguuguucauuucuaa

SEQ ID NO: 981197 - RNA, 22 nt, Human
acacuuuuagcuaugaguuaau

SEQ ID NO: 981198 - RNA, 22 nt, Human
aauuaggaaaugagaguauuug

SEQ ID NO: 981199 - RNA, 22 nt, Human
acagacauucagcuaagucuau

SEQ ID NO: 981200 - RNA, 22 nt, Human
cuucaugcugauauccucgaug

SEQ ID NO: 981201 - RNA, 22 nt, Human
guuuauuaacugucaagugauu

SEQ ID NO: 981202 - RNA, 17 nt, Human
acacagggagagggagc

SEQ ID NO: 981203 - RNA, 22 nt, Human
cucuggccugcagauccaugcu

SEQ ID NO: 981204 - RNA, 22 nt, Human
gcaauaaauaacauggaagaca

SEQ ID NO: 981205 - RNA, 22 nt, Human
cuucacaaauggccuagaguuc

SEQ ID NO: 981206 - RNA, 22 nt, Human
uaagucauaagucaugauguua

SEQ ID NO: 981207 - RNA, 22 nt, Human
ugugaaauucuugaaaugcaca

SEQ ID NO: 981208 - RNA, 22 nt, Human
ccuccuggcccugggccuggaa

SEQ ID NO: 981209 - RNA, 22 nt, Human
auucacaaauaacaggugcaga

SEQ ID NO: 981210 - RNA, 22 nt, Human
uagaaaugauuuugaugcuuca

SEQ ID NO: 981211 - RNA, 21 nt, Human
uggcagacaggaggagcucac

SEQ ID NO: 981212 - RNA, 22 nt, Human
guugaaaugagggauuaaucag

SEQ ID NO: 981213 - RNA, 22 nt, Human
cuggucaaggagagucucugca

SEQ ID NO: 981214 - RNA, 22 nt, Human
uaacccaauaauugguggccuu

SEQ ID NO: 981215 - RNA, 22 nt, Human
agggucuguggaugcaucuggg

SEQ ID NO: 981216 - RNA, 22 nt, Human
cauauaaauacaacauguguua

SEQ ID NO: 981217 - RNA, 22 nt, Human
aaauaguuagcccugcauauau

SEQ ID NO: 981218 - RNA, 22 nt, Human
cacuggcccauuccugucuggc

SEQ ID NO: 981219 - RNA, 20 nt, Human
uguuccaagcuaaugaauga

SEQ ID NO: 981220 - RNA, 22 nt, Human
ccugggccugaaaacauuucuc

SEQ ID NO: 981221 - RNA, 22 nt, Human
ugcauguggaccccuggugccu

SEQ ID NO: 981222 - RNA, 22 nt, Human
uauucacauucucaggccuggu

SEQ ID NO: 981223 - RNA, 16 nt, Human
auucacaaggcaucgg

SEQ ID NO: 981224 - RNA, 22 nt, Human
uaaccuuucaggcauguagguu

SEQ ID NO: 981225 - RNA, 22 nt, Human
aagaacauucgaacuauuuucu

SEQ ID NO: 981226 - RNA, 22 nt, Human
uuaauaggcuucuaacauagcu

SEQ ID NO: 981227 - RNA, 22 nt, Human
aucaggauggguuuggcuuagg

SEQ ID NO: 981228 - RNA, 19 nt, Human
uccaccuuucuucauuugg

SEQ ID NO: 981229 - RNA, 22 nt, Human
ucuguaaaacuucuuuguaaau

SEQ ID NO: 981230 - RNA, 22 nt, Human
auuaggaaauguguugcaagca

SEQ ID NO: 981231 - RNA, 22 nt, Human
auagaguccaaaguaugaauau

SEQ ID NO: 981232 - RNA, 22 nt, Human
ccuguuuaucuaucuagagaug

SEQ ID NO: 981233 - RNA, 22 nt, Human
cugaccaucauggugaaacccc

SEQ ID NO: 981234 - RNA, 22 nt, Human
uguaggauguaaggcaggcauc

SEQ ID NO: 981235 - RNA, 22 nt, Human
cuugaucuacauagugaaaccc

SEQ ID NO: 981236 - RNA, 22 nt, Human
auuauuagacuuauaugguagu

SEQ ID NO: 981237 - RNA, 22 nt, Human
uuggccaaggaccuuuuuggag

SEQ ID NO: 981238 - RNA, 22 nt, Human
ucacucugggcccuacugggcu

SEQ ID NO: 981239 - RNA, 19 nt, Human
uggucuaaaugugugcccc

SEQ ID NO: 981240 - RNA, 21 nt, Human
uggccaaaaccauauuauuaa

SEQ ID NO: 981241 - RNA, 21 nt, Human
auuuggcaaaggcgaugcaca

SEQ ID NO: 981242 - RNA, 22 nt, Human
uuauuuggaaauauggcuucug

SEQ ID NO: 981243 - RNA, 22 nt, Human
guuuaaguuucagaagcuaaga

SEQ ID NO: 981244 - RNA, 22 nt, Human
uuggccaagggaucgagguugg

SEQ ID NO: 981245 - RNA, 20 nt, Human
ugagccaaacgaugaagagc

SEQ ID NO: 981246 - RNA, 16 nt, Human
aggccaaaaaggggca

SEQ ID NO: 981247 - RNA, 22 nt, Human
ugaaacaggaaguaaacagaca

SEQ ID NO: 981248 - RNA, 22 nt, Human
gcucugcuguguuuguucagca

SEQ ID NO: 981249 - RNA, 22 nt, Human
ucuccuggccgggcuguccccu

SEQ ID NO: 981250 - RNA, 22 nt, Human
ucacuaagugccgaguuuaguu

SEQ ID NO: 981251 - RNA, 22 nt, Human
uuucacaaguuucaggauucug

SEQ ID NO: 981252 - RNA, 22 nt, Human
uggucaacaggcagggaugaaa

SEQ ID NO: 981253 - RNA, 22 nt, Human
ccuggccagcagccccuuccuc

SEQ ID NO: 981254 - RNA, 22 nt, Human
ugcugagguuucgucugcuugc

SEQ ID NO: 981255 - RNA, 22 nt, Human
guauuagggccaaaggcaggaa

SEQ ID NO: 981256 - RNA, 22 nt, Human
auagaauaaggcacagauucuu

SEQ ID NO: 981257 - RNA, 22 nt, Human
uaguuauuauuguuacuaucag

SEQ ID NO: 981258 - RNA, 22 nt, Human
guaauaaugguccccaaacacu

SEQ ID NO: 981259 - RNA, 23 nt, Human
cuccuggaggguccggcccugcc

SEQ ID NO: 981260 - RNA, 22 nt, Human
uucagcaagugucucuacuguc

SEQ ID NO: 981261 - RNA, 22 nt, Human
uuuaucagagauauguguggac

SEQ ID NO: 981262 - RNA, 22 nt, Human
cugggccagaccuuguggucuu

SEQ ID NO: 981263 - RNA, 22 nt, Human
cuuuguaucuaaauaucuugaa

SEQ ID NO: 981264 - RNA, 18 nt, Human
accuucauuccuuugccu

SEQ ID NO: 981265 - RNA, 22 nt, Human
uguguuaaguauuugauacacu

SEQ ID NO: 981266 - RNA, 22 nt, Human
aacauuucagcaaauaagaaca

SEQ ID NO: 981267 - RNA, 22 nt, Human
uaaauaaguucuucauuguuug

SEQ ID NO: 981268 - RNA, 22 nt, Human
cugagccaugagccugcgccca

SEQ ID NO: 981269 - RNA, 22 nt, Human
aguaacucauguaaaccucaca

SEQ ID NO: 981270 - RNA, 22 nt, Human
cugcuaaaccucucugagagcu

SEQ ID NO: 981271 - RNA, 22 nt, Human
uuauuagguuuacauaaagguu

SEQ ID NO: 981272 - RNA, 22 nt, Human
uaacugauauugaaaaacauca

SEQ ID NO: 981273 - RNA, 20 nt, Human
guauuagguguuccucuuuc

SEQ ID NO: 981274 - RNA, 22 nt, Human
uuuuuuauaucaacugaagucu

SEQ ID NO: 981275 - RNA, 22 nt, Human
ucucugcuugguguaugugagu

SEQ ID NO: 981276 - RNA, 22 nt, Human
augcugagcagagcugacaugc

SEQ ID NO: 981277 - RNA, 22 nt, Human
cauuaaauuccuuguucucaaa

SEQ ID NO: 981278 - RNA, 23 nt, Human
uccugaggguuucccagccuugg

SEQ ID NO: 981279 - RNA, 22 nt, Human
acuggccagaacuaagucacau

SEQ ID NO: 981280 - RNA, 22 nt, Human
acaaaaagggagaugagguaga

SEQ ID NO: 981281 - RNA, 22 nt, Human
aacauucaccucuaccuccuuc

SEQ ID NO: 981282 - RNA, 22 nt, Human
guuaauaaagguauagaaucag

SEQ ID NO: 981283 - RNA, 20 nt, Human
guguuucaugugauacaaug

SEQ ID NO: 981284 - RNA, 22 nt, Human
acucugcucuguauuucacugu

SEQ ID NO: 981285 - RNA, 22 nt, Human
gcuuccuaaaugcacagggcag

SEQ ID NO: 981286 - RNA, 22 nt, Human
uccuggccucacaguccugggu

SEQ ID NO: 981287 - RNA, 22 nt, Human
aagucaaaccuugcucacagga

SEQ ID NO: 981288 - RNA, 22 nt, Human
aacugcauuuaacaaauacucu

SEQ ID NO: 981289 - RNA, 22 nt, Human
aaaacaguuauaaacagaguca

SEQ ID NO: 981290 - RNA, 22 nt, Human
gagaaggaguagcugaccuggg

SEQ ID NO: 981291 - RNA, 22 nt, Human
gacagguggggaaacuaaggua

SEQ ID NO: 981292 - RNA, 22 nt, Human
uggcagcagaacaugaaaccca

SEQ ID NO: 981293 - RNA, 23 nt, Human
uggcuaaaggcucuaguccugcu

SEQ ID NO: 981294 - RNA, 22 nt, Human
uggcagcaccagcaguguccuu

SEQ ID NO: 981295 - RNA, 22 nt, Human
uucaaaacagcuagauauugga

SEQ ID NO: 981296 - RNA, 22 nt, Human
ccuccuggggugaaggauggga

SEQ ID NO: 981297 - RNA, 22 nt, Human
ccuggaccaaacacuggccugg

SEQ ID NO: 981298 - RNA, 22 nt, Human
aaagucauacauggugcuuacu

SEQ ID NO: 981299 - RNA, 22 nt, Human
uuggccaaaaaagucauuagaa

SEQ ID NO: 981300 - RNA, 22 nt, Human
ugaccaaaaaauucccugugag

SEQ ID NO: 981301 - RNA, 22 nt, Human
agacaggagagggaacugccgg

SEQ ID NO: 981302 - RNA, 22 nt, Human
ugucuuaagaaauugcauuugu

SEQ ID NO: 981303 - RNA, 22 nt, Human
aacaguaucuuuuaucagaaau

SEQ ID NO: 981304 - RNA, 22 nt, Human
ccuggccacagggcucugcauu

SEQ ID NO: 981305 - RNA, 22 nt, Human
ucugaagccuuuguacaggccu

SEQ ID NO: 981306 - RNA, 22 nt, Human
uagggauguaaacauaguaauu

SEQ ID NO: 981307 - RNA, 22 nt, Human
gcuccuggauguucaagucggc

SEQ ID NO: 981308 - RNA, 19 nt, Human
uccucagugacaaccucag

SEQ ID NO: 981309 - RNA, 22 nt, Human
uauuuauucauucagcaagcau

SEQ ID NO: 981310 - RNA, 22 nt, Human
aauaugucugcuaauuguuucu

SEQ ID NO: 981311 - RNA, 22 nt, Human
auaaaaaggacagauguggucu

SEQ ID NO: 981312 - RNA, 22 nt, Human
uguuccuguguggaaaagggcc

SEQ ID NO: 981313 - RNA, 22 nt, Human
gacuccugggccucugagaggc

SEQ ID NO: 981314 - RNA, 22 nt, Human
ccuucuuaaacaucauuuuggc

SEQ ID NO: 981315 - RNA, 18 nt, Human
uuuaugagcugugggacc

SEQ ID NO: 981316 - RNA, 22 nt, Human
uuauuagggugguuuauguucu

SEQ ID NO: 981317 - RNA, 22 nt, Human
gaauauuaguaucaguuauacc

SEQ ID NO: 981318 - RNA, 22 nt, Human
acaccuuuuauucgccaggcac

SEQ ID NO: 981319 - RNA, 22 nt, Human
acucugcuuauugcugcaggca

SEQ ID NO: 981320 - RNA, 22 nt, Human
guuauaaaaugcacaguuguuu

SEQ ID NO: 981321 - RNA, 22 nt, Human
acuccugguuuguguccuggcu

SEQ ID NO: 981322 - RNA, 22 nt, Human
caaaaguaauuaugguuuuugc

SEQ ID NO: 981323 - RNA, 22 nt, Human
ucacucugacuuggccuccaac

SEQ ID NO: 981324 - RNA, 22 nt, Human
uacucugccacuaggaguucug

SEQ ID NO: 981325 - RNA, 22 nt, Human
auauugaacccuacagacugua

SEQ ID NO: 981326 - RNA, 18 nt, Human
acuaugcugaauaaaugg

SEQ ID NO: 981327 - RNA, 22 nt, Human
uaggauaugugaaaucauauua

SEQ ID NO: 981328 - RNA, 22 nt, Human
aacuaaaucuggcauuuagagc

SEQ ID NO: 981329 - RNA, 22 nt, Human
agccuugaguucaagugcuggc

SEQ ID NO: 981330 - RNA, 22 nt, Human
uuauguagugacugacuguuag

SEQ ID NO: 981331 - RNA, 22 nt, Human
ucuccuggguaaaaggguugau

SEQ ID NO: 981332 - RNA, 22 nt, Human
gggccaaggggagcuggaaggg

SEQ ID NO: 981333 - RNA, 22 nt, Human
aggcauguauaugugcacaugu

SEQ ID NO: 981334 - RNA, 22 nt, Human
agccaugugucuuuauucuguu

SEQ ID NO: 981335 - RNA, 22 nt, Human
ugaaagcagugccaugauuaug

SEQ ID NO: 981336 - RNA, 22 nt, Human
gcucugcuggagggaaagagaa

SEQ ID NO: 981337 - RNA, 22 nt, Human
aaugaaauguagcuuauccaua

SEQ ID NO: 981338 - RNA, 22 nt, Human
cauuuaaagguuguggguaaaa

SEQ ID NO: 981339 - RNA, 22 nt, Human
uuuuauuaucuuugaaugggac

SEQ ID NO: 981340 - RNA, 22 nt, Human
acauacaucaaguaucacaaga

SEQ ID NO: 981341 - RNA, 22 nt, Human
aauguacacugaaagccuauca

SEQ ID NO: 981342 - RNA, 20 nt, Human
uuaggcauuuggauuggcuu

SEQ ID NO: 981343 - RNA, 22 nt, Human
ugaaagcacugauucucaacuc

SEQ ID NO: 981344 - RNA, 22 nt, Human
caaaaguaauugcaguuuuugc

SEQ ID NO: 981345 - RNA, 22 nt, Human
guucacaauuuuuacugauugg

SEQ ID NO: 981346 - RNA, 22 nt, Human
uuaggcauuggaaggucagcuu

SEQ ID NO: 981347 - RNA, 22 nt, Human
gcucugcugagauaucugggag

SEQ ID NO: 981348 - RNA, 22 nt, Human
uaaaauguuugcaagagaccag

SEQ ID NO: 981349 - RNA, 22 nt, Human
aacaaaccuucccuauacgucu

SEQ ID NO: 981350 - RNA, 22 nt, Human
acauuuuuuagagucccacauu

SEQ ID NO: 981351 - RNA, 22 nt, Human
auucacaaguugauggauauuu

SEQ ID NO: 981352 - RNA, 22 nt, Human
uuuauuguuguuagucauaagu

SEQ ID NO: 981353 - RNA, 22 nt, Human
ugguccaagugagguggccucu

SEQ ID NO: 981354 - RNA, 19 nt, Human
acuuccugcccgcuccuuu

SEQ ID NO: 981355 - RNA, 22 nt, Human
cugggccauggaagucucugcc

SEQ ID NO: 981356 - RNA, 22 nt, Human
ucacucugucccccauugagau

SEQ ID NO: 981357 - RNA, 23 nt, Human
ucaaacauauugugagacacagg

SEQ ID NO: 981358 - RNA, 22 nt, Human
gcagggaaggggcaugcuggag

SEQ ID NO: 981359 - RNA, 22 nt, Human
agcauaaguugguacagccacu

SEQ ID NO: 981360 - RNA, 20 nt, Human
ucacucugaugcuagggugg

SEQ ID NO: 981361 - RNA, 22 nt, Human
aaacacagggauauauauucca

SEQ ID NO: 981362 - RNA, 19 nt, Human
uuucacaaagagagcguga

SEQ ID NO: 981363 - RNA, 22 nt, Human
aacuaacagucauuaaaagaac

SEQ ID NO: 981364 - RNA, 22 nt, Human
cuguuacacggaccuucaaauc

SEQ ID NO: 981365 - RNA, 22 nt, Human
ccuuuuauacucagugauauca

SEQ ID NO: 981366 - RNA, 23 nt, Human
uggccacagggugcuccauugua

SEQ ID NO: 981367 - RNA, 22 nt, Human
cagccuuuuccauguauuguug

SEQ ID NO: 981368 - RNA, 22 nt, Human
uuauuuagucuagaugaauuuu

SEQ ID NO: 981369 - RNA, 22 nt, Human
auuauuaggacuacugggguug

SEQ ID NO: 981370 - RNA, 22 nt, Human
auuagcauauuaaauagucauu

SEQ ID NO: 981371 - RNA, 22 nt, Human
gagcacugauuuauuuuugucu

SEQ ID NO: 981372 - RNA, 22 nt, Human
auaaugugauauuucauuuaca

SEQ ID NO: 981373 - RNA, 21 nt, Human
uucugagcacucaucacuguc

SEQ ID NO: 981374 - RNA, 22 nt, Human
acugucuucaaaugaauauauu

SEQ ID NO: 981375 - RNA, 22 nt, Human
ugaaauguaaauaggacuagaa

SEQ ID NO: 981376 - RNA, 22 nt, Human
cguggccagccauuuccuggaa

SEQ ID NO: 981377 - RNA, 22 nt, Human
uacaccuuaaucauaugugucu

SEQ ID NO: 981378 - RNA, 22 nt, Human
uuacuggcugggccugagggcu

SEQ ID NO: 981379 - RNA, 22 nt, Human
acuccuggguugcaguccucaa

SEQ ID NO: 981380 - RNA, 22 nt, Human
gacuccugccuccucuguuugc

SEQ ID NO: 981381 - RNA, 22 nt, Human
cggccaaauugcagagagaagc

SEQ ID NO: 981382 - RNA, 22 nt, Human
aggagacaucuaacuguagguu

SEQ ID NO: 981383 - RNA, 22 nt, Human
auuaggauuuuguccaaguagc

SEQ ID NO: 981384 - RNA, 22 nt, Human
uaccuucaccagcgaauguuug

SEQ ID NO: 981385 - RNA, 22 nt, Human
gcuuagaaguuccuauaaaaug

SEQ ID NO: 981386 - RNA, 22 nt, Human
acaccuuugugaagugaugaug

SEQ ID NO: 981387 - RNA, 22 nt, Human
gagaggugaauguggaugccac

SEQ ID NO: 981388 - RNA, 22 nt, Human
uagaacaugugaaaauauagcc

SEQ ID NO: 981389 - RNA, 22 nt, Human
uuauuaggaaaaggucagaugu

SEQ ID NO: 981390 - RNA, 22 nt, Human
uuuaauugauucacagucugua

SEQ ID NO: 981391 - RNA, 22 nt, Human
ccucugcucugguccaugugcu

SEQ ID NO: 981392 - RNA, 21 nt, Human
ucuuggccuaaguucacugaa

SEQ ID NO: 981393 - RNA, 22 nt, Human
uaauaaaugaaagugcuggcau

SEQ ID NO: 981394 - RNA, 22 nt, Human
uauucacaaaaugagguccuca

SEQ ID NO: 981395 - RNA, 22 nt, Human
uuuuaguuguaguuggugagga

SEQ ID NO: 981396 - RNA, 22 nt, Human
ucacucugccuccauauuacua

SEQ ID NO: 981397 - RNA, 22 nt, Human
auaaugugaagauaaugcaaga

SEQ ID NO: 981398 - RNA, 19 nt, Human
gcuggccacgccccaguug

SEQ ID NO: 981399 - RNA, 22 nt, Human
ucauguuuggaguuugcucacu

SEQ ID NO: 981400 - RNA, 22 nt, Human
auggccaagaaguauuccugac

SEQ ID NO: 981401 - RNA, 22 nt, Human
guuauauaagacaaaucagagu

SEQ ID NO: 981402 - RNA, 18 nt, Human
acaguaaagaaaggaauu

SEQ ID NO: 981403 - RNA, 22 nt, Human
ccuccugggcuccugucugcac

SEQ ID NO: 981404 - RNA, 22 nt, Human
aaaagucugcucucauuucaga

SEQ ID NO: 981405 - RNA, 16 nt, Human
gcuccugggcccucga

SEQ ID NO: 981406 - RNA, 22 nt, Human
cucugcugggauguaaagucuu

SEQ ID NO: 981407 - RNA, 22 nt, Human
cagccuuuaagcuuggauaggu

SEQ ID NO: 981408 - RNA, 22 nt, Human
gaaacacaugcagcuccauaga

SEQ ID NO: 981409 - RNA, 22 nt, Human
aagccuugcagcauuaggcucu

SEQ ID NO: 981410 - RNA, 22 nt, Human
uuuauuauccaguguugucaug

SEQ ID NO: 981411 - RNA, 22 nt, Human
gaaauauuguacuggagauguu

SEQ ID NO: 981412 - RNA, 22 nt, Human
uggccacaguguccagcagcag

SEQ ID NO: 981413 - RNA, 22 nt, Human
acagaccucuagauuacauuug

SEQ ID NO: 981414 - RNA, 21 nt, Human
uccuggcccacucuaucccca

SEQ ID NO: 981415 - RNA, 22 nt, Human
uccugggcuuaagugauccucc

SEQ ID NO: 981416 - RNA, 22 nt, Human
ucuggccaacaaaaacuaaguc

SEQ ID NO: 981417 - RNA, 22 nt, Human
auucacaaaugcugccccauuc

SEQ ID NO: 981418 - RNA, 22 nt, Human
ugcaugugcccacucuggcuua

SEQ ID NO: 981419 - RNA, 22 nt, Human
uugcaaauauguucuccuauuc

SEQ ID NO: 981420 - RNA, 22 nt, Human
augugagguaucuaggucuucg

SEQ ID NO: 981421 - RNA, 22 nt, Human
uccuggccgccgcguggggccg

SEQ ID NO: 981422 - RNA, 20 nt, Human
ucacagaaacaaauagagaa

SEQ ID NO: 981423 - RNA, 22 nt, Human
agggucugcauuccaacuuggg

SEQ ID NO: 981424 - RNA, 22 nt, Human
guauuaggugguggaauuguag

SEQ ID NO: 981425 - RNA, 22 nt, Human
aagaguaugcaugcauguuugu

SEQ ID NO: 981426 - RNA, 22 nt, Human
uucugagcuacauaguacuggg

SEQ ID NO: 981427 - RNA, 20 nt, Human
uauuaggaaggaggaaggaa

SEQ ID NO: 981428 - RNA, 22 nt, Human
cuccuggaagcccgcccugcug

SEQ ID NO: 981429 - RNA, 22 nt, Human
cuccugggaauuuaguugugag

SEQ ID NO: 981430 - RNA, 22 nt, Human
agagucuuuugucaguaauguu

SEQ ID NO: 981431 - RNA, 22 nt, Human
auucggaucauguguauguguu

SEQ ID NO: 981432 - RNA, 22 nt, Human
acuccaggguuuugcaccugga

SEQ ID NO: 981433 - RNA, 22 nt, Human
uuuauguaguuacggacuauca

SEQ ID NO: 981434 - RNA, 22 nt, Human
auauauaagcugaugagccaca

SEQ ID NO: 981435 - RNA, 22 nt, Human
aauucacagaaccauggugcuc

SEQ ID NO: 981436 - RNA, 22 nt, Human
ccuccugggacaggcuggcaca

SEQ ID NO: 981437 - RNA, 22 nt, Human
uuauuagagauauuugguuagg

SEQ ID NO: 981438 - RNA, 22 nt, Human
ucaaauacauggucaaucaacu

SEQ ID NO: 981439 - RNA, 22 nt, Human
uaugcauuuuauagugcaaagc

SEQ ID NO: 981440 - RNA, 22 nt, Human
cagacagggaccucgcuccaga

SEQ ID NO: 981441 - RNA, 22 nt, Human
agaauaugaggaaacugugaau

SEQ ID NO: 981442 - RNA, 22 nt, Human
auuauaaagaacaugugugugg

SEQ ID NO: 981443 - RNA, 22 nt, Human
cuucuuaucaaguggcaaaucu

SEQ ID NO: 981444 - RNA, 17 nt, Human
cagcucugcaucuuccu

SEQ ID NO: 981445 - RNA, 22 nt, Human
caaaaguaauugugguuuucac

SEQ ID NO: 981446 - RNA, 22 nt, Human
ucugacauuuugagaaugacau

SEQ ID NO: 981447 - RNA, 22 nt, Human
aagaauaaauuaagauacuuag

SEQ ID NO: 981448 - RNA, 22 nt, Human
cugccacuagcuuucacaucuu

SEQ ID NO: 981449 - RNA, 22 nt, Human
caccuuuugugucugcguuugu

SEQ ID NO: 981450 - RNA, 22 nt, Human
cugggccaguuaugucucaucu

SEQ ID NO: 981451 - RNA, 22 nt, Human
uuccuggcugaacugaacuccu

SEQ ID NO: 981452 - RNA, 22 nt, Human
auuagggaaggauuuggccuga

SEQ ID NO: 981453 - RNA, 22 nt, Human
ucuuugcacacaucccuucccg

SEQ ID NO: 981454 - RNA, 22 nt, Human
ccuggccaaucuagggcuguua

SEQ ID NO: 981455 - RNA, 22 nt, Human
uagaacaugcucauguauaaau

SEQ ID NO: 981456 - RNA, 22 nt, Human
gaaauauuucucuugagccccu

SEQ ID NO: 981457 - RNA, 22 nt, Human
gcuggccaggaagagucucaga

SEQ ID NO: 981458 - RNA, 22 nt, Human
gagggaaggacccauuuuaagu

SEQ ID NO: 981459 - RNA, 21 nt, Human
acacauuaugagcauagacuc

SEQ ID NO: 981460 - RNA, 22 nt, Human
ugucuuaauuuggaugauguuu

SEQ ID NO: 981461 - RNA, 22 nt, Human
ccuggccacucagguguggggc

SEQ ID NO: 981462 - RNA, 17 nt, Human
auucuuugaugucucug

SEQ ID NO: 981463 - RNA, 22 nt, Human
uccaaagaagucacaaacgaag

SEQ ID NO: 981464 - RNA, 22 nt, Human
aacacauaggcagagcaugaca

SEQ ID NO: 981465 - RNA, 22 nt, Human
aaauaugugaucagugaauaaa

SEQ ID NO: 981466 - RNA, 17 nt, Human
acuccuggucugaaggg

SEQ ID NO: 981467 - RNA, 22 nt, Human
cuguaaaacugcuuaaguaugc

SEQ ID NO: 981468 - RNA, 22 nt, Human
guacacucccccugugaaguug

SEQ ID NO: 981469 - RNA, 22 nt, Human
caccguuugguuuggauuuaca

SEQ ID NO: 981470 - RNA, 22 nt, Human
gcaccuuuggaaugaaaaguug

SEQ ID NO: 981471 - RNA, 22 nt, Human
uggucaaaaacucucaguggac

SEQ ID NO: 981472 - RNA, 22 nt, Human
aauaauguugacgauagucuua

SEQ ID NO: 981473 - RNA, 22 nt, Human
cugagccuguguuucucuggca

SEQ ID NO: 981474 - RNA, 22 nt, Human
ucacucugguccauccgagagc

SEQ ID NO: 981475 - RNA, 22 nt, Human
gcuccuggccagcacagggccc

SEQ ID NO: 981476 - RNA, 22 nt, Human
ucuggccaggauggcaagacca

SEQ ID NO: 981477 - RNA, 22 nt, Human
uuaaaagaauccuguuauccuc

SEQ ID NO: 981478 - RNA, 22 nt, Human
gaaucauagaacauuaauagaa

SEQ ID NO: 981479 - RNA, 22 nt, Human
uugaaugaccaugaugcaaggg

SEQ ID NO: 981480 - RNA, 22 nt, Human
auauuaggaguuaaauguauua

SEQ ID NO: 981481 - RNA, 22 nt, Human
auauauaaccuggauaaggcuu

SEQ ID NO: 981482 - RNA, 18 nt, Human
gcuccuggagucugacuc

SEQ ID NO: 981483 - RNA, 22 nt, Human
guucacaagcugauugucuuuc

SEQ ID NO: 981484 - RNA, 22 nt, Human
uuauuagguuauucucuguacu

SEQ ID NO: 981485 - RNA, 22 nt, Human
aaaaauguuaucuacuguccga

SEQ ID NO: 981486 - RNA, 19 nt, Human
uuucuuaggccuuuggccu

SEQ ID NO: 981487 - RNA, 22 nt, Human
aacugcuggggaggccaaacuc

SEQ ID NO: 981488 - RNA, 23 nt, Human
auagucauguaaaauauuugaag

SEQ ID NO: 981489 - RNA, 22 nt, Human
cagcuguggcugccacugcucc

SEQ ID NO: 981490 - RNA, 22 nt, Human
uuucacaaaugucuuuaacuug

SEQ ID NO: 981491 - RNA, 22 nt, Human
ccuuuuauaaaguuguauugaa

SEQ ID NO: 981492 - RNA, 22 nt, Human
aaaaaguauuggccaugguuga

SEQ ID NO: 981493 - RNA, 22 nt, Human
acauucuuaacaguuaaaaacu

SEQ ID NO: 981494 - RNA, 22 nt, Human
aaauauuagggagaacagggac

SEQ ID NO: 981495 - RNA, 22 nt, Human
uaaaguguccuagcuaggaggc

SEQ ID NO: 981496 - RNA, 20 nt, Human
acuccugguaacuuuuguga

SEQ ID NO: 981497 - RNA, 22 nt, Human
uuggccaagugguuaaucucca

SEQ ID NO: 981498 - RNA, 22 nt, Human
gccauaaauugcuggucaaaau

SEQ ID NO: 981499 - RNA, 22 nt, Human
aauaauuagugggacagagaac

SEQ ID NO: 981500 - RNA, 22 nt, Human
cacaguuucuauaggucagaau

SEQ ID NO: 981501 - RNA, 22 nt, Human
gucauggaggauugugaguggu

SEQ ID NO: 981502 - RNA, 22 nt, Human
uaggaugaaaauccagcuuaua

SEQ ID NO: 981503 - RNA, 22 nt, Human
ccuuuuaugaacuugagcaggu

SEQ ID NO: 981504 - RNA, 22 nt, Human
cucugcuaagcaugaacaauua

SEQ ID NO: 981505 - RNA, 22 nt, Human
caccucuuugauuugaggcaag

SEQ ID NO: 981506 - RNA, 22 nt, Human
uuggcacacaguaagcccuaag

SEQ ID NO: 981507 - RNA, 22 nt, Human
aaaaaugugaccacaggguguu

SEQ ID NO: 981508 - RNA, 22 nt, Human
acauuucuuucuauucaguagc

SEQ ID NO: 981509 - RNA, 22 nt, Human
auuacaaaagaagggagaaggu

SEQ ID NO: 981510 - RNA, 22 nt, Human
auuaggauguuccuaugcacau

SEQ ID NO: 981511 - RNA, 22 nt, Human
uauccaaacauauagucucucu

SEQ ID NO: 981512 - RNA, 22 nt, Human
uuuaauguucaucucaaaggau

SEQ ID NO: 981513 - RNA, 22 nt, Human
uuguuuaaaauguagcaagaaa

SEQ ID NO: 981514 - RNA, 22 nt, Human
aauaauaagauacuaagggagu

SEQ ID NO: 981515 - RNA, 23 nt, Human
agggcacugaagcuggaauuggg

SEQ ID NO: 981516 - RNA, 22 nt, Human
ccagacaggaacacacaucucc

SEQ ID NO: 981517 - RNA, 22 nt, Human
ccuccuggauggauuuggugga

SEQ ID NO: 981518 - RNA, 22 nt, Human
aggaucuugcuguagaggauag

SEQ ID NO: 981519 - RNA, 21 nt, Human
acagacagggccagugucccc

SEQ ID NO: 981520 - RNA, 22 nt, Human
gaacccaaccucacuuggggua

SEQ ID NO: 981521 - RNA, 22 nt, Human
uggcucaagugauccuccugcc

SEQ ID NO: 981522 - RNA, 22 nt, Human
aucauuuaaaacaagucucuau

SEQ ID NO: 981523 - RNA, 23 nt, Human
uuucaacaaugcuuagagaaaac

SEQ ID NO: 981524 - RNA, 18 nt, Human
aacuucaacuacaaugga

SEQ ID NO: 981525 - RNA, 22 nt, Human
aacuccuguucuaugacaagag

SEQ ID NO: 981526 - RNA, 22 nt, Human
cuggccaagcuucucuaagcag

SEQ ID NO: 981527 - RNA, 22 nt, Human
uuucuggcagcgggacaggggu

SEQ ID NO: 981528 - RNA, 22 nt, Human
uaaaagacauauaacuguagga

SEQ ID NO: 981529 - RNA, 18 nt, Human
ucuccuggguaggggccu

SEQ ID NO: 981530 - RNA, 22 nt, Human
uauugaaauccauuacguucuu

SEQ ID NO: 981531 - RNA, 22 nt, Human
cuauuaggcuuccauuucaugc

SEQ ID NO: 981532 - RNA, 22 nt, Human
cauugguagaguuuguuuuaua

SEQ ID NO: 981533 - RNA, 22 nt, Human
ugacauaaaccagugagcaaaa

SEQ ID NO: 981534 - RNA, 22 nt, Human
cugugccaucugcacucucguc

SEQ ID NO: 981535 - RNA, 22 nt, Human
aauucacauauacauuauuccu

SEQ ID NO: 981536 - RNA, 22 nt, Human
agcaugcgcuugaucagcucca

SEQ ID NO: 981537 - RNA, 22 nt, Human
ucucugcuaagauugugucuag

SEQ ID NO: 981538 - RNA, 22 nt, Human
gcuagaaaucgacuucagaauu

SEQ ID NO: 981539 - RNA, 22 nt, Human
acuggccaggcagcaguagcuu

SEQ ID NO: 981540 - RNA, 22 nt, Human
acagucauuagauacaaugucu

SEQ ID NO: 981541 - RNA, 22 nt, Human
gaccuuuuuacuguguacgcug

SEQ ID NO: 981542 - RNA, 22 nt, Human
gaauuacaaagugagacaagcu

SEQ ID NO: 981543 - RNA, 22 nt, Human
uuuuaucugugacaucuggcag

SEQ ID NO: 981544 - RNA, 22 nt, Human
aaguuuguuguacauguuagua

SEQ ID NO: 981545 - RNA, 19 nt, Human
uggcagcauugguaccuug

SEQ ID NO: 981546 - RNA, 22 nt, Human
aaagcuauuugugaguuauaga

SEQ ID NO: 981547 - RNA, 22 nt, Human
auuauuagauucuuaauuguaa

SEQ ID NO: 981548 - RNA, 22 nt, Human
gauauagguucauaguguuaca

SEQ ID NO: 981549 - RNA, 22 nt, Human
uccuggccuugcuccugaugcc

SEQ ID NO: 981550 - RNA, 22 nt, Human
uaguuuaauggucaacuaauga

SEQ ID NO: 981551 - RNA, 22 nt, Human
aaauauaauuucugccucaaua

SEQ ID NO: 981552 - RNA, 22 nt, Human
acacauuauaggcaaucaaaag

SEQ ID NO: 981553 - RNA, 22 nt, Human
cuuccugggcaauguucugcuu

SEQ ID NO: 981554 - RNA, 22 nt, Human
auuaggauguguauauuguguu

SEQ ID NO: 981555 - RNA, 22 nt, Human
ccuggccagaggcgugccugug

SEQ ID NO: 981556 - RNA, 22 nt, Human
auucacaauagcagcuugcaug

SEQ ID NO: 981557 - RNA, 21 nt, Human
cauuucaugauuauagaaaug

SEQ ID NO: 981558 - RNA, 22 nt, Human
auccauggaggacaagagcaau

SEQ ID NO: 981559 - RNA, 20 nt, Human
cacguuuuuccacuagcaaa

SEQ ID NO: 981560 - RNA, 22 nt, Human
uggcagcagacaaaaggccauu

SEQ ID NO: 981561 - RNA, 22 nt, Human
auauaauaguuucauaaaggcu

SEQ ID NO: 981562 - RNA, 22 nt, Human
aauaagaauuuacuugucaaga

SEQ ID NO: 981563 - RNA, 22 nt, Human
acacuucuauucccugcacaaa

SEQ ID NO: 981564 - RNA, 22 nt, Human
cugagccagcuggcaugugcua

SEQ ID NO: 981565 - RNA, 22 nt, Human
uaagauaauaaguaugucuaug

SEQ ID NO: 981566 - RNA, 22 nt, Human
acacuugauaggucaaaucagu

SEQ ID NO: 981567 - RNA, 22 nt, Human
uuggccaagucacugguuaaug

SEQ ID NO: 981568 - RNA, 22 nt, Human
ggccaaaugaaggcaaugggac

SEQ ID NO: 981569 - RNA, 22 nt, Human
aaaaguauuuauggcuauguaa

SEQ ID NO: 981570 - RNA, 22 nt, Human
auagauguucaaucagauauuu

SEQ ID NO: 981571 - RNA, 22 nt, Human
uagaaaugugauaauagcuuaa

SEQ ID NO: 981572 - RNA, 22 nt, Human
uuauuuggguuugaguguggca

SEQ ID NO: 981573 - RNA, 22 nt, Human
aaguaugcuaauuaacuagcac

SEQ ID NO: 981574 - RNA, 22 nt, Human
cagcuuuuuagaaucuagggca

SEQ ID NO: 981575 - RNA, 22 nt, Human
uuuauuagauuaucaaagaggu

SEQ ID NO: 981576 - RNA, 22 nt, Human
aauaaaauggucaguuuucuca

SEQ ID NO: 981577 - RNA, 16 nt, Human
gucuggccuaccugcc

SEQ ID NO: 981578 - RNA, 22 nt, Human
acagggaacaggaauauacaaa

SEQ ID NO: 981579 - RNA, 22 nt, Human
guucacaaaguacuguaugcau

SEQ ID NO: 981580 - RNA, 22 nt, Human
auauuaggugcucaauacaugc

SEQ ID NO: 981581 - RNA, 19 nt, Human
acauuuaaauucagaucuc

SEQ ID NO: 981582 - RNA, 20 nt, Human
aaaauauguauaacucuucu

SEQ ID NO: 981583 - RNA, 19 nt, Human
agcagcuggagguggagug

SEQ ID NO: 981584 - RNA, 21 nt, Human
uggccaaacuggagcauuuga

SEQ ID NO: 981585 - RNA, 22 nt, Human
cuauuagguaugcagccuauuu

SEQ ID NO: 981586 - RNA, 18 nt, Human
uuaauguggcuuacuaug

SEQ ID NO: 981587 - RNA, 22 nt, Human
cuggccaacaucuggggcacau

SEQ ID NO: 981588 - RNA, 22 nt, Human
acucugcuggcugcagggcagc

SEQ ID NO: 981589 - RNA, 22 nt, Human
gcucugcucuugacuuaccagg

SEQ ID NO: 981590 - RNA, 22 nt, Human
gagggcuccauuccccgugccc

SEQ ID NO: 981591 - RNA, 22 nt, Human
aaagacauggaacuagagaugg

SEQ ID NO: 981592 - RNA, 22 nt, Human
uuggccaacagcgacagggcca

SEQ ID NO: 981593 - RNA, 15 nt, Human
ucacucuggaaggga

SEQ ID NO: 981594 - RNA, 22 nt, Human
aagcuaugggggaguuucaacc

SEQ ID NO: 981595 - RNA, 22 nt, Human
cugagccaccggcagggacauc

SEQ ID NO: 981596 - RNA, 21 nt, Human
uuugaauagaaauagugcuua

SEQ ID NO: 981597 - RNA, 22 nt, Human
uuuuaucugcuucauuaguuga

SEQ ID NO: 981598 - RNA, 22 nt, Human
uccuggccgcuggccccugaga

SEQ ID NO: 981599 - RNA, 22 nt, Human
uuauuugguugcugacuuggaa

SEQ ID NO: 981600 - RNA, 22 nt, Human
acuuccugcaaucguccacucc

SEQ ID NO: 981601 - RNA, 22 nt, Human
gcacucugugaucugcagagcc

SEQ ID NO: 981602 - RNA, 22 nt, Human
ugacauaaaucuaaaggaaagg

SEQ ID NO: 981603 - RNA, 23 nt, Human
uccaagggcuacaaacacagacc

SEQ ID NO: 981604 - RNA, 19 nt, Human
ucaaaacacaaaugguuga

SEQ ID NO: 981605 - RNA, 22 nt, Human
acucugcuuccacuuuugcuaa

SEQ ID NO: 981606 - RNA, 22 nt, Human
ucuuggccagguguggugccuc

SEQ ID NO: 981607 - RNA, 20 nt, Human
ugaaauaaggaguuguccuu

SEQ ID NO: 981608 - RNA, 21 nt, Human
cuccugggcuaagauauagug

SEQ ID NO: 981609 - RNA, 19 nt, Human
uccugggcugcgucuugcc

SEQ ID NO: 981610 - RNA, 22 nt, Human
uucaaucauuuuuacauagucc

SEQ ID NO: 981611 - RNA, 20 nt, Human
uuggcagcagcucagccacc

SEQ ID NO: 981612 - RNA, 22 nt, Human
aacugccuggccaggcugcaac

SEQ ID NO: 981613 - RNA, 22 nt, Human
ucacuaaguuacauuuaguauu

SEQ ID NO: 981614 - RNA, 22 nt, Human
acauaacaaucauaggacauag

SEQ ID NO: 981615 - RNA, 22 nt, Human
uuucacaaguaaaguccuaagu

SEQ ID NO: 981616 - RNA, 22 nt, Human
aaaagagugacugauaaguaua

SEQ ID NO: 981617 - RNA, 22 nt, Human
cacucugcaggccaaaccaaag

SEQ ID NO: 981618 - RNA, 22 nt, Human
cuauuagguuggugcaaaagua

SEQ ID NO: 981619 - RNA, 22 nt, Human
acagggaauggagggaucagua

SEQ ID NO: 981620 - RNA, 22 nt, Human
ucugagccguauggcuuggcua

SEQ ID NO: 981621 - RNA, 22 nt, Human
uauuaugagguauuuggacuuu

SEQ ID NO: 981622 - RNA, 22 nt, Human
aauauuaauagaagggguucua

SEQ ID NO: 981623 - RNA, 22 nt, Human
ggcagcaucacuugucuccagc

SEQ ID NO: 981624 - RNA, 22 nt, Human
ccugggcaucucaugcaccugc

SEQ ID NO: 981625 - RNA, 22 nt, Human
cagcuuugucugauuccucuuu

SEQ ID NO: 981626 - RNA, 22 nt, Human
uuggcaucaguguaggaccugu

SEQ ID NO: 981627 - RNA, 22 nt, Human
cauuuuauccucugggaagcua

SEQ ID NO: 981628 - RNA, 22 nt, Human
uaggaucucaccauagaaggaa

SEQ ID NO: 981629 - RNA, 22 nt, Human
uuuacuguuuacagcuaaugca

SEQ ID NO: 981630 - RNA, 22 nt, Human
gggucugaggaguaccauuguc

SEQ ID NO: 981631 - RNA, 22 nt, Human
augugaggaagaaagagguaag

SEQ ID NO: 981632 - RNA, 22 nt, Human
acuccuggguucuaaauuugaa

SEQ ID NO: 981633 - RNA, 22 nt, Human
uagaauaaguugaugauauaug

SEQ ID NO: 981634 - RNA, 22 nt, Human
gaaaaguaaacacuagggguca

SEQ ID NO: 981635 - RNA, 22 nt, Human
caaaaguaauggcgguuuuuac

SEQ ID NO: 981636 - RNA, 22 nt, Human
aaaguauuuuugacaggcauua

SEQ ID NO: 981637 - RNA, 22 nt, Human
auguggcacagcacaguaagag

SEQ ID NO: 981638 - RNA, 22 nt, Human
uuuauagggacaguucuuggag

SEQ ID NO: 981639 - RNA, 22 nt, Human
uggcacaaaucuagucccuggu

SEQ ID NO: 981640 - RNA, 22 nt, Human
cugcugucauagccaucccucc

SEQ ID NO: 981641 - RNA, 22 nt, Human
ccuuuucuaaucuuaagaaugu

SEQ ID NO: 981642 - RNA, 22 nt, Human
gaaaaguacacagcccaaacau

SEQ ID NO: 981643 - RNA, 22 nt, Human
uaaagaacacagggaauagcac

SEQ ID NO: 981644 - RNA, 22 nt, Human
cugccuggcuaaacucaagucg

SEQ ID NO: 981645 - RNA, 22 nt, Human
gcuggccagugucccagggauc

SEQ ID NO: 981646 - RNA, 20 nt, Human
uccugagccuccaccauguc

SEQ ID NO: 981647 - RNA, 21 nt, Human
cggccaaauuccuccuaggga

SEQ ID NO: 981648 - RNA, 22 nt, Human
aacuucugggcuguccaaaacu

SEQ ID NO: 981649 - RNA, 22 nt, Human
uaaaaguaggaaugaaacgcau

SEQ ID NO: 981650 - RNA, 22 nt, Human
cacucugcgcugggcgccagcg

SEQ ID NO: 981651 - RNA, 22 nt, Human
aacacugcugcuggguucugug

SEQ ID NO: 981652 - RNA, 22 nt, Human
auuaggacagagaugucaagag

SEQ ID NO: 981653 - RNA, 20 nt, Human
ucaccuuuguugguauucau

SEQ ID NO: 981654 - RNA, 22 nt, Human
cucucugcaaguuuugaaauag

SEQ ID NO: 981655 - RNA, 20 nt, Human
uuucacaaugaacaugucuc

SEQ ID NO: 981656 - RNA, 23 nt, Human
gcucugcucuguuucauagacag

SEQ ID NO: 981657 - RNA, 18 nt, Human
gcuccugguuggaaagaa

SEQ ID NO: 981658 - RNA, 22 nt, Human
cugagccagggccacacaugga

SEQ ID NO: 981659 - RNA, 20 nt, Human
caaguguagaaacuaauaag

SEQ ID NO: 981660 - RNA, 22 nt, Human
uggcagcacuugaacuugagcc

SEQ ID NO: 981661 - RNA, 22 nt, Human
gcuccuggcuccaggcagccaa

SEQ ID NO: 981662 - RNA, 22 nt, Human
gcagacaucaagcacaggccca

SEQ ID NO: 981663 - RNA, 22 nt, Human
gcagacauuuugaaucuaggcu

SEQ ID NO: 981664 - RNA, 22 nt, Human
cuucacaauucuaacagggcaa

SEQ ID NO: 981665 - RNA, 22 nt, Human
aaauauagcaauuaugccuacu

SEQ ID NO: 981666 - RNA, 22 nt, Human
aaugauguuuuuaaagaacaua

SEQ ID NO: 981667 - RNA, 22 nt, Human
uguguuaauuccacaaacauuc

SEQ ID NO: 981668 - RNA, 22 nt, Human
ucuuguuaaagugaagauacug

SEQ ID NO: 981669 - RNA, 20 nt, Human
aggccaaacccagcgcgccc

SEQ ID NO: 981670 - RNA, 22 nt, Human
aaacacauuuuaggaaaaucua

SEQ ID NO: 981671 - RNA, 22 nt, Human
uccugucuaaagaccugcaggc

SEQ ID NO: 981672 - RNA, 22 nt, Human
acacucugcucugagcuucagg

SEQ ID NO: 981673 - RNA, 23 nt, Human
uggccaagauaaucucaguuuuc

SEQ ID NO: 981674 - RNA, 22 nt, Human
ugcuugaggggaauaaaaagaa

SEQ ID NO: 981675 - RNA, 22 nt, Human
guuuuauuggaacacagccaug

SEQ ID NO: 981676 - RNA, 22 nt, Human
caacuccuccccagcaugccaa

SEQ ID NO: 981677 - RNA, 17 nt, Human
ucugaagccagucugcu

SEQ ID NO: 981678 - RNA, 22 nt, Human
uaaccuuuggugaaauauuaac

SEQ ID NO: 981679 - RNA, 22 nt, Human
uccuggccuugcgucuugggag

SEQ ID NO: 981680 - RNA, 22 nt, Human
ucuccugggaggacaaggaagg

SEQ ID NO: 981681 - RNA, 22 nt, Human
uucaggaugaaagugugcaaca

SEQ ID NO: 981682 - RNA, 22 nt, Human
guaaaauagaauaacguggcua

SEQ ID NO: 981683 - RNA, 23 nt, Human
uuggcagcgggucaggcuguggg

SEQ ID NO: 981684 - RNA, 22 nt, Human
aaagacauugaagaaggacuua

SEQ ID NO: 981685 - RNA, 22 nt, Human
uacaaaaaauugauacugacga

SEQ ID NO: 981686 - RNA, 22 nt, Human
ucacucugauagauaagcuaac

SEQ ID NO: 981687 - RNA, 22 nt, Human
ucacaagaauuuguagaugaaa

SEQ ID NO: 981688 - RNA, 22 nt, Human
aaaaugagauacaguuugaaag

SEQ ID NO: 981689 - RNA, 22 nt, Human
ucuccuggcauuugguugagua

SEQ ID NO: 981690 - RNA, 22 nt, Human
cagggucuuggcgccaucaccc

SEQ ID NO: 981691 - RNA, 22 nt, Human
gucugagcgcuggagcuugugu

SEQ ID NO: 981692 - RNA, 21 nt, Human
gacaggacuagaccagagcuc

SEQ ID NO: 981693 - RNA, 22 nt, Human
aaacaccaagagcuagcuauua

SEQ ID NO: 981694 - RNA, 22 nt, Human
acuggccaggcgaaccacacug

SEQ ID NO: 981695 - RNA, 22 nt, Human
ucacucuguuagaggaaagugc

SEQ ID NO: 981696 - RNA, 22 nt, Human
uuucauuauaaaaaguuggcuu

SEQ ID NO: 981697 - RNA, 22 nt, Human
uccuaggcaguuggugcuccau

SEQ ID NO: 981698 - RNA, 22 nt, Human
agaauaaacugcuuuagggcag

SEQ ID NO: 981699 - RNA, 17 nt, Human
acucugcugaaguagaa

SEQ ID NO: 981700 - RNA, 22 nt, Human
cuguuuauggagguaaggcauc

SEQ ID NO: 981701 - RNA, 22 nt, Human
ucuaagccuaggaaaugaguuu

SEQ ID NO: 981702 - RNA, 22 nt, Human
cuuucacacacauacauuugga

SEQ ID NO: 981703 - RNA, 22 nt, Human
uggcaacauggacaggucugcc

SEQ ID NO: 981704 - RNA, 22 nt, Human
uguuuaguaggaguuuaauacu

SEQ ID NO: 981705 - RNA, 22 nt, Human
cuggcccaggaagacguguccc

SEQ ID NO: 981706 - RNA, 22 nt, Human
uuucacaacguuguggugagag

SEQ ID NO: 981707 - RNA, 22 nt, Human
caacaaguggguacuuuacagg

SEQ ID NO: 981708 - RNA, 22 nt, Human
cacuaaguaagcuccucuacaa

SEQ ID NO: 981709 - RNA, 21 nt, Human
uucagcaagcacucuggacac

SEQ ID NO: 981710 - RNA, 22 nt, Human
ucugugccaccucuccaguguc

SEQ ID NO: 981711 - RNA, 23 nt, Human
agucuuaauacagcucuuuucua

SEQ ID NO: 981712 - RNA, 22 nt, Human
gggcauguagugugcauagaga

SEQ ID NO: 981713 - RNA, 22 nt, Human
ucuccuggaagugauuccccug

SEQ ID NO: 981714 - RNA, 23 nt, Human
uucaaaacuggaaaaucagaugc

SEQ ID NO: 981715 - RNA, 22 nt, Human
caaggugcagcguugucaagcu

SEQ ID NO: 981716 - RNA, 22 nt, Human
aaucaguauugguauagaauga

SEQ ID NO: 981717 - RNA, 23 nt, Human
uuucacaaugagcauuacagaau

SEQ ID NO: 981718 - RNA, 22 nt, Human
gaacccaaaccuggaccucccu

SEQ ID NO: 981719 - RNA, 22 nt, Human
accuucaaugaaaauaauaguc

SEQ ID NO: 981720 - RNA, 21 nt, Human
uccuggccagggcacuaggca

SEQ ID NO: 981721 - RNA, 22 nt, Human
uccuggccucgcuguccaccuu

SEQ ID NO: 981722 - RNA, 22 nt, Human
augcaaaugaacauguugcuag

SEQ ID NO: 981723 - RNA, 22 nt, Human
uuguuauaaagacuaaauaugu

SEQ ID NO: 981724 - RNA, 22 nt, Human
auuaggcagggcaugguggcuc

SEQ ID NO: 981725 - RNA, 22 nt, Human
acaguuauucuuuaugcaacca

SEQ ID NO: 981726 - RNA, 22 nt, Human
uugcaaauuccaauccaauauu

SEQ ID NO: 981727 - RNA, 22 nt, Human
agcuauguaacagugccaugga

SEQ ID NO: 981728 - RNA, 22 nt, Human
auuggcaaggcugcggugucug

SEQ ID NO: 981729 - RNA, 22 nt, Human
ugucaucuuggucuggaauaag

SEQ ID NO: 981730 - RNA, 22 nt, Human
ucuccuggauagauacuaucca

SEQ ID NO: 981731 - RNA, 22 nt, Human
ggccacaagugguccugagucc

SEQ ID NO: 981732 - RNA, 19 nt, Human
auuagcaugcuugaggaug

SEQ ID NO: 981733 - RNA, 22 nt, Human
uucuuauucuugaaauguggga

SEQ ID NO: 981734 - RNA, 22 nt, Human
caauaagugcuuuuguuuagca

SEQ ID NO: 981735 - RNA, 22 nt, Human
uuggccaauuuagaacguguug

SEQ ID NO: 981736 - RNA, 22 nt, Human
auggccaaagccacagcagagg

SEQ ID NO: 981737 - RNA, 22 nt, Human
acucugcugauagguccucaga

SEQ ID NO: 981738 - RNA, 20 nt, Human
cauuggacuuggcuucaugg

SEQ ID NO: 981739 - RNA, 22 nt, Human
aauucacaugcaugucugugca

SEQ ID NO: 981740 - RNA, 21 nt, Human
ugaaacacucuuuccaugaga

SEQ ID NO: 981741 - RNA, 22 nt, Human
ucuccugguuuguuaaauaauu

SEQ ID NO: 981742 - RNA, 22 nt, Human
acucugcucaaaguccugaggc

SEQ ID NO: 981743 - RNA, 22 nt, Human
gcuccuggugcuguagagauuu

SEQ ID NO: 981744 - RNA, 22 nt, Human
uuuuauucuaaguaugauggga

SEQ ID NO: 981745 - RNA, 22 nt, Human
uuguuaguuuauauaauguagu

SEQ ID NO: 981746 - RNA, 22 nt, Human
uuucacaacacaaucucguuaa

SEQ ID NO: 981747 - RNA, 23 nt, Human
gcuguuagauuuaauaagcauuu

SEQ ID NO: 981748 - RNA, 23 nt, Human
ccuccugggcacaggccugaugg

SEQ ID NO: 981749 - RNA, 22 nt, Human
caaaaagcuuagguaacaagcc

SEQ ID NO: 981750 - RNA, 22 nt, Human
cuucuuaaagauuacacaauga

SEQ ID NO: 981751 - RNA, 22 nt, Human
uauauuaacacccacuugccuc

SEQ ID NO: 981752 - RNA, 22 nt, Human
caaaaguaccuugugugcuuug

SEQ ID NO: 981753 - RNA, 22 nt, Human
agagugauccuaauugauuugg

SEQ ID NO: 981754 - RNA, 22 nt, Human
gauuuggccuuucgcaugguau

SEQ ID NO: 981755 - RNA, 22 nt, Human
guuuauuagaguuuucugucug

SEQ ID NO: 981756 - RNA, 22 nt, Human
gcuggccagcccucuuccucca

SEQ ID NO: 981757 - RNA, 22 nt, Human
auucugagacaauugccgucag

SEQ ID NO: 981758 - RNA, 22 nt, Human
uucagcaagaccaccauguacc

SEQ ID NO: 981759 - RNA, 22 nt, Human
uggaagagacacuuacauucag

SEQ ID NO: 981760 - RNA, 22 nt, Human
ucaauaaaauuguuuuccuauc

SEQ ID NO: 981761 - RNA, 22 nt, Human
cacuaugcuuacaugcuuauau

SEQ ID NO: 981762 - RNA, 23 nt, Human
auauuagggagauuagcccucua

SEQ ID NO: 981763 - RNA, 22 nt, Human
ccuccuggaggcucuagggaaa

SEQ ID NO: 981764 - RNA, 22 nt, Human
ucaaugaaagagcaugcauuuu

SEQ ID NO: 981765 - RNA, 22 nt, Human
uuggccaaggucacugggugag

SEQ ID NO: 981766 - RNA, 20 nt, Human
auguaaaauuauaaggcuga

SEQ ID NO: 981767 - RNA, 22 nt, Human
auaauaaaccaggaugggucug

SEQ ID NO: 981768 - RNA, 21 nt, Human
uuauugagacauuuguggaaa

SEQ ID NO: 981769 - RNA, 22 nt, Human
cacucugagccaaaacuaauuc

SEQ ID NO: 981770 - RNA, 22 nt, Human
uuuauuuggcaucucugccaag

SEQ ID NO: 981771 - RNA, 22 nt, Human
caaauauuccagguacaucccu

SEQ ID NO: 981772 - RNA, 22 nt, Human
uuuuacuuaauucuuggucaug

SEQ ID NO: 981773 - RNA, 19 nt, Human
ucucacaguuuccuugccu

SEQ ID NO: 981774 - RNA, 22 nt, Human
uuggccaaagcucaccagugcu

SEQ ID NO: 981775 - RNA, 22 nt, Human
aaagacauuagauuaacguaca

SEQ ID NO: 981776 - RNA, 22 nt, Human
ucuccuggauggaccuucucuu

SEQ ID NO: 981777 - RNA, 22 nt, Human
augcacuacuuggcuuuacuga

SEQ ID NO: 981778 - RNA, 22 nt, Human
uggccacauccuuuccuuguca

SEQ ID NO: 981779 - RNA, 22 nt, Human
cuccuggcuucugaaaucgugg

SEQ ID NO: 981780 - RNA, 22 nt, Human
ggcaacauucuccagauccuuu

SEQ ID NO: 981781 - RNA, 22 nt, Human
guuuauuauacaacaaaagcua

SEQ ID NO: 981782 - RNA, 22 nt, Human
auucaucaacugauagccauag

SEQ ID NO: 981783 - RNA, 22 nt, Human
uggcgcaacucauucauggugu

SEQ ID NO: 981784 - RNA, 22 nt, Human
caaguuaucagaaggcacuuuu

SEQ ID NO: 981785 - RNA, 20 nt, Human
agacaggagcccccauucag

SEQ ID NO: 981786 - RNA, 22 nt, Human
caaaaguaauguaugcucaucg

SEQ ID NO: 981787 - RNA, 22 nt, Human
uagaauauacacuacagcuuaa

SEQ ID NO: 981788 - RNA, 22 nt, Human
cucccuggugacucccaaagcu

SEQ ID NO: 981789 - RNA, 22 nt, Human
cuuuugauaguugcugagcagg

SEQ ID NO: 981790 - RNA, 22 nt, Human
accaaacaaaauugugcacugu

SEQ ID NO: 981791 - RNA, 22 nt, Human
uaaguauguuagaaaaucaagu

SEQ ID NO: 981792 - RNA, 22 nt, Human
ugucaucucacugauauagaug

SEQ ID NO: 981793 - RNA, 22 nt, Human
gaaaaguauguuuauuuugacu

SEQ ID NO: 981794 - RNA, 22 nt, Human
uuaaaugaacgagauaugcaac

SEQ ID NO: 981795 - RNA, 22 nt, Human
uccaaggguucaugugcauuca

SEQ ID NO: 981796 - RNA, 22 nt, Human
cacugucuuuugugaagacaau

SEQ ID NO: 981797 - RNA, 22 nt, Human
uauuuaaaaagaggccagcugg

SEQ ID NO: 981798 - RNA, 22 nt, Human
uuggccaauggugauucccggc

SEQ ID NO: 981799 - RNA, 22 nt, Human
ggcagcauuuagagcacagugu

SEQ ID NO: 981800 - RNA, 21 nt, Human
uggcagacuagaguauagaug

SEQ ID NO: 981801 - RNA, 22 nt, Human
uuggcagcauccaagucucggg

SEQ ID NO: 981802 - RNA, 22 nt, Human
gcucugcucccucaaaugacau

SEQ ID NO: 981803 - RNA, 22 nt, Human
uauugaggauugaggaaagcac

SEQ ID NO: 981804 - RNA, 22 nt, Human
aauguuauuacacuugugaaau

SEQ ID NO: 981805 - RNA, 22 nt, Human
uuucacaaacugaggagacaau

SEQ ID NO: 981806 - RNA, 18 nt, Human
gcuccuggaccaggucac

SEQ ID NO: 981807 - RNA, 22 nt, Human
cagagagggcggcccuggcuuc

SEQ ID NO: 981808 - RNA, 22 nt, Human
aaauacagcagacuccuguugu

SEQ ID NO: 981809 - RNA, 22 nt, Human
augaggauuaacuguugucaua

SEQ ID NO: 981810 - RNA, 22 nt, Human
aaagcacauuacaagcucaguc

SEQ ID NO: 981811 - RNA, 22 nt, Human
uggccaaaguagaaaauaauag

SEQ ID NO: 981812 - RNA, 18 nt, Human
aggauauuaagaguacag

SEQ ID NO: 981813 - RNA, 22 nt, Human
uuucaacagcucucaaaugauc

SEQ ID NO: 981814 - RNA, 22 nt, Human
aguauacauauauuagccuucg

SEQ ID NO: 981815 - RNA, 22 nt, Human
aguuauagaaccagguccucac

SEQ ID NO: 981816 - RNA, 22 nt, Human
ucuuggccccaccugugccagc

SEQ ID NO: 981817 - RNA, 22 nt, Human
caauaaguaauaggcaucuaau

SEQ ID NO: 981818 - RNA, 22 nt, Human
uuggccaaaggaaagacuacug

SEQ ID NO: 981819 - RNA, 22 nt, Human
acucugacuggagugagagagg

SEQ ID NO: 981820 - RNA, 22 nt, Human
aaauacaguguguguucuuuga

SEQ ID NO: 981821 - RNA, 22 nt, Human
caacccaagguuaguuggucuu

SEQ ID NO: 981822 - RNA, 22 nt, Human
cuaauguggacucuaucaaagu

SEQ ID NO: 981823 - RNA, 22 nt, Human
cuggcacaaugucacuuuugcu

SEQ ID NO: 981824 - RNA, 22 nt, Human
uccugggcuuuguuucucuccu

SEQ ID NO: 981825 - RNA, 22 nt, Human
uccaagggcaugcugaaauaag

SEQ ID NO: 981826 - RNA, 22 nt, Human
gaaaugugggucaugacccauu

SEQ ID NO: 981827 - RNA, 22 nt, Human
uuggccaaccagaacggagguc

SEQ ID NO: 981828 - RNA, 22 nt, Human
auguuguagcauaugaaauaua

SEQ ID NO: 981829 - RNA, 22 nt, Human
uacagccucacauuuacuuaca

SEQ ID NO: 981830 - RNA, 22 nt, Human
ucugcaggaggcuggcugcagg

SEQ ID NO: 981831 - RNA, 22 nt, Human
uucugagccucauucaugaggc

SEQ ID NO: 981832 - RNA, 22 nt, Human
ucacucugcugcccgagggcug

SEQ ID NO: 981833 - RNA, 22 nt, Human
gucuggccuuuuuagcuugugg

SEQ ID NO: 981834 - RNA, 22 nt, Human
augcaaaagacuauuuguugcu

SEQ ID NO: 981835 - RNA, 22 nt, Human
aacucacuuuguggcuucugaa

SEQ ID NO: 981836 - RNA, 22 nt, Human
uguuggcauuagaggguuauug

SEQ ID NO: 981837 - RNA, 22 nt, Human
uaacuaacuaguguucaaaaua

SEQ ID NO: 981838 - RNA, 22 nt, Human
auaaagacaugcuuacuugccc

SEQ ID NO: 981839 - RNA, 22 nt, Human
uccaagggaauuuaaaguugcu

SEQ ID NO: 981840 - RNA, 22 nt, Human
auaauguguucaucuuacaauu

SEQ ID NO: 981841 - RNA, 23 nt, Human
cuucuggcucuauaucagaauuc

SEQ ID NO: 981842 - RNA, 22 nt, Human
caaaaguaauugcgguuuuugc

SEQ ID NO: 981843 - RNA, 22 nt, Human
uugcaaauuauuuuagucccuu

SEQ ID NO: 981844 - RNA, 22 nt, Human
ucuucaaaaaauauccaucagu

SEQ ID NO: 981845 - RNA, 22 nt, Human
caaaacauucagagagcucacu

SEQ ID NO: 981846 - RNA, 22 nt, Human
cuaaauaaucccucuggucuua

SEQ ID NO: 981847 - RNA, 22 nt, Human
augauguuaccaguacuuagag

SEQ ID NO: 981848 - RNA, 22 nt, Human
uuucaagagggaacugaacaca

SEQ ID NO: 981849 - RNA, 20 nt, Human
auggccaaccugcuuaugac

SEQ ID NO: 981850 - RNA, 22 nt, Human
uaggaugagggguggccaagua

SEQ ID NO: 981851 - RNA, 22 nt, Human
agaguucagcuacugcaaaugu

SEQ ID NO: 981852 - RNA, 22 nt, Human
ucacucuguggcccaggcagug

SEQ ID NO: 981853 - RNA, 22 nt, Human
uggagggaacaaaggaguccca

SEQ ID NO: 981854 - RNA, 22 nt, Human
gggaggaggaauguuuugugua

SEQ ID NO: 981855 - RNA, 19 nt, Human
uuggcagcugagauccugc

SEQ ID NO: 981856 - RNA, 22 nt, Human
gucuagagugcuuccuagucau

SEQ ID NO: 981857 - RNA, 22 nt, Human
auucacaaugauacauaagcga

SEQ ID NO: 981858 - RNA, 22 nt, Human
cuggcucaauuuguacugcugu

SEQ ID NO: 981859 - RNA, 22 nt, Human
aaguuguauauaccgcuuuaag

SEQ ID NO: 981860 - RNA, 22 nt, Human
caacuccuggcuguuaggcaca

SEQ ID NO: 981861 - RNA, 22 nt, Human
aacacaaagaagcugcaggauc

SEQ ID NO: 981862 - RNA, 22 nt, Human
uggcaagccugagauccgggag

SEQ ID NO: 981863 - RNA, 22 nt, Human
cugcccaaauccuucuuccucu

SEQ ID NO: 981864 - RNA, 19 nt, Human
aauaauguucaugagauug

SEQ ID NO: 981865 - RNA, 22 nt, Human
uagaaaugauugguugagcucu

SEQ ID NO: 981866 - RNA, 22 nt, Human
cuaggccacuugcucucaugga

SEQ ID NO: 981867 - RNA, 22 nt, Human
auuagguugugcuuuguggaca

SEQ ID NO: 981868 - RNA, 22 nt, Human
cauguguaugcauucauacaua

SEQ ID NO: 981869 - RNA, 22 nt, Human
auuaaggaauguaggcaagaag

SEQ ID NO: 981870 - RNA, 22 nt, Human
uauuauuauaguuauugggaag

SEQ ID NO: 981871 - RNA, 22 nt, Human
auggccaagcuuacucuguugu

SEQ ID NO: 981872 - RNA, 22 nt, Human
uauauuaaacccucucuguagg

SEQ ID NO: 981873 - RNA, 22 nt, Human
acuccuggggauccauuccuuu

SEQ ID NO: 981874 - RNA, 22 nt, Human
uuccuggcgccacggagccggu

SEQ ID NO: 981875 - RNA, 22 nt, Human
uaccuuuugcuuauuaugacac

SEQ ID NO: 981876 - RNA, 22 nt, Human
uguuuauuuucaggauggauug

SEQ ID NO: 981877 - RNA, 20 nt, Human
uacuuaggcuuguuuuggcc

SEQ ID NO: 981878 - RNA, 20 nt, Human
ucugccacugcacucugccc

SEQ ID NO: 981879 - RNA, 22 nt, Human
aaaagagucuuaggcagucaua

SEQ ID NO: 981880 - RNA, 22 nt, Human
acuccuggugcugaugaagaga

SEQ ID NO: 981881 - RNA, 20 nt, Human
uuggcagcuucaggguacua

SEQ ID NO: 981882 - RNA, 22 nt, Human
ucuauuuacagaaagcagaauu

SEQ ID NO: 981883 - RNA, 22 nt, Human
uagaauaugauuaauuuucuua

SEQ ID NO: 981884 - RNA, 22 nt, Human
uuuaggaucucucuuguuacau

SEQ ID NO: 981885 - RNA, 22 nt, Human
aacaaguaaguuuauauauauu

SEQ ID NO: 981886 - RNA, 22 nt, Human
uccuggcccaaucugcccauga

SEQ ID NO: 981887 - RNA, 22 nt, Human
aacacuuucuuccuugcucagg

SEQ ID NO: 981888 - RNA, 22 nt, Human
uuucacaaagcauagcacuuua

SEQ ID NO: 981889 - RNA, 21 nt, Human
ucacucugauuaggugucucu

SEQ ID NO: 981890 - RNA, 22 nt, Human
acaaaaaccguggauucagcau

SEQ ID NO: 981891 - RNA, 22 nt, Human
uuuuaauucaaagugaauagug

SEQ ID NO: 981892 - RNA, 19 nt, Human
ccuggccagacuucugccc

SEQ ID NO: 981893 - RNA, 22 nt, Human
ucuccugguauguaugcaccug

SEQ ID NO: 981894 - RNA, 22 nt, Human
accuguuuguguccauuaguga

SEQ ID NO: 981895 - RNA, 22 nt, Human
ucauaaaaauagacucuaaagu

SEQ ID NO: 981896 - RNA, 22 nt, Human
aauuaaauugguuuagagagga

SEQ ID NO: 981897 - RNA, 22 nt, Human
aacaugucuggguauucacaag

SEQ ID NO: 981898 - RNA, 22 nt, Human
acuggccaggagcuggaaauac

SEQ ID NO: 981899 - RNA, 22 nt, Human
uaaagcacgucuauuuaaugau

SEQ ID NO: 981900 - RNA, 22 nt, Human
aggccaaagcucaccugcagcu

SEQ ID NO: 981901 - RNA, 22 nt, Human
uaugucacauuguaacagugug

SEQ ID NO: 981902 - RNA, 21 nt, Human
agggaaagaaaaugagcuaau

SEQ ID NO: 981903 - RNA, 22 nt, Human
auggccaagaucacagacuuca

SEQ ID NO: 981904 - RNA, 22 nt, Human
cagagcagucuggagauccagc

SEQ ID NO: 981905 - RNA, 21 nt, Human
gauguuggaggcuggggucug

SEQ ID NO: 981906 - RNA, 22 nt, Human
gugauaaagacgugucauaauu

SEQ ID NO: 981907 - RNA, 22 nt, Human
aggccaaauguguauaaaacau

SEQ ID NO: 981908 - RNA, 22 nt, Human
gggaagauaguguugagggccc

SEQ ID NO: 981909 - RNA, 22 nt, Human
ucuccugggcuugguugaaguu

SEQ ID NO: 981910 - RNA, 22 nt, Human
ugaaugugaugcuaaacauaug

SEQ ID NO: 981911 - RNA, 22 nt, Human
ucagggaacaauguuauggcuu

SEQ ID NO: 981912 - RNA, 21 nt, Human
caugcaggauuuaaccuagaa

SEQ ID NO: 981913 - RNA, 22 nt, Human
cucucuggcacuucauugcugu

SEQ ID NO: 981914 - RNA, 22 nt, Human
uauuuaauuugcucauugugau

SEQ ID NO: 981915 - RNA, 21 nt, Human
uuuauuuauauaggacacaug

SEQ ID NO: 981916 - RNA, 22 nt, Human
acaggccugagauuuugcauuu

SEQ ID NO: 981917 - RNA, 22 nt, Human
aaccaaauggaugguaagaggg

SEQ ID NO: 981918 - RNA, 22 nt, Human
uggcagcaauuagcuagagcug

SEQ ID NO: 981919 - RNA, 22 nt, Human
agaauaaauguuggacuuagga

SEQ ID NO: 981920 - RNA, 20 nt, Human
uguccuaauagacaagcaga

SEQ ID NO: 981921 - RNA, 22 nt, Human
auguuuaaauuuauagacagug

SEQ ID NO: 981922 - RNA, 22 nt, Human
auauuaaugagcaaguaaguga

SEQ ID NO: 981923 - RNA, 22 nt, Human
acuaaauaguuuugacagaaca

SEQ ID NO: 981924 - RNA, 22 nt, Human
uaucuuugaugccagauguuac

SEQ ID NO: 981925 - RNA, 22 nt, Human
uuuauuaauguagcauccaugg

SEQ ID NO: 981926 - RNA, 22 nt, Human
cuccuggaggauagugacuggg

SEQ ID NO: 981927 - RNA, 22 nt, Human
cucuugaagggcaucugaguua

SEQ ID NO: 981928 - RNA, 22 nt, Human
uaggcaauauuagacuuugucu

SEQ ID NO: 981929 - RNA, 22 nt, Human
uuauguaggauaaugaauugcc

SEQ ID NO: 981930 - RNA, 22 nt, Human
gcacagcucgagcucaggaggg

SEQ ID NO: 981931 - RNA, 22 nt, Human
gcucugcuggaaguucucugga

SEQ ID NO: 981932 - RNA, 22 nt, Human
auuauggacguuaauuuuggaa

SEQ ID NO: 981933 - RNA, 22 nt, Human
aagucauucuauuucucuaugu

SEQ ID NO: 981934 - RNA, 22 nt, Human
gcucugcuuucuggggggaucc

SEQ ID NO: 981935 - RNA, 22 nt, Human
cggccaagccggggccccgaag

SEQ ID NO: 981936 - RNA, 22 nt, Human
auucugagaaaugcauugucag

SEQ ID NO: 981937 - RNA, 22 nt, Human
ugagccaaugauuugaauagag

SEQ ID NO: 981938 - RNA, 22 nt, Human
uacaguauggaaaauguauagu

SEQ ID NO: 981939 - RNA, 22 nt, Human
caugcaggcacccagagcccac

SEQ ID NO: 981940 - RNA, 22 nt, Human
cuggccacugguggucauaggc

SEQ ID NO: 981941 - RNA, 22 nt, Human
ugacauaaguugguagaaagga

SEQ ID NO: 981942 - RNA, 22 nt, Human
cuccuggcucgcccccagcuga

SEQ ID NO: 981943 - RNA, 22 nt, Human
auucacauguugaagcccuaac

SEQ ID NO: 981944 - RNA, 22 nt, Human
aucuuucaaucaggaaaaaucu

SEQ ID NO: 981945 - RNA, 22 nt, Human
uuggccaaauacacaccuuuug

SEQ ID NO: 981946 - RNA, 22 nt, Human
uugaaaaguuuugaaacacucu

SEQ ID NO: 981947 - RNA, 22 nt, Human
aaaccaaacauuugcgguggug

SEQ ID NO: 981948 - RNA, 22 nt, Human
acacauaagaaacuacaaagag

SEQ ID NO: 981949 - RNA, 22 nt, Human
guuccaaacaagucauaaagua

SEQ ID NO: 981950 - RNA, 22 nt, Human
uccuggccaaguuacucucugc

SEQ ID NO: 981951 - RNA, 22 nt, Human
ccuggccagcuaauugcccauc

SEQ ID NO: 981952 - RNA, 22 nt, Human
auggcaagcaagcugaagagau

SEQ ID NO: 981953 - RNA, 22 nt, Human
agcacauucuugccuuaaccuc

SEQ ID NO: 981954 - RNA, 22 nt, Human
aaauuauuuucagaauggagaa

SEQ ID NO: 981955 - RNA, 22 nt, Human
uuagugauaggaagccagauug

SEQ ID NO: 981956 - RNA, 22 nt, Human
aaacuccugcauacucagaagc

SEQ ID NO: 981957 - RNA, 22 nt, Human
aggauguucgggucacauagcc

SEQ ID NO: 981958 - RNA, 22 nt, Human
ggccaaaccgcaauuauuuuug

SEQ ID NO: 981959 - RNA, 22 nt, Human
ccuccugguaauuagcgaaagg

SEQ ID NO: 981960 - RNA, 22 nt, Human
uauauuaguggaaugauaugaa

SEQ ID NO: 981961 - RNA, 22 nt, Human
ucagcaggcaggaggcaugcca

SEQ ID NO: 981962 - RNA, 22 nt, Human
uucagauaaacuacaaauaauu

SEQ ID NO: 981963 - RNA, 22 nt, Human
cagccuuugugaacaucaggug

SEQ ID NO: 981964 - RNA, 22 nt, Human
cuuugaauuccaguacaauaac

SEQ ID NO: 981965 - RNA, 22 nt, Human
acauuccugaggaaauacauuc

SEQ ID NO: 981966 - RNA, 22 nt, Human
uggcagcauuaauuauucaggu

SEQ ID NO: 981967 - RNA, 17 nt, Human
uuaagguggaucagcac

SEQ ID NO: 981968 - RNA, 18 nt, Human
ucagggaaucuuggccuu

SEQ ID NO: 981969 - RNA, 22 nt, Human
acucugcuugcccaauggaaac

SEQ ID NO: 981970 - RNA, 22 nt, Human
aaaacuccugaaauuguuuccc

SEQ ID NO: 981971 - RNA, 22 nt, Human
agcuagaauguuccuuuucauu

SEQ ID NO: 981972 - RNA, 21 nt, Human
ucacauuucucauggguaaau

SEQ ID NO: 981973 - RNA, 22 nt, Human
uugaggaguguuuagggugagg

SEQ ID NO: 981974 - RNA, 22 nt, Human
auagacauuuugcauucaagca

SEQ ID NO: 981975 - RNA, 22 nt, Human
cuuaggaugaguuuuugcguuu

SEQ ID NO: 981976 - RNA, 22 nt, Human
aaaugugcuucuuacucucaau

SEQ ID NO: 981977 - RNA, 22 nt, Human
uagaaacagagagauaugcccc

SEQ ID NO: 981978 - RNA, 21 nt, Human
uggaccaaaguaauuugccuu

SEQ ID NO: 981979 - RNA, 22 nt, Human
guauuaggagguggagccuuug

SEQ ID NO: 981980 - RNA, 21 nt, Human
uuuauuaacaacuguggacgu

SEQ ID NO: 981981 - RNA, 22 nt, Human
cauagaaacugagacaaggauu

SEQ ID NO: 981982 - RNA, 22 nt, Human
ccaaaaaguacauuuaggugug

SEQ ID NO: 981983 - RNA, 22 nt, Human
cuggcucaccuccgcuccagca

SEQ ID NO: 981984 - RNA, 22 nt, Human
acaugaaaccugagucuaacuc

SEQ ID NO: 981985 - RNA, 20 nt, Human
ccuccuggucaggugugcag

SEQ ID NO: 981986 - RNA, 22 nt, Human
aauucacagcauuugcccaucu

SEQ ID NO: 981987 - RNA, 22 nt, Human
uaaaacuagugguugggacuaa

SEQ ID NO: 981988 - RNA, 22 nt, Human
aaucauaauucaaauaagcuua

SEQ ID NO: 981989 - RNA, 22 nt, Human
uccuggccaggaugaccuaaca

SEQ ID NO: 981990 - RNA, 22 nt, Human
acuggccaugggauuuauauuu

SEQ ID NO: 981991 - RNA, 19 nt, Human
cauuccuuugucugccaaa

SEQ ID NO: 981992 - RNA, 22 nt, Human
aaacucaaauuaaacuagcuua

SEQ ID NO: 981993 - RNA, 22 nt, Human
auuuggcacacuggguucucgu

SEQ ID NO: 981994 - RNA, 22 nt, Human
auggccaagcauauacagauug

SEQ ID NO: 981995 - RNA, 23 nt, Human
uauuagggccaggacuggcaaau

SEQ ID NO: 981996 - RNA, 22 nt, Human
aagucauuaucucuucuaaucu

SEQ ID NO: 981997 - RNA, 22 nt, Human
guuauuaguaagacucgcacau

SEQ ID NO: 981998 - RNA, 22 nt, Human
gcuccuggcucucugagggcug

SEQ ID NO: 981999 - RNA, 18 nt, Human
aaguaugccuauguuauu

SEQ ID NO: 982000 - RNA, 22 nt, Human
uuucauuauucaugcuaguuau

SEQ ID NO: 982001 - RNA, 22 nt, Human
uggcacaugguaagugcuuaac

SEQ ID NO: 982002 - RNA, 22 nt, Human
uuucacaaacucagggugugug

SEQ ID NO: 982003 - RNA, 22 nt, Human
aagucauugguagcuugauagg

SEQ ID NO: 982004 - RNA, 22 nt, Human
ugaaauguguaauguggaugcc

SEQ ID NO: 982005 - RNA, 21 nt, Human
ccugggccaaauucccuggac

SEQ ID NO: 982006 - RNA, 22 nt, Human
cuggccaacuugcuuguuggca

SEQ ID NO: 982007 - RNA, 22 nt, Human
aguaugaagaugaugaaaaaua

SEQ ID NO: 982008 - RNA, 22 nt, Human
uggcaacaccuggaagacaugg

SEQ ID NO: 982009 - RNA, 22 nt, Human
cagacaggguccuguccgucac

SEQ ID NO: 982010 - RNA, 22 nt, Human
auucacaaguucuagggauuag

SEQ ID NO: 982011 - RNA, 22 nt, Human
ccuggccagggucugggcugcu

SEQ ID NO: 982012 - RNA, 22 nt, Human
caauaagccagguguuuguguu

SEQ ID NO: 982013 - RNA, 22 nt, Human
cauguuaaugaauuuuugcagu

SEQ ID NO: 982014 - RNA, 22 nt, Human
uggccacaugcgucugugaggc

SEQ ID NO: 982015 - RNA, 22 nt, Human
caugcaggcccgccugaauggg

SEQ ID NO: 982016 - RNA, 22 nt, Human
accuuauuuugaaauagauugu

SEQ ID NO: 982017 - RNA, 22 nt, Human
cucuuuaaaguaaaauuugucu

SEQ ID NO: 982018 - RNA, 22 nt, Human
uuuucauuguuccucgagcauu

SEQ ID NO: 982019 - RNA, 22 nt, Human
uaaaaugacuuccuccaacauc

SEQ ID NO: 982020 - RNA, 20 nt, Human
uuggccaaaucuuagucaug

SEQ ID NO: 982021 - RNA, 22 nt, Human
acuccugguucccaguugagau

SEQ ID NO: 982022 - RNA, 22 nt, Human
auuaggaaacugaaugucagaa

SEQ ID NO: 982023 - RNA, 22 nt, Human
ccuggccauuugaacuucagac

SEQ ID NO: 982024 - RNA, 22 nt, Human
uauccaaaguuucucagaaacu

SEQ ID NO: 982025 - RNA, 22 nt, Human
ucucuggcagggauaucuggcu

SEQ ID NO: 982026 - RNA, 22 nt, Human
uguuggcagauugucuaggguu

SEQ ID NO: 982027 - RNA, 22 nt, Human
uagcacugaaucacaugcugcu

SEQ ID NO: 982028 - RNA, 23 nt, Human
ucugggccacuugucugcacuuc

SEQ ID NO: 982029 - RNA, 22 nt, Human
ggccaaaugaaaucugagcaau

SEQ ID NO: 982030 - RNA, 22 nt, Human
aaugugcagaugaauaaacaaa

SEQ ID NO: 982031 - RNA, 22 nt, Human
ucauugaaugcucugcagguug

SEQ ID NO: 982032 - RNA, 22 nt, Human
ucacucuggccucugcagcagu

SEQ ID NO: 982033 - RNA, 22 nt, Human
cugagccaguagucagggacaa

SEQ ID NO: 982034 - RNA, 22 nt, Human
acucugcucccuaagccaugau

SEQ ID NO: 982035 - RNA, 21 nt, Human
uuucacaaaaguaugugacaa

SEQ ID NO: 982036 - RNA, 22 nt, Human
uggcaucauagccaaggugcuu

SEQ ID NO: 982037 - RNA, 22 nt, Human
gucuggccugccagcucuggug

SEQ ID NO: 982038 - RNA, 22 nt, Human
aaagauaugucuccaaagagau

SEQ ID NO: 982039 - RNA, 22 nt, Human
aauaguaaaagauacagcuaau

SEQ ID NO: 982040 - RNA, 22 nt, Human
aguuuaaaucauguuuuguaac

SEQ ID NO: 982041 - RNA, 22 nt, Human
gcuccugggcccugggcuaacu

SEQ ID NO: 982042 - RNA, 19 nt, Human
agucugcauuucuagcaag

SEQ ID NO: 982043 - RNA, 22 nt, Human
uuagagaugucccaaaaugaag

SEQ ID NO: 982044 - RNA, 22 nt, Human
ucacucugaaugguacugagga

SEQ ID NO: 982045 - RNA, 22 nt, Human
uuuaggaugcucuauucugacu

SEQ ID NO: 982046 - RNA, 19 nt, Human
ucuaagccucaauguuuuc

SEQ ID NO: 982047 - RNA, 22 nt, Human
uggucuaaauauggcucuaaau

SEQ ID NO: 982048 - RNA, 23 nt, Human
acucagcuuugggagaugacuca

SEQ ID NO: 982049 - RNA, 22 nt, Human
aucaggauguuuggcugucaua

SEQ ID NO: 982050 - RNA, 22 nt, Human
cgcaccacugaauuccagccug

SEQ ID NO: 982051 - RNA, 22 nt, Human
agggaagugaaugacagauauc

SEQ ID NO: 982052 - RNA, 22 nt, Human
acuaacauguuaaucaaaagaa

SEQ ID NO: 982053 - RNA, 22 nt, Human
augguacaaaauguauaaaguc

SEQ ID NO: 982054 - RNA, 22 nt, Human
caaguaaagaaucacauuucuu

SEQ ID NO: 982055 - RNA, 22 nt, Human
aagugccaucauagcauggcug

SEQ ID NO: 982056 - RNA, 22 nt, Human
ccugagccuggcucaugcacuc

SEQ ID NO: 982057 - RNA, 22 nt, Human
cucucuggaccucaacuauuuu

SEQ ID NO: 982058 - RNA, 22 nt, Human
aauaaaaugaacugguagaguu

SEQ ID NO: 982059 - RNA, 22 nt, Human
auuagguaagauaaagcagagg

SEQ ID NO: 982060 - RNA, 22 nt, Human
aaaagguaguugccaaauaagg

SEQ ID NO: 982061 - RNA, 22 nt, Human
aauaauguuaugucauucuucu

SEQ ID NO: 982062 - RNA, 22 nt, Human
augauguugauaaauuacuuua

SEQ ID NO: 982063 - RNA, 22 nt, Human
aggauaguugugaagauaggcu

SEQ ID NO: 982064 - RNA, 22 nt, Human
ucacucuguuuuacucacuguu

SEQ ID NO: 982065 - RNA, 22 nt, Human
acauucaaggccuucugacaca

SEQ ID NO: 982066 - RNA, 22 nt, Human
uuuuuauaugaaggauagugcg

SEQ ID NO: 982067 - RNA, 22 nt, Human
cuuauuagugucugucugaguu

SEQ ID NO: 982068 - RNA, 22 nt, Human
uagaauaugugguguauacuuu

SEQ ID NO: 982069 - RNA, 22 nt, Human
uccuguuaguguuagacuuccc

SEQ ID NO: 982070 - RNA, 22 nt, Human
gucaucuuugcccugugcagga

SEQ ID NO: 982071 - RNA, 22 nt, Human
cugagggucaacuugauuguau

SEQ ID NO: 982072 - RNA, 22 nt, Human
aggaagaauguuuacauaucaa

SEQ ID NO: 982073 - RNA, 22 nt, Human
uccaagggcagcagccauagcc

SEQ ID NO: 982074 - RNA, 22 nt, Human
cugggccacaagccugugugau

SEQ ID NO: 982075 - RNA, 19 nt, Human
caugcugaccugcuguggu

SEQ ID NO: 982076 - RNA, 22 nt, Human
cuaccuuucugacucuugggau

SEQ ID NO: 982077 - RNA, 22 nt, Human
uagggauggcagcauguagcuu

SEQ ID NO: 982078 - RNA, 19 nt, Human
cugggccagagcuguccuc

SEQ ID NO: 982079 - RNA, 22 nt, Human
cgagcaugaugacggcuguggc

SEQ ID NO: 982080 - RNA, 22 nt, Human
accuguuuggaggagguguuag

SEQ ID NO: 982081 - RNA, 22 nt, Human
auuagguuagugugcaagagaa

SEQ ID NO: 982082 - RNA, 22 nt, Human
gauuaggagggagaggcaagua

SEQ ID NO: 982083 - RNA, 22 nt, Human
uuauucaggcucucuuuggcua

SEQ ID NO: 982084 - RNA, 22 nt, Human
caaaaguagugaaguuguacau

SEQ ID NO: 982085 - RNA, 22 nt, Human
gugcaagguacauccuugaugu

SEQ ID NO: 982086 - RNA, 22 nt, Human
aaguuuguucagggcuuacauu

SEQ ID NO: 982087 - RNA, 22 nt, Human
ucuuguuaucaggaaaacagua

SEQ ID NO: 982088 - RNA, 22 nt, Human
accuuuuuguucuguucucagc

SEQ ID NO: 982089 - RNA, 22 nt, Human
gaguuauuuugagcagaugguu

SEQ ID NO: 982090 - RNA, 22 nt, Human
uuagugauuacuacauagauga

SEQ ID NO: 982091 - RNA, 22 nt, Human
uuccuggcauagagagggcaca

SEQ ID NO: 982092 - RNA, 23 nt, Human
aacugagauaauguauguaaagc

SEQ ID NO: 982093 - RNA, 22 nt, Human
cagcugugaauugucuuaucua

SEQ ID NO: 982094 - RNA, 22 nt, Human
cucuggccuggggccugcuccc

SEQ ID NO: 982095 - RNA, 23 nt, Human
ggccacaaauagucuccccuggc

SEQ ID NO: 982096 - RNA, 22 nt, Human
aaagcagcagcaccugcauuuc

SEQ ID NO: 982097 - RNA, 22 nt, Human
uuaaagagucuacugcacaucc

SEQ ID NO: 982098 - RNA, 22 nt, Human
cucugcuuuuuaaaaggagucc

SEQ ID NO: 982099 - RNA, 22 nt, Human
ccuggccagcgccggcugcucg

SEQ ID NO: 982100 - RNA, 22 nt, Human
agggaagaugucucaucuuagg

SEQ ID NO: 982101 - RNA, 22 nt, Human
agcugaaagugcuuugaggacu

SEQ ID NO: 982102 - RNA, 22 nt, Human
cugggccagggaggugucugua

SEQ ID NO: 982103 - RNA, 22 nt, Human
caaauaguaugagcaaugauuc

SEQ ID NO: 982104 - RNA, 22 nt, Human
aaccaggugacucauggugagc

SEQ ID NO: 982105 - RNA, 22 nt, Human
uaugucuugcauuuuucaaacu

SEQ ID NO: 982106 - RNA, 22 nt, Human
uuuaauuaggaaaugggcaggg

SEQ ID NO: 982107 - RNA, 22 nt, Human
acucugcugucugauggcagga

SEQ ID NO: 982108 - RNA, 21 nt, Human
auuuggauauugcuggcaaau

SEQ ID NO: 982109 - RNA, 22 nt, Human
ucuccuggcucuaaaaggcugu

SEQ ID NO: 982110 - RNA, 22 nt, Human
cuccuggcucugccacuuacua

SEQ ID NO: 982111 - RNA, 22 nt, Human
cugccuggguucaaguccuguu

SEQ ID NO: 982112 - RNA, 22 nt, Human
uuggcagcagggaguuggccgc

SEQ ID NO: 982113 - RNA, 22 nt, Human
aaaauaacuucuacuauuugca

SEQ ID NO: 982114 - RNA, 22 nt, Human
uggcagcagcuaacuuaggcag

SEQ ID NO: 982115 - RNA, 21 nt, Human
agacaguaacucuucuacucc

SEQ ID NO: 982116 - RNA, 22 nt, Human
acacauuuaaaaaggaacauau

SEQ ID NO: 982117 - RNA, 22 nt, Human
aaagauguuuuauaaguuaugg

SEQ ID NO: 982118 - RNA, 22 nt, Human
uguuuaaucuauaaaauggaga

SEQ ID NO: 982119 - RNA, 22 nt, Human
ucuccugggugcuuuaucagaa

SEQ ID NO: 982120 - RNA, 22 nt, Human
aacaauaauugcgguucucuau

SEQ ID NO: 982121 - RNA, 22 nt, Human
cucauacauaugccauuccugc

SEQ ID NO: 982122 - RNA, 22 nt, Human
uaaaaaguagugagaauggcgc

SEQ ID NO: 982123 - RNA, 22 nt, Human
cuaagccacucaaaucuugugg

SEQ ID NO: 982124 - RNA, 22 nt, Human
gcacucuguuucuccugucagc

SEQ ID NO: 982125 - RNA, 22 nt, Human
aggccaaagcacagagcuggaa

SEQ ID NO: 982126 - RNA, 22 nt, Human
ucuggcaaaggcaaccacaguu

SEQ ID NO: 982127 - RNA, 22 nt, Human
acuuugaaacuaaaauucauua

SEQ ID NO: 982128 - RNA, 22 nt, Human
acagcaugucuaguuaaauacu

SEQ ID NO: 982129 - RNA, 22 nt, Human
ugcucuucggggccacugcuug

SEQ ID NO: 982130 - RNA, 22 nt, Human
cagggucugaaacugaucacag

SEQ ID NO: 982131 - RNA, 22 nt, Human
agugaacaaagguagugagcau

SEQ ID NO: 982132 - RNA, 22 nt, Human
acucugcuaaauguaaguuggu

SEQ ID NO: 982133 - RNA, 22 nt, Human
gucaucuucgcagagugauuuu

SEQ ID NO: 982134 - RNA, 21 nt, Human
gcuccuggugcugcguggcgc

SEQ ID NO: 982135 - RNA, 22 nt, Human
uaggaugaucuuguagagagau

SEQ ID NO: 982136 - RNA, 19 nt, Human
gcuccuggaugaccugugg

SEQ ID NO: 982137 - RNA, 22 nt, Human
uacucugcucauuggagugugu

SEQ ID NO: 982138 - RNA, 22 nt, Human
uacucugcaggauggacuaugg

SEQ ID NO: 982139 - RNA, 22 nt, Human
aacucugcuuauaguuugucca

SEQ ID NO: 982140 - RNA, 22 nt, Human
cuccugcgguacuacugugcuu

SEQ ID NO: 982141 - RNA, 22 nt, Human
agucuuaacuaugcaaguacua

SEQ ID NO: 982142 - RNA, 22 nt, Human
accuuuuccagcuucuagaggc

SEQ ID NO: 982143 - RNA, 22 nt, Human
uugagggucuggaucugcugcu

SEQ ID NO: 982144 - RNA, 22 nt, Human
uucaggauucuuucagacuggg

SEQ ID NO: 982145 - RNA, 22 nt, Human
gacucugcuacaggccgagguu

SEQ ID NO: 982146 - RNA, 19 nt, Human
ugcuagaaauucugugacu

SEQ ID NO: 982147 - RNA, 22 nt, Human
uccuggccuccguucucugcau

SEQ ID NO: 982148 - RNA, 18 nt, Human
uuucacaaccuccagagg

SEQ ID NO: 982149 - RNA, 22 nt, Human
auuuauuaccucggaguuucug

SEQ ID NO: 982150 - RNA, 22 nt, Human
uuuaguagaaauauuugggccu

SEQ ID NO: 982151 - RNA, 22 nt, Human
uccuggcccggccgggccugcu

SEQ ID NO: 982152 - RNA, 22 nt, Human
ucacaaagggagggauagcugg

SEQ ID NO: 982153 - RNA, 19 nt, Human
cugggccagaaucagcuca

SEQ ID NO: 982154 - RNA, 22 nt, Human
aaugauggucauggcaacuuuu

SEQ ID NO: 982155 - RNA, 22 nt, Human
auauuaauuauuuacacaugag

SEQ ID NO: 982156 - RNA, 19 nt, Human
cugaggcccauguaccaug

SEQ ID NO: 982157 - RNA, 22 nt, Human
uagaaacacagagagacccaug

SEQ ID NO: 982158 - RNA, 22 nt, Human
uauagcaagcaggacagucuca

SEQ ID NO: 982159 - RNA, 22 nt, Human
acuccaggcaucugcuucugcu

SEQ ID NO: 982160 - RNA, 22 nt, Human
gcagcauacagggagaguacuc

SEQ ID NO: 982161 - RNA, 23 nt, Human
ugucuggcucauggugggucuca

SEQ ID NO: 982162 - RNA, 22 nt, Human
caaauaguuuuucauguauuau

SEQ ID NO: 982163 - RNA, 22 nt, Human
ccuccuggccugugcagagccc

SEQ ID NO: 982164 - RNA, 22 nt, Human
cugaagccaugugcucacuggu

SEQ ID NO: 982165 - RNA, 22 nt, Human
cacccacauggaaauucacagu

SEQ ID NO: 982166 - RNA, 22 nt, Human
cuucacaacgacaucugguuag

SEQ ID NO: 982167 - RNA, 22 nt, Human
acaaaaagcuccauuacugucc

SEQ ID NO: 982168 - RNA, 19 nt, Human
ccucugcuccaguuuccuu

SEQ ID NO: 982169 - RNA, 22 nt, Human
cagcucugaggaacacuccuuu

SEQ ID NO: 982170 - RNA, 22 nt, Human
ucuugcuaaagaccaacacauu

SEQ ID NO: 982171 - RNA, 22 nt, Human
uucagcaauuuuuuaagcuaau

SEQ ID NO: 982172 - RNA, 22 nt, Human
uauuaggguaaauuugacaugc

SEQ ID NO: 982173 - RNA, 22 nt, Human
uuuauauagagauuugugcaug

SEQ ID NO: 982174 - RNA, 21 nt, Human
gucaaacuugcaccagugccc

SEQ ID NO: 982175 - RNA, 22 nt, Human
agcuccugcucuuugucccuaa

SEQ ID NO: 982176 - RNA, 22 nt, Human
uuaguuaggaaacaaaguuguu

SEQ ID NO: 982177 - RNA, 22 nt, Human
acuuccugaauggggcuaauua

SEQ ID NO: 982178 - RNA, 22 nt, Human
ccuccuggagcauuggugagga

SEQ ID NO: 982179 - RNA, 22 nt, Human
uaaauacuuuuacuccacugau

SEQ ID NO: 982180 - RNA, 22 nt, Human
ucugcaagauggucuuagaggu

SEQ ID NO: 982181 - RNA, 19 nt, Human
auagaaaggguuaaagaca

SEQ ID NO: 982182 - RNA, 22 nt, Human
agaauaaaucaaauguccugag

SEQ ID NO: 982183 - RNA, 22 nt, Human
uggcagcacaagguggcccaug

SEQ ID NO: 982184 - RNA, 22 nt, Human
aaagacagagcuguaggggaaa

SEQ ID NO: 982185 - RNA, 22 nt, Human
ccaaaaagcucagagauauguu

SEQ ID NO: 982186 - RNA, 22 nt, Human
guauuaggaggaacacaggccu

SEQ ID NO: 982187 - RNA, 22 nt, Human
uuuuaugugcuggacuggcagu

SEQ ID NO: 982188 - RNA, 22 nt, Human
agagggcugcugcacagugcuc

SEQ ID NO: 982189 - RNA, 22 nt, Human
cuucugagcagaccuccugggg

SEQ ID NO: 982190 - RNA, 22 nt, Human
aggccaaaccggauggaaaagg

SEQ ID NO: 982191 - RNA, 22 nt, Human
ggucugaaaauggugaccacca

SEQ ID NO: 982192 - RNA, 22 nt, Human
ccuggccaguuuccaggcccug

SEQ ID NO: 982193 - RNA, 22 nt, Human
uggucaaauuuagucucuggaa

SEQ ID NO: 982194 - RNA, 22 nt, Human
aggagacauaacuaugaugaga

SEQ ID NO: 982195 - RNA, 21 nt, Human
cucucugcuuaugaauaguga

SEQ ID NO: 982196 - RNA, 22 nt, Human
uguuuaauucaccaucauguuc

SEQ ID NO: 982197 - RNA, 22 nt, Human
caccuugugauccucuugccuu

SEQ ID NO: 982198 - RNA, 22 nt, Human
auggccaagaauauuucucaac

SEQ ID NO: 982199 - RNA, 22 nt, Human
aaguaugcaaaucgucuuagaa

SEQ ID NO: 982200 - RNA, 18 nt, Human
ucauuagggauugcaaag

SEQ ID NO: 982201 - RNA, 22 nt, Human
aacauuucagcaccugauuccu

SEQ ID NO: 982202 - RNA, 22 nt, Human
ucugagccaccugccagugcug

SEQ ID NO: 982203 - RNA, 22 nt, Human
cuuauuagaguuguguucuguu

SEQ ID NO: 982204 - RNA, 22 nt, Human
cugggcaauaugcugggccugg

SEQ ID NO: 982205 - RNA, 22 nt, Human
guguugacucuuggacuucaag

SEQ ID NO: 982206 - RNA, 22 nt, Human
cuuauuagaaagaaaagacaug

SEQ ID NO: 982207 - RNA, 20 nt, Human
uccuggccucccuggggcuc

SEQ ID NO: 982208 - RNA, 22 nt, Human
uccuggcccacuaugccagcau

SEQ ID NO: 982209 - RNA, 22 nt, Human
guugaaauuugugauaauuuag

SEQ ID NO: 982210 - RNA, 22 nt, Human
ugaauaagaauuauuauaauga

SEQ ID NO: 982211 - RNA, 22 nt, Human
uauucacaggcuggagugaugu

SEQ ID NO: 982212 - RNA, 22 nt, Human
aaaauauuuuagggccaggaga

SEQ ID NO: 982213 - RNA, 22 nt, Human
ggccaaaucuguaaggcaagau

SEQ ID NO: 982214 - RNA, 22 nt, Human
aauacugccugugagguaacuc

SEQ ID NO: 982215 - RNA, 22 nt, Human
uugccacugaaccagucuugca

SEQ ID NO: 982216 - RNA, 22 nt, Human
aauagaauguaaucuaauacau

SEQ ID NO: 982217 - RNA, 22 nt, Human
uuuauaaguacuuugucugcuu

SEQ ID NO: 982218 - RNA, 22 nt, Human
uuuucauuguuacuaugagcua

SEQ ID NO: 982219 - RNA, 22 nt, Human
augcccaaugucacaauuuuug

SEQ ID NO: 982220 - RNA, 22 nt, Human
ugcugaaacaauaacauacugg

SEQ ID NO: 982221 - RNA, 22 nt, Human
agucugcuuccuggagaacuca

SEQ ID NO: 982222 - RNA, 22 nt, Human
aacucuggagcacgcccuggcc

SEQ ID NO: 982223 - RNA, 22 nt, Human
acaguguuuuaugagaauuguu

SEQ ID NO: 982224 - RNA, 20 nt, Human
augcaaacccugcuuugugg

SEQ ID NO: 982225 - RNA, 18 nt, Human
ugucaucuguuuaaaacc

SEQ ID NO: 982226 - RNA, 22 nt, Human
ugucaucugauauuacuuauag

SEQ ID NO: 982227 - RNA, 22 nt, Human
ucaaaacacuauuaccuuuaau

SEQ ID NO: 982228 - RNA, 22 nt, Human
acauuuaaauaugccuuauauu

SEQ ID NO: 982229 - RNA, 22 nt, Human
uccugggcgguuaugugaucug

SEQ ID NO: 982230 - RNA, 22 nt, Human
uuucacaauuuuaaggagcaaa

SEQ ID NO: 982231 - RNA, 22 nt, Human
aaaucagucccucuuggaauuu

SEQ ID NO: 982232 - RNA, 22 nt, Human
ucuccuggcucaccaggcugga

SEQ ID NO: 982233 - RNA, 22 nt, Human
aaaucaguaaauguucauuaac

SEQ ID NO: 982234 - RNA, 22 nt, Human
ucaaaaaguugaagaguugggg

SEQ ID NO: 982235 - RNA, 20 nt, Human
uauauaggaaauauuguguu

SEQ ID NO: 982236 - RNA, 22 nt, Human
uaaccaaagggccuaaggaaug

SEQ ID NO: 982237 - RNA, 22 nt, Human
gcucugcugucuucuugcaggc

SEQ ID NO: 982238 - RNA, 22 nt, Human
gcuggccaggugcuuugguucu

SEQ ID NO: 982239 - RNA, 22 nt, Human
cuccugugggucaccaauaggc

SEQ ID NO: 982240 - RNA, 21 nt, Human
gugguucuagagaaacagaau

SEQ ID NO: 982241 - RNA, 22 nt, Human
uuuaggauauuaauguucagag

SEQ ID NO: 982242 - RNA, 22 nt, Human
ucacucugagaggucacuggaa

SEQ ID NO: 982243 - RNA, 22 nt, Human
aaauaaguaguuuaguguugug

SEQ ID NO: 982244 - RNA, 22 nt, Human
uuuuauuaguggcuagaugggg

SEQ ID NO: 982245 - RNA, 22 nt, Human
auuccaaagccugaauaaugga

SEQ ID NO: 982246 - RNA, 22 nt, Human
ugcugaaaacucaaccauugug

SEQ ID NO: 982247 - RNA, 22 nt, Human
ucugagccaauuucugugucca

SEQ ID NO: 982248 - RNA, 22 nt, Human
uuuuaauugcaauuaugguccc

SEQ ID NO: 982249 - RNA, 22 nt, Human
cagucauuuuauuugaaaauua

SEQ ID NO: 982250 - RNA, 22 nt, Human
ucuggccacccgaggccccugc

SEQ ID NO: 982251 - RNA, 22 nt, Human
uuuuauauggcacauugguugg

SEQ ID NO: 982252 - RNA, 22 nt, Human
gauuaggacauggauguauguu

SEQ ID NO: 982253 - RNA, 22 nt, Human
cagcugacgccagaguggaauu

SEQ ID NO: 982254 - RNA, 22 nt, Human
aaauauguauggaguucaugaa

SEQ ID NO: 982255 - RNA, 22 nt, Human
augcccugaggaaugucacgcu

SEQ ID NO: 982256 - RNA, 22 nt, Human
gcuccuggucuggagcuucaag

SEQ ID NO: 982257 - RNA, 22 nt, Human
aaaagcuagucaaugauguauu

SEQ ID NO: 982258 - RNA, 22 nt, Human
cuguuuauagcagagcaagccu

SEQ ID NO: 982259 - RNA, 22 nt, Human
aacucugcagugacuuauaaag

SEQ ID NO: 982260 - RNA, 22 nt, Human
auuaggacacauacauguacag

SEQ ID NO: 982261 - RNA, 22 nt, Human
guggccaagagauaaaauugug

SEQ ID NO: 982262 - RNA, 22 nt, Human
gcucugcugggugggcaguuau

SEQ ID NO: 982263 - RNA, 22 nt, Human
cugggccaaaagaaguguucuu

SEQ ID NO: 982264 - RNA, 22 nt, Human
uucaacuagauuuauacaauuc

SEQ ID NO: 982265 - RNA, 22 nt, Human
ccuccuggaggcucuaagggag

SEQ ID NO: 982266 - RNA, 22 nt, Human
auggccaagcaugccuguggcc

SEQ ID NO: 982267 - RNA, 22 nt, Human
ugcaccuuguccauuuuuggcc

SEQ ID NO: 982268 - RNA, 22 nt, Human
uaccucacugggccucaguuuu

SEQ ID NO: 982269 - RNA, 22 nt, Human
acauagaaccuggcacauagua

SEQ ID NO: 982270 - RNA, 22 nt, Human
cuccuggcuuucccagaccagg

SEQ ID NO: 982271 - RNA, 22 nt, Human
ugcaccuucauuuuaggcagcu

SEQ ID NO: 982272 - RNA, 22 nt, Human
aaauaguucagcuuguaaaccc

SEQ ID NO: 982273 - RNA, 22 nt, Human
accuuuuauguaaauauauguu

SEQ ID NO: 982274 - RNA, 22 nt, Human
accuauuuaugcaauuaugaaa

SEQ ID NO: 982275 - RNA, 22 nt, Human
uuuuauugucaaugaagacaga

SEQ ID NO: 982276 - RNA, 22 nt, Human
uuuauaagaagcaaugucugag

SEQ ID NO: 982277 - RNA, 22 nt, Human
aaaaguaauugcaauuuuguag

SEQ ID NO: 982278 - RNA, 22 nt, Human
gcuggccacacugcugauggag

SEQ ID NO: 982279 - RNA, 22 nt, Human
guggccaagggacucuaaggca

SEQ ID NO: 982280 - RNA, 22 nt, Human
gucugucuguuguugagaagca

SEQ ID NO: 982281 - RNA, 22 nt, Human
uaaauaugcauguauccuuauc

SEQ ID NO: 982282 - RNA, 22 nt, Human
acuggccagguucaaaauacag

SEQ ID NO: 982283 - RNA, 22 nt, Human
auucacaaagaagggaaguaca

SEQ ID NO: 982284 - RNA, 22 nt, Human
cucaugucuucacccauucuaa

SEQ ID NO: 982285 - RNA, 22 nt, Human
ggccacaacuugcuccuagccc

SEQ ID NO: 982286 - RNA, 22 nt, Human
cuauuagguaugugguugcuau

SEQ ID NO: 982287 - RNA, 22 nt, Human
uuaauaaacaggugcagcugaa

SEQ ID NO: 982288 - RNA, 22 nt, Human
cugugccaggcccagcugacuu

SEQ ID NO: 982289 - RNA, 22 nt, Human
aacugcuguggccuaguacuua

SEQ ID NO: 982290 - RNA, 22 nt, Human
uaaaguauauuuuuucucaaua

SEQ ID NO: 982291 - RNA, 22 nt, Human
uccaagggcuuuggcgugaagu

SEQ ID NO: 982292 - RNA, 22 nt, Human
uuguauucauugcuuacccaau

SEQ ID NO: 982293 - RNA, 18 nt, Human
uguuaggaagggcacaca

SEQ ID NO: 982294 - RNA, 22 nt, Human
gacauaaaauucaauaauuugu

SEQ ID NO: 982295 - RNA, 22 nt, Human
uaggaugacacagcaaguauag

SEQ ID NO: 982296 - RNA, 19 nt, Human
aggucuaaucauaagacaa

SEQ ID NO: 982297 - RNA, 22 nt, Human
uccuggcccuguggccugcagu

SEQ ID NO: 982298 - RNA, 22 nt, Human
agcuccugaaaauccagacugg

SEQ ID NO: 982299 - RNA, 22 nt, Human
aucuacaggauaguuuaauauu

SEQ ID NO: 982300 - RNA, 22 nt, Human
uuuuaauacugcuauuguagga

SEQ ID NO: 982301 - RNA, 22 nt, Human
aguguacaguuuguaguacuac

SEQ ID NO: 982302 - RNA, 22 nt, Human
aaaguuugagugauuugacaca

SEQ ID NO: 982303 - RNA, 22 nt, Human
cugccuugguuucuagcagggc

SEQ ID NO: 982304 - RNA, 21 nt, Human
aaaaagcuggggcaugcaugc

SEQ ID NO: 982305 - RNA, 22 nt, Human
ccuggccaggcauggagucaca

SEQ ID NO: 982306 - RNA, 22 nt, Human
uccaagggcucauggacacuuu

SEQ ID NO: 982307 - RNA, 22 nt, Human
auagucacucuguuagguguuu

SEQ ID NO: 982308 - RNA, 22 nt, Human
agacucugcuaagaauauaauu

SEQ ID NO: 982309 - RNA, 17 nt, Human
aaauaugaccucaaagu

SEQ ID NO: 982310 - RNA, 22 nt, Human
uugcaguugucuuuccuaauuu

SEQ ID NO: 982311 - RNA, 22 nt, Human
uggaagaggcccaugacugccu

SEQ ID NO: 982312 - RNA, 22 nt, Human
uuaggaaucaccugcagaucuu

SEQ ID NO: 982313 - RNA, 20 nt, Human
ggccgaaauaauaguggcuu

SEQ ID NO: 982314 - RNA, 22 nt, Human
aaacugcugguugcuggccagc

SEQ ID NO: 982315 - RNA, 22 nt, Human
auacauacauguacacauaaau

SEQ ID NO: 982316 - RNA, 22 nt, Human
ucaucuaagagucuuacauuua

SEQ ID NO: 982317 - RNA, 22 nt, Human
augcaaaaguaacugugauuuu

SEQ ID NO: 982318 - RNA, 22 nt, Human
guuccaguaugauuccacccau

SEQ ID NO: 982319 - RNA, 22 nt, Human
aaagauuaaaucaaauugguca

SEQ ID NO: 982320 - RNA, 18 nt, Human
uggcagcaggaagccauu

SEQ ID NO: 982321 - RNA, 22 nt, Human
aaauaaguuaaacuagaaugau

SEQ ID NO: 982322 - RNA, 22 nt, Human
auuggucaggacuggcaugugg

SEQ ID NO: 982323 - RNA, 22 nt, Human
cuggccuagcucucugcuugaa

SEQ ID NO: 982324 - RNA, 22 nt, Human
aauucacauguugaaguccuaa

SEQ ID NO: 982325 - RNA, 23 nt, Human
agacaguggccgagagguacuag

SEQ ID NO: 982326 - RNA, 22 nt, Human
ggaagugaggaauuagguuuau

SEQ ID NO: 982327 - RNA, 22 nt, Human
aaaacagacagccaguguagag

SEQ ID NO: 982328 - RNA, 22 nt, Human
uccuugacugugaggaacuagc

SEQ ID NO: 982329 - RNA, 22 nt, Human
uuucuauuuuaaaggcauaugg

SEQ ID NO: 982330 - RNA, 22 nt, Human
acaccuuugccccaagucauag

SEQ ID NO: 982331 - RNA, 22 nt, Human
augcacuaugaugagcuagucu

SEQ ID NO: 982332 - RNA, 20 nt, Human
auucacaaagccaguguugc

SEQ ID NO: 982333 - RNA, 22 nt, Human
aaaugaugcucacagauuagug

SEQ ID NO: 982334 - RNA, 22 nt, Human
uuauuagagugcuuugagaaag

SEQ ID NO: 982335 - RNA, 22 nt, Human
uuaggauagucuguuagaaaag

SEQ ID NO: 982336 - RNA, 21 nt, Human
auuguuaucauugugcugugu

SEQ ID NO: 982337 - RNA, 22 nt, Human
uuggcagauuugucaguaagcu

SEQ ID NO: 982338 - RNA, 22 nt, Human
aauaagaaagagucagcuucag

SEQ ID NO: 982339 - RNA, 22 nt, Human
acucuggcccuccugcugccag

SEQ ID NO: 982340 - RNA, 22 nt, Human
uggcagcagacaucugaggucu

SEQ ID NO: 982341 - RNA, 22 nt, Human
ccuccuggugggcgcuucuggc

SEQ ID NO: 982342 - RNA, 22 nt, Human
auguuuuauauuuugcagcagu

SEQ ID NO: 982343 - RNA, 20 nt, Human
ccaauaaagcucuauaggga

SEQ ID NO: 982344 - RNA, 22 nt, Human
ucuuggcaauuugaucucaguu

SEQ ID NO: 982345 - RNA, 22 nt, Human
uagaguguuguaauugaaaagg

SEQ ID NO: 982346 - RNA, 22 nt, Human
acauuucagcgugcaugacaug

SEQ ID NO: 982347 - RNA, 22 nt, Human
aagaacauuuaugauggcauuu

SEQ ID NO: 982348 - RNA, 23 nt, Human
cuucacaaucaaaaucaguucug

SEQ ID NO: 982349 - RNA, 22 nt, Human
ucagggaaucagacucugcagc

SEQ ID NO: 982350 - RNA, 22 nt, Human
uaggauaugguagaaaucauuc

SEQ ID NO: 982351 - RNA, 22 nt, Human
aaacagucaugguugcuguuca

SEQ ID NO: 982352 - RNA, 22 nt, Human
uuauugagcacauaguaugugg

SEQ ID NO: 982353 - RNA, 18 nt, Human
gcacucugacugcagagc

SEQ ID NO: 982354 - RNA, 22 nt, Human
agggaaugcuccguauaaaucu

SEQ ID NO: 982355 - RNA, 22 nt, Human
ccugagccucuugcacgcucag

SEQ ID NO: 982356 - RNA, 22 nt, Human
uuuuaguuguacugucaacagu

SEQ ID NO: 982357 - RNA, 17 nt, Human
cagacaggcugucaccc

SEQ ID NO: 982358 - RNA, 22 nt, Human
ucugagccaaaauaaacagcau

SEQ ID NO: 982359 - RNA, 22 nt, Human
ccuuuucaacuaagauucugca

SEQ ID NO: 982360 - RNA, 22 nt, Human
gacacuaaaguauaggguaucu

SEQ ID NO: 982361 - RNA, 22 nt, Human
auucacaacugauccuugcuca

SEQ ID NO: 982362 - RNA, 22 nt, Human
gcugauguuuaguugauguuac

SEQ ID NO: 982363 - RNA, 22 nt, Human
cuguuuauuacacuggauagca

SEQ ID NO: 982364 - RNA, 22 nt, Human
gcugaaauucagauuccuaggc

SEQ ID NO: 982365 - RNA, 22 nt, Human
aaguuugugucagagcuguuac

SEQ ID NO: 982366 - RNA, 22 nt, Human
uacucugcaaguugaagguggc

SEQ ID NO: 982367 - RNA, 22 nt, Human
uuggccaagauacgagcacaua

SEQ ID NO: 982368 - RNA, 22 nt, Human
ugaagggggagauauaugugug

SEQ ID NO: 982369 - RNA, 22 nt, Human
auguggcauucuuggucauuuc

SEQ ID NO: 982370 - RNA, 22 nt, Human
uuucacaaucaaauggugaaau

SEQ ID NO: 982371 - RNA, 22 nt, Human
cucaaauauguggucagaaagc

SEQ ID NO: 982372 - RNA, 22 nt, Human
ucaaaacaaucauuggaugugc

SEQ ID NO: 982373 - RNA, 22 nt, Human
ggucuaaaaugagucuuccuag

SEQ ID NO: 982374 - RNA, 22 nt, Human
aauucacaauguguagucaugc

SEQ ID NO: 982375 - RNA, 22 nt, Human
uuaauaaaguaugaauuggaaa

SEQ ID NO: 982376 - RNA, 22 nt, Human
auucugaguccaugggggcagg

SEQ ID NO: 982377 - RNA, 22 nt, Human
uaggauguagcuaugucaucau

SEQ ID NO: 982378 - RNA, 22 nt, Human
auuuggcauaggcagaggccca

SEQ ID NO: 982379 - RNA, 22 nt, Human
gaguuuaacacuuggagaaaag

SEQ ID NO: 982380 - RNA, 22 nt, Human
auuuauuaagcaucugcuaugu

SEQ ID NO: 982381 - RNA, 22 nt, Human
ucuugaaggggggcaguguuga

SEQ ID NO: 982382 - RNA, 22 nt, Human
uuggccaacauggugaaacccc

SEQ ID NO: 982383 - RNA, 22 nt, Human
gcucugcuguggaauccucucc

SEQ ID NO: 982384 - RNA, 22 nt, Human
uagauaaauuagaaaguuuacu

SEQ ID NO: 982385 - RNA, 22 nt, Human
acuggccaugaacuugggaucu

SEQ ID NO: 982386 - RNA, 22 nt, Human
agcuauguauaaauaggccacu

SEQ ID NO: 982387 - RNA, 20 nt, Human
ucuguaaagacuccagaagc

SEQ ID NO: 982388 - RNA, 22 nt, Human
caaguaugagaaagcuauuacc

SEQ ID NO: 982389 - RNA, 22 nt, Human
uuauuaguguugauauuaggau

SEQ ID NO: 982390 - RNA, 22 nt, Human
ucuggccacuugcuucacacug

SEQ ID NO: 982391 - RNA, 22 nt, Human
ccugggcaggccggacgcuggg

SEQ ID NO: 982392 - RNA, 22 nt, Human
cagacaggcaggugcugcuuug

SEQ ID NO: 982393 - RNA, 22 nt, Human
caacugagcaguagcgucugga

SEQ ID NO: 982394 - RNA, 22 nt, Human
uggucaaaagaaagcucagaac

SEQ ID NO: 982395 - RNA, 22 nt, Human
agacauaagugcuaugacauug

SEQ ID NO: 982396 - RNA, 22 nt, Human
uucuuaagcaccuaaaaagugg

SEQ ID NO: 982397 - RNA, 22 nt, Human
auagugcaguggacugaguuaa

SEQ ID NO: 982398 - RNA, 22 nt, Human
cuggcgcaacagaaaaucugga

SEQ ID NO: 982399 - RNA, 21 nt, Human
uuuuauugaugaauggccacu

SEQ ID NO: 982400 - RNA, 22 nt, Human
uaaaaaguugaaaggacuuauc

SEQ ID NO: 982401 - RNA, 22 nt, Human
gagacagugguugcagaagcuc

SEQ ID NO: 982402 - RNA, 22 nt, Human
auaaaagaaguuuugguacuug

SEQ ID NO: 982403 - RNA, 19 nt, Human
cuuauuagagugagagcuu

SEQ ID NO: 982404 - RNA, 21 nt, Human
aacauuucaggauccaaauug

SEQ ID NO: 982405 - RNA, 21 nt, Human
auguaggguuugccuucucua

SEQ ID NO: 982406 - RNA, 22 nt, Human
gggaggagggugcuggcuaaac

SEQ ID NO: 982407 - RNA, 22 nt, Human
aaauaggagcuuaagcacuucu

SEQ ID NO: 982408 - RNA, 22 nt, Human
aggucaccauggcaugcuccac

SEQ ID NO: 982409 - RNA, 22 nt, Human
acuaugcucauuguuaauauuu

SEQ ID NO: 982410 - RNA, 22 nt, Human
uaugcacacauguaugcaugug

SEQ ID NO: 982411 - RNA, 22 nt, Human
uuggccaauccuauuggguggg

SEQ ID NO: 982412 - RNA, 21 nt, Human
aaguuuguucuuguauagucu

SEQ ID NO: 982413 - RNA, 22 nt, Human
ucuccuggcccugucgccaucu

SEQ ID NO: 982414 - RNA, 22 nt, Human
agcuuuguauuugagcauacga

SEQ ID NO: 982415 - RNA, 22 nt, Human
auuacacaggauuugccuuacu

SEQ ID NO: 982416 - RNA, 22 nt, Human
acuccugggugcauuucugauu

SEQ ID NO: 982417 - RNA, 22 nt, Human
uggcacauaguaggugcucaau

SEQ ID NO: 982418 - RNA, 22 nt, Human
uauuggauagcuugugcagaau

SEQ ID NO: 982419 - RNA, 22 nt, Human
auggccaaauaacagcuugcau

SEQ ID NO: 982420 - RNA, 21 nt, Human
uuccuggcggcagaaacguga

SEQ ID NO: 982421 - RNA, 22 nt, Human
cugcauucauaucagauagaag

SEQ ID NO: 982422 - RNA, 22 nt, Human
caguuuaaccuauccauuaugu

SEQ ID NO: 982423 - RNA, 22 nt, Human
uugauaaaaugaugaaaucacu

SEQ ID NO: 982424 - RNA, 22 nt, Human
ggucugaguagagggcuggcga

SEQ ID NO: 982425 - RNA, 22 nt, Human
gcauugaguccacucugucuuu

SEQ ID NO: 982426 - RNA, 22 nt, Human
uaaaccuugguagcaucuugcu

SEQ ID NO: 982427 - RNA, 22 nt, Human
acauucuaacauuguacagaua

SEQ ID NO: 982428 - RNA, 22 nt, Human
uuucacaacugcuuauuugaga

SEQ ID NO: 982429 - RNA, 22 nt, Human
uuucaaauaccauaaaccuaau

SEQ ID NO: 982430 - RNA, 22 nt, Human
cagggaauccauggucauaagg

SEQ ID NO: 982431 - RNA, 22 nt, Human
ggccaaauuuggccaugagcau

SEQ ID NO: 982432 - RNA, 22 nt, Human
auaaaacuuauuagaauugugu

SEQ ID NO: 982433 - RNA, 22 nt, Human
agaaguauaaagaauguuuaug

SEQ ID NO: 982434 - RNA, 16 nt, Human
ucucugcuucauaggu

SEQ ID NO: 982435 - RNA, 22 nt, Human
auuaaauacugcaggcuaagca

SEQ ID NO: 982436 - RNA, 22 nt, Human
auucuuuuuuaaggaauagaac

SEQ ID NO: 982437 - RNA, 22 nt, Human
auuuauuauugugguuacuucu

SEQ ID NO: 982438 - RNA, 22 nt, Human
guuuauuauucaacuucauguu

SEQ ID NO: 982439 - RNA, 22 nt, Human
caggaggcuccuagggcucugu

SEQ ID NO: 982440 - RNA, 22 nt, Human
guccucugggcagcugccccac

SEQ ID NO: 982441 - RNA, 22 nt, Human
caaaacauucagagagcucacu

SEQ ID NO: 982442 - RNA, 22 nt, Human
auccccagaaaauaggugccua

SEQ ID NO: 982443 - RNA, 22 nt, Human
ccaaggaggccccaggucagcu

SEQ ID NO: 982444 - RNA, 22 nt, Human
ucccagcagggccgaccagccu

SEQ ID NO: 982445 - RNA, 22 nt, Human
uaguccagccuuggguguagcc

SEQ ID NO: 982446 - RNA, 22 nt, Human
ucucacugggucacagcagagg

SEQ ID NO: 982447 - RNA, 18 nt, Human
uguacaguuaugagcauu

SEQ ID NO: 982448 - RNA, 22 nt, Human
gcuuccuggagggagagagcug

SEQ ID NO: 982449 - RNA, 22 nt, Human
ucucagggcagcaaggaagcau

SEQ ID NO: 982450 - RNA, 22 nt, Human
gccugcagaggugcugcuagcu

SEQ ID NO: 982451 - RNA, 22 nt, Human
auuguaaguagaaauguuaugg

SEQ ID NO: 982452 - RNA, 22 nt, Human
ccuccugggccuugcucuguga

SEQ ID NO: 982453 - RNA, 22 nt, Human
uuuucauuguuccucgagcauu

SEQ ID NO: 982454 - RNA, 22 nt, Human
agcagaaccacagcacuguuga

SEQ ID NO: 982455 - RNA, 22 nt, Human
gaggucagucagaccaggguuu

SEQ ID NO: 982456 - RNA, 22 nt, Human
uagccucucuccuccacaaccu

SEQ ID NO: 982457 - RNA, 22 nt, Human
aauaauuuugagagccuggaaa

SEQ ID NO: 982458 - RNA, 22 nt, Human
gcagguggcagaggugggaucu

SEQ ID NO: 982459 - RNA, 22 nt, Human
agccaggaauuggacaacacau

SEQ ID NO: 982460 - RNA, 22 nt, Human
gaagagcuuagacagaaucaaa

SEQ ID NO: 982461 - RNA, 22 nt, Human
acacagccgugaaucugcuucu

SEQ ID NO: 982462 - RNA, 22 nt, Human
aacaugucuggguauucacaag

SEQ ID NO: 982463 - RNA, 22 nt, Human
cagggagcuggcuggcgugagu

SEQ ID NO: 982464 - RNA, 21 nt, Human
cuugaaagguagagucuacag

SEQ ID NO: 982465 - RNA, 22 nt, Human
ccucucuguguggccucuccau

SEQ ID NO: 982466 - RNA, 22 nt, Human
cagagcugugauaaauagauau

SEQ ID NO: 982467 - RNA, 22 nt, Human
uuggccuuaaccucucugugcc

SEQ ID NO: 982468 - RNA, 22 nt, Human
ggucuaaaaugagucuuccuag

SEQ ID NO: 982469 - RNA, 22 nt, Human
uuccucuccucacaugagucac

SEQ ID NO: 982470 - RNA, 22 nt, Human
agauuuccaucuuuuucaugug

SEQ ID NO: 982471 - RNA, 22 nt, Human
ccugggcaggccggacgcuggg

SEQ ID NO: 982472 - RNA, 22 nt, Human
aguggggaagagcaugggcccu

SEQ ID NO: 982473 - RNA, 22 nt, Human
cagcuggaugggagaccauguu

SEQ ID NO: 982474 - RNA, 23 nt, Human
ugcucugggaggcccuggagagc

SEQ ID NO: 982475 - RNA, 22 nt, Human
gcaggagugacauggaugugga

SEQ ID NO: 982476 - RNA, 22 nt, Human
gaaaucugaaucuucuguuggu

SEQ ID NO: 982477 - RNA, 22 nt, Human
cugggcugcaguuccugguccu

SEQ ID NO: 982478 - RNA, 22 nt, Human
auacaucuaugccuuucugaca

SEQ ID NO: 982479 - RNA, 22 nt, Human
auaaaagaaguuuugguacuug

SEQ ID NO: 982480 - RNA, 22 nt, Human
cugcagccuaggugcagcuggg

SEQ ID NO: 982481 - RNA, 22 nt, Human
cucagcagagaccagggaggaa

SEQ ID NO: 982482 - RNA, 22 nt, Human
uggacucagaaguguucuuuua

SEQ ID NO: 982483 - RNA, 22 nt, Human
gcaggagcugcucuccugacga

SEQ ID NO: 982484 - RNA, 22 nt, Human
ggcugaguugagaggauuacuu

SEQ ID NO: 982485 - RNA, 22 nt, Human
cucuggagcauuucaccuacau

SEQ ID NO: 982486 - RNA, 22 nt, Human
ugagcccagagcccuuguaggg

SEQ ID NO: 982487 - RNA, 22 nt, Human
uuucaaugacacaaaagagaaa

SEQ ID NO: 982488 - RNA, 22 nt, Human
gucaucuuccuaguguuaacua

SEQ ID NO: 982489 - RNA, 22 nt, Human
ggcuggcuggcugguagacaag

SEQ ID NO: 982490 - RNA, 22 nt, Human
ucuguuccaguagaaaggugca

SEQ ID NO: 982491 - RNA, 22 nt, Human
ucuguaucacccguucccagaa

SEQ ID NO: 982492 - RNA, 22 nt, Human
cacugcuuucacaguuuguucc

SEQ ID NO: 982493 - RNA, 22 nt, Human
ggccucuggcaggcaggcccuc

SEQ ID NO: 982494 - RNA, 22 nt, Human
uggagcaagcuggagagaacau

SEQ ID NO: 982495 - RNA, 19 nt, Human
uacuuuuucaggacagagu

SEQ ID NO: 982496 - RNA, 22 nt, Human
acagcauugcuccaucucaaga

SEQ ID NO: 982497 - RNA, 22 nt, Human
ggcagcugagcauggcuaccuu

SEQ ID NO: 982498 - RNA, 22 nt, Human
uggcagaaguucacuaguagcu

SEQ ID NO: 982499 - RNA, 22 nt, Human
aaaaugugaucuacaaaugcaa

SEQ ID NO: 982500 - RNA, 20 nt, Human
ucagagucaucaaagauggu

SEQ ID NO: 982501 - RNA, 22 nt, Human
uccucuggggcgugguccugga

SEQ ID NO: 982502 - RNA, 22 nt, Human
cagacagaccugcaagggcaca

SEQ ID NO: 982503 - RNA, 22 nt, Human
acuggccaggcagcaguagcuu

SEQ ID NO: 982504 - RNA, 22 nt, Human
ccagguggcuucugcccgaugu

SEQ ID NO: 982505 - RNA, 22 nt, Human
uguaugcaccauuguauuaccu

SEQ ID NO: 982506 - RNA, 22 nt, Human
ugccaaggguaugggcaagaua

SEQ ID NO: 982507 - RNA, 22 nt, Human
uagcuuuaccauagaagaguau

SEQ ID NO: 982508 - RNA, 22 nt, Human
agccaugcaccuuacucuugcu

SEQ ID NO: 982509 - RNA, 22 nt, Human
aaugcacagcguuccaugcuug

SEQ ID NO: 982510 - RNA, 22 nt, Human
ggcacugaaccaggacacaagc

SEQ ID NO: 982511 - RNA, 22 nt, Human
uauuuccugcauggugauguaa

SEQ ID NO: 982512 - RNA, 22 nt, Human
ugucuuccucuuggcuugagcu

SEQ ID NO: 982513 - RNA, 22 nt, Human
ugaacagauggcccagcagagg

SEQ ID NO: 982514 - RNA, 22 nt, Human
aaguuucauguggagguagacu

SEQ ID NO: 982515 - RNA, 22 nt, Human
uggcccuguggaggucagugag

SEQ ID NO: 982516 - RNA, 22 nt, Human
agcagggcuucugugccugugc

SEQ ID NO: 982517 - RNA, 22 nt, Human
caguaugucuacuggacaaagu

SEQ ID NO: 982518 - RNA, 22 nt, Human
gcaggaugccagggcagcagcg

SEQ ID NO: 982519 - RNA, 18 nt, Human
cugaggccaacuacacug

SEQ ID NO: 982520 - RNA, 22 nt, Human
acaggcagggaccuuggcuaag

SEQ ID NO: 982521 - RNA, 22 nt, Human
ugggugcuucgucagcucugag

SEQ ID NO: 982522 - RNA, 17 nt, Human
gcugccaccuuuggagc

SEQ ID NO: 982523 - RNA, 22 nt, Human
ccucagggaggccucuguggcu

SEQ ID NO: 982524 - RNA, 22 nt, Human
aaacaaguguaaacuagucugu

SEQ ID NO: 982525 - RNA, 22 nt, Human
uggcacaugguaagugcuuaac

SEQ ID NO: 982526 - RNA, 21 nt, Human
uuuauuuauauaggacacaug

SEQ ID NO: 982527 - RNA, 22 nt, Human
auugaaagcacaaagaacaagu

SEQ ID NO: 982528 - RNA, 22 nt, Human
aggagcagaccguaguccugca

SEQ ID NO: 982529 - RNA, 22 nt, Human
ugccugggagugaccaagacuc

SEQ ID NO: 982530 - RNA, 22 nt, Human
ggagcagagcucuucaucugca

SEQ ID NO: 982531 - RNA, 22 nt, Human
ggcacagggagccgcaguugca

SEQ ID NO: 982532 - RNA, 22 nt, Human
aucaguuuguauaugaaacacu

SEQ ID NO: 982533 - RNA, 22 nt, Human
aaauaggagcuuaagcacuucu

SEQ ID NO: 982534 - RNA, 22 nt, Human
aaguucaaguaguguuacaugg

SEQ ID NO: 982535 - RNA, 17 nt, Human
cuccuggcagccucagg

SEQ ID NO: 982536 - RNA, 19 nt, Human
gcauuucucuuuacagcca

SEQ ID NO: 982537 - RNA, 22 nt, Human
uacagaaaaacuggcauugaag

SEQ ID NO: 982538 - RNA, 22 nt, Human
ccaggacuucgaggcuacagug

SEQ ID NO: 982539 - RNA, 22 nt, Human
caaauguguaaggaaguguuag

SEQ ID NO: 982540 - RNA, 21 nt, Human
cucaggauggcggccuggugg

SEQ ID NO: 982541 - RNA, 22 nt, Human
cagccagggagggcaaaugaga

SEQ ID NO: 982542 - RNA, 22 nt, Human
ccugggcucuauccugacccag

SEQ ID NO: 982543 - RNA, 22 nt, Human
acagacagauuuugucugaugu

SEQ ID NO: 982544 - RNA, 22 nt, Human
ccagcugauucgguggugguug

SEQ ID NO: 982545 - RNA, 22 nt, Human
gggacagcuguagugcuuggcu

SEQ ID NO: 982546 - RNA, 22 nt, Human
gccugccuuuuggaggcacauu

SEQ ID NO: 982547 - RNA, 22 nt, Human
ugaaggaaugaguauacuguuu

SEQ ID NO: 982548 - RNA, 22 nt, Human
ucugucacucuagagauggcag

SEQ ID NO: 982549 - RNA, 22 nt, Human
uucagcagucguccaggaaaag

SEQ ID NO: 982550 - RNA, 22 nt, Human
ucauugcaguugaguuguguua

SEQ ID NO: 982551 - RNA, 22 nt, Human
cagaggaggccaccgcauaggc

SEQ ID NO: 982552 - RNA, 22 nt, Human
uuuuauucuaaguaugauggga

SEQ ID NO: 982553 - RNA, 20 nt, Human
gugugaagcccucaggagga

SEQ ID NO: 982554 - RNA, 22 nt, Human
uaugaagaaguucugugaaaug

SEQ ID NO: 982555 - RNA, 22 nt, Human
uugacaagaaucguugccuugg

SEQ ID NO: 982556 - RNA, 22 nt, Human
agagaaaagaguucaggcuuug

SEQ ID NO: 982557 - RNA, 22 nt, Human
cauugacaguucuuuaaguugc

SEQ ID NO: 982558 - RNA, 22 nt, Human
aaggagagguuguccguguugu

SEQ ID NO: 982559 - RNA, 22 nt, Human
uggcucugagacacaggcucuc

SEQ ID NO: 982560 - RNA, 22 nt, Human
gagggacagcuaaagagaaauu

SEQ ID NO: 982561 - RNA, 22 nt, Human
cagcauugaucccaggcugugg

SEQ ID NO: 982562 - RNA, 22 nt, Human
gccucugggcucugccccuggc

SEQ ID NO: 982563 - RNA, 22 nt, Human
ccuggcucuguccucgcgcaaa

SEQ ID NO: 982564 - RNA, 22 nt, Human
cuggccaguuguccuggcuugg

SEQ ID NO: 982565 - RNA, 19 nt, Human
acacagggaucagaggguu

SEQ ID NO: 982566 - RNA, 21 nt, Human
acaguucaugauaacuccauc

SEQ ID NO: 982567 - RNA, 20 nt, Human
gaaaugugaccucuucugug

SEQ ID NO: 982568 - RNA, 23 nt, Human
uggcuucugccccauucucucca

SEQ ID NO: 982569 - RNA, 22 nt, Human
ugacacagauuagagacauacc

SEQ ID NO: 982570 - RNA, 22 nt, Human
cugggagguggagguugcauug

SEQ ID NO: 982571 - RNA, 22 nt, Human
uagucaaaccucagaauacccc

SEQ ID NO: 982572 - RNA, 22 nt, Human
ggcucugcugguaagaugccuc

SEQ ID NO: 982573 - RNA, 22 nt, Human
acaugcuuucuagguccuucug

SEQ ID NO: 982574 - RNA, 22 nt, Human
ucuguaaauccugcucagcaac

SEQ ID NO: 982575 - RNA, 20 nt, Human
accucugcaucaauccuuug

SEQ ID NO: 982576 - RNA, 22 nt, Human
cccacucccugcacgccugccg

SEQ ID NO: 982577 - RNA, 22 nt, Human
uaagaacauuuucggaaagaua

SEQ ID NO: 982578 - RNA, 22 nt, Human
cugggagcggcugucacugguu

SEQ ID NO: 982579 - RNA, 22 nt, Human
ccugcucugguuuagucagucu

SEQ ID NO: 982580 - RNA, 22 nt, Human
ucagcugccucucccuggaaga

SEQ ID NO: 982581 - RNA, 22 nt, Human
gcagagccgugaauggauuuca

SEQ ID NO: 982582 - RNA, 22 nt, Human
cuaaaugcccuacaaugacugg

SEQ ID NO: 982583 - RNA, 19 nt, Human
acaggcagaauugggugug

SEQ ID NO: 982584 - RNA, 22 nt, Human
uggggccugagguggagcugca

SEQ ID NO: 982585 - RNA, 22 nt, Human
gcuguuaggugcccugaccuug

SEQ ID NO: 982586 - RNA, 22 nt, Human
cugccugcuucugagccagagg

SEQ ID NO: 982587 - RNA, 22 nt, Human
auaaaaccaaagcagcaguguu

SEQ ID NO: 982588 - RNA, 19 nt, Human
uccuucagucagaucuggg

SEQ ID NO: 982589 - RNA, 22 nt, Human
gcagcauacagggagaguacuc

SEQ ID NO: 982590 - RNA, 22 nt, Human
ucuggcucaucucuccagguaa

SEQ ID NO: 982591 - RNA, 22 nt, Human
cccaggcagucuggcucuaaag

SEQ ID NO: 982592 - RNA, 22 nt, Human
caggacagguguucuagaucag

SEQ ID NO: 982593 - RNA, 22 nt, Human
ugccagggcugcuacuggcuga

SEQ ID NO: 982594 - RNA, 22 nt, Human
uagggcuauucugaguaauaau

SEQ ID NO: 982595 - RNA, 22 nt, Human
augagcuucccagacaggaugg

SEQ ID NO: 982596 - RNA, 22 nt, Human
cuuccucugcggcgccgggcgc

SEQ ID NO: 982597 - RNA, 22 nt, Human
uuuauagggacaguucuuggag

SEQ ID NO: 982598 - RNA, 22 nt, Human
caggcugccgugaagcaggccu

SEQ ID NO: 982599 - RNA, 22 nt, Human
caggccagguggcaggcaaaac

SEQ ID NO: 982600 - RNA, 22 nt, Human
aaaucaguuggaacacaagcag

SEQ ID NO: 982601 - RNA, 20 nt, Human
ugcagggcucugcuucucuc

SEQ ID NO: 982602 - RNA, 22 nt, Human
gguugccggggcaggacuggaa

SEQ ID NO: 982603 - RNA, 22 nt, Human
uaccucacugggccucaguuuu

SEQ ID NO: 982604 - RNA, 20 nt, Human
uccaagggcagcagaaucag

SEQ ID NO: 982605 - RNA, 22 nt, Human
uugcauuguugcaaugaaguau

SEQ ID NO: 982606 - RNA, 17 nt, Human
uccuucagggccucaca

SEQ ID NO: 982607 - RNA, 22 nt, Human
augcccgauaccuaguuaacuc

SEQ ID NO: 982608 - RNA, 22 nt, Human
uguggcugucuguucuccuagg

SEQ ID NO: 982609 - RNA, 22 nt, Human
ugaaggcauugaugaaggaauc

SEQ ID NO: 982610 - RNA, 22 nt, Human
cccagcagccagaaugaggagc

SEQ ID NO: 982611 - RNA, 22 nt, Human
agaaauguuuauggcugccuau

SEQ ID NO: 982612 - RNA, 23 nt, Human
ugaugggaaggaacgacuaccac

SEQ ID NO: 982613 - RNA, 23 nt, Human
ucuccuggcugcacuguggccac

SEQ ID NO: 982614 - RNA, 22 nt, Human
caaugugucaggaaaagggcca

SEQ ID NO: 982615 - RNA, 22 nt, Human
ucccagggacucucugccuucc

SEQ ID NO: 982616 - RNA, 22 nt, Human
aaggcagcagugcacgacugau

SEQ ID NO: 982617 - RNA, 22 nt, Human
uaaagguaguuuuaaaggugcu

SEQ ID NO: 982618 - RNA, 22 nt, Human
ugaagcagagaauuugacaguc

SEQ ID NO: 982619 - RNA, 22 nt, Human
agccugagagccaagcugugca

SEQ ID NO: 982620 - RNA, 22 nt, Human
auaauguguucaucuuacaauu

SEQ ID NO: 982621 - RNA, 22 nt, Human
gucccugcccuccugggacuca

SEQ ID NO: 982622 - RNA, 22 nt, Human
agaaaugggccuugggacacaa

SEQ ID NO: 982623 - RNA, 22 nt, Human
caagagcuggguggcaagcuag

SEQ ID NO: 982624 - RNA, 22 nt, Human
aaacuuuaagacaguccucaag

SEQ ID NO: 982625 - RNA, 22 nt, Human
ugggccagcaauugcugcucag

SEQ ID NO: 982626 - RNA, 22 nt, Human
ccugccaggacauugcuugaag

SEQ ID NO: 982627 - RNA, 22 nt, Human
agccacagcaacaagugcaauu

SEQ ID NO: 982628 - RNA, 22 nt, Human
gcagcuggcucagagagguggg

SEQ ID NO: 982629 - RNA, 22 nt, Human
guauucuugguuaucaaaauac

SEQ ID NO: 982630 - RNA, 22 nt, Human
aagguacaaaguauuauuuaaa

SEQ ID NO: 982631 - RNA, 22 nt, Human
aggcuccaugcaaaggcuguuu

SEQ ID NO: 982632 - RNA, 22 nt, Human
acauagcuuaaaugagaagaua

SEQ ID NO: 982633 - RNA, 22 nt, Human
gcagggacaccuuugugaagcu

SEQ ID NO: 982634 - RNA, 22 nt, Human
ggcuccuguccuccuggagcuc

SEQ ID NO: 982635 - RNA, 22 nt, Human
ucaggggcuugaggugcauguc

SEQ ID NO: 982636 - RNA, 22 nt, Human
uggucaggcugcucugcggcgu

SEQ ID NO: 982637 - RNA, 22 nt, Human
cccuggcaaaacacucucuuga

SEQ ID NO: 982638 - RNA, 22 nt, Human
uugggcugaaguagagggcaga

SEQ ID NO: 982639 - RNA, 22 nt, Human
auggccaagaaauugccgacug

SEQ ID NO: 982640 - RNA, 18 nt, Human
cguuuuuccgggauugca

SEQ ID NO: 982641 - RNA, 20 nt, Human
uguugauuggugucaucuca

SEQ ID NO: 982642 - RNA, 22 nt, Human
uggccgggccgggcgccuccac

SEQ ID NO: 982643 - RNA, 22 nt, Human
ggccaaaugaaggcaaugggac

SEQ ID NO: 982644 - RNA, 22 nt, Human
ugucccagacacaguaugcgcu

SEQ ID NO: 982645 - RNA, 22 nt, Human
gucagcagugucagcucugggg

SEQ ID NO: 982646 - RNA, 22 nt, Human
aaacagaaggguagguaaacau

SEQ ID NO: 982647 - RNA, 22 nt, Human
gcuggccugaccagccacaggc

SEQ ID NO: 982648 - RNA, 20 nt, Human
ccagcugagccaaggggaga

SEQ ID NO: 982649 - RNA, 22 nt, Human
uccuucagggggccgccugcac

SEQ ID NO: 982650 - RNA, 22 nt, Human
ccuccuggcccugggccuggaa

SEQ ID NO: 982651 - RNA, 22 nt, Human
aagcugccugggaggaagggcu

SEQ ID NO: 982652 - RNA, 22 nt, Human
agcuaggaaauugaggcugaga

SEQ ID NO: 982653 - RNA, 20 nt, Human
ccuggcuuugcaucugugau

SEQ ID NO: 982654 - RNA, 22 nt, Human
uggcagaggcucugugauguug

SEQ ID NO: 982655 - RNA, 22 nt, Human
gcacagggccuggcacauaaga

SEQ ID NO: 982656 - RNA, 22 nt, Human
ugggcacuauggcucugugcac

SEQ ID NO: 982657 - RNA, 22 nt, Human
aaaacaguuauaaacagaguca

SEQ ID NO: 982658 - RNA, 22 nt, Human
ccaggcugcucacaagcugccc

SEQ ID NO: 982659 - RNA, 22 nt, Human
ucucucagggggaaggcugaag

SEQ ID NO: 982660 - RNA, 22 nt, Human
gugcauugcgaugcagacgacc

SEQ ID NO: 982661 - RNA, 19 nt, Human
uagcugccuguuaccucca

SEQ ID NO: 982662 - RNA, 22 nt, Human
cugggcagcuaccaccacugcu

SEQ ID NO: 982663 - RNA, 22 nt, Human
ugcaguggaaucuggagagcag

SEQ ID NO: 982664 - RNA, 22 nt, Human
cuuccuguugucacagucugcg

SEQ ID NO: 982665 - RNA, 22 nt, Human
ucugcagaaguggcugggccac

SEQ ID NO: 982666 - RNA, 22 nt, Human
cugggcuacguguugacagcau

SEQ ID NO: 982667 - RNA, 22 nt, Human
ucuggagcgaggucccugucug

SEQ ID NO: 982668 - RNA, 22 nt, Human
ugucucugccagcuagcagaau

SEQ ID NO: 982669 - RNA, 22 nt, Human
ggcugcuggggacgugggagag

SEQ ID NO: 982670 - RNA, 22 nt, Human
acacauuaugagcaguugucuu

SEQ ID NO: 982671 - RNA, 22 nt, Human
aauucacauauacauuauuccu

SEQ ID NO: 982672 - RNA, 22 nt, Human
aguguacacuaaaugaauacaa

SEQ ID NO: 982673 - RNA, 22 nt, Human
agggcagaaaccaccuugaugg

SEQ ID NO: 982674 - RNA, 19 nt, Human
cagaguccuugaccagucc

SEQ ID NO: 982675 - RNA, 22 nt, Human
ugaaaucuucacuaagucucuu

SEQ ID NO: 982676 - RNA, 22 nt, Human
gggcaugguggcaggcaccugu

SEQ ID NO: 982677 - RNA, 22 nt, Human
acugucuuccaggucuggaggu

SEQ ID NO: 982678 - RNA, 21 nt, Human
ccacaggggcuccccugucag

SEQ ID NO: 982679 - RNA, 19 nt, Human
gcuggggccugaccagaca

SEQ ID NO: 982680 - RNA, 22 nt, Human
cccagcccagcguucgaggggu

SEQ ID NO: 982681 - RNA, 22 nt, Human
gcucccagggcagcgcagaaga

SEQ ID NO: 982682 - RNA, 22 nt, Human
ugccuggcaaugccagaagcca

SEQ ID NO: 982683 - RNA, 22 nt, Human
gggaguggauuauguggaccca

SEQ ID NO: 982684 - RNA, 22 nt, Human
ucacuugccuagcccaguucag

SEQ ID NO: 982685 - RNA, 22 nt, Human
cacccacccacugcucauuggc

SEQ ID NO: 982686 - RNA, 23 nt, Human
ugcagccacucaggagcucagug

SEQ ID NO: 982687 - RNA, 22 nt, Human
uaaagcaggccacauaugugau

SEQ ID NO: 982688 - RNA, 22 nt, Human
agggcagcagcggcccaggccu

SEQ ID NO: 982689 - RNA, 22 nt, Human
ugggacacccucacgccugcac

SEQ ID NO: 982690 - RNA, 22 nt, Human
ccucacagggccaggccccuca

SEQ ID NO: 982691 - RNA, 22 nt, Human
aagaaauguagagccuaguaaa

SEQ ID NO: 982692 - RNA, 22 nt, Human
aggguggcaguuacuggagcaa

SEQ ID NO: 982693 - RNA, 22 nt, Human
cacaggaggaggccagagcgua

SEQ ID NO: 982694 - RNA, 22 nt, Human
uuaaacagguuuuugaauggcc

SEQ ID NO: 982695 - RNA, 22 nt, Human
gagaggucaucucccaucagca

SEQ ID NO: 982696 - RNA, 22 nt, Human
uuggcagagaguaugcugaaga

SEQ ID NO: 982697 - RNA, 22 nt, Human
ucacagaauagcacuguaagcg

SEQ ID NO: 982698 - RNA, 22 nt, Human
gggccuggggugacguaccccu

SEQ ID NO: 982699 - RNA, 22 nt, Human
ccaaggcuucccagagaugcuc

SEQ ID NO: 982700 - RNA, 20 nt, Human
gcucccagccugcagucccc

SEQ ID NO: 982701 - RNA, 22 nt, Human
gaggcagcaugguaccuuggag

SEQ ID NO: 982702 - RNA, 22 nt, Human
aggagacaucuaacuguagguu

SEQ ID NO: 982703 - RNA, 22 nt, Human
gugaggugguacaauauuaacu

SEQ ID NO: 982704 - RNA, 22 nt, Human
gccccucccagucaggagcacu

SEQ ID NO: 982705 - RNA, 22 nt, Human
aaagcccauguggaaguacagg

SEQ ID NO: 982706 - RNA, 22 nt, Human
uggccuggaagagaggucgagg

SEQ ID NO: 982707 - RNA, 22 nt, Human
uucucuucaucucaguaaaugu

SEQ ID NO: 982708 - RNA, 22 nt, Human
acugccuugucucuugccuguu

SEQ ID NO: 982709 - RNA, 22 nt, Human
gugagcaggauuucauggugua

SEQ ID NO: 982710 - RNA, 22 nt, Human
gcugccucaggcaccuccuggc

SEQ ID NO: 982711 - RNA, 22 nt, Human
cagcuuggcuuccgcuuuacug

SEQ ID NO: 982712 - RNA, 22 nt, Human
aggagucagauaugggaaaguu

SEQ ID NO: 982713 - RNA, 22 nt, Human
uuauuagagauauuugguuagg

SEQ ID NO: 982714 - RNA, 22 nt, Human
gcccagcagaucucagugucuc

SEQ ID NO: 982715 - RNA, 22 nt, Human
ggagacagugguagggccuaag

SEQ ID NO: 982716 - RNA, 22 nt, Human
agccccaguccgcugcgggcgg

SEQ ID NO: 982717 - RNA, 22 nt, Human
cagggccuccuaaggcaucuaa

SEQ ID NO: 982718 - RNA, 22 nt, Human
gcagccccaggagacgcccagg

SEQ ID NO: 982719 - RNA, 22 nt, Human
uugcaaauauguucuccuauuc

SEQ ID NO: 982720 - RNA, 22 nt, Human
gaguuauucuagguccuuugua

SEQ ID NO: 982721 - RNA, 22 nt, Human
uuaacagagugccuggcaugua

SEQ ID NO: 982722 - RNA, 22 nt, Human
cugcucuggucucuucauguuu

SEQ ID NO: 982723 - RNA, 22 nt, Human
cuucuugcaauuuucaucuuau

SEQ ID NO: 982724 - RNA, 22 nt, Human
cagagcuguuacuauucaugaa

SEQ ID NO: 982725 - RNA, 22 nt, Human
gccuggcugagguggggaggca

SEQ ID NO: 982726 - RNA, 22 nt, Human
augugaaagagguguucagugg

SEQ ID NO: 982727 - RNA, 23 nt, Human
ugcagagggacugaagccagcuu

SEQ ID NO: 982728 - RNA, 22 nt, Human
agucccagaucuacaggaggga

SEQ ID NO: 982729 - RNA, 22 nt, Human
cccucagcuccacccucagcag

SEQ ID NO: 982730 - RNA, 21 nt, Human
gacaggggaagaagcaaggag

SEQ ID NO: 982731 - RNA, 22 nt, Human
cugcuuugaaaauaaacuuguc

SEQ ID NO: 982732 - RNA, 22 nt, Human
ggugugccuggggcuuagcugc

SEQ ID NO: 982733 - RNA, 20 nt, Human
cacaggccuugugagcagac

SEQ ID NO: 982734 - RNA, 22 nt, Human
cacagcagaaaguguaggagga

SEQ ID NO: 982735 - RNA, 22 nt, Human
gcuggggaggcagcagagaaca

SEQ ID NO: 982736 - RNA, 22 nt, Human
cagcugcccugccuugcccuua

SEQ ID NO: 982737 - RNA, 22 nt, Human
cugcucuggcuguguacuucag

SEQ ID NO: 982738 - RNA, 22 nt, Human
uaggacaggugaggggcugugg

SEQ ID NO: 982739 - RNA, 22 nt, Human
caugagauaauuuuucuccagu

SEQ ID NO: 982740 - RNA, 22 nt, Human
cugguuuagcuguaagguuccc

SEQ ID NO: 982741 - RNA, 22 nt, Human
ggagccuugggcgcucucccau

SEQ ID NO: 982742 - RNA, 22 nt, Human
accuuucauuaaagucuguagu

SEQ ID NO: 982743 - RNA, 22 nt, Human
gagaaacuuggaguuauucugg

SEQ ID NO: 982744 - RNA, 22 nt, Human
uagaaagugaagguuaauuaau

SEQ ID NO: 982745 - RNA, 22 nt, Human
cagggacaauggcagagccuga

SEQ ID NO: 982746 - RNA, 22 nt, Human
acucacauuucaucaggccaag

SEQ ID NO: 982747 - RNA, 19 nt, Human
uggcuuccaucucucucau

SEQ ID NO: 982748 - RNA, 22 nt, Human
ccuggagcccaaggcagugaga

SEQ ID NO: 982749 - RNA, 19 nt, Human
gaguuauugccagggcaug

SEQ ID NO: 982750 - RNA, 20 nt, Human
caaguguagaaacuaauaag

SEQ ID NO: 982751 - RNA, 22 nt, Human
ugagcuggucacuccuucugaa

SEQ ID NO: 982752 - RNA, 22 nt, Human
uuugcauugcauacaaggaacu

SEQ ID NO: 982753 - RNA, 22 nt, Human
cagcugugaauugucuuaucua

SEQ ID NO: 982754 - RNA, 19 nt, Human
agcagcuggagguggagug

SEQ ID NO: 982755 - RNA, 22 nt, Human
ggccuugguaaagggaugcaug

SEQ ID NO: 982756 - RNA, 21 nt, Human
ccugcagcaccagaaggagau

SEQ ID NO: 982757 - RNA, 22 nt, Human
ggucccagguugacagggagac

SEQ ID NO: 982758 - RNA, 22 nt, Human
ggagauagacuuggugagccac

SEQ ID NO: 982759 - RNA, 22 nt, Human
gucucagauaacauguauucua

SEQ ID NO: 982760 - RNA, 19 nt, Human
gcucugugaugcugagggg

SEQ ID NO: 982761 - RNA, 22 nt, Human
cugccagcacugccuccugagg

SEQ ID NO: 982762 - RNA, 22 nt, Human
agccagugcaacagcagugaag

SEQ ID NO: 982763 - RNA, 22 nt, Human
cccagggucccugcucucugug

SEQ ID NO: 982764 - RNA, 22 nt, Human
gucccagaggcuuuggccacag

SEQ ID NO: 982765 - RNA, 22 nt, Human
uagggcagccacccaggcugcu

SEQ ID NO: 982766 - RNA, 20 nt, Human
cccugcagccaugggagugg

SEQ ID NO: 982767 - RNA, 22 nt, Human
uggcucagaugcucuuccagug

SEQ ID NO: 982768 - RNA, 22 nt, Human
gggauggggucaacauguaccu

SEQ ID NO: 982769 - RNA, 19 nt, Human
gcucagagggcccugugcu

SEQ ID NO: 982770 - RNA, 22 nt, Human
agcuuuauuugucauucacggc

SEQ ID NO: 982771 - RNA, 22 nt, Human
cagacacaccaggcccauucug

SEQ ID NO: 982772 - RNA, 20 nt, Human
caccacagaauuggggacag

SEQ ID NO: 982773 - RNA, 22 nt, Human
ccuggaaguuggagguugcagu

SEQ ID NO: 982774 - RNA, 22 nt, Human
ccaggacucaguggggaaaggg

SEQ ID NO: 982775 - RNA, 21 nt, Human
cagcaaaucauugggcagacu

SEQ ID NO: 982776 - RNA, 22 nt, Human
ccaccaggacagcccugagggg

SEQ ID NO: 982777 - RNA, 22 nt, Human
ugggcucucuggcaggaaggcu

SEQ ID NO: 982778 - RNA, 18 nt, Human
gggcacuggggacuggag

SEQ ID NO: 982779 - RNA, 22 nt, Human
gucaucuucgcagagugauuuu

SEQ ID NO: 982780 - RNA, 22 nt, Human
cuggcagcgugagcagcaucca

SEQ ID NO: 982781 - RNA, 19 nt, Human
auacacauacguaaacuga

SEQ ID NO: 982782 - RNA, 19 nt, Human
agaggccucagcagcuggc

SEQ ID NO: 982783 - RNA, 22 nt, Human
augaagucuagcaagcauugaa

SEQ ID NO: 982784 - RNA, 22 nt, Human
cuguaauucacuagggucagcg

SEQ ID NO: 982785 - RNA, 22 nt, Human
gcagggcaaugaucccgagagg

SEQ ID NO: 982786 - RNA, 22 nt, Human
uagaacagaguuccagugauca

SEQ ID NO: 982787 - RNA, 22 nt, Human
caagaaaugggauuugacugcc

SEQ ID NO: 982788 - RNA, 20 nt, Human
uggcccuguuuucuccaggc

SEQ ID NO: 982789 - RNA, 22 nt, Human
cagcuggcccuuugguagccuu

SEQ ID NO: 982790 - RNA, 22 nt, Human
aggggcugggacagagccaagc

SEQ ID NO: 982791 - RNA, 19 nt, Human
cagagccucagagcuagaa

SEQ ID NO: 982792 - RNA, 22 nt, Human
uuugcauuuguuuagaaccuga

SEQ ID NO: 982793 - RNA, 17 nt, Human
cccugccaccaggaagc

SEQ ID NO: 982794 - RNA, 22 nt, Human
ucagagaaaugaaguagggauu

SEQ ID NO: 982795 - RNA, 22 nt, Human
ccaggccugcaucugcugcgca

SEQ ID NO: 982796 - RNA, 22 nt, Human
gcugcucuccauggccgugagu

SEQ ID NO: 982797 - RNA, 22 nt, Human
agggacaguuacaucaucagac

SEQ ID NO: 982798 - RNA, 20 nt, Human
ucacucugaugcuagggugg

SEQ ID NO: 982799 - RNA, 18 nt, Human
ucuggcucaggacugaac

SEQ ID NO: 982800 - RNA, 22 nt, Human
uauguacaaucagcaguucaua

SEQ ID NO: 982801 - RNA, 22 nt, Human
ucuuugcagaauuuaacuuugc

SEQ ID NO: 982802 - RNA, 22 nt, Human
aggccaaguagcuagcauugaa

SEQ ID NO: 982803 - RNA, 22 nt, Human
uauccaaacauauagucucucu

SEQ ID NO: 982804 - RNA, 22 nt, Human
uucagagcaucucuaaagccag

SEQ ID NO: 982805 - RNA, 21 nt, Human
aggagggcacaaggccaggaa

SEQ ID NO: 982806 - RNA, 22 nt, Human
uucagcaacauuuguugagugc

SEQ ID NO: 982807 - RNA, 22 nt, Human
uucagugugugauaccugcugu

SEQ ID NO: 982808 - RNA, 22 nt, Human
ugcagccaccaccucugcugaa

SEQ ID NO: 982809 - RNA, 22 nt, Human
uucauguaauuccauaagguaa

SEQ ID NO: 982810 - RNA, 22 nt, Human
ccggggacuuaaagugaaggaa

SEQ ID NO: 982811 - RNA, 22 nt, Human
ccaggcagagugcuccagaaag

SEQ ID NO: 982812 - RNA, 22 nt, Human
cagggugccuguccucagcaaa

SEQ ID NO: 982813 - RNA, 22 nt, Human
uccuggcccacuaugccagcau

SEQ ID NO: 982814 - RNA, 20 nt, Human
ccugucuggagacaaagaga

SEQ ID NO: 982815 - RNA, 22 nt, Human
cacugcaggucugagauggggg

SEQ ID NO: 982816 - RNA, 22 nt, Human
gcagccaccucccauggcgggg

SEQ ID NO: 982817 - RNA, 22 nt, Human
ggagcagacauaaccuuacaga

SEQ ID NO: 982818 - RNA, 22 nt, Human
gauuauauaauggaagcucuug

SEQ ID NO: 982819 - RNA, 22 nt, Human
gugagcagaacagguggcuucu

SEQ ID NO: 982820 - RNA, 22 nt, Human
cagagagaggccacugcuauua

SEQ ID NO: 982821 - RNA, 22 nt, Human
agguggggaaaccagcgauccc

SEQ ID NO: 982822 - RNA, 22 nt, Human
aaugauguauuaguacaacaca

SEQ ID NO: 982823 - RNA, 22 nt, Human
cugggcugucccaaccccaucc

SEQ ID NO: 982824 - RNA, 22 nt, Human
uggguggcacuucuggggucca

SEQ ID NO: 982825 - RNA, 22 nt, Human
cuaucuuucgauucuagcuuaa

SEQ ID NO: 982826 - RNA, 22 nt, Human
agcugccacaugcccaagggca

SEQ ID NO: 982827 - RNA, 22 nt, Human
ugcacagagagaugagacacgu

SEQ ID NO: 982828 - RNA, 22 nt, Human
ugcuuuauuuauaaaauagcaa

SEQ ID NO: 982829 - RNA, 22 nt, Human
ugcacagcgggugucugucagg

SEQ ID NO: 982830 - RNA, 19 nt, Human
gucacauuugucucccagg

SEQ ID NO: 982831 - RNA, 22 nt, Human
ucugggggcgaccagggacugc

SEQ ID NO: 982832 - RNA, 22 nt, Human
agaacagaggccuuauguuuca

SEQ ID NO: 982833 - RNA, 22 nt, Human
uauugaguuacagaaaauacuu

SEQ ID NO: 982834 - RNA, 22 nt, Human
gcacagggaggcuggccuggcc

SEQ ID NO: 982835 - RNA, 22 nt, Human
cagcuccugggccaucuccuag

SEQ ID NO: 982836 - RNA, 22 nt, Human
aaaguggucaccuucucauuuc

SEQ ID NO: 982837 - RNA, 20 nt, Human
uuguuucugcuauuuucuaa

SEQ ID NO: 982838 - RNA, 22 nt, Human
accaaacaaaauugugcacugu

SEQ ID NO: 982839 - RNA, 22 nt, Human
gugcccaggcccaaggcaccac

SEQ ID NO: 982840 - RNA, 22 nt, Human
uggucucugacucugaagaccc

SEQ ID NO: 982841 - RNA, 22 nt, Human
gggagcugguuccugcccucca

SEQ ID NO: 982842 - RNA, 22 nt, Human
cuggccagcauuuuugcuuuag

SEQ ID NO: 982843 - RNA, 22 nt, Human
gggagagaugcugauugccaau

SEQ ID NO: 982844 - RNA, 22 nt, Human
gcugucuuccuugcuccaaggg

SEQ ID NO: 982845 - RNA, 22 nt, Human
gagacugauggggcucccagaa

SEQ ID NO: 982846 - RNA, 22 nt, Human
aaugugcaggcucaaaccuugu

SEQ ID NO: 982847 - RNA, 22 nt, Human
uuuuuccuagugcuuucuggua

SEQ ID NO: 982848 - RNA, 22 nt, Human
aggucauuccuugucuucuugc

SEQ ID NO: 982849 - RNA, 20 nt, Human
cccuggccuguuucaugccc

SEQ ID NO: 982850 - RNA, 22 nt, Human
uguacuuccccaaugacagcac

SEQ ID NO: 982851 - RNA, 22 nt, Human
ucccagcagagccagcaagccg

SEQ ID NO: 982852 - RNA, 22 nt, Human
agacauuuggaagauacacaua

SEQ ID NO: 982853 - RNA, 22 nt, Human
gaugcagggcuggcaggagcuu

SEQ ID NO: 982854 - RNA, 22 nt, Human
ccucuugccaaucagcuacaga

SEQ ID NO: 982855 - RNA, 22 nt, Human
uugaagcacaaugucuuuuauc

SEQ ID NO: 982856 - RNA, 22 nt, Human
ggagcugaugacgucaccaugg

SEQ ID NO: 982857 - RNA, 22 nt, Human
aaaaacugcaauuacuuuuguc

SEQ ID NO: 982858 - RNA, 22 nt, Human
aggcacugauucucagaguuac

SEQ ID NO: 982859 - RNA, 19 nt, Human
uugguggugguuuugguuc

SEQ ID NO: 982860 - RNA, 22 nt, Human
gccagcucagaugcaggaagga

SEQ ID NO: 982861 - RNA, 22 nt, Human
gaaaugugugacaaguuucaau

SEQ ID NO: 982862 - RNA, 22 nt, Human
ccugccugcaccuucucugggg

SEQ ID NO: 982863 - RNA, 22 nt, Human
gguggggccugcuccagcggcc

SEQ ID NO: 982864 - RNA, 19 nt, Human
ucugaggguccagaugcau

SEQ ID NO: 982865 - RNA, 22 nt, Human
acucugcuaucuuagcaaaagg

SEQ ID NO: 982866 - RNA, 22 nt, Human
gcagcuuuuuggaugucaguua

SEQ ID NO: 982867 - RNA, 18 nt, Human
agagcagcggcaucacac

SEQ ID NO: 982868 - RNA, 22 nt, Human
cagucccacuagugccaauacc

SEQ ID NO: 982869 - RNA, 20 nt, Human
cuccagggaacagacuggag

SEQ ID NO: 982870 - RNA, 23 nt, Human
uugauacagaagaaucaguuugu

SEQ ID NO: 982871 - RNA, 22 nt, Human
cccagcccccgagugucuggaa

SEQ ID NO: 982872 - RNA, 22 nt, Human
ggcugucucugugacugccacc

SEQ ID NO: 982873 - RNA, 22 nt, Human
ugcugugcuggcggcagaggcc

SEQ ID NO: 982874 - RNA, 22 nt, Human
ugcuggaggggccugaccagga

SEQ ID NO: 982875 - RNA, 22 nt, Human
caggccuggguucaaaucccuu

SEQ ID NO: 982876 - RNA, 22 nt, Human
auauguguacgugcaguauaua

SEQ ID NO: 982877 - RNA, 22 nt, Human
ggcaacauucuccagauccuuu

SEQ ID NO: 982878 - RNA, 22 nt, Human
gcaggaaagguugagacuuugc

SEQ ID NO: 982879 - RNA, 23 nt, Human
gcugagguacauuuacaggaaga

SEQ ID NO: 982880 - RNA, 22 nt, Human
gacucugcugacuaguugacua

SEQ ID NO: 982881 - RNA, 22 nt, Human
uggccuggaaccuggcagggac

SEQ ID NO: 982882 - RNA, 22 nt, Human
uagaaaugauuuugaugcuuca

SEQ ID NO: 982883 - RNA, 22 nt, Human
caggggaagaugccaagggaga

SEQ ID NO: 982884 - RNA, 23 nt, Human
auuuccuacuauaaaagagguaa

SEQ ID NO: 982885 - RNA, 22 nt, Human
cuggugggaggcaagguggaag

SEQ ID NO: 982886 - RNA, 22 nt, Human
ucccaggguccucuucuggaau

SEQ ID NO: 982887 - RNA, 22 nt, Human
cuacauuuguucuauagcuuuu

SEQ ID NO: 982888 - RNA, 22 nt, Human
caggcacuggggaugcugggau

SEQ ID NO: 982889 - RNA, 22 nt, Human
agagcagguggcaacucuggga

SEQ ID NO: 982890 - RNA, 22 nt, Human
uuucuucucacccaggacagag

SEQ ID NO: 982891 - RNA, 22 nt, Human
agaggcaggagguugacuugag

SEQ ID NO: 982892 - RNA, 22 nt, Human
ccaggccuuucuucuuggucug

SEQ ID NO: 982893 - RNA, 17 nt, Human
uguuccauuugaccacc

SEQ ID NO: 982894 - RNA, 22 nt, Human
uguacaguauauuucaaagcca

SEQ ID NO: 982895 - RNA, 22 nt, Human
aggagccaagcagaacuaagga

SEQ ID NO: 982896 - RNA, 22 nt, Human
uacauuugcuuugauuuucagc

SEQ ID NO: 982897 - RNA, 22 nt, Human
ugagccagauaagggcucacgc

SEQ ID NO: 982898 - RNA, 22 nt, Human
guccucugcuucaugcccugau

SEQ ID NO: 982899 - RNA, 22 nt, Human
cugggaggugcagcaaaaauca

SEQ ID NO: 982900 - RNA, 22 nt, Human
ccagcugguguuccuuaggacc

SEQ ID NO: 982901 - RNA, 22 nt, Human
acagggaaguucugcaacagga

SEQ ID NO: 982902 - RNA, 22 nt, Human
ccucugcagcagagagccagag

SEQ ID NO: 982903 - RNA, 22 nt, Human
acagggcagagggcaguuggua

SEQ ID NO: 982904 - RNA, 20 nt, Human
agggucaguagcacagagcu

SEQ ID NO: 982905 - RNA, 22 nt, Human
uaagcauucaaugcuuagcacu

SEQ ID NO: 982906 - RNA, 22 nt, Human
gcuggagccauuggcuuggccu

SEQ ID NO: 982907 - RNA, 22 nt, Human
uggccaaauuugguguaacuug

SEQ ID NO: 982908 - RNA, 22 nt, Human
uggcugaaucugcagcaggaag

SEQ ID NO: 982909 - RNA, 22 nt, Human
ggaagggcaaaagagaugaacu

SEQ ID NO: 982910 - RNA, 22 nt, Human
auguguccacaggugugagaga

SEQ ID NO: 982911 - RNA, 22 nt, Human
ccuggcuggcaagaucgugaag

SEQ ID NO: 982912 - RNA, 22 nt, Human
cagagccaaaugcugugguuau

SEQ ID NO: 982913 - RNA, 22 nt, Human
uaugucuugcauuuuucaaacu

SEQ ID NO: 982914 - RNA, 22 nt, Human
ggcucaagcagucugccugccu

SEQ ID NO: 982915 - RNA, 22 nt, Human
agggugcauguuugcaagagug

SEQ ID NO: 982916 - RNA, 22 nt, Human
uagaaacucaggauacucuucc

SEQ ID NO: 982917 - RNA, 22 nt, Human
uggggacauagccagucuggcu

SEQ ID NO: 982918 - RNA, 22 nt, Human
ggcugcaggcaggguauccacu

SEQ ID NO: 982919 - RNA, 22 nt, Human
agaggugacauaggagaggcuc

SEQ ID NO: 982920 - RNA, 22 nt, Human
ggcucuggagacauguggagag

SEQ ID NO: 982921 - RNA, 22 nt, Human
gagcccuccauggagccaggca

SEQ ID NO: 982922 - RNA, 22 nt, Human
uccagggaugccagccauguug

SEQ ID NO: 982923 - RNA, 22 nt, Human
uugcaaauuauuuuagucccuu

SEQ ID NO: 982924 - RNA, 23 nt, Human
agucuuaauacagcucuuuucua

SEQ ID NO: 982925 - RNA, 22 nt, Human
uccugggcaaaaguaucuguga

SEQ ID NO: 982926 - RNA, 22 nt, Human
guggccaaaaggaagaagguua

SEQ ID NO: 982927 - RNA, 22 nt, Human
gugauaaagacgugucauaauu

SEQ ID NO: 982928 - RNA, 22 nt, Human
uuuuauugucaaugaagacaga

SEQ ID NO: 982929 - RNA, 22 nt, Human
gcaggaguuaggcgucguggau

SEQ ID NO: 982930 - RNA, 22 nt, Human
gcagagccugacgggauuuuuc

SEQ ID NO: 982931 - RNA, 22 nt, Human
ugccagcacaaguuaagagauc

SEQ ID NO: 982932 - RNA, 21 nt, Human
uuacuuuugcagcaaccuaau

SEQ ID NO: 982933 - RNA, 22 nt, Human
cugucuguucagauucauuacu

SEQ ID NO: 982934 - RNA, 22 nt, Human
aaaagguaguugccaaauaagg

SEQ ID NO: 982935 - RNA, 22 nt, Human
agccacgucccugucaggguca

SEQ ID NO: 982936 - RNA, 22 nt, Human
ggccauggaccccgagcugacc

SEQ ID NO: 982937 - RNA, 22 nt, Human
cuggugccuccucccugugcuu

SEQ ID NO: 982938 - RNA, 22 nt, Human
uuuuaugugcuggacuggcagu

SEQ ID NO: 982939 - RNA, 22 nt, Human
acuggccagaacuaagucacau

SEQ ID NO: 982940 - RNA, 22 nt, Human
acagcuggaggccccauugucc

SEQ ID NO: 982941 - RNA, 22 nt, Human
cauugcacuucugcuuuuccuc

SEQ ID NO: 982942 - RNA, 22 nt, Human
gggaagggagggaccucagucu

SEQ ID NO: 982943 - RNA, 22 nt, Human
cagaguguggcaucuuccaacu

SEQ ID NO: 982944 - RNA, 22 nt, Human
uggcacugggaugcuacuguua

SEQ ID NO: 982945 - RNA, 22 nt, Human
cugggcaauaugcugggccugg

SEQ ID NO: 982946 - RNA, 22 nt, Human
uuucauuauaaaaaguuggcuu

SEQ ID NO: 982947 - RNA, 22 nt, Human
gcucuguguugucagaggcacc

SEQ ID NO: 982948 - RNA, 22 nt, Human
uaaaauguuugcaagagaccag

SEQ ID NO: 982949 - RNA, 23 nt, Human
uguaaaaugggguaguguuacca

SEQ ID NO: 982950 - RNA, 22 nt, Human
ggugacugguuuaucuggcagu

SEQ ID NO: 982951 - RNA, 22 nt, Human
aucuaagaguuaacaucaagaa

SEQ ID NO: 982952 - RNA, 22 nt, Human
acagagcuuaggaugacuccca

SEQ ID NO: 982953 - RNA, 22 nt, Human
ucuuggagaauggcagagaagc

SEQ ID NO: 982954 - RNA, 21 nt, Human
ugauuuccaucuuaaaauaaa

SEQ ID NO: 982955 - RNA, 23 nt, Human
ugcugguguuuuugggaccaggg

SEQ ID NO: 982956 - RNA, 22 nt, Human
ucugucacaauuugcuuacucu

SEQ ID NO: 982957 - RNA, 22 nt, Human
uguuacacagcagaauagcaag

SEQ ID NO: 982958 - RNA, 22 nt, Human
auguuuauguugggcuauauuu

SEQ ID NO: 982959 - RNA, 22 nt, Human
agccucuguagaaagcagugug

SEQ ID NO: 982960 - RNA, 22 nt, Human
gcugggagcaaagccaugcaua

SEQ ID NO: 982961 - RNA, 22 nt, Human
ugcaagaggaauucuagaagca

SEQ ID NO: 982962 - RNA, 22 nt, Human
guuauuaguaagacucgcacau

SEQ ID NO: 982963 - RNA, 22 nt, Human
ugugccagccucuggcuguguc

SEQ ID NO: 982964 - RNA, 18 nt, Human
gcagcugcaguuguagcu

SEQ ID NO: 982965 - RNA, 22 nt, Human
caaaggcaacauauacuuguuu

SEQ ID NO: 982966 - RNA, 22 nt, Human
auuaaaagcuucccaagaguua

SEQ ID NO: 982967 - RNA, 22 nt, Human
uguggccagcagguggcugugu

SEQ ID NO: 982968 - RNA, 22 nt, Human
gcucccagacugaccagaggug

SEQ ID NO: 982969 - RNA, 22 nt, Human
cuggcucacaggugagaugcau

SEQ ID NO: 982970 - RNA, 22 nt, Human
guggccucugugcuccugccua

SEQ ID NO: 982971 - RNA, 22 nt, Human
aggccagagaggggaccagccu

SEQ ID NO: 982972 - RNA, 22 nt, Human
aaaagucugcucucauuucaga

SEQ ID NO: 982973 - RNA, 22 nt, Human
caggcuugggagcagagccacu

SEQ ID NO: 982974 - RNA, 20 nt, Human
uaugaagauaugugaacagc

SEQ ID NO: 982975 - RNA, 22 nt, Human
uggcuggggccacaguuuuccu

SEQ ID NO: 982976 - RNA, 22 nt, Human
ugcucucucaggccuggcccac

SEQ ID NO: 982977 - RNA, 22 nt, Human
uccugccucuugccuucuucac

SEQ ID NO: 982978 - RNA, 22 nt, Human
ggcuggucacaccacugcaggg

SEQ ID NO: 982979 - RNA, 22 nt, Human
aacaaguaaguuuauauauauu

SEQ ID NO: 982980 - RNA, 22 nt, Human
ggcuucagugacuggugcccuc

SEQ ID NO: 982981 - RNA, 22 nt, Human
guguuuccaguucagaaagcaa

SEQ ID NO: 982982 - RNA, 21 nt, Human
agcugagcccagaagacuggu

SEQ ID NO: 982983 - RNA, 22 nt, Human
auccaaaccuggacaugagugg

SEQ ID NO: 982984 - RNA, 22 nt, Human
uccauaagcagguucuuccuga

SEQ ID NO: 982985 - RNA, 22 nt, Human
cggcagcaaaggaagccagguc

SEQ ID NO: 982986 - RNA, 22 nt, Human
aggcccugcuuuccagagcuca

SEQ ID NO: 982987 - RNA, 19 nt, Human
guaagggcuaauggacuau

SEQ ID NO: 982988 - RNA, 22 nt, Human
auucagcauaaucaguagcuug

SEQ ID NO: 982989 - RNA, 22 nt, Human
uccuucagucuucugagccaua

SEQ ID NO: 982990 - RNA, 20 nt, Human
caagcccucuuuagccugcc

SEQ ID NO: 982991 - RNA, 22 nt, Human
guguccacggcugagaaugauu

SEQ ID NO: 982992 - RNA, 22 nt, Human
cugggacuuuacccuguggccc

SEQ ID NO: 982993 - RNA, 22 nt, Human
ugcuggggagugauugaccauc

SEQ ID NO: 982994 - RNA, 22 nt, Human
uccugcaggccuguucccagua

SEQ ID NO: 982995 - RNA, 22 nt, Human
gggcugugggacccggcacuuu

SEQ ID NO: 982996 - RNA, 22 nt, Human
ugucuuaauaugugcauucugu

SEQ ID NO: 982997 - RNA, 22 nt, Human
cgggcuggcugcagcugcugga

SEQ ID NO: 982998 - RNA, 22 nt, Human
ccugccaggagcuggugcugca

SEQ ID NO: 982999 - RNA, 23 nt, Human
cuggccuccgacacuggccaaga

SEQ ID NO: 983000 - RNA, 22 nt, Human
uccagcagaaaagagguaggga

SEQ ID NO: 983001 - RNA, 22 nt, Human
ggaaaguggugguggaaagagg

SEQ ID NO: 983002 - RNA, 22 nt, Human
ucccagagcaguacuccaggag

SEQ ID NO: 983003 - RNA, 22 nt, Human
augaugugugcugaucaagcuu

SEQ ID NO: 983004 - RNA, 22 nt, Human
cccaagaucuuucgugcacuaa

SEQ ID NO: 983005 - RNA, 22 nt, Human
uauucacagcugccgcacucag

SEQ ID NO: 983006 - RNA, 22 nt, Human
cuccagggaugagacagaguag

SEQ ID NO: 983007 - RNA, 22 nt, Human
agcagcugaucaaagcacuuau

SEQ ID NO: 983008 - RNA, 22 nt, Human
uagagcuggaaaacugcaggua

SEQ ID NO: 983009 - RNA, 22 nt, Human
ggcugcugggaauaugccagcu

SEQ ID NO: 983010 - RNA, 22 nt, Human
ggccugcucugcagccucuaca

SEQ ID NO: 983011 - RNA, 22 nt, Human
aagaugcagcuuccacuuuugc

SEQ ID NO: 983012 - RNA, 20 nt, Human
ccagucucuaucagaaauaa

SEQ ID NO: 983013 - RNA, 22 nt, Human
acauuucugcaucucagagcua

SEQ ID NO: 983014 - RNA, 22 nt, Human
ugaaagcagugccaugauuaug

SEQ ID NO: 983015 - RNA, 22 nt, Human
uuaggauagucuguuagaaaag

SEQ ID NO: 983016 - RNA, 22 nt, Human
gcagaugguggggcaggaaaau

SEQ ID NO: 983017 - RNA, 22 nt, Human
gaagagcuaaaggcacaggcuu

SEQ ID NO: 983018 - RNA, 22 nt, Human
gcaggagcagucaggggcagcu

SEQ ID NO: 983019 - RNA, 22 nt, Human
augcaagauguauagaagacuu

SEQ ID NO: 983020 - RNA, 22 nt, Human
ggugccaggcucccagcucagg

SEQ ID NO: 983021 - RNA, 23 nt, Human
ugcuguccaacagacuggccaug

SEQ ID NO: 983022 - RNA, 21 nt, Human
cagagcuguccaaacccugac

SEQ ID NO: 983023 - RNA, 22 nt, Human
cccaguccuaaagcagacgcca

SEQ ID NO: 983024 - RNA, 22 nt, Human
agcagggggccacagucacagc

SEQ ID NO: 983025 - RNA, 22 nt, Human
gaaugugucacccugucccaug

SEQ ID NO: 983026 - RNA, 22 nt, Human
ucaugacaacuauauuauucca

SEQ ID NO: 983027 - RNA, 22 nt, Human
gggcugugcugaguaggaggug

SEQ ID NO: 983028 - RNA, 22 nt, Human
cuuuguaucuaaauaucuugaa

SEQ ID NO: 983029 - RNA, 22 nt, Human
auauucacugagcauaaagcca

SEQ ID NO: 983030 - RNA, 22 nt, Human
gugcauuucucauacacuaaau

SEQ ID NO: 983031 - RNA, 22 nt, Human
guugaguggguuaggaugcuga

SEQ ID NO: 983032 - RNA, 23 nt, Human
uagagcagggaaaucugucagag

SEQ ID NO: 983033 - RNA, 22 nt, Human
cagcccagcagucuuagccugc

SEQ ID NO: 983034 - RNA, 22 nt, Human
cucccuggugacucccaaagcu

SEQ ID NO: 983035 - RNA, 22 nt, Human
cacaguuucuauaggucagaau

SEQ ID NO: 983036 - RNA, 22 nt, Human
uagcugccuagacagcuauagc

SEQ ID NO: 983037 - RNA, 22 nt, Human
uucaaaacagcuagauauugga

SEQ ID NO: 983038 - RNA, 22 nt, Human
ucaguuuuuaaaugauauaauu

SEQ ID NO: 983039 - RNA, 22 nt, Human
ggccccugcggacugccuagag

SEQ ID NO: 983040 - RNA, 22 nt, Human
ucauuacagagauauaaucuac

SEQ ID NO: 983041 - RNA, 22 nt, Human
ucugccugccagucugguccuc

SEQ ID NO: 983042 - RNA, 21 nt, Human
gggucugaauaucuggugcug

SEQ ID NO: 983043 - RNA, 22 nt, Human
ggucccaggaagugcggcggcg

SEQ ID NO: 983044 - RNA, 22 nt, Human
gucccugcaucaccacgggacu

SEQ ID NO: 983045 - RNA, 22 nt, Human
cucugggcaccaaagagcagcu

SEQ ID NO: 983046 - RNA, 22 nt, Human
aaaugucuuuaucucauguaac

SEQ ID NO: 983047 - RNA, 18 nt, Human
uucaccagugugaugggu

SEQ ID NO: 983048 - RNA, 18 nt, Human
agaaggagcuaugggcag

SEQ ID NO: 983049 - RNA, 22 nt, Human
acagaguauuggaaaggcagug

SEQ ID NO: 983050 - RNA, 22 nt, Human
ucaagagacaggacguguuuca

SEQ ID NO: 983051 - RNA, 22 nt, Human
cucuguagaaacagggcagaag

SEQ ID NO: 983052 - RNA, 20 nt, Human
acauguacuaaugaauacag

SEQ ID NO: 983053 - RNA, 22 nt, Human
ugucauuuaguccucugugugu

SEQ ID NO: 983054 - RNA, 22 nt, Human
gcugccugauuuacauagugaa

SEQ ID NO: 983055 - RNA, 22 nt, Human
cagagaaacucagauagcugau

SEQ ID NO: 983056 - RNA, 22 nt, Human
cagugccucuuaagugucaccc

SEQ ID NO: 983057 - RNA, 22 nt, Human
uagaaaucagcaggcauaugua

SEQ ID NO: 983058 - RNA, 22 nt, Human
gaguuauugaguauagaaugua

SEQ ID NO: 983059 - RNA, 22 nt, Human
gccuccugaaaggaagagcucc

SEQ ID NO: 983060 - RNA, 22 nt, Human
gggcuggggcucaauaauuugu

SEQ ID NO: 983061 - RNA, 22 nt, Human
agcaggcuccuuccuucucugg

SEQ ID NO: 983062 - RNA, 16 nt, Human
gccuggaguggcaggg

SEQ ID NO: 983063 - RNA, 22 nt, Human
gucauuguguggacauggagaa

SEQ ID NO: 983064 - RNA, 22 nt, Human
ccagugcacagccaggcaggug

SEQ ID NO: 983065 - RNA, 22 nt, Human
cugcccuguggcucugagucau

SEQ ID NO: 983066 - RNA, 22 nt, Human
uuccucucaacaugccugccgg

SEQ ID NO: 983067 - RNA, 22 nt, Human
agcuggguggagggcccacggu

SEQ ID NO: 983068 - RNA, 22 nt, Human
caggggcuguggcacauggugu

SEQ ID NO: 983069 - RNA, 22 nt, Human
ggcucugcgcgguaaagugacu

SEQ ID NO: 983070 - RNA, 23 nt, Human
ucuccagugucucuucauugagu

SEQ ID NO: 983071 - RNA, 18 nt, Human
cagcugccagcucaugga

SEQ ID NO: 983072 - RNA, 22 nt, Human
gccaggcagcugggagggugcc

SEQ ID NO: 983073 - RNA, 19 nt, Human
ggcucagggcgcugccgcc

SEQ ID NO: 983074 - RNA, 22 nt, Human
ucaggcaggcagagggcaaaug

SEQ ID NO: 983075 - RNA, 21 nt, Human
gacaggacuagaccagagcuc

SEQ ID NO: 983076 - RNA, 22 nt, Human
uaggggugaggccaggcaucag

SEQ ID NO: 983077 - RNA, 22 nt, Human
ggcagcaucacuugucuccagc

SEQ ID NO: 983078 - RNA, 21 nt, Human
cggccaaauuccuccuaggga

SEQ ID NO: 983079 - RNA, 22 nt, Human
uucuggaggccccuuccuucuc

SEQ ID NO: 983080 - RNA, 22 nt, Human
acugggccggugcagaguaguu

SEQ ID NO: 983081 - RNA, 22 nt, Human
aguuauucauuuauucuguaca

SEQ ID NO: 983082 - RNA, 22 nt, Human
caaaguuuaaaguagauuucag

SEQ ID NO: 983083 - RNA, 22 nt, Human
cagaacauucacucauaugugg

SEQ ID NO: 983084 - RNA, 22 nt, Human
uacaucuauacugaucuacauu

SEQ ID NO: 983085 - RNA, 19 nt, Human
gagcacagcggcauuuggu

SEQ ID NO: 983086 - RNA, 22 nt, Human
gcucagaggcacgaccucuugg

SEQ ID NO: 983087 - RNA, 22 nt, Human
auaguacacauccuacaauguu

SEQ ID NO: 983088 - RNA, 22 nt, Human
auauuaaugagcaaguaaguga

SEQ ID NO: 983089 - RNA, 22 nt, Human
gggugacauuucccaaugagcc

SEQ ID NO: 983090 - RNA, 22 nt, Human
gcaggagagccagcaggcuucc

SEQ ID NO: 983091 - RNA, 22 nt, Human
ucccaggauguuggcggcaggu

SEQ ID NO: 983092 - RNA, 22 nt, Human
auguuuaaaggagucagagacu

SEQ ID NO: 983093 - RNA, 22 nt, Human
agcugccagcaucccggaaggg

SEQ ID NO: 983094 - RNA, 22 nt, Human
uguuuuauuucuccaagaggga

SEQ ID NO: 983095 - RNA, 22 nt, Human
ucauugaauuucacagcuuuau

SEQ ID NO: 983096 - RNA, 22 nt, Human
augggagugacagggccacugg

SEQ ID NO: 983097 - RNA, 22 nt, Human
gugcaugugucuuuauaguagc

SEQ ID NO: 983098 - RNA, 22 nt, Human
aaugagcugcugcuguuccacc

SEQ ID NO: 983099 - RNA, 22 nt, Human
aagccagguguuuaggccagcg

SEQ ID NO: 983100 - RNA, 22 nt, Human
gugacagaguuuuagaucucau

SEQ ID NO: 983101 - RNA, 22 nt, Human
cugaagccaugugcucacuggu

SEQ ID NO: 983102 - RNA, 22 nt, Human
ggccagaaaguuaagcuguggc

SEQ ID NO: 983103 - RNA, 22 nt, Human
ucacuuaaaaauucuaguuaug

SEQ ID NO: 983104 - RNA, 22 nt, Human
cucucuggcacuucauugcugu

SEQ ID NO: 983105 - RNA, 19 nt, Human
cagcugcaccgugaccauc

SEQ ID NO: 983106 - RNA, 22 nt, Human
uuccuggcauagagagggcaca

SEQ ID NO: 983107 - RNA, 22 nt, Human
cugagcugggaguagagacucu

SEQ ID NO: 983108 - RNA, 22 nt, Human
cuggagaggcugggaacagguu

SEQ ID NO: 983109 - RNA, 22 nt, Human
aguacagaccugucucuuccug

SEQ ID NO: 983110 - RNA, 22 nt, Human
cacagggcaccaguuggccauc

SEQ ID NO: 983111 - RNA, 22 nt, Human
gcucagagcacucagacucagc

SEQ ID NO: 983112 - RNA, 22 nt, Human
cugagccaugagccugcgccca

SEQ ID NO: 983113 - RNA, 22 nt, Human
agggccagcacuccuggcagga

SEQ ID NO: 983114 - RNA, 22 nt, Human
ccuuucucuggcagcaggacag

SEQ ID NO: 983115 - RNA, 22 nt, Human
caaaugcauagaaagaugaaac

SEQ ID NO: 983116 - RNA, 22 nt, Human
cacagggcagguacucucagag

SEQ ID NO: 983117 - RNA, 19 nt, Human
gcuggccacgccccaguug

SEQ ID NO: 983118 - RNA, 21 nt, Human
uccucugcagugagguggccu

SEQ ID NO: 983119 - RNA, 22 nt, Human
guguguccucaguaguggcaug

SEQ ID NO: 983120 - RNA, 22 nt, Human
cuggguggcuguccagccagcc

SEQ ID NO: 983121 - RNA, 22 nt, Human
acuggccaugggauuuauauuu

SEQ ID NO: 983122 - RNA, 22 nt, Human
uuggccaaaggaaagacuacug

SEQ ID NO: 983123 - RNA, 22 nt, Human
gcagggugccgacuucagggau

SEQ ID NO: 983124 - RNA, 22 nt, Human
uagcugugagcacccaggcugu

SEQ ID NO: 983125 - RNA, 23 nt, Human
uugcuucugugcaauucaguacu

SEQ ID NO: 983126 - RNA, 22 nt, Human
cugcugucauagccaucccucc

SEQ ID NO: 983127 - RNA, 21 nt, Human
ugaaaguuggagucaaaugua

SEQ ID NO: 983128 - RNA, 23 nt, Human
aggcccugccugucccucuuuuu

SEQ ID NO: 983129 - RNA, 22 nt, Human
gcaggguaggugacagguaguc

SEQ ID NO: 983130 - RNA, 22 nt, Human
ucagaagcaggagugugcacaa

SEQ ID NO: 983131 - RNA, 22 nt, Human
aaggucauuuuuuccucuguug

SEQ ID NO: 983132 - RNA, 22 nt, Human
acccagcucuuugauggucuug

SEQ ID NO: 983133 - RNA, 19 nt, Human
ggccaggcugacugugguc

SEQ ID NO: 983134 - RNA, 21 nt, Human
auguaggguuugccuucucua

SEQ ID NO: 983135 - RNA, 22 nt, Human
cagggguguuuuuggccaggag

SEQ ID NO: 983136 - RNA, 22 nt, Human
uggcccugacacgugguacugg

SEQ ID NO: 983137 - RNA, 22 nt, Human
ucuccaagcagggcugcaaggc

SEQ ID NO: 983138 - RNA, 22 nt, Human
cucugagagcggucuguggcuu

SEQ ID NO: 983139 - RNA, 22 nt, Human
uauuucuuguuauucucguuga

SEQ ID NO: 983140 - RNA, 17 nt, Human
uauguaguacuuauaaa

SEQ ID NO: 983141 - RNA, 22 nt, Human
ggcuggaaaagacaaagcuauu

SEQ ID NO: 983142 - RNA, 22 nt, Human
accuuaaaacugacacauggag

SEQ ID NO: 983143 - RNA, 22 nt, Human
cagaggcucuuccucacugccc

SEQ ID NO: 983144 - RNA, 22 nt, Human
uuuuccuacugauaaacaguua

SEQ ID NO: 983145 - RNA, 22 nt, Human
gccucugcaugcucagcaccca

SEQ ID NO: 983146 - RNA, 22 nt, Human
ccuggaugauccaugucaugga

SEQ ID NO: 983147 - RNA, 22 nt, Human
uuggcagauuugucaguaagcu

SEQ ID NO: 983148 - RNA, 22 nt, Human
acacagggcggaaagcaugaga

SEQ ID NO: 983149 - RNA, 22 nt, Human
ugaggcuggcaaggcugguauu

SEQ ID NO: 983150 - RNA, 22 nt, Human
uaggaugaucuuguagagagau

SEQ ID NO: 983151 - RNA, 19 nt, Human
uagaaugcccacuuaaaaa

SEQ ID NO: 983152 - RNA, 22 nt, Human
cuggguggcagagccugcagug

SEQ ID NO: 983153 - RNA, 22 nt, Human
cagccccucacagagcuguccu

SEQ ID NO: 983154 - RNA, 22 nt, Human
cccaucaggaacccaggagccc

SEQ ID NO: 983155 - RNA, 22 nt, Human
aaaguguugauaugugacaucc

SEQ ID NO: 983156 - RNA, 22 nt, Human
uuccucagagggcgcuggggaa

SEQ ID NO: 983157 - RNA, 22 nt, Human
ucacagaaauaagauaguuauu

SEQ ID NO: 983158 - RNA, 20 nt, Human
aggaagccaaaggcugucuu

SEQ ID NO: 983159 - RNA, 22 nt, Human
gauggcagguaguggucucauc

SEQ ID NO: 983160 - RNA, 21 nt, Human
gcucccuggcugugugaccug

SEQ ID NO: 983161 - RNA, 22 nt, Human
aaaaagcuuaaaugagcaguuc

SEQ ID NO: 983162 - RNA, 22 nt, Human
ccagagccugcugagccccauu

SEQ ID NO: 983163 - RNA, 19 nt, Human
gcacugaagaguuggucac

SEQ ID NO: 983164 - RNA, 22 nt, Human
uggaagcaucacuucuugccug

SEQ ID NO: 983165 - RNA, 22 nt, Human
gccuggagacagcagaggcggc

SEQ ID NO: 983166 - RNA, 22 nt, Human
ugccagggugucaggagagcua

SEQ ID NO: 983167 - RNA, 22 nt, Human
cuggacuuuggcccaucugcca

SEQ ID NO: 983168 - RNA, 20 nt, Human
cuuggccuacuuagcuuugu

SEQ ID NO: 983169 - RNA, 22 nt, Human
aagcucugcucagcagacuagg

SEQ ID NO: 983170 - RNA, 22 nt, Human
gagcagugagugaauguugccu

SEQ ID NO: 983171 - RNA, 22 nt, Human
cuucaagaagacagcagagcau

SEQ ID NO: 983172 - RNA, 22 nt, Human
aacaugaagguaggaugguuuu

SEQ ID NO: 983173 - RNA, 22 nt, Human
acagaaauuagcagugaguuua

SEQ ID NO: 983174 - RNA, 19 nt, Human
ucuaacagaagugucgucc

SEQ ID NO: 983175 - RNA, 22 nt, Human
guuauugcaguauagaggucua

SEQ ID NO: 983176 - RNA, 22 nt, Human
auuguaucuugucauuaugcau

SEQ ID NO: 983177 - RNA, 22 nt, Human
cagggagggacaauugucaccu

SEQ ID NO: 983178 - RNA, 22 nt, Human
aaucaguauugguauagaauga

SEQ ID NO: 983179 - RNA, 22 nt, Human
gaggggcugcccuggugucagg

SEQ ID NO: 983180 - RNA, 22 nt, Human
gcauuuaaauuugaacuucaga

SEQ ID NO: 983181 - RNA, 19 nt, Human
gcccugcaggagguggggc

SEQ ID NO: 983182 - RNA, 22 nt, Human
cccuggagguggagguugcagg

SEQ ID NO: 983183 - RNA, 22 nt, Human
acaaaguuugugguauuccaag

SEQ ID NO: 983184 - RNA, 22 nt, Human
guggcugcuacagagcuggagg

SEQ ID NO: 983185 - RNA, 22 nt, Human
ugaagcaggaucguuugcuuca

SEQ ID NO: 983186 - RNA, 22 nt, Human
cucaguuucuucauauuguagg

SEQ ID NO: 983187 - RNA, 22 nt, Human
ugugacagaucuuuaaauaaug

SEQ ID NO: 983188 - RNA, 23 nt, Human
ugcucccaggugacgcugcuguu

SEQ ID NO: 983189 - RNA, 22 nt, Human
cccuggaagguucucuggcuca

SEQ ID NO: 983190 - RNA, 22 nt, Human
agccagcagggcuuagaggaca

SEQ ID NO: 983191 - RNA, 22 nt, Human
ccagcccuugagauggaaggga

SEQ ID NO: 983192 - RNA, 22 nt, Human
gaaacacaugcagcuccauaga

SEQ ID NO: 983193 - RNA, 17 nt, Human
ugccagccugucccagg

SEQ ID NO: 983194 - RNA, 22 nt, Human
uuuaucuuuggaucuucagaaa

SEQ ID NO: 983195 - RNA, 22 nt, Human
uuucacauacaguguauaguag

SEQ ID NO: 983196 - RNA, 22 nt, Human
agcugcugcgccucacccuggc

SEQ ID NO: 983197 - RNA, 22 nt, Human
cugaaggagaaggccacuguuc

SEQ ID NO: 983198 - RNA, 22 nt, Human
ggcauguuucaucacaucaaga

SEQ ID NO: 983199 - RNA, 21 nt, Human
uuuuuucuugcgugaggccug

SEQ ID NO: 983200 - RNA, 22 nt, Human
gagcaacaguuuaugguuuuuc

SEQ ID NO: 983201 - RNA, 22 nt, Human
aucaggauggguuuggcuuagg

SEQ ID NO: 983202 - RNA, 22 nt, Human
ucacagggauggaauagaaaua

SEQ ID NO: 983203 - RNA, 22 nt, Human
aaugugguuaacccauuuaaga

SEQ ID NO: 983204 - RNA, 22 nt, Human
aagggcuggcccugggaagagu

SEQ ID NO: 983205 - RNA, 22 nt, Human
cugcagaguggagccucggcug

SEQ ID NO: 983206 - RNA, 22 nt, Human
uaggauuuggcuuuagucaggu

SEQ ID NO: 983207 - RNA, 22 nt, Human
cucugcuuuuuaaaaggagucc

SEQ ID NO: 983208 - RNA, 22 nt, Human
uagaggugacacugagaccaua

SEQ ID NO: 983209 - RNA, 22 nt, Human
uuugcauuaucucacuuauaua

SEQ ID NO: 983210 - RNA, 20 nt, Human
guggccuguccuguuguggg

SEQ ID NO: 983211 - RNA, 22 nt, Human
auaaggcaucucucaguuagca

SEQ ID NO: 983212 - RNA, 22 nt, Human
uucucauucugacucaguguag

SEQ ID NO: 983213 - RNA, 22 nt, Human
ccuggccucagacagagggugg

SEQ ID NO: 983214 - RNA, 22 nt, Human
cuggacagaaaaggccacugga

SEQ ID NO: 983215 - RNA, 22 nt, Human
gggcagauggggcacaggcuga

SEQ ID NO: 983216 - RNA, 22 nt, Human
acagccugagaguggagcuggc

SEQ ID NO: 983217 - RNA, 22 nt, Human
aaucaguuguccaaaguucaca

SEQ ID NO: 983218 - RNA, 22 nt, Human
gucacacuagggccaaguggag

SEQ ID NO: 983219 - RNA, 22 nt, Human
ggcagcuggggcagugcccugu

SEQ ID NO: 983220 - RNA, 22 nt, Human
ccugggcuggaguacagcagug

SEQ ID NO: 983221 - RNA, 22 nt, Human
agcagacaacccagaugaccca

SEQ ID NO: 983222 - RNA, 22 nt, Human
gagggcaggggucuugcacggu

SEQ ID NO: 983223 - RNA, 22 nt, Human
cuggcucaauaaauauuagcug

SEQ ID NO: 983224 - RNA, 22 nt, Human
auguguaaaaagugcuuaauau

SEQ ID NO: 983225 - RNA, 22 nt, Human
ugcacacacaugaaguagcaug

SEQ ID NO: 983226 - RNA, 22 nt, Human
agccuguccagaggacagggcu

SEQ ID NO: 983227 - RNA, 22 nt, Human
acuuggagagcauugcugggga

SEQ ID NO: 983228 - RNA, 22 nt, Human
gcagcugaagcugcaguuccag

SEQ ID NO: 983229 - RNA, 22 nt, Human
cuggagcuccagggucuccucu

SEQ ID NO: 983230 - RNA, 20 nt, Human
ugcagcuucaccugugucau

SEQ ID NO: 983231 - RNA, 22 nt, Human
gaaaaagugaccuugguagcua

SEQ ID NO: 983232 - RNA, 22 nt, Human
ggcugcagaaguacuuccggau

SEQ ID NO: 983233 - RNA, 17 nt, Human
gucugggcuuuagagac

SEQ ID NO: 983234 - RNA, 22 nt, Human
ccagggcagugggagaaggugc

SEQ ID NO: 983235 - RNA, 22 nt, Human
agccacagcgaaccucucuucc

SEQ ID NO: 983236 - RNA, 22 nt, Human
ccugggcuuucaaaaccagccu

SEQ ID NO: 983237 - RNA, 22 nt, Human
gccugggaacucugaucuccug

SEQ ID NO: 983238 - RNA, 22 nt, Human
cacguuuuaugacagaagaagc

SEQ ID NO: 983239 - RNA, 22 nt, Human
gcacagggcugccaggcggcuu

SEQ ID NO: 983240 - RNA, 22 nt, Human
uccucaggaucuaggagugcuu

SEQ ID NO: 983241 - RNA, 22 nt, Human
cuggccaacuugcuuguuggca

SEQ ID NO: 983242 - RNA, 22 nt, Human
acagcacaaucugagucccaga

SEQ ID NO: 983243 - RNA, 22 nt, Human
gcacccagaauaaggacaggac

SEQ ID NO: 983244 - RNA, 22 nt, Human
auugaaaggcaaaguaggaagc

SEQ ID NO: 983245 - RNA, 22 nt, Human
cacacaugucucuccaugcucu

SEQ ID NO: 983246 - RNA, 22 nt, Human
ucuucuccagugcuucugcaca

SEQ ID NO: 983247 - RNA, 22 nt, Human
acguuuucagccuuaauguaga

SEQ ID NO: 983248 - RNA, 23 nt, Human
gccuggccaccccagggcugcuu

SEQ ID NO: 983249 - RNA, 21 nt, Human
agugaaauugcaucagaggga

SEQ ID NO: 983250 - RNA, 22 nt, Human
uucugggacaucuggacaguuu

SEQ ID NO: 983251 - RNA, 22 nt, Human
ugccacagaggugaagcccacu

SEQ ID NO: 983252 - RNA, 22 nt, Human
ugguaaagaaggcuagaucuga

SEQ ID NO: 983253 - RNA, 21 nt, Human
agggccugugcucuccagguc

SEQ ID NO: 983254 - RNA, 22 nt, Human
gaaaggucuuccggucuuccag

SEQ ID NO: 983255 - RNA, 22 nt, Human
aaaauaucagcaaagggugaca

SEQ ID NO: 983256 - RNA, 22 nt, Human
ccuggccagcagccccuuccuc

SEQ ID NO: 983257 - RNA, 22 nt, Human
gauuuauuggucuuucauuggu

SEQ ID NO: 983258 - RNA, 20 nt, Human
ccugccuguguuugugauga

SEQ ID NO: 983259 - RNA, 18 nt, Human
auuuugaacaaugcugua

SEQ ID NO: 983260 - RNA, 20 nt, Human
cagaaggucuaagcuuuaga

SEQ ID NO: 983261 - RNA, 22 nt, Human
gcagacuguaucaaugucagua

SEQ ID NO: 983262 - RNA, 22 nt, Human
cagggccagcgcccaggcccag

SEQ ID NO: 983263 - RNA, 20 nt, Human
ggucccugcccucugucauc

SEQ ID NO: 983264 - RNA, 22 nt, Human
caugcuuuaccaaagcagugau

SEQ ID NO: 983265 - RNA, 22 nt, Human
caggaaagagcugccaggcagg

SEQ ID NO: 983266 - RNA, 22 nt, Human
acugcagccuagggaccacagu

SEQ ID NO: 983267 - RNA, 21 nt, Human
gggaaugagauucuuggagau

SEQ ID NO: 983268 - RNA, 22 nt, Human
ggaccagagaagugagcaccug

SEQ ID NO: 983269 - RNA, 22 nt, Human
agaagaaacugucggggauauu

SEQ ID NO: 983270 - RNA, 20 nt, Human
uuccagagaucugcauuuua

SEQ ID NO: 983271 - RNA, 20 nt, Human
uaagaacaagacuaggaagc

SEQ ID NO: 983272 - RNA, 22 nt, Human
ucaagcaggguagcaagcuggu

SEQ ID NO: 983273 - RNA, 23 nt, Human
ucagcugcuuccuccugccugcc

SEQ ID NO: 983274 - RNA, 22 nt, Human
cugccucuugacagaucguggc

SEQ ID NO: 983275 - RNA, 22 nt, Human
ugcugcacaauuggaaaguauc

SEQ ID NO: 983276 - RNA, 18 nt, Human
ccuggaccugucuccuuu

SEQ ID NO: 983277 - RNA, 22 nt, Human
ccucuccaguuuuaacgugacc

SEQ ID NO: 983278 - RNA, 20 nt, Human
uuaggcauuuggauuggcuu

SEQ ID NO: 983279 - RNA, 22 nt, Human
ccaggcugccgaggaaagaaag

SEQ ID NO: 983280 - RNA, 22 nt, Human
gugccugguuuggggaguguuc

SEQ ID NO: 983281 - RNA, 22 nt, Human
aggggugauuugggacaggaca

SEQ ID NO: 983282 - RNA, 22 nt, Human
gccugcagauauauaggauggu

SEQ ID NO: 983283 - RNA, 22 nt, Human
gaguggggcccacugcugggug

SEQ ID NO: 983284 - RNA, 22 nt, Human
ugugccuggcauucugggcuuc

SEQ ID NO: 983285 - RNA, 22 nt, Human
augcucuggaguacgugaaauu

SEQ ID NO: 983286 - RNA, 22 nt, Human
uaacccaauaauugguggccuu

SEQ ID NO: 983287 - RNA, 22 nt, Human
gugcagugagcagugcagcacc

SEQ ID NO: 983288 - RNA, 22 nt, Human
agugggcagugcgcucggaugc

SEQ ID NO: 983289 - RNA, 22 nt, Human
cacuggggugggccugguagag

SEQ ID NO: 983290 - RNA, 22 nt, Human
ucaggagaaucagggcuguccu

SEQ ID NO: 983291 - RNA, 22 nt, Human
ggucccugaagaggccuggggu

SEQ ID NO: 983292 - RNA, 22 nt, Human
ucacaucuuauuagaguaucuc

SEQ ID NO: 983293 - RNA, 21 nt, Human
gcacagggacagaucaucaca

SEQ ID NO: 983294 - RNA, 22 nt, Human
agucccagugagaugagccacg

SEQ ID NO: 983295 - RNA, 22 nt, Human
uggcucuggggacaguaagucc

SEQ ID NO: 983296 - RNA, 22 nt, Human
cuucacaaagcucucuuuaugu

SEQ ID NO: 983297 - RNA, 22 nt, Human
cagcagcuacuuggagcagcag

SEQ ID NO: 983298 - RNA, 22 nt, Human
aguguuccugcucucaggaagc

SEQ ID NO: 983299 - RNA, 22 nt, Human
gcagugguggagcuuacauauc

SEQ ID NO: 983300 - RNA, 22 nt, Human
uauguacacauacacuuguaau

SEQ ID NO: 983301 - RNA, 22 nt, Human
aauucacaggagguauuugucc

SEQ ID NO: 983302 - RNA, 22 nt, Human
uuuauauuucccaggauuggcc

SEQ ID NO: 983303 - RNA, 22 nt, Human
gugccugggcaugagcuuguug

SEQ ID NO: 983304 - RNA, 22 nt, Human
agcauaaguugguacagccacu

SEQ ID NO: 983305 - RNA, 19 nt, Human
uggcugggcgugccuccgu

SEQ ID NO: 983306 - RNA, 22 nt, Human
gcaggcagucaucuuucauauu

SEQ ID NO: 983307 - RNA, 22 nt, Human
ccuggugccacuagagaauguc

SEQ ID NO: 983308 - RNA, 22 nt, Human
acuccuggaaaagaacgcaggg

SEQ ID NO: 983309 - RNA, 18 nt, Human
cugagggcagccccuggg

SEQ ID NO: 983310 - RNA, 22 nt, Human
cugggaggcccacguugggaag

SEQ ID NO: 983311 - RNA, 21 nt, Human
agcagagugcuuugacuuugu

SEQ ID NO: 983312 - RNA, 22 nt, Human
gagguagccacagauagagacu

SEQ ID NO: 983313 - RNA, 22 nt, Human
ccagcagagucuaggaaggagg

SEQ ID NO: 983314 - RNA, 22 nt, Human
uaaaagacauauaacuguagga

SEQ ID NO: 983315 - RNA, 22 nt, Human
gagccagcgccuugccucuggg

SEQ ID NO: 983316 - RNA, 22 nt, Human
agaauaaauguuggacuuagga

SEQ ID NO: 983317 - RNA, 20 nt, Human
uccugagccuccaccauguc

SEQ ID NO: 983318 - RNA, 22 nt, Human
aggugagugugacugcaagaga

SEQ ID NO: 983319 - RNA, 22 nt, Human
ucugggagguaaccaugcugau

SEQ ID NO: 983320 - RNA, 22 nt, Human
gcugagggcauguguggcgacu

SEQ ID NO: 983321 - RNA, 22 nt, Human
guggcucucgccagccugcggg

SEQ ID NO: 983322 - RNA, 22 nt, Human
uugaaaggugcugugugcugau

SEQ ID NO: 983323 - RNA, 22 nt, Human
uccaagggcagccauagaacuu

SEQ ID NO: 983324 - RNA, 22 nt, Human
ccuucucuacuccugaugcaug

SEQ ID NO: 983325 - RNA, 22 nt, Human
ccuggagcaaaaaucuaaggag

SEQ ID NO: 983326 - RNA, 22 nt, Human
agccacagcauguguguaugua

SEQ ID NO: 983327 - RNA, 22 nt, Human
uuugcauuacuugacuuuaguu

SEQ ID NO: 983328 - RNA, 22 nt, Human
ccagcacugcucucagacugag

SEQ ID NO: 983329 - RNA, 22 nt, Human
ugcaggugcguuuucaagccuc

SEQ ID NO: 983330 - RNA, 22 nt, Human
ccuucuuaaacaucauuuuggc

SEQ ID NO: 983331 - RNA, 22 nt, Human
cuggggccacaacggcgcacgc

SEQ ID NO: 983332 - RNA, 22 nt, Human
uuaauguguguacaggauuuug

SEQ ID NO: 983333 - RNA, 22 nt, Human
caggaacacaaguucagggaug

SEQ ID NO: 983334 - RNA, 22 nt, Human
agcagaacugaugagacuugag

SEQ ID NO: 983335 - RNA, 22 nt, Human
guauuuauaggggaaugagagu

SEQ ID NO: 983336 - RNA, 22 nt, Human
uucaaugagcccggggccauag

SEQ ID NO: 983337 - RNA, 19 nt, Human
ccuuugaaucaggacacuu

SEQ ID NO: 983338 - RNA, 22 nt, Human
ugaaaguuacaggaaaacagau

SEQ ID NO: 983339 - RNA, 22 nt, Human
gugcuuccaucuagagggucac

SEQ ID NO: 983340 - RNA, 22 nt, Human
ccugccaggcuuugggcuucug

SEQ ID NO: 983341 - RNA, 22 nt, Human
ucuucaaaaaauauccaucagu

SEQ ID NO: 983342 - RNA, 22 nt, Human
ugcuggcccaguauggacugca

SEQ ID NO: 983343 - RNA, 22 nt, Human
aguuacuugagacguuuaugaa

SEQ ID NO: 983344 - RNA, 22 nt, Human
uggggguguccuggugcacaca

SEQ ID NO: 983345 - RNA, 22 nt, Human
gcuccuggcucucugagggcug

SEQ ID NO: 983346 - RNA, 22 nt, Human
ucagggcauacucuucaagguc

SEQ ID NO: 983347 - RNA, 22 nt, Human
gagggcugaagauuguggcccc

SEQ ID NO: 983348 - RNA, 22 nt, Human
ugcucagggacaauggagaggg

SEQ ID NO: 983349 - RNA, 22 nt, Human
auagaacagaaacagaugcaca

SEQ ID NO: 983350 - RNA, 17 nt, Human
aucuggcugcuucuaga

SEQ ID NO: 983351 - RNA, 20 nt, Human
ccuccaggcacacccaugug

SEQ ID NO: 983352 - RNA, 22 nt, Human
ugauuuuuagcuauucugaaga

SEQ ID NO: 983353 - RNA, 22 nt, Human
cucaccacagagccuguccagc

SEQ ID NO: 983354 - RNA, 22 nt, Human
uggagaugaauauguguaccug

SEQ ID NO: 983355 - RNA, 22 nt, Human
aaguuugugucagagcuguuac

SEQ ID NO: 983356 - RNA, 22 nt, Human
auuuggcaaauaauuugagggu

SEQ ID NO: 983357 - RNA, 22 nt, Human
cccagacugcagagcgggcaga

SEQ ID NO: 983358 - RNA, 22 nt, Human
ucacagacaauuguuuuggugu

SEQ ID NO: 983359 - RNA, 22 nt, Human
gcagggaaggggcaugcuggag

SEQ ID NO: 983360 - RNA, 22 nt, Human
ggcugggcugcugggucagagc

SEQ ID NO: 983361 - RNA, 22 nt, Human
ugcccaggaucuggcgaugcuc

SEQ ID NO: 983362 - RNA, 22 nt, Human
ccagggcaggagaaagacucac

SEQ ID NO: 983363 - RNA, 22 nt, Human
ggccaccuuccaguugccugca

SEQ ID NO: 983364 - RNA, 22 nt, Human
aaauaaguaguuuaguguugug

SEQ ID NO: 983365 - RNA, 22 nt, Human
uuacaaagaguguucuuuucca

SEQ ID NO: 983366 - RNA, 22 nt, Human
ucaaaguagggguaagccaggc

SEQ ID NO: 983367 - RNA, 22 nt, Human
auguuuuacccuuugcacaaac

SEQ ID NO: 983368 - RNA, 22 nt, Human
uccugccuuagagcaaggaaaa

SEQ ID NO: 983369 - RNA, 21 nt, Human
ugcaugcuauguuuuuauuuc

SEQ ID NO: 983370 - RNA, 22 nt, Human
gcuggaccaggugugcacaggc

SEQ ID NO: 983371 - RNA, 22 nt, Human
uuguaacaggcacucugugcca

SEQ ID NO: 983372 - RNA, 23 nt, Human
auucuucauuaucuucuagaaaa

SEQ ID NO: 983373 - RNA, 22 nt, Human
gaggccuggaauuccagccugg

SEQ ID NO: 983374 - RNA, 22 nt, Human
gaagccaagugcaaaugccuua

SEQ ID NO: 983375 - RNA, 22 nt, Human
ggccuggcauggggacuaaggg

SEQ ID NO: 983376 - RNA, 22 nt, Human
caaggcaggcaguucacuugag

SEQ ID NO: 983377 - RNA, 22 nt, Human
agccccaguaagggagggccug

SEQ ID NO: 983378 - RNA, 22 nt, Human
agucucugcaugaugcagcaca

SEQ ID NO: 983379 - RNA, 22 nt, Human
uaugcacaccuggguccuuguc

SEQ ID NO: 983380 - RNA, 22 nt, Human
ugggcuggcugaacuucaaccu

SEQ ID NO: 983381 - RNA, 22 nt, Human
ccagaagucaggaaugagucuu

SEQ ID NO: 983382 - RNA, 22 nt, Human
agccuucaguaaauccacugug

SEQ ID NO: 983383 - RNA, 22 nt, Human
ucugggcucugucagcaccucu

SEQ ID NO: 983384 - RNA, 22 nt, Human
augacagaaggccucccugaca

SEQ ID NO: 983385 - RNA, 22 nt, Human
ucucccacgguacaggauaaac

SEQ ID NO: 983386 - RNA, 22 nt, Human
acugcagcaaagcccgugucuu

SEQ ID NO: 983387 - RNA, 22 nt, Human
uggccuggcucacagugagauu

SEQ ID NO: 983388 - RNA, 22 nt, Human
ggccagaggccauccuccugcu

SEQ ID NO: 983389 - RNA, 22 nt, Human
uuucauguuuucuuaaauggca

SEQ ID NO: 983390 - RNA, 22 nt, Human
augguguagcaugugauaugac

SEQ ID NO: 983391 - RNA, 22 nt, Human
acuuguguaacacagaaagaac

SEQ ID NO: 983392 - RNA, 22 nt, Human
cauauaaauacaacauguguua

SEQ ID NO: 983393 - RNA, 22 nt, Human
aagucacacuagacaacugagg

SEQ ID NO: 983394 - RNA, 22 nt, Human
uggggcuggcuauugucucccu

SEQ ID NO: 983395 - RNA, 22 nt, Human
uggcugggccgggccuugugcc

SEQ ID NO: 983396 - RNA, 22 nt, Human
guggccuggaugagcuucgaca

SEQ ID NO: 983397 - RNA, 22 nt, Human
auuucauugaaguuaauucuuc

SEQ ID NO: 983398 - RNA, 22 nt, Human
cagcccuuuccuucucagcuuu

SEQ ID NO: 983399 - RNA, 20 nt, Human
ucugccacugcacucugccc

SEQ ID NO: 983400 - RNA, 22 nt, Human
ugggaugggaucucgcuguguc

SEQ ID NO: 983401 - RNA, 22 nt, Human
agcuggguguguaucagauaaa

SEQ ID NO: 983402 - RNA, 22 nt, Human
cagcccuggccccagguggucu

SEQ ID NO: 983403 - RNA, 22 nt, Human
gccuggcccagggcucuuguug

SEQ ID NO: 983404 - RNA, 22 nt, Human
ucagcagauggguuguguuggc

SEQ ID NO: 983405 - RNA, 22 nt, Human
ugccuggguccaggccaagccu

SEQ ID NO: 983406 - RNA, 22 nt, Human
gugcucaggaagcuguuccugc

SEQ ID NO: 983407 - RNA, 22 nt, Human
gaaaaugugccuuuggguauug

SEQ ID NO: 983408 - RNA, 22 nt, Human
auucacaaguugauggauauuu

SEQ ID NO: 983409 - RNA, 23 nt, Human
uggauaaagcugugcugcauagg

SEQ ID NO: 983410 - RNA, 22 nt, Human
cugugcuggagaugggccagag

SEQ ID NO: 983411 - RNA, 22 nt, Human
uccauggguagcccugguugag

SEQ ID NO: 983412 - RNA, 22 nt, Human
uggagcaggugggaugucguga

SEQ ID NO: 983413 - RNA, 22 nt, Human
gagcaggcucugccuguguguc

SEQ ID NO: 983414 - RNA, 22 nt, Human
gggcaguggguggcugcagccu

SEQ ID NO: 983415 - RNA, 22 nt, Human
ucauccuuuugcaugggaaggc

SEQ ID NO: 983416 - RNA, 22 nt, Human
cagagcugguguuacaagucca

SEQ ID NO: 983417 - RNA, 22 nt, Human
ucaaaguccuugcuuuuucugu

SEQ ID NO: 983418 - RNA, 22 nt, Human
cagggguggcugcagcagaggu

SEQ ID NO: 983419 - RNA, 22 nt, Human
ggucacaggggagaagagugau

SEQ ID NO: 983420 - RNA, 22 nt, Human
ugcagggccuucuagaccaugg

SEQ ID NO: 983421 - RNA, 22 nt, Human
cccauuuagauaacaguucaaa

SEQ ID NO: 983422 - RNA, 22 nt, Human
ucagggaaucagacucugcagc

SEQ ID NO: 983423 - RNA, 22 nt, Human
ugcugccucagcuuccugggcu

SEQ ID NO: 983424 - RNA, 22 nt, Human
ggagcagagcugggcuuggcug

SEQ ID NO: 983425 - RNA, 22 nt, Human
agcugcccuucucuugcccuug

SEQ ID NO: 983426 - RNA, 22 nt, Human
gccugucugcagggcugucauu

SEQ ID NO: 983427 - RNA, 22 nt, Human
aagggacuuugucagcuuucca

SEQ ID NO: 983428 - RNA, 22 nt, Human
cacauuuaaagguugaagcuga

SEQ ID NO: 983429 - RNA, 22 nt, Human
agccuggacagcuacggagaac

SEQ ID NO: 983430 - RNA, 18 nt, Human
caguuuuuauaucuggca

SEQ ID NO: 983431 - RNA, 22 nt, Human
ucucagaggcccgacguucucc

SEQ ID NO: 983432 - RNA, 22 nt, Human
gccuccugguugcuucuccaac

SEQ ID NO: 983433 - RNA, 22 nt, Human
ucuggcucaaaauacguacucu

SEQ ID NO: 983434 - RNA, 22 nt, Human
aacaaauguguuuuguaauuaa

SEQ ID NO: 983435 - RNA, 22 nt, Human
cuuucucugugugguaaagggc

SEQ ID NO: 983436 - RNA, 22 nt, Human
ccagcugcugugcagggaggcu

SEQ ID NO: 983437 - RNA, 22 nt, Human
gagggauggugugagaggcuca

SEQ ID NO: 983438 - RNA, 22 nt, Human
ucuggccauggcaagccgagug

SEQ ID NO: 983439 - RNA, 22 nt, Human
caggcacucauucagagaggug

SEQ ID NO: 983440 - RNA, 22 nt, Human
aaggacuccaauucuuucaucu

SEQ ID NO: 983441 - RNA, 22 nt, Human
gccuuggcugaugugcgaauga

SEQ ID NO: 983442 - RNA, 22 nt, Human
gcauucaucuuccuccaugcag

SEQ ID NO: 983443 - RNA, 22 nt, Human
gacccugccaugagugacaggg

SEQ ID NO: 983444 - RNA, 22 nt, Human
ggcugccuucccugagccccgg

SEQ ID NO: 983445 - RNA, 22 nt, Human
uccucuucugcccaucagaggc

SEQ ID NO: 983446 - RNA, 22 nt, Human
ugaaauguuugaagaccacuga

SEQ ID NO: 983447 - RNA, 22 nt, Human
uuuccucuaaacgcauuugcuu

SEQ ID NO: 983448 - RNA, 22 nt, Human
ugcauccuuaaccagcaucacu

SEQ ID NO: 983449 - RNA, 22 nt, Human
uggcucuggugcgggcuccugc

SEQ ID NO: 983450 - RNA, 22 nt, Human
gcugccucuguagcuuuggacc

SEQ ID NO: 983451 - RNA, 22 nt, Human
gugccuggcaugcgccggugcu

SEQ ID NO: 983452 - RNA, 22 nt, Human
aucuggcuugacuuugcgacuu

SEQ ID NO: 983453 - RNA, 21 nt, Human
ucugucucuccacugcccugc

SEQ ID NO: 983454 - RNA, 22 nt, Human
aggucccaggcauagcuggucu

SEQ ID NO: 983455 - RNA, 22 nt, Human
uguguccauucaggcacugacc

SEQ ID NO: 983456 - RNA, 22 nt, Human
aaggccaggacaccaggggacu

SEQ ID NO: 983457 - RNA, 22 nt, Human
agagcagccugugaugaugcac

SEQ ID NO: 983458 - RNA, 20 nt, Human
aauauaauucucugaauuua

SEQ ID NO: 983459 - RNA, 22 nt, Human
cagcccucagguccucagcagc

SEQ ID NO: 983460 - RNA, 22 nt, Human
augagacuaccuguaauguggc

SEQ ID NO: 983461 - RNA, 22 nt, Human
uguacaugugucuguauaucuu

SEQ ID NO: 983462 - RNA, 22 nt, Human
agaauuguugggguaauaaaag

SEQ ID NO: 983463 - RNA, 22 nt, Human
ugcucuggggagcuccucugcg

SEQ ID NO: 983464 - RNA, 22 nt, Human
ucugaggcccugcaggcagugu

SEQ ID NO: 983465 - RNA, 20 nt, Human
cugggcagguguuugaucuc

SEQ ID NO: 983466 - RNA, 22 nt, Human
ggaggccaucuggcuggaggcu

SEQ ID NO: 983467 - RNA, 22 nt, Human
agcugcucuuugaaggacacuu

SEQ ID NO: 983468 - RNA, 22 nt, Human
guggauggauugaggcaguggg

SEQ ID NO: 983469 - RNA, 21 nt, Human
ucccacucuaaauggacugaa

SEQ ID NO: 983470 - RNA, 19 nt, Human
aggcagcacccaguccuug

SEQ ID NO: 983471 - RNA, 22 nt, Human
agugaaauccuggucaacaggu

SEQ ID NO: 983472 - RNA, 22 nt, Human
uguggcuguguccaccugcugc

SEQ ID NO: 983473 - RNA, 19 nt, Human
uauucaggaugauggcaca

SEQ ID NO: 983474 - RNA, 22 nt, Human
uugugcauuucucugagugugu

SEQ ID NO: 983475 - RNA, 21 nt, Human
gcugagagguugggaaguuca

SEQ ID NO: 983476 - RNA, 22 nt, Human
gccugccuggagcuugagguga

SEQ ID NO: 983477 - RNA, 22 nt, Human
uuggccaaacagaguucaacag

SEQ ID NO: 983478 - RNA, 21 nt, Human
uuuauuaacaacuguggacgu

SEQ ID NO: 983479 - RNA, 22 nt, Human
aaauauagcaauuaugccuacu

SEQ ID NO: 983480 - RNA, 22 nt, Human
agagacaggguuuugccauguu

SEQ ID NO: 983481 - RNA, 22 nt, Human
cauacauuuugcauauuuacca

SEQ ID NO: 983482 - RNA, 22 nt, Human
cacucugcgcugggcgccagcg

SEQ ID NO: 983483 - RNA, 22 nt, Human
gggcuggcgggaaaggcaauuc

SEQ ID NO: 983484 - RNA, 22 nt, Human
cagcucugugcaggccugggga

SEQ ID NO: 983485 - RNA, 22 nt, Human
gcagagcugggucuguauccaa

SEQ ID NO: 983486 - RNA, 22 nt, Human
ggaggccaaggugggcggauca

SEQ ID NO: 983487 - RNA, 22 nt, Human
aagagcuggaagugaagauaac

SEQ ID NO: 983488 - RNA, 22 nt, Human
ggacagagcccugguggccuaa

SEQ ID NO: 983489 - RNA, 22 nt, Human
ccagggcugagcugugaccaug

SEQ ID NO: 983490 - RNA, 22 nt, Human
gaaggagagagacaucgucccu

SEQ ID NO: 983491 - RNA, 22 nt, Human
augcaguacagauaauucuaca

SEQ ID NO: 983492 - RNA, 22 nt, Human
ggggauggaauguaguagugau

SEQ ID NO: 983493 - RNA, 22 nt, Human
uaugcauaugaccccaagcuug

SEQ ID NO: 983494 - RNA, 23 nt, Human
cccuggagcuagucugagcagag

SEQ ID NO: 983495 - RNA, 22 nt, Human
uacauaguuccauuuacaggaa

SEQ ID NO: 983496 - RNA, 22 nt, Human
uuuauaaguacuuugucugcuu

SEQ ID NO: 983497 - RNA, 22 nt, Human
cugggcucagcccaugcugucc

SEQ ID NO: 983498 - RNA, 22 nt, Human
cacauugaaaugacccaauaau

SEQ ID NO: 983499 - RNA, 22 nt, Human
cagaaauguuuauauguggugu

SEQ ID NO: 983500 - RNA, 22 nt, Human
uggcucucagcucccagcagcc

SEQ ID NO: 983501 - RNA, 22 nt, Human
acagcuggaggucugugagcac

SEQ ID NO: 983502 - RNA, 18 nt, Human
cagaugagaugcaaucuc

SEQ ID NO: 983503 - RNA, 22 nt, Human
gaaggcuggcuuucugagagca

SEQ ID NO: 983504 - RNA, 22 nt, Human
aagccaggggcugcuuaggaga

SEQ ID NO: 983505 - RNA, 22 nt, Human
uggaggaugccuggggaggccu

SEQ ID NO: 983506 - RNA, 22 nt, Human
aucuggcucacuuagucuagga

SEQ ID NO: 983507 - RNA, 22 nt, Human
gagaaguuucugguuugcauag

SEQ ID NO: 983508 - RNA, 22 nt, Human
cagggccacccucugcugggug

SEQ ID NO: 983509 - RNA, 18 nt, Human
acauuucuaugcuucugg

SEQ ID NO: 983510 - RNA, 23 nt, Human
ucacacagcuggucagguacaga

SEQ ID NO: 983511 - RNA, 22 nt, Human
ucuguccucuuugaagcugcuc

SEQ ID NO: 983512 - RNA, 22 nt, Human
guauuagggccaaaggcaggaa

SEQ ID NO: 983513 - RNA, 22 nt, Human
cugaggagagaucacguggugu

SEQ ID NO: 983514 - RNA, 22 nt, Human
cugggccugguagggcuugaaa

SEQ ID NO: 983515 - RNA, 22 nt, Human
ggccucucauguccugggcuuc

SEQ ID NO: 983516 - RNA, 22 nt, Human
ggcaggaggaagaguuagcacc

SEQ ID NO: 983517 - RNA, 22 nt, Human
cagaggcuguguaggcagacug

SEQ ID NO: 983518 - RNA, 22 nt, Human
uucuuucacucaagaaggaucu

SEQ ID NO: 983519 - RNA, 22 nt, Human
caggcagcugaggacuuugcua

SEQ ID NO: 983520 - RNA, 22 nt, Human
gcucugcuuucuggggggaucc

SEQ ID NO: 983521 - RNA, 22 nt, Human
uggguggcggccugguucugag

SEQ ID NO: 983522 - RNA, 22 nt, Human
caggugccgggaaugcagcaau

SEQ ID NO: 983523 - RNA, 22 nt, Human
cucugugccucaguuuucuucu

SEQ ID NO: 983524 - RNA, 22 nt, Human
ucagggcaggacaguguaggcc

SEQ ID NO: 983525 - RNA, 22 nt, Human
aaagguaguacuucuagaaggg

SEQ ID NO: 983526 - RNA, 20 nt, Human
aucagcaacugccacucagu

SEQ ID NO: 983527 - RNA, 22 nt, Human
ugccucugggugaccaaggagc

SEQ ID NO: 983528 - RNA, 22 nt, Human
ccaggccuagccccugagggua

SEQ ID NO: 983529 - RNA, 22 nt, Human
agagcugcccacacagcagauu

SEQ ID NO: 983530 - RNA, 23 nt, Human
ggcucugugcugggccugcagga

SEQ ID NO: 983531 - RNA, 18 nt, Human
uccagagcuacuguggug

SEQ ID NO: 983532 - RNA, 22 nt, Human
aaaggucaagcuggacucaggu

SEQ ID NO: 983533 - RNA, 22 nt, Human
acauuucuccuacuuguuauuu

SEQ ID NO: 983534 - RNA, 22 nt, Human
uccucagggcggccuccgucuu

SEQ ID NO: 983535 - RNA, 19 nt, Human
agcagagcagggccguggg

SEQ ID NO: 983536 - RNA, 22 nt, Human
agcucuccacacauaggacuag

SEQ ID NO: 983537 - RNA, 22 nt, Human
ugccugucuuaauaucuggaaa

SEQ ID NO: 983538 - RNA, 22 nt, Human
agcuggugcugaagcucuugag

SEQ ID NO: 983539 - RNA, 22 nt, Human
ggaaggaggaugcucuggccuu

SEQ ID NO: 983540 - RNA, 19 nt, Human
aggucauugauagugcagg

SEQ ID NO: 983541 - RNA, 22 nt, Human
cacacuagucuauccauuagcu

SEQ ID NO: 983542 - RNA, 22 nt, Human
cagccagggucaggcagcuucu

SEQ ID NO: 983543 - RNA, 21 nt, Human
uccuuccuugagguccuuucc

SEQ ID NO: 983544 - RNA, 22 nt, Human
aaggcugccucugccagaggag

SEQ ID NO: 983545 - RNA, 22 nt, Human
gccaggcugcuccagggaggcc

SEQ ID NO: 983546 - RNA, 22 nt, Human
cuccacagcucaggcucagagu

SEQ ID NO: 983547 - RNA, 22 nt, Human
uuaugcuaagugcaacaagcca

SEQ ID NO: 983548 - RNA, 22 nt, Human
uuuaggaucucucuuguuacau

SEQ ID NO: 983549 - RNA, 22 nt, Human
augaagcuaaacccugcagcca

SEQ ID NO: 983550 - RNA, 22 nt, Human
aaauaugugaucagugaauaaa

SEQ ID NO: 983551 - RNA, 22 nt, Human
aagggaaaucauauggugcagu

SEQ ID NO: 983552 - RNA, 22 nt, Human
uggcucagcuuuccccaucugg

SEQ ID NO: 983553 - RNA, 22 nt, Human
cagcagggcccccgggugcgcc

SEQ ID NO: 983554 - RNA, 22 nt, Human
cugaaggauuagagagcacuua

SEQ ID NO: 983555 - RNA, 22 nt, Human
ccuggcaguuuugcccaggauu

SEQ ID NO: 983556 - RNA, 22 nt, Human
ugggcagagucguggggaauag

SEQ ID NO: 983557 - RNA, 22 nt, Human
ucagcaauccucccacaggugg

SEQ ID NO: 983558 - RNA, 22 nt, Human
uggcugggagcuggaacugggc

SEQ ID NO: 983559 - RNA, 22 nt, Human
ucugagaggcagaccuuccuaa

SEQ ID NO: 983560 - RNA, 22 nt, Human
aacuucuugguccugagcuguu

SEQ ID NO: 983561 - RNA, 22 nt, Human
cugaggugcuauggaggauacg

SEQ ID NO: 983562 - RNA, 23 nt, Human
gcagacagagcagacuaagacaa

SEQ ID NO: 983563 - RNA, 22 nt, Human
cuccagggagcuguggagguuu

SEQ ID NO: 983564 - RNA, 22 nt, Human
cagagcugagaauguugaugcu

SEQ ID NO: 983565 - RNA, 22 nt, Human
gugggaugcaguggugaguggc

SEQ ID NO: 983566 - RNA, 18 nt, Human
acaaauguagugucuuaa

SEQ ID NO: 983567 - RNA, 22 nt, Human
auaaauaucacuguugucccuc

SEQ ID NO: 983568 - RNA, 22 nt, Human
uagaauaugugguaggaucugg

SEQ ID NO: 983569 - RNA, 22 nt, Human
ggcucugcagugacuugagggg

SEQ ID NO: 983570 - RNA, 22 nt, Human
ccugccugucaucgccugcgcc

SEQ ID NO: 983571 - RNA, 22 nt, Human
gagucccaugaugauagccaca

SEQ ID NO: 983572 - RNA, 23 nt, Human
uccuccuuuugcuugugcuuccc

SEQ ID NO: 983573 - RNA, 22 nt, Human
cacaggagcuguggggcagugu

SEQ ID NO: 983574 - RNA, 22 nt, Human
gcucuguguccacagcuggaaa

SEQ ID NO: 983575 - RNA, 22 nt, Human
augucacauggucaccucuagc

SEQ ID NO: 983576 - RNA, 22 nt, Human
cuccuuccugccccagugauaa

SEQ ID NO: 983577 - RNA, 22 nt, Human
uaggcagcugcaaacuucgguc

SEQ ID NO: 983578 - RNA, 22 nt, Human
aauucuagcauugugaaaauau

SEQ ID NO: 983579 - RNA, 22 nt, Human
ucagagugguagccuauuuucu

SEQ ID NO: 983580 - RNA, 22 nt, Human
aguaaacauaauuuaccuguag

SEQ ID NO: 983581 - RNA, 22 nt, Human
aaaguaaccuaguaauaguguc

SEQ ID NO: 983582 - RNA, 22 nt, Human
guguuccauguuugagguaguu

SEQ ID NO: 983583 - RNA, 22 nt, Human
cacccagccuucacacaggagu

SEQ ID NO: 983584 - RNA, 22 nt, Human
cuggccuggcagggagggcaug

SEQ ID NO: 983585 - RNA, 23 nt, Human
ucaugcccaggcuccagauguca

SEQ ID NO: 983586 - RNA, 22 nt, Human
ugcauuguugaugaguugaaua

SEQ ID NO: 983587 - RNA, 22 nt, Human
gcagcugaauguccauugcugc

SEQ ID NO: 983588 - RNA, 22 nt, Human
uccagggguaccggccaggcag

SEQ ID NO: 983589 - RNA, 17 nt, Human
ugcauuguaggcuagcc

SEQ ID NO: 983590 - RNA, 22 nt, Human
uggcucaguaaucgagucuccu

SEQ ID NO: 983591 - RNA, 22 nt, Human
auaucacaaacaagucuguacu

SEQ ID NO: 983592 - RNA, 22 nt, Human
ugggcagaaggaagagccaccu

SEQ ID NO: 983593 - RNA, 22 nt, Human
aaaaugugcaguuuuuaagcug

SEQ ID NO: 983594 - RNA, 22 nt, Human
ugcacacaaguuggagaaugaa

SEQ ID NO: 983595 - RNA, 20 nt, Human
aggcacuguugucuguaucc

SEQ ID NO: 983596 - RNA, 22 nt, Human
gccaagagaaugugagagaaau

SEQ ID NO: 983597 - RNA, 22 nt, Human
ucccccacucuaaaggagccuu

SEQ ID NO: 983598 - RNA, 22 nt, Human
gggcugcuuccuggggaaugcu

SEQ ID NO: 983599 - RNA, 22 nt, Human
aacaaauggaacacaaaucuuu

SEQ ID NO: 983600 - RNA, 22 nt, Human
auuugucuagugguauucacgu

SEQ ID NO: 983601 - RNA, 22 nt, Human
ggaggccaguccuggccgggcu

SEQ ID NO: 983602 - RNA, 22 nt, Human
ccucccaccauuuagagagagc

SEQ ID NO: 983603 - RNA, 22 nt, Human
cagaauuuuucgaauguacugu

SEQ ID NO: 983604 - RNA, 22 nt, Human
uggagccaugccuggccuuucc

SEQ ID NO: 983605 - RNA, 22 nt, Human
agccacagcuccuugguggaga

SEQ ID NO: 983606 - RNA, 22 nt, Human
uucccaguauuaccuucaggaa

SEQ ID NO: 983607 - RNA, 22 nt, Human
aucauaaaccacuuuguaaucu

SEQ ID NO: 983608 - RNA, 22 nt, Human
ccaggccauucccagaguugcu

SEQ ID NO: 983609 - RNA, 22 nt, Human
caaauccagaucccagucguag

SEQ ID NO: 983610 - RNA, 22 nt, Human
uuacuuuguucucaagauaugu

SEQ ID NO: 983611 - RNA, 19 nt, Human
ccugugugggguagagauc

SEQ ID NO: 983612 - RNA, 22 nt, Human
uguacauugucacucaucaagu

SEQ ID NO: 983613 - RNA, 21 nt, Human
cugagggccgcagcugggcuc

SEQ ID NO: 983614 - RNA, 22 nt, Human
uggagcaggcaucuuucucucu

SEQ ID NO: 983615 - RNA, 22 nt, Human
agauuucccucuuguauuugca

SEQ ID NO: 983616 - RNA, 22 nt, Human
ucugaagccuuuguacaggccu

SEQ ID NO: 983617 - RNA, 22 nt, Human
cugcugcugcuaucuacccagg

SEQ ID NO: 983618 - RNA, 22 nt, Human
auggacaggaacucccuuggca

SEQ ID NO: 983619 - RNA, 22 nt, Human
cucaggaugucggugacuauug

SEQ ID NO: 983620 - RNA, 22 nt, Human
uagcagcuuccagagagggcag

SEQ ID NO: 983621 - RNA, 22 nt, Human
agcagggcucuguggagggugg

SEQ ID NO: 983622 - RNA, 22 nt, Human
agaauguagucuuggagauuua

SEQ ID NO: 983623 - RNA, 22 nt, Human
ugaggggagaagcagcagccug

SEQ ID NO: 983624 - RNA, 19 nt, Human
aggacucuggaggcaugag

SEQ ID NO: 983625 - RNA, 22 nt, Human
acucugcugauagguccucaga

SEQ ID NO: 983626 - RNA, 22 nt, Human
ccugucaguugcugucagggau

SEQ ID NO: 983627 - RNA, 22 nt, Human
ccugucagaugaaguaauugug

SEQ ID NO: 983628 - RNA, 22 nt, Human
uggguagagacacagucugggg

SEQ ID NO: 983629 - RNA, 22 nt, Human
agaagccauguuuaguaggaug

SEQ ID NO: 983630 - RNA, 22 nt, Human
uggcugucagcugccuggugcg

SEQ ID NO: 983631 - RNA, 22 nt, Human
aaggcagcaccgccuccugaaa

SEQ ID NO: 983632 - RNA, 19 nt, Human
gcuccuggaugaccugugg

SEQ ID NO: 983633 - RNA, 22 nt, Human
uggcucaggugugagcugaaga

SEQ ID NO: 983634 - RNA, 22 nt, Human
gggagggauuaguucugccugg

SEQ ID NO: 983635 - RNA, 22 nt, Human
gggacuggaguagaggccggug

SEQ ID NO: 983636 - RNA, 22 nt, Human
uuccucagaaaauacuguccaa

SEQ ID NO: 983637 - RNA, 19 nt, Human
agucccaggcccgaaagag

SEQ ID NO: 983638 - RNA, 20 nt, Human
uuggcagcaguuccaaguga

SEQ ID NO: 983639 - RNA, 22 nt, Human
cauggcaggugcagauucugug

SEQ ID NO: 983640 - RNA, 22 nt, Human
gccuggaguacuccuugaagug

SEQ ID NO: 983641 - RNA, 22 nt, Human
ugcagcuucuuguccugugauu

SEQ ID NO: 983642 - RNA, 22 nt, Human
gugauugcccagcaccauuguu

SEQ ID NO: 983643 - RNA, 22 nt, Human
uccuuccuggggucucugcugc

SEQ ID NO: 983644 - RNA, 22 nt, Human
cauguaaaacacucagaacagu

SEQ ID NO: 983645 - RNA, 22 nt, Human
gagccagccgcaagagcuguga

SEQ ID NO: 983646 - RNA, 22 nt, Human
uggucuaaauauggcucuaaau

SEQ ID NO: 983647 - RNA, 23 nt, Human
acugagccagggccugggucagc

SEQ ID NO: 983648 - RNA, 22 nt, Human
cugggaggcggagguuguagug

SEQ ID NO: 983649 - RNA, 22 nt, Human
uugaaaggguuaaagugguaaa

SEQ ID NO: 983650 - RNA, 22 nt, Human
auggccaagcaugccuguggcc

SEQ ID NO: 983651 - RNA, 22 nt, Human
uuaauaggcuucuaacauagcu

SEQ ID NO: 983652 - RNA, 22 nt, Human
cuucucucugcauaggcauggg

SEQ ID NO: 983653 - RNA, 22 nt, Human
uaugcacauauaaccugcacug

SEQ ID NO: 983654 - RNA, 22 nt, Human
ggagugacucucggggccacua

SEQ ID NO: 983655 - RNA, 23 nt, Human
uccagcagccaagaaggguagaa

SEQ ID NO: 983656 - RNA, 22 nt, Human
ggagugggaacaaugacauggu

SEQ ID NO: 983657 - RNA, 22 nt, Human
uaagaacauaaauucauacggg

SEQ ID NO: 983658 - RNA, 22 nt, Human
uguuuauuacaguucuuggaau

SEQ ID NO: 983659 - RNA, 22 nt, Human
agcaccaucagaugcaauaucu

SEQ ID NO: 983660 - RNA, 22 nt, Human
agcagcagauccaaaaaaugug

SEQ ID NO: 983661 - RNA, 22 nt, Human
aaacuccugcauacucagaagc

SEQ ID NO: 983662 - RNA, 22 nt, Human
gccuucaggaaaucaguccuug

SEQ ID NO: 983663 - RNA, 22 nt, Human
gauguuucaugcuagcaugugu

SEQ ID NO: 983664 - RNA, 19 nt, Human
ggaagagaggaaaggugga

SEQ ID NO: 983665 - RNA, 22 nt, Human
ugaggcagcuuuuucugugugu

SEQ ID NO: 983666 - RNA, 22 nt, Human
aggcugcuggcaggcguggacg

SEQ ID NO: 983667 - RNA, 19 nt, Human
auagucuuuccaauuauac

SEQ ID NO: 983668 - RNA, 22 nt, Human
gcugcccucccagggcaagcuu

SEQ ID NO: 983669 - RNA, 22 nt, Human
cagggagaagucuggucagucc

SEQ ID NO: 983670 - RNA, 21 nt, Human
aacauuucaggauccaaauug

SEQ ID NO: 983671 - RNA, 22 nt, Human
ucuggcucuauaacuccuagcu

SEQ ID NO: 983672 - RNA, 22 nt, Human
uggcugaauaauauucuguugu

SEQ ID NO: 983673 - RNA, 22 nt, Human
aaaugcacugaacacauguugu

SEQ ID NO: 983674 - RNA, 22 nt, Human
ucacucuggccucugcagcagu

SEQ ID NO: 983675 - RNA, 22 nt, Human
ccugcaggggagagacuucuag

SEQ ID NO: 983676 - RNA, 22 nt, Human
cuguggugagcaacugacugaa

SEQ ID NO: 983677 - RNA, 22 nt, Human
cuuagaaaucgaacucagguua

SEQ ID NO: 983678 - RNA, 22 nt, Human
augcuguagaucuuagccucua

SEQ ID NO: 983679 - RNA, 21 nt, Human
uuucacaaaaguaugugacaa

SEQ ID NO: 983680 - RNA, 22 nt, Human
gucuugaucuccugaccuugug

SEQ ID NO: 983681 - RNA, 22 nt, Human
aggaaaugcugaugcuccugga

SEQ ID NO: 983682 - RNA, 22 nt, Human
uggcugccuagugucugagcag

SEQ ID NO: 983683 - RNA, 22 nt, Human
ugggcagauguccucugaagug

SEQ ID NO: 983684 - RNA, 22 nt, Human
uuggccaacagcgacagggcca

SEQ ID NO: 983685 - RNA, 22 nt, Human
ggaggccaaagugugggcggcu

SEQ ID NO: 983686 - RNA, 21 nt, Human
ucagcagcaucugccuagagu

SEQ ID NO: 983687 - RNA, 18 nt, Human
gggcccuggcguccgccc

SEQ ID NO: 983688 - RNA, 22 nt, Human
uucauucccuuauauuagcauu

SEQ ID NO: 983689 - RNA, 22 nt, Human
gggaagauaguguugagggccc

SEQ ID NO: 983690 - RNA, 22 nt, Human
acagaguacauucagagacuau

SEQ ID NO: 983691 - RNA, 22 nt, Human
agcugcucucacuggacgccug

SEQ ID NO: 983692 - RNA, 22 nt, Human
gccugagagucugcauuucuaa

SEQ ID NO: 983693 - RNA, 22 nt, Human
uccugagauucugcauuucuaa

SEQ ID NO: 983694 - RNA, 22 nt, Human
ccucagcucuucccugugcaca

SEQ ID NO: 983695 - RNA, 22 nt, Human
aggccuagaggaauggccaggg

SEQ ID NO: 983696 - RNA, 22 nt, Human
gagcugccaagauuacaaucag

SEQ ID NO: 983697 - RNA, 22 nt, Human
ccuggcagcuccuccccggcgg

SEQ ID NO: 983698 - RNA, 22 nt, Human
ugggagcaagcuggugcuggag

SEQ ID NO: 983699 - RNA, 22 nt, Human
gcucccugccuacacggaccuu

SEQ ID NO: 983700 - RNA, 22 nt, Human
uggccuggccacauccagcagg

SEQ ID NO: 983701 - RNA, 22 nt, Human
ugggcacaaacaucugccuguu

SEQ ID NO: 983702 - RNA, 22 nt, Human
uccagggaucuuuagagucuuu

SEQ ID NO: 983703 - RNA, 22 nt, Human
agucucagcuacuugggaggcu

SEQ ID NO: 983704 - RNA, 22 nt, Human
cagagccauccaggugccuguu

SEQ ID NO: 983705 - RNA, 22 nt, Human
aacaauaauugcgguucucuau

SEQ ID NO: 983706 - RNA, 22 nt, Human
gaaauauucuugucuuguuuuc

SEQ ID NO: 983707 - RNA, 22 nt, Human
cagagccucagaauccugugga

SEQ ID NO: 983708 - RNA, 18 nt, Human
uuuaugagcugugggacc

SEQ ID NO: 983709 - RNA, 22 nt, Human
gcagcagcccagggcucucaga

SEQ ID NO: 983710 - RNA, 22 nt, Human
ugcaggccggcccuaggccuca

SEQ ID NO: 983711 - RNA, 22 nt, Human
ccucuggcuguaccacuggcac

SEQ ID NO: 983712 - RNA, 22 nt, Human
cuggagggugagccucaucucu

SEQ ID NO: 983713 - RNA, 23 nt, Human
guuguaauggauaaugcaaauug

SEQ ID NO: 983714 - RNA, 22 nt, Human
ugcagaaguauuccaggcccca

SEQ ID NO: 983715 - RNA, 22 nt, Human
cagcaauaaugucuacaaaucu

SEQ ID NO: 983716 - RNA, 22 nt, Human
uaagaacaagcuggggguucca

SEQ ID NO: 983717 - RNA, 22 nt, Human
aggauuugaaccugcauccagu

SEQ ID NO: 983718 - RNA, 20 nt, Human
ucacaucuggcagcugauga

SEQ ID NO: 983719 - RNA, 22 nt, Human
guggccugccgugugguauggg

SEQ ID NO: 983720 - RNA, 22 nt, Human
gugcauuugacgaauacucacu

SEQ ID NO: 983721 - RNA, 22 nt, Human
caugcuuucuguccaaauguua

SEQ ID NO: 983722 - RNA, 22 nt, Human
aucaggauccaccuugagccug

SEQ ID NO: 983723 - RNA, 22 nt, Human
caaggaaaacagaugaucaaca

SEQ ID NO: 983724 - RNA, 22 nt, Human
aaguugaaugcguacgugacau

SEQ ID NO: 983725 - RNA, 20 nt, Human
uucuggaggcuacaagucug

SEQ ID NO: 983726 - RNA, 22 nt, Human
gaggccugguagccgagcccca

SEQ ID NO: 983727 - RNA, 22 nt, Human
agucccaguucgguucuuccuc

SEQ ID NO: 983728 - RNA, 20 nt, Human
cugccaugauugauagagug

SEQ ID NO: 983729 - RNA, 22 nt, Human
ccucagggucugaggagaccgu

SEQ ID NO: 983730 - RNA, 22 nt, Human
ugucccagggaaggcccagcac

SEQ ID NO: 983731 - RNA, 22 nt, Human
uucuucaaaauccagcaugauu

SEQ ID NO: 983732 - RNA, 22 nt, Human
ccacagcugaccgcaggugagc

SEQ ID NO: 983733 - RNA, 22 nt, Human
ccagccuggguguuagaagaca

SEQ ID NO: 983734 - RNA, 22 nt, Human
uuccaaagaaauugaccaagac

SEQ ID NO: 983735 - RNA, 21 nt, Human
aggugcagagccagggaccag

SEQ ID NO: 983736 - RNA, 22 nt, Human
ccucugaggucauggacuuggc

SEQ ID NO: 983737 - RNA, 22 nt, Human
ugcaccccauuuuacauuuaca

SEQ ID NO: 983738 - RNA, 22 nt, Human
cagagcugcacauucuaugaug

SEQ ID NO: 983739 - RNA, 22 nt, Human
gaggaccacagaugagccugca

SEQ ID NO: 983740 - RNA, 22 nt, Human
ccugggaggcggagguugcagg

SEQ ID NO: 983741 - RNA, 22 nt, Human
auucacaaagucacccuuacac

SEQ ID NO: 983742 - RNA, 22 nt, Human
caggggcuguuugccucaggcc

SEQ ID NO: 983743 - RNA, 22 nt, Human
guggcaggucccauuggagcag

SEQ ID NO: 983744 - RNA, 22 nt, Human
uuggccaaaaaagucauuagaa

SEQ ID NO: 983745 - RNA, 22 nt, Human
uggcucaguuucugcccagcug

SEQ ID NO: 983746 - RNA, 22 nt, Human
aggguagggcccggagacagac

SEQ ID NO: 983747 - RNA, 22 nt, Human
uugacagcuauuuugcuuugau

SEQ ID NO: 983748 - RNA, 22 nt, Human
ucccagaggcaguugguaacuu

SEQ ID NO: 983749 - RNA, 22 nt, Human
caugaagcauguuuugucauga

SEQ ID NO: 983750 - RNA, 22 nt, Human
ucuggagcuggcagggcccugg

SEQ ID NO: 983751 - RNA, 22 nt, Human
uucuuucagaacacaagugauu

SEQ ID NO: 983752 - RNA, 22 nt, Human
aaguuguauauaccgcuuuaag

SEQ ID NO: 983753 - RNA, 22 nt, Human
ucaggaaagaagaugcucagug

SEQ ID NO: 983754 - RNA, 22 nt, Human
aagauuuccauuucuagcucau

SEQ ID NO: 983755 - RNA, 22 nt, Human
gugcugucaauugcuuucagua

SEQ ID NO: 983756 - RNA, 22 nt, Human
uguaugcagggcuuguaugcag

SEQ ID NO: 983757 - RNA, 22 nt, Human
gcuguauuccugcacuguauag

SEQ ID NO: 983758 - RNA, 22 nt, Human
agcugagcuaguaguuccagug

SEQ ID NO: 983759 - RNA, 22 nt, Human
uugaaggacaucuuguuucuag

SEQ ID NO: 983760 - RNA, 18 nt, Human
ucugucuguacaaguauc

SEQ ID NO: 983761 - RNA, 22 nt, Human
ugcugcucaaugagaugccauc

SEQ ID NO: 983762 - RNA, 22 nt, Human
cugccugcugccuguggagggu

SEQ ID NO: 983763 - RNA, 22 nt, Human
cagcugccccgcuggcugacca

SEQ ID NO: 983764 - RNA, 22 nt, Human
ggcccugggcagaggagugggc

SEQ ID NO: 983765 - RNA, 22 nt, Human
gggcaugagagggcagcuggca

SEQ ID NO: 983766 - RNA, 22 nt, Human
ccucuggcaacuucacagccca

SEQ ID NO: 983767 - RNA, 22 nt, Human
ugcucuggaguggcuugugcac

SEQ ID NO: 983768 - RNA, 22 nt, Human
agccaagcaccacuggcacucg

SEQ ID NO: 983769 - RNA, 22 nt, Human
acacagggucuagaguuaggcc

SEQ ID NO: 983770 - RNA, 22 nt, Human
gccuaggaguacagaaugguuu

SEQ ID NO: 983771 - RNA, 22 nt, Human
cugccgaguacagccauagaaa

SEQ ID NO: 983772 - RNA, 19 nt, Human
ugcucaggccaaggagccc

SEQ ID NO: 983773 - RNA, 22 nt, Human
gggaggugauggcaagcagcgg

SEQ ID NO: 983774 - RNA, 22 nt, Human
gguaacaguauguagaguaaga

SEQ ID NO: 983775 - RNA, 22 nt, Human
ucugcucuaguugcuuccugcc

SEQ ID NO: 983776 - RNA, 20 nt, Human
uccaagcccuccuuccauuc

SEQ ID NO: 983777 - RNA, 22 nt, Human
aagaacauuuuguagaaugaca

SEQ ID NO: 983778 - RNA, 22 nt, Human
gcagagcucuguucuuaucucc

SEQ ID NO: 983779 - RNA, 22 nt, Human
cugcagggcccgccugagcccu

SEQ ID NO: 983780 - RNA, 18 nt, Human
guccugagcucugcugua

SEQ ID NO: 983781 - RNA, 22 nt, Human
ugcagucuuccagcugcacaaa

SEQ ID NO: 983782 - RNA, 22 nt, Human
ugagcccagagaucugagcuau

SEQ ID NO: 983783 - RNA, 22 nt, Human
cuuuuuccagcuucaggguggg

SEQ ID NO: 983784 - RNA, 22 nt, Human
ccagcagcgauagggugagugc

SEQ ID NO: 983785 - RNA, 22 nt, Human
ugggccuguugggguugaguua

SEQ ID NO: 983786 - RNA, 22 nt, Human
aggccucacauugggcuucaag

SEQ ID NO: 983787 - RNA, 22 nt, Human
uccacugcagcuucugauggaa

SEQ ID NO: 983788 - RNA, 22 nt, Human
aaaaaugcugugguagcugugu

SEQ ID NO: 983789 - RNA, 22 nt, Human
ugauuucauaguauauacauga

SEQ ID NO: 983790 - RNA, 19 nt, Human
ggcugccuggagcgagggc

SEQ ID NO: 983791 - RNA, 21 nt, Human
ugcagcugacacugguaugcc

SEQ ID NO: 983792 - RNA, 22 nt, Human
ucagaggucccuagcaggagug

SEQ ID NO: 983793 - RNA, 22 nt, Human
ccauaaggagccagacauucca

SEQ ID NO: 983794 - RNA, 22 nt, Human
cagcauggggaucacuguaggc

SEQ ID NO: 983795 - RNA, 22 nt, Human
ggcagcucugcuccacaugagu

SEQ ID NO: 983796 - RNA, 22 nt, Human
cccuggccagcucaugucugag

SEQ ID NO: 983797 - RNA, 22 nt, Human
aaggcugauuagacugauagcu

SEQ ID NO: 983798 - RNA, 22 nt, Human
ucacaugcucaccuaagccaca

SEQ ID NO: 983799 - RNA, 22 nt, Human
caggcaggugcagauuccucuu

SEQ ID NO: 983800 - RNA, 22 nt, Human
uacuccugcugauccugccagc

SEQ ID NO: 983801 - RNA, 22 nt, Human
ugcugaaauuagaacauugagg

SEQ ID NO: 983802 - RNA, 22 nt, Human
gcagagccaggcuggggcaggu

SEQ ID NO: 983803 - RNA, 16 nt, Human
gggagggaguuggugg

SEQ ID NO: 983804 - RNA, 22 nt, Human
ugucccucauugacgcugugcc

SEQ ID NO: 983805 - RNA, 21 nt, Human
ucuguacaucauugagucccc

SEQ ID NO: 983806 - RNA, 22 nt, Human
aauaugugagguauguucagug

SEQ ID NO: 983807 - RNA, 22 nt, Human
uaugcacacaucgcagcaggaa

SEQ ID NO: 983808 - RNA, 22 nt, Human
auuggcaaggcugcggugucug

SEQ ID NO: 983809 - RNA, 22 nt, Human
uuaacagacauauauauuugua

SEQ ID NO: 983810 - RNA, 22 nt, Human
gagguucacaggcuaucacagu

SEQ ID NO: 983811 - RNA, 22 nt, Human
caguaugagaguugaaucaagg

SEQ ID NO: 983812 - RNA, 22 nt, Human
caggagugaguuggggucuaca

SEQ ID NO: 983813 - RNA, 22 nt, Human
uuugcauuguuucaaaagugaa

SEQ ID NO: 983814 - RNA, 21 nt, Human
aaggaaaagcuuggucucuga

SEQ ID NO: 983815 - RNA, 22 nt, Human
uccagucauuuccauuguuccc

SEQ ID NO: 983816 - RNA, 16 nt, Human
agcagccagcacugga

SEQ ID NO: 983817 - RNA, 22 nt, Human
gcugaagagagaugcguccagc

SEQ ID NO: 983818 - RNA, 23 nt, Human
agucaguguaaguuuggaaugca

SEQ ID NO: 983819 - RNA, 22 nt, Human
ggcaguagccagggacuggcag

SEQ ID NO: 983820 - RNA, 20 nt, Human
gucucaaguaucucacaguc

SEQ ID NO: 983821 - RNA, 20 nt, Human
cucuccuugccgacuuggca

SEQ ID NO: 983822 - RNA, 22 nt, Human
gcacagaacagagaaauagcca

SEQ ID NO: 983823 - RNA, 22 nt, Human
uagugcacacgcauguagcagu

SEQ ID NO: 983824 - RNA, 20 nt, Human
gguagcagcugcugucaucc

SEQ ID NO: 983825 - RNA, 22 nt, Human
gucaucuuaucauuguugcugu

SEQ ID NO: 983826 - RNA, 22 nt, Human
ccugggugucaugggcagcugg

SEQ ID NO: 983827 - RNA, 21 nt, Human
ugcagagauaucugaagcaga

SEQ ID NO: 983828 - RNA, 22 nt, Human
aggccugggucucgugccuacc

SEQ ID NO: 983829 - RNA, 17 nt, Human
gcagcagagagacccuc

SEQ ID NO: 983830 - RNA, 22 nt, Human
cacugaaggaaggacuacugca

SEQ ID NO: 983831 - RNA, 22 nt, Human
ccugucuguaucgguucagagu

SEQ ID NO: 983832 - RNA, 22 nt, Human
gccuucugaucgcuggacugac

SEQ ID NO: 983833 - RNA, 22 nt, Human
gccuccuggauuuuagugccau

SEQ ID NO: 983834 - RNA, 22 nt, Human
ggcaaggccuugcccagcauuc

SEQ ID NO: 983835 - RNA, 22 nt, Human
gcucccagggaccgcagggcag

SEQ ID NO: 983836 - RNA, 22 nt, Human
gagaggcugaaaucacaggagc

SEQ ID NO: 983837 - RNA, 22 nt, Human
caggguuucaccauguuagcag

SEQ ID NO: 983838 - RNA, 19 nt, Human
cugcucaggucagucuguc

SEQ ID NO: 983839 - RNA, 22 nt, Human
gugugcaugcauagacaccaca

SEQ ID NO: 983840 - RNA, 22 nt, Human
uggaaggagcuaaggaccuggg

SEQ ID NO: 983841 - RNA, 22 nt, Human
ucucagggccucccucuguuuc

SEQ ID NO: 983842 - RNA, 22 nt, Human
uuucacaauuuuaaggagcaaa

SEQ ID NO: 983843 - RNA, 22 nt, Human
ugggccacaagccaugggacca

SEQ ID NO: 983844 - RNA, 22 nt, Human
cccaagcagggugcagaggcau

SEQ ID NO: 983845 - RNA, 23 nt, Human
cccagcgcugagcccugcaggca

SEQ ID NO: 983846 - RNA, 22 nt, Human
uucucuuauucuggauaugcag

SEQ ID NO: 983847 - RNA, 22 nt, Human
caggugcugcguggcggagcug

SEQ ID NO: 983848 - RNA, 22 nt, Human
uguggccuugcagccuggaggu

SEQ ID NO: 983849 - RNA, 21 nt, Human
ugggcagauggcaguguggcu

SEQ ID NO: 983850 - RNA, 22 nt, Human
caaggagauaaaauguugagcu

SEQ ID NO: 983851 - RNA, 22 nt, Human
aguguugucaaacggcucagca

SEQ ID NO: 983852 - RNA, 21 nt, Human
cagagcagcguucugcugugg

SEQ ID NO: 983853 - RNA, 22 nt, Human
acaagagauuaucuacagauga

SEQ ID NO: 983854 - RNA, 22 nt, Human
auggccaacugaaaugaaagau

SEQ ID NO: 983855 - RNA, 22 nt, Human
gggcagagguucaacuucaaca

SEQ ID NO: 983856 - RNA, 22 nt, Human
gggcuaggcuuggccagcacug

SEQ ID NO: 983857 - RNA, 22 nt, Human
auaugugugccauuucagcagu

SEQ ID NO: 983858 - RNA, 22 nt, Human
uuccuggccucucucugagcag

SEQ ID NO: 983859 - RNA, 22 nt, Human
ugccaggcccagcuccagagcu

SEQ ID NO: 983860 - RNA, 22 nt, Human
cugaagccacgauagcuuccua

SEQ ID NO: 983861 - RNA, 22 nt, Human
uggccuggcccugaggcccugu

SEQ ID NO: 983862 - RNA, 18 nt, Human
uggagcaggaagccuggc

SEQ ID NO: 983863 - RNA, 21 nt, Human
cucuuuauauaguaaagauau

SEQ ID NO: 983864 - RNA, 22 nt, Human
ugagccuggagucguggagggg

SEQ ID NO: 983865 - RNA, 22 nt, Human
aagaauguggguggauaugaug

SEQ ID NO: 983866 - RNA, 22 nt, Human
cacaaugcguacauauaucaaa

SEQ ID NO: 983867 - RNA, 22 nt, Human
aaaguuuccugcuaagugcuau

SEQ ID NO: 983868 - RNA, 22 nt, Human
aggaggccgauuucagaggucg

SEQ ID NO: 983869 - RNA, 19 nt, Human
aggcucugagcuccuggag

SEQ ID NO: 983870 - RNA, 22 nt, Human
ccugggagagccaucuguggcc

SEQ ID NO: 983871 - RNA, 22 nt, Human
agcuggagaucaugcugauacu

SEQ ID NO: 983872 - RNA, 18 nt, Human
cccacggugcuguagggc

SEQ ID NO: 983873 - RNA, 22 nt, Human
uccugucagugaggcagaugaa

SEQ ID NO: 983874 - RNA, 17 nt, Human
gccucugcuugugucau

SEQ ID NO: 983875 - RNA, 22 nt, Human
ugaaugugaugcuaaacauaug

SEQ ID NO: 983876 - RNA, 22 nt, Human
uaaguaaauuuauaaugugauu

SEQ ID NO: 983877 - RNA, 22 nt, Human
gcaccugggacccagaggcacc

SEQ ID NO: 983878 - RNA, 22 nt, Human
gcugugcuauaucucugagugu

SEQ ID NO: 983879 - RNA, 22 nt, Human
ccugucugcagauaucucaggu

SEQ ID NO: 983880 - RNA, 22 nt, Human
ugaggcagaaauuccuguuuuc

SEQ ID NO: 983881 - RNA, 22 nt, Human
uggugcugacaguucugagugc

SEQ ID NO: 983882 - RNA, 22 nt, Human
acacauuauaggcaaucaaaag

SEQ ID NO: 983883 - RNA, 21 nt, Human
ucuuugcaucaguuguuuucu

SEQ ID NO: 983884 - RNA, 22 nt, Human
uggagccauaacccuuucguac

SEQ ID NO: 983885 - RNA, 22 nt, Human
agucccaggcagccgagccggu

SEQ ID NO: 983886 - RNA, 22 nt, Human
aggcagagagcaguggccgucu

SEQ ID NO: 983887 - RNA, 22 nt, Human
aaaugucuguuagucauaucau

SEQ ID NO: 983888 - RNA, 22 nt, Human
cagaaauggagcccaggaaucu

SEQ ID NO: 983889 - RNA, 22 nt, Human
ugcugcacucaccaacagauaa

SEQ ID NO: 983890 - RNA, 22 nt, Human
gccagagccacuuuugggugau

SEQ ID NO: 983891 - RNA, 22 nt, Human
gcaggccuccccugcuggagcu

SEQ ID NO: 983892 - RNA, 22 nt, Human
acacagggcugcgccugacccc

SEQ ID NO: 983893 - RNA, 20 nt, Human
agggcagagggauuacaggc

SEQ ID NO: 983894 - RNA, 22 nt, Human
uaaaucaguuucucuuauuggu

SEQ ID NO: 983895 - RNA, 22 nt, Human
cuucucuucccagggacacagg

SEQ ID NO: 983896 - RNA, 22 nt, Human
ggagggagucagcugauuagaa

SEQ ID NO: 983897 - RNA, 22 nt, Human
gggcagaggggcgcuucccucu

SEQ ID NO: 983898 - RNA, 22 nt, Human
caggcugcggucggcucugguc

SEQ ID NO: 983899 - RNA, 22 nt, Human
uauagaaguaagcauugugaug

SEQ ID NO: 983900 - RNA, 22 nt, Human
gagccugaaauacaggucacug

SEQ ID NO: 983901 - RNA, 22 nt, Human
ugggccugaguuugggaacugg

SEQ ID NO: 983902 - RNA, 22 nt, Human
cugaaggaagcagguggccugu

SEQ ID NO: 983903 - RNA, 22 nt, Human
ccagcagcccacaggcgucccu

SEQ ID NO: 983904 - RNA, 22 nt, Human
uacauggguagguuaagucaua

SEQ ID NO: 983905 - RNA, 20 nt, Human
gcagagcuguucugugggga

SEQ ID NO: 983906 - RNA, 22 nt, Human
aggcugcaggucugggucaugu

SEQ ID NO: 983907 - RNA, 22 nt, Human
cccugccuugggguccacaccg

SEQ ID NO: 983908 - RNA, 22 nt, Human
auucacaaagaagggaaguaca

SEQ ID NO: 983909 - RNA, 22 nt, Human
acugaaggaaacuuuuguguuu

SEQ ID NO: 983910 - RNA, 20 nt, Human
uguacacaguacuuuacaau

SEQ ID NO: 983911 - RNA, 18 nt, Human
uggagcugagugcugugc

SEQ ID NO: 983912 - RNA, 22 nt, Human
agcagcaugaugacagagucuc

SEQ ID NO: 983913 - RNA, 22 nt, Human
ggcacugagaggcucuuccuaa

SEQ ID NO: 983914 - RNA, 22 nt, Human
caggcacugugcaagggucucg

SEQ ID NO: 983915 - RNA, 22 nt, Human
ccaggcccugcuccucacacca

SEQ ID NO: 983916 - RNA, 22 nt, Human
acaggcagcacuaaucucuggu

SEQ ID NO: 983917 - RNA, 22 nt, Human
uggucucuucuuccaagauggc

SEQ ID NO: 983918 - RNA, 22 nt, Human
gguggccucugcaggccucgac

SEQ ID NO: 983919 - RNA, 22 nt, Human
ggggcugguggugguuucucca

SEQ ID NO: 983920 - RNA, 22 nt, Human
cccaggucuaugccagcucuga

SEQ ID NO: 983921 - RNA, 22 nt, Human
aggggccucgcaggaccgcucc

SEQ ID NO: 983922 - RNA, 22 nt, Human
agguacagaugaaagucuaguu

SEQ ID NO: 983923 - RNA, 22 nt, Human
gcaggcaggcuuccuugaacug

SEQ ID NO: 983924 - RNA, 22 nt, Human
cugcucuguucccccaucaucu

SEQ ID NO: 983925 - RNA, 22 nt, Human
agccucucugaugugacagcua

SEQ ID NO: 983926 - RNA, 22 nt, Human
acucugggccccagguggagcu

SEQ ID NO: 983927 - RNA, 22 nt, Human
agaggucauaucucagaagaga

SEQ ID NO: 983928 - RNA, 22 nt, Human
caguggcgugaucucugcucac

SEQ ID NO: 983929 - RNA, 22 nt, Human
acugugugcccugacgccaggg

SEQ ID NO: 983930 - RNA, 22 nt, Human
agcugcaggcccaugcucaguc

SEQ ID NO: 983931 - RNA, 22 nt, Human
gggcuggcucugucuagaaagg

SEQ ID NO: 983932 - RNA, 22 nt, Human
gaugcaaagcauuuuugugugu

SEQ ID NO: 983933 - RNA, 23 nt, Human
cauuucugggagauuuauaaaau

SEQ ID NO: 983934 - RNA, 22 nt, Human
ugccugcugcuaagcucuuugu

SEQ ID NO: 983935 - RNA, 22 nt, Human
acuccuggugcugaugaagaga

SEQ ID NO: 983936 - RNA, 17 nt, Human
ucagagggaugagcagg

SEQ ID NO: 983937 - RNA, 22 nt, Human
uugaggagcacuagucagguau

SEQ ID NO: 983938 - RNA, 22 nt, Human
uuuauuagugcuuguaucacug

SEQ ID NO: 983939 - RNA, 21 nt, Human
agagagaaggccauauggucc

SEQ ID NO: 983940 - RNA, 22 nt, Human
aggagaguaccauugggccgca

SEQ ID NO: 983941 - RNA, 22 nt, Human
ccagcugcgggcaucgagaguu

SEQ ID NO: 983942 - RNA, 22 nt, Human
agguagagcuccaguagaaaau

SEQ ID NO: 983943 - RNA, 22 nt, Human
ggagagcugguagcuggcucca

SEQ ID NO: 983944 - RNA, 22 nt, Human
ugcagcucugaacagucaugaa

SEQ ID NO: 983945 - RNA, 22 nt, Human
ggccucgcggcuucugguggcu

SEQ ID NO: 983946 - RNA, 22 nt, Human
ccacagggcacagacaggaagc

SEQ ID NO: 983947 - RNA, 22 nt, Human
gguucacauauugagaguauuc

SEQ ID NO: 983948 - RNA, 22 nt, Human
agagggcugcugcacagugcuc

SEQ ID NO: 983949 - RNA, 22 nt, Human
gggucugaggaguaccauuguc

SEQ ID NO: 983950 - RNA, 22 nt, Human
gcagggugugucucauacaguu

SEQ ID NO: 983951 - RNA, 23 nt, Human
auaauaacgucugucuugucucu

SEQ ID NO: 983952 - RNA, 22 nt, Human
ccagccucacuggcaucaccua

SEQ ID NO: 983953 - RNA, 22 nt, Human
cagggugcagugucgcugcuag

SEQ ID NO: 983954 - RNA, 23 nt, Human
cagggcugggcuugguguuaggc

SEQ ID NO: 983955 - RNA, 23 nt, Human
cucugcaggagagugggcagggc

SEQ ID NO: 983956 - RNA, 22 nt, Human
accugccucagugcagcuggau

SEQ ID NO: 983957 - RNA, 22 nt, Human
ucucagggcgcagugaggcagu

SEQ ID NO: 983958 - RNA, 22 nt, Human
ugggcacuguagcuggugcugg

SEQ ID NO: 983959 - RNA, 22 nt, Human
acccugggucauauacagugug

SEQ ID NO: 983960 - RNA, 22 nt, Human
cugcccugugaggguccuuggg

SEQ ID NO: 983961 - RNA, 21 nt, Human
uauacaugugugcauacgugu

SEQ ID NO: 983962 - RNA, 22 nt, Human
gagguuagaggucagugcaguc

SEQ ID NO: 983963 - RNA, 22 nt, Human
gaugcagaaaguagacaccauc

SEQ ID NO: 983964 - RNA, 22 nt, Human
gggcagaggcucuggcccaucc

SEQ ID NO: 983965 - RNA, 22 nt, Human
gacauaaaauucaauaauuugu

SEQ ID NO: 983966 - RNA, 22 nt, Human
guuccauaucacagcagacgaa

SEQ ID NO: 983967 - RNA, 22 nt, Human
agccucugacugucagcaaggu

SEQ ID NO: 983968 - RNA, 22 nt, Human
cucauacauaugccauuccugc

SEQ ID NO: 983969 - RNA, 22 nt, Human
uaaauaaguucuucauuguuug

SEQ ID NO: 983970 - RNA, 22 nt, Human
uguguacaagaguguuuacugu

SEQ ID NO: 983971 - RNA, 22 nt, Human
uccuucagggcugaccacaggc

SEQ ID NO: 983972 - RNA, 22 nt, Human
aggcucagauucacauuugguu

SEQ ID NO: 983973 - RNA, 22 nt, Human
ggagcauguggggugagcaggg

SEQ ID NO: 983974 - RNA, 22 nt, Human
gcaagcaagcagguagagcuga

SEQ ID NO: 983975 - RNA, 22 nt, Human
ggcagcucaccucugguccagg

SEQ ID NO: 983976 - RNA, 22 nt, Human
augugcaacuucagcagaaagg

SEQ ID NO: 983977 - RNA, 22 nt, Human
uaccuugggcuauuaucuuuga

SEQ ID NO: 983978 - RNA, 22 nt, Human
cccagcagaaucugaugagggc

SEQ ID NO: 983979 - RNA, 22 nt, Human
ggcugggcaggucugcacaggg

SEQ ID NO: 983980 - RNA, 23 nt, Human
ccucccaccuauuucacuuucuu

SEQ ID NO: 983981 - RNA, 22 nt, Human
uggcucugugcuucuaguaucu

SEQ ID NO: 983982 - RNA, 23 nt, Human
ucagagaaguuguaggcugggga

SEQ ID NO: 983983 - RNA, 21 nt, Human
aaagaacaggcagauguucuu

SEQ ID NO: 983984 - RNA, 22 nt, Human
uagaacaugcucauguauaaau

SEQ ID NO: 983985 - RNA, 22 nt, Human
ccucagccuuggccccaggcag

SEQ ID NO: 983986 - RNA, 22 nt, Human
aagggcagggaguuugugucua

SEQ ID NO: 983987 - RNA, 22 nt, Human
ggcugccugaggcugaggcccg

SEQ ID NO: 983988 - RNA, 22 nt, Human
agagccuggucugagauaggac

SEQ ID NO: 983989 - RNA, 22 nt, Human
caggugggccaugaaaaaugac

SEQ ID NO: 983990 - RNA, 22 nt, Human
cccagccugucuuucccaauga

SEQ ID NO: 983991 - RNA, 22 nt, Human
ugggccacuugaaaguggaugu

SEQ ID NO: 983992 - RNA, 22 nt, Human
agcugggaugauaaccucaguc

SEQ ID NO: 983993 - RNA, 22 nt, Human
cuuugcaauagaggcacacaug

SEQ ID NO: 983994 - RNA, 22 nt, Human
ggggugggcgugcagggacacc

SEQ ID NO: 983995 - RNA, 22 nt, Human
ucuaggagcaugaagggaaggc

SEQ ID NO: 983996 - RNA, 22 nt, Human
acagcuguggccacuugcaucc

SEQ ID NO: 983997 - RNA, 19 nt, Human
ggccccucucacaggaguu

SEQ ID NO: 983998 - RNA, 22 nt, Human
ccuggccauuugaacuucagac

SEQ ID NO: 983999 - RNA, 22 nt, Human
caagacaagaucuaagcaugcu

SEQ ID NO: 984000 - RNA, 22 nt, Human
gaaauauuguacuggagauguu

SEQ ID NO: 984001 - RNA, 22 nt, Human
ggccugcugcuaugacuuccug

SEQ ID NO: 984002 - RNA, 22 nt, Human
acagggccucagcugauucugg

SEQ ID NO: 984003 - RNA, 22 nt, Human
ucccuggggauguuggccugcc

SEQ ID NO: 984004 - RNA, 22 nt, Human
ugagcccagucugucugacaug

SEQ ID NO: 984005 - RNA, 22 nt, Human
gucagaggggcagcugccaggc

SEQ ID NO: 984006 - RNA, 22 nt, Human
cagggagaucuuggcuccuggu

SEQ ID NO: 984007 - RNA, 22 nt, Human
ggcagcugaccuagcaccaucc

SEQ ID NO: 984008 - RNA, 22 nt, Human
cuggucaaggagagucucugca

SEQ ID NO: 984009 - RNA, 22 nt, Human
ucaguuuucauuucaugagcag

SEQ ID NO: 984010 - RNA, 22 nt, Human
auucauucugaccucaagagaa

SEQ ID NO: 984011 - RNA, 22 nt, Human
ucaaaugcuguauuguaguaau

SEQ ID NO: 984012 - RNA, 22 nt, Human
cauuaaauuccuuguucucaaa

SEQ ID NO: 984013 - RNA, 22 nt, Human
uguguacauaucuauccuagau

SEQ ID NO: 984014 - RNA, 22 nt, Human
agcacagaguugcagagagcgu

SEQ ID NO: 984015 - RNA, 22 nt, Human
aaaggucagcugccaucguucu

SEQ ID NO: 984016 - RNA, 22 nt, Human
cagaggugcauacaggucauua

SEQ ID NO: 984017 - RNA, 22 nt, Human
uggcagacacugucgaagccua

SEQ ID NO: 984018 - RNA, 22 nt, Human
auuuaugacuggugaauagaac

SEQ ID NO: 984019 - RNA, 22 nt, Human
cuaggccacuugcucucaugga

SEQ ID NO: 984020 - RNA, 22 nt, Human
ucucaggaauagaguggcagca

SEQ ID NO: 984021 - RNA, 22 nt, Human
gaguuuaaaacgcuuguauuua

SEQ ID NO: 984022 - RNA, 22 nt, Human
cugggcaggagggcucuaugga

SEQ ID NO: 984023 - RNA, 22 nt, Human
cugggcugagccugggcugugu

SEQ ID NO: 984024 - RNA, 22 nt, Human
ggccugccucacagucagcacc

SEQ ID NO: 984025 - RNA, 22 nt, Human
uccuggccgcuggccccugaga

SEQ ID NO: 984026 - RNA, 22 nt, Human
uaacauuccucaaaguuuucag

SEQ ID NO: 984027 - RNA, 22 nt, Human
ccuggccucuccgaguaaccug

SEQ ID NO: 984028 - RNA, 22 nt, Human
accccaagacaguagaagagaa

SEQ ID NO: 984029 - RNA, 22 nt, Human
aagggaggggauguaagccugg

SEQ ID NO: 984030 - RNA, 22 nt, Human
uaagacaauucuucagucacaa

SEQ ID NO: 984031 - RNA, 22 nt, Human
ccaccagcagugugcaaggauu

SEQ ID NO: 984032 - RNA, 20 nt, Human
ucugcucagcccucaguggc

SEQ ID NO: 984033 - RNA, 22 nt, Human
auuaggauguuccuaugcacau

SEQ ID NO: 984034 - RNA, 22 nt, Human
aguguuccuugcuuucccagag

SEQ ID NO: 984035 - RNA, 22 nt, Human
gcuguucccauguggggcucag

SEQ ID NO: 984036 - RNA, 22 nt, Human
aggucacauggauaaugaucag

SEQ ID NO: 984037 - RNA, 22 nt, Human
aguuucaauucuuuucacaaag

SEQ ID NO: 984038 - RNA, 22 nt, Human
acagggccucagccagggcaga

SEQ ID NO: 984039 - RNA, 22 nt, Human
cagccugacaccagcuuugggc

SEQ ID NO: 984040 - RNA, 22 nt, Human
aauuaggaauaaaugaguacuu

SEQ ID NO: 984041 - RNA, 22 nt, Human
uccucugccaaagggaguugcc

SEQ ID NO: 984042 - RNA, 22 nt, Human
gauggguggucucagacuugcc

SEQ ID NO: 984043 - RNA, 22 nt, Human
uccucaggucaaagcaggagaa

SEQ ID NO: 984044 - RNA, 22 nt, Human
aaggagcuuguucgccuuccuc

SEQ ID NO: 984045 - RNA, 22 nt, Human
uaugugcaguuugcucuuaaca

SEQ ID NO: 984046 - RNA, 18 nt, Human
gcagagugcgucucugug

SEQ ID NO: 984047 - RNA, 22 nt, Human
aagcugcagacccccugucuca

SEQ ID NO: 984048 - RNA, 22 nt, Human
aaaaguuuaagacucauucuag

SEQ ID NO: 984049 - RNA, 22 nt, Human
ucugucugcaccuaagcacagu

SEQ ID NO: 984050 - RNA, 22 nt, Human
aggaggcccuagagcucuagag

SEQ ID NO: 984051 - RNA, 22 nt, Human
uauguuaaauguuugauguuua

SEQ ID NO: 984052 - RNA, 22 nt, Human
ugucucagggcagcagcagggg

SEQ ID NO: 984053 - RNA, 22 nt, Human
uggccaaaguagaaaauaauag

SEQ ID NO: 984054 - RNA, 22 nt, Human
aaaguuugaaugauauauuagu

SEQ ID NO: 984055 - RNA, 22 nt, Human
uuccuauuuccaugaaacacaa

SEQ ID NO: 984056 - RNA, 22 nt, Human
gccuggcaggccugggccagca

SEQ ID NO: 984057 - RNA, 22 nt, Human
uagagcauuuagaggggcagga

SEQ ID NO: 984058 - RNA, 23 nt, Human
cuugcagggcuggaggcuuagaa

SEQ ID NO: 984059 - RNA, 22 nt, Human
cguuggagacacuugaggacuu

SEQ ID NO: 984060 - RNA, 22 nt, Human
ugggcaggauaauaucucaugu

SEQ ID NO: 984061 - RNA, 22 nt, Human
acuccugggugcugaccagcgu

SEQ ID NO: 984062 - RNA, 21 nt, Human
agacagagugcagucuacaua

SEQ ID NO: 984063 - RNA, 22 nt, Human
cucccagagaccaagcugagaa

SEQ ID NO: 984064 - RNA, 22 nt, Human
aucuggcuccuacacuugaaga

SEQ ID NO: 984065 - RNA, 22 nt, Human
aaucagucauuagcucugaccu

SEQ ID NO: 984066 - RNA, 20 nt, Human
ggcugcugugggcagagagg

SEQ ID NO: 984067 - RNA, 23 nt, Human
uggcucagggucucuuaugaagu

SEQ ID NO: 984068 - RNA, 22 nt, Human
gcugauuauuacaugucugugg

SEQ ID NO: 984069 - RNA, 22 nt, Human
uaaguucagaguucucauuugu

SEQ ID NO: 984070 - RNA, 22 nt, Human
cuggcaggaaguuagaugguaa

SEQ ID NO: 984071 - RNA, 22 nt, Human
ccuggcagaauauuaaagugca

SEQ ID NO: 984072 - RNA, 22 nt, Human
acagaccaaaaaaggauauugg

SEQ ID NO: 984073 - RNA, 18 nt, Human
gcugucugaggucugagg

SEQ ID NO: 984074 - RNA, 21 nt, Human
gcaggggauagaaauggucug

SEQ ID NO: 984075 - RNA, 22 nt, Human
gcaggauggugcccuuucugcc

SEQ ID NO: 984076 - RNA, 22 nt, Human
gcugccacucugagcuugcuuc

SEQ ID NO: 984077 - RNA, 17 nt, Human
uuuucucucuuggauuc

SEQ ID NO: 984078 - RNA, 22 nt, Human
ggccccaggaccuccacggucc

SEQ ID NO: 984079 - RNA, 22 nt, Human
ugcugccuccaacuccugggcu

SEQ ID NO: 984080 - RNA, 22 nt, Human
guuugcauauuugcacaggaau

SEQ ID NO: 984081 - RNA, 17 nt, Human
gccuuccuuccuccaca

SEQ ID NO: 984082 - RNA, 22 nt, Human
uaauuuauuucaacugccaagg

SEQ ID NO: 984083 - RNA, 19 nt, Human
ccagucccauacaggagau

SEQ ID NO: 984084 - RNA, 22 nt, Human
gccuccuggccuuugcuccuca

SEQ ID NO: 984085 - RNA, 22 nt, Human
cuggccuucagacucggacuga

SEQ ID NO: 984086 - RNA, 22 nt, Human
aaaugcaggaaauuaugcuuuu

SEQ ID NO: 984087 - RNA, 22 nt, Human
ugcucacugaacucuugcuguc

SEQ ID NO: 984088 - RNA, 22 nt, Human
ccuuuggguucaaucucggucu

SEQ ID NO: 984089 - RNA, 22 nt, Human
agaggcugaaugaugucaucau

SEQ ID NO: 984090 - RNA, 22 nt, Human
ggcugugcgggcagccguggga

SEQ ID NO: 984091 - RNA, 22 nt, Human
uagaguguuguaauugaaaagg

SEQ ID NO: 984092 - RNA, 22 nt, Human
gagaaagauguaggcugggagg

SEQ ID NO: 984093 - RNA, 22 nt, Human
cacagccugcugcacucaagaa

SEQ ID NO: 984094 - RNA, 23 nt, Human
aggcacugaaugugucagugagu

SEQ ID NO: 984095 - RNA, 22 nt, Human
gcagggucuugagaggcagcca

SEQ ID NO: 984096 - RNA, 21 nt, Human
uggaccaaaguaauuugccuu

SEQ ID NO: 984097 - RNA, 22 nt, Human
cacaggcuccggccuugcagcc

SEQ ID NO: 984098 - RNA, 22 nt, Human
ggcugcagagcugggugggccu

SEQ ID NO: 984099 - RNA, 22 nt, Human
caggaaagguagucacaaugua

SEQ ID NO: 984100 - RNA, 22 nt, Human
uauuucugucagccagauaugg

SEQ ID NO: 984101 - RNA, 22 nt, Human
cagccaggagccucugcaacua

SEQ ID NO: 984102 - RNA, 23 nt, Human
agaagcagcuucuggaguaucgg

SEQ ID NO: 984103 - RNA, 22 nt, Human
ugaagaugucagcagggguggu

SEQ ID NO: 984104 - RNA, 22 nt, Human
cucuggaguggguggccgggag

SEQ ID NO: 984105 - RNA, 17 nt, Human
acagggcagaaacagcu

SEQ ID NO: 984106 - RNA, 22 nt, Human
acagccuguguaccagcuggga

SEQ ID NO: 984107 - RNA, 22 nt, Human
cagagcucagagcagggcacuc

SEQ ID NO: 984108 - RNA, 22 nt, Human
ggcaguggaggacccugugucu

SEQ ID NO: 984109 - RNA, 22 nt, Human
aagcagggugucuugacccaug

SEQ ID NO: 984110 - RNA, 22 nt, Human
agaagcugacagaugcagcagg

SEQ ID NO: 984111 - RNA, 22 nt, Human
caggcagcguccugcuuccugu

SEQ ID NO: 984112 - RNA, 22 nt, Human
gaccugccugagcugccucugc

SEQ ID NO: 984113 - RNA, 22 nt, Human
guggccuggauagacuccaucu

SEQ ID NO: 984114 - RNA, 22 nt, Human
ucuuuccuagaggcugaugagu

SEQ ID NO: 984115 - RNA, 22 nt, Human
gggauggacuuggggacuccag

SEQ ID NO: 984116 - RNA, 22 nt, Human
acugaaggaagcgggcaggggu

SEQ ID NO: 984117 - RNA, 21 nt, Human
guguuuccuguuuauggcuug

SEQ ID NO: 984118 - RNA, 22 nt, Human
agagaauuuuaaaagccuugaa

SEQ ID NO: 984119 - RNA, 22 nt, Human
aaggaggaauuucagggugaau

SEQ ID NO: 984120 - RNA, 22 nt, Human
uucauucaucucuaaaaugccu

SEQ ID NO: 984121 - RNA, 20 nt, Human
aaaguguaagcauauaauua

SEQ ID NO: 984122 - RNA, 22 nt, Human
ugcauauuauguguaucugucu

SEQ ID NO: 984123 - RNA, 22 nt, Human
cugaggcuggggaagggaagug

SEQ ID NO: 984124 - RNA, 22 nt, Human
aagaugauguuguguuuucacu

SEQ ID NO: 984125 - RNA, 22 nt, Human
gggugggaucuguggagccuca

SEQ ID NO: 984126 - RNA, 21 nt, Human
aagccucaagcagaagacaga

SEQ ID NO: 984127 - RNA, 21 nt, Human
uaaagaagaugaaugugauca

SEQ ID NO: 984128 - RNA, 22 nt, Human
augccagucaaagaagaugaca

SEQ ID NO: 984129 - RNA, 20 nt, Human
ugcuugucaugcacucaggc

SEQ ID NO: 984130 - RNA, 22 nt, Human
aguaacaagugccaacguuaga

SEQ ID NO: 984131 - RNA, 22 nt, Human
accuuauuuugaaauagauugu

SEQ ID NO: 984132 - RNA, 19 nt, Human
gggcuccuugggccucucu

SEQ ID NO: 984133 - RNA, 22 nt, Human
gcaaugauauugaagugaugaa

SEQ ID NO: 984134 - RNA, 20 nt, Human
ucuguaaagacuccagaagc

SEQ ID NO: 984135 - RNA, 21 nt, Human
uggcugcuggcccucucucca

SEQ ID NO: 984136 - RNA, 22 nt, Human
uuuaggauaacuccaguuuucc

SEQ ID NO: 984137 - RNA, 22 nt, Human
gcaaggcugcugccacccaucu

SEQ ID NO: 984138 - RNA, 21 nt, Human
uggcucugagccucauggcug

SEQ ID NO: 984139 - RNA, 22 nt, Human
gcucucuggguggugggcaaca

SEQ ID NO: 984140 - RNA, 22 nt, Human
acccagagcugggcuuggcaaa

SEQ ID NO: 984141 - RNA, 22 nt, Human
ccugugucagccccugccucca

SEQ ID NO: 984142 - RNA, 22 nt, Human
ucugggcuugguuagggcuguu

SEQ ID NO: 984143 - RNA, 22 nt, Human
gcucagagcuugaaguuccacu

SEQ ID NO: 984144 - RNA, 20 nt, Human
agcaggaaugaugcuuucau

SEQ ID NO: 984145 - RNA, 22 nt, Human
auucagcaguuccugcuucagu

SEQ ID NO: 984146 - RNA, 22 nt, Human
uagcuuuguguaugaugucugu

SEQ ID NO: 984147 - RNA, 22 nt, Human
gagaaggaguagcugaccuggg

SEQ ID NO: 984148 - RNA, 22 nt, Human
auugacaauguauuuguaucug

SEQ ID NO: 984149 - RNA, 22 nt, Human
agcuuuauucaugauuucaggg

SEQ ID NO: 984150 - RNA, 22 nt, Human
aggcacugugcuucuuauaugu

SEQ ID NO: 984151 - RNA, 22 nt, Human
ucuuugcaacucccauuuccau

SEQ ID NO: 984152 - RNA, 22 nt, Human
acagccaggagccaugggcagg

SEQ ID NO: 984153 - RNA, 22 nt, Human
ccagccugaaaugccucauccu

SEQ ID NO: 984154 - RNA, 22 nt, Human
guuauguacuuuuuaaaucuug

SEQ ID NO: 984155 - RNA, 22 nt, Human
uagaaacauauaggauggcagg

SEQ ID NO: 984156 - RNA, 22 nt, Human
uuggccuucccuaccugggcca

SEQ ID NO: 984157 - RNA, 22 nt, Human
ccucccacuucuugcugagguc

SEQ ID NO: 984158 - RNA, 22 nt, Human
cuggcagccaagugggauacuc

SEQ ID NO: 984159 - RNA, 22 nt, Human
augcacaagaggcuagaaaaga

SEQ ID NO: 984160 - RNA, 22 nt, Human
agugucauuuuguccaucuucu

SEQ ID NO: 984161 - RNA, 22 nt, Human
agcugcucuugggugacuucaa

SEQ ID NO: 984162 - RNA, 22 nt, Human
ucucagggugaggaaagaauuu

SEQ ID NO: 984163 - RNA, 22 nt, Human
ugggcuccagcaccugugcucu

SEQ ID NO: 984164 - RNA, 22 nt, Human
aggacuuagaacauuauguacu

SEQ ID NO: 984165 - RNA, 22 nt, Human
ucuugaaggggggcaguguuga

SEQ ID NO: 984166 - RNA, 22 nt, Human
cugggguggugcaggccucaug

SEQ ID NO: 984167 - RNA, 22 nt, Human
uagccggguguugugucaugca

SEQ ID NO: 984168 - RNA, 22 nt, Human
ucaauuaugccauugcaauauu

SEQ ID NO: 984169 - RNA, 18 nt, Human
aggccugggaagcugagg

SEQ ID NO: 984170 - RNA, 19 nt, Human
aacuagaaagguuuugaga

SEQ ID NO: 984171 - RNA, 22 nt, Human
ugagccuggguggucgaggcug

SEQ ID NO: 984172 - RNA, 22 nt, Human
aggcugggcaccguuuugaucc

SEQ ID NO: 984173 - RNA, 22 nt, Human
ggcuggcauccagggaaaucca

SEQ ID NO: 984174 - RNA, 22 nt, Human
cuggccaauccauuaauuuguu

SEQ ID NO: 984175 - RNA, 22 nt, Human
agagccugugggagaugcagcu

SEQ ID NO: 984176 - RNA, 22 nt, Human
cagaaagaccugggcucaagag

SEQ ID NO: 984177 - RNA, 22 nt, Human
cuguggcuuucucugccuccuu

SEQ ID NO: 984178 - RNA, 22 nt, Human
ccuggcagcgugccgagcugcg

SEQ ID NO: 984179 - RNA, 22 nt, Human
ucucaggccccugaguuucucu

SEQ ID NO: 984180 - RNA, 22 nt, Human
gagagugaaggcuucccagcaa

SEQ ID NO: 984181 - RNA, 22 nt, Human
uaagauaugguaggaaguuugg

SEQ ID NO: 984182 - RNA, 19 nt, Human
ggcugucucggcccagcca

SEQ ID NO: 984183 - RNA, 20 nt, Human
ucucaggccccaguuuucuu

SEQ ID NO: 984184 - RNA, 22 nt, Human
agcugcugagccaggcugaugu

SEQ ID NO: 984185 - RNA, 22 nt, Human
gcucugcugagauaucugggag

SEQ ID NO: 984186 - RNA, 22 nt, Human
gcuggagauaguaggauccaua

SEQ ID NO: 984187 - RNA, 22 nt, Human
uuccauaaaggugauaguauac

SEQ ID NO: 984188 - RNA, 22 nt, Human
gaggcagaggaagguggucucu

SEQ ID NO: 984189 - RNA, 22 nt, Human
cuuggcagauccaaaaaugaca

SEQ ID NO: 984190 - RNA, 22 nt, Human
agcucccagucuccucuccaug

SEQ ID NO: 984191 - RNA, 22 nt, Human
ccucugccugcacaucauccug

SEQ ID NO: 984192 - RNA, 22 nt, Human
aaagagcuucauuuccauuuau

SEQ ID NO: 984193 - RNA, 22 nt, Human
uccugagcuucaaaacacuuug

SEQ ID NO: 984194 - RNA, 22 nt, Human
cggggcugcgcucuuccugccg

SEQ ID NO: 984195 - RNA, 22 nt, Human
cucaggaugcaggucacaggac

SEQ ID NO: 984196 - RNA, 22 nt, Human
gccuggagacaaggacaaaggg

SEQ ID NO: 984197 - RNA, 22 nt, Human
auguccuuugcuucucuggucc

SEQ ID NO: 984198 - RNA, 22 nt, Human
guucacaaauaugcacuuacga

SEQ ID NO: 984199 - RNA, 22 nt, Human
ucuuggccagguguggugccuc

SEQ ID NO: 984200 - RNA, 23 nt, Human
gggauauggaccuuggaggaguc

SEQ ID NO: 984201 - RNA, 22 nt, Human
acagaagagcacauuuaguaug

SEQ ID NO: 984202 - RNA, 22 nt, Human
uggagcuggaauuucugggccu

SEQ ID NO: 984203 - RNA, 22 nt, Human
gccuaauaacuagcuguguaac

SEQ ID NO: 984204 - RNA, 22 nt, Human
gacagguggggaaacuaaggua

SEQ ID NO: 984205 - RNA, 21 nt, Human
ucucugggcccuccugugggg

SEQ ID NO: 984206 - RNA, 22 nt, Human
guaauugacucagcucuguuca

SEQ ID NO: 984207 - RNA, 22 nt, Human
ucugagccaaaauaaacagcau

SEQ ID NO: 984208 - RNA, 22 nt, Human
ccuuuuucaauauagaauugca

SEQ ID NO: 984209 - RNA, 22 nt, Human
uggggcugucccgguuuggcga

SEQ ID NO: 984210 - RNA, 22 nt, Human
ccccagccagcaggaccucuga

SEQ ID NO: 984211 - RNA, 22 nt, Human
uagcugccagaccauucuuacu

SEQ ID NO: 984212 - RNA, 22 nt, Human
cucagggcuugaguguccagga

SEQ ID NO: 984213 - RNA, 22 nt, Human
ucuuuacaguccucugucaauc

SEQ ID NO: 984214 - RNA, 21 nt, Human
auucugaguugucagucuuca

SEQ ID NO: 984215 - RNA, 22 nt, Human
acuuugaaggggaacauuuuaa

SEQ ID NO: 984216 - RNA, 22 nt, Human
agggccagggaagcuguauuuu

SEQ ID NO: 984217 - RNA, 22 nt, Human
aguugaaauuagaguccuggcu

SEQ ID NO: 984218 - RNA, 22 nt, Human
gagcagcuagauaaagcccuuc

SEQ ID NO: 984219 - RNA, 22 nt, Human
agagacaggguuuugucguguu

SEQ ID NO: 984220 - RNA, 22 nt, Human
agugaaaugacugaaucagaua

SEQ ID NO: 984221 - RNA, 22 nt, Human
uguggcugcucaggugcagacc

SEQ ID NO: 984222 - RNA, 22 nt, Human
gcuuuauguaaguccaaaggca

SEQ ID NO: 984223 - RNA, 22 nt, Human
ugcagaggagcuggaaggcugg

SEQ ID NO: 984224 - RNA, 22 nt, Human
ggagacaguauggcuuguagcu

SEQ ID NO: 984225 - RNA, 22 nt, Human
aggcacugaaggaagcuugcgc

SEQ ID NO: 984226 - RNA, 22 nt, Human
agagcugaggauccagcugagc

SEQ ID NO: 984227 - RNA, 22 nt, Human
ucugagccagccaccuccuuca

SEQ ID NO: 984228 - RNA, 22 nt, Human
cagggccugagggcugcucugc

SEQ ID NO: 984229 - RNA, 21 nt, Human
uuugaauagaaauagugcuua

SEQ ID NO: 984230 - RNA, 22 nt, Human
agggcugcuauguugauucaga

SEQ ID NO: 984231 - RNA, 22 nt, Human
cucaggagaugacagaagguau

SEQ ID NO: 984232 - RNA, 22 nt, Human
augaaauaucuugaagaaauuc

SEQ ID NO: 984233 - RNA, 22 nt, Human
ggccucugggguccugagccca

SEQ ID NO: 984234 - RNA, 22 nt, Human
ucaagagagugcugcuuggggu

SEQ ID NO: 984235 - RNA, 22 nt, Human
cucaggauccaucuccugcccu

SEQ ID NO: 984236 - RNA, 22 nt, Human
cuauuagguaugcagccuauuu

SEQ ID NO: 984237 - RNA, 22 nt, Human
uuucuguauuuaaaagaucugg

SEQ ID NO: 984238 - RNA, 22 nt, Human
gaaaucugcccagugcacuggu

SEQ ID NO: 984239 - RNA, 22 nt, Human
uaaaguguccuagcuaggaggc

SEQ ID NO: 984240 - RNA, 22 nt, Human
gauuuccucacuaacauccauc

SEQ ID NO: 984241 - RNA, 22 nt, Human
cugggccaguuaugucucaucu

SEQ ID NO: 984242 - RNA, 22 nt, Human
gaaaaaugcuccaaaucugugg

SEQ ID NO: 984243 - RNA, 22 nt, Human
gcucugugggugaguagaaucu

SEQ ID NO: 984244 - RNA, 22 nt, Human
agccagcaugaagacagaggcc

SEQ ID NO: 984245 - RNA, 22 nt, Human
ggaggcucugcuccguguguuc

SEQ ID NO: 984246 - RNA, 22 nt, Human
ccccagcucagugcagggacau

SEQ ID NO: 984247 - RNA, 22 nt, Human
uuuuaacuuaaaauacauagau

SEQ ID NO: 984248 - RNA, 22 nt, Human
uauauuaaccauaggguucuag

SEQ ID NO: 984249 - RNA, 22 nt, Human
ggggcggggcucugagaagcau

SEQ ID NO: 984250 - RNA, 22 nt, Human
uuuaucuuuaggacuuugcaga

SEQ ID NO: 984251 - RNA, 22 nt, Human
agacagcauggagcugauaaca

SEQ ID NO: 984252 - RNA, 22 nt, Human
ucuggcuccacuuucuucauuu

SEQ ID NO: 984253 - RNA, 18 nt, Human
agagaugguguagaguuu

SEQ ID NO: 984254 - RNA, 22 nt, Human
cacugugucaguuugguuagac

SEQ ID NO: 984255 - RNA, 22 nt, Human
cugugccaucugcacucucguc

SEQ ID NO: 984256 - RNA, 22 nt, Human
ucaggggaaaucucucagcgaa

SEQ ID NO: 984257 - RNA, 22 nt, Human
uugcauuguaggauguuagaag

SEQ ID NO: 984258 - RNA, 22 nt, Human
ugcagugccucggcagugcagc

SEQ ID NO: 984259 - RNA, 22 nt, Human
cugcccugagucaugccagaug

SEQ ID NO: 984260 - RNA, 22 nt, Human
uauuuugacuauuaaaccaaca

SEQ ID NO: 984261 - RNA, 22 nt, Human
ucuuccucuagaucugaggccc

SEQ ID NO: 984262 - RNA, 17 nt, Human
uggagcugcguguguuc

SEQ ID NO: 984263 - RNA, 22 nt, Human
gccaggcuggugcaaggauauu

SEQ ID NO: 984264 - RNA, 22 nt, Human
cagcucuguaaauuccuucauc

SEQ ID NO: 984265 - RNA, 22 nt, Human
ugacuuccugcacucaggugau

SEQ ID NO: 984266 - RNA, 22 nt, Human
ccaggcugugguuuagauagag

SEQ ID NO: 984267 - RNA, 22 nt, Human
gcacugcagccucagauggugg

SEQ ID NO: 984268 - RNA, 22 nt, Human
auauuagguuggugcaaaagua

SEQ ID NO: 984269 - RNA, 20 nt, Human
ucauccaggacaggaguggc

SEQ ID NO: 984270 - RNA, 22 nt, Human
accacugggcgggcagccugcu

SEQ ID NO: 984271 - RNA, 22 nt, Human
ggccagggccuggggacugucc

SEQ ID NO: 984272 - RNA, 22 nt, Human
ccaggcagccaagugugugugu

SEQ ID NO: 984273 - RNA, 22 nt, Human
auguaucaugcaggguccauga

SEQ ID NO: 984274 - RNA, 22 nt, Human
acauuucucuuagaguuggacu

SEQ ID NO: 984275 - RNA, 22 nt, Human
cauccugguuaccccauaguca

SEQ ID NO: 984276 - RNA, 22 nt, Human
aggcccuggcacugccugggag

SEQ ID NO: 984277 - RNA, 22 nt, Human
acacagggcaaugcuuugaccu

SEQ ID NO: 984278 - RNA, 22 nt, Human
augcagcaguuuacaaagcaau

SEQ ID NO: 984279 - RNA, 22 nt, Human
aaggucauugguucugaauucu

SEQ ID NO: 984280 - RNA, 22 nt, Human
ggccaaauuuggccaugagcau

SEQ ID NO: 984281 - RNA, 22 nt, Human
ggagccagagggaugcaguuga

SEQ ID NO: 984282 - RNA, 21 nt, Human
agcaggaggcagucacagcuc

SEQ ID NO: 984283 - RNA, 22 nt, Human
cuggagcuggcuuccuuccacu

SEQ ID NO: 984284 - RNA, 22 nt, Human
gcugggaggaucucucccuguc

SEQ ID NO: 984285 - RNA, 22 nt, Human
gcugguccacucccuggaggcu

SEQ ID NO: 984286 - RNA, 22 nt, Human
cuuugcauacaauuuuuagaaa

SEQ ID NO: 984287 - RNA, 22 nt, Human
uccugccuguuuaccuguacuu

SEQ ID NO: 984288 - RNA, 22 nt, Human
acucugcuguuuacucucuaua

SEQ ID NO: 984289 - RNA, 23 nt, Human
gggggcugguugacucucugcag

SEQ ID NO: 984290 - RNA, 22 nt, Human
uacucugcaggauggacuaugg

SEQ ID NO: 984291 - RNA, 22 nt, Human
acacauuuaaaaaggaacauau

SEQ ID NO: 984292 - RNA, 22 nt, Human
caugcacuuaccugaaauucaa

SEQ ID NO: 984293 - RNA, 22 nt, Human
aauagguagccagauauauaaa

SEQ ID NO: 984294 - RNA, 22 nt, Human
agcugccaccucugccuuuggg

SEQ ID NO: 984295 - RNA, 22 nt, Human
ccuggcucucugcagauccugg

SEQ ID NO: 984296 - RNA, 22 nt, Human
cuggccacaugugugcugagca

SEQ ID NO: 984297 - RNA, 22 nt, Human
gccugaggaaugcuccugacuu

SEQ ID NO: 984298 - RNA, 22 nt, Human
auuuauuaugggauuuggcaca

SEQ ID NO: 984299 - RNA, 22 nt, Human
augcaguauaaaucauuucugg

SEQ ID NO: 984300 - RNA, 18 nt, Human
uuaauguggcuuacuaug

SEQ ID NO: 984301 - RNA, 22 nt, Human
cauuacauuucaaaauguuucc

SEQ ID NO: 984302 - RNA, 22 nt, Human
cuguguccucccgcugcaccca

SEQ ID NO: 984303 - RNA, 22 nt, Human
aggcucugcagaccccagcugu

SEQ ID NO: 984304 - RNA, 22 nt, Human
cacucugacuggcccugcagga

SEQ ID NO: 984305 - RNA, 22 nt, Human
aggucauuccagccauuccccu

SEQ ID NO: 984306 - RNA, 18 nt, Human
ugucucaggcugaaacag

SEQ ID NO: 984307 - RNA, 22 nt, Human
ggcagggagagcaugcugauaa

SEQ ID NO: 984308 - RNA, 22 nt, Human
uccuucagcuacucaguuucca

SEQ ID NO: 984309 - RNA, 22 nt, Human
acaaaguuaacaguuggauagu

SEQ ID NO: 984310 - RNA, 22 nt, Human
gaguuguucaacgugugugaaa

SEQ ID NO: 984311 - RNA, 22 nt, Human
agaugcuucaguguuuaauuua

SEQ ID NO: 984312 - RNA, 22 nt, Human
acacugcucacuucuucccuug

SEQ ID NO: 984313 - RNA, 22 nt, Human
augaaaaguucgaucuagaagg

SEQ ID NO: 984314 - RNA, 21 nt, Human
uaaauaauaaguugcugagau

SEQ ID NO: 984315 - RNA, 22 nt, Human
uugaagcaaauucugugcagua

SEQ ID NO: 984316 - RNA, 22 nt, Human
auaaagacaugcuuacuugccc

SEQ ID NO: 984317 - RNA, 22 nt, Human
acauuuguaugcguuuuuacug

SEQ ID NO: 984318 - RNA, 22 nt, Human
caaagugcuaggauuacaggcc

SEQ ID NO: 984319 - RNA, 22 nt, Human
uccugggcuuaagugauccucc

SEQ ID NO: 984320 - RNA, 22 nt, Human
gcagccacuaguuuuccuguuu

SEQ ID NO: 984321 - RNA, 22 nt, Human
cauguguaugcauucauacaua

SEQ ID NO: 984322 - RNA, 22 nt, Human
acauaaugaaaugcagaaauca

SEQ ID NO: 984323 - RNA, 20 nt, Human
agcuggagaagggcccuucc

SEQ ID NO: 984324 - RNA, 22 nt, Human
uuugacagacauuuacuacauu

SEQ ID NO: 984325 - RNA, 23 nt, Human
agcuggaggcugucuacucccaa

SEQ ID NO: 984326 - RNA, 22 nt, Human
aagaugcagcaaacuacuuuuu

SEQ ID NO: 984327 - RNA, 22 nt, Human
ucuggcucuguguccccaccca

SEQ ID NO: 984328 - RNA, 22 nt, Human
gggcacugaaugccaagcuagg

SEQ ID NO: 984329 - RNA, 22 nt, Human
cacaggagguuaggaagugguc

SEQ ID NO: 984330 - RNA, 21 nt, Human
uccuggcccacucuaucccca

SEQ ID NO: 984331 - RNA, 22 nt, Human
uucaagaugcacaguggcauuc

SEQ ID NO: 984332 - RNA, 22 nt, Human
cagcuuugucugauuccucuuu

SEQ ID NO: 984333 - RNA, 22 nt, Human
ucagggcaccaaaaaagaugcc

SEQ ID NO: 984334 - RNA, 22 nt, Human
ccaaaguccacaguuuacauua

SEQ ID NO: 984335 - RNA, 22 nt, Human
caugcacaacauacucaagagg

SEQ ID NO: 984336 - RNA, 22 nt, Human
aucagcaaucucguguauuagg

SEQ ID NO: 984337 - RNA, 22 nt, Human
ugcagugguugagagcccagac

SEQ ID NO: 984338 - RNA, 22 nt, Human
ugucucaggggcauugaaauaa

SEQ ID NO: 984339 - RNA, 22 nt, Human
gcuggagcugaguucccugggc

SEQ ID NO: 984340 - RNA, 22 nt, Human
gcuccuggcuucacugacauca

SEQ ID NO: 984341 - RNA, 22 nt, Human
uggcagagaacacacaugauuc

SEQ ID NO: 984342 - RNA, 22 nt, Human
ccagggcagccaacccagaugc

SEQ ID NO: 984343 - RNA, 22 nt, Human
ggcuggcacugaggagagcucu

SEQ ID NO: 984344 - RNA, 22 nt, Human
cuuggcugucuauaggaaagag

SEQ ID NO: 984345 - RNA, 22 nt, Human
gcuccuggcaggcagugugugu

SEQ ID NO: 984346 - RNA, 22 nt, Human
gaaugcacuuccaacaucuauu

SEQ ID NO: 984347 - RNA, 22 nt, Human
agaggccagguccagaguuugu

SEQ ID NO: 984348 - RNA, 20 nt, Human
cagagccaagagcagcaucu

SEQ ID NO: 984349 - RNA, 22 nt, Human
cagguaggauggaagggcucaa

SEQ ID NO: 984350 - RNA, 22 nt, Human
gacuccuggcuuucccucuuag

SEQ ID NO: 984351 - RNA, 22 nt, Human
cagcagcuucuguugaucagaa

SEQ ID NO: 984352 - RNA, 22 nt, Human
aggacccagaggcagaggacgu

SEQ ID NO: 984353 - RNA, 19 nt, Human
augucccaccgccccugag

SEQ ID NO: 984354 - RNA, 22 nt, Human
ggccuuggugcucuguguugca

SEQ ID NO: 984355 - RNA, 22 nt, Human
cagaaauucccauuucagauuc

SEQ ID NO: 984356 - RNA, 22 nt, Human
auuaggaagaggaugucagcau

SEQ ID NO: 984357 - RNA, 22 nt, Human
uucaugcuuuuaccgcuguuaa

SEQ ID NO: 984358 - RNA, 22 nt, Human
ggcucccugccuguccucaguc

SEQ ID NO: 984359 - RNA, 22 nt, Human
acagagcaugcucaguguguga

SEQ ID NO: 984360 - RNA, 22 nt, Human
ucauugaaugcucugcagguug

SEQ ID NO: 984361 - RNA, 22 nt, Human
guggccaagaaaauagaugcau

SEQ ID NO: 984362 - RNA, 20 nt, Human
ggcugccuccuuccuuuccu

SEQ ID NO: 984363 - RNA, 22 nt, Human
ucaggcugaggucaucugcauc

SEQ ID NO: 984364 - RNA, 22 nt, Human
ugugaggagaggcccagcuccc

SEQ ID NO: 984365 - RNA, 22 nt, Human
uuuaagaugguauuuuauaaag

SEQ ID NO: 984366 - RNA, 22 nt, Human
gagggcugcaaugagacagaga

SEQ ID NO: 984367 - RNA, 22 nt, Human
agggcagagcugucuaaauggc

SEQ ID NO: 984368 - RNA, 22 nt, Human
ucugcagcgugcaggcuggugc

SEQ ID NO: 984369 - RNA, 22 nt, Human
ggccugagcagacagcaugaug

SEQ ID NO: 984370 - RNA, 23 nt, Human
uggcucuguggaucccucaggag

SEQ ID NO: 984371 - RNA, 22 nt, Human
ggucucagcuggaguccuuggu

SEQ ID NO: 984372 - RNA, 21 nt, Human
cucaggaucuuauauauuagu

SEQ ID NO: 984373 - RNA, 22 nt, Human
ucugccuggguguggagcagag

SEQ ID NO: 984374 - RNA, 22 nt, Human
ucagaggaccuuacugagaacc

SEQ ID NO: 984375 - RNA, 22 nt, Human
uuaaacagucccagaggcugac

SEQ ID NO: 984376 - RNA, 21 nt, Human
aucuuuauuacgcagagaaga

SEQ ID NO: 984377 - RNA, 19 nt, Human
uggcagggagaguuugaag

SEQ ID NO: 984378 - RNA, 22 nt, Human
cacagggcaggccccaggccuc

SEQ ID NO: 984379 - RNA, 22 nt, Human
cagguggaucucuaaggacuga

SEQ ID NO: 984380 - RNA, 22 nt, Human
gaggccugcagcguggucccug

SEQ ID NO: 984381 - RNA, 22 nt, Human
gcuccugucuuggggcacuggc

SEQ ID NO: 984382 - RNA, 22 nt, Human
cuggacagaaagggcugcugug

SEQ ID NO: 984383 - RNA, 22 nt, Human
caguguuccaggcggcagugaa

SEQ ID NO: 984384 - RNA, 22 nt, Human
ugagugccugaacauagaguag

SEQ ID NO: 984385 - RNA, 22 nt, Human
gagugguaggcaguguuaggaa

SEQ ID NO: 984386 - RNA, 22 nt, Human
uuauuauaaugagggauaaaaa

SEQ ID NO: 984387 - RNA, 22 nt, Human
aauacugccugugagguaacuc

SEQ ID NO: 984388 - RNA, 22 nt, Human
ccccaccugugcgucugccgca

SEQ ID NO: 984389 - RNA, 22 nt, Human
aucauguuccagaaacagugau

SEQ ID NO: 984390 - RNA, 22 nt, Human
gguggccuuucaguggaucagg

SEQ ID NO: 984391 - RNA, 22 nt, Human
uauauuaaaugaccaguuuuaa

SEQ ID NO: 984392 - RNA, 22 nt, Human
uugauacagcagccugugaucc

SEQ ID NO: 984393 - RNA, 22 nt, Human
aaugcacagcuaaagugguucc

SEQ ID NO: 984394 - RNA, 22 nt, Human
cacugagaggucucauuuccaa

SEQ ID NO: 984395 - RNA, 22 nt, Human
uagaucugauacaauucaucug

SEQ ID NO: 984396 - RNA, 22 nt, Human
auggauaauggugauaguugca

SEQ ID NO: 984397 - RNA, 22 nt, Human
ugcccugucuaagcugucagua

SEQ ID NO: 984398 - RNA, 22 nt, Human
auaaaaaggacagauguggucu

SEQ ID NO: 984399 - RNA, 22 nt, Human
uggcucagcugucacagccugg

SEQ ID NO: 984400 - RNA, 18 nt, Human
uggagcagguaggcauga

SEQ ID NO: 984401 - RNA, 22 nt, Human
uuacaguaugaucaacuuuuca

SEQ ID NO: 984402 - RNA, 22 nt, Human
ggcucaggaccugggauugcca

SEQ ID NO: 984403 - RNA, 22 nt, Human
uaaaugugcacagguuagaagg

SEQ ID NO: 984404 - RNA, 20 nt, Human
cucugcagcaaggccugggu

SEQ ID NO: 984405 - RNA, 22 nt, Human
aggccuguuggcgugggcucua

SEQ ID NO: 984406 - RNA, 22 nt, Human
gcucuccaaacccuguggcuuu

SEQ ID NO: 984407 - RNA, 22 nt, Human
ucccagccggugccuggguccc

SEQ ID NO: 984408 - RNA, 22 nt, Human
aaagcaguauauugguaguugu

SEQ ID NO: 984409 - RNA, 22 nt, Human
auucuaggcuugaaacaugaag

SEQ ID NO: 984410 - RNA, 22 nt, Human
cagcagugaugugugaggguuc

SEQ ID NO: 984411 - RNA, 22 nt, Human
gaaggaagugcucauacuaguu

SEQ ID NO: 984412 - RNA, 22 nt, Human
caguuaaaggcccaauaucugg

SEQ ID NO: 984413 - RNA, 22 nt, Human
cuucaagagaaugcagggaugu

SEQ ID NO: 984414 - RNA, 22 nt, Human
cucuggagugcagccugguggc

SEQ ID NO: 984415 - RNA, 22 nt, Human
uccagccaagccuugguagcug

SEQ ID NO: 984416 - RNA, 22 nt, Human
acaggagugaaucuggcacuua

SEQ ID NO: 984417 - RNA, 20 nt, Human
uccugcaguuccuaggaggg

SEQ ID NO: 984418 - RNA, 22 nt, Human
agaagccauucccuguaggcuc

SEQ ID NO: 984419 - RNA, 20 nt, Human
agauggugaaggccagggag

SEQ ID NO: 984420 - RNA, 22 nt, Human
cagguggguacaucacagagac

SEQ ID NO: 984421 - RNA, 22 nt, Human
auauacuuggagacuaucauug

SEQ ID NO: 984422 - RNA, 22 nt, Human
agaggccaguggcugugcuguc

SEQ ID NO: 984423 - RNA, 22 nt, Human
ggcaugggguguauguggcacg

SEQ ID NO: 984424 - RNA, 21 nt, Human
ggagucauuagucauuuccuu

SEQ ID NO: 984425 - RNA, 22 nt, Human
cagccugcauuuguaucuguau

SEQ ID NO: 984426 - RNA, 22 nt, Human
acacaggagauauguaauggcu

SEQ ID NO: 984427 - RNA, 22 nt, Human
agaucucaccucuguguauuau

SEQ ID NO: 984428 - RNA, 22 nt, Human
aaguucaagucugcaucuuuuu

SEQ ID NO: 984429 - RNA, 22 nt, Human
ugccugaggagucagggcaggu

SEQ ID NO: 984430 - RNA, 22 nt, Human
cuggcugguuacuauuucuggu

SEQ ID NO: 984431 - RNA, 22 nt, Human
ccauaagguuuggggccaugca

SEQ ID NO: 984432 - RNA, 22 nt, Human
auccaggguguggagagagcuc

SEQ ID NO: 984433 - RNA, 19 nt, Human
uuucacaaagagagcguga

SEQ ID NO: 984434 - RNA, 22 nt, Human
uaaagguaacaugaacugcuuu

SEQ ID NO: 984435 - RNA, 22 nt, Human
ggccucagugggccgcugcagg

SEQ ID NO: 984436 - RNA, 22 nt, Human
ucugucuccucugaggugccag

SEQ ID NO: 984437 - RNA, 22 nt, Human
gcaagauguuaacauagggaga

SEQ ID NO: 984438 - RNA, 22 nt, Human
ucuccuggccuuuagguuaagg

SEQ ID NO: 984439 - RNA, 22 nt, Human
ucaaaugcugccuuugugugcc

SEQ ID NO: 984440 - RNA, 22 nt, Human
uuaaaacagcgugaaucuggca

SEQ ID NO: 984441 - RNA, 22 nt, Human
gagagcugugguuugaccaggc

SEQ ID NO: 984442 - RNA, 22 nt, Human
gaggugagaagggggucagaug

SEQ ID NO: 984443 - RNA, 22 nt, Human
aggcagcagccacaaggccuga

SEQ ID NO: 984444 - RNA, 19 nt, Human
cuggcagccugucuguguc

SEQ ID NO: 984445 - RNA, 22 nt, Human
gccagagcugagacacgagucc

SEQ ID NO: 984446 - RNA, 22 nt, Human
ucucagggaccaugaugaugac

SEQ ID NO: 984447 - RNA, 22 nt, Human
uggcucuggauuaaucuaggaa

SEQ ID NO: 984448 - RNA, 22 nt, Human
uuccaggaauucagcucucagu

SEQ ID NO: 984449 - RNA, 22 nt, Human
aggagccaguuccaccccagga

SEQ ID NO: 984450 - RNA, 22 nt, Human
ccagugcaggugagcaccaggu

SEQ ID NO: 984451 - RNA, 22 nt, Human
agccaggaaugcaugcucugcu

SEQ ID NO: 984452 - RNA, 22 nt, Human
aaaguuugcaauuuauguuaau

SEQ ID NO: 984453 - RNA, 22 nt, Human
caggaaauaucuccuggcagag

SEQ ID NO: 984454 - RNA, 22 nt, Human
uucuuaaagaggcaaaacacag

SEQ ID NO: 984455 - RNA, 22 nt, Human
uaaggcacgcauaagagggggc

SEQ ID NO: 984456 - RNA, 22 nt, Human
ccagggcaaaugagaucauagc

SEQ ID NO: 984457 - RNA, 22 nt, Human
aggccugggcaagaaggggcgu

SEQ ID NO: 984458 - RNA, 22 nt, Human
uggagcugggguuugaaucugg

SEQ ID NO: 984459 - RNA, 22 nt, Human
aagagcuggagcugcuacagga

SEQ ID NO: 984460 - RNA, 22 nt, Human
uugugaaacauucauggauuug

SEQ ID NO: 984461 - RNA, 17 nt, Human
ggccuuggggccucagu

SEQ ID NO: 984462 - RNA, 22 nt, Human
augauggugggagaugacccag

SEQ ID NO: 984463 - RNA, 22 nt, Human
auagaaauggcagcuggugcua

SEQ ID NO: 984464 - RNA, 22 nt, Human
gagggcuccucacauucucuau

SEQ ID NO: 984465 - RNA, 22 nt, Human
uguccugggaaugggaugcagu

SEQ ID NO: 984466 - RNA, 22 nt, Human
cuggugucugcucccucacagc

SEQ ID NO: 984467 - RNA, 22 nt, Human
gucccuggucuaccguggcuuc

SEQ ID NO: 984468 - RNA, 22 nt, Human
ggagagugggagcaacuguugc

SEQ ID NO: 984469 - RNA, 22 nt, Human
agauuucagaugcucggcaguu

SEQ ID NO: 984470 - RNA, 22 nt, Human
auaauaaaccaggaugggucug

SEQ ID NO: 984471 - RNA, 22 nt, Human
uuugcagcaaggagagagcauu

SEQ ID NO: 984472 - RNA, 22 nt, Human
aagcugccauagaacgagaggu

SEQ ID NO: 984473 - RNA, 22 nt, Human
ucuuugcaggagcccuuugaac

SEQ ID NO: 984474 - RNA, 20 nt, Human
ccuuuauuauuuguaugaug

SEQ ID NO: 984475 - RNA, 22 nt, Human
augggugugaaaauggucaucu

SEQ ID NO: 984476 - RNA, 22 nt, Human
gucccagaugucuggaacuccc

SEQ ID NO: 984477 - RNA, 22 nt, Human
cccagagccucauucuguuggg

SEQ ID NO: 984478 - RNA, 22 nt, Human
accaucagucacauguagagaa

SEQ ID NO: 984479 - RNA, 19 nt, Human
ugucccagacuccgugucu

SEQ ID NO: 984480 - RNA, 22 nt, Human
gggcagcucucacagcagccaa

SEQ ID NO: 984481 - RNA, 22 nt, Human
uguacaaugccgagacuaacuc

SEQ ID NO: 984482 - RNA, 23 nt, Human
cccuggccuuggggcacaggcug

SEQ ID NO: 984483 - RNA, 22 nt, Human
ugagccuggggccugggcagcg

SEQ ID NO: 984484 - RNA, 22 nt, Human
cugcccagaaucacucacucga

SEQ ID NO: 984485 - RNA, 21 nt, Human
aggaaguggccagauugggaa

SEQ ID NO: 984486 - RNA, 22 nt, Human
aaugaugguauugaugagcuaa

SEQ ID NO: 984487 - RNA, 22 nt, Human
ugcugcucuguaaagugaugag

SEQ ID NO: 984488 - RNA, 21 nt, Human
aggucccagguuugggcagca

SEQ ID NO: 984489 - RNA, 22 nt, Human
uauugacaauuugugaaacuau

SEQ ID NO: 984490 - RNA, 22 nt, Human
cccagcuugcccaggacugagg

SEQ ID NO: 984491 - RNA, 19 nt, Human
gaaggagagcugaguuagg

SEQ ID NO: 984492 - RNA, 22 nt, Human
gggccucucccuucucacgcau

SEQ ID NO: 984493 - RNA, 22 nt, Human
guggcuucuggcugggccucag

SEQ ID NO: 984494 - RNA, 22 nt, Human
acauacuaugaauacauguguc

SEQ ID NO: 984495 - RNA, 23 nt, Human
acagagguccaaacaguauaagc

SEQ ID NO: 984496 - RNA, 22 nt, Human
gccacaugcaauugcagcacgu

SEQ ID NO: 984497 - RNA, 22 nt, Human
cugcuuuguguggucccuccag

SEQ ID NO: 984498 - RNA, 22 nt, Human
ccauggaguuccucuggucuau

SEQ ID NO: 984499 - RNA, 22 nt, Human
aagaagagaaaugugcugcugg

SEQ ID NO: 984500 - RNA, 23 nt, Human
ggccuguguuuugucugaaguac

SEQ ID NO: 984501 - RNA, 21 nt, Human
ucccagagugcuugggacugc

SEQ ID NO: 984502 - RNA, 22 nt, Human
ccuguuuacaucaucaaggacu

SEQ ID NO: 984503 - RNA, 22 nt, Human
gcucaggaucagccaccucuuu

SEQ ID NO: 984504 - RNA, 22 nt, Human
uggcaggguuggccaccuuacc

SEQ ID NO: 984505 - RNA, 22 nt, Human
acuguguccucauguggcagaa

SEQ ID NO: 984506 - RNA, 22 nt, Human
ucccagcccagauuugugugac

SEQ ID NO: 984507 - RNA, 22 nt, Human
ugugccuucucaguccugcuca

SEQ ID NO: 984508 - RNA, 22 nt, Human
uggaugcuguaggacacgcucu

SEQ ID NO: 984509 - RNA, 22 nt, Human
agucccagcuacucaagaggcu

SEQ ID NO: 984510 - RNA, 22 nt, Human
ucuccuggauggaccuucucuu

SEQ ID NO: 984511 - RNA, 22 nt, Human
ccagaccacccuggccaugcac

SEQ ID NO: 984512 - RNA, 22 nt, Human
caggccugacccugagcuucac

SEQ ID NO: 984513 - RNA, 22 nt, Human
gagcccuggcagucugggaugg

SEQ ID NO: 984514 - RNA, 22 nt, Human
ucuugccucuuccccuuuccau

SEQ ID NO: 984515 - RNA, 22 nt, Human
agcugccagggacugggcaugg

SEQ ID NO: 984516 - RNA, 22 nt, Human
cccaggucugugccagcucuga

SEQ ID NO: 984517 - RNA, 22 nt, Human
ugcagaaggaggaggaaaucca

SEQ ID NO: 984518 - RNA, 22 nt, Human
ccugccugaaggucagccaccc

SEQ ID NO: 984519 - RNA, 17 nt, Human
cucuccuuccucugagg

SEQ ID NO: 984520 - RNA, 21 nt, Human
agggaaagaaaaugagcuaau

SEQ ID NO: 984521 - RNA, 20 nt, Human
ccuaggcaugcugagucucc

SEQ ID NO: 984522 - RNA, 22 nt, Human
uaaacauggauucugaucacag

SEQ ID NO: 984523 - RNA, 22 nt, Human
aggccugaggaccuucuggagg

SEQ ID NO: 984524 - RNA, 22 nt, Human
ugcucugggcaacagccucccu

SEQ ID NO: 984525 - RNA, 22 nt, Human
ccuggcugcauuuugcuggaug

SEQ ID NO: 984526 - RNA, 22 nt, Human
ucagccagguaauguggagaug

SEQ ID NO: 984527 - RNA, 22 nt, Human
caguuuaaccuauccauuaugu

SEQ ID NO: 984528 - RNA, 22 nt, Human
gcagcguggggacaggagcuca

SEQ ID NO: 984529 - RNA, 22 nt, Human
gagagaagaauguuccgaggcc

SEQ ID NO: 984530 - RNA, 22 nt, Human
ccuggccucagccuagggcuga

SEQ ID NO: 984531 - RNA, 22 nt, Human
caggcagcgcucguggccuggc

SEQ ID NO: 984532 - RNA, 22 nt, Human
ccucagagguuuucauucugua

SEQ ID NO: 984533 - RNA, 22 nt, Human
accucugccaagaugugcuccc

SEQ ID NO: 984534 - RNA, 22 nt, Human
acucugcugucugauggcagga

SEQ ID NO: 984535 - RNA, 22 nt, Human
auggauaagucaaagaguaucc

SEQ ID NO: 984536 - RNA, 22 nt, Human
gcuggccugcaaagcccggcug

SEQ ID NO: 984537 - RNA, 22 nt, Human
uggagcaggccggaaguggcuu

SEQ ID NO: 984538 - RNA, 22 nt, Human
ugcucuccggcuuccguggccu

SEQ ID NO: 984539 - RNA, 22 nt, Human
uccuuuccaugcuucuagaggc

SEQ ID NO: 984540 - RNA, 22 nt, Human
uggcuggcgccgggcuagccac

SEQ ID NO: 984541 - RNA, 22 nt, Human
guccucuggugaaagcauuccc

SEQ ID NO: 984542 - RNA, 22 nt, Human
cuccucugucuggcccugagcc

SEQ ID NO: 984543 - RNA, 22 nt, Human
ccagcugggauuaagggaaaau

SEQ ID NO: 984544 - RNA, 22 nt, Human
ggugcagaggagccagcugggg

SEQ ID NO: 984545 - RNA, 22 nt, Human
ucugaaaguaucuggaucuuuu

SEQ ID NO: 984546 - RNA, 22 nt, Human
gcuccuggguguggcugccccu

SEQ ID NO: 984547 - RNA, 17 nt, Human
cccagagaugcugccuu

SEQ ID NO: 984548 - RNA, 22 nt, Human
auagacauuuugcauucaagca

SEQ ID NO: 984549 - RNA, 22 nt, Human
cugccucaugcugccugcagcc

SEQ ID NO: 984550 - RNA, 22 nt, Human
gagaggugaauguggaugccac

SEQ ID NO: 984551 - RNA, 22 nt, Human
agcucagcuuccucuccaugcu

SEQ ID NO: 984552 - RNA, 22 nt, Human
gcagcuggggaggucgugggga

SEQ ID NO: 984553 - RNA, 22 nt, Human
gagcugccuguugcauagcaac

SEQ ID NO: 984554 - RNA, 22 nt, Human
ugugcuucaucacuucucaguu

SEQ ID NO: 984555 - RNA, 22 nt, Human
ggagaaggugcuggucacugug

SEQ ID NO: 984556 - RNA, 22 nt, Human
cugggccagggaggugucugua

SEQ ID NO: 984557 - RNA, 18 nt, Human
ugggcugccuggccucug

SEQ ID NO: 984558 - RNA, 21 nt, Human
ucagggcagugggagguuccu

SEQ ID NO: 984559 - RNA, 22 nt, Human
gcucaaggcaggcagacaugag

SEQ ID NO: 984560 - RNA, 22 nt, Human
ucaagagaagugcuccacagua

SEQ ID NO: 984561 - RNA, 22 nt, Human
aagaauuauugcaauacuagau

SEQ ID NO: 984562 - RNA, 22 nt, Human
cccugcagccggccagcucauu

SEQ ID NO: 984563 - RNA, 22 nt, Human
ugaguagcggcuauguguaacu

SEQ ID NO: 984564 - RNA, 22 nt, Human
caguguccucagccagcagcua

SEQ ID NO: 984565 - RNA, 22 nt, Human
gagcucugacugcugggugaca

SEQ ID NO: 984566 - RNA, 18 nt, Human
cccucuccugcuaguggg

SEQ ID NO: 984567 - RNA, 22 nt, Human
gcacccagccagcaucucagag

SEQ ID NO: 984568 - RNA, 22 nt, Human
cccuguccuuggcugugaggcu

SEQ ID NO: 984569 - RNA, 22 nt, Human
cuucugugcuucacaguugcca

SEQ ID NO: 984570 - RNA, 23 nt, Human
aaagacugcugagaauuuuagga

SEQ ID NO: 984571 - RNA, 22 nt, Human
aucuuucagagcuccaucaggg

SEQ ID NO: 984572 - RNA, 22 nt, Human
acacaggaagucagcacugaug

SEQ ID NO: 984573 - RNA, 19 nt, Human
augauggucccauucaccu

SEQ ID NO: 984574 - RNA, 22 nt, Human
cugccuuccaaccccagacucc

SEQ ID NO: 984575 - RNA, 22 nt, Human
ucugguaaccuuuaucccuccu

SEQ ID NO: 984576 - RNA, 22 nt, Human
cuguccuugcuggccagguaug

SEQ ID NO: 984577 - RNA, 22 nt, Human
cagcaguguacaaggugucaga

SEQ ID NO: 984578 - RNA, 22 nt, Human
auaugcacacucugcccacaga

SEQ ID NO: 984579 - RNA, 22 nt, Human
uacauacacaaauauacuguuu

SEQ ID NO: 984580 - RNA, 22 nt, Human
agaguggggaagguguugagaa

SEQ ID NO: 984581 - RNA, 22 nt, Human
accagcucagaagccagaaaga

SEQ ID NO: 984582 - RNA, 22 nt, Human
ccucugcugcuguugagcaccg

SEQ ID NO: 984583 - RNA, 22 nt, Human
uugacaauugggagauauaaag

SEQ ID NO: 984584 - RNA, 22 nt, Human
aguguguguuugggcgguuuau

SEQ ID NO: 984585 - RNA, 22 nt, Human
agcucccauuaucuucugaaac

SEQ ID NO: 984586 - RNA, 22 nt, Human
augugcaugcacuuacaugugu

SEQ ID NO: 984587 - RNA, 22 nt, Human
aaagcucacaguaauacaaggc

SEQ ID NO: 984588 - RNA, 22 nt, Human
uguguuuuacaaauucucuuaa

SEQ ID NO: 984589 - RNA, 22 nt, Human
agauggggcagaauggagccau

SEQ ID NO: 984590 - RNA, 22 nt, Human
guaagggauuugaacauagguu

SEQ ID NO: 984591 - RNA, 22 nt, Human
agccuggauccauguggcuacc

SEQ ID NO: 984592 - RNA, 22 nt, Human
gcacugaaugccaaaguguagg

SEQ ID NO: 984593 - RNA, 22 nt, Human
uccugagauaaaucucauguga

SEQ ID NO: 984594 - RNA, 22 nt, Human
uuugaaaauuuaagugcuacac

SEQ ID NO: 984595 - RNA, 22 nt, Human
auguuacauaguccuuauuugu

SEQ ID NO: 984596 - RNA, 17 nt, Human
gaaagguccuagaaauc

SEQ ID NO: 984597 - RNA, 22 nt, Human
ccucaugguacuuacuguagcu

SEQ ID NO: 984598 - RNA, 22 nt, Human
ccugccagucacuaugucaccu

SEQ ID NO: 984599 - RNA, 22 nt, Human
caagugucuauaucagugcuug

SEQ ID NO: 984600 - RNA, 22 nt, Human
agagccugcuguguaagucaca

SEQ ID NO: 984601 - RNA, 22 nt, Human
ucuccuggcucaccaggcugga

SEQ ID NO: 984602 - RNA, 22 nt, Human
acaggcuuacaggcugcaagua

SEQ ID NO: 984603 - RNA, 22 nt, Human
gccaggggacgcggagcgacga

SEQ ID NO: 984604 - RNA, 22 nt, Human
uauguacaugauuucauuugcu

SEQ ID NO: 984605 - RNA, 22 nt, Human
uggcagcagggccccuggagga

SEQ ID NO: 984606 - RNA, 22 nt, Human
cugagccuuauucaccagcccu

SEQ ID NO: 984607 - RNA, 22 nt, Human
cucucugcaaguuuugaaauag

SEQ ID NO: 984608 - RNA, 22 nt, Human
cuuccucccggcccaugcucug

SEQ ID NO: 984609 - RNA, 22 nt, Human
ccaggaggcggaagguacagug

SEQ ID NO: 984610 - RNA, 22 nt, Human
ggagcuggcuacagagaacucc

SEQ ID NO: 984611 - RNA, 19 nt, Human
gcuguauuaaagauacaug

SEQ ID NO: 984612 - RNA, 22 nt, Human
cuguacaucucugaggacagua

SEQ ID NO: 984613 - RNA, 20 nt, Human
augcaaacccugcuuugugg

SEQ ID NO: 984614 - RNA, 22 nt, Human
aguuuauguagaauuggcaaua

SEQ ID NO: 984615 - RNA, 22 nt, Human
aggcuuccucgugccuuagaua

SEQ ID NO: 984616 - RNA, 18 nt, Human
agugugugcccuuucagg

SEQ ID NO: 984617 - RNA, 22 nt, Human
gagauauguuagaaagcuauug

SEQ ID NO: 984618 - RNA, 22 nt, Human
ucagagaaguaagguggggugc

SEQ ID NO: 984619 - RNA, 22 nt, Human
cugccuugaaaaugaagcuuua

SEQ ID NO: 984620 - RNA, 22 nt, Human
gcaggggaguccacucuaugca

SEQ ID NO: 984621 - RNA, 22 nt, Human
ugucucuggcccaugagcagag

SEQ ID NO: 984622 - RNA, 22 nt, Human
aaugauguuuuuaaagaacaua

SEQ ID NO: 984623 - RNA, 22 nt, Human
uucuuuccaaccagauauuggu

SEQ ID NO: 984624 - RNA, 22 nt, Human
ugcucccaaacgaccuacugug

SEQ ID NO: 984625 - RNA, 19 nt, Human
ggaggccuggguauuugcc

SEQ ID NO: 984626 - RNA, 22 nt, Human
ggcuuucuagaucuagcucugu

SEQ ID NO: 984627 - RNA, 22 nt, Human
ccagagcaauucucacagaacu

SEQ ID NO: 984628 - RNA, 22 nt, Human
augcaguacauacaaacacuga

SEQ ID NO: 984629 - RNA, 22 nt, Human
ucaaaguaaaaguauagaguuu

SEQ ID NO: 984630 - RNA, 22 nt, Human
uggcucaagugauccuccugcc

SEQ ID NO: 984631 - RNA, 22 nt, Human
aacauuucuucugaaacugagu

SEQ ID NO: 984632 - RNA, 21 nt, Human
gcucucugcaugguggcucag

SEQ ID NO: 984633 - RNA, 22 nt, Human
cagacaugauguaagcagaggc

SEQ ID NO: 984634 - RNA, 18 nt, Human
gggcuguguucaugccca

SEQ ID NO: 984635 - RNA, 22 nt, Human
uaagacaugguugaucuagugu

SEQ ID NO: 984636 - RNA, 22 nt, Human
gcugucagaaggugaaggguaa

SEQ ID NO: 984637 - RNA, 22 nt, Human
aaacacagggauauauauucca

SEQ ID NO: 984638 - RNA, 22 nt, Human
aacagaaaucauuuagggcucu

SEQ ID NO: 984639 - RNA, 22 nt, Human
uccuucagcuuauuucuuagga

SEQ ID NO: 984640 - RNA, 22 nt, Human
aagaggucauaccagauaaggg

SEQ ID NO: 984641 - RNA, 22 nt, Human
ucugccugagggagcugaggaa

SEQ ID NO: 984642 - RNA, 23 nt, Human
aaguucaagucacagccugucuu

SEQ ID NO: 984643 - RNA, 22 nt, Human
cuggugugauugagcccaggug

SEQ ID NO: 984644 - RNA, 22 nt, Human
aggcagggucuugcuauguugc

SEQ ID NO: 984645 - RNA, 23 nt, Human
uggugccucagaagcagugggcu

SEQ ID NO: 984646 - RNA, 22 nt, Human
ggcuucccaaggagccaggaug

SEQ ID NO: 984647 - RNA, 22 nt, Human
ugagccuggcggaagcagcgug

SEQ ID NO: 984648 - RNA, 22 nt, Human
aaguucaagcucugccuaaaau

SEQ ID NO: 984649 - RNA, 22 nt, Human
ccagggagccuggugugucagc

SEQ ID NO: 984650 - RNA, 22 nt, Human
cauggccucaaaggacugcaga

SEQ ID NO: 984651 - RNA, 22 nt, Human
cugaggaguuuggguuguucaa

SEQ ID NO: 984652 - RNA, 22 nt, Human
agccuccacagaugcaaagggc

SEQ ID NO: 984653 - RNA, 22 nt, Human
agaagugccauacuguggucca

SEQ ID NO: 984654 - RNA, 22 nt, Human
ugaagcagaggggucuugagcu

SEQ ID NO: 984655 - RNA, 22 nt, Human
ugggguggauagaaagugaugu

SEQ ID NO: 984656 - RNA, 22 nt, Human
accagcuguguccuggcugcag

SEQ ID NO: 984657 - RNA, 22 nt, Human
agcagugggugacagagcugag

SEQ ID NO: 984658 - RNA, 22 nt, Human
ccuccaggauaagucagggccu

SEQ ID NO: 984659 - RNA, 22 nt, Human
uucuuuccacagaggggaugau

SEQ ID NO: 984660 - RNA, 22 nt, Human
ccauggcauuuuaugugucuua

SEQ ID NO: 984661 - RNA, 22 nt, Human
uuuauuccaugugucuaugacc

SEQ ID NO: 984662 - RNA, 23 nt, Human
ccucagcauggcaggagcccagc

SEQ ID NO: 984663 - RNA, 22 nt, Human
uaagaaauuuaguuauagaaug

SEQ ID NO: 984664 - RNA, 22 nt, Human
cacagaggcaaccuucuggggu

SEQ ID NO: 984665 - RNA, 22 nt, Human
agggccuggugaccuggguccu

SEQ ID NO: 984666 - RNA, 22 nt, Human
uggccugccucccggcuucuuu

SEQ ID NO: 984667 - RNA, 22 nt, Human
caagagcucagaaacccuugcu

SEQ ID NO: 984668 - RNA, 22 nt, Human
ucccagcauaacaaacugcccg

SEQ ID NO: 984669 - RNA, 22 nt, Human
aaguucaaggcucuagaguucc

SEQ ID NO: 984670 - RNA, 22 nt, Human
auuuaaauuuucugauggagag

SEQ ID NO: 984671 - RNA, 22 nt, Human
ccagcaccuugaucuuggaguu

SEQ ID NO: 984672 - RNA, 22 nt, Human
agcaggaguuugaugcuuuuau

SEQ ID NO: 984673 - RNA, 22 nt, Human
uggcaacaugucgaagugcugu

SEQ ID NO: 984674 - RNA, 22 nt, Human
aaaugcacaaaguaaguguaau

SEQ ID NO: 984675 - RNA, 22 nt, Human
ccaaaguccauaguuuacauaa

SEQ ID NO: 984676 - RNA, 22 nt, Human
ugggccacggggguggagagcu

SEQ ID NO: 984677 - RNA, 22 nt, Human
gcugguuaggugagggugcgcc

SEQ ID NO: 984678 - RNA, 22 nt, Human
gaauuguacgcuuuacauaggu

SEQ ID NO: 984679 - RNA, 22 nt, Human
agcagcugucccuuaacaucag

SEQ ID NO: 984680 - RNA, 22 nt, Human
cugcccugaccugccucagagu

SEQ ID NO: 984681 - RNA, 22 nt, Human
cuggggcugcggacgggagccc

SEQ ID NO: 984682 - RNA, 22 nt, Human
cagccacguagcccuuggccgu

SEQ ID NO: 984683 - RNA, 19 nt, Human
gcaggguguugacuguccc

SEQ ID NO: 984684 - RNA, 22 nt, Human
cuucuuuacuuucuagaaauaa

SEQ ID NO: 984685 - RNA, 22 nt, Human
ccuggccagggucugggcugcu

SEQ ID NO: 984686 - RNA, 22 nt, Human
uacacuuuuuacuacagauucu

SEQ ID NO: 984687 - RNA, 22 nt, Human
aucuggcugagcgaggcccaca

SEQ ID NO: 984688 - RNA, 20 nt, Human
agcccuguuuccuggagaga

SEQ ID NO: 984689 - RNA, 22 nt, Human
gggugaggagcugccagucaug

SEQ ID NO: 984690 - RNA, 22 nt, Human
aaguaaaagcuuuaccaugcgc

SEQ ID NO: 984691 - RNA, 22 nt, Human
guauuaggugguggaauuguag

SEQ ID NO: 984692 - RNA, 22 nt, Human
uugcuucagagggagacacuuu

SEQ ID NO: 984693 - RNA, 22 nt, Human
uggguagagcaggcuggggcuu

SEQ ID NO: 984694 - RNA, 22 nt, Human
uacaugcaugucacagaaugaa

SEQ ID NO: 984695 - RNA, 22 nt, Human
ugccuaggaaaccucaugcuuc

SEQ ID NO: 984696 - RNA, 22 nt, Human
gcagcugaaagggaucucuaca

SEQ ID NO: 984697 - RNA, 22 nt, Human
cuccaggggccagaagccuggc

SEQ ID NO: 984698 - RNA, 22 nt, Human
gugucccaaagauuagaaauca

SEQ ID NO: 984699 - RNA, 22 nt, Human
gcagugggcaacaagagcugga

SEQ ID NO: 984700 - RNA, 22 nt, Human
cagguggagcugacugagggca

SEQ ID NO: 984701 - RNA, 22 nt, Human
uuuagaaauugcagagugggug

SEQ ID NO: 984702 - RNA, 21 nt, Human
ccuucucuugcuucagcuuca

SEQ ID NO: 984703 - RNA, 22 nt, Human
aaaguucagauuagacucaaga

SEQ ID NO: 984704 - RNA, 22 nt, Human
ccuguggcucucuuuggagguc

SEQ ID NO: 984705 - RNA, 20 nt, Human
gugggcagcaggcauacugg

SEQ ID NO: 984706 - RNA, 22 nt, Human
gggaguggguuuggccuaggcc

SEQ ID NO: 984707 - RNA, 22 nt, Human
ggccuugggaggagggucagaa

SEQ ID NO: 984708 - RNA, 22 nt, Human
cccagaggugcuucagaggugc

SEQ ID NO: 984709 - RNA, 18 nt, Human
ccagcaugccagaggcug

SEQ ID NO: 984710 - RNA, 22 nt, Human
agcugcugcggaaagaugccac

SEQ ID NO: 984711 - RNA, 22 nt, Human
acauguguauagccuguauaga

SEQ ID NO: 984712 - RNA, 22 nt, Human
ucucaagagggaggcaaucaug

SEQ ID NO: 984713 - RNA, 22 nt, Human
aauguguagcauuuaaugcagu

SEQ ID NO: 984714 - RNA, 17 nt, Human
uggcucugaggcugaau

SEQ ID NO: 984715 - RNA, 22 nt, Human
ugggcagacugagcccuguccc

SEQ ID NO: 984716 - RNA, 22 nt, Human
gccuucagcccugacuggccag

SEQ ID NO: 984717 - RNA, 22 nt, Human
gcccugugccagucacgcugug

SEQ ID NO: 984718 - RNA, 22 nt, Human
uccauuggucucugugcccagg

SEQ ID NO: 984719 - RNA, 22 nt, Human
aggcacugagaggcuguguugc

SEQ ID NO: 984720 - RNA, 22 nt, Human
cagugguggaaugaggaauugu

SEQ ID NO: 984721 - RNA, 22 nt, Human
cuggagccacuuuuuauccuuu

SEQ ID NO: 984722 - RNA, 22 nt, Human
agagccagcaagugaauaguga

SEQ ID NO: 984723 - RNA, 22 nt, Human
uggcucugucacugugagcuau

SEQ ID NO: 984724 - RNA, 22 nt, Human
aucacaaaggcugcuucaugau

SEQ ID NO: 984725 - RNA, 22 nt, Human
gcccuuccaacccagagggcaa

SEQ ID NO: 984726 - RNA, 22 nt, Human
ccugguguugugaaguagccgu

SEQ ID NO: 984727 - RNA, 22 nt, Human
ucucuggaagcgcagaucuguu

SEQ ID NO: 984728 - RNA, 22 nt, Human
aagaggaagucuccauggagag

SEQ ID NO: 984729 - RNA, 22 nt, Human
cagucccagaagagccugggag

SEQ ID NO: 984730 - RNA, 20 nt, Human
ucagugauuaucucugagug

SEQ ID NO: 984731 - RNA, 22 nt, Human
gggcugggauugcuugcuguga

SEQ ID NO: 984732 - RNA, 23 nt, Human
cagagcuggcucagagcugccug

SEQ ID NO: 984733 - RNA, 22 nt, Human
agagaggcgaguuaccugugcu

SEQ ID NO: 984734 - RNA, 22 nt, Human
guguuuccuaguuuaaugaaug

SEQ ID NO: 984735 - RNA, 22 nt, Human
aggccuggccuuuauguucaag

SEQ ID NO: 984736 - RNA, 22 nt, Human
ugcaagcacucaaugcaaacag

SEQ ID NO: 984737 - RNA, 22 nt, Human
uaaauguauaggcacuaaaccu

SEQ ID NO: 984738 - RNA, 23 nt, Human
ugcucugugaauaguuggugacu

SEQ ID NO: 984739 - RNA, 22 nt, Human
cagcucucuaaggucuugcuuu

SEQ ID NO: 984740 - RNA, 22 nt, Human
guggccucuguuggcuccuagg

SEQ ID NO: 984741 - RNA, 22 nt, Human
auugaauagaugcauuauacua

SEQ ID NO: 984742 - RNA, 20 nt, Human
ucagggcaugggacagcccc

SEQ ID NO: 984743 - RNA, 22 nt, Human
cucagcagugacaagagaguau

SEQ ID NO: 984744 - RNA, 22 nt, Human
ccugcuggccaguggagggcug

SEQ ID NO: 984745 - RNA, 22 nt, Human
acauuucugagcagggagcugu

SEQ ID NO: 984746 - RNA, 22 nt, Human
cagggccaagccccuuuggcug

SEQ ID NO: 984747 - RNA, 22 nt, Human
auagucuuagaucagauaaagu

SEQ ID NO: 984748 - RNA, 22 nt, Human
uuucacaaguuucaggauucug

SEQ ID NO: 984749 - RNA, 21 nt, Human
uuugcauuuuacaugugggga

SEQ ID NO: 984750 - RNA, 22 nt, Human
gcuguccugggaacaggcacua

SEQ ID NO: 984751 - RNA, 22 nt, Human
ugaaauauuuagagaguaaguu

SEQ ID NO: 984752 - RNA, 22 nt, Human
agcagcucacaggauuccugaa

SEQ ID NO: 984753 - RNA, 22 nt, Human
agcagcauguugggaugugaaa

SEQ ID NO: 984754 - RNA, 22 nt, Human
agcugccugggcuuguacaccu

SEQ ID NO: 984755 - RNA, 22 nt, Human
gcuggccugcugggcaccaccg

SEQ ID NO: 984756 - RNA, 22 nt, Human
ucccagggacugggcuaggcuu

SEQ ID NO: 984757 - RNA, 22 nt, Human
aaaaucaguacacuuuauuuug

SEQ ID NO: 984758 - RNA, 22 nt, Human
ugggcucugcaucagugcccau

SEQ ID NO: 984759 - RNA, 22 nt, Human
agggagacacaugaggaaguca

SEQ ID NO: 984760 - RNA, 22 nt, Human
ccaggccagcaggcacaccugc

SEQ ID NO: 984761 - RNA, 22 nt, Human
ugaagcaggguggccagauugu

SEQ ID NO: 984762 - RNA, 22 nt, Human
cagggccaugaggcacaggguc

SEQ ID NO: 984763 - RNA, 22 nt, Human
guucauuuuacuguaaauagca

SEQ ID NO: 984764 - RNA, 22 nt, Human
cucagagucccuucccucgugg

SEQ ID NO: 984765 - RNA, 22 nt, Human
uacauguaggugacauuuuaau

SEQ ID NO: 984766 - RNA, 22 nt, Human
gaggaagcagggcuuggcugag

SEQ ID NO: 984767 - RNA, 22 nt, Human
cuucacaacgacaucugguuag

SEQ ID NO: 984768 - RNA, 22 nt, Human
aaggcaggaugggaaaagauuu

SEQ ID NO: 984769 - RNA, 22 nt, Human
aggauauuugcuuaagauagcu

SEQ ID NO: 984770 - RNA, 22 nt, Human
cugccuggccugaucuccacgc

SEQ ID NO: 984771 - RNA, 22 nt, Human
cgcuggccauagccuccugugu

SEQ ID NO: 984772 - RNA, 22 nt, Human
gcugcagcaagcccuccagggg

SEQ ID NO: 984773 - RNA, 22 nt, Human
uccagccacucagcagggauug

SEQ ID NO: 984774 - RNA, 22 nt, Human
gcuccuggcuccaggcagccaa

SEQ ID NO: 984775 - RNA, 22 nt, Human
aucugacaaccuauugacuuga

SEQ ID NO: 984776 - RNA, 22 nt, Human
ugggggugugccagggaccucc

SEQ ID NO: 984777 - RNA, 22 nt, Human
acugcuuuuagaaaucuauaga

SEQ ID NO: 984778 - RNA, 22 nt, Human
auucacagggacaaugggagag

SEQ ID NO: 984779 - RNA, 20 nt, Human
agcugaggcaccugagguua

SEQ ID NO: 984780 - RNA, 22 nt, Human
ccuggagcacucucccuggcug

SEQ ID NO: 984781 - RNA, 22 nt, Human
caucacuguccucagcauucca

SEQ ID NO: 984782 - RNA, 22 nt, Human
aggcugccuguuccaaucuccu

SEQ ID NO: 984783 - RNA, 22 nt, Human
ggugggcaggucacucugccuc

SEQ ID NO: 984784 - RNA, 22 nt, Human
cagaguguaucuguguaagcau

SEQ ID NO: 984785 - RNA, 23 nt, Human
ugggaguguugggaucucugcuc

SEQ ID NO: 984786 - RNA, 22 nt, Human
gauuucaauccagcuuucuucu

SEQ ID NO: 984787 - RNA, 22 nt, Human
ugauuuccacagucaggggugc

SEQ ID NO: 984788 - RNA, 20 nt, Human
auauguguacguguauacau

SEQ ID NO: 984789 - RNA, 22 nt, Human
caagggcucuuuugaggaaugu

SEQ ID NO: 984790 - RNA, 22 nt, Human
auuguaauuuuagagaaagugg

SEQ ID NO: 984791 - RNA, 22 nt, Human
gaggaguguauuccacaccacu

SEQ ID NO: 984792 - RNA, 22 nt, Human
ggcagagcuuguuccuucuguu

SEQ ID NO: 984793 - RNA, 22 nt, Human
ucaggggcugugcauuucccag

SEQ ID NO: 984794 - RNA, 22 nt, Human
cuggggcccaucgagggcugag

SEQ ID NO: 984795 - RNA, 21 nt, Human
accaggcuugugggagggagc

SEQ ID NO: 984796 - RNA, 22 nt, Human
gcucaagggaugggagugggug

SEQ ID NO: 984797 - RNA, 22 nt, Human
acucugaggcaggucagggcag

SEQ ID NO: 984798 - RNA, 22 nt, Human
ugcucuguugugcaugugggau

SEQ ID NO: 984799 - RNA, 22 nt, Human
gggucuggacggcugcaggaag

SEQ ID NO: 984800 - RNA, 22 nt, Human
acuucucuucauagguggcaau

SEQ ID NO: 984801 - RNA, 22 nt, Human
uagaaagcuugggguguuuaaa

SEQ ID NO: 984802 - RNA, 22 nt, Human
agcuuguagaaggccacgagca

SEQ ID NO: 984803 - RNA, 22 nt, Human
agaaaaggcuugaagagguuuu

SEQ ID NO: 984804 - RNA, 22 nt, Human
auuucuuccucugucaguaacu

SEQ ID NO: 984805 - RNA, 23 nt, Human
uuacaguaggaguuggaaaacca

SEQ ID NO: 984806 - RNA, 22 nt, Human
aggcagagcuggguuuugaaau

SEQ ID NO: 984807 - RNA, 22 nt, Human
gcccugagacugagcauggguu

SEQ ID NO: 984808 - RNA, 22 nt, Human
cucugcuuggaacuggacagaa

SEQ ID NO: 984809 - RNA, 22 nt, Human
ccuuccuggagcccaugcagau

SEQ ID NO: 984810 - RNA, 21 nt, Human
ugcaggcaggcagagaugcug

SEQ ID NO: 984811 - RNA, 22 nt, Human
ugggcagaguugugaugaacug

SEQ ID NO: 984812 - RNA, 22 nt, Human
aaagauuaaaucaaauugguca

SEQ ID NO: 984813 - RNA, 22 nt, Human
gcugccugauguccagcaggac

SEQ ID NO: 984814 - RNA, 22 nt, Human
uuaaacagagucugaaauguaa

SEQ ID NO: 984815 - RNA, 22 nt, Human
aacaaaugauuguugguuggag

SEQ ID NO: 984816 - RNA, 22 nt, Human
ggcagaggaaggaugaauucac

SEQ ID NO: 984817 - RNA, 21 nt, Human
gcaggaugcaucuuggugucu

SEQ ID NO: 984818 - RNA, 22 nt, Human
cugagggcaugaacauuccaua

SEQ ID NO: 984819 - RNA, 22 nt, Human
aggagagucuugagucacuggu

SEQ ID NO: 984820 - RNA, 22 nt, Human
uccuugaagcaacgugcagaca

SEQ ID NO: 984821 - RNA, 22 nt, Human
ucugaggcauaaccuguucugc

SEQ ID NO: 984822 - RNA, 22 nt, Human
cugucaguaggcucccaucauu

SEQ ID NO: 984823 - RNA, 22 nt, Human
cuagaaauauuuuacagucaag

SEQ ID NO: 984824 - RNA, 22 nt, Human
uggggaggacgggcgccuuccu

SEQ ID NO: 984825 - RNA, 22 nt, Human
ugucagggcaugcgguccagcc

SEQ ID NO: 984826 - RNA, 22 nt, Human
uaacuaacuaguguucaaaaua

SEQ ID NO: 984827 - RNA, 22 nt, Human
uuuuaguuguaguuggugagga

SEQ ID NO: 984828 - RNA, 22 nt, Human
guuauguaugagggaaugauua

SEQ ID NO: 984829 - RNA, 22 nt, Human
uuuuauauggcacauugguugg

SEQ ID NO: 984830 - RNA, 22 nt, Human
cuggccuguccugacccagccu

SEQ ID NO: 984831 - RNA, 22 nt, Human
ccugucugagccagggugggca

SEQ ID NO: 984832 - RNA, 22 nt, Human
uagcugucaccagaaauggcca

SEQ ID NO: 984833 - RNA, 22 nt, Human
cuguagcagugugcucuuuuuc

SEQ ID NO: 984834 - RNA, 22 nt, Human
uggggcugaggagccucacucu

SEQ ID NO: 984835 - RNA, 22 nt, Human
cugaaggacacgugaggagcca

SEQ ID NO: 984836 - RNA, 20 nt, Human
gagccugggaagucuaaggu

SEQ ID NO: 984837 - RNA, 22 nt, Human
guggcucuccauugacauggaa

SEQ ID NO: 984838 - RNA, 22 nt, Human
ugaagcaaacgcuucuguuccu

SEQ ID NO: 984839 - RNA, 22 nt, Human
ccucagaguaggucucagcugu

SEQ ID NO: 984840 - RNA, 22 nt, Human
guuagaaacacauucuuauuga

SEQ ID NO: 984841 - RNA, 22 nt, Human
gcaugggcaagaggacuggggg

SEQ ID NO: 984842 - RNA, 22 nt, Human
uacaaaugaccauagccacuua

SEQ ID NO: 984843 - RNA, 22 nt, Human
auccaguucucagugcuuacag

SEQ ID NO: 984844 - RNA, 22 nt, Human
ugcagcugcuugauucaucuug

SEQ ID NO: 984845 - RNA, 22 nt, Human
ugaaggaaaugacggcagaaga

SEQ ID NO: 984846 - RNA, 22 nt, Human
ggcaggugcucugugggccugg

SEQ ID NO: 984847 - RNA, 22 nt, Human
cuguucucuggcgguggcuguu

SEQ ID NO: 984848 - RNA, 22 nt, Human
ccaaggagcugcaggcacuugu

SEQ ID NO: 984849 - RNA, 19 nt, Human
uuggcagcugagauccugc

SEQ ID NO: 984850 - RNA, 22 nt, Human
acaaagcuagagaagagaauug

SEQ ID NO: 984851 - RNA, 22 nt, Human
aguuucauauuaccaugucacc

SEQ ID NO: 984852 - RNA, 22 nt, Human
uuauuuucagcuaggaaagcca

SEQ ID NO: 984853 - RNA, 22 nt, Human
ccacagggcucuaggcgcuucc

SEQ ID NO: 984854 - RNA, 22 nt, Human
acauucuaacauuguacagaua

SEQ ID NO: 984855 - RNA, 22 nt, Human
caucuuuaacaauuuacaaugu

SEQ ID NO: 984856 - RNA, 22 nt, Human
ggggcacacuuuugguagauau

SEQ ID NO: 984857 - RNA, 22 nt, Human
caccagggcucugagcucugaa

SEQ ID NO: 984858 - RNA, 22 nt, Human
auauucuuccaaaacaucauuu

SEQ ID NO: 984859 - RNA, 22 nt, Human
ucagggcagaauccaaagaauu

SEQ ID NO: 984860 - RNA, 21 nt, Human
cugcuuuacuucagaggaucu

SEQ ID NO: 984861 - RNA, 18 nt, Human
gggaucaggcugccuagg

SEQ ID NO: 984862 - RNA, 18 nt, Human
caggagcaggaguugaac

SEQ ID NO: 984863 - RNA, 22 nt, Human
aguguuucuggcaaaugaaagu

SEQ ID NO: 984864 - RNA, 22 nt, Human
ugacagggcuagaggcaaugca

SEQ ID NO: 984865 - RNA, 22 nt, Human
acauuucuuccacaugcugcug

SEQ ID NO: 984866 - RNA, 22 nt, Human
ccaggagucuggaugagguguc

SEQ ID NO: 984867 - RNA, 22 nt, Human
aguguuccacacaucuggggaa

SEQ ID NO: 984868 - RNA, 22 nt, Human
ucugagggugggagaaggagcu

SEQ ID NO: 984869 - RNA, 22 nt, Human
uggccugacugucaggcuguau

SEQ ID NO: 984870 - RNA, 19 nt, Human
uguggccaugguucagcug

SEQ ID NO: 984871 - RNA, 20 nt, Human
gggugagauguaggagaggg

SEQ ID NO: 984872 - RNA, 22 nt, Human
cacagcuuccauuagaaugaga

SEQ ID NO: 984873 - RNA, 22 nt, Human
aggcagcuggcagcacccaggg

SEQ ID NO: 984874 - RNA, 22 nt, Human
ugugccaggcacuugcccaggc

SEQ ID NO: 984875 - RNA, 22 nt, Human
gggcacugugcuaggugcugag

SEQ ID NO: 984876 - RNA, 22 nt, Human
uuaggaaucaccugcagaucuu

SEQ ID NO: 984877 - RNA, 22 nt, Human
ugcaagggcuuagggggcugug

SEQ ID NO: 984878 - RNA, 22 nt, Human
ugcagugguguccagguguacu

SEQ ID NO: 984879 - RNA, 21 nt, Human
guggcccugguguggcugcac

SEQ ID NO: 984880 - RNA, 21 nt, Human
agagaagggacucuuccaguc

SEQ ID NO: 984881 - RNA, 22 nt, Human
auuaggacagagaugucaagag

SEQ ID NO: 984882 - RNA, 22 nt, Human
guaaaauagaauaacguggcua

SEQ ID NO: 984883 - RNA, 22 nt, Human
uggaccugcuggaugggcaggu

SEQ ID NO: 984884 - RNA, 22 nt, Human
acagauauaaacuauaguagug

SEQ ID NO: 984885 - RNA, 20 nt, Human
ugagccaaacgaugaagagc

SEQ ID NO: 984886 - RNA, 22 nt, Human
gugaggugggcuggccagagac

SEQ ID NO: 984887 - RNA, 22 nt, Human
gccuggagaauuaaaaggaagg

SEQ ID NO: 984888 - RNA, 22 nt, Human
aagauucuacaguagguacauu

SEQ ID NO: 984889 - RNA, 22 nt, Human
cccagccuggugcacugugggg

SEQ ID NO: 984890 - RNA, 22 nt, Human
gccaggcaaauuaaggaaugca

SEQ ID NO: 984891 - RNA, 22 nt, Human
ggccuuggugccauggccaguu

SEQ ID NO: 984892 - RNA, 22 nt, Human
uugcauugaaaauauauuuuaa

SEQ ID NO: 984893 - RNA, 22 nt, Human
gccggggcuggggagagacaug

SEQ ID NO: 984894 - RNA, 22 nt, Human
accaguccgcggagcuccgggg

SEQ ID NO: 984895 - RNA, 22 nt, Human
acccugagucagacagccugac

SEQ ID NO: 984896 - RNA, 22 nt, Human
caauaugcaagcuauuaaguau

SEQ ID NO: 984897 - RNA, 22 nt, Human
gaggcaggcacuguuaucagca

SEQ ID NO: 984898 - RNA, 22 nt, Human
aagcccagcaucccugcaccag

SEQ ID NO: 984899 - RNA, 22 nt, Human
uuauuuggguuugaguguggca

SEQ ID NO: 984900 - RNA, 22 nt, Human
agcagccaaccuuacauucauc

SEQ ID NO: 984901 - RNA, 22 nt, Human
ugcuagaauaccuaccuggagg

SEQ ID NO: 984902 - RNA, 20 nt, Human
gaggccucagccucagcucc

SEQ ID NO: 984903 - RNA, 22 nt, Human
gcucaggacccaggugugaccu

SEQ ID NO: 984904 - RNA, 22 nt, Human
gaaaugugaccuacuuccuugu

SEQ ID NO: 984905 - RNA, 17 nt, Human
guuugcaugguguuaac

SEQ ID NO: 984906 - RNA, 22 nt, Human
gcagcacauauaaacaaagaga

SEQ ID NO: 984907 - RNA, 19 nt, Human
auaaggcaauuggauuugg

SEQ ID NO: 984908 - RNA, 20 nt, Human
uacuugaauguugcagcagu

SEQ ID NO: 984909 - RNA, 22 nt, Human
uucugaggcacuggcucuccca

SEQ ID NO: 984910 - RNA, 22 nt, Human
uugcacagaugagggugaugcu

SEQ ID NO: 984911 - RNA, 22 nt, Human
ucagggaaugaugcacacaguu

SEQ ID NO: 984912 - RNA, 22 nt, Human
ugagccagaggaggcugugugg

SEQ ID NO: 984913 - RNA, 22 nt, Human
ccucuguccuggggaguggagc

SEQ ID NO: 984914 - RNA, 22 nt, Human
ucagcugccccaguggccccag

SEQ ID NO: 984915 - RNA, 22 nt, Human
uuauuaugguauuucuuugcag

SEQ ID NO: 984916 - RNA, 23 nt, Human
cccagcuuucccacugccgagag

SEQ ID NO: 984917 - RNA, 20 nt, Human
ccagucccugagcaccaggg

SEQ ID NO: 984918 - RNA, 22 nt, Human
ggccucugcaacuggcuguggc

SEQ ID NO: 984919 - RNA, 22 nt, Human
gacccaggguuucugcacaggg

SEQ ID NO: 984920 - RNA, 22 nt, Human
ugugccagaaaauaugcugagg

SEQ ID NO: 984921 - RNA, 22 nt, Human
cuggccugaggccgccuucaga

SEQ ID NO: 984922 - RNA, 22 nt, Human
aaaugcauaucaaagacuugaa

SEQ ID NO: 984923 - RNA, 22 nt, Human
cuccugaguaguagcauuguca

SEQ ID NO: 984924 - RNA, 22 nt, Human
gccucugcaggugcgguuaucc

SEQ ID NO: 984925 - RNA, 19 nt, Human
ccucugcgcuguccugcuc

SEQ ID NO: 984926 - RNA, 22 nt, Human
aaaguguagagacuuuggaacc

SEQ ID NO: 984927 - RNA, 22 nt, Human
ccuggcaguggugaagaagagg

SEQ ID NO: 984928 - RNA, 22 nt, Human
cuguacaucccgagagccagua

SEQ ID NO: 984929 - RNA, 22 nt, Human
ugauuuccacgugcacccaggu

SEQ ID NO: 984930 - RNA, 22 nt, Human
cuguuuauaaauagaggggagu

SEQ ID NO: 984931 - RNA, 22 nt, Human
cugccucugcgucccacagagu

SEQ ID NO: 984932 - RNA, 21 nt, Human
aacugcuggucuuuucugucu

SEQ ID NO: 984933 - RNA, 22 nt, Human
gaggaaaagagacagguuauug

SEQ ID NO: 984934 - RNA, 20 nt, Human
cacagcuugccuuuuaugac

SEQ ID NO: 984935 - RNA, 22 nt, Human
guaagcaucugucucuucugca

SEQ ID NO: 984936 - RNA, 22 nt, Human
uuccugaugcacacagucauuu

SEQ ID NO: 984937 - RNA, 22 nt, Human
ggcaguggugggaggcucgcuc

SEQ ID NO: 984938 - RNA, 22 nt, Human
ucuggcucucaacaaauauuua

SEQ ID NO: 984939 - RNA, 22 nt, Human
uugauaaaaugauaucuucuuu

SEQ ID NO: 984940 - RNA, 22 nt, Human
gggaggaggaauguuuugugua

SEQ ID NO: 984941 - RNA, 22 nt, Human
uuccuguaguugugcaauguac

SEQ ID NO: 984942 - RNA, 22 nt, Human
uuaugggagcaauuggggaggu

SEQ ID NO: 984943 - RNA, 22 nt, Human
ucccacucccaggcaggccucu

SEQ ID NO: 984944 - RNA, 22 nt, Human
uucuuuaaaauagugagaaaga

SEQ ID NO: 984945 - RNA, 22 nt, Human
gagcagaugugugccaggaugc

SEQ ID NO: 984946 - RNA, 18 nt, Human
gaagggagcuggaaugca

SEQ ID NO: 984947 - RNA, 22 nt, Human
uggcaagccugagauccgggag

SEQ ID NO: 984948 - RNA, 22 nt, Human
ggggcuguuuuuggaauggcug

SEQ ID NO: 984949 - RNA, 22 nt, Human
cugccagcucaaagcgcagcua

SEQ ID NO: 984950 - RNA, 22 nt, Human
aaaugaugcucacagauuagug

SEQ ID NO: 984951 - RNA, 22 nt, Human
agugaaaugauaguguaaauac

SEQ ID NO: 984952 - RNA, 22 nt, Human
ggcagcuccucaaaaaauuaaa

SEQ ID NO: 984953 - RNA, 22 nt, Human
auuauauugaguauaaccagag

SEQ ID NO: 984954 - RNA, 22 nt, Human
gcugggagcaaguacucaucuu

SEQ ID NO: 984955 - RNA, 22 nt, Human
gggagcugagggaccucugugg

SEQ ID NO: 984956 - RNA, 21 nt, Human
acagcagggcuggcaugacag

SEQ ID NO: 984957 - RNA, 19 nt, Human
ugaagcaggcagagaagau

SEQ ID NO: 984958 - RNA, 22 nt, Human
uuaugacauaugaguacaagua

SEQ ID NO: 984959 - RNA, 22 nt, Human
gcaagcaguuguggcuucugag

SEQ ID NO: 984960 - RNA, 19 nt, Human
ggcucucuuaaagcuguuu

SEQ ID NO: 984961 - RNA, 22 nt, Human
cuguccccgcgaguccagagcu

SEQ ID NO: 984962 - RNA, 22 nt, Human
uuauacauguguuuugagauga

SEQ ID NO: 984963 - RNA, 22 nt, Human
cagcuugggucaggugccugcu

SEQ ID NO: 984964 - RNA, 22 nt, Human
uuucaagcauaacugggaagag

SEQ ID NO: 984965 - RNA, 22 nt, Human
gcuggccucuggagaagggcuu

SEQ ID NO: 984966 - RNA, 19 nt, Human
gcaugcuugguggcuucug

SEQ ID NO: 984967 - RNA, 22 nt, Human
ggccucucucccuggcuugcag

SEQ ID NO: 984968 - RNA, 18 nt, Human
ucauuagggauugcaaag

SEQ ID NO: 984969 - RNA, 22 nt, Human
ugggcugcuuccucagcugaga

SEQ ID NO: 984970 - RNA, 22 nt, Human
gcucaagagagaugcaguucuu

SEQ ID NO: 984971 - RNA, 20 nt, Human
cagcaguggaugagaguuuu

SEQ ID NO: 984972 - RNA, 19 nt, Human
caagugaagccugggaugg

SEQ ID NO: 984973 - RNA, 22 nt, Human
gccaggcacaguucuaggugcu

SEQ ID NO: 984974 - RNA, 22 nt, Human
agauacauagcugugagcacac

SEQ ID NO: 984975 - RNA, 22 nt, Human
cugcccugacugaccuuuugaa

SEQ ID NO: 984976 - RNA, 22 nt, Human
gucauugcaguggcaaaucaca

SEQ ID NO: 984977 - RNA, 20 nt, Human
uaugaguauuacuuucagga

SEQ ID NO: 984978 - RNA, 22 nt, Human
cccaggagagaggccaguuggc

SEQ ID NO: 984979 - RNA, 22 nt, Human
cagccagguucaaguccuuaua

SEQ ID NO: 984980 - RNA, 22 nt, Human
agcaccugcuuaaugugcagug

SEQ ID NO: 984981 - RNA, 22 nt, Human
cccagccucagcuuuacuucca

SEQ ID NO: 984982 - RNA, 22 nt, Human
uuaauaaacaggugcagcugaa

SEQ ID NO: 984983 - RNA, 22 nt, Human
ucacaugcuacugagccagacc

SEQ ID NO: 984984 - RNA, 22 nt, Human
agaauuuuugauuaucuacucg

SEQ ID NO: 984985 - RNA, 22 nt, Human
ccaaaugcuccacugacuuugg

SEQ ID NO: 984986 - RNA, 22 nt, Human
uuugcaaauaccaugaaacuug

SEQ ID NO: 984987 - RNA, 22 nt, Human
cuuccugcaggacagccaucug

SEQ ID NO: 984988 - RNA, 22 nt, Human
aaauacaguguguguucuuuga

SEQ ID NO: 984989 - RNA, 22 nt, Human
auauuaauuauuuacacaugag

SEQ ID NO: 984990 - RNA, 22 nt, Human
ucugugccucaucugguucagg

SEQ ID NO: 984991 - RNA, 22 nt, Human
cacagaauuaagggagaaauau

SEQ ID NO: 984992 - RNA, 22 nt, Human
ugcucugucaagaaaagaugcc

SEQ ID NO: 984993 - RNA, 22 nt, Human
uaaaauguagcuucuaggcugg

SEQ ID NO: 984994 - RNA, 22 nt, Human
uucucuggaacugaaacaagau

SEQ ID NO: 984995 - RNA, 19 nt, Human
accucugcagagauguuua

SEQ ID NO: 984996 - RNA, 22 nt, Human
uggcucagccauucguguugcc

SEQ ID NO: 984997 - RNA, 23 nt, Human
cacaccaggagccgucugggcca

SEQ ID NO: 984998 - RNA, 22 nt, Human
cacagcuucugagugaggauuu

SEQ ID NO: 984999 - RNA, 22 nt, Human
agcuuuaugggagcuuagauaa

SEQ ID NO: 985000 - RNA, 22 nt, Human
ucugggagacguguguugucag

SEQ ID NO: 985001 - RNA, 22 nt, Human
caggguggcacucagcgcaucu

SEQ ID NO: 985002 - RNA, 22 nt, Human
uuugugaagggaacagaagugu

SEQ ID NO: 985003 - RNA, 22 nt, Human
uaaauaugcauguauccuuauc

SEQ ID NO: 985004 - RNA, 22 nt, Human
gcagugguccaguucacaccca

SEQ ID NO: 985005 - RNA, 22 nt, Human
ggccugcuuuccgagccugcag

SEQ ID NO: 985006 - RNA, 22 nt, Human
uuauuagggugguuuauguucu

SEQ ID NO: 985007 - RNA, 22 nt, Human
guuaggauuauauaucccauga

SEQ ID NO: 985008 - RNA, 22 nt, Human
uguuccauaaguggugcuuugu

SEQ ID NO: 985009 - RNA, 22 nt, Human
uguauauucugccuaaaagcuu

SEQ ID NO: 985010 - RNA, 22 nt, Human
agcauggggcaaugcaugugcu

SEQ ID NO: 985011 - RNA, 22 nt, Human
uagggauggaaacuaggaaucu

SEQ ID NO: 985012 - RNA, 22 nt, Human
cuauugaauagcccaaaucauu

SEQ ID NO: 985013 - RNA, 22 nt, Human
agcagagccaggucucucugua

SEQ ID NO: 985014 - RNA, 22 nt, Human
cacugucuuuugugaagacaau

SEQ ID NO: 985015 - RNA, 22 nt, Human
caccugagugucaguauucuca

SEQ ID NO: 985016 - RNA, 22 nt, Human
gaggcucagagggagcaugguc

SEQ ID NO: 985017 - RNA, 22 nt, Human
agggaggauaguagucaguuua

SEQ ID NO: 985018 - RNA, 22 nt, Human
ugccucugugggccuuccuggc

SEQ ID NO: 985019 - RNA, 22 nt, Human
gaggcugcaggcaaugcugccc

SEQ ID NO: 985020 - RNA, 22 nt, Human
cauggcaggaggcugcuggcag

SEQ ID NO: 985021 - RNA, 22 nt, Human
ggcaggagggcggacaaugacc

SEQ ID NO: 985022 - RNA, 22 nt, Human
ugccagaagauucucuaucaga

SEQ ID NO: 985023 - RNA, 22 nt, Human
acaaaugccauauauaaauucu

SEQ ID NO: 985024 - RNA, 22 nt, Human
ggagcuggucagccuugagcau

SEQ ID NO: 985025 - RNA, 22 nt, Human
ggccagggggcuucagacucca

SEQ ID NO: 985026 - RNA, 22 nt, Human
ucagggacugcagagggaagcu

SEQ ID NO: 985027 - RNA, 22 nt, Human
gacucugcuacaggccgagguu

SEQ ID NO: 985028 - RNA, 20 nt, Human
ucacagaaacaaauagagaa

SEQ ID NO: 985029 - RNA, 22 nt, Human
uuuuccucugcagagcaguuag

SEQ ID NO: 985030 - RNA, 22 nt, Human
ucagaagcugguguccuuugaa

SEQ ID NO: 985031 - RNA, 22 nt, Human
acuggccaggcacagcuguggg

SEQ ID NO: 985032 - RNA, 22 nt, Human
gagccuggagcuggaacgaagc

SEQ ID NO: 985033 - RNA, 22 nt, Human
caagagcucccagaccugggca

SEQ ID NO: 985034 - RNA, 22 nt, Human
ucacuggggccuuuggucagga

SEQ ID NO: 985035 - RNA, 22 nt, Human
gagggguguggagccaucaguu

SEQ ID NO: 985036 - RNA, 22 nt, Human
aggcucaggcaggaauggcgga

SEQ ID NO: 985037 - RNA, 22 nt, Human
cuucacaaaauauuucauuaua

SEQ ID NO: 985038 - RNA, 22 nt, Human
gcugccuccugaaagcgcucug

SEQ ID NO: 985039 - RNA, 22 nt, Human
aucuacaggauaguuuaauauu

SEQ ID NO: 985040 - RNA, 22 nt, Human
auucggaucauguguauguguu

SEQ ID NO: 985041 - RNA, 22 nt, Human
gcuuuguguagaaggaggaugg

SEQ ID NO: 985042 - RNA, 22 nt, Human
uauuagguaugaacuggcaacc

SEQ ID NO: 985043 - RNA, 22 nt, Human
aggccaaaccggauggaaaagg

SEQ ID NO: 985044 - RNA, 22 nt, Human
ccagggucucugcugccugaga

SEQ ID NO: 985045 - RNA, 22 nt, Human
aaucuggcauguaagcuuagag

SEQ ID NO: 985046 - RNA, 22 nt, Human
ugcugccaccccucaccagagc

SEQ ID NO: 985047 - RNA, 22 nt, Human
agugaguggguuacagauggga

SEQ ID NO: 985048 - RNA, 22 nt, Human
accugagaaugggggcaugugu

SEQ ID NO: 985049 - RNA, 22 nt, Human
gaaugugugacucuauugagca

SEQ ID NO: 985050 - RNA, 23 nt, Human
uccaagggcuacaaacacagacc

SEQ ID NO: 985051 - RNA, 20 nt, Human
cguaaggcaagugcugcauc

SEQ ID NO: 985052 - RNA, 22 nt, Human
gcugucucggggcuuucuccug

SEQ ID NO: 985053 - RNA, 22 nt, Human
cugggcugcaggaguggggcaa

SEQ ID NO: 985054 - RNA, 22 nt, Human
cccuccagagcuugaccugcug

SEQ ID NO: 985055 - RNA, 22 nt, Human
ugcuggccaacaaggcuccaag

SEQ ID NO: 985056 - RNA, 22 nt, Human
gaaaguuucuucauuaagaugu

SEQ ID NO: 985057 - RNA, 22 nt, Human
ugugcaguuucuauguugucca

SEQ ID NO: 985058 - RNA, 22 nt, Human
aaaugucuaucuggcauauucc

SEQ ID NO: 985059 - RNA, 22 nt, Human
gaggcugguaggaaaggaaaca

SEQ ID NO: 985060 - RNA, 22 nt, Human
caggagcucuuaaggaugugau

SEQ ID NO: 985061 - RNA, 22 nt, Human
aacucacuuuguggcuucugaa

SEQ ID NO: 985062 - RNA, 20 nt, Human
agugucuggugcagggccuc

SEQ ID NO: 985063 - RNA, 21 nt, Human
uuacuuuugcaccaaccuaau

SEQ ID NO: 985064 - RNA, 22 nt, Human
acagagcacugcccugugccgc

SEQ ID NO: 985065 - RNA, 22 nt, Human
acauuucuggaguuucucaaca

SEQ ID NO: 985066 - RNA, 22 nt, Human
gaggaaugucagcacaggccuc

SEQ ID NO: 985067 - RNA, 22 nt, Human
ucacuaaguuacauuuaguauu

SEQ ID NO: 985068 - RNA, 22 nt, Human
uccuggauucugcccugaaggc

SEQ ID NO: 985069 - RNA, 22 nt, Human
gccaugccugugucuccaggcc

SEQ ID NO: 985070 - RNA, 22 nt, Human
uggccuggcugcccugucugga

SEQ ID NO: 985071 - RNA, 22 nt, Human
cugggcacagcguugggcucuu

SEQ ID NO: 985072 - RNA, 22 nt, Human
aaagaacaaaugauauaugguu

SEQ ID NO: 985073 - RNA, 22 nt, Human
uggcugcugagaaggcagcugu

SEQ ID NO: 985074 - RNA, 22 nt, Human
agggcugguauguccaugaaag

SEQ ID NO: 985075 - RNA, 21 nt, Human
acagccugucaucucaugguc

SEQ ID NO: 985076 - RNA, 22 nt, Human
accugccucuaagcagcaggug

SEQ ID NO: 985077 - RNA, 22 nt, Human
aaagguuugcauggaauuuacc

SEQ ID NO: 985078 - RNA, 22 nt, Human
gaacagcccuguuaagucuguu

SEQ ID NO: 985079 - RNA, 22 nt, Human
ugauuuccugugcgcccuuagg

SEQ ID NO: 985080 - RNA, 23 nt, Human
ucuggcucuaugugacagcucuc

SEQ ID NO: 985081 - RNA, 22 nt, Human
uuguacacaauucuuaacauac

SEQ ID NO: 985082 - RNA, 22 nt, Human
ugucuuaagaaauugcauuugu

SEQ ID NO: 985083 - RNA, 19 nt, Human
agucucacccaagcagucu

SEQ ID NO: 985084 - RNA, 22 nt, Human
cuguguccugcgucaagccaau

SEQ ID NO: 985085 - RNA, 22 nt, Human
cucaggaugaaagucaugguga

SEQ ID NO: 985086 - RNA, 20 nt, Human
aagcaauauagugcaaaugu

SEQ ID NO: 985087 - RNA, 22 nt, Human
uggagcugauacagcuggcuuu

SEQ ID NO: 985088 - RNA, 22 nt, Human
augcaaaagacuauuuguugcu

SEQ ID NO: 985089 - RNA, 22 nt, Human
ucaguuuugaaaacauugaaug

SEQ ID NO: 985090 - RNA, 22 nt, Human
agggcugcuccuccuucaggcc

SEQ ID NO: 985091 - RNA, 22 nt, Human
cauugcacuccagcuugggcaa

SEQ ID NO: 985092 - RNA, 22 nt, Human
ugaaggaaugagggaguggguc

SEQ ID NO: 985093 - RNA, 22 nt, Human
augcugcacaagccacauguag

SEQ ID NO: 985094 - RNA, 22 nt, Human
auuacacacucaaguccuguua

SEQ ID NO: 985095 - RNA, 22 nt, Human
gugcgccagcucaaggggaggc

SEQ ID NO: 985096 - RNA, 22 nt, Human
cugccuggucucaggcaugggg

SEQ ID NO: 985097 - RNA, 22 nt, Human
ucagagccaaucauggugcauu

SEQ ID NO: 985098 - RNA, 22 nt, Human
ggagcuguugcgcaugcgcucg

SEQ ID NO: 985099 - RNA, 22 nt, Human
ccaagggcucugacuugccugc

SEQ ID NO: 985100 - RNA, 22 nt, Human
cucccugguguccccuccagga

SEQ ID NO: 985101 - RNA, 22 nt, Human
ugauuuccaauaaggagaaugu

SEQ ID NO: 985102 - RNA, 22 nt, Human
cugagccauccauaccagcuua

SEQ ID NO: 985103 - RNA, 22 nt, Human
agcugagcacauucaaacaggu

SEQ ID NO: 985104 - RNA, 22 nt, Human
aagcagaaaaacugagcuccaa

SEQ ID NO: 985105 - RNA, 22 nt, Human
acuuugugcccaacagaaagaa

SEQ ID NO: 985106 - RNA, 22 nt, Human
agaaguaggcagggcuguauca

SEQ ID NO: 985107 - RNA, 22 nt, Human
cugaggucuagacaccccaggg

SEQ ID NO: 985108 - RNA, 22 nt, Human
ucucaggaagauuagggcuaag

SEQ ID NO: 985109 - RNA, 22 nt, Human
ucuucuuccucauuuauacaua

SEQ ID NO: 985110 - RNA, 22 nt, Human
agcagggccucuggcacugguc

SEQ ID NO: 985111 - RNA, 22 nt, Human
aggcagcagggccacuggcuga

SEQ ID NO: 985112 - RNA, 22 nt, Human
aaaacuccugaaauuguuuccc

SEQ ID NO: 985113 - RNA, 22 nt, Human
gagagcuguccggcugagcagc

SEQ ID NO: 985114 - RNA, 22 nt, Human
ccuuggcccuagccucaggcaa

SEQ ID NO: 985115 - RNA, 22 nt, Human
cugaaaugacgguuuggggcaa

SEQ ID NO: 985116 - RNA, 22 nt, Human
gccugccugcugucaucugccu

SEQ ID NO: 985117 - RNA, 22 nt, Human
ugcuucaggaagaaacgccagg

SEQ ID NO: 985118 - RNA, 22 nt, Human
gagcucagcccaaagagcagug

SEQ ID NO: 985119 - RNA, 20 nt, Human
ccuggcugcauucaggacgg

SEQ ID NO: 985120 - RNA, 22 nt, Human
ccugccugacagagaagguuca

SEQ ID NO: 985121 - RNA, 22 nt, Human
gccagcugguaggcaccuagcc

SEQ ID NO: 985122 - RNA, 22 nt, Human
uccaagggcucauggacacuuu

SEQ ID NO: 985123 - RNA, 22 nt, Human
cuuauguauauuuggaacguac

SEQ ID NO: 985124 - RNA, 22 nt, Human
caguuucucucaauaagcaucg

SEQ ID NO: 985125 - RNA, 21 nt, Human
ugcccacagcaaaugcagagg

SEQ ID NO: 985126 - RNA, 22 nt, Human
uucccaggcugugcuaccagag

SEQ ID NO: 985127 - RNA, 22 nt, Human
agagggaucacccuguuucugg

SEQ ID NO: 985128 - RNA, 22 nt, Human
cugccagcagaggccagcgcug

SEQ ID NO: 985129 - RNA, 22 nt, Human
gguagcagggcugugagucaga

SEQ ID NO: 985130 - RNA, 23 nt, Human
cccuguagcccaggacaggcuuu

SEQ ID NO: 985131 - RNA, 22 nt, Human
cuggaagguucuuugugugccu

SEQ ID NO: 985132 - RNA, 22 nt, Human
cagggcagagccaggauuucaa

SEQ ID NO: 985133 - RNA, 22 nt, Human
uugccacugaaccagucuugca

SEQ ID NO: 985134 - RNA, 22 nt, Human
acccuuucuuacucacacgcuc

SEQ ID NO: 985135 - RNA, 22 nt, Human
agucccagcucugccacuuacu

SEQ ID NO: 985136 - RNA, 22 nt, Human
cagcaauaagccagguuagaca

SEQ ID NO: 985137 - RNA, 21 nt, Human
uccauuguuuucccaggguuu

SEQ ID NO: 985138 - RNA, 22 nt, Human
aggcugcuuccuuacguggcug

SEQ ID NO: 985139 - RNA, 21 nt, Human
aagcaggacauaugaugcccu

SEQ ID NO: 985140 - RNA, 23 nt, Human
aaucuggcugauguuuuuucucu

SEQ ID NO: 985141 - RNA, 18 nt, Human
ugggauggagaguaacug

SEQ ID NO: 985142 - RNA, 22 nt, Human
cagaagcauuccagcaaauagu

SEQ ID NO: 985143 - RNA, 22 nt, Human
gcugagcugaggcagggcuggg

SEQ ID NO: 985144 - RNA, 22 nt, Human
aggccaaagcucaccugcagcu

SEQ ID NO: 985145 - RNA, 22 nt, Human
acuccuggguugcaguccucaa

SEQ ID NO: 985146 - RNA, 22 nt, Human
ccuugcaggggaacaggcagug

SEQ ID NO: 985147 - RNA, 22 nt, Human
cagggacugagauccagacugu

SEQ ID NO: 985148 - RNA, 17 nt, Human
gcuuccucaugcaguuc

SEQ ID NO: 985149 - RNA, 22 nt, Human
uccuuuuuauaguuagagaaac

SEQ ID NO: 985150 - RNA, 22 nt, Human
gggcagugguuacacagcugag

SEQ ID NO: 985151 - RNA, 21 nt, Human
guuugcaugaacaagucagcc

SEQ ID NO: 985152 - RNA, 23 nt, Human
uuucuguuggguauauauccaag

SEQ ID NO: 985153 - RNA, 22 nt, Human
ugcaccuuguccauuuuuggcc

SEQ ID NO: 985154 - RNA, 22 nt, Human
cagcugaauucuucagacucca

SEQ ID NO: 985155 - RNA, 22 nt, Human
cagggucugaaacugaucacag

SEQ ID NO: 985156 - RNA, 22 nt, Human
uggccacacccaccuagaggag

SEQ ID NO: 985157 - RNA, 22 nt, Human
uggacaggugagugacucaggg

SEQ ID NO: 985158 - RNA, 22 nt, Human
ccauaagguugaaaacuguaca

SEQ ID NO: 985159 - RNA, 22 nt, Human
aagcugccaccagcccagggca

SEQ ID NO: 985160 - RNA, 22 nt, Human
ucagggcauccauugccuguug

SEQ ID NO: 985161 - RNA, 22 nt, Human
gcaucuuucuguccauucagca

SEQ ID NO: 985162 - RNA, 22 nt, Human
uggcuucugggacuugugagca

SEQ ID NO: 985163 - RNA, 22 nt, Human
auaguauuuaauaguuagcuca

SEQ ID NO: 985164 - RNA, 22 nt, Human
ugcaccauuaauuuaugugaga

SEQ ID NO: 985165 - RNA, 22 nt, Human
uugaagauggaucgccacucuc

SEQ ID NO: 985166 - RNA, 22 nt, Human
cucagggacguuagaggacagg

SEQ ID NO: 985167 - RNA, 22 nt, Human
gaaaucugaacaacagcuguca

SEQ ID NO: 985168 - RNA, 22 nt, Human
guguggcuaccucagaggagca

SEQ ID NO: 985169 - RNA, 23 nt, Human
uugugggcagauuccauggggag

SEQ ID NO: 985170 - RNA, 22 nt, Human
gccugagagacccauggggcaa

SEQ ID NO: 985171 - RNA, 22 nt, Human
ugggcucugaagucagucugcu

SEQ ID NO: 985172 - RNA, 22 nt, Human
ccacugaaggucaacauagagc

SEQ ID NO: 985173 - RNA, 22 nt, Human
aagaaauuaaggaaugcaacga

SEQ ID NO: 985174 - RNA, 22 nt, Human
cagcugccagcuucucuccauc

SEQ ID NO: 985175 - RNA, 22 nt, Human
gacaggaggcagagcucaggug

SEQ ID NO: 985176 - RNA, 22 nt, Human
uugugugguagcuucauugaac

SEQ ID NO: 985177 - RNA, 21 nt, Human
ggugggcacaggagagcagag

SEQ ID NO: 985178 - RNA, 22 nt, Human
aauaagaaagagucagcuucag

SEQ ID NO: 985179 - RNA, 22 nt, Human
acagcagcauaaacugacuaag

SEQ ID NO: 985180 - RNA, 23 nt, Human
aucaagauaauccagaugaccua

SEQ ID NO: 985181 - RNA, 22 nt, Human
ucuccugguacccuuccuagca

SEQ ID NO: 985182 - RNA, 22 nt, Human
uucuccgcuaaguucucugcag

SEQ ID NO: 985183 - RNA, 22 nt, Human
uugaagcagcucaggaggcuua

SEQ ID NO: 985184 - RNA, 22 nt, Human
ccaggacuuuaaguccagcacu

SEQ ID NO: 985185 - RNA, 22 nt, Human
agagcucaagacgcucacagua

SEQ ID NO: 985186 - RNA, 22 nt, Human
caggcacuguguuaggcacugu

SEQ ID NO: 985187 - RNA, 22 nt, Human
agaauaaaucaaauguccugag

SEQ ID NO: 985188 - RNA, 18 nt, Human
uugagggaggggcagagu

SEQ ID NO: 985189 - RNA, 22 nt, Human
aagacagaccacgugacagggc

SEQ ID NO: 985190 - RNA, 22 nt, Human
ugugcucuggaguugccuucac

SEQ ID NO: 985191 - RNA, 22 nt, Human
uuuaguagaaauauuugggccu

SEQ ID NO: 985192 - RNA, 22 nt, Human
agugcugucccgacaacugagg

SEQ ID NO: 985193 - RNA, 22 nt, Human
aauucacauguugaaguccuaa

SEQ ID NO: 985194 - RNA, 22 nt, Human
acaaagucaaauugcagccgcc

SEQ ID NO: 985195 - RNA, 22 nt, Human
gcaaaugcucuccuuggucagg

SEQ ID NO: 985196 - RNA, 22 nt, Human
acucugcucccuaagccaugau

SEQ ID NO: 985197 - RNA, 22 nt, Human
acuacuuugggccauuuguuua

SEQ ID NO: 985198 - RNA, 22 nt, Human
acuugauuuugaaccuuucuac

SEQ ID NO: 985199 - RNA, 22 nt, Human
gacucagugauuugacaugccu

SEQ ID NO: 985200 - RNA, 22 nt, Human
ccucccacauugaggacaugcu

SEQ ID NO: 985201 - RNA, 22 nt, Human
agaaaacauuacauaggugugu

SEQ ID NO: 985202 - RNA, 22 nt, Human
cacugcuuaguugguaaaugug

SEQ ID NO: 985203 - RNA, 22 nt, Human
augcacagacccaaaggccauc

SEQ ID NO: 985204 - RNA, 22 nt, Human
ugggaggcagguaggugaugau

SEQ ID NO: 985205 - RNA, 22 nt, Human
gcucugagccgggggccugucc

SEQ ID NO: 985206 - RNA, 22 nt, Human
ugguacuuggaggcagaaaaau

SEQ ID NO: 985207 - RNA, 22 nt, Human
ucuggccaguagauguggguug

SEQ ID NO: 985208 - RNA, 22 nt, Human
uauuucuuucagguauguguug

SEQ ID NO: 985209 - RNA, 22 nt, Human
cuggccaauauagggaaaucuu

SEQ ID NO: 985210 - RNA, 20 nt, Human
cugcucugcuuugcaggugg

SEQ ID NO: 985211 - RNA, 22 nt, Human
uguacaauagcuauuaucucca

SEQ ID NO: 985212 - RNA, 22 nt, Human
gaggcugcggggaggagccugc

SEQ ID NO: 985213 - RNA, 22 nt, Human
aaauacagcagacuccuguugu

SEQ ID NO: 985214 - RNA, 22 nt, Human
cugucccucaucaccucugggu

SEQ ID NO: 985215 - RNA, 22 nt, Human
ugucaccagcugcuccucagga

SEQ ID NO: 985216 - RNA, 22 nt, Human
agucucugcaugccugcugugc

SEQ ID NO: 985217 - RNA, 22 nt, Human
acagggcagaaauguugcaucu

SEQ ID NO: 985218 - RNA, 22 nt, Human
uuagaaauacaagugagguuga

SEQ ID NO: 985219 - RNA, 22 nt, Human
cccagcuccgagcuccgagccg

SEQ ID NO: 985220 - RNA, 22 nt, Human
cuucccacuaguaucacagagc

SEQ ID NO: 985221 - RNA, 22 nt, Human
gcugcagcagaaguucucagag

SEQ ID NO: 985222 - RNA, 22 nt, Human
gcugucacauuuggagcacugg

SEQ ID NO: 985223 - RNA, 22 nt, Human
uucuggagcuaaaguccacucu

SEQ ID NO: 985224 - RNA, 22 nt, Human
guguacauauugagucugcuga

SEQ ID NO: 985225 - RNA, 22 nt, Human
uccuggccgccgcguggggccg

SEQ ID NO: 985226 - RNA, 22 nt, Human
cagagcugggcauggugaaagg

SEQ ID NO: 985227 - RNA, 20 nt, Human
cuguccccgaggucaccagg

SEQ ID NO: 985228 - RNA, 21 nt, Human
acuggccaccacuggcagggg

SEQ ID NO: 985229 - RNA, 22 nt, Human
uccugucugucuuuggucccuu

SEQ ID NO: 985230 - RNA, 22 nt, Human
uggcucagccagcccuaggaac

SEQ ID NO: 985231 - RNA, 22 nt, Human
agagaugaaaaguggagacugg

SEQ ID NO: 985232 - RNA, 22 nt, Human
uggcugcucaagggaggaggcu

SEQ ID NO: 985233 - RNA, 22 nt, Human
caggggcucuaaugcaugauca

SEQ ID NO: 985234 - RNA, 22 nt, Human
ggcugccucuggaagcuggaga

SEQ ID NO: 985235 - RNA, 22 nt, Human
cauugguagaguuuguuuuaua

SEQ ID NO: 985236 - RNA, 22 nt, Human
agagccugucugccuuucuacc

SEQ ID NO: 985237 - RNA, 22 nt, Human
agugaaauggaugcugcuacug

SEQ ID NO: 985238 - RNA, 21 nt, Human
cgggcuggccgggcccucacc

SEQ ID NO: 985239 - RNA, 22 nt, Human
ccucagggccaucucugucccu

SEQ ID NO: 985240 - RNA, 17 nt, Human
auuuccucagggcugag

SEQ ID NO: 985241 - RNA, 22 nt, Human
uaugcauauagaugcacacaca

SEQ ID NO: 985242 - RNA, 22 nt, Human
gugugcagaagacacaagacau

SEQ ID NO: 985243 - RNA, 22 nt, Human
uggccuggggaagaccaugggc

SEQ ID NO: 985244 - RNA, 22 nt, Human
aagagguaaccauagcaaccac

SEQ ID NO: 985245 - RNA, 22 nt, Human
uauuggucuuggaagguuuugu

SEQ ID NO: 985246 - RNA, 22 nt, Human
uggcacaaaucuagucccuggu

SEQ ID NO: 985247 - RNA, 22 nt, Human
ggggcagauggaacagagcaca

SEQ ID NO: 985248 - RNA, 22 nt, Human
gaagcccagggcguggccgggc

SEQ ID NO: 985249 - RNA, 22 nt, Human
cugucaucacaguugagcagcc

SEQ ID NO: 985250 - RNA, 22 nt, Human
gagauuggauuuaauggccaaa

SEQ ID NO: 985251 - RNA, 22 nt, Human
ccugggagguggagguugcagc

SEQ ID NO: 985252 - RNA, 21 nt, Human
cugugcuucuuccuaagccag

SEQ ID NO: 985253 - RNA, 22 nt, Human
augggggccugaacaggcaaaa

SEQ ID NO: 985254 - RNA, 22 nt, Human
cagaaguaagauuacugugaga

SEQ ID NO: 985255 - RNA, 22 nt, Human
gcuuuuucaaaugaaagcuggu

SEQ ID NO: 985256 - RNA, 22 nt, Human
gucaugccagcggagcucggga

SEQ ID NO: 985257 - RNA, 19 nt, Human
acuuucuccaggaccuguu

SEQ ID NO: 985258 - RNA, 22 nt, Human
agcaggugacccaagcaggcug

SEQ ID NO: 985259 - RNA, 21 nt, Human
uccuucaguucugcacuuucu

SEQ ID NO: 985260 - RNA, 22 nt, Human
ucucagagaaaugugucaccau

SEQ ID NO: 985261 - RNA, 22 nt, Human
gcacugcagguggguggagagg

SEQ ID NO: 985262 - RNA, 21 nt, Human
cuggccgaccccucugugcuc

SEQ ID NO: 985263 - RNA, 19 nt, Human
aggucuaaucauaagacaa

SEQ ID NO: 985264 - RNA, 22 nt, Human
uggaggcaucagagugcuuggc

SEQ ID NO: 985265 - RNA, 22 nt, Human
cuggccucauagccaagcugug

SEQ ID NO: 985266 - RNA, 22 nt, Human
uuugcauugccucugacuuaug

SEQ ID NO: 985267 - RNA, 22 nt, Human
aaauuguugaucuacaguaagg

SEQ ID NO: 985268 - RNA, 22 nt, Human
ccugccugcggcccgcggggag

SEQ ID NO: 985269 - RNA, 20 nt, Human
uagauuucauacuucucuuu

SEQ ID NO: 985270 - RNA, 22 nt, Human
ucagcaguguaguuuaucauuc

SEQ ID NO: 985271 - RNA, 22 nt, Human
gcucuguacgcaggaugagggg

SEQ ID NO: 985272 - RNA, 22 nt, Human
ggggcagagaauaaaaaccuaa

SEQ ID NO: 985273 - RNA, 22 nt, Human
caccuggcuggaagugcuccgg

SEQ ID NO: 985274 - RNA, 22 nt, Human
auuuauuaccucggaguuucug

SEQ ID NO: 985275 - RNA, 22 nt, Human
uggauaaacucacuguaaguug

SEQ ID NO: 985276 - RNA, 22 nt, Human
ugucuagggagcugcucaggcu

SEQ ID NO: 985277 - RNA, 22 nt, Human
uggcucagucuggguugacuga

SEQ ID NO: 985278 - RNA, 21 nt, Human
ggagucagggucuggcugggg

SEQ ID NO: 985279 - RNA, 22 nt, Human
gacagcaggagaucaugauaga

SEQ ID NO: 985280 - RNA, 22 nt, Human
ggagccuguggccgucacgacu

SEQ ID NO: 985281 - RNA, 21 nt, Human
cagaggccucaugcucugugc

SEQ ID NO: 985282 - RNA, 22 nt, Human
gagcaggcuugcagagaagggg

SEQ ID NO: 985283 - RNA, 22 nt, Human
gcagggcacagacagugccaag

SEQ ID NO: 985284 - RNA, 22 nt, Human
auuuuuccaugauacuuaucug

SEQ ID NO: 985285 - RNA, 22 nt, Human
uaaaucccuacaucuguguuuu

SEQ ID NO: 985286 - RNA, 22 nt, Human
ucucauguauugcccuggugug

SEQ ID NO: 985287 - RNA, 22 nt, Human
auuuugaaaccaaguuauuucc

SEQ ID NO: 985288 - RNA, 21 nt, Human
agagcugggacuugccugaga

SEQ ID NO: 985289 - RNA, 22 nt, Human
caaguuaucagaaggcacuuuu

SEQ ID NO: 985290 - RNA, 22 nt, Human
gagccagguuugaaucucaguc

SEQ ID NO: 985291 - RNA, 22 nt, Human
gacaugcaacaauuuggcauuu

SEQ ID NO: 985292 - RNA, 22 nt, Human
cagagcaguccuugucaaucag

SEQ ID NO: 985293 - RNA, 22 nt, Human
uuagauaacaguagaauaucaa

SEQ ID NO: 985294 - RNA, 20 nt, Human
uggagcuguaaucuugucug

SEQ ID NO: 985295 - RNA, 22 nt, Human
agggcuggaggguacuaguuua

SEQ ID NO: 985296 - RNA, 22 nt, Human
cuccugcgguacuacugugcuu

SEQ ID NO: 985297 - RNA, 18 nt, Human
uacaugcauaaaugaagc

SEQ ID NO: 985298 - RNA, 22 nt, Human
acagauugaucuugagaauuau

SEQ ID NO: 985299 - RNA, 22 nt, Human
cugagauggaguuucgcucuuc

SEQ ID NO: 985300 - RNA, 19 nt, Human
ucucagagcccuagaggcc

SEQ ID NO: 985301 - RNA, 20 nt, Human
cacguuuuuccacuagcaaa

SEQ ID NO: 985302 - RNA, 22 nt, Human
augauugaaaaugacauugcca

SEQ ID NO: 985303 - RNA, 21 nt, Human
uccagggaacuucucaggaau

SEQ ID NO: 985304 - RNA, 22 nt, Human
auucaguucuaaggucagugcc

SEQ ID NO: 985305 - RNA, 22 nt, Human
auucaagagcccauguuuccug

SEQ ID NO: 985306 - RNA, 18 nt, Human
gguggccuugacuucucu

SEQ ID NO: 985307 - RNA, 23 nt, Human
uggcaccaggcauucuaggggua

SEQ ID NO: 985308 - RNA, 22 nt, Human
aucugguuuggggauccuugug

SEQ ID NO: 985309 - RNA, 22 nt, Human
cuggcagcaguuaugaaacaau

SEQ ID NO: 985310 - RNA, 22 nt, Human
auuuuuccaauuaggauaaaga

SEQ ID NO: 985311 - RNA, 22 nt, Human
cuggagccaugucuugacugcu

SEQ ID NO: 985312 - RNA, 22 nt, Human
caaugugugcuuacaggccagu

SEQ ID NO: 985313 - RNA, 22 nt, Human
uggcagagaaccugggcuuugu

SEQ ID NO: 985314 - RNA, 22 nt, Human
uggaagcacuuggguuuuguug

SEQ ID NO: 985315 - RNA, 22 nt, Human
ccuuucucuuggauaccgauug

SEQ ID NO: 985316 - RNA, 22 nt, Human
aacaaauguguggcaguguggg

SEQ ID NO: 985317 - RNA, 22 nt, Human
cagccuuuuaggacuauuugug

SEQ ID NO: 985318 - RNA, 19 nt, Human
acuuugcaugugugucuaa

SEQ ID NO: 985319 - RNA, 22 nt, Human
ccuggccagcgccggcugcucg

SEQ ID NO: 985320 - RNA, 22 nt, Human
ugcucuucggggccacugcuug

SEQ ID NO: 985321 - RNA, 22 nt, Human
ugggcugcggauaggccucgga

SEQ ID NO: 985322 - RNA, 22 nt, Human
uuucuggcagcgggacaggggu

SEQ ID NO: 985323 - RNA, 22 nt, Human
aaagucauguaaugauaugauu

SEQ ID NO: 985324 - RNA, 22 nt, Human
gcagacauuuugaaucuaggcu

SEQ ID NO: 985325 - RNA, 22 nt, Human
auggacaggcugagcuuccuca

SEQ ID NO: 985326 - RNA, 22 nt, Human
aauguuguuuuucugcaugucu

SEQ ID NO: 985327 - RNA, 19 nt, Human
acacagggcuagaguuaca

SEQ ID NO: 985328 - RNA, 22 nt, Human
acucagaguuugcguuccauac

SEQ ID NO: 985329 - RNA, 22 nt, Human
uaacagaauccuguuauugcca

SEQ ID NO: 985330 - RNA, 22 nt, Human
uccucucagugugguuguggga

SEQ ID NO: 985331 - RNA, 19 nt, Human
cucuggccucuggaugcug

SEQ ID NO: 985332 - RNA, 22 nt, Human
cagggccuccccggcagucuuu

SEQ ID NO: 985333 - RNA, 22 nt, Human
uuuccauauucugcgucugcca

SEQ ID NO: 985334 - RNA, 22 nt, Human
cccaggaggcagagcuugcagu

SEQ ID NO: 985335 - RNA, 22 nt, Human
uuuguaaauagcaguacucaug

SEQ ID NO: 985336 - RNA, 22 nt, Human
gcugaagcccacguggcuugua

SEQ ID NO: 985337 - RNA, 20 nt, Human
ccugaggguuuguguucuuu

SEQ ID NO: 985338 - RNA, 22 nt, Human
auaauuuacaacugcuuuuaau

SEQ ID NO: 985339 - RNA, 22 nt, Human
gagccuggauugucaccgacuu

SEQ ID NO: 985340 - RNA, 22 nt, Human
uacucugccacuaggaguucug

SEQ ID NO: 985341 - RNA, 22 nt, Human
uggccugguuguugcugccguu

SEQ ID NO: 985342 - RNA, 22 nt, Human
accucugcucaagaccccuccg

SEQ ID NO: 985343 - RNA, 22 nt, Human
ugcagcucauugguguccuggu

SEQ ID NO: 985344 - RNA, 22 nt, Human
ucucagagggaaacaugaguga

SEQ ID NO: 985345 - RNA, 22 nt, Human
uugcuuuguggugguucuucca

SEQ ID NO: 985346 - RNA, 22 nt, Human
cuacauuuuucaccgagccucu

SEQ ID NO: 985347 - RNA, 22 nt, Human
uucauuacugcgguagucacac

SEQ ID NO: 985348 - RNA, 22 nt, Human
caggauccccaggucgccgucc

SEQ ID NO: 985349 - RNA, 22 nt, Human
gcagcagaggcccuacucuuug

SEQ ID NO: 985350 - RNA, 22 nt, Human
uauuagguaaaggacuugcagg

SEQ ID NO: 985351 - RNA, 22 nt, Human
gccucucucuacccaguaugau

SEQ ID NO: 985352 - RNA, 22 nt, Human
gaaaccucuuagccucucuuug

SEQ ID NO: 985353 - RNA, 22 nt, Human
aagaacagguucuagaaccauu

SEQ ID NO: 985354 - RNA, 22 nt, Human
uaguccauuuucacacugcuga

SEQ ID NO: 985355 - RNA, 22 nt, Human
cagggacagccuugggguggcg

SEQ ID NO: 985356 - RNA, 22 nt, Human
ugggccuguggcuuggcucuag

SEQ ID NO: 985357 - RNA, 22 nt, Human
gcagcugccccgacugugaguc

SEQ ID NO: 985358 - RNA, 22 nt, Human
gggagggaucugcuaggcaaug

SEQ ID NO: 985359 - RNA, 23 nt, Human
gugagcagcccacuaggaaugcc

SEQ ID NO: 985360 - RNA, 22 nt, Human
caggggcuuuuccucuauaagg

SEQ ID NO: 985361 - RNA, 21 nt, Human
ccugccaggaaacugaguguc

SEQ ID NO: 985362 - RNA, 22 nt, Human
gcuggccaguguggugaccacc

SEQ ID NO: 985363 - RNA, 22 nt, Human
ucauugaagugacugaaagauu

SEQ ID NO: 985364 - RNA, 22 nt, Human
cugugccaggcccagcugacuu

SEQ ID NO: 985365 - RNA, 22 nt, Human
auaaggcagucacuggaauguu

SEQ ID NO: 985366 - RNA, 22 nt, Human
ucaguaacuuacuuauucaccu

SEQ ID NO: 985367 - RNA, 22 nt, Human
gaggacagcuuagggcuuccug

SEQ ID NO: 985368 - RNA, 22 nt, Human
gugggggcaggcagugcuagga

SEQ ID NO: 985369 - RNA, 22 nt, Human
caucagcaggcaacacucuugg

SEQ ID NO: 985370 - RNA, 22 nt, Human
ucuggcucugacacuacuguua

SEQ ID NO: 985371 - RNA, 19 nt, Human
ucccagagucuagagguug

SEQ ID NO: 985372 - RNA, 22 nt, Human
gggccuggugcuucugacuccu

SEQ ID NO: 985373 - RNA, 22 nt, Human
auggccaagcauauacagauug

SEQ ID NO: 985374 - RNA, 22 nt, Human
caguacuugggaaugcugggga

SEQ ID NO: 985375 - RNA, 22 nt, Human
cagcccugagaaggaggaucuc

SEQ ID NO: 985376 - RNA, 22 nt, Human
uccuuugacuucuugcagucca

SEQ ID NO: 985377 - RNA, 22 nt, Human
gcuggccucuacaggccggcca

SEQ ID NO: 985378 - RNA, 20 nt, Human
uugcauuggaugugcaggug

SEQ ID NO: 985379 - RNA, 22 nt, Human
caaauaguuuuucauguauuau

SEQ ID NO: 985380 - RNA, 22 nt, Human
ggacaggguaaguacuagugug

SEQ ID NO: 985381 - RNA, 22 nt, Human
aaguucuacuguggguaaaaug

SEQ ID NO: 985382 - RNA, 22 nt, Human
uuguuucagcuguaugcuaugu

SEQ ID NO: 985383 - RNA, 22 nt, Human
gccucugcugcaagccugguug

SEQ ID NO: 985384 - RNA, 22 nt, Human
ucagagugaccuuacauggucu

SEQ ID NO: 985385 - RNA, 22 nt, Human
ggcaggguggcccuccagugag

SEQ ID NO: 985386 - RNA, 22 nt, Human
uuaaaaugaauauugauuagca

SEQ ID NO: 985387 - RNA, 22 nt, Human
ugcuuaauauugugauguaaua

SEQ ID NO: 985388 - RNA, 22 nt, Human
gaggagcuggcagcgucuccgc

SEQ ID NO: 985389 - RNA, 22 nt, Human
aaauuagucauguuguauuacu

SEQ ID NO: 985390 - RNA, 22 nt, Human
ucugucugcgcuugcccuggug

SEQ ID NO: 985391 - RNA, 22 nt, Human
uuggcagcccagcuuacuagca

SEQ ID NO: 985392 - RNA, 22 nt, Human
aguguccccuacagaggcauuc

SEQ ID NO: 985393 - RNA, 22 nt, Human
cuggccaagcacuggggucaaa

SEQ ID NO: 985394 - RNA, 22 nt, Human
ugucaucucacugauauagaug

SEQ ID NO: 985395 - RNA, 22 nt, Human
uuauuuagucuagaugaauuuu

SEQ ID NO: 985396 - RNA, 22 nt, Human
cuguccuaugaguacucacuag

SEQ ID NO: 985397 - RNA, 21 nt, Human
cagugcucaaucugacagugg

SEQ ID NO: 985398 - RNA, 22 nt, Human
cccucccaagcacucugacaua

SEQ ID NO: 985399 - RNA, 22 nt, Human
ccaagggcugcugaggugucca

SEQ ID NO: 985400 - RNA, 22 nt, Human
auucccaucgucaacuucacug

SEQ ID NO: 985401 - RNA, 22 nt, Human
caggccaggcugcauuugcccc

SEQ ID NO: 985402 - RNA, 22 nt, Human
gggcguggauggucagugcagg

SEQ ID NO: 985403 - RNA, 22 nt, Human
acuccugggugcauuucugauu

SEQ ID NO: 985404 - RNA, 22 nt, Human
ucccagagguugagucacuuau

SEQ ID NO: 985405 - RNA, 22 nt, Human
aacuaaaucuggcauuuagagc

SEQ ID NO: 985406 - RNA, 22 nt, Human
gaagccccaaacccucgccauc

SEQ ID NO: 985407 - RNA, 22 nt, Human
uguaggauguaaggcaggcauc

SEQ ID NO: 985408 - RNA, 22 nt, Human
agcugcccccagggcugugcuu

SEQ ID NO: 985409 - RNA, 22 nt, Human
agcugcaggccucuccugggga

SEQ ID NO: 985410 - RNA, 22 nt, Human
uuuuccucuguauuugaaaugc

SEQ ID NO: 985411 - RNA, 22 nt, Human
auuuggcauaggcagaggccca

SEQ ID NO: 985412 - RNA, 22 nt, Human
gccucugcaccaguacugugcc

SEQ ID NO: 985413 - RNA, 22 nt, Human
uuugacagauccuuaacucagc

SEQ ID NO: 985414 - RNA, 22 nt, Human
aggggugugcauccuggaggau

SEQ ID NO: 985415 - RNA, 22 nt, Human
ucacuuagauggggaucaucac

SEQ ID NO: 985416 - RNA, 22 nt, Human
gcucaggagcucuugguggcgc

SEQ ID NO: 985417 - RNA, 22 nt, Human
ccugacucuggccaggccagcu

SEQ ID NO: 985418 - RNA, 22 nt, Human
gggcucucaugaguguguggua

SEQ ID NO: 985419 - RNA, 19 nt, Human
ccugucugucuucagcuag

SEQ ID NO: 985420 - RNA, 22 nt, Human
acagaauuaaugaaaauuacaa

SEQ ID NO: 985421 - RNA, 22 nt, Human
ucucugcuugguguaugugagu

SEQ ID NO: 985422 - RNA, 22 nt, Human
gcugccuucaguucugauucau

SEQ ID NO: 985423 - RNA, 21 nt, Human
agaggccuuacaggauagacc

SEQ ID NO: 985424 - RNA, 22 nt, Human
agcagggcagugaucagaaagg

SEQ ID NO: 985425 - RNA, 22 nt, Human
ccuggccaaucuagggcuguua

SEQ ID NO: 985426 - RNA, 22 nt, Human
gaagcagcuggugagauggagc

SEQ ID NO: 985427 - RNA, 22 nt, Human
gccugggugaauuugauccuaa

SEQ ID NO: 985428 - RNA, 22 nt, Human
agcucccagaguccucugccca

SEQ ID NO: 985429 - RNA, 22 nt, Human
uggccagguugggcuuugcagc

SEQ ID NO: 985430 - RNA, 22 nt, Human
gagccuggauugaagugggugg

SEQ ID NO: 985431 - RNA, 22 nt, Human
acagaaggcggggacaaggcgg

SEQ ID NO: 985432 - RNA, 22 nt, Human
ggaggcugcugccucacguggg

SEQ ID NO: 985433 - RNA, 22 nt, Human
aauaugaauuauuguuacaagu

SEQ ID NO: 985434 - RNA, 22 nt, Human
ccuggcagguggcgcccucggc

SEQ ID NO: 985435 - RNA, 22 nt, Human
acucugccuuucagcagaugaa

SEQ ID NO: 985436 - RNA, 18 nt, Human
cagaagcaggcagugcag

SEQ ID NO: 985437 - RNA, 22 nt, Human
uauuucugggaguucagaaauu

SEQ ID NO: 985438 - RNA, 19 nt, Human
aggcugcaagguggugggc

SEQ ID NO: 985439 - RNA, 22 nt, Human
ucucugggugauggcagggcac

SEQ ID NO: 985440 - RNA, 21 nt, Human
ucuuggccuaaguucacugaa

SEQ ID NO: 985441 - RNA, 18 nt, Human
agggucagugucacuggc

SEQ ID NO: 985442 - RNA, 22 nt, Human
gugccagcucuccccacaucug

SEQ ID NO: 985443 - RNA, 22 nt, Human
ggcagugaaaaaguauguuucc

SEQ ID NO: 985444 - RNA, 20 nt, Human
acaaaugcauucugugacau

SEQ ID NO: 985445 - RNA, 22 nt, Human
ggagauuuauagcacacuucag

SEQ ID NO: 985446 - RNA, 22 nt, Human
aggugccagaugcacagcugaa

SEQ ID NO: 985447 - RNA, 22 nt, Human
aggcaucugaguuugcaagcuu

SEQ ID NO: 985448 - RNA, 22 nt, Human
uuagucaauagugaauauagag

SEQ ID NO: 985449 - RNA, 22 nt, Human
gagcuggugaucagcuggagga

SEQ ID NO: 985450 - RNA, 22 nt, Human
cagacauauguuuuaacagauu

SEQ ID NO: 985451 - RNA, 22 nt, Human
uaugcacacauuagcacagggu

SEQ ID NO: 985452 - RNA, 22 nt, Human
acauacaucaaguaucacaaga

SEQ ID NO: 985453 - RNA, 23 nt, Human
cuguggcugaguccuguuggagu

SEQ ID NO: 985454 - RNA, 22 nt, Human
uagcagggguagauagagugug

SEQ ID NO: 985455 - RNA, 22 nt, Human
agcagcugguaggaguggccac

SEQ ID NO: 985456 - RNA, 22 nt, Human
ggcccacacugacagcugagcu

SEQ ID NO: 985457 - RNA, 22 nt, Human
cagcccagcagggucuggcccu

SEQ ID NO: 985458 - RNA, 23 nt, Human
cuuuccuuucuuugacacccagc

SEQ ID NO: 985459 - RNA, 22 nt, Human
uccuugacugugaggaacuagc

SEQ ID NO: 985460 - RNA, 22 nt, Human
cagagcaggcccacugcccucc

SEQ ID NO: 985461 - RNA, 20 nt, Human
auguagaugaaagcaaaggc

SEQ ID NO: 985462 - RNA, 22 nt, Human
augaaauguuggucccaaucgc

SEQ ID NO: 985463 - RNA, 19 nt, Human
accaggcuuauggucagug

SEQ ID NO: 985464 - RNA, 22 nt, Human
caccuuuugugucugcguuugu

SEQ ID NO: 985465 - RNA, 22 nt, Human
gcugcagcagcugcaggguugu

SEQ ID NO: 985466 - RNA, 22 nt, Human
uguuaacaucuuggacucguga

SEQ ID NO: 985467 - RNA, 22 nt, Human
augagcugugggauuccagagg

SEQ ID NO: 985468 - RNA, 23 nt, Human
acagcaagaggaccagaugugag

SEQ ID NO: 985469 - RNA, 22 nt, Human
acauuucuuuucaucucuauau

SEQ ID NO: 985470 - RNA, 22 nt, Human
cugggaggcagucucucuagaa

SEQ ID NO: 985471 - RNA, 22 nt, Human
auucugagacaauugccgucag

SEQ ID NO: 985472 - RNA, 22 nt, Human
cuggaagaggaagccagcugga

SEQ ID NO: 985473 - RNA, 22 nt, Human
uauaagaaacaaggcaaauuuu

SEQ ID NO: 985474 - RNA, 22 nt, Human
cagcaguggccaucuguguggu

SEQ ID NO: 985475 - RNA, 21 nt, Human
uuagcaaagcaaacacaugcu

SEQ ID NO: 985476 - RNA, 19 nt, Human
cugaggugcaguaagaggc

SEQ ID NO: 985477 - RNA, 22 nt, Human
ccuggccacucagguguggggc

SEQ ID NO: 985478 - RNA, 22 nt, Human
cuggccaagcuucucuaagcag

SEQ ID NO: 985479 - RNA, 22 nt, Human
ucuccugguuuguuaaauaauu

SEQ ID NO: 985480 - RNA, 22 nt, Human
cauugcacuuuggguccaggac

SEQ ID NO: 985481 - RNA, 22 nt, Human
ucaguuuugauuccugguucuc

SEQ ID NO: 985482 - RNA, 22 nt, Human
ugguuuauuucucugaaagguu

SEQ ID NO: 985483 - RNA, 21 nt, Human
ugcagcagaguaagcagggga

SEQ ID NO: 985484 - RNA, 22 nt, Human
augggaguuuucucugaugcuc

SEQ ID NO: 985485 - RNA, 22 nt, Human
ugcaugcauaaauguacacaca

SEQ ID NO: 985486 - RNA, 22 nt, Human
cuuagaaauuguuacucauuca

SEQ ID NO: 985487 - RNA, 22 nt, Human
ugcccaaguguuuggcugaguc

SEQ ID NO: 985488 - RNA, 23 nt, Human
aggaacugaggccuagggaggua

SEQ ID NO: 985489 - RNA, 22 nt, Human
ucuuucagccacuuaccugucu

SEQ ID NO: 985490 - RNA, 21 nt, Human
agggagcuauuuauaguaagc

SEQ ID NO: 985491 - RNA, 22 nt, Human
ugcucuggguccugggccuccu

SEQ ID NO: 985492 - RNA, 22 nt, Human
uggcuggacagugggcagugga

SEQ ID NO: 985493 - RNA, 22 nt, Human
ugauggcuaucccuggaagggc

SEQ ID NO: 985494 - RNA, 22 nt, Human
uccucaggcggugaggaggggc

SEQ ID NO: 985495 - RNA, 22 nt, Human
uggcagcugauuagauggugcc

SEQ ID NO: 985496 - RNA, 22 nt, Human
acagaaauauucguggugcuug

SEQ ID NO: 985497 - RNA, 21 nt, Human
ugaggcuguuguaccagggag

SEQ ID NO: 985498 - RNA, 22 nt, Human
ugcagcauuauucacaguagcc

SEQ ID NO: 985499 - RNA, 22 nt, Human
agccuggagcuugaguuaugag

SEQ ID NO: 985500 - RNA, 16 nt, Human
gggcugggggauucug

SEQ ID NO: 985501 - RNA, 22 nt, Human
cugcagugaaaucaggaagcaa

SEQ ID NO: 985502 - RNA, 22 nt, Human
uucagagaugacaccugguguu

SEQ ID NO: 985503 - RNA, 22 nt, Human
ugagcuucaaaauaugugaauc

SEQ ID NO: 985504 - RNA, 22 nt, Human
aagucacagcuaaauagcuaag

SEQ ID NO: 985505 - RNA, 22 nt, Human
cucuggagguggagguugcagu

SEQ ID NO: 985506 - RNA, 22 nt, Human
uggucaaauuuagucucuggaa

SEQ ID NO: 985507 - RNA, 22 nt, Human
aaagaacagauguguggugcau

SEQ ID NO: 985508 - RNA, 22 nt, Human
aucaguuuggaacauucaggcc

SEQ ID NO: 985509 - RNA, 22 nt, Human
cagucccaguuugagacucugg

SEQ ID NO: 985510 - RNA, 22 nt, Human
caggcccugggcaggaucagcc

SEQ ID NO: 985511 - RNA, 22 nt, Human
cagugggcugugauggauucac

SEQ ID NO: 985512 - RNA, 22 nt, Human
uggcucuguuuuaugaguacca

SEQ ID NO: 985513 - RNA, 22 nt, Human
agugcacagcgugauguauugg

SEQ ID NO: 985514 - RNA, 22 nt, Human
gcugggagcccuggucugcucc

SEQ ID NO: 985515 - RNA, 21 nt, Human
uucagcaagcacucuggacac

SEQ ID NO: 985516 - RNA, 22 nt, Human
ucagccucucugaguccagacc

SEQ ID NO: 985517 - RNA, 22 nt, Human
gcagagccccauugcuggcggg

SEQ ID NO: 985518 - RNA, 22 nt, Human
auguacacaugcaugcaugugc

SEQ ID NO: 985519 - RNA, 22 nt, Human
ccucugaguccucccugguugc

SEQ ID NO: 985520 - RNA, 22 nt, Human
uagaaacaucagcuaaccaaaa

SEQ ID NO: 985521 - RNA, 22 nt, Human
cugcucucuguuccccuggauc

SEQ ID NO: 985522 - RNA, 20 nt, Human
agugcaagaaagcacagcug

SEQ ID NO: 985523 - RNA, 22 nt, Human
agguacaguagacagacaguua

SEQ ID NO: 985524 - RNA, 22 nt, Human
cugagauggccacugggucuca

SEQ ID NO: 985525 - RNA, 22 nt, Human
agggucugacaaugugacuuag

SEQ ID NO: 985526 - RNA, 22 nt, Human
aaguucaagaucaagguuccag

SEQ ID NO: 985527 - RNA, 22 nt, Human
gcagauggacuguaugaccuga

SEQ ID NO: 985528 - RNA, 22 nt, Human
gcagccagaagacucagaacaa

SEQ ID NO: 985529 - RNA, 22 nt, Human
ccugagccugaguggugcaggg

SEQ ID NO: 985530 - RNA, 22 nt, Human
ccagggcugcugugggacucca

SEQ ID NO: 985531 - RNA, 22 nt, Human
cuccugggagucuuccuggaug

SEQ ID NO: 985532 - RNA, 22 nt, Human
agcaguggcuggauggugugcu

SEQ ID NO: 985533 - RNA, 22 nt, Human
uggcugaaggaagauucuucua

SEQ ID NO: 985534 - RNA, 22 nt, Human
ccucugggugggaggccgggcg

SEQ ID NO: 985535 - RNA, 22 nt, Human
cuggcucccguuguccuugaag

SEQ ID NO: 985536 - RNA, 22 nt, Human
guuguauagagggcaugaaucu

SEQ ID NO: 985537 - RNA, 22 nt, Human
ggcugcucuucuuggcgaccuc

SEQ ID NO: 985538 - RNA, 22 nt, Human
uggagccugagucagcggaggc

SEQ ID NO: 985539 - RNA, 22 nt, Human
uagcacauaacuuagaauaguu

SEQ ID NO: 985540 - RNA, 22 nt, Human
ggcagcauuuagagcacagugu

SEQ ID NO: 985541 - RNA, 22 nt, Human
uauaacacucagaaagaaucau

SEQ ID NO: 985542 - RNA, 22 nt, Human
cccugccucugaagcugcucag

SEQ ID NO: 985543 - RNA, 22 nt, Human
gaagcagcaaguauaggacagg

SEQ ID NO: 985544 - RNA, 22 nt, Human
ucaaaugcggucauggcuuuua

SEQ ID NO: 985545 - RNA, 22 nt, Human
guacaaaguggaccugauagua

SEQ ID NO: 985546 - RNA, 22 nt, Human
acuuccugcaaucguccacucc

SEQ ID NO: 985547 - RNA, 22 nt, Human
aggcuucccagcugagcucagc

SEQ ID NO: 985548 - RNA, 20 nt, Human
ucucaggguucagcaaagua

SEQ ID NO: 985549 - RNA, 19 nt, Human
cuggugcuugagugaguca

SEQ ID NO: 985550 - RNA, 22 nt, Human
ucaggggcccuucccucagcag

SEQ ID NO: 985551 - RNA, 22 nt, Human
auuuacagaugaugcuauuuga

SEQ ID NO: 985552 - RNA, 22 nt, Human
uggcucuguuuguuaacuagac

SEQ ID NO: 985553 - RNA, 22 nt, Human
uaagauaauaaguaugucuaug

SEQ ID NO: 985554 - RNA, 22 nt, Human
cagcccuguccagcagagggug

SEQ ID NO: 985555 - RNA, 22 nt, Human
cagcugccaugacauguccugc

SEQ ID NO: 985556 - RNA, 22 nt, Human
uaacagaagaaaacauauugga

SEQ ID NO: 985557 - RNA, 22 nt, Human
guuugaaaaaagcaguauguaa

SEQ ID NO: 985558 - RNA, 22 nt, Human
gggaggucagggugccugcugg

SEQ ID NO: 985559 - RNA, 22 nt, Human
gcucccugcagcugagaguucc

SEQ ID NO: 985560 - RNA, 22 nt, Human
caguauuuauggcuugaguauu

SEQ ID NO: 985561 - RNA, 19 nt, Human
ugaagcaauaccauuuuug

SEQ ID NO: 985562 - RNA, 22 nt, Human
uugcauguagaauacucaacuu

SEQ ID NO: 985563 - RNA, 22 nt, Human
uaaccuuuguucaauguaagau

SEQ ID NO: 985564 - RNA, 22 nt, Human
gaaaguuuauagguuauauaau

SEQ ID NO: 985565 - RNA, 22 nt, Human
agggcagagagaugaaugggau

SEQ ID NO: 985566 - RNA, 22 nt, Human
cacagcugccauggcugcacuu

SEQ ID NO: 985567 - RNA, 22 nt, Human
ccagcagcagcguccaaggaga

SEQ ID NO: 985568 - RNA, 22 nt, Human
uccuggcccuguggccugcagu

SEQ ID NO: 985569 - RNA, 22 nt, Human
ugaggaugacgauggcaauggc

SEQ ID NO: 985570 - RNA, 22 nt, Human
guuuauuauacaacaaaagcua

SEQ ID NO: 985571 - RNA, 22 nt, Human
aaaugcacagaaaggaugugga

SEQ ID NO: 985572 - RNA, 22 nt, Human
ggaggcccagagaggugaagug

SEQ ID NO: 985573 - RNA, 22 nt, Human
cagcugccccauaaaucacagu

SEQ ID NO: 985574 - RNA, 22 nt, Human
augggcugugagguccggcagg

SEQ ID NO: 985575 - RNA, 22 nt, Human
ccugggagugugccaucucugu

SEQ ID NO: 985576 - RNA, 22 nt, Human
cagugcagaacacauggaaaau

SEQ ID NO: 985577 - RNA, 22 nt, Human
cugaggcugcccagggccaggu

SEQ ID NO: 985578 - RNA, 22 nt, Human
ccagcagcucccucaggguccg

SEQ ID NO: 985579 - RNA, 22 nt, Human
gccccagcucugccacaacuag

SEQ ID NO: 985580 - RNA, 22 nt, Human
gcaaggcuuugugaauuuuaaa

SEQ ID NO: 985581 - RNA, 22 nt, Human
agccaggggauucaucagggac

SEQ ID NO: 985582 - RNA, 22 nt, Human
gcagaggcuccauuuuacagau

SEQ ID NO: 985583 - RNA, 22 nt, Human
ucaaguguaguggugucagguc

SEQ ID NO: 985584 - RNA, 22 nt, Human
uggcacugaccccaggccugug

SEQ ID NO: 985585 - RNA, 22 nt, Human
ccugggcauaaaucacuccaag

SEQ ID NO: 985586 - RNA, 22 nt, Human
cagaggcugggaccucaggcau

SEQ ID NO: 985587 - RNA, 22 nt, Human
ucaccacugaacagaccuuugg

SEQ ID NO: 985588 - RNA, 22 nt, Human
ugcagcagcagggaggaggcuc

SEQ ID NO: 985589 - RNA, 19 nt, Human
cagaguacaccagauagga

SEQ ID NO: 985590 - RNA, 22 nt, Human
aaguuuguuguacauguuagua

SEQ ID NO: 985591 - RNA, 22 nt, Human
uugcauugaaugcacauuuuua

SEQ ID NO: 985592 - RNA, 22 nt, Human
agcuggccuuagugagcaccug

SEQ ID NO: 985593 - RNA, 22 nt, Human
agcuggccuccgggugccuggg

SEQ ID NO: 985594 - RNA, 20 nt, Human
ccuccuggucaggugugcag

SEQ ID NO: 985595 - RNA, 22 nt, Human
uuuuuaagcuccuuugauguca

SEQ ID NO: 985596 - RNA, 22 nt, Human
caggugcccagcuccugcugug

SEQ ID NO: 985597 - RNA, 22 nt, Human
ugugaaagauacuaggcagagg

SEQ ID NO: 985598 - RNA, 22 nt, Human
aggcccuguuaugagccacugu

SEQ ID NO: 985599 - RNA, 22 nt, Human
ccacagggugucaucagcuuga

SEQ ID NO: 985600 - RNA, 22 nt, Human
aaggccauuauucugauauauu

SEQ ID NO: 985601 - RNA, 22 nt, Human
ucagagucauugcaaguagaag

SEQ ID NO: 985602 - RNA, 19 nt, Human
ucagaggauuuggcuauga

SEQ ID NO: 985603 - RNA, 22 nt, Human
ggggcagaguagcuggggugug

SEQ ID NO: 985604 - RNA, 22 nt, Human
gagaagccgagucagcugagcc

SEQ ID NO: 985605 - RNA, 22 nt, Human
uggcucagaguucaucuuuuag

SEQ ID NO: 985606 - RNA, 22 nt, Human
ucuuuccuuagaauaauucuuu

SEQ ID NO: 985607 - RNA, 23 nt, Human
uacuuaggaauggggacggcaag

SEQ ID NO: 985608 - RNA, 22 nt, Human
caauaaguaauaggcaucuaau

SEQ ID NO: 985609 - RNA, 22 nt, Human
uacaaaguuugggguccucaaa

SEQ ID NO: 985610 - RNA, 22 nt, Human
guguacaugagaaaucaacuuu

SEQ ID NO: 985611 - RNA, 22 nt, Human
gaggagguuccggguggagaag

SEQ ID NO: 985612 - RNA, 22 nt, Human
uggcagaguucgcuccuauuca

SEQ ID NO: 985613 - RNA, 22 nt, Human
uggaaagaugaagauguuuaag

SEQ ID NO: 985614 - RNA, 22 nt, Human
gccuggaggggccaggguggua

SEQ ID NO: 985615 - RNA, 22 nt, Human
agagccaggaucuguuuugggg

SEQ ID NO: 985616 - RNA, 22 nt, Human
cugagcugggacucaguagcaa

SEQ ID NO: 985617 - RNA, 22 nt, Human
uccucagacacccugcuggcuu

SEQ ID NO: 985618 - RNA, 22 nt, Human
ucugccagaaguucugagagua

SEQ ID NO: 985619 - RNA, 22 nt, Human
gaagagcuauguccagggagca

SEQ ID NO: 985620 - RNA, 22 nt, Human
acauuucuuccuaauuaucccu

SEQ ID NO: 985621 - RNA, 22 nt, Human
auaguggugagcugcauuuaug

SEQ ID NO: 985622 - RNA, 18 nt, Human
acaggccucaguccugca

SEQ ID NO: 985623 - RNA, 22 nt, Human
ucacacguccuugcuacuccuc

SEQ ID NO: 985624 - RNA, 22 nt, Human
ucaguuuuuaagaguuaugcga

SEQ ID NO: 985625 - RNA, 22 nt, Human
gccuucugauugcuggacugac

SEQ ID NO: 985626 - RNA, 22 nt, Human
agcaggagagcagugcgugguc

SEQ ID NO: 985627 - RNA, 22 nt, Human
guaucuuuugguggaaaaauaa

SEQ ID NO: 985628 - RNA, 23 nt, Human
uccuucagagccucccuccaagc

SEQ ID NO: 985629 - RNA, 22 nt, Human
cauguuuucuaggcuuucacaa

SEQ ID NO: 985630 - RNA, 22 nt, Human
uuauuuauuguguaccuacugu

SEQ ID NO: 985631 - RNA, 22 nt, Human
aaauuuaagaagugugugcgug

SEQ ID NO: 985632 - RNA, 22 nt, Human
aaugccuuggagagccuagagg

SEQ ID NO: 985633 - RNA, 22 nt, Human
acagugaaugcccaagaaaagu

SEQ ID NO: 985634 - RNA, 22 nt, Human
ucaccagucuuucuuaccauug

SEQ ID NO: 985635 - RNA, 22 nt, Human
uccagccuuucuacucacugag

SEQ ID NO: 985636 - RNA, 22 nt, Human
gagccuggggacccuccugagu

SEQ ID NO: 985637 - RNA, 22 nt, Human
uccuggaggcaaaugagcacau

SEQ ID NO: 985638 - RNA, 22 nt, Human
ggccaaaccgcaauuauuuuug

SEQ ID NO: 985639 - RNA, 22 nt, Human
ggccuguccagccugccuggcu

SEQ ID NO: 985640 - RNA, 22 nt, Human
accugccuucucaaggacauga

SEQ ID NO: 985641 - RNA, 22 nt, Human
gcucugcuguguuuguucagca

SEQ ID NO: 985642 - RNA, 23 nt, Human
uuuuaauuuggacauaagaagau

SEQ ID NO: 985643 - RNA, 22 nt, Human
ccucauggaccucagacugucc

SEQ ID NO: 985644 - RNA, 22 nt, Human
gaaaauguuuguccggagcuga

SEQ ID NO: 985645 - RNA, 20 nt, Human
gggcuggcgcauggggaaag

SEQ ID NO: 985646 - RNA, 22 nt, Human
caugcuccaaaaacaagagaau

SEQ ID NO: 985647 - RNA, 22 nt, Human
guacauuuugagguuaaaacaa

SEQ ID NO: 985648 - RNA, 22 nt, Human
uaugcacauuaucuaauccauu

SEQ ID NO: 985649 - RNA, 22 nt, Human
agguacagcaauauaagagguc

SEQ ID NO: 985650 - RNA, 20 nt, Human
aggcucagagcaguaguaca

SEQ ID NO: 985651 - RNA, 22 nt, Human
ugagcuucuuuauuuggccaga

SEQ ID NO: 985652 - RNA, 22 nt, Human
aaacaugagcacuugcuucaua

SEQ ID NO: 985653 - RNA, 21 nt, Human
ccuggcugcacaguugcuggu

SEQ ID NO: 985654 - RNA, 22 nt, Human
cccagagcugagucugauauau

SEQ ID NO: 985655 - RNA, 22 nt, Human
cuggcucaugugaugagggcaa

SEQ ID NO: 985656 - RNA, 22 nt, Human
cacuacuugaaagaauuacaga

SEQ ID NO: 985657 - RNA, 19 nt, Human
ugcaggaggacugagcaga

SEQ ID NO: 985658 - RNA, 22 nt, Human
gcagcuggcccugacacgcaga

SEQ ID NO: 985659 - RNA, 22 nt, Human
ccuggcugaaccaaugaagugg

SEQ ID NO: 985660 - RNA, 22 nt, Human
uccagggaagagcagaggcuac

SEQ ID NO: 985661 - RNA, 22 nt, Human
ugacccugcuucuuggugcagg

SEQ ID NO: 985662 - RNA, 22 nt, Human
agcucccagagcucgagaguaa

SEQ ID NO: 985663 - RNA, 22 nt, Human
aagugccaucauagcauggcug

SEQ ID NO: 985664 - RNA, 22 nt, Human
acacagggauauuucagguggu

SEQ ID NO: 985665 - RNA, 17 nt, Human
acaagcaguggccaugg

SEQ ID NO: 985666 - RNA, 22 nt, Human
uuuuccucugcaauaaaagcag

SEQ ID NO: 985667 - RNA, 22 nt, Human
gggcuucucccuaaggacucug

SEQ ID NO: 985668 - RNA, 22 nt, Human
cccaagggagugccuggucaac

SEQ ID NO: 985669 - RNA, 22 nt, Human
agccccucuguggcucugccuc

SEQ ID NO: 985670 - RNA, 19 nt, Human
ugagagugaggaaggcuuc

SEQ ID NO: 985671 - RNA, 22 nt, Human
aggcaggcucaggcccaugcuu

SEQ ID NO: 985672 - RNA, 22 nt, Human
ggcugggcucgcugauuggcug

SEQ ID NO: 985673 - RNA, 22 nt, Human
ugcaggugguuuggacacugcu

SEQ ID NO: 985674 - RNA, 22 nt, Human
agagccugggaauuugcauguu

SEQ ID NO: 985675 - RNA, 20 nt, Human
ucugccacuuuuucugucac

SEQ ID NO: 985676 - RNA, 22 nt, Human
ucagaguggugguuuugccuuc

SEQ ID NO: 985677 - RNA, 22 nt, Human
gcugcaggagcuggagcugugg

SEQ ID NO: 985678 - RNA, 22 nt, Human
ucccagagaagagcuggaugga

SEQ ID NO: 985679 - RNA, 22 nt, Human
cugccugggccggccacccucu

SEQ ID NO: 985680 - RNA, 22 nt, Human
gcugcaggcauuuuccugggca

SEQ ID NO: 985681 - RNA, 22 nt, Human
aaaaccaggcguuuccuauuau

SEQ ID NO: 985682 - RNA, 23 nt, Human
agacccagagacuggcucugcuc

SEQ ID NO: 985683 - RNA, 22 nt, Human
cagcuucccuuggcugagcaga

SEQ ID NO: 985684 - RNA, 22 nt, Human
gcuggagcugcagccugggccu

SEQ ID NO: 985685 - RNA, 22 nt, Human
ggagccugacagugcccagcau

SEQ ID NO: 985686 - RNA, 22 nt, Human
gagcacagcuggagguagcauu

SEQ ID NO: 985687 - RNA, 22 nt, Human
ugugaagcuggauccuggagcu

SEQ ID NO: 985688 - RNA, 22 nt, Human
ccaggagcauuaagagaacaua

SEQ ID NO: 985689 - RNA, 22 nt, Human
ucaggcugguggucagauggcu

SEQ ID NO: 985690 - RNA, 21 nt, Human
uagagaaaagaagcuguuccu

SEQ ID NO: 985691 - RNA, 22 nt, Human
acacucuguaaugucacacucc

SEQ ID NO: 985692 - RNA, 22 nt, Human
auaacagagagcuacugaacug

SEQ ID NO: 985693 - RNA, 22 nt, Human
aaugcuguauaucuuagcuaau

SEQ ID NO: 985694 - RNA, 22 nt, Human
augcucugggcaggagcccugg

SEQ ID NO: 985695 - RNA, 22 nt, Human
uucagcaagaccaccauguacc

SEQ ID NO: 985696 - RNA, 22 nt, Human
cagagcugacccaaggauugaa

SEQ ID NO: 985697 - RNA, 22 nt, Human
agagcuguagcuuccuagagcc

SEQ ID NO: 985698 - RNA, 22 nt, Human
ccagggccucguguucugagug

SEQ ID NO: 985699 - RNA, 22 nt, Human
uuugaacaagagcuucacauua

SEQ ID NO: 985700 - RNA, 22 nt, Human
gcucucugggugugucuagaua

SEQ ID NO: 985701 - RNA, 22 nt, Human
uuuuauauugagugagaguucc

SEQ ID NO: 985702 - RNA, 22 nt, Human
ccugccagugaagcugacgggc

SEQ ID NO: 985703 - RNA, 22 nt, Human
cugggcuguaauguggcacuga

SEQ ID NO: 985704 - RNA, 22 nt, Human
ugugcagggaagggcaugcuau

SEQ ID NO: 985705 - RNA, 19 nt, Human
ugagaggcuuaaggcagcu

SEQ ID NO: 985706 - RNA, 22 nt, Human
ugguggccuugauggcaucugc

SEQ ID NO: 985707 - RNA, 22 nt, Human
aggagcccugcgggaggcagag

SEQ ID NO: 985708 - RNA, 22 nt, Human
gagccagcugagcugcacuguc

SEQ ID NO: 985709 - RNA, 18 nt, Human
gucauugcaacauacugu

SEQ ID NO: 985710 - RNA, 22 nt, Human
gaaaucugcuucuugcauagua

SEQ ID NO: 985711 - RNA, 22 nt, Human
ccaaggaguagagcaggaagcu

SEQ ID NO: 985712 - RNA, 22 nt, Human
cacuccuguuccacuaaaugag

SEQ ID NO: 985713 - RNA, 22 nt, Human
auucugucuuuuuaaaauaaua

SEQ ID NO: 985714 - RNA, 22 nt, Human
ccuggagcuuggucacgcugcg

SEQ ID NO: 985715 - RNA, 20 nt, Human
cccuggagagaagcuccacg

SEQ ID NO: 985716 - RNA, 22 nt, Human
ccaaaguccuuucuccaccugc

SEQ ID NO: 985717 - RNA, 22 nt, Human
gcugagucuugagcacugagca

SEQ ID NO: 985718 - RNA, 22 nt, Human
acugaaggcuuaacucuuucau

SEQ ID NO: 985719 - RNA, 22 nt, Human
uguccacaucacucacuuguca

SEQ ID NO: 985720 - RNA, 20 nt, Human
aaucagaaagugugagcucu

SEQ ID NO: 985721 - RNA, 22 nt, Human
agguggagaagagaugggcagu

SEQ ID NO: 985722 - RNA, 22 nt, Human
ggccagagaauaugccuuacgu

SEQ ID NO: 985723 - RNA, 22 nt, Human
cucugcugcccaggccugcuag

SEQ ID NO: 985724 - RNA, 23 nt, Human
aggcugcagaagaauagggucau

SEQ ID NO: 985725 - RNA, 22 nt, Human
ugggauaguggccaggaccccc

SEQ ID NO: 985726 - RNA, 22 nt, Human
acuauacauugaauguuaaggu

SEQ ID NO: 985727 - RNA, 22 nt, Human
ggcugcuugcuguuucuuggau

SEQ ID NO: 985728 - RNA, 22 nt, Human
uaagacauuugaaaugugaucc

SEQ ID NO: 985729 - RNA, 22 nt, Human
gcccagcacagcuggaagaguc

SEQ ID NO: 985730 - RNA, 20 nt, Human
cccugagaccagagagcagc

SEQ ID NO: 985731 - RNA, 22 nt, Human
uguggccaccagagcugcuauu

SEQ ID NO: 985732 - RNA, 22 nt, Human
guuggccugaauggucaagagg

SEQ ID NO: 985733 - RNA, 22 nt, Human
ugccaggcuaaguggaggacuu

SEQ ID NO: 985734 - RNA, 21 nt, Human
agcugcuccagggagcucagg

SEQ ID NO: 985735 - RNA, 22 nt, Human
gggcuguggagccgcgagggcu

SEQ ID NO: 985736 - RNA, 22 nt, Human
cggccaaauugcagagagaagc

SEQ ID NO: 985737 - RNA, 22 nt, Human
caggccucuccuuagucuggca

SEQ ID NO: 985738 - RNA, 22 nt, Human
gcaggggcugcugggaacucgg

SEQ ID NO: 985739 - RNA, 22 nt, Human
ggcagugacuguucagacgucc

SEQ ID NO: 985740 - RNA, 22 nt, Human
cagaagccugccucagaugcac

SEQ ID NO: 985741 - RNA, 22 nt, Human
gcucucugaggugcuggcagag

SEQ ID NO: 985742 - RNA, 22 nt, Human
agccccugggaguagcugcugc

SEQ ID NO: 985743 - RNA, 22 nt, Human
uauugaggauugaggaaagcac

SEQ ID NO: 985744 - RNA, 22 nt, Human
ugcacacaaaugugaacgugcc

SEQ ID NO: 985745 - RNA, 22 nt, Human
ucaggcacugcuuucugauaug

SEQ ID NO: 985746 - RNA, 23 nt, Human
uggagcugacagucagagggagg

SEQ ID NO: 985747 - RNA, 22 nt, Human
ugcugaaaacucaaccauugug

SEQ ID NO: 985748 - RNA, 22 nt, Human
acaguguuuuaugagaauuguu

SEQ ID NO: 985749 - RNA, 22 nt, Human
aagcagccucauuugugguaag

SEQ ID NO: 985750 - RNA, 22 nt, Human
gcacuaaaccaacauguaauaa

SEQ ID NO: 985751 - RNA, 22 nt, Human
acuuccuggcguagcugacauu

SEQ ID NO: 985752 - RNA, 22 nt, Human
ggauuugggcuugcagcagagc

SEQ ID NO: 985753 - RNA, 22 nt, Human
uguaagauauucagcuuauuga

SEQ ID NO: 985754 - RNA, 22 nt, Human
cggggcuguagcacagcugagc

SEQ ID NO: 985755 - RNA, 21 nt, Human
ccccugggagcccugucagua

SEQ ID NO: 985756 - RNA, 22 nt, Human
uccugggcugugugccacucug

SEQ ID NO: 985757 - RNA, 22 nt, Human
aaauaacuuaugaucgucuggc

SEQ ID NO: 985758 - RNA, 22 nt, Human
augcacuaugaugagcuagucu

SEQ ID NO: 985759 - RNA, 22 nt, Human
uaaauguguuagucaugguuuu

SEQ ID NO: 985760 - RNA, 22 nt, Human
ccuggcuguggcggugcucuca

SEQ ID NO: 985761 - RNA, 22 nt, Human
aggccucacucucagagcuucu

SEQ ID NO: 985762 - RNA, 20 nt, Human
gggcaguggcgcuaucucag

SEQ ID NO: 985763 - RNA, 22 nt, Human
uuuaggaucaaugagaaagucu

SEQ ID NO: 985764 - RNA, 22 nt, Human
cccucugaccuccugccacagu

SEQ ID NO: 985765 - RNA, 22 nt, Human
agagcccucucauuggcuuauu

SEQ ID NO: 985766 - RNA, 22 nt, Human
uggcaguguauagguggcuccu

SEQ ID NO: 985767 - RNA, 22 nt, Human
cggggacacacuggcagcuccu

SEQ ID NO: 985768 - RNA, 22 nt, Human
gggagcaggagccugccugcca

SEQ ID NO: 985769 - RNA, 22 nt, Human
gccagguggucuggcuccagag

SEQ ID NO: 985770 - RNA, 22 nt, Human
uuucacauaaauauuaugccua

SEQ ID NO: 985771 - RNA, 22 nt, Human
agggaggagaauggacuccuuc

SEQ ID NO: 985772 - RNA, 17 nt, Human
uagcugccccgaaugcu

SEQ ID NO: 985773 - RNA, 22 nt, Human
cccucugccucugaguaggaca

SEQ ID NO: 985774 - RNA, 22 nt, Human
ucugggcugggagcguguggac

SEQ ID NO: 985775 - RNA, 22 nt, Human
gcagggugaaggucacauagaa

SEQ ID NO: 985776 - RNA, 22 nt, Human
acugugcaugaaccgaaacaaa

SEQ ID NO: 985777 - RNA, 21 nt, Human
gaugaagcaaucuuucuguug

SEQ ID NO: 985778 - RNA, 22 nt, Human
gccugcuguuaacugcaggaau

SEQ ID NO: 985779 - RNA, 22 nt, Human
ucagggacuuacaaaccagaag

SEQ ID NO: 985780 - RNA, 22 nt, Human
gacacuaaaguauaggguaucu

SEQ ID NO: 985781 - RNA, 22 nt, Human
gcacagguugcaaaaguucaca

SEQ ID NO: 985782 - RNA, 22 nt, Human
acauuucuuucuauucaguagc

SEQ ID NO: 985783 - RNA, 22 nt, Human
gaagcagcgaaguggaagggac

SEQ ID NO: 985784 - RNA, 22 nt, Human
cucaaguaagaaacagaauugg

SEQ ID NO: 985785 - RNA, 22 nt, Human
uggccugccccgagauccuggc

SEQ ID NO: 985786 - RNA, 22 nt, Human
cugccucuguugggcauggucu

SEQ ID NO: 985787 - RNA, 22 nt, Human
acucucucacagcuuggcugau

SEQ ID NO: 985788 - RNA, 22 nt, Human
ccagcuggugacauccccaacc

SEQ ID NO: 985789 - RNA, 18 nt, Human
uguuaggaagggcacaca

SEQ ID NO: 985790 - RNA, 22 nt, Human
uuaaguaagaccuuaugucuug

SEQ ID NO: 985791 - RNA, 22 nt, Human
ggcugggcaaacaagacucuuc

SEQ ID NO: 985792 - RNA, 22 nt, Human
cucaggagacaguguccacaug

SEQ ID NO: 985793 - RNA, 22 nt, Human
aagagcuggcucuugcagcagc

SEQ ID NO: 985794 - RNA, 22 nt, Human
ggcccugugguuuugcaaaguc

SEQ ID NO: 985795 - RNA, 22 nt, Human
aucuacaggauuuuacagaguu

SEQ ID NO: 985796 - RNA, 22 nt, Human
cuccugggcucaagugauccuc

SEQ ID NO: 985797 - RNA, 22 nt, Human
acagaauugaaaguauaaucug

SEQ ID NO: 985798 - RNA, 22 nt, Human
ggcucuggugaggguaggagau

SEQ ID NO: 985799 - RNA, 22 nt, Human
uuuuaaucaugcuucuaugucc

SEQ ID NO: 985800 - RNA, 22 nt, Human
ccuuuucuaaucuuaagaaugu

SEQ ID NO: 985801 - RNA, 22 nt, Human
gacagaggcaagaccagaagcc

SEQ ID NO: 985802 - RNA, 22 nt, Human
acugcuuuucagagucugccug

SEQ ID NO: 985803 - RNA, 22 nt, Human
caggagugaaaugaggcccagg

SEQ ID NO: 985804 - RNA, 22 nt, Human
gaggaggaaacccuguuccucu

SEQ ID NO: 985805 - RNA, 21 nt, Human
ccugugugucugacugggcua

SEQ ID NO: 985806 - RNA, 22 nt, Human
uauuauguagaguaaggguuaa

SEQ ID NO: 985807 - RNA, 22 nt, Human
cccagcauuucugggcugcacu

SEQ ID NO: 985808 - RNA, 22 nt, Human
acuggccaggagcuggaaauac

SEQ ID NO: 985809 - RNA, 22 nt, Human
agcagcugaccagugaguccug

SEQ ID NO: 985810 - RNA, 22 nt, Human
gggcagcucuggcugugggaag

SEQ ID NO: 985811 - RNA, 22 nt, Human
agccacaccuguccugccagcu

SEQ ID NO: 985812 - RNA, 22 nt, Human
cuuguggcccauggcuuccugc

SEQ ID NO: 985813 - RNA, 22 nt, Human
ggcugggcuccgggagcaugcg

SEQ ID NO: 985814 - RNA, 22 nt, Human
ucuccuggcucuaaaaggcugu

SEQ ID NO: 985815 - RNA, 17 nt, Human
agccccucagcgucacc

SEQ ID NO: 985816 - RNA, 22 nt, Human
gcaucuucacacaaagccagug

SEQ ID NO: 985817 - RNA, 22 nt, Human
aaaagguuuugaguacaaauau

SEQ ID NO: 985818 - RNA, 22 nt, Human
cucagaguucuccugggaggug

SEQ ID NO: 985819 - RNA, 22 nt, Human
cugggcagugcagcuauagaac

SEQ ID NO: 985820 - RNA, 22 nt, Human
agggcagaggcggacacggaag

SEQ ID NO: 985821 - RNA, 22 nt, Human
cuggcgcaacagaaaaucugga

SEQ ID NO: 985822 - RNA, 22 nt, Human
ccugucucuuucaaucugagag

SEQ ID NO: 985823 - RNA, 22 nt, Human
ucaaauacauggucaaucaacu

SEQ ID NO: 985824 - RNA, 22 nt, Human
gagucaguaauggauaugucau

SEQ ID NO: 985825 - RNA, 22 nt, Human
agagugauggguugugcugacc

SEQ ID NO: 985826 - RNA, 21 nt, Human
aucagcaaaugccugucuccc

SEQ ID NO: 985827 - RNA, 22 nt, Human
gccagccuucuguggccugcaa

SEQ ID NO: 985828 - RNA, 22 nt, Human
accccagcccugcuucugggag

SEQ ID NO: 985829 - RNA, 22 nt, Human
cagagcugauuggauccagaga

SEQ ID NO: 985830 - RNA, 22 nt, Human
uagacacauccguggaagcuuc

SEQ ID NO: 985831 - RNA, 22 nt, Human
ucaaagucucugcuucuguaac

SEQ ID NO: 985832 - RNA, 22 nt, Human
uggcuuccuccagagcaggagg

SEQ ID NO: 985833 - RNA, 22 nt, Human
cugggccuuggauugacacugu

SEQ ID NO: 985834 - RNA, 22 nt, Human
aaauuauuuucagaauggagaa

SEQ ID NO: 985835 - RNA, 22 nt, Human
aaagacauuagauuaacguaca

SEQ ID NO: 985836 - RNA, 22 nt, Human
cacugcuucuggaggaauuugg

SEQ ID NO: 985837 - RNA, 22 nt, Human
aaacacuagcaggaagcacuga

SEQ ID NO: 985838 - RNA, 22 nt, Human
ggcuggccuguguggccgccac

SEQ ID NO: 985839 - RNA, 22 nt, Human
uugaaaggccuguuuauccagc

SEQ ID NO: 985840 - RNA, 22 nt, Human
aaaugcagguaguauuuauuuu

SEQ ID NO: 985841 - RNA, 22 nt, Human
ugcagcuucuccaucuccuugu

SEQ ID NO: 985842 - RNA, 22 nt, Human
uauauuaguggaaugauaugaa

SEQ ID NO: 985843 - RNA, 22 nt, Human
caguuucugggcguucacaggu

SEQ ID NO: 985844 - RNA, 22 nt, Human
caguacuugggggguucuaagu

SEQ ID NO: 985845 - RNA, 22 nt, Human
ggagccagugcccucuggugga

SEQ ID NO: 985846 - RNA, 22 nt, Human
ucaucuaagagucuuacauuua

SEQ ID NO: 985847 - RNA, 22 nt, Human
uucaacuagauuuauacaauuc

SEQ ID NO: 985848 - RNA, 22 nt, Human
augcaguaaaauaggagguaau

SEQ ID NO: 985849 - RNA, 22 nt, Human
cucccacuccuggcucaccaca

SEQ ID NO: 985850 - RNA, 22 nt, Human
aaauguguauaugaaacaugau

SEQ ID NO: 985851 - RNA, 22 nt, Human
auuaggauuugguauggucaua

SEQ ID NO: 985852 - RNA, 22 nt, Human
gagguggguguaucacagguca

SEQ ID NO: 985853 - RNA, 22 nt, Human
uaaaugcagauuccugagccua

SEQ ID NO: 985854 - RNA, 22 nt, Human
aacuucuggauguuucaaaugu

SEQ ID NO: 985855 - RNA, 22 nt, Human
uucaaucauuagaaucucaggc

SEQ ID NO: 985856 - RNA, 22 nt, Human
agagcugggugaagugccauca

SEQ ID NO: 985857 - RNA, 22 nt, Human
caggagugucuccacacagcaa

SEQ ID NO: 985858 - RNA, 22 nt, Human
ucaaauaaugccauucaucauc

SEQ ID NO: 985859 - RNA, 22 nt, Human
ugacuucaaaggcucuacuccu

SEQ ID NO: 985860 - RNA, 22 nt, Human
aggaggugacagccugcaucug

SEQ ID NO: 985861 - RNA, 22 nt, Human
cagcagcuuugccaagucagcc

SEQ ID NO: 985862 - RNA, 22 nt, Human
uaagacacaugcguacaagaua

SEQ ID NO: 985863 - RNA, 22 nt, Human
aguuuagaguucaaauuaguuc

SEQ ID NO: 985864 - RNA, 22 nt, Human
acaguaauauugaugcucguca

SEQ ID NO: 985865 - RNA, 22 nt, Human
ggcucagguuuccuucccagcu

SEQ ID NO: 985866 - RNA, 22 nt, Human
ugugaaaggggucacagggaaa

SEQ ID NO: 985867 - RNA, 22 nt, Human
uauuucuguaugcauaaaagga

SEQ ID NO: 985868 - RNA, 22 nt, Human
caggcagcaucagucugcugua

SEQ ID NO: 985869 - RNA, 22 nt, Human
cucccuggaggugagcuggcac

SEQ ID NO: 985870 - RNA, 19 nt, Human
acucaagucuaaugaaauc

SEQ ID NO: 985871 - RNA, 22 nt, Human
uuaauuuuuauguauagugugu

SEQ ID NO: 985872 - RNA, 22 nt, Human
gaaugcagauggcugguguaug

SEQ ID NO: 985873 - RNA, 22 nt, Human
uucaagauggcugcaaauacuu

SEQ ID NO: 985874 - RNA, 22 nt, Human
gugacucacacaggccugggcu

SEQ ID NO: 985875 - RNA, 22 nt, Human
gcugucaccaaagcaggcacug

SEQ ID NO: 985876 - RNA, 22 nt, Human
agaaauguuacaguuguuauuu

SEQ ID NO: 985877 - RNA, 22 nt, Human
ccuguuuaucuaucuagagaug

SEQ ID NO: 985878 - RNA, 22 nt, Human
gaugugagugguagcugggauu

SEQ ID NO: 985879 - RNA, 22 nt, Human
auaacagaguugggaagugaaa

SEQ ID NO: 985880 - RNA, 22 nt, Human
ucccuggacagccuugccuggg

SEQ ID NO: 985881 - RNA, 23 nt, Human
agcacagacuagaaaggucuuuc

SEQ ID NO: 985882 - RNA, 22 nt, Human
ucucuucuugauuuucacugga

SEQ ID NO: 985883 - RNA, 22 nt, Human
agcucccagcagagcuggccac

SEQ ID NO: 985884 - RNA, 22 nt, Human
gagcagcucugggugacccagu

SEQ ID NO: 985885 - RNA, 22 nt, Human
auuauguauuugguauaguuug

SEQ ID NO: 985886 - RNA, 22 nt, Human
cucaggauuuaaaggggcacuc

SEQ ID NO: 985887 - RNA, 18 nt, Human
gaugggagcaagagaaga

SEQ ID NO: 985888 - RNA, 22 nt, Human
uacaucuagccuuacaauuauu

SEQ ID NO: 985889 - RNA, 22 nt, Human
cagagugagggccugcaccugc

SEQ ID NO: 985890 - RNA, 22 nt, Human
guuugcauaaaguggaugcagg

SEQ ID NO: 985891 - RNA, 22 nt, Human
cagcagcuggugagacacagcc

SEQ ID NO: 985892 - RNA, 22 nt, Human
acugaaauacugcucuuggauu

SEQ ID NO: 985893 - RNA, 22 nt, Human
cugggagggguagccaauccua

SEQ ID NO: 985894 - RNA, 22 nt, Human
ccuggcagcagcacaugccuuc

SEQ ID NO: 985895 - RNA, 22 nt, Human
ccagcuccccucagcagguaau

SEQ ID NO: 985896 - RNA, 22 nt, Human
cugcccugcccaggccuugggc

SEQ ID NO: 985897 - RNA, 22 nt, Human
ccugguccuuacgucauugcuu

SEQ ID NO: 985898 - RNA, 22 nt, Human
auaaggcagucccuuaacaagg

SEQ ID NO: 985899 - RNA, 22 nt, Human
uugaauaauuaauuacacucag

SEQ ID NO: 985900 - RNA, 22 nt, Human
gggaggcuggcucuggccacag

SEQ ID NO: 985901 - RNA, 22 nt, Human
aagaauguucauuaaacuguug

SEQ ID NO: 985902 - RNA, 22 nt, Human
acuccaggguuuugcaccugga

SEQ ID NO: 985903 - RNA, 22 nt, Human
gagcucccaggccccagcaagg

SEQ ID NO: 985904 - RNA, 22 nt, Human
uuucaugugcaauuagcaauau

SEQ ID NO: 985905 - RNA, 22 nt, Human
cacauuucuaggaaauuaaaug

SEQ ID NO: 985906 - RNA, 22 nt, Human
cugcucugacccuuucaccuuc

SEQ ID NO: 985907 - RNA, 22 nt, Human
agagacaggauaucugcucaug

SEQ ID NO: 985908 - RNA, 22 nt, Human
cugggguggauggguccaaguu

SEQ ID NO: 985909 - RNA, 22 nt, Human
cugcagcugucucuacugggca

SEQ ID NO: 985910 - RNA, 22 nt, Human
cuggcucaggaaaguugcugcu

SEQ ID NO: 985911 - RNA, 22 nt, Human
gcccugucccuuggcuucuagg

SEQ ID NO: 985912 - RNA, 22 nt, Human
agccagcugccuuucacaucug

SEQ ID NO: 985913 - RNA, 22 nt, Human
gaggccugucgcuaggccucug

SEQ ID NO: 985914 - RNA, 22 nt, Human
guuuaauaauguugaauuacua

SEQ ID NO: 985915 - RNA, 22 nt, Human
ccuccagcgcgauccacuccgg

SEQ ID NO: 985916 - RNA, 22 nt, Human
ggucccaguccucucccugcua

SEQ ID NO: 985917 - RNA, 22 nt, Human
aacucugcaaccuauguagacc

SEQ ID NO: 985918 - RNA, 22 nt, Human
agcuuaggaggaugaugaacau

SEQ ID NO: 985919 - RNA, 22 nt, Human
agagcccuuucuccaggcaccu

SEQ ID NO: 985920 - RNA, 22 nt, Human
auacauacguacauacguaugu

SEQ ID NO: 985921 - RNA, 19 nt, Human
aguagcagaaagugcagug

SEQ ID NO: 985922 - RNA, 21 nt, Human
ggcagaaguagcauggacggg

SEQ ID NO: 985923 - RNA, 22 nt, Human
cagggugccucccgcucgccgg

SEQ ID NO: 985924 - RNA, 22 nt, Human
aagagcuggaguuugcagcccu

SEQ ID NO: 985925 - RNA, 22 nt, Human
uuccucaucugugcaccucacu

SEQ ID NO: 985926 - RNA, 22 nt, Human
gcccagcugcacccuggugggu

SEQ ID NO: 985927 - RNA, 22 nt, Human
ugauuuccuagcugacaugaaa

SEQ ID NO: 985928 - RNA, 22 nt, Human
uucaagauggcaccagugagug

SEQ ID NO: 985929 - RNA, 22 nt, Human
cagaacauuccaugugcccugc

SEQ ID NO: 985930 - RNA, 19 nt, Human
cccagagcauccugaacuu

SEQ ID NO: 985931 - RNA, 22 nt, Human
cugagccuguguuucucuggca

SEQ ID NO: 985932 - RNA, 22 nt, Human
gugcagcagggggaagacagug

SEQ ID NO: 985933 - RNA, 22 nt, Human
uagcagggaaggugugcugagc

SEQ ID NO: 985934 - RNA, 22 nt, Human
gagggcugccacguugggcgag

SEQ ID NO: 985935 - RNA, 22 nt, Human
agcugggucuugggccaggaga

SEQ ID NO: 985936 - RNA, 22 nt, Human
caggcagccuucucgucucaca

SEQ ID NO: 985937 - RNA, 22 nt, Human
gagagcugcauucucagacaca

SEQ ID NO: 985938 - RNA, 22 nt, Human
caggugggcuugggagaacacu

SEQ ID NO: 985939 - RNA, 22 nt, Human
caggcacugugcuagauccuug

SEQ ID NO: 985940 - RNA, 19 nt, Human
ggucucagugcagcugcag

SEQ ID NO: 985941 - RNA, 22 nt, Human
aaaguuuggauuagcaguuaga

SEQ ID NO: 985942 - RNA, 22 nt, Human
cggcagcuccgcgccguaggac

SEQ ID NO: 985943 - RNA, 22 nt, Human
ugggcucugugccagguuggug

SEQ ID NO: 985944 - RNA, 22 nt, Human
aacucaguucuuuccacaaugc

SEQ ID NO: 985945 - RNA, 22 nt, Human
agcagagcugcaguggccugcu

SEQ ID NO: 985946 - RNA, 22 nt, Human
cuggccuuggaagggagcccgu

SEQ ID NO: 985947 - RNA, 22 nt, Human
ccagaggcuggguucaccucag

SEQ ID NO: 985948 - RNA, 22 nt, Human
gaauguaauagucaguagaaca

SEQ ID NO: 985949 - RNA, 22 nt, Human
caagagcuuuagaaaugcucau

SEQ ID NO: 985950 - RNA, 18 nt, Human
uccagagguguuggagcc

SEQ ID NO: 985951 - RNA, 21 nt, Human
auggagccuaagaguggaggu

SEQ ID NO: 985952 - RNA, 22 nt, Human
guccucaguaagagggccucug

SEQ ID NO: 985953 - RNA, 22 nt, Human
uuucacaucagagguagauuag

SEQ ID NO: 985954 - RNA, 22 nt, Human
cuguuuauuacacuggauagca

SEQ ID NO: 985955 - RNA, 22 nt, Human
cagcaggguagguuguaucagu

SEQ ID NO: 985956 - RNA, 22 nt, Human
ugcugcuccccagcacacagca

SEQ ID NO: 985957 - RNA, 22 nt, Human
uugucuguccaggcaccccaag

SEQ ID NO: 985958 - RNA, 22 nt, Human
aggauaguugugaagauaggcu

SEQ ID NO: 985959 - RNA, 22 nt, Human
uggccuuggacagagcgcuccu

SEQ ID NO: 985960 - RNA, 22 nt, Human
ucagcuggagaugagaaccgaa

SEQ ID NO: 985961 - RNA, 22 nt, Human
gucauuucuguuucuucagugc

SEQ ID NO: 985962 - RNA, 22 nt, Human
gaggcccuccagcugucagcug

SEQ ID NO: 985963 - RNA, 22 nt, Human
agcuggagcuucaagcagguaa

SEQ ID NO: 985964 - RNA, 22 nt, Human
cugagagcagggacuugagcca

SEQ ID NO: 985965 - RNA, 22 nt, Human
ugagguguguccccagggaggu

SEQ ID NO: 985966 - RNA, 22 nt, Human
aaauguguuucuuugugaaugg

SEQ ID NO: 985967 - RNA, 22 nt, Human
acugggaggcaaagagcaagga

SEQ ID NO: 985968 - RNA, 22 nt, Human
cugagaggaugcugcaguggag

SEQ ID NO: 985969 - RNA, 22 nt, Human
acaaggaggucuggggggcccu

SEQ ID NO: 985970 - RNA, 22 nt, Human
caggaccuggaaugcuugugaa

SEQ ID NO: 985971 - RNA, 20 nt, Human
agaauucuuacccuuugaug

SEQ ID NO: 985972 - RNA, 22 nt, Human
uguaugcuuguguauaauauaa

SEQ ID NO: 985973 - RNA, 18 nt, Human
agaguguucucagugaaa

SEQ ID NO: 985974 - RNA, 22 nt, Human
cagagccuuccuagcagacucu

SEQ ID NO: 985975 - RNA, 22 nt, Human
agggcugcaggcaagauauggc

SEQ ID NO: 985976 - RNA, 22 nt, Human
gauaugaaguggcauugugaag

SEQ ID NO: 985977 - RNA, 22 nt, Human
gagagaagggggauaugagccu

SEQ ID NO: 985978 - RNA, 22 nt, Human
auacaaagacaaaucucaaucu

SEQ ID NO: 985979 - RNA, 22 nt, Human
caugggcuacagaagcaugcug

SEQ ID NO: 985980 - RNA, 22 nt, Human
ugcucagacaagcugaacagua

SEQ ID NO: 985981 - RNA, 22 nt, Human
ugggcagaggcagcagaaaccu

SEQ ID NO: 985982 - RNA, 22 nt, Human
gacaggguacgggcuaggcaca

SEQ ID NO: 985983 - RNA, 22 nt, Human
uuugcauugcagugguuuacag

SEQ ID NO: 985984 - RNA, 22 nt, Human
gccuggaguuguggugaagcca

SEQ ID NO: 985985 - RNA, 22 nt, Human
aaggcacuugcccagagcugca

SEQ ID NO: 985986 - RNA, 22 nt, Human
agccacaggaaacagagacagc

SEQ ID NO: 985987 - RNA, 23 nt, Human
aaaugcagggucgcagguuacag

SEQ ID NO: 985988 - RNA, 22 nt, Human
gggagccuugggagugccagcc

SEQ ID NO: 985989 - RNA, 22 nt, Human
agaaaucaugacuaagagcagu

SEQ ID NO: 985990 - RNA, 19 nt, Human
gcaggcacagcccugggug

SEQ ID NO: 985991 - RNA, 22 nt, Human
gcugcaggcgccugcggucucu

SEQ ID NO: 985992 - RNA, 22 nt, Human
uggcacauaguaggugcucaau

SEQ ID NO: 985993 - RNA, 22 nt, Human
aagcaggcauuccagagacaau

SEQ ID NO: 985994 - RNA, 22 nt, Human
ucccagacaaucauuggccacc

SEQ ID NO: 985995 - RNA, 22 nt, Human
cauuaugugggaaaauguucuu

SEQ ID NO: 985996 - RNA, 20 nt, Human
cucucuggaaggugggagcc

SEQ ID NO: 985997 - RNA, 22 nt, Human
agcugagccagcagcaacagga

SEQ ID NO: 985998 - RNA, 22 nt, Human
uccuggaggggacagcaugggc

SEQ ID NO: 985999 - RNA, 22 nt, Human
ucaacagaagugauagcuauua

SEQ ID NO: 986000 - RNA, 22 nt, Human
cagcuggcagaaccugcaucca

SEQ ID NO: 986001 - RNA, 22 nt, Human
agcauuuaugacuaauguaaaa

SEQ ID NO: 986002 - RNA, 22 nt, Human
cuuagaaauaaugguuucaguu

SEQ ID NO: 986003 - RNA, 22 nt, Human
gggcugacucugcacugagcca

SEQ ID NO: 986004 - RNA, 22 nt, Human
cacauuugaaggaauuagcauu

SEQ ID NO: 986005 - RNA, 22 nt, Human
gcuccuggccagcacagggccc

SEQ ID NO: 986006 - RNA, 21 nt, Human
ugcucacagaugugcucagug

SEQ ID NO: 986007 - RNA, 23 nt, Human
gcucugcucuguuucauagacag

SEQ ID NO: 986008 - RNA, 22 nt, Human
ugucuccucauacugucauauu

SEQ ID NO: 986009 - RNA, 22 nt, Human
gaaugcacucacccaucacuca

SEQ ID NO: 986010 - RNA, 22 nt, Human
uccuccuucgggacugcuugac

SEQ ID NO: 986011 - RNA, 23 nt, Human
ugcuucucugcuugacaguucug

SEQ ID NO: 986012 - RNA, 22 nt, Human
cacccaggcagguggcugagaa

SEQ ID NO: 986013 - RNA, 20 nt, Human
uccugggguaagccaugguc

SEQ ID NO: 986014 - RNA, 22 nt, Human
agaauaaacugcuuuagggcag

SEQ ID NO: 986015 - RNA, 22 nt, Human
agcagccaagguaaccugugcu

SEQ ID NO: 986016 - RNA, 22 nt, Human
caguugaugggacucauguggg

SEQ ID NO: 986017 - RNA, 22 nt, Human
uguacacaauucuuaacauaca

SEQ ID NO: 986018 - RNA, 22 nt, Human
ccagagcuccagggcuacagaa

SEQ ID NO: 986019 - RNA, 22 nt, Human
gagccagccuucuucugagguc

SEQ ID NO: 986020 - RNA, 22 nt, Human
ucagcagggagaggagaaugca

SEQ ID NO: 986021 - RNA, 20 nt, Human
ugagugauggaggcggguca

SEQ ID NO: 986022 - RNA, 22 nt, Human
ugggcagacgggagcuugccuu

SEQ ID NO: 986023 - RNA, 22 nt, Human
guccugggcccaggggcugccu

SEQ ID NO: 986024 - RNA, 22 nt, Human
ccucagagaaagguauggcuga

SEQ ID NO: 986025 - RNA, 22 nt, Human
uuauguacucugcaauguuuga

SEQ ID NO: 986026 - RNA, 22 nt, Human
ggcacugauuccauucaugaag

SEQ ID NO: 986027 - RNA, 22 nt, Human
gugggcuucuguuagggaggcu

SEQ ID NO: 986028 - RNA, 22 nt, Human
agcagcugagccccagcuguga

SEQ ID NO: 986029 - RNA, 22 nt, Human
ugccuggguguaaagggccaac

SEQ ID NO: 986030 - RNA, 22 nt, Human
caggaggcccaaagggcgcaga

SEQ ID NO: 986031 - RNA, 22 nt, Human
ccagggugugagaaggaaguag

SEQ ID NO: 986032 - RNA, 22 nt, Human
gggcacuguacacugugcaugg

SEQ ID NO: 986033 - RNA, 22 nt, Human
gcuggugcauuagcugcaguuc

SEQ ID NO: 986034 - RNA, 22 nt, Human
guggccaauaggagcagcuauc

SEQ ID NO: 986035 - RNA, 22 nt, Human
guuuuccuucucagccauugcc

SEQ ID NO: 986036 - RNA, 22 nt, Human
gcugccaguguggcaugaugca

SEQ ID NO: 986037 - RNA, 22 nt, Human
agaaaagguugaaaguaggauu

SEQ ID NO: 986038 - RNA, 23 nt, Human
ugauuaggucuacucuuggcucc

SEQ ID NO: 986039 - RNA, 22 nt, Human
gccugggagugcacagugaggu

SEQ ID NO: 986040 - RNA, 22 nt, Human
ccacugggggcugcaggcacuc

SEQ ID NO: 986041 - RNA, 22 nt, Human
caagcagagacuagauagcugu

SEQ ID NO: 986042 - RNA, 21 nt, Human
aagcuucccugcucuccaggg

SEQ ID NO: 986043 - RNA, 21 nt, Human
guauugcagaguuaugugcuc

SEQ ID NO: 986044 - RNA, 22 nt, Human
aagcagccuggacuugggcugg

SEQ ID NO: 986045 - RNA, 22 nt, Human
cuccugagcucugaggaagcuu

SEQ ID NO: 986046 - RNA, 22 nt, Human
uuggaaggugagucccuggguu

SEQ ID NO: 986047 - RNA, 22 nt, Human
caggagcugggucuggaagcag

SEQ ID NO: 986048 - RNA, 22 nt, Human
acugagcugugacaaugcuuaa

SEQ ID NO: 986049 - RNA, 22 nt, Human
ccagcagcuuuauuggcucucc

SEQ ID NO: 986050 - RNA, 22 nt, Human
acacaggggaaaguggagcuga

SEQ ID NO: 986051 - RNA, 22 nt, Human
gugggcuggacccuccugcucc

SEQ ID NO: 986052 - RNA, 22 nt, Human
gcagggccagugcagagaggaa

SEQ ID NO: 986053 - RNA, 22 nt, Human
cagggucuuauaaggccaauuu

SEQ ID NO: 986054 - RNA, 22 nt, Human
gaagaacaccugcugcccagug

SEQ ID NO: 986055 - RNA, 22 nt, Human
ccacaggggcccacgagccgcu

SEQ ID NO: 986056 - RNA, 23 nt, Human
gcugcagcuguggauguucucag

SEQ ID NO: 986057 - RNA, 22 nt, Human
caagagcuagacuuugucagga

SEQ ID NO: 986058 - RNA, 22 nt, Human
ccagagcugauuccugggacuu

SEQ ID NO: 986059 - RNA, 22 nt, Human
aguuacaaccaugacacaagca

SEQ ID NO: 986060 - RNA, 22 nt, Human
aagccaggaagagagccuucac

SEQ ID NO: 986061 - RNA, 22 nt, Human
acucccacuccagaguagaagc

SEQ ID NO: 986062 - RNA, 22 nt, Human
uuggcugagagaggaaaagggc

SEQ ID NO: 986063 - RNA, 22 nt, Human
aacauuucauuggaagcuaugu

SEQ ID NO: 986064 - RNA, 22 nt, Human
caccuuguggcccagucagguu

SEQ ID NO: 986065 - RNA, 22 nt, Human
gcaggcagguggcaucuuguga

SEQ ID NO: 986066 - RNA, 22 nt, Human
aguguacaguuuguaguacuac

SEQ ID NO: 986067 - RNA, 22 nt, Human
gcugcucuacccaugcaucugu

SEQ ID NO: 986068 - RNA, 22 nt, Human
ucucaccaaagccuugaccaua

SEQ ID NO: 986069 - RNA, 22 nt, Human
gagggagagugauggaccauug

SEQ ID NO: 986070 - RNA, 22 nt, Human
uaacuccagagaauccauccau

SEQ ID NO: 986071 - RNA, 22 nt, Human
uccuggagcuuccuucauggua

SEQ ID NO: 986072 - RNA, 22 nt, Human
cauacauugcucauucaguauc

SEQ ID NO: 986073 - RNA, 22 nt, Human
agugaccaacaaugcugagaag

SEQ ID NO: 986074 - RNA, 22 nt, Human
uaaguucaguuggucgaaguag

SEQ ID NO: 986075 - RNA, 22 nt, Human
uuuaucagagauauguguggac

SEQ ID NO: 986076 - RNA, 17 nt, Human
uuccuggaagucauucc

SEQ ID NO: 986077 - RNA, 22 nt, Human
uggcccugaggggcugugcccc

SEQ ID NO: 986078 - RNA, 22 nt, Human
cugggggcaauggucagagugu

SEQ ID NO: 986079 - RNA, 22 nt, Human
gcuggccugggcagccugucgg

SEQ ID NO: 986080 - RNA, 21 nt, Human
acagaugggaugagcacacug

SEQ ID NO: 986081 - RNA, 21 nt, Human
ucucuacacuuucacuaggcu

SEQ ID NO: 986082 - RNA, 22 nt, Human
caaauauuccagguacaucccu

SEQ ID NO: 986083 - RNA, 19 nt, Human
cucugccucuggcuguggc

SEQ ID NO: 986084 - RNA, 22 nt, Human
ccuuucucuuugcugaucaugu

SEQ ID NO: 986085 - RNA, 22 nt, Human
cugggccagucucggccgcucu

SEQ ID NO: 986086 - RNA, 22 nt, Human
uaaugcaguacugauauaaaca

SEQ ID NO: 986087 - RNA, 22 nt, Human
gggagggaggugcugguucacg

SEQ ID NO: 986088 - RNA, 20 nt, Human
aggauuugagaaggcgucuu

SEQ ID NO: 986089 - RNA, 22 nt, Human
uaggaaaagucuagauugauga

SEQ ID NO: 986090 - RNA, 22 nt, Human
ugaagcagcaccauuuuagagc

SEQ ID NO: 986091 - RNA, 22 nt, Human
cuaauacucauuucuguaacuc

SEQ ID NO: 986092 - RNA, 22 nt, Human
caacuccuccccagcaugccaa

SEQ ID NO: 986093 - RNA, 22 nt, Human
uuugggcaguagauguaucacu

SEQ ID NO: 986094 - RNA, 22 nt, Human
uccucaugccgggucucacgcu

SEQ ID NO: 986095 - RNA, 22 nt, Human
agccaacuaggagauuaaggua

SEQ ID NO: 986096 - RNA, 22 nt, Human
accagcagaguugaggaggaca

SEQ ID NO: 986097 - RNA, 22 nt, Human
cagguggggcgcccucaggcag

SEQ ID NO: 986098 - RNA, 22 nt, Human
ugcauuauacuuuuagaaauuu

SEQ ID NO: 986099 - RNA, 20 nt, Human
uuggccaaaucuuagucaug

SEQ ID NO: 986100 - RNA, 22 nt, Human
aaaaaguauuggccaugguuga

SEQ ID NO: 986101 - RNA, 22 nt, Human
agcuuccuuggcgcugaggccu

SEQ ID NO: 986102 - RNA, 18 nt, Human
ugaacagaugaguugaag

SEQ ID NO: 986103 - RNA, 23 nt, Human
acuuaaaugguucuuuaucucag

SEQ ID NO: 986104 - RNA, 22 nt, Human
ucccacugcuuugcucugcuca

SEQ ID NO: 986105 - RNA, 22 nt, Human
gucaaguuuauccgcucauuca

SEQ ID NO: 986106 - RNA, 23 nt, Human
ucagugauguugaaccuagcagu

SEQ ID NO: 986107 - RNA, 22 nt, Human
uggcugaacuaaugugcuguuu

SEQ ID NO: 986108 - RNA, 22 nt, Human
augcuuuacaguuuuccaaaca

SEQ ID NO: 986109 - RNA, 22 nt, Human
uugaagcauuucuuugagcuuc

SEQ ID NO: 986110 - RNA, 22 nt, Human
uggcagcuggagggcaauggcc

SEQ ID NO: 986111 - RNA, 22 nt, Human
cucuggaggccuaaggaagugg

SEQ ID NO: 986112 - RNA, 22 nt, Human
ccaggcugcuuagccuuaucuu

SEQ ID NO: 986113 - RNA, 22 nt, Human
uaaggcacccauguucauacag

SEQ ID NO: 986114 - RNA, 22 nt, Human
guuauguaaucuaacacucagu

SEQ ID NO: 986115 - RNA, 22 nt, Human
ucugccuggauuuuggaaagcu

SEQ ID NO: 986116 - RNA, 22 nt, Human
acugcagccuugaacucugggc

SEQ ID NO: 986117 - RNA, 20 nt, Human
gaggcugcggacugcuggac

SEQ ID NO: 986118 - RNA, 22 nt, Human
gagcagcuccagccgcaugacu

SEQ ID NO: 986119 - RNA, 22 nt, Human
gcauuucuuccuggugugagcc

SEQ ID NO: 986120 - RNA, 22 nt, Human
cugucugucaaguucaucucca

SEQ ID NO: 986121 - RNA, 22 nt, Human
ucugcuguugccaugaguaaua

SEQ ID NO: 986122 - RNA, 22 nt, Human
uccagugguaguaaagaggucu

SEQ ID NO: 986123 - RNA, 22 nt, Human
ugcugaggucaccuugcugcua

SEQ ID NO: 986124 - RNA, 22 nt, Human
gccccuggcuggccagcuccuc

SEQ ID NO: 986125 - RNA, 22 nt, Human
acagauauaugauuguguaaau

SEQ ID NO: 986126 - RNA, 22 nt, Human
aagugagauuauauguacggga

SEQ ID NO: 986127 - RNA, 18 nt, Human
agcagagcccaugcauuc

SEQ ID NO: 986128 - RNA, 22 nt, Human
cagcaauaagguaagcuucucc

SEQ ID NO: 986129 - RNA, 22 nt, Human
ucugaggcuaagagacagaggc

SEQ ID NO: 986130 - RNA, 22 nt, Human
acuugaaaggaagcucuaaaac

SEQ ID NO: 986131 - RNA, 22 nt, Human
uuuugaaagaguccugcuacag

SEQ ID NO: 986132 - RNA, 22 nt, Human
cagcaggcccaggugcugguga

SEQ ID NO: 986133 - RNA, 22 nt, Human
uccagagggcgauggcuggggg

SEQ ID NO: 986134 - RNA, 23 nt, Human
gagguacagcaccagugaauagg

SEQ ID NO: 986135 - RNA, 22 nt, Human
cacugcuuuuuuggcuauguac

SEQ ID NO: 986136 - RNA, 22 nt, Human
ugcagaggagucagccugggca

SEQ ID NO: 986137 - RNA, 22 nt, Human
auggggcucugcggcugcuccc

SEQ ID NO: 986138 - RNA, 22 nt, Human
uaugcacaacaugcagguuugu

SEQ ID NO: 986139 - RNA, 22 nt, Human
ugaggccacuuccccacagccc

SEQ ID NO: 986140 - RNA, 22 nt, Human
gggagggaagguaccuguguga

SEQ ID NO: 986141 - RNA, 22 nt, Human
aggcccugaagucggccccuca

SEQ ID NO: 986142 - RNA, 23 nt, Human
caguacuuaguguagcguuaauu

SEQ ID NO: 986143 - RNA, 22 nt, Human
gggcccacuggcugucugaccc

SEQ ID NO: 986144 - RNA, 22 nt, Human
cuuaacagauacaucugugguu

SEQ ID NO: 986145 - RNA, 22 nt, Human
gagcuggcaggaggcuccccga

SEQ ID NO: 986146 - RNA, 22 nt, Human
gaggccuggagccgccuaggcg

SEQ ID NO: 986147 - RNA, 22 nt, Human
ggcuggcaagugucugcucaug

SEQ ID NO: 986148 - RNA, 22 nt, Human
ucaugccacuuacaaaauaaug

SEQ ID NO: 986149 - RNA, 22 nt, Human
acucugcucuuauaguguuaua

SEQ ID NO: 986150 - RNA, 22 nt, Human
uuucucaucuggaaacagugcu

SEQ ID NO: 986151 - RNA, 22 nt, Human
uaaaacugaauacauacugagg

SEQ ID NO: 986152 - RNA, 22 nt, Human
auaaacaucuguuucucuucug

SEQ ID NO: 986153 - RNA, 22 nt, Human
ugggggacugcacuggcgucag

SEQ ID NO: 986154 - RNA, 22 nt, Human
agcagggguaacagaaggaaag

SEQ ID NO: 986155 - RNA, 22 nt, Human
agagcuuauaucuuggccaucc

SEQ ID NO: 986156 - RNA, 21 nt, Human
gccugccugcgugacccucuu

SEQ ID NO: 986157 - RNA, 22 nt, Human
uccucuggcccagcugccucug

SEQ ID NO: 986158 - RNA, 22 nt, Human
caccguuugguuuggauuuaca

SEQ ID NO: 986159 - RNA, 22 nt, Human
gacagagaggcugagcaguaca

SEQ ID NO: 986160 - RNA, 22 nt, Human
gcugaagggagugcugagucug

SEQ ID NO: 986161 - RNA, 22 nt, Human
uaguaucuauuaguaacaagag

SEQ ID NO: 986162 - RNA, 22 nt, Human
ucucagagaggggccgggccuu

SEQ ID NO: 986163 - RNA, 22 nt, Human
aaggcucucugauggcagcagu

SEQ ID NO: 986164 - RNA, 22 nt, Human
cucucuggaccucaacuauuuu

SEQ ID NO: 986165 - RNA, 22 nt, Human
agucucagaaaauaugcuuuuu

SEQ ID NO: 986166 - RNA, 22 nt, Human
ugguaucagagccaucuguauu

SEQ ID NO: 986167 - RNA, 22 nt, Human
ccuauugacaauucucuucucc

SEQ ID NO: 986168 - RNA, 22 nt, Human
ccucucauagucuguauccuuu

SEQ ID NO: 986169 - RNA, 22 nt, Human
gugcagggcuggcaccggaggc

SEQ ID NO: 986170 - RNA, 22 nt, Human
uucuuauucuugaaauguggga

SEQ ID NO: 986171 - RNA, 22 nt, Human
cugccgagugggucaugaggca

SEQ ID NO: 986172 - RNA, 22 nt, Human
agaaguauaaagaauguuuaug

SEQ ID NO: 986173 - RNA, 22 nt, Human
cccaggagguggagguugcagc

SEQ ID NO: 986174 - RNA, 22 nt, Human
cuguccauuuucgugccuccuu

SEQ ID NO: 986175 - RNA, 22 nt, Human
uccagcagguccgagacaaguu

SEQ ID NO: 986176 - RNA, 22 nt, Human
agggcagcagcuccuccuagcu

SEQ ID NO: 986177 - RNA, 22 nt, Human
cccagcccaucucaaaggucua

SEQ ID NO: 986178 - RNA, 22 nt, Human
gagagcacaugaacauggagga

SEQ ID NO: 986179 - RNA, 21 nt, Human
aggagcuguguuagcuggucg

SEQ ID NO: 986180 - RNA, 22 nt, Human
caacaaguggguacuuuacagg

SEQ ID NO: 986181 - RNA, 22 nt, Human
aagcacaaugaacaucuuagau

SEQ ID NO: 986182 - RNA, 22 nt, Human
cguggccagccauuuccuggaa

SEQ ID NO: 986183 - RNA, 22 nt, Human
aucaggaucagggcuagcagag

SEQ ID NO: 986184 - RNA, 22 nt, Human
ccaucuccacugucccugucaa

SEQ ID NO: 986185 - RNA, 22 nt, Human
uugaaagggauauaucuuucug

SEQ ID NO: 986186 - RNA, 22 nt, Human
caagagcuggagaggcagucua

SEQ ID NO: 986187 - RNA, 22 nt, Human
agucuuaacuaugcaaguacua

SEQ ID NO: 986188 - RNA, 22 nt, Human
aagagcugcaucuaagccauga

SEQ ID NO: 986189 - RNA, 22 nt, Human
uaggauguagcuaugucaucau

SEQ ID NO: 986190 - RNA, 22 nt, Human
ccugccuggaucagccauccug

SEQ ID NO: 986191 - RNA, 22 nt, Human
auugaaagcauggauuuggauu

SEQ ID NO: 986192 - RNA, 22 nt, Human
uacuuuuagccuauuugauucu

SEQ ID NO: 986193 - RNA, 20 nt, Human
cagagacccaggcuucagcu

SEQ ID NO: 986194 - RNA, 22 nt, Human
aagcuuccugaaugcucauuua

SEQ ID NO: 986195 - RNA, 22 nt, Human
aggauccuuuuucugcuguuug

SEQ ID NO: 986196 - RNA, 20 nt, Human
guaaaauauggucuuugggu

SEQ ID NO: 986197 - RNA, 22 nt, Human
aggcacugugcagucccaagca

SEQ ID NO: 986198 - RNA, 21 nt, Human
caugcaggauuuaaccuagaa

SEQ ID NO: 986199 - RNA, 22 nt, Human
auugacaagacaauggcucuua

SEQ ID NO: 986200 - RNA, 17 nt, Human
aguggcaggcagauggg

SEQ ID NO: 986201 - RNA, 22 nt, Human
caggggcucugggugaugugag

SEQ ID NO: 986202 - RNA, 22 nt, Human
aaacugaauucccaagggcaug

SEQ ID NO: 986203 - RNA, 19 nt, Human
agcaccugugagagccugg

SEQ ID NO: 986204 - RNA, 21 nt, Human
ccuggccaaucugauaggguu

SEQ ID NO: 986205 - RNA, 22 nt, Human
ucuuuccuaggugauaugcaau

SEQ ID NO: 986206 - RNA, 22 nt, Human
cucuggccagagccugcgggaa

SEQ ID NO: 986207 - RNA, 22 nt, Human
cugcagagcauaaaucugaaua

SEQ ID NO: 986208 - RNA, 22 nt, Human
agaaggaguguacaggucaugc

SEQ ID NO: 986209 - RNA, 22 nt, Human
uugggcugaacccugcagcuga

SEQ ID NO: 986210 - RNA, 22 nt, Human
cugcaggcugagcgccugccgg

SEQ ID NO: 986211 - RNA, 22 nt, Human
uccagaguacggaagagucauc

SEQ ID NO: 986212 - RNA, 22 nt, Human
auguaguguagagauuagucuc

SEQ ID NO: 986213 - RNA, 22 nt, Human
uuccauaauaaccugagagaaa

SEQ ID NO: 986214 - RNA, 22 nt, Human
gcugagcucccagcaguaucug

SEQ ID NO: 986215 - RNA, 19 nt, Human
uccccagcaccucugaguc

SEQ ID NO: 986216 - RNA, 18 nt, Human
augcuuugcuuacguuau

SEQ ID NO: 986217 - RNA, 22 nt, Human
uagccgggugugguggaacucc

SEQ ID NO: 986218 - RNA, 22 nt, Human
cccuggaguagcacugggucgc

SEQ ID NO: 986219 - RNA, 16 nt, Human
gcucugcugaggccca

SEQ ID NO: 986220 - RNA, 22 nt, Human
cucacugucuguacuagcugau

SEQ ID NO: 986221 - RNA, 22 nt, Human
caggcugggaacgccacccgcu

SEQ ID NO: 986222 - RNA, 22 nt, Human
cuggccugaucucaugcugucc

SEQ ID NO: 986223 - RNA, 22 nt, Human
ggaaggaggggcaaagcaguuc

SEQ ID NO: 986224 - RNA, 22 nt, Human
ggccgggcaggucucagccagc

SEQ ID NO: 986225 - RNA, 22 nt, Human
acagagaaagugggcugaagau

SEQ ID NO: 986226 - RNA, 22 nt, Human
agcuugaguuuuggaugaagug

SEQ ID NO: 986227 - RNA, 22 nt, Human
uuauuuauggcacuguuggugg

SEQ ID NO: 986228 - RNA, 22 nt, Human
gcagagcuaucuucuggauuug

SEQ ID NO: 986229 - RNA, 23 nt, Human
gccucuggagccccagugcucag

SEQ ID NO: 986230 - RNA, 22 nt, Human
auggggcugggauucuccucgg

SEQ ID NO: 986231 - RNA, 19 nt, Human
gcugcucugggucucaucu

SEQ ID NO: 986232 - RNA, 22 nt, Human
gagauggggaauaggagcaagc

SEQ ID NO: 986233 - RNA, 22 nt, Human
ggcuccugggaugggacugagc

SEQ ID NO: 986234 - RNA, 22 nt, Human
cuggggugugcucagagcaggg

SEQ ID NO: 986235 - RNA, 22 nt, Human
caaauaucuuuggcaaagagaa

SEQ ID NO: 986236 - RNA, 22 nt, Human
ugcugaggagguggcugugcuu

SEQ ID NO: 986237 - RNA, 23 nt, Human
ccugaagggucaggguccucagc

SEQ ID NO: 986238 - RNA, 18 nt, Human
agcugcagaccaggaggu

SEQ ID NO: 986239 - RNA, 22 nt, Human
gcagaagggaauaaggagcuuu

SEQ ID NO: 986240 - RNA, 22 nt, Human
aggagcugacuuguaaagcauu

SEQ ID NO: 986241 - RNA, 22 nt, Human
gccaggcagccacccucugcga

SEQ ID NO: 986242 - RNA, 19 nt, Human
gcagccaccgcggcggccg

SEQ ID NO: 986243 - RNA, 22 nt, Human
ucuggcucacuucaggcuucac

SEQ ID NO: 986244 - RNA, 20 nt, Human
gucucagaauggauuugcau

SEQ ID NO: 986245 - RNA, 22 nt, Human
gcuggagguuucaccugaguuu

SEQ ID NO: 986246 - RNA, 22 nt, Human
ggcucagguuaccagucccucc

SEQ ID NO: 986247 - RNA, 22 nt, Human
aucaguuuauacuuauaaaucu

SEQ ID NO: 986248 - RNA, 22 nt, Human
auguuuaagaaagucuuccaua

SEQ ID NO: 986249 - RNA, 22 nt, Human
ugaggcuguucuaccagggcca

SEQ ID NO: 986250 - RNA, 22 nt, Human
ggcuucaccgcgggguugcagg

SEQ ID NO: 986251 - RNA, 22 nt, Human
uggagcagcuaagccucugaga

SEQ ID NO: 986252 - RNA, 22 nt, Human
acagggccauuaucuguucuag

SEQ ID NO: 986253 - RNA, 22 nt, Human
agggaauguagcaagaugccaa

SEQ ID NO: 986254 - RNA, 22 nt, Human
auugagaauccauuugagauga

SEQ ID NO: 986255 - RNA, 23 nt, Human
aucagucuugguagcugugccca

SEQ ID NO: 986256 - RNA, 21 nt, Human
uggaaagauucaaagaccagg

SEQ ID NO: 986257 - RNA, 22 nt, Human
ucugucugagggagugacauuu

SEQ ID NO: 986258 - RNA, 22 nt, Human
aggaaaaaagucugugauuaua

SEQ ID NO: 986259 - RNA, 22 nt, Human
aaguuaugaaauuuggacagcu

SEQ ID NO: 986260 - RNA, 22 nt, Human
uacaguucacaguaucauaaau

SEQ ID NO: 986261 - RNA, 22 nt, Human
gaaagaggaaggagauguauua

SEQ ID NO: 986262 - RNA, 23 nt, Human
cauggcagcaagagcucauggcc

SEQ ID NO: 986263 - RNA, 22 nt, Human
aaggagaaaugguagaugugca

SEQ ID NO: 986264 - RNA, 22 nt, Human
ucacaaaucauuuuaucugugu

SEQ ID NO: 986265 - RNA, 22 nt, Human
cugggccacaagccugugugau

SEQ ID NO: 986266 - RNA, 22 nt, Human
cagcaggguuaagugacucacc

SEQ ID NO: 986267 - RNA, 22 nt, Human
ccagagccggauugugaagugc

SEQ ID NO: 986268 - RNA, 17 nt, Human
agauggcaggaggcaga

SEQ ID NO: 986269 - RNA, 22 nt, Human
cagugcauaaucuaaauggggg

SEQ ID NO: 986270 - RNA, 22 nt, Human
agagcugaaaaagcugacccgg

SEQ ID NO: 986271 - RNA, 22 nt, Human
aacugcauucagaaagcucacu

SEQ ID NO: 986272 - RNA, 22 nt, Human
acuuagaacaggcagaauucca

SEQ ID NO: 986273 - RNA, 22 nt, Human
ugggacagggaaucugaucccc

SEQ ID NO: 986274 - RNA, 22 nt, Human
uuuuaucugcuucauuaguuga

SEQ ID NO: 986275 - RNA, 22 nt, Human
guggagaccuccuaggaugugu

SEQ ID NO: 986276 - RNA, 22 nt, Human
acagaauucucucugcagaggc

SEQ ID NO: 986277 - RNA, 22 nt, Human
aacuagaaaacaagaugcugau

SEQ ID NO: 986278 - RNA, 22 nt, Human
gggaguguugagcgcccugcca

SEQ ID NO: 986279 - RNA, 22 nt, Human
uugaauucauuucucauugagu

SEQ ID NO: 986280 - RNA, 22 nt, Human
gcccucagaugggaaaggaggg

SEQ ID NO: 986281 - RNA, 22 nt, Human
ucagaaauagucuuuaaaauga

SEQ ID NO: 986282 - RNA, 22 nt, Human
gcugggagaggcccugaaguga

SEQ ID NO: 986283 - RNA, 22 nt, Human
ggcagagacuggguuggcagag

SEQ ID NO: 986284 - RNA, 22 nt, Human
cucugguguccuuuagaauuua

SEQ ID NO: 986285 - RNA, 22 nt, Human
uaagaacaagauguuccuguuu

SEQ ID NO: 986286 - RNA, 22 nt, Human
guguaauugaaauugagaacca

SEQ ID NO: 986287 - RNA, 22 nt, Human
uguacaguaggaacuuguuauu

SEQ ID NO: 986288 - RNA, 22 nt, Human
caggcagccugagggaucuggg

SEQ ID NO: 986289 - RNA, 22 nt, Human
uaacagaaauuuuaguuagggg

SEQ ID NO: 986290 - RNA, 22 nt, Human
gagguauguaugcuacauucuu

SEQ ID NO: 986291 - RNA, 22 nt, Human
ucauucagguugggcaaguguc

SEQ ID NO: 986292 - RNA, 22 nt, Human
ucacugcagagaccucuaguca

SEQ ID NO: 986293 - RNA, 22 nt, Human
aauuugcaugaugagaacaaua

SEQ ID NO: 986294 - RNA, 21 nt, Human
auuguuaucauugugcugugu

SEQ ID NO: 986295 - RNA, 22 nt, Human
caaaugcuggcccugcuacuua

SEQ ID NO: 986296 - RNA, 22 nt, Human
aaugcugcaagaggugaaaaga

SEQ ID NO: 986297 - RNA, 22 nt, Human
ccagaggcauguucaaagcaau

SEQ ID NO: 986298 - RNA, 17 nt, Human
ugagaaguaggcaucau

SEQ ID NO: 986299 - RNA, 22 nt, Human
ucugccagugguuuggcccuga

SEQ ID NO: 986300 - RNA, 22 nt, Human
caccucuuugauuugaggcaag

SEQ ID NO: 986301 - RNA, 22 nt, Human
ggaaggagggcggcaaugauga

SEQ ID NO: 986302 - RNA, 23 nt, Human
uaguuauuuucucuguaauuugc

SEQ ID NO: 986303 - RNA, 22 nt, Human
gcguaaggccucuggucucgga

SEQ ID NO: 986304 - RNA, 22 nt, Human
gggcuuggcacaugggcucagc

SEQ ID NO: 986305 - RNA, 22 nt, Human
agggcugccauuucuggcccaa

SEQ ID NO: 986306 - RNA, 22 nt, Human
auagucacucuguuagguguuu

SEQ ID NO: 986307 - RNA, 22 nt, Human
aggcccuguccauggugcugaa

SEQ ID NO: 986308 - RNA, 22 nt, Human
cuuuggaagugaccacaauccu

SEQ ID NO: 986309 - RNA, 22 nt, Human
cugggcagccucacacaauguu

SEQ ID NO: 986310 - RNA, 22 nt, Human
uagagcuagcuucaaaaugcga

SEQ ID NO: 986311 - RNA, 20 nt, Human
gccagcacagggagcaguuc

SEQ ID NO: 986312 - RNA, 22 nt, Human
uggagcccagggugagaaggag

SEQ ID NO: 986313 - RNA, 22 nt, Human
caugggaggucugcaaggugcu

SEQ ID NO: 986314 - RNA, 22 nt, Human
guacauguugguuguuuccagu

SEQ ID NO: 986315 - RNA, 22 nt, Human
gacagggcauggugcagaguuc

SEQ ID NO: 986316 - RNA, 22 nt, Human
guggcugcuaagucuccuuccu

SEQ ID NO: 986317 - RNA, 22 nt, Human
uaacugauauugaaaaacauca

SEQ ID NO: 986318 - RNA, 22 nt, Human
agggaagagcuugcaagaaacc

SEQ ID NO: 986319 - RNA, 17 nt, Human
gagugcugguggagcuc

SEQ ID NO: 986320 - RNA, 22 nt, Human
ucuccuggaagugauuccccug

SEQ ID NO: 986321 - RNA, 22 nt, Human
cgcugccaggauccccugccgg

SEQ ID NO: 986322 - RNA, 22 nt, Human
ggcucuggaaaguguccuugau

SEQ ID NO: 986323 - RNA, 21 nt, Human
cucacaggaugcaguguuacu

SEQ ID NO: 986324 - RNA, 22 nt, Human
ugugaaagucaaauuaauugaa

SEQ ID NO: 986325 - RNA, 22 nt, Human
cucaguuucugacauuaaaauc

SEQ ID NO: 986326 - RNA, 22 nt, Human
gucagugucuuaacagagauua

SEQ ID NO: 986327 - RNA, 22 nt, Human
aggggcugccuggcuuggcacu

SEQ ID NO: 986328 - RNA, 22 nt, Human
gucaucuugcuguuuuagaucu

SEQ ID NO: 986329 - RNA, 22 nt, Human
accagagcuuacaugcuagaaa

SEQ ID NO: 986330 - RNA, 22 nt, Human
ccugggcuucugucuagauguu

SEQ ID NO: 986331 - RNA, 22 nt, Human
agccacagcccacaggacucuu

SEQ ID NO: 986332 - RNA, 22 nt, Human
agucucugccagcuuguccucu

SEQ ID NO: 986333 - RNA, 21 nt, Human
gcagcaguguucuagaauacu

SEQ ID NO: 986334 - RNA, 22 nt, Human
cugccuguuagucuagcaguua

SEQ ID NO: 986335 - RNA, 22 nt, Human
uugcaaauuccaauccaauauu

SEQ ID NO: 986336 - RNA, 22 nt, Human
aagcgccaugguuccugcgcag

SEQ ID NO: 986337 - RNA, 22 nt, Human
agauuuagacugccuuaaucau

SEQ ID NO: 986338 - RNA, 22 nt, Human
aagcagccaccucaucuccacu

SEQ ID NO: 986339 - RNA, 22 nt, Human
uugaaauacugcauuguucagu

SEQ ID NO: 986340 - RNA, 22 nt, Human
guauuagguuggugcaaaauug

SEQ ID NO: 986341 - RNA, 22 nt, Human
ggucugaguggugcugacucag

SEQ ID NO: 986342 - RNA, 23 nt, Human
uucaaaacuggaaaaucagaugc

SEQ ID NO: 986343 - RNA, 22 nt, Human
aauguucaguagaauaggaaug

SEQ ID NO: 986344 - RNA, 22 nt, Human
gcuggagccuucugcucuguug

SEQ ID NO: 986345 - RNA, 22 nt, Human
caaaugcaaaauauaacccugu

SEQ ID NO: 986346 - RNA, 22 nt, Human
uggcacauagcagguacucagu

SEQ ID NO: 986347 - RNA, 22 nt, Human
ccugagugaauucccucacugu

SEQ ID NO: 986348 - RNA, 22 nt, Human
ugggggagauugugcaucucua

SEQ ID NO: 986349 - RNA, 22 nt, Human
gcagcuggacccacacggcuua

SEQ ID NO: 986350 - RNA, 22 nt, Human
ucaggagagaaagaauacaauu

SEQ ID NO: 986351 - RNA, 22 nt, Human
aacaucagaauauccauguugg

SEQ ID NO: 986352 - RNA, 20 nt, Human
gcugccuguuucuguaagua

SEQ ID NO: 986353 - RNA, 22 nt, Human
cuuccugggcaauguucugcuu

SEQ ID NO: 986354 - RNA, 20 nt, Human
ugugcccaauguccagguuc

SEQ ID NO: 986355 - RNA, 23 nt, Human
ucugggcaccuuguugacaugau

SEQ ID NO: 986356 - RNA, 22 nt, Human
ggcagcuuuuaucccugacaga

SEQ ID NO: 986357 - RNA, 20 nt, Human
ggccuuggccucuuugcagc

SEQ ID NO: 986358 - RNA, 22 nt, Human
accuacccuuagaucacaaggg

SEQ ID NO: 986359 - RNA, 22 nt, Human
ucaucaaagucaaagaaugacu

SEQ ID NO: 986360 - RNA, 22 nt, Human
cuggcucacuagcccugcccug

SEQ ID NO: 986361 - RNA, 23 nt, Human
ucugucaccuauggcugcucuuc

SEQ ID NO: 986362 - RNA, 22 nt, Human
acaugucaauuuaguacucuua

SEQ ID NO: 986363 - RNA, 19 nt, Human
cugggccagagcuguccuc

SEQ ID NO: 986364 - RNA, 22 nt, Human
aaaucaguaaauguucauuaac

SEQ ID NO: 986365 - RNA, 22 nt, Human
ggcuucugaaaucucugugcgu

SEQ ID NO: 986366 - RNA, 22 nt, Human
uugcaggggaaggagcagagcu

SEQ ID NO: 986367 - RNA, 22 nt, Human
accucugcaacccuggaauggg

SEQ ID NO: 986368 - RNA, 22 nt, Human
gcuggggagggcgucaaggcca

SEQ ID NO: 986369 - RNA, 22 nt, Human
uagcagugccaggauuuugcug

SEQ ID NO: 986370 - RNA, 22 nt, Human
auagugguuggauaugucagag

SEQ ID NO: 986371 - RNA, 22 nt, Human
agccugagugcuuaggacuguu

SEQ ID NO: 986372 - RNA, 22 nt, Human
acagaggccccgugggagagcc

SEQ ID NO: 986373 - RNA, 22 nt, Human
guccucuggccuuucccaggac

SEQ ID NO: 986374 - RNA, 22 nt, Human
cugcagcuauauuuucccacag

SEQ ID NO: 986375 - RNA, 22 nt, Human
cuggccagacuacacaugugug

SEQ ID NO: 986376 - RNA, 22 nt, Human
aacauuucagcaccugauuccu

SEQ ID NO: 986377 - RNA, 22 nt, Human
agcugguggauuaugcuguaca

SEQ ID NO: 986378 - RNA, 22 nt, Human
cacucugcagcugaagggcugg

SEQ ID NO: 986379 - RNA, 22 nt, Human
agaggcugucccuugcuauucc

SEQ ID NO: 986380 - RNA, 21 nt, Human
aaacugaccuugccugagaca

SEQ ID NO: 986381 - RNA, 22 nt, Human
ucacuguauuugcugaugcaua

SEQ ID NO: 986382 - RNA, 22 nt, Human
ucaacacucuuuggcacaguua

SEQ ID NO: 986383 - RNA, 22 nt, Human
cauuuucucaaugaacccucuu

SEQ ID NO: 986384 - RNA, 22 nt, Human
acaccuuucagguccagacagu

SEQ ID NO: 986385 - RNA, 18 nt, Human
uguuccaaggaaggaauc

SEQ ID NO: 986386 - RNA, 22 nt, Human
cuucuuaaagauuacacaauga

SEQ ID NO: 986387 - RNA, 19 nt, Human
ucaaugcaugaaaucagcc

SEQ ID NO: 986388 - RNA, 22 nt, Human
uacauauagacaguuacucuag

SEQ ID NO: 986389 - RNA, 22 nt, Human
uuugcauuugcaaauaaugaaa

SEQ ID NO: 986390 - RNA, 22 nt, Human
ucuuucucucuaaucaagcaca

SEQ ID NO: 986391 - RNA, 22 nt, Human
guugaaauccuaacccccuagu

SEQ ID NO: 986392 - RNA, 22 nt, Human
aggcagcccacaggacacagga

SEQ ID NO: 986393 - RNA, 22 nt, Human
ccacccagccagaugcaggaag

SEQ ID NO: 986394 - RNA, 22 nt, Human
gcagggacgccagggacagcaa

SEQ ID NO: 986395 - RNA, 22 nt, Human
gcuggucacucugggagcugcu

SEQ ID NO: 986396 - RNA, 22 nt, Human
ugaagcagcuucuuucugucaa

SEQ ID NO: 986397 - RNA, 20 nt, Human
aggcacuggggauagguaag

SEQ ID NO: 986398 - RNA, 22 nt, Human
cucuggaguucucaugaggaac

SEQ ID NO: 986399 - RNA, 22 nt, Human
caaagguauaaguuaauauaca

SEQ ID NO: 986400 - RNA, 22 nt, Human
uuuucauuguaaaucaggaaac

SEQ ID NO: 986401 - RNA, 22 nt, Human
ucaaauaugugauagaagcuaa

SEQ ID NO: 986402 - RNA, 22 nt, Human
cuggcucaccuccgcuccagca

SEQ ID NO: 986403 - RNA, 22 nt, Human
ccgggcgggggcucucgucacc

SEQ ID NO: 986404 - RNA, 22 nt, Human
ucaggccacggcucacugagac

SEQ ID NO: 986405 - RNA, 22 nt, Human
gcugagagcaguguggccuuaa

SEQ ID NO: 986406 - RNA, 22 nt, Human
gcacugaacuuuaaucauuucu

SEQ ID NO: 986407 - RNA, 22 nt, Human
aagugacaccucuucccuuucc

SEQ ID NO: 986408 - RNA, 22 nt, Human
aaucaguuaaauauugaguaca

SEQ ID NO: 986409 - RNA, 22 nt, Human
agauuguagaaacuguagcauu

SEQ ID NO: 986410 - RNA, 22 nt, Human
ucuguuccauguuuuguuccau

SEQ ID NO: 986411 - RNA, 22 nt, Human
ugcugggcuugaaagcugcuaa

SEQ ID NO: 986412 - RNA, 22 nt, Human
ccagaggugccacagaaagagc

SEQ ID NO: 986413 - RNA, 22 nt, Human
agaaugcaagauaaacuuuauu

SEQ ID NO: 986414 - RNA, 22 nt, Human
guccugucccccaaggcugugg

SEQ ID NO: 986415 - RNA, 22 nt, Human
uagaacagaggguugcccagau

SEQ ID NO: 986416 - RNA, 22 nt, Human
guuaggauauggugaaauggag

SEQ ID NO: 986417 - RNA, 22 nt, Human
gccugcuggcuguccauugcag

SEQ ID NO: 986418 - RNA, 22 nt, Human
cuggccuggagccucugggugg

SEQ ID NO: 986419 - RNA, 22 nt, Human
cugccuguuuucugauagauuu

SEQ ID NO: 986420 - RNA, 22 nt, Human
uugaacagcuguuacauuguua

SEQ ID NO: 986421 - RNA, 22 nt, Human
aggauccuguauggagaagcug

SEQ ID NO: 986422 - RNA, 22 nt, Human
ccuggcagcgccgaagcuggcc

SEQ ID NO: 986423 - RNA, 22 nt, Human
ccacagaguuacaaaacaguca

SEQ ID NO: 986424 - RNA, 22 nt, Human
cccaggagauggagguugcagu

SEQ ID NO: 986425 - RNA, 22 nt, Human
cccugagcccauaguugacauu

SEQ ID NO: 986426 - RNA, 22 nt, Human
uuccagaauuuuguucugcuug

SEQ ID NO: 986427 - RNA, 22 nt, Human
ugaauggucacugagcaucugu

SEQ ID NO: 986428 - RNA, 22 nt, Human
agcagagcccuuccauggccuu

SEQ ID NO: 986429 - RNA, 22 nt, Human
aaccaggugacucauggugagc

SEQ ID NO: 986430 - RNA, 22 nt, Human
ccaaaaaguacauuuaggugug

SEQ ID NO: 986431 - RNA, 22 nt, Human
ccagggcuggguuugucggugu

SEQ ID NO: 986432 - RNA, 22 nt, Human
ucauaaaacacaccagguaguu

SEQ ID NO: 986433 - RNA, 22 nt, Human
auucacauguugaagcccuaac

SEQ ID NO: 986434 - RNA, 22 nt, Human
caugcacagugauaucugaaga

SEQ ID NO: 986435 - RNA, 21 nt, Human
acaggcucuggggaugcuggg

SEQ ID NO: 986436 - RNA, 22 nt, Human
gcucccacaaccuucuugcucc

SEQ ID NO: 986437 - RNA, 22 nt, Human
ucucagagugacaaugagaauu

SEQ ID NO: 986438 - RNA, 22 nt, Human
uaugagaaaauaaauaucuguu

SEQ ID NO: 986439 - RNA, 22 nt, Human
gugucacaagagcccaggaaac

SEQ ID NO: 986440 - RNA, 22 nt, Human
cuggcugggagcgagcugcuca

SEQ ID NO: 986441 - RNA, 22 nt, Human
guuauguaugggggccuuauga

SEQ ID NO: 986442 - RNA, 22 nt, Human
uucagcaacucaaaccuauuag

SEQ ID NO: 986443 - RNA, 22 nt, Human
acagaaagaagguguauuugag

SEQ ID NO: 986444 - RNA, 18 nt, Human
uugauaaacaauuucauu

SEQ ID NO: 986445 - RNA, 22 nt, Human
gugcuaggauuacaggcauggg

SEQ ID NO: 986446 - RNA, 22 nt, Human
aggcacugaagugguaaaugua

SEQ ID NO: 986447 - RNA, 22 nt, Human
cuuuggcaaugaaacacaagaa

SEQ ID NO: 986448 - RNA, 22 nt, Human
gccuggagccucagcaaggagg

SEQ ID NO: 986449 - RNA, 22 nt, Human
cugucucucuaggacacugggg

SEQ ID NO: 986450 - RNA, 22 nt, Human
gcucugucauuuugcagacacu

SEQ ID NO: 986451 - RNA, 22 nt, Human
guaagagcacugucuccugcug

SEQ ID NO: 986452 - RNA, 22 nt, Human
cccccuggcaggcuggccucuc

SEQ ID NO: 986453 - RNA, 21 nt, Human
ugcuccuuagcugccccugcc

SEQ ID NO: 986454 - RNA, 22 nt, Human
agggccagcccauaaugccaaa

SEQ ID NO: 986455 - RNA, 22 nt, Human
gccugccuguuggcugaggugc

SEQ ID NO: 986456 - RNA, 22 nt, Human
cccuggaguccuggcaguugau

SEQ ID NO: 986457 - RNA, 23 nt, Human
ccagccucugggucuucauccag

SEQ ID NO: 986458 - RNA, 22 nt, Human
auccuugacacacuccaguacu

SEQ ID NO: 986459 - RNA, 22 nt, Human
cauuucuguucucuuccuguac

SEQ ID NO: 986460 - RNA, 22 nt, Human
cugcucacgccaccguucauca

SEQ ID NO: 986461 - RNA, 22 nt, Human
aaagucauuguaauauaugcua

SEQ ID NO: 986462 - RNA, 21 nt, Human
ccugggccaaauucccuggac

SEQ ID NO: 986463 - RNA, 22 nt, Human
aggggagcuaacaccagagccc

SEQ ID NO: 986464 - RNA, 22 nt, Human
aggaaagggguagguguggacg

SEQ ID NO: 986465 - RNA, 23 nt, Human
aggcagagccaaggucaaaaccc

SEQ ID NO: 986466 - RNA, 22 nt, Human
ugccugggccuucccaccucug

SEQ ID NO: 986467 - RNA, 19 nt, Human
gccugggaugggcagaacu

SEQ ID NO: 986468 - RNA, 22 nt, Human
acacuuuacagcuuccuuugca

SEQ ID NO: 986469 - RNA, 22 nt, Human
aaaugccucugcuguacacaau

SEQ ID NO: 986470 - RNA, 22 nt, Human
aggucagaagugccagggaauu

SEQ ID NO: 986471 - RNA, 22 nt, Human
gccaccaggagcccaguccaaa

SEQ ID NO: 986472 - RNA, 22 nt, Human
aggcucagcugguggugaucgc

SEQ ID NO: 986473 - RNA, 22 nt, Human
cucuccagaucugcugagccag

SEQ ID NO: 986474 - RNA, 22 nt, Human
gcaggggaguggaugauggauu

SEQ ID NO: 986475 - RNA, 22 nt, Human
agaggcugagaaacccucuucu

SEQ ID NO: 986476 - RNA, 17 nt, Human
ucugccgacugccagcu

SEQ ID NO: 986477 - RNA, 22 nt, Human
caggccacaaguuggguucaag

SEQ ID NO: 986478 - RNA, 22 nt, Human
ggcugggccagggccuguggac

SEQ ID NO: 986479 - RNA, 22 nt, Human
uccugggaagagaccugagcau

SEQ ID NO: 986480 - RNA, 22 nt, Human
aggcugccaaagcuucugucuc

SEQ ID NO: 986481 - RNA, 22 nt, Human
agggcacagccuaaagccuaug

SEQ ID NO: 986482 - RNA, 22 nt, Human
uggagcuggaauuugagcugga

SEQ ID NO: 986483 - RNA, 22 nt, Human
uuuaguaaguucacugcaaagc

SEQ ID NO: 986484 - RNA, 22 nt, Human
agucucagccacacagaccuau

SEQ ID NO: 986485 - RNA, 22 nt, Human
aguaggaggcgggagcaugaag

SEQ ID NO: 986486 - RNA, 22 nt, Human
aacucaguuacauauuagaaua

SEQ ID NO: 986487 - RNA, 22 nt, Human
uguauguguauguacauaugca

SEQ ID NO: 986488 - RNA, 18 nt, Human
uacaucuauauaguguuu

SEQ ID NO: 986489 - RNA, 22 nt, Human
gagcugaguuaccuccagauca

SEQ ID NO: 986490 - RNA, 22 nt, Human
cugccuggaaggagcaagggga

SEQ ID NO: 986491 - RNA, 22 nt, Human
cuggcagcuggaggcuagaggc

SEQ ID NO: 986492 - RNA, 22 nt, Human
ugcuugagacacauaugaauuu

SEQ ID NO: 986493 - RNA, 22 nt, Human
ggcagcacugcagcuuguuggg

SEQ ID NO: 986494 - RNA, 19 nt, Human
ugggcuuccccagggcaga

SEQ ID NO: 986495 - RNA, 22 nt, Human
ugggccuguugccugaguccau

SEQ ID NO: 986496 - RNA, 22 nt, Human
aaggcccuggccccagcuucuu

SEQ ID NO: 986497 - RNA, 22 nt, Human
cagcagugugcaggugugcugg

SEQ ID NO: 986498 - RNA, 22 nt, Human
ugccuggaugugcuggccucac

SEQ ID NO: 986499 - RNA, 23 nt, Human
ccuccugggcacaggccugaugg

SEQ ID NO: 986500 - RNA, 22 nt, Human
gauuucaaagguucugcaugcc

SEQ ID NO: 986501 - RNA, 22 nt, Human
aaggcagccgugugacugcaug

SEQ ID NO: 986502 - RNA, 22 nt, Human
agaguguuucagucuuccuaga

SEQ ID NO: 986503 - RNA, 22 nt, Human
uggcucagaagaaaagguaaac

SEQ ID NO: 986504 - RNA, 22 nt, Human
gcugccugccuugccuggagga

SEQ ID NO: 986505 - RNA, 22 nt, Human
acauugaucagccucccaugca

SEQ ID NO: 986506 - RNA, 22 nt, Human
agcagccaggaaucugcagagc

SEQ ID NO: 986507 - RNA, 22 nt, Human
gcugccugaagugucuacacug

SEQ ID NO: 986508 - RNA, 22 nt, Human
gauucugagcugguguuuuacg

SEQ ID NO: 986509 - RNA, 22 nt, Human
ggccugaggcaauagucagaca

SEQ ID NO: 986510 - RNA, 22 nt, Human
ucuuuauuuuaugcuugugcaa

SEQ ID NO: 986511 - RNA, 22 nt, Human
aaaucugguucaguaaguccuc

SEQ ID NO: 986512 - RNA, 22 nt, Human
gcucugggaacugacugccuuc

SEQ ID NO: 986513 - RNA, 22 nt, Human
gggccucugugcagaggggccu

SEQ ID NO: 986514 - RNA, 22 nt, Human
cugccuggagcauucugaaggu

SEQ ID NO: 986515 - RNA, 22 nt, Human
agggcagcuagcuguagaaaga

SEQ ID NO: 986516 - RNA, 22 nt, Human
aggaccuguaccucagcaucua

SEQ ID NO: 986517 - RNA, 22 nt, Human
aagccaggcugcacuugcuggg

SEQ ID NO: 986518 - RNA, 22 nt, Human
uaaaaguggauaagcuguagga

SEQ ID NO: 986519 - RNA, 22 nt, Human
guuuuguugcugcagagcucaa

SEQ ID NO: 986520 - RNA, 22 nt, Human
uaggauaugugaaaucauauua

SEQ ID NO: 986521 - RNA, 22 nt, Human
ugcagcucauugcuggggucug

SEQ ID NO: 986522 - RNA, 23 nt, Human
auggagcugguacuagcuaccuc

SEQ ID NO: 986523 - RNA, 22 nt, Human
acugucuucaaaugaauauauu

SEQ ID NO: 986524 - RNA, 22 nt, Human
gcugcuucucugauggagucca

SEQ ID NO: 986525 - RNA, 22 nt, Human
cuggcugccacuucagggucuu

SEQ ID NO: 986526 - RNA, 22 nt, Human
agcaguggccuggggcucugug

SEQ ID NO: 986527 - RNA, 22 nt, Human
cuggcagcgguuugcagccugg

SEQ ID NO: 986528 - RNA, 22 nt, Human
ugggcucauggcccagcacugg

SEQ ID NO: 986529 - RNA, 22 nt, Human
ggcuucuccccuuugagucuuc

SEQ ID NO: 986530 - RNA, 22 nt, Human
ugcuuccuauccacacaaugcc

SEQ ID NO: 986531 - RNA, 22 nt, Human
ccaggcugggcuacaaguugag

SEQ ID NO: 986532 - RNA, 23 nt, Human
cauguacacacagcuguacagug

SEQ ID NO: 986533 - RNA, 22 nt, Human
aaugaugggaaggagaaaagca

SEQ ID NO: 986534 - RNA, 22 nt, Human
ggagccaggggaccuucacaga

SEQ ID NO: 986535 - RNA, 22 nt, Human
uggccuccccuaacagccucuu

SEQ ID NO: 986536 - RNA, 22 nt, Human
ugccuguccugaggaugagggu

SEQ ID NO: 986537 - RNA, 22 nt, Human
ucccacugugaauccaaggccu

SEQ ID NO: 986538 - RNA, 22 nt, Human
uggccugcagaggcuguggggc

SEQ ID NO: 986539 - RNA, 23 nt, Human
aguuccagaaaaaugcucaagca

SEQ ID NO: 986540 - RNA, 22 nt, Human
aaauguagaccuauagggaccu

SEQ ID NO: 986541 - RNA, 22 nt, Human
acagagcauauaaagugcuuug

SEQ ID NO: 986542 - RNA, 22 nt, Human
uauguacauaacaugaaaugca

SEQ ID NO: 986543 - RNA, 22 nt, Human
aacuccagugucagcugcaaug

SEQ ID NO: 986544 - RNA, 22 nt, Human
ucacauacacuaggauauuuuu

SEQ ID NO: 986545 - RNA, 22 nt, Human
cuguuuauagcagagcaagccu

SEQ ID NO: 986546 - RNA, 22 nt, Human
gcaguggauccaaugguaucuu

SEQ ID NO: 986547 - RNA, 22 nt, Human
aauguguguauuucuaggcgag

SEQ ID NO: 986548 - RNA, 22 nt, Human
ggugaaggcacaagagggcaag

SEQ ID NO: 986549 - RNA, 22 nt, Human
aaaucaguucucccuuucuuca

SEQ ID NO: 986550 - RNA, 22 nt, Human
agaagcugccuacaugaccagc

SEQ ID NO: 986551 - RNA, 22 nt, Human
uggcagcauguuauguaaggaa

SEQ ID NO: 986552 - RNA, 22 nt, Human
cgcaccacugaauuccagccug

SEQ ID NO: 986553 - RNA, 21 nt, Human
cucucugcuuaugaauaguga

SEQ ID NO: 986554 - RNA, 23 nt, Human
caugggagugagaaugccagcuc

SEQ ID NO: 986555 - RNA, 22 nt, Human
gucagcugucuccccagagugg

SEQ ID NO: 986556 - RNA, 22 nt, Human
uagaaauguuagauguauugag

SEQ ID NO: 986557 - RNA, 22 nt, Human
uggcucaggauaauuuucccaa

SEQ ID NO: 986558 - RNA, 22 nt, Human
auaaggcagugacuucaucuau

SEQ ID NO: 986559 - RNA, 22 nt, Human
uacauuccacuagugacuggcg

SEQ ID NO: 986560 - RNA, 19 nt, Human
cugaggcccauguaccaug

SEQ ID NO: 986561 - RNA, 21 nt, Human
agacagaacaacugcucucca

SEQ ID NO: 986562 - RNA, 22 nt, Human
gccuguccacuaaacagccaag

SEQ ID NO: 986563 - RNA, 22 nt, Human
cuggcucagugccuucagaagu

SEQ ID NO: 986564 - RNA, 19 nt, Human
agugucaucagcuacucag

SEQ ID NO: 986565 - RNA, 22 nt, Human
aaaugaccagaauacaggcuuc

SEQ ID NO: 986566 - RNA, 21 nt, Human
uggccucccacacuuccaugg

SEQ ID NO: 986567 - RNA, 22 nt, Human
acaaagucuuuuacaacaguca

SEQ ID NO: 986568 - RNA, 22 nt, Human
ccagccaguccagcauuggugu

SEQ ID NO: 986569 - RNA, 22 nt, Human
cuuggcagcuuuuggaggagcc

SEQ ID NO: 986570 - RNA, 22 nt, Human
uggcucaggcuugaaaauagau

SEQ ID NO: 986571 - RNA, 22 nt, Human
ugccucuguggaaauggugguc

SEQ ID NO: 986572 - RNA, 22 nt, Human
uguauguaaaguuuguaauaga

SEQ ID NO: 986573 - RNA, 22 nt, Human
aaagauuuaugaaguucaauua

SEQ ID NO: 986574 - RNA, 22 nt, Human
agaggcuguuacacucccagau

SEQ ID NO: 986575 - RNA, 22 nt, Human
agcaauauuucagcuagcaggu

SEQ ID NO: 986576 - RNA, 22 nt, Human
uggagcugguaaacagugacau

SEQ ID NO: 986577 - RNA, 19 nt, Human
gcugugccucucuccugcu

SEQ ID NO: 986578 - RNA, 22 nt, Human
uccuggccuagcucacccugga

SEQ ID NO: 986579 - RNA, 22 nt, Human
ccagcucucagcgggagacuca

SEQ ID NO: 986580 - RNA, 22 nt, Human
aggagucauaaaugugaacaaa

SEQ ID NO: 986581 - RNA, 22 nt, Human
cugcccugagggccuguguguu

SEQ ID NO: 986582 - RNA, 22 nt, Human
acacugcagaugaaagcauaag

SEQ ID NO: 986583 - RNA, 20 nt, Human
aaaauauguauaacucuucu

SEQ ID NO: 986584 - RNA, 22 nt, Human
uuguaacagguacuaaauaacu

SEQ ID NO: 986585 - RNA, 22 nt, Human
aggcagaggaaggguggauuug

SEQ ID NO: 986586 - RNA, 22 nt, Human
uggccuguggcuuaaggucugu

SEQ ID NO: 986587 - RNA, 22 nt, Human
uuugcaaaaugucuuguguuag

SEQ ID NO: 986588 - RNA, 22 nt, Human
uuuuccucugagcuuugaauaa

SEQ ID NO: 986589 - RNA, 22 nt, Human
gcucugagauugagccuuuggu

SEQ ID NO: 986590 - RNA, 22 nt, Human
cuggagccugcaguuuucacuu

SEQ ID NO: 986591 - RNA, 22 nt, Human
ccaggcagagggauccccaucc

SEQ ID NO: 986592 - RNA, 22 nt, Human
auuuauuauugugguuacuucu

SEQ ID NO: 986593 - RNA, 20 nt, Human
ucugugugccaucaccuaac

SEQ ID NO: 986594 - RNA, 22 nt, Human
ccaggagcuggagggugcagug

SEQ ID NO: 986595 - RNA, 22 nt, Human
augaaaacuuuagccucauuag

SEQ ID NO: 986596 - RNA, 22 nt, Human
uggccaagaaugauaugugaag

SEQ ID NO: 986597 - RNA, 22 nt, Human
ucugagccaccugccagugcug

SEQ ID NO: 986598 - RNA, 22 nt, Human
ccugccagcccgcguucaugcc

SEQ ID NO: 986599 - RNA, 22 nt, Human
gggagggacacaaagaguuccc

SEQ ID NO: 986600 - RNA, 22 nt, Human
uagaaaugauugguugagcucu

SEQ ID NO: 986601 - RNA, 22 nt, Human
agcaugaaagcauaggacaguc

SEQ ID NO: 986602 - RNA, 22 nt, Human
cugcugucuuuauuucacugcu

SEQ ID NO: 986603 - RNA, 22 nt, Human
gcacagaagagcuuuggaauga

SEQ ID NO: 986604 - RNA, 22 nt, Human
ugagguaggugguaagagauac

SEQ ID NO: 986605 - RNA, 22 nt, Human
guggccagcaagugcugccucu

SEQ ID NO: 986606 - RNA, 22 nt, Human
caggaaagggaugggcugccac

SEQ ID NO: 986607 - RNA, 22 nt, Human
aagaauguucuuguagucauga

SEQ ID NO: 986608 - RNA, 22 nt, Human
cuggccuuuagccccagugucu

SEQ ID NO: 986609 - RNA, 22 nt, Human
ccuccuggagcauuggugagga

SEQ ID NO: 986610 - RNA, 22 nt, Human
caguacuucuuggaaacuggau

SEQ ID NO: 986611 - RNA, 21 nt, Human
uggcugccuacaugcugcagg

SEQ ID NO: 986612 - RNA, 22 nt, Human
ggcauggcuggguucuggugag

SEQ ID NO: 986613 - RNA, 22 nt, Human
uaaagacaugguguaggugaac

SEQ ID NO: 986614 - RNA, 20 nt, Human
uaacagaaguagaagugggu

SEQ ID NO: 986615 - RNA, 22 nt, Human
ccccuuccacagugcuuccuaa

SEQ ID NO: 986616 - RNA, 22 nt, Human
ucaaaacaaucauuggaugugc

SEQ ID NO: 986617 - RNA, 22 nt, Human
guuuauuauucaacuucauguu

SEQ ID NO: 986618 - RNA, 22 nt, Human
gccagcaguauguccuggcagu

SEQ ID NO: 986619 - RNA, 22 nt, Human
ucuucuuccuccacagggccca

SEQ ID NO: 986620 - RNA, 22 nt, Human
agucaguguucuccggagaggc

SEQ ID NO: 986621 - RNA, 22 nt, Human
acagccagaggugguccugggu

SEQ ID NO: 986622 - RNA, 22 nt, Human
cguggccuuugagugagcuccc

SEQ ID NO: 986623 - RNA, 22 nt, Human
ucuuuacacaagacaagaauaa

SEQ ID NO: 986624 - RNA, 22 nt, Human
gcuggccugcgagggcaggcug

SEQ ID NO: 986625 - RNA, 22 nt, Human
ugcagccaucgcagagucugua

SEQ ID NO: 986626 - RNA, 22 nt, Human
agaaaugacacacaugagacau

SEQ ID NO: 986627 - RNA, 22 nt, Human
caggugggagccacagcguaca

SEQ ID NO: 986628 - RNA, 19 nt, Human
auaaauaaaaagugggaga

SEQ ID NO: 986629 - RNA, 22 nt, Human
aguuuaauauccuucaacuuuc

SEQ ID NO: 986630 - RNA, 22 nt, Human
aggguggagggagucccugagc

SEQ ID NO: 986631 - RNA, 21 nt, Human
ucacauuucucauggguaaau

SEQ ID NO: 986632 - RNA, 21 nt, Human
auuuggcaaaggcgaugcaca

SEQ ID NO: 986633 - RNA, 22 nt, Human
agcagagucugugugcacuuua

SEQ ID NO: 986634 - RNA, 23 nt, Human
uacauuguggauggaguccuggg

SEQ ID NO: 986635 - RNA, 22 nt, Human
cugaggcucaagggcagguggg

SEQ ID NO: 986636 - RNA, 22 nt, Human
gggccuggcaugcagccccguu

SEQ ID NO: 986637 - RNA, 22 nt, Human
ccagggcauguaacuaauggug

SEQ ID NO: 986638 - RNA, 22 nt, Human
ucccagaggaaauggcagcuga

SEQ ID NO: 986639 - RNA, 22 nt, Human
uuuaaauaggacuccugggggu

SEQ ID NO: 986640 - RNA, 22 nt, Human
gcugggagucgcgucuguggcc

SEQ ID NO: 986641 - RNA, 22 nt, Human
agcuucuggaaggcaaggcuug

SEQ ID NO: 986642 - RNA, 22 nt, Human
ugacacaggcagcucccagcac

SEQ ID NO: 986643 - RNA, 22 nt, Human
ggcucuggucagugaggggccu

SEQ ID NO: 986644 - RNA, 22 nt, Human
uccaagggaaugugggcaaugc

SEQ ID NO: 986645 - RNA, 22 nt, Human
gccuggugugcgccgcgcagcu

SEQ ID NO: 986646 - RNA, 22 nt, Human
aaggguggauuucugagcucua

SEQ ID NO: 986647 - RNA, 22 nt, Human
ugcugucugcaacaguacuaca

SEQ ID NO: 986648 - RNA, 22 nt, Human
uuuuccuauaugcaaagaaugc

SEQ ID NO: 986649 - RNA, 22 nt, Human
cucaggauugugccuagggaga

SEQ ID NO: 986650 - RNA, 22 nt, Human
gcauuauuaauagcugcaugag

SEQ ID NO: 986651 - RNA, 22 nt, Human
ccccuuccaggaagcagaaucg

SEQ ID NO: 986652 - RNA, 21 nt, Human
ccuccaggagcagagcccuga

SEQ ID NO: 986653 - RNA, 22 nt, Human
acagagcacauagauuggaguu

SEQ ID NO: 986654 - RNA, 22 nt, Human
uuugucagucaugucugcuuuu

SEQ ID NO: 986655 - RNA, 22 nt, Human
gccaggugcauggcugagucuc

SEQ ID NO: 986656 - RNA, 20 nt, Human
ggccuuggguuucgccuguu

SEQ ID NO: 986657 - RNA, 22 nt, Human
ugucugguggguugacaggcag

SEQ ID NO: 986658 - RNA, 22 nt, Human
aggaucuugcuguagaggauag

SEQ ID NO: 986659 - RNA, 22 nt, Human
caggagugcagguggugaggca

SEQ ID NO: 986660 - RNA, 22 nt, Human
ggcuuccuaauacucccuacac

SEQ ID NO: 986661 - RNA, 22 nt, Human
gguucacacuaagcuuaagugg

SEQ ID NO: 986662 - RNA, 22 nt, Human
uggcagagucucuccuuuccag

SEQ ID NO: 986663 - RNA, 22 nt, Human
ggguccagcuacaucagggugg

SEQ ID NO: 986664 - RNA, 22 nt, Human
aagggcaggcacccacccucac

SEQ ID NO: 986665 - RNA, 22 nt, Human
ugucaucugauauuacuuauag

SEQ ID NO: 986666 - RNA, 23 nt, Human
guggagccacaucacaggcuccu

SEQ ID NO: 986667 - RNA, 22 nt, Human
uagacacaucaaguauaguuaa

SEQ ID NO: 986668 - RNA, 22 nt, Human
agagaugucgccuugcccaggg

SEQ ID NO: 986669 - RNA, 22 nt, Human
ugcagcccuuccuuccucuggg

SEQ ID NO: 986670 - RNA, 22 nt, Human
uucaaaggcaggauagcagcug

SEQ ID NO: 986671 - RNA, 22 nt, Human
auggggagagaagggcugagcu

SEQ ID NO: 986672 - RNA, 23 nt, Human
uggccaagauaaucucaguuuuc

SEQ ID NO: 986673 - RNA, 22 nt, Human
augcacagcagugaguucagug

SEQ ID NO: 986674 - RNA, 22 nt, Human
agugugcugcuuaaacaguugu

SEQ ID NO: 986675 - RNA, 22 nt, Human
gagacauggcaaaagcacuggu

SEQ ID NO: 986676 - RNA, 22 nt, Human
cucugggcuuguugaccugcac

SEQ ID NO: 986677 - RNA, 22 nt, Human
auggcucauuuaucuugcagcc

SEQ ID NO: 986678 - RNA, 22 nt, Human
acagagccaaaaggacauagua

SEQ ID NO: 986679 - RNA, 22 nt, Human
acuggccaggcgaaccacacug

SEQ ID NO: 986680 - RNA, 17 nt, Human
ugaagaugcauggcagc

SEQ ID NO: 986681 - RNA, 22 nt, Human
gcaguggggaaugcuggggaga

SEQ ID NO: 986682 - RNA, 22 nt, Human
ucugagcccucuuuugcagccc

SEQ ID NO: 986683 - RNA, 22 nt, Human
agugugugcaugcauucgugca

SEQ ID NO: 986684 - RNA, 22 nt, Human
ggggcccagcaccccuccucgc

SEQ ID NO: 986685 - RNA, 22 nt, Human
uuaauaaaguaugaauuggaaa

SEQ ID NO: 986686 - RNA, 22 nt, Human
gcagcuguggguuccaagucua

SEQ ID NO: 986687 - RNA, 22 nt, Human
aggaaaaucgagucuggaggca

SEQ ID NO: 986688 - RNA, 22 nt, Human
cacagggcuaaaugaaggguug

SEQ ID NO: 986689 - RNA, 22 nt, Human
ugucccaguuuugcagguuaga

SEQ ID NO: 986690 - RNA, 22 nt, Human
acuguguggaaauuugugaggg

SEQ ID NO: 986691 - RNA, 22 nt, Human
aaaugugucaguuucauucucu

SEQ ID NO: 986692 - RNA, 17 nt, Human
cagcucugcaucuuccu

SEQ ID NO: 986693 - RNA, 22 nt, Human
gagcugcugguugcuggugccu

SEQ ID NO: 986694 - RNA, 22 nt, Human
ugucccagucaaggcugucauc

SEQ ID NO: 986695 - RNA, 22 nt, Human
ugccuugguucucuacuuggag

SEQ ID NO: 986696 - RNA, 22 nt, Human
gaggugggagggcagucccuaa

SEQ ID NO: 986697 - RNA, 22 nt, Human
agaguguaauaagggcaagggc

SEQ ID NO: 986698 - RNA, 22 nt, Human
gccuucccacccugcgaggcug

SEQ ID NO: 986699 - RNA, 22 nt, Human
auguguaggugaaucgaggcug

SEQ ID NO: 986700 - RNA, 22 nt, Human
cucccuggcuuuguccugaggc

SEQ ID NO: 986701 - RNA, 23 nt, Human
acagagaucuugacuuguaugga

SEQ ID NO: 986702 - RNA, 22 nt, Human
aagagcauauuaauaguggaga

SEQ ID NO: 986703 - RNA, 22 nt, Human
ugccucuguugagccuuggcug

SEQ ID NO: 986704 - RNA, 22 nt, Human
gucacacucagaaugacuagag

SEQ ID NO: 986705 - RNA, 19 nt, Human
ugacaggcuguugccuuga

SEQ ID NO: 986706 - RNA, 22 nt, Human
ccacccuuggguucggaggccg

SEQ ID NO: 986707 - RNA, 22 nt, Human
agcugcucaggagagccagguc

SEQ ID NO: 986708 - RNA, 22 nt, Human
agaaugcaguuugaaauaaggu

SEQ ID NO: 986709 - RNA, 22 nt, Human
uccuucaguuaucacaguacug

SEQ ID NO: 986710 - RNA, 22 nt, Human
ugcagggcuacaggacuacaac

SEQ ID NO: 986711 - RNA, 22 nt, Human
gcacugaaaauguuggauucca

SEQ ID NO: 986712 - RNA, 22 nt, Human
gaguggagcaaaagagguagau

SEQ ID NO: 986713 - RNA, 22 nt, Human
ccuggccaggcuccaaguacug

SEQ ID NO: 986714 - RNA, 22 nt, Human
ucugagagagggucagaugcua

SEQ ID NO: 986715 - RNA, 23 nt, Human
agggcacugaagcuggaauuggg

SEQ ID NO: 986716 - RNA, 22 nt, Human
aaaagguagauucuccuucuau

SEQ ID NO: 986717 - RNA, 19 nt, Human
cugagcagcggcagcacuu

SEQ ID NO: 986718 - RNA, 22 nt, Human
cccugggacccgcugcagaggc

SEQ ID NO: 986719 - RNA, 22 nt, Human
agcaccuguggcucaugcucgu

SEQ ID NO: 986720 - RNA, 22 nt, Human
cuggcucuucagugcuugguuc

SEQ ID NO: 986721 - RNA, 22 nt, Human
uggcucagcagguuagaaacua

SEQ ID NO: 986722 - RNA, 22 nt, Human
ccacagagagugucagccuuug

SEQ ID NO: 986723 - RNA, 22 nt, Human
ugcugccuuagcagccaggcaa

SEQ ID NO: 986724 - RNA, 22 nt, Human
uccucaggagagcuccuaugcc

SEQ ID NO: 986725 - RNA, 22 nt, Human
aaaacagacagccaguguagag

SEQ ID NO: 986726 - RNA, 22 nt, Human
ucaccuuagcuagaggaagaga

SEQ ID NO: 986727 - RNA, 22 nt, Human
uuagcucagaaaauuuaaacuu

SEQ ID NO: 986728 - RNA, 22 nt, Human
gggcagcagaggaucccuuaau

SEQ ID NO: 986729 - RNA, 22 nt, Human
aggcucaguuugguuuccauug

SEQ ID NO: 986730 - RNA, 22 nt, Human
ugcugccaaaugcgagcucugu

SEQ ID NO: 986731 - RNA, 22 nt, Human
agaauuagucacaauuauagga

SEQ ID NO: 986732 - RNA, 22 nt, Human
uucuuaggacuaguauagcaug

SEQ ID NO: 986733 - RNA, 23 nt, Human
agacaguggccgagagguacuag

SEQ ID NO: 986734 - RNA, 22 nt, Human
ccaggccuguguuguguggagg

SEQ ID NO: 986735 - RNA, 22 nt, Human
uagaaaauagggccuguggagc

SEQ ID NO: 986736 - RNA, 22 nt, Human
uuggccaagugguuaaucucca

SEQ ID NO: 986737 - RNA, 22 nt, Human
uucuggaguauuccuggcaccu

SEQ ID NO: 986738 - RNA, 19 nt, Human
aggugaugugacucuagaa

SEQ ID NO: 986739 - RNA, 22 nt, Human
gccaccucuuugucucugccgc

SEQ ID NO: 986740 - RNA, 22 nt, Human
uauguacauggagagcaauuga

SEQ ID NO: 986741 - RNA, 22 nt, Human
agucucugcugguugugccuau

SEQ ID NO: 986742 - RNA, 22 nt, Human
uacauuaacuuacguccacaug

SEQ ID NO: 986743 - RNA, 22 nt, Human
agcagagccagaauuggaccag

SEQ ID NO: 986744 - RNA, 22 nt, Human
aaaauguaaagcuugaguguag

SEQ ID NO: 986745 - RNA, 22 nt, Human
auguaguauuuggaaauguaaa

SEQ ID NO: 986746 - RNA, 22 nt, Human
ugaggcaggaguucaggcugcg

SEQ ID NO: 986747 - RNA, 21 nt, Human
uucuuuccccagaggacuaaa

SEQ ID NO: 986748 - RNA, 22 nt, Human
gcuucauuacugacagucugug

SEQ ID NO: 986749 - RNA, 22 nt, Human
cuugaucuacauagugaaaccc

SEQ ID NO: 986750 - RNA, 22 nt, Human
uucuuacuaguauguuucagca

SEQ ID NO: 986751 - RNA, 22 nt, Human
guguaauuauauaaagaucuac

SEQ ID NO: 986752 - RNA, 23 nt, Human
ucaguuuuggcuguucaguguug

SEQ ID NO: 986753 - RNA, 22 nt, Human
aggcagagaaaaaccagauaug

SEQ ID NO: 986754 - RNA, 22 nt, Human
ucccuggagauaacuucuggga

SEQ ID NO: 986755 - RNA, 22 nt, Human
agcagcugggcucagagcuggg

SEQ ID NO: 986756 - RNA, 18 nt, Human
ugcucuggucucacuugg

SEQ ID NO: 986757 - RNA, 22 nt, Human
ccagcagagcauggggaggaag

SEQ ID NO: 986758 - RNA, 22 nt, Human
acagcauucaauaaauaauaac

SEQ ID NO: 986759 - RNA, 22 nt, Human
cuuacauugucuuaguuuucaa

SEQ ID NO: 986760 - RNA, 22 nt, Human
cugcccuguuuggacagcccgg

SEQ ID NO: 986761 - RNA, 22 nt, Human
gggccugggaacuugcauuuag

SEQ ID NO: 986762 - RNA, 22 nt, Human
gugggacucuucuuuggcagug

SEQ ID NO: 986763 - RNA, 22 nt, Human
ggagcugggguuggcaucuucc

SEQ ID NO: 986764 - RNA, 22 nt, Human
gggaucagcaagccacugcacc

SEQ ID NO: 986765 - RNA, 22 nt, Human
aagaaauuaaugugccauuacu

SEQ ID NO: 986766 - RNA, 22 nt, Human
gcagcaugagcuauacaaagua

SEQ ID NO: 986767 - RNA, 22 nt, Human
cagcugucuaaguugagcagga

SEQ ID NO: 986768 - RNA, 22 nt, Human
caugggagcuaucuccaucacu

SEQ ID NO: 986769 - RNA, 22 nt, Human
ccugcuucagggaugauggcac

SEQ ID NO: 986770 - RNA, 22 nt, Human
aaaagagguuaaccaggugugu

SEQ ID NO: 986771 - RNA, 22 nt, Human
cccauggcuuaggagggagugu

SEQ ID NO: 986772 - RNA, 22 nt, Human
agucagcagccuggccaggaga

SEQ ID NO: 986773 - RNA, 20 nt, Human
ccaagagcaugcaugaggaa

SEQ ID NO: 986774 - RNA, 22 nt, Human
gccuggaggaauguagcugagg

SEQ ID NO: 986775 - RNA, 22 nt, Human
gcugccaguaguuggagcucca

SEQ ID NO: 986776 - RNA, 21 nt, Human
ugcuggccucaagggugacuu

SEQ ID NO: 986777 - RNA, 22 nt, Human
ggaggaccccagcagcucccca

SEQ ID NO: 986778 - RNA, 22 nt, Human
aagugguagacaaagauaauug

SEQ ID NO: 986779 - RNA, 22 nt, Human
ugcaauaacuacuuuaauguug

SEQ ID NO: 986780 - RNA, 22 nt, Human
uaaggcacuucaauguuuagaa

SEQ ID NO: 986781 - RNA, 22 nt, Human
aggcagaauguuggaaaggaag

SEQ ID NO: 986782 - RNA, 22 nt, Human
uguccucaaggagcuucagucu

SEQ ID NO: 986783 - RNA, 22 nt, Human
aguguuucccaguaggaugaaa

SEQ ID NO: 986784 - RNA, 22 nt, Human
ggcccaaggcccaggucgagcu

SEQ ID NO: 986785 - RNA, 22 nt, Human
gaaauauuacaguggaggggau

SEQ ID NO: 986786 - RNA, 23 nt, Human
uuccuggcagguacaacuuuuac

SEQ ID NO: 986787 - RNA, 22 nt, Human
cuccucuggcuuccuggaggca

SEQ ID NO: 986788 - RNA, 21 nt, Human
ucaggggcuguguuuuccauc

SEQ ID NO: 986789 - RNA, 22 nt, Human
agacuuugagcucuuagagaag

SEQ ID NO: 986790 - RNA, 20 nt, Human
ugggcagcacugcuggcugg

SEQ ID NO: 986791 - RNA, 22 nt, Human
cagcuuugcccuuugcccaauc

SEQ ID NO: 986792 - RNA, 22 nt, Human
ugaagcagauggucuggucauu

SEQ ID NO: 986793 - RNA, 22 nt, Human
gagccugggacugggggucaug

SEQ ID NO: 986794 - RNA, 22 nt, Human
ggcaggagauaaaauauuaguu

SEQ ID NO: 986795 - RNA, 22 nt, Human
aacucuggagcacgcccuggcc

SEQ ID NO: 986796 - RNA, 22 nt, Human
ccagggcaggggcuggaguuca

SEQ ID NO: 986797 - RNA, 22 nt, Human
uauugaaauccauuacguucuu

SEQ ID NO: 986798 - RNA, 22 nt, Human
ucagaaauuuucucaguaguuc

SEQ ID NO: 986799 - RNA, 22 nt, Human
aaagagcuaacauugccgagau

SEQ ID NO: 986800 - RNA, 20 nt, Human
ccucucugaagaggucaucu

SEQ ID NO: 986801 - RNA, 22 nt, Human
gagagcuggguucaaguagcug

SEQ ID NO: 986802 - RNA, 22 nt, Human
agucauguguucaucuuucauu

SEQ ID NO: 986803 - RNA, 22 nt, Human
cugcacagagcagggcagacac

SEQ ID NO: 986804 - RNA, 22 nt, Human
gagagugagauaauuucacaua

SEQ ID NO: 986805 - RNA, 18 nt, Human
caggucagccuggccuca

SEQ ID NO: 986806 - RNA, 22 nt, Human
uccuugaauccuagcauccuau

SEQ ID NO: 986807 - RNA, 22 nt, Human
aggccuccuggcuccaggccuu

SEQ ID NO: 986808 - RNA, 22 nt, Human
uggcucuggcgugaagcccaga

SEQ ID NO: 986809 - RNA, 22 nt, Human
ggcuucucucccccagcuccac

SEQ ID NO: 986810 - RNA, 23 nt, Human
uggcucugagcuuccugguggcc

SEQ ID NO: 986811 - RNA, 22 nt, Human
cauugcacgggcgucugucugu

SEQ ID NO: 986812 - RNA, 22 nt, Human
acuuucucaaaucagacuuuaa

SEQ ID NO: 986813 - RNA, 22 nt, Human
ugugugcagccucugucuuugg

SEQ ID NO: 986814 - RNA, 22 nt, Human
gggcucugggauucagagcaag

SEQ ID NO: 986815 - RNA, 22 nt, Human
cagggagaaaucuccaggaggu

SEQ ID NO: 986816 - RNA, 22 nt, Human
auccaguuuaugucauauucuu

SEQ ID NO: 986817 - RNA, 21 nt, Human
ggccuuggcgggggccgaauu

SEQ ID NO: 986818 - RNA, 22 nt, Human
ucagugcuucggcgagcaccua

SEQ ID NO: 986819 - RNA, 23 nt, Human
ccagcuccgugagccucgggcuc

SEQ ID NO: 986820 - RNA, 22 nt, Human
aaaugaacaguugcauucucug

SEQ ID NO: 986821 - RNA, 22 nt, Human
auuagagaaauguugccaagau

SEQ ID NO: 986822 - RNA, 20 nt, Human
cagcccuccaguggaggcag

SEQ ID NO: 986823 - RNA, 22 nt, Human
gcagagccagaauggccaggac

SEQ ID NO: 986824 - RNA, 22 nt, Human
cccuggguucuggcugggcugc

SEQ ID NO: 986825 - RNA, 22 nt, Human
cagagccagaacuagaccuugu

SEQ ID NO: 986826 - RNA, 22 nt, Human
uucagauaaacuacaaauaauu

SEQ ID NO: 986827 - RNA, 22 nt, Human
ucucuucuuguguuuuccugcc

SEQ ID NO: 986828 - RNA, 22 nt, Human
gccaggcugcuggcugcugucc

SEQ ID NO: 986829 - RNA, 22 nt, Human
cugcaagauuggaagaugcaau

SEQ ID NO: 986830 - RNA, 22 nt, Human
cugcugagcaucagggcugccc

SEQ ID NO: 986831 - RNA, 22 nt, Human
ccagccuucugagcugccugga

SEQ ID NO: 986832 - RNA, 22 nt, Human
ccacugggcguuucuguccaau

SEQ ID NO: 986833 - RNA, 20 nt, Human
ugccaugguaacagagugug

SEQ ID NO: 986834 - RNA, 22 nt, Human
uucuuaagcaccuaaaaagugg

SEQ ID NO: 986835 - RNA, 22 nt, Human
cagaggcugaugugggaugggc

SEQ ID NO: 986836 - RNA, 22 nt, Human
uccucagggaagaugagccuca

SEQ ID NO: 986837 - RNA, 22 nt, Human
auuauuagacuuauaugguagu

SEQ ID NO: 986838 - RNA, 22 nt, Human
aaagucauugcuguuaucaaug

SEQ ID NO: 986839 - RNA, 22 nt, Human
uuguuaaaaugcauauucuggu

SEQ ID NO: 986840 - RNA, 22 nt, Human
ucuggcuccacucugugcaugc

SEQ ID NO: 986841 - RNA, 22 nt, Human
cuucuaggcuucucagggggca

SEQ ID NO: 986842 - RNA, 22 nt, Human
ugagccugcaauaagcacagcc

SEQ ID NO: 986843 - RNA, 22 nt, Human
ccagcccuugcugaaggguggc

SEQ ID NO: 986844 - RNA, 22 nt, Human
aaggcccuggcaggaagcagga

SEQ ID NO: 986845 - RNA, 22 nt, Human
agucucugcacaguaagaagca

SEQ ID NO: 986846 - RNA, 22 nt, Human
ugucuucaguaaaauacacuau

SEQ ID NO: 986847 - RNA, 22 nt, Human
gggccuccggggugagcugugg

SEQ ID NO: 986848 - RNA, 22 nt, Human
gggcucuggaaggugcaccaug

SEQ ID NO: 986849 - RNA, 22 nt, Human
gagcucauccccaugguccguc

SEQ ID NO: 986850 - RNA, 22 nt, Human
uaacagaaacagauaaguguaa

SEQ ID NO: 986851 - RNA, 22 nt, Human
ggagccuggcaaugcugcgucc

SEQ ID NO: 986852 - RNA, 22 nt, Human
cccagccucuguuugcuccucu

SEQ ID NO: 986853 - RNA, 22 nt, Human
gggcagagaaauggacaguugg

SEQ ID NO: 986854 - RNA, 22 nt, Human
uucaaucauuuuuacauagucc

SEQ ID NO: 986855 - RNA, 22 nt, Human
caucaguguggcaguucacugu

SEQ ID NO: 986856 - RNA, 22 nt, Human
agcuggccuucggugucacugg

SEQ ID NO: 986857 - RNA, 22 nt, Human
acagagguguguguaggacagu

SEQ ID NO: 986858 - RNA, 22 nt, Human
guucacaucacuucacugaacc

SEQ ID NO: 986859 - RNA, 22 nt, Human
cugcucugcagcuuggacuccc

SEQ ID NO: 986860 - RNA, 22 nt, Human
gcugcccugucugcagcaggac

SEQ ID NO: 986861 - RNA, 22 nt, Human
ccuccagguguuacauaugacu

SEQ ID NO: 986862 - RNA, 23 nt, Human
aggcuuccuaucuuagagcuggg

SEQ ID NO: 986863 - RNA, 22 nt, Human
uuuguaaagucuguucugaguu

SEQ ID NO: 986864 - RNA, 18 nt, Human
cacaggcucccagugagg

SEQ ID NO: 986865 - RNA, 22 nt, Human
cuggcucccagcuuucagggag

SEQ ID NO: 986866 - RNA, 22 nt, Human
gccuggugguauccuggcaaga

SEQ ID NO: 986867 - RNA, 22 nt, Human
uagucuuuuuaauaaauaaugc

SEQ ID NO: 986868 - RNA, 22 nt, Human
cucugagcagaggccguggcua

SEQ ID NO: 986869 - RNA, 22 nt, Human
ucacacgugagguucuauccug

SEQ ID NO: 986870 - RNA, 22 nt, Human
cuuccuggccauugccauggca

SEQ ID NO: 986871 - RNA, 22 nt, Human
cagucccagacccagaaggugg

SEQ ID NO: 986872 - RNA, 22 nt, Human
aguauguauuuuauacuuacag

SEQ ID NO: 986873 - RNA, 20 nt, Human
gcugcucuccacggucugca

SEQ ID NO: 986874 - RNA, 20 nt, Human
uccaggagaacugggagccg

SEQ ID NO: 986875 - RNA, 22 nt, Human
gcccucugcuggccucaccucg

SEQ ID NO: 986876 - RNA, 22 nt, Human
ucuuuuaaaagcccugcugucu

SEQ ID NO: 986877 - RNA, 22 nt, Human
gcucaggaaggcucaaccagga

SEQ ID NO: 986878 - RNA, 22 nt, Human
aaucagaauuuauugaaucuuu

SEQ ID NO: 986879 - RNA, 22 nt, Human
acuccagguuuuuucacugaag

SEQ ID NO: 986880 - RNA, 22 nt, Human
ggucauugucagagccuguacu

SEQ ID NO: 986881 - RNA, 22 nt, Human
aucaaaguccaucagaagguag

SEQ ID NO: 986882 - RNA, 22 nt, Human
cagagugaaauaggggaucaag

SEQ ID NO: 986883 - RNA, 22 nt, Human
accuuuuuucagaacucuaaag

SEQ ID NO: 986884 - RNA, 23 nt, Human
agaggcaggaguggcuugcccgg

SEQ ID NO: 986885 - RNA, 22 nt, Human
gagcagcugagcuggaaugaga

SEQ ID NO: 986886 - RNA, 18 nt, Human
cugccuguugcugagagg

SEQ ID NO: 986887 - RNA, 22 nt, Human
ggucccaggcugcgggcuggug

SEQ ID NO: 986888 - RNA, 20 nt, Human
aguaccuuuuguauguuacc

SEQ ID NO: 986889 - RNA, 22 nt, Human
cugccucucagccugaccgcca

SEQ ID NO: 986890 - RNA, 18 nt, Human
gccugcaggcacgggggu

SEQ ID NO: 986891 - RNA, 22 nt, Human
uggcucagauuuuuguaggcuu

SEQ ID NO: 986892 - RNA, 22 nt, Human
agaggccagcagugccuaucug

SEQ ID NO: 986893 - RNA, 22 nt, Human
agaaacauuuagauuauauguc

SEQ ID NO: 986894 - RNA, 22 nt, Human
ccuggggcucaagauggcgccg

SEQ ID NO: 986895 - RNA, 19 nt, Human
gguaaaagugagcuucagg

SEQ ID NO: 986896 - RNA, 22 nt, Human
aguguccaacucagcuugucaa

SEQ ID NO: 986897 - RNA, 22 nt, Human
cccugcaggggaccugcagccu

SEQ ID NO: 986898 - RNA, 22 nt, Human
acaugaaaccugagucuaacuc

SEQ ID NO: 986899 - RNA, 22 nt, Human
auacauacauguacacauaaau

SEQ ID NO: 986900 - RNA, 22 nt, Human
ucagagcugcccaugcaagggg

SEQ ID NO: 986901 - RNA, 22 nt, Human
augcacccagugucuggacuau

SEQ ID NO: 986902 - RNA, 20 nt, Human
ccuggccaaugagauaggaa

SEQ ID NO: 986903 - RNA, 22 nt, Human
ucauuucuccgaccugcugucc

SEQ ID NO: 986904 - RNA, 22 nt, Human
ugcaugugcccacucuggcuua

SEQ ID NO: 986905 - RNA, 22 nt, Human
gcuggccuugugucugaggaag

SEQ ID NO: 986906 - RNA, 22 nt, Human
agaacagaugugggcagaccug

SEQ ID NO: 986907 - RNA, 22 nt, Human
uggcagcuguguccagguagaa

SEQ ID NO: 986908 - RNA, 22 nt, Human
aaauguuagguuguacugaguc

SEQ ID NO: 986909 - RNA, 22 nt, Human
acagcuguggggacucuugccc

SEQ ID NO: 986910 - RNA, 19 nt, Human
agguggucuaggcuggaga

SEQ ID NO: 986911 - RNA, 22 nt, Human
aacuccagggcauugucuccug

SEQ ID NO: 986912 - RNA, 22 nt, Human
cuggcucuaucuccaaggcugg

SEQ ID NO: 986913 - RNA, 22 nt, Human
ucaguuuuaagguuugagaauu

SEQ ID NO: 986914 - RNA, 22 nt, Human
ucagggacauuuagacacugau

SEQ ID NO: 986915 - RNA, 22 nt, Human
cggcuggguucggcugcaggcc

SEQ ID NO: 986916 - RNA, 22 nt, Human
uuuuccucaggaaugcuaagcu

SEQ ID NO: 986917 - RNA, 22 nt, Human
ggcugccugaacuuuggggaaa

SEQ ID NO: 986918 - RNA, 22 nt, Human
agcauuuaguuaguaaauguuu

SEQ ID NO: 986919 - RNA, 22 nt, Human
cugcagcuguagaggacagugg

SEQ ID NO: 986920 - RNA, 22 nt, Human
agggccugcucuaucacucuca

SEQ ID NO: 986921 - RNA, 22 nt, Human
accuuuuccagcuucuagaggc

SEQ ID NO: 986922 - RNA, 22 nt, Human
cugccuuggaaaaugugguaau

SEQ ID NO: 986923 - RNA, 22 nt, Human
cuccuucccuucaaguguuccu

SEQ ID NO: 986924 - RNA, 22 nt, Human
cagggcaguuugugccuaugag

SEQ ID NO: 986925 - RNA, 19 nt, Human
uggaagaggaagggaaaua

SEQ ID NO: 986926 - RNA, 22 nt, Human
ggccccuggcaccaggcugauu

SEQ ID NO: 986927 - RNA, 22 nt, Human
acacuugauaggucaaaucagu

SEQ ID NO: 986928 - RNA, 22 nt, Human
ugcacccucaucagucaaaugg

SEQ ID NO: 986929 - RNA, 19 nt, Human
uuggaaggagccagagugg

SEQ ID NO: 986930 - RNA, 22 nt, Human
gcugcugcgcuugucuacuguu

SEQ ID NO: 986931 - RNA, 18 nt, Human
aaugcacacauuuacucc

SEQ ID NO: 986932 - RNA, 22 nt, Human
cuggcuggccggagcgaggcgg

SEQ ID NO: 986933 - RNA, 22 nt, Human
cuggccucaccucagacuuacu

SEQ ID NO: 986934 - RNA, 22 nt, Human
cagcuccccucuguggggcagu

SEQ ID NO: 986935 - RNA, 22 nt, Human
gaggcuggcagaaaagcacagg

SEQ ID NO: 986936 - RNA, 22 nt, Human
auugaaagauuuugggcucaug

SEQ ID NO: 986937 - RNA, 22 nt, Human
uggaggaugagugugggcucug

SEQ ID NO: 986938 - RNA, 22 nt, Human
gccuucugauaucucuuggcau

SEQ ID NO: 986939 - RNA, 22 nt, Human
gcagcuggucuggccuagagua

SEQ ID NO: 986940 - RNA, 22 nt, Human
cucacagaugcugugggucagg

SEQ ID NO: 986941 - RNA, 22 nt, Human
guaucuuuccacaucuucagua

SEQ ID NO: 986942 - RNA, 22 nt, Human
aggaccaacauagcagcagugg

SEQ ID NO: 986943 - RNA, 22 nt, Human
aagccagccagugccagucuua

SEQ ID NO: 986944 - RNA, 22 nt, Human
caggccugucugcacaugaggc

SEQ ID NO: 986945 - RNA, 22 nt, Human
cugugucccccucagccaggug

SEQ ID NO: 986946 - RNA, 22 nt, Human
aucaaaguggaaguuuacuagg

SEQ ID NO: 986947 - RNA, 22 nt, Human
caguacuuggucaaggaagcag

SEQ ID NO: 986948 - RNA, 22 nt, Human
agaaagaacguugguuaucuua

SEQ ID NO: 986949 - RNA, 22 nt, Human
cucagggucugguccuuagauu

SEQ ID NO: 986950 - RNA, 22 nt, Human
ggcacugaucugauuucccucc

SEQ ID NO: 986951 - RNA, 22 nt, Human
cagcucugcugggaggaugcag

SEQ ID NO: 986952 - RNA, 22 nt, Human
gggcugggcaugguguucccuc

SEQ ID NO: 986953 - RNA, 22 nt, Human
uguggcucucagauccuccaau

SEQ ID NO: 986954 - RNA, 22 nt, Human
ggcgcuggccacgguggcucug

SEQ ID NO: 986955 - RNA, 22 nt, Human
uauuggcagcaugagcuccugg

SEQ ID NO: 986956 - RNA, 22 nt, Human
ugucuguaagguguuuauguua

SEQ ID NO: 986957 - RNA, 22 nt, Human
cugcccugucuuuuucugauga

SEQ ID NO: 986958 - RNA, 22 nt, Human
guccucugacucagccuuggga

SEQ ID NO: 986959 - RNA, 22 nt, Human
cucucuguuaugcuuucaugaa

SEQ ID NO: 986960 - RNA, 22 nt, Human
auaugccauuagcuagaaauaa

SEQ ID NO: 986961 - RNA, 22 nt, Human
aggagcugucagagugccagag

SEQ ID NO: 986962 - RNA, 22 nt, Human
gcuggcuguaucaccuggccag

SEQ ID NO: 986963 - RNA, 22 nt, Human
gagcagggccacuucuguaccu

SEQ ID NO: 986964 - RNA, 22 nt, Human
ugggcugcagggguugagagcu

SEQ ID NO: 986965 - RNA, 22 nt, Human
uucaguuucagucuugcaaaaa

SEQ ID NO: 986966 - RNA, 22 nt, Human
agcugucuaccugcagaguccu

SEQ ID NO: 986967 - RNA, 22 nt, Human
aggcucagagagcuguguccau

SEQ ID NO: 986968 - RNA, 22 nt, Human
cagcugcccaggccaccuggag

SEQ ID NO: 986969 - RNA, 22 nt, Human
uacuuuagaaggaaauaaguuc

SEQ ID NO: 986970 - RNA, 22 nt, Human
cuguuuauacgacagguggagg

SEQ ID NO: 986971 - RNA, 22 nt, Human
cguguacagucuaucuuuuuuc

SEQ ID NO: 986972 - RNA, 22 nt, Human
agggaaaguaagcauuucauua

SEQ ID NO: 986973 - RNA, 22 nt, Human
aaaugcuugcucuugauuauuu

SEQ ID NO: 986974 - RNA, 17 nt, Human
gcugcagcgguaggcag

SEQ ID NO: 986975 - RNA, 22 nt, Human
ugcuugggaauguggagucaga

SEQ ID NO: 986976 - RNA, 22 nt, Human
cuacugaguccuucagcugcca

SEQ ID NO: 986977 - RNA, 22 nt, Human
auguuauaguuauaaaaugagg

SEQ ID NO: 986978 - RNA, 22 nt, Human
gcaguggcuaggagucuggcgu

SEQ ID NO: 986979 - RNA, 22 nt, Human
acagccaggaauucuggagaag

SEQ ID NO: 986980 - RNA, 22 nt, Human
aaggccaugcacauccuaggca

SEQ ID NO: 986981 - RNA, 18 nt, Human
uggcagccagcugcuccu

SEQ ID NO: 986982 - RNA, 22 nt, Human
cagccagccucucaaccaugca

SEQ ID NO: 986983 - RNA, 22 nt, Human
gaagaacaagcagugcuuuccu

SEQ ID NO: 986984 - RNA, 22 nt, Human
gagagcugggaaagccguggag

SEQ ID NO: 986985 - RNA, 22 nt, Human
aagggcugaaagaccuugggca

SEQ ID NO: 986986 - RNA, 22 nt, Human
cuggcccaggaagacguguccc

SEQ ID NO: 986987 - RNA, 22 nt, Human
gcugccugcacagagcugcuuu

SEQ ID NO: 986988 - RNA, 22 nt, Human
uacaaaugaaccaacuuugaug

SEQ ID NO: 986989 - RNA, 22 nt, Human
ccagcccucacugaggccucuc

SEQ ID NO: 986990 - RNA, 22 nt, Human
uugaaucauuacaauagauaag

SEQ ID NO: 986991 - RNA, 22 nt, Human
agccuggauccuaggcucagcu

SEQ ID NO: 986992 - RNA, 22 nt, Human
aggauuuuagauaagacagcaa

SEQ ID NO: 986993 - RNA, 22 nt, Human
ucagggaacuacuucucccuau

SEQ ID NO: 986994 - RNA, 18 nt, Human
cagggcuguggggucacu

SEQ ID NO: 986995 - RNA, 23 nt, Human
agaaaagcuuggacacauggccu

SEQ ID NO: 986996 - RNA, 17 nt, Human
acucugcugaaguagaa

SEQ ID NO: 986997 - RNA, 22 nt, Human
aauccagguggcggagguugug

SEQ ID NO: 986998 - RNA, 22 nt, Human
uggcagcacaagguggcccaug

SEQ ID NO: 986999 - RNA, 22 nt, Human
acauuguauaaugauuaucaca

SEQ ID NO: 987000 - RNA, 22 nt, Human
agggcagaccacgugcaaggau

SEQ ID NO: 987001 - RNA, 22 nt, Human
uccuugaauggacauuacacug

SEQ ID NO: 987002 - RNA, 22 nt, Human
agacaggaugcauacucuuggu

SEQ ID NO: 987003 - RNA, 22 nt, Human
gagagugaggccugggaaucua

SEQ ID NO: 987004 - RNA, 22 nt, Human
cagucccaugagcccagaacau

SEQ ID NO: 987005 - RNA, 22 nt, Human
aauuaggaaaugagaguauuug

SEQ ID NO: 987006 - RNA, 22 nt, Human
cugcagagcuaggcugagugaa

SEQ ID NO: 987007 - RNA, 22 nt, Human
cccuucagcugagugggacagc

SEQ ID NO: 987008 - RNA, 22 nt, Human
ccugggaggcagagguugcagu

SEQ ID NO: 987009 - RNA, 22 nt, Human
uggggagugaugccucggauaa

SEQ ID NO: 987010 - RNA, 22 nt, Human
ucaaaccaccuuguuacugggg

SEQ ID NO: 987011 - RNA, 22 nt, Human
gcugggcagccuggccgcugcc

SEQ ID NO: 987012 - RNA, 22 nt, Human
caggccuggcccccggcacacc

SEQ ID NO: 987013 - RNA, 22 nt, Human
ggcucuggugggaagguuagau

SEQ ID NO: 987014 - RNA, 22 nt, Human
uuuuccucuguuauuaguguga

SEQ ID NO: 987015 - RNA, 22 nt, Human
cacaggguuguucugaggauuc

SEQ ID NO: 987016 - RNA, 22 nt, Human
gcugagaggcacuaucuccgga

SEQ ID NO: 987017 - RNA, 22 nt, Human
ucuggccagugaaaugcagaau

SEQ ID NO: 987018 - RNA, 22 nt, Human
ugcauuaugcuacccagaagcu

SEQ ID NO: 987019 - RNA, 22 nt, Human
agccagcaggugagugcagccu

SEQ ID NO: 987020 - RNA, 22 nt, Human
ccugaagagcacucuagaguug

SEQ ID NO: 987021 - RNA, 22 nt, Human
aaggccugggaguacugggaca

SEQ ID NO: 987022 - RNA, 22 nt, Human
acauuucuaucauccuguaaug

SEQ ID NO: 987023 - RNA, 22 nt, Human
guggccuggaguuugauguagg

SEQ ID NO: 987024 - RNA, 22 nt, Human
gacccuguuucuacaaauaauu

SEQ ID NO: 987025 - RNA, 22 nt, Human
uuugcauuuugauaagaucacu

SEQ ID NO: 987026 - RNA, 22 nt, Human
uggcucaguuugggggauugaa

SEQ ID NO: 987027 - RNA, 22 nt, Human
ggcagagaugugggucagaauc

SEQ ID NO: 987028 - RNA, 22 nt, Human
ccugauggagcccugcugcaug

SEQ ID NO: 987029 - RNA, 22 nt, Human
agagcuguucaacguagcaaug

SEQ ID NO: 987030 - RNA, 22 nt, Human
ucacucugcaggaaggagcagc

SEQ ID NO: 987031 - RNA, 22 nt, Human
ggcugccugggagcccuccucu

SEQ ID NO: 987032 - RNA, 22 nt, Human
aaguucaagucuccugaguaua

SEQ ID NO: 987033 - RNA, 22 nt, Human
ugcauuguugaauauuucauag

SEQ ID NO: 987034 - RNA, 22 nt, Human
ccucugcaccauagccuucagc

SEQ ID NO: 987035 - RNA, 19 nt, Human
ccaguagagacagcugcag

SEQ ID NO: 987036 - RNA, 22 nt, Human
uggcucagagccuugagagcug

SEQ ID NO: 987037 - RNA, 22 nt, Human
acaugcauacaagcacauguag

SEQ ID NO: 987038 - RNA, 22 nt, Human
uggcuuccacugugugcccccu

SEQ ID NO: 987039 - RNA, 22 nt, Human
gcagggcagcuuagucccuguc

SEQ ID NO: 987040 - RNA, 22 nt, Human
guuugcauuuauuagucuucug

SEQ ID NO: 987041 - RNA, 21 nt, Human
agcagcugcaguuucuaucug

SEQ ID NO: 987042 - RNA, 22 nt, Human
agcugcccugggucuugcugcu

SEQ ID NO: 987043 - RNA, 22 nt, Human
gggccaggucggugaaugguca

SEQ ID NO: 987044 - RNA, 22 nt, Human
gcugucugcugggucgcucagg

SEQ ID NO: 987045 - RNA, 22 nt, Human
cccagcucaagcagagagcuaa

SEQ ID NO: 987046 - RNA, 22 nt, Human
cacagagagcuacgugcagcgu

SEQ ID NO: 987047 - RNA, 22 nt, Human
uucauucauuacgugccaggca

SEQ ID NO: 987048 - RNA, 22 nt, Human
uuagaaaucugcugccaugcaa

SEQ ID NO: 987049 - RNA, 22 nt, Human
caaaggcaguuacugaaugaag

SEQ ID NO: 987050 - RNA, 22 nt, Human
ucaaacuguuuacagugagaua

SEQ ID NO: 987051 - RNA, 22 nt, Human
ugucaucuuuuuaaagaagaga

SEQ ID NO: 987052 - RNA, 22 nt, Human
cagcagcccacgcgugcugucc

SEQ ID NO: 987053 - RNA, 23 nt, Human
augcaguauaugucaguaguuua

SEQ ID NO: 987054 - RNA, 22 nt, Human
cugucccaggagcuguaagaca

SEQ ID NO: 987055 - RNA, 22 nt, Human
gcagagcagugcuugcccagcg

SEQ ID NO: 987056 - RNA, 22 nt, Human
uguuucagucccuguguucaau

SEQ ID NO: 987057 - RNA, 22 nt, Human
agcagcucugagaggccagcac

SEQ ID NO: 987058 - RNA, 22 nt, Human
gucuggaguggggccugagaau

SEQ ID NO: 987059 - RNA, 22 nt, Human
aaucuggcauuugagaguagga

SEQ ID NO: 987060 - RNA, 22 nt, Human
ccagggugugggcgucggcacg

SEQ ID NO: 987061 - RNA, 22 nt, Human
cugaggcucccucgggucugcu

SEQ ID NO: 987062 - RNA, 19 nt, Human
ggaugagggucaggcauag

SEQ ID NO: 987063 - RNA, 22 nt, Human
gauuuccuagacauggggcaga

SEQ ID NO: 987064 - RNA, 22 nt, Human
uaaagguaugucuuaaucaaac

SEQ ID NO: 987065 - RNA, 22 nt, Human
acagaacugggaaaugcacaua

SEQ ID NO: 987066 - RNA, 22 nt, Human
agcugaaggcuagaacagcugg

SEQ ID NO: 987067 - RNA, 22 nt, Human
uuccaggggcagcagugauggu

SEQ ID NO: 987068 - RNA, 22 nt, Human
uauugaaaugaaugacagugau

SEQ ID NO: 987069 - RNA, 22 nt, Human
aagauuucucuccuggaaagca

SEQ ID NO: 987070 - RNA, 20 nt, Human
cagcaggaaaagugccucag

SEQ ID NO: 987071 - RNA, 22 nt, Human
uuaaaguucauuaaaugagcca

SEQ ID NO: 987072 - RNA, 22 nt, Human
ccacacagucaguuuccaagaa

SEQ ID NO: 987073 - RNA, 22 nt, Human
ugaugcugcugggaguggugcu

SEQ ID NO: 987074 - RNA, 22 nt, Human
ggaggccaaggcaggcggauca

SEQ ID NO: 987075 - RNA, 22 nt, Human
gagggggcgugcaaggcuccgc

SEQ ID NO: 987076 - RNA, 22 nt, Human
gcaggcagagaaggaacauuua

SEQ ID NO: 987077 - RNA, 22 nt, Human
cuucacauguuggaguccuuug

SEQ ID NO: 987078 - RNA, 19 nt, Human
cugguccugacugaggggu

SEQ ID NO: 987079 - RNA, 22 nt, Human
uuuuaauugcaauuaugguccc

SEQ ID NO: 987080 - RNA, 22 nt, Human
gaauuguagagggaacagaagc

SEQ ID NO: 987081 - RNA, 19 nt, Human
ucugcuggcagaauucccu

SEQ ID NO: 987082 - RNA, 22 nt, Human
ccugcccagcuucaccucaggc

SEQ ID NO: 987083 - RNA, 22 nt, Human
ucaagcaucuuggucuacgauc

SEQ ID NO: 987084 - RNA, 22 nt, Human
cuggcucaggguggucuggguc

SEQ ID NO: 987085 - RNA, 22 nt, Human
agagaggcugggcguagggcuu

SEQ ID NO: 987086 - RNA, 22 nt, Human
cauugcacuccacccuaggcaa

SEQ ID NO: 987087 - RNA, 22 nt, Human
uggcagaggaaaaagucacugg

SEQ ID NO: 987088 - RNA, 22 nt, Human
gaaggagcuaaagggagcccug

SEQ ID NO: 987089 - RNA, 22 nt, Human
ccugagggaggguauaggcugu

SEQ ID NO: 987090 - RNA, 22 nt, Human
aaagcuauuugugaguuauaga

SEQ ID NO: 987091 - RNA, 22 nt, Human
ucagggcaucaucaugaauaua

SEQ ID NO: 987092 - RNA, 22 nt, Human
auguuaaaugguuuauuauuaa

SEQ ID NO: 987093 - RNA, 22 nt, Human
uggcagagaugaagaguuguuu

SEQ ID NO: 987094 - RNA, 22 nt, Human
aucuggcucgcuaggcucuggg

SEQ ID NO: 987095 - RNA, 22 nt, Human
gccugaaguuucaugccucuau

SEQ ID NO: 987096 - RNA, 22 nt, Human
guucacaagcugauugucuuuc

SEQ ID NO: 987097 - RNA, 22 nt, Human
acagaaugcguagugcauguug

SEQ ID NO: 987098 - RNA, 22 nt, Human
uaacagaagaugaaacuucuuu

SEQ ID NO: 987099 - RNA, 22 nt, Human
uggcagcuacagacagagguga

SEQ ID NO: 987100 - RNA, 19 nt, Human
gagcugccuuuugaagacc

SEQ ID NO: 987101 - RNA, 22 nt, Human
gccagggggucagcaggcacuu

SEQ ID NO: 987102 - RNA, 22 nt, Human
auuauuagugauguuguuacug

SEQ ID NO: 987103 - RNA, 22 nt, Human
ggcaaaaaccgcaauaacuucu

SEQ ID NO: 987104 - RNA, 22 nt, Human
accaggggugucaacagcauuu

SEQ ID NO: 987105 - RNA, 22 nt, Human
acacaguaccccaaggcugggc

SEQ ID NO: 987106 - RNA, 22 nt, Human
gucugucuguuguugagaagca

SEQ ID NO: 987107 - RNA, 22 nt, Human
aagaacaguugggaggugagcc

SEQ ID NO: 987108 - RNA, 21 nt, Human
ggcagccugacccccagagag

SEQ ID NO: 987109 - RNA, 22 nt, Human
guuuuauuuccaugagagaccg

SEQ ID NO: 987110 - RNA, 22 nt, Human
augcuuccaaggcuaagacaag

SEQ ID NO: 987111 - RNA, 22 nt, Human
agguggccggugccagccgggc

SEQ ID NO: 987112 - RNA, 22 nt, Human
caggcagcagccacucugguau

SEQ ID NO: 987113 - RNA, 22 nt, Human
ugccacccagccaggaguggga

SEQ ID NO: 987114 - RNA, 22 nt, Human
cuggcagggugggcuuugcuuu

SEQ ID NO: 987115 - RNA, 23 nt, Human
aacaauagguuuuggcagaauag

SEQ ID NO: 987116 - RNA, 19 nt, Human
ccaggccuccugggagguc

SEQ ID NO: 987117 - RNA, 22 nt, Human
gauuuccuaauguggaucucug

SEQ ID NO: 987118 - RNA, 22 nt, Human
uggcucagcaagacauugaccu

SEQ ID NO: 987119 - RNA, 22 nt, Human
ugaccaaaggugguuuauuugg

SEQ ID NO: 987120 - RNA, 21 nt, Human
uggcagacaggaggagcucac

SEQ ID NO: 987121 - RNA, 22 nt, Human
uuuuacuuaauucuuggucaug

SEQ ID NO: 987122 - RNA, 22 nt, Human
ugcauguggaccccuggugccu

SEQ ID NO: 987123 - RNA, 22 nt, Human
ggggcagagcauagcuccaauu

SEQ ID NO: 987124 - RNA, 22 nt, Human
cuauugaauuaacuauuaaagu

SEQ ID NO: 987125 - RNA, 22 nt, Human
aagguacaguuuuaagaauaag

SEQ ID NO: 987126 - RNA, 22 nt, Human
accauuuaauaaguauuuccau

SEQ ID NO: 987127 - RNA, 22 nt, Human
agagggcauuaacucugucuug

SEQ ID NO: 987128 - RNA, 22 nt, Human
gcauccagucuuggcuccugga

SEQ ID NO: 987129 - RNA, 22 nt, Human
accugagggcccaaacuuggua

SEQ ID NO: 987130 - RNA, 22 nt, Human
gacagccucaugaggagcaaaa

SEQ ID NO: 987131 - RNA, 22 nt, Human
cuguccuggagggcauaggacg

SEQ ID NO: 987132 - RNA, 23 nt, Human
ggccuccuggucuaggcuagacu

SEQ ID NO: 987133 - RNA, 22 nt, Human
ccccagcugcauacuugccaag

SEQ ID NO: 987134 - RNA, 22 nt, Human
uggguaaacugggucuggagag

SEQ ID NO: 987135 - RNA, 22 nt, Human
ucacaggguuuggaagccuccu

SEQ ID NO: 987136 - RNA, 22 nt, Human
acucugccccgaguucugggaa

SEQ ID NO: 987137 - RNA, 22 nt, Human
ucuuaaaaguaugccaauugga

SEQ ID NO: 987138 - RNA, 22 nt, Human
aguguuguaugggaugacugcu

SEQ ID NO: 987139 - RNA, 22 nt, Human
acagagauguggaugagggauu

SEQ ID NO: 987140 - RNA, 20 nt, Human
uacagaaacaggacuuuugg

SEQ ID NO: 987141 - RNA, 22 nt, Human
uguggcuuaagaaugccuuuaa

SEQ ID NO: 987142 - RNA, 22 nt, Human
ucugaagccaccucugcuuguc

SEQ ID NO: 987143 - RNA, 22 nt, Human
cugcccugccuggccagugugg

SEQ ID NO: 987144 - RNA, 22 nt, Human
cuguuuaucccuuuggucagca

SEQ ID NO: 987145 - RNA, 22 nt, Human
ugcuauaagaauuauauuacuc

SEQ ID NO: 987146 - RNA, 20 nt, Human
cauuggacuuggcuucaugg

SEQ ID NO: 987147 - RNA, 22 nt, Human
gggcugcuuauacugaugauaa

SEQ ID NO: 987148 - RNA, 22 nt, Human
cugagcugaaacuugagaggcu

SEQ ID NO: 987149 - RNA, 22 nt, Human
ucuuacauauagcaugaguaca

SEQ ID NO: 987150 - RNA, 20 nt, Human
gcccuggagccuuguccugg

SEQ ID NO: 987151 - RNA, 22 nt, Human
gucccagggaugcagacaugag

SEQ ID NO: 987152 - RNA, 22 nt, Human
gccuaauaugcaaaauugauac

SEQ ID NO: 987153 - RNA, 22 nt, Human
cugacucuccucaagcauaaau

SEQ ID NO: 987154 - RNA, 22 nt, Human
ccugccagggccuuggaagaaa

SEQ ID NO: 987155 - RNA, 22 nt, Human
aauguguagauguugcauuccu

SEQ ID NO: 987156 - RNA, 22 nt, Human
gcuggcaucacuggcuucggug

SEQ ID NO: 987157 - RNA, 22 nt, Human
uagauaaauuagaaaguuuacu

SEQ ID NO: 987158 - RNA, 22 nt, Human
gccuucugcgcucgugucuccg

SEQ ID NO: 987159 - RNA, 22 nt, Human
uggcucagcugacucggcuucu

SEQ ID NO: 987160 - RNA, 19 nt, Human
gggcuuggggcugaagccu

SEQ ID NO: 987161 - RNA, 22 nt, Human
auuuagaaauuccaaaaguauu

SEQ ID NO: 987162 - RNA, 22 nt, Human
agcagccacacgccuccuucuc

SEQ ID NO: 987163 - RNA, 22 nt, Human
ugccuuggugcuucuucaugug

SEQ ID NO: 987164 - RNA, 20 nt, Human
auacacauauucuugcaacu

SEQ ID NO: 987165 - RNA, 22 nt, Human
aaguguguugacugaauugggg

SEQ ID NO: 987166 - RNA, 22 nt, Human
ucugagcauugaauuuucuucc

SEQ ID NO: 987167 - RNA, 22 nt, Human
agguaggguuaauggagauaua

SEQ ID NO: 987168 - RNA, 22 nt, Human
cagaguccuggacacagagaca

SEQ ID NO: 987169 - RNA, 22 nt, Human
agguggagacccagagaaggcg

SEQ ID NO: 987170 - RNA, 22 nt, Human
agggagcaugggugaagcaggc

SEQ ID NO: 987171 - RNA, 22 nt, Human
aguaacuaugcuugagaaucag

SEQ ID NO: 987172 - RNA, 22 nt, Human
acugucaccaucagagcgggaa

SEQ ID NO: 987173 - RNA, 22 nt, Human
ggcgaggccgggacaggcugga

SEQ ID NO: 987174 - RNA, 20 nt, Human
gccuggaggcagagauaaag

SEQ ID NO: 987175 - RNA, 22 nt, Human
gaaugcacacgugugugcaugc

SEQ ID NO: 987176 - RNA, 22 nt, Human
cuggcccuucucuugcuuccug

SEQ ID NO: 987177 - RNA, 22 nt, Human
gggcugcugccaccagguggau

SEQ ID NO: 987178 - RNA, 19 nt, Human
agggaaggauucugucauu

SEQ ID NO: 987179 - RNA, 22 nt, Human
ggugacuggagggacccaggcc

SEQ ID NO: 987180 - RNA, 22 nt, Human
cuacauuuuaauaagcugcuua

SEQ ID NO: 987181 - RNA, 22 nt, Human
uggccucuuacgacauagccuu

SEQ ID NO: 987182 - RNA, 22 nt, Human
ucugccugcaguguggcagggc

SEQ ID NO: 987183 - RNA, 22 nt, Human
auuucuuuucaagagggugcuu

SEQ ID NO: 987184 - RNA, 22 nt, Human
agggcagacuaggauggaagug

SEQ ID NO: 987185 - RNA, 22 nt, Human
gcucccaccaggcagaccuacc

SEQ ID NO: 987186 - RNA, 22 nt, Human
cucuggagcgcugcuucccgcg

SEQ ID NO: 987187 - RNA, 22 nt, Human
cagcugccugucuggaggcaau

SEQ ID NO: 987188 - RNA, 22 nt, Human
uggcucucaggccugcugcguu

SEQ ID NO: 987189 - RNA, 22 nt, Human
agggagcugcucugcuuccgug

SEQ ID NO: 987190 - RNA, 19 nt, Human
ucuaagccucaauguuuuc

SEQ ID NO: 987191 - RNA, 22 nt, Human
gcuggcuguguuccuucugcca

SEQ ID NO: 987192 - RNA, 22 nt, Human
aggauccugcgcuuugggggag

SEQ ID NO: 987193 - RNA, 22 nt, Human
gcuuccuaaaugcacagggcag

SEQ ID NO: 987194 - RNA, 19 nt, Human
uucacauuggaagaaguag

SEQ ID NO: 987195 - RNA, 22 nt, Human
ugucaguguauacauacaguau

SEQ ID NO: 987196 - RNA, 22 nt, Human
ggccugcuccgggggcugagcu

SEQ ID NO: 987197 - RNA, 22 nt, Human
agccugguguggggcugcagag

SEQ ID NO: 987198 - RNA, 22 nt, Human
auauuucuccaaauguuuucaa

SEQ ID NO: 987199 - RNA, 22 nt, Human
gcaaagcugggugugaaugcac

SEQ ID NO: 987200 - RNA, 18 nt, Human
agcagcugugccacacug

SEQ ID NO: 987201 - RNA, 22 nt, Human
ucugcgcugccuugauccuugg

SEQ ID NO: 987202 - RNA, 22 nt, Human
acacugaaugcuguuuagaaau

SEQ ID NO: 987203 - RNA, 22 nt, Human
gccaggcuggugucacaacucu

SEQ ID NO: 987204 - RNA, 21 nt, Human
acagcaagccuuccuuucagg

SEQ ID NO: 987205 - RNA, 22 nt, Human
ucagaaaugaucguuauucauu

SEQ ID NO: 987206 - RNA, 22 nt, Human
auucacaacugauccuugcuca

SEQ ID NO: 987207 - RNA, 20 nt, Human
cugugcuuuggaaccuggaa

SEQ ID NO: 987208 - RNA, 22 nt, Human
gggaaauugugugagaucuuug

SEQ ID NO: 987209 - RNA, 21 nt, Human
aaugugugcuauuuaucuuuu

SEQ ID NO: 987210 - RNA, 22 nt, Human
gcagcagaguuugggagauggu

SEQ ID NO: 987211 - RNA, 22 nt, Human
ccacagggucagccacucugca

SEQ ID NO: 987212 - RNA, 22 nt, Human
gaugaagccugacuucucggug

SEQ ID NO: 987213 - RNA, 17 nt, Human
ugcauuguuggaaauuu

SEQ ID NO: 987214 - RNA, 16 nt, Human
uggaaggggucuccgg

SEQ ID NO: 987215 - RNA, 22 nt, Human
agggccagagucuguguagaua

SEQ ID NO: 987216 - RNA, 18 nt, Human
cagauccaggcagcuauu

SEQ ID NO: 987217 - RNA, 22 nt, Human
agaaauuccuaagguacacaag

SEQ ID NO: 987218 - RNA, 22 nt, Human
guggagacuucuacuagagacc

SEQ ID NO: 987219 - RNA, 22 nt, Human
uuugacaguaauaaagcacaag

SEQ ID NO: 987220 - RNA, 22 nt, Human
agguuauaugucauacugaagu

SEQ ID NO: 987221 - RNA, 22 nt, Human
gcauugucaaaagugguaugac

SEQ ID NO: 987222 - RNA, 22 nt, Human
gcauuucugugcauacacauga

SEQ ID NO: 987223 - RNA, 22 nt, Human
uuggaaggcccugccuagcagg

SEQ ID NO: 987224 - RNA, 22 nt, Human
gcccucagaggacagcugacuu

SEQ ID NO: 987225 - RNA, 22 nt, Human
augggaugaacuugaucugcuu

SEQ ID NO: 987226 - RNA, 22 nt, Human
uggaggcauaggccugggcccu

SEQ ID NO: 987227 - RNA, 20 nt, Human
agaaucugacccagagagac

SEQ ID NO: 987228 - RNA, 22 nt, Human
auucacaauagcagcuugcaug

SEQ ID NO: 987229 - RNA, 22 nt, Human
gcagaggccaucaacuuugcca

SEQ ID NO: 987230 - RNA, 23 nt, Human
ggaguuggauuguacuugcugcu

SEQ ID NO: 987231 - RNA, 22 nt, Human
gcccuggaaucucuccauggga

SEQ ID NO: 987232 - RNA, 22 nt, Human
gaaggagggugcggaucugagc

SEQ ID NO: 987233 - RNA, 22 nt, Human
ggcucuggcaaggggaggcuac

SEQ ID NO: 987234 - RNA, 22 nt, Human
ucuuagaaaugaaguucuuucu

SEQ ID NO: 987235 - RNA, 22 nt, Human
guauccuuugcggaaauuucua

SEQ ID NO: 987236 - RNA, 22 nt, Human
uugcagagaucagcagguuuga

SEQ ID NO: 987237 - RNA, 22 nt, Human
uacucugcucauuggagugugu

SEQ ID NO: 987238 - RNA, 22 nt, Human
aggcauguauaugugcacaugu

SEQ ID NO: 987239 - RNA, 23 nt, Human
cugcagucgccggccugggugcc

SEQ ID NO: 987240 - RNA, 22 nt, Human
aauucacagcauuugcccaucu

SEQ ID NO: 987241 - RNA, 20 nt, Human
cugagcgucuaagaggugag

SEQ ID NO: 987242 - RNA, 22 nt, Human
ugcaguggaagagguggagauc

SEQ ID NO: 987243 - RNA, 17 nt, Human
ccuuucucuuucaucuc

SEQ ID NO: 987244 - RNA, 22 nt, Human
auaagguaugaaaaguaaaugg

SEQ ID NO: 987245 - RNA, 22 nt, Human
cagcuccugaggacugcuggga

SEQ ID NO: 987246 - RNA, 22 nt, Human
ggaguucacugugcaggcucug

SEQ ID NO: 987247 - RNA, 22 nt, Human
ugauuuccaaaaggcuucuaag

SEQ ID NO: 987248 - RNA, 22 nt, Human
gucucagauucagacaucuaca

SEQ ID NO: 987249 - RNA, 22 nt, Human
aggcugcucugcgaagucagcu

SEQ ID NO: 987250 - RNA, 22 nt, Human
agaaaguucacugguauauuuu

SEQ ID NO: 987251 - RNA, 22 nt, Human
caguagcagggauuauuuuagg

SEQ ID NO: 987252 - RNA, 21 nt, Human
ucauuuuuauugcuaccuugc

SEQ ID NO: 987253 - RNA, 22 nt, Human
uaccuuuugcuuauuaugacac

SEQ ID NO: 987254 - RNA, 22 nt, Human
uggcuggcccugggagugcaga

SEQ ID NO: 987255 - RNA, 22 nt, Human
auaaggcauauagucacuuuuu

SEQ ID NO: 987256 - RNA, 22 nt, Human
caaagggcucuagacucagcag

SEQ ID NO: 987257 - RNA, 22 nt, Human
cuguuacacggaccuucaaauc

SEQ ID NO: 987258 - RNA, 22 nt, Human
agaauucuccuucagggcagga

SEQ ID NO: 987259 - RNA, 22 nt, Human
uucuuacagcccuauuacuaaa

SEQ ID NO: 987260 - RNA, 22 nt, Human
ucagagaugcagugccaccuac

SEQ ID NO: 987261 - RNA, 22 nt, Human
gccuugcuuugcuucuggacag

SEQ ID NO: 987262 - RNA, 22 nt, Human
acagcagccuuguugguuucga

SEQ ID NO: 987263 - RNA, 22 nt, Human
aaucaguuagaaggaagagaau

SEQ ID NO: 987264 - RNA, 22 nt, Human
guggcucuaggugagcauggag

SEQ ID NO: 987265 - RNA, 22 nt, Human
uagcccagagucccaauuccag

SEQ ID NO: 987266 - RNA, 22 nt, Human
caaggagaaaacggcuucugaa

SEQ ID NO: 987267 - RNA, 22 nt, Human
uauguacaguccuuaacuuaaa

SEQ ID NO: 987268 - RNA, 21 nt, Human
aagagcuggaucaaggauaag

SEQ ID NO: 987269 - RNA, 22 nt, Human
uccuggccuugcuccugaugcc

SEQ ID NO: 987270 - RNA, 22 nt, Human
cagaggccccagaacuagcucu

SEQ ID NO: 987271 - RNA, 22 nt, Human
cauacuuugggauaagagugga

SEQ ID NO: 987272 - RNA, 22 nt, Human
uuuucauuuuuguagaugcaag

SEQ ID NO: 987273 - RNA, 23 nt, Human
agcaauaagaagggauacaugug

SEQ ID NO: 987274 - RNA, 22 nt, Human
ugggaccaagucauuucuuuag

SEQ ID NO: 987275 - RNA, 22 nt, Human
uggacagcgaaagugccuggga

SEQ ID NO: 987276 - RNA, 20 nt, Human
aaagucuuaugguuaauuuu

SEQ ID NO: 987277 - RNA, 22 nt, Human
ugucccagcagcuggguucucu

SEQ ID NO: 987278 - RNA, 22 nt, Human
aagaacagauucagccugaacu

SEQ ID NO: 987279 - RNA, 22 nt, Human
aggacaggauugagcugaacug

SEQ ID NO: 987280 - RNA, 22 nt, Human
auaugcacauacauacauaggu

SEQ ID NO: 987281 - RNA, 22 nt, Human
ggaugcugacuuuggagcaugg

SEQ ID NO: 987282 - RNA, 22 nt, Human
aguuuuaugcaguguucugaua

SEQ ID NO: 987283 - RNA, 22 nt, Human
gcagggcucaacaggacacccc

SEQ ID NO: 987284 - RNA, 22 nt, Human
agcucugggccaggaacccuaa

SEQ ID NO: 987285 - RNA, 22 nt, Human
guucuccauucagcuuccugug

SEQ ID NO: 987286 - RNA, 22 nt, Human
uuuccucuccaccaggaggucu

SEQ ID NO: 987287 - RNA, 22 nt, Human
cacagcugcccuacuccaugug

SEQ ID NO: 987288 - RNA, 20 nt, Human
agucucuguagugccugaga

SEQ ID NO: 987289 - RNA, 22 nt, Human
aggcucugguuggcaaguaaag

SEQ ID NO: 987290 - RNA, 22 nt, Human
ugcaugcagcuggugauaagaa

SEQ ID NO: 987291 - RNA, 22 nt, Human
ucucagaguaauucuuuaaggu

SEQ ID NO: 987292 - RNA, 22 nt, Human
cucagggggaaucaggucacag

SEQ ID NO: 987293 - RNA, 22 nt, Human
gggcagcugccaagugcaucgc

SEQ ID NO: 987294 - RNA, 18 nt, Human
uccauuguucuacuguga

SEQ ID NO: 987295 - RNA, 22 nt, Human
caguauguacucuuaucaugua

SEQ ID NO: 987296 - RNA, 22 nt, Human
acuguacuguguauuguagaau

SEQ ID NO: 987297 - RNA, 22 nt, Human
acagcugggugcugcucagagc

SEQ ID NO: 987298 - RNA, 17 nt, Human
gagaguguauuggaugc

SEQ ID NO: 987299 - RNA, 22 nt, Human
uggacucagugcugccauuccc

SEQ ID NO: 987300 - RNA, 22 nt, Human
agccuccuggaguuucugggau

SEQ ID NO: 987301 - RNA, 21 nt, Human
gggugcuguggucaugcagga

SEQ ID NO: 987302 - RNA, 22 nt, Human
uggugccuugggccuacagcgc

SEQ ID NO: 987303 - RNA, 22 nt, Human
uagacagauuuaaaggaaugga

SEQ ID NO: 987304 - RNA, 22 nt, Human
ccugcugggccugagcaaugag

SEQ ID NO: 987305 - RNA, 20 nt, Human
caccaggcgcucugagaaca

SEQ ID NO: 987306 - RNA, 22 nt, Human
ggcuagaacuuuacacuuugca

SEQ ID NO: 987307 - RNA, 22 nt, Human
uuuuucaugagacuagaaguca

SEQ ID NO: 987308 - RNA, 22 nt, Human
aggcuggguaccugucauaugc

SEQ ID NO: 987309 - RNA, 22 nt, Human
cugggugguucuaacuguugau

SEQ ID NO: 987310 - RNA, 22 nt, Human
agcugccaaguuggaguagcaa

SEQ ID NO: 987311 - RNA, 22 nt, Human
ccaggagccacucaggcccaca

SEQ ID NO: 987312 - RNA, 22 nt, Human
gcagauggcucagacacugggg

SEQ ID NO: 987313 - RNA, 22 nt, Human
aggaagccuggggcugcccucg

SEQ ID NO: 987314 - RNA, 22 nt, Human
agcuucuugaccaagccuguaa

SEQ ID NO: 987315 - RNA, 22 nt, Human
gggagggaaagcuugaucuguc

SEQ ID NO: 987316 - RNA, 22 nt, Human
auuagguaagauaaagcagagg

SEQ ID NO: 987317 - RNA, 22 nt, Human
cccaggaguuugaguucagcau

SEQ ID NO: 987318 - RNA, 22 nt, Human
ggcuggagauaugucuggaaca

SEQ ID NO: 987319 - RNA, 22 nt, Human
aggccucuucagggagcaugga

SEQ ID NO: 987320 - RNA, 22 nt, Human
uuagucuucuuccuuauauguu

SEQ ID NO: 987321 - RNA, 22 nt, Human
agcugcaguaaagcucuccagg

SEQ ID NO: 987322 - RNA, 22 nt, Human
ucacaugcccuguauuuaccag

SEQ ID NO: 987323 - RNA, 22 nt, Human
ggcuucucgugccgaagcaaga

SEQ ID NO: 987324 - RNA, 22 nt, Human
ggaaagagcuaaaagggugaga

SEQ ID NO: 987325 - RNA, 22 nt, Human
cuucacaauucuaacagggcaa

SEQ ID NO: 987326 - RNA, 22 nt, Human
gcagagccaggagagacccuug

SEQ ID NO: 987327 - RNA, 22 nt, Human
accaaggagacaaagguguauu

SEQ ID NO: 987328 - RNA, 23 nt, Human
ccuggcuggauucucugcauuca

SEQ ID NO: 987329 - RNA, 23 nt, Human
aguacauucgaaaaauucuguga

SEQ ID NO: 987330 - RNA, 22 nt, Human
uagcugccauugcuccaggaag

SEQ ID NO: 987331 - RNA, 22 nt, Human
aaaaugagauacaguuugaaag

SEQ ID NO: 987332 - RNA, 22 nt, Human
agauggggcucaguguggaggc

SEQ ID NO: 987333 - RNA, 22 nt, Human
guggccaagggacucuaaggca

SEQ ID NO: 987334 - RNA, 22 nt, Human
uacaccuuaaucauaugugucu

SEQ ID NO: 987335 - RNA, 22 nt, Human
cuccucugucuaccacgagggu

SEQ ID NO: 987336 - RNA, 22 nt, Human
uggcagagcaaaaagauagaau

SEQ ID NO: 987337 - RNA, 22 nt, Human
gaggaugugucuggucugggca

SEQ ID NO: 987338 - RNA, 22 nt, Human
aaggcugagagucacaguccua

SEQ ID NO: 987339 - RNA, 19 nt, Human
caugcugaccugcuguggu

SEQ ID NO: 987340 - RNA, 22 nt, Human
ugccugaugcaggaguaucaga

SEQ ID NO: 987341 - RNA, 22 nt, Human
acagagcucccagccaucuccu

SEQ ID NO: 987342 - RNA, 22 nt, Human
guauuagguuggugcaaaagua

SEQ ID NO: 987343 - RNA, 22 nt, Human
ugaacccaggagguugcaguga

SEQ ID NO: 987344 - RNA, 22 nt, Human
ggcugccuacuuucccagaguu

SEQ ID NO: 987345 - RNA, 20 nt, Human
gcaggcagggaaugggggug

SEQ ID NO: 987346 - RNA, 21 nt, Human
auuuggauauugcuggcaaau

SEQ ID NO: 987347 - RNA, 22 nt, Human
ggcugccuccucgagacaggau

SEQ ID NO: 987348 - RNA, 22 nt, Human
agcuucuggaagccuggcagca

SEQ ID NO: 987349 - RNA, 22 nt, Human
cucagagaagucuuugcuaaac

SEQ ID NO: 987350 - RNA, 22 nt, Human
ccuuuugcucucccauccagaa

SEQ ID NO: 987351 - RNA, 22 nt, Human
uggcacugccuggcagggcccc

SEQ ID NO: 987352 - RNA, 22 nt, Human
aaguuuuaacaaguacuuacua

SEQ ID NO: 987353 - RNA, 22 nt, Human
auuucagcccaguaugagcccc

SEQ ID NO: 987354 - RNA, 22 nt, Human
gggcuggcaucgguugcugaga

SEQ ID NO: 987355 - RNA, 22 nt, Human
cagggcagagggaaacuccuuu

SEQ ID NO: 987356 - RNA, 22 nt, Human
uggccugcagcucucagggaag

SEQ ID NO: 987357 - RNA, 22 nt, Human
ugguuugcccacucgagugauu

SEQ ID NO: 987358 - RNA, 22 nt, Human
gaccuuuuuacuguguacgcug

SEQ ID NO: 987359 - RNA, 22 nt, Human
ugggagagugcucaaugugcaa

SEQ ID NO: 987360 - RNA, 22 nt, Human
uccagcagcccgaaggcccauc

SEQ ID NO: 987361 - RNA, 22 nt, Human
cacagaaaaaggcuugaaaauc

SEQ ID NO: 987362 - RNA, 22 nt, Human
aggaguguggccagggcucugg

SEQ ID NO: 987363 - RNA, 22 nt, Human
auuauaggcuugagccaccgug

SEQ ID NO: 987364 - RNA, 22 nt, Human
agauacauuaguaguuacuugu

SEQ ID NO: 987365 - RNA, 22 nt, Human
cgagcaugaugacggcuguggc

SEQ ID NO: 987366 - RNA, 22 nt, Human
cagcugcaggaacaaaaaugug

SEQ ID NO: 987367 - RNA, 22 nt, Human
gcucccagauuucagccuugug

SEQ ID NO: 987368 - RNA, 19 nt, Human
aucuuacagagcagaguac

SEQ ID NO: 987369 - RNA, 22 nt, Human
uggcccgaccucugcucaugca

SEQ ID NO: 987370 - RNA, 22 nt, Human
aaguucuaauuuugcauucagg

SEQ ID NO: 987371 - RNA, 21 nt, Human
ucacuuauaauguauuugcug

SEQ ID NO: 987372 - RNA, 22 nt, Human
aggcugggaaaccugaaguugu

SEQ ID NO: 987373 - RNA, 22 nt, Human
auggcccaggccuccuguggcu

SEQ ID NO: 987374 - RNA, 22 nt, Human
cuuaagaauauugaaguugugg

SEQ ID NO: 987375 - RNA, 22 nt, Human
uggcucagccuggcccuuucau

SEQ ID NO: 987376 - RNA, 22 nt, Human
uaugaagauauaucugaucucu

SEQ ID NO: 987377 - RNA, 21 nt, Human
gagacagacuuucguccccug

SEQ ID NO: 987378 - RNA, 22 nt, Human
auaucuuuuagagcaagcuugu

SEQ ID NO: 987379 - RNA, 22 nt, Human
uggccugccugggagcagcagg

SEQ ID NO: 987380 - RNA, 22 nt, Human
ugccugucucugacugccauua

SEQ ID NO: 987381 - RNA, 23 nt, Human
ugggccuggccucccaguccagc

SEQ ID NO: 987382 - RNA, 22 nt, Human
ggcggggguccaggagccugca

SEQ ID NO: 987383 - RNA, 22 nt, Human
cuuugaaaacuuaaauaacagc

SEQ ID NO: 987384 - RNA, 22 nt, Human
augauguuauuuucagaaacau

SEQ ID NO: 987385 - RNA, 22 nt, Human
cugagaggugacagcgugcugg

SEQ ID NO: 987386 - RNA, 22 nt, Human
aaacuguauauuuauggcaugu

SEQ ID NO: 987387 - RNA, 22 nt, Human
uggcuuccugcauggauccucu

SEQ ID NO: 987388 - RNA, 23 nt, Human
aggagaagagauuuccacaugca

SEQ ID NO: 987389 - RNA, 22 nt, Human
gccugguguccagaggcgagug

SEQ ID NO: 987390 - RNA, 22 nt, Human
ugggagcugggguuggacgucu

SEQ ID NO: 987391 - RNA, 20 nt, Human
gucagugucuucaguaguga

SEQ ID NO: 987392 - RNA, 22 nt, Human
cucagagcaaugaacaugcaaa

SEQ ID NO: 987393 - RNA, 22 nt, Human
cuguguggccucaagccagccu

SEQ ID NO: 987394 - RNA, 22 nt, Human
uggcagggccugaaucuuauac

SEQ ID NO: 987395 - RNA, 21 nt, Human
uaucuacuggugucuuucaga

SEQ ID NO: 987396 - RNA, 22 nt, Human
caggccugugaguugaggcccc

SEQ ID NO: 987397 - RNA, 18 nt, Human
ugucucugaauuccagug

SEQ ID NO: 987398 - RNA, 22 nt, Human
uugacagcaaagauugugccua

SEQ ID NO: 987399 - RNA, 22 nt, Human
cuggcuccaucacugggugaug

SEQ ID NO: 987400 - RNA, 22 nt, Human
acucugcaauguggcaagaaca

SEQ ID NO: 987401 - RNA, 22 nt, Human
ugcugccacaaauucagcugcc

SEQ ID NO: 987402 - RNA, 20 nt, Human
gagauuuccaaucaugccca

SEQ ID NO: 987403 - RNA, 22 nt, Human
auguacaguggaaacuaacaaa

SEQ ID NO: 987404 - RNA, 22 nt, Human
gggguggauuccuacaggucca

SEQ ID NO: 987405 - RNA, 22 nt, Human
uggccagguguggguucucaga

SEQ ID NO: 987406 - RNA, 22 nt, Human
cagagguacaagcuaaguuggg

SEQ ID NO: 987407 - RNA, 21 nt, Human
uggcacugcuuagcagguucc

SEQ ID NO: 987408 - RNA, 22 nt, Human
uggcucaggggucuggcucugu

SEQ ID NO: 987409 - RNA, 22 nt, Human
cagucccaggguugguucagcu

SEQ ID NO: 987410 - RNA, 22 nt, Human
cagccucucuguaucucaggau

SEQ ID NO: 987411 - RNA, 22 nt, Human
aagugacacauggcacuucuau

SEQ ID NO: 987412 - RNA, 23 nt, Human
gcuguuagauuuaauaagcauuu

SEQ ID NO: 987413 - RNA, 22 nt, Human
guggcuugaccaucccugcuac

SEQ ID NO: 987414 - RNA, 16 nt, Human
gagggcagaggcggaa

SEQ ID NO: 987415 - RNA, 22 nt, Human
cuccagggagcugcgggagcca

SEQ ID NO: 987416 - RNA, 22 nt, Human
cagaggccuuucuacagugaua

SEQ ID NO: 987417 - RNA, 22 nt, Human
uauaguaaaauuuucauuuaug

SEQ ID NO: 987418 - RNA, 22 nt, Human
aaaugcagguucuugagccaag

SEQ ID NO: 987419 - RNA, 22 nt, Human
uggcaguggcucagagugcaga

SEQ ID NO: 987420 - RNA, 22 nt, Human
acacacaacucauuguguaaua

SEQ ID NO: 987421 - RNA, 22 nt, Human
auucacaaguucuagggauuag

SEQ ID NO: 987422 - RNA, 22 nt, Human
ugauuuccuggcuuuggaguuc

SEQ ID NO: 987423 - RNA, 21 nt, Human
agagaagaggacuuucucaca

SEQ ID NO: 987424 - RNA, 22 nt, Human
ggucaggguuccagguaucuuc

SEQ ID NO: 987425 - RNA, 22 nt, Human
aguguauugauuggaacagccu

SEQ ID NO: 987426 - RNA, 20 nt, Human
gcuuccuucccagcccccac

SEQ ID NO: 987427 - RNA, 19 nt, Human
ggcugucuggcguguggau

SEQ ID NO: 987428 - RNA, 20 nt, Human
agguggcuccugcugggggu

SEQ ID NO: 987429 - RNA, 22 nt, Human
ugagccaaacuucuccuugguc

SEQ ID NO: 987430 - RNA, 22 nt, Human
uccuucaggguugaggccgacu

SEQ ID NO: 987431 - RNA, 22 nt, Human
aaaguucugggggagaagaacg

SEQ ID NO: 987432 - RNA, 22 nt, Human
cugcugcauuacucuucucaag

SEQ ID NO: 987433 - RNA, 22 nt, Human
cuggcagguuuggugucuggug

SEQ ID NO: 987434 - RNA, 22 nt, Human
acugucugcuggccccugguua

SEQ ID NO: 987435 - RNA, 22 nt, Human
aggccaaauguguauaaaacau

SEQ ID NO: 987436 - RNA, 23 nt, Human
acaguuauagcugugaauaacau

SEQ ID NO: 987437 - RNA, 22 nt, Human
ucagcuuggacagcuugguuga

SEQ ID NO: 987438 - RNA, 22 nt, Human
agggcacaagacucugagcccc

SEQ ID NO: 987439 - RNA, 22 nt, Human
ugguggcaauguccuggagaag

SEQ ID NO: 987440 - RNA, 22 nt, Human
aagaguaugcaugcauguuugu

SEQ ID NO: 987441 - RNA, 22 nt, Human
gcucagagcaucccagugaaug

SEQ ID NO: 987442 - RNA, 16 nt, Human
ugggcagaugagaaga

SEQ ID NO: 987443 - RNA, 22 nt, Human
ggagcugucuguagggcacagg

SEQ ID NO: 987444 - RNA, 22 nt, Human
uucaggagcuggcugcgaagga

SEQ ID NO: 987445 - RNA, 22 nt, Human
cagcacuggggggauucggagc

SEQ ID NO: 987446 - RNA, 17 nt, Human
aggcagcucagaacauc

SEQ ID NO: 987447 - RNA, 22 nt, Human
agguggggugagcugcagacua

SEQ ID NO: 987448 - RNA, 22 nt, Human
aauguggaaucauggacuuuau

SEQ ID NO: 987449 - RNA, 23 nt, Human
cuggcucuguagguggcauccuu

SEQ ID NO: 987450 - RNA, 22 nt, Human
gcucccagcauugcuucccagg

SEQ ID NO: 987451 - RNA, 22 nt, Human
acuccuggguucuaaauuugaa

SEQ ID NO: 987452 - RNA, 22 nt, Human
cuggcagcguguuuaugaacau

SEQ ID NO: 987453 - RNA, 20 nt, Human
caggcacacucauuccugcu

SEQ ID NO: 987454 - RNA, 22 nt, Human
uaaaugcaguuaguacuugcca

SEQ ID NO: 987455 - RNA, 22 nt, Human
gaguuauuuguagggauuauau

SEQ ID NO: 987456 - RNA, 22 nt, Human
gagcucaggagcaucagaagaa

SEQ ID NO: 987457 - RNA, 22 nt, Human
gcccagcaggacagagugguuu

SEQ ID NO: 987458 - RNA, 22 nt, Human
gagcuuugcuggaagccugggg

SEQ ID NO: 987459 - RNA, 22 nt, Human
acuggacagaggaaauauggag

SEQ ID NO: 987460 - RNA, 22 nt, Human
uuguguccugauuugacacaau

SEQ ID NO: 987461 - RNA, 22 nt, Human
ugcugccaccugguggcugaag

SEQ ID NO: 987462 - RNA, 22 nt, Human
aggccuggccugggcggcauug

SEQ ID NO: 987463 - RNA, 22 nt, Human
uaacagaaauagaaaugagagu

SEQ ID NO: 987464 - RNA, 22 nt, Human
ccagcccugccagagagagcug

SEQ ID NO: 987465 - RNA, 22 nt, Human
uuuauuaauguagcauccaugg

SEQ ID NO: 987466 - RNA, 22 nt, Human
ggucucagcaguugcuuugacu

SEQ ID NO: 987467 - RNA, 22 nt, Human
uguguauuucuggaacagacua

SEQ ID NO: 987468 - RNA, 22 nt, Human
gugucccaggccucuggaauua

SEQ ID NO: 987469 - RNA, 22 nt, Human
ucagagagccucaggcacugcc

SEQ ID NO: 987470 - RNA, 22 nt, Human
ggugaggggagagugaaagaaa

SEQ ID NO: 987471 - RNA, 22 nt, Human
ggagggcugccagguggagcgg

SEQ ID NO: 987472 - RNA, 22 nt, Human
gcugccuggagcucagccugcc

SEQ ID NO: 987473 - RNA, 20 nt, Human
aauaaaagaagccuucaccc

SEQ ID NO: 987474 - RNA, 22 nt, Human
agcacauucuugccuuaaccuc

SEQ ID NO: 987475 - RNA, 22 nt, Human
aggcugggaagguaaaguugua

SEQ ID NO: 987476 - RNA, 20 nt, Human
cugggccauccuuuuacaau

SEQ ID NO: 987477 - RNA, 22 nt, Human
guaacagaggguuugcagauau

SEQ ID NO: 987478 - RNA, 22 nt, Human
uuggccaaggaaguagcaacgg

SEQ ID NO: 987479 - RNA, 22 nt, Human
ucuggagcuuguuucagauggu

SEQ ID NO: 987480 - RNA, 22 nt, Human
uagugauuaaaggcagaauguu

SEQ ID NO: 987481 - RNA, 22 nt, Human
gaaaggugccccauaggcagga

SEQ ID NO: 987482 - RNA, 22 nt, Human
ggaggccaaggcagguggaucg

SEQ ID NO: 987483 - RNA, 22 nt, Human
gaggccuggaccagccacagag

SEQ ID NO: 987484 - RNA, 22 nt, Human
ccucccuggccagagcagcagc

SEQ ID NO: 987485 - RNA, 22 nt, Human
ucaaggcuaaacuuucagagua

SEQ ID NO: 987486 - RNA, 22 nt, Human
acuggcaguuugagaaugcauu

SEQ ID NO: 987487 - RNA, 22 nt, Human
uccugccuaccuugcggaggug

SEQ ID NO: 987488 - RNA, 17 nt, Human
uucucuuccuggauagu

SEQ ID NO: 987489 - RNA, 17 nt, Human
uggcuucccugggccac

SEQ ID NO: 987490 - RNA, 22 nt, Human
cugagcauggccgguccauggu

SEQ ID NO: 987491 - RNA, 22 nt, Human
cacacaugaaucccuaguaccu

SEQ ID NO: 987492 - RNA, 22 nt, Human
aaguucaauggaaaagcuuuag

SEQ ID NO: 987493 - RNA, 22 nt, Human
ugagaggcagaauggugccugc

SEQ ID NO: 987494 - RNA, 22 nt, Human
gggccagagcuuggcagcuggg

SEQ ID NO: 987495 - RNA, 23 nt, Human
ccagcccuccaccagcucuaggc

SEQ ID NO: 987496 - RNA, 22 nt, Human
ggggagugacgcagggccauag

SEQ ID NO: 987497 - RNA, 22 nt, Human
agugcacaccuuaguacaaagu

SEQ ID NO: 987498 - RNA, 22 nt, Human
ccuggccaggcauggagucaca

SEQ ID NO: 987499 - RNA, 22 nt, Human
ugugaaaggagccauagacagu

SEQ ID NO: 987500 - RNA, 22 nt, Human
aaaugcagaucccugaaucuca

SEQ ID NO: 987501 - RNA, 22 nt, Human
ggcugccacgucgaggguccaa

SEQ ID NO: 987502 - RNA, 22 nt, Human
cucccagggccaucgagucacu

SEQ ID NO: 987503 - RNA, 22 nt, Human
gaagcagcugccagagaugucu

SEQ ID NO: 987504 - RNA, 22 nt, Human
ccugccugucccucaguccaca

SEQ ID NO: 987505 - RNA, 22 nt, Human
agccaagcacucaacuccugga

SEQ ID NO: 987506 - RNA, 22 nt, Human
gagcacagaaucuucccaugca

SEQ ID NO: 987507 - RNA, 22 nt, Human
guagcccaccuggggagggcga

SEQ ID NO: 987508 - RNA, 22 nt, Human
agucucugagguucagaugccu

SEQ ID NO: 987509 - RNA, 22 nt, Human
uccauuuacuauucucauaucg

SEQ ID NO: 987510 - RNA, 22 nt, Human
gcagugggaagguuggcacaug

SEQ ID NO: 987511 - RNA, 22 nt, Human
ugcagggcuuccucuuggaguu

SEQ ID NO: 987512 - RNA, 22 nt, Human
uccagggauguccuguagcacu

SEQ ID NO: 987513 - RNA, 22 nt, Human
ccugccugcguccucugagggc

SEQ ID NO: 987514 - RNA, 22 nt, Human
aaaacucugcaguuaguuucua

SEQ ID NO: 987515 - RNA, 22 nt, Human
uggcagcagcuaacuuaggcag

SEQ ID NO: 987516 - RNA, 22 nt, Human
uuccucugaaauggcuuggaaa

SEQ ID NO: 987517 - RNA, 22 nt, Human
acagggaauggagggaucagua

SEQ ID NO: 987518 - RNA, 22 nt, Human
ccucugcucugguccaugugcu

SEQ ID NO: 987519 - RNA, 22 nt, Human
cugugcauugucuugucuguag

SEQ ID NO: 987520 - RNA, 22 nt, Human
auaaggcagaaauagggaaagu

SEQ ID NO: 987521 - RNA, 22 nt, Human
uuccucucgcucuccggggccc

SEQ ID NO: 987522 - RNA, 22 nt, Human
cagagccaaaccucagggcccg

SEQ ID NO: 987523 - RNA, 22 nt, Human
aacagacaacuccuguggcuca

SEQ ID NO: 987524 - RNA, 22 nt, Human
cagacagacagccguggccacc

SEQ ID NO: 987525 - RNA, 22 nt, Human
cugucaguucuuccagauagag

SEQ ID NO: 987526 - RNA, 21 nt, Human
ccagagccugcugagcccccu

SEQ ID NO: 987527 - RNA, 22 nt, Human
gcugaguguaaugauggcagag

SEQ ID NO: 987528 - RNA, 22 nt, Human
uggcucaguagcagugugguca

SEQ ID NO: 987529 - RNA, 22 nt, Human
cagagcuguugcggggcuuggc

SEQ ID NO: 987530 - RNA, 22 nt, Human
aagaacugugcuccaggcucca

SEQ ID NO: 987531 - RNA, 22 nt, Human
ggccaggcuggucucagacuuc

SEQ ID NO: 987532 - RNA, 20 nt, Human
cuguaucagguuacaaagua

SEQ ID NO: 987533 - RNA, 19 nt, Human
augauacaggugaaaauug

SEQ ID NO: 987534 - RNA, 22 nt, Human
guuugcauguauuaagucaaua

SEQ ID NO: 987535 - RNA, 22 nt, Human
cugcuuuggcucagugacauca

SEQ ID NO: 987536 - RNA, 22 nt, Human
aaaggugacacucugccagcug

SEQ ID NO: 987537 - RNA, 22 nt, Human
acacuuuuguguauauccaguu

SEQ ID NO: 987538 - RNA, 22 nt, Human
cugccuggcuaaacucaagucg

SEQ ID NO: 987539 - RNA, 22 nt, Human
ugcuuccugaggccgucuucuc

SEQ ID NO: 987540 - RNA, 22 nt, Human
aaaugcacagagccuuagagau

SEQ ID NO: 987541 - RNA, 22 nt, Human
gcccacacaccagcucaggagg

SEQ ID NO: 987542 - RNA, 21 nt, Human
gggagcuggaaacugggugac

SEQ ID NO: 987543 - RNA, 21 nt, Human
ggcagcccgcccucuccuggc

SEQ ID NO: 987544 - RNA, 22 nt, Human
gcucaggacuggaggagcgggg

SEQ ID NO: 987545 - RNA, 22 nt, Human
aagcuccccgaaacccaccucu

SEQ ID NO: 987546 - RNA, 22 nt, Human
gcucuggcuacuguggcuaccg

SEQ ID NO: 987547 - RNA, 22 nt, Human
gcugggcugagcuagacuuggc

SEQ ID NO: 987548 - RNA, 22 nt, Human
ugcugcuccugccuggcuccca

SEQ ID NO: 987549 - RNA, 20 nt, Human
ucucccaggcucagggaaga

SEQ ID NO: 987550 - RNA, 22 nt, Human
gcuguccaugucuggccucagu

SEQ ID NO: 987551 - RNA, 22 nt, Human
aggucauuuccuuagaggcaga

SEQ ID NO: 987552 - RNA, 22 nt, Human
aacucagcauccugcacagaga

SEQ ID NO: 987553 - RNA, 22 nt, Human
acagagcaauaacagggagagg

SEQ ID NO: 987554 - RNA, 22 nt, Human
agggucaggagacacuggcaac

SEQ ID NO: 987555 - RNA, 22 nt, Human
uccucugcuggaagggcaagag

SEQ ID NO: 987556 - RNA, 22 nt, Human
cugcagccuccugggguacaug

SEQ ID NO: 987557 - RNA, 21 nt, Human
acaugucucuaaucucaguga

SEQ ID NO: 987558 - RNA, 22 nt, Human
caaaguauauuggauugaaugg

SEQ ID NO: 987559 - RNA, 22 nt, Human
uggagaagucaaagugaacagg

SEQ ID NO: 987560 - RNA, 22 nt, Human
gagacagugguugcagaagcuc

SEQ ID NO: 987561 - RNA, 21 nt, Human
gcacagcaugaguguuggcau

SEQ ID NO: 987562 - RNA, 22 nt, Human
uucuuucccaguagaugugaaa

SEQ ID NO: 987563 - RNA, 22 nt, Human
uacaaaguuuucuuggauugag

SEQ ID NO: 987564 - RNA, 22 nt, Human
cuggcuccuccaaggccuggag

SEQ ID NO: 987565 - RNA, 22 nt, Human
aaaugucuuucaauagagaaau

SEQ ID NO: 987566 - RNA, 22 nt, Human
ggccugagcuugggcagcguau

SEQ ID NO: 987567 - RNA, 22 nt, Human
uuggcagggccaggcucucucu

SEQ ID NO: 987568 - RNA, 22 nt, Human
cacugcuuuaaggcugaguaac

SEQ ID NO: 987569 - RNA, 22 nt, Human
uguaugcuuuccaaaaaugcug

SEQ ID NO: 987570 - RNA, 22 nt, Human
ucuguuuaggcaaaauagcuac

SEQ ID NO: 987571 - RNA, 19 nt, Human
uccugggcugggccagguc

SEQ ID NO: 987572 - RNA, 22 nt, Human
cagcuggcuggucagugcacaa

SEQ ID NO: 987573 - RNA, 16 nt, Human
ccuuucucugccuucc

SEQ ID NO: 987574 - RNA, 19 nt, Human
agggagaauuccaagagga

SEQ ID NO: 987575 - RNA, 20 nt, Human
uggggccuguuucugugguu

SEQ ID NO: 987576 - RNA, 22 nt, Human
aaugaugguuaaacacuggagg

SEQ ID NO: 987577 - RNA, 18 nt, Human
gagcccugagucugcaca

SEQ ID NO: 987578 - RNA, 22 nt, Human
agccacagucugaugccugaga

SEQ ID NO: 987579 - RNA, 22 nt, Human
gugccugguuuggggaauguuc

SEQ ID NO: 987580 - RNA, 22 nt, Human
agggcagagcacugaauuggga

SEQ ID NO: 987581 - RNA, 22 nt, Human
ggccucugcccucacuccuguc

SEQ ID NO: 987582 - RNA, 20 nt, Human
cucucccagcacagcuuccu

SEQ ID NO: 987583 - RNA, 22 nt, Human
gggagggaaggaggcgccgugu

SEQ ID NO: 987584 - RNA, 22 nt, Human
auggccuggccagagcucugcu

SEQ ID NO: 987585 - RNA, 22 nt, Human
ggucccaggagaauaggugcaa

SEQ ID NO: 987586 - RNA, 22 nt, Human
ucaggcaguagaauugcuugaa

SEQ ID NO: 987587 - RNA, 22 nt, Human
cuccaggagcugugucuuucuu

SEQ ID NO: 987588 - RNA, 22 nt, Human
uaguaacagauuuauacagucu

SEQ ID NO: 987589 - RNA, 22 nt, Human
guacauuucauuuaaaugaugu

SEQ ID NO: 987590 - RNA, 22 nt, Human
ugcuccagugagcuggccaucc

SEQ ID NO: 987591 - RNA, 22 nt, Human
gugugccaacaaaagacagugc

SEQ ID NO: 987592 - RNA, 22 nt, Human
gucugaggaagaugcaggggga

SEQ ID NO: 987593 - RNA, 22 nt, Human
cugugcuugacagugggaagca

SEQ ID NO: 987594 - RNA, 22 nt, Human
gaggcagaaguugcagugagca

SEQ ID NO: 987595 - RNA, 22 nt, Human
ggcaucuguccaucucuccagc

SEQ ID NO: 987596 - RNA, 22 nt, Human
ccucugcucccuggugucugag

SEQ ID NO: 987597 - RNA, 22 nt, Human
aauguuaaaaccuucagugcuu

SEQ ID NO: 987598 - RNA, 22 nt, Human
uacauagcaaggaaaugacaga

SEQ ID NO: 987599 - RNA, 22 nt, Human
gggaguggagagcaauggauga

SEQ ID NO: 987600 - RNA, 22 nt, Human
aucaaaguucguaacugauaac

SEQ ID NO: 987601 - RNA, 22 nt, Human
gaugccugcauuucaggagagu

SEQ ID NO: 987602 - RNA, 22 nt, Human
gaggagagggcugcgggcccac

SEQ ID NO: 987603 - RNA, 22 nt, Human
gugcauuggugcgccacuucac

SEQ ID NO: 987604 - RNA, 22 nt, Human
guaucuuucccaccaaucacaa

SEQ ID NO: 987605 - RNA, 16 nt, Human
ggagagugucugcaaa

SEQ ID NO: 987606 - RNA, 19 nt, Human
cuuauuagagugagagcuu

SEQ ID NO: 987607 - RNA, 22 nt, Human
ucuguggauuuuaguguucaug

SEQ ID NO: 987608 - RNA, 22 nt, Human
ggagccugugcccaagcccaga

SEQ ID NO: 987609 - RNA, 22 nt, Human
cuuugaaagcucccaggacuua

SEQ ID NO: 987610 - RNA, 22 nt, Human
ucauacaucuuguauaucuauc

SEQ ID NO: 987611 - RNA, 22 nt, Human
uucacagggccacuggcaggag

SEQ ID NO: 987612 - RNA, 22 nt, Human
uggcucaguuucaguccugguu

SEQ ID NO: 987613 - RNA, 22 nt, Human
gcagacaucaagcacaggccca

SEQ ID NO: 987614 - RNA, 22 nt, Human
gagccaggggucagcuccgagg

SEQ ID NO: 987615 - RNA, 22 nt, Human
caggcacagaguuauucauuua

SEQ ID NO: 987616 - RNA, 22 nt, Human
ugugcugguacaugugaggaug

SEQ ID NO: 987617 - RNA, 22 nt, Human
cuggcuuccaugcuguaguggc

SEQ ID NO: 987618 - RNA, 21 nt, Human
cugguguagcacucaggugcu

SEQ ID NO: 987619 - RNA, 23 nt, Human
agagcuuagggaauucacaugag

SEQ ID NO: 987620 - RNA, 22 nt, Human
agguaaagacagugaaagaggg

SEQ ID NO: 987621 - RNA, 22 nt, Human
agccucugguccucccucagcu

SEQ ID NO: 987622 - RNA, 22 nt, Human
ucccagccacagguguagcccu

SEQ ID NO: 987623 - RNA, 22 nt, Human
gacagcagggacauguaggaag

SEQ ID NO: 987624 - RNA, 17 nt, Human
agagagagcaugccacc

SEQ ID NO: 987625 - RNA, 22 nt, Human
agaggaugguugaggaagaccu

SEQ ID NO: 987626 - RNA, 22 nt, Human
ugaaaguugcacauaagagaau

SEQ ID NO: 987627 - RNA, 22 nt, Human
aggacucaucccugcuugucag

SEQ ID NO: 987628 - RNA, 22 nt, Human
uacucugccccagccaauaaug

SEQ ID NO: 987629 - RNA, 22 nt, Human
gcugggagccccgagccagcgc

SEQ ID NO: 987630 - RNA, 19 nt, Human
uccaaaggacccaccucca

SEQ ID NO: 987631 - RNA, 22 nt, Human
cucuggagcaccgggcuaucca

SEQ ID NO: 987632 - RNA, 22 nt, Human
gauuuggccuuucgcaugguau

SEQ ID NO: 987633 - RNA, 22 nt, Human
cugagccagcgggcucacuuuu

SEQ ID NO: 987634 - RNA, 22 nt, Human
cagcagcugggaaggaggcuga

SEQ ID NO: 987635 - RNA, 22 nt, Human
ucagagccccuccgcuguccca

SEQ ID NO: 987636 - RNA, 22 nt, Human
gaagagcugcaguuuccugggc

SEQ ID NO: 987637 - RNA, 22 nt, Human
aggacagaccuaggacuggagc

SEQ ID NO: 987638 - RNA, 22 nt, Human
agagccaggcaggcaauguuga

SEQ ID NO: 987639 - RNA, 22 nt, Human
caagagcauuuaguuagcuggu

SEQ ID NO: 987640 - RNA, 22 nt, Human
ggagaugguggaagcuggugca

SEQ ID NO: 987641 - RNA, 22 nt, Human
guacaguuuucaguguucacug

SEQ ID NO: 987642 - RNA, 22 nt, Human
gacacauagaucuaucucacuc

SEQ ID NO: 987643 - RNA, 22 nt, Human
uuggcacacaguaagcccuaag

SEQ ID NO: 987644 - RNA, 23 nt, Human
agccucuuuucuccugcccugca

SEQ ID NO: 987645 - RNA, 22 nt, Human
gcuggcaccugcaccaagcagg

SEQ ID NO: 987646 - RNA, 22 nt, Human
gggcuggcaucaguugccgaga

SEQ ID NO: 987647 - RNA, 22 nt, Human
gagagcugcagccgagaggggg

SEQ ID NO: 987648 - RNA, 22 nt, Human
cugagguguugaugaccuaugc

SEQ ID NO: 987649 - RNA, 22 nt, Human
ggagccagcagggugacacuga

SEQ ID NO: 987650 - RNA, 22 nt, Human
cuguccugcaguugggggcagg

SEQ ID NO: 987651 - RNA, 22 nt, Human
uggagcagagaugguggccuuc

SEQ ID NO: 987652 - RNA, 20 nt, Human
ccaggcacugucccaugcag

SEQ ID NO: 987653 - RNA, 22 nt, Human
cuuuauuagauguagacuuucu

SEQ ID NO: 987654 - RNA, 22 nt, Human
gagcugucucuauaugaaugcu

SEQ ID NO: 987655 - RNA, 22 nt, Human
aucuggcucaccuggguaaaua

SEQ ID NO: 987656 - RNA, 22 nt, Human
cuggcuccacucccugccugac

SEQ ID NO: 987657 - RNA, 22 nt, Human
cugggcuggagugcaauggcgc

SEQ ID NO: 987658 - RNA, 22 nt, Human
ccagccagcugcccuuggggcc

SEQ ID NO: 987659 - RNA, 22 nt, Human
ggaugcaggacggcauggaugu

SEQ ID NO: 987660 - RNA, 23 nt, Human
cauguacagaguuugauaaagug

SEQ ID NO: 987661 - RNA, 20 nt, Human
gugaccagaagacagugggu

SEQ ID NO: 987662 - RNA, 19 nt, Human
agacacacuugauaugugu

SEQ ID NO: 987663 - RNA, 20 nt, Human
uaggcagagcugugcagccu

SEQ ID NO: 987664 - RNA, 22 nt, Human
uggcagcagccauggaaggccc

SEQ ID NO: 987665 - RNA, 22 nt, Human
ccuccuggaaaaauucccuggc

SEQ ID NO: 987666 - RNA, 22 nt, Human
cagggcugaaaucaagguguag

SEQ ID NO: 987667 - RNA, 22 nt, Human
cugccuggcauggagaagagaa

SEQ ID NO: 987668 - RNA, 18 nt, Human
aggccagcccugcuacug

SEQ ID NO: 987669 - RNA, 22 nt, Human
guagcuuauuagggauaauagu

SEQ ID NO: 987670 - RNA, 22 nt, Human
cugggcuggcgcauccgacacg

SEQ ID NO: 987671 - RNA, 22 nt, Human
uggacucaaguccaaguucacg

SEQ ID NO: 987672 - RNA, 22 nt, Human
caggggcuuaagugacagaagg

SEQ ID NO: 987673 - RNA, 22 nt, Human
cuccuuggccguuaaugucaca

SEQ ID NO: 987674 - RNA, 22 nt, Human
cacaugcauaaggauaauuacu

SEQ ID NO: 987675 - RNA, 22 nt, Human
ccagccuccauguagauagcug

SEQ ID NO: 987676 - RNA, 22 nt, Human
acagagccacuuuggugccuac

SEQ ID NO: 987677 - RNA, 21 nt, Human
ugggagagggcucagcuaccc

SEQ ID NO: 987678 - RNA, 22 nt, Human
aucugaagcuaucugcacuuca

SEQ ID NO: 987679 - RNA, 22 nt, Human
uauucacagguucuggggauca

SEQ ID NO: 987680 - RNA, 22 nt, Human
ugucucaguacacuccgauguu

SEQ ID NO: 987681 - RNA, 21 nt, Human
gcagggacaaagcuucaggag

SEQ ID NO: 987682 - RNA, 18 nt, Human
caaagcucacguuccauc

SEQ ID NO: 987683 - RNA, 22 nt, Human
uuugaguugcuuauuuaauagg

SEQ ID NO: 987684 - RNA, 22 nt, Human
ccugugcauccgguggucauug

SEQ ID NO: 987685 - RNA, 22 nt, Human
agcuccugcacccagccuugag

SEQ ID NO: 987686 - RNA, 22 nt, Human
aagggcuggccacauucugggu

SEQ ID NO: 987687 - RNA, 22 nt, Human
caagagcucaccggagagcauu

SEQ ID NO: 987688 - RNA, 19 nt, Human
agugaaauggaguauucaa

SEQ ID NO: 987689 - RNA, 22 nt, Human
cugaaggacuuggugauaguug

SEQ ID NO: 987690 - RNA, 22 nt, Human
ccucucaucauuaucgcuuugu

SEQ ID NO: 987691 - RNA, 22 nt, Human
ccagcagagggucuuggccauu

SEQ ID NO: 987692 - RNA, 22 nt, Human
agagugaaaagcuagagcagua

SEQ ID NO: 987693 - RNA, 16 nt, Human
gagccaggugccuuga

SEQ ID NO: 987694 - RNA, 22 nt, Human
guguggcugauugacaugguca

SEQ ID NO: 987695 - RNA, 22 nt, Human
ugcuggagaucauuaauguuca

SEQ ID NO: 987696 - RNA, 22 nt, Human
gaggccagaaugagcugaaugc

SEQ ID NO: 987697 - RNA, 22 nt, Human
accagccugucugagucguggg

SEQ ID NO: 987698 - RNA, 22 nt, Human
ugguaaaguguacugaauauga

SEQ ID NO: 987699 - RNA, 22 nt, Human
gcccucugcacagcucugagca

SEQ ID NO: 987700 - RNA, 22 nt, Human
accacugcccauggugaaaacu

SEQ ID NO: 987701 - RNA, 22 nt, Human
gccagguggcugagugacugag

SEQ ID NO: 987702 - RNA, 22 nt, Human
agucccagugagaugaaccagg

SEQ ID NO: 987703 - RNA, 22 nt, Human
cagugcaugaaacaauaugcag

SEQ ID NO: 987704 - RNA, 22 nt, Human
auuuaucaccaguuagcugacu

SEQ ID NO: 987705 - RNA, 22 nt, Human
caggggcucugagauugucuaa

SEQ ID NO: 987706 - RNA, 22 nt, Human
cuggcagcgcagcaugaagucg

SEQ ID NO: 987707 - RNA, 22 nt, Human
gcagcagagaacacaaugaugg

SEQ ID NO: 987708 - RNA, 22 nt, Human
gcugccugguuucucagcugca

SEQ ID NO: 987709 - RNA, 22 nt, Human
uacauguauugauuucucuucu

SEQ ID NO: 987710 - RNA, 22 nt, Human
agccagcuggugggucagcugg

SEQ ID NO: 987711 - RNA, 22 nt, Human
guggccugaugccagcccugug

SEQ ID NO: 987712 - RNA, 23 nt, Human
ggggccugcaccggucugcgcgg

SEQ ID NO: 987713 - RNA, 22 nt, Human
cagcagugucuccagcaucaca

SEQ ID NO: 987714 - RNA, 19 nt, Human
gugauuucuuuccacaagc

SEQ ID NO: 987715 - RNA, 22 nt, Human
cuucagggugacgcaggcugca

SEQ ID NO: 987716 - RNA, 22 nt, Human
uccuucagaggacggcagccag

SEQ ID NO: 987717 - RNA, 22 nt, Human
auggggugaccaugagcauuua

SEQ ID NO: 987718 - RNA, 22 nt, Human
uggccuggugcucaggcaguag

SEQ ID NO: 987719 - RNA, 22 nt, Human
aagcagcugauuucacagcuca

SEQ ID NO: 987720 - RNA, 22 nt, Human
cagcuugcaguacuuguuuuug

SEQ ID NO: 987721 - RNA, 22 nt, Human
cucugggcacauuuuccaggac

SEQ ID NO: 987722 - RNA, 22 nt, Human
ugcugccagccaggccauggag

SEQ ID NO: 987723 - RNA, 22 nt, Human
ccaccagcuucagcagccgcgg

SEQ ID NO: 987724 - RNA, 22 nt, Human
gcucagaggaugcuccuuuaug

SEQ ID NO: 987725 - RNA, 22 nt, Human
acuggcagagguuggacaccau

SEQ ID NO: 987726 - RNA, 22 nt, Human
ugccucugcugcuguggcauca

SEQ ID NO: 987727 - RNA, 21 nt, Human
agcagccauggaugguaugua

SEQ ID NO: 987728 - RNA, 22 nt, Human
auuugucuucaguagguucuuc

SEQ ID NO: 987729 - RNA, 22 nt, Human
gcucaggaccgaggggugggaa

SEQ ID NO: 987730 - RNA, 22 nt, Human
uagauuucucauucauagauug

SEQ ID NO: 987731 - RNA, 22 nt, Human
aaggcacuuaacgugggaggau

SEQ ID NO: 987732 - RNA, 21 nt, Human
acacauuaugagcauagacuc

SEQ ID NO: 987733 - RNA, 22 nt, Human
cagucacacaaguggacuuggg

SEQ ID NO: 987734 - RNA, 22 nt, Human
auacuuuggggguuaguguaga

SEQ ID NO: 987735 - RNA, 22 nt, Human
aaagauuucacaucccaagccu

SEQ ID NO: 987736 - RNA, 22 nt, Human
gagggcagagacagugauucac

SEQ ID NO: 987737 - RNA, 21 nt, Human
uuuauguacuucauagaguag

SEQ ID NO: 987738 - RNA, 22 nt, Human
guggggggacguuggucacuuu

SEQ ID NO: 987739 - RNA, 22 nt, Human
aagccagggauuccugagggag

SEQ ID NO: 987740 - RNA, 19 nt, Human
gccugagccagccaugcaa

SEQ ID NO: 987741 - RNA, 22 nt, Human
uggccaggggaguuccccucca

SEQ ID NO: 987742 - RNA, 22 nt, Human
aaauauaguaaaugcauaguuc

SEQ ID NO: 987743 - RNA, 22 nt, Human
aucuuccuucacuuucucccac

SEQ ID NO: 987744 - RNA, 20 nt, Human
ucagccagcuaacaugggga

SEQ ID NO: 987745 - RNA, 22 nt, Human
ugcauuugucuugucucaugaa

SEQ ID NO: 987746 - RNA, 22 nt, Human
ggccucagaccggagcuggcca

SEQ ID NO: 987747 - RNA, 22 nt, Human
cauugcuguuaauugucucuag

SEQ ID NO: 987748 - RNA, 22 nt, Human
gccugugacucgucuugggcca

SEQ ID NO: 987749 - RNA, 22 nt, Human
agcagggccaacaguaaacacc

SEQ ID NO: 987750 - RNA, 22 nt, Human
gaacccaaccucacuuggggua

SEQ ID NO: 987751 - RNA, 22 nt, Human
acauuuaggauguuuugagaga

SEQ ID NO: 987752 - RNA, 22 nt, Human
ggcucugcuggauugaggccag

SEQ ID NO: 987753 - RNA, 22 nt, Human
ccacugucugcaggccucagca

SEQ ID NO: 987754 - RNA, 22 nt, Human
uuagaaaacauaagugguaaag

SEQ ID NO: 987755 - RNA, 22 nt, Human
aagcugcccuguguuagaguuc

SEQ ID NO: 987756 - RNA, 20 nt, Human
ugcagaagaacguucugguu

SEQ ID NO: 987757 - RNA, 22 nt, Human
uuuauuauagugguggggacug

SEQ ID NO: 987758 - RNA, 20 nt, Human
ugcugcaguuucaugggacu

SEQ ID NO: 987759 - RNA, 23 nt, Human
gcaggugguucgaacagaaguuu

SEQ ID NO: 987760 - RNA, 17 nt, Human
cgagggcuugcuggcuc

SEQ ID NO: 987761 - RNA, 22 nt, Human
gugcauuuggugacucucaccc

SEQ ID NO: 987762 - RNA, 22 nt, Human
agaaugcauuuuguguagcuau

SEQ ID NO: 987763 - RNA, 22 nt, Human
gggcuggagccagcuguggcug

SEQ ID NO: 987764 - RNA, 21 nt, Human
cucuggaggcaagggagagug

SEQ ID NO: 987765 - RNA, 21 nt, Human
ucagaguguguuacagcaagc

SEQ ID NO: 987766 - RNA, 22 nt, Human
caguauguuugggagacaugac

SEQ ID NO: 987767 - RNA, 22 nt, Human
ccugucugcaugaucccugcca

SEQ ID NO: 987768 - RNA, 22 nt, Human
gccagcagccacagaagucacu

SEQ ID NO: 987769 - RNA, 22 nt, Human
agucugcuuccuggagaacuca

SEQ ID NO: 987770 - RNA, 19 nt, Human
ccuuggaguuccaggugga

SEQ ID NO: 987771 - RNA, 22 nt, Human
ggaggaugagcuacgaggagcu

SEQ ID NO: 987772 - RNA, 22 nt, Human
guucagggagggacagaugaag

SEQ ID NO: 987773 - RNA, 21 nt, Human
gccaccucgucucggagcagc

SEQ ID NO: 987774 - RNA, 22 nt, Human
gaugcacagugacccugccagu

SEQ ID NO: 987775 - RNA, 22 nt, Human
ggucagguuuuuaggagugacc

SEQ ID NO: 987776 - RNA, 22 nt, Human
aagauuucugcuuuuggaggca

SEQ ID NO: 987777 - RNA, 21 nt, Human
agacaguaacucuucuacucc

SEQ ID NO: 987778 - RNA, 22 nt, Human
agcagcugcagggagggucugc

SEQ ID NO: 987779 - RNA, 22 nt, Human
cucacugcaaguuccaccuacc

SEQ ID NO: 987780 - RNA, 22 nt, Human
ugaagcagagugaaggugaauu

SEQ ID NO: 987781 - RNA, 22 nt, Human
uuccuugaaugagucauggaaa

SEQ ID NO: 987782 - RNA, 22 nt, Human
uccucugcuguucugguucuuu

SEQ ID NO: 987783 - RNA, 22 nt, Human
ucaucacucauuggacaacaga

SEQ ID NO: 987784 - RNA, 22 nt, Human
cuugcugggguaagucugugcu

SEQ ID NO: 987785 - RNA, 22 nt, Human
uuucaguguaagguuuccagga

SEQ ID NO: 987786 - RNA, 22 nt, Human
ccuuucucuaucgacccaucgc

SEQ ID NO: 987787 - RNA, 20 nt, Human
cccucugcuacacugggagc

SEQ ID NO: 987788 - RNA, 22 nt, Human
agaggcuccaccuucucugucc

SEQ ID NO: 987789 - RNA, 22 nt, Human
aggggccuggacauggacgcgc

SEQ ID NO: 987790 - RNA, 22 nt, Human
acacucugugaggcauguaaug

SEQ ID NO: 987791 - RNA, 20 nt, Human
uuugagaccagucugcccaa

SEQ ID NO: 987792 - RNA, 22 nt, Human
cauuguauugaggauacuuaag

SEQ ID NO: 987793 - RNA, 22 nt, Human
ucaauaaaauuguuuuccuauc

SEQ ID NO: 987794 - RNA, 22 nt, Human
guccugggccugcugaggcuga

SEQ ID NO: 987795 - RNA, 22 nt, Human
agggcagcucucaccucuggcc

SEQ ID NO: 987796 - RNA, 22 nt, Human
caggccuggagugcaauggcac

SEQ ID NO: 987797 - RNA, 22 nt, Human
gugcucuguguauuaggauguc

SEQ ID NO: 987798 - RNA, 22 nt, Human
aagggcaggugggcauuucugg

SEQ ID NO: 987799 - RNA, 22 nt, Human
gcacacaggcaguuuccagcca

SEQ ID NO: 987800 - RNA, 22 nt, Human
acagcagccugcagcccugugu

SEQ ID NO: 987801 - RNA, 22 nt, Human
agccagccaguucacuaggaaa

SEQ ID NO: 987802 - RNA, 22 nt, Human
ccaggcucugucuggucagaag

SEQ ID NO: 987803 - RNA, 22 nt, Human
ugucacauaauuuaucuguagg

SEQ ID NO: 987804 - RNA, 22 nt, Human
ugcuggccaauggcagaggcgg

SEQ ID NO: 987805 - RNA, 23 nt, Human
gcagagcugcccuauugccuugg

SEQ ID NO: 987806 - RNA, 23 nt, Human
ugcauuauccucucugaagacca

SEQ ID NO: 987807 - RNA, 22 nt, Human
gcagggacaaggcagguguucu

SEQ ID NO: 987808 - RNA, 22 nt, Human
caccagcuacagacuacugugu

SEQ ID NO: 987809 - RNA, 22 nt, Human
agacaggagagggaacugccgg

SEQ ID NO: 987810 - RNA, 22 nt, Human
acuuccugcagcuucucagccc

SEQ ID NO: 987811 - RNA, 22 nt, Human
caaagugcuggaauuacaggug

SEQ ID NO: 987812 - RNA, 22 nt, Human
ucagugucuugaccugggugug

SEQ ID NO: 987813 - RNA, 22 nt, Human
caaggagaguaauugaaugaga

SEQ ID NO: 987814 - RNA, 22 nt, Human
ugccugucagggggagugggaa

SEQ ID NO: 987815 - RNA, 21 nt, Human
ucagaguggaagacaguuuga

SEQ ID NO: 987816 - RNA, 23 nt, Human
ugcugggguaguuuguggcacag

SEQ ID NO: 987817 - RNA, 22 nt, Human
uugcauugggagugaggagacc

SEQ ID NO: 987818 - RNA, 22 nt, Human
uuccauaacugaccgaaugcau

SEQ ID NO: 987819 - RNA, 22 nt, Human
gcagccacacuguuacagaaug

SEQ ID NO: 987820 - RNA, 20 nt, Human
auacaaagagauugauguau

SEQ ID NO: 987821 - RNA, 22 nt, Human
acaaaaguguaggaauuccuua

SEQ ID NO: 987822 - RNA, 22 nt, Human
agagcuguggauaguccuggau

SEQ ID NO: 987823 - RNA, 22 nt, Human
caacuccuggcuguuaggcaca

SEQ ID NO: 987824 - RNA, 22 nt, Human
acucugcuuauugcugcaggca

SEQ ID NO: 987825 - RNA, 23 nt, Human
uccugagaugagacagugcugcc

SEQ ID NO: 987826 - RNA, 22 nt, Human
gcagcuggagcaucuucucauc

SEQ ID NO: 987827 - RNA, 22 nt, Human
agcuauguauuuguguguuaaa

SEQ ID NO: 987828 - RNA, 20 nt, Human
cccucccagaugcuucccaa

SEQ ID NO: 987829 - RNA, 22 nt, Human
aagaauucacugguagagucaa

SEQ ID NO: 987830 - RNA, 22 nt, Human
agaauucuguucuucgggugug

SEQ ID NO: 987831 - RNA, 22 nt, Human
cucaggccauucuuccagcugc

SEQ ID NO: 987832 - RNA, 22 nt, Human
gcaggcaguugcaguuuucuag

SEQ ID NO: 987833 - RNA, 22 nt, Human
ugucccagaucacaggagggga

SEQ ID NO: 987834 - RNA, 22 nt, Human
auugacaagugagcugggcugc

SEQ ID NO: 987835 - RNA, 20 nt, Human
ugggagcuggugaggucuca

SEQ ID NO: 987836 - RNA, 22 nt, Human
uucacaggaauguaggggucuu

SEQ ID NO: 987837 - RNA, 22 nt, Human
cuuguagaauugaaauggucuc

SEQ ID NO: 987838 - RNA, 22 nt, Human
gcagggacagggcagggccuuu

SEQ ID NO: 987839 - RNA, 22 nt, Human
ucaggggagguugaaucgucuc

SEQ ID NO: 987840 - RNA, 15 nt, Human
ucacucuggaaggga

SEQ ID NO: 987841 - RNA, 22 nt, Human
gaguuauuaauggcugaguuug

SEQ ID NO: 987842 - RNA, 22 nt, Human
agcacaggaccaaggaagcugu

SEQ ID NO: 987843 - RNA, 22 nt, Human
agccuggcuguaaccucauggu

SEQ ID NO: 987844 - RNA, 22 nt, Human
ugggcccugacuucaagcaucc

SEQ ID NO: 987845 - RNA, 22 nt, Human
auuuguacaaauuuauguuagu

SEQ ID NO: 987846 - RNA, 22 nt, Human
gcugugcagucuuuggugugcc

SEQ ID NO: 987847 - RNA, 22 nt, Human
cuuucucuguguuucacaugcu

SEQ ID NO: 987848 - RNA, 22 nt, Human
uucacauuaucaggauuguuuc

SEQ ID NO: 987849 - RNA, 20 nt, Human
uccugagauuuaagggguuc

SEQ ID NO: 987850 - RNA, 22 nt, Human
gagagugagauccuccugggga

SEQ ID NO: 987851 - RNA, 22 nt, Human
ugcagaagaaugagcuuggagu

SEQ ID NO: 987852 - RNA, 22 nt, Human
agagcccugaagcagagcuaaa

SEQ ID NO: 987853 - RNA, 22 nt, Human
cugagagucagcuucuccuccu

SEQ ID NO: 987854 - RNA, 22 nt, Human
ugcagccaauucauucauucuu

SEQ ID NO: 987855 - RNA, 22 nt, Human
agacucugcuaagaauauaauu

SEQ ID NO: 987856 - RNA, 20 nt, Human
gcagagccucacugcaaggg

SEQ ID NO: 987857 - RNA, 18 nt, Human
ucugucucuguccuugcu

SEQ ID NO: 987858 - RNA, 22 nt, Human
aggcuggggaauugaauuugcu

SEQ ID NO: 987859 - RNA, 22 nt, Human
gggcagcugcagggauggugac

SEQ ID NO: 987860 - RNA, 22 nt, Human
guggcuucugcggugugcgcag

SEQ ID NO: 987861 - RNA, 22 nt, Human
aaccuucacuugcuucauuuga

SEQ ID NO: 987862 - RNA, 22 nt, Human
ucugggagagcugcugucagag

SEQ ID NO: 987863 - RNA, 20 nt, Human
ugcuccaucuaaagugauua

SEQ ID NO: 987864 - RNA, 22 nt, Human
aguggcagccgagcaggagaug

SEQ ID NO: 987865 - RNA, 20 nt, Human
agcagcuguguuuucauccu

SEQ ID NO: 987866 - RNA, 22 nt, Human
uagcauuuauggucaugugucc

SEQ ID NO: 987867 - RNA, 22 nt, Human
uggcuggcuuguucacugacug

SEQ ID NO: 987868 - RNA, 22 nt, Human
ggcugccaggagggaggccagu

SEQ ID NO: 987869 - RNA, 23 nt, Human
uggggcugauggagacggaccag

SEQ ID NO: 987870 - RNA, 22 nt, Human
auguggcacagcacaguaagag

SEQ ID NO: 987871 - RNA, 22 nt, Human
gugucauguagaaauugaugaa

SEQ ID NO: 987872 - RNA, 22 nt, Human
gccaggcagcagcgaggauggu

SEQ ID NO: 987873 - RNA, 22 nt, Human
aagagguugucugugaugaguu

SEQ ID NO: 987874 - RNA, 22 nt, Human
ucauccaguucacauggugagu

SEQ ID NO: 987875 - RNA, 22 nt, Human
ggaggugaggccguagggugug

SEQ ID NO: 987876 - RNA, 20 nt, Human
aagagcauaguacaggaaga

SEQ ID NO: 987877 - RNA, 22 nt, Human
agcagcucuuaacaaagcaugg

SEQ ID NO: 987878 - RNA, 22 nt, Human
gagcugccaguguaugaauucu

SEQ ID NO: 987879 - RNA, 22 nt, Human
ggagccuggccuggcucugugu

SEQ ID NO: 987880 - RNA, 19 nt, Human
gcugcuggcucuggcugga

SEQ ID NO: 987881 - RNA, 22 nt, Human
gaugaggggucauuggcuggga

SEQ ID NO: 987882 - RNA, 22 nt, Human
cuccuugguguaguacugagca

SEQ ID NO: 987883 - RNA, 22 nt, Human
aagagcuggauggaaucuggga

SEQ ID NO: 987884 - RNA, 22 nt, Human
ccagagccggcucccucagcuu

SEQ ID NO: 987885 - RNA, 22 nt, Human
agcuggaggauaacucacuucu

SEQ ID NO: 987886 - RNA, 22 nt, Human
uuggcuuccaggaucucagcag

SEQ ID NO: 987887 - RNA, 19 nt, Human
ggcugcugguuacagaggc

SEQ ID NO: 987888 - RNA, 22 nt, Human
uucuuucccuuccagcagcucc

SEQ ID NO: 987889 - RNA, 22 nt, Human
uacaugcuccacuuucuccugu

SEQ ID NO: 987890 - RNA, 18 nt, Human
augugcaauuuuguauuu

SEQ ID NO: 987891 - RNA, 22 nt, Human
caagggcucacggucugcuggg

SEQ ID NO: 987892 - RNA, 22 nt, Human
uucucuagguuuuagaugaaga

SEQ ID NO: 987893 - RNA, 22 nt, Human
ugucccauggauaccaggcuau

SEQ ID NO: 987894 - RNA, 22 nt, Human
cagggcagaacauauagauagu

SEQ ID NO: 987895 - RNA, 22 nt, Human
uucaagaugucuucacaauagu

SEQ ID NO: 987896 - RNA, 22 nt, Human
agacaaagacagcaucucaggu

SEQ ID NO: 987897 - RNA, 22 nt, Human
ucacugaagacugggcucuaaa

SEQ ID NO: 987898 - RNA, 22 nt, Human
uuuauuaaaacuguuggcucug

SEQ ID NO: 987899 - RNA, 22 nt, Human
augcaaaaguaacugugauuuu

SEQ ID NO: 987900 - RNA, 22 nt, Human
gugcuuuccauccucccugcug

SEQ ID NO: 987901 - RNA, 22 nt, Human
gacucugcuaggaaaaucucag

SEQ ID NO: 987902 - RNA, 22 nt, Human
agucccagagaggucggggcca

SEQ ID NO: 987903 - RNA, 22 nt, Human
ccaguugguuucaaugggacag

SEQ ID NO: 987904 - RNA, 22 nt, Human
cagcauggugccagugagucca

SEQ ID NO: 987905 - RNA, 22 nt, Human
agcucccagaaggcccugcgcc

SEQ ID NO: 987906 - RNA, 20 nt, Human
ccuggaagagcuccccaggc

SEQ ID NO: 987907 - RNA, 23 nt, Human
agggcccaagccuggacagcagg

SEQ ID NO: 987908 - RNA, 22 nt, Human
aaguucaaguguaaucuuuauu

SEQ ID NO: 987909 - RNA, 22 nt, Human
aucaguuuuuauuaauguagcu

SEQ ID NO: 987910 - RNA, 22 nt, Human
uauaucuuauaugugcagguac

SEQ ID NO: 987911 - RNA, 22 nt, Human
ucaaaguuuuugagaauuacau

SEQ ID NO: 987912 - RNA, 22 nt, Human
ugcuuccuucccguucuucucc

SEQ ID NO: 987913 - RNA, 22 nt, Human
uccugccugagcguggaggagg

SEQ ID NO: 987914 - RNA, 22 nt, Human
uggcccugacuuggaggccuga

SEQ ID NO: 987915 - RNA, 22 nt, Human
ugucucagaguaucccugaacu

SEQ ID NO: 987916 - RNA, 22 nt, Human
uggcuggcuagugggcaggauu

SEQ ID NO: 987917 - RNA, 22 nt, Human
cccuggagugccggaaucaaga

SEQ ID NO: 987918 - RNA, 22 nt, Human
auccuucaaggggcugacagcu

SEQ ID NO: 987919 - RNA, 22 nt, Human
ucugcagcuuuuugguggggug

SEQ ID NO: 987920 - RNA, 22 nt, Human
gcagcguggggcugagucagcu

SEQ ID NO: 987921 - RNA, 20 nt, Human
gagccuuccccucaccacug

SEQ ID NO: 987922 - RNA, 22 nt, Human
cugggccugggaggccaggucu

SEQ ID NO: 987923 - RNA, 22 nt, Human
caggcagggagcuggaaaggau

SEQ ID NO: 987924 - RNA, 22 nt, Human
uggcccugucccuggagccugg

SEQ ID NO: 987925 - RNA, 22 nt, Human
cagggcuguuagcugcugcucu

SEQ ID NO: 987926 - RNA, 22 nt, Human
ugauuucccuguagccucugaa

SEQ ID NO: 987927 - RNA, 22 nt, Human
aagucagagcaacugagacauu

SEQ ID NO: 987928 - RNA, 22 nt, Human
aggagccaagauggggcaagua

SEQ ID NO: 987929 - RNA, 22 nt, Human
cacauuucugugagucaauauu

SEQ ID NO: 987930 - RNA, 22 nt, Human
caguuucuacgacuuaagcaca

SEQ ID NO: 987931 - RNA, 22 nt, Human
uauuucaugugcaccauaauuc

SEQ ID NO: 987932 - RNA, 22 nt, Human
agauacauugaguuuccuccug

SEQ ID NO: 987933 - RNA, 22 nt, Human
ugcauguuauuguggcaagaau

SEQ ID NO: 987934 - RNA, 22 nt, Human
cccaggcuggauuucgguggca

SEQ ID NO: 987935 - RNA, 22 nt, Human
ccugaagaugcuguggccuggu

SEQ ID NO: 987936 - RNA, 22 nt, Human
ccugucuggccaccagggcgau

SEQ ID NO: 987937 - RNA, 22 nt, Human
aacucaguguguuucuuaguau

SEQ ID NO: 987938 - RNA, 22 nt, Human
aaggaaagacauauaaaugacu

SEQ ID NO: 987939 - RNA, 22 nt, Human
uccguauuugacuauugcaccg

SEQ ID NO: 987940 - RNA, 22 nt, Human
cagggugacugcccuggccacu

SEQ ID NO: 987941 - RNA, 19 nt, Human
agccagggugagaaggagc

SEQ ID NO: 987942 - RNA, 22 nt, Human
cagggcaggacagauacauuac

SEQ ID NO: 987943 - RNA, 22 nt, Human
gccagagccggcuucacaggau

SEQ ID NO: 987944 - RNA, 22 nt, Human
gagugcagaugaacagaagauu

SEQ ID NO: 987945 - RNA, 22 nt, Human
ugagagagccugaaucucuuac

SEQ ID NO: 987946 - RNA, 22 nt, Human
uacuacauuaauaaaacauuca

SEQ ID NO: 987947 - RNA, 22 nt, Human
ugcuggccgugagcucucggga

SEQ ID NO: 987948 - RNA, 22 nt, Human
gcaggcugaugacuggaguugg

SEQ ID NO: 987949 - RNA, 22 nt, Human
ugaggcagcaauuguauuguau

SEQ ID NO: 987950 - RNA, 22 nt, Human
ucacagugaugacgugggagca

SEQ ID NO: 987951 - RNA, 22 nt, Human
ggaggccaccugaccugcuguu

SEQ ID NO: 987952 - RNA, 22 nt, Human
cugccaaggcuggggaggacaa

SEQ ID NO: 987953 - RNA, 22 nt, Human
aacaugaaaguugcuaagugca

SEQ ID NO: 987954 - RNA, 22 nt, Human
cauaagaaauaaugaugaugac

SEQ ID NO: 987955 - RNA, 22 nt, Human
aagauuuagggccaguuuacau

SEQ ID NO: 987956 - RNA, 21 nt, Human
agaugaggauacugaggccua

SEQ ID NO: 987957 - RNA, 22 nt, Human
gcuguggcuguacagagaccau

SEQ ID NO: 987958 - RNA, 22 nt, Human
cucccuggaggcccagaccugg

SEQ ID NO: 987959 - RNA, 22 nt, Human
agaggccuaaccaagauguccu

SEQ ID NO: 987960 - RNA, 22 nt, Human
agccaaggagugcagguggcuu

SEQ ID NO: 987961 - RNA, 22 nt, Human
uuuuuccaccguacuuccugag

SEQ ID NO: 987962 - RNA, 22 nt, Human
caggcacuggccagucagcaca

SEQ ID NO: 987963 - RNA, 22 nt, Human
agggagcucaguuggaagcggu

SEQ ID NO: 987964 - RNA, 22 nt, Human
uaaaugugaccuucauuuuaua

SEQ ID NO: 987965 - RNA, 22 nt, Human
uacuuccagcaaucugcauauu

SEQ ID NO: 987966 - RNA, 22 nt, Human
gaauuacaaagugagacaagcu

SEQ ID NO: 987967 - RNA, 22 nt, Human
gcacugcaucuacuggcaagua

SEQ ID NO: 987968 - RNA, 22 nt, Human
agaauucuuggugguuagaaua

SEQ ID NO: 987969 - RNA, 22 nt, Human
gaaaauguuuccuguuauuugc

SEQ ID NO: 987970 - RNA, 22 nt, Human
cuugcaggauuuugcugcugua

SEQ ID NO: 987971 - RNA, 22 nt, Human
uggcagcaaaaccagaaucaga

SEQ ID NO: 987972 - RNA, 22 nt, Human
ugcagggcacacgcacgggugu

SEQ ID NO: 987973 - RNA, 22 nt, Human
uuagagaaauucugguaaugua

SEQ ID NO: 987974 - RNA, 22 nt, Human
uggccugcuuucauuugaugcu

SEQ ID NO: 987975 - RNA, 22 nt, Human
uuacauuuuaguuaaccuguga

SEQ ID NO: 987976 - RNA, 22 nt, Human
ucugucugacaggguaugaacu

SEQ ID NO: 987977 - RNA, 22 nt, Human
cagagaccccgcugcccuucug

SEQ ID NO: 987978 - RNA, 22 nt, Human
ugggccuggagcccuggagagu

SEQ ID NO: 987979 - RNA, 22 nt, Human
uauaaagaaguguaaacaggaa

SEQ ID NO: 987980 - RNA, 22 nt, Human
ccaggcucugcgcuggacaugg

SEQ ID NO: 987981 - RNA, 22 nt, Human
ucagaacauuuaaaaagugguu

SEQ ID NO: 987982 - RNA, 22 nt, Human
ucucagaguuuagagcugagcc

SEQ ID NO: 987983 - RNA, 22 nt, Human
cuggagcugcuguccuugggug

SEQ ID NO: 987984 - RNA, 22 nt, Human
cucugugcccuacugcucagcu

SEQ ID NO: 987985 - RNA, 22 nt, Human
gaggccugggagccuguccucc

SEQ ID NO: 987986 - RNA, 22 nt, Human
aaaauaacuucuacuauuugca

SEQ ID NO: 987987 - RNA, 23 nt, Human
gaagcagaugucugaguaggcag

SEQ ID NO: 987988 - RNA, 22 nt, Human
aaaaguaauugaugcaaucgua

SEQ ID NO: 987989 - RNA, 22 nt, Human
cuuugaauuccaguacaauaac

SEQ ID NO: 987990 - RNA, 21 nt, Human
aagggagauaggaaucaggcc

SEQ ID NO: 987991 - RNA, 22 nt, Human
gccuucagcggccgcucgcugc

SEQ ID NO: 987992 - RNA, 20 nt, Human
ggccgaaauaauaguggcuu

SEQ ID NO: 987993 - RNA, 22 nt, Human
uauuagcgcuuacugaguugcc

SEQ ID NO: 987994 - RNA, 23 nt, Human
uggcccugugcaugcugcuuccc

SEQ ID NO: 987995 - RNA, 22 nt, Human
gccagagcaugcacugccugca

SEQ ID NO: 987996 - RNA, 22 nt, Human
cugccucuggccucaggcccag

SEQ ID NO: 987997 - RNA, 22 nt, Human
uuucacaaugcaauccuacuuc

SEQ ID NO: 987998 - RNA, 22 nt, Human
uucaagucaaggaaagaggucu

SEQ ID NO: 987999 - RNA, 22 nt, Human
cucucccccacagcagccuucu

SEQ ID NO: 988000 - RNA, 22 nt, Human
ccuguggcacaugcagggauuc

SEQ ID NO: 988001 - RNA, 22 nt, Human
uuaggcauauggcacaugauag

SEQ ID NO: 988002 - RNA, 22 nt, Human
gcugucacaaauauuucucagc

SEQ ID NO: 988003 - RNA, 22 nt, Human
cauaacuagagugaaauguuga

SEQ ID NO: 988004 - RNA, 22 nt, Human
ucugucuccugccagugccucu

SEQ ID NO: 988005 - RNA, 22 nt, Human
uguaugugcuugagaagguggg

SEQ ID NO: 988006 - RNA, 22 nt, Human
ggcugagcaauuuugaugacau

SEQ ID NO: 988007 - RNA, 22 nt, Human
agggcugggcugcuuguuguca

SEQ ID NO: 988008 - RNA, 22 nt, Human
aggagcugcuuaaaugguuggu

SEQ ID NO: 988009 - RNA, 21 nt, Human
ugucagaaauaagcaugugau

SEQ ID NO: 988010 - RNA, 22 nt, Human
cugacccauauaagaguggagg

SEQ ID NO: 988011 - RNA, 22 nt, Human
aagcacagaaaaggagcaugga

SEQ ID NO: 988012 - RNA, 22 nt, Human
acgcagaagggccuggcgugcc

SEQ ID NO: 988013 - RNA, 22 nt, Human
cugagcuggucuauggacuugg

SEQ ID NO: 988014 - RNA, 23 nt, Human
uuguuuuuagagguggcaugaga

SEQ ID NO: 988015 - RNA, 22 nt, Human
acagucauuagauacaaugucu

SEQ ID NO: 988016 - RNA, 22 nt, Human
gcaaaugcuaaaguguagagac

SEQ ID NO: 988017 - RNA, 20 nt, Human
gugggcagaugugugcaugg

SEQ ID NO: 988018 - RNA, 22 nt, Human
ugucucugugacuccuuccgcc

SEQ ID NO: 988019 - RNA, 22 nt, Human
ucaguuuucucaucuguaauuu

SEQ ID NO: 988020 - RNA, 21 nt, Human
auguaggaguuauuggaacag

SEQ ID NO: 988021 - RNA, 20 nt, Human
cacaggcuauaugagagcca

SEQ ID NO: 988022 - RNA, 22 nt, Human
agggagcuguggucagcucagu

SEQ ID NO: 988023 - RNA, 22 nt, Human
uuuuaauucaaagugaauagug

SEQ ID NO: 988024 - RNA, 22 nt, Human
cagcucucacacccuccuccca

SEQ ID NO: 988025 - RNA, 22 nt, Human
uggagcauauucuggagcuugg

SEQ ID NO: 988026 - RNA, 22 nt, Human
cucugcuaagcaugaacaauua

SEQ ID NO: 988027 - RNA, 22 nt, Human
uuucaaagguggaagagugaau

SEQ ID NO: 988028 - RNA, 22 nt, Human
gggcacagagggucuugaagaa

SEQ ID NO: 988029 - RNA, 22 nt, Human
uuuauuugucuugccauuuagu

SEQ ID NO: 988030 - RNA, 22 nt, Human
cuccuggcuuucccagaccagg

SEQ ID NO: 988031 - RNA, 19 nt, Human
guuuuucccagacgaggca

SEQ ID NO: 988032 - RNA, 22 nt, Human
ggcagaggagcuggaaacaugg

SEQ ID NO: 988033 - RNA, 22 nt, Human
cuggaugcuuccucucugcuag

SEQ ID NO: 988034 - RNA, 21 nt, Human
gagccuucccucugcccuuuc

SEQ ID NO: 988035 - RNA, 22 nt, Human
cagggcagggccacacccccug

SEQ ID NO: 988036 - RNA, 22 nt, Human
gguggagcuguggacaggaagg

SEQ ID NO: 988037 - RNA, 22 nt, Human
aaaugucuuucuucugcuacgu

SEQ ID NO: 988038 - RNA, 22 nt, Human
aggccuguuccuuccugggcac

SEQ ID NO: 988039 - RNA, 22 nt, Human
ugggcucugcugcguaccaguu

SEQ ID NO: 988040 - RNA, 22 nt, Human
cgucuuccucuuacgaugcgcu

SEQ ID NO: 988041 - RNA, 22 nt, Human
gcagaggcauuucugacgcugc

SEQ ID NO: 988042 - RNA, 22 nt, Human
ccagaagggcuauugcagugac

SEQ ID NO: 988043 - RNA, 22 nt, Human
uggcagagaauaaaucuugacu

SEQ ID NO: 988044 - RNA, 22 nt, Human
ccucuggguaucuguggaagua

SEQ ID NO: 988045 - RNA, 22 nt, Human
ggagccuguuaguugagugcuc

SEQ ID NO: 988046 - RNA, 18 nt, Human
aaaugcuaggcuacauga

SEQ ID NO: 988047 - RNA, 22 nt, Human
auuuggcacacuggguucucgu

SEQ ID NO: 988048 - RNA, 22 nt, Human
cccugcagcuuuugcauaguca

SEQ ID NO: 988049 - RNA, 22 nt, Human
gcugucagugaggugagacaug

SEQ ID NO: 988050 - RNA, 22 nt, Human
aacucagucauaaagcgaaugc

SEQ ID NO: 988051 - RNA, 22 nt, Human
aguaaugugccugaaauacuug

SEQ ID NO: 988052 - RNA, 23 nt, Human
ugagcccaggaggucaaggcugc

SEQ ID NO: 988053 - RNA, 22 nt, Human
uugaaggacauccuauuucuag

SEQ ID NO: 988054 - RNA, 22 nt, Human
gugcccugaguggguaggagag

SEQ ID NO: 988055 - RNA, 22 nt, Human
ggcaggcugcuugggucauguc

SEQ ID NO: 988056 - RNA, 22 nt, Human
ccugcagaccacacucaguccu

SEQ ID NO: 988057 - RNA, 22 nt, Human
ccuggccugugaaucugagagc

SEQ ID NO: 988058 - RNA, 22 nt, Human
cuccagggaggucugcaggacu

SEQ ID NO: 988059 - RNA, 22 nt, Human
ccagggcacuuaggcccagccc

SEQ ID NO: 988060 - RNA, 22 nt, Human
aucaguuuugggggacauacug

SEQ ID NO: 988061 - RNA, 22 nt, Human
uccucugccccagaugaaauuu

SEQ ID NO: 988062 - RNA, 22 nt, Human
ccagggugaggaggcucccacg

SEQ ID NO: 988063 - RNA, 22 nt, Human
uuccuuccgggcaccaggcacu

SEQ ID NO: 988064 - RNA, 22 nt, Human
aggcacugacaauucuggacug

SEQ ID NO: 988065 - RNA, 22 nt, Human
cagagagagucaaaucuuugcu

SEQ ID NO: 988066 - RNA, 22 nt, Human
uaugagcuuccaguguugcaug

SEQ ID NO: 988067 - RNA, 22 nt, Human
agcagaugagccucaugacugg

SEQ ID NO: 988068 - RNA, 17 nt, Human
auguuaauuucacauuu

SEQ ID NO: 988069 - RNA, 22 nt, Human
uggccuuguguuuuagagaaag

SEQ ID NO: 988070 - RNA, 21 nt, Human
cagaggggcuagccuggcugc

SEQ ID NO: 988071 - RNA, 22 nt, Human
ugcagaagauggucugagcacc

SEQ ID NO: 988072 - RNA, 22 nt, Human
cagagcugcucaugguggccag

SEQ ID NO: 988073 - RNA, 22 nt, Human
cagagcagcagagcuuccaugg

SEQ ID NO: 988074 - RNA, 22 nt, Human
aguacuucagaggcugcccagg

SEQ ID NO: 988075 - RNA, 23 nt, Human
gugcucugcggucugcuagucug

SEQ ID NO: 988076 - RNA, 22 nt, Human
ggaggaugccaagcugugcaca

SEQ ID NO: 988077 - RNA, 22 nt, Human
gcagagccaugggagguuuuug

SEQ ID NO: 988078 - RNA, 22 nt, Human
cugggcuccuaaccauccaggu

SEQ ID NO: 988079 - RNA, 20 nt, Human
gcccacucuaauccacuguc

SEQ ID NO: 988080 - RNA, 22 nt, Human
auuugucucugcacuuuacuca

SEQ ID NO: 988081 - RNA, 22 nt, Human
acauuuaaugauccuacuguga

SEQ ID NO: 988082 - RNA, 22 nt, Human
auggcagcaaaugucuggcugg

SEQ ID NO: 988083 - RNA, 22 nt, Human
cuccuggcucgcccccagcuga

SEQ ID NO: 988084 - RNA, 22 nt, Human
ggggcagagagaaggaagcuug

SEQ ID NO: 988085 - RNA, 22 nt, Human
aucuuucaaucaggaaaaaucu

SEQ ID NO: 988086 - RNA, 22 nt, Human
acaccagggccuagccagggcg

SEQ ID NO: 988087 - RNA, 21 nt, Human
gcaugccugcaucuuaguguu

SEQ ID NO: 988088 - RNA, 23 nt, Human
agcccagcagagaaccuaggucc

SEQ ID NO: 988089 - RNA, 22 nt, Human
augaugguuguccuaggugcau

SEQ ID NO: 988090 - RNA, 22 nt, Human
aaggccaugaccacuugcugug

SEQ ID NO: 988091 - RNA, 22 nt, Human
ugcuggcugggcugcuggagac

SEQ ID NO: 988092 - RNA, 22 nt, Human
aguuauagaaccagguccucac

SEQ ID NO: 988093 - RNA, 22 nt, Human
ugugugcauucacaugcaugcc

SEQ ID NO: 988094 - RNA, 22 nt, Human
ugucauugaggaaaacuaggug

SEQ ID NO: 988095 - RNA, 18 nt, Human
gggcaucauucacaaagu

SEQ ID NO: 988096 - RNA, 22 nt, Human
ucauugcagugauguuguaugu

SEQ ID NO: 988097 - RNA, 22 nt, Human
cccuggagggacagcugcucua

SEQ ID NO: 988098 - RNA, 22 nt, Human
aacuuuaaggcuauaaauuaug

SEQ ID NO: 988099 - RNA, 22 nt, Human
ccagcagccaccuucucgaaau

SEQ ID NO: 988100 - RNA, 22 nt, Human
gggugggagucuggcccucaaa

SEQ ID NO: 988101 - RNA, 22 nt, Human
gucccacaccuugaggggucuu

SEQ ID NO: 988102 - RNA, 22 nt, Human
gccugaagaacagcugugagga

SEQ ID NO: 988103 - RNA, 22 nt, Human
ucugucacccagagugcagugg

SEQ ID NO: 988104 - RNA, 20 nt, Human
cacaagagaauacacacugg

SEQ ID NO: 988105 - RNA, 22 nt, Human
aucuggcuuuuaccccacggcc

SEQ ID NO: 988106 - RNA, 22 nt, Human
agcugguaugaacaggauagga

SEQ ID NO: 988107 - RNA, 22 nt, Human
uggcaggagguuuucuccagga

SEQ ID NO: 988108 - RNA, 22 nt, Human
cugggcacuuuggggagccuac

SEQ ID NO: 988109 - RNA, 22 nt, Human
ucaaugaaagagcaugcauuuu

SEQ ID NO: 988110 - RNA, 22 nt, Human
augauguugauaaauuacuuua

SEQ ID NO: 988111 - RNA, 22 nt, Human
guaacacagaaaugaaauucca

SEQ ID NO: 988112 - RNA, 22 nt, Human
cagagcugguaagugguagagg

SEQ ID NO: 988113 - RNA, 22 nt, Human
gcugccagcucacucuccugag

SEQ ID NO: 988114 - RNA, 22 nt, Human
acugagcugcuugaagugaacu

SEQ ID NO: 988115 - RNA, 22 nt, Human
gggcucugguacuuccuggcuc

SEQ ID NO: 988116 - RNA, 20 nt, Human
uguucacaguaguugcugcu

SEQ ID NO: 988117 - RNA, 22 nt, Human
gcacagcaauuucuauaagcuc

SEQ ID NO: 988118 - RNA, 22 nt, Human
gaaaugugcagaauguguuaga

SEQ ID NO: 988119 - RNA, 22 nt, Human
aaggcgacacaggcagcaggcc

SEQ ID NO: 988120 - RNA, 22 nt, Human
cccucuggcucuucucaggccg

SEQ ID NO: 988121 - RNA, 22 nt, Human
ggucauuguucuuuucugugau

SEQ ID NO: 988122 - RNA, 22 nt, Human
uuaaaaccaucagcuguaagau

SEQ ID NO: 988123 - RNA, 22 nt, Human
ggccucacccaucggugccuuu

SEQ ID NO: 988124 - RNA, 22 nt, Human
acaaagugaauugcaucgaguu

SEQ ID NO: 988125 - RNA, 22 nt, Human
aaaagucagucucuccuagcuc

SEQ ID NO: 988126 - RNA, 22 nt, Human
cauuccuuaacguggggagucu

SEQ ID NO: 988127 - RNA, 22 nt, Human
agguggguccuggcucugccau

SEQ ID NO: 988128 - RNA, 22 nt, Human
ggaaagaggauaguggguaggu

SEQ ID NO: 988129 - RNA, 22 nt, Human
gcuccagguauuugcccuuuua

SEQ ID NO: 988130 - RNA, 22 nt, Human
uuaguaggagagcuuguucauu

SEQ ID NO: 988131 - RNA, 22 nt, Human
caggccucagagaguggcgggg

SEQ ID NO: 988132 - RNA, 22 nt, Human
agagucuuccaggcagccugag

SEQ ID NO: 988133 - RNA, 18 nt, Human
gggaagaggaucuggccc

SEQ ID NO: 988134 - RNA, 22 nt, Human
cucugcaggggaggcaugcacu

SEQ ID NO: 988135 - RNA, 18 nt, Human
acauuucuccuucugacc

SEQ ID NO: 988136 - RNA, 20 nt, Human
cugugccuaaaccuccgggu

SEQ ID NO: 988137 - RNA, 22 nt, Human
ucuccuucgaggcccagcuccc

SEQ ID NO: 988138 - RNA, 21 nt, Human
ucugggcccaugcugccucac

SEQ ID NO: 988139 - RNA, 22 nt, Human
cugagucucccggcaguggagg

SEQ ID NO: 988140 - RNA, 19 nt, Human
ucucagaggaaaaauugcu

SEQ ID NO: 988141 - RNA, 22 nt, Human
uccucugcuccaucuuuacugu

SEQ ID NO: 988142 - RNA, 22 nt, Human
ucugaaaucuguaagcacuagc

SEQ ID NO: 988143 - RNA, 22 nt, Human
gccugugcuuaacugacgugag

SEQ ID NO: 988144 - RNA, 18 nt, Human
gcuccugguuggaaagaa

SEQ ID NO: 988145 - RNA, 21 nt, Human
uggcagaguugaguaguuaug

SEQ ID NO: 988146 - RNA, 22 nt, Human
ugucccaguuuaucugggacug

SEQ ID NO: 988147 - RNA, 22 nt, Human
ccauuuguucgcccagcuccaa

SEQ ID NO: 988148 - RNA, 22 nt, Human
ucagcaguggcucucaugcagu

SEQ ID NO: 988149 - RNA, 22 nt, Human
gggcugccaagccugccugccu

SEQ ID NO: 988150 - RNA, 22 nt, Human
ugugccuggaucucugugacaa

SEQ ID NO: 988151 - RNA, 22 nt, Human
uacuuagagcgauaauuuauac

SEQ ID NO: 988152 - RNA, 22 nt, Human
gcuguccucuuggacucagggc

SEQ ID NO: 988153 - RNA, 22 nt, Human
acauacuuuuuaaaagauugcu

SEQ ID NO: 988154 - RNA, 22 nt, Human
cuguagccaguuuggccucacc

SEQ ID NO: 988155 - RNA, 22 nt, Human
aucagcaaguccuguuaauucu

SEQ ID NO: 988156 - RNA, 22 nt, Human
ucagagcuuaucucuugcugga

SEQ ID NO: 988157 - RNA, 22 nt, Human
ccuggccacccagccuuggcca

SEQ ID NO: 988158 - RNA, 17 nt, Human
aggagucucagaugagc

SEQ ID NO: 988159 - RNA, 22 nt, Human
agaugggcgcccuggacugagg

SEQ ID NO: 988160 - RNA, 22 nt, Human
gaugagggccugguggcugugc

SEQ ID NO: 988161 - RNA, 22 nt, Human
uccucagggggccaacccagcc

SEQ ID NO: 988162 - RNA, 22 nt, Human
acagguggggaggcugagguuc

SEQ ID NO: 988163 - RNA, 22 nt, Human
gucugcugcagagcauggcuuu

SEQ ID NO: 988164 - RNA, 22 nt, Human
cuggcucauuuuagcaucaggu

SEQ ID NO: 988165 - RNA, 22 nt, Human
guucauauuacuuugagugcag

SEQ ID NO: 988166 - RNA, 22 nt, Human
gggcuggugaggcugcccugca

SEQ ID NO: 988167 - RNA, 22 nt, Human
aagaguuuucuauaaucuuggc

SEQ ID NO: 988168 - RNA, 22 nt, Human
aaaaucugcuuccuuuuacaga

SEQ ID NO: 988169 - RNA, 22 nt, Human
accuuuuauguaaauauauguu

SEQ ID NO: 988170 - RNA, 22 nt, Human
ugggccuggacaaggccacuag

SEQ ID NO: 988171 - RNA, 18 nt, Human
ugcucuguuuaaugauuu

SEQ ID NO: 988172 - RNA, 22 nt, Human
caaagguaguauauauauuguu

SEQ ID NO: 988173 - RNA, 22 nt, Human
ggccucuggucaagacaagcau

SEQ ID NO: 988174 - RNA, 22 nt, Human
ugggggugaaagucuggacagu

SEQ ID NO: 988175 - RNA, 22 nt, Human
ucucauucauacccuacaugcu

SEQ ID NO: 988176 - RNA, 18 nt, Human
gcacucugacugcagagc

SEQ ID NO: 988177 - RNA, 22 nt, Human
cagaacugggcagggagcagag

SEQ ID NO: 988178 - RNA, 23 nt, Human
uggggccaagugaggaagggucu

SEQ ID NO: 988179 - RNA, 22 nt, Human
gcagggcaugggcccugucugc

SEQ ID NO: 988180 - RNA, 22 nt, Human
uagaaaucagguuuuuagaaag

SEQ ID NO: 988181 - RNA, 22 nt, Human
ggugaagggccuuaggagacag

SEQ ID NO: 988182 - RNA, 22 nt, Human
auacagaagaacuauagccacu

SEQ ID NO: 988183 - RNA, 23 nt, Human
acagggcauugcuggccucgagg

SEQ ID NO: 988184 - RNA, 22 nt, Human
ucccaggaucugagggcagaga

SEQ ID NO: 988185 - RNA, 22 nt, Human
gcugcagcuuuaggauccagug

SEQ ID NO: 988186 - RNA, 20 nt, Human
cugagccaacucucuucuug

SEQ ID NO: 988187 - RNA, 17 nt, Human
agcagcuggcacaggag

SEQ ID NO: 988188 - RNA, 22 nt, Human
ccaaaaagcucagagauauguu

SEQ ID NO: 988189 - RNA, 22 nt, Human
aggcaggugggucacuugaguc

SEQ ID NO: 988190 - RNA, 22 nt, Human
uauagaagagacaugugcauag

SEQ ID NO: 988191 - RNA, 22 nt, Human
gccuggugcuaugagggccagc

SEQ ID NO: 988192 - RNA, 19 nt, Human
cuguccuuggcugcacugu

SEQ ID NO: 988193 - RNA, 22 nt, Human
cacuggcaugugaggcgguggc

SEQ ID NO: 988194 - RNA, 22 nt, Human
aucaauucuuaggaaaauagcu

SEQ ID NO: 988195 - RNA, 22 nt, Human
aaaugcacagguuuuaaauccu

SEQ ID NO: 988196 - RNA, 22 nt, Human
aagccagcauuuucccauuccu

SEQ ID NO: 988197 - RNA, 22 nt, Human
caggagcaaggagcagugggau

SEQ ID NO: 988198 - RNA, 22 nt, Human
cucugcugggauguaaagucuu

SEQ ID NO: 988199 - RNA, 22 nt, Human
ggucucuguugccuccaucaag

SEQ ID NO: 988200 - RNA, 22 nt, Human
aauuaggaaauucagccauuuu

SEQ ID NO: 988201 - RNA, 22 nt, Human
uccuugaagagugggcggucga

SEQ ID NO: 988202 - RNA, 22 nt, Human
uaauaucuacuucauagaguuu

SEQ ID NO: 988203 - RNA, 22 nt, Human
caguggccaugguggcaggggu

SEQ ID NO: 988204 - RNA, 22 nt, Human
agagugaaguuuuugaaaguga

SEQ ID NO: 988205 - RNA, 22 nt, Human
caggcugcagaggccuuucaug

SEQ ID NO: 988206 - RNA, 22 nt, Human
gcugucugucuucacaucucgc

SEQ ID NO: 988207 - RNA, 22 nt, Human
gcagacagccagacugcacugg

SEQ ID NO: 988208 - RNA, 22 nt, Human
aggagcagcccacuccuguccu

SEQ ID NO: 988209 - RNA, 22 nt, Human
aggcuggaguacaguggcuauu

SEQ ID NO: 988210 - RNA, 20 nt, Human
cucaguguggccugaguguu

SEQ ID NO: 988211 - RNA, 22 nt, Human
gggucucucucggcuccacgcg

SEQ ID NO: 988212 - RNA, 22 nt, Human
uccuggcccucugcaaacgcca

SEQ ID NO: 988213 - RNA, 22 nt, Human
ucaguuuucucauuuaugagau

SEQ ID NO: 988214 - RNA, 22 nt, Human
uaaagguagugugacauauugu

SEQ ID NO: 988215 - RNA, 20 nt, Human
caggccagagguuugauggc

SEQ ID NO: 988216 - RNA, 22 nt, Human
ccagccagucccgcaugaccgc

SEQ ID NO: 988217 - RNA, 22 nt, Human
ccaggcaggcagcguucucagg

SEQ ID NO: 988218 - RNA, 22 nt, Human
uccaagggcuuuggcgugaagu

SEQ ID NO: 988219 - RNA, 22 nt, Human
agaaacuucagcuauucuuuug

SEQ ID NO: 988220 - RNA, 22 nt, Human
gcccugggauuggguggaggcu

SEQ ID NO: 988221 - RNA, 22 nt, Human
ccuggccagcuaauugcccauc

SEQ ID NO: 988222 - RNA, 22 nt, Human
ucuccugggugcuuuaucagaa

SEQ ID NO: 988223 - RNA, 22 nt, Human
gcuggcuccucuguccucacgg

SEQ ID NO: 988224 - RNA, 22 nt, Human
gcuguccucugaucucuggagg

SEQ ID NO: 988225 - RNA, 22 nt, Human
gggcugcuguagagaacauguu

SEQ ID NO: 988226 - RNA, 22 nt, Human
gcaccaggcuuagagccccagg

SEQ ID NO: 988227 - RNA, 22 nt, Human
gcaccuuuggaaugaaaaguug

SEQ ID NO: 988228 - RNA, 22 nt, Human
agcaaggcagucagcuggcugg

SEQ ID NO: 988229 - RNA, 22 nt, Human
ccagcucugcagggccuggggu

SEQ ID NO: 988230 - RNA, 22 nt, Human
cugaaggagcauagucaguuuu

SEQ ID NO: 988231 - RNA, 22 nt, Human
uuuuaugauugagcuggcuaca

SEQ ID NO: 988232 - RNA, 22 nt, Human
agggcuggcaagggauugaaau

SEQ ID NO: 988233 - RNA, 22 nt, Human
cacagguguaugaauaugucca

SEQ ID NO: 988234 - RNA, 22 nt, Human
gagcccagguucugcuuccagc

SEQ ID NO: 988235 - RNA, 22 nt, Human
ucuggcucccagccugcucuca

SEQ ID NO: 988236 - RNA, 22 nt, Human
uacaaaaaauugauacugacga

SEQ ID NO: 988237 - RNA, 22 nt, Human
ugcagcugcuggcccaggugcu

SEQ ID NO: 988238 - RNA, 22 nt, Human
gagcuucccucugcagucccug

SEQ ID NO: 988239 - RNA, 22 nt, Human
uuuacuguuuacagcuaaugca

SEQ ID NO: 988240 - RNA, 22 nt, Human
cuggggugagcagaaacagggg

SEQ ID NO: 988241 - RNA, 22 nt, Human
cagcucccuauggugaggcgac

SEQ ID NO: 988242 - RNA, 22 nt, Human
gcaggagagucugugccagguu

SEQ ID NO: 988243 - RNA, 22 nt, Human
agacagguaaauagagaugcug

SEQ ID NO: 988244 - RNA, 22 nt, Human
ggcugccuucagacuccagcuu

SEQ ID NO: 988245 - RNA, 22 nt, Human
uucacauuauaaucaguucugc

SEQ ID NO: 988246 - RNA, 22 nt, Human
ucugagccacagauguccuguu

SEQ ID NO: 988247 - RNA, 22 nt, Human
agccuucacugggaccuuggau

SEQ ID NO: 988248 - RNA, 22 nt, Human
aaauucuuucauggcuaauaag

SEQ ID NO: 988249 - RNA, 18 nt, Human
ccugcagcccaggaggcc

SEQ ID NO: 988250 - RNA, 22 nt, Human
caguggccugagccaggcuucc

SEQ ID NO: 988251 - RNA, 22 nt, Human
gccagcagguggagagaucaag

SEQ ID NO: 988252 - RNA, 22 nt, Human
gcugucuguggugucagcugac

SEQ ID NO: 988253 - RNA, 22 nt, Human
uucuuagaugauuaaugauggg

SEQ ID NO: 988254 - RNA, 22 nt, Human
aagagagagcauucuucuguua

SEQ ID NO: 988255 - RNA, 22 nt, Human
ugaagggggagauauaugugug

SEQ ID NO: 988256 - RNA, 20 nt, Human
ccagagcagccacugaaguu

SEQ ID NO: 988257 - RNA, 19 nt, Human
uguguaaagucugugguca

SEQ ID NO: 988258 - RNA, 22 nt, Human
auguaucaauuaucugucugca

SEQ ID NO: 988259 - RNA, 22 nt, Human
ggcugccagugagugcagaccg

SEQ ID NO: 988260 - RNA, 22 nt, Human
agaugguguuuccccaggugga

SEQ ID NO: 988261 - RNA, 22 nt, Human
ccugccugcuuucugcuuugca

SEQ ID NO: 988262 - RNA, 22 nt, Human
ggacuggccggcgcugaggccc

SEQ ID NO: 988263 - RNA, 22 nt, Human
gggccccaaaaugccaggcucu

SEQ ID NO: 988264 - RNA, 22 nt, Human
ugcaagagguaaaaugaaagga

SEQ ID NO: 988265 - RNA, 22 nt, Human
caaaggagguaaugggugugag

SEQ ID NO: 988266 - RNA, 22 nt, Human
uagcugucagcaaucaaguggu

SEQ ID NO: 988267 - RNA, 22 nt, Human
ggugggcaggcgaggcccaggu

SEQ ID NO: 988268 - RNA, 22 nt, Human
aaugaacaaaauaugcuuugca

SEQ ID NO: 988269 - RNA, 21 nt, Human
gccugcagaccccaccaggcu

SEQ ID NO: 988270 - RNA, 22 nt, Human
uuucacaaacugaggagacaau

SEQ ID NO: 988271 - RNA, 22 nt, Human
cucuuuccaggguaccccaggu

SEQ ID NO: 988272 - RNA, 22 nt, Human
ccugagagcagcuuccugcuua

SEQ ID NO: 988273 - RNA, 20 nt, Human
gcugaggucauuaugccuca

SEQ ID NO: 988274 - RNA, 23 nt, Human
uggcucagcuaguuuuccauuuc

SEQ ID NO: 988275 - RNA, 22 nt, Human
aagggaggaggauuuauuguac

SEQ ID NO: 988276 - RNA, 22 nt, Human
ugcagagguguugcugagauaa

SEQ ID NO: 988277 - RNA, 19 nt, Human
gggcucuggccucaguggg

SEQ ID NO: 988278 - RNA, 18 nt, Human
ucaagacaucaugaaaua

SEQ ID NO: 988279 - RNA, 22 nt, Human
aaauaugaaugauaagaguuau

SEQ ID NO: 988280 - RNA, 22 nt, Human
ucucugcuaagauugugucuag

SEQ ID NO: 988281 - RNA, 20 nt, Human
aagaaacuugaaaguacaag

SEQ ID NO: 988282 - RNA, 22 nt, Human
aaguuugagaagcuuauagaua

SEQ ID NO: 988283 - RNA, 22 nt, Human
ucugcugcugagcacacuccua

SEQ ID NO: 988284 - RNA, 22 nt, Human
agauuucccacuccauguauug

SEQ ID NO: 988285 - RNA, 22 nt, Human
cauucugugauucuaaaucccu

SEQ ID NO: 988286 - RNA, 22 nt, Human
aaguuuguguaguuuagcaucc

SEQ ID NO: 988287 - RNA, 22 nt, Human
agguccagcuguugcagccucc

SEQ ID NO: 988288 - RNA, 22 nt, Human
cuucagaggggacucaaaguca

SEQ ID NO: 988289 - RNA, 22 nt, Human
gaggcugcuguuagcccugggc

SEQ ID NO: 988290 - RNA, 22 nt, Human
acauacauaugacaacuuuccu

SEQ ID NO: 988291 - RNA, 22 nt, Human
ucagaagcauguggggagccug

SEQ ID NO: 988292 - RNA, 22 nt, Human
aauaaaaugaacugguagaguu

SEQ ID NO: 988293 - RNA, 22 nt, Human
ccucugccaccucccacgaggc

SEQ ID NO: 988294 - RNA, 22 nt, Human
aggagaguucacacuggucaga

SEQ ID NO: 988295 - RNA, 21 nt, Human
aggcagcucaggcccagagag

SEQ ID NO: 988296 - RNA, 22 nt, Human
aggagguggccugagcgugccc

SEQ ID NO: 988297 - RNA, 17 nt, Human
cucagaguugcuuuguc

SEQ ID NO: 988298 - RNA, 22 nt, Human
aguacauuuauuaaugguaaaa

SEQ ID NO: 988299 - RNA, 22 nt, Human
ccaaggagcucauauucuuguu

SEQ ID NO: 988300 - RNA, 22 nt, Human
cccuggagcaucucugcugucu

SEQ ID NO: 988301 - RNA, 22 nt, Human
aagugguaggaagagagcacug

SEQ ID NO: 988302 - RNA, 20 nt, Human
agagccuugaggaagaugau

SEQ ID NO: 988303 - RNA, 17 nt, Human
agugaaauuuacauugc

SEQ ID NO: 988304 - RNA, 22 nt, Human
gcugucuggguugagggcccug

SEQ ID NO: 988305 - RNA, 22 nt, Human
ccauuguaaagaguauacuuug

SEQ ID NO: 988306 - RNA, 22 nt, Human
gcuggcuuugcacugggugcau

SEQ ID NO: 988307 - RNA, 22 nt, Human
uggcagcauuuuuuccagaaca

SEQ ID NO: 988308 - RNA, 22 nt, Human
gcagagccugugucugagcaaa

SEQ ID NO: 988309 - RNA, 22 nt, Human
uuagcuaaacuguaacuagaau

SEQ ID NO: 988310 - RNA, 22 nt, Human
uccaggagguuuggaggaagca

SEQ ID NO: 988311 - RNA, 22 nt, Human
ugcagcugaggccagcuaugcc

SEQ ID NO: 988312 - RNA, 22 nt, Human
gagccugagugcugccuccccu

SEQ ID NO: 988313 - RNA, 20 nt, Human
ugaaauaaggaguuguccuu

SEQ ID NO: 988314 - RNA, 21 nt, Human
agucccaggggugagugaugu

SEQ ID NO: 988315 - RNA, 22 nt, Human
auggccaagaucacagacuuca

SEQ ID NO: 988316 - RNA, 22 nt, Human
cacugaagaugcgacuagugcu

SEQ ID NO: 988317 - RNA, 22 nt, Human
aggaagccugcaggugacugcu

SEQ ID NO: 988318 - RNA, 23 nt, Human
augcucugggcugugggaccugc

SEQ ID NO: 988319 - RNA, 22 nt, Human
agaggagguggugaugcuuuaa

SEQ ID NO: 988320 - RNA, 22 nt, Human
caggaaccuaaugaaggcucac

SEQ ID NO: 988321 - RNA, 22 nt, Human
cagcccugagagaaccaucuau

SEQ ID NO: 988322 - RNA, 22 nt, Human
cugcucugugguccaugagaca

SEQ ID NO: 988323 - RNA, 22 nt, Human
cucuguccacagguuugucccu

SEQ ID NO: 988324 - RNA, 22 nt, Human
aaaugucuuugaguauuucugc

SEQ ID NO: 988325 - RNA, 22 nt, Human
uugucuuaaauggauggacaau

SEQ ID NO: 988326 - RNA, 22 nt, Human
agcuguguagggaaucagagaa

SEQ ID NO: 988327 - RNA, 22 nt, Human
agcaggguuuggggauuggcac

SEQ ID NO: 988328 - RNA, 22 nt, Human
ucugggcucuuaguguacccuc

SEQ ID NO: 988329 - RNA, 22 nt, Human
agucaguggcuccgagccuggu

SEQ ID NO: 988330 - RNA, 22 nt, Human
gugggcaaggucccugccagcu

SEQ ID NO: 988331 - RNA, 18 nt, Human
ucacagugcucuugccua

SEQ ID NO: 988332 - RNA, 22 nt, Human
cugaggugcuagggucccugcu

SEQ ID NO: 988333 - RNA, 22 nt, Human
cacucugagaaguacaagcucc

SEQ ID NO: 988334 - RNA, 22 nt, Human
acaauucuggguauuuauauag

SEQ ID NO: 988335 - RNA, 22 nt, Human
aacugccuggccaggcugcaac

SEQ ID NO: 988336 - RNA, 23 nt, Human
gcauugucuccccacuucugggc

SEQ ID NO: 988337 - RNA, 22 nt, Human
agacauuuauugaacaccuagc

SEQ ID NO: 988338 - RNA, 22 nt, Human
ucauugcaggcauuccccugcc

SEQ ID NO: 988339 - RNA, 22 nt, Human
ucugccuguucaagucuucuag

SEQ ID NO: 988340 - RNA, 21 nt, Human
ucugagagcaacugcccuuua

SEQ ID NO: 988341 - RNA, 22 nt, Human
aacaggagaguaaauauaugau

SEQ ID NO: 988342 - RNA, 22 nt, Human
caggguggcccuguggucucau

SEQ ID NO: 988343 - RNA, 22 nt, Human
aauagaauuuguacuguguuuu

SEQ ID NO: 988344 - RNA, 22 nt, Human
ggcaccuggagguuuacuggau

SEQ ID NO: 988345 - RNA, 22 nt, Human
gacaggggucccucugggcugu

SEQ ID NO: 988346 - RNA, 22 nt, Human
auguaagguucagaguauguga

SEQ ID NO: 988347 - RNA, 22 nt, Human
aucucccagccacagcauucuu

SEQ ID NO: 988348 - RNA, 22 nt, Human
gcaggugggggucggugcaucu

SEQ ID NO: 988349 - RNA, 23 nt, Human
gguggcaggaguggaugcugagc

SEQ ID NO: 988350 - RNA, 22 nt, Human
uacauguaagacaugagacucu

SEQ ID NO: 988351 - RNA, 22 nt, Human
aauuccugucuuaacaguucug

SEQ ID NO: 988352 - RNA, 19 nt, Human
ucucuggggacacuuucac

SEQ ID NO: 988353 - RNA, 22 nt, Human
acuuucucccacccacccgucu

SEQ ID NO: 988354 - RNA, 22 nt, Human
cccauuuaaacacaagcuuuca

SEQ ID NO: 988355 - RNA, 19 nt, Human
uggcaggcccaggauggac

SEQ ID NO: 988356 - RNA, 20 nt, Human
uguuccaugacuauuuggau

SEQ ID NO: 988357 - RNA, 22 nt, Human
uggcagcauuaauuauucaggu

SEQ ID NO: 988358 - RNA, 22 nt, Human
cccucaggagaugucagcugga

SEQ ID NO: 988359 - RNA, 22 nt, Human
aagcagccuggcaugaugcuuu

SEQ ID NO: 988360 - RNA, 21 nt, Human
gggcuggacaugguggcucau

SEQ ID NO: 988361 - RNA, 22 nt, Human
ccuggaggagcgcugaccagcu

SEQ ID NO: 988362 - RNA, 22 nt, Human
cagcucugugggagcguaugug

SEQ ID NO: 988363 - RNA, 22 nt, Human
acagggccagccugggaccugg

SEQ ID NO: 988364 - RNA, 22 nt, Human
cuucccagacgggguggcagcc

SEQ ID NO: 988365 - RNA, 22 nt, Human
uccaggcuggacaugaggcggg

SEQ ID NO: 988366 - RNA, 22 nt, Human
agcagggcagcugaugcgcacg

SEQ ID NO: 988367 - RNA, 22 nt, Human
acacuuuuagcuaugaguuaau

SEQ ID NO: 988368 - RNA, 21 nt, Human
aaaguucaugcuuuaauauuc

SEQ ID NO: 988369 - RNA, 22 nt, Human
ccuggugcuuaccagagcuuuu

SEQ ID NO: 988370 - RNA, 22 nt, Human
uuccuggcaugaaaaauaucac

SEQ ID NO: 988371 - RNA, 22 nt, Human
agcugagcauuugauccaccuc

SEQ ID NO: 988372 - RNA, 22 nt, Human
ucuggcccagccccugagguca

SEQ ID NO: 988373 - RNA, 22 nt, Human
ggcugcugguagggguaggaag

SEQ ID NO: 988374 - RNA, 22 nt, Human
ccaaagugcugggguuacaggc

SEQ ID NO: 988375 - RNA, 22 nt, Human
ugccuggcaagaggggcuggcu

SEQ ID NO: 988376 - RNA, 22 nt, Human
ucucugcucaggcaccagcccu

SEQ ID NO: 988377 - RNA, 22 nt, Human
auccuugagccaaugacugauu

SEQ ID NO: 988378 - RNA, 20 nt, Human
ggggcccaagcccucuugcc

SEQ ID NO: 988379 - RNA, 22 nt, Human
aggggagccccugguccuggug

SEQ ID NO: 988380 - RNA, 22 nt, Human
ugggcuccucgucacucgcugu

SEQ ID NO: 988381 - RNA, 22 nt, Human
cugggccuagaggaagcugaca

SEQ ID NO: 988382 - RNA, 19 nt, Human
agacagagcucaguggguu

SEQ ID NO: 988383 - RNA, 22 nt, Human
cggcuggguagaggugccgggu

SEQ ID NO: 988384 - RNA, 22 nt, Human
uccacagaauguaagauccaca

SEQ ID NO: 988385 - RNA, 19 nt, Human
ccugggagucagcugaagg

SEQ ID NO: 988386 - RNA, 22 nt, Human
cuccccagguucaggagguggg

SEQ ID NO: 988387 - RNA, 23 nt, Human
cagaccuggcagucauccucaac

SEQ ID NO: 988388 - RNA, 22 nt, Human
cagagccuaaaacgacuccacu

SEQ ID NO: 988389 - RNA, 22 nt, Human
ucagcagggcugugguguggcu

SEQ ID NO: 988390 - RNA, 22 nt, Human
gagggcagaaaauuaugcggug

SEQ ID NO: 988391 - RNA, 22 nt, Human
cccagcuccagagccagaaaca

SEQ ID NO: 988392 - RNA, 22 nt, Human
uccaugugccaaggggcagagg

SEQ ID NO: 988393 - RNA, 22 nt, Human
gugcagugacccuggagagcug

SEQ ID NO: 988394 - RNA, 22 nt, Human
agccauugaauuuagugccuuu

SEQ ID NO: 988395 - RNA, 22 nt, Human
uggccugguaccacauagauuu

SEQ ID NO: 988396 - RNA, 22 nt, Human
gcauuguccugcuucugagugu

SEQ ID NO: 988397 - RNA, 23 nt, Human
auauuagggagauuagcccucua

SEQ ID NO: 988398 - RNA, 22 nt, Human
gggcucugcgcucagcuccagc

SEQ ID NO: 988399 - RNA, 22 nt, Human
aucuggcuuuuacugaauugcu

SEQ ID NO: 988400 - RNA, 22 nt, Human
ggaggugggagacauaggcggc

SEQ ID NO: 988401 - RNA, 22 nt, Human
gcagacuggucuucagccuugg

SEQ ID NO: 988402 - RNA, 22 nt, Human
caggaucccuggccuccgccca

SEQ ID NO: 988403 - RNA, 21 nt, Human
uugaagcaaggguggcucuga

SEQ ID NO: 988404 - RNA, 22 nt, Human
aagcugcccaagacugaagcau

SEQ ID NO: 988405 - RNA, 22 nt, Human
cccugggcagucugcacuucag

SEQ ID NO: 988406 - RNA, 22 nt, Human
cuucuggggauggagcccagaa

SEQ ID NO: 988407 - RNA, 22 nt, Human
ugagagucucagaccuccuggu

SEQ ID NO: 988408 - RNA, 22 nt, Human
agcugccagaugacagugcuau

SEQ ID NO: 988409 - RNA, 22 nt, Human
uugcaaaugggcaaagcagauc

SEQ ID NO: 988410 - RNA, 22 nt, Human
cagggcucaucugugugaccag

SEQ ID NO: 988411 - RNA, 22 nt, Human
aucuggcuauugacauguuaua

SEQ ID NO: 988412 - RNA, 22 nt, Human
uguggucucguuauguugccca

SEQ ID NO: 988413 - RNA, 22 nt, Human
agaagcagacucugaggcaagg

SEQ ID NO: 988414 - RNA, 22 nt, Human
cuccugugggucaccaauaggc

SEQ ID NO: 988415 - RNA, 22 nt, Human
ggggauggauuccgggucccug

SEQ ID NO: 988416 - RNA, 22 nt, Human
gaaaagcuaggccaguucagcu

SEQ ID NO: 988417 - RNA, 22 nt, Human
augggaggaaggaggcccuuga

SEQ ID NO: 988418 - RNA, 22 nt, Human
ucuggcucaggucagacaggga

SEQ ID NO: 988419 - RNA, 22 nt, Human
uugggcucaggaguuugagacc

SEQ ID NO: 988420 - RNA, 22 nt, Human
cucugagcugaaacaugagcau

SEQ ID NO: 988421 - RNA, 22 nt, Human
ccagcuggcacuguggcugccc

SEQ ID NO: 988422 - RNA, 22 nt, Human
gguggggucacgacagagggaa

SEQ ID NO: 988423 - RNA, 22 nt, Human
auuaggaaacugaaugucagaa

SEQ ID NO: 988424 - RNA, 22 nt, Human
uguuccaugucuuuguaggacu

SEQ ID NO: 988425 - RNA, 22 nt, Human
ccuuuuucccuggagggacagc

SEQ ID NO: 988426 - RNA, 22 nt, Human
cuggcagguccagcuggacuca

SEQ ID NO: 988427 - RNA, 23 nt, Human
uggccacagggugcuccauugua

SEQ ID NO: 988428 - RNA, 22 nt, Human
aguaucaaggaucuccagcacc

SEQ ID NO: 988429 - RNA, 22 nt, Human
ugccugggccucugaggaaggc

SEQ ID NO: 988430 - RNA, 22 nt, Human
ccagguggaaggucugugcucu

SEQ ID NO: 988431 - RNA, 22 nt, Human
ucaguuuucucaucugugaaau

SEQ ID NO: 988432 - RNA, 22 nt, Human
cagagacagggcagggagugug

SEQ ID NO: 988433 - RNA, 22 nt, Human
ccugggcaacauagugagaccc

SEQ ID NO: 988434 - RNA, 22 nt, Human
gccugcagaacugugaggcaau

SEQ ID NO: 988435 - RNA, 22 nt, Human
guaaaugugcuucuuuuaacuu

SEQ ID NO: 988436 - RNA, 22 nt, Human
gcuggccugucuagagccuuac

SEQ ID NO: 988437 - RNA, 22 nt, Human
cugguucauccccuuccaggaa

SEQ ID NO: 988438 - RNA, 22 nt, Human
aguauuucugcucaugaaagag

SEQ ID NO: 988439 - RNA, 22 nt, Human
ccugcagcuccggauuucuggg

SEQ ID NO: 988440 - RNA, 22 nt, Human
cucuuccucucaugcggucaua

SEQ ID NO: 988441 - RNA, 22 nt, Human
agggucuguggaugcaucuggg

SEQ ID NO: 988442 - RNA, 22 nt, Human
cugcaguguucuggaaugcauu

SEQ ID NO: 988443 - RNA, 22 nt, Human
agccuugaacacugacugaagg

SEQ ID NO: 988444 - RNA, 22 nt, Human
caacccaagguuaguuggucuu

SEQ ID NO: 988445 - RNA, 22 nt, Human
cagggccacuguagaugaggag

SEQ ID NO: 988446 - RNA, 22 nt, Human
agaagauuuagguugacgcuau

SEQ ID NO: 988447 - RNA, 22 nt, Human
uuucuucugagaucagggagaa

SEQ ID NO: 988448 - RNA, 22 nt, Human
cucuggccugcuuccucaggua

SEQ ID NO: 988449 - RNA, 22 nt, Human
auuuuuaugacaaaccauccuc

SEQ ID NO: 988450 - RNA, 22 nt, Human
acauuucucauucuccccuaac

SEQ ID NO: 988451 - RNA, 22 nt, Human
uguacauuuagagcucaauaga

SEQ ID NO: 988452 - RNA, 19 nt, Human
acagaagcauagaaaagga

SEQ ID NO: 988453 - RNA, 22 nt, Human
cgagaguggacagggcgcagcu

SEQ ID NO: 988454 - RNA, 23 nt, Human
cagggccaggcagcagcugucac

SEQ ID NO: 988455 - RNA, 22 nt, Human
gaacaguaaauuuaugcagcac

SEQ ID NO: 988456 - RNA, 22 nt, Human
ugaaagcuguccacuaggcugu

SEQ ID NO: 988457 - RNA, 17 nt, Human
auuagguuuugucauga

SEQ ID NO: 988458 - RNA, 22 nt, Human
ucuggcaaaggcaaccacaguu

SEQ ID NO: 988459 - RNA, 22 nt, Human
cccaggagguagagguugcagu

SEQ ID NO: 988460 - RNA, 22 nt, Human
gccugcagccucaagggcugag

SEQ ID NO: 988461 - RNA, 22 nt, Human
gcuccaggagagggaagcagau

SEQ ID NO: 988462 - RNA, 22 nt, Human
gcccaggcuagcguagagugca

SEQ ID NO: 988463 - RNA, 22 nt, Human
uucacauugguucuugauagcu

SEQ ID NO: 988464 - RNA, 22 nt, Human
ugcuagaaaucugaaacuagca

SEQ ID NO: 988465 - RNA, 22 nt, Human
agcagggcuuugcagacuuggg

SEQ ID NO: 988466 - RNA, 22 nt, Human
ccagcuggaagagugcagaacu

SEQ ID NO: 988467 - RNA, 22 nt, Human
cucugggcaaguuucuucauga

SEQ ID NO: 988468 - RNA, 22 nt, Human
guuuauuagaguuuucugucug

SEQ ID NO: 988469 - RNA, 22 nt, Human
auugucuguacuuuaaaaaugu

SEQ ID NO: 988470 - RNA, 22 nt, Human
agcaccuggucuccuggcgcug

SEQ ID NO: 988471 - RNA, 22 nt, Human
aucaggaucugcaucauaagaa

SEQ ID NO: 988472 - RNA, 22 nt, Human
ccagagccuaagaucugauccu

SEQ ID NO: 988473 - RNA, 22 nt, Human
cuggagccgcauggagcaggga

SEQ ID NO: 988474 - RNA, 22 nt, Human
gugugcagugagcaaaagaucu

SEQ ID NO: 988475 - RNA, 22 nt, Human
uugagggucuggaucugcugcu

SEQ ID NO: 988476 - RNA, 22 nt, Human
uugcauugugauuacagaggug

SEQ ID NO: 988477 - RNA, 22 nt, Human
caggucccgccccgggcugacc

SEQ ID NO: 988478 - RNA, 22 nt, Human
ugugucagagguagagauggca

SEQ ID NO: 988479 - RNA, 22 nt, Human
aaucuggcucagaagaagauga

SEQ ID NO: 988480 - RNA, 22 nt, Human
acugagcucuugacugggaguu

SEQ ID NO: 988481 - RNA, 22 nt, Human
acauuucagcgugcaugacaug

SEQ ID NO: 988482 - RNA, 22 nt, Human
cauguacaguuuuucuguccug

SEQ ID NO: 988483 - RNA, 22 nt, Human
ucagcaauaugauaggcuuugu

SEQ ID NO: 988484 - RNA, 22 nt, Human
agauuucaauggauauugcaag

SEQ ID NO: 988485 - RNA, 22 nt, Human
aggcugaggcagguggaucacu

SEQ ID NO: 988486 - RNA, 21 nt, Human
caugaagccgguucccuguuu

SEQ ID NO: 988487 - RNA, 22 nt, Human
uagccucuggaauccuuucucu

SEQ ID NO: 988488 - RNA, 22 nt, Human
aauaaauguuaagauugucuca

SEQ ID NO: 988489 - RNA, 22 nt, Human
auucuuuucccaacugcuuuaa

SEQ ID NO: 988490 - RNA, 22 nt, Human
ucugagccguauggcuuggcua

SEQ ID NO: 988491 - RNA, 22 nt, Human
uggcccugacugauguggaggg

SEQ ID NO: 988492 - RNA, 22 nt, Human
ccagggcauguccaagacuuag

SEQ ID NO: 988493 - RNA, 22 nt, Human
cggagccugcuuguugcagcug

SEQ ID NO: 988494 - RNA, 22 nt, Human
uucuaacucuguuauguguuuc

SEQ ID NO: 988495 - RNA, 22 nt, Human
ucuuagaaugucaacugauguu

SEQ ID NO: 988496 - RNA, 22 nt, Human
uuccucucucuugccagaaugu

SEQ ID NO: 988497 - RNA, 23 nt, Human
ugccucugccucccuagucugca

SEQ ID NO: 988498 - RNA, 22 nt, Human
ccugugugcugaugacgacaga

SEQ ID NO: 988499 - RNA, 22 nt, Human
caggggacaguaugguggauga

SEQ ID NO: 988500 - RNA, 22 nt, Human
ugccugggguuggcaaacugcu

SEQ ID NO: 988501 - RNA, 22 nt, Human
acaggccugacacacagagggc

SEQ ID NO: 988502 - RNA, 22 nt, Human
gcugcccugugguccagcaggu

SEQ ID NO: 988503 - RNA, 17 nt, Human
gagagcugcugcuuccg

SEQ ID NO: 988504 - RNA, 22 nt, Human
aaaucugggucaagguggagug

SEQ ID NO: 988505 - RNA, 22 nt, Human
cuggccugggagcugcuagcgu

SEQ ID NO: 988506 - RNA, 22 nt, Human
acuaaauaguuuugacagaaca

SEQ ID NO: 988507 - RNA, 22 nt, Human
cacaagucuguggucuccaaca

SEQ ID NO: 988508 - RNA, 22 nt, Human
ugggugggagcgcccugucugg

SEQ ID NO: 988509 - RNA, 22 nt, Human
acagcagcgucaacuuaaaauu

SEQ ID NO: 988510 - RNA, 22 nt, Human
uagucuuuugagaaguauaucu

SEQ ID NO: 988511 - RNA, 22 nt, Human
gguggggcccuggcacugguau

SEQ ID NO: 988512 - RNA, 22 nt, Human
uggaaagaaaguaaaggcguau

SEQ ID NO: 988513 - RNA, 22 nt, Human
ccaaggagcaaggcucaacaag

SEQ ID NO: 988514 - RNA, 22 nt, Human
auaaggcacacauagauagggu

SEQ ID NO: 988515 - RNA, 22 nt, Human
ugggaggaucgcuugagcccag

SEQ ID NO: 988516 - RNA, 22 nt, Human
agcccccaaaagugcuuaugau

SEQ ID NO: 988517 - RNA, 22 nt, Human
aaaugcagcagcuaauugaaaa

SEQ ID NO: 988518 - RNA, 22 nt, Human
uuguuacuaagccuuuaaauag

SEQ ID NO: 988519 - RNA, 22 nt, Human
aguuucuuuagauagaaaguuc

SEQ ID NO: 988520 - RNA, 22 nt, Human
agccagagcugaugucauucuc

SEQ ID NO: 988521 - RNA, 17 nt, Human
gcacugaacaauccugu

SEQ ID NO: 988522 - RNA, 22 nt, Human
uggcugccuuucaccucaucuc

SEQ ID NO: 988523 - RNA, 22 nt, Human
agcagccagagucugaacauua

SEQ ID NO: 988524 - RNA, 21 nt, Human
agcugggccucagccugcagu

SEQ ID NO: 988525 - RNA, 22 nt, Human
gauuucaaggaguuuucacagu

SEQ ID NO: 988526 - RNA, 22 nt, Human
uuuagaaauucaucuauggccu

SEQ ID NO: 988527 - RNA, 20 nt, Human
uguuccaagcuaaugaauga

SEQ ID NO: 988528 - RNA, 21 nt, Human
ccacucugaguguugaacaga

SEQ ID NO: 988529 - RNA, 22 nt, Human
cugugcuuccaggauggcagcu

SEQ ID NO: 988530 - RNA, 22 nt, Human
uguucuugggaaucuuacaguu

SEQ ID NO: 988531 - RNA, 22 nt, Human
caccaggcuggagugcagaggu

SEQ ID NO: 988532 - RNA, 22 nt, Human
cugcagagaauuguggggcuuc

SEQ ID NO: 988533 - RNA, 22 nt, Human
ggcugccugcucaggugcggcg

SEQ ID NO: 988534 - RNA, 22 nt, Human
ugaauauguuccucacaaguuc

SEQ ID NO: 988535 - RNA, 22 nt, Human
agcacucuucugugauaguugu

SEQ ID NO: 988536 - RNA, 22 nt, Human
uuagauaaauuaagacuuuaca

SEQ ID NO: 988537 - RNA, 22 nt, Human
gcagcugagcgugaggaagagu

SEQ ID NO: 988538 - RNA, 22 nt, Human
uggggugccgacagggagggca

SEQ ID NO: 988539 - RNA, 22 nt, Human
gccuggaguagcauggcaagcc

SEQ ID NO: 988540 - RNA, 22 nt, Human
aaaguguaaggaauuuaaguaa

SEQ ID NO: 988541 - RNA, 22 nt, Human
uuucauaaugucacagucaaaa

SEQ ID NO: 988542 - RNA, 22 nt, Human
ggccuggccuccagaugugggc

SEQ ID NO: 988543 - RNA, 18 nt, Human
uccugccugugccccagg

SEQ ID NO: 988544 - RNA, 22 nt, Human
ucucucagucagaugcuaaaga

SEQ ID NO: 988545 - RNA, 22 nt, Human
agggccuggaacugugggcagg

SEQ ID NO: 988546 - RNA, 22 nt, Human
uucuuuggggaauauucugguu

SEQ ID NO: 988547 - RNA, 22 nt, Human
guggaggacaaaagaagccuuu

SEQ ID NO: 988548 - RNA, 22 nt, Human
agccucugcuggcccuggcacu

SEQ ID NO: 988549 - RNA, 22 nt, Human
uggacagguuugggugccuguu

SEQ ID NO: 988550 - RNA, 22 nt, Human
uaucuugagagacaacacagca

SEQ ID NO: 988551 - RNA, 21 nt, Human
agcuggugucagagcucuggg

SEQ ID NO: 988552 - RNA, 22 nt, Human
gcugccuuugugagccaagggg

SEQ ID NO: 988553 - RNA, 22 nt, Human
gcugccugucccaggaugagga

SEQ ID NO: 988554 - RNA, 22 nt, Human
uuaugcuaaaugaaucaaguca

SEQ ID NO: 988555 - RNA, 22 nt, Human
uagaaauguugguauuaacauu

SEQ ID NO: 988556 - RNA, 21 nt, Human
gcagcagaggcuugacagaca

SEQ ID NO: 988557 - RNA, 22 nt, Human
agcaggugaauuccuggaugug

SEQ ID NO: 988558 - RNA, 22 nt, Human
ggaaggucgagcugcaucuggc

SEQ ID NO: 988559 - RNA, 22 nt, Human
ggugcccaccugucuuccugga

SEQ ID NO: 988560 - RNA, 21 nt, Human
agauuguauggaggugagagg

SEQ ID NO: 988561 - RNA, 22 nt, Human
augguacaaaauguauaaaguc

SEQ ID NO: 988562 - RNA, 22 nt, Human
gcaggaugaaggcagaggcuga

SEQ ID NO: 988563 - RNA, 22 nt, Human
acauuucuucccuuuagcagaa

SEQ ID NO: 988564 - RNA, 22 nt, Human
ggagcugaaggggugggcucag

SEQ ID NO: 988565 - RNA, 22 nt, Human
ggaagagagggcugggccucaa

SEQ ID NO: 988566 - RNA, 19 nt, Human
gccugcagaaaaggcaggg

SEQ ID NO: 988567 - RNA, 22 nt, Human
cuguccuguagcuccaucaguc

SEQ ID NO: 988568 - RNA, 22 nt, Human
cccucugcaggcuggaccugcc

SEQ ID NO: 988569 - RNA, 22 nt, Human
gaggcccaggucaagcagccac

SEQ ID NO: 988570 - RNA, 22 nt, Human
acaggggcuccgaaggugaggg

SEQ ID NO: 988571 - RNA, 22 nt, Human
acaggugggcuuaagagucggc

SEQ ID NO: 988572 - RNA, 22 nt, Human
uggccacauccuuuccuuguca

SEQ ID NO: 988573 - RNA, 22 nt, Human
uccaggagaggccugaccaggu

SEQ ID NO: 988574 - RNA, 18 nt, Human
ugacagaaccuggagccu

SEQ ID NO: 988575 - RNA, 22 nt, Human
gcucaggagcugacagccucaa

SEQ ID NO: 988576 - RNA, 22 nt, Human
cucagaaucugccaaguucagg

SEQ ID NO: 988577 - RNA, 20 nt, Human
gccugccucagcuagcugag

SEQ ID NO: 988578 - RNA, 22 nt, Human
aaaguguaaaagcauguuaggg

SEQ ID NO: 988579 - RNA, 22 nt, Human
aacauuuaugguagucauugca

SEQ ID NO: 988580 - RNA, 23 nt, Human
uggcuaaaggcucuaguccugcu

SEQ ID NO: 988581 - RNA, 22 nt, Human
ucaggcagaugcagggauggau

SEQ ID NO: 988582 - RNA, 22 nt, Human
uuugauucuguaaaauaacagg

SEQ ID NO: 988583 - RNA, 22 nt, Human
aaaaugaggucaauauccuuuu

SEQ ID NO: 988584 - RNA, 20 nt, Human
gagagcuggggaugaggcug

SEQ ID NO: 988585 - RNA, 22 nt, Human
caaaaguaccuugugugcuuug

SEQ ID NO: 988586 - RNA, 22 nt, Human
cuucuggaggacacuggcccca

SEQ ID NO: 988587 - RNA, 22 nt, Human
agccccaggcccggacgccucu

SEQ ID NO: 988588 - RNA, 22 nt, Human
auguaucagauaaagcaugugg

SEQ ID NO: 988589 - RNA, 22 nt, Human
ccagucacuggaaaaugggaau

SEQ ID NO: 988590 - RNA, 22 nt, Human
aaaauacacauacuaggggaaa

SEQ ID NO: 988591 - RNA, 22 nt, Human
ugcugccaugcagagcaacaga

SEQ ID NO: 988592 - RNA, 22 nt, Human
uaaauguguuguggaugaaguu

SEQ ID NO: 988593 - RNA, 22 nt, Human
acagagguguuccagaccuagg

SEQ ID NO: 988594 - RNA, 21 nt, Human
gcugcugccccuagugaggcc

SEQ ID NO: 988595 - RNA, 22 nt, Human
aaugcugcucucauaauuauag

SEQ ID NO: 988596 - RNA, 20 nt, Human
gaagcagcuucauguagaca

SEQ ID NO: 988597 - RNA, 22 nt, Human
ucucccaggugggugccuggag

SEQ ID NO: 988598 - RNA, 21 nt, Human
gcugucucuggcuccugggaa

SEQ ID NO: 988599 - RNA, 22 nt, Human
ucuggcucucauacucgccagu

SEQ ID NO: 988600 - RNA, 22 nt, Human
uggcagaaguacacaagcaugc

SEQ ID NO: 988601 - RNA, 22 nt, Human
uaacacugguauuucauuuagu

SEQ ID NO: 988602 - RNA, 22 nt, Human
cagagccaugguaugggcuugu

SEQ ID NO: 988603 - RNA, 22 nt, Human
ccagccaggcauugcaaacuga

SEQ ID NO: 988604 - RNA, 22 nt, Human
cugcucugaagccaggauucug

SEQ ID NO: 988605 - RNA, 22 nt, Human
ucaccugggagggcugugguag

SEQ ID NO: 988606 - RNA, 22 nt, Human
ggaggcucccacgcagcucaca

SEQ ID NO: 988607 - RNA, 22 nt, Human
cuugccuguggcuaguuggcuc

SEQ ID NO: 988608 - RNA, 22 nt, Human
ugcagcuccucuggcugccuga

SEQ ID NO: 988609 - RNA, 22 nt, Human
uaaauguggagacucaggaguc

SEQ ID NO: 988610 - RNA, 22 nt, Human
ggucccugcugaagccuuggug

SEQ ID NO: 988611 - RNA, 22 nt, Human
agaggcuccuucacucuggcac

SEQ ID NO: 988612 - RNA, 22 nt, Human
gcaugcugcaccagagccucuc

SEQ ID NO: 988613 - RNA, 23 nt, Human
auaaggcauaaagguacauugga

SEQ ID NO: 988614 - RNA, 22 nt, Human
gcucugcugucuucuugcaggc

SEQ ID NO: 988615 - RNA, 22 nt, Human
ggcagcuggguuggccagaaac

SEQ ID NO: 988616 - RNA, 22 nt, Human
guccucugggagccuugagccu

SEQ ID NO: 988617 - RNA, 22 nt, Human
ggcuggcuuucucuccgcaccu

SEQ ID NO: 988618 - RNA, 23 nt, Human
uggaccugaaccagugccucugu

SEQ ID NO: 988619 - RNA, 22 nt, Human
gagagugaggcaucaggggcag

SEQ ID NO: 988620 - RNA, 22 nt, Human
ucugagcuuuuauuaucaaccu

SEQ ID NO: 988621 - RNA, 22 nt, Human
gcagcuggggccacacuuaggc

SEQ ID NO: 988622 - RNA, 22 nt, Human
gagacagcagggccagggccug

SEQ ID NO: 988623 - RNA, 22 nt, Human
ugaaagguagcuggccucauag

SEQ ID NO: 988624 - RNA, 22 nt, Human
ggucauugaaaucagaaggguu

SEQ ID NO: 988625 - RNA, 17 nt, Human
uucugagccacuuccuu

SEQ ID NO: 988626 - RNA, 22 nt, Human
cuggagagggagcccuggcagu

SEQ ID NO: 988627 - RNA, 22 nt, Human
ucacaacucuuuccauuuaaua

SEQ ID NO: 988628 - RNA, 23 nt, Human
ggcuggcccggggcugcuccuga

SEQ ID NO: 988629 - RNA, 22 nt, Human
agauuuagugguggaauuuugg

SEQ ID NO: 988630 - RNA, 22 nt, Human
uggggcuguccuuagucugaga

SEQ ID NO: 988631 - RNA, 22 nt, Human
cacugggcguguccugggugag

SEQ ID NO: 988632 - RNA, 22 nt, Human
gccucugcggagcuguacauca

SEQ ID NO: 988633 - RNA, 21 nt, Human
cugcucuggggaccggcugug

SEQ ID NO: 988634 - RNA, 21 nt, Human
ugcugccaucaugcagagaug

SEQ ID NO: 988635 - RNA, 21 nt, Human
uggagcugaauuuuuggcauc

SEQ ID NO: 988636 - RNA, 22 nt, Human
augucuuuggcuuugacauggc

SEQ ID NO: 988637 - RNA, 22 nt, Human
ugagggaggcccuuugagcaga

SEQ ID NO: 988638 - RNA, 22 nt, Human
ugugacaucgcugugucuguuu

SEQ ID NO: 988639 - RNA, 22 nt, Human
uaacagaagagcaggcagcccu

SEQ ID NO: 988640 - RNA, 22 nt, Human
agccuggaagaaccugaagucu

SEQ ID NO: 988641 - RNA, 22 nt, Human
cugcucuggcguacucggcauc

SEQ ID NO: 988642 - RNA, 22 nt, Human
guauuaggaggaacacaggccu

SEQ ID NO: 988643 - RNA, 22 nt, Human
cucuggccugcagauccaugcu

SEQ ID NO: 988644 - RNA, 22 nt, Human
acauucaaggccuucugacaca

SEQ ID NO: 988645 - RNA, 22 nt, Human
agccucugcuuaugcaaaggua

SEQ ID NO: 988646 - RNA, 20 nt, Human
ggaagcagagaacuguuuuc

SEQ ID NO: 988647 - RNA, 22 nt, Human
gauacauuuuaucuccuaacag

SEQ ID NO: 988648 - RNA, 22 nt, Human
aaagaggaaccaagagcacgug

SEQ ID NO: 988649 - RNA, 22 nt, Human
ugggagaagcagcagccaagug

SEQ ID NO: 988650 - RNA, 22 nt, Human
aggccugggacgggagccguga

SEQ ID NO: 988651 - RNA, 23 nt, Human
cagcugaagcagccugggcugga

SEQ ID NO: 988652 - RNA, 22 nt, Human
agcagcuucuuucacuccugga

SEQ ID NO: 988653 - RNA, 20 nt, Human
ccuggagccuggaaggaguc

SEQ ID NO: 988654 - RNA, 22 nt, Human
aguuuuauuccaaugugcagca

SEQ ID NO: 988655 - RNA, 22 nt, Human
uagaaauccccagucucauagu

SEQ ID NO: 988656 - RNA, 22 nt, Human
ggcuccucucuggccgcucccg

SEQ ID NO: 988657 - RNA, 22 nt, Human
gccucuggucccucaugcugug

SEQ ID NO: 988658 - RNA, 22 nt, Human
cugccucuccccagaguggccc

SEQ ID NO: 988659 - RNA, 22 nt, Human
uuccuguauuuugcgaauuuuc

SEQ ID NO: 988660 - RNA, 22 nt, Human
cgaugguucuggcugcuuguau

SEQ ID NO: 988661 - RNA, 22 nt, Human
agcugucugucuccugaggaga

SEQ ID NO: 988662 - RNA, 22 nt, Human
ggccaagauggaaggagagaug

SEQ ID NO: 988663 - RNA, 22 nt, Human
uugaaaggugacauuguuagag

SEQ ID NO: 988664 - RNA, 22 nt, Human
agggauguaaauucuucuucuu

SEQ ID NO: 988665 - RNA, 20 nt, Human
gcauugaguauagacagaug

SEQ ID NO: 988666 - RNA, 22 nt, Human
gagaggagucccuaucacaguu

SEQ ID NO: 988667 - RNA, 22 nt, Human
uaggagcuaaaauauuuuauau

SEQ ID NO: 988668 - RNA, 22 nt, Human
agcuauguuauagcauguauca

SEQ ID NO: 988669 - RNA, 22 nt, Human
agcugccauccgaggugucaga

SEQ ID NO: 988670 - RNA, 22 nt, Human
ucacucugggccagcgcaggua

SEQ ID NO: 988671 - RNA, 22 nt, Human
aguugcagacgcagagauguug

SEQ ID NO: 988672 - RNA, 22 nt, Human
ucacaggcuccagggccuggau

SEQ ID NO: 988673 - RNA, 23 nt, Human
uggcagugaucaaaagcuuacau

SEQ ID NO: 988674 - RNA, 22 nt, Human
gccaggaguucagaugcauguu

SEQ ID NO: 988675 - RNA, 22 nt, Human
cuccagggggcauccacacagc

SEQ ID NO: 988676 - RNA, 22 nt, Human
uccuccagugucuggggccuug

SEQ ID NO: 988677 - RNA, 23 nt, Human
gccucugcucugcguuggggacu

SEQ ID NO: 988678 - RNA, 22 nt, Human
cuggcuucugggccagggcaga

SEQ ID NO: 988679 - RNA, 22 nt, Human
gcccauggcagaacugugagca

SEQ ID NO: 988680 - RNA, 22 nt, Human
agccuucaaccuagcuagagca

SEQ ID NO: 988681 - RNA, 22 nt, Human
cagcccagcacuaaguagauuu

SEQ ID NO: 988682 - RNA, 22 nt, Human
gaagccaacauuccaaguagaa

SEQ ID NO: 988683 - RNA, 22 nt, Human
cuguggcuaugguguacauacu

SEQ ID NO: 988684 - RNA, 22 nt, Human
cacugaaucucaaggggagggu

SEQ ID NO: 988685 - RNA, 22 nt, Human
cugcucugagaggcucuuccua

SEQ ID NO: 988686 - RNA, 22 nt, Human
acaguaccugcucucaagcaaa

SEQ ID NO: 988687 - RNA, 22 nt, Human
gucccagaggacagggucacau

SEQ ID NO: 988688 - RNA, 22 nt, Human
guuauaaaggugauaaugguca

SEQ ID NO: 988689 - RNA, 22 nt, Human
ucugucugcucauuuaccucag

SEQ ID NO: 988690 - RNA, 22 nt, Human
agugucugaaccaccggggcau

SEQ ID NO: 988691 - RNA, 22 nt, Human
gucuggaggaggaagaaggcac

SEQ ID NO: 988692 - RNA, 22 nt, Human
guccagggcuaaaucagguucc

SEQ ID NO: 988693 - RNA, 22 nt, Human
agucauauguggcauuuucuaa

SEQ ID NO: 988694 - RNA, 22 nt, Human
caggcagccugcggucugcaca

SEQ ID NO: 988695 - RNA, 22 nt, Human
uucaagaugacccagucacacg

SEQ ID NO: 988696 - RNA, 22 nt, Human
ccaggguguagggauuccagau

SEQ ID NO: 988697 - RNA, 22 nt, Human
aaaucagucccucuuggaauuu

SEQ ID NO: 988698 - RNA, 22 nt, Human
auuaggauuuuguccaaguagc

SEQ ID NO: 988699 - RNA, 22 nt, Human
uaagcauaacuaaaaaugauuu

SEQ ID NO: 988700 - RNA, 22 nt, Human
ucuuugcaaauguuauuaucuu

SEQ ID NO: 988701 - RNA, 22 nt, Human
ucauguuuggaguuugcucacu

SEQ ID NO: 988702 - RNA, 22 nt, Human
uagcagagcagggaucagagcc

SEQ ID NO: 988703 - RNA, 22 nt, Human
gucugucucccugugacugaga

SEQ ID NO: 988704 - RNA, 22 nt, Human
gcugcucucagagcucaugcug

SEQ ID NO: 988705 - RNA, 22 nt, Human
uauugucuguccgggucaaagc

SEQ ID NO: 988706 - RNA, 22 nt, Human
cugaaggauguguggugggagu

SEQ ID NO: 988707 - RNA, 22 nt, Human
uggcagaguuauggguauuuau

SEQ ID NO: 988708 - RNA, 23 nt, Human
aggaggccugaaacugaggcuga

SEQ ID NO: 988709 - RNA, 22 nt, Human
ucuaaaaaagucuguucacuug

SEQ ID NO: 988710 - RNA, 22 nt, Human
caggaacagcaccaggagcuag

SEQ ID NO: 988711 - RNA, 22 nt, Human
uccuucaguucaauuaguccgu

SEQ ID NO: 988712 - RNA, 22 nt, Human
cuccuggaagcccgcccugcug

SEQ ID NO: 988713 - RNA, 22 nt, Human
uacagccucacauuuacuuaca

SEQ ID NO: 988714 - RNA, 22 nt, Human
gcagcuuggugaaaggugaugg

SEQ ID NO: 988715 - RNA, 22 nt, Human
gcagaagcugggcagcgaggug

SEQ ID NO: 988716 - RNA, 22 nt, Human
uccaggagagguguggggacug

SEQ ID NO: 988717 - RNA, 22 nt, Human
aagacagagacucugcaacagg

SEQ ID NO: 988718 - RNA, 18 nt, Human
ccucaggggaccuggcag

SEQ ID NO: 988719 - RNA, 18 nt, Human
uccuggccacacuaccuu

SEQ ID NO: 988720 - RNA, 22 nt, Human
ugcucugguaacucacuuccau

SEQ ID NO: 988721 - RNA, 21 nt, Human
ugcaggagucugugagucagg

SEQ ID NO: 988722 - RNA, 22 nt, Human
acuuuguauaagacaauaaaga

SEQ ID NO: 988723 - RNA, 22 nt, Human
ggacucagcagccaggaguggc

SEQ ID NO: 988724 - RNA, 22 nt, Human
ugcuccuuccucauccugugca

SEQ ID NO: 988725 - RNA, 22 nt, Human
ccucauggccuugagcugaggg

SEQ ID NO: 988726 - RNA, 23 nt, Human
uucaagauacgguuuccaggcug

SEQ ID NO: 988727 - RNA, 22 nt, Human
ggcagggguccugguguugacu

SEQ ID NO: 988728 - RNA, 20 nt, Human
ugcucugucuaaaacuuccc

SEQ ID NO: 988729 - RNA, 22 nt, Human
aguagaaagaaggcacugggcc

SEQ ID NO: 988730 - RNA, 22 nt, Human
caccaggcugaaccagagggga

SEQ ID NO: 988731 - RNA, 22 nt, Human
gggauggcuuuguggcugacuc

SEQ ID NO: 988732 - RNA, 22 nt, Human
gcuguguccucacacagccuuu

SEQ ID NO: 988733 - RNA, 22 nt, Human
acaguggagaaggcaugaggcu

SEQ ID NO: 988734 - RNA, 22 nt, Human
uuuauuauguacaggcacuaua

SEQ ID NO: 988735 - RNA, 22 nt, Human
cugccagguuggcgcucgcucu

SEQ ID NO: 988736 - RNA, 22 nt, Human
uggagcugagagccaggcuggc

SEQ ID NO: 988737 - RNA, 22 nt, Human
uaggaugaaaauccagcuuaua

SEQ ID NO: 988738 - RNA, 22 nt, Human
aagggccuccuggggagccugg

SEQ ID NO: 988739 - RNA, 22 nt, Human
accugaggccuccccagcagac

SEQ ID NO: 988740 - RNA, 22 nt, Human
gaaagagaaccugggccuagau

SEQ ID NO: 988741 - RNA, 22 nt, Human
augggaggaagagaagaugucu

SEQ ID NO: 988742 - RNA, 22 nt, Human
cacaagacuuauuuguguagaa

SEQ ID NO: 988743 - RNA, 22 nt, Human
ccaguccagugccaugcauggc

SEQ ID NO: 988744 - RNA, 22 nt, Human
uuucaaauggagucgugaaaug

SEQ ID NO: 988745 - RNA, 22 nt, Human
agcaugcacaugacuggcuuaa

SEQ ID NO: 988746 - RNA, 22 nt, Human
ggagagaauuccauggacaugu

SEQ ID NO: 988747 - RNA, 22 nt, Human
uauugaaauucuucauguccuc

SEQ ID NO: 988748 - RNA, 20 nt, Human
gccagcccugacacaggagc

SEQ ID NO: 988749 - RNA, 22 nt, Human
ugcuggcccuggcucagggaac

SEQ ID NO: 988750 - RNA, 22 nt, Human
gagcagcuuaugucaagccaga

SEQ ID NO: 988751 - RNA, 22 nt, Human
ccaggguggcguagaugcuggg

SEQ ID NO: 988752 - RNA, 22 nt, Human
accuggccauccagcuggcauc

SEQ ID NO: 988753 - RNA, 22 nt, Human
acuccugguuuguguccuggcu

SEQ ID NO: 988754 - RNA, 22 nt, Human
uuauucaggcucucuuuggcua

SEQ ID NO: 988755 - RNA, 22 nt, Human
uauuucuguaacucagggucug

SEQ ID NO: 988756 - RNA, 22 nt, Human
ugggccaggauuucaagacccu

SEQ ID NO: 988757 - RNA, 22 nt, Human
ccagguggaggugugagguccu

SEQ ID NO: 988758 - RNA, 22 nt, Human
ucuguaucuaauuuuacaguag

SEQ ID NO: 988759 - RNA, 22 nt, Human
ugucucugguauuaggugaaaa

SEQ ID NO: 988760 - RNA, 22 nt, Human
uggccacaguguccagcagcag

SEQ ID NO: 988761 - RNA, 22 nt, Human
ccugccucaucaacuugucgug

SEQ ID NO: 988762 - RNA, 22 nt, Human
agagccagcaacucuagcccug

SEQ ID NO: 988763 - RNA, 22 nt, Human
agggccuggcuucacuuucuca

SEQ ID NO: 988764 - RNA, 22 nt, Human
aaaugcaucagcucauaagaga

SEQ ID NO: 988765 - RNA, 22 nt, Human
gaaaggagggaaacagagcggu

SEQ ID NO: 988766 - RNA, 22 nt, Human
caguggggaggccaggauagaa

SEQ ID NO: 988767 - RNA, 22 nt, Human
ucccagcagcauagcucagaau

SEQ ID NO: 988768 - RNA, 22 nt, Human
accaaggaagaaucuauuugag

SEQ ID NO: 988769 - RNA, 22 nt, Human
ggcuuccuggggccuccugcaa

SEQ ID NO: 988770 - RNA, 22 nt, Human
aauauguucaaaauagaucacu

SEQ ID NO: 988771 - RNA, 22 nt, Human
ucauuuccucaaauucaagguu

SEQ ID NO: 988772 - RNA, 22 nt, Human
gaacaguaucaguagugccagu

SEQ ID NO: 988773 - RNA, 22 nt, Human
gcaagcuggcuguuagaggaug

SEQ ID NO: 988774 - RNA, 22 nt, Human
agagcagauggagcuggaagag

SEQ ID NO: 988775 - RNA, 22 nt, Human
ccuccagcugccucagucucuu

SEQ ID NO: 988776 - RNA, 18 nt, Human
ucuccuggguaggggccu

SEQ ID NO: 988777 - RNA, 23 nt, Human
uucuuauuuacuuuggaaucucc

SEQ ID NO: 988778 - RNA, 22 nt, Human
ugcugccagagagacagggacu

SEQ ID NO: 988779 - RNA, 22 nt, Human
aagaugauagaucugucaaugu

SEQ ID NO: 988780 - RNA, 22 nt, Human
cauagaaacugagacaaggauu

SEQ ID NO: 988781 - RNA, 22 nt, Human
cacauggggcgcugcauuggcc

SEQ ID NO: 988782 - RNA, 22 nt, Human
aagauguaucaguuaagucuuc

SEQ ID NO: 988783 - RNA, 23 nt, Human
uauuagggccaggacuggcaaau

SEQ ID NO: 988784 - RNA, 22 nt, Human
cagcaauaacucaaagccauuu

SEQ ID NO: 988785 - RNA, 22 nt, Human
ugcagcauugcaaagcagucuu

SEQ ID NO: 988786 - RNA, 22 nt, Human
aagcuggagaguuaggugaaua

SEQ ID NO: 988787 - RNA, 22 nt, Human
uggcagggccuaccccaauauc

SEQ ID NO: 988788 - RNA, 22 nt, Human
ucauugaauuugguucaauaug

SEQ ID NO: 988789 - RNA, 22 nt, Human
gcugccuuuuaaagccucgcuu

SEQ ID NO: 988790 - RNA, 22 nt, Human
uggaggaaguggcuggccagaa

SEQ ID NO: 988791 - RNA, 22 nt, Human
uguguuaauuccacaaacauuc

SEQ ID NO: 988792 - RNA, 22 nt, Human
aaagccuucaaguagauguaag

SEQ ID NO: 988793 - RNA, 18 nt, Human
gaaaugugauucuagggc

SEQ ID NO: 988794 - RNA, 22 nt, Human
ugcaauaaguuguguuaucacu

SEQ ID NO: 988795 - RNA, 22 nt, Human
ugcuggggcucugaccacucca

SEQ ID NO: 988796 - RNA, 22 nt, Human
cugggccagauccagccucaca

SEQ ID NO: 988797 - RNA, 22 nt, Human
ggcccagcugugcuuccagccc

SEQ ID NO: 988798 - RNA, 22 nt, Human
cccaggcugaguuagagguguc

SEQ ID NO: 988799 - RNA, 22 nt, Human
ugagaaccaugaaaagcuguca

SEQ ID NO: 988800 - RNA, 22 nt, Human
auggcaggcccagguguucauu

SEQ ID NO: 988801 - RNA, 22 nt, Human
accaaggaguuugguauuuuag

SEQ ID NO: 988802 - RNA, 22 nt, Human
uguuuguucccucucuuuccug

SEQ ID NO: 988803 - RNA, 22 nt, Human
guggcugggcuccgagcggcuu

SEQ ID NO: 988804 - RNA, 18 nt, Human
uccugccugcgggcuccc

SEQ ID NO: 988805 - RNA, 22 nt, Human
aguggggacuuaugccagcauu

SEQ ID NO: 988806 - RNA, 21 nt, Human
ucagcagcuuuugcagucccu

SEQ ID NO: 988807 - RNA, 18 nt, Human
accugccuguucuucucu

SEQ ID NO: 988808 - RNA, 22 nt, Human
agugccuggaccccaugacaua

SEQ ID NO: 988809 - RNA, 22 nt, Human
aggagcugcauggauaccuggu

SEQ ID NO: 988810 - RNA, 22 nt, Human
ggcuugcuucuuguccaggaau

SEQ ID NO: 988811 - RNA, 22 nt, Human
caaauaguaugagcaaugauuc

SEQ ID NO: 988812 - RNA, 22 nt, Human
uccugccuagcaggugaccuau

SEQ ID NO: 988813 - RNA, 22 nt, Human
gcugaaggaggcucugguacua

SEQ ID NO: 988814 - RNA, 22 nt, Human
cuguauuuucaugccuacguac

SEQ ID NO: 988815 - RNA, 22 nt, Human
accugaggcuguuagucuaggu

SEQ ID NO: 988816 - RNA, 22 nt, Human
acuggcucagaguuccuagaga

SEQ ID NO: 988817 - RNA, 22 nt, Human
aacaaaugaccugauuucuucc

SEQ ID NO: 988818 - RNA, 22 nt, Human
ccagcuggcaggagagucaggg

SEQ ID NO: 988819 - RNA, 22 nt, Human
gcugcugguccucagagcucau

SEQ ID NO: 988820 - RNA, 22 nt, Human
ggggacccucaggacugcgucu

SEQ ID NO: 988821 - RNA, 20 nt, Human
uggagccaaggugugucugg

SEQ ID NO: 988822 - RNA, 22 nt, Human
uugagucaguaauuccauuucu

SEQ ID NO: 988823 - RNA, 22 nt, Human
gccaccagccccaugcgcugug

SEQ ID NO: 988824 - RNA, 22 nt, Human
cuguauuuaguuaaaaugcuaa

SEQ ID NO: 988825 - RNA, 22 nt, Human
gggagagagaaaacguggcgca

SEQ ID NO: 988826 - RNA, 22 nt, Human
uggcccugccacucacugcuga

SEQ ID NO: 988827 - RNA, 22 nt, Human
auucuccaucaccacuggcacu

SEQ ID NO: 988828 - RNA, 22 nt, Human
agagaacaaauuaaaggugguu

SEQ ID NO: 988829 - RNA, 22 nt, Human
accuguuuuccuaucuagauug

SEQ ID NO: 988830 - RNA, 22 nt, Human
uuuccucugaugcugacuugga

SEQ ID NO: 988831 - RNA, 22 nt, Human
gaggggcuggcacgauggcugc

SEQ ID NO: 988832 - RNA, 17 nt, Human
gcagugaaaagagauca

SEQ ID NO: 988833 - RNA, 22 nt, Human
uccuucaaagcuccuagugagc

SEQ ID NO: 988834 - RNA, 22 nt, Human
uugucugaaagaucauuacauu

SEQ ID NO: 988835 - RNA, 22 nt, Human
gcccagagagaugcuguagacc

SEQ ID NO: 988836 - RNA, 22 nt, Human
agggcacaucugcugggaaugg

SEQ ID NO: 988837 - RNA, 22 nt, Human
gaggcaggcagauugcuugagg

SEQ ID NO: 988838 - RNA, 22 nt, Human
agcugccaggccccugagaacc

SEQ ID NO: 988839 - RNA, 17 nt, Human
aggcugcugggccaggg

SEQ ID NO: 988840 - RNA, 22 nt, Human
cucaaauauguggucagaaagc

SEQ ID NO: 988841 - RNA, 22 nt, Human
uucauuccugagcccauauuua

SEQ ID NO: 988842 - RNA, 23 nt, Human
agccuucaggcaaugucaguaga

SEQ ID NO: 988843 - RNA, 22 nt, Human
ccuccuggccugugcagagccc

SEQ ID NO: 988844 - RNA, 22 nt, Human
agggcagcacagcugugcuccu

SEQ ID NO: 988845 - RNA, 22 nt, Human
ccaguuuuuccagugcuuucug

SEQ ID NO: 988846 - RNA, 22 nt, Human
uuacauuuggcuauguccucua

SEQ ID NO: 988847 - RNA, 21 nt, Human
ccaggcagagcugugaguucu

SEQ ID NO: 988848 - RNA, 22 nt, Human
ggaggccaggaaggcucggaga

SEQ ID NO: 988849 - RNA, 22 nt, Human
ccagcugguuaaaauagagaaa

SEQ ID NO: 988850 - RNA, 18 nt, Human
caugucugcgccacaagg

SEQ ID NO: 988851 - RNA, 22 nt, Human
uagauuucgcugcaucucaauc

SEQ ID NO: 988852 - RNA, 22 nt, Human
gccaccagggggcuccagugag

SEQ ID NO: 988853 - RNA, 22 nt, Human
aagaauguuaguuucugauaca

SEQ ID NO: 988854 - RNA, 22 nt, Human
gccugaugagcuuccagcugag

SEQ ID NO: 988855 - RNA, 22 nt, Human
augauguuaccaguacuuagag

SEQ ID NO: 988856 - RNA, 21 nt, Human
agggcagauuagcuguaagag

SEQ ID NO: 988857 - RNA, 22 nt, Human
gcucagaaaagugaggcucagu

SEQ ID NO: 988858 - RNA, 22 nt, Human
accuuucaaaguggcuaucacu

SEQ ID NO: 988859 - RNA, 20 nt, Human
aauuuacucacagaaugaau

SEQ ID NO: 988860 - RNA, 22 nt, Human
aacucugcagugacuuauaaag

SEQ ID NO: 988861 - RNA, 22 nt, Human
cuccauugaacauccucucaga

SEQ ID NO: 988862 - RNA, 22 nt, Human
cagagcugcaaaugccccuccg

SEQ ID NO: 988863 - RNA, 19 nt, Human
cuguggcugaccucuggcc

SEQ ID NO: 988864 - RNA, 22 nt, Human
cuccugggcucauaucauucag

SEQ ID NO: 988865 - RNA, 18 nt, Human
uuaagagcugaaagggga

SEQ ID NO: 988866 - RNA, 22 nt, Human
ggcugccauaacagaguaccac

SEQ ID NO: 988867 - RNA, 22 nt, Human
gagaggggcgcgcagcucgcga

SEQ ID NO: 988868 - RNA, 22 nt, Human
gggcucugggaugcucuuagag

SEQ ID NO: 988869 - RNA, 22 nt, Human
cugccagcaaugugaccaugcu

SEQ ID NO: 988870 - RNA, 19 nt, Human
ucucugcuucucuuggcau

SEQ ID NO: 988871 - RNA, 19 nt, Human
caucuggaugauucuccug

SEQ ID NO: 988872 - RNA, 22 nt, Human
ugucacauguguggcauuuuuc

SEQ ID NO: 988873 - RNA, 19 nt, Human
cacagggcaggucucaugu

SEQ ID NO: 988874 - RNA, 22 nt, Human
uaaccaaagggccuaaggaaug

SEQ ID NO: 988875 - RNA, 22 nt, Human
agucccagccuaggcugugcug

SEQ ID NO: 988876 - RNA, 22 nt, Human
ugcauuucagaagaaaauucgg

SEQ ID NO: 988877 - RNA, 22 nt, Human
caagggugguauugggagcaua

SEQ ID NO: 988878 - RNA, 22 nt, Human
acaaagguggaccauguggcuu

SEQ ID NO: 988879 - RNA, 22 nt, Human
cacuggcccauuccugucuggc

SEQ ID NO: 988880 - RNA, 22 nt, Human
uuaauguggaaagcucuugagu

SEQ ID NO: 988881 - RNA, 22 nt, Human
aggccuggcaugagaccugaga

SEQ ID NO: 988882 - RNA, 22 nt, Human
gagccaggcccguacuugcugu

SEQ ID NO: 988883 - RNA, 22 nt, Human
uccucuggcucuuucccuagga

SEQ ID NO: 988884 - RNA, 22 nt, Human
ggcagucagugugguucauaaa

SEQ ID NO: 988885 - RNA, 22 nt, Human
caggggcugugggcggagccuc

SEQ ID NO: 988886 - RNA, 18 nt, Human
ggcucaggcuauccuaac

SEQ ID NO: 988887 - RNA, 22 nt, Human
ugcauuaucuuuaauguucuca

SEQ ID NO: 988888 - RNA, 22 nt, Human
acagagcaauucuuggguguuu

SEQ ID NO: 988889 - RNA, 22 nt, Human
agauguuccagccaaugggaau

SEQ ID NO: 988890 - RNA, 22 nt, Human
uacauuccauguguguguauuc

SEQ ID NO: 988891 - RNA, 22 nt, Human
ggcagcaguccauggcccaagg

SEQ ID NO: 988892 - RNA, 22 nt, Human
ggccuggcucuugcccagccug

SEQ ID NO: 988893 - RNA, 22 nt, Human
cuggagccauguauagccuaug

SEQ ID NO: 988894 - RNA, 22 nt, Human
caggagcccguugcuccggcgg

SEQ ID NO: 988895 - RNA, 22 nt, Human
ccuggagcuuuuccauccugga

SEQ ID NO: 988896 - RNA, 22 nt, Human
uccagugguuugaaaggggugu

SEQ ID NO: 988897 - RNA, 22 nt, Human
accaucagucauugucaguggg

SEQ ID NO: 988898 - RNA, 22 nt, Human
gcuuagucaauuauaaauaggc

SEQ ID NO: 988899 - RNA, 17 nt, Human
ugaaggaaggaugaugu

SEQ ID NO: 988900 - RNA, 22 nt, Human
ggaaaaggccacagggacacau

SEQ ID NO: 988901 - RNA, 22 nt, Human
uguuaaucaaucaacaguauua

SEQ ID NO: 988902 - RNA, 17 nt, Human
cucugcagugcauggcu

SEQ ID NO: 988903 - RNA, 22 nt, Human
uguagaaagaauauguuucaua

SEQ ID NO: 988904 - RNA, 22 nt, Human
agugcuguccaguuucacaggu

SEQ ID NO: 988905 - RNA, 22 nt, Human
uaauccacaauagagauuaucu

SEQ ID NO: 988906 - RNA, 22 nt, Human
cucugcagaauuugagcugcuc

SEQ ID NO: 988907 - RNA, 22 nt, Human
cuggcagcuuccuuugcaucug

SEQ ID NO: 988908 - RNA, 22 nt, Human
guucucucugcuuccaagaugg

SEQ ID NO: 988909 - RNA, 22 nt, Human
agccaagcugaucuccugcuga

SEQ ID NO: 988910 - RNA, 22 nt, Human
ccacaggggucucuguagcuga

SEQ ID NO: 988911 - RNA, 22 nt, Human
ugaugcuucacgcugaauaugc

SEQ ID NO: 988912 - RNA, 22 nt, Human
aaauaguucagcuuguaaaccc

SEQ ID NO: 988913 - RNA, 20 nt, Human
ccugccugccucggcucauu

SEQ ID NO: 988914 - RNA, 22 nt, Human
ucccagagauuuccucuccuuc

SEQ ID NO: 988915 - RNA, 22 nt, Human
gauuucuuuagguguaauagug

SEQ ID NO: 988916 - RNA, 22 nt, Human
aagucauugguagcuugauagg

SEQ ID NO: 988917 - RNA, 22 nt, Human
caguuuuugccauuaagaguaa

SEQ ID NO: 988918 - RNA, 22 nt, Human
gcuaccugagcaagagcuucaa

SEQ ID NO: 988919 - RNA, 22 nt, Human
gcagccacugggagugcuuaua

SEQ ID NO: 988920 - RNA, 22 nt, Human
aauacaaucaaauucacuagca

SEQ ID NO: 988921 - RNA, 18 nt, Human
ugucauugccagggaagc

SEQ ID NO: 988922 - RNA, 22 nt, Human
uccagagccuauauguucaacu

SEQ ID NO: 988923 - RNA, 22 nt, Human
uccagggaaggugugaggcugg

SEQ ID NO: 988924 - RNA, 22 nt, Human
uuuucauuuacauuagggaaga

SEQ ID NO: 988925 - RNA, 22 nt, Human
uauuauuauaguuauugggaag

SEQ ID NO: 988926 - RNA, 22 nt, Human
cagggcaggaauuugacauugc

SEQ ID NO: 988927 - RNA, 22 nt, Human
acagagcauuugggacagagag

SEQ ID NO: 988928 - RNA, 21 nt, Human
uagaaaucagcuggugccucu

SEQ ID NO: 988929 - RNA, 22 nt, Human
ugucccuggaacuauggcucca

SEQ ID NO: 988930 - RNA, 21 nt, Human
gccagccuguuuaccuguggu

SEQ ID NO: 988931 - RNA, 22 nt, Human
caucacagauguuguguggagu

SEQ ID NO: 988932 - RNA, 22 nt, Human
cagcugagcucccaggccauca

SEQ ID NO: 988933 - RNA, 19 nt, Human
cauuccuuugucugccaaa

SEQ ID NO: 988934 - RNA, 22 nt, Human
ggcuggcuugccaagcucaggg

SEQ ID NO: 988935 - RNA, 22 nt, Human
acagggcagagugaaaugcuau

SEQ ID NO: 988936 - RNA, 22 nt, Human
gccuucaguagugucagcugua

SEQ ID NO: 988937 - RNA, 22 nt, Human
ugagccagccuugcagcugugc

SEQ ID NO: 988938 - RNA, 22 nt, Human
ccaggagcaacuugaaggcaag

SEQ ID NO: 988939 - RNA, 22 nt, Human
ucuuugcacacaucccuucccg

SEQ ID NO: 988940 - RNA, 22 nt, Human
cauggggagacaccuagggaaa

SEQ ID NO: 988941 - RNA, 22 nt, Human
cuuauuagaaagaaaagacaug

SEQ ID NO: 988942 - RNA, 22 nt, Human
accaaggagaaggugcaagcuu

SEQ ID NO: 988943 - RNA, 22 nt, Human
auacaguauuaccuguucagga

SEQ ID NO: 988944 - RNA, 22 nt, Human
aaagcacauuacaagcucaguc

SEQ ID NO: 988945 - RNA, 22 nt, Human
uggcuaggcuccaagagcugga

SEQ ID NO: 988946 - RNA, 22 nt, Human
ggucagccuuggauuugguagc

SEQ ID NO: 988947 - RNA, 21 nt, Human
gcagccacagccaccaagcua

SEQ ID NO: 988948 - RNA, 22 nt, Human
gagcugagccuggguggaccgc

SEQ ID NO: 988949 - RNA, 22 nt, Human
ugacagaaagaauaugucaauc

SEQ ID NO: 988950 - RNA, 22 nt, Human
ccugucugcggaggaguggaag

SEQ ID NO: 988951 - RNA, 16 nt, Human
uguuagcugugcauua

SEQ ID NO: 988952 - RNA, 22 nt, Human
cagaggccuauccaguguccau

SEQ ID NO: 988953 - RNA, 17 nt, Human
ugcugccaagucccaac

SEQ ID NO: 988954 - RNA, 22 nt, Human
ccuccuggggugaaggauggga

SEQ ID NO: 988955 - RNA, 22 nt, Human
ccacaaguuucagcacccagag

SEQ ID NO: 988956 - RNA, 22 nt, Human
cugcaggauucucccaguugga

SEQ ID NO: 988957 - RNA, 22 nt, Human
uccuuccucggggacccagauc

SEQ ID NO: 988958 - RNA, 22 nt, Human
aucaguuucugugaagaacaca

SEQ ID NO: 988959 - RNA, 20 nt, Human
uucaggauucuagaccacac

SEQ ID NO: 988960 - RNA, 22 nt, Human
cuggcccauggugagcucuggg

SEQ ID NO: 988961 - RNA, 18 nt, Human
uuucacaaccuccagagg

SEQ ID NO: 988962 - RNA, 22 nt, Human
uggagccaggagccugggaguc

SEQ ID NO: 988963 - RNA, 22 nt, Human
gccaaagcagucuugccucugc

SEQ ID NO: 988964 - RNA, 22 nt, Human
acagguggcauaggcaguuuga

SEQ ID NO: 988965 - RNA, 22 nt, Human
augauucagcaauuuuauaucu

SEQ ID NO: 988966 - RNA, 22 nt, Human
agaguguuuuucugucaaggac

SEQ ID NO: 988967 - RNA, 22 nt, Human
aagccucuggggccucaucugu

SEQ ID NO: 988968 - RNA, 19 nt, Human
gccagcagaaugaugaggc

SEQ ID NO: 988969 - RNA, 22 nt, Human
ugcaggagaaaguacggagcgu

SEQ ID NO: 988970 - RNA, 22 nt, Human
gucccuggggaaucagcuggag

SEQ ID NO: 988971 - RNA, 22 nt, Human
caggccucccggugcacacuga

SEQ ID NO: 988972 - RNA, 22 nt, Human
ugggggagccuucacaguagcu

SEQ ID NO: 988973 - RNA, 18 nt, Human
cuuucagauggauaugcu

SEQ ID NO: 988974 - RNA, 21 nt, Human
ggugucaguuuuggucauuag

SEQ ID NO: 988975 - RNA, 22 nt, Human
uucaagguaugguagcugguca

SEQ ID NO: 988976 - RNA, 22 nt, Human
cagacaggcaggugcugcuuug

SEQ ID NO: 988977 - RNA, 21 nt, Human
uuguucuuccagaagcaaagu

SEQ ID NO: 988978 - RNA, 22 nt, Human
cuguuuuugugcugugucuccc

SEQ ID NO: 988979 - RNA, 22 nt, Human
ggugaaggaggaagcugaugga

SEQ ID NO: 988980 - RNA, 22 nt, Human
gcugcagcucgccuuccggccu

SEQ ID NO: 988981 - RNA, 22 nt, Human
agauuucaaugugagcauuagu

SEQ ID NO: 988982 - RNA, 22 nt, Human
cuggggcuggugaggcaggcuc

SEQ ID NO: 988983 - RNA, 22 nt, Human
auacauguaacugcauuguaau

SEQ ID NO: 988984 - RNA, 22 nt, Human
ggcagcuguaagaugagugaau

SEQ ID NO: 988985 - RNA, 22 nt, Human
gcaggaugggagcuucacuuug

SEQ ID NO: 988986 - RNA, 23 nt, Human
uuggcagcgggucaggcuguggg

SEQ ID NO: 988987 - RNA, 22 nt, Human
agagcugcaauuucauguggug

SEQ ID NO: 988988 - RNA, 22 nt, Human
guccucaggaaagcagauaaca

SEQ ID NO: 988989 - RNA, 20 nt, Human
ugcuuccuggccacugcggg

SEQ ID NO: 988990 - RNA, 22 nt, Human
ggcacugaauuucuuggcaucu

SEQ ID NO: 988991 - RNA, 22 nt, Human
gggcuggaggugagcaggacag

SEQ ID NO: 988992 - RNA, 22 nt, Human
uugcauaaaugcuuaaaauuug

SEQ ID NO: 988993 - RNA, 22 nt, Human
guucccauacaguaucagugcu

SEQ ID NO: 988994 - RNA, 22 nt, Human
cacagcuugggcucugacaaua

SEQ ID NO: 988995 - RNA, 22 nt, Human
ggcccaucucuugcucuggguu

SEQ ID NO: 988996 - RNA, 22 nt, Human
uucugagcugcaacacuaacau

SEQ ID NO: 988997 - RNA, 22 nt, Human
uuccaaagucauguugcugaua

SEQ ID NO: 988998 - RNA, 22 nt, Human
ucuccucugcgcggcagugccc

SEQ ID NO: 988999 - RNA, 22 nt, Human
acacaguaugaaaagucuaguu

SEQ ID NO: 989000 - RNA, 22 nt, Human
cucuggccuggggccugcuccc

SEQ ID NO: 989001 - RNA, 22 nt, Human
aggaccagaggccagagucagc

SEQ ID NO: 989002 - RNA, 22 nt, Human
uguuuaguaggaguuuaauacu

SEQ ID NO: 989003 - RNA, 21 nt, Human
ucccugcuuucuggcccaguc

SEQ ID NO: 989004 - RNA, 22 nt, Human
ccagcagaggggcggagugcag

SEQ ID NO: 989005 - RNA, 22 nt, Human
ggccugagucacaucaggagag

SEQ ID NO: 989006 - RNA, 22 nt, Human
agguaagggucacaguucauau

SEQ ID NO: 989007 - RNA, 22 nt, Human
ugaagcagcaaaugaugggaga

SEQ ID NO: 989008 - RNA, 22 nt, Human
caaggaaacaugaaaugcauug

SEQ ID NO: 989009 - RNA, 22 nt, Human
ggccaggagcaagccaggcucu

SEQ ID NO: 989010 - RNA, 22 nt, Human
acaggcucuggggcaggauggc

SEQ ID NO: 989011 - RNA, 22 nt, Human
aaauauguauggaguucaugaa

SEQ ID NO: 989012 - RNA, 22 nt, Human
cuggccaacaucuggggcacau

SEQ ID NO: 989013 - RNA, 22 nt, Human
ccugccuggcuuccagaagaga

SEQ ID NO: 989014 - RNA, 22 nt, Human
ccacagaaaguugucuagagua

SEQ ID NO: 989015 - RNA, 22 nt, Human
cacagggcuucucauggggugc

SEQ ID NO: 989016 - RNA, 22 nt, Human
auugaaagagaauguagcucuu

SEQ ID NO: 989017 - RNA, 22 nt, Human
cugcuuuguggaaucacacugg

SEQ ID NO: 989018 - RNA, 22 nt, Human
ccagcagcuguggcuuugccuc

SEQ ID NO: 989019 - RNA, 22 nt, Human
augcccaaugucacaauuuuug

SEQ ID NO: 989020 - RNA, 22 nt, Human
gaaaagagaacaucugaggauc

SEQ ID NO: 989021 - RNA, 22 nt, Human
gcuccugggcccugggcuaacu

SEQ ID NO: 989022 - RNA, 22 nt, Human
ggcucugguugaccaugauggc

SEQ ID NO: 989023 - RNA, 20 nt, Human
cuuugccuauucucugccug

SEQ ID NO: 989024 - RNA, 22 nt, Human
agggccucugacgcccccagcc

SEQ ID NO: 989025 - RNA, 22 nt, Human
cucaaggacuuauucaugccug

SEQ ID NO: 989026 - RNA, 22 nt, Human
cugggagucuggccucuggucc

SEQ ID NO: 989027 - RNA, 22 nt, Human
ugucugagugugccugggcauu

SEQ ID NO: 989028 - RNA, 22 nt, Human
ggcuuccuuucacuacccucag

SEQ ID NO: 989029 - RNA, 22 nt, Human
uaaagucaucuuuacaucuuug

SEQ ID NO: 989030 - RNA, 19 nt, Human
cucugccucccuccugggu

SEQ ID NO: 989031 - RNA, 19 nt, Human
ucaaaacacaaaugguuga

SEQ ID NO: 989032 - RNA, 22 nt, Human
cucaggaggaggaaguucauug

SEQ ID NO: 989033 - RNA, 22 nt, Human
uccuuccugcaggccaaguccu

SEQ ID NO: 989034 - RNA, 22 nt, Human
gcuggcagaagagcugguucaa

SEQ ID NO: 989035 - RNA, 22 nt, Human
aagagcuggcccaaucugagca

SEQ ID NO: 989036 - RNA, 22 nt, Human
uauucacaguugauuuacaguu

SEQ ID NO: 989037 - RNA, 22 nt, Human
caggaagagaacauggaggcug

SEQ ID NO: 989038 - RNA, 22 nt, Human
gggggcuguccugugcauugua

SEQ ID NO: 989039 - RNA, 22 nt, Human
cagagccugcucacgucucugu

SEQ ID NO: 989040 - RNA, 22 nt, Human
auuauuagauucuuaauuguaa

SEQ ID NO: 989041 - RNA, 22 nt, Human
auugaaagauaggcuacugugg

SEQ ID NO: 989042 - RNA, 22 nt, Human
uuauguagugacugacuguuag

SEQ ID NO: 989043 - RNA, 22 nt, Human
uaaggcaccauaauauauuuaa

SEQ ID NO: 989044 - RNA, 22 nt, Human
ccagagcccgggaccuggacuu

SEQ ID NO: 989045 - RNA, 22 nt, Human
caccagcagaagacugagggug

SEQ ID NO: 989046 - RNA, 22 nt, Human
uggaggccagagguacugggac

SEQ ID NO: 989047 - RNA, 22 nt, Human
cccugccuacaggguuuucuuu

SEQ ID NO: 989048 - RNA, 22 nt, Human
uucaggaugaaagugugcaaca

SEQ ID NO: 989049 - RNA, 22 nt, Human
uuguccuuaccucaaucuggaa

SEQ ID NO: 989050 - RNA, 22 nt, Human
agugcugaagacuggcuaggga

SEQ ID NO: 989051 - RNA, 21 nt, Human
acucugcugcgggcuuggccu

SEQ ID NO: 989052 - RNA, 22 nt, Human
cacaggcucuucucacuugauu

SEQ ID NO: 989053 - RNA, 22 nt, Human
auugaaagguuuugagcagaua

SEQ ID NO: 989054 - RNA, 22 nt, Human
auauugaacccuacagacugua

SEQ ID NO: 989055 - RNA, 22 nt, Human
uuuucucuacaaaauaaccagc

SEQ ID NO: 989056 - RNA, 22 nt, Human
auccuuggaugugucuuuuugu

SEQ ID NO: 989057 - RNA, 22 nt, Human
aggagagaauguuccaggcuug

SEQ ID NO: 989058 - RNA, 22 nt, Human
caggugggagcgaggagcuacu

SEQ ID NO: 989059 - RNA, 22 nt, Human
cugcccugggauggucugugcg

SEQ ID NO: 989060 - RNA, 22 nt, Human
cuggagcuaauaauccaucuga

SEQ ID NO: 989061 - RNA, 22 nt, Human
guauuaggagguggagccuuug

SEQ ID NO: 989062 - RNA, 22 nt, Human
guggguggaucaccugagguca

SEQ ID NO: 989063 - RNA, 21 nt, Human
ggacuuacauagguaaggggu

SEQ ID NO: 989064 - RNA, 22 nt, Human
gcugcaggggggucuggacuug

SEQ ID NO: 989065 - RNA, 22 nt, Human
ugaaaaacuuuaauccauaaag

SEQ ID NO: 989066 - RNA, 22 nt, Human
uggcaaacuggaggaagcccug

SEQ ID NO: 989067 - RNA, 22 nt, Human
auguacaaaaugccacugaauu

SEQ ID NO: 989068 - RNA, 22 nt, Human
uggcaccugaacuuagaggugu

SEQ ID NO: 989069 - RNA, 22 nt, Human
gccaggcuccccggaucccugg

SEQ ID NO: 989070 - RNA, 22 nt, Human
ggcucugcaugugagugggugg

SEQ ID NO: 989071 - RNA, 22 nt, Human
uuaaaagaauccuguuauccuc

SEQ ID NO: 989072 - RNA, 22 nt, Human
gcuggcccagggucaccuagga

SEQ ID NO: 989073 - RNA, 22 nt, Human
uaauuuaauccaaguguuacau

SEQ ID NO: 989074 - RNA, 22 nt, Human
gccccagguugccugucccagg

SEQ ID NO: 989075 - RNA, 22 nt, Human
caaaaugugagucccaccucaa

SEQ ID NO: 989076 - RNA, 22 nt, Human
uggugcugauaauggcaggauu

SEQ ID NO: 989077 - RNA, 22 nt, Human
auacaucucauguaagagauaa

SEQ ID NO: 989078 - RNA, 22 nt, Human
ucacaggguaucugggauggau

SEQ ID NO: 989079 - RNA, 16 nt, Human
cagaguguaaacagga

SEQ ID NO: 989080 - RNA, 22 nt, Human
gagcugcccugagcuuugcaug

SEQ ID NO: 989081 - RNA, 22 nt, Human
ugagugaggaagcgguggagga

SEQ ID NO: 989082 - RNA, 22 nt, Human
agaaauaugcugauuagaugaa

SEQ ID NO: 989083 - RNA, 22 nt, Human
cuggcagcuuagcacucugguu

SEQ ID NO: 989084 - RNA, 22 nt, Human
gagcagcuggacaggccucccu

SEQ ID NO: 989085 - RNA, 19 nt, Human
ugcuuccucaccaucuccc

SEQ ID NO: 989086 - RNA, 22 nt, Human
ugaagcaggaaccagcagcauu

SEQ ID NO: 989087 - RNA, 22 nt, Human
uucagagccacuucaagucuaa

SEQ ID NO: 989088 - RNA, 22 nt, Human
cuggcugcaggaugaggcugcc

SEQ ID NO: 989089 - RNA, 22 nt, Human
aggcugaggcagguggaucauu

SEQ ID NO: 989090 - RNA, 22 nt, Human
agggcccaggacagcaucaggg

SEQ ID NO: 989091 - RNA, 22 nt, Human
ggcugccuggaccuccucuuuc

SEQ ID NO: 989092 - RNA, 22 nt, Human
uacauggugguggcacuugacu

SEQ ID NO: 989093 - RNA, 22 nt, Human
ugacucuguaccugucugccuu

SEQ ID NO: 989094 - RNA, 22 nt, Human
uaguacuuaucucugucauugu

SEQ ID NO: 989095 - RNA, 22 nt, Human
cagucccagacauaguaaggga

SEQ ID NO: 989096 - RNA, 22 nt, Human
caggcagagugagguggucuaa

SEQ ID NO: 989097 - RNA, 22 nt, Human
uucagcagugcagacacccagu

SEQ ID NO: 989098 - RNA, 22 nt, Human
uuggccaaccagaacggagguc

SEQ ID NO: 989099 - RNA, 22 nt, Human
aauugugcuaugauuaugaaag

SEQ ID NO: 989100 - RNA, 22 nt, Human
auaaugugauauuucauuuaca

SEQ ID NO: 989101 - RNA, 22 nt, Human
aggcuucuaggguuggcagcgg

SEQ ID NO: 989102 - RNA, 22 nt, Human
cugcccugucugcagccuggcu

SEQ ID NO: 989103 - RNA, 22 nt, Human
guccucagggaauguggcgggu

SEQ ID NO: 989104 - RNA, 22 nt, Human
uucugagccucauucaugaggc

SEQ ID NO: 989105 - RNA, 22 nt, Human
ccaggccuggaccaugccaggg

SEQ ID NO: 989106 - RNA, 22 nt, Human
uaguuaggguucugcagagaca

SEQ ID NO: 989107 - RNA, 22 nt, Human
cacucccuucaggagccuagga

SEQ ID NO: 989108 - RNA, 22 nt, Human
ucuuuccuacuuuauugugaac

SEQ ID NO: 989109 - RNA, 19 nt, Human
ggaccagguccugggcagc

SEQ ID NO: 989110 - RNA, 22 nt, Human
aggcugccucgugagcucgcug

SEQ ID NO: 989111 - RNA, 22 nt, Human
ggagcagagcauuucacagccu

SEQ ID NO: 989112 - RNA, 22 nt, Human
aaggcacuuuuccugagaugau

SEQ ID NO: 989113 - RNA, 22 nt, Human
caggcuggaguuaccuuuaggg

SEQ ID NO: 989114 - RNA, 22 nt, Human
gguggcagaggugcaucagccc

SEQ ID NO: 989115 - RNA, 22 nt, Human
cucuggagggaggcugagcugg

SEQ ID NO: 989116 - RNA, 22 nt, Human
ccaggguggggcaggcccacug

SEQ ID NO: 989117 - RNA, 22 nt, Human
acguuuucuagagaauaugcag

SEQ ID NO: 989118 - RNA, 22 nt, Human
uaacagaaaggcucaggugcuc

SEQ ID NO: 989119 - RNA, 22 nt, Human
uugccuugauucuucucaugug

SEQ ID NO: 989120 - RNA, 22 nt, Human
aggcuggcgacaucuggcgggc

SEQ ID NO: 989121 - RNA, 22 nt, Human
ccuucagaccuagacaggaauc

SEQ ID NO: 989122 - RNA, 22 nt, Human
uacaaaaguaauuacgguuuuu

SEQ ID NO: 989123 - RNA, 22 nt, Human
cuggcagcagcuucuggaucga

SEQ ID NO: 989124 - RNA, 19 nt, Human
gcacacccugcaccaccau

SEQ ID NO: 989125 - RNA, 22 nt, Human
cuucagaacuauaaaaaguacu

SEQ ID NO: 989126 - RNA, 22 nt, Human
ucacucugccuccauauuacua

SEQ ID NO: 989127 - RNA, 22 nt, Human
gcagcugggccccagccucucc

SEQ ID NO: 989128 - RNA, 22 nt, Human
aagagcuggauugugcugcaga

SEQ ID NO: 989129 - RNA, 22 nt, Human
cucuccagaauaugccgccgug

SEQ ID NO: 989130 - RNA, 21 nt, Human
agcagcagaucuggugagggc

SEQ ID NO: 989131 - RNA, 22 nt, Human
uggaggcauuuuagguugucac

SEQ ID NO: 989132 - RNA, 22 nt, Human
gcucuggagauggagccuugag

SEQ ID NO: 989133 - RNA, 22 nt, Human
uggcagcaguggagguagaaag

SEQ ID NO: 989134 - RNA, 22 nt, Human
uggagcaggugccaggugugug

SEQ ID NO: 989135 - RNA, 22 nt, Human
uuuauucuugagagugagaaga

SEQ ID NO: 989136 - RNA, 23 nt, Human
ugggggugcacgggccacaucuu

SEQ ID NO: 989137 - RNA, 22 nt, Human
agggcagaaguacagacacuua

SEQ ID NO: 989138 - RNA, 22 nt, Human
agcagcucuguuuaccuggagg

SEQ ID NO: 989139 - RNA, 22 nt, Human
ucucagagcuucagaaagcacc

SEQ ID NO: 989140 - RNA, 22 nt, Human
acagagauggcacagagaaggu

SEQ ID NO: 989141 - RNA, 22 nt, Human
acaugcaugucuaugggcaggu

SEQ ID NO: 989142 - RNA, 22 nt, Human
auuuuucucuccacuccauuaa

SEQ ID NO: 989143 - RNA, 22 nt, Human
cucuguccuugcacaguuccua

SEQ ID NO: 989144 - RNA, 22 nt, Human
gcuccacuugcagcuaggcuug

SEQ ID NO: 989145 - RNA, 22 nt, Human
cugguccauucucucccugaag

SEQ ID NO: 989146 - RNA, 22 nt, Human
agcaauauaaauguuggguaga

SEQ ID NO: 989147 - RNA, 22 nt, Human
agggaaauuaaugugagcaaug

SEQ ID NO: 989148 - RNA, 22 nt, Human
ucugccacuuuugcuuacuggg

SEQ ID NO: 989149 - RNA, 22 nt, Human
ggggagaguccuuuccaguucc

SEQ ID NO: 989150 - RNA, 22 nt, Human
gugauuucagguuuuucauacu

SEQ ID NO: 989151 - RNA, 22 nt, Human
cuggcuggccggaggcaucccu

SEQ ID NO: 989152 - RNA, 22 nt, Human
caggaugggauguagugggccc

SEQ ID NO: 989153 - RNA, 22 nt, Human
uauuuguauuucaugcaguaaa

SEQ ID NO: 989154 - RNA, 22 nt, Human
ccuguccuccaagagcacaucu

SEQ ID NO: 989155 - RNA, 22 nt, Human
aguuuuucugggaggcacugcu

SEQ ID NO: 989156 - RNA, 22 nt, Human
aggcuucccaagcagcugcaaa

SEQ ID NO: 989157 - RNA, 22 nt, Human
caggagacaauggcuguggggc

SEQ ID NO: 989158 - RNA, 22 nt, Human
uggcccugaggacccagugugg

SEQ ID NO: 989159 - RNA, 22 nt, Human
aagucauucuauuucucuaugu

SEQ ID NO: 989160 - RNA, 22 nt, Human
uggagggcaugcuguccauggg

SEQ ID NO: 989161 - RNA, 22 nt, Human
ggcagcagggcugucucccuac

SEQ ID NO: 989162 - RNA, 22 nt, Human
ugucauuuucuaaucuguuguc

SEQ ID NO: 989163 - RNA, 22 nt, Human
cuuuggcaugguccucacuaua

SEQ ID NO: 989164 - RNA, 22 nt, Human
gggggcucugacucccucagcu

SEQ ID NO: 989165 - RNA, 22 nt, Human
uaugcacauugguuuccucauu

SEQ ID NO: 989166 - RNA, 22 nt, Human
agauaaauuccuaagauuucag

SEQ ID NO: 989167 - RNA, 22 nt, Human
accucuggccuucaggcaucau

SEQ ID NO: 989168 - RNA, 19 nt, Human
gagguggguccccgcagcc

SEQ ID NO: 989169 - RNA, 22 nt, Human
ucuggagccacaaaccucagcu

SEQ ID NO: 989170 - RNA, 18 nt, Human
gcccugguggagcuggug

SEQ ID NO: 989171 - RNA, 22 nt, Human
agagaauuacagaagaauguca

SEQ ID NO: 989172 - RNA, 22 nt, Human
guguuuccucacuucucugacu

SEQ ID NO: 989173 - RNA, 22 nt, Human
auggccugggcccgcuucagau

SEQ ID NO: 989174 - RNA, 22 nt, Human
aaugggaggauuuucucucuug

SEQ ID NO: 989175 - RNA, 22 nt, Human
aggccaaauugaucaucuuuag

SEQ ID NO: 989176 - RNA, 22 nt, Human
aagauuucugcuccugagagaa

SEQ ID NO: 989177 - RNA, 19 nt, Human
cuugguuaugguaugaugc

SEQ ID NO: 989178 - RNA, 22 nt, Human
uggagccaaggccaguucucag

SEQ ID NO: 989179 - RNA, 22 nt, Human
ucugagggcuugaggggaagua

SEQ ID NO: 989180 - RNA, 22 nt, Human
cacagugcaugaugggcagaag

SEQ ID NO: 989181 - RNA, 22 nt, Human
uuucauaugggcauuggcaaua

SEQ ID NO: 989182 - RNA, 22 nt, Human
uaaccuuuggugaaauauuaac

SEQ ID NO: 989183 - RNA, 22 nt, Human
uggccugccuucgcugagcuga

SEQ ID NO: 989184 - RNA, 22 nt, Human
uuuauguaaguggaaugaugcc

SEQ ID NO: 989185 - RNA, 22 nt, Human
ucagacaguuugcagugugccu

SEQ ID NO: 989186 - RNA, 22 nt, Human
ucccuuaaaacucauguguugu

SEQ ID NO: 989187 - RNA, 22 nt, Human
uuuccaauaaagugucauuguu

SEQ ID NO: 989188 - RNA, 22 nt, Human
gcugccuguggcccuucugggu

SEQ ID NO: 989189 - RNA, 18 nt, Human
cagaaguccuucaaggcc

SEQ ID NO: 989190 - RNA, 22 nt, Human
agaggccuaauugcuacccuuu

SEQ ID NO: 989191 - RNA, 22 nt, Human
ggcaagcauaaccuguacagcc

SEQ ID NO: 989192 - RNA, 22 nt, Human
caccuugugauccucuugccuu

SEQ ID NO: 989193 - RNA, 22 nt, Human
gcugccugaucauacaccaggg

SEQ ID NO: 989194 - RNA, 21 nt, Human
gcacagugccaggcacacagu

SEQ ID NO: 989195 - RNA, 20 nt, Human
ucacaggggaccaggagcag

SEQ ID NO: 989196 - RNA, 22 nt, Human
ggcuccuguccccucagcugcu

SEQ ID NO: 989197 - RNA, 22 nt, Human
ugcccacauggugccauggcca

SEQ ID NO: 989198 - RNA, 22 nt, Human
cugaggccucuguucaccagaa

SEQ ID NO: 989199 - RNA, 22 nt, Human
caggcacuucugcugcuugucu

SEQ ID NO: 989200 - RNA, 22 nt, Human
ugcauauuuguaugauguuuag

SEQ ID NO: 989201 - RNA, 22 nt, Human
ucaagagaaggggaaauagacu

SEQ ID NO: 989202 - RNA, 21 nt, Human
uagggcaggcauuggaagaga

SEQ ID NO: 989203 - RNA, 19 nt, Human
caaggguugggucugucau

SEQ ID NO: 989204 - RNA, 22 nt, Human
aagggcagaaagggacgcuuug

SEQ ID NO: 989205 - RNA, 22 nt, Human
acuuccuguguuggucuugcug

SEQ ID NO: 989206 - RNA, 22 nt, Human
gauauagguucauaguguuaca

SEQ ID NO: 989207 - RNA, 22 nt, Human
uaacagaaaagaacugaguuug

SEQ ID NO: 989208 - RNA, 22 nt, Human
uuugcuauaaaagggucacacg

SEQ ID NO: 989209 - RNA, 18 nt, Human
gucaccuggaucagauua

SEQ ID NO: 989210 - RNA, 22 nt, Human
uuugcauuccugccugcauuca

SEQ ID NO: 989211 - RNA, 22 nt, Human
ccuuuuaugaacuugagcaggu

SEQ ID NO: 989212 - RNA, 22 nt, Human
ucuauuuacagaaagcagaauu

SEQ ID NO: 989213 - RNA, 22 nt, Human
cuguaaaacugcuuaaguaugc

SEQ ID NO: 989214 - RNA, 20 nt, Human
aguguuccggaagacuggca

SEQ ID NO: 989215 - RNA, 22 nt, Human
uagaaaugugauaauagcuuaa

SEQ ID NO: 989216 - RNA, 22 nt, Human
aaaaauguuaucuacuguccga

SEQ ID NO: 989217 - RNA, 22 nt, Human
aggugcuggagucugggcagga

SEQ ID NO: 989218 - RNA, 22 nt, Human
ggcucaggacacagugguuuag

SEQ ID NO: 989219 - RNA, 22 nt, Human
uuaucauugucgcagucuaauu

SEQ ID NO: 989220 - RNA, 22 nt, Human
agggcagcuaaggugcugacug

SEQ ID NO: 989221 - RNA, 21 nt, Human
ggcagcugaccgcgcggugca

SEQ ID NO: 989222 - RNA, 22 nt, Human
uuauuugguugcugacuuggaa

SEQ ID NO: 989223 - RNA, 22 nt, Human
gcugucacucaccaggccugca

SEQ ID NO: 989224 - RNA, 22 nt, Human
aucuagaaguggcaugaauuac

SEQ ID NO: 989225 - RNA, 18 nt, Human
ggcugugcguggaggcug

SEQ ID NO: 989226 - RNA, 22 nt, Human
guaggcagauaggagugcagcc

SEQ ID NO: 989227 - RNA, 19 nt, Human
ucuggcuccugccaggcug

SEQ ID NO: 989228 - RNA, 17 nt, Human
uguggccuucugagcuu

SEQ ID NO: 989229 - RNA, 22 nt, Human
ugagcuguagcagaugcuguug

SEQ ID NO: 989230 - RNA, 22 nt, Human
cccuggagggcagacagaugcc

SEQ ID NO: 989231 - RNA, 22 nt, Human
ugguggcuucugaggauggcga

SEQ ID NO: 989232 - RNA, 21 nt, Human
uccugccuuaguccagagcag

SEQ ID NO: 989233 - RNA, 19 nt, Human
uccucaggggcucacagac

SEQ ID NO: 989234 - RNA, 22 nt, Human
gcuccuggauguucaagucggc

SEQ ID NO: 989235 - RNA, 22 nt, Human
gcacucugugaucugcagagcc

SEQ ID NO: 989236 - RNA, 22 nt, Human
ccaggccuuccaguacgcagaa

SEQ ID NO: 989237 - RNA, 22 nt, Human
gugccagcaguuauggugauuu

SEQ ID NO: 989238 - RNA, 22 nt, Human
guuccacaaaauguacccaguu

SEQ ID NO: 989239 - RNA, 22 nt, Human
cucaggauagauuguccucuca

SEQ ID NO: 989240 - RNA, 22 nt, Human
uggggugggcaugcgcuguccu

SEQ ID NO: 989241 - RNA, 22 nt, Human
ugucugucugcaagccagaaag

SEQ ID NO: 989242 - RNA, 22 nt, Human
agagugaaguucaucgugcagc

SEQ ID NO: 989243 - RNA, 22 nt, Human
cagagguaccagcagccucugg

SEQ ID NO: 989244 - RNA, 22 nt, Human
ggcuccugauaggagaaugcgg

SEQ ID NO: 989245 - RNA, 22 nt, Human
aaagcuauuuuauugcagcucu

SEQ ID NO: 989246 - RNA, 22 nt, Human
acaaaaauuagcugggcauggu

SEQ ID NO: 989247 - RNA, 22 nt, Human
cugggagucaccaggagcaagg

SEQ ID NO: 989248 - RNA, 22 nt, Human
ccuggcacgaagggcugagguu

SEQ ID NO: 989249 - RNA, 22 nt, Human
uuuccuuccagguuccuaaggc

SEQ ID NO: 989250 - RNA, 22 nt, Human
aaauaauugaguuggucaauau

SEQ ID NO: 989251 - RNA, 22 nt, Human
aguguacauguuuacagcaucu

SEQ ID NO: 989252 - RNA, 22 nt, Human
gucugagaaucuugcauaucau

SEQ ID NO: 989253 - RNA, 22 nt, Human
uaaaugugagugaugcggugaa

SEQ ID NO: 989254 - RNA, 22 nt, Human
ggguggcuccuaugggcauagc

SEQ ID NO: 989255 - RNA, 22 nt, Human
guuuucuuugaaugcuucuaga

SEQ ID NO: 989256 - RNA, 22 nt, Human
ugaagcaggaaacuucuuguuu

SEQ ID NO: 989257 - RNA, 22 nt, Human
agggagagguugaaaccucagu

SEQ ID NO: 989258 - RNA, 22 nt, Human
ucugucucaaguucuugcacuc

SEQ ID NO: 989259 - RNA, 22 nt, Human
caaaugcagucccuuuguugcu

SEQ ID NO: 989260 - RNA, 22 nt, Human
ugccucugguuaucugguaccu

SEQ ID NO: 989261 - RNA, 22 nt, Human
auuauuaggacuacugggguug

SEQ ID NO: 989262 - RNA, 22 nt, Human
ugcaucuuacguuuugaaaggg

SEQ ID NO: 989263 - RNA, 22 nt, Human
gcuggccaggugcuuugguucu

SEQ ID NO: 989264 - RNA, 22 nt, Human
aaaugguaagacaacacauuau

SEQ ID NO: 989265 - RNA, 22 nt, Human
aagggcaggcagagaucauaua

SEQ ID NO: 989266 - RNA, 22 nt, Human
augucuaaaagauaaaguuuaa

SEQ ID NO: 989267 - RNA, 22 nt, Human
auaugaagucagacaaacuggg

SEQ ID NO: 989268 - RNA, 22 nt, Human
aguaugaagaugaugaaaaaua

SEQ ID NO: 989269 - RNA, 22 nt, Human
aaggcacuagcaagcugccugg

SEQ ID NO: 989270 - RNA, 22 nt, Human
agggacagucuacuguucacug

SEQ ID NO: 989271 - RNA, 22 nt, Human
ucaggggacagccagcuggagg

SEQ ID NO: 989272 - RNA, 22 nt, Human
guuagaaagugucugcuugggu

SEQ ID NO: 989273 - RNA, 22 nt, Human
uuuuccuaguaggccuauuaga

SEQ ID NO: 989274 - RNA, 22 nt, Human
uuguggcucgugagauguuagg

SEQ ID NO: 989275 - RNA, 22 nt, Human
uacaaaguuugagaaugcuuuc

SEQ ID NO: 989276 - RNA, 22 nt, Human
cuguccuccggccaccuacagu

SEQ ID NO: 989277 - RNA, 22 nt, Human
ggcugcuguuucagagacuguu

SEQ ID NO: 989278 - RNA, 22 nt, Human
ugucccagauacuggacauaga

SEQ ID NO: 989279 - RNA, 17 nt, Human
gagauggguggaucacc

SEQ ID NO: 989280 - RNA, 22 nt, Human
gggcuucucuuaugcuaacugg

SEQ ID NO: 989281 - RNA, 22 nt, Human
agggcccuccccgcucagggca

SEQ ID NO: 989282 - RNA, 22 nt, Human
cagagcuguccaaacccugaca

SEQ ID NO: 989283 - RNA, 22 nt, Human
ugaaaucuccucuuuauauauc

SEQ ID NO: 989284 - RNA, 22 nt, Human
uagagcugauaaugaggccaag

SEQ ID NO: 989285 - RNA, 22 nt, Human
aggggcugacuggaaagugcca

SEQ ID NO: 989286 - RNA, 22 nt, Human
gccuggugaaaggcagagagcg

SEQ ID NO: 989287 - RNA, 22 nt, Human
agccagccgggggaccacagug

SEQ ID NO: 989288 - RNA, 15 nt, Human
aaucuggcggcaagu

SEQ ID NO: 989289 - RNA, 22 nt, Human
cauuuagaaacuguuuuuaaca

SEQ ID NO: 989290 - RNA, 22 nt, Human
agagccuggcucccagcuaccg

SEQ ID NO: 989291 - RNA, 22 nt, Human
ucaguguaaguuauguagaugu

SEQ ID NO: 989292 - RNA, 21 nt, Human
gauuucacuuaccuucauuua

SEQ ID NO: 989293 - RNA, 22 nt, Human
aaggaagggaaauagugauguc

SEQ ID NO: 989294 - RNA, 20 nt, Human
cugagcugagcuccaugggu

SEQ ID NO: 989295 - RNA, 22 nt, Human
ggccugcugacccaaguccugu

SEQ ID NO: 989296 - RNA, 22 nt, Human
gagcucagauucuggugucaga

SEQ ID NO: 989297 - RNA, 22 nt, Human
cugagcuuggccaggaaugaau

SEQ ID NO: 989298 - RNA, 22 nt, Human
aggucauuggggacuaucuccg

SEQ ID NO: 989299 - RNA, 23 nt, Human
gccucugcagccuaguuaguguc

SEQ ID NO: 989300 - RNA, 22 nt, Human
ggccuucacgugaccuggcgug

SEQ ID NO: 989301 - RNA, 22 nt, Human
uaugcauaauuggauaaguaga

SEQ ID NO: 989302 - RNA, 22 nt, Human
agaaaucacaggaggcagaagg

SEQ ID NO: 989303 - RNA, 22 nt, Human
uguggcccagaugagugugcua

SEQ ID NO: 989304 - RNA, 22 nt, Human
caggagaagguuuggagugcag

SEQ ID NO: 989305 - RNA, 22 nt, Human
gcagggccuuagcagcggcugc

SEQ ID NO: 989306 - RNA, 22 nt, Human
ugugcuucugcagagacuauuu

SEQ ID NO: 989307 - RNA, 22 nt, Human
acuuccugggcaugcagagucc

SEQ ID NO: 989308 - RNA, 22 nt, Human
ggcacugaaguggguguugggu

SEQ ID NO: 989309 - RNA, 19 nt, Human
agccuggcuuugcucugcu

SEQ ID NO: 989310 - RNA, 22 nt, Human
uggcagggaauacagauguuua

SEQ ID NO: 989311 - RNA, 22 nt, Human
gcacccagcccagggcgugaug

SEQ ID NO: 989312 - RNA, 22 nt, Human
acccagcuggaugcauggaggc

SEQ ID NO: 989313 - RNA, 22 nt, Human
ggacagaggguugacagaguau

SEQ ID NO: 989314 - RNA, 22 nt, Human
gaaaaguaaacacuagggguca

SEQ ID NO: 989315 - RNA, 22 nt, Human
aggggcugcuggguccgccccu

SEQ ID NO: 989316 - RNA, 22 nt, Human
agcuuccugaugcaagagggcu

SEQ ID NO: 989317 - RNA, 21 nt, Human
aguucauacugaguaacaaaa

SEQ ID NO: 989318 - RNA, 22 nt, Human
uaacccaaaggcaaugucucga

SEQ ID NO: 989319 - RNA, 22 nt, Human
caauaauauccugugcuguuug

SEQ ID NO: 989320 - RNA, 21 nt, Human
agcugcuuucagcuccuagag

SEQ ID NO: 989321 - RNA, 22 nt, Human
gguguccaucaggcugugcuuc

SEQ ID NO: 989322 - RNA, 22 nt, Human
cagagagggcggcccuggcuuc

SEQ ID NO: 989323 - RNA, 22 nt, Human
augugucaauuuucaaaugcuu

SEQ ID NO: 989324 - RNA, 22 nt, Human
cauuuguauguuccuccuuagg

SEQ ID NO: 989325 - RNA, 22 nt, Human
gcagauggugccaugucuugug

SEQ ID NO: 989326 - RNA, 22 nt, Human
ggggcuggcucacuaagagacu

SEQ ID NO: 989327 - RNA, 22 nt, Human
ugcccugcagugagugcgucug

SEQ ID NO: 989328 - RNA, 22 nt, Human
uaugucacauuguaacagugug

SEQ ID NO: 989329 - RNA, 22 nt, Human
uccagcagaccaucaaggcuca

SEQ ID NO: 989330 - RNA, 20 nt, Human
ccugggguacacuggcaugu

SEQ ID NO: 989331 - RNA, 22 nt, Human
uucagcaauuuuuuaagcuaau

SEQ ID NO: 989332 - RNA, 22 nt, Human
agcccagccggauucccaguuc

SEQ ID NO: 989333 - RNA, 22 nt, Human
ccugcagguugcagaggcggaa

SEQ ID NO: 989334 - RNA, 22 nt, Human
aaagacagagcuguaggggaaa

SEQ ID NO: 989335 - RNA, 22 nt, Human
gcucugcucuugacuuaccagg

SEQ ID NO: 989336 - RNA, 22 nt, Human
ucaaauguucccuguacuggcc

SEQ ID NO: 989337 - RNA, 22 nt, Human
aggagagagcugagcuuugcug

SEQ ID NO: 989338 - RNA, 22 nt, Human
gagccagguuggaggcugcagu

SEQ ID NO: 989339 - RNA, 22 nt, Human
caggcuggagugcaguugugca

SEQ ID NO: 989340 - RNA, 22 nt, Human
aguguggguuuuauggagcccu

SEQ ID NO: 989341 - RNA, 22 nt, Human
acagguggagugguuagcaggc

SEQ ID NO: 989342 - RNA, 22 nt, Human
ugcugucccccgugucugggcu

SEQ ID NO: 989343 - RNA, 22 nt, Human
gccacguugccacccgggugac

SEQ ID NO: 989344 - RNA, 22 nt, Human
augagcuguaagguggcuuccu

SEQ ID NO: 989345 - RNA, 22 nt, Human
cugucacacugauaucaggcuu

SEQ ID NO: 989346 - RNA, 22 nt, Human
guauguauguauauguuuaaga

SEQ ID NO: 989347 - RNA, 22 nt, Human
aagcagccacuggccaguuaua

SEQ ID NO: 989348 - RNA, 21 nt, Human
ccuccaggugauuccgugcuc

SEQ ID NO: 989349 - RNA, 22 nt, Human
uaauuuacuugcaaauaacaau

SEQ ID NO: 989350 - RNA, 22 nt, Human
acauaaauagauuauugggagg

SEQ ID NO: 989351 - RNA, 22 nt, Human
gaaaugcagauucugauucugu

SEQ ID NO: 989352 - RNA, 22 nt, Human
aaugccaguguguugauuccag

SEQ ID NO: 989353 - RNA, 22 nt, Human
uuugauaacagugaauaucaug

SEQ ID NO: 989354 - RNA, 22 nt, Human
cagcagggaagcugugcuguuu

SEQ ID NO: 989355 - RNA, 22 nt, Human
ugcagaagaauguaggcauaag

SEQ ID NO: 989356 - RNA, 22 nt, Human
acuuucuccagaaaaccaagga

SEQ ID NO: 989357 - RNA, 22 nt, Human
ugcugccagggcucugcccaca

SEQ ID NO: 989358 - RNA, 22 nt, Human
uuucaaauaccauaaaccuaau

SEQ ID NO: 989359 - RNA, 22 nt, Human
aaauaauguuaggccuuugcuc

SEQ ID NO: 989360 - RNA, 22 nt, Human
ccaaagucuggagcagcagagc

SEQ ID NO: 989361 - RNA, 20 nt, Human
ccagcauguacacaugugga

SEQ ID NO: 989362 - RNA, 22 nt, Human
caugggcuuuggaggcuggagg

SEQ ID NO: 989363 - RNA, 22 nt, Human
ucuggcucaggagcuguguuca

SEQ ID NO: 989364 - RNA, 20 nt, Human
guguuucaugugauacaaug

SEQ ID NO: 989365 - RNA, 22 nt, Human
accucugcaaugcaaugucaug

SEQ ID NO: 989366 - RNA, 22 nt, Human
ucugagccuauuucaaauuccu

SEQ ID NO: 989367 - RNA, 22 nt, Human
ugcagcaggagccaggccuggu

SEQ ID NO: 989368 - RNA, 22 nt, Human
acaaaguuauucuuucagagga

SEQ ID NO: 989369 - RNA, 22 nt, Human
ggagccagaggcugcugcugug

SEQ ID NO: 989370 - RNA, 22 nt, Human
cccuuucccuucuggcucaggg

SEQ ID NO: 989371 - RNA, 22 nt, Human
uccagggcugacuugggagagg

SEQ ID NO: 989372 - RNA, 22 nt, Human
agagccaggacugugucucacu

SEQ ID NO: 989373 - RNA, 18 nt, Human
uggcagcaggaagccauu

SEQ ID NO: 989374 - RNA, 22 nt, Human
ucaggcagagcuguggagcucu

SEQ ID NO: 989375 - RNA, 22 nt, Human
ugcagucuggauguccucagau

SEQ ID NO: 989376 - RNA, 22 nt, Human
gcagggcugcugaaacuuguuu

SEQ ID NO: 989377 - RNA, 22 nt, Human
caggugcuguccugcacauguc

SEQ ID NO: 989378 - RNA, 22 nt, Human
auggggcuguucucugcccugc

SEQ ID NO: 989379 - RNA, 22 nt, Human
uuugcauucuagaaaaauuucu

SEQ ID NO: 989380 - RNA, 22 nt, Human
ucacucugacuuggccuccaac

SEQ ID NO: 989381 - RNA, 22 nt, Human
gcccuuccuuagacagcaggau

SEQ ID NO: 989382 - RNA, 22 nt, Human
agagccagccuucucagcuuac

SEQ ID NO: 989383 - RNA, 22 nt, Human
auauuagggucucuaaauucua

SEQ ID NO: 989384 - RNA, 23 nt, Human
ugggccuggaaagccuuagagag

SEQ ID NO: 989385 - RNA, 19 nt, Human
ucucaauguucagaaagcu

SEQ ID NO: 989386 - RNA, 22 nt, Human
ugucauguguucuuaaauacau

SEQ ID NO: 989387 - RNA, 22 nt, Human
uuguuucugaguuuucauguau

SEQ ID NO: 989388 - RNA, 22 nt, Human
guggcugcuguccucucugguu

SEQ ID NO: 989389 - RNA, 22 nt, Human
cuggagcaggcuugucccagcu

SEQ ID NO: 989390 - RNA, 22 nt, Human
uauucacauucucaggccuggu

SEQ ID NO: 989391 - RNA, 22 nt, Human
uugggaaggcguggaagcagaa

SEQ ID NO: 989392 - RNA, 22 nt, Human
caguacuuaguucucaugguuu

SEQ ID NO: 989393 - RNA, 22 nt, Human
cugggaggacaacuuggagcuc

SEQ ID NO: 989394 - RNA, 21 nt, Human
cugccuugaaugguacuggga

SEQ ID NO: 989395 - RNA, 22 nt, Human
gugcaugugucuuuauaguaga

SEQ ID NO: 989396 - RNA, 22 nt, Human
cagcugcccauccugggaaaug

SEQ ID NO: 989397 - RNA, 22 nt, Human
agcucccaggcagucaugagga

SEQ ID NO: 989398 - RNA, 22 nt, Human
gccugagcaggcguggaccaug

SEQ ID NO: 989399 - RNA, 18 nt, Human
cuuguucuucucuuggcg

SEQ ID NO: 989400 - RNA, 22 nt, Human
ucauugcaccccagucccagcu

SEQ ID NO: 989401 - RNA, 22 nt, Human
auaaacaguagagaaagguggu

SEQ ID NO: 989402 - RNA, 22 nt, Human
ucucagagaugucaagagucua

SEQ ID NO: 989403 - RNA, 22 nt, Human
aacauaaauuugaaguggcaaa

SEQ ID NO: 989404 - RNA, 22 nt, Human
agcccucauggaacagcuccua

SEQ ID NO: 989405 - RNA, 22 nt, Human
ggacagcccauacacaugucug

SEQ ID NO: 989406 - RNA, 22 nt, Human
gcuggccugggcucaagaccag

SEQ ID NO: 989407 - RNA, 22 nt, Human
ccugccugauuccaggauggcu

SEQ ID NO: 989408 - RNA, 22 nt, Human
uaaauacuuuuacuccacugau

SEQ ID NO: 989409 - RNA, 22 nt, Human
cugucuguuucugauucaaccu

SEQ ID NO: 989410 - RNA, 22 nt, Human
uuggccaagggcucuuuaggcu

SEQ ID NO: 989411 - RNA, 22 nt, Human
ggagccuuccagacugcccaca

SEQ ID NO: 989412 - RNA, 22 nt, Human
agagccagagaccuggguucac

SEQ ID NO: 989413 - RNA, 22 nt, Human
cuaaauaaucccucuggucuua

SEQ ID NO: 989414 - RNA, 22 nt, Human
aaugcacaaaaauuguauguaa

SEQ ID NO: 989415 - RNA, 23 nt, Human
aggagccaggugcagcccuugug

SEQ ID NO: 989416 - RNA, 17 nt, Human
agguggguggaucaccu

SEQ ID NO: 989417 - RNA, 22 nt, Human
cauugcugugggcauuugcugc

SEQ ID NO: 989418 - RNA, 22 nt, Human
gaguuuaaauaacacauuucca

SEQ ID NO: 989419 - RNA, 22 nt, Human
uucacaggauauaugugcaggg

SEQ ID NO: 989420 - RNA, 22 nt, Human
gccagggcaggggagcaucugc

SEQ ID NO: 989421 - RNA, 22 nt, Human
cagggcccauggcucagguagg

SEQ ID NO: 989422 - RNA, 22 nt, Human
aauguguauaugaacauacagg

SEQ ID NO: 989423 - RNA, 20 nt, Human
uauuugaaauggccaagugu

SEQ ID NO: 989424 - RNA, 19 nt, Human
ggcugccuuuccuuaccag

SEQ ID NO: 989425 - RNA, 22 nt, Human
agagcugggacuuggacucaau

SEQ ID NO: 989426 - RNA, 18 nt, Human
gcaggagauggguggggu

SEQ ID NO: 989427 - RNA, 22 nt, Human
aaaugcagauugucauucagga

SEQ ID NO: 989428 - RNA, 23 nt, Human
cuggggcuuucaaaucugggcag

SEQ ID NO: 989429 - RNA, 22 nt, Human
ucuggcucugaauucacuucug

SEQ ID NO: 989430 - RNA, 22 nt, Human
cugcuucuaagaaccugcagcu

SEQ ID NO: 989431 - RNA, 22 nt, Human
aggccaaagugcuccuuuuaga

SEQ ID NO: 989432 - RNA, 22 nt, Human
cacagcuuaugccacugauugg

SEQ ID NO: 989433 - RNA, 22 nt, Human
uuuauuguuguuagucauaagu

SEQ ID NO: 989434 - RNA, 22 nt, Human
ccuggccaggcucucagcacug

SEQ ID NO: 989435 - RNA, 22 nt, Human
uauguagguaaacacagacaua

SEQ ID NO: 989436 - RNA, 22 nt, Human
uuugaauaucacaaacuuucaa

SEQ ID NO: 989437 - RNA, 22 nt, Human
gcccuggccuucaucucagaca

SEQ ID NO: 989438 - RNA, 22 nt, Human
ggaggagacaguaaaaagcacg

SEQ ID NO: 989439 - RNA, 22 nt, Human
cagaaauguucuaaugauucag

SEQ ID NO: 989440 - RNA, 22 nt, Human
cuugugcauuucauuccucagg

SEQ ID NO: 989441 - RNA, 17 nt, Human
ccacucaguaauuucuc

SEQ ID NO: 989442 - RNA, 22 nt, Human
ugcugcacgauaaauaauuucu

SEQ ID NO: 989443 - RNA, 18 nt, Human
gcucugcccaggcugccc

SEQ ID NO: 989444 - RNA, 19 nt, Human
acacugaauguagaauugg

SEQ ID NO: 989445 - RNA, 22 nt, Human
ggccugagaaccauggggccaa

SEQ ID NO: 989446 - RNA, 22 nt, Human
aggcacugaagaacucuuuuug

SEQ ID NO: 989447 - RNA, 22 nt, Human
aacaaaccuucccuauacgucu

SEQ ID NO: 989448 - RNA, 22 nt, Human
ucaggcagaccaccgugggcag

SEQ ID NO: 989449 - RNA, 22 nt, Human
ccuggaaggugaugguacagca

SEQ ID NO: 989450 - RNA, 22 nt, Human
ugggcaaguaucggacucugag

SEQ ID NO: 989451 - RNA, 22 nt, Human
cauuacaugguccaggauauau

SEQ ID NO: 989452 - RNA, 22 nt, Human
acugggccuggauuggcguguc

SEQ ID NO: 989453 - RNA, 22 nt, Human
cagccagguaugggcgugcggg

SEQ ID NO: 989454 - RNA, 22 nt, Human
uccagggaugguaaugagcagu

SEQ ID NO: 989455 - RNA, 22 nt, Human
acagcuuuucaauucugcugag

SEQ ID NO: 989456 - RNA, 22 nt, Human
ccacucugauuucaagggagau

SEQ ID NO: 989457 - RNA, 21 nt, Human
ugggggagaauugguugcuuu

SEQ ID NO: 989458 - RNA, 20 nt, Human
acaggagaucugaggaaagg

SEQ ID NO: 989459 - RNA, 22 nt, Human
agcaggaguguccccuggcugu

SEQ ID NO: 989460 - RNA, 22 nt, Human
uccuggucuacacugcauuggg

SEQ ID NO: 989461 - RNA, 22 nt, Human
gccaggcuggucuugaacuccu

SEQ ID NO: 989462 - RNA, 22 nt, Human
gccuggaguggacuuggccccu

SEQ ID NO: 989463 - RNA, 22 nt, Human
ucuggcuccguguccgcuccca

SEQ ID NO: 989464 - RNA, 22 nt, Human
ccucccucuuucagucccacag

SEQ ID NO: 989465 - RNA, 22 nt, Human
acuaaggaauaugacaaacuca

SEQ ID NO: 989466 - RNA, 22 nt, Human
cucuuccuacagucugcuaugc

SEQ ID NO: 989467 - RNA, 22 nt, Human
uguuuaauucaccaucauguuc

SEQ ID NO: 989468 - RNA, 22 nt, Human
ccuggcuccugccucugcaggg

SEQ ID NO: 989469 - RNA, 22 nt, Human
ugggcugcacccucagccucug

SEQ ID NO: 989470 - RNA, 22 nt, Human
gcucacugccauucucuagaug

SEQ ID NO: 989471 - RNA, 23 nt, Human
uucuuucaagaaguucacagugc

SEQ ID NO: 989472 - RNA, 22 nt, Human
cuuccaaagcacuuuauggacc

SEQ ID NO: 989473 - RNA, 22 nt, Human
uuggccaaauacacaccuuuug

SEQ ID NO: 989474 - RNA, 22 nt, Human
cccaggcagagagcuggugagc

SEQ ID NO: 989475 - RNA, 22 nt, Human
uagcagggccaggcugggaacc

SEQ ID NO: 989476 - RNA, 22 nt, Human
auugacaagcaguaugucuuag

SEQ ID NO: 989477 - RNA, 17 nt, Human
agcuccugcccauggcu

SEQ ID NO: 989478 - RNA, 22 nt, Human
ggaaaaggccauuguuucucug

SEQ ID NO: 989479 - RNA, 22 nt, Human
caguggugaagagcaggggcuc

SEQ ID NO: 989480 - RNA, 22 nt, Human
ucuuggagacucuuguauauuu

SEQ ID NO: 989481 - RNA, 23 nt, Human
ugcagcugccucuggcgggccgg

SEQ ID NO: 989482 - RNA, 22 nt, Human
agucagugaaaacuagaauguu

SEQ ID NO: 989483 - RNA, 22 nt, Human
gagagcugauagaugagcuacu

SEQ ID NO: 989484 - RNA, 22 nt, Human
ccuguuuagugaggugaggagu

SEQ ID NO: 989485 - RNA, 22 nt, Human
aagggcugcuguagaagcagag

SEQ ID NO: 989486 - RNA, 22 nt, Human
ucugggagcacacgcagugauc

SEQ ID NO: 989487 - RNA, 22 nt, Human
agaaaugugagccccuuaucaa

SEQ ID NO: 989488 - RNA, 17 nt, Human
ugagacagggcaggccc

SEQ ID NO: 989489 - RNA, 22 nt, Human
uguguuuugaacucaucuacug

SEQ ID NO: 989490 - RNA, 22 nt, Human
uaccuugggguuuuguugcucu

SEQ ID NO: 989491 - RNA, 22 nt, Human
ggcagccauggacacuggcuag

SEQ ID NO: 989492 - RNA, 22 nt, Human
ggagggagcauccccuugcuga

SEQ ID NO: 989493 - RNA, 22 nt, Human
gcuucucuggccugcagggcau

SEQ ID NO: 989494 - RNA, 21 nt, Human
agagucugcauuucugacaag

SEQ ID NO: 989495 - RNA, 22 nt, Human
cugagcugcucccgcugcagcg

SEQ ID NO: 989496 - RNA, 19 nt, Human
aggcagaggcuuggcuagc

SEQ ID NO: 989497 - RNA, 22 nt, Human
caugcaggcacccagagcccac

SEQ ID NO: 989498 - RNA, 22 nt, Human
ucacucugguccauccgagagc

SEQ ID NO: 989499 - RNA, 22 nt, Human
ccuccugggagagcacggaggg

SEQ ID NO: 989500 - RNA, 23 nt, Human
acacaauagaguacuauucagcc

SEQ ID NO: 989501 - RNA, 22 nt, Human
gacagggcgagacucagucuca

SEQ ID NO: 989502 - RNA, 22 nt, Human
uuguaacacuuuucuauuaaua

SEQ ID NO: 989503 - RNA, 22 nt, Human
ucuggccagcaugagaccuggu

SEQ ID NO: 989504 - RNA, 22 nt, Human
uguaugcaaauuuauuagcaca

SEQ ID NO: 989505 - RNA, 22 nt, Human
gagacacacacaggagguggca

SEQ ID NO: 989506 - RNA, 22 nt, Human
ugucccaguucccaggguugcu

SEQ ID NO: 989507 - RNA, 22 nt, Human
cuucugagcagaccuccugggg

SEQ ID NO: 989508 - RNA, 22 nt, Human
cucagaauuacaucccauuuua

SEQ ID NO: 989509 - RNA, 22 nt, Human
ucauaauacaaagaguucugca

SEQ ID NO: 989510 - RNA, 22 nt, Human
cucuccagccacagaagcugcu

SEQ ID NO: 989511 - RNA, 23 nt, Human
ugggcaucuccucugugccaggc

SEQ ID NO: 989512 - RNA, 22 nt, Human
acaccuuuuauucgccaggcac

SEQ ID NO: 989513 - RNA, 22 nt, Human
ucaggagcagcaugggugagag

SEQ ID NO: 989514 - RNA, 23 nt, Human
gggcugcuccaggccaaggcugg

SEQ ID NO: 989515 - RNA, 22 nt, Human
cucagggcaguauggcugagag

SEQ ID NO: 989516 - RNA, 22 nt, Human
ggagucaggagcaggcugggcu

SEQ ID NO: 989517 - RNA, 22 nt, Human
aacugcauuuaacaaauacucu

SEQ ID NO: 989518 - RNA, 22 nt, Human
ugcugggcuaggguggagcucu

SEQ ID NO: 989519 - RNA, 21 nt, Human
auuauuauuucuguguccagc

SEQ ID NO: 989520 - RNA, 22 nt, Human
acagaggucauggagaguucuc

SEQ ID NO: 989521 - RNA, 22 nt, Human
ucagcugccuuucccaugcuag

SEQ ID NO: 989522 - RNA, 22 nt, Human
gcagggccagggcucaggcugu

SEQ ID NO: 989523 - RNA, 22 nt, Human
aagcagcacaguaauauuggug

SEQ ID NO: 989524 - RNA, 19 nt, Human
uugcauuguaguuggacug

SEQ ID NO: 989525 - RNA, 22 nt, Human
aaacagcugucauuguuuuaaa

SEQ ID NO: 989526 - RNA, 22 nt, Human
ggcugcagggcagcuggugugg

SEQ ID NO: 989527 - RNA, 22 nt, Human
gggugggguucaggaaucuuca

SEQ ID NO: 989528 - RNA, 22 nt, Human
cucuugaagcaggggccaguuc

SEQ ID NO: 989529 - RNA, 22 nt, Human
uauuggaugauucacuuggcag

SEQ ID NO: 989530 - RNA, 22 nt, Human
gugggugauguacuggaggcca

SEQ ID NO: 989531 - RNA, 22 nt, Human
gaguguucccacaccccaguug

SEQ ID NO: 989532 - RNA, 22 nt, Human
uggccugggucacaccaggguc

SEQ ID NO: 989533 - RNA, 20 nt, Human
gcagcugcccccagucccug

SEQ ID NO: 989534 - RNA, 20 nt, Human
caguuuaacuuugagcaguu

SEQ ID NO: 989535 - RNA, 22 nt, Human
agcaggcuaagggaccuguuua

SEQ ID NO: 989536 - RNA, 18 nt, Human
cagucccaaaccuuagga

SEQ ID NO: 989537 - RNA, 22 nt, Human
ucagaacagaagcuggcuauaa

SEQ ID NO: 989538 - RNA, 21 nt, Human
gcccucaggggaggauggccu

SEQ ID NO: 989539 - RNA, 17 nt, Human
ggcugcugugcuggugc

SEQ ID NO: 989540 - RNA, 22 nt, Human
acagcuugcaauggcuuucaac

SEQ ID NO: 989541 - RNA, 22 nt, Human
cagugcaguugguggcaggggu

SEQ ID NO: 989542 - RNA, 22 nt, Human
ggcuucagugagcugagcucac

SEQ ID NO: 989543 - RNA, 22 nt, Human
uggggcuggcacagucucuauu

SEQ ID NO: 989544 - RNA, 18 nt, Human
gugagcagagagcaucac

SEQ ID NO: 989545 - RNA, 22 nt, Human
agugcauugcaucucugcuuca

SEQ ID NO: 989546 - RNA, 22 nt, Human
caggaaggcccaccuguccugu

SEQ ID NO: 989547 - RNA, 22 nt, Human
ggggccugcgagguucaacuuc

SEQ ID NO: 989548 - RNA, 22 nt, Human
guccucuggaagaugaguucuu

SEQ ID NO: 989549 - RNA, 22 nt, Human
agucucagcaagcauggcuagu

SEQ ID NO: 989550 - RNA, 22 nt, Human
ucucuuuuauguacacccugac

SEQ ID NO: 989551 - RNA, 22 nt, Human
auaugcauaugucaaaacuuau

SEQ ID NO: 989552 - RNA, 22 nt, Human
gaaggaaaacagaucugccuga

SEQ ID NO: 989553 - RNA, 20 nt, Human
uccagcugggaacagcugau

SEQ ID NO: 989554 - RNA, 22 nt, Human
ccacaggaccagaggagaucac

SEQ ID NO: 989555 - RNA, 22 nt, Human
gaaaagggcaagagagagggca

SEQ ID NO: 989556 - RNA, 22 nt, Human
uggagcagcaucacuuugagcu

SEQ ID NO: 989557 - RNA, 21 nt, Human
uucugagcacucaucacuguc

SEQ ID NO: 989558 - RNA, 22 nt, Human
aagcugcccucauucccagugc

SEQ ID NO: 989559 - RNA, 22 nt, Human
uuuauguacauauccacaagga

SEQ ID NO: 989560 - RNA, 22 nt, Human
ggcauggcucggagucagaaca

SEQ ID NO: 989561 - RNA, 22 nt, Human
ucaagagauugaauaauaacug

SEQ ID NO: 989562 - RNA, 22 nt, Human
gggcuccaacggugagcaugga

SEQ ID NO: 989563 - RNA, 22 nt, Human
gaggcagcugaaggagugacag

SEQ ID NO: 989564 - RNA, 22 nt, Human
ccuggagcacagcccaguccca

SEQ ID NO: 989565 - RNA, 22 nt, Human
acagccauagaugcuuauguaa

SEQ ID NO: 989566 - RNA, 22 nt, Human
uggccuugggcagguggccugc

SEQ ID NO: 989567 - RNA, 20 nt, Human
ggcagagcuaugucuguugc

SEQ ID NO: 989568 - RNA, 22 nt, Human
acacugaagagcacuuucaaag

SEQ ID NO: 989569 - RNA, 21 nt, Human
uucaaagagugggcauuguca

SEQ ID NO: 989570 - RNA, 22 nt, Human
ucagccugcuccaagugcugcc

SEQ ID NO: 989571 - RNA, 22 nt, Human
cucacaggcaucucaucaggcu

SEQ ID NO: 989572 - RNA, 22 nt, Human
uggcccugcuuaugucucucuu

SEQ ID NO: 989573 - RNA, 22 nt, Human
gccugcagugagugcagaaggu

SEQ ID NO: 989574 - RNA, 22 nt, Human
cccagcagaccgcugugauggc

SEQ ID NO: 989575 - RNA, 22 nt, Human
ugggccugggucuuugcugcca

SEQ ID NO: 989576 - RNA, 22 nt, Human
agucaaagcuacaggcauuuga

SEQ ID NO: 989577 - RNA, 18 nt, Human
acagaacucaggggcacc

SEQ ID NO: 989578 - RNA, 22 nt, Human
agguaacacuacuuaguauacu

SEQ ID NO: 989579 - RNA, 18 nt, Human
gagacacaagggccugga

SEQ ID NO: 989580 - RNA, 22 nt, Human
ucccagagaaagucaaggucuu

SEQ ID NO: 989581 - RNA, 22 nt, Human
uuuaccaagcuuuaauuacaua

SEQ ID NO: 989582 - RNA, 22 nt, Human
ugagguggcuagggaggcacuc

SEQ ID NO: 989583 - RNA, 21 nt, Human
aggccucuucauggccaugau

SEQ ID NO: 989584 - RNA, 22 nt, Human
guggcuucacauggcauuuggc

SEQ ID NO: 989585 - RNA, 22 nt, Human
agggcucuguccccagaggccc

SEQ ID NO: 989586 - RNA, 22 nt, Human
ucagugucuugggcuugaaugc

SEQ ID NO: 989587 - RNA, 22 nt, Human
uagaaacauguucuguucuguu

SEQ ID NO: 989588 - RNA, 22 nt, Human
aaaugcaccuugcugugagacu

SEQ ID NO: 989589 - RNA, 22 nt, Human
ggacacagcugcagccacaccc

SEQ ID NO: 989590 - RNA, 22 nt, Human
gaaucauagaacauuaauagaa

SEQ ID NO: 989591 - RNA, 22 nt, Human
gucaggggccaugggccaagga

SEQ ID NO: 989592 - RNA, 22 nt, Human
ccugccugcagaaaguaucucc

SEQ ID NO: 989593 - RNA, 22 nt, Human
uuuuugcaccaaccuaauagaa

SEQ ID NO: 989594 - RNA, 22 nt, Human
cacagggccuugugugacugca

SEQ ID NO: 989595 - RNA, 22 nt, Human
uagcugccaaaagggugggcua

SEQ ID NO: 989596 - RNA, 22 nt, Human
acaggggauugauuggaagucu

SEQ ID NO: 989597 - RNA, 17 nt, Human
agcugccagggagugug

SEQ ID NO: 989598 - RNA, 20 nt, Human
uuggcagcuucaggguacua

SEQ ID NO: 989599 - RNA, 20 nt, Human
acagccagaggaggcagaca

SEQ ID NO: 989600 - RNA, 17 nt, Human
ucaugcccaacuauuac

SEQ ID NO: 989601 - RNA, 22 nt, Human
ggugggcacccgagacuggauc

SEQ ID NO: 989602 - RNA, 22 nt, Human
uggcagagcuggcugcggauga

SEQ ID NO: 989603 - RNA, 22 nt, Human
uagagcaguuggcagcuguauu

SEQ ID NO: 989604 - RNA, 22 nt, Human
aggugccaauuuucagugaaca

SEQ ID NO: 989605 - RNA, 22 nt, Human
agaugaagauaucugcaggggc

SEQ ID NO: 989606 - RNA, 22 nt, Human
gagccaggguuugaaacuagac

SEQ ID NO: 989607 - RNA, 22 nt, Human
agggucugacuccucuggcaag

SEQ ID NO: 989608 - RNA, 22 nt, Human
cagcucugaagaaaggugucua

SEQ ID NO: 989609 - RNA, 22 nt, Human
cccugagaugccucacccuagu

SEQ ID NO: 989610 - RNA, 22 nt, Human
uggcucagaaggcugccuucac

SEQ ID NO: 989611 - RNA, 22 nt, Human
agacccagaaagcagcugcauu

SEQ ID NO: 989612 - RNA, 22 nt, Human
ugggcuguccagcaccugggcu

SEQ ID NO: 989613 - RNA, 22 nt, Human
ccacuugugaaauaaucaaaua

SEQ ID NO: 989614 - RNA, 22 nt, Human
gggcugcacagaucuucaaggg

SEQ ID NO: 989615 - RNA, 22 nt, Human
ugcauuguuugauaggugaauu

SEQ ID NO: 989616 - RNA, 22 nt, Human
acaaauguggacauggauaaug

SEQ ID NO: 989617 - RNA, 22 nt, Human
cuggccacaacuagcccaggac

SEQ ID NO: 989618 - RNA, 22 nt, Human
aggccaaagcacagagcuggaa

SEQ ID NO: 989619 - RNA, 22 nt, Human
cuggcaggagcauucacagagg

SEQ ID NO: 989620 - RNA, 22 nt, Human
agggcugcaccggggcuucgcg

SEQ ID NO: 989621 - RNA, 22 nt, Human
ucagaggugguaaaggacagca

SEQ ID NO: 989622 - RNA, 22 nt, Human
aggagcuggguuccuuuggugg

SEQ ID NO: 989623 - RNA, 22 nt, Human
gaggagggagcuggaagcucuu

SEQ ID NO: 989624 - RNA, 22 nt, Human
ggcagggaggaggugaaaguga

SEQ ID NO: 989625 - RNA, 17 nt, Human
ucaggcugugccuggua

SEQ ID NO: 989626 - RNA, 22 nt, Human
gguggccugcccugaucccugg

SEQ ID NO: 989627 - RNA, 22 nt, Human
ccaggcuggagugcaauggugc

SEQ ID NO: 989628 - RNA, 22 nt, Human
auggaagguccuacagagcgca

SEQ ID NO: 989629 - RNA, 22 nt, Human
augaagucugcacaugcaugug

SEQ ID NO: 989630 - RNA, 22 nt, Human
gagaugaauguaaacaaaggca

SEQ ID NO: 989631 - RNA, 22 nt, Human
guggugcauccuugaguaagcu

SEQ ID NO: 989632 - RNA, 22 nt, Human
ucugccaccuucauccuccacu

SEQ ID NO: 989633 - RNA, 22 nt, Human
ccaggccuggccaggggaugcc

SEQ ID NO: 989634 - RNA, 22 nt, Human
aaauguguuuagaugguuuauu

SEQ ID NO: 989635 - RNA, 22 nt, Human
uuugcauugcauuaaguauucu

SEQ ID NO: 989636 - RNA, 22 nt, Human
guggagcccugccuugcucaug

SEQ ID NO: 989637 - RNA, 22 nt, Human
accccagaggcggaggcugcag

SEQ ID NO: 989638 - RNA, 22 nt, Human
acaggcucucagccaguuggca

SEQ ID NO: 989639 - RNA, 22 nt, Human
gguggcuggaggagcugaugga

SEQ ID NO: 989640 - RNA, 22 nt, Human
uaagccugguucauaauuugcu

SEQ ID NO: 989641 - RNA, 22 nt, Human
caaagcaaggcucaguuugaac

SEQ ID NO: 989642 - RNA, 22 nt, Human
cacaugggcguaauguccaugg

SEQ ID NO: 989643 - RNA, 22 nt, Human
ucucagagcaucauuuucuuag

SEQ ID NO: 989644 - RNA, 22 nt, Human
acauuucucuugaugucucuau

SEQ ID NO: 989645 - RNA, 22 nt, Human
gccuggcaggccucaugagggg

SEQ ID NO: 989646 - RNA, 21 nt, Human
gagugucuaauccaggcuguc

SEQ ID NO: 989647 - RNA, 22 nt, Human
cugaagaggacgcagcagcaag

SEQ ID NO: 989648 - RNA, 22 nt, Human
aaggcugcuuuuaacaugcaua

SEQ ID NO: 989649 - RNA, 22 nt, Human
uuccuguccgcaauggccuggg

SEQ ID NO: 989650 - RNA, 20 nt, Human
ccucaagcagacugacagcu

SEQ ID NO: 989651 - RNA, 22 nt, Human
ucaggaucaggggccuuuccuu

SEQ ID NO: 989652 - RNA, 22 nt, Human
uggcucagagagggagugugga

SEQ ID NO: 989653 - RNA, 22 nt, Human
gcugagagugagcacuggauau

SEQ ID NO: 989654 - RNA, 19 nt, Human
uagcagcugccaaaggaga

SEQ ID NO: 989655 - RNA, 22 nt, Human
ccucuggucccagcucugcugc

SEQ ID NO: 989656 - RNA, 22 nt, Human
auuugucuuuggaccugugaga

SEQ ID NO: 989657 - RNA, 22 nt, Human
cagaggccaccuguggccacug

SEQ ID NO: 989658 - RNA, 22 nt, Human
gggacagacccaugggccaggu

SEQ ID NO: 989659 - RNA, 22 nt, Human
gccagggcucgcggucccucgu

SEQ ID NO: 989660 - RNA, 22 nt, Human
gcagcuggaagugacacucugu

SEQ ID NO: 989661 - RNA, 22 nt, Human
uacaguaaccuuauuugucauu

SEQ ID NO: 989662 - RNA, 22 nt, Human
uccaaagaagucacaaacgaag

SEQ ID NO: 989663 - RNA, 22 nt, Human
gcagccacccucaaggcugaau

SEQ ID NO: 989664 - RNA, 22 nt, Human
augauggugagguugagcacag

SEQ ID NO: 989665 - RNA, 22 nt, Human
auaccuuuuagacauguaguug

SEQ ID NO: 989666 - RNA, 22 nt, Human
ggagaguggauuccagcuguau

SEQ ID NO: 989667 - RNA, 22 nt, Human
uuauguacaauguuaauguaaa

SEQ ID NO: 989668 - RNA, 21 nt, Human
uccauaagagaccaucuccua

SEQ ID NO: 989669 - RNA, 22 nt, Human
agcugguucagaaauuagaugg

SEQ ID NO: 989670 - RNA, 22 nt, Human
cugcccuggcagccuaccaugg

SEQ ID NO: 989671 - RNA, 22 nt, Human
gcugccacuuggucaugucaug

SEQ ID NO: 989672 - RNA, 22 nt, Human
uggugcuguggaggggcagaag

SEQ ID NO: 989673 - RNA, 20 nt, Human
uugcagcagugaggugaagg

SEQ ID NO: 989674 - RNA, 22 nt, Human
ugaugauguuuaucuugguauu

SEQ ID NO: 989675 - RNA, 22 nt, Human
ggggauggugggaaggcaaucu

SEQ ID NO: 989676 - RNA, 22 nt, Human
cagccaucccagccugugguuc

SEQ ID NO: 989677 - RNA, 22 nt, Human
uguacaaugccagggaacacca

SEQ ID NO: 989678 - RNA, 22 nt, Human
cucuggagguugagcccagcaa

SEQ ID NO: 989679 - RNA, 22 nt, Human
gacagagugcagggcuagaaga

SEQ ID NO: 989680 - RNA, 22 nt, Human
cccagagcuccgguccugccca

SEQ ID NO: 989681 - RNA, 22 nt, Human
aauuuagauugauaaacaugga

SEQ ID NO: 989682 - RNA, 22 nt, Human
gcuguggccaacaaaccacuuu

SEQ ID NO: 989683 - RNA, 22 nt, Human
cccuggaggaaaaucugaggcu

SEQ ID NO: 989684 - RNA, 22 nt, Human
cacauuucucuaccucacacaa

SEQ ID NO: 989685 - RNA, 22 nt, Human
aaguaugcuaauuaacuagcac

SEQ ID NO: 989686 - RNA, 22 nt, Human
gcagagugagccgaggcugcuc

SEQ ID NO: 989687 - RNA, 18 nt, Human
ucagcuggggcugcagcc

SEQ ID NO: 989688 - RNA, 22 nt, Human
gcagugaaacaauaggaucaaa

SEQ ID NO: 989689 - RNA, 22 nt, Human
aagacuuucucccaaauccuca

SEQ ID NO: 989690 - RNA, 22 nt, Human
ggcagcucugugucugggaagc

SEQ ID NO: 989691 - RNA, 21 nt, Human
ccagccucagaucagggagcu

SEQ ID NO: 989692 - RNA, 22 nt, Human
aagggcugccagggggugccag

SEQ ID NO: 989693 - RNA, 22 nt, Human
ccagggcaacgcugucucagag

SEQ ID NO: 989694 - RNA, 22 nt, Human
ccagucccaucucugucgcuua

SEQ ID NO: 989695 - RNA, 22 nt, Human
cagggcugugcccaucuucccc

SEQ ID NO: 989696 - RNA, 22 nt, Human
uggcccugcagaacuagccugg

SEQ ID NO: 989697 - RNA, 22 nt, Human
aggcagccagauggcagccugc

SEQ ID NO: 989698 - RNA, 22 nt, Human
cucucugggcccaguuggcacc

SEQ ID NO: 989699 - RNA, 22 nt, Human
auguaacaggugaagcucugag

SEQ ID NO: 989700 - RNA, 22 nt, Human
agcagcauagaagcugggagga

SEQ ID NO: 989701 - RNA, 22 nt, Human
cucuuaguuuaucuuugacaaa

SEQ ID NO: 989702 - RNA, 22 nt, Human
ugagaguauuuuggcauuauca

SEQ ID NO: 989703 - RNA, 22 nt, Human
auuuauuaugggauuuggcuca

SEQ ID NO: 989704 - RNA, 22 nt, Human
gccagggaacccaagggccuca

SEQ ID NO: 989705 - RNA, 22 nt, Human
caggggccaggcugucugcugu

SEQ ID NO: 989706 - RNA, 22 nt, Human
uuuauaagaagcaaugucugag

SEQ ID NO: 989707 - RNA, 22 nt, Human
gugccagggggcacugaacaga

SEQ ID NO: 989708 - RNA, 22 nt, Human
ggcagaagaaaggcuaagucuc

SEQ ID NO: 989709 - RNA, 17 nt, Human
acagagguuauacagac

SEQ ID NO: 989710 - RNA, 22 nt, Human
cugccagcucucuggaggcucu

SEQ ID NO: 989711 - RNA, 22 nt, Human
caggguggaaaagcuaguugga

SEQ ID NO: 989712 - RNA, 22 nt, Human
aaagacuagcauuuauauguac

SEQ ID NO: 989713 - RNA, 22 nt, Human
cuggagccccaggcugugcaga

SEQ ID NO: 989714 - RNA, 22 nt, Human
uaugcacgucuauuuaugaaga

SEQ ID NO: 989715 - RNA, 22 nt, Human
ggccucugguucacagggagga

SEQ ID NO: 989716 - RNA, 22 nt, Human
cucucugcuguauccuuaggcu

SEQ ID NO: 989717 - RNA, 22 nt, Human
aagauuucuuacuuauugaugc

SEQ ID NO: 989718 - RNA, 19 nt, Human
cuggcucuuggguggagga

SEQ ID NO: 989719 - RNA, 18 nt, Human
cucugcuaaugggcagcu

SEQ ID NO: 989720 - RNA, 22 nt, Human
uaaggcagaaauaugagcaggg

SEQ ID NO: 989721 - RNA, 22 nt, Human
gagaggccauggcugugcagug

SEQ ID NO: 989722 - RNA, 22 nt, Human
uuguauuagcuguaaauuuucu

SEQ ID NO: 989723 - RNA, 22 nt, Human
aaguuuaagguggaaguggugg

SEQ ID NO: 989724 - RNA, 22 nt, Human
uccagggacacagaguccuucu

SEQ ID NO: 989725 - RNA, 22 nt, Human
ugcucccaggcucuguggucug

SEQ ID NO: 989726 - RNA, 22 nt, Human
ucugcagauuuaucagcagcug

SEQ ID NO: 989727 - RNA, 21 nt, Human
ggccucugccuugccccacuc

SEQ ID NO: 989728 - RNA, 22 nt, Human
aagcaauauacugauaugauua

SEQ ID NO: 989729 - RNA, 22 nt, Human
cacugggcaauucugagccuaa

SEQ ID NO: 989730 - RNA, 19 nt, Human
cagcaauaaugccagaugg

SEQ ID NO: 989731 - RNA, 22 nt, Human
gcuucucucucagacugcaagc

SEQ ID NO: 989732 - RNA, 22 nt, Human
acuggagcccguggaggcgcag

SEQ ID NO: 989733 - RNA, 22 nt, Human
ggcagagcugcaugagcacuca

SEQ ID NO: 989734 - RNA, 22 nt, Human
ggcagugaaugaaacagaggcu

SEQ ID NO: 989735 - RNA, 22 nt, Human
uccugccucuccaugcuaacua

SEQ ID NO: 989736 - RNA, 22 nt, Human
uguuccuguguggaaaagggcc

SEQ ID NO: 989737 - RNA, 22 nt, Human
gcugccaauccagcugugggag

SEQ ID NO: 989738 - RNA, 19 nt, Human
gcauaaaaugucaaugugu

SEQ ID NO: 989739 - RNA, 22 nt, Human
ccuggcagacagcacugaagcu

SEQ ID NO: 989740 - RNA, 22 nt, Human
uacaugcucaguaacuuucagu

SEQ ID NO: 989741 - RNA, 22 nt, Human
uaaguucauuagacuacagaua

SEQ ID NO: 989742 - RNA, 22 nt, Human
ugcguugcgcuccugcagcagg

SEQ ID NO: 989743 - RNA, 22 nt, Human
uggcucagugacauuccuccca

SEQ ID NO: 989744 - RNA, 22 nt, Human
ucaccaggcuggaaugcagugg

SEQ ID NO: 989745 - RNA, 22 nt, Human
acagaauuaucaggaaauguua

SEQ ID NO: 989746 - RNA, 22 nt, Human
ggugccaggcuguagucagggu

SEQ ID NO: 989747 - RNA, 22 nt, Human
caguacuuauuucuauuuaggg

SEQ ID NO: 989748 - RNA, 19 nt, Human
acagagcucucugcuucug

SEQ ID NO: 989749 - RNA, 22 nt, Human
aagcagaaguugaucuaccaua

SEQ ID NO: 989750 - RNA, 22 nt, Human
gggagccaaggagagaggccuu

SEQ ID NO: 989751 - RNA, 23 nt, Human
gccuggagaaaagcugcaguuca

SEQ ID NO: 989752 - RNA, 22 nt, Human
ucauugcaagcucauuuaucug

SEQ ID NO: 989753 - RNA, 22 nt, Human
gggcugcuuuuaagggucucag

SEQ ID NO: 989754 - RNA, 22 nt, Human
gccugagaaggauaggaagcga

SEQ ID NO: 989755 - RNA, 18 nt, Human
aguggucuguuauaucau

SEQ ID NO: 989756 - RNA, 22 nt, Human
ucugcagcuugcacaggcaggc

SEQ ID NO: 989757 - RNA, 22 nt, Human
gaguuauuucagaaggaaagau

SEQ ID NO: 989758 - RNA, 18 nt, Human
ccuggcuuccaucuuggu

SEQ ID NO: 989759 - RNA, 22 nt, Human
aggaaucccgcaccagcugcug

SEQ ID NO: 989760 - RNA, 22 nt, Human
aaaguucagugccuucuauaca

SEQ ID NO: 989761 - RNA, 22 nt, Human
cccuggagcuagucugagcaga

SEQ ID NO: 989762 - RNA, 22 nt, Human
gcuggcagucccaucagcuggg

SEQ ID NO: 989763 - RNA, 22 nt, Human
ucauaacagcuaagucccuuuc

SEQ ID NO: 989764 - RNA, 22 nt, Human
ucaguuuuucuauacuuuguag

SEQ ID NO: 989765 - RNA, 20 nt, Human
cccugagacaaaggaggggc

SEQ ID NO: 989766 - RNA, 22 nt, Human
ucccuggcagcuaagggugguc

SEQ ID NO: 989767 - RNA, 19 nt, Human
ccugcagggaugagagguu

SEQ ID NO: 989768 - RNA, 22 nt, Human
ucagggacuaggugcugccuga

SEQ ID NO: 989769 - RNA, 22 nt, Human
uuucacaaucaaauggugaaau

SEQ ID NO: 989770 - RNA, 22 nt, Human
uaguccaguaaaacagcuaacg

SEQ ID NO: 989771 - RNA, 22 nt, Human
acacaugcauaagccuucccuu

SEQ ID NO: 989772 - RNA, 22 nt, Human
uucaccuugaauaugucuuaaa

SEQ ID NO: 989773 - RNA, 22 nt, Human
ucccagccugacagugcaucaa

SEQ ID NO: 989774 - RNA, 22 nt, Human
cuaaaugccuuuccuaccuaac

SEQ ID NO: 989775 - RNA, 22 nt, Human
acagagccuccaggagugcugg

SEQ ID NO: 989776 - RNA, 22 nt, Human
guugggaaggcaagaaguagaa

SEQ ID NO: 989777 - RNA, 22 nt, Human
agccauuggcugccuggugcgu

SEQ ID NO: 989778 - RNA, 22 nt, Human
uguaacaguaagccugugagcu

SEQ ID NO: 989779 - RNA, 22 nt, Human
ugaugggaaaaugaggccuggg

SEQ ID NO: 989780 - RNA, 19 nt, Human
ucaaaugccaaugucacag

SEQ ID NO: 989781 - RNA, 22 nt, Human
ucuggcucggauuugucuagca

SEQ ID NO: 989782 - RNA, 18 nt, Human
ccugagcccugcuuacuu

SEQ ID NO: 989783 - RNA, 22 nt, Human
cagcuuuuuagaaucuagggca

SEQ ID NO: 989784 - RNA, 22 nt, Human
cugugggcugaaagugcucccg

SEQ ID NO: 989785 - RNA, 22 nt, Human
cagggcaguaccgcccucuggc

SEQ ID NO: 989786 - RNA, 22 nt, Human
ccucugagagaaggccuucagc

SEQ ID NO: 989787 - RNA, 22 nt, Human
aacagaaaagguagguggcuuu

SEQ ID NO: 989788 - RNA, 22 nt, Human
gccuggagugcaguggcgugau

SEQ ID NO: 989789 - RNA, 19 nt, Human
gccucugcuggggacaggc

SEQ ID NO: 989790 - RNA, 22 nt, Human
ucuucaaacugaaaauuuagaa

SEQ ID NO: 989791 - RNA, 22 nt, Human
uaaaucucacuggguauauugg

SEQ ID NO: 989792 - RNA, 22 nt, Human
acucugcucaaaguccugaggc

SEQ ID NO: 989793 - RNA, 22 nt, Human
uagggaggcuacuucuuguagg

SEQ ID NO: 989794 - RNA, 21 nt, Human
gagugcaggucugaugccauc

SEQ ID NO: 989795 - RNA, 22 nt, Human
gcagcagaugcuuucauggaca

SEQ ID NO: 989796 - RNA, 22 nt, Human
uuccagggcuaauuccugugga

SEQ ID NO: 989797 - RNA, 22 nt, Human
uuccagaaaucuuucagcucaa

SEQ ID NO: 989798 - RNA, 22 nt, Human
gccuggagcucaugugggcauu

SEQ ID NO: 989799 - RNA, 22 nt, Human
gccugggugucgaucacuagug

SEQ ID NO: 989800 - RNA, 22 nt, Human
gucugagcgcuggagcuugugu

SEQ ID NO: 989801 - RNA, 22 nt, Human
cacaguggcagguguggguugu

SEQ ID NO: 989802 - RNA, 22 nt, Human
uaaaaguaggaaugaaacgcau

SEQ ID NO: 989803 - RNA, 22 nt, Human
uuaggaaauuaugguuucagau

SEQ ID NO: 989804 - RNA, 22 nt, Human
cucccaggcacagggaggagcc

SEQ ID NO: 989805 - RNA, 19 nt, Human
auuagcaugcuugaggaug

SEQ ID NO: 989806 - RNA, 22 nt, Human
caggcuggagugaguguagugg

SEQ ID NO: 989807 - RNA, 20 nt, Human
aggagaaauucgggacaccu

SEQ ID NO: 989808 - RNA, 22 nt, Human
uuuuuccuaagcaguggagcug

SEQ ID NO: 989809 - RNA, 23 nt, Human
ccuggcagcaaacgaggagguua

SEQ ID NO: 989810 - RNA, 22 nt, Human
agguggcuccucccauggcugg

SEQ ID NO: 989811 - RNA, 22 nt, Human
gcaaaacagucgaugccuccca

SEQ ID NO: 989812 - RNA, 22 nt, Human
uuugcauuaguuuagauuucaa

SEQ ID NO: 989813 - RNA, 22 nt, Human
cagagcagucuggagauccagc

SEQ ID NO: 989814 - RNA, 22 nt, Human
ugcugggcuagaagcugaggcc

SEQ ID NO: 989815 - RNA, 22 nt, Human
agcaggcuuguuaugucugaga

SEQ ID NO: 989816 - RNA, 22 nt, Human
cuggggcucucuggaaugcuug

SEQ ID NO: 989817 - RNA, 20 nt, Human
cucugcugcccgccggcugc

SEQ ID NO: 989818 - RNA, 20 nt, Human
acugagcugcauggagagga

SEQ ID NO: 989819 - RNA, 21 nt, Human
uggcagacuagaguauagaug

SEQ ID NO: 989820 - RNA, 22 nt, Human
gccaggcuggccagcaccuucu

SEQ ID NO: 989821 - RNA, 22 nt, Human
cuucaagauccauagauauugc

SEQ ID NO: 989822 - RNA, 22 nt, Human
agaacuguccuuggaggagagu

SEQ ID NO: 989823 - RNA, 22 nt, Human
uaagaacagugacagccaacau

SEQ ID NO: 989824 - RNA, 23 nt, Human
aacugagauaauguauguaaagc

SEQ ID NO: 989825 - RNA, 22 nt, Human
aagcagugcgcucaucuaaggg

SEQ ID NO: 989826 - RNA, 22 nt, Human
ugccugcuaggcccugcugggu

SEQ ID NO: 989827 - RNA, 22 nt, Human
cacaccuguaauaccagcuacu

SEQ ID NO: 989828 - RNA, 22 nt, Human
ucauugcauuuauucacuggca

SEQ ID NO: 989829 - RNA, 22 nt, Human
uuugcauuuuagauuuaggccu

SEQ ID NO: 989830 - RNA, 22 nt, Human
ggugggugagcccugggagcug

SEQ ID NO: 989831 - RNA, 22 nt, Human
ucccagccuuccagucugguuu

SEQ ID NO: 989832 - RNA, 22 nt, Human
caguacuuguccucagguguua

SEQ ID NO: 989833 - RNA, 22 nt, Human
ggguggggcccaggaaaucuau

SEQ ID NO: 989834 - RNA, 22 nt, Human
aggcaugugacccuggacucag

SEQ ID NO: 989835 - RNA, 22 nt, Human
caguccuggggaccaggcugag

SEQ ID NO: 989836 - RNA, 22 nt, Human
uggcucaguggcagccgcagcu

SEQ ID NO: 989837 - RNA, 20 nt, Human
caggaggcaaggucaagguc

SEQ ID NO: 989838 - RNA, 22 nt, Human
uggaggagggcuggugucugua

SEQ ID NO: 989839 - RNA, 22 nt, Human
uaucuuugcaaauaucucuaag

SEQ ID NO: 989840 - RNA, 22 nt, Human
ucuggcugcugcgugagugcuu

SEQ ID NO: 989841 - RNA, 22 nt, Human
accugggagucacaccugagaa

SEQ ID NO: 989842 - RNA, 22 nt, Human
gcaaaaaaugcuuguugcuuag

SEQ ID NO: 989843 - RNA, 19 nt, Human
augagcuggcauuucaggu

SEQ ID NO: 989844 - RNA, 23 nt, Human
ugucuggcucauggugggucuca

SEQ ID NO: 989845 - RNA, 22 nt, Human
cuucucucccuggcacucagac

SEQ ID NO: 989846 - RNA, 22 nt, Human
uuuaauguucaucucaaaggau

SEQ ID NO: 989847 - RNA, 22 nt, Human
auugaaagaguuuucugcugca

SEQ ID NO: 989848 - RNA, 22 nt, Human
ugugucccuuggaaccucagcu

SEQ ID NO: 989849 - RNA, 22 nt, Human
ucuggaaguuagaggaggaaag

SEQ ID NO: 989850 - RNA, 22 nt, Human
ugguccuggggaucugcaguga

SEQ ID NO: 989851 - RNA, 18 nt, Human
auccuugaugagaggucu

SEQ ID NO: 989852 - RNA, 22 nt, Human
cacacaggaugaagcagcagaa

SEQ ID NO: 989853 - RNA, 22 nt, Human
cugggcaguuuuacaucauugc

SEQ ID NO: 989854 - RNA, 22 nt, Human
gcucccuccaugaggcagaccg

SEQ ID NO: 989855 - RNA, 22 nt, Human
ucccagagccucugccacucug

SEQ ID NO: 989856 - RNA, 22 nt, Human
ucuugcuaaagaccaacacauu

SEQ ID NO: 989857 - RNA, 20 nt, Human
aagagcugacucacaguggu

SEQ ID NO: 989858 - RNA, 22 nt, Human
cauuauguucaguagcuuaaaa

SEQ ID NO: 989859 - RNA, 22 nt, Human
gccugguggacacugggcauca

SEQ ID NO: 989860 - RNA, 18 nt, Human
acccucuggcuucugagc

SEQ ID NO: 989861 - RNA, 22 nt, Human
cccaugccuucugacucacagg

SEQ ID NO: 989862 - RNA, 19 nt, Human
cagagcugcuggccucguc

SEQ ID NO: 989863 - RNA, 22 nt, Human
auauuaggcaaggagauuauuu

SEQ ID NO: 989864 - RNA, 22 nt, Human
cucuccuccaacagcccugccg

SEQ ID NO: 989865 - RNA, 22 nt, Human
aagagcuggucacagguccauu

SEQ ID NO: 989866 - RNA, 22 nt, Human
uuggagcccugaggaucuggau

SEQ ID NO: 989867 - RNA, 22 nt, Human
uucaaacaguguagaauauaug

SEQ ID NO: 989868 - RNA, 22 nt, Human
uggcagggugggcuucagcccc

SEQ ID NO: 989869 - RNA, 22 nt, Human
uggcucaggccuacgacgccuu

SEQ ID NO: 989870 - RNA, 22 nt, Human
guucaaagcuccugguacagua

SEQ ID NO: 989871 - RNA, 22 nt, Human
caagggccuccaccuugcucgu

SEQ ID NO: 989872 - RNA, 22 nt, Human
gcagcugccgugagcucacgcc

SEQ ID NO: 989873 - RNA, 19 nt, Human
gcuggcagauguggccgug

SEQ ID NO: 989874 - RNA, 22 nt, Human
cugggaguguucuaggucacau

SEQ ID NO: 989875 - RNA, 20 nt, Human
aagggcagagggaacagacu

SEQ ID NO: 989876 - RNA, 22 nt, Human
uaggauaugguagaaaucauuc

SEQ ID NO: 989877 - RNA, 22 nt, Human
auccuugaacuuagacacuagg

SEQ ID NO: 989878 - RNA, 22 nt, Human
uuuccucuccggggccuccagg

SEQ ID NO: 989879 - RNA, 22 nt, Human
ugugacaugugucaucuuuucu

SEQ ID NO: 989880 - RNA, 22 nt, Human
ggcuucugagugcucugcuguu

SEQ ID NO: 989881 - RNA, 22 nt, Human
cauacuuuugcccugacauucu

SEQ ID NO: 989882 - RNA, 22 nt, Human
agcuuuauauuuaaugaauucu

SEQ ID NO: 989883 - RNA, 22 nt, Human
gaggccugaaaggggaccuaug

SEQ ID NO: 989884 - RNA, 22 nt, Human
aucagugcuaaagcaaaugccc

SEQ ID NO: 989885 - RNA, 22 nt, Human
ggcugcagcggauuggggauug

SEQ ID NO: 989886 - RNA, 22 nt, Human
cucaaggaaagucuggagaaga

SEQ ID NO: 989887 - RNA, 22 nt, Human
uuccauaaucaccuuauucuuu

SEQ ID NO: 989888 - RNA, 22 nt, Human
ccaggcuggauuuugcaguuca

SEQ ID NO: 989889 - RNA, 22 nt, Human
uccagggccaagucauggaacc

SEQ ID NO: 989890 - RNA, 19 nt, Human
agccuggagggcuggucac

SEQ ID NO: 989891 - RNA, 22 nt, Human
cucuggaaaaccacuagcagga

SEQ ID NO: 989892 - RNA, 22 nt, Human
uggcagucggacuucuaucuca

SEQ ID NO: 989893 - RNA, 22 nt, Human
gcguggugcugcccugcacaca

SEQ ID NO: 989894 - RNA, 22 nt, Human
gugcagugaaaaaagaaugucc

SEQ ID NO: 989895 - RNA, 22 nt, Human
gacacagcacuguacaaggaau

SEQ ID NO: 989896 - RNA, 22 nt, Human
gggccacauugaagggugggua

SEQ ID NO: 989897 - RNA, 19 nt, Human
gccugccuggguuucugag

SEQ ID NO: 989898 - RNA, 22 nt, Human
agcaggguauguuagagcugua

SEQ ID NO: 989899 - RNA, 22 nt, Human
uuaagaauggaaugaggaauuu

SEQ ID NO: 989900 - RNA, 22 nt, Human
gcccaggcuggagugcaguagc

SEQ ID NO: 989901 - RNA, 23 nt, Human
acucacaaagcaggaucauguug

SEQ ID NO: 989902 - RNA, 19 nt, Human
gagaggccugugcuugaag

SEQ ID NO: 989903 - RNA, 19 nt, Human
ugcagaagacacaguggug

SEQ ID NO: 989904 - RNA, 22 nt, Human
cucaggacccgguccagguggg

SEQ ID NO: 989905 - RNA, 22 nt, Human
ccugucuguccucucaugagcc

SEQ ID NO: 989906 - RNA, 20 nt, Human
agucccuuuggucagguauu

SEQ ID NO: 989907 - RNA, 18 nt, Human
gagguccugcucuagccc

SEQ ID NO: 989908 - RNA, 22 nt, Human
uggagggaacaaaggaguccca

SEQ ID NO: 989909 - RNA, 22 nt, Human
ugcuguagcccugcacagugca

SEQ ID NO: 989910 - RNA, 22 nt, Human
guggcagcaaaauccugcauuc

SEQ ID NO: 989911 - RNA, 22 nt, Human
ugugucagaaggcaauggggau

SEQ ID NO: 989912 - RNA, 22 nt, Human
gaaacccaaacuaagacaguag

SEQ ID NO: 989913 - RNA, 22 nt, Human
cugaagcacagcauauaaauaa

SEQ ID NO: 989914 - RNA, 22 nt, Human
cuggcagcauggagccugugcu

SEQ ID NO: 989915 - RNA, 22 nt, Human
agccccuuccaguucucagauc

SEQ ID NO: 989916 - RNA, 22 nt, Human
guuauguaucuugauugggugg

SEQ ID NO: 989917 - RNA, 22 nt, Human
aaaugugcuugugaucagcugu

SEQ ID NO: 989918 - RNA, 22 nt, Human
guugggaagcagauggaugagc

SEQ ID NO: 989919 - RNA, 22 nt, Human
cagcuggccugaucccuguggc

SEQ ID NO: 989920 - RNA, 22 nt, Human
uaacagaauagcagaaacagaa

SEQ ID NO: 989921 - RNA, 22 nt, Human
acuggcagcuguaggaugcaug

SEQ ID NO: 989922 - RNA, 22 nt, Human
cugucagcacucuacuacagau

SEQ ID NO: 989923 - RNA, 19 nt, Human
uuuggcacucugaaguguu

SEQ ID NO: 989924 - RNA, 22 nt, Human
agcugccacugagggugcacag

SEQ ID NO: 989925 - RNA, 22 nt, Human
caaaaguaauugcgguuuuugc

SEQ ID NO: 989926 - RNA, 21 nt, Human
aacauuucugggagaacucac

SEQ ID NO: 989927 - RNA, 22 nt, Human
acacuucuauucccugcacaaa

SEQ ID NO: 989928 - RNA, 19 nt, Human
ucauaaaaaugguaaccca

SEQ ID NO: 989929 - RNA, 22 nt, Human
gcauuuauuucuuuacugcauc

SEQ ID NO: 989930 - RNA, 22 nt, Human
cugugcugauucagcacaggcc

SEQ ID NO: 989931 - RNA, 22 nt, Human
ucucccaggcugcccuguggac

SEQ ID NO: 989932 - RNA, 22 nt, Human
uuccauaauuaaguggagagaa

SEQ ID NO: 989933 - RNA, 22 nt, Human
cagccaggccuggugaccaaag

SEQ ID NO: 989934 - RNA, 22 nt, Human
cugcagugcaagcccagaugga

SEQ ID NO: 989935 - RNA, 22 nt, Human
cgggcagaucacacagggcuug

SEQ ID NO: 989936 - RNA, 22 nt, Human
caucugccuaaguggcccuguu

SEQ ID NO: 989937 - RNA, 22 nt, Human
gggggcuggaauauccaucaac

SEQ ID NO: 989938 - RNA, 22 nt, Human
cuggccugagaaugcuacccuu

SEQ ID NO: 989939 - RNA, 22 nt, Human
uacuuacagagcuuauaaguua

SEQ ID NO: 989940 - RNA, 22 nt, Human
accaucagagcacaguccgugc

SEQ ID NO: 989941 - RNA, 22 nt, Human
ugcaccauuuugucaggcuacu

SEQ ID NO: 989942 - RNA, 22 nt, Human
uguuggcauuagaggguuauug

SEQ ID NO: 989943 - RNA, 22 nt, Human
aagucauuaucucuucuaaucu

SEQ ID NO: 989944 - RNA, 22 nt, Human
ucucuucuagcuucuugugguu

SEQ ID NO: 989945 - RNA, 22 nt, Human
cacugcaguaacucuaggacug

SEQ ID NO: 989946 - RNA, 22 nt, Human
acacauaagaaacuacaaagag

SEQ ID NO: 989947 - RNA, 22 nt, Human
agucucagaaaagaagcaugga

SEQ ID NO: 989948 - RNA, 22 nt, Human
gaggagagagggacugucugca

SEQ ID NO: 989949 - RNA, 21 nt, Human
agcugccacccuagcuucuga

SEQ ID NO: 989950 - RNA, 22 nt, Human
agcagcugagaugguaagauuc

SEQ ID NO: 989951 - RNA, 22 nt, Human
gagcagaacuacucacauaucg

SEQ ID NO: 989952 - RNA, 22 nt, Human
ucaggacagccagggugcagac

SEQ ID NO: 989953 - RNA, 22 nt, Human
guguacauagaauugugcuuug

SEQ ID NO: 989954 - RNA, 22 nt, Human
aaauauguaagauuagcacuag

SEQ ID NO: 989955 - RNA, 22 nt, Human
uggugugggcguggcaggcaag

SEQ ID NO: 989956 - RNA, 22 nt, Human
uugcauguuauuuaaucuguau

SEQ ID NO: 989957 - RNA, 22 nt, Human
agggaaggaaaagcugucgcuu

SEQ ID NO: 989958 - RNA, 22 nt, Human
ucugccuggaugauggcagggc

SEQ ID NO: 989959 - RNA, 22 nt, Human
ucugagaguacgggcugcgcgc

SEQ ID NO: 989960 - RNA, 22 nt, Human
acagggucaagggugcuacaag

SEQ ID NO: 989961 - RNA, 22 nt, Human
gcucagagauguucaguagcuu

SEQ ID NO: 989962 - RNA, 22 nt, Human
cuauuagguaugugguugcuau

SEQ ID NO: 989963 - RNA, 22 nt, Human
ugggcagagaucuggaucaaac

SEQ ID NO: 989964 - RNA, 22 nt, Human
aaggcacugcuuugcugcgccc

SEQ ID NO: 989965 - RNA, 22 nt, Human
ccucaggguggcaucagaucuu

SEQ ID NO: 989966 - RNA, 22 nt, Human
acugaaggaaagccuuugcaug

SEQ ID NO: 989967 - RNA, 22 nt, Human
agauguguuucuaguuccugca

SEQ ID NO: 989968 - RNA, 22 nt, Human
uacaaagugugcccaugcugag

SEQ ID NO: 989969 - RNA, 22 nt, Human
uggaggagaauuuauggucgaa

SEQ ID NO: 989970 - RNA, 22 nt, Human
cagggcagccaggccccguggg

SEQ ID NO: 989971 - RNA, 22 nt, Human
agacagcaugauacaugaugcu

SEQ ID NO: 989972 - RNA, 22 nt, Human
guugaaaugagggauuaaucag

SEQ ID NO: 989973 - RNA, 22 nt, Human
ggcagcuggccuccucgcccac

SEQ ID NO: 989974 - RNA, 22 nt, Human
ugggaggacuugugggcuucau

SEQ ID NO: 989975 - RNA, 22 nt, Human
gcugcucuugaggggcucacug

SEQ ID NO: 989976 - RNA, 22 nt, Human
aucuggcuuucuuaaugacuua

SEQ ID NO: 989977 - RNA, 22 nt, Human
ggagaggugaauggcugcucua

SEQ ID NO: 989978 - RNA, 22 nt, Human
gugucaugggagucagaaguga

SEQ ID NO: 989979 - RNA, 22 nt, Human
ucugcugcacaaauucaucucu

SEQ ID NO: 989980 - RNA, 19 nt, Human
aggaaagguggccuuagca

SEQ ID NO: 989981 - RNA, 22 nt, Human
gagaggcuaugagguucugugu

SEQ ID NO: 989982 - RNA, 22 nt, Human
uacaggaggauuaucaaaggau

SEQ ID NO: 989983 - RNA, 22 nt, Human
agccuggaggaggaguugagca

SEQ ID NO: 989984 - RNA, 22 nt, Human
acagccagggcauugucgccga

SEQ ID NO: 989985 - RNA, 22 nt, Human
uaccugagcccagugcagcaua

SEQ ID NO: 989986 - RNA, 22 nt, Human
ggcuccuggcaucuggugggua

SEQ ID NO: 989987 - RNA, 22 nt, Human
uggagggaacccaggcugcucu

SEQ ID NO: 989988 - RNA, 22 nt, Human
cccaggcucccaggugggacaa

SEQ ID NO: 989989 - RNA, 17 nt, Human
ggagagugggaauggcc

SEQ ID NO: 989990 - RNA, 22 nt, Human
ucugcaggaaaaaagugccugg

SEQ ID NO: 989991 - RNA, 22 nt, Human
acauuucuccuugcaggaguca

SEQ ID NO: 989992 - RNA, 22 nt, Human
cagcugaggucaaagaagcagg

SEQ ID NO: 989993 - RNA, 22 nt, Human
ggggccuguagagcuucaggga

SEQ ID NO: 989994 - RNA, 20 nt, Human
gucagaggacccuagagcga

SEQ ID NO: 989995 - RNA, 22 nt, Human
ggcuggaaguccaagaucaagg

SEQ ID NO: 989996 - RNA, 22 nt, Human
ugcugagaaucacagguuauaa

SEQ ID NO: 989997 - RNA, 22 nt, Human
gcugccaccguggagaugagug

SEQ ID NO: 989998 - RNA, 22 nt, Human
augcagguugggcaaguguggg

SEQ ID NO: 989999 - RNA, 22 nt, Human
uaaccauauuuuccauuaaguu

SEQ ID NO: 990000 - RNA, 22 nt, Human
gauccuugcaacucugugaggu

SEQ ID NO: 990001 - RNA, 21 nt, Human
acccuggguucuccauacccu

SEQ ID NO: 990002 - RNA, 22 nt, Human
gcccacagcucguuccucuccu

SEQ ID NO: 990003 - RNA, 22 nt, Human
caggcagcugcuggguucagcc

SEQ ID NO: 990004 - RNA, 22 nt, Human
agggaguguaaauggugcucag

SEQ ID NO: 990005 - RNA, 22 nt, Human
gggccaaggggagcuggaaggg

SEQ ID NO: 990006 - RNA, 22 nt, Human
cugaaggauucaaaauggcagg

SEQ ID NO: 990007 - RNA, 23 nt, Human
aagaauaaaugacauuaaaggug

SEQ ID NO: 990008 - RNA, 22 nt, Human
ggcagcucugaugaugcucugg

SEQ ID NO: 990009 - RNA, 22 nt, Human
aggccugcagcaggagcaaacc

SEQ ID NO: 990010 - RNA, 22 nt, Human
uaggccaguggcagguugugug

SEQ ID NO: 990011 - RNA, 22 nt, Human
cacuguaucuuuuccaaagucu

SEQ ID NO: 990012 - RNA, 18 nt, Human
gccugggaggaggaaaug

SEQ ID NO: 990013 - RNA, 22 nt, Human
caguacuuuucuggcuuucuac

SEQ ID NO: 990014 - RNA, 23 nt, Human
agccacuucuaucuugcuccugg

SEQ ID NO: 990015 - RNA, 22 nt, Human
gccagcaguccugcugugugcc

SEQ ID NO: 990016 - RNA, 22 nt, Human
aauuaggagaaaacuguugucu

SEQ ID NO: 990017 - RNA, 22 nt, Human
ggguccagacacuccagaggaa

SEQ ID NO: 990018 - RNA, 22 nt, Human
ugagcccaggaguuggaggcug

SEQ ID NO: 990019 - RNA, 22 nt, Human
ugggcaggaugcguugauucuu

SEQ ID NO: 990020 - RNA, 22 nt, Human
ucauugcacuccagccugggca

SEQ ID NO: 990021 - RNA, 22 nt, Human
caggccucuauggucagcugag

SEQ ID NO: 990022 - RNA, 22 nt, Human
ugucccagguccuagaugacca

SEQ ID NO: 990023 - RNA, 22 nt, Human
gcuggggcugggcugaggaaga

SEQ ID NO: 990024 - RNA, 22 nt, Human
aaugcacaugucuuggccucac

SEQ ID NO: 990025 - RNA, 22 nt, Human
ucugagagcuguagaagccuau

SEQ ID NO: 990026 - RNA, 22 nt, Human
agcugggaggugggcagugaga

SEQ ID NO: 990027 - RNA, 22 nt, Human
guucacaauggcuuuaccuaag

SEQ ID NO: 990028 - RNA, 22 nt, Human
caucugcuguuccuuggacuca

SEQ ID NO: 990029 - RNA, 19 nt, Human
gcaggcaguggcauucgga

SEQ ID NO: 990030 - RNA, 22 nt, Human
gagcacaggcuuugguggacac

SEQ ID NO: 990031 - RNA, 22 nt, Human
ugugcccauuacacagaggcau

SEQ ID NO: 990032 - RNA, 22 nt, Human
uuuccucuuuguaccuugacua

SEQ ID NO: 990033 - RNA, 22 nt, Human
aaggcacucagccuugggacag

SEQ ID NO: 990034 - RNA, 22 nt, Human
agggcagaaauauugauacugu

SEQ ID NO: 990035 - RNA, 22 nt, Human
gugugccaccagucaaggugaa

SEQ ID NO: 990036 - RNA, 22 nt, Human
uucaucaauguguuuaauaaug

SEQ ID NO: 990037 - RNA, 22 nt, Human
acacugaauguuuaagaacuug

SEQ ID NO: 990038 - RNA, 22 nt, Human
aggaagaauguuuacauaucaa

SEQ ID NO: 990039 - RNA, 22 nt, Human
acaguaaugauucugagucucu

SEQ ID NO: 990040 - RNA, 21 nt, Human
aaagagguuaauauuguaagu

SEQ ID NO: 990041 - RNA, 22 nt, Human
ugggcugcccaagguggccaug

SEQ ID NO: 990042 - RNA, 22 nt, Human
gugcuuaauacaugucaauaac

SEQ ID NO: 990043 - RNA, 22 nt, Human
aggucaaaccacagcucuaggc

SEQ ID NO: 990044 - RNA, 22 nt, Human
ugccugagugauguggcagcca

SEQ ID NO: 990045 - RNA, 22 nt, Human
uuuaauuaggaaaugggcaggg

SEQ ID NO: 990046 - RNA, 21 nt, Human
cccagggaagccgcagucacc

SEQ ID NO: 990047 - RNA, 20 nt, Human
uguauauuuucugguguaaa

SEQ ID NO: 990048 - RNA, 22 nt, Human
gcugccuguguggccacucacu

SEQ ID NO: 990049 - RNA, 22 nt, Human
gauuucaaccuaacaguaugac

SEQ ID NO: 990050 - RNA, 22 nt, Human
uagaacaugugaaaauauagcc

SEQ ID NO: 990051 - RNA, 22 nt, Human
uacagucuuuggaaagagauag

SEQ ID NO: 990052 - RNA, 22 nt, Human
aaagccuugagauccuauaguu

SEQ ID NO: 990053 - RNA, 22 nt, Human
ggcuggccucaggguccucgcu

SEQ ID NO: 990054 - RNA, 22 nt, Human
ccucuuccacugggccccaucc

SEQ ID NO: 990055 - RNA, 21 nt, Human
aaaaugugagcgugaugcuua

SEQ ID NO: 990056 - RNA, 22 nt, Human
gcuguuccugcuuagaggucgg

SEQ ID NO: 990057 - RNA, 22 nt, Human
guacaugucaaaaaaugcauaa

SEQ ID NO: 990058 - RNA, 22 nt, Human
ugcaggccucacaccuggcacc

SEQ ID NO: 990059 - RNA, 22 nt, Human
cuccuggcacugucuugaccca

SEQ ID NO: 990060 - RNA, 22 nt, Human
agggacacacuccaguguuauu

SEQ ID NO: 990061 - RNA, 22 nt, Human
guguguccaggcgggagucaag

SEQ ID NO: 990062 - RNA, 22 nt, Human
ccuuugggugaauuccucucuu

SEQ ID NO: 990063 - RNA, 22 nt, Human
cuuauguauaauguuccacaua

SEQ ID NO: 990064 - RNA, 19 nt, Human
ggcagaagguguaggggga

SEQ ID NO: 990065 - RNA, 23 nt, Human
aucaaaguggaaaucaauuaucu

SEQ ID NO: 990066 - RNA, 22 nt, Human
uaucuacaggugucagguaaga

SEQ ID NO: 990067 - RNA, 22 nt, Human
uggcugaauaaaauaugguguu

SEQ ID NO: 990068 - RNA, 22 nt, Human
cagcucccagagugaccagcag

SEQ ID NO: 990069 - RNA, 22 nt, Human
agccaggaaccagcuacagucu

SEQ ID NO: 990070 - RNA, 22 nt, Human
cuggcucaauuuguacugcugu

SEQ ID NO: 990071 - RNA, 22 nt, Human
agagccagcauuugacacuggc

SEQ ID NO: 990072 - RNA, 22 nt, Human
aaaggucaaaaucgugacauug

SEQ ID NO: 990073 - RNA, 22 nt, Human
uauccuuguacuauaguauuua

SEQ ID NO: 990074 - RNA, 22 nt, Human
ccagccugguucagaauuggcu

SEQ ID NO: 990075 - RNA, 20 nt, Human
cuucaggacccauccucccc

SEQ ID NO: 990076 - RNA, 22 nt, Human
ugaagcaguuacuggguguuaa

SEQ ID NO: 990077 - RNA, 22 nt, Human
aguccuucaagaaaucuggaaa

SEQ ID NO: 990078 - RNA, 17 nt, Human
ccucccacaccgcccug

SEQ ID NO: 990079 - RNA, 22 nt, Human
aggcccugggcaguucuguagc

SEQ ID NO: 990080 - RNA, 22 nt, Human
ugaggccaaugacccugggcag

SEQ ID NO: 990081 - RNA, 22 nt, Human
guugaaauuugugauaauuuag

SEQ ID NO: 990082 - RNA, 22 nt, Human
guuugcauggaagacagugagu

SEQ ID NO: 990083 - RNA, 19 nt, Human
ugcuagaaauucugugacu

SEQ ID NO: 990084 - RNA, 22 nt, Human
gggcugcacguauucugcucac

SEQ ID NO: 990085 - RNA, 22 nt, Human
aacuagaaccacuuguauuucc

SEQ ID NO: 990086 - RNA, 22 nt, Human
aacuucugggcuguccaaaacu

SEQ ID NO: 990087 - RNA, 22 nt, Human
auuuguaauuucuuaucugugu

SEQ ID NO: 990088 - RNA, 19 nt, Human
ugccagcauuaggcugaag

SEQ ID NO: 990089 - RNA, 22 nt, Human
gagagcccugcuccuaucccag

SEQ ID NO: 990090 - RNA, 21 nt, Human
augacagaugcugcagaucgu

SEQ ID NO: 990091 - RNA, 22 nt, Human
cacagcagaaauaugaaggcag

SEQ ID NO: 990092 - RNA, 22 nt, Human
ccuggaaggcaggcauggauug

SEQ ID NO: 990093 - RNA, 22 nt, Human
cugugcuggcagaccuggaguu

SEQ ID NO: 990094 - RNA, 22 nt, Human
ucacucugucccccauugagau

SEQ ID NO: 990095 - RNA, 22 nt, Human
ugaaggugucuuugugaacauc

SEQ ID NO: 990096 - RNA, 22 nt, Human
agccucuggcccuagacugcuu

SEQ ID NO: 990097 - RNA, 18 nt, Human
ggcugccuguuccugaag

SEQ ID NO: 990098 - RNA, 22 nt, Human
gggccuguguguucaggagccu

SEQ ID NO: 990099 - RNA, 19 nt, Human
guggccugcgcugggugcg

SEQ ID NO: 990100 - RNA, 22 nt, Human
aaggcccuaauagagcacauau

SEQ ID NO: 990101 - RNA, 22 nt, Human
uccagccaacugccuagggagc

SEQ ID NO: 990102 - RNA, 22 nt, Human
ggucugaguagagggcuggcga

SEQ ID NO: 990103 - RNA, 22 nt, Human
acucugacuggagugagagagg

SEQ ID NO: 990104 - RNA, 22 nt, Human
aauguacaaaagucagccaacu

SEQ ID NO: 990105 - RNA, 22 nt, Human
ccuggccauagggcccaggaaa

SEQ ID NO: 990106 - RNA, 22 nt, Human
ugcugaaagucccaaaucucau

SEQ ID NO: 990107 - RNA, 23 nt, Human
ggccacaaauagucuccccuggc

SEQ ID NO: 990108 - RNA, 22 nt, Human
ccuggagauuauuugguccaau

SEQ ID NO: 990109 - RNA, 22 nt, Human
gcagagccccucaagccagccu

SEQ ID NO: 990110 - RNA, 22 nt, Human
uaguuuaaaaguuagggaugau

SEQ ID NO: 990111 - RNA, 22 nt, Human
ccugccugggcucacuugccag

SEQ ID NO: 990112 - RNA, 22 nt, Human
cagacuugacggcagcugcuuu

SEQ ID NO: 990113 - RNA, 20 nt, Human
ugcuggggacauacagggug

SEQ ID NO: 990114 - RNA, 23 nt, Human
cccuggaguaaauucuuggaagg

SEQ ID NO: 990115 - RNA, 20 nt, Human
cagccuccacucacucagcu

SEQ ID NO: 990116 - RNA, 22 nt, Human
gccagguggcugagcagcugca

SEQ ID NO: 990117 - RNA, 22 nt, Human
agucccagacuccaguuuucug

SEQ ID NO: 990118 - RNA, 22 nt, Human
auuaggcagggcaugguggcuc

SEQ ID NO: 990119 - RNA, 22 nt, Human
agcuuuguauuugagcauacga

SEQ ID NO: 990120 - RNA, 22 nt, Human
auggccaagaaguauuccugac

SEQ ID NO: 990121 - RNA, 22 nt, Human
gcagguggauuaucagaagugc

SEQ ID NO: 990122 - RNA, 23 nt, Human
gcccaugcuguugggcccgagca

SEQ ID NO: 990123 - RNA, 22 nt, Human
agugcauauaugaagaguauga

SEQ ID NO: 990124 - RNA, 22 nt, Human
ggcagccaugucccagggcuuc

SEQ ID NO: 990125 - RNA, 21 nt, Human
auccauccaucuuggccuaac

SEQ ID NO: 990126 - RNA, 22 nt, Human
uauguacaccggggaagguggg

SEQ ID NO: 990127 - RNA, 22 nt, Human
uguggcucucaugcacucccag

SEQ ID NO: 990128 - RNA, 22 nt, Human
cuggugagacgguugacaggag

SEQ ID NO: 990129 - RNA, 21 nt, Human
ucucuggaauuagaccauguu

SEQ ID NO: 990130 - RNA, 22 nt, Human
cugggcagugguggcccuuccc

SEQ ID NO: 990131 - RNA, 22 nt, Human
gucucccaaccccugugcccag

SEQ ID NO: 990132 - RNA, 22 nt, Human
gagcagugggaaggaacagggu

SEQ ID NO: 990133 - RNA, 22 nt, Human
agaacagcagcacgucaagcug

SEQ ID NO: 990134 - RNA, 22 nt, Human
gagggcugauaacaggaauaca

SEQ ID NO: 990135 - RNA, 22 nt, Human
gggacaggccccucgcuagcuu

SEQ ID NO: 990136 - RNA, 22 nt, Human
agcuguucccucacugcaguca

SEQ ID NO: 990137 - RNA, 22 nt, Human
gaaggccuagggaugcucugcg

SEQ ID NO: 990138 - RNA, 22 nt, Human
uggcgugcccuccagacuuggc

SEQ ID NO: 990139 - RNA, 22 nt, Human
uuugacaggacuaacauauggc

SEQ ID NO: 990140 - RNA, 22 nt, Human
cacaggcugcccgcagcuggga

SEQ ID NO: 990141 - RNA, 22 nt, Human
cacaggagagcugggaggugcc

SEQ ID NO: 990142 - RNA, 22 nt, Human
acugagcugcaagucagggagg

SEQ ID NO: 990143 - RNA, 22 nt, Human
cagggcagcuuccuuuguuagg

SEQ ID NO: 990144 - RNA, 22 nt, Human
uggcucagcuuacuuuugaggg

SEQ ID NO: 990145 - RNA, 22 nt, Human
caggcuugcugcuagagcacuu

SEQ ID NO: 990146 - RNA, 22 nt, Human
agaggagcugggaggcccucgu

SEQ ID NO: 990147 - RNA, 22 nt, Human
cacagggcagaggguccguggc

SEQ ID NO: 990148 - RNA, 21 nt, Human
gccauuguuuucuaccuggag

SEQ ID NO: 990149 - RNA, 22 nt, Human
cuggagcauccaugcccagggu

SEQ ID NO: 990150 - RNA, 22 nt, Human
cuccucuggaaauuccucugcc

SEQ ID NO: 990151 - RNA, 22 nt, Human
uguacacugcaggaugcauugc

SEQ ID NO: 990152 - RNA, 21 nt, Human
uccacaaguuagaaggaaauu

SEQ ID NO: 990153 - RNA, 22 nt, Human
ugcauuaugcuugugcuguaua

SEQ ID NO: 990154 - RNA, 22 nt, Human
uggcuccuaucaaggagugggu

SEQ ID NO: 990155 - RNA, 22 nt, Human
aaaucaguuguuauauuaaaga

SEQ ID NO: 990156 - RNA, 22 nt, Human
uuaacagauguuuauggagcau

SEQ ID NO: 990157 - RNA, 22 nt, Human
agcugagagguggcaagcugua

SEQ ID NO: 990158 - RNA, 22 nt, Human
ccagacuguggaguuccuggug

SEQ ID NO: 990159 - RNA, 22 nt, Human
aucuggcuuacgaagcacuggu

SEQ ID NO: 990160 - RNA, 22 nt, Human
cagggccagcgucucgggcuau

SEQ ID NO: 990161 - RNA, 23 nt, Human
cugucuccugggcuagguggaau

SEQ ID NO: 990162 - RNA, 22 nt, Human
ccugggugaugugcugcccucg

SEQ ID NO: 990163 - RNA, 22 nt, Human
ggcuggguuauuuauggccaag

SEQ ID NO: 990164 - RNA, 22 nt, Human
cccuggaggcggagcuugcagu

SEQ ID NO: 990165 - RNA, 22 nt, Human
aggcccugcccagagcuccucg

SEQ ID NO: 990166 - RNA, 22 nt, Human
cagaaugagauaacccagauug

SEQ ID NO: 990167 - RNA, 22 nt, Human
gcucucuggaggccauggacag

SEQ ID NO: 990168 - RNA, 22 nt, Human
agugacucacuagcucucagug

SEQ ID NO: 990169 - RNA, 22 nt, Human
cugggccuggcguuccaggcug

SEQ ID NO: 990170 - RNA, 22 nt, Human
ugggcuggcguggagaguuuag

SEQ ID NO: 990171 - RNA, 22 nt, Human
cacugaagcuuucauucucuug

SEQ ID NO: 990172 - RNA, 22 nt, Human
gcucccugcacucugcagcccu

SEQ ID NO: 990173 - RNA, 22 nt, Human
cagcuuuguccugcaaaccuga

SEQ ID NO: 990174 - RNA, 22 nt, Human
cagagccaacgccaccugccca

SEQ ID NO: 990175 - RNA, 22 nt, Human
uaaauucccaacucugcucuuc

SEQ ID NO: 990176 - RNA, 22 nt, Human
ucucagaggugcccuggcaucu

SEQ ID NO: 990177 - RNA, 22 nt, Human
agcuugccucuuaaucaccuca

SEQ ID NO: 990178 - RNA, 22 nt, Human
aggggaggagcuuuucuugccu

SEQ ID NO: 990179 - RNA, 22 nt, Human
auuaaauacugcaggcuaagca

SEQ ID NO: 990180 - RNA, 22 nt, Human
ggcagggugccuggcuccuguu

SEQ ID NO: 990181 - RNA, 22 nt, Human
acugccuugaaagauuguugag

SEQ ID NO: 990182 - RNA, 22 nt, Human
aaugcacauaaauauggucuua

SEQ ID NO: 990183 - RNA, 22 nt, Human
cucuccuugcagauggcugccu

SEQ ID NO: 990184 - RNA, 22 nt, Human
guuccuauauagccuuaaggau

SEQ ID NO: 990185 - RNA, 20 nt, Human
aacagggggcugcagagggc

SEQ ID NO: 990186 - RNA, 22 nt, Human
agggcaaguugagugugcgugg

SEQ ID NO: 990187 - RNA, 22 nt, Human
caggguccaucuuucaucacug

SEQ ID NO: 990188 - RNA, 22 nt, Human
gagagcuguuuaucuucuucaa

SEQ ID NO: 990189 - RNA, 22 nt, Human
ucccaaggcacagggcagggac

SEQ ID NO: 990190 - RNA, 22 nt, Human
aaauugugagcuauagaucuag

SEQ ID NO: 990191 - RNA, 20 nt, Human
uguuucuuuuaaugagcggc

SEQ ID NO: 990192 - RNA, 22 nt, Human
gcaggcuccaggccggccccuu

SEQ ID NO: 990193 - RNA, 22 nt, Human
aacugcuggggaggccaaacuc

SEQ ID NO: 990194 - RNA, 22 nt, Human
cuuguccuuuacuugagacuca

SEQ ID NO: 990195 - RNA, 22 nt, Human
cccagcauggagugaggacuca

SEQ ID NO: 990196 - RNA, 21 nt, Human
cagaaguaaggguaacuucuc

SEQ ID NO: 990197 - RNA, 22 nt, Human
ggugaggcuaagugacacaggg

SEQ ID NO: 990198 - RNA, 22 nt, Human
uacauuaucuuguuaucuuuca

SEQ ID NO: 990199 - RNA, 22 nt, Human
ucucuccuuaucauuguguuua

SEQ ID NO: 990200 - RNA, 22 nt, Human
ucagaggauugccucagcgagc

SEQ ID NO: 990201 - RNA, 23 nt, Human
agcagggccagaauacuugcugu

SEQ ID NO: 990202 - RNA, 20 nt, Human
gcagcugaaaguaugacacc

SEQ ID NO: 990203 - RNA, 22 nt, Human
ucuagaaaaaaacugcugugga

SEQ ID NO: 990204 - RNA, 22 nt, Human
cagggccugccugguuccugga

SEQ ID NO: 990205 - RNA, 22 nt, Human
ccuccugguugcaaugaaaugg

SEQ ID NO: 990206 - RNA, 22 nt, Human
ugcccugugugugcaagcacug

SEQ ID NO: 990207 - RNA, 22 nt, Human
gcugucuccauagcuguguguc

SEQ ID NO: 990208 - RNA, 22 nt, Human
aaguucaaggaagccuccaguu

SEQ ID NO: 990209 - RNA, 22 nt, Human
aacaguaaugugguguuggguu

SEQ ID NO: 990210 - RNA, 22 nt, Human
cugcugcucagugucaucaugu

SEQ ID NO: 990211 - RNA, 22 nt, Human
aauaugucugcuaauuguuucu

SEQ ID NO: 990212 - RNA, 22 nt, Human
cccuggggcugagggauggccg

SEQ ID NO: 990213 - RNA, 22 nt, Human
uugaaaaguuuugaaacacucu

SEQ ID NO: 990214 - RNA, 22 nt, Human
gcugccuggaauaacggcuggc

SEQ ID NO: 990215 - RNA, 19 nt, Human
agauggggaagagugugag

SEQ ID NO: 990216 - RNA, 22 nt, Human
aaagaaauagauggcauuuaaa

SEQ ID NO: 990217 - RNA, 22 nt, Human
uggaaggcaacggagugagcug

SEQ ID NO: 990218 - RNA, 22 nt, Human
ucugcaggaggcuggcugcagg

SEQ ID NO: 990219 - RNA, 22 nt, Human
agacauaagugcuaugacauug

SEQ ID NO: 990220 - RNA, 22 nt, Human
ggcacugacacuagcauggcac

SEQ ID NO: 990221 - RNA, 19 nt, Human
auaaggcaggaggaaauuu

SEQ ID NO: 990222 - RNA, 22 nt, Human
caggcagcugggucaccguccc

SEQ ID NO: 990223 - RNA, 22 nt, Human
ucaguggauauuucuguggcug

SEQ ID NO: 990224 - RNA, 22 nt, Human
aaaugcauuuuuaauuagaccc

SEQ ID NO: 990225 - RNA, 23 nt, Human
uggcuggcagaaacugaagcaug

SEQ ID NO: 990226 - RNA, 22 nt, Human
uaaaugcagcaguuucuguucu

SEQ ID NO: 990227 - RNA, 22 nt, Human
gcaggguccauggaggcagccc

SEQ ID NO: 990228 - RNA, 22 nt, Human
agagcugagaauguggcuuccu

SEQ ID NO: 990229 - RNA, 22 nt, Human
uucuuuccucccagccuuugga

SEQ ID NO: 990230 - RNA, 22 nt, Human
cccaaggccucuccuuggcuug

SEQ ID NO: 990231 - RNA, 22 nt, Human
cagcuggcuccaccucugggcu

SEQ ID NO: 990232 - RNA, 22 nt, Human
ccagcuggugggucuuucucug

SEQ ID NO: 990233 - RNA, 22 nt, Human
uuacaaagagaaguuguagaau

SEQ ID NO: 990234 - RNA, 22 nt, Human
caaauguguuuuuucuucuaca

SEQ ID NO: 990235 - RNA, 22 nt, Human
caggccugugacaccgugucug

SEQ ID NO: 990236 - RNA, 22 nt, Human
aggcugagauagguggaucauu

SEQ ID NO: 990237 - RNA, 22 nt, Human
uccuguuaguguuagacuuccc

SEQ ID NO: 990238 - RNA, 19 nt, Human
ccuggguccacucagacua

SEQ ID NO: 990239 - RNA, 22 nt, Human
uaagaacaucuguccccagauu

SEQ ID NO: 990240 - RNA, 22 nt, Human
uauacuuuccugcaacuuugau

SEQ ID NO: 990241 - RNA, 22 nt, Human
ccaaggcuggagugcaguggcg

SEQ ID NO: 990242 - RNA, 22 nt, Human
auguauguuaguguauuaucua

SEQ ID NO: 990243 - RNA, 22 nt, Human
uagcaggguccaaugugaggca

SEQ ID NO: 990244 - RNA, 22 nt, Human
gaguaagagcuggcuuuggugu

SEQ ID NO: 990245 - RNA, 22 nt, Human
cucucugguacauagaguuugg

SEQ ID NO: 990246 - RNA, 22 nt, Human
gguggcagcgucuaucugacau

SEQ ID NO: 990247 - RNA, 22 nt, Human
acauuguagacuuuucauaugu

SEQ ID NO: 990248 - RNA, 22 nt, Human
ucacugcaaggaggcuucucaa

SEQ ID NO: 990249 - RNA, 19 nt, Human
ugcucauggggacuucucc

SEQ ID NO: 990250 - RNA, 22 nt, Human
aggugcagcugguggagucugg

SEQ ID NO: 990251 - RNA, 22 nt, Human
cugcucuggggaagccagaugu

SEQ ID NO: 990252 - RNA, 22 nt, Human
aggaagcucggagagggcaaau

SEQ ID NO: 990253 - RNA, 22 nt, Human
gagacagaguuucacucuuguu

SEQ ID NO: 990254 - RNA, 22 nt, Human
cugccuuggcccuaguucaugg

SEQ ID NO: 990255 - RNA, 22 nt, Human
ccugggcaggaugggcccggug

SEQ ID NO: 990256 - RNA, 22 nt, Human
guauuaggaaauaugaagaaag

SEQ ID NO: 990257 - RNA, 22 nt, Human
uccucagaaaccccugugaggu

SEQ ID NO: 990258 - RNA, 22 nt, Human
gaacccaaaccuggaccucccu

SEQ ID NO: 990259 - RNA, 22 nt, Human
guucauuuaugauguaacaugu

SEQ ID NO: 990260 - RNA, 22 nt, Human
agaaugcuccagagcugaaaga

SEQ ID NO: 990261 - RNA, 22 nt, Human
cagcugcaguucaaugcuugcu

SEQ ID NO: 990262 - RNA, 21 nt, Human
cauugucgacauuuuccccuc

SEQ ID NO: 990263 - RNA, 22 nt, Human
guaggcagucucucaggugauc

SEQ ID NO: 990264 - RNA, 22 nt, Human
uacuuuuugucucuuugaaugu

SEQ ID NO: 990265 - RNA, 22 nt, Human
aaucaguuaggguguuaaugag

SEQ ID NO: 990266 - RNA, 22 nt, Human
gcugugugacugagagccuggc

SEQ ID NO: 990267 - RNA, 22 nt, Human
uagaaguuaaaggaauacagaa

SEQ ID NO: 990268 - RNA, 22 nt, Human
ugggaggcuuccagaccuugcu

SEQ ID NO: 990269 - RNA, 22 nt, Human
ucaagauaccaccauuauaugu

SEQ ID NO: 990270 - RNA, 23 nt, Human
aagcugccagucugaagccuggg

SEQ ID NO: 990271 - RNA, 22 nt, Human
uggggccuggucagagcugcac

SEQ ID NO: 990272 - RNA, 22 nt, Human
aaaugaguuuccucaauguccu

SEQ ID NO: 990273 - RNA, 22 nt, Human
uccugcagagacagaggccuca

SEQ ID NO: 990274 - RNA, 22 nt, Human
uaagaagcuucugcuaaugccu

SEQ ID NO: 990275 - RNA, 22 nt, Human
uucuuuccccauggaguucgga

SEQ ID NO: 990276 - RNA, 22 nt, Human
cuuaggauuuaauuucagacuc

SEQ ID NO: 990277 - RNA, 22 nt, Human
gggcuggaggaccggccucgga

SEQ ID NO: 990278 - RNA, 22 nt, Human
cacauguacagaagcaggcugg

SEQ ID NO: 990279 - RNA, 20 nt, Human
uccuugaaagugggguauau

SEQ ID NO: 990280 - RNA, 22 nt, Human
acuuuauuuccuauugcaucca

SEQ ID NO: 990281 - RNA, 22 nt, Human
uuggcugaagguuaagugcugg

SEQ ID NO: 990282 - RNA, 22 nt, Human
uguaggacauguacuuguaaca

SEQ ID NO: 990283 - RNA, 22 nt, Human
aaagaaggaccuggaggaggau

SEQ ID NO: 990284 - RNA, 22 nt, Human
gaaucacgguauucugcacggg

SEQ ID NO: 990285 - RNA, 19 nt, Human
gcagcugugggaagagcca

SEQ ID NO: 990286 - RNA, 22 nt, Human
ugggcugcugucugcacaugcu

SEQ ID NO: 990287 - RNA, 22 nt, Human
cuggaagguuccucccagcucc

SEQ ID NO: 990288 - RNA, 16 nt, Human
ccacagggcaaggggc

SEQ ID NO: 990289 - RNA, 22 nt, Human
uuuauuuggcaucucugccaag

SEQ ID NO: 990290 - RNA, 22 nt, Human
auauaaaguguuuagaaagcug

SEQ ID NO: 990291 - RNA, 22 nt, Human
gcugucacaucaaggcacuaaa

SEQ ID NO: 990292 - RNA, 22 nt, Human
aggcucugugacaaucaagcug

SEQ ID NO: 990293 - RNA, 17 nt, Human
aauagcugcucagagag

SEQ ID NO: 990294 - RNA, 22 nt, Human
gcucucuguuauuaagaucuuu

SEQ ID NO: 990295 - RNA, 22 nt, Human
gcugagugagguccagagcuug

SEQ ID NO: 990296 - RNA, 22 nt, Human
caaaaguaauugugguuuuugc

SEQ ID NO: 990297 - RNA, 22 nt, Human
uuccauuuauucuuguccagau

SEQ ID NO: 990298 - RNA, 22 nt, Human
ccuccagggcagacggggagca

SEQ ID NO: 990299 - RNA, 20 nt, Human
ccagagcugauggcugcccg

SEQ ID NO: 990300 - RNA, 22 nt, Human
gugcagagaaaugagaagucga

SEQ ID NO: 990301 - RNA, 22 nt, Human
gcagggcuauuggaaggagaug

SEQ ID NO: 990302 - RNA, 22 nt, Human
ucauugcagaaauaaaggugaa

SEQ ID NO: 990303 - RNA, 22 nt, Human
uaguaucuuucuauauuuccca

SEQ ID NO: 990304 - RNA, 22 nt, Human
gcuggccuuugaggaagcugcg

SEQ ID NO: 990305 - RNA, 18 nt, Human
cugcugcaggcacucagg

SEQ ID NO: 990306 - RNA, 22 nt, Human
ggggcagagucuggacuguugu

SEQ ID NO: 990307 - RNA, 20 nt, Human
gugccuggagaagaggcugu

SEQ ID NO: 990308 - RNA, 22 nt, Human
ggccaggaagggaagaucagca

SEQ ID NO: 990309 - RNA, 22 nt, Human
cuguuuauggagguaaggcauc

SEQ ID NO: 990310 - RNA, 22 nt, Human
uggccuggggaccugugagacc

SEQ ID NO: 990311 - RNA, 18 nt, Human
ugucaucuguuuaaaacc

SEQ ID NO: 990312 - RNA, 22 nt, Human
gaggcaggcccugaaugaguca

SEQ ID NO: 990313 - RNA, 22 nt, Human
cagaguguuucuuugggugggu

SEQ ID NO: 990314 - RNA, 22 nt, Human
ugcauuccauguguuuccugag

SEQ ID NO: 990315 - RNA, 18 nt, Human
ucugagggugcgggagcu

SEQ ID NO: 990316 - RNA, 22 nt, Human
gguuggggcgagcuggaggccc

SEQ ID NO: 990317 - RNA, 22 nt, Human
ucugaggccccugggcaggaug

SEQ ID NO: 990318 - RNA, 22 nt, Human
acagcuguauccccagagcuca

SEQ ID NO: 990319 - RNA, 22 nt, Human
uuaaaagagcagcccagcauau

SEQ ID NO: 990320 - RNA, 22 nt, Human
gagggcaguagccucguacccu

SEQ ID NO: 990321 - RNA, 22 nt, Human
uggccugggccugccggugcaa

SEQ ID NO: 990322 - RNA, 15 nt, Human
cagucccagggaccc

SEQ ID NO: 990323 - RNA, 22 nt, Human
agcugguucauucauucauggu

SEQ ID NO: 990324 - RNA, 22 nt, Human
gaaggcuugcagcucuguggca

SEQ ID NO: 990325 - RNA, 22 nt, Human
gagcagagacaguacaacuggc

SEQ ID NO: 990326 - RNA, 22 nt, Human
uauuuugagguauuuuugagcu

SEQ ID NO: 990327 - RNA, 22 nt, Human
cucaggggaccuggcuccgagu

SEQ ID NO: 990328 - RNA, 22 nt, Human
ggccuguguccuccuugcccug

SEQ ID NO: 990329 - RNA, 22 nt, Human
augucacauggccuguacuuug

SEQ ID NO: 990330 - RNA, 22 nt, Human
uuacaaaguucugaguucaaac

SEQ ID NO: 990331 - RNA, 22 nt, Human
gccuggagcuacuggacacuga

SEQ ID NO: 990332 - RNA, 22 nt, Human
ugggcagaaugugggauccaga

SEQ ID NO: 990333 - RNA, 22 nt, Human
ccuggagguggagguugcagug

SEQ ID NO: 990334 - RNA, 22 nt, Human
cacugccugugagcugugugcc

SEQ ID NO: 990335 - RNA, 19 nt, Human
uuacaucugcaacacuggu

SEQ ID NO: 990336 - RNA, 22 nt, Human
cagcuccugcagcugcugccgu

SEQ ID NO: 990337 - RNA, 22 nt, Human
gggccacacagaaccuccuggu

SEQ ID NO: 990338 - RNA, 22 nt, Human
ucucagaggucuucagccucug

SEQ ID NO: 990339 - RNA, 22 nt, Human
cuccagggaaaggggcguccgc

SEQ ID NO: 990340 - RNA, 22 nt, Human
cuggcucauagagcagcuccaa

SEQ ID NO: 990341 - RNA, 22 nt, Human
aacagaauaguugauguacagu

SEQ ID NO: 990342 - RNA, 22 nt, Human
aaucuuucccuauuaaaugugg

SEQ ID NO: 990343 - RNA, 22 nt, Human
aaagauuuaagaauaauuugug

SEQ ID NO: 990344 - RNA, 22 nt, Human
ccagcuggagcucgcagauagg

SEQ ID NO: 990345 - RNA, 22 nt, Human
agagaagagcaaugauaaauuu

SEQ ID NO: 990346 - RNA, 18 nt, Human
acauacauucugucugca

SEQ ID NO: 990347 - RNA, 22 nt, Human
ggguuggggcccagcagucugc

SEQ ID NO: 990348 - RNA, 22 nt, Human
agcagaaccugcagaccugucu

SEQ ID NO: 990349 - RNA, 22 nt, Human
agagcugcaccuaugcagaccu

SEQ ID NO: 990350 - RNA, 22 nt, Human
cagaagcauugacuccuugcuc

SEQ ID NO: 990351 - RNA, 22 nt, Human
uauuucuugaguggucaguuuc

SEQ ID NO: 990352 - RNA, 22 nt, Human
ccaaagucugcauuuuaacaug

SEQ ID NO: 990353 - RNA, 22 nt, Human
aucagcaagcauuuauugagug

SEQ ID NO: 990354 - RNA, 17 nt, Human
uuaagguggaucagcac

SEQ ID NO: 990355 - RNA, 22 nt, Human
aaaguucaugguguuauagaaa

SEQ ID NO: 990356 - RNA, 22 nt, Human
aggcacuggguaauuaguagcu

SEQ ID NO: 990357 - RNA, 21 nt, Human
agcagccauuucacagagacu

SEQ ID NO: 990358 - RNA, 22 nt, Human
cuguagccagaagcagaaggcc

SEQ ID NO: 990359 - RNA, 22 nt, Human
uccagggagauacuggcugcca

SEQ ID NO: 990360 - RNA, 23 nt, Human
cccagcagagaugaggagggguc

SEQ ID NO: 990361 - RNA, 22 nt, Human
agaggccaucugcucugugggg

SEQ ID NO: 990362 - RNA, 22 nt, Human
uguuuuguuuaugagagcacag

SEQ ID NO: 990363 - RNA, 22 nt, Human
cagguccccuccccuaccaggc

SEQ ID NO: 990364 - RNA, 22 nt, Human
uacaguaaccagucuacuuaga

SEQ ID NO: 990365 - RNA, 22 nt, Human
gggcccuggggccugauuugca

SEQ ID NO: 990366 - RNA, 22 nt, Human
uccaggaggaggaaggcugcca

SEQ ID NO: 990367 - RNA, 22 nt, Human
gagaccaggaaguacagcagcc

SEQ ID NO: 990368 - RNA, 22 nt, Human
gaguuuaaagcauacauauuuu

SEQ ID NO: 990369 - RNA, 22 nt, Human
uggaagggggaagacagcucug

SEQ ID NO: 990370 - RNA, 22 nt, Human
gcuggggagcuagaccucagca

SEQ ID NO: 990371 - RNA, 22 nt, Human
auucacaaaaugauauagauac

SEQ ID NO: 990372 - RNA, 20 nt, Human
aggcugggguguuuugccca

SEQ ID NO: 990373 - RNA, 22 nt, Human
gaaaugugggucaugacccauu

SEQ ID NO: 990374 - RNA, 19 nt, Human
uaaaaugucuguggucagu

SEQ ID NO: 990375 - RNA, 22 nt, Human
caggagcuacucagguuggguu

SEQ ID NO: 990376 - RNA, 22 nt, Human
uguuauugagguuacuuauaag

SEQ ID NO: 990377 - RNA, 22 nt, Human
agugauggugagugagaagcuc

SEQ ID NO: 990378 - RNA, 22 nt, Human
agaugaaaagauaagcagcaau

SEQ ID NO: 990379 - RNA, 18 nt, Human
ggccugaggauuucagca

SEQ ID NO: 990380 - RNA, 22 nt, Human
gcuggccacacugcugauggag

SEQ ID NO: 990381 - RNA, 22 nt, Human
aggggcuggcuuaucugagagu

SEQ ID NO: 990382 - RNA, 22 nt, Human
acagaacugcaggaggaaaagc

SEQ ID NO: 990383 - RNA, 22 nt, Human
gcagcugcaggcaggcuugcug

SEQ ID NO: 990384 - RNA, 22 nt, Human
uguauagaguuggaagaugacu

SEQ ID NO: 990385 - RNA, 22 nt, Human
gcagagccugggggucugcgga

SEQ ID NO: 990386 - RNA, 22 nt, Human
gcaggcugauagaggauuccau

SEQ ID NO: 990387 - RNA, 22 nt, Human
ucagaccauccugcuguuagug

SEQ ID NO: 990388 - RNA, 22 nt, Human
gaugcacaugugaguauagaag

SEQ ID NO: 990389 - RNA, 20 nt, Human
cacugaagacuucuugcuca

SEQ ID NO: 990390 - RNA, 22 nt, Human
ccagucccaggcagaaauccag

SEQ ID NO: 990391 - RNA, 22 nt, Human
ugccugugucacagugauguuu

SEQ ID NO: 990392 - RNA, 22 nt, Human
acugcuuuagaccuagagcucu

SEQ ID NO: 990393 - RNA, 22 nt, Human
gcuccuggucuggagcuucaag

SEQ ID NO: 990394 - RNA, 22 nt, Human
guguggcugccagccaagaggc

SEQ ID NO: 990395 - RNA, 22 nt, Human
agaagcaguuauuuuuugcaca

SEQ ID NO: 990396 - RNA, 22 nt, Human
ugcugcucucagccaccaggaa

SEQ ID NO: 990397 - RNA, 22 nt, Human
cuccucccugcgauugcucugc

SEQ ID NO: 990398 - RNA, 22 nt, Human
guggccaaggugcagagcagcu

SEQ ID NO: 990399 - RNA, 22 nt, Human
cugggagagaagcgaagcuggg

SEQ ID NO: 990400 - RNA, 22 nt, Human
cuugcaggcagggccuccugga

SEQ ID NO: 990401 - RNA, 22 nt, Human
uacauauuugucuuuguacugu

SEQ ID NO: 990402 - RNA, 22 nt, Human
caggguggaauggaaugcuggc

SEQ ID NO: 990403 - RNA, 22 nt, Human
gcuggcugggucccugagaggc

SEQ ID NO: 990404 - RNA, 22 nt, Human
augaagauaagaccaggcugga

SEQ ID NO: 990405 - RNA, 22 nt, Human
uccuucagccaugggcucucca

SEQ ID NO: 990406 - RNA, 22 nt, Human
ugcucuguaacaaauugacaug

SEQ ID NO: 990407 - RNA, 22 nt, Human
uaaaaugacuuccuccaacauc

SEQ ID NO: 990408 - RNA, 22 nt, Human
aggcagaaaauagucauccaaa

SEQ ID NO: 990409 - RNA, 22 nt, Human
uuugcauuguaauauuuaguuc

SEQ ID NO: 990410 - RNA, 22 nt, Human
aaugaacaucaaaugccuacca

SEQ ID NO: 990411 - RNA, 22 nt, Human
uggcagcagggaggccaguguu

SEQ ID NO: 990412 - RNA, 22 nt, Human
uuucauuacguguuugacuugu

SEQ ID NO: 990413 - RNA, 22 nt, Human
aaucgguugaacccaggaagug

SEQ ID NO: 990414 - RNA, 22 nt, Human
gcacagaacuucucuuaguagg

SEQ ID NO: 990415 - RNA, 22 nt, Human
uccagucaggcugaauucaagg

SEQ ID NO: 990416 - RNA, 22 nt, Human
ucacuguaucauguugcacuua

SEQ ID NO: 990417 - RNA, 22 nt, Human
gucuggccuuuuuagcuugugg

SEQ ID NO: 990418 - RNA, 22 nt, Human
ggaggccaugaggcucuaggug

SEQ ID NO: 990419 - RNA, 22 nt, Human
gcaggcaguuugcuuuucccuc

SEQ ID NO: 990420 - RNA, 22 nt, Human
agagccagguguagucucggag

SEQ ID NO: 990421 - RNA, 22 nt, Human
cagcaggcguugggagaaagac

SEQ ID NO: 990422 - RNA, 22 nt, Human
caguggaggcucaagugugcuu

SEQ ID NO: 990423 - RNA, 22 nt, Human
cugaggugagcuucccugggcu

SEQ ID NO: 990424 - RNA, 22 nt, Human
cucacagguaccagcacccucc

SEQ ID NO: 990425 - RNA, 19 nt, Human
ggcugggucuggcagguuc

SEQ ID NO: 990426 - RNA, 22 nt, Human
gggcuggucuggcuuagucagg

SEQ ID NO: 990427 - RNA, 22 nt, Human
cugcugggcagaggcugcauga

SEQ ID NO: 990428 - RNA, 22 nt, Human
cugcugcaggaugggcacucug

SEQ ID NO: 990429 - RNA, 22 nt, Human
uggcagagguauauugggagga

SEQ ID NO: 990430 - RNA, 21 nt, Human
agcuuccugcagugggagguc

SEQ ID NO: 990431 - RNA, 22 nt, Human
uuucuuccuuaccuuacuagag

SEQ ID NO: 990432 - RNA, 23 nt, Human
ucucagaggauuccugggccuug

SEQ ID NO: 990433 - RNA, 22 nt, Human
cccaggaggccaagguugcagu

SEQ ID NO: 990434 - RNA, 22 nt, Human
ucagcagggaggcucugugccc

SEQ ID NO: 990435 - RNA, 22 nt, Human
cagggcacaguuauggaggugg

SEQ ID NO: 990436 - RNA, 22 nt, Human
uuucuauucuggaucuguggca

SEQ ID NO: 990437 - RNA, 22 nt, Human
guuuaaguuucagaagcuaaga

SEQ ID NO: 990438 - RNA, 22 nt, Human
acugaaggguaaugugggagcc

SEQ ID NO: 990439 - RNA, 22 nt, Human
agcagccagaaauccagaggug

SEQ ID NO: 990440 - RNA, 22 nt, Human
uggcacuggcgcaggauggcgg

SEQ ID NO: 990441 - RNA, 22 nt, Human
agcugucagugcugugccugua

SEQ ID NO: 990442 - RNA, 22 nt, Human
ugcauauugugaaaauguagau

SEQ ID NO: 990443 - RNA, 22 nt, Human
cucccugggcagauguggcucu

SEQ ID NO: 990444 - RNA, 18 nt, Human
uggguggcuagggaguuu

SEQ ID NO: 990445 - RNA, 22 nt, Human
auuagcauauuaaauagucauu

SEQ ID NO: 990446 - RNA, 22 nt, Human
uugggugcugucauggggcacg

SEQ ID NO: 990447 - RNA, 22 nt, Human
ugccugucuuggaguccuggcc

SEQ ID NO: 990448 - RNA, 22 nt, Human
gcuggccugggcagaggcuaug

SEQ ID NO: 990449 - RNA, 22 nt, Human
uuuucuuacugucugugauccu

SEQ ID NO: 990450 - RNA, 20 nt, Human
agacaggagcccccauucag

SEQ ID NO: 990451 - RNA, 22 nt, Human
gugucauuaaccaccaugcaaa

SEQ ID NO: 990452 - RNA, 22 nt, Human
auagauacauuagguaacuugu

SEQ ID NO: 990453 - RNA, 22 nt, Human
ggagcugggacccugucaucug

SEQ ID NO: 990454 - RNA, 22 nt, Human
gcagcugcuggaaguuccugcc

SEQ ID NO: 990455 - RNA, 22 nt, Human
uuucaacagcucucaaaugauc

SEQ ID NO: 990456 - RNA, 22 nt, Human
ucaucaaagcgcuuggaguagg

SEQ ID NO: 990457 - RNA, 22 nt, Human
cagccagagaaagggcacugcc

SEQ ID NO: 990458 - RNA, 22 nt, Human
gggccccuuguaucucuggcuc

SEQ ID NO: 990459 - RNA, 22 nt, Human
ucaaugauagacaagaucuaag

SEQ ID NO: 990460 - RNA, 22 nt, Human
ucuuccucucuaauugaucaga

SEQ ID NO: 990461 - RNA, 22 nt, Human
uagggauguaaacauaguaauu

SEQ ID NO: 990462 - RNA, 22 nt, Human
uuuuuauaugaaggauagugcg

SEQ ID NO: 990463 - RNA, 22 nt, Human
acagaaauaacuuuuuauguuu

SEQ ID NO: 990464 - RNA, 22 nt, Human
acuccuggguuccggagauucu

SEQ ID NO: 990465 - RNA, 22 nt, Human
ccugacgaaaggcgugcuggag

SEQ ID NO: 990466 - RNA, 22 nt, Human
acauuuaaauaugccuuauauu

SEQ ID NO: 990467 - RNA, 22 nt, Human
aggaggcuguggagcacuccau

SEQ ID NO: 990468 - RNA, 22 nt, Human
uguuacuuaucucacgugaugc

SEQ ID NO: 990469 - RNA, 22 nt, Human
ccacagggccuuuccugcuggc

SEQ ID NO: 990470 - RNA, 22 nt, Human
uugcauguguaauuuuucuaaa

SEQ ID NO: 990471 - RNA, 22 nt, Human
aaggcacuacgcugcuggggcg

SEQ ID NO: 990472 - RNA, 23 nt, Human
cacuccuguuucuaagccagcau

SEQ ID NO: 990473 - RNA, 22 nt, Human
gcugcucuggcucugcaguguc

SEQ ID NO: 990474 - RNA, 22 nt, Human
agugguaacuaaguccugcuua

SEQ ID NO: 990475 - RNA, 22 nt, Human
ugaugguuuuauuaauaggacc

SEQ ID NO: 990476 - RNA, 22 nt, Human
uuuaaaaaacuagucugagucu

SEQ ID NO: 990477 - RNA, 22 nt, Human
auucuguauggaaaagcacuau

SEQ ID NO: 990478 - RNA, 22 nt, Human
gaucuuggggggaucaccaugg

SEQ ID NO: 990479 - RNA, 22 nt, Human
uccagcagggaauuaguagucu

SEQ ID NO: 990480 - RNA, 23 nt, Human
gggagccaggaccucgcgcccca

SEQ ID NO: 990481 - RNA, 22 nt, Human
cuaggaggcgggggcugcagua

SEQ ID NO: 990482 - RNA, 20 nt, Human
aggaaaaauggaaacuggag

SEQ ID NO: 990483 - RNA, 22 nt, Human
uucaagaucgaguuuaaaguga

SEQ ID NO: 990484 - RNA, 22 nt, Human
agcugaaagugcuuugaggacu

SEQ ID NO: 990485 - RNA, 22 nt, Human
uuucucugaggcuggccucccu

SEQ ID NO: 990486 - RNA, 22 nt, Human
ggagcugggaauuggaucaucu

SEQ ID NO: 990487 - RNA, 22 nt, Human
auuaggacacauacauguacag

SEQ ID NO: 990488 - RNA, 22 nt, Human
uaaaacuagugguugggacuaa

SEQ ID NO: 990489 - RNA, 22 nt, Human
gucuuguuugggauguggaugg

SEQ ID NO: 990490 - RNA, 22 nt, Human
caauagcagcuucugaaugcaa

SEQ ID NO: 990491 - RNA, 22 nt, Human
aggaagccaugguggacgucua

SEQ ID NO: 990492 - RNA, 22 nt, Human
guauuugauagauuucaaagga

SEQ ID NO: 990493 - RNA, 21 nt, Human
ccuggcagaagccugauaugc

SEQ ID NO: 990494 - RNA, 22 nt, Human
auggcagccuguggacagucaa

SEQ ID NO: 990495 - RNA, 22 nt, Human
gggaaauugucaacacucucaa

SEQ ID NO: 990496 - RNA, 22 nt, Human
gagcuuggugaugccuccuggu

SEQ ID NO: 990497 - RNA, 22 nt, Human
cacagcuucuccuugauaucgc

SEQ ID NO: 990498 - RNA, 22 nt, Human
aaacacauuuuaggaaaaucua

SEQ ID NO: 990499 - RNA, 22 nt, Human
caaaaguaauugcaguuuuugc

SEQ ID NO: 990500 - RNA, 22 nt, Human
gaggggcuggcuguggucccau

SEQ ID NO: 990501 - RNA, 22 nt, Human
gggcagccucggugccugcugc

SEQ ID NO: 990502 - RNA, 22 nt, Human
ggucaggguauaaucaagugag

SEQ ID NO: 990503 - RNA, 22 nt, Human
uugaacaguuuugucagguuca

SEQ ID NO: 990504 - RNA, 22 nt, Human
ggcagccaugcacgcugccugg

SEQ ID NO: 990505 - RNA, 22 nt, Human
cagcagcaaaucuagaagagga

SEQ ID NO: 990506 - RNA, 22 nt, Human
ucagcugaguucuagagcacuc

SEQ ID NO: 990507 - RNA, 22 nt, Human
ucugcaagauggucuuagaggu

SEQ ID NO: 990508 - RNA, 22 nt, Human
cucuugaaaauuggaacacaga

SEQ ID NO: 990509 - RNA, 22 nt, Human
gagguacagaguguuccaaugu

SEQ ID NO: 990510 - RNA, 22 nt, Human
guuaauaaagguauagaaucag

SEQ ID NO: 990511 - RNA, 22 nt, Human
gcaggggcaggagaucucaggc

SEQ ID NO: 990512 - RNA, 22 nt, Human
cccugccuuguuggagccuaug

SEQ ID NO: 990513 - RNA, 22 nt, Human
gccuccccugcaauuguccuug

SEQ ID NO: 990514 - RNA, 22 nt, Human
gagccaagaucgcaccacugca

SEQ ID NO: 990515 - RNA, 22 nt, Human
cucaggauucucgacacucaca

SEQ ID NO: 990516 - RNA, 20 nt, Human
cccuccagcaaccaggacuu

SEQ ID NO: 990517 - RNA, 22 nt, Human
ucaaggugcugugcugugcuag

SEQ ID NO: 990518 - RNA, 22 nt, Human
uaaaaaguugaaaggacuuauc

SEQ ID NO: 990519 - RNA, 22 nt, Human
uaaaaguauacuuucaaaggag

SEQ ID NO: 990520 - RNA, 22 nt, Human
ggcagagcuugcagugagccga

SEQ ID NO: 990521 - RNA, 22 nt, Human
ccuggcagacugugagggcagg

SEQ ID NO: 990522 - RNA, 22 nt, Human
guccugggaaggaagccaggga

SEQ ID NO: 990523 - RNA, 22 nt, Human
uaaugaauaaacuugagaguca

SEQ ID NO: 990524 - RNA, 22 nt, Human
ucuuugcaugugcuucuuggcc

SEQ ID NO: 990525 - RNA, 22 nt, Human
gggcagagagcuggaacuccuu

SEQ ID NO: 990526 - RNA, 22 nt, Human
acugccuuauaugcugugugug

SEQ ID NO: 990527 - RNA, 22 nt, Human
gcuggcucccauugguccuucc

SEQ ID NO: 990528 - RNA, 22 nt, Human
ugggcagacgcuguuggaaggc

SEQ ID NO: 990529 - RNA, 22 nt, Human
gggcacagcugcuacccagugc

SEQ ID NO: 990530 - RNA, 21 nt, Human
ugggaugggucugggaccagc

SEQ ID NO: 990531 - RNA, 22 nt, Human
aacacugcugcuggguucugug

SEQ ID NO: 990532 - RNA, 22 nt, Human
aaaguuucaauagaggaagugg

SEQ ID NO: 990533 - RNA, 22 nt, Human
ccugggucuugguucaugcucu

SEQ ID NO: 990534 - RNA, 22 nt, Human
cugggccaagaaguuguguaug

SEQ ID NO: 990535 - RNA, 22 nt, Human
aaaaagguugauccagauuagg

SEQ ID NO: 990536 - RNA, 22 nt, Human
ugcugucuguuuacuggcuaua

SEQ ID NO: 990537 - RNA, 22 nt, Human
auucacaaugauacauaagcga

SEQ ID NO: 990538 - RNA, 22 nt, Human
uccuggagccacggagcuuuca

SEQ ID NO: 990539 - RNA, 19 nt, Human
caggagagcaugcacuuug

SEQ ID NO: 990540 - RNA, 22 nt, Human
ugcagcuguaacagaggccuca

SEQ ID NO: 990541 - RNA, 22 nt, Human
cuucaucaacucuaacaaaugu

SEQ ID NO: 990542 - RNA, 22 nt, Human
uccagccaugcaugacaaucac

SEQ ID NO: 990543 - RNA, 22 nt, Human
cugggaggauacacaagaucag

SEQ ID NO: 990544 - RNA, 22 nt, Human
agaggaugauuuuaaggacacu

SEQ ID NO: 990545 - RNA, 22 nt, Human
gcucugagcacugugcggcugg

SEQ ID NO: 990546 - RNA, 22 nt, Human
uuuauugcauacacaaauguca

SEQ ID NO: 990547 - RNA, 22 nt, Human
cuggcucucugagauauugagu

SEQ ID NO: 990548 - RNA, 22 nt, Human
ugugugacccccagugaagccu

SEQ ID NO: 990549 - RNA, 22 nt, Human
ucugugccaccucuccaguguc

SEQ ID NO: 990550 - RNA, 22 nt, Human
augcaguggcagcuccuggugu

SEQ ID NO: 990551 - RNA, 22 nt, Human
uuuuugaaggcugaugugauua

SEQ ID NO: 990552 - RNA, 22 nt, Human
acauuucugcuagaauagguga

SEQ ID NO: 990553 - RNA, 22 nt, Human
ugaaacaggaaguaaacagaca

SEQ ID NO: 990554 - RNA, 22 nt, Human
agccucugugacucacagguca

SEQ ID NO: 990555 - RNA, 23 nt, Human
ucccagccucuucucuugcauac

SEQ ID NO: 990556 - RNA, 22 nt, Human
uucaagaucuuccaaaggauac

SEQ ID NO: 990557 - RNA, 22 nt, Human
agcagccauagauagcaugcaa

SEQ ID NO: 990558 - RNA, 22 nt, Human
uuucuuaguccuagagugauuu

SEQ ID NO: 990559 - RNA, 22 nt, Human
ggaggccacgguuuagcaccga

SEQ ID NO: 990560 - RNA, 17 nt, Human
aggugcuggagcaucag

SEQ ID NO: 990561 - RNA, 22 nt, Human
uauguacauguuaaagggcaaa

SEQ ID NO: 990562 - RNA, 22 nt, Human
gagcucuguguagccugagggu

SEQ ID NO: 990563 - RNA, 23 nt, Human
gccuucagcucgggaaggcuccc

SEQ ID NO: 990564 - RNA, 18 nt, Human
aggcacagagcauacaua

SEQ ID NO: 990565 - RNA, 22 nt, Human
cacaugggugugccuggaggaa

SEQ ID NO: 990566 - RNA, 23 nt, Human
agucucagcuggaaacauguguc

SEQ ID NO: 990567 - RNA, 22 nt, Human
aggccuggcuuugguuugcuga

SEQ ID NO: 990568 - RNA, 22 nt, Human
auuacaaaagaagggagaaggu

SEQ ID NO: 990569 - RNA, 22 nt, Human
gcuuccugucccucagccauga

SEQ ID NO: 990570 - RNA, 22 nt, Human
gaaauauugggacucagagcuu

SEQ ID NO: 990571 - RNA, 22 nt, Human
agcagugaugcaugacagccua

SEQ ID NO: 990572 - RNA, 22 nt, Human
uugcaaaagccgaggcacucca

SEQ ID NO: 990573 - RNA, 17 nt, Human
cuccuggccaccccucu

SEQ ID NO: 990574 - RNA, 22 nt, Human
cagaguguugaccauaagccca

SEQ ID NO: 990575 - RNA, 22 nt, Human
ucagaagcaaacaucacucuag

SEQ ID NO: 990576 - RNA, 22 nt, Human
aacagacagaaaaaugugaucu

SEQ ID NO: 990577 - RNA, 22 nt, Human
uuacugaaaauucuucaggauu

SEQ ID NO: 990578 - RNA, 22 nt, Human
uccucaggugacuagguaucuu

SEQ ID NO: 990579 - RNA, 19 nt, Human
uugaggggccaggggagau

SEQ ID NO: 990580 - RNA, 22 nt, Human
cugagcugggaguggauagugg

SEQ ID NO: 990581 - RNA, 22 nt, Human
acauuugagaugccuuuuaggu

SEQ ID NO: 990582 - RNA, 22 nt, Human
cugggagcccgcguccuggugg

SEQ ID NO: 990583 - RNA, 22 nt, Human
gcucagagaugucugcugccuu

SEQ ID NO: 990584 - RNA, 22 nt, Human
cugagcccaggcgggagcugag

SEQ ID NO: 990585 - RNA, 22 nt, Human
gcucugagucucagcuaccaca

SEQ ID NO: 990586 - RNA, 22 nt, Human
gagcuggugugugcccgagcac

SEQ ID NO: 990587 - RNA, 23 nt, Human
uccagggauuaaugaagucaguc

SEQ ID NO: 990588 - RNA, 22 nt, Human
gcucccaccuuugcuaucagua

SEQ ID NO: 990589 - RNA, 22 nt, Human
agcaggaggguuuuguagaguc

SEQ ID NO: 990590 - RNA, 22 nt, Human
augccuggacugacaugcacug

SEQ ID NO: 990591 - RNA, 20 nt, Human
ggcucuggaaucuggugggc

SEQ ID NO: 990592 - RNA, 22 nt, Human
cauggccuugagugacugcacu

SEQ ID NO: 990593 - RNA, 22 nt, Human
cagcugugcuguauuaagcucu

SEQ ID NO: 990594 - RNA, 22 nt, Human
ugcugucugauucagggugauu

SEQ ID NO: 990595 - RNA, 22 nt, Human
gggugcugacuggggccugaaa

SEQ ID NO: 990596 - RNA, 22 nt, Human
uggucaaaagaaagcucagaac

SEQ ID NO: 990597 - RNA, 22 nt, Human
gccugagacagugugguccaau

SEQ ID NO: 990598 - RNA, 21 nt, Human
acugccugucuccauagucua

SEQ ID NO: 990599 - RNA, 22 nt, Human
agcagccagaaagggcagucga

SEQ ID NO: 990600 - RNA, 22 nt, Human
aguuauauaacuaucuagaugc

SEQ ID NO: 990601 - RNA, 22 nt, Human
uguuuaagcugaugagguaucg

SEQ ID NO: 990602 - RNA, 22 nt, Human
gagaaagcuucuuucccacagg

SEQ ID NO: 990603 - RNA, 21 nt, Human
gcagccacugccuucaacaau

SEQ ID NO: 990604 - RNA, 22 nt, Human
ugcugggggugucucaccaggc

SEQ ID NO: 990605 - RNA, 22 nt, Human
ucagcaggcgguuccuuguggg

SEQ ID NO: 990606 - RNA, 22 nt, Human
ggcugugccucaaggcuacuca

SEQ ID NO: 990607 - RNA, 22 nt, Human
auucacaauuagaaguagauaa

SEQ ID NO: 990608 - RNA, 22 nt, Human
accaaggagccacauacaaccu

SEQ ID NO: 990609 - RNA, 22 nt, Human
ccuggccugcucggcucuuaag

SEQ ID NO: 990610 - RNA, 22 nt, Human
uguggccuccuguuccugggua

SEQ ID NO: 990611 - RNA, 22 nt, Human
agagugauucuaguuagggaau

SEQ ID NO: 990612 - RNA, 22 nt, Human
uccuugaacagagggccugggu

SEQ ID NO: 990613 - RNA, 22 nt, Human
uuccugagggacuuuugagauu

SEQ ID NO: 990614 - RNA, 23 nt, Human
uuucauaugguguggaugaagaa

SEQ ID NO: 990615 - RNA, 22 nt, Human
ucuccugugcacccucccugug

SEQ ID NO: 990616 - RNA, 22 nt, Human
ccuggcagcuguuuggcuuggc

SEQ ID NO: 990617 - RNA, 22 nt, Human
agcacagguacggagaugcuac

SEQ ID NO: 990618 - RNA, 22 nt, Human
uugcauaaagauuuuauugcau

SEQ ID NO: 990619 - RNA, 22 nt, Human
caagccucagaaucuucuccau

SEQ ID NO: 990620 - RNA, 22 nt, Human
aguaaugucccuuaaauguggu

SEQ ID NO: 990621 - RNA, 22 nt, Human
gcaugugucuccccaguggagg

SEQ ID NO: 990622 - RNA, 22 nt, Human
caggugggcguggcgagaaggc

SEQ ID NO: 990623 - RNA, 22 nt, Human
ucuggccuacuggaguccauga

SEQ ID NO: 990624 - RNA, 22 nt, Human
augaaaacggaccagagcuauu

SEQ ID NO: 990625 - RNA, 22 nt, Human
cagcccaaagccccaggcuaga

SEQ ID NO: 990626 - RNA, 22 nt, Human
uugacaauguccuuugaauuuc

SEQ ID NO: 990627 - RNA, 22 nt, Human
guggcccugucccaggccuccu

SEQ ID NO: 990628 - RNA, 22 nt, Human
cuaauguggacucuaucaaagu

SEQ ID NO: 990629 - RNA, 22 nt, Human
aggugcugccccgagaaggaug

SEQ ID NO: 990630 - RNA, 22 nt, Human
uaacacugauuuguucucaggg

SEQ ID NO: 990631 - RNA, 22 nt, Human
ucccagagucuucuccuguaau

SEQ ID NO: 990632 - RNA, 22 nt, Human
ucagggcauguauguuucuuua

SEQ ID NO: 990633 - RNA, 22 nt, Human
agacagagauacuauguuguca

SEQ ID NO: 990634 - RNA, 22 nt, Human
cagccagcuucagauccaagcc

SEQ ID NO: 990635 - RNA, 22 nt, Human
accagagcagacuacuggaggu

SEQ ID NO: 990636 - RNA, 22 nt, Human
ucagagucucccccaguuuggg

SEQ ID NO: 990637 - RNA, 22 nt, Human
agcugguuagcaaucuaaguga

SEQ ID NO: 990638 - RNA, 22 nt, Human
acguuuucagugacugugcuuc

SEQ ID NO: 990639 - RNA, 22 nt, Human
aaaaaucacuuuuauaggcagc

SEQ ID NO: 990640 - RNA, 22 nt, Human
aaggcacugaacuuaaauucug

SEQ ID NO: 990641 - RNA, 22 nt, Human
ucucugcucugugccucaguuu

SEQ ID NO: 990642 - RNA, 22 nt, Human
guacauuuuacuuuguuugaau

SEQ ID NO: 990643 - RNA, 22 nt, Human
acaacaggguaaggcaggccau

SEQ ID NO: 990644 - RNA, 22 nt, Human
cagggcagggagcuuagaauga

SEQ ID NO: 990645 - RNA, 20 nt, Human
ggagagcagggaagacagua

SEQ ID NO: 990646 - RNA, 21 nt, Human
uuucugucucugccacuaguu

SEQ ID NO: 990647 - RNA, 22 nt, Human
cagccuguagaauacaguaaau

SEQ ID NO: 990648 - RNA, 22 nt, Human
cuguggagcuuguggcaguggg

SEQ ID NO: 990649 - RNA, 18 nt, Human
uuccauaauguauguaac

SEQ ID NO: 990650 - RNA, 22 nt, Human
ucagggcacauucugcaguggc

SEQ ID NO: 990651 - RNA, 22 nt, Human
uguguacagcaggauuucucaa

SEQ ID NO: 990652 - RNA, 22 nt, Human
uggccucuggcugaggacuaac

SEQ ID NO: 990653 - RNA, 22 nt, Human
guuauauaagacaaaucagagu

SEQ ID NO: 990654 - RNA, 22 nt, Human
ucagcagcagcucagcauguuu

SEQ ID NO: 990655 - RNA, 22 nt, Human
uacaguagaauuuuuaguaacu

SEQ ID NO: 990656 - RNA, 22 nt, Human
ggguggaguagaaagaugaauu

SEQ ID NO: 990657 - RNA, 22 nt, Human
caagaugaaacuacagggagga

SEQ ID NO: 990658 - RNA, 22 nt, Human
gcuugcucaacccccgucucuc

SEQ ID NO: 990659 - RNA, 22 nt, Human
ccacucugcugugcuccaugau

SEQ ID NO: 990660 - RNA, 22 nt, Human
gcugucugacuccaaguuggag

SEQ ID NO: 990661 - RNA, 22 nt, Human
ucacagugagccaugucagaga

SEQ ID NO: 990662 - RNA, 22 nt, Human
uucauuccuucccuaagcaacu

SEQ ID NO: 990663 - RNA, 22 nt, Human
agagcagugcugaagaguaggg

SEQ ID NO: 990664 - RNA, 22 nt, Human
acuuugcaauacuuaauacaaa

SEQ ID NO: 990665 - RNA, 22 nt, Human
guccaaauaaguugcaaaauag

SEQ ID NO: 990666 - RNA, 22 nt, Human
cagagcagggugcaccuugggc

SEQ ID NO: 990667 - RNA, 22 nt, Human
ggcagugguuagaaacaugagc

SEQ ID NO: 990668 - RNA, 20 nt, Human
acuuucucgguuucucaccu

SEQ ID NO: 990669 - RNA, 22 nt, Human
cugugucggacgugggcagcag

SEQ ID NO: 990670 - RNA, 22 nt, Human
acaggugauucaggcucuggga

SEQ ID NO: 990671 - RNA, 22 nt, Human
uuccuguuucauagaaaacuga

SEQ ID NO: 990672 - RNA, 22 nt, Human
gggcagcagagcccugccgagu

SEQ ID NO: 990673 - RNA, 22 nt, Human
agcagcuuacauguggccuauc

SEQ ID NO: 990674 - RNA, 22 nt, Human
gcuggccagugucccagggauc

SEQ ID NO: 990675 - RNA, 22 nt, Human
ugggcugcuucuauuggugguc

SEQ ID NO: 990676 - RNA, 22 nt, Human
acucugaggagugacuagaggu

SEQ ID NO: 990677 - RNA, 22 nt, Human
ugucucugauaaguaguucagu

SEQ ID NO: 990678 - RNA, 22 nt, Human
uaaguauguuagaaaaucaagu

SEQ ID NO: 990679 - RNA, 22 nt, Human
aggauuucugugccuggaaaau

SEQ ID NO: 990680 - RNA, 22 nt, Human
caggcugggcagccuccccggc

SEQ ID NO: 990681 - RNA, 22 nt, Human
gugcuucucuucacacccaacu

SEQ ID NO: 990682 - RNA, 22 nt, Human
cugcugcucgaccagucccagg

SEQ ID NO: 990683 - RNA, 22 nt, Human
ccagcccugaacccugcugcau

SEQ ID NO: 990684 - RNA, 22 nt, Human
cccaggagguggagcuugcagu

SEQ ID NO: 990685 - RNA, 22 nt, Human
ucucagagggaaaggccaauuu

SEQ ID NO: 990686 - RNA, 22 nt, Human
aaggcaggaugcggacccaucu

SEQ ID NO: 990687 - RNA, 22 nt, Human
ucucagagagaugaaacuucca

SEQ ID NO: 990688 - RNA, 22 nt, Human
cagaguacugggagaacagaag

SEQ ID NO: 990689 - RNA, 22 nt, Human
aaaagaggagugguuuaugaca

SEQ ID NO: 990690 - RNA, 23 nt, Human
agggcugaugccauugcagcucu

SEQ ID NO: 990691 - RNA, 22 nt, Human
gcccaugcacuuucugugaugg

SEQ ID NO: 990692 - RNA, 17 nt, Human
auccccagcaucuagaa

SEQ ID NO: 990693 - RNA, 22 nt, Human
cuacacaguucugccuaauggc

SEQ ID NO: 990694 - RNA, 22 nt, Human
ggccuggaagaggacagagaaa

SEQ ID NO: 990695 - RNA, 22 nt, Human
cagagguagccgagugcaaucg

SEQ ID NO: 990696 - RNA, 22 nt, Human
cucuggaguuagugaucugggc

SEQ ID NO: 990697 - RNA, 23 nt, Human
ucugcucugaaguucggcugagc

SEQ ID NO: 990698 - RNA, 22 nt, Human
agcagacauaucucaugucaca

SEQ ID NO: 990699 - RNA, 22 nt, Human
uugugucugggggagugacauc

SEQ ID NO: 990700 - RNA, 22 nt, Human
gcagagugauggaaugugggug

SEQ ID NO: 990701 - RNA, 22 nt, Human
aggaccuguagggccugcaucc

SEQ ID NO: 990702 - RNA, 20 nt, Human
guauuagguguuccucuuuc

SEQ ID NO: 990703 - RNA, 19 nt, Human
cccucaggucugagcaguc

SEQ ID NO: 990704 - RNA, 20 nt, Human
ugaagcagccuugauucugu

SEQ ID NO: 990705 - RNA, 22 nt, Human
aaaucugggagcagcucggcca

SEQ ID NO: 990706 - RNA, 22 nt, Human
cugcugccggcgagccucccuu

SEQ ID NO: 990707 - RNA, 22 nt, Human
uuaaaaugcagauucugauuca

SEQ ID NO: 990708 - RNA, 22 nt, Human
acacacagguaaaggagccugg

SEQ ID NO: 990709 - RNA, 22 nt, Human
gacugucauucuagugcccaug

SEQ ID NO: 990710 - RNA, 22 nt, Human
auggccaaggggccuaggcagg

SEQ ID NO: 990711 - RNA, 22 nt, Human
acugucuguccugcucuccgug

SEQ ID NO: 990712 - RNA, 22 nt, Human
ugcucugugguccaagauggcu

SEQ ID NO: 990713 - RNA, 22 nt, Human
gccagcucccaagugagccccu

SEQ ID NO: 990714 - RNA, 22 nt, Human
aaggagugcaugacucagagua

SEQ ID NO: 990715 - RNA, 22 nt, Human
auugcaccuuggguuuugaaag

SEQ ID NO: 990716 - RNA, 22 nt, Human
agagggagcccagucauagcug

SEQ ID NO: 990717 - RNA, 22 nt, Human
gccagagcagaauagaguggcc

SEQ ID NO: 990718 - RNA, 22 nt, Human
uucuggagagaaaccuuacaaa

SEQ ID NO: 990719 - RNA, 22 nt, Human
uauguagaagcugcucaaagaa

SEQ ID NO: 990720 - RNA, 22 nt, Human
agggagguaggagcuucuagcu

SEQ ID NO: 990721 - RNA, 22 nt, Human
agggguggccugccuuacuccc

SEQ ID NO: 990722 - RNA, 22 nt, Human
ggccugagcucuggggaggcaa

SEQ ID NO: 990723 - RNA, 22 nt, Human
ugaagcaacuggacaaguuggc

SEQ ID NO: 990724 - RNA, 22 nt, Human
ucaggggacuuaggagagaagu

SEQ ID NO: 990725 - RNA, 20 nt, Human
uccagggcuagggagcucau

SEQ ID NO: 990726 - RNA, 22 nt, Human
aagcuggcaauuaucaaaacug

SEQ ID NO: 990727 - RNA, 22 nt, Human
gccucugcucggacuuugccuc

SEQ ID NO: 990728 - RNA, 22 nt, Human
uggcagcacuugaacuugagcc

SEQ ID NO: 990729 - RNA, 22 nt, Human
gggcuucuagaccagcagugag

SEQ ID NO: 990730 - RNA, 22 nt, Human
ucagaacagaagaaggaacacg

SEQ ID NO: 990731 - RNA, 22 nt, Human
ggccucucuccuuggcuugcag

SEQ ID NO: 990732 - RNA, 20 nt, Human
ucaccuuuguugguauucau

SEQ ID NO: 990733 - RNA, 22 nt, Human
ggccugucucacccccgggugc

SEQ ID NO: 990734 - RNA, 22 nt, Human
agggcagcagcccauggcucug

SEQ ID NO: 990735 - RNA, 22 nt, Human
aauguguagggugccuguuuuu

SEQ ID NO: 990736 - RNA, 22 nt, Human
ccugugugucugucacugcaca

SEQ ID NO: 990737 - RNA, 22 nt, Human
cacagguguucuugcagugaaa

SEQ ID NO: 990738 - RNA, 22 nt, Human
uuucucuaaauagggaggcuua

SEQ ID NO: 990739 - RNA, 22 nt, Human
ugagccugguugcagugucugg

SEQ ID NO: 990740 - RNA, 22 nt, Human
uggagcaggugcucaggguaau

SEQ ID NO: 990741 - RNA, 22 nt, Human
cccagcuaccucugcuaggaga

SEQ ID NO: 990742 - RNA, 22 nt, Human
aucagcaaaaaugccuucagaa

SEQ ID NO: 990743 - RNA, 22 nt, Human
uuagaaaugauuucaccucuuu

SEQ ID NO: 990744 - RNA, 22 nt, Human
agggaagugaaugacagauauc

SEQ ID NO: 990745 - RNA, 22 nt, Human
cugagccaaggggacagugaca

SEQ ID NO: 990746 - RNA, 22 nt, Human
gccugagcccaggugugcagag

SEQ ID NO: 990747 - RNA, 22 nt, Human
agagcuguuuggacaucugagu

SEQ ID NO: 990748 - RNA, 22 nt, Human
uccuuuuugguccaaggugacc

SEQ ID NO: 990749 - RNA, 22 nt, Human
cccaaggcauggcaugguggca

SEQ ID NO: 990750 - RNA, 22 nt, Human
ugcagccaucuuucuuggagga

SEQ ID NO: 990751 - RNA, 22 nt, Human
cagcagugcuucagugugagau

SEQ ID NO: 990752 - RNA, 22 nt, Human
ccagcugcaggggagcagugga

SEQ ID NO: 990753 - RNA, 22 nt, Human
gggcaguggcucacgccuguaa

SEQ ID NO: 990754 - RNA, 22 nt, Human
aauaguaaaagauacagcuaau

SEQ ID NO: 990755 - RNA, 22 nt, Human
aaagaacaauguggaaucuccu

SEQ ID NO: 990756 - RNA, 22 nt, Human
accugccuaucagcugccugcu

SEQ ID NO: 990757 - RNA, 22 nt, Human
aucauuccacauguaccacuag

SEQ ID NO: 990758 - RNA, 22 nt, Human
auagauguucaaucagauauuu

SEQ ID NO: 990759 - RNA, 22 nt, Human
gccuaggagacaagcgugaaag

SEQ ID NO: 990760 - RNA, 22 nt, Human
caauaagccagguguuuguguu

SEQ ID NO: 990761 - RNA, 22 nt, Human
ugcaggugccucuugagcuugu

SEQ ID NO: 990762 - RNA, 22 nt, Human
ucccagagucagagguggggcc

SEQ ID NO: 990763 - RNA, 22 nt, Human
agagaaaacucauugagguguc

SEQ ID NO: 990764 - RNA, 22 nt, Human
ccagagugacgugaagugugaa

SEQ ID NO: 990765 - RNA, 22 nt, Human
ggagccaguuuagaccucaguu

SEQ ID NO: 990766 - RNA, 22 nt, Human
uugucuguaaagacggccacca

SEQ ID NO: 990767 - RNA, 22 nt, Human
acuguguccuauuuccuugaca

SEQ ID NO: 990768 - RNA, 22 nt, Human
ugaaaucugucccacuuuagcu

SEQ ID NO: 990769 - RNA, 19 nt, Human
ucgagucaagacacuaggc

SEQ ID NO: 990770 - RNA, 22 nt, Human
uuauuagagugcuuugagaaag

SEQ ID NO: 990771 - RNA, 22 nt, Human
uuaagucacuuaucuaaagaca

SEQ ID NO: 990772 - RNA, 22 nt, Human
guuugauucaagaacaaagagu

SEQ ID NO: 990773 - RNA, 22 nt, Human
aauauccagguagaugucuucu

SEQ ID NO: 990774 - RNA, 22 nt, Human
uugcagggcaggaccauggaca

SEQ ID NO: 990775 - RNA, 20 nt, Human
ugggccugagccugugggcu

SEQ ID NO: 990776 - RNA, 22 nt, Human
uuagauaaauugcaacuugauu

SEQ ID NO: 990777 - RNA, 22 nt, Human
uggcagcaaguucuugggaggu

SEQ ID NO: 990778 - RNA, 22 nt, Human
aauguuauuacacuugugaaau

SEQ ID NO: 990779 - RNA, 22 nt, Human
aaggcagagggcuggaucagag

SEQ ID NO: 990780 - RNA, 22 nt, Human
gaagcagcucagauugacugaa

SEQ ID NO: 990781 - RNA, 22 nt, Human
gugggccucuugaggguggcua

SEQ ID NO: 990782 - RNA, 22 nt, Human
acagcagagacacucaggaggc

SEQ ID NO: 990783 - RNA, 22 nt, Human
ugccugucuucaggagugucac

SEQ ID NO: 990784 - RNA, 22 nt, Human
uguaguaagugcgcaauaaaua

SEQ ID NO: 990785 - RNA, 22 nt, Human
uuuccuaugauauucuaugugu

SEQ ID NO: 990786 - RNA, 22 nt, Human
uucaaagugcauguuccucaga

SEQ ID NO: 990787 - RNA, 22 nt, Human
ggggcagcucccgagggcagga

SEQ ID NO: 990788 - RNA, 22 nt, Human
auugcacaaacacagucagacu

SEQ ID NO: 990789 - RNA, 22 nt, Human
ggggcugggauuugaacccagg

SEQ ID NO: 990790 - RNA, 22 nt, Human
ggcagccuccagggcacuggug

SEQ ID NO: 990791 - RNA, 22 nt, Human
accucccagcucugagcuuggg

SEQ ID NO: 990792 - RNA, 22 nt, Human
cagcaaaagccagcauaagcuc

SEQ ID NO: 990793 - RNA, 22 nt, Human
ucuggcaggcaaucggcucugg

SEQ ID NO: 990794 - RNA, 23 nt, Human
acaaaugcccauacaucuaguuc

SEQ ID NO: 990795 - RNA, 22 nt, Human
cugggcucagaugagaggaagg

SEQ ID NO: 990796 - RNA, 23 nt, Human
gcagauggccccagagugcugcc

SEQ ID NO: 990797 - RNA, 22 nt, Human
gggccuggggacaccaccauga

SEQ ID NO: 990798 - RNA, 22 nt, Human
uggaagagggagcuggguggcc

SEQ ID NO: 990799 - RNA, 22 nt, Human
aacccuggggcagcugcuaggg

SEQ ID NO: 990800 - RNA, 22 nt, Human
agaggccuccgaaaggugggcu

SEQ ID NO: 990801 - RNA, 22 nt, Human
ugcaguggaggccgugagacag

SEQ ID NO: 990802 - RNA, 22 nt, Human
uggcacauagaaaaggaucaau

SEQ ID NO: 990803 - RNA, 22 nt, Human
aagccuuccugagugcaaggcc

SEQ ID NO: 990804 - RNA, 22 nt, Human
gccuggcacucacugaagaggc

SEQ ID NO: 990805 - RNA, 22 nt, Human
ugguccugccccgugcacagag

SEQ ID NO: 990806 - RNA, 21 nt, Human
ugcauaaagaaauacaaauac

SEQ ID NO: 990807 - RNA, 22 nt, Human
acugcagccuuugggcucauaa

SEQ ID NO: 990808 - RNA, 22 nt, Human
ugccagcuccgaggagcugcag

SEQ ID NO: 990809 - RNA, 22 nt, Human
gccuuucaguuccaucaaagga

SEQ ID NO: 990810 - RNA, 22 nt, Human
ccaguggguaggccauggugag

SEQ ID NO: 990811 - RNA, 22 nt, Human
ucuggccacuugcuucacacug

SEQ ID NO: 990812 - RNA, 22 nt, Human
uccaagggaaacugcacuucua

SEQ ID NO: 990813 - RNA, 22 nt, Human
cggcagagcuuccugcucagcg

SEQ ID NO: 990814 - RNA, 22 nt, Human
acaauucucucauaucuuauua

SEQ ID NO: 990815 - RNA, 22 nt, Human
gaaauauuucucuugagccccu

SEQ ID NO: 990816 - RNA, 18 nt, Human
ggagagugagaucaaaca

SEQ ID NO: 990817 - RNA, 22 nt, Human
ugaaagguguccaauauuucuc

SEQ ID NO: 990818 - RNA, 22 nt, Human
ggacuggacucucaggcucaca

SEQ ID NO: 990819 - RNA, 22 nt, Human
gcugucugucucugugacuuaa

SEQ ID NO: 990820 - RNA, 22 nt, Human
uaaagaacacagggaauagcac

SEQ ID NO: 990821 - RNA, 22 nt, Human
ccugagggaaggaugcuaccca

SEQ ID NO: 990822 - RNA, 22 nt, Human
cauuucugauuacagaauacua

SEQ ID NO: 990823 - RNA, 22 nt, Human
ggagaagggacagacucagcuu

SEQ ID NO: 990824 - RNA, 22 nt, Human
acaccuuugccccaagucauag

SEQ ID NO: 990825 - RNA, 23 nt, Human
cagaaaguuugagaagauacauc

SEQ ID NO: 990826 - RNA, 22 nt, Human
gcaggcaggagcccaacugccu

SEQ ID NO: 990827 - RNA, 22 nt, Human
gccuggcccagggcuccgcagg

SEQ ID NO: 990828 - RNA, 22 nt, Human
gucccagaaacauauugcuggu

SEQ ID NO: 990829 - RNA, 22 nt, Human
gcccagaaguugaggcugcagu

SEQ ID NO: 990830 - RNA, 22 nt, Human
caggaggaggugagguagaacu

SEQ ID NO: 990831 - RNA, 22 nt, Human
acuuugcaaugggcagaaccca

SEQ ID NO: 990832 - RNA, 20 nt, Human
aagcagaagcugcucucagc

SEQ ID NO: 990833 - RNA, 22 nt, Human
aggagcugggcugcugcuggga

SEQ ID NO: 990834 - RNA, 22 nt, Human
ucugcagcuucuugccagagag

SEQ ID NO: 990835 - RNA, 22 nt, Human
aggcacugggaauaugcugagg

SEQ ID NO: 990836 - RNA, 22 nt, Human
ugcagcagguuccaaaggguua

SEQ ID NO: 990837 - RNA, 22 nt, Human
aaggccuggauuuagguuguga

SEQ ID NO: 990838 - RNA, 22 nt, Human
cugcugggucuaugcaagugga

SEQ ID NO: 990839 - RNA, 22 nt, Human
ggcuggaaguccaagaucaaga

SEQ ID NO: 990840 - RNA, 22 nt, Human
aaaguuugagugauuugacaca

SEQ ID NO: 990841 - RNA, 22 nt, Human
ugggaggaaugucacugagcca

SEQ ID NO: 990842 - RNA, 22 nt, Human
gaagcccuauccucuccuggga

SEQ ID NO: 990843 - RNA, 22 nt, Human
auggaaaggcuguggaaacuua

SEQ ID NO: 990844 - RNA, 22 nt, Human
ugucaugccauuuaaaauguuu

SEQ ID NO: 990845 - RNA, 22 nt, Human
acuaaauagccucugguaguug

SEQ ID NO: 990846 - RNA, 22 nt, Human
cugucucugucuuaacucccag

SEQ ID NO: 990847 - RNA, 22 nt, Human
cagaggcucaccagccuuucac

SEQ ID NO: 990848 - RNA, 22 nt, Human
ccugggaagagcugacaggagg

SEQ ID NO: 990849 - RNA, 22 nt, Human
agauacauauagaaaacaucaa

SEQ ID NO: 990850 - RNA, 22 nt, Human
acauugaugaaaagguaucauu

SEQ ID NO: 990851 - RNA, 22 nt, Human
cagucccacaagaucuccacaa

SEQ ID NO: 990852 - RNA, 22 nt, Human
ugggccugugaugcugggcuau

SEQ ID NO: 990853 - RNA, 22 nt, Human
cuggggggagcugcguccagca

SEQ ID NO: 990854 - RNA, 22 nt, Human
aacuccugaggaaauggucuca

SEQ ID NO: 990855 - RNA, 20 nt, Human
ucugucucugagcuagacuu

SEQ ID NO: 990856 - RNA, 22 nt, Human
cagggcugguuugucgaagaaa

SEQ ID NO: 990857 - RNA, 22 nt, Human
gagccuccuccuggugugccga

SEQ ID NO: 990858 - RNA, 22 nt, Human
guggauggacaugggcaagagg

SEQ ID NO: 990859 - RNA, 22 nt, Human
ucacaccuguaaucccaggccu

SEQ ID NO: 990860 - RNA, 22 nt, Human
agcccaaggcuucccugcuggc

SEQ ID NO: 990861 - RNA, 22 nt, Human
uuaguaaauaaagucuacuuuc

SEQ ID NO: 990862 - RNA, 22 nt, Human
caguggguggcuaaguggcuga

SEQ ID NO: 990863 - RNA, 23 nt, Human
ccagcucccaggucugaggacug

SEQ ID NO: 990864 - RNA, 22 nt, Human
ugacagcugagccccaggcaag

SEQ ID NO: 990865 - RNA, 22 nt, Human
cacagggccacuuucccaguaa

SEQ ID NO: 990866 - RNA, 22 nt, Human
aagcagcuuaaauuagagccug

SEQ ID NO: 990867 - RNA, 22 nt, Human
agcagcaacuuauuuuucuuau

SEQ ID NO: 990868 - RNA, 22 nt, Human
aucuagaaaguguugaagauca

SEQ ID NO: 990869 - RNA, 22 nt, Human
ccaggacuuauuacaguauaac

SEQ ID NO: 990870 - RNA, 22 nt, Human
aauccuggaauacaagagugaa

SEQ ID NO: 990871 - RNA, 22 nt, Human
ugggcagaucuuugguggcuag

SEQ ID NO: 990872 - RNA, 19 nt, Human
ccucccacggauuccuucc

SEQ ID NO: 990873 - RNA, 22 nt, Human
ccucacuuuccuuucuccuggg

SEQ ID NO: 990874 - RNA, 22 nt, Human
gcuggguggaucggaggcucug

SEQ ID NO: 990875 - RNA, 22 nt, Human
gcuggccuucugcagaguucug

SEQ ID NO: 990876 - RNA, 22 nt, Human
uuuugucuaagaacuuugcaaa

SEQ ID NO: 990877 - RNA, 22 nt, Human
agacagugcaagaagagcaggc

SEQ ID NO: 990878 - RNA, 22 nt, Human
ccagugggugcugggcucugcc

SEQ ID NO: 990879 - RNA, 22 nt, Human
caggcaccccaggugagcacug

SEQ ID NO: 990880 - RNA, 22 nt, Human
cugcuggggucagagcacuggg

SEQ ID NO: 990881 - RNA, 22 nt, Human
ggcugccugaggcagugagaga

SEQ ID NO: 990882 - RNA, 22 nt, Human
agggcuggcuccguuaccuuga

SEQ ID NO: 990883 - RNA, 22 nt, Human
gcuggcagggacagcugcgugu

SEQ ID NO: 990884 - RNA, 22 nt, Human
aaguaugcaaaucgucuuagaa

SEQ ID NO: 990885 - RNA, 20 nt, Human
acugggcauaccuguccugu

SEQ ID NO: 990886 - RNA, 22 nt, Human
agcagugggggaguguuaguuu

SEQ ID NO: 990887 - RNA, 22 nt, Human
agaggcugggaaggguccccgg

SEQ ID NO: 990888 - RNA, 22 nt, Human
aaaagcucuuucugcuguagau

SEQ ID NO: 990889 - RNA, 22 nt, Human
cuggcucaguucuugguuuuca

SEQ ID NO: 990890 - RNA, 20 nt, Human
ccacaggaguccagucgacc

SEQ ID NO: 990891 - RNA, 22 nt, Human
uagcacaucuggcgcuuauagg

SEQ ID NO: 990892 - RNA, 22 nt, Human
caguacuuugaagauauuuuag

SEQ ID NO: 990893 - RNA, 22 nt, Human
uggcagagcccagaacugagca

SEQ ID NO: 990894 - RNA, 22 nt, Human
acaggcugcugggcuccgugcu

SEQ ID NO: 990895 - RNA, 22 nt, Human
ggucacugcucuaaacaaaagu

SEQ ID NO: 990896 - RNA, 22 nt, Human
ugggcugccggcaggcucugcc

SEQ ID NO: 990897 - RNA, 22 nt, Human
aggugccagugcuguggucccc

SEQ ID NO: 990898 - RNA, 22 nt, Human
auucacaacaaaaggauaugag

SEQ ID NO: 990899 - RNA, 23 nt, Human
gggagccauggguggucauggag

SEQ ID NO: 990900 - RNA, 21 nt, Human
ucaggcaggcgcagagggaag

SEQ ID NO: 990901 - RNA, 22 nt, Human
ucuggccaacaaaaacuaaguc

SEQ ID NO: 990902 - RNA, 23 nt, Human
uggcagagacccagaaucuacau

SEQ ID NO: 990903 - RNA, 22 nt, Human
gagcucccuggagguucagaua

SEQ ID NO: 990904 - RNA, 22 nt, Human
aaugucugccugaacuuuauau

SEQ ID NO: 990905 - RNA, 22 nt, Human
agcccuccucacaucagcgucc

SEQ ID NO: 990906 - RNA, 22 nt, Human
gguggguuuggaagagcaggcu

SEQ ID NO: 990907 - RNA, 22 nt, Human
gagggggagaugugcacacacu

SEQ ID NO: 990908 - RNA, 22 nt, Human
cagacacagauaugcauauggc

SEQ ID NO: 990909 - RNA, 17 nt, Human
cagacagauauccuggg

SEQ ID NO: 990910 - RNA, 21 nt, Human
aggcucagcagguguauaaag

SEQ ID NO: 990911 - RNA, 22 nt, Human
aucagcaagcaugguuaggugu

SEQ ID NO: 990912 - RNA, 22 nt, Human
ggccagaggccacagcuguguc

SEQ ID NO: 990913 - RNA, 22 nt, Human
acuguguggaccacucugaggc

SEQ ID NO: 990914 - RNA, 22 nt, Human
gcugggagugggcaagaugaga

SEQ ID NO: 990915 - RNA, 22 nt, Human
ccuggguggcagagguugcagu

SEQ ID NO: 990916 - RNA, 22 nt, Human
gaggccuggcucugcccuccug

SEQ ID NO: 990917 - RNA, 22 nt, Human
ggcagaaggccucccagcuccu

SEQ ID NO: 990918 - RNA, 22 nt, Human
acagcaagccagcuugucacug

SEQ ID NO: 990919 - RNA, 19 nt, Human
gggaaauucacuugcuucc

SEQ ID NO: 990920 - RNA, 18 nt, Human
ccagagcuggcuccucgc

SEQ ID NO: 990921 - RNA, 22 nt, Human
ccuccaaguuugacucaggaca

SEQ ID NO: 990922 - RNA, 22 nt, Human
agaacagaagggaggaaggccu

SEQ ID NO: 990923 - RNA, 22 nt, Human
cuggcucagacagcugugcagu

SEQ ID NO: 990924 - RNA, 22 nt, Human
uguaauggaagugggauugcau

SEQ ID NO: 990925 - RNA, 19 nt, Human
cagcugccuuuucuuugca

SEQ ID NO: 990926 - RNA, 20 nt, Human
aguagcagugugacauugac

SEQ ID NO: 990927 - RNA, 22 nt, Human
ucaggcugccuaucagacugug

SEQ ID NO: 990928 - RNA, 22 nt, Human
acugaaggucucagcaaggaug

SEQ ID NO: 990929 - RNA, 22 nt, Human
uggcagggugccaguugcgagu

SEQ ID NO: 990930 - RNA, 22 nt, Human
ggguggaggagaacaggcccca

SEQ ID NO: 990931 - RNA, 22 nt, Human
gcaccugcaggaugagccaggg

SEQ ID NO: 990932 - RNA, 22 nt, Human
uaagugcaauguuuuacuuaaa

SEQ ID NO: 990933 - RNA, 22 nt, Human
aagcugccuagaguugaauguc

SEQ ID NO: 990934 - RNA, 22 nt, Human
gggcauguagugugcauagaga

SEQ ID NO: 990935 - RNA, 22 nt, Human
ggcugccugugcccaggcacac

SEQ ID NO: 990936 - RNA, 22 nt, Human
aagcaaagaguuuaguggguga

SEQ ID NO: 990937 - RNA, 22 nt, Human
uaccuucaccagcgaauguuug

SEQ ID NO: 990938 - RNA, 22 nt, Human
cugcuggagguuggagcaugca

SEQ ID NO: 990939 - RNA, 22 nt, Human
gugcccugguccccagcauaua

SEQ ID NO: 990940 - RNA, 20 nt, Human
agugccagggcaggugagag

SEQ ID NO: 990941 - RNA, 22 nt, Human
gcugagggcuguaacagcagag

SEQ ID NO: 990942 - RNA, 22 nt, Human
ucaaaacacuauuaccuuuaau

SEQ ID NO: 990943 - RNA, 22 nt, Human
ggcugcugcccaccccugcaug

SEQ ID NO: 990944 - RNA, 22 nt, Human
cauuuacagugagaguuuuuac

SEQ ID NO: 990945 - RNA, 22 nt, Human
gugucaugcacacucaguguug

SEQ ID NO: 990946 - RNA, 22 nt, Human
ugcauuauaacugaauguuguu

SEQ ID NO: 990947 - RNA, 22 nt, Human
uucacauuggugauauguuucu

SEQ ID NO: 990948 - RNA, 22 nt, Human
cagaccuggaaaacaggcuugc

SEQ ID NO: 990949 - RNA, 22 nt, Human
aaucacaauuacuuuugcacca

SEQ ID NO: 990950 - RNA, 22 nt, Human
acauuucugucuuagggacugu

SEQ ID NO: 990951 - RNA, 22 nt, Human
guucacaaaguacuguaugcau

SEQ ID NO: 990952 - RNA, 22 nt, Human
agcagcugccagagagaguucc

SEQ ID NO: 990953 - RNA, 22 nt, Human
ggaggccaaggaggagcuugcc

SEQ ID NO: 990954 - RNA, 20 nt, Human
cccagggaccugagcuccau

SEQ ID NO: 990955 - RNA, 19 nt, Human
ggucacagggguuacaagg

SEQ ID NO: 990956 - RNA, 22 nt, Human
ucucagagauguuagggaagag

SEQ ID NO: 990957 - RNA, 22 nt, Human
cagcugaacauguagagcaucu

SEQ ID NO: 990958 - RNA, 22 nt, Human
cuuaauaaaugguagcuguuau

SEQ ID NO: 990959 - RNA, 22 nt, Human
cauuucauaguugucacaauaa

SEQ ID NO: 990960 - RNA, 22 nt, Human
cacuaugcuuacaugcuuauau

SEQ ID NO: 990961 - RNA, 22 nt, Human
aguuaaagucugaaauagagaa

SEQ ID NO: 990962 - RNA, 22 nt, Human
ccuggcaggccccuccuggauu

SEQ ID NO: 990963 - RNA, 22 nt, Human
ugaaaaggguagaucccuaagu

SEQ ID NO: 990964 - RNA, 21 nt, Human
gcagcuggucucagagcuugc

SEQ ID NO: 990965 - RNA, 22 nt, Human
gcaccuggcugcccagguggag

SEQ ID NO: 990966 - RNA, 22 nt, Human
auguagcaucuauccugauaaa

SEQ ID NO: 990967 - RNA, 22 nt, Human
cucugagcuccuggaagcgugc

SEQ ID NO: 990968 - RNA, 22 nt, Human
uguuuaauugggccaacagcgg

SEQ ID NO: 990969 - RNA, 22 nt, Human
acagggcccuugccagcacaag

SEQ ID NO: 990970 - RNA, 22 nt, Human
uguuggcagauugucuaggguu

SEQ ID NO: 990971 - RNA, 22 nt, Human
agggccugggguagcuuacugc

SEQ ID NO: 990972 - RNA, 22 nt, Human
ggcagacaccuuuaugucuaau

SEQ ID NO: 990973 - RNA, 22 nt, Human
ucacucugauagauaagcuaac

SEQ ID NO: 990974 - RNA, 22 nt, Human
caagcagacaguaggccuagaa

SEQ ID NO: 990975 - RNA, 22 nt, Human
aggcugcagaacagucaggugc

SEQ ID NO: 990976 - RNA, 22 nt, Human
gauuaggacauggauguauguu

SEQ ID NO: 990977 - RNA, 22 nt, Human
cugcugggcuccucaugugacu

SEQ ID NO: 990978 - RNA, 22 nt, Human
augcacuugcguguuugcaaau

SEQ ID NO: 990979 - RNA, 22 nt, Human
uggcugccuagucccucagccu

SEQ ID NO: 990980 - RNA, 22 nt, Human
aggcuuccgaguagcugggacu

SEQ ID NO: 990981 - RNA, 22 nt, Human
uaggcagggauuaggguugauu

SEQ ID NO: 990982 - RNA, 22 nt, Human
ugagcuuccucccugcauccau

SEQ ID NO: 990983 - RNA, 21 nt, Human
cagaggcagguccugggacgg

SEQ ID NO: 990984 - RNA, 22 nt, Human
cccagcacuuugaauaugucac

SEQ ID NO: 990985 - RNA, 22 nt, Human
cuucacaaauggccuagaguuc

SEQ ID NO: 990986 - RNA, 22 nt, Human
ggaucauuaacacauccaucac

SEQ ID NO: 990987 - RNA, 22 nt, Human
agccuggcacugaggcagggcg

SEQ ID NO: 990988 - RNA, 17 nt, Human
gugcagggaugaaggau

SEQ ID NO: 990989 - RNA, 22 nt, Human
agccauggcgccacuagaggga

SEQ ID NO: 990990 - RNA, 22 nt, Human
ccuccuggugggcgcuucuggc

SEQ ID NO: 990991 - RNA, 17 nt, Human
ucuguccagggagugug

SEQ ID NO: 990992 - RNA, 22 nt, Human
ugcugccacauuuaaagagggg

SEQ ID NO: 990993 - RNA, 22 nt, Human
aauguauaaaguguuaauaacu

SEQ ID NO: 990994 - RNA, 22 nt, Human
gcucugcucccucaaaugacau

SEQ ID NO: 990995 - RNA, 22 nt, Human
ugugccuuaugaauucuuucug

SEQ ID NO: 990996 - RNA, 22 nt, Human
ggcagcagaacuggcccuguau

SEQ ID NO: 990997 - RNA, 22 nt, Human
caggagcccagaguccucagcu

SEQ ID NO: 990998 - RNA, 22 nt, Human
aggcacugcuucuaaguaggaa

SEQ ID NO: 990999 - RNA, 22 nt, Human
ucaggcugugggcacuggccau

SEQ ID NO: 991000 - RNA, 22 nt, Human
aaacuccugggcucaagcaguu

SEQ ID NO: 991001 - RNA, 22 nt, Human
gcuggcauuacaggagagaacc

SEQ ID NO: 991002 - RNA, 22 nt, Human
uaugcacaguuacaagaauauc

SEQ ID NO: 991003 - RNA, 22 nt, Human
ccaaggcuccucagcuggucuu

SEQ ID NO: 991004 - RNA, 22 nt, Human
ucacugcucucuaagcaucgcc

SEQ ID NO: 991005 - RNA, 22 nt, Human
ucuuggcaauuugaucucaguu

SEQ ID NO: 991006 - RNA, 22 nt, Human
uccugagagcagaguccaggug

SEQ ID NO: 991007 - RNA, 22 nt, Human
auuauguaacugugguucagca

SEQ ID NO: 991008 - RNA, 22 nt, Human
uuaaacaguguuucaugugggg

SEQ ID NO: 991009 - RNA, 22 nt, Human
cugcagaggccucgccuccucu

SEQ ID NO: 991010 - RNA, 22 nt, Human
uggcucagucauggaugaguaa

SEQ ID NO: 991011 - RNA, 22 nt, Human
agacaacaccaaaugcuagugu

SEQ ID NO: 991012 - RNA, 22 nt, Human
ccaggaguuggagguugcagug

SEQ ID NO: 991013 - RNA, 22 nt, Human
ugaaaucuuagccauucugccu

SEQ ID NO: 991014 - RNA, 17 nt, Human
uuccaguuuaguauugu

SEQ ID NO: 991015 - RNA, 22 nt, Human
ggcagcaggcgacuucccuauu

SEQ ID NO: 991016 - RNA, 22 nt, Human
uugcauugaugucuauacgcug

SEQ ID NO: 991017 - RNA, 22 nt, Human
uucugagguccaugcaguacug

SEQ ID NO: 991018 - RNA, 22 nt, Human
cuugucugugucggauaaaacu

SEQ ID NO: 991019 - RNA, 22 nt, Human
cugggcagagcuaacaccugag

SEQ ID NO: 991020 - RNA, 22 nt, Human
aagcugaggcccauggcaaggu

SEQ ID NO: 991021 - RNA, 22 nt, Human
acauuucuuagccuaguuccag

SEQ ID NO: 991022 - RNA, 21 nt, Human
ggucuuccaaauaaggagaaa

SEQ ID NO: 991023 - RNA, 22 nt, Human
ucaaugauaucagcaggaugug

SEQ ID NO: 991024 - RNA, 22 nt, Human
ugccagugggugugcagagacu

SEQ ID NO: 991025 - RNA, 22 nt, Human
cuuaacagcaagaucuguguca

SEQ ID NO: 991026 - RNA, 23 nt, Human
uggcucucucagugcugcagagg

SEQ ID NO: 991027 - RNA, 22 nt, Human
gcacagccagcaucugagggau

SEQ ID NO: 991028 - RNA, 22 nt, Human
acuuccuggcugggugaccugg

SEQ ID NO: 991029 - RNA, 22 nt, Human
ucacugaauacuugucucaucc

SEQ ID NO: 991030 - RNA, 22 nt, Human
ucauaaaaugcuccugauauug

SEQ ID NO: 991031 - RNA, 22 nt, Human
cuacuucugugaugaaacuaca

SEQ ID NO: 991032 - RNA, 22 nt, Human
cccagcucucucaguucugcuu

SEQ ID NO: 991033 - RNA, 22 nt, Human
aguucuuuugugaacauaugcu

SEQ ID NO: 991034 - RNA, 19 nt, Human
uggcucugucgaaggcaca

SEQ ID NO: 991035 - RNA, 22 nt, Human
cuagagggauguuaggauagca

SEQ ID NO: 991036 - RNA, 22 nt, Human
ccuggcugguggcagcgacaag

SEQ ID NO: 991037 - RNA, 22 nt, Human
aaguguauauaugacuuauaaa

SEQ ID NO: 991038 - RNA, 22 nt, Human
caagggaguuacugagggcggg

SEQ ID NO: 991039 - RNA, 19 nt, Human
gcuccugggccucacucau

SEQ ID NO: 991040 - RNA, 22 nt, Human
cccauuuaucccaagguuacuc

SEQ ID NO: 991041 - RNA, 22 nt, Human
aagaauaaauuaagauacuuag

SEQ ID NO: 991042 - RNA, 22 nt, Human
caagaauuguacaaacugggug

SEQ ID NO: 991043 - RNA, 22 nt, Human
gguggcaggcccugagcauccc

SEQ ID NO: 991044 - RNA, 22 nt, Human
agggggugcuacuuccagaguu

SEQ ID NO: 991045 - RNA, 22 nt, Human
cuucuccucugaguccugggag

SEQ ID NO: 991046 - RNA, 22 nt, Human
ugugccauuucuauucugcagc

SEQ ID NO: 991047 - RNA, 22 nt, Human
uauagagguggaaacugagguu

SEQ ID NO: 991048 - RNA, 22 nt, Human
ucacaaagggagggauagcugg

SEQ ID NO: 991049 - RNA, 22 nt, Human
cuggucugagggcucuugaggc

SEQ ID NO: 991050 - RNA, 22 nt, Human
aguacuuuacuucuuacaguuu

SEQ ID NO: 991051 - RNA, 22 nt, Human
uugcuuccaguccaagucuguu

SEQ ID NO: 991052 - RNA, 22 nt, Human
uacagggguaacaguggggaau

SEQ ID NO: 991053 - RNA, 22 nt, Human
ccucagggacuccaugcugcag

SEQ ID NO: 991054 - RNA, 22 nt, Human
gcucccugaaaagaacaaaguc

SEQ ID NO: 991055 - RNA, 20 nt, Human
caguagcaauaauuagaagc

SEQ ID NO: 991056 - RNA, 22 nt, Human
gcaaagguagccaaggagcuca

SEQ ID NO: 991057 - RNA, 22 nt, Human
uggagcaggacugcugcccuca

SEQ ID NO: 991058 - RNA, 22 nt, Human
agaggggcucaagcaguggucu

SEQ ID NO: 991059 - RNA, 22 nt, Human
uguguacacaaugauugcagag

SEQ ID NO: 991060 - RNA, 22 nt, Human
ugauuuccccagucuugcugcu

SEQ ID NO: 991061 - RNA, 22 nt, Human
gcagugggagcuuaggcagugc

SEQ ID NO: 991062 - RNA, 22 nt, Human
gaggcaugucuggccuguccca

SEQ ID NO: 991063 - RNA, 22 nt, Human
augacacaauuuuagagcugaa

SEQ ID NO: 991064 - RNA, 22 nt, Human
aagcaauaagccagauuuggau

SEQ ID NO: 991065 - RNA, 22 nt, Human
cagcuccucacgagucuugaaa

SEQ ID NO: 991066 - RNA, 22 nt, Human
gguccccagcaguggcugcuuc

SEQ ID NO: 991067 - RNA, 22 nt, Human
caaagucccagcugcuuagaga

SEQ ID NO: 991068 - RNA, 20 nt, Human
cagagcuguuauggaugaug

SEQ ID NO: 991069 - RNA, 22 nt, Human
uacaguauuaugagugauugaa

SEQ ID NO: 991070 - RNA, 22 nt, Human
aggcugggaaauguagucuucc

SEQ ID NO: 991071 - RNA, 22 nt, Human
cagccagaaccuaggaugagcu

SEQ ID NO: 991072 - RNA, 21 nt, Human
ugaaacacucuuuccaugaga

SEQ ID NO: 991073 - RNA, 22 nt, Human
uccuugaaugaagagaggugac

SEQ ID NO: 991074 - RNA, 22 nt, Human
agcagggggaguuagacuagau

SEQ ID NO: 991075 - RNA, 22 nt, Human
aguuuguaucaauuugcuuuau

SEQ ID NO: 991076 - RNA, 18 nt, Human
cucucugggugaggacaa

SEQ ID NO: 991077 - RNA, 22 nt, Human
cagagguagaaggcaugcagug

SEQ ID NO: 991078 - RNA, 22 nt, Human
augggcuguccuaguccagccc

SEQ ID NO: 991079 - RNA, 22 nt, Human
gggacugggagauccuccuggc

SEQ ID NO: 991080 - RNA, 22 nt, Human
gcacacagccagcugagggcua

SEQ ID NO: 991081 - RNA, 22 nt, Human
aggccuggugaaugaaguaucu

SEQ ID NO: 991082 - RNA, 22 nt, Human
uuuucauuguuacuaugagcua

SEQ ID NO: 991083 - RNA, 22 nt, Human
ccagcuugaagaugugcugguu

SEQ ID NO: 991084 - RNA, 22 nt, Human
ugcaggggcuugucugggccug

SEQ ID NO: 991085 - RNA, 22 nt, Human
cccagcuccuuacagggccgaa

SEQ ID NO: 991086 - RNA, 22 nt, Human
ucucagggagggcgagucagcg

SEQ ID NO: 991087 - RNA, 20 nt, Human
auucacaaagccaguguugc

SEQ ID NO: 991088 - RNA, 22 nt, Human
aagacauuacuggaaucugacu

SEQ ID NO: 991089 - RNA, 22 nt, Human
agagugaagguugacacuucac

SEQ ID NO: 991090 - RNA, 22 nt, Human
uuucaauguaugucuuucugag

SEQ ID NO: 991091 - RNA, 22 nt, Human
uggagcaggaagucuauggcug

SEQ ID NO: 991092 - RNA, 17 nt, Human
uucaaugauuaaugcau

SEQ ID NO: 991093 - RNA, 22 nt, Human
uuucacaaacucagggugugug

SEQ ID NO: 991094 - RNA, 22 nt, Human
ucaggagauggucuuuauaggc

SEQ ID NO: 991095 - RNA, 22 nt, Human
caggagacaaguuagcagcuga

SEQ ID NO: 991096 - RNA, 22 nt, Human
augucuuucgcaucaguagcua

SEQ ID NO: 991097 - RNA, 22 nt, Human
gccacaggcacuuaagggcugg

SEQ ID NO: 991098 - RNA, 22 nt, Human
acugcagggcauccuggccaag

SEQ ID NO: 991099 - RNA, 22 nt, Human
acuccagggcuccaucccuugu

SEQ ID NO: 991100 - RNA, 22 nt, Human
uaggauaggauggagacagaau

SEQ ID NO: 991101 - RNA, 22 nt, Human
cuauuucugccuaaugaccugu

SEQ ID NO: 991102 - RNA, 22 nt, Human
aacucugccagguuucaggagc

SEQ ID NO: 991103 - RNA, 22 nt, Human
aaaucuaggcucauccuggucc

SEQ ID NO: 991104 - RNA, 20 nt, Human
agugucugggccucaggccc

SEQ ID NO: 991105 - RNA, 22 nt, Human
gaggcagcagggcugguuccuu

SEQ ID NO: 991106 - RNA, 22 nt, Human
agaucaaagccaugagagauuu

SEQ ID NO: 991107 - RNA, 22 nt, Human
ugccagaagugcuuuauaagug

SEQ ID NO: 991108 - RNA, 22 nt, Human
uguuaaauguuccuuuacugga

SEQ ID NO: 991109 - RNA, 22 nt, Human
cccuggaggcggauguugcagu

SEQ ID NO: 991110 - RNA, 22 nt, Human
cuggcccagagcucuggccuuu

SEQ ID NO: 991111 - RNA, 22 nt, Human
auacauuagcucauaugauuaa

SEQ ID NO: 991112 - RNA, 21 nt, Human
ugccagcauuaaacagucauu

SEQ ID NO: 991113 - RNA, 22 nt, Human
ggcagaggaagcuggaaguggg

SEQ ID NO: 991114 - RNA, 21 nt, Human
aagaagcaauuuauuggaagg

SEQ ID NO: 991115 - RNA, 22 nt, Human
ggcaaaaacagcaaugacuuuu

SEQ ID NO: 991116 - RNA, 22 nt, Human
agcuuccuguugagagagggag

SEQ ID NO: 991117 - RNA, 22 nt, Human
agccagcuggagaccacuguuu

SEQ ID NO: 991118 - RNA, 22 nt, Human
cuggcuggcaaguagaacacaa

SEQ ID NO: 991119 - RNA, 22 nt, Human
acccugagggguauagcagaag

SEQ ID NO: 991120 - RNA, 22 nt, Human
gugcaagguacauccuugaugu

SEQ ID NO: 991121 - RNA, 22 nt, Human
cuuccugcauugugccagaguu

SEQ ID NO: 991122 - RNA, 22 nt, Human
augcugagacuggagcagcugg

SEQ ID NO: 991123 - RNA, 22 nt, Human
agggugggcuagacucuucccc

SEQ ID NO: 991124 - RNA, 22 nt, Human
gcucugaggcugggagcacucu

SEQ ID NO: 991125 - RNA, 22 nt, Human
ucucagagaagugaugagcaau

SEQ ID NO: 991126 - RNA, 19 nt, Human
agaaaucucgagauuuguu

SEQ ID NO: 991127 - RNA, 22 nt, Human
gcugucuguucgagcguguguu

SEQ ID NO: 991128 - RNA, 22 nt, Human
aaagaugucauacacauuaaga

SEQ ID NO: 991129 - RNA, 22 nt, Human
cuuacauuaaguaagagauuga

SEQ ID NO: 991130 - RNA, 22 nt, Human
auugucgcuuauuuaggugcuu

SEQ ID NO: 991131 - RNA, 21 nt, Human
acagagccgggcacaaagcug

SEQ ID NO: 991132 - RNA, 22 nt, Human
caggcaggagccagggauucca

SEQ ID NO: 991133 - RNA, 22 nt, Human
uuccuggccccaccccuggaga

SEQ ID NO: 991134 - RNA, 22 nt, Human
cuacauuaaauuggcuuacuua

SEQ ID NO: 991135 - RNA, 22 nt, Human
acaaaaagggagaugagguaga

SEQ ID NO: 991136 - RNA, 22 nt, Human
cccaggaggcagaaguugcagu

SEQ ID NO: 991137 - RNA, 22 nt, Human
cuggcugcuuguagacucgacu

SEQ ID NO: 991138 - RNA, 22 nt, Human
gccaggcuguggggaacuugaa

SEQ ID NO: 991139 - RNA, 22 nt, Human
gaaggaaaaauacucuguaagg

SEQ ID NO: 991140 - RNA, 22 nt, Human
agaggcaguauacaauccgagc

SEQ ID NO: 991141 - RNA, 22 nt, Human
ucaagaaagggcuucaccagga

SEQ ID NO: 991142 - RNA, 22 nt, Human
acucugugugaguagagccugu

SEQ ID NO: 991143 - RNA, 22 nt, Human
auacauguucguguacauguuc

SEQ ID NO: 991144 - RNA, 22 nt, Human
gugcauuugugcaugcacaugu

SEQ ID NO: 991145 - RNA, 22 nt, Human
uagagcugcuggacuguaacag

SEQ ID NO: 991146 - RNA, 22 nt, Human
uuuggaaaguguacaaauuuga

SEQ ID NO: 991147 - RNA, 22 nt, Human
cacaggcuuccaguccccagcu

SEQ ID NO: 991148 - RNA, 22 nt, Human
cugcaggaauucaaagugagcu

SEQ ID NO: 991149 - RNA, 22 nt, Human
uggcagccacaucucguggauu

SEQ ID NO: 991150 - RNA, 22 nt, Human
uacaaaguauauuucuagcugu

SEQ ID NO: 991151 - RNA, 22 nt, Human
gcugguuagaaaacagagcuca

SEQ ID NO: 991152 - RNA, 22 nt, Human
gccugccugcugugugcaaguu

SEQ ID NO: 991153 - RNA, 22 nt, Human
uggcagcuccuggggccagcac

SEQ ID NO: 991154 - RNA, 22 nt, Human
gggguugguuuaaaugcuugag

SEQ ID NO: 991155 - RNA, 23 nt, Human
cuucacaaucaaaaucaguucug

SEQ ID NO: 991156 - RNA, 22 nt, Human
gcaggccucuguugagggccuu

SEQ ID NO: 991157 - RNA, 22 nt, Human
ucugaggcauacccaggccccc

SEQ ID NO: 991158 - RNA, 22 nt, Human
aggcuccuuguucaucauccau

SEQ ID NO: 991159 - RNA, 22 nt, Human
ucuucucaguuucucuaggaug

SEQ ID NO: 991160 - RNA, 22 nt, Human
aaguucaagagugacauauuag

SEQ ID NO: 991161 - RNA, 22 nt, Human
uugaaaugcagauuccaaucca

SEQ ID NO: 991162 - RNA, 22 nt, Human
gagagucacugucugcauuucc

SEQ ID NO: 991163 - RNA, 22 nt, Human
acagaccaaguuuccagcaggu

SEQ ID NO: 991164 - RNA, 22 nt, Human
auaacagauacucucugugagg

SEQ ID NO: 991165 - RNA, 22 nt, Human
uccugccucuuuucuuauucca

SEQ ID NO: 991166 - RNA, 22 nt, Human
uagcagcucacagccucccauu

SEQ ID NO: 991167 - RNA, 22 nt, Human
guggccaaaucaugucaaaggc

SEQ ID NO: 991168 - RNA, 22 nt, Human
cacagggcagagaccugggugc

SEQ ID NO: 991169 - RNA, 21 nt, Human
uguaaguuucaucugaauugg

SEQ ID NO: 991170 - RNA, 19 nt, Human
uccugggcugcgucuugcc

SEQ ID NO: 991171 - RNA, 22 nt, Human
gcccaucaucacuguggaggcu

SEQ ID NO: 991172 - RNA, 22 nt, Human
ugggcagagucauacaggagac

SEQ ID NO: 991173 - RNA, 22 nt, Human
ccugaagcaaggguaggcaggu

SEQ ID NO: 991174 - RNA, 21 nt, Human
uggcucugcucagagcagucc

SEQ ID NO: 991175 - RNA, 22 nt, Human
gaagcccaggcuuccuuggcuu

SEQ ID NO: 991176 - RNA, 22 nt, Human
uuguuuuuaugaacauccagga

SEQ ID NO: 991177 - RNA, 22 nt, Human
cccagggaaugacucuggccuu

SEQ ID NO: 991178 - RNA, 22 nt, Human
uuuuaauacugcuauuguagga

SEQ ID NO: 991179 - RNA, 22 nt, Human
aguuauauuccauagauucaga

SEQ ID NO: 991180 - RNA, 22 nt, Human
ccacacagggggaugaguuauu

SEQ ID NO: 991181 - RNA, 22 nt, Human
auuaggaaauguguugcaagca

SEQ ID NO: 991182 - RNA, 22 nt, Human
ucccagcauuaaugccugucag

SEQ ID NO: 991183 - RNA, 22 nt, Human
gcuuagaaguuccuauaaaaug

SEQ ID NO: 991184 - RNA, 22 nt, Human
aggaggccgcugaugggcuccc

SEQ ID NO: 991185 - RNA, 19 nt, Human
cucagcuguagcucaugug

SEQ ID NO: 991186 - RNA, 22 nt, Human
ugcuggggguucagaugaguaa

SEQ ID NO: 991187 - RNA, 17 nt, Human
ccagguggaaucgugga

SEQ ID NO: 991188 - RNA, 22 nt, Human
aguggggagguccaggccaccc

SEQ ID NO: 991189 - RNA, 19 nt, Human
acaagggcaggcaagguga

SEQ ID NO: 991190 - RNA, 22 nt, Human
gaaggaagucauuagugcagac

SEQ ID NO: 991191 - RNA, 22 nt, Human
ggcuucauggaggaggugaguc

SEQ ID NO: 991192 - RNA, 22 nt, Human
aaaaguauuggccaccauuucu

SEQ ID NO: 991193 - RNA, 18 nt, Human
gguggcaggucagaugcc

SEQ ID NO: 991194 - RNA, 22 nt, Human
ccucuggggguccucagagucu

SEQ ID NO: 991195 - RNA, 22 nt, Human
ucucagggccccaaaggcuagu

SEQ ID NO: 991196 - RNA, 22 nt, Human
gcagcccagagcgcaggacccc

SEQ ID NO: 991197 - RNA, 20 nt, Human
gccugcagguuggaugggau

SEQ ID NO: 991198 - RNA, 22 nt, Human
aaaugugcuucuuacucucaau

SEQ ID NO: 991199 - RNA, 22 nt, Human
cucuggccgcagcucagcucug

SEQ ID NO: 991200 - RNA, 22 nt, Human
caggcugcagcagcaguggccc

SEQ ID NO: 991201 - RNA, 17 nt, Human
ccucacagggaccagac

SEQ ID NO: 991202 - RNA, 22 nt, Human
gccuggucucuuucaugucagu

SEQ ID NO: 991203 - RNA, 22 nt, Human
gugucccaggagaggagacaau

SEQ ID NO: 991204 - RNA, 22 nt, Human
ucagagugggagaaugugccaa

SEQ ID NO: 991205 - RNA, 22 nt, Human
ccaggugguucaggucaccaua

SEQ ID NO: 991206 - RNA, 22 nt, Human
gcuggagccaagcugcucuugg

SEQ ID NO: 991207 - RNA, 20 nt, Human
uuucagugguuugugccuag

SEQ ID NO: 991208 - RNA, 22 nt, Human
gggaaccagccgcuuccgccuc

SEQ ID NO: 991209 - RNA, 22 nt, Human
auaucuuuguaugguucagcag

SEQ ID NO: 991210 - RNA, 22 nt, Human
cgcugccaggucaccaggggua

SEQ ID NO: 991211 - RNA, 22 nt, Human
cugcucugaguauuaacggagg

SEQ ID NO: 991212 - RNA, 22 nt, Human
cuuucacauaauugaccuugaa

SEQ ID NO: 991213 - RNA, 22 nt, Human
acauagaaccuggcacauagua

SEQ ID NO: 991214 - RNA, 22 nt, Human
ucagcugagcuccagcucauag

SEQ ID NO: 991215 - RNA, 22 nt, Human
gugccugugcggacucagggaa

SEQ ID NO: 991216 - RNA, 22 nt, Human
aaauugcaaaaguacuuuuagg

SEQ ID NO: 991217 - RNA, 22 nt, Human
agaacuuaggaacaacagcuua

SEQ ID NO: 991218 - RNA, 22 nt, Human
ugauuuccaugaagcugaaggc

SEQ ID NO: 991219 - RNA, 22 nt, Human
uccaggcugggcugaagggugc

SEQ ID NO: 991220 - RNA, 22 nt, Human
gaggcaggguguugauuacaga

SEQ ID NO: 991221 - RNA, 22 nt, Human
cacagaggacuguagcggggag

SEQ ID NO: 991222 - RNA, 22 nt, Human
ggaagggccucgggcgugggac

SEQ ID NO: 991223 - RNA, 22 nt, Human
ccaucagcaugggagcaugggc

SEQ ID NO: 991224 - RNA, 22 nt, Human
cagggcuguaaauuagugcuga

SEQ ID NO: 991225 - RNA, 22 nt, Human
gucaugccuggcuucuuagaca

SEQ ID NO: 991226 - RNA, 22 nt, Human
ccucccagugccuccagagcag

SEQ ID NO: 991227 - RNA, 22 nt, Human
cucaggauguacuacagaaggc

SEQ ID NO: 991228 - RNA, 22 nt, Human
augagcugggccauccagugau

SEQ ID NO: 991229 - RNA, 22 nt, Human
cgcagcagccccgugguaggug

SEQ ID NO: 991230 - RNA, 22 nt, Human
uuggcaucaguguaggaccugu

SEQ ID NO: 991231 - RNA, 22 nt, Human
aaguuauugcagcaauccaagu

SEQ ID NO: 991232 - RNA, 22 nt, Human
uccauggggcccaggaugagag

SEQ ID NO: 991233 - RNA, 22 nt, Human
uggcacaugguaagacucagua

SEQ ID NO: 991234 - RNA, 22 nt, Human
aagauuuccuggauguaauucc

SEQ ID NO: 991235 - RNA, 21 nt, Human
agaagccuggguggagguggg

SEQ ID NO: 991236 - RNA, 22 nt, Human
aggagccccucuucaguccugg

SEQ ID NO: 991237 - RNA, 22 nt, Human
agcuggcuccagaaggagucgu

SEQ ID NO: 991238 - RNA, 22 nt, Human
agggucugcauuccaacuuggg

SEQ ID NO: 991239 - RNA, 22 nt, Human
aacaguaucuuuuaucagaaau

SEQ ID NO: 991240 - RNA, 22 nt, Human
ccucaggggcuuuucguuguug

SEQ ID NO: 991241 - RNA, 22 nt, Human
ucuugggauugcccugcaguuc

SEQ ID NO: 991242 - RNA, 22 nt, Human
ucuggcucauacaagccugcaa

SEQ ID NO: 991243 - RNA, 22 nt, Human
ccuggcaggcuggggacagugc

SEQ ID NO: 991244 - RNA, 22 nt, Human
uggaggaaaauuacuggggucu

SEQ ID NO: 991245 - RNA, 20 nt, Human
agucccagaucaaauuucug

SEQ ID NO: 991246 - RNA, 22 nt, Human
auaaaaguuuccaaucaugccu

SEQ ID NO: 991247 - RNA, 20 nt, Human
acauggaaggucaaacuauc

SEQ ID NO: 991248 - RNA, 22 nt, Human
agaagccauugaagcagaccuc

SEQ ID NO: 991249 - RNA, 20 nt, Human
ucuggcucuuugcuccuccc

SEQ ID NO: 991250 - RNA, 20 nt, Human
cucuggcuccgcgugaccgc

SEQ ID NO: 991251 - RNA, 22 nt, Human
ucgagucauguucucccauuaa

SEQ ID NO: 991252 - RNA, 22 nt, Human
cccuggagcugcuugcauguug

SEQ ID NO: 991253 - RNA, 22 nt, Human
ccagcauggcaccugagaugag

SEQ ID NO: 991254 - RNA, 22 nt, Human
cugccuugaggagguuguggga

SEQ ID NO: 991255 - RNA, 22 nt, Human
caauguguuugcauauuaaaau

SEQ ID NO: 991256 - RNA, 22 nt, Human
ugcagggcccuugggguugaac

SEQ ID NO: 991257 - RNA, 22 nt, Human
aacaucuuuuuguuugcugaaa

SEQ ID NO: 991258 - RNA, 22 nt, Human
uagaaaugcccagauucugcua

SEQ ID NO: 991259 - RNA, 22 nt, Human
uccagccaccaccuugauugcc

SEQ ID NO: 991260 - RNA, 22 nt, Human
guuccaaacaagucauaaagua

SEQ ID NO: 991261 - RNA, 22 nt, Human
gaauauuaguaucaguuauacc

SEQ ID NO: 991262 - RNA, 22 nt, Human
gcaaggcagcgcggaguagcua

SEQ ID NO: 991263 - RNA, 22 nt, Human
aguggcagaagucacuggguag

SEQ ID NO: 991264 - RNA, 22 nt, Human
uggguagaggaauugggcuacc

SEQ ID NO: 991265 - RNA, 22 nt, Human
uccugccuugccugggacauca

SEQ ID NO: 991266 - RNA, 22 nt, Human
caggccagugugcuucccaggc

SEQ ID NO: 991267 - RNA, 22 nt, Human
ggggaggcugaugugggcaaag

SEQ ID NO: 991268 - RNA, 22 nt, Human
gccagcagcccagaaggacuuu

SEQ ID NO: 991269 - RNA, 22 nt, Human
ggcacugggagaggugagacgg

SEQ ID NO: 991270 - RNA, 22 nt, Human
aggucacacuuggaucauagaa

SEQ ID NO: 991271 - RNA, 19 nt, Human
ucauaaggagagaggaaau

SEQ ID NO: 991272 - RNA, 22 nt, Human
gggcuacagacaugcucuaagc

SEQ ID NO: 991273 - RNA, 22 nt, Human
aagaacaacugcuuuaaaagca

SEQ ID NO: 991274 - RNA, 22 nt, Human
gcugcagccaaauucauuguca

SEQ ID NO: 991275 - RNA, 22 nt, Human
uggcccugcuggccaaaggcua

SEQ ID NO: 991276 - RNA, 22 nt, Human
ugaggcaggagguugagaacug

SEQ ID NO: 991277 - RNA, 22 nt, Human
ugcagaggaccauuguccugga

SEQ ID NO: 991278 - RNA, 22 nt, Human
ucuuuucuggacucugcaugga

SEQ ID NO: 991279 - RNA, 22 nt, Human
uggguggaauaaaucaguucug

SEQ ID NO: 991280 - RNA, 22 nt, Human
aauuucaaugcacucaugguug

SEQ ID NO: 991281 - RNA, 22 nt, Human
agggagccagaguugggagcuc

SEQ ID NO: 991282 - RNA, 18 nt, Human
uuaaggauaagcagacua

SEQ ID NO: 991283 - RNA, 22 nt, Human
aggcugggaaauguauuccagc

SEQ ID NO: 991284 - RNA, 22 nt, Human
gagcugccagacaugggaauga

SEQ ID NO: 991285 - RNA, 17 nt, Human
agcagcuggguugaucu

SEQ ID NO: 991286 - RNA, 22 nt, Human
cugggccaaaagaaguguucuu

SEQ ID NO: 991287 - RNA, 22 nt, Human
uuaaaaugcagauuaugacuca

SEQ ID NO: 991288 - RNA, 22 nt, Human
aguggcaguagaugagcugguu

SEQ ID NO: 991289 - RNA, 22 nt, Human
gcucugugcaguucagggacac

SEQ ID NO: 991290 - RNA, 22 nt, Human
uggccacaugcgucugugaggc

SEQ ID NO: 991291 - RNA, 22 nt, Human
gacagggccgcagauggagacu

SEQ ID NO: 991292 - RNA, 22 nt, Human
uacaguauggaaaauguauagu

SEQ ID NO: 991293 - RNA, 22 nt, Human
uccugagggcgauucagcaggu

SEQ ID NO: 991294 - RNA, 22 nt, Human
uucugagcuacauaguacuggg

SEQ ID NO: 991295 - RNA, 22 nt, Human
uuauuaaugaguacaaguuauu

SEQ ID NO: 991296 - RNA, 22 nt, Human
gacauucacaguuuccgauggu

SEQ ID NO: 991297 - RNA, 22 nt, Human
agcccaagcauaggagggaggc

SEQ ID NO: 991298 - RNA, 22 nt, Human
aggcuccuugcucacaggcuca

SEQ ID NO: 991299 - RNA, 21 nt, Human
ccagcagcucaaggaucucuu

SEQ ID NO: 991300 - RNA, 23 nt, Human
ucugucacuuucugcuguggagu

SEQ ID NO: 991301 - RNA, 22 nt, Human
ugggaaauguguuucuggacca

SEQ ID NO: 991302 - RNA, 22 nt, Human
gcuccuggugcuguagagauuu

SEQ ID NO: 991303 - RNA, 19 nt, Human
ugaaggagggggauggcca

SEQ ID NO: 991304 - RNA, 22 nt, Human
aggcucugugcagccugcaucu

SEQ ID NO: 991305 - RNA, 22 nt, Human
uggcacugagcagccgcggcag

SEQ ID NO: 991306 - RNA, 22 nt, Human
ugcagaagacacaagguaacgu

SEQ ID NO: 991307 - RNA, 22 nt, Human
ggagcugcucagagccaguccc

SEQ ID NO: 991308 - RNA, 19 nt, Human
cugugcaggccgggcugag

SEQ ID NO: 991309 - RNA, 22 nt, Human
acccugggcuuggccugcucag

SEQ ID NO: 991310 - RNA, 23 nt, Human
ccagucucuuuccaaaaucacau

SEQ ID NO: 991311 - RNA, 21 nt, Human
ugccagcauguaggcuaguug

SEQ ID NO: 991312 - RNA, 22 nt, Human
uggagcagccaugaugacagag

SEQ ID NO: 991313 - RNA, 22 nt, Human
ccauuugucaccucugcacucc

SEQ ID NO: 991314 - RNA, 22 nt, Human
gcaaaugaguuguaacauaaaa

SEQ ID NO: 991315 - RNA, 22 nt, Human
agcugcuguccuaggcacugua

SEQ ID NO: 991316 - RNA, 22 nt, Human
uagauuuccucuuccucauucc

SEQ ID NO: 991317 - RNA, 21 nt, Human
ucuccuggguccaacccaugc

SEQ ID NO: 991318 - RNA, 22 nt, Human
uggccuggcagagcaaggccug

SEQ ID NO: 991319 - RNA, 18 nt, Human
ucucuuuuccccucauug

SEQ ID NO: 991320 - RNA, 22 nt, Human
acugccugcucauaacauugcu

SEQ ID NO: 991321 - RNA, 22 nt, Human
uuauugccugauugaggucauu

SEQ ID NO: 991322 - RNA, 20 nt, Human
gagauggcuaagugcugaac

SEQ ID NO: 991323 - RNA, 22 nt, Human
gcaauaaauaacauggaagaca

SEQ ID NO: 991324 - RNA, 19 nt, Human
uuagaaacuguugacacug

SEQ ID NO: 991325 - RNA, 22 nt, Human
gcugccugggcaggaggcgcug

SEQ ID NO: 991326 - RNA, 22 nt, Human
uugauacaggcucuauuucauc

SEQ ID NO: 991327 - RNA, 22 nt, Human
gaaauguguuguucauuucuaa

SEQ ID NO: 991328 - RNA, 22 nt, Human
gugcuuccugccuggugccuuu

SEQ ID NO: 991329 - RNA, 20 nt, Human
uauauaggaaauauuguguu

SEQ ID NO: 991330 - RNA, 22 nt, Human
gagcuggcuaauacugacuuau

SEQ ID NO: 991331 - RNA, 21 nt, Human
uuaagagcuuagcaguaggcc

SEQ ID NO: 991332 - RNA, 22 nt, Human
ccacucugauuggucaccucug

SEQ ID NO: 991333 - RNA, 22 nt, Human
acuccugguucccaguugagau

SEQ ID NO: 991334 - RNA, 22 nt, Human
ucaaaugcacguagagaaaaua

SEQ ID NO: 991335 - RNA, 22 nt, Human
aaaaugcaugagaaugugcucg

SEQ ID NO: 991336 - RNA, 22 nt, Human
gaaguucaggugggaauugagc

SEQ ID NO: 991337 - RNA, 22 nt, Human
ccucuggggugagugggccacu

SEQ ID NO: 991338 - RNA, 21 nt, Human
agagaauugccuuagauguuc

SEQ ID NO: 991339 - RNA, 22 nt, Human
ggauggagguucucagaugcuc

SEQ ID NO: 991340 - RNA, 22 nt, Human
gaggcagcaucuauggugggaa

SEQ ID NO: 991341 - RNA, 22 nt, Human
uggccugggcaugaagcaucgu

SEQ ID NO: 991342 - RNA, 22 nt, Human
agcugcugugugcucaggcagg

SEQ ID NO: 991343 - RNA, 22 nt, Human
ggaggccaggguggguggaucg

SEQ ID NO: 991344 - RNA, 22 nt, Human
ucugagaguccaucuccaagcc

SEQ ID NO: 991345 - RNA, 20 nt, Human
uucuuucaucuacacguugu

SEQ ID NO: 991346 - RNA, 22 nt, Human
cuggcagcugcccgagaugccc

SEQ ID NO: 991347 - RNA, 22 nt, Human
gaaaaguacacagcccaaacau

SEQ ID NO: 991348 - RNA, 22 nt, Human
cugggcagugguggcaucuuug

SEQ ID NO: 991349 - RNA, 22 nt, Human
cugggguggaggagcuccccug

SEQ ID NO: 991350 - RNA, 22 nt, Human
uuggccaauuccagaggaucau

SEQ ID NO: 991351 - RNA, 22 nt, Human
uaucuuuagaggaagagaaucu

SEQ ID NO: 991352 - RNA, 22 nt, Human
cucugggcaaagaugccucauc

SEQ ID NO: 991353 - RNA, 22 nt, Human
agccuugaguucaagugcuggc

SEQ ID NO: 991354 - RNA, 22 nt, Human
cccagccucugggcucacccaa

SEQ ID NO: 991355 - RNA, 22 nt, Human
agcccagcaaagggagguucag

SEQ ID NO: 991356 - RNA, 18 nt, Human
ucucagaggccauccuag

SEQ ID NO: 991357 - RNA, 22 nt, Human
caggccuccacuccacgcagac

SEQ ID NO: 991358 - RNA, 22 nt, Human
auguuuaaauuuauagacagug

SEQ ID NO: 991359 - RNA, 22 nt, Human
uuccaaaggaauggggagcuau

SEQ ID NO: 991360 - RNA, 22 nt, Human
gccuggagaccugcuccucuac

SEQ ID NO: 991361 - RNA, 22 nt, Human
caccagggacaaugcuaggggu

SEQ ID NO: 991362 - RNA, 22 nt, Human
ccaggaguuugaggcugcagug

SEQ ID NO: 991363 - RNA, 22 nt, Human
ugugaaggcagcagcucugucc

SEQ ID NO: 991364 - RNA, 22 nt, Human
ccugugccauccugagcauccc

SEQ ID NO: 991365 - RNA, 22 nt, Human
ucaggugggaccugcuaggaca

SEQ ID NO: 991366 - RNA, 22 nt, Human
guuuggggucugcagagcggcg

SEQ ID NO: 991367 - RNA, 22 nt, Human
ugacacauuaaaugcucacaaa

SEQ ID NO: 991368 - RNA, 22 nt, Human
aaaucaaaagacauguguuuua

SEQ ID NO: 991369 - RNA, 22 nt, Human
ugaaagcucugucaucauuccu

SEQ ID NO: 991370 - RNA, 22 nt, Human
ggagccaggcaaucuguacuuu

SEQ ID NO: 991371 - RNA, 22 nt, Human
cccuggagugugacgaggcauu

SEQ ID NO: 991372 - RNA, 22 nt, Human
acagccuguuugaucuggugcu

SEQ ID NO: 991373 - RNA, 22 nt, Human
cagugccaugucugagccccua

SEQ ID NO: 991374 - RNA, 22 nt, Human
gugcagggagcccagaaggucc

SEQ ID NO: 991375 - RNA, 20 nt, Human
cugggaggucuuccaaauca

SEQ ID NO: 991376 - RNA, 22 nt, Human
agauacaugucaagagacuuau

SEQ ID NO: 991377 - RNA, 22 nt, Human
aagaagaugguuaacuuucagu

SEQ ID NO: 991378 - RNA, 22 nt, Human
ggggugggguuacucauugugc

SEQ ID NO: 991379 - RNA, 22 nt, Human
agaauucucuuccauugaaaca

SEQ ID NO: 991380 - RNA, 22 nt, Human
aaagacauugaagaaggacuua

SEQ ID NO: 991381 - RNA, 22 nt, Human
gccucugcucucagguagccuc

SEQ ID NO: 991382 - RNA, 17 nt, Human
ccagagcuacugagacu

SEQ ID NO: 991383 - RNA, 22 nt, Human
gauuucuucauucauuagaugg

SEQ ID NO: 991384 - RNA, 22 nt, Human
cuugaaaugacaggagcacauc

SEQ ID NO: 991385 - RNA, 22 nt, Human
cugcuccacaccuccauuuccu

SEQ ID NO: 991386 - RNA, 22 nt, Human
ucucuucugaaaccugucuuua

SEQ ID NO: 991387 - RNA, 19 nt, Human
gcucugcuacuauuaccac

SEQ ID NO: 991388 - RNA, 18 nt, Human
uggugaaggguggaggag

SEQ ID NO: 991389 - RNA, 18 nt, Human
cucagggcaucagucugg

SEQ ID NO: 991390 - RNA, 22 nt, Human
ccuuggaggacugcugcuucuu

SEQ ID NO: 991391 - RNA, 22 nt, Human
cugucuccagggcaggugcagg

SEQ ID NO: 991392 - RNA, 20 nt, Human
guccugggagccacagcaca

SEQ ID NO: 991393 - RNA, 22 nt, Human
ucaaugauaguacaaucagccu

SEQ ID NO: 991394 - RNA, 22 nt, Human
aacauguugcuuuaauaauauu

SEQ ID NO: 991395 - RNA, 22 nt, Human
ugaggcucaaggucugguggag

SEQ ID NO: 991396 - RNA, 20 nt, Human
uacauucaaaacaaacucug

SEQ ID NO: 991397 - RNA, 20 nt, Human
uccagcugucuuucagagac

SEQ ID NO: 991398 - RNA, 22 nt, Human
gggcaggaugcaguuucagaga

SEQ ID NO: 991399 - RNA, 23 nt, Human
ugacacauuuccuuuccacugca

SEQ ID NO: 991400 - RNA, 22 nt, Human
ggugggcacauucagucucugu

SEQ ID NO: 991401 - RNA, 22 nt, Human
aaaggugacugcagcagcuauu

SEQ ID NO: 991402 - RNA, 22 nt, Human
ccagggcaauaggaacacuuuu

SEQ ID NO: 991403 - RNA, 22 nt, Human
agauaauuugaguaaauuaauu

SEQ ID NO: 991404 - RNA, 22 nt, Human
caguagccacuagacacaugua

SEQ ID NO: 991405 - RNA, 19 nt, Human
cagagcagugguuccugaa

SEQ ID NO: 991406 - RNA, 22 nt, Human
gaggacagugugaucugccagc

SEQ ID NO: 991407 - RNA, 22 nt, Human
cccugccuucuuggccuuuaaa

SEQ ID NO: 991408 - RNA, 22 nt, Human
ucaguuuucaauuucaucagag

SEQ ID NO: 991409 - RNA, 22 nt, Human
ccuggcugccgagugugcagcg

SEQ ID NO: 991410 - RNA, 22 nt, Human
ugguuucccauuaucugcagga

SEQ ID NO: 991411 - RNA, 22 nt, Human
gcugugugcucacguaguggaa

SEQ ID NO: 991412 - RNA, 22 nt, Human
cagaggcugcucuggguggcau

SEQ ID NO: 991413 - RNA, 22 nt, Human
guccucugcccaggucaagguu

SEQ ID NO: 991414 - RNA, 22 nt, Human
agccugccuugggcugcuugag

SEQ ID NO: 991415 - RNA, 22 nt, Human
cucugugauuuugugagccaga

SEQ ID NO: 991416 - RNA, 22 nt, Human
agggccagcugaugagaaugag

SEQ ID NO: 991417 - RNA, 19 nt, Human
uggcagaggcaguuuguac

SEQ ID NO: 991418 - RNA, 22 nt, Human
caacugagcaguagcgucugga

SEQ ID NO: 991419 - RNA, 22 nt, Human
ggagcugcuccuucagccaagu

SEQ ID NO: 991420 - RNA, 22 nt, Human
ggagggugcauuuuacccugug

SEQ ID NO: 991421 - RNA, 22 nt, Human
gcaggcuggaggcuguucuggg

SEQ ID NO: 991422 - RNA, 22 nt, Human
auucaguuaaaaacuguacuuc

SEQ ID NO: 991423 - RNA, 22 nt, Human
cugggagauugcuagagaugca

SEQ ID NO: 991424 - RNA, 19 nt, Human
ugucuuaauuaacucagag

SEQ ID NO: 991425 - RNA, 22 nt, Human
gaguuauuagucaaauagggaa

SEQ ID NO: 991426 - RNA, 22 nt, Human
ccuggaagauucaccacuacca

SEQ ID NO: 991427 - RNA, 22 nt, Human
ucagcugcucuguugagcugaa

SEQ ID NO: 991428 - RNA, 22 nt, Human
accucaggauguggacacagaa

SEQ ID NO: 991429 - RNA, 22 nt, Human
cugagcugcggcaggcaccugg

SEQ ID NO: 991430 - RNA, 19 nt, Human
gaucuuugccaauuuaagc

SEQ ID NO: 991431 - RNA, 22 nt, Human
gcacagagggcagugagccucu

SEQ ID NO: 991432 - RNA, 22 nt, Human
aggugauguccacagcuugcag

SEQ ID NO: 991433 - RNA, 22 nt, Human
accuucaaugaaaauaauaguc

SEQ ID NO: 991434 - RNA, 22 nt, Human
acagugucuccugguacccagu

SEQ ID NO: 991435 - RNA, 23 nt, Human
agcagccauagggaagcaauaca

SEQ ID NO: 991436 - RNA, 22 nt, Human
acucugcuugggccauaucugg

SEQ ID NO: 991437 - RNA, 22 nt, Human
uauuucugaggcccaggaagug

SEQ ID NO: 991438 - RNA, 22 nt, Human
ucacucugcugcccgagggcug

SEQ ID NO: 991439 - RNA, 21 nt, Human
uuuuauugaugaauggccacu

SEQ ID NO: 991440 - RNA, 22 nt, Human
aggagccaugagugacaucaca

SEQ ID NO: 991441 - RNA, 22 nt, Human
uugaacauuaacuucagucuau

SEQ ID NO: 991442 - RNA, 22 nt, Human
accuguuuggaggagguguuag

SEQ ID NO: 991443 - RNA, 22 nt, Human
uggaggcaccacuggcugcccg

SEQ ID NO: 991444 - RNA, 22 nt, Human
aggagucaggaccaaauggaaa

SEQ ID NO: 991445 - RNA, 22 nt, Human
aucacaggugguaggaaaagaa

SEQ ID NO: 991446 - RNA, 22 nt, Human
cugcuuccaugcaauggcaguc

SEQ ID NO: 991447 - RNA, 23 nt, Human
uugucugugcuuuuccaguugcu

SEQ ID NO: 991448 - RNA, 22 nt, Human
gucaccagucccagcuccugaa

SEQ ID NO: 991449 - RNA, 22 nt, Human
ugagccagucugucugggugaa

SEQ ID NO: 991450 - RNA, 22 nt, Human
aagacauuuauuugaaucaauu

SEQ ID NO: 991451 - RNA, 22 nt, Human
acucugccaucccaggugcugu

SEQ ID NO: 991452 - RNA, 22 nt, Human
ucugguuagccaauaaugccaa

SEQ ID NO: 991453 - RNA, 22 nt, Human
gagcagugaagacagaaguaca

SEQ ID NO: 991454 - RNA, 22 nt, Human
agcaggaaguagucuguaagca

SEQ ID NO: 991455 - RNA, 22 nt, Human
ucucugggaaugggccugggua

SEQ ID NO: 991456 - RNA, 22 nt, Human
uugaagcaggaaaauuucuauu

SEQ ID NO: 991457 - RNA, 22 nt, Human
gcccagcugucuggcagggaug

SEQ ID NO: 991458 - RNA, 22 nt, Human
agcugcagagguuugugcaaca

SEQ ID NO: 991459 - RNA, 22 nt, Human
gcucugcugggugggcaguuau

SEQ ID NO: 991460 - RNA, 22 nt, Human
cagccaggacagggaaacuagu

SEQ ID NO: 991461 - RNA, 22 nt, Human
ugucccaguuggguauugaauu

SEQ ID NO: 991462 - RNA, 22 nt, Human
aaauaguuagcccugcauauau

SEQ ID NO: 991463 - RNA, 22 nt, Human
caggugggaccaugauagggca

SEQ ID NO: 991464 - RNA, 22 nt, Human
uucauguauuuaucauguaaau

SEQ ID NO: 991465 - RNA, 19 nt, Human
aggccugggguuuugcacu

SEQ ID NO: 991466 - RNA, 20 nt, Human
uccuucaggcagggccuagu

SEQ ID NO: 991467 - RNA, 22 nt, Human
aaaguuacuaucacaaugaaau

SEQ ID NO: 991468 - RNA, 22 nt, Human
cagacuuucaaggagugaaggc

SEQ ID NO: 991469 - RNA, 22 nt, Human
gcuugggauaugcugauguaaa

SEQ ID NO: 991470 - RNA, 22 nt, Human
agagcuggaaucagaccucagg

SEQ ID NO: 991471 - RNA, 22 nt, Human
gagcuuccauggacgccaucug

SEQ ID NO: 991472 - RNA, 22 nt, Human
aaagauaugucuccaaagagau

SEQ ID NO: 991473 - RNA, 22 nt, Human
cccuggaggcaaagguugcagu

SEQ ID NO: 991474 - RNA, 22 nt, Human
gggugggccacugagcagcgug

SEQ ID NO: 991475 - RNA, 22 nt, Human
uacauguaauuuucauaguaag

SEQ ID NO: 991476 - RNA, 22 nt, Human
acauguuagaaaugcagaaucu

SEQ ID NO: 991477 - RNA, 22 nt, Human
aagggcuggaucucucugagca

SEQ ID NO: 991478 - RNA, 21 nt, Human
ccagacuggccuaugugguag

SEQ ID NO: 991479 - RNA, 19 nt, Human
agagaggcugugugaggga

SEQ ID NO: 991480 - RNA, 22 nt, Human
uaauacuuaccuugcagagucu

SEQ ID NO: 991481 - RNA, 22 nt, Human
gcccagaguucaaggcugcagu

SEQ ID NO: 991482 - RNA, 20 nt, Human
gacaucauguacacauugcc

SEQ ID NO: 991483 - RNA, 22 nt, Human
cuggccacugguggucauaggc

SEQ ID NO: 991484 - RNA, 22 nt, Human
ucacugcaaccucugccuuccg

SEQ ID NO: 991485 - RNA, 22 nt, Human
uuccauauuuguguggcaaaag

SEQ ID NO: 991486 - RNA, 22 nt, Human
gccagcccagcuccaggggaaa

SEQ ID NO: 991487 - RNA, 22 nt, Human
cagccucuaagcacagccucuc

SEQ ID NO: 991488 - RNA, 22 nt, Human
ggcugaaacagauuucaagaca

SEQ ID NO: 991489 - RNA, 22 nt, Human
uggagcagggcaucacugugcg

SEQ ID NO: 991490 - RNA, 22 nt, Human
gagagcugggcuuugggugaag

SEQ ID NO: 991491 - RNA, 22 nt, Human
acauuuacagugcuagacaauc

SEQ ID NO: 991492 - RNA, 22 nt, Human
uaaaagacccucuagaguccca

SEQ ID NO: 991493 - RNA, 22 nt, Human
ccuggcagucaggggaguccuu

SEQ ID NO: 991494 - RNA, 22 nt, Human
agcaugcugguguucauggcag

SEQ ID NO: 991495 - RNA, 20 nt, Human
ugucauuguuucuaggaccu

SEQ ID NO: 991496 - RNA, 22 nt, Human
acucugagcaucccaagucuua

SEQ ID NO: 991497 - RNA, 22 nt, Human
uccaucagauucccuccugaga

SEQ ID NO: 991498 - RNA, 22 nt, Human
gggccugacugagagcuccuca

SEQ ID NO: 991499 - RNA, 22 nt, Human
aaugucugagucucuguauccc

SEQ ID NO: 991500 - RNA, 22 nt, Human
ggucccugguucccucugagcu

SEQ ID NO: 991501 - RNA, 22 nt, Human
ccagggccaagagaccucgagg

SEQ ID NO: 991502 - RNA, 22 nt, Human
ugugccugaguuggcugaguac

SEQ ID NO: 991503 - RNA, 22 nt, Human
uccucacauggugagccacaca

SEQ ID NO: 991504 - RNA, 22 nt, Human
gccaggcuguuuuuauuacugu

SEQ ID NO: 991505 - RNA, 21 nt, Human
gggcagaggggccuccugggu

SEQ ID NO: 991506 - RNA, 22 nt, Human
cuucccagaccuuagagugcag

SEQ ID NO: 991507 - RNA, 22 nt, Human
agagccacugggagacagagca

SEQ ID NO: 991508 - RNA, 20 nt, Human
aagagaagaagucuuugaaa

SEQ ID NO: 991509 - RNA, 22 nt, Human
gcucagagauggggaaugaaaa

SEQ ID NO: 991510 - RNA, 19 nt, Human
uguagcaguuuaaaacaac

SEQ ID NO: 991511 - RNA, 22 nt, Human
uguguauuaccauuuuacagcu

SEQ ID NO: 991512 - RNA, 22 nt, Human
ccaaagucagugcucagucguc

SEQ ID NO: 991513 - RNA, 23 nt, Human
aggauccugguacaggagcagag

SEQ ID NO: 991514 - RNA, 22 nt, Human
uuucuguaauuaaaagggcagg

SEQ ID NO: 991515 - RNA, 22 nt, Human
gccucugcggggcccgagcccg

SEQ ID NO: 991516 - RNA, 22 nt, Human
ucagccuggcaggauggccugg

SEQ ID NO: 991517 - RNA, 22 nt, Human
ugcccaagcagaggagugauuc

SEQ ID NO: 991518 - RNA, 22 nt, Human
aggagcugaagucucugcacuc

SEQ ID NO: 991519 - RNA, 22 nt, Human
ggggcagaaagcccacagagug

SEQ ID NO: 991520 - RNA, 22 nt, Human
agaaggccuaacuugggggcaa

SEQ ID NO: 991521 - RNA, 22 nt, Human
gcagcaaucuucacagugucau

SEQ ID NO: 991522 - RNA, 22 nt, Human
ugagacaguucugcagcugggu

SEQ ID NO: 991523 - RNA, 22 nt, Human
uacauuguuuuuucuugccauc

SEQ ID NO: 991524 - RNA, 22 nt, Human
gcagagcugucuaagucacuuc

SEQ ID NO: 991525 - RNA, 23 nt, Human
uggcagcagaucuuaaagugacc

SEQ ID NO: 991526 - RNA, 22 nt, Human
ggugggcagcucuuggcaggca

SEQ ID NO: 991527 - RNA, 22 nt, Human
ugaaaggugacauuucuuggau

SEQ ID NO: 991528 - RNA, 22 nt, Human
gcugccaugccacagcacucac

SEQ ID NO: 991529 - RNA, 22 nt, Human
agagugggugaucucuguuguc

SEQ ID NO: 991530 - RNA, 22 nt, Human
ucccagggucaguggugaggcc

SEQ ID NO: 991531 - RNA, 22 nt, Human
gggcugcugcccaggaggcacc

SEQ ID NO: 991532 - RNA, 22 nt, Human
ucagaacaauugggaaccauua

SEQ ID NO: 991533 - RNA, 22 nt, Human
ggcuucccagcagagggcgcac

SEQ ID NO: 991534 - RNA, 22 nt, Human
ggcugcuggaagacugaacaag

SEQ ID NO: 991535 - RNA, 22 nt, Human
caggugaccuuuguccuaaguu

SEQ ID NO: 991536 - RNA, 22 nt, Human
ccugggcaaaugccagagacaa

SEQ ID NO: 991537 - RNA, 20 nt, Human
acagaaagagagaaugucag

SEQ ID NO: 991538 - RNA, 22 nt, Human
agggggcaucagguccuggcuc

SEQ ID NO: 991539 - RNA, 22 nt, Human
ccaggggcuggugcugagcugg

SEQ ID NO: 991540 - RNA, 21 nt, Human
aggcuguccuuugccagcccu

SEQ ID NO: 991541 - RNA, 22 nt, Human
ggcagagguagcuggaaccagg

SEQ ID NO: 991542 - RNA, 22 nt, Human
auucaguaggucuagaauaaga

SEQ ID NO: 991543 - RNA, 18 nt, Human
gaggauggaaggagaugc

SEQ ID NO: 991544 - RNA, 23 nt, Human
ggccauggagacuuagaaugggc

SEQ ID NO: 991545 - RNA, 22 nt, Human
ucuggcucagggcucugaggga

SEQ ID NO: 991546 - RNA, 22 nt, Human
gcuuucucuucacugauguuca

SEQ ID NO: 991547 - RNA, 22 nt, Human
agccucucuuucugguggcuaa

SEQ ID NO: 991548 - RNA, 22 nt, Human
gguggccuccagggcauaggug

SEQ ID NO: 991549 - RNA, 22 nt, Human
cagcuggcgggcagagccgcca

SEQ ID NO: 991550 - RNA, 22 nt, Human
auuaaggaauguaggcaagaag

SEQ ID NO: 991551 - RNA, 22 nt, Human
ugccagcccaccuuggggccuc

SEQ ID NO: 991552 - RNA, 22 nt, Human
agcagccagugggagugauaca

SEQ ID NO: 991553 - RNA, 18 nt, Human
cauuguacaaugcuuuau

SEQ ID NO: 991554 - RNA, 22 nt, Human
ucugggcacugcugagccugua

SEQ ID NO: 991555 - RNA, 22 nt, Human
aggcuucuuagauuggcuggag

SEQ ID NO: 991556 - RNA, 22 nt, Human
gugcaguggcagauccuagcuc

SEQ ID NO: 991557 - RNA, 22 nt, Human
gccagggaggcuguaggguccu

SEQ ID NO: 991558 - RNA, 22 nt, Human
uggcuuccaaaggaaugggccu

SEQ ID NO: 991559 - RNA, 22 nt, Human
uuccauaauaggcuuaagugaa

SEQ ID NO: 991560 - RNA, 22 nt, Human
uagcacugaaucacaugcugcu

SEQ ID NO: 991561 - RNA, 22 nt, Human
gaugggggccagggccugcuuu

SEQ ID NO: 991562 - RNA, 22 nt, Human
uggcucugggcaccguguccac

SEQ ID NO: 991563 - RNA, 22 nt, Human
ggccugcacagagguggcucua

SEQ ID NO: 991564 - RNA, 22 nt, Human
ccugucugcaugagugagcaua

SEQ ID NO: 991565 - RNA, 22 nt, Human
gcacugaaauuauaugcauuug

SEQ ID NO: 991566 - RNA, 22 nt, Human
ugucucaggcccaagccaguaa

SEQ ID NO: 991567 - RNA, 22 nt, Human
agagccaggaugucuucugggg

SEQ ID NO: 991568 - RNA, 22 nt, Human
cugcuuugcauagcugccagag

SEQ ID NO: 991569 - RNA, 22 nt, Human
agagugaaggccagguuacagu

SEQ ID NO: 991570 - RNA, 18 nt, Human
aagccagagaccacugcc

SEQ ID NO: 991571 - RNA, 21 nt, Human
acaugcauagagagauuucug

SEQ ID NO: 991572 - RNA, 22 nt, Human
ucaguauccacaaaugcucaaa

SEQ ID NO: 991573 - RNA, 22 nt, Human
uggcagggucuugcuguguugc

SEQ ID NO: 991574 - RNA, 22 nt, Human
gucccuuggcucacaaacagcu

SEQ ID NO: 991575 - RNA, 22 nt, Human
gugaaaucugaggcccaugaug

SEQ ID NO: 991576 - RNA, 20 nt, Human
agugacagagacuguguggc

SEQ ID NO: 991577 - RNA, 22 nt, Human
cugugcaagacuuacuuuaaua

SEQ ID NO: 991578 - RNA, 22 nt, Human
aggccugaaggaagaugagcug

SEQ ID NO: 991579 - RNA, 22 nt, Human
aggagucauugagagggguccu

SEQ ID NO: 991580 - RNA, 22 nt, Human
cuacauuuggagaguauaggaa

SEQ ID NO: 991581 - RNA, 22 nt, Human
cagacaggguccuguccgucac

SEQ ID NO: 991582 - RNA, 22 nt, Human
ggagugaguacuggaguagcug

SEQ ID NO: 991583 - RNA, 18 nt, Human
caugggugacagguggau

SEQ ID NO: 991584 - RNA, 22 nt, Human
ccugugccagcugggcccugcc

SEQ ID NO: 991585 - RNA, 22 nt, Human
ccagagccagagaggugccugc

SEQ ID NO: 991586 - RNA, 18 nt, Human
aaguaugccuauguuauu

SEQ ID NO: 991587 - RNA, 22 nt, Human
ugcaaacaggagaguaaguaua

SEQ ID NO: 991588 - RNA, 18 nt, Human
cucucuggucuggauccc

SEQ ID NO: 991589 - RNA, 22 nt, Human
acagccagguaaaggcauggca

SEQ ID NO: 991590 - RNA, 22 nt, Human
caagcuccuuacauccacaggg

SEQ ID NO: 991591 - RNA, 22 nt, Human
uggccuuggcagugagaagagu

SEQ ID NO: 991592 - RNA, 22 nt, Human
agggccuggaacuggagaccac

SEQ ID NO: 991593 - RNA, 22 nt, Human
gaggugaguggaucacgagguc

SEQ ID NO: 991594 - RNA, 22 nt, Human
guagaagugaugucauguuaua

SEQ ID NO: 991595 - RNA, 22 nt, Human
agacagggucuugaucagagcu

SEQ ID NO: 991596 - RNA, 22 nt, Human
gcugccaugguccaggcuccag

SEQ ID NO: 991597 - RNA, 22 nt, Human
acccuggggguggccagugcca

SEQ ID NO: 991598 - RNA, 21 nt, Human
agaugcugugcuccaggagca

SEQ ID NO: 991599 - RNA, 22 nt, Human
aggcacugaauauccaguaaaa

SEQ ID NO: 991600 - RNA, 22 nt, Human
uuucuaaaugguggcugcauug

SEQ ID NO: 991601 - RNA, 22 nt, Human
gaggcuggugguuaguuccauu

SEQ ID NO: 991602 - RNA, 22 nt, Human
cugggccaucagaggggcugga

SEQ ID NO: 991603 - RNA, 22 nt, Human
cagcugagucugagguucuuug

SEQ ID NO: 991604 - RNA, 22 nt, Human
agccccacacucucucugagaa

SEQ ID NO: 991605 - RNA, 22 nt, Human
gcccagcagcugguggagaagg

SEQ ID NO: 991606 - RNA, 22 nt, Human
ugggcugcuguuacaggggcug

SEQ ID NO: 991607 - RNA, 22 nt, Human
uggcucaggguccccaaauggu

SEQ ID NO: 991608 - RNA, 22 nt, Human
cugcacaguuugauuucuugcu

SEQ ID NO: 991609 - RNA, 22 nt, Human
cugugugcugaaaugcagugag

SEQ ID NO: 991610 - RNA, 22 nt, Human
uucaagauggccccagugagcc

SEQ ID NO: 991611 - RNA, 22 nt, Human
uccagagguauguagagaguau

SEQ ID NO: 991612 - RNA, 22 nt, Human
aaugcacauguuguaauaaaua

SEQ ID NO: 991613 - RNA, 22 nt, Human
cuguccucuguccucagcagga

SEQ ID NO: 991614 - RNA, 22 nt, Human
uaaguucauaagcuuauucuua

SEQ ID NO: 991615 - RNA, 22 nt, Human
cauucauuagaauagauaugua

SEQ ID NO: 991616 - RNA, 22 nt, Human
uauucacauuaauaagucuuca

SEQ ID NO: 991617 - RNA, 22 nt, Human
cagggccuuuuagcaucuucuc

SEQ ID NO: 991618 - RNA, 22 nt, Human
uuagcugcauuaucaaaguuau

SEQ ID NO: 991619 - RNA, 22 nt, Human
agucccagcuucccccaugcag

SEQ ID NO: 991620 - RNA, 21 nt, Human
cagcuuugucugucuucgggg

SEQ ID NO: 991621 - RNA, 22 nt, Human
uggcagugccccuugaccagug

SEQ ID NO: 991622 - RNA, 22 nt, Human
aauguacacugaaagccuauca

SEQ ID NO: 991623 - RNA, 22 nt, Human
cucagaguccccacaucugggu

SEQ ID NO: 991624 - RNA, 22 nt, Human
auguaacuguuauauuuuguug

SEQ ID NO: 991625 - RNA, 22 nt, Human
cuuccugguuugaagcucgccg

SEQ ID NO: 991626 - RNA, 22 nt, Human
gaaaugcauggaucuuggcaga

SEQ ID NO: 991627 - RNA, 22 nt, Human
cugggagcuagcucugagcuga

SEQ ID NO: 991628 - RNA, 22 nt, Human
ccugugaggucaucugugguaa

SEQ ID NO: 991629 - RNA, 21 nt, Human
ugcaggaaagugcugcgaccc

SEQ ID NO: 991630 - RNA, 22 nt, Human
augggaggcagcagagcccagc

SEQ ID NO: 991631 - RNA, 22 nt, Human
ucggagcuguagaugaaacccu

SEQ ID NO: 991632 - RNA, 22 nt, Human
cugccagcucgccacaaugaca

SEQ ID NO: 991633 - RNA, 22 nt, Human
cuggugguucaggagaauggcu

SEQ ID NO: 991634 - RNA, 22 nt, Human
ggccuugggcagacacgucaca

SEQ ID NO: 991635 - RNA, 22 nt, Human
cucuuucaguucugauagucuc

SEQ ID NO: 991636 - RNA, 22 nt, Human
cccagcucugcagaccugcccu

SEQ ID NO: 991637 - RNA, 22 nt, Human
agaaguuaccacauacuucucu

SEQ ID NO: 991638 - RNA, 22 nt, Human
ucugcaggccucgacaaggcca

SEQ ID NO: 991639 - RNA, 22 nt, Human
aacagcuuugcuucuggagaca

SEQ ID NO: 991640 - RNA, 22 nt, Human
ugaaccagagucuccagugguu

SEQ ID NO: 991641 - RNA, 22 nt, Human
caagagcuagaaauugguuaga

SEQ ID NO: 991642 - RNA, 22 nt, Human
aaaaaguuucaacugccaacuc

SEQ ID NO: 991643 - RNA, 22 nt, Human
aagggcugaaugaaggguugaa

SEQ ID NO: 991644 - RNA, 22 nt, Human
caguacuuuucaaccaguauga

SEQ ID NO: 991645 - RNA, 22 nt, Human
aaugugcagaugaauaaacaaa

SEQ ID NO: 991646 - RNA, 21 nt, Human
ccaggguccagcugccauggu

SEQ ID NO: 991647 - RNA, 22 nt, Human
ugucucagaauggcucauaaua

SEQ ID NO: 991648 - RNA, 22 nt, Human
cugcucuguuucuuagcugggu

SEQ ID NO: 991649 - RNA, 22 nt, Human
agccucucuguuagucacuggg

SEQ ID NO: 991650 - RNA, 20 nt, Human
caggccucugggggcccugg

SEQ ID NO: 991651 - RNA, 22 nt, Human
ccaggcugagcaugauuggagc

SEQ ID NO: 991652 - RNA, 22 nt, Human
cccuucccuucugggagaucca

SEQ ID NO: 991653 - RNA, 21 nt, Human
gccuggcagguggaagggcuc

SEQ ID NO: 991654 - RNA, 22 nt, Human
gcauccagagguagccacugug

SEQ ID NO: 991655 - RNA, 21 nt, Human
aacaaagggaugcucaucuuu

SEQ ID NO: 991656 - RNA, 22 nt, Human
aaacccugcccuucccaagaug

SEQ ID NO: 991657 - RNA, 20 nt, Human
guggccucucacauucugag

SEQ ID NO: 991658 - RNA, 22 nt, Human
cucagcagcagggaagagguca

SEQ ID NO: 991659 - RNA, 22 nt, Human
ucuggccaauguugugaucaca

SEQ ID NO: 991660 - RNA, 22 nt, Human
ccugcagcuguaggagaaggcg

SEQ ID NO: 991661 - RNA, 21 nt, Human
cccuguguuccacagcagaca

SEQ ID NO: 991662 - RNA, 22 nt, Human
ggcacugagcgggcucugagcg

SEQ ID NO: 991663 - RNA, 21 nt, Human
aggcugcuggcucaggguccu

SEQ ID NO: 991664 - RNA, 22 nt, Human
aaggagagagcuuugcuggaac

SEQ ID NO: 991665 - RNA, 22 nt, Human
ggcaugggagugagcaaccuua

SEQ ID NO: 991666 - RNA, 22 nt, Human
gggagccaugcuggucuucuuu

SEQ ID NO: 991667 - RNA, 22 nt, Human
agaaaaaucuuggcgcuugucu

SEQ ID NO: 991668 - RNA, 22 nt, Human
auucuccacacauccagaccuu

SEQ ID NO: 991669 - RNA, 22 nt, Human
cacauguuuggcaugucaccaa

SEQ ID NO: 991670 - RNA, 22 nt, Human
aagagggcugcaaucuuauugc

SEQ ID NO: 991671 - RNA, 19 nt, Human
gggaugggcccucacccuc

SEQ ID NO: 991672 - RNA, 22 nt, Human
cagacccucgggugaguuggcc

SEQ ID NO: 991673 - RNA, 22 nt, Human
ccagggcagcagaauuggggca

SEQ ID NO: 991674 - RNA, 22 nt, Human
caugucuuggcuuaggcacaga

SEQ ID NO: 991675 - RNA, 20 nt, Human
cuggcaggagcgagucuacc

SEQ ID NO: 991676 - RNA, 22 nt, Human
ucagggcucaccagccucugcc

SEQ ID NO: 991677 - RNA, 22 nt, Human
ucucugggauaaacugggccag

SEQ ID NO: 991678 - RNA, 22 nt, Human
uaaggcacacaguugcugcaug

SEQ ID NO: 991679 - RNA, 22 nt, Human
gcuggcuguuggagguaccugc

SEQ ID NO: 991680 - RNA, 23 nt, Human
agaugaaagcuucccaucacagu

SEQ ID NO: 991681 - RNA, 20 nt, Human
gucugaggagcagugggaaa

SEQ ID NO: 991682 - RNA, 22 nt, Human
cugggugaguugaugaaggaga

SEQ ID NO: 991683 - RNA, 22 nt, Human
ugucccagcacuuugggagucu

SEQ ID NO: 991684 - RNA, 22 nt, Human
gcucccagaaccaaggcugggg

SEQ ID NO: 991685 - RNA, 20 nt, Human
aggaacuggaagggaggaaa

SEQ ID NO: 991686 - RNA, 22 nt, Human
cagagccccccuucugaucaca

SEQ ID NO: 991687 - RNA, 22 nt, Human
ccagggcaauuauuuggagggu

SEQ ID NO: 991688 - RNA, 20 nt, Human
acugccuugguucaguaggu

SEQ ID NO: 991689 - RNA, 22 nt, Human
ccagcuggagccaagguggacu

SEQ ID NO: 991690 - RNA, 22 nt, Human
gcuggccauauauuuugcuguu

SEQ ID NO: 991691 - RNA, 22 nt, Human
gcacagggagacagccguggcc

SEQ ID NO: 991692 - RNA, 23 nt, Human
ugucacauuuaguuggcauuguu

SEQ ID NO: 991693 - RNA, 22 nt, Human
ugggcagagaguagaggcaacg

SEQ ID NO: 991694 - RNA, 22 nt, Human
aggcccagggcugcucucugaa

SEQ ID NO: 991695 - RNA, 22 nt, Human
uauuuugucuucugcucaucac

SEQ ID NO: 991696 - RNA, 22 nt, Human
ucucaggguuuccugggggcug

SEQ ID NO: 991697 - RNA, 22 nt, Human
cucauggauauaagaacuguuu

SEQ ID NO: 991698 - RNA, 22 nt, Human
accuuauuaaaaugaugaugua

SEQ ID NO: 991699 - RNA, 22 nt, Human
ucucacucauuuccuaggucuu

SEQ ID NO: 991700 - RNA, 22 nt, Human
uaugcacagaaguuugcugaau

SEQ ID NO: 991701 - RNA, 22 nt, Human
uacaaagccugguagauaucug

SEQ ID NO: 991702 - RNA, 22 nt, Human
cagguacacucccuugugcuga

SEQ ID NO: 991703 - RNA, 22 nt, Human
gccucugcugacaagauggaca

SEQ ID NO: 991704 - RNA, 22 nt, Human
caguggguaggaaaggcucuuc

SEQ ID NO: 991705 - RNA, 21 nt, Human
cugugcuuuuuaagugugaug

SEQ ID NO: 991706 - RNA, 22 nt, Human
uggccugauuuugcuaagagaa

SEQ ID NO: 991707 - RNA, 19 nt, Human
aauaauguucaugagauug

SEQ ID NO: 991708 - RNA, 22 nt, Human
uggagcugagaaguggagcucu

SEQ ID NO: 991709 - RNA, 22 nt, Human
cacaagagagugcgcguugcaa

SEQ ID NO: 991710 - RNA, 22 nt, Human
agcagccauccuuagagaaaga

SEQ ID NO: 991711 - RNA, 22 nt, Human
acuggaagccaguugacaauca

SEQ ID NO: 991712 - RNA, 22 nt, Human
cccaggaggucgaagcugcagu

SEQ ID NO: 991713 - RNA, 22 nt, Human
cccagaaggucgaggcugcagu

SEQ ID NO: 991714 - RNA, 18 nt, Human
acauuucucucugcguga

SEQ ID NO: 991715 - RNA, 19 nt, Human
ugggccugcaucugggucu

SEQ ID NO: 991716 - RNA, 22 nt, Human
uagcaguggaaucuuuugucca

SEQ ID NO: 991717 - RNA, 23 nt, Human
caugccaguuugugcaggcagau

SEQ ID NO: 991718 - RNA, 22 nt, Human
gccuuccuuuuaccaccagcca

SEQ ID NO: 991719 - RNA, 22 nt, Human
aggccuuccucggagacaggga

SEQ ID NO: 991720 - RNA, 22 nt, Human
cagggccauaucuugugcacca

SEQ ID NO: 991721 - RNA, 22 nt, Human
uccaguggagugugggggugaa

SEQ ID NO: 991722 - RNA, 22 nt, Human
gcccaggccggagagcagugcu

SEQ ID NO: 991723 - RNA, 22 nt, Human
ucccagagacaucauuucuccg

SEQ ID NO: 991724 - RNA, 22 nt, Human
uugaaaggcacaggcaccuggg

SEQ ID NO: 991725 - RNA, 22 nt, Human
acagaauugauggaaaucucag

SEQ ID NO: 991726 - RNA, 21 nt, Human
gggugggaggacacagcaggc

SEQ ID NO: 991727 - RNA, 22 nt, Human
cagcaguggaacuacccaggga

SEQ ID NO: 991728 - RNA, 22 nt, Human
gcagggcucauucuaguacaau

SEQ ID NO: 991729 - RNA, 22 nt, Human
guggagacgggacagaagcuaa

SEQ ID NO: 991730 - RNA, 22 nt, Human
ugcaguggcgccaucucagcuc

SEQ ID NO: 991731 - RNA, 22 nt, Human
cagcauggcuugaguguuuccu

SEQ ID NO: 991732 - RNA, 22 nt, Human
ccuggaccaaacacuggccugg

SEQ ID NO: 991733 - RNA, 22 nt, Human
gcaaagucugcaucuggaucag

SEQ ID NO: 991734 - RNA, 22 nt, Human
gcucugcuguggaauccucucc

SEQ ID NO: 991735 - RNA, 22 nt, Human
gaagcccacguuuggugaugua

SEQ ID NO: 991736 - RNA, 19 nt, Human
ucccgcccacugagcgugc

SEQ ID NO: 991737 - RNA, 22 nt, Human
ucuggcucccuggagcuccaca

SEQ ID NO: 991738 - RNA, 15 nt, Human
ugauuuccuacuaac

SEQ ID NO: 991739 - RNA, 22 nt, Human
ucaguuuuguauguuguaaguc

SEQ ID NO: 991740 - RNA, 22 nt, Human
uggccugggugcugcugacauc

SEQ ID NO: 991741 - RNA, 22 nt, Human
ggaggccaucagggagggcauu

SEQ ID NO: 991742 - RNA, 22 nt, Human
ucacagggcauuauggcuccag

SEQ ID NO: 991743 - RNA, 21 nt, Human
agguggggcugcaccucugcu

SEQ ID NO: 991744 - RNA, 22 nt, Human
aggccuccugcagggaugagug

SEQ ID NO: 991745 - RNA, 22 nt, Human
accuuucacgguaucagacauc

SEQ ID NO: 991746 - RNA, 22 nt, Human
ugcugcauuuaucuucucaaac

SEQ ID NO: 991747 - RNA, 22 nt, Human
cuugccuucuguuccuauagaa

SEQ ID NO: 991748 - RNA, 22 nt, Human
cuggguggaaagugcugagaau

SEQ ID NO: 991749 - RNA, 22 nt, Human
guggccaacucaauguuuuuca

SEQ ID NO: 991750 - RNA, 22 nt, Human
cagguggcaugacugccuacaa

SEQ ID NO: 991751 - RNA, 22 nt, Human
gcugucuggaggcucugaggga

SEQ ID NO: 991752 - RNA, 22 nt, Human
aacagugagaagguggacagga

SEQ ID NO: 991753 - RNA, 22 nt, Human
cagcugccuaugaccuagccuc

SEQ ID NO: 991754 - RNA, 22 nt, Human
auauuaggugcucaauacaugc

SEQ ID NO: 991755 - RNA, 22 nt, Human
gccuuggccaacaccuugcaaa

SEQ ID NO: 991756 - RNA, 22 nt, Human
ucuggccacuaauaggucucac

SEQ ID NO: 991757 - RNA, 22 nt, Human
uuccaguuaaggaagcuauucu

SEQ ID NO: 991758 - RNA, 21 nt, Human
cucuggagucaagagcuucca

SEQ ID NO: 991759 - RNA, 22 nt, Human
cccagcucuuuuagcggcaucu

SEQ ID NO: 991760 - RNA, 22 nt, Human
ccuuccuggcuguccgccugau

SEQ ID NO: 991761 - RNA, 22 nt, Human
ucuccuggcaugugggucaucu

SEQ ID NO: 991762 - RNA, 22 nt, Human
aucauaaagugcuaucugauug

SEQ ID NO: 991763 - RNA, 22 nt, Human
ucucagagauuuuguuucccuu

SEQ ID NO: 991764 - RNA, 22 nt, Human
uuagauaauguagagauaugag

SEQ ID NO: 991765 - RNA, 22 nt, Human
cuggagagaaaugacaaagcua

SEQ ID NO: 991766 - RNA, 22 nt, Human
ugaagcaguucucagaaguggg

SEQ ID NO: 991767 - RNA, 22 nt, Human
ucaggcagaggauggggagcgu

SEQ ID NO: 991768 - RNA, 17 nt, Human
ggaaaaggaugauacag

SEQ ID NO: 991769 - RNA, 22 nt, Human
cagcuggggcagccacgugcgg

SEQ ID NO: 991770 - RNA, 22 nt, Human
cuccaguaucuguaggaaaagg

SEQ ID NO: 991771 - RNA, 22 nt, Human
cuggagccccagacagggagag

SEQ ID NO: 991772 - RNA, 22 nt, Human
gagagugucgggggccccagga

SEQ ID NO: 991773 - RNA, 22 nt, Human
aggggcucaguuacuuuggcag

SEQ ID NO: 991774 - RNA, 22 nt, Human
gagcagggagacaacucuggug

SEQ ID NO: 991775 - RNA, 22 nt, Human
ugacagaaugugacucucagau

SEQ ID NO: 991776 - RNA, 22 nt, Human
aaaggcuccuucucccaugacc

SEQ ID NO: 991777 - RNA, 22 nt, Human
cagugggaagggcagaggcuuu

SEQ ID NO: 991778 - RNA, 21 nt, Human
gcucuuggaaggggcucagcu

SEQ ID NO: 991779 - RNA, 22 nt, Human
aggucaccauggcaugcuccac

SEQ ID NO: 991780 - RNA, 22 nt, Human
ggcccuguuagagcucccacaa

SEQ ID NO: 991781 - RNA, 22 nt, Human
gagagcuggccagcuucaguau

SEQ ID NO: 991782 - RNA, 22 nt, Human
guggccaagaggggacuggaua

SEQ ID NO: 991783 - RNA, 22 nt, Human
uuucuauuuuaaaggcauaugg

SEQ ID NO: 991784 - RNA, 22 nt, Human
ugaaaucugcaugcaaaguccu

SEQ ID NO: 991785 - RNA, 22 nt, Human
cuggaagggucuacuuagcaga

SEQ ID NO: 991786 - RNA, 22 nt, Human
agauggguaacuggagucugcu

SEQ ID NO: 991787 - RNA, 22 nt, Human
ccagcucugccaagcgucagcu

SEQ ID NO: 991788 - RNA, 22 nt, Human
agauacaucuugaacuucuaga

SEQ ID NO: 991789 - RNA, 22 nt, Human
cacagggccuggggcagcugcu

SEQ ID NO: 991790 - RNA, 22 nt, Human
ugucucagaggcaggaagagcc

SEQ ID NO: 991791 - RNA, 22 nt, Human
cacugaagccugggaguaagac

SEQ ID NO: 991792 - RNA, 18 nt, Human
aaagaaggauuggagagc

SEQ ID NO: 991793 - RNA, 22 nt, Human
acaggugguaaaauggacuguc

SEQ ID NO: 991794 - RNA, 22 nt, Human
uugcauugaucccagcuugggc

SEQ ID NO: 991795 - RNA, 22 nt, Human
auguacaguuucuagacucaaa

SEQ ID NO: 991796 - RNA, 22 nt, Human
ccaaggagaaaugcugugcuuu

SEQ ID NO: 991797 - RNA, 22 nt, Human
ggaggguuagcaaaggcacaga

SEQ ID NO: 991798 - RNA, 22 nt, Human
ccucccacauccuagcucugcu

SEQ ID NO: 991799 - RNA, 19 nt, Human
gugaggauacugcucagag

SEQ ID NO: 991800 - RNA, 22 nt, Human
ucucaccauggugcuugcuuau

SEQ ID NO: 991801 - RNA, 22 nt, Human
cugucuguuuuaccuucuccag

SEQ ID NO: 991802 - RNA, 21 nt, Human
gccaccccuggcacaggugcu

SEQ ID NO: 991803 - RNA, 22 nt, Human
ccagggucuuggagaggagugc

SEQ ID NO: 991804 - RNA, 19 nt, Human
ggcucucccuugagagagc

SEQ ID NO: 991805 - RNA, 22 nt, Human
gcagcaggagaguuuguccugc

SEQ ID NO: 991806 - RNA, 22 nt, Human
uagucucuggagacucuagggg

SEQ ID NO: 991807 - RNA, 22 nt, Human
uacuuuggauccuuacaauagc

SEQ ID NO: 991808 - RNA, 23 nt, Human
cuggcucauccugguugcagugg

SEQ ID NO: 991809 - RNA, 22 nt, Human
gagagaagaaagccaugguccu

SEQ ID NO: 991810 - RNA, 22 nt, Human
agcugcucccuauccuuuccuu

SEQ ID NO: 991811 - RNA, 23 nt, Human
ggaaagagaggaguugugcauag

SEQ ID NO: 991812 - RNA, 22 nt, Human
cugcagcuuuggaaaccuguuu

SEQ ID NO: 991813 - RNA, 22 nt, Human
ucaaauaaggagucaugaccau

SEQ ID NO: 991814 - RNA, 22 nt, Human
gcagauggugggggaggaguac

SEQ ID NO: 991815 - RNA, 22 nt, Human
cagcagguauguuuguucagca

SEQ ID NO: 991816 - RNA, 22 nt, Human
ugaagucuauuaacugauuucu

SEQ ID NO: 991817 - RNA, 23 nt, Human
gcugucaguuguuuuugucucua

SEQ ID NO: 991818 - RNA, 22 nt, Human
uggccaggcagguagaacggcc

SEQ ID NO: 991819 - RNA, 22 nt, Human
aaugggagagaacacaaagucc

SEQ ID NO: 991820 - RNA, 21 nt, Human
cuccugggcuaagauauagug

SEQ ID NO: 991821 - RNA, 22 nt, Human
uagggcaguuauaacauuagug

SEQ ID NO: 991822 - RNA, 22 nt, Human
acagcagcuggguucccaccau

SEQ ID NO: 991823 - RNA, 22 nt, Human
aaacuguaaacacagcaguaca

SEQ ID NO: 991824 - RNA, 22 nt, Human
agacaugagaaacccaccagag

SEQ ID NO: 991825 - RNA, 22 nt, Human
uaucuauuccaaauaucagcgu

SEQ ID NO: 991826 - RNA, 22 nt, Human
gcuggugagcaaaggagaagga

SEQ ID NO: 991827 - RNA, 22 nt, Human
acugcaggagacacagcugcug

SEQ ID NO: 991828 - RNA, 22 nt, Human
gacaucaauauucugcagggau

SEQ ID NO: 991829 - RNA, 22 nt, Human
caaaugaagaaccuucucaccu

SEQ ID NO: 991830 - RNA, 22 nt, Human
ugauuucccucaucauaacaga

SEQ ID NO: 991831 - RNA, 22 nt, Human
aaauguguuccuuugcuacaga

SEQ ID NO: 991832 - RNA, 22 nt, Human
uuuucuaacaucuaguaauuug

SEQ ID NO: 991833 - RNA, 20 nt, Human
acauugauuauguuuguaga

SEQ ID NO: 991834 - RNA, 22 nt, Human
agggcagaaaucgauuacaccu

SEQ ID NO: 991835 - RNA, 22 nt, Human
ggcaaaaaccacaauuacuuuu

SEQ ID NO: 991836 - RNA, 19 nt, Human
ucauucaggaccaguggau

SEQ ID NO: 991837 - RNA, 22 nt, Human
ugaggaggucagagucuggcug

SEQ ID NO: 991838 - RNA, 22 nt, Human
aucuggcuuggguguggguagc

SEQ ID NO: 991839 - RNA, 19 nt, Human
ccagcagcuuugauucucu

SEQ ID NO: 991840 - RNA, 19 nt, Human
ucucacaucagcuccuagc

SEQ ID NO: 991841 - RNA, 22 nt, Human
uggcagcuuccugcucauagga

SEQ ID NO: 991842 - RNA, 22 nt, Human
uggagcccagacacuggcauug

SEQ ID NO: 991843 - RNA, 22 nt, Human
agggcucugagugggaaagagg

SEQ ID NO: 991844 - RNA, 22 nt, Human
auguguacaaccaagcacuaaa

SEQ ID NO: 991845 - RNA, 22 nt, Human
ugaggugaccgcagaugggaag

SEQ ID NO: 991846 - RNA, 20 nt, Human
gcugaccccugcugucaugc

SEQ ID NO: 991847 - RNA, 21 nt, Human
agaaaaaccagcauguuuuca

SEQ ID NO: 991848 - RNA, 22 nt, Human
gaggcagagucacaaagagucu

SEQ ID NO: 991849 - RNA, 22 nt, Human
ucacaggacccugaggguggcg

SEQ ID NO: 991850 - RNA, 22 nt, Human
ucugccuucgcugcucccugaa

SEQ ID NO: 991851 - RNA, 22 nt, Human
gaccagagaaaggcacuggaag

SEQ ID NO: 991852 - RNA, 22 nt, Human
guucacauccuugugaggauuu

SEQ ID NO: 991853 - RNA, 20 nt, Human
cuuagaaauuuuuacccugg

SEQ ID NO: 991854 - RNA, 22 nt, Human
gcugugcagguccccacugccu

SEQ ID NO: 991855 - RNA, 22 nt, Human
uugccaggagcucaucugaggg

SEQ ID NO: 991856 - RNA, 22 nt, Human
caagcccaggauuccccaguua

SEQ ID NO: 991857 - RNA, 22 nt, Human
gccaccagugggggccugggca

SEQ ID NO: 991858 - RNA, 22 nt, Human
ugggcuggugagggaucauuua

SEQ ID NO: 991859 - RNA, 22 nt, Human
uauuagguuggugcaacaguaa

SEQ ID NO: 991860 - RNA, 22 nt, Human
gagccauacaaccuauaaagug

SEQ ID NO: 991861 - RNA, 22 nt, Human
ggcaaaguuuucaucucauaac

SEQ ID NO: 991862 - RNA, 22 nt, Human
aggcacuguucccaguuauccu

SEQ ID NO: 991863 - RNA, 22 nt, Human
uuuccucugucaugacagcuga

SEQ ID NO: 991864 - RNA, 20 nt, Human
cucaggauugucuagccccu

SEQ ID NO: 991865 - RNA, 22 nt, Human
gguuugcaugugauguugggca

SEQ ID NO: 991866 - RNA, 22 nt, Human
ggcugcugaguuggccaggaga

SEQ ID NO: 991867 - RNA, 17 nt, Human
uagaauauggugggcug

SEQ ID NO: 991868 - RNA, 22 nt, Human
gcugagcugcuguucauccugc

SEQ ID NO: 991869 - RNA, 22 nt, Human
ucugagaggcaucugcacuucu

SEQ ID NO: 991870 - RNA, 22 nt, Human
ugcccacauucaaaaggugaug

SEQ ID NO: 991871 - RNA, 22 nt, Human
ugggcugcugcggugcucuugg

SEQ ID NO: 991872 - RNA, 22 nt, Human
cagcccugccauggagccuccu

SEQ ID NO: 991873 - RNA, 22 nt, Human
uguaugcagcaaaacaauuagu

SEQ ID NO: 991874 - RNA, 22 nt, Human
gccugagccgccugagcggcgg

SEQ ID NO: 991875 - RNA, 22 nt, Human
uccauguggccagacacuggca

SEQ ID NO: 991876 - RNA, 22 nt, Human
gcauuccugagaaugcagagug

SEQ ID NO: 991877 - RNA, 22 nt, Human
cagagcaguaaaucuggggcac

SEQ ID NO: 991878 - RNA, 22 nt, Human
accaggcuggagugcaguggcg

SEQ ID NO: 991879 - RNA, 22 nt, Human
gagcucagcacuaaaaucaugu

SEQ ID NO: 991880 - RNA, 22 nt, Human
agccaggauuggcugagccuua

SEQ ID NO: 991881 - RNA, 22 nt, Human
ggcagcuccuccuagucugccc

SEQ ID NO: 991882 - RNA, 22 nt, Human
agcugcugaaugacacugcaag

SEQ ID NO: 991883 - RNA, 22 nt, Human
aaggcugaguaaaacagagaac

SEQ ID NO: 991884 - RNA, 22 nt, Human
agaauaguggcaaugacugcac

SEQ ID NO: 991885 - RNA, 22 nt, Human
uaacagaaauauuuccagguga

SEQ ID NO: 991886 - RNA, 22 nt, Human
ucccagagugugggcaucaagg

SEQ ID NO: 991887 - RNA, 22 nt, Human
gucccaggcuuauguggagcuu

SEQ ID NO: 991888 - RNA, 22 nt, Human
auccugggaagcugacauugaa

SEQ ID NO: 991889 - RNA, 19 nt, Human
ccagcagacacagcugccc

SEQ ID NO: 991890 - RNA, 22 nt, Human
gugccaggugcuaagcugugcu

SEQ ID NO: 991891 - RNA, 22 nt, Human
cccagguggcagaagcugcagu

SEQ ID NO: 991892 - RNA, 22 nt, Human
gcagugcuaaguagcuggccca

SEQ ID NO: 991893 - RNA, 22 nt, Human
cuuuauguccaccagacugcaa

SEQ ID NO: 991894 - RNA, 22 nt, Human
ggguccaggucuucaggcagag

SEQ ID NO: 991895 - RNA, 22 nt, Human
ucagaggagccaaaguucugag

SEQ ID NO: 991896 - RNA, 22 nt, Human
ucucacuggguauaaaugagua

SEQ ID NO: 991897 - RNA, 22 nt, Human
agcagcuguacuuucaucuguu

SEQ ID NO: 991898 - RNA, 22 nt, Human
gcugccugcucggcuccuggga

SEQ ID NO: 991899 - RNA, 22 nt, Human
cauguacacucauguaacuaua

SEQ ID NO: 991900 - RNA, 22 nt, Human
caguggaggccuugggaccuuu

SEQ ID NO: 991901 - RNA, 21 nt, Human
ucaaagcacauauuugcacau

SEQ ID NO: 991902 - RNA, 22 nt, Human
ggcagcaggagccaucugguag

SEQ ID NO: 991903 - RNA, 22 nt, Human
acagguggaggcuuuaggaggu

SEQ ID NO: 991904 - RNA, 22 nt, Human
gcugcccagcaggccccagggg

SEQ ID NO: 991905 - RNA, 23 nt, Human
ggacagggcccugcccuauggcc

SEQ ID NO: 991906 - RNA, 22 nt, Human
uugcaaaugaccauugccacau

SEQ ID NO: 991907 - RNA, 22 nt, Human
cuuauguaugcuacuuuguggu

SEQ ID NO: 991908 - RNA, 22 nt, Human
gaggggcagaaugugaucaggg

SEQ ID NO: 991909 - RNA, 22 nt, Human
aaacaccagcacuguuuacaaa

SEQ ID NO: 991910 - RNA, 22 nt, Human
cugcaggcucgaagacacggau

SEQ ID NO: 991911 - RNA, 22 nt, Human
ugcuccauucucuagccagugc

SEQ ID NO: 991912 - RNA, 22 nt, Human
ugcaaaugaguugcagaucagg

SEQ ID NO: 991913 - RNA, 22 nt, Human
cagcaugcaaguccagaugugg

SEQ ID NO: 991914 - RNA, 22 nt, Human
auaaaaguaggaccaacuuaca

SEQ ID NO: 991915 - RNA, 22 nt, Human
uguaccuuuuucugugcaugcu

SEQ ID NO: 991916 - RNA, 22 nt, Human
ugcugucuuccaggauggugaa

SEQ ID NO: 991917 - RNA, 22 nt, Human
aaguuacuggcaagggcugcag

SEQ ID NO: 991918 - RNA, 22 nt, Human
accugccuaguugguucugccc

SEQ ID NO: 991919 - RNA, 22 nt, Human
accugccuauggagccacaugg

SEQ ID NO: 991920 - RNA, 22 nt, Human
agaggcagcagucauacuacag

SEQ ID NO: 991921 - RNA, 22 nt, Human
uuuuaguuguacugucaacagu

SEQ ID NO: 991922 - RNA, 22 nt, Human
acagccugcugccugcuucuug

SEQ ID NO: 991923 - RNA, 22 nt, Human
uacaaagucaccagcuucuugc

SEQ ID NO: 991924 - RNA, 22 nt, Human
ucacauuuucauauucucugag

SEQ ID NO: 991925 - RNA, 22 nt, Human
agugagggaugaagaacugcgg

SEQ ID NO: 991926 - RNA, 22 nt, Human
ggcugagcucaggggcagcagg

SEQ ID NO: 991927 - RNA, 22 nt, Human
cacccaggcuggagugcagggg

SEQ ID NO: 991928 - RNA, 22 nt, Human
uggcugcuagccagagcuucag

SEQ ID NO: 991929 - RNA, 22 nt, Human
caguagcacucugucagugaag

SEQ ID NO: 991930 - RNA, 22 nt, Human
caagaaauuucuuaagaacuaa

SEQ ID NO: 991931 - RNA, 22 nt, Human
cugcuaaaccucucugagagcu

SEQ ID NO: 991932 - RNA, 22 nt, Human
gcagagguggcaucugggcucu

SEQ ID NO: 991933 - RNA, 22 nt, Human
cucaggauagcugcgcagccug

SEQ ID NO: 991934 - RNA, 22 nt, Human
auguggcauucuuggucauuuc

SEQ ID NO: 991935 - RNA, 22 nt, Human
agggcuggcuaggugcguuccc

SEQ ID NO: 991936 - RNA, 22 nt, Human
agcugccugcuuaugagcucca

SEQ ID NO: 991937 - RNA, 22 nt, Human
uggcuuccgccgcgggccucgg

SEQ ID NO: 991938 - RNA, 22 nt, Human
aguuggcauuuuauuuaaguau

SEQ ID NO: 991939 - RNA, 22 nt, Human
acuuuuuacaggguguauacca

SEQ ID NO: 991940 - RNA, 22 nt, Human
auagaauaaggcacagauucuu

SEQ ID NO: 991941 - RNA, 22 nt, Human
gcagagcauguccucaggacag

SEQ ID NO: 991942 - RNA, 22 nt, Human
uguucuugagccuuuagaccua

SEQ ID NO: 991943 - RNA, 22 nt, Human
aucuggcucucucauuuacaaa

SEQ ID NO: 991944 - RNA, 22 nt, Human
caaaguuuggcucucaugacau

SEQ ID NO: 991945 - RNA, 22 nt, Human
ggcugccaggagaagcucagug

SEQ ID NO: 991946 - RNA, 22 nt, Human
auuuucugguugagguuuaaca

SEQ ID NO: 991947 - RNA, 22 nt, Human
aagauacugaugauguaggcua

SEQ ID NO: 991948 - RNA, 18 nt, Human
gcuggcugcacuucugcu

SEQ ID NO: 991949 - RNA, 22 nt, Human
uccuggccaaguuacucucugc

SEQ ID NO: 991950 - RNA, 22 nt, Human
aggcucugcagugcuggaggac

SEQ ID NO: 991951 - RNA, 22 nt, Human
ccucagagguguggcaucucug

SEQ ID NO: 991952 - RNA, 22 nt, Human
uuuaauugauucacagucugua

SEQ ID NO: 991953 - RNA, 19 nt, Human
agucucaguguacagaggc

SEQ ID NO: 991954 - RNA, 22 nt, Human
agcucacagaaauccugcagga

SEQ ID NO: 991955 - RNA, 20 nt, Human
auugucagccuucagaggag

SEQ ID NO: 991956 - RNA, 22 nt, Human
cagucccaccaggaucgcucuu

SEQ ID NO: 991957 - RNA, 22 nt, Human
augauacaucuucaugucagug

SEQ ID NO: 991958 - RNA, 22 nt, Human
ccuuuccuuuuuagugugggag

SEQ ID NO: 991959 - RNA, 22 nt, Human
cuccagaagacccauccucaug

SEQ ID NO: 991960 - RNA, 22 nt, Human
ucacucuguggcccaggcagug

SEQ ID NO: 991961 - RNA, 22 nt, Human
ccacagcaugcaggccugacac

SEQ ID NO: 991962 - RNA, 22 nt, Human
gaaacuguauguaguuuuuggg

SEQ ID NO: 991963 - RNA, 22 nt, Human
gccucacugcagccccaggaag

SEQ ID NO: 991964 - RNA, 22 nt, Human
ucugccuggauuccauucucca

SEQ ID NO: 991965 - RNA, 22 nt, Human
gccucugcaacuccgccuuggu

SEQ ID NO: 991966 - RNA, 22 nt, Human
aggugcagaaaaaaguccuuua

SEQ ID NO: 991967 - RNA, 23 nt, Human
uggccucuccccaccuggcagaa

SEQ ID NO: 991968 - RNA, 22 nt, Human
caggaggccaacugugggacuu

SEQ ID NO: 991969 - RNA, 22 nt, Human
accugagcaugccaggagagug

SEQ ID NO: 991970 - RNA, 23 nt, Human
uccucccaaauuucagccucauu

SEQ ID NO: 991971 - RNA, 22 nt, Human
gccucugcccuccugggacugc

SEQ ID NO: 991972 - RNA, 18 nt, Human
ucuuggaguaaugaucaa

SEQ ID NO: 991973 - RNA, 22 nt, Human
ucugagccaauuucugugucca

SEQ ID NO: 991974 - RNA, 22 nt, Human
ugaaacagucuccagacuugga

SEQ ID NO: 991975 - RNA, 22 nt, Human
ugucaucuuggucuggaauaag

SEQ ID NO: 991976 - RNA, 20 nt, Human
aggcagagcgcacuuuuaga

SEQ ID NO: 991977 - RNA, 22 nt, Human
uuugcaauuugugcugcaaaug

SEQ ID NO: 991978 - RNA, 22 nt, Human
uaaaugcaaugugcuuuaccag

SEQ ID NO: 991979 - RNA, 22 nt, Human
guggccaggccgacugccaggc

SEQ ID NO: 991980 - RNA, 22 nt, Human
acacauuauagagaguauaaua

SEQ ID NO: 991981 - RNA, 22 nt, Human
ucccagccuuucuuuucugcug

SEQ ID NO: 991982 - RNA, 21 nt, Human
ugguuugcggccaaaguuaaa

SEQ ID NO: 991983 - RNA, 22 nt, Human
ucccaaagcuacucuucugacu

SEQ ID NO: 991984 - RNA, 22 nt, Human
ugcagcugauuaaagggcagac

SEQ ID NO: 991985 - RNA, 22 nt, Human
gcccugagggguggugucugua

SEQ ID NO: 991986 - RNA, 22 nt, Human
gggaugucacugugccuggcac

SEQ ID NO: 991987 - RNA, 19 nt, Human
aucagcaagguaggaugug

SEQ ID NO: 991988 - RNA, 22 nt, Human
ugccugcucuuaccacucuccc

SEQ ID NO: 991989 - RNA, 22 nt, Human
gcccucucuucugcagccucca

SEQ ID NO: 991990 - RNA, 22 nt, Human
ccagcucuagccccauguggcu

SEQ ID NO: 991991 - RNA, 22 nt, Human
acaaaguccugguguauggcca

SEQ ID NO: 991992 - RNA, 22 nt, Human
agcuucucaggagucugaggca

SEQ ID NO: 991993 - RNA, 22 nt, Human
agcuccuccugugccaggccag

SEQ ID NO: 991994 - RNA, 22 nt, Human
ugcaggcuguaaucugaggcua

SEQ ID NO: 991995 - RNA, 22 nt, Human
caggagugagaugcgaucacuu

SEQ ID NO: 991996 - RNA, 22 nt, Human
uccuggcccaaucugcccauga

SEQ ID NO: 991997 - RNA, 22 nt, Human
uaggaugacacagcaaguauag

SEQ ID NO: 991998 - RNA, 22 nt, Human
aaggucauuguugcauguucuc

SEQ ID NO: 991999 - RNA, 22 nt, Human
uuuauuaugauggacaccuucg

SEQ ID NO: 992000 - RNA, 22 nt, Human
aacauacagugagcaguggacu

SEQ ID NO: 992001 - RNA, 22 nt, Human
ucccagagcccaaguuggagag

SEQ ID NO: 992002 - RNA, 22 nt, Human
augggaggcagacacuaaguuc

SEQ ID NO: 992003 - RNA, 22 nt, Human
ugguccaggguguaguacagag

SEQ ID NO: 992004 - RNA, 22 nt, Human
gcagcccagguguagcucuuug

SEQ ID NO: 992005 - RNA, 22 nt, Human
agagucuuuugucaguaauguu

SEQ ID NO: 992006 - RNA, 22 nt, Human
acccucccauuuccauguagca

SEQ ID NO: 992007 - RNA, 22 nt, Human
uccuuucaccaaaaaguguugu

SEQ ID NO: 992008 - RNA, 22 nt, Human
uccugggcuugcuccuccagcu

SEQ ID NO: 992009 - RNA, 22 nt, Human
guccucuguagggcugggccac

SEQ ID NO: 992010 - RNA, 22 nt, Human
aaguauauuuuuugaagcauau

SEQ ID NO: 992011 - RNA, 22 nt, Human
caaaaguaauuaugguuuuugc

SEQ ID NO: 992012 - RNA, 22 nt, Human
aaauguaguauguugcauguau

SEQ ID NO: 992013 - RNA, 22 nt, Human
cagcugccacuugcucucggcu

SEQ ID NO: 992014 - RNA, 22 nt, Human
agcccagcagaaaguccagccu

SEQ ID NO: 992015 - RNA, 22 nt, Human
cugggcacauuuugacuagugu

SEQ ID NO: 992016 - RNA, 22 nt, Human
gugcagcugugugagagcucca

SEQ ID NO: 992017 - RNA, 22 nt, Human
gaaaugcauaaucuuaguagau

SEQ ID NO: 992018 - RNA, 22 nt, Human
ccaggaggcagaaguugcagug

SEQ ID NO: 992019 - RNA, 22 nt, Human
uaaaucacuccuaauaaucagu

SEQ ID NO: 992020 - RNA, 19 nt, Human
ugcagcucagggcaggggc

SEQ ID NO: 992021 - RNA, 22 nt, Human
gcuggcagaauuucuucuugcu

SEQ ID NO: 992022 - RNA, 21 nt, Human
ucacucugauuaggugucucu

SEQ ID NO: 992023 - RNA, 22 nt, Human
ucucagagcucacaccuccugg

SEQ ID NO: 992024 - RNA, 21 nt, Human
agagccugagaucuuccagca

SEQ ID NO: 992025 - RNA, 20 nt, Human
ugcagcugcaggaggguggg

SEQ ID NO: 992026 - RNA, 18 nt, Human
ugagagugugugcucuug

SEQ ID NO: 992027 - RNA, 22 nt, Human
uguauuagagcaguagaauuau

SEQ ID NO: 992028 - RNA, 22 nt, Human
ucccagauuguugauggcuuaa

SEQ ID NO: 992029 - RNA, 22 nt, Human
ggaccagagcucgggcuucuca

SEQ ID NO: 992030 - RNA, 22 nt, Human
ugcagaagaaaacagcugugug

SEQ ID NO: 992031 - RNA, 22 nt, Human
ggccugcuauuggugggcagac

SEQ ID NO: 992032 - RNA, 22 nt, Human
ugccaggcauauggccucuuug

SEQ ID NO: 992033 - RNA, 18 nt, Human
cagaaaucacaccagcac

SEQ ID NO: 992034 - RNA, 22 nt, Human
ccagcucuuuuggcugagugag

SEQ ID NO: 992035 - RNA, 22 nt, Human
uggcucugggaaucuguugcuu

SEQ ID NO: 992036 - RNA, 22 nt, Human
acacugaauauacaaugaauau

SEQ ID NO: 992037 - RNA, 22 nt, Human
auuagagaaugugcugacauug

SEQ ID NO: 992038 - RNA, 22 nt, Human
aggauccuuuggccacuucuua

SEQ ID NO: 992039 - RNA, 22 nt, Human
cagacagcugcuuucuugcugu

SEQ ID NO: 992040 - RNA, 22 nt, Human
agccuggcccugcugaacucug

SEQ ID NO: 992041 - RNA, 22 nt, Human
aacacaaagaagcugcaggauc

SEQ ID NO: 992042 - RNA, 22 nt, Human
aagcagaauuucccacuaguug

SEQ ID NO: 992043 - RNA, 22 nt, Human
aggauguugcuauuggcagucu

SEQ ID NO: 992044 - RNA, 22 nt, Human
aggcacugaccugcuuccuuga

SEQ ID NO: 992045 - RNA, 22 nt, Human
agucccuguacuuuccacugcc

SEQ ID NO: 992046 - RNA, 22 nt, Human
agcagccaauuggaggaugaag

SEQ ID NO: 992047 - RNA, 22 nt, Human
uggagccagagcgcagccuggg

SEQ ID NO: 992048 - RNA, 22 nt, Human
agggaaagguagugaggucaca

SEQ ID NO: 992049 - RNA, 22 nt, Human
gcuuuccuggcccugucccugc

SEQ ID NO: 992050 - RNA, 22 nt, Human
ggaggcaggaaagacagguuca

SEQ ID NO: 992051 - RNA, 23 nt, Human
guggccuccccggaaugccucgc

SEQ ID NO: 992052 - RNA, 22 nt, Human
ggaagaagggucauuggcagcc

SEQ ID NO: 992053 - RNA, 22 nt, Human
augccuguaaucccagugcuuu

SEQ ID NO: 992054 - RNA, 22 nt, Human
agcccaagcuaugaggugaccu

SEQ ID NO: 992055 - RNA, 22 nt, Human
aaaagacaucuauuucaggcag

SEQ ID NO: 992056 - RNA, 22 nt, Human
ucuuuggauaucgcuagaccgu

SEQ ID NO: 992057 - RNA, 18 nt, Human
aaauguacuguccauggc

SEQ ID NO: 992058 - RNA, 22 nt, Human
uugaagcaaggcgaaucuugug

SEQ ID NO: 992059 - RNA, 22 nt, Human
acacagggggcauucuaggagu

SEQ ID NO: 992060 - RNA, 22 nt, Human
cacaguggauugggugaugccc

SEQ ID NO: 992061 - RNA, 22 nt, Human
gggucuggcaugcugagaugga

SEQ ID NO: 992062 - RNA, 22 nt, Human
aggccugaggaccagauaaaug

SEQ ID NO: 992063 - RNA, 22 nt, Human
ccaggcaucacgggcauguggc

SEQ ID NO: 992064 - RNA, 20 nt, Human
ugccagggccagcagaggcu

SEQ ID NO: 992065 - RNA, 22 nt, Human
agggcagagaaauguaguugag

SEQ ID NO: 992066 - RNA, 22 nt, Human
agacagcaggggagucugguuu

SEQ ID NO: 992067 - RNA, 22 nt, Human
uuuucuuauggugaagcacaaa

SEQ ID NO: 992068 - RNA, 22 nt, Human
augccaggccccacgcugggca

SEQ ID NO: 992069 - RNA, 22 nt, Human
uggaagagaaaggaguggaucu

SEQ ID NO: 992070 - RNA, 22 nt, Human
gaaaaguauguuuauuuugacu

SEQ ID NO: 992071 - RNA, 22 nt, Human
gcagagcccuggggguauggug

SEQ ID NO: 992072 - RNA, 22 nt, Human
uggcucagcgguggcagcagac

SEQ ID NO: 992073 - RNA, 22 nt, Human
aaguugaagcaugaaccaaggu

SEQ ID NO: 992074 - RNA, 22 nt, Human
aaagaucagucugaagcaacau

SEQ ID NO: 992075 - RNA, 22 nt, Human
ucacuuauaaaaugcaagaucu

SEQ ID NO: 992076 - RNA, 19 nt, Human
acagggcagcaauaggaua

SEQ ID NO: 992077 - RNA, 22 nt, Human
aggcagagcugauguucuguga

SEQ ID NO: 992078 - RNA, 22 nt, Human
cucagaguccauaguuuacagu

SEQ ID NO: 992079 - RNA, 22 nt, Human
ccuggcugugcauugccggccc

SEQ ID NO: 992080 - RNA, 22 nt, Human
agugaaauugcuguaagaggaa

SEQ ID NO: 992081 - RNA, 23 nt, Human
ccuucagaagaaguaacaggggc

SEQ ID NO: 992082 - RNA, 22 nt, Human
caagaugaucccugaaggcagc

SEQ ID NO: 992083 - RNA, 22 nt, Human
ggucaugcugugaaucagugcu

SEQ ID NO: 992084 - RNA, 22 nt, Human
auucuccagcucacuguccaua

SEQ ID NO: 992085 - RNA, 22 nt, Human
ucuguucuauuggucuaugugu

SEQ ID NO: 992086 - RNA, 22 nt, Human
caggugggccgggguuuguucu

SEQ ID NO: 992087 - RNA, 22 nt, Human
ugaccaaaaaauucccugugag

SEQ ID NO: 992088 - RNA, 22 nt, Human
cucucugaggaaggagcaucug

SEQ ID NO: 992089 - RNA, 22 nt, Human
uuaaacagacaguaaaugaaac

SEQ ID NO: 992090 - RNA, 22 nt, Human
caggcagauuugcugcccucca

SEQ ID NO: 992091 - RNA, 22 nt, Human
gggcuggaucuccugcaggcag

SEQ ID NO: 992092 - RNA, 22 nt, Human
uaauacuuuugccuuguauuca

SEQ ID NO: 992093 - RNA, 22 nt, Human
ugcccaggguggagugcagcgg

SEQ ID NO: 992094 - RNA, 22 nt, Human
ugacaugcuuguuuuccuugaa

SEQ ID NO: 992095 - RNA, 22 nt, Human
agccagggacgcugcaggcuac

SEQ ID NO: 992096 - RNA, 22 nt, Human
acugugugaaacaucaaugugu

SEQ ID NO: 992097 - RNA, 22 nt, Human
aacaacugaaaagcuuuuucug

SEQ ID NO: 992098 - RNA, 22 nt, Human
ggaggccauaguuugggaguca

SEQ ID NO: 992099 - RNA, 22 nt, Human
aaauauuauugcuuaaggggag

SEQ ID NO: 992100 - RNA, 22 nt, Human
gccaggugcuaucccugcgcug

SEQ ID NO: 992101 - RNA, 22 nt, Human
aagaaugucguugguauuuuaa

SEQ ID NO: 992102 - RNA, 22 nt, Human
auucuuuuuuaaggaauagaac

SEQ ID NO: 992103 - RNA, 22 nt, Human
uugcagggaccugcagaaagcu

SEQ ID NO: 992104 - RNA, 22 nt, Human
cggagcugccugccaagccugc

SEQ ID NO: 992105 - RNA, 23 nt, Human
ggagccuggcauaugagacgcau

SEQ ID NO: 992106 - RNA, 22 nt, Human
aaguguuaaaagauuaaaugcu

SEQ ID NO: 992107 - RNA, 22 nt, Human
uagcagcugugaguaaaagcca

SEQ ID NO: 992108 - RNA, 22 nt, Human
ugcccuguuaucuuggaagagu

SEQ ID NO: 992109 - RNA, 22 nt, Human
cuggaaggucuguccccacugc

SEQ ID NO: 992110 - RNA, 22 nt, Human
ugucagugaguuaguugcaagu

SEQ ID NO: 992111 - RNA, 22 nt, Human
cuagaaaugcucaagagaaagu

SEQ ID NO: 992112 - RNA, 22 nt, Human
gcagccacuuugcaaccaagag

SEQ ID NO: 992113 - RNA, 23 nt, Human
aaaguugauuugcaguuuaagag

SEQ ID NO: 992114 - RNA, 22 nt, Human
gcagugcugaucccauggcaga

SEQ ID NO: 992115 - RNA, 22 nt, Human
uauuuauaaucugccaaagaga

SEQ ID NO: 992116 - RNA, 22 nt, Human
gauuuccuugcauauugguaau

SEQ ID NO: 992117 - RNA, 22 nt, Human
ggacccugggcuugcuccuggg

SEQ ID NO: 992118 - RNA, 22 nt, Human
ccugccugguguaagucuaagg

SEQ ID NO: 992119 - RNA, 22 nt, Human
ccuggcugggccugauuucuca

SEQ ID NO: 992120 - RNA, 22 nt, Human
gcucugucuucagcacacagua

SEQ ID NO: 992121 - RNA, 22 nt, Human
uggcuggcaguaggcuaguggc

SEQ ID NO: 992122 - RNA, 22 nt, Human
guuccaguaugauuccacccau

SEQ ID NO: 992123 - RNA, 22 nt, Human
aggcucagcccaagguggagag

SEQ ID NO: 992124 - RNA, 22 nt, Human
uccuugaaaggggcugcagggc

SEQ ID NO: 992125 - RNA, 22 nt, Human
gccuuggccuuccuaggccuga

SEQ ID NO: 992126 - RNA, 22 nt, Human
gagauguacaauguguauuaau

SEQ ID NO: 992127 - RNA, 22 nt, Human
ggaggggcagccauggaacucc

SEQ ID NO: 992128 - RNA, 22 nt, Human
uuguuuucacagcuuugcccgg

SEQ ID NO: 992129 - RNA, 22 nt, Human
cagccagcugaauguaccauga

SEQ ID NO: 992130 - RNA, 22 nt, Human
cagagccagcuguccuuggcau

SEQ ID NO: 992131 - RNA, 22 nt, Human
uuauguaauuuguuugcucuuc

SEQ ID NO: 992132 - RNA, 22 nt, Human
ggugauuuucgaguuucauguu

SEQ ID NO: 992133 - RNA, 22 nt, Human
cagcugagcaucacuagucugg

SEQ ID NO: 992134 - RNA, 22 nt, Human
uagaaaugcaguguacuguguc

SEQ ID NO: 992135 - RNA, 22 nt, Human
cacucugcugaaaucgccuugu

SEQ ID NO: 992136 - RNA, 22 nt, Human
uuguuuaaaauguagcaagaaa

SEQ ID NO: 992137 - RNA, 22 nt, Human
auaauuuacuaagcucuaccuu

SEQ ID NO: 992138 - RNA, 22 nt, Human
uacaaagagguaauugcauaua

SEQ ID NO: 992139 - RNA, 22 nt, Human
auuguacaaugccuggaacauu

SEQ ID NO: 992140 - RNA, 22 nt, Human
cuggagccuagguugaccuggg

SEQ ID NO: 992141 - RNA, 22 nt, Human
gugccuggagcuaauguguaua

SEQ ID NO: 992142 - RNA, 22 nt, Human
agcugcuccuuuccugcaggcg

SEQ ID NO: 992143 - RNA, 22 nt, Human
ccuggagcacauggcaggaggc

SEQ ID NO: 992144 - RNA, 22 nt, Human
caucuuuuggccuauucugagg

SEQ ID NO: 992145 - RNA, 22 nt, Human
ucaggaguccugccugcagccu

SEQ ID NO: 992146 - RNA, 22 nt, Human
ucaggcugagaaaaucuggacc

SEQ ID NO: 992147 - RNA, 22 nt, Human
gcugucacacaugggaucucag

SEQ ID NO: 992148 - RNA, 22 nt, Human
cagcacugcuucgcagccaggg

SEQ ID NO: 992149 - RNA, 20 nt, Human
cagucccaauccagggccag

SEQ ID NO: 992150 - RNA, 22 nt, Human
ucagaggucacacagcaaguuu

SEQ ID NO: 992151 - RNA, 22 nt, Human
cagcaauauacacagucuaugg

SEQ ID NO: 992152 - RNA, 22 nt, Human
uggaaagaaaaacaggccauga

SEQ ID NO: 992153 - RNA, 22 nt, Human
cccugcagccuugcaugccuuc

SEQ ID NO: 992154 - RNA, 23 nt, Human
ugagcugguauuguccaucucca

SEQ ID NO: 992155 - RNA, 22 nt, Human
agggggcccuugcaggugagcg

SEQ ID NO: 992156 - RNA, 22 nt, Human
uggaagaggcccaugacugccu

SEQ ID NO: 992157 - RNA, 22 nt, Human
caaggaaaaagcgagcucgggg

SEQ ID NO: 992158 - RNA, 22 nt, Human
gcagugacagggcugcugccuu

SEQ ID NO: 992159 - RNA, 22 nt, Human
acccaggagguggaggcugcag

SEQ ID NO: 992160 - RNA, 22 nt, Human
cacagggcagugauuguccaca

SEQ ID NO: 992161 - RNA, 22 nt, Human
aaaccaaacauuugcgguggug

SEQ ID NO: 992162 - RNA, 22 nt, Human
uuguuuguaugcugagaagaau

SEQ ID NO: 992163 - RNA, 22 nt, Human
aauaauguacauacauauuucg

SEQ ID NO: 992164 - RNA, 22 nt, Human
auguacauuuagaucauuucug

SEQ ID NO: 992165 - RNA, 22 nt, Human
ucugagcuggagcccaucaccu

SEQ ID NO: 992166 - RNA, 22 nt, Human
uugucugucccagcuugugcau

SEQ ID NO: 992167 - RNA, 22 nt, Human
cauugucacccaaagcucauag

SEQ ID NO: 992168 - RNA, 22 nt, Human
ugaagcaggcauugacugauga

SEQ ID NO: 992169 - RNA, 22 nt, Human
cagagugaaaacugagcucaaa

SEQ ID NO: 992170 - RNA, 22 nt, Human
aggcucagcaucugauucauau

SEQ ID NO: 992171 - RNA, 22 nt, Human
agcagcugcagagggcuccccc

SEQ ID NO: 992172 - RNA, 22 nt, Human
ccuggcagcauugguagagauu

SEQ ID NO: 992173 - RNA, 22 nt, Human
ggcugccuugacccuggcuccg

SEQ ID NO: 992174 - RNA, 22 nt, Human
ucuuuuauccuacauuuagcuc

SEQ ID NO: 992175 - RNA, 22 nt, Human
guuauaaaaugcacaguuguuu

SEQ ID NO: 992176 - RNA, 22 nt, Human
ucugggugcccuuugcucuguu

SEQ ID NO: 992177 - RNA, 22 nt, Human
cauaccuuucucaagcacaugu

SEQ ID NO: 992178 - RNA, 22 nt, Human
uggcucagaggggaagugguuu

SEQ ID NO: 992179 - RNA, 22 nt, Human
cuccaggccagggaaguggaca

SEQ ID NO: 992180 - RNA, 22 nt, Human
gccaggcauuuguuaggugcug

SEQ ID NO: 992181 - RNA, 22 nt, Human
gcagagugaggaagagcuucca

SEQ ID NO: 992182 - RNA, 22 nt, Human
cauuuuauccucugggaagcua

SEQ ID NO: 992183 - RNA, 22 nt, Human
gcugucacucuccggccuuccc

SEQ ID NO: 992184 - RNA, 22 nt, Human
cuggcaggcggcagagcccagg

SEQ ID NO: 992185 - RNA, 22 nt, Human
uaggaaaaauacagaauuauau

SEQ ID NO: 992186 - RNA, 22 nt, Human
guggccaaggcagagaaagagc

SEQ ID NO: 992187 - RNA, 22 nt, Human
gcccucuggcagccuuggcugg

SEQ ID NO: 992188 - RNA, 22 nt, Human
uggcagcugaggggaggcuuug

SEQ ID NO: 992189 - RNA, 22 nt, Human
gagcucuggcagggcaggucug

SEQ ID NO: 992190 - RNA, 22 nt, Human
ucccagcagucagagcuaugug

SEQ ID NO: 992191 - RNA, 22 nt, Human
uguggccuggaaggggcugcuc

SEQ ID NO: 992192 - RNA, 22 nt, Human
ccucugggagacugcuacugag

SEQ ID NO: 992193 - RNA, 22 nt, Human
cgcuggggcuuuuugcuugaga

SEQ ID NO: 992194 - RNA, 22 nt, Human
ggccagaaguuggaaaagagcc

SEQ ID NO: 992195 - RNA, 22 nt, Human
gcugccuugaacuuggccuggg

SEQ ID NO: 992196 - RNA, 22 nt, Human
agagcccucuucacugccccuu

SEQ ID NO: 992197 - RNA, 22 nt, Human
uacauucuacuuuuucacuccc

SEQ ID NO: 992198 - RNA, 22 nt, Human
gugcaggggaucagguugcagc

SEQ ID NO: 992199 - RNA, 22 nt, Human
cagggccuuauccugccauuga

SEQ ID NO: 992200 - RNA, 22 nt, Human
ugcuggcuacugauggcaggcc

SEQ ID NO: 992201 - RNA, 22 nt, Human
uuccucuccucccaccagguga

SEQ ID NO: 992202 - RNA, 22 nt, Human
cagggaauccauggucauaagg

SEQ ID NO: 992203 - RNA, 22 nt, Human
ugaagguggcauaggagagaug

SEQ ID NO: 992204 - RNA, 22 nt, Human
uucuggagaucugccuauggga

SEQ ID NO: 992205 - RNA, 22 nt, Human
cuuguacaggaauccaugguau

SEQ ID NO: 992206 - RNA, 22 nt, Human
gcagggcugggugggagacaga

SEQ ID NO: 992207 - RNA, 22 nt, Human
aauucacaaaaguuagauccau

SEQ ID NO: 992208 - RNA, 22 nt, Human
aaacuguaagagaauaaacuac

SEQ ID NO: 992209 - RNA, 22 nt, Human
uauuggauagcuugugcagaau

SEQ ID NO: 992210 - RNA, 22 nt, Human
ugaagccacagagcaucugccu

SEQ ID NO: 992211 - RNA, 22 nt, Human
augggaggguggaaaggcucug

SEQ ID NO: 992212 - RNA, 22 nt, Human
agaugcugcuccacaggccagg

SEQ ID NO: 992213 - RNA, 22 nt, Human
gccugccugaaggcuguaccag

SEQ ID NO: 992214 - RNA, 23 nt, Human
aguguuccaguugguugagagug

SEQ ID NO: 992215 - RNA, 19 nt, Human
ccuggaggugaagguucuc

SEQ ID NO: 992216 - RNA, 22 nt, Human
agggauggaagcucgucugcaa

SEQ ID NO: 992217 - RNA, 22 nt, Human
cauaucccauuggccaggacau

SEQ ID NO: 992218 - RNA, 23 nt, Human
aguuuuucugcaugguucuguau

SEQ ID NO: 992219 - RNA, 22 nt, Human
ugggccugaaggagcugcgccc

SEQ ID NO: 992220 - RNA, 17 nt, Human
gggcagggacuccuggg

SEQ ID NO: 992221 - RNA, 22 nt, Human
cuuccucacggugcaacaggaa

SEQ ID NO: 992222 - RNA, 22 nt, Human
cacagaggaaaggcaguuggua

SEQ ID NO: 992223 - RNA, 22 nt, Human
auauaaagagcuuaguauagug

SEQ ID NO: 992224 - RNA, 22 nt, Human
ucagggcaaagggcagaguuug

SEQ ID NO: 992225 - RNA, 22 nt, Human
acagaauuaaaguguuugugga

SEQ ID NO: 992226 - RNA, 22 nt, Human
acucacuuuccauucaagcacc

SEQ ID NO: 992227 - RNA, 18 nt, Human
uucacaggaaaugucuuu

SEQ ID NO: 992228 - RNA, 22 nt, Human
cauguuaaugaauuuuugcagu

SEQ ID NO: 992229 - RNA, 21 nt, Human
ugggcacugagggugcugcuc

SEQ ID NO: 992230 - RNA, 22 nt, Human
gugggccuugcagggugcaggg

SEQ ID NO: 992231 - RNA, 20 nt, Human
ugaaaggugggaauuguggg

SEQ ID NO: 992232 - RNA, 22 nt, Human
aaaugugucauauucaaaguca

SEQ ID NO: 992233 - RNA, 22 nt, Human
agccuccaaaugucaggucccg

SEQ ID NO: 992234 - RNA, 22 nt, Human
cuuagaaaugcagauucucagg

SEQ ID NO: 992235 - RNA, 21 nt, Human
ggggcagagcuaggcccugca

SEQ ID NO: 992236 - RNA, 21 nt, Human
aggcacuguuugugguuuggg

SEQ ID NO: 992237 - RNA, 22 nt, Human
uugucugugaaauggaaauagu

SEQ ID NO: 992238 - RNA, 22 nt, Human
uccagaggcuccaaagggagau

SEQ ID NO: 992239 - RNA, 22 nt, Human
aucccugcccucauggagcuua

SEQ ID NO: 992240 - RNA, 22 nt, Human
acauuuaaauaccuauguuucu

SEQ ID NO: 992241 - RNA, 22 nt, Human
ugggcagaauugugguaguuaa

SEQ ID NO: 992242 - RNA, 22 nt, Human
uaaaguuuggcagacaauaaca

SEQ ID NO: 992243 - RNA, 22 nt, Human
ugcaguggugguaaagaugcuc

SEQ ID NO: 992244 - RNA, 22 nt, Human
agggagaacaguugcagcagac

SEQ ID NO: 992245 - RNA, 22 nt, Human
gcagcugggacacugaggccag

SEQ ID NO: 992246 - RNA, 22 nt, Human
ggucccaggcucccucuugucc

SEQ ID NO: 992247 - RNA, 22 nt, Human
gcucuccacugaccacggggca

SEQ ID NO: 992248 - RNA, 22 nt, Human
gcagacagcauguugggcuauu

SEQ ID NO: 992249 - RNA, 22 nt, Human
aagggagacaguugugugagga

SEQ ID NO: 992250 - RNA, 20 nt, Human
gccugagcuauugccaggau

SEQ ID NO: 992251 - RNA, 22 nt, Human
guacacucccccugugaaguug

SEQ ID NO: 992252 - RNA, 19 nt, Human
ggcuggcaagugacagugu

SEQ ID NO: 992253 - RNA, 22 nt, Human
aagggaggccagagguuuugca

SEQ ID NO: 992254 - RNA, 22 nt, Human
cuccugggaauuuaguugugag

SEQ ID NO: 992255 - RNA, 22 nt, Human
cucucugagugagggacaagcu

SEQ ID NO: 992256 - RNA, 22 nt, Human
ucagaggaaaggucagauggcu

SEQ ID NO: 992257 - RNA, 22 nt, Human
ucagcaaugugauacugugcaa

SEQ ID NO: 992258 - RNA, 22 nt, Human
cagggacaugacuggucucugu

SEQ ID NO: 992259 - RNA, 22 nt, Human
gggauggggagcuggaaagggg

SEQ ID NO: 992260 - RNA, 19 nt, Human
ucucacaguuuccuugccu

SEQ ID NO: 992261 - RNA, 22 nt, Human
gcucccuguucucagccaugau

SEQ ID NO: 992262 - RNA, 22 nt, Human
agaagccaauucugugugaguc

SEQ ID NO: 992263 - RNA, 22 nt, Human
agucccagaugacccagcuacu

SEQ ID NO: 992264 - RNA, 22 nt, Human
ugaagcugugggcaguggagcc

SEQ ID NO: 992265 - RNA, 22 nt, Human
ucagcagucacauguuguccca

SEQ ID NO: 992266 - RNA, 20 nt, Human
gggguuggcuggcacaggga

SEQ ID NO: 992267 - RNA, 22 nt, Human
gggcucuguccauuccuucaua

SEQ ID NO: 992268 - RNA, 22 nt, Human
accaucaguacuggaugcugac

SEQ ID NO: 992269 - RNA, 18 nt, Human
uggcagggaggaaauaua

SEQ ID NO: 992270 - RNA, 22 nt, Human
guggccagaagacugcaaugcu

SEQ ID NO: 992271 - RNA, 18 nt, Human
ucugggcuucccgaggcu

SEQ ID NO: 992272 - RNA, 22 nt, Human
ccaggagguggagauugcagug

SEQ ID NO: 992273 - RNA, 21 nt, Human
gaggccacuaauaggggcaga

SEQ ID NO: 992274 - RNA, 22 nt, Human
aaagucauuggaauauuaauga

SEQ ID NO: 992275 - RNA, 22 nt, Human
uaauguguccugaaagcuucug

SEQ ID NO: 992276 - RNA, 22 nt, Human
auuguauuagcacaauacaauu

SEQ ID NO: 992277 - RNA, 22 nt, Human
uugcuucauuuuaaauaaagac

SEQ ID NO: 992278 - RNA, 22 nt, Human
gauccuugcacuugacuuggca

SEQ ID NO: 992279 - RNA, 22 nt, Human
ucacaggaaccaucagagaaau

SEQ ID NO: 992280 - RNA, 22 nt, Human
guggccaaacaccaguuuagga

SEQ ID NO: 992281 - RNA, 20 nt, Human
ugucaugcauuagaugaaga

SEQ ID NO: 992282 - RNA, 20 nt, Human
ucugcccaccccggcuccca

SEQ ID NO: 992283 - RNA, 22 nt, Human
ggccugagucccaccuggcugu

SEQ ID NO: 992284 - RNA, 22 nt, Human
aguaaaaucuuaagcacagugg

SEQ ID NO: 992285 - RNA, 22 nt, Human
ggggacugccuuccacagacac

SEQ ID NO: 992286 - RNA, 22 nt, Human
ccuuccaggugcaggcaagccu

SEQ ID NO: 992287 - RNA, 18 nt, Human
agcagaauucuaggguuc

SEQ ID NO: 992288 - RNA, 23 nt, Human
gccagccuugcucuccugcagcc

SEQ ID NO: 992289 - RNA, 22 nt, Human
gguggguauaguuagggccucu

SEQ ID NO: 992290 - RNA, 20 nt, Human
cugagcccccagccugcagg

SEQ ID NO: 992291 - RNA, 21 nt, Human
cugcaucucauagaacauguc

SEQ ID NO: 992292 - RNA, 22 nt, Human
agucucagaguaccugagggac

SEQ ID NO: 992293 - RNA, 22 nt, Human
ucuggcuccugaguccaugcuc

SEQ ID NO: 992294 - RNA, 22 nt, Human
guggcugcagcccagcggcacg

SEQ ID NO: 992295 - RNA, 22 nt, Human
agcuucuguucaucuuccaggc

SEQ ID NO: 992296 - RNA, 22 nt, Human
ccaggagcaggagcuggacaga

SEQ ID NO: 992297 - RNA, 22 nt, Human
uuguuucauggggauguuuauu

SEQ ID NO: 992298 - RNA, 22 nt, Human
agacaucagcuugugugcaggg

SEQ ID NO: 992299 - RNA, 22 nt, Human
auagacuugguuaguaaauuug

SEQ ID NO: 992300 - RNA, 22 nt, Human
agcugggccugagcuggaagcu

SEQ ID NO: 992301 - RNA, 22 nt, Human
ucugggcccuaaaccagcucua

SEQ ID NO: 992302 - RNA, 22 nt, Human
cauuuacauuuaagguuaauau

SEQ ID NO: 992303 - RNA, 22 nt, Human
uuuccucuuugugacacagcug

SEQ ID NO: 992304 - RNA, 22 nt, Human
gagaaggggugauguggguaau

SEQ ID NO: 992305 - RNA, 23 nt, Human
gagcugggauacaggcuuacugc

SEQ ID NO: 992306 - RNA, 22 nt, Human
accuuuuuguucuguucucagc

SEQ ID NO: 992307 - RNA, 22 nt, Human
gcagggucgcucuaggagauca

SEQ ID NO: 992308 - RNA, 22 nt, Human
agcccagaggcugggcgugcau

SEQ ID NO: 992309 - RNA, 22 nt, Human
ugcagggccagacuggguugga

SEQ ID NO: 992310 - RNA, 22 nt, Human
gggacuguaaauucauauggcc

SEQ ID NO: 992311 - RNA, 22 nt, Human
cuccuguauguugggcuucaca

SEQ ID NO: 992312 - RNA, 22 nt, Human
agcuggagaugcccagcaccgg

SEQ ID NO: 992313 - RNA, 22 nt, Human
agaaauguuguggguuuuguua

SEQ ID NO: 992314 - RNA, 22 nt, Human
aaggcacuagcagaauuaguga

SEQ ID NO: 992315 - RNA, 22 nt, Human
gcaaggagacuguagggccaag

SEQ ID NO: 992316 - RNA, 22 nt, Human
uccuucagugucccgcucaggu

SEQ ID NO: 992317 - RNA, 22 nt, Human
auuugcagagcucugaauuuug

SEQ ID NO: 992318 - RNA, 22 nt, Human
cucuugggagugcucuggagaa

SEQ ID NO: 992319 - RNA, 22 nt, Human
cccagccaaggugcugguguug

SEQ ID NO: 992320 - RNA, 19 nt, Human
agucugcauuucuagcaag

SEQ ID NO: 992321 - RNA, 22 nt, Human
cugaaaugguugccuggagaau

SEQ ID NO: 992322 - RNA, 22 nt, Human
uaaaaguuuuaguuguacauaa

SEQ ID NO: 992323 - RNA, 22 nt, Human
acaggcuuuuuuagaaugacau

SEQ ID NO: 992324 - RNA, 22 nt, Human
aagccagguguugugguaagag

SEQ ID NO: 992325 - RNA, 22 nt, Human
uuguuuuggaagaacuuacucu

SEQ ID NO: 992326 - RNA, 22 nt, Human
ugagccuguggggugacaacca

SEQ ID NO: 992327 - RNA, 22 nt, Human
gauacaaauucaugucugaauu

SEQ ID NO: 992328 - RNA, 22 nt, Human
ggguguccugugccaagcuggg

SEQ ID NO: 992329 - RNA, 22 nt, Human
cagcuucugagcaagccagggg

SEQ ID NO: 992330 - RNA, 20 nt, Human
gccugcagagaaggucagag

SEQ ID NO: 992331 - RNA, 22 nt, Human
aaaugcacacaccaggaaacua

SEQ ID NO: 992332 - RNA, 22 nt, Human
uuguuaguuuauauaauguagu

SEQ ID NO: 992333 - RNA, 22 nt, Human
agaggggcucauauccugucau

SEQ ID NO: 992334 - RNA, 22 nt, Human
ugagccaaugauuugaauagag

SEQ ID NO: 992335 - RNA, 22 nt, Human
ucucccacuggccuuguaugau

SEQ ID NO: 992336 - RNA, 22 nt, Human
augaaacaugagaaauggagag

SEQ ID NO: 992337 - RNA, 22 nt, Human
cucugagcccgcugcagcccca

SEQ ID NO: 992338 - RNA, 22 nt, Human
gcagggcuaauggggcaaguag

SEQ ID NO: 992339 - RNA, 22 nt, Human
cccagcucaucaggagccgccc

SEQ ID NO: 992340 - RNA, 20 nt, Human
uaacauaguccagagaacga

SEQ ID NO: 992341 - RNA, 22 nt, Human
agcucuggaauaaugaugugau

SEQ ID NO: 992342 - RNA, 22 nt, Human
uguuggcaucucugagagaguu

SEQ ID NO: 992343 - RNA, 22 nt, Human
ggaaccaguggaaugauaugcu

SEQ ID NO: 992344 - RNA, 19 nt, Human
acccagagcccuuugcagg

SEQ ID NO: 992345 - RNA, 22 nt, Human
ucucuggggauggaccugggag

SEQ ID NO: 992346 - RNA, 22 nt, Human
auguccuuccauuuugaucugu

SEQ ID NO: 992347 - RNA, 22 nt, Human
uauauuaacacccacuugccuc

SEQ ID NO: 992348 - RNA, 22 nt, Human
agggcagccaugagccuucagg

SEQ ID NO: 992349 - RNA, 20 nt, Human
ucugaggcugagcucuacuu

SEQ ID NO: 992350 - RNA, 22 nt, Human
agagugauccuaauugauuugg

SEQ ID NO: 992351 - RNA, 22 nt, Human
cuggccuuuaaaaugaccuuau

SEQ ID NO: 992352 - RNA, 22 nt, Human
aucuaggauuugaaugcacagu

SEQ ID NO: 992353 - RNA, 22 nt, Human
caugccaguuuugagaugcacc

SEQ ID NO: 992354 - RNA, 22 nt, Human
cagcagaggaaagcaaaucuaa

SEQ ID NO: 992355 - RNA, 22 nt, Human
ugagccagaguggagugugccu

SEQ ID NO: 992356 - RNA, 22 nt, Human
acuucuugggacccuggcaccg

SEQ ID NO: 992357 - RNA, 22 nt, Human
ggcagcugauuagcaucaagga

SEQ ID NO: 992358 - RNA, 22 nt, Human
cugcugagcccuggcacaggug

SEQ ID NO: 992359 - RNA, 22 nt, Human
cugcaggcccccuuccuggagu

SEQ ID NO: 992360 - RNA, 22 nt, Human
caggccuggcugcagcucgccu

SEQ ID NO: 992361 - RNA, 19 nt, Human
gggcagaauggcaucucag

SEQ ID NO: 992362 - RNA, 22 nt, Human
gcucugugccacaugcaguguu

SEQ ID NO: 992363 - RNA, 20 nt, Human
uccaguuuuggagacauucu

SEQ ID NO: 992364 - RNA, 20 nt, Human
gcugucuggauuagaagccu

SEQ ID NO: 992365 - RNA, 22 nt, Human
guggcccaggcuuggcgcuggc

SEQ ID NO: 992366 - RNA, 22 nt, Human
cugucucuguugccuguaggug

SEQ ID NO: 992367 - RNA, 22 nt, Human
agagaagacuuacagccacagu

SEQ ID NO: 992368 - RNA, 20 nt, Human
uauaacaguguugggugugu

SEQ ID NO: 992369 - RNA, 23 nt, Human
cucccuggaguuucuggaagaug

SEQ ID NO: 992370 - RNA, 22 nt, Human
cugugccuuuguagcugugccu

SEQ ID NO: 992371 - RNA, 22 nt, Human
gcagccuguuguaccagccugu

SEQ ID NO: 992372 - RNA, 22 nt, Human
gcuguauuuauuuucuaggguu

SEQ ID NO: 992373 - RNA, 22 nt, Human
cagagcuggguuugggaaaccu

SEQ ID NO: 992374 - RNA, 22 nt, Human
uugcucagcacuggagccagcu

SEQ ID NO: 992375 - RNA, 22 nt, Human
caggcagcucgaugccuuguug

SEQ ID NO: 992376 - RNA, 22 nt, Human
aaaaguuaccucuguaauauaa

SEQ ID NO: 992377 - RNA, 22 nt, Human
auuccaguucuccucucuaaag

SEQ ID NO: 992378 - RNA, 22 nt, Human
uacauucaacaugucacuaugu

SEQ ID NO: 992379 - RNA, 22 nt, Human
cagagcagguaucuuuggugaa

SEQ ID NO: 992380 - RNA, 22 nt, Human
cccucugccugggaccaagucc

SEQ ID NO: 992381 - RNA, 22 nt, Human
gcuggcucuucaguggagauag

SEQ ID NO: 992382 - RNA, 18 nt, Human
uagaauauaggucauucu

SEQ ID NO: 992383 - RNA, 22 nt, Human
ugcccaaaccucuccuagcucu

SEQ ID NO: 992384 - RNA, 22 nt, Human
ggcugccuccugcugggcugga

SEQ ID NO: 992385 - RNA, 22 nt, Human
aguuuauguaaaauuaguaaug

SEQ ID NO: 992386 - RNA, 21 nt, Human
ccuucuccacagggucuccgg

SEQ ID NO: 992387 - RNA, 22 nt, Human
agccugcaggaugggcagcacc

SEQ ID NO: 992388 - RNA, 19 nt, Human
uccaccuuucuucauuugg

SEQ ID NO: 992389 - RNA, 22 nt, Human
gccugccuagaauugcagcuuu

SEQ ID NO: 992390 - RNA, 22 nt, Human
auggaaagccaguguuccauca

SEQ ID NO: 992391 - RNA, 22 nt, Human
uuauguauggauggcugaaagu

SEQ ID NO: 992392 - RNA, 22 nt, Human
gauaccagacagggagggagaa

SEQ ID NO: 992393 - RNA, 22 nt, Human
agcuccugaaaauccagacugg

SEQ ID NO: 992394 - RNA, 17 nt, Human
gccaaaggguuccaauc

SEQ ID NO: 992395 - RNA, 22 nt, Human
guacacauugucuguuuacuuc

SEQ ID NO: 992396 - RNA, 22 nt, Human
gggcuccagcccgggaccaggu

SEQ ID NO: 992397 - RNA, 22 nt, Human
aagauauuuuagaacauucacu

SEQ ID NO: 992398 - RNA, 22 nt, Human
cugucuccuccacugcauggga

SEQ ID NO: 992399 - RNA, 20 nt, Human
auguaaaauuauaaggcuga

SEQ ID NO: 992400 - RNA, 22 nt, Human
cuggaaugccucccugucagag

SEQ ID NO: 992401 - RNA, 22 nt, Human
agucccagugacuuggccagaa

SEQ ID NO: 992402 - RNA, 22 nt, Human
ccucagcugcuucccuggagcc

SEQ ID NO: 992403 - RNA, 22 nt, Human
ugagaaagugggugccuagcaa

SEQ ID NO: 992404 - RNA, 22 nt, Human
ugaagccaucccucagauggcc

SEQ ID NO: 992405 - RNA, 22 nt, Human
cuggagcagguuuaggaguccc

SEQ ID NO: 992406 - RNA, 22 nt, Human
augcauaauguauguauugacu

SEQ ID NO: 992407 - RNA, 22 nt, Human
gagugcaucguggccauuuuaa

SEQ ID NO: 992408 - RNA, 22 nt, Human
uagcugccuaugugauaagaga

SEQ ID NO: 992409 - RNA, 22 nt, Human
acagggcaaccucugggagacu

SEQ ID NO: 992410 - RNA, 22 nt, Human
gcucucugucguuaugcuucau

SEQ ID NO: 992411 - RNA, 22 nt, Human
aauucacagaaccauggugcuc

SEQ ID NO: 992412 - RNA, 22 nt, Human
agggcagauggaacuuccccga

SEQ ID NO: 992413 - RNA, 21 nt, Human
cccuugccugcacuccucggc

SEQ ID NO: 992414 - RNA, 22 nt, Human
ggcaguggcuccucucuacucc

SEQ ID NO: 992415 - RNA, 22 nt, Human
ucucaggggauucacuggcacc

SEQ ID NO: 992416 - RNA, 22 nt, Human
gccuggaguucagccaaguccc

SEQ ID NO: 992417 - RNA, 22 nt, Human
cauucacucagcgaugccagua

SEQ ID NO: 992418 - RNA, 22 nt, Human
uggcagagagacucuccuugau

SEQ ID NO: 992419 - RNA, 22 nt, Human
caggcagcaggagcccugcucg

SEQ ID NO: 992420 - RNA, 22 nt, Human
uguguacuugaaagggcagguc

SEQ ID NO: 992421 - RNA, 22 nt, Human
cugcuuugaggggcucuguaua

SEQ ID NO: 992422 - RNA, 22 nt, Human
ucaugacaucuguuuaucucaa

SEQ ID NO: 992423 - RNA, 22 nt, Human
guuugcauuccaauuuagggga

SEQ ID NO: 992424 - RNA, 22 nt, Human
ucagggcaaaagggaaaccauu

SEQ ID NO: 992425 - RNA, 22 nt, Human
guucacaagcuggguuucugca

SEQ ID NO: 992426 - RNA, 18 nt, Human
cuccagggaacucaguca

SEQ ID NO: 992427 - RNA, 22 nt, Human
agggacuggcucucugagcagg

SEQ ID NO: 992428 - RNA, 22 nt, Human
ggcccugggaugcucagcagug

SEQ ID NO: 992429 - RNA, 22 nt, Human
aguggcagagcaggugcuggaa

SEQ ID NO: 992430 - RNA, 23 nt, Human
aucaaacuggugagaaugucagu

SEQ ID NO: 992431 - RNA, 22 nt, Human
aaccaggacaauuugaauagaa

SEQ ID NO: 992432 - RNA, 22 nt, Human
cuggccugugggcugucuccgg

SEQ ID NO: 992433 - RNA, 22 nt, Human
uggcccucagucuugcuccugc

SEQ ID NO: 992434 - RNA, 22 nt, Human
ucccuggccauuccucuaggcc

SEQ ID NO: 992435 - RNA, 22 nt, Human
uugggguguuggauggagcaag

SEQ ID NO: 992436 - RNA, 22 nt, Human
uaugcacacaggcuuaauucau

SEQ ID NO: 992437 - RNA, 22 nt, Human
agggccaggaacaccugaaggg

SEQ ID NO: 992438 - RNA, 22 nt, Human
gccucugcaucaucacuccagc

SEQ ID NO: 992439 - RNA, 21 nt, Human
uucaaaguuugccuaaagauu

SEQ ID NO: 992440 - RNA, 22 nt, Human
gcaggggcuaaggacacagaga

SEQ ID NO: 992441 - RNA, 22 nt, Human
cccuggcagaaugucucugggc

SEQ ID NO: 992442 - RNA, 22 nt, Human
uucuuccucagcagggcugccu

SEQ ID NO: 992443 - RNA, 23 nt, Human
ggcugagacuacaggcgcuugcc

SEQ ID NO: 992444 - RNA, 22 nt, Human
ccagggcauccucacaucgcag

SEQ ID NO: 992445 - RNA, 22 nt, Human
uagagcuggccgggacagcugg

SEQ ID NO: 992446 - RNA, 22 nt, Human
uuuccucuuauacaguguuuau

SEQ ID NO: 992447 - RNA, 22 nt, Human
ugaggccagcuucagcagugga

SEQ ID NO: 992448 - RNA, 22 nt, Human
auaauuaauuucaguaaucucc

SEQ ID NO: 992449 - RNA, 22 nt, Human
agggccugucagcgguguccug

SEQ ID NO: 992450 - RNA, 18 nt, Human
ggcugagguugacuagaa

SEQ ID NO: 992451 - RNA, 22 nt, Human
ggcaggaggugaguggcgggug

SEQ ID NO: 992452 - RNA, 23 nt, Human
gugcaugugucuuuacaguagca

SEQ ID NO: 992453 - RNA, 19 nt, Human
agaggcugucaccuguagc

SEQ ID NO: 992454 - RNA, 20 nt, Human
auuaggauuuuaggucauca

SEQ ID NO: 992455 - RNA, 22 nt, Human
augcugagcagagcugacaugc

SEQ ID NO: 992456 - RNA, 22 nt, Human
aucccuggacggcgccucccca

SEQ ID NO: 992457 - RNA, 22 nt, Human
cuucuuaaugacagauuaaaau

SEQ ID NO: 992458 - RNA, 22 nt, Human
agcucagggcgaucugucucgg

SEQ ID NO: 992459 - RNA, 22 nt, Human
acauucuagaagucuuugcaau

SEQ ID NO: 992460 - RNA, 22 nt, Human
cugccuggaccggcagcccucc

SEQ ID NO: 992461 - RNA, 22 nt, Human
auucuucauguugaagcuguca

SEQ ID NO: 992462 - RNA, 22 nt, Human
gggcucagccccauugaaccag

SEQ ID NO: 992463 - RNA, 19 nt, Human
gggcuucugggaucaagag

SEQ ID NO: 992464 - RNA, 22 nt, Human
ugucuuaauuuggaugauguuu

SEQ ID NO: 992465 - RNA, 22 nt, Human
cugugagcuggguggccaggac

SEQ ID NO: 992466 - RNA, 22 nt, Human
agugucugccagcugccaggug

SEQ ID NO: 992467 - RNA, 22 nt, Human
agagccaggugcugcuguuuga

SEQ ID NO: 992468 - RNA, 22 nt, Human
ggcucuggugcccuggcuccca

SEQ ID NO: 992469 - RNA, 22 nt, Human
gcuggagcuugagaggacaggg

SEQ ID NO: 992470 - RNA, 22 nt, Human
cugggagcccugacuagccugg

SEQ ID NO: 992471 - RNA, 22 nt, Human
uuacaucuaaacugugaacaau

SEQ ID NO: 992472 - RNA, 22 nt, Human
aagugacaaaaggguauccaaa

SEQ ID NO: 992473 - RNA, 22 nt, Human
cuggugggagcagcaggcagcu

SEQ ID NO: 992474 - RNA, 22 nt, Human
gcucaggaucccaggggugugc

SEQ ID NO: 992475 - RNA, 22 nt, Human
gccucccuggcccacagcagcg

SEQ ID NO: 992476 - RNA, 22 nt, Human
ggggaugguggcauuuguaaaa

SEQ ID NO: 992477 - RNA, 22 nt, Human
ggcugcuuuaucggcugcugaa

SEQ ID NO: 992478 - RNA, 20 nt, Human
gccugagcuccgccuccugu

SEQ ID NO: 992479 - RNA, 22 nt, Human
uggacaggaucugagacugaga

SEQ ID NO: 992480 - RNA, 22 nt, Human
ucagagguaagggcugagagga

SEQ ID NO: 992481 - RNA, 22 nt, Human
gcucaggauuucauccaugugu

SEQ ID NO: 992482 - RNA, 22 nt, Human
uuguuacagcagugauuucaga

SEQ ID NO: 992483 - RNA, 22 nt, Human
ggguguguuccuaaggaaacca

SEQ ID NO: 992484 - RNA, 22 nt, Human
ggcucaggccagaccacgacuc

SEQ ID NO: 992485 - RNA, 22 nt, Human
ucccuggaacagagagacaacg

SEQ ID NO: 992486 - RNA, 22 nt, Human
aggucacccguuugacuaucca

SEQ ID NO: 992487 - RNA, 22 nt, Human
caggaacacaaugagucucaaa

SEQ ID NO: 992488 - RNA, 22 nt, Human
ccaaagagcuagaauuauaggc

SEQ ID NO: 992489 - RNA, 21 nt, Human
agcuggcagauauggugucug

SEQ ID NO: 992490 - RNA, 22 nt, Human
cccuggaguccggagcucaccu

SEQ ID NO: 992491 - RNA, 22 nt, Human
ucuggccuuaucuguccaagcc

SEQ ID NO: 992492 - RNA, 22 nt, Human
ugaggccagucucaucacaggc

SEQ ID NO: 992493 - RNA, 22 nt, Human
gagcuguccuaccaggaguccu

SEQ ID NO: 992494 - RNA, 22 nt, Human
gaggucaggcuugcagcagggu

SEQ ID NO: 992495 - RNA, 22 nt, Human
gagguacaugaggauacacagg

SEQ ID NO: 992496 - RNA, 22 nt, Human
ucacugcagacaaccucaguca

SEQ ID NO: 992497 - RNA, 22 nt, Human
uccuugaauugugccacuuacc

SEQ ID NO: 992498 - RNA, 19 nt, Human
cagaacagaggucauggcc

SEQ ID NO: 992499 - RNA, 23 nt, Human
acagaaaguucugcuggacagag

SEQ ID NO: 992500 - RNA, 22 nt, Human
augcacuacuagaugcaaaagu

SEQ ID NO: 992501 - RNA, 22 nt, Human
uaacuccacaccccucuuggug

SEQ ID NO: 992502 - RNA, 22 nt, Human
ccccuuccgucucuugaguguc

SEQ ID NO: 992503 - RNA, 22 nt, Human
gaacaauagugguaacaaagcc

SEQ ID NO: 992504 - RNA, 22 nt, Human
cagggcuccccgcaccgcagcc

SEQ ID NO: 992505 - RNA, 22 nt, Human
gcagacagacugcagugauuuu

SEQ ID NO: 992506 - RNA, 22 nt, Human
ggaggccuugaggccaggagcu

SEQ ID NO: 992507 - RNA, 22 nt, Human
accucugccacuuucuaacucu

SEQ ID NO: 992508 - RNA, 22 nt, Human
acagagguaggacaugagauau

SEQ ID NO: 992509 - RNA, 22 nt, Human
uagagcugggcagugcucugag

SEQ ID NO: 992510 - RNA, 22 nt, Human
acaagagacaagagguucuucu

SEQ ID NO: 992511 - RNA, 22 nt, Human
aaaauauuuuagggccaggaga

SEQ ID NO: 992512 - RNA, 22 nt, Human
cuuccaaacccaggguaugggc

SEQ ID NO: 992513 - RNA, 22 nt, Human
acagaaauauagaagguaggaa

SEQ ID NO: 992514 - RNA, 22 nt, Human
cuuuauauccagauguuuggug

SEQ ID NO: 992515 - RNA, 22 nt, Human
cagagggcucaguccugcugga

SEQ ID NO: 992516 - RNA, 21 nt, Human
gggccacaccuucugcagacc

SEQ ID NO: 992517 - RNA, 22 nt, Human
uagggcagcugcaucaggcacu

SEQ ID NO: 992518 - RNA, 22 nt, Human
uacagaguggugagaucuuuug

SEQ ID NO: 992519 - RNA, 22 nt, Human
cgugucaucugagccuugggcg

SEQ ID NO: 992520 - RNA, 22 nt, Human
guggccuggaaaggcuggucug

SEQ ID NO: 992521 - RNA, 22 nt, Human
ggauaagaaaauuguaauaacu

SEQ ID NO: 992522 - RNA, 19 nt, Human
gcucugagaggggcauggg

SEQ ID NO: 992523 - RNA, 22 nt, Human
uccuggcccgaucccugugaag

SEQ ID NO: 992524 - RNA, 22 nt, Human
gcagcugcuguggcaucaagcu

SEQ ID NO: 992525 - RNA, 22 nt, Human
cuggaggcugaguugggucucc

SEQ ID NO: 992526 - RNA, 22 nt, Human
augcuuuuccuaaaaugaugcc

SEQ ID NO: 992527 - RNA, 22 nt, Human
agaugcugccucuccucacaag

SEQ ID NO: 992528 - RNA, 22 nt, Human
uuacauuagacccacuuucaug

SEQ ID NO: 992529 - RNA, 22 nt, Human
aagcccagaugggagcauuuca

SEQ ID NO: 992530 - RNA, 22 nt, Human
gagggucccgagcccugucaga

SEQ ID NO: 992531 - RNA, 22 nt, Human
aaugcacaugccacauguggua

SEQ ID NO: 992532 - RNA, 22 nt, Human
gcacucuguuucuccugucagc

SEQ ID NO: 992533 - RNA, 22 nt, Human
ucuccuggccgggcuguccccu

SEQ ID NO: 992534 - RNA, 22 nt, Human
ggaugcaggggcagcagagccu

SEQ ID NO: 992535 - RNA, 22 nt, Human
ccuccugggacucauuagcacc

SEQ ID NO: 992536 - RNA, 22 nt, Human
cagaauuuagcacaauguaugg

SEQ ID NO: 992537 - RNA, 22 nt, Human
ggcagggcuugucucugugaug

SEQ ID NO: 992538 - RNA, 22 nt, Human
guccuggcuuaguucgcuguaa

SEQ ID NO: 992539 - RNA, 23 nt, Human
gcagaggagcaagcuggacacca

SEQ ID NO: 992540 - RNA, 22 nt, Human
aaguaugacauuuaagacaauu

SEQ ID NO: 992541 - RNA, 22 nt, Human
uggcucugaucagauguccagu

SEQ ID NO: 992542 - RNA, 22 nt, Human
ucugucaccauucagcuugaau

SEQ ID NO: 992543 - RNA, 22 nt, Human
cagcagagcuuauguuggguca

SEQ ID NO: 992544 - RNA, 22 nt, Human
ucuguggcacgauugcacugca

SEQ ID NO: 992545 - RNA, 17 nt, Human
ggugagaccucccacuc

SEQ ID NO: 992546 - RNA, 19 nt, Human
uguuuuguuaaagcagucc

SEQ ID NO: 992547 - RNA, 22 nt, Human
agugcagugguuaggagccagg

SEQ ID NO: 992548 - RNA, 22 nt, Human
auggaaagggaagcaaggaaca

SEQ ID NO: 992549 - RNA, 22 nt, Human
ucacuuauugcucaucucaugc

SEQ ID NO: 992550 - RNA, 22 nt, Human
gaaaauguuagcuucauaguca

SEQ ID NO: 992551 - RNA, 22 nt, Human
gagagugauucccucccauaga

SEQ ID NO: 992552 - RNA, 21 nt, Human
cagggcacacagaggauggua

SEQ ID NO: 992553 - RNA, 22 nt, Human
gacagaagaggaacuuggacag

SEQ ID NO: 992554 - RNA, 21 nt, Human
guggcccugccgcagugucca

SEQ ID NO: 992555 - RNA, 22 nt, Human
gcuggggucugugaggagggcu

SEQ ID NO: 992556 - RNA, 22 nt, Human
aggaaagcucccaguagggcuc

SEQ ID NO: 992557 - RNA, 19 nt, Human
caguggagauuggaggagg

SEQ ID NO: 992558 - RNA, 22 nt, Human
cagggcuguggcuuugugcugu

SEQ ID NO: 992559 - RNA, 22 nt, Human
ggcucuggagcacagacgucug

SEQ ID NO: 992560 - RNA, 22 nt, Human
accaggaggccuggagcacaaa

SEQ ID NO: 992561 - RNA, 22 nt, Human
cugggcacacagugacucugca

SEQ ID NO: 992562 - RNA, 22 nt, Human
ucaggcagcuccaggaauggua

SEQ ID NO: 992563 - RNA, 22 nt, Human
agcugcagauucuaucuagaag

SEQ ID NO: 992564 - RNA, 22 nt, Human
aguaauaauuuauauuagggag

SEQ ID NO: 992565 - RNA, 22 nt, Human
gccauccucugagcacuaggca

SEQ ID NO: 992566 - RNA, 22 nt, Human
ggaggugguggcagugacaauu

SEQ ID NO: 992567 - RNA, 22 nt, Human
acauguggucaaucuguguagg

SEQ ID NO: 992568 - RNA, 22 nt, Human
gcagaagcccggucagcgcacg

SEQ ID NO: 992569 - RNA, 22 nt, Human
aguuuaugaaacacagauuuga

SEQ ID NO: 992570 - RNA, 22 nt, Human
agaaaucugacugcugugcaca

SEQ ID NO: 992571 - RNA, 23 nt, Human
ucuuuacauacugaugaguucuc

SEQ ID NO: 992572 - RNA, 21 nt, Human
caggaaaagcggaagucuagc

SEQ ID NO: 992573 - RNA, 22 nt, Human
aggguauaaagagcaagcagaa

SEQ ID NO: 992574 - RNA, 22 nt, Human
ugccugccaugcagaaagcuga

SEQ ID NO: 992575 - RNA, 22 nt, Human
uagucccauuuugagguauuug

SEQ ID NO: 992576 - RNA, 22 nt, Human
agggagaaugaccaagguauau

SEQ ID NO: 992577 - RNA, 22 nt, Human
agugcagccgagaucaggugcu

SEQ ID NO: 992578 - RNA, 21 nt, Human
gagcugggcgaggcuccgggg

SEQ ID NO: 992579 - RNA, 22 nt, Human
cagccugcccuggaagcccagc

SEQ ID NO: 992580 - RNA, 22 nt, Human
gggcuacauugugagagaaguu

SEQ ID NO: 992581 - RNA, 22 nt, Human
gagaagguggaccugaaggagc

SEQ ID NO: 992582 - RNA, 20 nt, Human
uauuuagauucaaguaugga

SEQ ID NO: 992583 - RNA, 22 nt, Human
cccuccagccauggacccaggu

SEQ ID NO: 992584 - RNA, 22 nt, Human
cuggccaguugccuuccugggu

SEQ ID NO: 992585 - RNA, 22 nt, Human
gaguggggcguggauccagcgu

SEQ ID NO: 992586 - RNA, 20 nt, Human
cagcugccuggcucugggau

SEQ ID NO: 992587 - RNA, 22 nt, Human
auuuuucucucacacuuaccag

SEQ ID NO: 992588 - RNA, 22 nt, Human
cugcaggggccucgagcacagg

SEQ ID NO: 992589 - RNA, 22 nt, Human
agcaugcgcuugaucagcucca

SEQ ID NO: 992590 - RNA, 22 nt, Human
auggccuggggagcaugggaag

SEQ ID NO: 992591 - RNA, 20 nt, Human
uuuuuccuucucuacaggca

SEQ ID NO: 992592 - RNA, 22 nt, Human
gccccugggagcagagccacca

SEQ ID NO: 992593 - RNA, 22 nt, Human
auuauguagcuaaaaauugugu

SEQ ID NO: 992594 - RNA, 22 nt, Human
cuguguggacugguugaggccc

SEQ ID NO: 992595 - RNA, 22 nt, Human
cugccucucaggucccugagau

SEQ ID NO: 992596 - RNA, 22 nt, Human
gcuggugccuuguuguuguuac

SEQ ID NO: 992597 - RNA, 22 nt, Human
cuggggcuucaaugcuucggug

SEQ ID NO: 992598 - RNA, 22 nt, Human
gaaaugcaaauucucucucgcu

SEQ ID NO: 992599 - RNA, 22 nt, Human
augacagaggagugcaggugau

SEQ ID NO: 992600 - RNA, 22 nt, Human
aaaguguggagauugaacuaaa

SEQ ID NO: 992601 - RNA, 22 nt, Human
cuggccugcugggugagguccu

SEQ ID NO: 992602 - RNA, 18 nt, Human
aaggcuucaaagaguaga

SEQ ID NO: 992603 - RNA, 22 nt, Human
ugcuuccuugagcucuccaauc

SEQ ID NO: 992604 - RNA, 18 nt, Human
caggaugagugaugggga

SEQ ID NO: 992605 - RNA, 22 nt, Human
uuugaacaugcugcaugauaau

SEQ ID NO: 992606 - RNA, 22 nt, Human
cuguacauauacauuuuuuucc

SEQ ID NO: 992607 - RNA, 22 nt, Human
ugcagggcuaagucagagccug

SEQ ID NO: 992608 - RNA, 22 nt, Human
cauugcacagcccuguggugau

SEQ ID NO: 992609 - RNA, 22 nt, Human
ucccagaguuuccuguguccca

SEQ ID NO: 992610 - RNA, 22 nt, Human
ccuguggcugccacuuggguga

SEQ ID NO: 992611 - RNA, 21 nt, Human
aggugccaaggagaagcaggc

SEQ ID NO: 992612 - RNA, 22 nt, Human
ccugggcagggcuggacucuca

SEQ ID NO: 992613 - RNA, 22 nt, Human
cagcugccuucugcgggaaguc

SEQ ID NO: 992614 - RNA, 22 nt, Human
cugggccauggaagucucugcc

SEQ ID NO: 992615 - RNA, 22 nt, Human
gcaccuuucuauauucaguggc

SEQ ID NO: 992616 - RNA, 21 nt, Human
uggccaaaaccauauuauuaa

SEQ ID NO: 992617 - RNA, 22 nt, Human
ccaggggaaacagggagcacuc

SEQ ID NO: 992618 - RNA, 22 nt, Human
agagccagcauuugggcccugc

SEQ ID NO: 992619 - RNA, 22 nt, Human
auccuugaaugacucugcccuc

SEQ ID NO: 992620 - RNA, 20 nt, Human
gugcauuucaccuguacugu

SEQ ID NO: 992621 - RNA, 22 nt, Human
acacuuuguuguggcauauacg

SEQ ID NO: 992622 - RNA, 22 nt, Human
uggcaggguggcaacuuuuggu

SEQ ID NO: 992623 - RNA, 22 nt, Human
uuaggauaugaaacaguauaag

SEQ ID NO: 992624 - RNA, 22 nt, Human
aagcaucucuauguggagagug

SEQ ID NO: 992625 - RNA, 22 nt, Human
cuuucacacacauacauuugga

SEQ ID NO: 992626 - RNA, 22 nt, Human
cagggccagagagggcuggcug

SEQ ID NO: 992627 - RNA, 22 nt, Human
agucccagcucagaaccacuag

SEQ ID NO: 992628 - RNA, 22 nt, Human
uaaauucuacaacuucaaagau

SEQ ID NO: 992629 - RNA, 22 nt, Human
gugccugugccaggggugugcu

SEQ ID NO: 992630 - RNA, 20 nt, Human
agaguaacuggcacauaggg

SEQ ID NO: 992631 - RNA, 22 nt, Human
acauuucucauaggagagccac

SEQ ID NO: 992632 - RNA, 22 nt, Human
uccuucaguuaaagaucucaca

SEQ ID NO: 992633 - RNA, 22 nt, Human
uguggccuccccacuucugggg

SEQ ID NO: 992634 - RNA, 22 nt, Human
ugaacauauucaccucuaaaua

SEQ ID NO: 992635 - RNA, 22 nt, Human
uggaaagacauucagccgcugg

SEQ ID NO: 992636 - RNA, 22 nt, Human
gggcagugguccaggcuacagc

SEQ ID NO: 992637 - RNA, 22 nt, Human
auuauuaggugcucucugacaa

SEQ ID NO: 992638 - RNA, 22 nt, Human
accccagcucugagccacacca

SEQ ID NO: 992639 - RNA, 22 nt, Human
acucuggcccuccugcugccag

SEQ ID NO: 992640 - RNA, 22 nt, Human
cagggcuggcucaugaaaaguu

SEQ ID NO: 992641 - RNA, 22 nt, Human
cuggcaggcagacuucugcaag

SEQ ID NO: 992642 - RNA, 22 nt, Human
gcugaagcugcagcaggaggaa

SEQ ID NO: 992643 - RNA, 22 nt, Human
ccagaggucuccugcacgggau

SEQ ID NO: 992644 - RNA, 22 nt, Human
guuugcauaucugugaaaugga

SEQ ID NO: 992645 - RNA, 22 nt, Human
uccugccucacaguugaaguuu

SEQ ID NO: 992646 - RNA, 22 nt, Human
aaacaccaagagcuagcuauua

SEQ ID NO: 992647 - RNA, 22 nt, Human
guguaaggugaaaucaacaaau

SEQ ID NO: 992648 - RNA, 23 nt, Human
cuucuggcucuauaucagaauuc

SEQ ID NO: 992649 - RNA, 22 nt, Human
ugcuggcuggccuggccuggac

SEQ ID NO: 992650 - RNA, 22 nt, Human
aauuaacaaauguagcugugau

SEQ ID NO: 992651 - RNA, 22 nt, Human
ggugaggcccagugaucugugu

SEQ ID NO: 992652 - RNA, 22 nt, Human
gcuuccugagaaacaaucugau

SEQ ID NO: 992653 - RNA, 22 nt, Human
uaaaaaguagugagaauggcgc

SEQ ID NO: 992654 - RNA, 19 nt, Human
auuuacugccuaaaaucuc

SEQ ID NO: 992655 - RNA, 22 nt, Human
cacauccuucagcugagcccag

SEQ ID NO: 992656 - RNA, 22 nt, Human
ggggacaguuaaagaccaagac

SEQ ID NO: 992657 - RNA, 22 nt, Human
aggagcugcagauucugccuug

SEQ ID NO: 992658 - RNA, 22 nt, Human
uccuugaaaagaaugucuccau

SEQ ID NO: 992659 - RNA, 22 nt, Human
cuuauuagaguuguguucuguu

SEQ ID NO: 992660 - RNA, 22 nt, Human
caaaugugguuucucagcauuc

SEQ ID NO: 992661 - RNA, 22 nt, Human
gcucccucugcucaggcacuug

SEQ ID NO: 992662 - RNA, 22 nt, Human
ucucagagauucagggagaagu

SEQ ID NO: 992663 - RNA, 22 nt, Human
uggcuccuaggauggugccugg

SEQ ID NO: 992664 - RNA, 22 nt, Human
agaaaaggauugauggaucaga

SEQ ID NO: 992665 - RNA, 22 nt, Human
agagggcccauguugggcugcu

SEQ ID NO: 992666 - RNA, 22 nt, Human
ugccucagaguugucccuacca

SEQ ID NO: 992667 - RNA, 22 nt, Human
agagccugaggaugucccagcu

SEQ ID NO: 992668 - RNA, 23 nt, Human
uccuuccuuugagaggcuccauc

SEQ ID NO: 992669 - RNA, 22 nt, Human
ggcaguggguuccccaaggcac

SEQ ID NO: 992670 - RNA, 22 nt, Human
acaaagucacaauaauuaaccu

SEQ ID NO: 992671 - RNA, 22 nt, Human
caaaagauacuugcaucuaacu

SEQ ID NO: 992672 - RNA, 22 nt, Human
cuucccugauaagagccucaga

SEQ ID NO: 992673 - RNA, 22 nt, Human
gcagccacagaggagggaugca

SEQ ID NO: 992674 - RNA, 22 nt, Human
aggcuggcuggcaggggacaca

SEQ ID NO: 992675 - RNA, 22 nt, Human
ucugugcucuucucaguaucac

SEQ ID NO: 992676 - RNA, 22 nt, Human
gcagggcuguucaggagggugg

SEQ ID NO: 992677 - RNA, 22 nt, Human
uggcaccaggcgggguggcugu

SEQ ID NO: 992678 - RNA, 22 nt, Human
aggugccagcucucaggcagga

SEQ ID NO: 992679 - RNA, 22 nt, Human
cccagccuuugcuuccugguuc

SEQ ID NO: 992680 - RNA, 22 nt, Human
gcagggaccugccacugcuguc

SEQ ID NO: 992681 - RNA, 22 nt, Human
ugggcuggagcuuguugcuucc

SEQ ID NO: 992682 - RNA, 22 nt, Human
ccagcuccagguagaugggcag

SEQ ID NO: 992683 - RNA, 20 nt, Human
ccaccuggccaaggcugugc

SEQ ID NO: 992684 - RNA, 22 nt, Human
ugcagcauucuuggccacuacu

SEQ ID NO: 992685 - RNA, 22 nt, Human
uaaauuguuuucuagaaguugu

SEQ ID NO: 992686 - RNA, 22 nt, Human
uaaagguacgaagugagggauu

SEQ ID NO: 992687 - RNA, 22 nt, Human
gagugagggcagcaggggcugc

SEQ ID NO: 992688 - RNA, 22 nt, Human
ccugggugaaaucucuccugca

SEQ ID NO: 992689 - RNA, 22 nt, Human
uggucaaaaacucucaguggac

SEQ ID NO: 992690 - RNA, 22 nt, Human
cagaggaguucaguacacagcc

SEQ ID NO: 992691 - RNA, 22 nt, Human
gcuggccauggccugcgccauc

SEQ ID NO: 992692 - RNA, 21 nt, Human
ggcacugagccagauggacuc

SEQ ID NO: 992693 - RNA, 22 nt, Human
caggggcuagcacuuaauguuu

SEQ ID NO: 992694 - RNA, 22 nt, Human
uagaauaaguugaugauauaug

SEQ ID NO: 992695 - RNA, 22 nt, Human
aauaaacugcucaauugcauca

SEQ ID NO: 992696 - RNA, 22 nt, Human
ugcaaucucggcacuuugggag

SEQ ID NO: 992697 - RNA, 21 nt, Human
acaggcuuuagaaaaugacuc

SEQ ID NO: 992698 - RNA, 22 nt, Human
aauguguauacuggcaauuaag

SEQ ID NO: 992699 - RNA, 21 nt, Human
ggagauggguaucgccugggc

SEQ ID NO: 992700 - RNA, 22 nt, Human
cugcaggcaucuaacugugggc

SEQ ID NO: 992701 - RNA, 22 nt, Human
gagccuucaucgcagccuuguu

SEQ ID NO: 992702 - RNA, 22 nt, Human
cucuggaauuaaggaagccugu

SEQ ID NO: 992703 - RNA, 22 nt, Human
auaaggcagaaaugauucuagu

SEQ ID NO: 992704 - RNA, 20 nt, Human
ccagacagcaccugccuggu

SEQ ID NO: 992705 - RNA, 22 nt, Human
agacagugauguaagcaggagu

SEQ ID NO: 992706 - RNA, 22 nt, Human
aagcaagacagaaguuacugcc

SEQ ID NO: 992707 - RNA, 22 nt, Human
gugucacaugguuuacugcagc

SEQ ID NO: 992708 - RNA, 22 nt, Human
cuuuguauucaguugggcugug

SEQ ID NO: 992709 - RNA, 22 nt, Human
aggcaguguguagcuggaagag

SEQ ID NO: 992710 - RNA, 21 nt, Human
gcugccaccgcgugcuccagg

SEQ ID NO: 992711 - RNA, 22 nt, Human
ugccuucaaucaggauggucuc

SEQ ID NO: 992712 - RNA, 22 nt, Human
uagggcagauucgguggaguuu

SEQ ID NO: 992713 - RNA, 22 nt, Human
gagggugguggcuuaaggugcu

SEQ ID NO: 992714 - RNA, 22 nt, Human
agugaaauuuguuuagauaggu

SEQ ID NO: 992715 - RNA, 22 nt, Human
caggaaugacugcagauggggc

SEQ ID NO: 992716 - RNA, 22 nt, Human
aucagcaagauguaauuucuau

SEQ ID NO: 992717 - RNA, 22 nt, Human
ggcuccuguggcaagacagcuu

SEQ ID NO: 992718 - RNA, 22 nt, Human
caugggagguuggcuuggcaug

SEQ ID NO: 992719 - RNA, 22 nt, Human
cauuucugcagaauugcucuuc

SEQ ID NO: 992720 - RNA, 22 nt, Human
gcacacccucucaccagcacug

SEQ ID NO: 992721 - RNA, 22 nt, Human
gccagcagguugucaaggagcu

SEQ ID NO: 992722 - RNA, 22 nt, Human
gcaaagucucaagacccaagug

SEQ ID NO: 992723 - RNA, 22 nt, Human
gcugucugggaugucacugcug

SEQ ID NO: 992724 - RNA, 22 nt, Human
ugagcuuacgugggaacagacu

SEQ ID NO: 992725 - RNA, 22 nt, Human
cuuuccuagauggccaucuuuc

SEQ ID NO: 992726 - RNA, 22 nt, Human
ccaggccaaauucagucagcag

SEQ ID NO: 992727 - RNA, 22 nt, Human
ucuccuggguaaaaggguugau

SEQ ID NO: 992728 - RNA, 22 nt, Human
cagcaguguggaagcugagggg

SEQ ID NO: 992729 - RNA, 23 nt, Human
ccacagagcugccaauuccugug

SEQ ID NO: 992730 - RNA, 22 nt, Human
gagcaggccagcaauggaaggg

SEQ ID NO: 992731 - RNA, 22 nt, Human
uucaagaucuggguuuucagcu

SEQ ID NO: 992732 - RNA, 22 nt, Human
gaggggcugggguugacuccaa

SEQ ID NO: 992733 - RNA, 22 nt, Human
uuacuuugaugaucaaugagcg

SEQ ID NO: 992734 - RNA, 22 nt, Human
uuagauauguuuuugcuaaugc

SEQ ID NO: 992735 - RNA, 22 nt, Human
ugcugagguuucgucugcuugc

SEQ ID NO: 992736 - RNA, 22 nt, Human
auucugagaaaugcauugucag

SEQ ID NO: 992737 - RNA, 23 nt, Human
cuuuuaacuugaucugagaccag

SEQ ID NO: 992738 - RNA, 22 nt, Human
cagagcagaagcgguccucaca

SEQ ID NO: 992739 - RNA, 22 nt, Human
aauguacaauaagacaaagagg

SEQ ID NO: 992740 - RNA, 22 nt, Human
uauucacaaaaugagguccuca

SEQ ID NO: 992741 - RNA, 22 nt, Human
guacucucuugaaggccuuucu

SEQ ID NO: 992742 - RNA, 22 nt, Human
gagggcagugaauuuugaagcu

SEQ ID NO: 992743 - RNA, 22 nt, Human
auguaucaacaaauuguacagu

SEQ ID NO: 992744 - RNA, 22 nt, Human
cacugaagguaggaccaaggcu

SEQ ID NO: 992745 - RNA, 22 nt, Human
gccugccuuugugaggaagcgg

SEQ ID NO: 992746 - RNA, 22 nt, Human
uagaaaucuacuuagacuuucu

SEQ ID NO: 992747 - RNA, 22 nt, Human
ucccagggcagcuguccagaag

SEQ ID NO: 992748 - RNA, 22 nt, Human
aaucaguuucuuggcaaguuua

SEQ ID NO: 992749 - RNA, 22 nt, Human
aaagccuuggucaucugguucc

SEQ ID NO: 992750 - RNA, 22 nt, Human
ugccucagucuaaagucucuca

SEQ ID NO: 992751 - RNA, 21 nt, Human
agaaauguaucauucuuuucc

SEQ ID NO: 992752 - RNA, 22 nt, Human
aauaauaagauacuaagggagu

SEQ ID NO: 992753 - RNA, 22 nt, Human
agaaaucaauaucuauauguug

SEQ ID NO: 992754 - RNA, 22 nt, Human
gugucauggaaaauugcaaugg

SEQ ID NO: 992755 - RNA, 21 nt, Human
agcagcugggcaacauggagg

SEQ ID NO: 992756 - RNA, 22 nt, Human
cugggcuguucugccccugggu

SEQ ID NO: 992757 - RNA, 22 nt, Human
ggcuucuguccucuggaucugu

SEQ ID NO: 992758 - RNA, 22 nt, Human
uccaagaagucaucuaaacugu

SEQ ID NO: 992759 - RNA, 22 nt, Human
aagagcugauuaagucaugagg

SEQ ID NO: 992760 - RNA, 22 nt, Human
aaacucuggagauguuuaugca

SEQ ID NO: 992761 - RNA, 22 nt, Human
uauuuagaacagacaauagaaa

SEQ ID NO: 992762 - RNA, 22 nt, Human
aucuacagcugucugcacagua

SEQ ID NO: 992763 - RNA, 18 nt, Human
ccuggagcuccacagcaa

SEQ ID NO: 992764 - RNA, 22 nt, Human
cagcccugcacgcugccuccgc

SEQ ID NO: 992765 - RNA, 22 nt, Human
ggcuguccuuggccaaggcacu

SEQ ID NO: 992766 - RNA, 22 nt, Human
gguggccucgguggugcacagg

SEQ ID NO: 992767 - RNA, 22 nt, Human
acuuucuaggucucaguccuuu

SEQ ID NO: 992768 - RNA, 22 nt, Human
auguacauuuguaguaauauca

SEQ ID NO: 992769 - RNA, 22 nt, Human
cucucuucccgugaguguugca

SEQ ID NO: 992770 - RNA, 22 nt, Human
agggacagaugaaugacugagu

SEQ ID NO: 992771 - RNA, 17 nt, Human
aagauuucauuagcuga

SEQ ID NO: 992772 - RNA, 22 nt, Human
cacagaaucugugacuccaaga

SEQ ID NO: 992773 - RNA, 22 nt, Human
augucccagcugagagacaacu

SEQ ID NO: 992774 - RNA, 22 nt, Human
ucucagagggaggauuacugcc

SEQ ID NO: 992775 - RNA, 22 nt, Human
uguuuaaucuauaaaauggaga

SEQ ID NO: 992776 - RNA, 22 nt, Human
uacauuuauaaggcuucucugu

SEQ ID NO: 992777 - RNA, 22 nt, Human
cuucugggcauucagcugcaca

SEQ ID NO: 992778 - RNA, 22 nt, Human
ccuggccuggcacucccucugc

SEQ ID NO: 992779 - RNA, 22 nt, Human
caggcugagcucuggccugggc

SEQ ID NO: 992780 - RNA, 19 nt, Human
ucaggacugacuugaaguc

SEQ ID NO: 992781 - RNA, 22 nt, Human
augcccugaggaaugucacgcu

SEQ ID NO: 992782 - RNA, 22 nt, Human
agaaacugaauuauuucugagg

SEQ ID NO: 992783 - RNA, 22 nt, Human
aggccuguuccaggccccuuuu

SEQ ID NO: 992784 - RNA, 22 nt, Human
cagucacauggaugauggauag

SEQ ID NO: 992785 - RNA, 22 nt, Human
cacacagaugguaagggaggga

SEQ ID NO: 992786 - RNA, 22 nt, Human
ggaggacaggggcugcagcaca

SEQ ID NO: 992787 - RNA, 22 nt, Human
caaaguccauaguuuacaauag

SEQ ID NO: 992788 - RNA, 18 nt, Human
cuuuaugugcagagcuuu

SEQ ID NO: 992789 - RNA, 22 nt, Human
uucuaguguccuuggacuugcu

SEQ ID NO: 992790 - RNA, 22 nt, Human
auagaaaacagauguccuuaaa

SEQ ID NO: 992791 - RNA, 22 nt, Human
ugcagagggacagccacagcuc

SEQ ID NO: 992792 - RNA, 22 nt, Human
gagggaaagguuaauacaugau

SEQ ID NO: 992793 - RNA, 22 nt, Human
cuuauguaaaacggaaagggaa

SEQ ID NO: 992794 - RNA, 22 nt, Human
ucccagaaaaaggaggcuauga

SEQ ID NO: 992795 - RNA, 22 nt, Human
gggcuggcaggaccugggcuga

SEQ ID NO: 992796 - RNA, 21 nt, Human
gcucccugcucagcuccuggg

SEQ ID NO: 992797 - RNA, 22 nt, Human
accauguuggccaagcuggucu

SEQ ID NO: 992798 - RNA, 22 nt, Human
agggcccucuggcaggccaggc

SEQ ID NO: 992799 - RNA, 22 nt, Human
agucagugaaggcauugcucaa

SEQ ID NO: 992800 - RNA, 22 nt, Human
uucuguguggguagcuccuguu

SEQ ID NO: 992801 - RNA, 20 nt, Human
uccagggcaacuagagugug

SEQ ID NO: 992802 - RNA, 21 nt, Human
uggcucugaaagagugcugca

SEQ ID NO: 992803 - RNA, 22 nt, Human
ucaguuuuuguuugccagauag

SEQ ID NO: 992804 - RNA, 22 nt, Human
uaaaauguguuucuguaugguu

SEQ ID NO: 992805 - RNA, 22 nt, Human
ggcucagguuuaaagugcuuua

SEQ ID NO: 992806 - RNA, 22 nt, Human
caaggccugccucuggcagaaa

SEQ ID NO: 992807 - RNA, 22 nt, Human
ccuccugguaauuagcgaaagg

SEQ ID NO: 992808 - RNA, 22 nt, Human
cauuugaugacucaacucauaa

SEQ ID NO: 992809 - RNA, 22 nt, Human
agccuggaauuaaggaaaugca

SEQ ID NO: 992810 - RNA, 22 nt, Human
agcaccugcuaugugucaggga

SEQ ID NO: 992811 - RNA, 22 nt, Human
aucuucaaagcacaucguuugu

SEQ ID NO: 992812 - RNA, 22 nt, Human
gcugccucccccauggcuggaa

SEQ ID NO: 992813 - RNA, 22 nt, Human
gucccagggagguucagggcuu

SEQ ID NO: 992814 - RNA, 22 nt, Human
cagaauuugaaguaauauucca

SEQ ID NO: 992815 - RNA, 22 nt, Human
cugcagccucaaccuccugagc

SEQ ID NO: 992816 - RNA, 22 nt, Human
cucucaggcuugggucguggca

SEQ ID NO: 992817 - RNA, 22 nt, Human
ugcugccuucuaggcgugcccu

SEQ ID NO: 992818 - RNA, 22 nt, Human
ccuuucagaugggcauggaccg

SEQ ID NO: 992819 - RNA, 19 nt, Human
ccuuccuccccagggccau

SEQ ID NO: 992820 - RNA, 22 nt, Human
cccuggagucagguuggccugg

SEQ ID NO: 992821 - RNA, 22 nt, Human
auaauguagguauguguauuua

SEQ ID NO: 992822 - RNA, 22 nt, Human
ugcaccauacccauuccccucu

SEQ ID NO: 992823 - RNA, 22 nt, Human
ucucagagaacaguuggugcuu

SEQ ID NO: 992824 - RNA, 22 nt, Human
ggcuucucucuucacauggcuu

SEQ ID NO: 992825 - RNA, 22 nt, Human
cuaccuuucugacucuugggau

SEQ ID NO: 992826 - RNA, 23 nt, Human
ccaggccucucagagggugugcc

SEQ ID NO: 992827 - RNA, 22 nt, Human
aauggcugggaguguauuuugg

SEQ ID NO: 992828 - RNA, 22 nt, Human
ccagcuccaaguuugggcauca

SEQ ID NO: 992829 - RNA, 17 nt, Human
aagacagaagccaugag

SEQ ID NO: 992830 - RNA, 22 nt, Human
agagcagagggcucugggacaa

SEQ ID NO: 992831 - RNA, 22 nt, Human
gcagcccaauggacugagacag

SEQ ID NO: 992832 - RNA, 22 nt, Human
agccagggagguggagguugca

SEQ ID NO: 992833 - RNA, 22 nt, Human
ugggcugcugagaaugagagag

SEQ ID NO: 992834 - RNA, 22 nt, Human
agucccagccuguaggauuggg

SEQ ID NO: 992835 - RNA, 22 nt, Human
ccucuccuugcacccgucccgc

SEQ ID NO: 992836 - RNA, 22 nt, Human
uggcucuguucgccaucaggag

SEQ ID NO: 992837 - RNA, 22 nt, Human
cuggugcaggaaggagcuggca

SEQ ID NO: 992838 - RNA, 22 nt, Human
uggagcugggaguccugggcug

SEQ ID NO: 992839 - RNA, 22 nt, Human
aaagcaaugaugguagacacgu

SEQ ID NO: 992840 - RNA, 22 nt, Human
agggcugcugaggaagccuugc

SEQ ID NO: 992841 - RNA, 22 nt, Human
gaggccuggcugucagucccca

SEQ ID NO: 992842 - RNA, 22 nt, Human
gucaccaggucugaugcagcca

SEQ ID NO: 992843 - RNA, 22 nt, Human
caggcuugauuauucagacaau

SEQ ID NO: 992844 - RNA, 22 nt, Human
uaaaguucuggugagagguaag

SEQ ID NO: 992845 - RNA, 22 nt, Human
cuagaaauacaggcacgugcca

SEQ ID NO: 992846 - RNA, 22 nt, Human
ugagccugcugucgcuggaccc

SEQ ID NO: 992847 - RNA, 17 nt, Human
ggcagcugccacuuuuu

SEQ ID NO: 992848 - RNA, 22 nt, Human
gaaaucugcggugaggccugag

SEQ ID NO: 992849 - RNA, 22 nt, Human
ugggcagacuaaggucaaagcu

SEQ ID NO: 992850 - RNA, 22 nt, Human
gugcugucguggaacugggcug

SEQ ID NO: 992851 - RNA, 22 nt, Human
uggcucagugaagagauaacuu

SEQ ID NO: 992852 - RNA, 22 nt, Human
ccagcuggucugugcucauguu

SEQ ID NO: 992853 - RNA, 22 nt, Human
accaugggucagccaccucagc

SEQ ID NO: 992854 - RNA, 22 nt, Human
guggccaagagauaaaauugug

SEQ ID NO: 992855 - RNA, 22 nt, Human
cugaagaugucugagaugcuca

SEQ ID NO: 992856 - RNA, 20 nt, Human
uguccuaauagacaagcaga

SEQ ID NO: 992857 - RNA, 22 nt, Human
ggagccagagucugcaguguaa

SEQ ID NO: 992858 - RNA, 22 nt, Human
cuggcucauccagguguugcuc

SEQ ID NO: 992859 - RNA, 22 nt, Human
agaggcuggauugagcauagac

SEQ ID NO: 992860 - RNA, 22 nt, Human
aggagcugagggagcgcccuug

SEQ ID NO: 992861 - RNA, 22 nt, Human
gcugcccauuccacuggauggu

SEQ ID NO: 992862 - RNA, 22 nt, Human
cagaaguaagauuacugugagu

SEQ ID NO: 992863 - RNA, 22 nt, Human
guaggaagcucugaggcuaguu

SEQ ID NO: 992864 - RNA, 22 nt, Human
agcugagcugcagaugacugua

SEQ ID NO: 992865 - RNA, 22 nt, Human
gcugagcugggacaguccuggg

SEQ ID NO: 992866 - RNA, 22 nt, Human
aaaagcuagucaaugauguauu

SEQ ID NO: 992867 - RNA, 22 nt, Human
gagccuggccuccugccucagc

SEQ ID NO: 992868 - RNA, 22 nt, Human
uacagauacagaucuagauaca

SEQ ID NO: 992869 - RNA, 22 nt, Human
cugugugugucugcagcauacu

SEQ ID NO: 992870 - RNA, 21 nt, Human
guuuuaagggagaaaaccuag

SEQ ID NO: 992871 - RNA, 22 nt, Human
uaauuuaauuucaugccagccu

SEQ ID NO: 992872 - RNA, 22 nt, Human
acuggccaugaacuugggaucu

SEQ ID NO: 992873 - RNA, 22 nt, Human
uguccugcaacugaaggagaag

SEQ ID NO: 992874 - RNA, 17 nt, Human
ccugggaggaguuauga

SEQ ID NO: 992875 - RNA, 22 nt, Human
acaggggaauuuacugucauua

SEQ ID NO: 992876 - RNA, 21 nt, Human
gcagccagccgagaccaugcc

SEQ ID NO: 992877 - RNA, 22 nt, Human
gucccagagagcacuaguccau

SEQ ID NO: 992878 - RNA, 22 nt, Human
gcagagcuguuaauggagcuga

SEQ ID NO: 992879 - RNA, 21 nt, Human
ugaagccugaggcauagcccc

SEQ ID NO: 992880 - RNA, 19 nt, Human
ugucacugucauggcccag

SEQ ID NO: 992881 - RNA, 20 nt, Human
uggcuccucuuggcuguggc

SEQ ID NO: 992882 - RNA, 22 nt, Human
ucagagcuuuggagaccaggaa

SEQ ID NO: 992883 - RNA, 22 nt, Human
agagcagauggccagggggccu

SEQ ID NO: 992884 - RNA, 22 nt, Human
aaugaacaggugaaugucagau

SEQ ID NO: 992885 - RNA, 22 nt, Human
agcauugccugccuauugcuaa

SEQ ID NO: 992886 - RNA, 22 nt, Human
aauaaaauggucaguuuucuca

SEQ ID NO: 992887 - RNA, 22 nt, Human
gcucccagcuggagccucaaca

SEQ ID NO: 992888 - RNA, 22 nt, Human
cagagcugcgcuuuuuccuggu

SEQ ID NO: 992889 - RNA, 22 nt, Human
agccaaggcagcuagagcucug

SEQ ID NO: 992890 - RNA, 22 nt, Human
gccuggccgcuccgagcuccgc

SEQ ID NO: 992891 - RNA, 22 nt, Human
caggguggaagcuguagagugg

SEQ ID NO: 992892 - RNA, 17 nt, Human
ucuuuccugccaugcuc

SEQ ID NO: 992893 - RNA, 22 nt, Human
gucccuaguggaaagacaugau

SEQ ID NO: 992894 - RNA, 22 nt, Human
aagaacauguuaaaagauucac

SEQ ID NO: 992895 - RNA, 22 nt, Human
uuuuaucaaucauuaagacauu

SEQ ID NO: 992896 - RNA, 22 nt, Human
gcagagcuucuguccuucagga

SEQ ID NO: 992897 - RNA, 22 nt, Human
ucugucacccgagcaggcgaga

SEQ ID NO: 992898 - RNA, 22 nt, Human
ugggacagugugccuugcuccu

SEQ ID NO: 992899 - RNA, 22 nt, Human
cugcucugcaaggcacagugau

SEQ ID NO: 992900 - RNA, 22 nt, Human
ugaaagcacugauucucaacuc

SEQ ID NO: 992901 - RNA, 22 nt, Human
accagagaaaacacagcaggcu

SEQ ID NO: 992902 - RNA, 22 nt, Human
ucucagagccuaacuaaccuaa

SEQ ID NO: 992903 - RNA, 22 nt, Human
ucagaagagcuggugcugccug

SEQ ID NO: 992904 - RNA, 22 nt, Human
ucuggagauaagacagacagau

SEQ ID NO: 992905 - RNA, 22 nt, Human
uagccaggcgaggucagugucg

SEQ ID NO: 992906 - RNA, 22 nt, Human
auccaaagauggaaagaacuuu

SEQ ID NO: 992907 - RNA, 19 nt, Human
ggaaacaggggccagagga

SEQ ID NO: 992908 - RNA, 18 nt, Human
accuucauuccuuugccu

SEQ ID NO: 992909 - RNA, 22 nt, Human
cagaagaaaguggggagacaag

SEQ ID NO: 992910 - RNA, 22 nt, Human
gcuucccacagcuggacugggg

SEQ ID NO: 992911 - RNA, 22 nt, Human
uuguuuucuccacugcaucuua

SEQ ID NO: 992912 - RNA, 22 nt, Human
cucagagcccaggguacacccg

SEQ ID NO: 992913 - RNA, 22 nt, Human
auuuccuagccucucuugcagu

SEQ ID NO: 992914 - RNA, 22 nt, Human
ccacugucuuuuccaggcugaa

SEQ ID NO: 992915 - RNA, 21 nt, Human
uugcaccaugauaaauucaga

SEQ ID NO: 992916 - RNA, 22 nt, Human
uuugcauuucucguaaggaaac

SEQ ID NO: 992917 - RNA, 22 nt, Human
cuuccugaacaaugccaucaau

SEQ ID NO: 992918 - RNA, 22 nt, Human
caggagcagaggguggucagca

SEQ ID NO: 992919 - RNA, 21 nt, Human
agccuggcccagggggaggcu

SEQ ID NO: 992920 - RNA, 22 nt, Human
guggcagcugguaugcagacag

SEQ ID NO: 992921 - RNA, 22 nt, Human
ugggcagaaaucaguaucagau

SEQ ID NO: 992922 - RNA, 22 nt, Human
cagcugccaagaaucuuuucua

SEQ ID NO: 992923 - RNA, 22 nt, Human
auggcaagcaagcugaagagau

SEQ ID NO: 992924 - RNA, 21 nt, Human
ggccucugucauccugggaag

SEQ ID NO: 992925 - RNA, 22 nt, Human
uccaaacacccuccaugcugca

SEQ ID NO: 992926 - RNA, 22 nt, Human
ugauaauauuuugaaucauaag

SEQ ID NO: 992927 - RNA, 22 nt, Human
cugagccaaaaagcagagcuug

SEQ ID NO: 992928 - RNA, 22 nt, Human
ugucucaguucccuucucugga

SEQ ID NO: 992929 - RNA, 22 nt, Human
agagcuggguggacuuguaguu

SEQ ID NO: 992930 - RNA, 22 nt, Human
uacauauacugagugauuugcu

SEQ ID NO: 992931 - RNA, 22 nt, Human
agcaguggaccucagugcuauu

SEQ ID NO: 992932 - RNA, 22 nt, Human
uggcagcaauuugugauguuga

SEQ ID NO: 992933 - RNA, 22 nt, Human
guaauguguuuugaaaaacagu

SEQ ID NO: 992934 - RNA, 22 nt, Human
ugaaggaagaauaggcaguguu

SEQ ID NO: 992935 - RNA, 22 nt, Human
aguauuuccuggcuuaucugcu

SEQ ID NO: 992936 - RNA, 22 nt, Human
uggcccugacagguccugggca

SEQ ID NO: 992937 - RNA, 22 nt, Human
aguuuuucugcuggucucacua

SEQ ID NO: 992938 - RNA, 22 nt, Human
ccucuuugugccugcaggcugc

SEQ ID NO: 992939 - RNA, 22 nt, Human
aggcugcagugcagguaggauu

SEQ ID NO: 992940 - RNA, 18 nt, Human
acugugguuuauguguag

SEQ ID NO: 992941 - RNA, 22 nt, Human
acugggaggcaucuggagcuga

SEQ ID NO: 992942 - RNA, 22 nt, Human
ggcccagcacagugcuuggggg

SEQ ID NO: 992943 - RNA, 17 nt, Human
uccagagcacagagcuc

SEQ ID NO: 992944 - RNA, 22 nt, Human
uagaggugucacuuugggaagu

SEQ ID NO: 992945 - RNA, 22 nt, Human
uggcuccuucauucuccugcca

SEQ ID NO: 992946 - RNA, 22 nt, Human
augcacuacuuggcuuuacuga

SEQ ID NO: 992947 - RNA, 22 nt, Human
gcaggguauaauacuuagguga

SEQ ID NO: 992948 - RNA, 21 nt, Human
uccaggaguggcugggcaggg

SEQ ID NO: 992949 - RNA, 22 nt, Human
uggcuucugcuuucaguggagg

SEQ ID NO: 992950 - RNA, 22 nt, Human
uccaguucuaggucacucucug

SEQ ID NO: 992951 - RNA, 22 nt, Human
uggcagagaacacggcugaucu

SEQ ID NO: 992952 - RNA, 22 nt, Human
gcagagaaaguuuuguccucag

SEQ ID NO: 992953 - RNA, 22 nt, Human
ucuagaaauuuugccuuguauu

SEQ ID NO: 992954 - RNA, 22 nt, Human
ucacaugcuugaggaaagaaaa

SEQ ID NO: 992955 - RNA, 22 nt, Human
gcugcucucucccuaaguuggg

SEQ ID NO: 992956 - RNA, 22 nt, Human
uauauuaaacccucucuguagg

SEQ ID NO: 992957 - RNA, 22 nt, Human
ucuggcuccacaccucacugca

SEQ ID NO: 992958 - RNA, 22 nt, Human
cagggcccaagacacaaugagg

SEQ ID NO: 992959 - RNA, 22 nt, Human
ucagaggacaagcucccuggug

SEQ ID NO: 992960 - RNA, 22 nt, Human
uguauuuucuucuggaagcuua

SEQ ID NO: 992961 - RNA, 22 nt, Human
cuuuagugguauuuuagcaagu

SEQ ID NO: 992962 - RNA, 22 nt, Human
aaauguauugcauaggauauuu

SEQ ID NO: 992963 - RNA, 22 nt, Human
gcauacagagaggauguggcau

SEQ ID NO: 992964 - RNA, 22 nt, Human
cugggacagcugagacaggaga

SEQ ID NO: 992965 - RNA, 22 nt, Human
ggcaggagcucuccaguuugcc

SEQ ID NO: 992966 - RNA, 22 nt, Human
ggccucugccucaucugggcac

SEQ ID NO: 992967 - RNA, 22 nt, Human
auacaucuugucagauucaugu

SEQ ID NO: 992968 - RNA, 22 nt, Human
ccuggccagaggcgugccugug

SEQ ID NO: 992969 - RNA, 22 nt, Human
aucaguuugauaauaaggcuug

SEQ ID NO: 992970 - RNA, 22 nt, Human
augaccccuaaaauuuacuguc

SEQ ID NO: 992971 - RNA, 20 nt, Human
agaagcugauacugauggaa

SEQ ID NO: 992972 - RNA, 22 nt, Human
caggaacauuuaaccacagggu

SEQ ID NO: 992973 - RNA, 22 nt, Human
gccaggcauucuagaaguagug

SEQ ID NO: 992974 - RNA, 22 nt, Human
acagaguaucuaucaggaguau

SEQ ID NO: 992975 - RNA, 22 nt, Human
acagccagggucucaggaggcg

SEQ ID NO: 992976 - RNA, 22 nt, Human
uggcacuggaaucguagccuug

SEQ ID NO: 992977 - RNA, 22 nt, Human
uggucaguugcaucagagaagu

SEQ ID NO: 992978 - RNA, 22 nt, Human
agccugucugucuccaaagcug

SEQ ID NO: 992979 - RNA, 22 nt, Human
cagugcauagauccugaggccu

SEQ ID NO: 992980 - RNA, 23 nt, Human
auacauacagucuuacugacuuu

SEQ ID NO: 992981 - RNA, 22 nt, Human
uggcagcuccggguaggggcug

SEQ ID NO: 992982 - RNA, 22 nt, Human
uuggcuucucuuaacccuaaag

SEQ ID NO: 992983 - RNA, 22 nt, Human
ggcucuggcguccaauggagcg

SEQ ID NO: 992984 - RNA, 22 nt, Human
acuccuggggcugccaucacag

SEQ ID NO: 992985 - RNA, 22 nt, Human
aggaccaguaugagagcaucug

SEQ ID NO: 992986 - RNA, 22 nt, Human
ccugagagagaagcgaccuggu

SEQ ID NO: 992987 - RNA, 22 nt, Human
uagugaaauuuaugcacagcua

SEQ ID NO: 992988 - RNA, 22 nt, Human
ggcccucccugagccagguggg

SEQ ID NO: 992989 - RNA, 22 nt, Human
guguaucaaagcacagacuuca

SEQ ID NO: 992990 - RNA, 22 nt, Human
gggagcuggagcuggaagacuc

SEQ ID NO: 992991 - RNA, 22 nt, Human
agcagccagagaaugaugcagu

SEQ ID NO: 992992 - RNA, 21 nt, Human
ugcagccauucagcccuaugc

SEQ ID NO: 992993 - RNA, 22 nt, Human
uggagccuguguuucugcccag

SEQ ID NO: 992994 - RNA, 22 nt, Human
ugggcuguggagcaccuuugca

SEQ ID NO: 992995 - RNA, 22 nt, Human
ugguggccaauucacagggcuc

SEQ ID NO: 992996 - RNA, 22 nt, Human
acccugccgugggcugcuugug

SEQ ID NO: 992997 - RNA, 22 nt, Human
uggcccugcugggucagagcug

SEQ ID NO: 992998 - RNA, 22 nt, Human
cuggcaggaagaggaaagguca

SEQ ID NO: 992999 - RNA, 22 nt, Human
caggcugucugaauggaggccc

SEQ ID NO: 993000 - RNA, 22 nt, Human
agcccugggaggccagcuugua

SEQ ID NO: 993001 - RNA, 22 nt, Human
cugggagcugucaggagcgugu

SEQ ID NO: 993002 - RNA, 22 nt, Human
uccugugccuccaccugcuccg

SEQ ID NO: 993003 - RNA, 22 nt, Human
gcugcccuaauaucacauguua

SEQ ID NO: 993004 - RNA, 21 nt, Human
ugcucaugcaaugcaugucca

SEQ ID NO: 993005 - RNA, 22 nt, Human
augggaggaucacuugaggcca

SEQ ID NO: 993006 - RNA, 22 nt, Human
uuggcagcagggaguuggccgc

SEQ ID NO: 993007 - RNA, 22 nt, Human
gaauuacauuguuagccuuccu

SEQ ID NO: 993008 - RNA, 22 nt, Human
cagucccaucucccagguggcu

SEQ ID NO: 993009 - RNA, 22 nt, Human
aguuuuucuccccuggcuucau

SEQ ID NO: 993010 - RNA, 22 nt, Human
augaggauuaacuguugucaua

SEQ ID NO: 993011 - RNA, 22 nt, Human
uggcugcugcuuggucuucuuc

SEQ ID NO: 993012 - RNA, 22 nt, Human
cagcauggagacaaagugggca

SEQ ID NO: 993013 - RNA, 21 nt, Human
ccugggagaucagcugccuuc

SEQ ID NO: 993014 - RNA, 22 nt, Human
cagcuggguuuaguggggugug

SEQ ID NO: 993015 - RNA, 22 nt, Human
ugcagcuguuacggacccuguc

SEQ ID NO: 993016 - RNA, 22 nt, Human
gccaggccugcaagugcuggug

SEQ ID NO: 993017 - RNA, 22 nt, Human
uguguacaggccuugcuagacu

SEQ ID NO: 993018 - RNA, 22 nt, Human
uuuccuuccaaaugcccgggag

SEQ ID NO: 993019 - RNA, 22 nt, Human
uugcaccaaaugaguuaaaauu

SEQ ID NO: 993020 - RNA, 22 nt, Human
gagcacagccaaaguaagaagg

SEQ ID NO: 993021 - RNA, 22 nt, Human
gugccugcugcagagucgcugu

SEQ ID NO: 993022 - RNA, 22 nt, Human
ugggugagugggaaaagcccag

SEQ ID NO: 993023 - RNA, 22 nt, Human
agugccaggagcaaggagcucc

SEQ ID NO: 993024 - RNA, 22 nt, Human
caggccugcaggaaaggcuccc

SEQ ID NO: 993025 - RNA, 22 nt, Human
agagaacacgugcaucugcaau

SEQ ID NO: 993026 - RNA, 22 nt, Human
cugauuccugauucaugcucuu

SEQ ID NO: 993027 - RNA, 22 nt, Human
ggcagcuccaaaaggaaacacu

SEQ ID NO: 993028 - RNA, 22 nt, Human
aagagggaggugcgggugcaga

SEQ ID NO: 993029 - RNA, 22 nt, Human
cagcucugaggaacacuccuuu

SEQ ID NO: 993030 - RNA, 22 nt, Human
aggcacugauucuguuuuccau

SEQ ID NO: 993031 - RNA, 22 nt, Human
gggcugagucugcugccuguca

SEQ ID NO: 993032 - RNA, 22 nt, Human
ggcugccucugaugugcagacg

SEQ ID NO: 993033 - RNA, 22 nt, Human
gucucuaucauagcugaacccu

SEQ ID NO: 993034 - RNA, 20 nt, Human
agggcagcuugaggagccgg

SEQ ID NO: 993035 - RNA, 22 nt, Human
ccagcugacgaugccuggucuc

SEQ ID NO: 993036 - RNA, 20 nt, Human
ugcagagcuggcuggcuccu

SEQ ID NO: 993037 - RNA, 22 nt, Human
ccaggcaggcgauggugcagug

SEQ ID NO: 993038 - RNA, 21 nt, Human
gucagcagauccagcacuugu

SEQ ID NO: 993039 - RNA, 22 nt, Human
uccuggguccauggcagccgaa

SEQ ID NO: 993040 - RNA, 22 nt, Human
ugggcagaggacagggaagauc

SEQ ID NO: 993041 - RNA, 22 nt, Human
acacagggcagagagcuggcuc

SEQ ID NO: 993042 - RNA, 22 nt, Human
aacccagccguguagcugccgc

SEQ ID NO: 993043 - RNA, 22 nt, Human
gcucuguccagcgugcacagaa

SEQ ID NO: 993044 - RNA, 22 nt, Human
aggagcugagucagcccgacag

SEQ ID NO: 993045 - RNA, 22 nt, Human
gaaggaaaucugugauuuaugc

SEQ ID NO: 993046 - RNA, 23 nt, Human
uagggcagcugggagggacaugc

SEQ ID NO: 993047 - RNA, 22 nt, Human
uaagaacagugucugucucaca

SEQ ID NO: 993048 - RNA, 22 nt, Human
gugauuucuaaucaucugaaug

SEQ ID NO: 993049 - RNA, 22 nt, Human
ucccagcgcggggggaggaucc

SEQ ID NO: 993050 - RNA, 20 nt, Human
acuccugguaacuuuuguga

SEQ ID NO: 993051 - RNA, 22 nt, Human
uggcucuguugagguauggauu

SEQ ID NO: 993052 - RNA, 20 nt, Human
ucagaggcugccagcugggg

SEQ ID NO: 993053 - RNA, 22 nt, Human
ucuggcucuccagugcucuuag

SEQ ID NO: 993054 - RNA, 22 nt, Human
ucaaagucauggcaggcucaga

SEQ ID NO: 993055 - RNA, 21 nt, Human
ccaggcuccugaggcugguca

SEQ ID NO: 993056 - RNA, 22 nt, Human
cagcugccacaggacuuucuga

SEQ ID NO: 993057 - RNA, 22 nt, Human
uuguuucaugaguguaaaggga

SEQ ID NO: 993058 - RNA, 22 nt, Human
ugcugccuuugggaccuggccu

SEQ ID NO: 993059 - RNA, 22 nt, Human
caguuuaaaugagugacugcag

SEQ ID NO: 993060 - RNA, 22 nt, Human
uuugcauuucuaaugagcuccg

SEQ ID NO: 993061 - RNA, 22 nt, Human
agaauucugacaauagaauugg

SEQ ID NO: 993062 - RNA, 21 nt, Human
ggucagggggugccuccaggu

SEQ ID NO: 993063 - RNA, 22 nt, Human
gucccugggaugcccuucuggg

SEQ ID NO: 993064 - RNA, 22 nt, Human
uaaguucaaugaacucaguucu

SEQ ID NO: 993065 - RNA, 22 nt, Human
ucaguuuuuacggucacaggga

SEQ ID NO: 993066 - RNA, 22 nt, Human
acuuugaaacuaaaauucauua

SEQ ID NO: 993067 - RNA, 22 nt, Human
ugggccuggaguuuguccagag

SEQ ID NO: 993068 - RNA, 22 nt, Human
uaguuuuuucaacaaauggugc

SEQ ID NO: 993069 - RNA, 22 nt, Human
ccuuaaaagaacuaucucuucu

SEQ ID NO: 993070 - RNA, 22 nt, Human
auuuguagugaagugaaaauaa

SEQ ID NO: 993071 - RNA, 22 nt, Human
uccagggacagcgcuggagcua

SEQ ID NO: 993072 - RNA, 22 nt, Human
gccagccugugcuuggccaggc

SEQ ID NO: 993073 - RNA, 22 nt, Human
uagacagauuucuuguuagaca

SEQ ID NO: 993074 - RNA, 20 nt, Human
uauuaggaaggaggaaggaa

SEQ ID NO: 993075 - RNA, 22 nt, Human
cugccuggggaaugugaggauu

SEQ ID NO: 993076 - RNA, 22 nt, Human
uguuaucugagcaacgucgacg

SEQ ID NO: 993077 - RNA, 22 nt, Human
guaaaguucuauuugaauuuag

SEQ ID NO: 993078 - RNA, 23 nt, Human
aaccagauaaauggcuccagggc

SEQ ID NO: 993079 - RNA, 22 nt, Human
aauuaacagagggcuuauuacu

SEQ ID NO: 993080 - RNA, 22 nt, Human
caggaggaacaagagguucugg

SEQ ID NO: 993081 - RNA, 22 nt, Human
aagagcuguaugccauaugauu

SEQ ID NO: 993082 - RNA, 22 nt, Human
ccagcucuuggugcacuuacau

SEQ ID NO: 993083 - RNA, 22 nt, Human
uguguccuucugggagucccag

SEQ ID NO: 993084 - RNA, 17 nt, Human
gguggccugcaguggcu

SEQ ID NO: 993085 - RNA, 22 nt, Human
cugaagcaaaugaaacagcucu

SEQ ID NO: 993086 - RNA, 22 nt, Human
cagcuuggaggaggaucuaaga

SEQ ID NO: 993087 - RNA, 22 nt, Human
cagguggguguaugaaugcaaa

SEQ ID NO: 993088 - RNA, 22 nt, Human
ccugaggacacacgcugcagga

SEQ ID NO: 993089 - RNA, 22 nt, Human
acaaaguaggucaucaaagcuc

SEQ ID NO: 993090 - RNA, 22 nt, Human
ucuguaguagguuguaguucuu

SEQ ID NO: 993091 - RNA, 22 nt, Human
cuggcacaaugucacuuuugcu

SEQ ID NO: 993092 - RNA, 19 nt, Human
agcagccaucgaccaugga

SEQ ID NO: 993093 - RNA, 22 nt, Human
uacuguauuugauaagugaagu

SEQ ID NO: 993094 - RNA, 22 nt, Human
gacuuucucuccucccaggugu

SEQ ID NO: 993095 - RNA, 22 nt, Human
agacaggcagaggcugcagagg

SEQ ID NO: 993096 - RNA, 22 nt, Human
uaaguuaucggaguguguuuca

SEQ ID NO: 993097 - RNA, 22 nt, Human
aaggcugagacagcacaggucc

SEQ ID NO: 993098 - RNA, 20 nt, Human
cuguggcucaugcaucugcc

SEQ ID NO: 993099 - RNA, 22 nt, Human
gcagggcuguggacacuuuggu

SEQ ID NO: 993100 - RNA, 22 nt, Human
ugucaucuucaucauaaguaaa

SEQ ID NO: 993101 - RNA, 22 nt, Human
ucagaguguggugagaugugca

SEQ ID NO: 993102 - RNA, 21 nt, Human
ucucugggaggacuugugaga

SEQ ID NO: 993103 - RNA, 22 nt, Human
uuccuguauucuaaagggaaag

SEQ ID NO: 993104 - RNA, 23 nt, Human
uuucaacaaugcuuagagaaaac

SEQ ID NO: 993105 - RNA, 22 nt, Human
aucuaagauguauugagcacuu

SEQ ID NO: 993106 - RNA, 22 nt, Human
aaagaacaaauuagcuguuuua

SEQ ID NO: 993107 - RNA, 23 nt, Human
gcugucugucaucucugcgggag

SEQ ID NO: 993108 - RNA, 22 nt, Human
aaucaguuguucacucugaaaa

SEQ ID NO: 993109 - RNA, 22 nt, Human
gcugucugagaacaugguggaa

SEQ ID NO: 993110 - RNA, 22 nt, Human
ggcucaggacugcagcguagag

SEQ ID NO: 993111 - RNA, 22 nt, Human
cuucaagauauuucuagaauca

SEQ ID NO: 993112 - RNA, 22 nt, Human
cuuauguacacacauauauugu

SEQ ID NO: 993113 - RNA, 22 nt, Human
ugaucagucccaugaucuucca

SEQ ID NO: 993114 - RNA, 22 nt, Human
uccaagggcaugcugaaauaag

SEQ ID NO: 993115 - RNA, 22 nt, Human
cacucugccugauguuacaugg

SEQ ID NO: 993116 - RNA, 22 nt, Human
aacaugaaguuuucuauaguga

SEQ ID NO: 993117 - RNA, 22 nt, Human
auaaaacuuauuagaauugugu

SEQ ID NO: 993118 - RNA, 22 nt, Human
ugcagaagaccuuccagggcug

SEQ ID NO: 993119 - RNA, 22 nt, Human
aagauucucagagugaaagaau

SEQ ID NO: 993120 - RNA, 22 nt, Human
augggcagcagcugccauucau

SEQ ID NO: 993121 - RNA, 23 nt, Human
uuauugaggguguagauuggugu

SEQ ID NO: 993122 - RNA, 22 nt, Human
agcucccaauugacuugaacua

SEQ ID NO: 993123 - RNA, 22 nt, Human
acauauuuccaugcagcauguc

SEQ ID NO: 993124 - RNA, 22 nt, Human
agggcagagggugccucaccug

SEQ ID NO: 993125 - RNA, 22 nt, Human
ggcugucugugguggagcguug

SEQ ID NO: 993126 - RNA, 22 nt, Human
uccugagauguggagcuccaug

SEQ ID NO: 993127 - RNA, 22 nt, Human
acaggccugagauuuugcauuu

SEQ ID NO: 993128 - RNA, 22 nt, Human
uuauuauugugaccugagaaug

SEQ ID NO: 993129 - RNA, 22 nt, Human
ugaaagguuaaaaguaguauug

SEQ ID NO: 993130 - RNA, 22 nt, Human
ggcugccugccuccaagccggg

SEQ ID NO: 993131 - RNA, 22 nt, Human
acccaggccugagagacaggag

SEQ ID NO: 993132 - RNA, 22 nt, Human
cacaggaggaggugcccgggcc

SEQ ID NO: 993133 - RNA, 22 nt, Human
aaaugcacagaggccagagagg

SEQ ID NO: 993134 - RNA, 22 nt, Human
augaugguggguaauguguaaa

SEQ ID NO: 993135 - RNA, 22 nt, Human
caguuucuucaucaguuaagca

SEQ ID NO: 993136 - RNA, 22 nt, Human
uggucaaaaaggccuagacaca

SEQ ID NO: 993137 - RNA, 18 nt, Human
uccucucuuuccccaggg

SEQ ID NO: 993138 - RNA, 22 nt, Human
augcaaaugaacauguugcuag

SEQ ID NO: 993139 - RNA, 22 nt, Human
gagguggccucaagcagucuuc

SEQ ID NO: 993140 - RNA, 22 nt, Human
uagaaacugauagucuugugcu

SEQ ID NO: 993141 - RNA, 23 nt, Human
ugccagaggcagucacaguggug

SEQ ID NO: 993142 - RNA, 22 nt, Human
cugagaggcacaaggcauuucg

SEQ ID NO: 993143 - RNA, 22 nt, Human
caguugcuacaguucaagugug

SEQ ID NO: 993144 - RNA, 22 nt, Human
uuucacaacugcuuauuugaga

SEQ ID NO: 993145 - RNA, 22 nt, Human
agaggcugcacuugcucaugau

SEQ ID NO: 993146 - RNA, 22 nt, Human
cccagcauccucagggagcggg

SEQ ID NO: 993147 - RNA, 22 nt, Human
aggccugagccccagguuuguu

SEQ ID NO: 993148 - RNA, 22 nt, Human
ggccucugguucguggugaccu

SEQ ID NO: 993149 - RNA, 19 nt, Human
uggcagggagugauauuag

SEQ ID NO: 993150 - RNA, 22 nt, Human
agcugggagcagagccacagcc

SEQ ID NO: 993151 - RNA, 22 nt, Human
uccauugucuuugguccuagcc

SEQ ID NO: 993152 - RNA, 22 nt, Human
agugcauuauauguuucaaugg

SEQ ID NO: 993153 - RNA, 19 nt, Human
uccauaagcuuguguucau

SEQ ID NO: 993154 - RNA, 22 nt, Human
aaguguguauuguuuaugcugc

SEQ ID NO: 993155 - RNA, 21 nt, Human
gcagccagacgggauucaguu

SEQ ID NO: 993156 - RNA, 22 nt, Human
ccugggagggcaagugcugaug

SEQ ID NO: 993157 - RNA, 22 nt, Human
gucuggagccacccuaagcauu

SEQ ID NO: 993158 - RNA, 22 nt, Human
uucagaaagugaaucuuguuau

SEQ ID NO: 993159 - RNA, 22 nt, Human
cagccaucaguaaagacagcuu

SEQ ID NO: 993160 - RNA, 20 nt, Human
ugcuguaagauuagagagcu

SEQ ID NO: 993161 - RNA, 22 nt, Human
auacagcagugaauaagauaaa

SEQ ID NO: 993162 - RNA, 22 nt, Human
gcucugucaacagcuagcugug

SEQ ID NO: 993163 - RNA, 22 nt, Human
acaaacagcuaacauauguuaa

SEQ ID NO: 993164 - RNA, 22 nt, Human
uggacagguugaguaggaggag

SEQ ID NO: 993165 - RNA, 22 nt, Human
ucugccuuccccauaaucugau

SEQ ID NO: 993166 - RNA, 22 nt, Human
cagcuuccaucuccacugcccu

SEQ ID NO: 993167 - RNA, 22 nt, Human
cuuuuauuuugaauuaagggcu

SEQ ID NO: 993168 - RNA, 22 nt, Human
uaaagguagcaugaaacugcaa

SEQ ID NO: 993169 - RNA, 22 nt, Human
ggugcagcugcagccugggagc

SEQ ID NO: 993170 - RNA, 22 nt, Human
gaagaacacuucaugauucauu

SEQ ID NO: 993171 - RNA, 22 nt, Human
uucacaggcuuggagguggggg

SEQ ID NO: 993172 - RNA, 22 nt, Human
gccugucugcgucacgcuuauu

SEQ ID NO: 993173 - RNA, 22 nt, Human
uccugagcugccgcaucagcag

SEQ ID NO: 993174 - RNA, 22 nt, Human
cuuguauuccccuaucucuaaa

SEQ ID NO: 993175 - RNA, 22 nt, Human
cuugaaagcuuugcgucuucua

SEQ ID NO: 993176 - RNA, 22 nt, Human
aguuuaaaucauguuuuguaac

SEQ ID NO: 993177 - RNA, 22 nt, Human
aucaguuuuguucacuacuaua

SEQ ID NO: 993178 - RNA, 22 nt, Human
ccugucagcugauggcuaugua

SEQ ID NO: 993179 - RNA, 22 nt, Human
agccaugugucuuuauucuguu

SEQ ID NO: 993180 - RNA, 20 nt, Human
agccugccagcuggcccaga

SEQ ID NO: 993181 - RNA, 22 nt, Human
ggagcugcuuugaucugaagaa

SEQ ID NO: 993182 - RNA, 22 nt, Human
auguuuuauauuuugcagcagu

SEQ ID NO: 993183 - RNA, 22 nt, Human
ccagggcagggaccacgugucu

SEQ ID NO: 993184 - RNA, 22 nt, Human
ccuccugggcuccugucugcac

SEQ ID NO: 993185 - RNA, 22 nt, Human
uauauuaacuugugauccugga

SEQ ID NO: 993186 - RNA, 22 nt, Human
uggccucuuaggacauccucua

SEQ ID NO: 993187 - RNA, 22 nt, Human
agugugggugagggaggcccuc

SEQ ID NO: 993188 - RNA, 19 nt, Human
cuggggcuuugguacugcc

SEQ ID NO: 993189 - RNA, 22 nt, Human
uucaagauccagcacaacagug

SEQ ID NO: 993190 - RNA, 22 nt, Human
uccaagggaauuuaaaguugcu

SEQ ID NO: 993191 - RNA, 22 nt, Human
ccucucuguaagggucccuccc

SEQ ID NO: 993192 - RNA, 22 nt, Human
ggccuugggcuggcugcaguau

SEQ ID NO: 993193 - RNA, 22 nt, Human
cagccugcagggcugccuguug

SEQ ID NO: 993194 - RNA, 22 nt, Human
acucugcuaaauguaaguuggu

SEQ ID NO: 993195 - RNA, 22 nt, Human
auacaagacucagcacagacgg

SEQ ID NO: 993196 - RNA, 22 nt, Human
gagggcugauaaaugcgcaugg

SEQ ID NO: 993197 - RNA, 22 nt, Human
cagauggccagaggcagcugca

SEQ ID NO: 993198 - RNA, 18 nt, Human
gguggcucagucaugggg

SEQ ID NO: 993199 - RNA, 22 nt, Human
acccaggguagagugcaguggc

SEQ ID NO: 993200 - RNA, 23 nt, Human
acacaaggguaacugccagccau

SEQ ID NO: 993201 - RNA, 22 nt, Human
caagggaccugagauggucucu

SEQ ID NO: 993202 - RNA, 22 nt, Human
agaagccacuggagguugagau

SEQ ID NO: 993203 - RNA, 22 nt, Human
aagccucaccuuuuagaagcua

SEQ ID NO: 993204 - RNA, 20 nt, Human
cagcucugggaaagaggcca

SEQ ID NO: 993205 - RNA, 22 nt, Human
caggauggucagaugcauuguc

SEQ ID NO: 993206 - RNA, 22 nt, Human
ucaaaugcaggucuggucuugg

SEQ ID NO: 993207 - RNA, 21 nt, Human
gggaaauuaggauugcucauc

SEQ ID NO: 993208 - RNA, 22 nt, Human
ccugggaggcuguuuccagccu

SEQ ID NO: 993209 - RNA, 22 nt, Human
agcaccugcacaguggaggaaa

SEQ ID NO: 993210 - RNA, 22 nt, Human
gcugucagcgcccaaggagcuc

SEQ ID NO: 993211 - RNA, 22 nt, Human
guguccagagaaacucacagcu

SEQ ID NO: 993212 - RNA, 22 nt, Human
uuacaugguuguuggaaaugcu

SEQ ID NO: 993213 - RNA, 20 nt, Human
uagaaaucuuauaaaagacu

SEQ ID NO: 993214 - RNA, 22 nt, Human
acuucuggauagagucagcuuu

SEQ ID NO: 993215 - RNA, 22 nt, Human
cuggagcccugaaugggcagga

SEQ ID NO: 993216 - RNA, 22 nt, Human
ugagcaguaggucugaauagug

SEQ ID NO: 993217 - RNA, 22 nt, Human
aaacacaucauucaugucguca

SEQ ID NO: 993218 - RNA, 22 nt, Human
gccaugaggaacuguaagacaa

SEQ ID NO: 993219 - RNA, 22 nt, Human
ccuggagggcgccgcacagucc

SEQ ID NO: 993220 - RNA, 22 nt, Human
uggagcagagaugggagcccaa

SEQ ID NO: 993221 - RNA, 22 nt, Human
ucucugcugagaagggcuggca

SEQ ID NO: 993222 - RNA, 17 nt, Human
auuucacuuagcaugag

SEQ ID NO: 993223 - RNA, 22 nt, Human
uaacagaauuugcuaaacuccg

SEQ ID NO: 993224 - RNA, 22 nt, Human
ucagagugaggcccagcaaucu

SEQ ID NO: 993225 - RNA, 21 nt, Human
aggcccagcuuuccucuugcu

SEQ ID NO: 993226 - RNA, 22 nt, Human
cacuucaauuaacuucagcauu

SEQ ID NO: 993227 - RNA, 22 nt, Human
cccuccagcucaaagcaaccgg

SEQ ID NO: 993228 - RNA, 22 nt, Human
aaguuacaggagaaagagauca

SEQ ID NO: 993229 - RNA, 22 nt, Human
ccugcagacacuuguccagcaa

SEQ ID NO: 993230 - RNA, 22 nt, Human
ucccagagcugauaagccuuua

SEQ ID NO: 993231 - RNA, 22 nt, Human
ccagcugagaaguguaaaguga

SEQ ID NO: 993232 - RNA, 22 nt, Human
ccacagccauuccagggaggcu

SEQ ID NO: 993233 - RNA, 22 nt, Human
acagcagcuaaccccugggcca

SEQ ID NO: 993234 - RNA, 22 nt, Human
acugucugcccugagaugccag

SEQ ID NO: 993235 - RNA, 22 nt, Human
cacagaguggaggcuuggccug

SEQ ID NO: 993236 - RNA, 21 nt, Human
ugguggagugugcugagcaug

SEQ ID NO: 993237 - RNA, 21 nt, Human
cagaggcugagagggcaaucu

SEQ ID NO: 993238 - RNA, 22 nt, Human
gcuggccacauugugccguccu

SEQ ID NO: 993239 - RNA, 22 nt, Human
ggcuucugccacgagagggaag

SEQ ID NO: 993240 - RNA, 22 nt, Human
uaaaugugggggccacgggcuu

SEQ ID NO: 993241 - RNA, 22 nt, Human
ucccagggugcgccugcccucg

SEQ ID NO: 993242 - RNA, 22 nt, Human
cuuucacagcugugcuuaugau

SEQ ID NO: 993243 - RNA, 22 nt, Human
ggccucuguuuggagccaggau

SEQ ID NO: 993244 - RNA, 22 nt, Human
uggccuggugucugcgaggccu

SEQ ID NO: 993245 - RNA, 22 nt, Human
agaaaucauucccaaacccaua

SEQ ID NO: 993246 - RNA, 22 nt, Human
gcaggagcuggaaagugauguu

SEQ ID NO: 993247 - RNA, 22 nt, Human
cugggcuucucccccuggcaga

SEQ ID NO: 993248 - RNA, 22 nt, Human
gcuggcuguguuucaucucuga

SEQ ID NO: 993249 - RNA, 22 nt, Human
aggucaaguuuagauagaguua

SEQ ID NO: 993250 - RNA, 22 nt, Human
acugugugggccgcucacuggg

SEQ ID NO: 993251 - RNA, 22 nt, Human
ucugggugaugaaaugcacugu

SEQ ID NO: 993252 - RNA, 22 nt, Human
agguggguaucaugagagauua

SEQ ID NO: 993253 - RNA, 22 nt, Human
acucucagaggguggcagcaau

SEQ ID NO: 993254 - RNA, 22 nt, Human
aauggacaggagagcauaguca

SEQ ID NO: 993255 - RNA, 22 nt, Human
ugagaauuacaaaugagucaca

SEQ ID NO: 993256 - RNA, 22 nt, Human
ucugucacugagcucaggauuc

SEQ ID NO: 993257 - RNA, 22 nt, Human
gccugagauucccggagccgug

SEQ ID NO: 993258 - RNA, 22 nt, Human
cuggagccggaccagggacggu

SEQ ID NO: 993259 - RNA, 22 nt, Human
gaaggcaggcuucugauuaggu

SEQ ID NO: 993260 - RNA, 22 nt, Human
aaugauggucauggcaacuuuu

SEQ ID NO: 993261 - RNA, 22 nt, Human
ucuccuuuaagauuuccucagg

SEQ ID NO: 993262 - RNA, 22 nt, Human
ucacucugaaugguacugagga

SEQ ID NO: 993263 - RNA, 22 nt, Human
ugcuggcuguauaugugagagu

SEQ ID NO: 993264 - RNA, 22 nt, Human
gcagagacuccacugucuugug

SEQ ID NO: 993265 - RNA, 22 nt, Human
aagccuugcagcauuaggcucu

SEQ ID NO: 993266 - RNA, 22 nt, Human
uaccuauagguacaauuacaag

SEQ ID NO: 993267 - RNA, 22 nt, Human
uuuauuagauuaucaaagaggu

SEQ ID NO: 993268 - RNA, 22 nt, Human
ugaugggacugccagcugcuga

SEQ ID NO: 993269 - RNA, 22 nt, Human
gccucugcaauuacauugugcc

SEQ ID NO: 993270 - RNA, 22 nt, Human
ccuggccacagggcucugcauu

SEQ ID NO: 993271 - RNA, 22 nt, Human
auguccuucuccucuuaccugc

SEQ ID NO: 993272 - RNA, 22 nt, Human
uacuuuaaaaacugauaauuca

SEQ ID NO: 993273 - RNA, 22 nt, Human
gcucaggaaauaguuuaguguu

SEQ ID NO: 993274 - RNA, 22 nt, Human
cagagccagcaguggggacagg

SEQ ID NO: 993275 - RNA, 22 nt, Human
ucacauuuucuacuacuguacg

SEQ ID NO: 993276 - RNA, 22 nt, Human
gucugucaucugagauggagug

SEQ ID NO: 993277 - RNA, 22 nt, Human
aaccaggacaauuuugaaagua

SEQ ID NO: 993278 - RNA, 22 nt, Human
aauaauuuuagcucagaguugu

SEQ ID NO: 993279 - RNA, 22 nt, Human
aggcccuggguuagggcccacu

SEQ ID NO: 993280 - RNA, 22 nt, Human
aaagaauacccugggucauaaa

SEQ ID NO: 993281 - RNA, 22 nt, Human
uauagcaagcaggacagucuca

SEQ ID NO: 993282 - RNA, 22 nt, Human
aucuggcugcugugcuuaagcu

SEQ ID NO: 993283 - RNA, 22 nt, Human
gccuggagcagacgugucccgg

SEQ ID NO: 993284 - RNA, 22 nt, Human
gauuucaaguaucuugggcgag

SEQ ID NO: 993285 - RNA, 22 nt, Human
aaggcuaugaucuuuuucauga

SEQ ID NO: 993286 - RNA, 22 nt, Human
cuuacauugugugcaugagggg

SEQ ID NO: 993287 - RNA, 22 nt, Human
gcccugcugucuucagaguaua

SEQ ID NO: 993288 - RNA, 22 nt, Human
guggauggauuuugaggaaugg

SEQ ID NO: 993289 - RNA, 22 nt, Human
acaggcagcgucauugcugcuc

SEQ ID NO: 993290 - RNA, 22 nt, Human
cuggcuuccucaggagcagugg

SEQ ID NO: 993291 - RNA, 19 nt, Human
uccuuugaauaucaguuga

SEQ ID NO: 993292 - RNA, 22 nt, Human
agccuggaguucccaggagaag

SEQ ID NO: 993293 - RNA, 22 nt, Human
ggucccagcuggucacugucag

SEQ ID NO: 993294 - RNA, 22 nt, Human
ugcagcaggcacaggacggaag

SEQ ID NO: 993295 - RNA, 22 nt, Human
gguggcagucuuaagagaucuu

SEQ ID NO: 993296 - RNA, 22 nt, Human
agcagagaagacacaggcuuca

SEQ ID NO: 993297 - RNA, 22 nt, Human
cagagccaggucuaggagucuc

SEQ ID NO: 993298 - RNA, 22 nt, Human
ucuuuccucugagcuccuguag

SEQ ID NO: 993299 - RNA, 22 nt, Human
ggcaggcaggagcgugcuuggg

SEQ ID NO: 993300 - RNA, 22 nt, Human
cuugccuucuuuuccuauagaa

SEQ ID NO: 993301 - RNA, 22 nt, Human
ucagaggguggcugggagcauc

SEQ ID NO: 993302 - RNA, 22 nt, Human
guccagggaaauagcgacaggg

SEQ ID NO: 993303 - RNA, 22 nt, Human
agguggggaggagugucucuuu

SEQ ID NO: 993304 - RNA, 22 nt, Human
cccugcagaaccacagacaaac

SEQ ID NO: 993305 - RNA, 21 nt, Human
uguucacauggagcagaaugu

SEQ ID NO: 993306 - RNA, 22 nt, Human
acugcaucugaaacauggguca

SEQ ID NO: 993307 - RNA, 22 nt, Human
ggcacugauaauguccucucuc

SEQ ID NO: 993308 - RNA, 22 nt, Human
cuuggggcugucacucuggcau

SEQ ID NO: 993309 - RNA, 22 nt, Human
gagauuucuuuugaugccuguc

SEQ ID NO: 993310 - RNA, 22 nt, Human
uauugacagagggucagaagag

SEQ ID NO: 993311 - RNA, 22 nt, Human
auacagaaaaugaugcagaguu

SEQ ID NO: 993312 - RNA, 19 nt, Human
aagaagcaauaagcuguga

SEQ ID NO: 993313 - RNA, 20 nt, Human
ucaggcaguggggaaaggca

SEQ ID NO: 993314 - RNA, 22 nt, Human
agccuucauaaucuugggcuuu

SEQ ID NO: 993315 - RNA, 22 nt, Human
agagauguucauucagcauguu

SEQ ID NO: 993316 - RNA, 22 nt, Human
ugcccagcacugugccagucac

SEQ ID NO: 993317 - RNA, 22 nt, Human
cccagccugugacagccguccu

SEQ ID NO: 993318 - RNA, 22 nt, Human
gagcugggcacacgccacuuga

SEQ ID NO: 993319 - RNA, 22 nt, Human
ugucucaguauacgaaacacuu

SEQ ID NO: 993320 - RNA, 22 nt, Human
guggccuggcgagcuggcgcgg

SEQ ID NO: 993321 - RNA, 20 nt, Human
acuggagccaucucagccua

SEQ ID NO: 993322 - RNA, 22 nt, Human
ucccagaguucaaugggaaggu

SEQ ID NO: 993323 - RNA, 22 nt, Human
gcagugaaucuggcaagaauuu

SEQ ID NO: 993324 - RNA, 22 nt, Human
uucugucacuuaggaggucaua

SEQ ID NO: 993325 - RNA, 22 nt, Human
gcagccagccccucugaccucu

SEQ ID NO: 993326 - RNA, 22 nt, Human
aagcuaugggggaguuucaacc

SEQ ID NO: 993327 - RNA, 22 nt, Human
cacugcagaucagaggcugaga

SEQ ID NO: 993328 - RNA, 22 nt, Human
agcuuccucaccucagaggucu

SEQ ID NO: 993329 - RNA, 22 nt, Human
gagccugaugaaacaggcagac

SEQ ID NO: 993330 - RNA, 22 nt, Human
auucucaaacaagugguuugau

SEQ ID NO: 993331 - RNA, 22 nt, Human
agugacugggcagggcagggcc

SEQ ID NO: 993332 - RNA, 22 nt, Human
ucacugggagaugugggaaggg

SEQ ID NO: 993333 - RNA, 22 nt, Human
gagcuuccugaugccgaccagu

SEQ ID NO: 993334 - RNA, 22 nt, Human
uuuauguaguuacggacuauca

SEQ ID NO: 993335 - RNA, 22 nt, Human
augauugaccaucugcugggcu

SEQ ID NO: 993336 - RNA, 22 nt, Human
gagugugucggucagcguggcg

SEQ ID NO: 993337 - RNA, 22 nt, Human
ugggccuggcccuguggaggag

SEQ ID NO: 993338 - RNA, 22 nt, Human
agggcugcugcuccgggcccag

SEQ ID NO: 993339 - RNA, 22 nt, Human
gcuggccagggcugcucgcgga

SEQ ID NO: 993340 - RNA, 20 nt, Human
guauuaggagguaaauguaa

SEQ ID NO: 993341 - RNA, 18 nt, Human
ggagagugacagagucgu

SEQ ID NO: 993342 - RNA, 22 nt, Human
uguguuaaguauuugauacacu

SEQ ID NO: 993343 - RNA, 22 nt, Human
cagacagaaggcuccuugaggu

SEQ ID NO: 993344 - RNA, 22 nt, Human
ccuccuggaggcucuaagggag

SEQ ID NO: 993345 - RNA, 17 nt, Human
acacagggagagggagc

SEQ ID NO: 993346 - RNA, 22 nt, Human
cagggcagugaagaacacacgu

SEQ ID NO: 993347 - RNA, 22 nt, Human
aagaacauucgaacuauuuucu

SEQ ID NO: 993348 - RNA, 22 nt, Human
gcagggacugugaucucacaga

SEQ ID NO: 993349 - RNA, 22 nt, Human
gcagauggaaagugcuugaggg

SEQ ID NO: 993350 - RNA, 22 nt, Human
ggagccuguggcugcuugaagc

SEQ ID NO: 993351 - RNA, 22 nt, Human
ggcugccauaacugauaccaua

SEQ ID NO: 993352 - RNA, 22 nt, Human
ucacauuuuaucuauuuuaagu

SEQ ID NO: 993353 - RNA, 22 nt, Human
cuggccuuggugcuugcagaca

SEQ ID NO: 993354 - RNA, 22 nt, Human
ucccaggcuaggccucugcguu

SEQ ID NO: 993355 - RNA, 17 nt, Human
aaauaugaccucaaagu

SEQ ID NO: 993356 - RNA, 18 nt, Human
gccugccuagagcuugcc

SEQ ID NO: 993357 - RNA, 22 nt, Human
agcaagcuaccuagauagucua

SEQ ID NO: 993358 - RNA, 23 nt, Human
auagucauguaaaauauuugaag

SEQ ID NO: 993359 - RNA, 20 nt, Human
cccagccccuaccuguugcc

SEQ ID NO: 993360 - RNA, 22 nt, Human
acuuugcagagccagaagagaa

SEQ ID NO: 993361 - RNA, 22 nt, Human
gagucacaaagccuuucuuauu

SEQ ID NO: 993362 - RNA, 21 nt, Human
gcagacugcccugcugucccc

SEQ ID NO: 993363 - RNA, 22 nt, Human
gacaaaggaucagagguuggga

SEQ ID NO: 993364 - RNA, 22 nt, Human
ggagagagaugccgccuugcuc

SEQ ID NO: 993365 - RNA, 22 nt, Human
gagcagcucgagaaggaagcag

SEQ ID NO: 993366 - RNA, 22 nt, Human
acaauguaggauauguacuugu

SEQ ID NO: 993367 - RNA, 22 nt, Human
uuagaaaaaggcuguggucuua

SEQ ID NO: 993368 - RNA, 22 nt, Human
agcugccacauggugucacugu

SEQ ID NO: 993369 - RNA, 22 nt, Human
ggcagggaaacagcugauccca

SEQ ID NO: 993370 - RNA, 22 nt, Human
uggcucaguuuagcagcucagu

SEQ ID NO: 993371 - RNA, 22 nt, Human
caguagcaggcaggugcuuuug

SEQ ID NO: 993372 - RNA, 22 nt, Human
uugaagcauuugcuauagcauu

SEQ ID NO: 993373 - RNA, 22 nt, Human
aacagcaauagcacuauucauu

SEQ ID NO: 993374 - RNA, 22 nt, Human
agggcugcccagugugagagcu

SEQ ID NO: 993375 - RNA, 20 nt, Human
agagaauucccuuuggagau

SEQ ID NO: 993376 - RNA, 22 nt, Human
agaggccuuucuguugagugaa

SEQ ID NO: 993377 - RNA, 22 nt, Human
uaucuacuccucuuucagaugc

SEQ ID NO: 993378 - RNA, 22 nt, Human
uugauaaaaugaugaaaucacu

SEQ ID NO: 993379 - RNA, 22 nt, Human
uagcagcuuaaguaauuagaau

SEQ ID NO: 993380 - RNA, 22 nt, Human
gaggcugcuuugaugacaggag

SEQ ID NO: 993381 - RNA, 22 nt, Human
gaauucuuuucuuucugaaagu

SEQ ID NO: 993382 - RNA, 22 nt, Human
uccuguaguugcuaaguuuguu

SEQ ID NO: 993383 - RNA, 22 nt, Human
uagaaaguaaaucaguuuuauu

SEQ ID NO: 993384 - RNA, 22 nt, Human
ucucagagcuucaguuauuuuc

SEQ ID NO: 993385 - RNA, 22 nt, Human
uggcucagcgcggccuggucuu

SEQ ID NO: 993386 - RNA, 22 nt, Human
caguacuuugcaucauuccacu

SEQ ID NO: 993387 - RNA, 22 nt, Human
cugagagccuccuguuggcuag

SEQ ID NO: 993388 - RNA, 22 nt, Human
cugcccuggucccauggcugau

SEQ ID NO: 993389 - RNA, 22 nt, Human
ccaucagcuccaguaucuucug

SEQ ID NO: 993390 - RNA, 22 nt, Human
uugggcaaaguguuucuggagc

SEQ ID NO: 993391 - RNA, 22 nt, Human
gcagauggcagcccaggcuggg

SEQ ID NO: 993392 - RNA, 22 nt, Human
agcugguguccuccuggagcug

SEQ ID NO: 993393 - RNA, 22 nt, Human
caucacugacgcugagauucca

SEQ ID NO: 993394 - RNA, 22 nt, Human
aaaagagucuuaggcagucaua

SEQ ID NO: 993395 - RNA, 22 nt, Human
gccaggcugaggcucuggaaga

SEQ ID NO: 993396 - RNA, 22 nt, Human
uggcagcaauuagcuagagcug

SEQ ID NO: 993397 - RNA, 22 nt, Human
cugagccagggccacacaugga

SEQ ID NO: 993398 - RNA, 22 nt, Human
aguuuuuccguggcuacgauaa

SEQ ID NO: 993399 - RNA, 22 nt, Human
ucauugcagacuaacaaucuca

SEQ ID NO: 993400 - RNA, 22 nt, Human
ccaggccugauugggaaucuug

SEQ ID NO: 993401 - RNA, 22 nt, Human
uaaggcauucucaugcugugaa

SEQ ID NO: 993402 - RNA, 22 nt, Human
ucaucuucuauuaauagggaga

SEQ ID NO: 993403 - RNA, 22 nt, Human
cugggagaugacucagagcagg

SEQ ID NO: 993404 - RNA, 22 nt, Human
aucucagacauguuguccauga

SEQ ID NO: 993405 - RNA, 22 nt, Human
uagcuuuguuagaaugucuuca

SEQ ID NO: 993406 - RNA, 22 nt, Human
aggccuggugugccggaugcag

SEQ ID NO: 993407 - RNA, 22 nt, Human
cuggagcucuccagagccccgu

SEQ ID NO: 993408 - RNA, 22 nt, Human
uggaagcagugauucuugucug

SEQ ID NO: 993409 - RNA, 22 nt, Human
gcugugugaaaacugggccugg

SEQ ID NO: 993410 - RNA, 22 nt, Human
uacaaagugagcaaccucuuuu

SEQ ID NO: 993411 - RNA, 22 nt, Human
ugggaguguucuuggcuugcuu

SEQ ID NO: 993412 - RNA, 22 nt, Human
gcacagggcaacaggucuguua

SEQ ID NO: 993413 - RNA, 22 nt, Human
gaguguggugaacaggagcacc

SEQ ID NO: 993414 - RNA, 22 nt, Human
gcagcuguguaaugagcccaca

SEQ ID NO: 993415 - RNA, 22 nt, Human
ucuggccugaaaguccaugcuu

SEQ ID NO: 993416 - RNA, 22 nt, Human
gcuccugggcucuaccuugcua

SEQ ID NO: 993417 - RNA, 22 nt, Human
cugacucagcagcugaugaucc

SEQ ID NO: 993418 - RNA, 22 nt, Human
guggccucaugucuauaaagag

SEQ ID NO: 993419 - RNA, 22 nt, Human
caggagacuauggcccaaggcc

SEQ ID NO: 993420 - RNA, 22 nt, Human
ucccucuguguugggcaugccu

SEQ ID NO: 993421 - RNA, 19 nt, Human
ucccuuccugucgggcucc

SEQ ID NO: 993422 - RNA, 22 nt, Human
ggggggugcugaucaguggagc

SEQ ID NO: 993423 - RNA, 23 nt, Human
uaagaacagacaagcauuuacau

SEQ ID NO: 993424 - RNA, 19 nt, Human
cugucaggggcuggauguu

SEQ ID NO: 993425 - RNA, 22 nt, Human
cugggccugucagggcuuuuug

SEQ ID NO: 993426 - RNA, 22 nt, Human
caccagcuuugcccacugccca

SEQ ID NO: 993427 - RNA, 22 nt, Human
cucuugaagggcaucugaguua

SEQ ID NO: 993428 - RNA, 22 nt, Human
uagggauggcagcauguagcuu

SEQ ID NO: 993429 - RNA, 22 nt, Human
ccugaggcuuaaucugucccaa

SEQ ID NO: 993430 - RNA, 18 nt, Human
aguaguggguuuagcuuc

SEQ ID NO: 993431 - RNA, 19 nt, Human
agcaaauauaauaguguuc

SEQ ID NO: 993432 - RNA, 22 nt, Human
ucuguggccuguguccaagugc

SEQ ID NO: 993433 - RNA, 22 nt, Human
agcaaagucaguggaaccaucc

SEQ ID NO: 993434 - RNA, 22 nt, Human
gaggucaggggagaggcugaug

SEQ ID NO: 993435 - RNA, 22 nt, Human
aucucagggcuggagcccugga

SEQ ID NO: 993436 - RNA, 22 nt, Human
gucuagagugcuuccuagucau

SEQ ID NO: 993437 - RNA, 22 nt, Human
uccucaggcugccuggaagacu

SEQ ID NO: 993438 - RNA, 22 nt, Human
aagauacauaaagguagagucu

SEQ ID NO: 993439 - RNA, 19 nt, Human
agcuggggcgguguguguu

SEQ ID NO: 993440 - RNA, 21 nt, Human
aagagcugucaggaaggcugc

SEQ ID NO: 993441 - RNA, 22 nt, Human
gcuccuggagagauugagaaag

SEQ ID NO: 993442 - RNA, 22 nt, Human
agggcuggcaucucuaaugcug

SEQ ID NO: 993443 - RNA, 22 nt, Human
gugcuuccccaagccacagccu

SEQ ID NO: 993444 - RNA, 22 nt, Human
cuggcugcgucugcucugacag

SEQ ID NO: 993445 - RNA, 21 nt, Human
uccucagggccccagagcacu

SEQ ID NO: 993446 - RNA, 22 nt, Human
cucagcuggcaauucuggcucc

SEQ ID NO: 993447 - RNA, 22 nt, Human
uaacagaaguuguucauugugg

SEQ ID NO: 993448 - RNA, 22 nt, Human
cccacucuggcucccuucuagu

SEQ ID NO: 993449 - RNA, 22 nt, Human
caggggccggcuguccgugccc

SEQ ID NO: 993450 - RNA, 22 nt, Human
ucccaggacaggccacauggaa

SEQ ID NO: 993451 - RNA, 22 nt, Human
uuuaguagugacagauucuggg

SEQ ID NO: 993452 - RNA, 22 nt, Human
cagcugaguuacucugaggucu

SEQ ID NO: 993453 - RNA, 22 nt, Human
guauacauagaugaugaacaag

SEQ ID NO: 993454 - RNA, 21 nt, Human
aaaaagcuggggcaugcaugc

SEQ ID NO: 993455 - RNA, 22 nt, Human
augguuuguguggcccagauga

SEQ ID NO: 993456 - RNA, 18 nt, Human
acagaaauagcugugccu

SEQ ID NO: 993457 - RNA, 22 nt, Human
gccuggagggcucuagagaggc

SEQ ID NO: 993458 - RNA, 22 nt, Human
ccuaugccugucacucugcgcu

SEQ ID NO: 993459 - RNA, 22 nt, Human
aucagcaaggcaaucacugcag

SEQ ID NO: 993460 - RNA, 22 nt, Human
gaggggcuugaggcccugaugg

SEQ ID NO: 993461 - RNA, 22 nt, Human
ugcaauaacccaguaucuguga

SEQ ID NO: 993462 - RNA, 22 nt, Human
ccugccuggcugucagcagagc

SEQ ID NO: 993463 - RNA, 22 nt, Human
aacagaaugcaggggaugcugc

SEQ ID NO: 993464 - RNA, 22 nt, Human
ucagaaauguaagcugaugacu

SEQ ID NO: 993465 - RNA, 22 nt, Human
cagagccaggguugcaccccug

SEQ ID NO: 993466 - RNA, 22 nt, Human
uggggacacagagccaaacuau

SEQ ID NO: 993467 - RNA, 22 nt, Human
aagcccaguuucacacugagac

SEQ ID NO: 993468 - RNA, 22 nt, Human
cagagacaguuucacagggucu

SEQ ID NO: 993469 - RNA, 22 nt, Human
cacacaugagucuccccauugg

SEQ ID NO: 993470 - RNA, 22 nt, Human
aauauuucuccuucguuauagc

SEQ ID NO: 993471 - RNA, 22 nt, Human
auaauuuaaauuaguaugugau

SEQ ID NO: 993472 - RNA, 22 nt, Human
uagggcagagcuuguacacgau

SEQ ID NO: 993473 - RNA, 22 nt, Human
uucaaugagcccaagaacguga

SEQ ID NO: 993474 - RNA, 22 nt, Human
ggagaaggaagaaagcuacuau

SEQ ID NO: 993475 - RNA, 22 nt, Human
cccaggcuggagugcaauggug

SEQ ID NO: 993476 - RNA, 22 nt, Human
cacccagcagcacuuaagacua

SEQ ID NO: 993477 - RNA, 22 nt, Human
agaggaaguaaucaggaccugc

SEQ ID NO: 993478 - RNA, 22 nt, Human
gcagagccuugcgucaugugcc

SEQ ID NO: 993479 - RNA, 22 nt, Human
ucccugcucagcucaccuggca

SEQ ID NO: 993480 - RNA, 22 nt, Human
gaggccuguagucauggaugua

SEQ ID NO: 993481 - RNA, 22 nt, Human
ugacagcauaacacuggucuug

SEQ ID NO: 993482 - RNA, 22 nt, Human
ugccuggcaacuguggugggcu

SEQ ID NO: 993483 - RNA, 22 nt, Human
uagaauguaaauuccaagggca

SEQ ID NO: 993484 - RNA, 22 nt, Human
cccuguccuggaugggagcacu

SEQ ID NO: 993485 - RNA, 22 nt, Human
ccaccagcuuugccacccugcu

SEQ ID NO: 993486 - RNA, 22 nt, Human
aaugcacacauuugguacugaa

SEQ ID NO: 993487 - RNA, 23 nt, Human
ucacaggggccagcgcucugugg

SEQ ID NO: 993488 - RNA, 20 nt, Human
aggagccauugacugcagca

SEQ ID NO: 993489 - RNA, 22 nt, Human
gugugcaguagagaaagagcag

SEQ ID NO: 993490 - RNA, 22 nt, Human
ccuccuggcuuuucccauugaa

SEQ ID NO: 993491 - RNA, 22 nt, Human
aaaucuggccccuugccuauuu

SEQ ID NO: 993492 - RNA, 22 nt, Human
uguagcucuccagccagcaagg

SEQ ID NO: 993493 - RNA, 23 nt, Human
uugcauguagcccaugaguaacu

SEQ ID NO: 993494 - RNA, 22 nt, Human
caggggcaagaaugcugucagc

SEQ ID NO: 993495 - RNA, 22 nt, Human
caaggcaggaagccugucuuau

SEQ ID NO: 993496 - RNA, 21 nt, Human
aggggacagaguagcuccagg

SEQ ID NO: 993497 - RNA, 22 nt, Human
acaccuuugugaagugaugaug

SEQ ID NO: 993498 - RNA, 22 nt, Human
aaaucaguucacguucugaggu

SEQ ID NO: 993499 - RNA, 22 nt, Human
ccauuguaguaucuguuuuagu

SEQ ID NO: 993500 - RNA, 22 nt, Human
agcuggggcugcagagaacagg

SEQ ID NO: 993501 - RNA, 23 nt, Human
ggcagcucucaucugaugacuga

SEQ ID NO: 993502 - RNA, 22 nt, Human
cccucccagaugggcuugaggu

SEQ ID NO: 993503 - RNA, 22 nt, Human
guggcagcggcccaggccgucu

SEQ ID NO: 993504 - RNA, 20 nt, Human
uuccuguauacaaagaguuc

SEQ ID NO: 993505 - RNA, 22 nt, Human
aagggcagccugacucacgguc

SEQ ID NO: 993506 - RNA, 17 nt, Human
cugucugcgcaugaggu

SEQ ID NO: 993507 - RNA, 22 nt, Human
acagacauuuucuguauugccu

SEQ ID NO: 993508 - RNA, 22 nt, Human
acagggucauuuuaugaucugu

SEQ ID NO: 993509 - RNA, 22 nt, Human
ucccugggcaucacguugcuuc

SEQ ID NO: 993510 - RNA, 22 nt, Human
ucagggcaaugucccucagaag

SEQ ID NO: 993511 - RNA, 22 nt, Human
uggcagcagaacaugaaaccca

SEQ ID NO: 993512 - RNA, 21 nt, Human
gagugcagcaagguagagucu

SEQ ID NO: 993513 - RNA, 22 nt, Human
cugugcuugcggguguggagcc

SEQ ID NO: 993514 - RNA, 22 nt, Human
uccuugaagaaugauucuugga

SEQ ID NO: 993515 - RNA, 22 nt, Human
ggacacagauaaucacacagau

SEQ ID NO: 993516 - RNA, 22 nt, Human
auuacacaggauuugccuuacu

SEQ ID NO: 993517 - RNA, 18 nt, Human
ccugccagucuggagcag

SEQ ID NO: 993518 - RNA, 22 nt, Human
gacagacauuuccugauccaau

SEQ ID NO: 993519 - RNA, 22 nt, Human
ccagggugggguccaggaacca

SEQ ID NO: 993520 - RNA, 23 nt, Human
caggcaggaugaggacuacacuc

SEQ ID NO: 993521 - RNA, 22 nt, Human
cugcuggccuagcccauccucu

SEQ ID NO: 993522 - RNA, 22 nt, Human
gugcagguguuuuggcugccag

SEQ ID NO: 993523 - RNA, 22 nt, Human
aaacagucaugguugcuguuca

SEQ ID NO: 993524 - RNA, 22 nt, Human
guaaaguucuacuagaaucaac

SEQ ID NO: 993525 - RNA, 22 nt, Human
agggccuggcgcguggccgccg

SEQ ID NO: 993526 - RNA, 22 nt, Human
gggcucuggauggagccugcag

SEQ ID NO: 993527 - RNA, 22 nt, Human
gucccagggaagaaggcagcac

SEQ ID NO: 993528 - RNA, 22 nt, Human
uuucagauggagguuuaggaca

SEQ ID NO: 993529 - RNA, 22 nt, Human
cagcugaguuuccaagucugcc

SEQ ID NO: 993530 - RNA, 22 nt, Human
cuccuuccccuacucagcaucc

SEQ ID NO: 993531 - RNA, 22 nt, Human
cacagcuuguuuagugacucac

SEQ ID NO: 993532 - RNA, 22 nt, Human
uggccucugggaaagcagauuc

SEQ ID NO: 993533 - RNA, 17 nt, Human
aggaaacauuuucuuuc

SEQ ID NO: 993534 - RNA, 22 nt, Human
uggcagggccugcucaucaucc

SEQ ID NO: 993535 - RNA, 22 nt, Human
gcaggaguguggugggacaucc

SEQ ID NO: 993536 - RNA, 22 nt, Human
uuuuuuauaucaacugaagucu

SEQ ID NO: 993537 - RNA, 22 nt, Human
uuggccaagggaucgagguugg

SEQ ID NO: 993538 - RNA, 22 nt, Human
aguggcagaucucuggucugga

SEQ ID NO: 993539 - RNA, 22 nt, Human
gaggccagcgcgcagcacuuuu

SEQ ID NO: 993540 - RNA, 22 nt, Human
agcuccugaaaagcgcuugcuu

SEQ ID NO: 993541 - RNA, 22 nt, Human
agccugagccccauccagcuga

SEQ ID NO: 993542 - RNA, 22 nt, Human
uuggccaaagcucaccagugcu

SEQ ID NO: 993543 - RNA, 22 nt, Human
agggaaaggcugaugcuguggg

SEQ ID NO: 993544 - RNA, 22 nt, Human
aacaaauguaaaaugcagaugc

SEQ ID NO: 993545 - RNA, 22 nt, Human
uuugcauuuccagaguagcaga

SEQ ID NO: 993546 - RNA, 22 nt, Human
ugggaggagcccucugggaagg

SEQ ID NO: 993547 - RNA, 22 nt, Human
gcugaaauucagauuccuaggc

SEQ ID NO: 993548 - RNA, 22 nt, Human
ccagcuucucucugaugcagcu

SEQ ID NO: 993549 - RNA, 22 nt, Human
aggcaaaauuacaaaguuauua

SEQ ID NO: 993550 - RNA, 21 nt, Human
agugaaaugaaguguaugcuc

SEQ ID NO: 993551 - RNA, 22 nt, Human
ccacagggauaggaauggggcu

SEQ ID NO: 993552 - RNA, 22 nt, Human
cacacuuuuggcauguuugguu

SEQ ID NO: 993553 - RNA, 22 nt, Human
agaggccacuuugccugugaug

SEQ ID NO: 993554 - RNA, 22 nt, Human
ccugagagcauuccacacugaa

SEQ ID NO: 993555 - RNA, 23 nt, Human
ggagugcaauggcgccaucucgg

SEQ ID NO: 993556 - RNA, 22 nt, Human
uggggacacagagguucguugg

SEQ ID NO: 993557 - RNA, 22 nt, Human
ucccuggacaacagacuucacu

SEQ ID NO: 993558 - RNA, 22 nt, Human
uggcagaguggaccauacucaa

SEQ ID NO: 993559 - RNA, 23 nt, Human
ccaggcaguagcuauugaaguga

SEQ ID NO: 993560 - RNA, 22 nt, Human
aggcuggcccuacuggcugccu

SEQ ID NO: 993561 - RNA, 22 nt, Human
cugggcugucaauggcccucug

SEQ ID NO: 993562 - RNA, 22 nt, Human
acauuucuugaugccucuguga

SEQ ID NO: 993563 - RNA, 22 nt, Human
cuccuggacauggagcggagga

SEQ ID NO: 993564 - RNA, 22 nt, Human
gggcauggugaugugcaccugu

SEQ ID NO: 993565 - RNA, 22 nt, Human
uguauuuuuaggaaugcgcuau

SEQ ID NO: 993566 - RNA, 22 nt, Human
aggcuggcuuggcucuccugug

SEQ ID NO: 993567 - RNA, 22 nt, Human
acugucuccucaucaugccugg

SEQ ID NO: 993568 - RNA, 22 nt, Human
ccucugagaccagcucugcacc

SEQ ID NO: 993569 - RNA, 22 nt, Human
ucaaaagucugcauucuucaca

SEQ ID NO: 993570 - RNA, 22 nt, Human
ggccuugggauguggcugcagc

SEQ ID NO: 993571 - RNA, 19 nt, Human
uagucuuuauucuuaauuu

SEQ ID NO: 993572 - RNA, 22 nt, Human
agccucugauggcucccaagga

SEQ ID NO: 993573 - RNA, 22 nt, Human
aaaugugugcacaaagacagcu

SEQ ID NO: 993574 - RNA, 22 nt, Human
cccagacuccucuggcuggugg

SEQ ID NO: 993575 - RNA, 22 nt, Human
cugggccucauccucagaguuu

SEQ ID NO: 993576 - RNA, 22 nt, Human
ugcacacacgcggcacaucugu

SEQ ID NO: 993577 - RNA, 22 nt, Human
cugccucuauaggaguccacca

SEQ ID NO: 993578 - RNA, 22 nt, Human
ccagggccaguaagauuggcau

SEQ ID NO: 993579 - RNA, 21 nt, Human
aaauguguuccauaaugcuuu

SEQ ID NO: 993580 - RNA, 23 nt, Human
gugugccaagcacugugccagga

SEQ ID NO: 993581 - RNA, 22 nt, Human
cagcaucaccgccauuucugau

SEQ ID NO: 993582 - RNA, 19 nt, Human
cugggagguguucagagaa

SEQ ID NO: 993583 - RNA, 22 nt, Human
augggaugcauggcuguggcca

SEQ ID NO: 993584 - RNA, 22 nt, Human
gugucccacucuggaggugaag

SEQ ID NO: 993585 - RNA, 22 nt, Human
gcagcugguuaaugggagaauu

SEQ ID NO: 993586 - RNA, 22 nt, Human
gaggaguggaguugcuggguug

SEQ ID NO: 993587 - RNA, 22 nt, Human
ugagccugggagauggaggcug

SEQ ID NO: 993588 - RNA, 17 nt, Human
uccuggcucugccacug

SEQ ID NO: 993589 - RNA, 22 nt, Human
cugggcacaggggagcagaguc

SEQ ID NO: 993590 - RNA, 22 nt, Human
aguggcagagcugugucuugaa

SEQ ID NO: 993591 - RNA, 22 nt, Human
uccaggacuagcauuucugaua

SEQ ID NO: 993592 - RNA, 22 nt, Human
uauuucugaauccaaaagguca

SEQ ID NO: 993593 - RNA, 22 nt, Human
agccaggacguugcucagcucc

SEQ ID NO: 993594 - RNA, 22 nt, Human
ucuuguuaaagugaagauacug

SEQ ID NO: 993595 - RNA, 22 nt, Human
gcugccucugcgacucugggcg

SEQ ID NO: 993596 - RNA, 22 nt, Human
ucucagaguuugaaucuggagu

SEQ ID NO: 993597 - RNA, 22 nt, Human
ucacuaagugccgaguuuaguu

SEQ ID NO: 993598 - RNA, 22 nt, Human
cuuccucccccacacacucacu

SEQ ID NO: 993599 - RNA, 19 nt, Human
ucaaggcucccugagggau

SEQ ID NO: 993600 - RNA, 22 nt, Human
gacagccaugcacuucugcugu

SEQ ID NO: 993601 - RNA, 22 nt, Human
ugggcagcagcaaagccagacu

SEQ ID NO: 993602 - RNA, 21 nt, Human
aaggcagaagcauggaaugag

SEQ ID NO: 993603 - RNA, 22 nt, Human
cccagggcccuggacagcuaca

SEQ ID NO: 993604 - RNA, 22 nt, Human
cauacauaugcauguguguaua

SEQ ID NO: 993605 - RNA, 22 nt, Human
gggcauggaggucugucugcag

SEQ ID NO: 993606 - RNA, 22 nt, Human
gcagcugauggaaguccuauug

SEQ ID NO: 993607 - RNA, 18 nt, Human
gagaggcccggcugugcc

SEQ ID NO: 993608 - RNA, 22 nt, Human
gaguuuaacacuuggagaaaag

SEQ ID NO: 993609 - RNA, 22 nt, Human
ugcuucucccaaccagggccug

SEQ ID NO: 993610 - RNA, 22 nt, Human
cccuggugguacggcacuggca

SEQ ID NO: 993611 - RNA, 20 nt, Human
accuugaacccgccagccau

SEQ ID NO: 993612 - RNA, 19 nt, Human
uggaggagaggaaaaguca

SEQ ID NO: 993613 - RNA, 22 nt, Human
ugccucugaggaagauuguguu

SEQ ID NO: 993614 - RNA, 22 nt, Human
cagcagggggcagcgcagauca

SEQ ID NO: 993615 - RNA, 22 nt, Human
gcaagcugcuuaagcucauugu

SEQ ID NO: 993616 - RNA, 22 nt, Human
cccacaggcuagggguagggca

SEQ ID NO: 993617 - RNA, 22 nt, Human
ccauggccgccgcugcucagga

SEQ ID NO: 993618 - RNA, 22 nt, Human
aggcccaguagugcugccuuua

SEQ ID NO: 993619 - RNA, 22 nt, Human
agggccugcaucaggagcuugg

SEQ ID NO: 993620 - RNA, 22 nt, Human
ugcacuggggucccagcgcacg

SEQ ID NO: 993621 - RNA, 22 nt, Human
gcacugaaugcuuuuacuguaa

SEQ ID NO: 993622 - RNA, 22 nt, Human
cuagucacucagcacugacaaa

SEQ ID NO: 993623 - RNA, 22 nt, Human
ucaacacuauccaggcaaucuu

SEQ ID NO: 993624 - RNA, 22 nt, Human
cagagagcuuagugugcugcau

SEQ ID NO: 993625 - RNA, 22 nt, Human
ccuccuggaggcucuagggaaa

SEQ ID NO: 993626 - RNA, 22 nt, Human
gagcugccugugugccaugaug

SEQ ID NO: 993627 - RNA, 22 nt, Human
cccagggacagcuagguggggc

SEQ ID NO: 993628 - RNA, 22 nt, Human
ucuuguuacaguuuauuacaug

SEQ ID NO: 993629 - RNA, 23 nt, Human
agcuggguggccugcgugaagcu

SEQ ID NO: 993630 - RNA, 22 nt, Human
aggaaaaagaguugcugccuuc

SEQ ID NO: 993631 - RNA, 22 nt, Human
ugauuuccaguugcugggugcu

SEQ ID NO: 993632 - RNA, 21 nt, Human
gacucugcaccaaauuaagcc

SEQ ID NO: 993633 - RNA, 22 nt, Human
acauaaaguacugagagacucu

SEQ ID NO: 993634 - RNA, 22 nt, Human
agcaggugacagggcuguggug

SEQ ID NO: 993635 - RNA, 22 nt, Human
ugucuuuucuacuguaagcaua

SEQ ID NO: 993636 - RNA, 22 nt, Human
ucuggcucucucaucacccaau

SEQ ID NO: 993637 - RNA, 22 nt, Human
gcagagcaguacucucuugacu

SEQ ID NO: 993638 - RNA, 22 nt, Human
cugccuuugcccuugacacugu

SEQ ID NO: 993639 - RNA, 22 nt, Human
cugugucccuugucccagagcc

SEQ ID NO: 993640 - RNA, 22 nt, Human
uucacauuagugguucuauaua

SEQ ID NO: 993641 - RNA, 22 nt, Human
agcuuccuacaaccaucucaga

SEQ ID NO: 993642 - RNA, 22 nt, Human
aauuucaagucuugaagaagua

SEQ ID NO: 993643 - RNA, 22 nt, Human
ccugucucccuggcauggcuca

SEQ ID NO: 993644 - RNA, 22 nt, Human
acauuccugaggaaauacauuc

SEQ ID NO: 993645 - RNA, 22 nt, Human
cucugaagggagggccaagccc

SEQ ID NO: 993646 - RNA, 22 nt, Human
cuggccuggcaggggaccucua

SEQ ID NO: 993647 - RNA, 22 nt, Human
aggagaaggaagugcaucacua

SEQ ID NO: 993648 - RNA, 22 nt, Human
ccagagucuaugaguccucauu

SEQ ID NO: 993649 - RNA, 22 nt, Human
aggccagguggucaugcuugcu

SEQ ID NO: 993650 - RNA, 22 nt, Human
uaacagaaauaguaggugaggg

SEQ ID NO: 993651 - RNA, 22 nt, Human
auguaucagaaauagcauuggc

SEQ ID NO: 993652 - RNA, 22 nt, Human
uccucugcucagcauuccucac

SEQ ID NO: 993653 - RNA, 22 nt, Human
gguggguauugaauacaggugu

SEQ ID NO: 993654 - RNA, 22 nt, Human
auguguauacuugugcuuacuc

SEQ ID NO: 993655 - RNA, 22 nt, Human
uaggccagaggagcagcuuugg

SEQ ID NO: 993656 - RNA, 22 nt, Human
ccaggcugcuguugguguccgc

SEQ ID NO: 993657 - RNA, 20 nt, Human
gacaggagaguuagguaggu

SEQ ID NO: 993658 - RNA, 22 nt, Human
uuugggaaacuuaggggucaga

SEQ ID NO: 993659 - RNA, 22 nt, Human
caguccaggccuggaggagcca

SEQ ID NO: 993660 - RNA, 19 nt, Human
uuuaggauaaagucuggac

SEQ ID NO: 993661 - RNA, 22 nt, Human
gcagagcucaagguguucagcu

SEQ ID NO: 993662 - RNA, 22 nt, Human
ugucucagauacgccaucaagg

SEQ ID NO: 993663 - RNA, 22 nt, Human
ugcagaagugagucaugaggaa

SEQ ID NO: 993664 - RNA, 22 nt, Human
guuuccauggcucuguuaaugg

SEQ ID NO: 993665 - RNA, 22 nt, Human
aaaugcuguaacugauauucug

SEQ ID NO: 993666 - RNA, 22 nt, Human
accagagcuggcucugagcacc

SEQ ID NO: 993667 - RNA, 22 nt, Human
cccccaggcucugacacaggag

SEQ ID NO: 993668 - RNA, 22 nt, Human
ccuccugggacaggcuggcaca

SEQ ID NO: 993669 - RNA, 22 nt, Human
cagcucaaguuucccaggucag

SEQ ID NO: 993670 - RNA, 22 nt, Human
ugggauggagccugaguauagu

SEQ ID NO: 993671 - RNA, 22 nt, Human
uuguaacagcugcuuaauagag

SEQ ID NO: 993672 - RNA, 22 nt, Human
acauuucucccugcaugccugc

SEQ ID NO: 993673 - RNA, 22 nt, Human
cccagggauuauaaaggugaaa

SEQ ID NO: 993674 - RNA, 22 nt, Human
ccacccuggacaggccucugag

SEQ ID NO: 993675 - RNA, 22 nt, Human
ugcagcugguuuagaacuagau

SEQ ID NO: 993676 - RNA, 22 nt, Human
uggcagaggagaauuaagauua

SEQ ID NO: 993677 - RNA, 22 nt, Human
auaaguucagguaaagaaauca

SEQ ID NO: 993678 - RNA, 22 nt, Human
ucucagagugguggucccucug

SEQ ID NO: 993679 - RNA, 22 nt, Human
ucuccuuugaaaguuaggacug

SEQ ID NO: 993680 - RNA, 22 nt, Human
uccugggcgguuaugugaucug

SEQ ID NO: 993681 - RNA, 22 nt, Human
cauguguagugaaauaagcagu

SEQ ID NO: 993682 - RNA, 22 nt, Human
agaaauguauucuguauguuuu

SEQ ID NO: 993683 - RNA, 22 nt, Human
ugcaggcuuuagccccauggcu

SEQ ID NO: 993684 - RNA, 20 nt, Human
caaugcacacagcugcuucu

SEQ ID NO: 993685 - RNA, 22 nt, Human
aguauacauauauuagccuucg

SEQ ID NO: 993686 - RNA, 22 nt, Human
caguuucuuaucuucaaaauug

SEQ ID NO: 993687 - RNA, 22 nt, Human
agcuccugcucuuugucccuaa

SEQ ID NO: 993688 - RNA, 22 nt, Human
uaaggcaccuguccaggcuggg

SEQ ID NO: 993689 - RNA, 22 nt, Human
uucaggauggcggauguugggg

SEQ ID NO: 993690 - RNA, 22 nt, Human
aagaggaacugggggcugaguc

SEQ ID NO: 993691 - RNA, 23 nt, Human
ugucccagagggagggauaggcu

SEQ ID NO: 993692 - RNA, 22 nt, Human
guuuuuaucuaauagcaguuau

SEQ ID NO: 993693 - RNA, 22 nt, Human
ugcagccauuuucugccaaugc

SEQ ID NO: 993694 - RNA, 22 nt, Human
ugggcuacucugggagccuaac

SEQ ID NO: 993695 - RNA, 22 nt, Human
auccuugagaaaauaaaugacc

SEQ ID NO: 993696 - RNA, 22 nt, Human
cugccucuauucacugaggcag

SEQ ID NO: 993697 - RNA, 22 nt, Human
ucugccugcggcugcagguggc

SEQ ID NO: 993698 - RNA, 22 nt, Human
guggcugcucgggcuccggccc

SEQ ID NO: 993699 - RNA, 22 nt, Human
uauucacauguacauaugcuca

SEQ ID NO: 993700 - RNA, 22 nt, Human
cagugucuuauuuguagcucag

SEQ ID NO: 993701 - RNA, 22 nt, Human
agaaauguauagugaauuuuuc

SEQ ID NO: 993702 - RNA, 22 nt, Human
gaguuauuuugagcagaugguu

SEQ ID NO: 993703 - RNA, 22 nt, Human
uuccucaugggguuccuucaga

SEQ ID NO: 993704 - RNA, 22 nt, Human
ugcuugaggggaauaaaaagaa

SEQ ID NO: 993705 - RNA, 20 nt, Human
aaaaacaguaaugcugaaga

SEQ ID NO: 993706 - RNA, 22 nt, Human
uaaggcacccuucugaguagag

SEQ ID NO: 993707 - RNA, 22 nt, Human
acaguuauucuuuaugcaacca

SEQ ID NO: 993708 - RNA, 22 nt, Human
uuagaaaggaaucuucauuuca

SEQ ID NO: 993709 - RNA, 22 nt, Human
cugggcugugguguggcccaaa

SEQ ID NO: 993710 - RNA, 22 nt, Human
ugagcuuacuucuguacacaga

SEQ ID NO: 993711 - RNA, 22 nt, Human
ugauuucaaguagugacaugcu

SEQ ID NO: 993712 - RNA, 22 nt, Human
cauagcaacagcaucaagucaa

SEQ ID NO: 993713 - RNA, 22 nt, Human
agcugccaucagccuuuggaug

SEQ ID NO: 993714 - RNA, 22 nt, Human
uugauacauagcacaguuuagg

SEQ ID NO: 993715 - RNA, 22 nt, Human
gagagcugggggacuguggaug

SEQ ID NO: 993716 - RNA, 22 nt, Human
gcacccaggcuugggcagcaac

SEQ ID NO: 993717 - RNA, 20 nt, Human
ggcagcucacuacuuucugu

SEQ ID NO: 993718 - RNA, 22 nt, Human
gcagggucugaggccacagagg

SEQ ID NO: 993719 - RNA, 22 nt, Human
ucuggccacccgaggccccugc

SEQ ID NO: 993720 - RNA, 22 nt, Human
cuccagggcagcauggcagugg

SEQ ID NO: 993721 - RNA, 22 nt, Human
cccugcagaccaaugccauaga

SEQ ID NO: 993722 - RNA, 22 nt, Human
ugggcacuggaagccugcugug

SEQ ID NO: 993723 - RNA, 22 nt, Human
uuauuaggaacucaggauuuuu

SEQ ID NO: 993724 - RNA, 19 nt, Human
cccagcuugaccaccugcu

SEQ ID NO: 993725 - RNA, 22 nt, Human
cuccuggcucugccacuuacua

SEQ ID NO: 993726 - RNA, 22 nt, Human
gaugcacugcaguauauacugu

SEQ ID NO: 993727 - RNA, 22 nt, Human
gcuccuggcauccugcuuuuaa

SEQ ID NO: 993728 - RNA, 22 nt, Human
acaguguccuuguggucccugu

SEQ ID NO: 993729 - RNA, 22 nt, Human
cagagccccucagcucucuccc

SEQ ID NO: 993730 - RNA, 22 nt, Human
gcaggggcugagcaccagcggg

SEQ ID NO: 993731 - RNA, 22 nt, Human
caauaagugcuuuuguuuagca

SEQ ID NO: 993732 - RNA, 22 nt, Human
aaggaagacacagaugaaguga

SEQ ID NO: 993733 - RNA, 22 nt, Human
cagcaggcugcgauugcucauu

SEQ ID NO: 993734 - RNA, 22 nt, Human
gcucaggaaacagcagggcuug

SEQ ID NO: 993735 - RNA, 22 nt, Human
aauucacaugcaugucugugca

SEQ ID NO: 993736 - RNA, 22 nt, Human
cuggugcuggagccuagucccu

SEQ ID NO: 993737 - RNA, 18 nt, Human
auggucucauacugggag

SEQ ID NO: 993738 - RNA, 22 nt, Human
gccuggccugaacuaggaggug

SEQ ID NO: 993739 - RNA, 22 nt, Human
auaugaagaauuccaauuugga

SEQ ID NO: 993740 - RNA, 19 nt, Human
agcagagcccugaagaucc

SEQ ID NO: 993741 - RNA, 22 nt, Human
gggacuggaacuacuggugcag

SEQ ID NO: 993742 - RNA, 22 nt, Human
gcaggcagaucaccugucagga

SEQ ID NO: 993743 - RNA, 22 nt, Human
gcccauggacacccaagugcca

SEQ ID NO: 993744 - RNA, 22 nt, Human
agcagcuguggaaaaguaacua

SEQ ID NO: 993745 - RNA, 22 nt, Human
ccaggagcagauauggacauaa

SEQ ID NO: 993746 - RNA, 22 nt, Human
ggcucaggaugagccuucucau

SEQ ID NO: 993747 - RNA, 22 nt, Human
uguaucaaggguuuauguaagc

SEQ ID NO: 993748 - RNA, 19 nt, Human
ccaggccaucccaguuccc

SEQ ID NO: 993749 - RNA, 22 nt, Human
aagauuuaccacuuuauucaag

SEQ ID NO: 993750 - RNA, 22 nt, Human
cagcuccugccugggcagcugu

SEQ ID NO: 993751 - RNA, 22 nt, Human
ugugggcaggcccgggucugag

SEQ ID NO: 993752 - RNA, 22 nt, Human
ucccuguccugggcaaucccag

SEQ ID NO: 993753 - RNA, 22 nt, Human
cuccuuccugguuagcaccuua

SEQ ID NO: 993754 - RNA, 23 nt, Human
gggagaauaugaggaugauggug

SEQ ID NO: 993755 - RNA, 22 nt, Human
ucccuggcugggggcugccuug

SEQ ID NO: 993756 - RNA, 16 nt, Human
ccaccugcagcucuca

SEQ ID NO: 993757 - RNA, 22 nt, Human
agaggcccucucucuccugaug

SEQ ID NO: 993758 - RNA, 22 nt, Human
cugggaggcacuauucaggagg

SEQ ID NO: 993759 - RNA, 22 nt, Human
cagcagagacgguaagcagaac

SEQ ID NO: 993760 - RNA, 22 nt, Human
gcugcucugugacagccuccgg

SEQ ID NO: 993761 - RNA, 22 nt, Human
caggaaccuaaagagacauuac

SEQ ID NO: 993762 - RNA, 22 nt, Human
uguagcauguaaauugguuauu

SEQ ID NO: 993763 - RNA, 22 nt, Human
aacagcaugcuggguaacauug

SEQ ID NO: 993764 - RNA, 22 nt, Human
acgcuuuuacuauuuugagcuc

SEQ ID NO: 993765 - RNA, 22 nt, Human
aaggcucuuggagugaaugcag

SEQ ID NO: 993766 - RNA, 22 nt, Human
uccugucugcucacagagcugg

SEQ ID NO: 993767 - RNA, 22 nt, Human
uauacagaaccgccugaagucu

SEQ ID NO: 993768 - RNA, 22 nt, Human
uccuuggcagcagggagcauga

SEQ ID NO: 993769 - RNA, 22 nt, Human
gagaaccucuccacaagucugg

SEQ ID NO: 993770 - RNA, 22 nt, Human
ugcaauaaagugcuauaaaucc

SEQ ID NO: 993771 - RNA, 22 nt, Human
ucugccugcuaacuccugcacc

SEQ ID NO: 993772 - RNA, 22 nt, Human
ccaggcauccauugcuuccucu

SEQ ID NO: 993773 - RNA, 22 nt, Human
acuccaggcaucugcuucugcu

SEQ ID NO: 993774 - RNA, 22 nt, Human
uguccucuuccagugcuccuuc

SEQ ID NO: 993775 - RNA, 22 nt, Human
uaaugcacaugacugaacuauu

SEQ ID NO: 993776 - RNA, 22 nt, Human
ugcucuggagggugaagcuuuu

SEQ ID NO: 993777 - RNA, 22 nt, Human
aucuggguucaccaugcuccug

SEQ ID NO: 993778 - RNA, 22 nt, Human
uuguuacacauaauaacauuuu

SEQ ID NO: 993779 - RNA, 19 nt, Human
caugagcugcucacuuccc

SEQ ID NO: 993780 - RNA, 22 nt, Human
caggguggggcuggcuaucaaa

SEQ ID NO: 993781 - RNA, 22 nt, Human
cugucugcuagaacaucuauac

SEQ ID NO: 993782 - RNA, 22 nt, Human
ccucacuggccagccaggggug

SEQ ID NO: 993783 - RNA, 22 nt, Human
gcucaggaaaacagucuaguaa

SEQ ID NO: 993784 - RNA, 22 nt, Human
auucuagaugcuguaaguagca

SEQ ID NO: 993785 - RNA, 22 nt, Human
ggcugcucugccuuccagcugg

SEQ ID NO: 993786 - RNA, 22 nt, Human
guggagcccugguagggacccc

SEQ ID NO: 993787 - RNA, 21 nt, Human
ucccagggccaggugccauca

SEQ ID NO: 993788 - RNA, 21 nt, Human
cugaggcagcacagcuaguca

SEQ ID NO: 993789 - RNA, 16 nt, Human
auucacaaggcaucgg

SEQ ID NO: 993790 - RNA, 22 nt, Human
cugaaugucgaucagcuugggu

SEQ ID NO: 993791 - RNA, 22 nt, Human
gacauacagcauggucuaugaa

SEQ ID NO: 993792 - RNA, 22 nt, Human
cuggcuccauccuugagcucug

SEQ ID NO: 993793 - RNA, 22 nt, Human
cagcugcccaagccccagaugu

SEQ ID NO: 993794 - RNA, 22 nt, Human
ggcucagaaacuaaaggcgcug

SEQ ID NO: 993795 - RNA, 22 nt, Human
ugugaaauucuugaaaugcaca

SEQ ID NO: 993796 - RNA, 22 nt, Human
ggaugcacgaaggcgccucgga

SEQ ID NO: 993797 - RNA, 20 nt, Human
uccuggccuucucgggcagu

SEQ ID NO: 993798 - RNA, 22 nt, Human
gcaugguggccuuaggguagcc

SEQ ID NO: 993799 - RNA, 22 nt, Human
aggugaaguugaggaggcagaa

SEQ ID NO: 993800 - RNA, 22 nt, Human
aucagcugaaaaacaggcagca

SEQ ID NO: 993801 - RNA, 21 nt, Human
ccuggcuucagggugcacugg

SEQ ID NO: 993802 - RNA, 22 nt, Human
uggccucugcaauggauucacc

SEQ ID NO: 993803 - RNA, 22 nt, Human
ggagccugugggaugagaugug

SEQ ID NO: 993804 - RNA, 17 nt, Human
cccagcuggcagugccg

SEQ ID NO: 993805 - RNA, 22 nt, Human
uggcugcuuguuuuagugaggc

SEQ ID NO: 993806 - RNA, 22 nt, Human
cgccaggcuugguagcucaugc

SEQ ID NO: 993807 - RNA, 22 nt, Human
gaacagaagaggcuggugccac

SEQ ID NO: 993808 - RNA, 22 nt, Human
cagggccugcuuccuucuuguu

SEQ ID NO: 993809 - RNA, 17 nt, Human
gcucccugaggacagcu

SEQ ID NO: 993810 - RNA, 22 nt, Human
ucuccugggcuugguugaaguu

SEQ ID NO: 993811 - RNA, 22 nt, Human
aagggcugagcacagugagcca

SEQ ID NO: 993812 - RNA, 22 nt, Human
ugaaagaacuagcaucuucaag

SEQ ID NO: 993813 - RNA, 22 nt, Human
ccaggccucccuuuuccagcca

SEQ ID NO: 993814 - RNA, 22 nt, Human
aguuuuuccugauuuuacagaa

SEQ ID NO: 993815 - RNA, 22 nt, Human
agauguaguagugggucuuuua

SEQ ID NO: 993816 - RNA, 22 nt, Human
cacaggggcaaacuguagggga

SEQ ID NO: 993817 - RNA, 22 nt, Human
uugaagcagagaaauacuugaa

SEQ ID NO: 993818 - RNA, 22 nt, Human
uguauacauuuaacuagauaga

SEQ ID NO: 993819 - RNA, 22 nt, Human
auuguacuuuuauuacauguag

SEQ ID NO: 993820 - RNA, 22 nt, Human
gcagugcuuuagucuguccuuu

SEQ ID NO: 993821 - RNA, 22 nt, Human
cagaggccauauuucuucacuc

SEQ ID NO: 993822 - RNA, 22 nt, Human
ucucuggaauuggcugaggcaa

SEQ ID NO: 993823 - RNA, 22 nt, Human
gagagggccgggggccagcucc

SEQ ID NO: 993824 - RNA, 22 nt, Human
gaguccaguuguucacagaggc

SEQ ID NO: 993825 - RNA, 22 nt, Human
cccacagguccccaugaacucg

SEQ ID NO: 993826 - RNA, 22 nt, Human
ugcuggaggaguuuacuguggc

SEQ ID NO: 993827 - RNA, 22 nt, Human
uccuggagggaggcggugcuac

SEQ ID NO: 993828 - RNA, 22 nt, Human
gacagcagacagaacuaccugc

SEQ ID NO: 993829 - RNA, 22 nt, Human
ccaggcagcucugauuuauguc

SEQ ID NO: 993830 - RNA, 22 nt, Human
cucuguccuaugcuugauagaa

SEQ ID NO: 993831 - RNA, 22 nt, Human
ucaaaugcuucuacuccuaaga

SEQ ID NO: 993832 - RNA, 22 nt, Human
ucacucuguuuuacucacuguu

SEQ ID NO: 993833 - RNA, 22 nt, Human
uggcuucagacuucugcuacgu

SEQ ID NO: 993834 - RNA, 22 nt, Human
cagcuggcaaguggagcagggu

SEQ ID NO: 993835 - RNA, 22 nt, Human
ggcucuggguucugcaaugcgu

SEQ ID NO: 993836 - RNA, 23 nt, Human
gucagggcuggggucagagugac

SEQ ID NO: 993837 - RNA, 22 nt, Human
uagcagcucugauucugggccc

SEQ ID NO: 993838 - RNA, 20 nt, Human
augccucuaauuuugcaaac

SEQ ID NO: 993839 - RNA, 22 nt, Human
ggcagccagagggcagcuggau

SEQ ID NO: 993840 - RNA, 22 nt, Human
agacaaagaaaccguagaagca

SEQ ID NO: 993841 - RNA, 22 nt, Human
gcccucagcuccuggacacaug

SEQ ID NO: 993842 - RNA, 18 nt, Human
uccuccuuuggccuuuuc

SEQ ID NO: 993843 - RNA, 22 nt, Human
gauuucaccugaucuugucauc

SEQ ID NO: 993844 - RNA, 22 nt, Human
uggccuuccuggugacucauga

SEQ ID NO: 993845 - RNA, 22 nt, Human
augugaaacugaagcauccaua

SEQ ID NO: 993846 - RNA, 22 nt, Human
gaggccacagcuaucagggaca

SEQ ID NO: 993847 - RNA, 22 nt, Human
uuuuuccuuagggguuacucac

SEQ ID NO: 993848 - RNA, 22 nt, Human
ugagccuggccugcagagacca

SEQ ID NO: 993849 - RNA, 22 nt, Human
gggcugucaugugucagugacc

SEQ ID NO: 993850 - RNA, 23 nt, Human
aggagccaggaaccagcuucccc

SEQ ID NO: 993851 - RNA, 22 nt, Human
aauaagaauuuacuugucaaga

SEQ ID NO: 993852 - RNA, 22 nt, Human
uccugggcuguggccccgggca

SEQ ID NO: 993853 - RNA, 22 nt, Human
ccuggagccccucuggccagcc

SEQ ID NO: 993854 - RNA, 22 nt, Human
ugcugccauggucgcugguguc

SEQ ID NO: 993855 - RNA, 22 nt, Human
gcuugcuggugccugcaggcuc

SEQ ID NO: 993856 - RNA, 22 nt, Human
agucccagcccaguccuguaag

SEQ ID NO: 993857 - RNA, 22 nt, Human
ucucccacagucucccauggcu

SEQ ID NO: 993858 - RNA, 22 nt, Human
agaugcugucacacacacuguu

SEQ ID NO: 993859 - RNA, 22 nt, Human
uacuuugucauucuaaccuucc

SEQ ID NO: 993860 - RNA, 22 nt, Human
gccuggagaaaggaagguggga

SEQ ID NO: 993861 - RNA, 19 nt, Human
auuccucaaggacagaaau

SEQ ID NO: 993862 - RNA, 22 nt, Human
gucuggggaagucagggcauca

SEQ ID NO: 993863 - RNA, 22 nt, Human
ucugaggcuucagacuguacug

SEQ ID NO: 993864 - RNA, 22 nt, Human
uccuucagcucucuauuuagau

SEQ ID NO: 993865 - RNA, 18 nt, Human
gugacagcugcuagcuca

SEQ ID NO: 993866 - RNA, 22 nt, Human
ugugggcucccccucacucugu

SEQ ID NO: 993867 - RNA, 22 nt, Human
ugaagccuuguguggccucucu

SEQ ID NO: 993868 - RNA, 22 nt, Human
ucagaggacgcacuaggguugu

SEQ ID NO: 993869 - RNA, 22 nt, Human
ucugggagauccaagcagaacu

SEQ ID NO: 993870 - RNA, 20 nt, Human
ugaugguucuuuccggguug

SEQ ID NO: 993871 - RNA, 21 nt, Human
ccagaggccucucuuggccac

SEQ ID NO: 993872 - RNA, 21 nt, Human
uucagcaguccucuagagaua

SEQ ID NO: 993873 - RNA, 22 nt, Human
agugucauuccagggacccucg

SEQ ID NO: 993874 - RNA, 22 nt, Human
uaucuguuccaggcacucagcu

SEQ ID NO: 993875 - RNA, 22 nt, Human
gggagggaaggaccuuaugaau

SEQ ID NO: 993876 - RNA, 22 nt, Human
gggaggagggugcuggcuaaac

SEQ ID NO: 993877 - RNA, 22 nt, Human
cuucuugcugggggccucagug

SEQ ID NO: 993878 - RNA, 22 nt, Human
cucaggaugcaauuccaucaag

SEQ ID NO: 993879 - RNA, 22 nt, Human
auuagguugugcuuuguggaca

SEQ ID NO: 993880 - RNA, 20 nt, Human
cagaccugcacccacuucga

SEQ ID NO: 993881 - RNA, 22 nt, Human
uggcuucuuagaccaguggccu

SEQ ID NO: 993882 - RNA, 22 nt, Human
aacuagaacgucuaguugcugg

SEQ ID NO: 993883 - RNA, 23 nt, Human
cagggcugguagggaagagcgug

SEQ ID NO: 993884 - RNA, 22 nt, Human
uguuuauuuucaggauggauug

SEQ ID NO: 993885 - RNA, 22 nt, Human
caaugauggcuaggcagcugcu

SEQ ID NO: 993886 - RNA, 22 nt, Human
ccugggcucaagugauccuccu

SEQ ID NO: 993887 - RNA, 22 nt, Human
ugcaggugugguuccucagcca

SEQ ID NO: 993888 - RNA, 22 nt, Human
cagggcugagaauuuagagaca

SEQ ID NO: 993889 - RNA, 22 nt, Human
aaaaguaauugcaauuuuguag

SEQ ID NO: 993890 - RNA, 22 nt, Human
caaagccucugauuucacuugu

SEQ ID NO: 993891 - RNA, 17 nt, Human
uuagcaaaauagcacuu

SEQ ID NO: 993892 - RNA, 22 nt, Human
auugcagcuggucaggguaauu

SEQ ID NO: 993893 - RNA, 22 nt, Human
cagccuucugaaugaacguacu

SEQ ID NO: 993894 - RNA, 22 nt, Human
ccagggugcucuguggcgucgc

SEQ ID NO: 993895 - RNA, 22 nt, Human
uuauuaggaaaaggucagaugu

SEQ ID NO: 993896 - RNA, 22 nt, Human
ugacagggugauuaugagagcu

SEQ ID NO: 993897 - RNA, 22 nt, Human
ggcuccugaaagacuaugggaa

SEQ ID NO: 993898 - RNA, 18 nt, Human
aggcccuggccucgaaca

SEQ ID NO: 993899 - RNA, 20 nt, Human
gaggaaaagcugccaggccu

SEQ ID NO: 993900 - RNA, 22 nt, Human
ggcaggugugagaucgaggcca

SEQ ID NO: 993901 - RNA, 22 nt, Human
ucuccuggucaccucagaaguc

SEQ ID NO: 993902 - RNA, 22 nt, Human
agcauggggcuccgcaaugaac

SEQ ID NO: 993903 - RNA, 22 nt, Human
agcaauauuuaaagguuugcaa

SEQ ID NO: 993904 - RNA, 23 nt, Human
ggcagagagcauggcuggggccc

SEQ ID NO: 993905 - RNA, 23 nt, Human
ugauuuccagugagucaguggga

SEQ ID NO: 993906 - RNA, 23 nt, Human
ucucaggacacacaugucuauca

SEQ ID NO: 993907 - RNA, 22 nt, Human
gcugugcacuaccuauacaucc

SEQ ID NO: 993908 - RNA, 22 nt, Human
cagggcccaggccacuggguug

SEQ ID NO: 993909 - RNA, 22 nt, Human
cauugcacucuggcuggaacgg

SEQ ID NO: 993910 - RNA, 22 nt, Human
gcagaacauuucacaguaucuu

SEQ ID NO: 993911 - RNA, 19 nt, Human
ucaaagucugagucacuuu

SEQ ID NO: 993912 - RNA, 22 nt, Human
aggcacuguggaagacaugguu

SEQ ID NO: 993913 - RNA, 22 nt, Human
gccuuugccugcgacguggcug

SEQ ID NO: 993914 - RNA, 22 nt, Human
ucuggcuccaggaccgggcaca

SEQ ID NO: 993915 - RNA, 22 nt, Human
ucuggagccuuggaugggaaag

SEQ ID NO: 993916 - RNA, 22 nt, Human
augaguaagaccauaauuuuug

SEQ ID NO: 993917 - RNA, 22 nt, Human
cauauuaaggucuguaaggggu

SEQ ID NO: 993918 - RNA, 19 nt, Human
acagaaauuaguuauuuuc

SEQ ID NO: 993919 - RNA, 22 nt, Human
ccaggccucuggcugcuuaguc

SEQ ID NO: 993920 - RNA, 22 nt, Human
aagacaagcaucaaaucaggca

SEQ ID NO: 993921 - RNA, 22 nt, Human
uggcucagaacuacuucuaguu

SEQ ID NO: 993922 - RNA, 22 nt, Human
ccugggagugucagacuugcuu

SEQ ID NO: 993923 - RNA, 22 nt, Human
ucuggccagaaagacuugaugu

SEQ ID NO: 993924 - RNA, 18 nt, Human
cagagcagagguggagcg

SEQ ID NO: 993925 - RNA, 19 nt, Human
cauuaggauuagagacaag

SEQ ID NO: 993926 - RNA, 22 nt, Human
augggguggaguccgggcagcg

SEQ ID NO: 993927 - RNA, 22 nt, Human
gccaggcuccaggcccuccuga

SEQ ID NO: 993928 - RNA, 22 nt, Human
aaugcacauauauguguauaca

SEQ ID NO: 993929 - RNA, 22 nt, Human
uagaaacacagagagacccaug

SEQ ID NO: 993930 - RNA, 22 nt, Human
auaaggcaagcugucaguuugu

SEQ ID NO: 993931 - RNA, 22 nt, Human
uccugucuaaagaccugcaggc

SEQ ID NO: 993932 - RNA, 20 nt, Human
agaggcuuccuugggaggag

SEQ ID NO: 993933 - RNA, 22 nt, Human
uacuaggaagcagcugcauugg

SEQ ID NO: 993934 - RNA, 22 nt, Human
aaaugguguuucuaaugcuaga

SEQ ID NO: 993935 - RNA, 22 nt, Human
gaacagcugcuagagaucugug

SEQ ID NO: 993936 - RNA, 18 nt, Human
ucaaagucuggcuccacu

SEQ ID NO: 993937 - RNA, 17 nt, Human
aggccucccuccaggcc

SEQ ID NO: 993938 - RNA, 22 nt, Human
gaggcugcugagagcccuguuu

SEQ ID NO: 993939 - RNA, 22 nt, Human
gcugucugcugugcacugagca

SEQ ID NO: 993940 - RNA, 22 nt, Human
uucaacacaggaacaugauaua

SEQ ID NO: 993941 - RNA, 22 nt, Human
uaacacacugaaggugagaugg

SEQ ID NO: 993942 - RNA, 22 nt, Human
agcugaguuaauucaucacuua

SEQ ID NO: 993943 - RNA, 22 nt, Human
acaaaaaccguggauucagcau

SEQ ID NO: 993944 - RNA, 22 nt, Human
cuggcccagucucagaguguca

SEQ ID NO: 993945 - RNA, 18 nt, Human
acauuucuaggugaaagc

SEQ ID NO: 993946 - RNA, 22 nt, Human
gcugcccaguucugcugcugcc

SEQ ID NO: 993947 - RNA, 22 nt, Human
ccucacucugcacccugcagca

SEQ ID NO: 993948 - RNA, 22 nt, Human
aggcacugcagauuacaggcgc

SEQ ID NO: 993949 - RNA, 22 nt, Human
gagagcuguguucauucuacca

SEQ ID NO: 993950 - RNA, 23 nt, Human
ggguccagagacaggcaugggug

SEQ ID NO: 993951 - RNA, 22 nt, Human
uggugaagucagcggagcccgg

SEQ ID NO: 993952 - RNA, 22 nt, Human
uaucuuugaugccagauguuac

SEQ ID NO: 993953 - RNA, 22 nt, Human
gcuagaaaucgacuucagaauu

SEQ ID NO: 993954 - RNA, 22 nt, Human
aucagcaagauugugucuugua

SEQ ID NO: 993955 - RNA, 22 nt, Human
ccugagccuggcucaugcacuc

SEQ ID NO: 993956 - RNA, 22 nt, Human
ucauucuccucuggaaaaggca

SEQ ID NO: 993957 - RNA, 22 nt, Human
aucaguuugagugcugugucaa

SEQ ID NO: 993958 - RNA, 22 nt, Human
auaaacagcuccauuuagugcc

SEQ ID NO: 993959 - RNA, 22 nt, Human
ucagcuccucaugcaggggaua

SEQ ID NO: 993960 - RNA, 22 nt, Human
uccugccugcaaucccagcacu

SEQ ID NO: 993961 - RNA, 22 nt, Human
aggucauuguuaagucaccaua

SEQ ID NO: 993962 - RNA, 22 nt, Human
agagucugaggcagcugcagcc

SEQ ID NO: 993963 - RNA, 22 nt, Human
auuauggacguuaauuuuggaa

SEQ ID NO: 993964 - RNA, 22 nt, Human
uuucacaacguuguggugagag

SEQ ID NO: 993965 - RNA, 22 nt, Human
acugcuuuucuaagauucugug

SEQ ID NO: 993966 - RNA, 22 nt, Human
aggucauuaaaguuaaaugagg

SEQ ID NO: 993967 - RNA, 22 nt, Human
uggcagcugucuguggggucuc

SEQ ID NO: 993968 - RNA, 22 nt, Human
uccuccaggucuaggguggcuu

SEQ ID NO: 993969 - RNA, 22 nt, Human
agaggcaggaagagcugauuuu

SEQ ID NO: 993970 - RNA, 17 nt, Human
aggcauggucuggggug

SEQ ID NO: 993971 - RNA, 22 nt, Human
ggaggccuagccagcuccaguu

SEQ ID NO: 993972 - RNA, 22 nt, Human
agugaaaugauucugagcaaga

SEQ ID NO: 993973 - RNA, 22 nt, Human
auaauuuaauuuucacaguggu

SEQ ID NO: 993974 - RNA, 22 nt, Human
aagagagaacucccuucgccag

SEQ ID NO: 993975 - RNA, 22 nt, Human
ggccugugucugugccuguccu

SEQ ID NO: 993976 - RNA, 22 nt, Human
ucuggccaggggucccugaagg

SEQ ID NO: 993977 - RNA, 22 nt, Human
ccuaggcccauuaauuccccuu

SEQ ID NO: 993978 - RNA, 22 nt, Human
ccagcaugagacgaugaugaag

SEQ ID NO: 993979 - RNA, 22 nt, Human
gggaaggagguggcuugaagug

SEQ ID NO: 993980 - RNA, 22 nt, Human
cgccugggaguccacaccugcu

SEQ ID NO: 993981 - RNA, 22 nt, Human
aguggcaggaaaguggaagaga

SEQ ID NO: 993982 - RNA, 22 nt, Human
agauaugacuagaagcucauuu

SEQ ID NO: 993983 - RNA, 22 nt, Human
accuggagucauuugaggagua

SEQ ID NO: 993984 - RNA, 22 nt, Human
ccagcgcuucccaucagggagg

SEQ ID NO: 993985 - RNA, 22 nt, Human
ggcugcugugaccucaggugau

SEQ ID NO: 993986 - RNA, 22 nt, Human
cauguacaaaaggcaaaugccu

SEQ ID NO: 993987 - RNA, 22 nt, Human
cuggccuggggccucagcugcu

SEQ ID NO: 993988 - RNA, 19 nt, Human
ucccuggcgccucucgggc

SEQ ID NO: 993989 - RNA, 17 nt, Human
cugaggcccagggccca

SEQ ID NO: 993990 - RNA, 22 nt, Human
aguuuauagcccagauucaugg

SEQ ID NO: 993991 - RNA, 22 nt, Human
aaagccuugcccgucacuggga

SEQ ID NO: 993992 - RNA, 22 nt, Human
cagguggggcagcugugggagc

SEQ ID NO: 993993 - RNA, 22 nt, Human
aaguucaaggugauaguggcag

SEQ ID NO: 993994 - RNA, 23 nt, Human
aggugccaacugagagcugagag

SEQ ID NO: 993995 - RNA, 22 nt, Human
uuuaggauauuaauguucagag

SEQ ID NO: 993996 - RNA, 20 nt, Human
uacuuaggcuuguuuuggcc

SEQ ID NO: 993997 - RNA, 22 nt, Human
ugcuuuggccacuagaauucag

SEQ ID NO: 993998 - RNA, 22 nt, Human
ugcagaagcugcaggucagugg

SEQ ID NO: 993999 - RNA, 23 nt, Human
gccucagagaaacagcugcacac

SEQ ID NO: 994000 - RNA, 22 nt, Human
uagcacaggucuuguugccauu

SEQ ID NO: 994001 - RNA, 19 nt, Human
gccaggagggcucuggcug

SEQ ID NO: 994002 - RNA, 22 nt, Human
gaggcugcccaacuggagugga

SEQ ID NO: 994003 - RNA, 22 nt, Human
uccuggagagugggcgagcaca

SEQ ID NO: 994004 - RNA, 22 nt, Human
cuuccucaugugcaaugcaagc

SEQ ID NO: 994005 - RNA, 22 nt, Human
ugaacagaucaauagaacugac

SEQ ID NO: 994006 - RNA, 22 nt, Human
ucuuguccuaagagcuggauuc

SEQ ID NO: 994007 - RNA, 22 nt, Human
gaggaaagcugguuuaaaguau

SEQ ID NO: 994008 - RNA, 20 nt, Human
aggaaaaggguggugguaga

SEQ ID NO: 994009 - RNA, 22 nt, Human
agucccagaucuccauucgguc

SEQ ID NO: 994010 - RNA, 22 nt, Human
acuccuggggauccauuccuuu

SEQ ID NO: 994011 - RNA, 22 nt, Human
gaggagcacaugaggcugaggg

SEQ ID NO: 994012 - RNA, 22 nt, Human
aggcacugacagauucuguguc

SEQ ID NO: 994013 - RNA, 22 nt, Human
uaacaucuuuagcagcucgaac

SEQ ID NO: 994014 - RNA, 22 nt, Human
uauguguaggaggaggacaggg

SEQ ID NO: 994015 - RNA, 22 nt, Human
uuuugaaagggugauuuggcuu

SEQ ID NO: 994016 - RNA, 22 nt, Human
accagagauggggcuucucugu

SEQ ID NO: 994017 - RNA, 22 nt, Human
cuuauuagugucugucugaguu

SEQ ID NO: 994018 - RNA, 22 nt, Human
uaaugaugugugcaaacugaau

SEQ ID NO: 994019 - RNA, 22 nt, Human
agagacugcgugucagcgcugg

SEQ ID NO: 994020 - RNA, 22 nt, Human
gagccaggucgggccgcggcga

SEQ ID NO: 994021 - RNA, 22 nt, Human
auagucuuagucuauaguuuug

SEQ ID NO: 994022 - RNA, 22 nt, Human
auguuuaaucggcugccuuucc

SEQ ID NO: 994023 - RNA, 18 nt, Human
ugcuggcaacuacuauug

SEQ ID NO: 994024 - RNA, 22 nt, Human
caguagcaggcacucagcacgu

SEQ ID NO: 994025 - RNA, 22 nt, Human
cugaugcuauaagccacagugg

SEQ ID NO: 994026 - RNA, 22 nt, Human
aaugcaguuucauuuguagaau

SEQ ID NO: 994027 - RNA, 22 nt, Human
uggcugggugcuauccaguacu

SEQ ID NO: 994028 - RNA, 22 nt, Human
gcagcccaaaaaagagguagau

SEQ ID NO: 994029 - RNA, 22 nt, Human
aaugauggauuuagacaagcug

SEQ ID NO: 994030 - RNA, 22 nt, Human
auacaucuuccuuuuaaaaugc

SEQ ID NO: 994031 - RNA, 22 nt, Human
uuugcauuuguucaaguauuga

SEQ ID NO: 994032 - RNA, 22 nt, Human
gucugucucucuccagagugca

SEQ ID NO: 994033 - RNA, 22 nt, Human
ucccagaguauuagcaauugcu

SEQ ID NO: 994034 - RNA, 22 nt, Human
ccacccugagccgcaagagcag

SEQ ID NO: 994035 - RNA, 22 nt, Human
aggcugggcuccgcccaacucc

SEQ ID NO: 994036 - RNA, 18 nt, Human
aaaaugcaggcgacaugg

SEQ ID NO: 994037 - RNA, 22 nt, Human
gugauuucaaauauagagugag

SEQ ID NO: 994038 - RNA, 22 nt, Human
caguggguccuaaguacaguuc

SEQ ID NO: 994039 - RNA, 22 nt, Human
uuucaguggguuuauuucaugu

SEQ ID NO: 994040 - RNA, 22 nt, Human
ggcugagggccagggcuagucu

SEQ ID NO: 994041 - RNA, 22 nt, Human
gcagcugagagaagaacagggc

SEQ ID NO: 994042 - RNA, 22 nt, Human
aggauuuguuuauaggucuuaa

SEQ ID NO: 994043 - RNA, 22 nt, Human
cccagcucucgcacuuacuagc

SEQ ID NO: 994044 - RNA, 19 nt, Human
ccucugccagcccgccucu

SEQ ID NO: 994045 - RNA, 22 nt, Human
ucuucagauugcacugagcaag

SEQ ID NO: 994046 - RNA, 22 nt, Human
uauaauccauucauugauuucu

SEQ ID NO: 994047 - RNA, 22 nt, Human
ugcaucuguucagagcugucga

SEQ ID NO: 994048 - RNA, 22 nt, Human
acagaggaaggcugagcugccc

SEQ ID NO: 994049 - RNA, 22 nt, Human
uggcccuguguccugcugccag

SEQ ID NO: 994050 - RNA, 22 nt, Human
ccugucugaggaggugcucuuu

SEQ ID NO: 994051 - RNA, 23 nt, Human
agggaaaguaguaauggccuuug

SEQ ID NO: 994052 - RNA, 22 nt, Human
cacucaggcugugucaggagga

SEQ ID NO: 994053 - RNA, 22 nt, Human
gcagcuggugcaaaugucacuc

SEQ ID NO: 994054 - RNA, 22 nt, Human
acugggccuugccauggcagcc

SEQ ID NO: 994055 - RNA, 22 nt, Human
aggagucacucagggcuucauc

SEQ ID NO: 994056 - RNA, 22 nt, Human
uggagcugaacuuugaggccag

SEQ ID NO: 994057 - RNA, 22 nt, Human
agcagcauucucugguaugggg

SEQ ID NO: 994058 - RNA, 19 nt, Human
uacauuuguguacacuugu

SEQ ID NO: 994059 - RNA, 21 nt, Human
agcagaggcagaauguaugca

SEQ ID NO: 994060 - RNA, 22 nt, Human
gcagaggcaaucagguaugugg

SEQ ID NO: 994061 - RNA, 22 nt, Human
agggcugccugacuccagagcc

SEQ ID NO: 994062 - RNA, 22 nt, Human
gcgaaaaauguguaaauauguu

SEQ ID NO: 994063 - RNA, 20 nt, Human
ugcagcugguuucacaggga

SEQ ID NO: 994064 - RNA, 22 nt, Human
gcaaggaccuuugagcgugcca

SEQ ID NO: 994065 - RNA, 22 nt, Human
ggcuggagugggcuccagaguu

SEQ ID NO: 994066 - RNA, 22 nt, Human
uggcagaguuggagguggaaga

SEQ ID NO: 994067 - RNA, 22 nt, Human
uguccucacaggaaugaacuuu

SEQ ID NO: 994068 - RNA, 22 nt, Human
ccaggccuccugugaguggacc

SEQ ID NO: 994069 - RNA, 19 nt, Human
gcuucccaccagccagccc

SEQ ID NO: 994070 - RNA, 22 nt, Human
ggccuagggaguggccaugccu

SEQ ID NO: 994071 - RNA, 22 nt, Human
acucccagguugccuggcaggc

SEQ ID NO: 994072 - RNA, 22 nt, Human
gcucccugacucaguuccugag

SEQ ID NO: 994073 - RNA, 23 nt, Human
ucugagagaacaaugccuccuau

SEQ ID NO: 994074 - RNA, 22 nt, Human
acaguuucuccauuuacaccuu

SEQ ID NO: 994075 - RNA, 20 nt, Human
ucuccuggucugguccgugc

SEQ ID NO: 994076 - RNA, 22 nt, Human
gcucugggugaacuuggagcaa

SEQ ID NO: 994077 - RNA, 22 nt, Human
ggcaggcuggcuuuguuccagg

SEQ ID NO: 994078 - RNA, 22 nt, Human
augggaggaugcucgggugcuc

SEQ ID NO: 994079 - RNA, 22 nt, Human
ugugcccaucccucuggagugu

SEQ ID NO: 994080 - RNA, 22 nt, Human
uucagcaagugucucuacuguc

SEQ ID NO: 994081 - RNA, 22 nt, Human
uccugggccuguacuccauccg

SEQ ID NO: 994082 - RNA, 22 nt, Human
gaggguccccaugcagagcuca

SEQ ID NO: 994083 - RNA, 22 nt, Human
ggcccuguccuggcugucuccg

SEQ ID NO: 994084 - RNA, 22 nt, Human
agagagcccgggccagggcaca

SEQ ID NO: 994085 - RNA, 22 nt, Human
cuacccaggcuggagugcagua

SEQ ID NO: 994086 - RNA, 19 nt, Human
ggcccaaguacugagugcc

SEQ ID NO: 994087 - RNA, 22 nt, Human
auaaggaaugauguaucaguuu

SEQ ID NO: 994088 - RNA, 22 nt, Human
ccugccagauccccugagcuga

SEQ ID NO: 994089 - RNA, 22 nt, Human
gaugugggguugagggaccagc

SEQ ID NO: 994090 - RNA, 22 nt, Human
cuggccugagcacagcggcugc

SEQ ID NO: 994091 - RNA, 22 nt, Human
ucagguguuagaagaaauuuca

SEQ ID NO: 994092 - RNA, 22 nt, Human
ucugcuguaaagaauuucugcc

SEQ ID NO: 994093 - RNA, 22 nt, Human
aggacugggugcagagggcauc

SEQ ID NO: 994094 - RNA, 22 nt, Human
ugggcccaagagagucuccaac

SEQ ID NO: 994095 - RNA, 22 nt, Human
cacugccuccccaggcuccaca

SEQ ID NO: 994096 - RNA, 22 nt, Human
acagaauucuaguauguggcuu

SEQ ID NO: 994097 - RNA, 22 nt, Human
augaaggauggcuggcugcccu

SEQ ID NO: 994098 - RNA, 17 nt, Human
auucuuugaugucucug

SEQ ID NO: 994099 - RNA, 22 nt, Human
gccagcagggcccaaaugcugg

SEQ ID NO: 994100 - RNA, 22 nt, Human
acagcagcaauagcagugacau

SEQ ID NO: 994101 - RNA, 22 nt, Human
uuaaaugaacgagauaugcaac

SEQ ID NO: 994102 - RNA, 22 nt, Human
cugugcaagcccaagauaaaac

SEQ ID NO: 994103 - RNA, 21 nt, Human
acagaguaguugaaacagaga

SEQ ID NO: 994104 - RNA, 22 nt, Human
gggcagcagcaggaggucucug

SEQ ID NO: 994105 - RNA, 21 nt, Human
ugaaaucugaugggacaaaug

SEQ ID NO: 994106 - RNA, 22 nt, Human
caacagaaggaagcagggucag

SEQ ID NO: 994107 - RNA, 22 nt, Human
augaagcugguuuuggcuuggg

SEQ ID NO: 994108 - RNA, 22 nt, Human
cagaggcuaagaugagugggug

SEQ ID NO: 994109 - RNA, 22 nt, Human
cagagggagcccuccaggagca

SEQ ID NO: 994110 - RNA, 22 nt, Human
uggcucugugucucccagcagc

SEQ ID NO: 994111 - RNA, 22 nt, Human
ccagcccuccuccaucagagga

SEQ ID NO: 994112 - RNA, 22 nt, Human
gccuaggaguggggauggcggu

SEQ ID NO: 994113 - RNA, 22 nt, Human
ggugaagggugucauggcauuu

SEQ ID NO: 994114 - RNA, 22 nt, Human
aggauguucgggucacauagcc

SEQ ID NO: 994115 - RNA, 22 nt, Human
cccagggagguagcaggagaaa

SEQ ID NO: 994116 - RNA, 22 nt, Human
acacagccaggguaguaaggcu

SEQ ID NO: 994117 - RNA, 22 nt, Human
uggaagagguggaaguggcuuc

SEQ ID NO: 994118 - RNA, 22 nt, Human
gcacccaggccggcgacugcag

SEQ ID NO: 994119 - RNA, 22 nt, Human
ucacugcaaucucugccuucca

SEQ ID NO: 994120 - RNA, 22 nt, Human
acaggugugagaacaugccuug

SEQ ID NO: 994121 - RNA, 22 nt, Human
cagcucuggcgucagggagcga

SEQ ID NO: 994122 - RNA, 22 nt, Human
ggccaaaucuguaaggcaagau

SEQ ID NO: 994123 - RNA, 22 nt, Human
caguguacuuggaauguaacag

SEQ ID NO: 994124 - RNA, 22 nt, Human
ccucuucugagugagacucccu

SEQ ID NO: 994125 - RNA, 22 nt, Human
ccacagaggacaacugccuggc

SEQ ID NO: 994126 - RNA, 22 nt, Human
gccugggagagggauagugcag

SEQ ID NO: 994127 - RNA, 22 nt, Human
uauuuauucauucagcaagcau

SEQ ID NO: 994128 - RNA, 22 nt, Human
agugauggagcuuccucugcua

SEQ ID NO: 994129 - RNA, 22 nt, Human
auggccaaauaacagcuugcau

SEQ ID NO: 994130 - RNA, 22 nt, Human
cuggcugcaggaaggagugggc

SEQ ID NO: 994131 - RNA, 22 nt, Human
augaacacauguacacauuucu

SEQ ID NO: 994132 - RNA, 22 nt, Human
ucugccuuggcaaccacagcuu

SEQ ID NO: 994133 - RNA, 17 nt, Human
agcagaagucagaggga

SEQ ID NO: 994134 - RNA, 22 nt, Human
aagcgccacgagaagcuggacc

SEQ ID NO: 994135 - RNA, 21 nt, Human
uucaaugaaaacaaagugagg

SEQ ID NO: 994136 - RNA, 22 nt, Human
agccagaggccagccugccuca

SEQ ID NO: 994137 - RNA, 22 nt, Human
ugaaauguguaauguggaugcc

SEQ ID NO: 994138 - RNA, 22 nt, Human
aauuaaauugguuuagagagga

SEQ ID NO: 994139 - RNA, 22 nt, Human
auugucuuuggugcuuccagga

SEQ ID NO: 994140 - RNA, 22 nt, Human
ggugcagaucuuucucuucagg

SEQ ID NO: 994141 - RNA, 22 nt, Human
gcuggccagcccucuuccucca

SEQ ID NO: 994142 - RNA, 23 nt, Human
aguuuguaaagaaauauuugcac

SEQ ID NO: 994143 - RNA, 22 nt, Human
ccugccuguacuagagacccag

SEQ ID NO: 994144 - RNA, 22 nt, Human
aggagaaguaaggcuagaugau

SEQ ID NO: 994145 - RNA, 22 nt, Human
gccuccugagaagccacaggcu

SEQ ID NO: 994146 - RNA, 19 nt, Human
ugccugucaguagaucuca

SEQ ID NO: 994147 - RNA, 22 nt, Human
ccucccucuguuagagcugucu

SEQ ID NO: 994148 - RNA, 22 nt, Human
cugaggccagcugcagagcucu

SEQ ID NO: 994149 - RNA, 22 nt, Human
agagugaaguaauuguuaggau

SEQ ID NO: 994150 - RNA, 22 nt, Human
ucuggagagucacagugccaga

SEQ ID NO: 994151 - RNA, 23 nt, Human
uggccuggagagaaaagaugagu

SEQ ID NO: 994152 - RNA, 22 nt, Human
caaagguauucucauuuuggaa

SEQ ID NO: 994153 - RNA, 22 nt, Human
ucccacacagcccgcucaccgg

SEQ ID NO: 994154 - RNA, 23 nt, Human
aagcuuccuucacgucuccuggg

SEQ ID NO: 994155 - RNA, 22 nt, Human
gguccuggaaauugacggaaag

SEQ ID NO: 994156 - RNA, 19 nt, Human
ccauggcaaugaucugaug

SEQ ID NO: 994157 - RNA, 22 nt, Human
acacaugagaaacaucaguugu

SEQ ID NO: 994158 - RNA, 22 nt, Human
augucuuuauaaauguauaaug

SEQ ID NO: 994159 - RNA, 22 nt, Human
guucacaaaauucuggccagug

SEQ ID NO: 994160 - RNA, 22 nt, Human
agagccaggcggcugggcaccu

SEQ ID NO: 994161 - RNA, 23 nt, Human
uugaaggagaaagcuuucuuggu

SEQ ID NO: 994162 - RNA, 22 nt, Human
cucuuuaaaguaaaauuugucu

SEQ ID NO: 994163 - RNA, 22 nt, Human
aggugcuuggcucgugcacaca

SEQ ID NO: 994164 - RNA, 22 nt, Human
agggacacugaugagaaauucu

SEQ ID NO: 994165 - RNA, 22 nt, Human
agaaauguacgauguuaugcag

SEQ ID NO: 994166 - RNA, 22 nt, Human
gugaggggaguaaagccauguu

SEQ ID NO: 994167 - RNA, 22 nt, Human
uuggaaggagucaaccagcuga

SEQ ID NO: 994168 - RNA, 22 nt, Human
uuguuacaucuuauguaagugg

SEQ ID NO: 994169 - RNA, 22 nt, Human
uuauuuaauuuucucacucaga

SEQ ID NO: 994170 - RNA, 22 nt, Human
uaaugcacauagaaguacuuag

SEQ ID NO: 994171 - RNA, 22 nt, Human
gccaggcagauaugugagcuua

SEQ ID NO: 994172 - RNA, 22 nt, Human
uggaggugagugugguacagca

SEQ ID NO: 994173 - RNA, 22 nt, Human
aaaugcauugguuucuacuugu

SEQ ID NO: 994174 - RNA, 22 nt, Human
aaguaacaaugcuguugaauug

SEQ ID NO: 994175 - RNA, 22 nt, Human
aggaagcccuugucauuucugu

SEQ ID NO: 994176 - RNA, 22 nt, Human
aagggccauaacuugcaguguu

SEQ ID NO: 994177 - RNA, 22 nt, Human
acugaaggcuuucccaagguca

SEQ ID NO: 994178 - RNA, 22 nt, Human
gccugagauucugcauuucuaa

SEQ ID NO: 994179 - RNA, 22 nt, Human
aucuggcucauucagggaacgg

SEQ ID NO: 994180 - RNA, 21 nt, Human
aaguuuguucuuguauagucu

SEQ ID NO: 994181 - RNA, 21 nt, Human
ugcugccauagaccugaggga

SEQ ID NO: 994182 - RNA, 22 nt, Human
ucuuggccccaccugugccagc

SEQ ID NO: 994183 - RNA, 19 nt, Human
aagggcugggcaccucacu

SEQ ID NO: 994184 - RNA, 19 nt, Human
auaaggcagugacuuuuuu

SEQ ID NO: 994185 - RNA, 22 nt, Human
ugcugucccuaagucucuucaa

SEQ ID NO: 994186 - RNA, 22 nt, Human
ggguaauuggggccuugcagug

SEQ ID NO: 994187 - RNA, 22 nt, Human
uuaacagagaacauagaaguag

SEQ ID NO: 994188 - RNA, 22 nt, Human
agugaccaaucaugguuagauu

SEQ ID NO: 994189 - RNA, 22 nt, Human
agaaaucagaacccugaaguuc

SEQ ID NO: 994190 - RNA, 19 nt, Human
agcauccagucaugggauc

SEQ ID NO: 994191 - RNA, 22 nt, Human
uugaagcauuguggcuuguauu

SEQ ID NO: 994192 - RNA, 22 nt, Human
cugagggugcuauucuugccuu

SEQ ID NO: 994193 - RNA, 22 nt, Human
aucaaaaugcuccagugauggu

SEQ ID NO: 994194 - RNA, 22 nt, Human
augugcauuaaaugucaauguu

SEQ ID NO: 994195 - RNA, 22 nt, Human
ccagggugaccagcuggccuag

SEQ ID NO: 994196 - RNA, 22 nt, Human
uugucccaggacuugcauagau

SEQ ID NO: 994197 - RNA, 22 nt, Human
augaagcugaccuugucuugcu

SEQ ID NO: 994198 - RNA, 22 nt, Human
uaaugcacagaauugacauggg

SEQ ID NO: 994199 - RNA, 22 nt, Human
cacccaggcuagagugcagugg

SEQ ID NO: 994200 - RNA, 18 nt, Human
agggaucaucacugcagc

SEQ ID NO: 994201 - RNA, 22 nt, Human
aagucaaaccuugcucacagga

SEQ ID NO: 994202 - RNA, 22 nt, Human
ugggggugacuaucucgggaau

SEQ ID NO: 994203 - RNA, 20 nt, Human
aggcucugcauuucugagug

SEQ ID NO: 994204 - RNA, 22 nt, Human
aaagauuucagaagccugugcc

SEQ ID NO: 994205 - RNA, 22 nt, Human
acaggcuucucacagaaaaggg

SEQ ID NO: 994206 - RNA, 22 nt, Human
uauuuuguuaauaauccagucc

SEQ ID NO: 994207 - RNA, 22 nt, Human
uggaaggggagcuggaaagggg

SEQ ID NO: 994208 - RNA, 22 nt, Human
agagccugcagcugugaagaaa

SEQ ID NO: 994209 - RNA, 20 nt, Human
ugucagugccugaggcacag

SEQ ID NO: 994210 - RNA, 22 nt, Human
uucauauauaugcacuacguac

SEQ ID NO: 994211 - RNA, 22 nt, Human
agcugccauccuguucagcacc

SEQ ID NO: 994212 - RNA, 22 nt, Human
acucugcuuccacuuuugcuaa

SEQ ID NO: 994213 - RNA, 22 nt, Human
aggguccaucaaggacugcaca

SEQ ID NO: 994214 - RNA, 22 nt, Human
gcucugcuggaaguucucugga

SEQ ID NO: 994215 - RNA, 17 nt, Human
ugaggccugcaucagug

SEQ ID NO: 994216 - RNA, 22 nt, Human
uucuuucccagaagauauguuu

SEQ ID NO: 994217 - RNA, 22 nt, Human
gccuggcuccuaagagcacaac

SEQ ID NO: 994218 - RNA, 22 nt, Human
ggcuagaauaauugacuucauu

SEQ ID NO: 994219 - RNA, 22 nt, Human
uacaguagacaauguuaguaug

SEQ ID NO: 994220 - RNA, 22 nt, Human
aucuggcugacuuugugggaca

SEQ ID NO: 994221 - RNA, 18 nt, Human
gggcucugauccuucacc

SEQ ID NO: 994222 - RNA, 22 nt, Human
acuaugcucauuguuaauauuu

SEQ ID NO: 994223 - RNA, 22 nt, Human
ugccugucuccucugcagggug

SEQ ID NO: 994224 - RNA, 22 nt, Human
uuccuguaugucagugaagagc

SEQ ID NO: 994225 - RNA, 22 nt, Human
ccagcagaagcucccgcugggu

SEQ ID NO: 994226 - RNA, 21 nt, Human
uauuucuuugacucucucccu

SEQ ID NO: 994227 - RNA, 22 nt, Human
uucagucagugacuaagcaguu

SEQ ID NO: 994228 - RNA, 22 nt, Human
acauaacaaucauaggacauag

SEQ ID NO: 994229 - RNA, 18 nt, Human
gcaggugccacugcuguu

SEQ ID NO: 994230 - RNA, 22 nt, Human
caucagcagucacaugaugcug

SEQ ID NO: 994231 - RNA, 21 nt, Human
uuucaauguguucuuuguagu

SEQ ID NO: 994232 - RNA, 19 nt, Human
caguggccuggaggucucu

SEQ ID NO: 994233 - RNA, 22 nt, Human
guuuuuccugcugacuuggguc

SEQ ID NO: 994234 - RNA, 22 nt, Human
caaaguccuagaacagugcuug

SEQ ID NO: 994235 - RNA, 22 nt, Human
uccuggaguugugcagugcaca

SEQ ID NO: 994236 - RNA, 22 nt, Human
gguggccucucaugcaagguag

SEQ ID NO: 994237 - RNA, 22 nt, Human
uggaaggcaugggaacuguucu

SEQ ID NO: 994238 - RNA, 22 nt, Human
cugggcagaauuuuaggauggc

SEQ ID NO: 994239 - RNA, 22 nt, Human
ggugucccaggccagcugugug

SEQ ID NO: 994240 - RNA, 22 nt, Human
gaggaaggucccaucagaauuu

SEQ ID NO: 994241 - RNA, 22 nt, Human
aagugaaacauguaucucuuua

SEQ ID NO: 994242 - RNA, 22 nt, Human
uauuucuggcuuugagggugau

SEQ ID NO: 994243 - RNA, 22 nt, Human
caggaguggugugagggacucc

SEQ ID NO: 994244 - RNA, 22 nt, Human
aggcacugaaagguggccagag

SEQ ID NO: 994245 - RNA, 22 nt, Human
cucaggauggaagccuacagga

SEQ ID NO: 994246 - RNA, 22 nt, Human
ggcagccauacucagaccuggg

SEQ ID NO: 994247 - RNA, 21 nt, Human
uccucugcucucauaccacaa

SEQ ID NO: 994248 - RNA, 22 nt, Human
uggcaccagcaccuagaugggg

SEQ ID NO: 994249 - RNA, 22 nt, Human
guccucagucaguuuggugggg

SEQ ID NO: 994250 - RNA, 22 nt, Human
aagcugccagcugagcugaggc

SEQ ID NO: 994251 - RNA, 22 nt, Human
ggccaugguuggggaagacaug

SEQ ID NO: 994252 - RNA, 22 nt, Human
caaugguggugucagaagagau

SEQ ID NO: 994253 - RNA, 22 nt, Human
agcagccacagucugggacagg

SEQ ID NO: 994254 - RNA, 22 nt, Human
ggugcucaagagggcauccucu

SEQ ID NO: 994255 - RNA, 22 nt, Human
gcagcugcagguggucccaugc

SEQ ID NO: 994256 - RNA, 22 nt, Human
caggugggagcggagacugauu

SEQ ID NO: 994257 - RNA, 22 nt, Human
gcuuccugauauucauacuguu

SEQ ID NO: 994258 - RNA, 22 nt, Human
ugggccuggguuccuccugggc

SEQ ID NO: 994259 - RNA, 22 nt, Human
agccuggauucgugcauccaca

SEQ ID NO: 994260 - RNA, 22 nt, Human
aauuucaaguggcaucuuugau

SEQ ID NO: 994261 - RNA, 22 nt, Human
cccagcugcaccucuauggccu

SEQ ID NO: 994262 - RNA, 21 nt, Human
uggagcugccacuuguccucc

SEQ ID NO: 994263 - RNA, 22 nt, Human
cccaggaggcagagguugcagu

SEQ ID NO: 994264 - RNA, 22 nt, Human
ccuccuggguucaagcgauucu

SEQ ID NO: 994265 - RNA, 22 nt, Human
cagcaucuaaucuucaugccgg

SEQ ID NO: 994266 - RNA, 22 nt, Human
ggggaugguagaccggugacgu

SEQ ID NO: 994267 - RNA, 22 nt, Human
gcugagagcggccagcugggaa

SEQ ID NO: 994268 - RNA, 19 nt, Human
cagcucaguuugauucucu

SEQ ID NO: 994269 - RNA, 22 nt, Human
gggacagaaggaagugagcaca

SEQ ID NO: 994270 - RNA, 22 nt, Human
agaaaagggcaggagggauaca

SEQ ID NO: 994271 - RNA, 22 nt, Human
uuaaaugaugcauaucauuuag

SEQ ID NO: 994272 - RNA, 22 nt, Human
cagagcugcagauugaaggcau

SEQ ID NO: 994273 - RNA, 21 nt, Human
ucuuguccuugcucucccacu

SEQ ID NO: 994274 - RNA, 22 nt, Human
aggcacuguggguguggccgga

SEQ ID NO: 994275 - RNA, 22 nt, Human
gcagugugaccgagcuugcuuc

SEQ ID NO: 994276 - RNA, 22 nt, Human
gaggggcucuuuaauaguaaca

SEQ ID NO: 994277 - RNA, 22 nt, Human
ucucacugcaaauauuauguau

SEQ ID NO: 994278 - RNA, 22 nt, Human
aaggagucucagcugggccuga

SEQ ID NO: 994279 - RNA, 22 nt, Human
gcugcuccgucugagcucuggu

SEQ ID NO: 994280 - RNA, 19 nt, Human
ccagguggaacugagguag

SEQ ID NO: 994281 - RNA, 22 nt, Human
gccaggcucucagugacugccc

SEQ ID NO: 994282 - RNA, 22 nt, Human
agaguucagcuacugcaaaugu

SEQ ID NO: 994283 - RNA, 22 nt, Human
agagcuggccagggaucacucu

SEQ ID NO: 994284 - RNA, 22 nt, Human
cacccacauggaaauucacagu

SEQ ID NO: 994285 - RNA, 22 nt, Human
agagguagagguugcagugagc

SEQ ID NO: 994286 - RNA, 22 nt, Human
cagaaaaccugacucuagaacu

SEQ ID NO: 994287 - RNA, 22 nt, Human
gagcagcugcagugcagacccu

SEQ ID NO: 994288 - RNA, 19 nt, Human
ggagccuggagcacgugcc

SEQ ID NO: 994289 - RNA, 22 nt, Human
uggccucaagucugagggccuu

SEQ ID NO: 994290 - RNA, 19 nt, Human
uggcauugguccagauaaa

SEQ ID NO: 994291 - RNA, 22 nt, Human
aagaaaagaaaccugaggcuuu

SEQ ID NO: 994292 - RNA, 22 nt, Human
ccugggcaucucaugcaccugc

SEQ ID NO: 994293 - RNA, 17 nt, Human
uagagcugguucaggag

SEQ ID NO: 994294 - RNA, 22 nt, Human
cuuauguaaacuacagauaaua

SEQ ID NO: 994295 - RNA, 22 nt, Human
cucaggaucgcuugcccuaggg

SEQ ID NO: 994296 - RNA, 22 nt, Human
uggcagcagacaaaaggccauu

SEQ ID NO: 994297 - RNA, 22 nt, Human
gcagggccagguacaagaagca

SEQ ID NO: 994298 - RNA, 22 nt, Human
uauuuaaaaagaggccagcugg

SEQ ID NO: 994299 - RNA, 22 nt, Human
ccagggcagaaaaagagggaau

SEQ ID NO: 994300 - RNA, 22 nt, Human
uggccuggaaaaaugcagaugg

SEQ ID NO: 994301 - RNA, 22 nt, Human
cugggcaguuuauucaguucug

SEQ ID NO: 994302 - RNA, 22 nt, Human
cuggcuggucaucagcaguacg

SEQ ID NO: 994303 - RNA, 22 nt, Human
ugccaggagagugcaugcaggg

SEQ ID NO: 994304 - RNA, 21 nt, Human
gucaaacuugcaccagugccc

SEQ ID NO: 994305 - RNA, 22 nt, Human
cucugaacucuugggcagcaug

SEQ ID NO: 994306 - RNA, 22 nt, Human
gcugggagccguaccugucacg

SEQ ID NO: 994307 - RNA, 22 nt, Human
gucucuggguuaagcagugcau

SEQ ID NO: 994308 - RNA, 22 nt, Human
uggccugaggcucggcaugggu

SEQ ID NO: 994309 - RNA, 22 nt, Human
gagggcuccauuccccgugccc

SEQ ID NO: 994310 - RNA, 22 nt, Human
agacagcugcucgcagagcuau

SEQ ID NO: 994311 - RNA, 22 nt, Human
caaacugagcaucagaaaguuu

SEQ ID NO: 994312 - RNA, 22 nt, Human
ugcuggggauccguaccaaccc

SEQ ID NO: 994313 - RNA, 22 nt, Human
gccagcuggagugagagugggc

SEQ ID NO: 994314 - RNA, 22 nt, Human
uccuugaaugaauguucucucc

SEQ ID NO: 994315 - RNA, 22 nt, Human
ccugugucuuccccacuggugu

SEQ ID NO: 994316 - RNA, 22 nt, Human
ugggagcucagaaagggagguc

SEQ ID NO: 994317 - RNA, 21 nt, Human
guauucuuuaugaagugaaaa

SEQ ID NO: 994318 - RNA, 20 nt, Human
gcacugaagguuccagggga

SEQ ID NO: 994319 - RNA, 22 nt, Human
aacagaauugcugcugccaaug

SEQ ID NO: 994320 - RNA, 20 nt, Human
uccagccacuuccgcugguc

SEQ ID NO: 994321 - RNA, 22 nt, Human
uacccaggagaaacagcagggc

SEQ ID NO: 994322 - RNA, 22 nt, Human
aucuuucaguuucauaccaauu

SEQ ID NO: 994323 - RNA, 22 nt, Human
cucuucagauaaaagggauauu

SEQ ID NO: 994324 - RNA, 18 nt, Human
ucagagguacagaaaagu

SEQ ID NO: 994325 - RNA, 22 nt, Human
uuacaguauuguuaaacucuuu

SEQ ID NO: 994326 - RNA, 22 nt, Human
gcugucacaagcaucuggggca

SEQ ID NO: 994327 - RNA, 22 nt, Human
acagggccaggugagaggugcu

SEQ ID NO: 994328 - RNA, 22 nt, Human
ggcaaaaaccauaauuacuuuu

SEQ ID NO: 994329 - RNA, 22 nt, Human
ggaggagacccugugucaguuu

SEQ ID NO: 994330 - RNA, 21 nt, Human
gcagagccugagguucuugag

SEQ ID NO: 994331 - RNA, 22 nt, Human
caggggcagucugugugcgugg

SEQ ID NO: 994332 - RNA, 22 nt, Human
uaagcuauuccugaagaagguu

SEQ ID NO: 994333 - RNA, 22 nt, Human
gaggaggcuggcgccgccugcc

SEQ ID NO: 994334 - RNA, 22 nt, Human
gugcucacugugagacguccug

SEQ ID NO: 994335 - RNA, 22 nt, Human
gugccucagcaccgccugcagc

SEQ ID NO: 994336 - RNA, 22 nt, Human
gggaaggagccugcuugcuaga

SEQ ID NO: 994337 - RNA, 22 nt, Human
gggaucagaaacauagcccuga

SEQ ID NO: 994338 - RNA, 22 nt, Human
cagaccugagguugaguaccag

SEQ ID NO: 994339 - RNA, 22 nt, Human
ucuuccagcaaugugaaaucac

SEQ ID NO: 994340 - RNA, 17 nt, Human
agugacuuggaaagagc

SEQ ID NO: 994341 - RNA, 22 nt, Human
caauauucaguggaaaagccau

SEQ ID NO: 994342 - RNA, 22 nt, Human
gcugccuguccugaggaguccg

SEQ ID NO: 994343 - RNA, 22 nt, Human
ugaggcaguucuuacuuguauu

SEQ ID NO: 994344 - RNA, 20 nt, Human
auaaaauaacugccacaaga

SEQ ID NO: 994345 - RNA, 22 nt, Human
ucagagcuaaggggagagcaaa

SEQ ID NO: 994346 - RNA, 22 nt, Human
agugucauaugccacugcaucc

SEQ ID NO: 994347 - RNA, 22 nt, Human
gggugggaacaggaugccagga

SEQ ID NO: 994348 - RNA, 22 nt, Human
uaugcacauucacacaaaaaug

SEQ ID NO: 994349 - RNA, 22 nt, Human
guuuauuaacugucaagugauu

SEQ ID NO: 994350 - RNA, 22 nt, Human
cugaccaucauggugaaacccc

SEQ ID NO: 994351 - RNA, 21 nt, Human
uaagaacauuaucuucuuccu

SEQ ID NO: 994352 - RNA, 22 nt, Human
acagaguagcucaagaagauug

SEQ ID NO: 994353 - RNA, 22 nt, Human
cugccucugguuuuggucccug

SEQ ID NO: 994354 - RNA, 22 nt, Human
guuacacaggaaaacauuagca

SEQ ID NO: 994355 - RNA, 22 nt, Human
cacuuaagcaguuaauuuaucu

SEQ ID NO: 994356 - RNA, 22 nt, Human
ucucaggcuaccuugcacaagg

SEQ ID NO: 994357 - RNA, 22 nt, Human
cucugcagaggcccaaggcuga

SEQ ID NO: 994358 - RNA, 22 nt, Human
ccagagcccagggucaugcagg

SEQ ID NO: 994359 - RNA, 22 nt, Human
uuggccaagauacgagcacaua

SEQ ID NO: 994360 - RNA, 22 nt, Human
gggggcuggacuuucccacaca

SEQ ID NO: 994361 - RNA, 22 nt, Human
gagcucugggaaacaaagugua

SEQ ID NO: 994362 - RNA, 22 nt, Human
cagcuccagcccaggcagcucc

SEQ ID NO: 994363 - RNA, 22 nt, Human
uccaguggguugcugagggagg

SEQ ID NO: 994364 - RNA, 16 nt, Human
gucuggccuaccugcc

SEQ ID NO: 994365 - RNA, 22 nt, Human
augugugccccuuuuacucuuu

SEQ ID NO: 994366 - RNA, 22 nt, Human
gccucugcacuguggcacacca

SEQ ID NO: 994367 - RNA, 22 nt, Human
cccuggaggucagaggccuggg

SEQ ID NO: 994368 - RNA, 22 nt, Human
agccagagagccccagguucua

SEQ ID NO: 994369 - RNA, 22 nt, Human
cauuaucugccauugacaccau

SEQ ID NO: 994370 - RNA, 23 nt, Human
ugcugggcagagcuggugcugag

SEQ ID NO: 994371 - RNA, 22 nt, Human
ccugggaggcggagguugcagu

SEQ ID NO: 994372 - RNA, 22 nt, Human
acaaaugcaaguuuuaugucaa

SEQ ID NO: 994373 - RNA, 22 nt, Human
agggccugagcuggcugaccuc

SEQ ID NO: 994374 - RNA, 22 nt, Human
ugcuuuauguuaucagaagggu

SEQ ID NO: 994375 - RNA, 22 nt, Human
cugucccagauguucucagcac

SEQ ID NO: 994376 - RNA, 20 nt, Human
uggagccacagucagguucc

SEQ ID NO: 994377 - RNA, 22 nt, Human
ugcugcucuucaccauggccuc

SEQ ID NO: 994378 - RNA, 22 nt, Human
cagguggggagaguguggagca

SEQ ID NO: 994379 - RNA, 22 nt, Human
acugucacuccaacugagucgu

SEQ ID NO: 994380 - RNA, 22 nt, Human
uucacaggugacuggggauaac

SEQ ID NO: 994381 - RNA, 22 nt, Human
cagggcagaaggcacucuacuc

SEQ ID NO: 994382 - RNA, 22 nt, Human
cagcaauaguguguuuguuuca

SEQ ID NO: 994383 - RNA, 22 nt, Human
ggaggaccugcuggcccugcaa

SEQ ID NO: 994384 - RNA, 22 nt, Human
gauuucaaaaguagauccauca

SEQ ID NO: 994385 - RNA, 22 nt, Human
ucagggcaagauugguuaauaa

SEQ ID NO: 994386 - RNA, 22 nt, Human
auguucaaacuuuuuacacacc

SEQ ID NO: 994387 - RNA, 22 nt, Human
gucaaacaaauuaacauaucca

SEQ ID NO: 994388 - RNA, 22 nt, Human
cagugggugaugaguccugggg

SEQ ID NO: 994389 - RNA, 22 nt, Human
gcuggccauggggagugaggag

SEQ ID NO: 994390 - RNA, 22 nt, Human
gcugucugggaggccuccacuu

SEQ ID NO: 994391 - RNA, 22 nt, Human
aauaauguugacgauagucuua

SEQ ID NO: 994392 - RNA, 22 nt, Human
ugggaauggaugcuaagugcua

SEQ ID NO: 994393 - RNA, 22 nt, Human
cagaagcaaaugccuugcugag

SEQ ID NO: 994394 - RNA, 22 nt, Human
cugagccaccggcagggacauc

SEQ ID NO: 994395 - RNA, 22 nt, Human
acaggcugacuuccugccaugu

SEQ ID NO: 994396 - RNA, 22 nt, Human
uugacaaugcacugugcuaagu

SEQ ID NO: 994397 - RNA, 22 nt, Human
cagagcagagugauuguucugg

SEQ ID NO: 994398 - RNA, 22 nt, Human
uguaggauuuucaccagaccuu

SEQ ID NO: 994399 - RNA, 22 nt, Human
cauuucugugacacuuccaucu

SEQ ID NO: 994400 - RNA, 22 nt, Human
uagaaacacagaucugguguca

SEQ ID NO: 994401 - RNA, 22 nt, Human
ggagcugcacgcucugaagccu

SEQ ID NO: 994402 - RNA, 22 nt, Human
cugggcugcagcgggagcgacg

SEQ ID NO: 994403 - RNA, 22 nt, Human
cuggcugcuggccugaggaugc

SEQ ID NO: 994404 - RNA, 22 nt, Human
ccugagccucuugcacgcucag

SEQ ID NO: 994405 - RNA, 22 nt, Human
guuuacaaauauuuuaaauggu

SEQ ID NO: 994406 - RNA, 22 nt, Human
uagaauauacacuacagcuuaa

SEQ ID NO: 994407 - RNA, 22 nt, Human
aggagccuccuucucaugugca

SEQ ID NO: 994408 - RNA, 22 nt, Human
cuugugcaauugacauugaauc

SEQ ID NO: 994409 - RNA, 22 nt, Human
uggugcaagucucugaggaggg

SEQ ID NO: 994410 - RNA, 22 nt, Human
uuacuuuggauggucaagaaag

SEQ ID NO: 994411 - RNA, 22 nt, Human
cacuggugacuucugagcugga

SEQ ID NO: 994412 - RNA, 22 nt, Human
ucaugcaaggcugaaacauggu

SEQ ID NO: 994413 - RNA, 22 nt, Human
ccgggccucgggacaccgggua

SEQ ID NO: 994414 - RNA, 22 nt, Human
cucaggguaaugaaagacgaau

SEQ ID NO: 994415 - RNA, 22 nt, Human
gcaggaugagugaguacauuua

SEQ ID NO: 994416 - RNA, 20 nt, Human
gcaaauggaucccacaagcc

SEQ ID NO: 994417 - RNA, 22 nt, Human
uuaucguacgcuucagaaauuu

SEQ ID NO: 994418 - RNA, 22 nt, Human
gucagcaggguccccuugagug

SEQ ID NO: 994419 - RNA, 22 nt, Human
uuauuauuuuguguacagcaaa

SEQ ID NO: 994420 - RNA, 22 nt, Human
gcauguguggaggagaugugcu

SEQ ID NO: 994421 - RNA, 22 nt, Human
gccuggcaaggcccuguugacu

SEQ ID NO: 994422 - RNA, 22 nt, Human
aaauguauccuacuuccugagu

SEQ ID NO: 994423 - RNA, 22 nt, Human
uuccuggcgccacggagccggu

SEQ ID NO: 994424 - RNA, 22 nt, Human
cugccacuuucacccagugcuc

SEQ ID NO: 994425 - RNA, 20 nt, Human
cugggcugcccagcuauggg

SEQ ID NO: 994426 - RNA, 19 nt, Human
uggcagcauugguaccuug

SEQ ID NO: 994427 - RNA, 22 nt, Human
caaauguguagagcuuuugggg

SEQ ID NO: 994428 - RNA, 22 nt, Human
ccugucuggccuuccacggggg

SEQ ID NO: 994429 - RNA, 22 nt, Human
cauuucugucacguucuuuuau

SEQ ID NO: 994430 - RNA, 17 nt, Human
acacagccagguucucc

SEQ ID NO: 994431 - RNA, 22 nt, Human
cuuuauguucaguacaaugcuu

SEQ ID NO: 994432 - RNA, 22 nt, Human
acaaagucugaaaccugaggca

SEQ ID NO: 994433 - RNA, 22 nt, Human
ucuuugcaugcauuuucccuua

SEQ ID NO: 994434 - RNA, 17 nt, Human
ucaggauccaggguucu

SEQ ID NO: 994435 - RNA, 22 nt, Human
cuauuaggcuuccauuucaugc

SEQ ID NO: 994436 - RNA, 22 nt, Human
gccaggcagcaggaagccagug

SEQ ID NO: 994437 - RNA, 22 nt, Human
gccucugcgccucagccgaccu

SEQ ID NO: 994438 - RNA, 22 nt, Human
cagguggcuucucccuaggcca

SEQ ID NO: 994439 - RNA, 22 nt, Human
cagguaagagacggauuggccc

SEQ ID NO: 994440 - RNA, 22 nt, Human
guccuggguccccgcaggucag

SEQ ID NO: 994441 - RNA, 22 nt, Human
guccucugaaguugugcaaugc

SEQ ID NO: 994442 - RNA, 22 nt, Human
caagauggacauaaggagagaa

SEQ ID NO: 994443 - RNA, 20 nt, Human
gcacugaaauucaauguuug

SEQ ID NO: 994444 - RNA, 22 nt, Human
ucauugcaguagggagagaccc

SEQ ID NO: 994445 - RNA, 22 nt, Human
gcaggagcucguuuccaggcug

SEQ ID NO: 994446 - RNA, 22 nt, Human
agcaggaaagaaaaaucugugu

SEQ ID NO: 994447 - RNA, 22 nt, Human
guuuagaauucuaacuuuaagg

SEQ ID NO: 994448 - RNA, 20 nt, Human
gccuguccugagugucaugg

SEQ ID NO: 994449 - RNA, 22 nt, Human
agaugaagacucaggagcaggu

SEQ ID NO: 994450 - RNA, 22 nt, Human
gagcugccugaacaagcagcag

SEQ ID NO: 994451 - RNA, 22 nt, Human
cugcccugggaguaccuguccu

SEQ ID NO: 994452 - RNA, 22 nt, Human
uaugaagacaaugauagcauga

SEQ ID NO: 994453 - RNA, 19 nt, Human
ugccuggcaccagcuccac

SEQ ID NO: 994454 - RNA, 22 nt, Human
gccucugccaagggggcugcgg

SEQ ID NO: 994455 - RNA, 22 nt, Human
cagagacauuaagugccaugau

SEQ ID NO: 994456 - RNA, 21 nt, Human
gcuccuggugcugcguggcgc

SEQ ID NO: 994457 - RNA, 22 nt, Human
gcaggcaguuauuuaguagaau

SEQ ID NO: 994458 - RNA, 22 nt, Human
cccaggccagaacuugguugcu

SEQ ID NO: 994459 - RNA, 17 nt, Human
uuccacaauaguuuguc

SEQ ID NO: 994460 - RNA, 22 nt, Human
ccaggaagccucagaugcugag

SEQ ID NO: 994461 - RNA, 22 nt, Human
ucuggcuccuggcuccacugcc

SEQ ID NO: 994462 - RNA, 21 nt, Human
agaaaaguagaguuuucagag

SEQ ID NO: 994463 - RNA, 22 nt, Human
cugugcccuggccaggccucuc

SEQ ID NO: 994464 - RNA, 22 nt, Human
ggccugugagcccuugcaugua

SEQ ID NO: 994465 - RNA, 19 nt, Human
cucuggagcagacacugga

SEQ ID NO: 994466 - RNA, 22 nt, Human
ucacucuguguuucccugggac

SEQ ID NO: 994467 - RNA, 22 nt, Human
ugacauaaaucuaaaggaaagg

SEQ ID NO: 994468 - RNA, 22 nt, Human
ucagaguguuuuacuaaacaag

SEQ ID NO: 994469 - RNA, 22 nt, Human
caagagcugaggcuggagaggu

SEQ ID NO: 994470 - RNA, 19 nt, Human
gagcagcugcacccauuga

SEQ ID NO: 994471 - RNA, 22 nt, Human
agaaaucuaagaugcucaagga

SEQ ID NO: 994472 - RNA, 22 nt, Human
uggcccugugugcaggcugcac

SEQ ID NO: 994473 - RNA, 22 nt, Human
cugugucccaguaccuugggua

SEQ ID NO: 994474 - RNA, 22 nt, Human
cagaguguuagcgcugguuggg

SEQ ID NO: 994475 - RNA, 22 nt, Human
caugaagcacagcucucuuuuu

SEQ ID NO: 994476 - RNA, 22 nt, Human
aggcaagggggcgccaccuucc

SEQ ID NO: 994477 - RNA, 22 nt, Human
cuggccgguauuugccucuggg

SEQ ID NO: 994478 - RNA, 22 nt, Human
cagcuguggcugccacugcucc

SEQ ID NO: 994479 - RNA, 22 nt, Human
ucuucucccaucuccaggcagg

SEQ ID NO: 994480 - RNA, 22 nt, Human
ugugcuucagguugucgccacg

SEQ ID NO: 994481 - RNA, 23 nt, Human
acucagcuuugggagaugacuca

SEQ ID NO: 994482 - RNA, 22 nt, Human
ccugagacaugaaccaggcucc

SEQ ID NO: 994483 - RNA, 22 nt, Human
uugugucccccuuugagagcca

SEQ ID NO: 994484 - RNA, 22 nt, Human
uauugacaauaggcaacugagg

SEQ ID NO: 994485 - RNA, 22 nt, Human
ucugagagccucuagccuaagu

SEQ ID NO: 994486 - RNA, 22 nt, Human
aaauugugcucacacugauauu

SEQ ID NO: 994487 - RNA, 22 nt, Human
ugucaugccaccguuucccaga

SEQ ID NO: 994488 - RNA, 22 nt, Human
cuccuggcccugagcucccagg

SEQ ID NO: 994489 - RNA, 22 nt, Human
cugccaggacugacgucuucag

SEQ ID NO: 994490 - RNA, 20 nt, Human
cccaggagugagcagcuuua

SEQ ID NO: 994491 - RNA, 22 nt, Human
ucaguggagcuaagcaugagau

SEQ ID NO: 994492 - RNA, 22 nt, Human
ucucugucugagccuggcagac

SEQ ID NO: 994493 - RNA, 20 nt, Human
ucucugcuguccacauuugc

SEQ ID NO: 994494 - RNA, 22 nt, Human
augugaggaagaaagagguaag

SEQ ID NO: 994495 - RNA, 22 nt, Human
uuuaugagcaccuuggcccaga

SEQ ID NO: 994496 - RNA, 22 nt, Human
ugucccaggccucauguugcca

SEQ ID NO: 994497 - RNA, 22 nt, Human
uccaagaucuacagcaguuuag

SEQ ID NO: 994498 - RNA, 22 nt, Human
augucacagcucccauuccucc

SEQ ID NO: 994499 - RNA, 22 nt, Human
uauuaggguaaauuugacaugc

SEQ ID NO: 994500 - RNA, 22 nt, Human
acacagggaggaggugcugugc

SEQ ID NO: 994501 - RNA, 22 nt, Human
ccagagccucgcccggagccuc

SEQ ID NO: 994502 - RNA, 22 nt, Human
uuggaggcaaugggaaggaggc

SEQ ID NO: 994503 - RNA, 22 nt, Human
gcugagugauugauauuuuagu

SEQ ID NO: 994504 - RNA, 22 nt, Human
aaggcacuuuucuaaagaccuu

SEQ ID NO: 994505 - RNA, 20 nt, Human
agacccuguguccuguggcc

SEQ ID NO: 994506 - RNA, 22 nt, Human
uuuuagaaauacugauuuagug

SEQ ID NO: 994507 - RNA, 17 nt, Human
gcugagugcagggaguc

SEQ ID NO: 994508 - RNA, 22 nt, Human
uccuaggcaguuggugcuccau

SEQ ID NO: 994509 - RNA, 22 nt, Human
gcaggaugggagcuucacucug

SEQ ID NO: 994510 - RNA, 22 nt, Human
auuuugaaaagcauuugaguaa

SEQ ID NO: 994511 - RNA, 22 nt, Human
ggccugggcccacugucaagag

SEQ ID NO: 994512 - RNA, 22 nt, Human
ugcagaccucccauggcugccu

SEQ ID NO: 994513 - RNA, 23 nt, Human
ugucauugugacuacagaaccag

SEQ ID NO: 994514 - RNA, 21 nt, Human
cacaggugggucagugaggcc

SEQ ID NO: 994515 - RNA, 22 nt, Human
aaacaugagcaucucuucaagc

SEQ ID NO: 994516 - RNA, 22 nt, Human
gaggcagagugcaccccaggag

SEQ ID NO: 994517 - RNA, 22 nt, Human
aacacauaggcagagcaugaca

SEQ ID NO: 994518 - RNA, 22 nt, Human
guggcugcagagccagcaagcu

SEQ ID NO: 994519 - RNA, 22 nt, Human
agccauugaguuuuaugugcua

SEQ ID NO: 994520 - RNA, 22 nt, Human
aggguauguuuuuaucuacugu

SEQ ID NO: 994521 - RNA, 22 nt, Human
gugucccagccccacaggccug

SEQ ID NO: 994522 - RNA, 21 nt, Human
aguguccuugaucuugccuug

SEQ ID NO: 994523 - RNA, 22 nt, Human
ucuccuggcauuugguugagua

SEQ ID NO: 994524 - RNA, 22 nt, Human
agggacacaugugauuauuuau

SEQ ID NO: 994525 - RNA, 22 nt, Human
agcaucuggugagggccuaguu

SEQ ID NO: 994526 - RNA, 22 nt, Human
agccacagagguugaugugguu

SEQ ID NO: 994527 - RNA, 22 nt, Human
uuuuagauugggaaauguaaag

SEQ ID NO: 994528 - RNA, 22 nt, Human
uauauguaagcuauguaagagu

SEQ ID NO: 994529 - RNA, 22 nt, Human
guggcccucugauagggucagg

SEQ ID NO: 994530 - RNA, 22 nt, Human
aaggagaguacaggaguuggua

SEQ ID NO: 994531 - RNA, 22 nt, Human
acagggcagagaggcaggcuug

SEQ ID NO: 994532 - RNA, 22 nt, Human
cagcaugguggagcugcucuuu

SEQ ID NO: 994533 - RNA, 22 nt, Human
gccagggagucugggccacaga

SEQ ID NO: 994534 - RNA, 22 nt, Human
cugcugagguccuugcucagac

SEQ ID NO: 994535 - RNA, 22 nt, Human
ccagggugggaggcugaaggcg

SEQ ID NO: 994536 - RNA, 22 nt, Human
uuccaguucccaugaggauuaa

SEQ ID NO: 994537 - RNA, 22 nt, Human
cugccacuuacuaggcauggug

SEQ ID NO: 994538 - RNA, 22 nt, Human
ggcucugcccagaugaagagga

SEQ ID NO: 994539 - RNA, 22 nt, Human
gugcuuucugcaugguuccuac

SEQ ID NO: 994540 - RNA, 22 nt, Human
aggguggggugcuacaucuuua

SEQ ID NO: 994541 - RNA, 22 nt, Human
agguaaagacugcaaggagaau

SEQ ID NO: 994542 - RNA, 20 nt, Human
aacacacugguggcaucagg

SEQ ID NO: 994543 - RNA, 22 nt, Human
agggaagaugucucaucuuagg

SEQ ID NO: 994544 - RNA, 22 nt, Human
agcugccuguccuaggccauca

SEQ ID NO: 994545 - RNA, 22 nt, Human
uugcuauuuugagagucauagu

SEQ ID NO: 994546 - RNA, 22 nt, Human
cagcugccugcaacacaagcuu

SEQ ID NO: 994547 - RNA, 22 nt, Human
gagagcuggauucuggauaggu

SEQ ID NO: 994548 - RNA, 22 nt, Human
ugacagaacagguugggagcaa

SEQ ID NO: 994549 - RNA, 22 nt, Human
gcugagagaaaagugagguucu

SEQ ID NO: 994550 - RNA, 22 nt, Human
cagggccaguucucgcagcagu

SEQ ID NO: 994551 - RNA, 22 nt, Human
agaauuguaagcaauuugauua

SEQ ID NO: 994552 - RNA, 21 nt, Human
agcagaacagucgagcacugc

SEQ ID NO: 994553 - RNA, 22 nt, Human
gcugucaggccaugugggccuu

SEQ ID NO: 994554 - RNA, 22 nt, Human
ggcucagguugggucacaugac

SEQ ID NO: 994555 - RNA, 22 nt, Human
cagggcaggaugcugugauuau

SEQ ID NO: 994556 - RNA, 22 nt, Human
agaagccaacagggcaggagag

SEQ ID NO: 994557 - RNA, 22 nt, Human
gcugugcagccaagugccucug

SEQ ID NO: 994558 - RNA, 22 nt, Human
cagccuuugggucagaagauuc

SEQ ID NO: 994559 - RNA, 22 nt, Human
aauaauguuaugucauucuucu

SEQ ID NO: 994560 - RNA, 22 nt, Human
cagacacagcaauucuguguug

SEQ ID NO: 994561 - RNA, 22 nt, Human
cccugaggggaguggugaggug

SEQ ID NO: 994562 - RNA, 22 nt, Human
ugcugggggcuuucuggauacc

SEQ ID NO: 994563 - RNA, 21 nt, Human
gccacugcacuccagccuggg

SEQ ID NO: 994564 - RNA, 22 nt, Human
caugugucaaaugauguagcug

SEQ ID NO: 994565 - RNA, 22 nt, Human
gcugucccgaaccccugguaau

SEQ ID NO: 994566 - RNA, 22 nt, Human
gauuucaagcccccagagauuc

SEQ ID NO: 994567 - RNA, 22 nt, Human
ugccugggaaccaauccuggcu

SEQ ID NO: 994568 - RNA, 22 nt, Human
ucauggagacuuugagccuguu

SEQ ID NO: 994569 - RNA, 22 nt, Human
gggcaugguggugcacaccugu

SEQ ID NO: 994570 - RNA, 22 nt, Human
aaggacagaaacagauugcugg

SEQ ID NO: 994571 - RNA, 22 nt, Human
uccagggagauggcagaggcug

SEQ ID NO: 994572 - RNA, 22 nt, Human
agaccacagucaggcuccuggu

SEQ ID NO: 994573 - RNA, 22 nt, Human
uggcagacuuuagggucuacau

SEQ ID NO: 994574 - RNA, 22 nt, Human
gaagcucucaaacucuccccuu

SEQ ID NO: 994575 - RNA, 22 nt, Human
uacaaagcuguauagccugguc

SEQ ID NO: 994576 - RNA, 22 nt, Human
cauugaaaaacguugacugagu

SEQ ID NO: 994577 - RNA, 22 nt, Human
ugcucccagggacucuggcugg

SEQ ID NO: 994578 - RNA, 22 nt, Human
caggccugaguguggaagucuu

SEQ ID NO: 994579 - RNA, 22 nt, Human
cucugggcaaguaugauagaaa

SEQ ID NO: 994580 - RNA, 22 nt, Human
uuucacauuuuauacuuaagcc

SEQ ID NO: 994581 - RNA, 22 nt, Human
agcagagcuauucuugugcaau

SEQ ID NO: 994582 - RNA, 22 nt, Human
uugcauaaaagaguauaucuua

SEQ ID NO: 994583 - RNA, 22 nt, Human
ggcucugcuucagaaggcucau

SEQ ID NO: 994584 - RNA, 22 nt, Human
ccuggcagguggagguugcagu

SEQ ID NO: 994585 - RNA, 22 nt, Human
ugucaugccaggaaauaguccc

SEQ ID NO: 994586 - RNA, 22 nt, Human
augcaguacugauacaugccac

SEQ ID NO: 994587 - RNA, 19 nt, Human
guggccucggagcgcgcgg

SEQ ID NO: 994588 - RNA, 19 nt, Human
acauuuagaauguacuugc

SEQ ID NO: 994589 - RNA, 22 nt, Human
caguguggagggagagagccug

SEQ ID NO: 994590 - RNA, 22 nt, Human
aggcagcaugcucugcuucuac

SEQ ID NO: 994591 - RNA, 22 nt, Human
cuggguggcgucuggggccagu

SEQ ID NO: 994592 - RNA, 21 nt, Human
agaaaauggcguuuuagauuu

SEQ ID NO: 994593 - RNA, 21 nt, Human
gcccagcaaggugagaaggcc

SEQ ID NO: 994594 - RNA, 22 nt, Human
ugaaagguuauuuaggucugcu

SEQ ID NO: 994595 - RNA, 22 nt, Human
aaggcacucauucaaggagaua

SEQ ID NO: 994596 - RNA, 17 nt, Human
agcugaaauugcugaag

SEQ ID NO: 994597 - RNA, 23 nt, Human
ucaaacauauugugagacacagg

SEQ ID NO: 994598 - RNA, 22 nt, Human
gcagagugggagcccagggcug

SEQ ID NO: 994599 - RNA, 22 nt, Human
cugaggcuuugugugcaugccu

SEQ ID NO: 994600 - RNA, 22 nt, Human
gccucugcaucuucgccgcacu

SEQ ID NO: 994601 - RNA, 22 nt, Human
ugguggcuguugcagaacugag

SEQ ID NO: 994602 - RNA, 22 nt, Human
ugucagugguagacccagaggu

SEQ ID NO: 994603 - RNA, 20 nt, Human
acugcuucuuucucugaccu

SEQ ID NO: 994604 - RNA, 22 nt, Human
ucucagaguuccucuggagucc

SEQ ID NO: 994605 - RNA, 22 nt, Human
uugcucugacuggagugcagug

SEQ ID NO: 994606 - RNA, 22 nt, Human
uagagcuggaauuugcagcaag

SEQ ID NO: 994607 - RNA, 22 nt, Human
ucuccucaccaccagcagcaga

SEQ ID NO: 994608 - RNA, 20 nt, Human
ccugucuccucuuaccuggc

SEQ ID NO: 994609 - RNA, 22 nt, Human
gaagcagcaaaucugcaguauc

SEQ ID NO: 994610 - RNA, 22 nt, Human
ggagagcagggaggcugcucug

SEQ ID NO: 994611 - RNA, 22 nt, Human
ucagggcaggcgagcagcugcu

SEQ ID NO: 994612 - RNA, 22 nt, Human
uggagugaaguaaagaggacaa

SEQ ID NO: 994613 - RNA, 20 nt, Human
gagggcaggcacccauuuca

SEQ ID NO: 994614 - RNA, 22 nt, Human
cucaugucuucacccauucuaa

SEQ ID NO: 994615 - RNA, 22 nt, Human
gcagcuuuguggagaggcccau

SEQ ID NO: 994616 - RNA, 20 nt, Human
gacauucauaguuauuacca

SEQ ID NO: 994617 - RNA, 22 nt, Human
acauuucuauagugcaucuguu

SEQ ID NO: 994618 - RNA, 22 nt, Human
ccucaggggugcccacagcugc

SEQ ID NO: 994619 - RNA, 22 nt, Human
cucucugguuucagcgaagggg

SEQ ID NO: 994620 - RNA, 22 nt, Human
cgggcagauugggaagguucau

SEQ ID NO: 994621 - RNA, 22 nt, Human
ccucagaggugaacaucagugc

SEQ ID NO: 994622 - RNA, 22 nt, Human
aaaaaaucagaucuuugguuaa

SEQ ID NO: 994623 - RNA, 22 nt, Human
ggcagcagggucuagauugaug

SEQ ID NO: 994624 - RNA, 22 nt, Human
cccagccagccucuucccauau

SEQ ID NO: 994625 - RNA, 22 nt, Human
caggggcugagaaggaacgucc

SEQ ID NO: 994626 - RNA, 22 nt, Human
uuucauuauucaugcuaguuau

SEQ ID NO: 994627 - RNA, 22 nt, Human
cagggagaggcaucauagggaa

SEQ ID NO: 994628 - RNA, 22 nt, Human
cucucuggaagggggagcugau

SEQ ID NO: 994629 - RNA, 22 nt, Human
aucuggcuauuucuggucgggg

SEQ ID NO: 994630 - RNA, 22 nt, Human
auuaggcaauucugggcaucuc

SEQ ID NO: 994631 - RNA, 22 nt, Human
cagauaaaggcuuacuaguagu

SEQ ID NO: 994632 - RNA, 22 nt, Human
agggccugggauguccuccuag

SEQ ID NO: 994633 - RNA, 22 nt, Human
acacaugcugauaagaauauaa

SEQ ID NO: 994634 - RNA, 22 nt, Human
cugugucucuccuuacaagacu

SEQ ID NO: 994635 - RNA, 22 nt, Human
augugagguaucuaggucuucg

SEQ ID NO: 994636 - RNA, 22 nt, Human
ccuucugcuggucaucccagug

SEQ ID NO: 994637 - RNA, 22 nt, Human
ccucucucuccugcacacacac

SEQ ID NO: 994638 - RNA, 18 nt, Human
uggcucugcagccagaug

SEQ ID NO: 994639 - RNA, 22 nt, Human
uaauaggagccaggucacauag

SEQ ID NO: 994640 - RNA, 22 nt, Human
cugagggcccugaagcuuggca

SEQ ID NO: 994641 - RNA, 22 nt, Human
cagcagcugauggggaagugau

SEQ ID NO: 994642 - RNA, 22 nt, Human
gcucugcugauccgcagccauc

SEQ ID NO: 994643 - RNA, 22 nt, Human
uagcuuuacaaagugcugcacc

SEQ ID NO: 994644 - RNA, 22 nt, Human
uccucacaagcaagcacaggua

SEQ ID NO: 994645 - RNA, 22 nt, Human
cagcaaaauuugaggauugccu

SEQ ID NO: 994646 - RNA, 22 nt, Human
ggccucucuccagucagugcag

SEQ ID NO: 994647 - RNA, 22 nt, Human
ugaaacacuuucaauuacauau

SEQ ID NO: 994648 - RNA, 22 nt, Human
gcaggggaguggcaggcccgga

SEQ ID NO: 994649 - RNA, 22 nt, Human
caggcugcagugcaguggcuau

SEQ ID NO: 994650 - RNA, 22 nt, Human
ggagccagggaagcugcuuccu

SEQ ID NO: 994651 - RNA, 22 nt, Human
ggcaaaaaguucccaucagugu

SEQ ID NO: 994652 - RNA, 22 nt, Human
cacagcuggugcacuagcucug

SEQ ID NO: 994653 - RNA, 22 nt, Human
caaaugcuaacuucuuuccaaa

SEQ ID NO: 994654 - RNA, 22 nt, Human
augcacgccccacacuggugug

SEQ ID NO: 994655 - RNA, 22 nt, Human
gccuggagcucuccacuugggg

SEQ ID NO: 994656 - RNA, 22 nt, Human
ugaaagcacaaguucuaacagg

SEQ ID NO: 994657 - RNA, 22 nt, Human
acauuaaugaggugaugacaca

SEQ ID NO: 994658 - RNA, 22 nt, Human
auucuguauuucuaauaagauc

SEQ ID NO: 994659 - RNA, 22 nt, Human
aagccagggucaggggccuccu

SEQ ID NO: 994660 - RNA, 22 nt, Human
guggccaggacauugccaggca

SEQ ID NO: 994661 - RNA, 18 nt, Human
ccgggcuuuggugacaca

SEQ ID NO: 994662 - RNA, 22 nt, Human
ggcaggagaauggcgugaacuc

SEQ ID NO: 994663 - RNA, 22 nt, Human
ggucccagaauugguuagcaca

SEQ ID NO: 994664 - RNA, 22 nt, Human
ugucacagggauaccauggggc

SEQ ID NO: 994665 - RNA, 22 nt, Human
ucuacuuuucccuauacaguuu

SEQ ID NO: 994666 - RNA, 22 nt, Human
ggcucugccugcccagcagcac

SEQ ID NO: 994667 - RNA, 22 nt, Human
gagcuguccgccccugggccga

SEQ ID NO: 994668 - RNA, 22 nt, Human
guuauguauugggaaauccaag

SEQ ID NO: 994669 - RNA, 22 nt, Human
cuucuuaucaaguggcaaaucu

SEQ ID NO: 994670 - RNA, 22 nt, Human
cacauguaguaagcaggcaaug

SEQ ID NO: 994671 - RNA, 22 nt, Human
cuggguggaucgcagccccagg

SEQ ID NO: 994672 - RNA, 22 nt, Human
ugcugccuugaccuccugggcu

SEQ ID NO: 994673 - RNA, 22 nt, Human
uaaggucauggugaauaauaag

SEQ ID NO: 994674 - RNA, 22 nt, Human
guaucuuuuacaccaggaaauu

SEQ ID NO: 994675 - RNA, 22 nt, Human
guuauaaaugacugcaaaaguu

SEQ ID NO: 994676 - RNA, 22 nt, Human
caggaccccauauucacugaac

SEQ ID NO: 994677 - RNA, 22 nt, Human
uggagccagcccaggccccucu

SEQ ID NO: 994678 - RNA, 22 nt, Human
gagacaaaaguuggagugcaag

SEQ ID NO: 994679 - RNA, 22 nt, Human
ucccugggccacagcugugagc

SEQ ID NO: 994680 - RNA, 22 nt, Human
aagcaugugcuggggcuuuuug

SEQ ID NO: 994681 - RNA, 22 nt, Human
gagagugaugaaugguuaaaca

SEQ ID NO: 994682 - RNA, 22 nt, Human
uuucuguagggauuucacaguu

SEQ ID NO: 994683 - RNA, 22 nt, Human
gugccuggcacacagaaggcaa

SEQ ID NO: 994684 - RNA, 22 nt, Human
gaagccaguacugugcucugca

SEQ ID NO: 994685 - RNA, 22 nt, Human
ccuggcagcuaagugcuuugag

SEQ ID NO: 994686 - RNA, 22 nt, Human
uccucuggauauaagccucacc

SEQ ID NO: 994687 - RNA, 22 nt, Human
uagaaacagcauauauuagccc

SEQ ID NO: 994688 - RNA, 22 nt, Human
gcagggacaucuuugucuagua

SEQ ID NO: 994689 - RNA, 22 nt, Human
aagaugauaggacuugcuuaag

SEQ ID NO: 994690 - RNA, 22 nt, Human
ucuggcucuguguccucaccca

SEQ ID NO: 994691 - RNA, 22 nt, Human
ggcagauggagaagcagcaggu

SEQ ID NO: 994692 - RNA, 22 nt, Human
uuacaaagagugccagagugug

SEQ ID NO: 994693 - RNA, 22 nt, Human
agccuccaguagcugaagagac

SEQ ID NO: 994694 - RNA, 21 nt, Human
aaggccugcuuacugcuaguu

SEQ ID NO: 994695 - RNA, 22 nt, Human
agcaggagcugugggaagaugg

SEQ ID NO: 994696 - RNA, 22 nt, Human
ugaagccaucaggaagccagca

SEQ ID NO: 994697 - RNA, 22 nt, Human
gcugcccaggguggagccggcu

SEQ ID NO: 994698 - RNA, 22 nt, Human
agacaaaggauuaaugaugaug

SEQ ID NO: 994699 - RNA, 21 nt, Human
gagacagcccagugccagggc

SEQ ID NO: 994700 - RNA, 22 nt, Human
uauuagugaaagaauuaguuug

SEQ ID NO: 994701 - RNA, 22 nt, Human
aacaaaugauaccaguucucaa

SEQ ID NO: 994702 - RNA, 22 nt, Human
gccuggagagcacugugcgcuu

SEQ ID NO: 994703 - RNA, 22 nt, Human
cccagacauaacagcagagagg

SEQ ID NO: 994704 - RNA, 22 nt, Human
acucugcucuuuggacaaugcc

SEQ ID NO: 994705 - RNA, 22 nt, Human
uccuggagauaauugcagugaa

SEQ ID NO: 994706 - RNA, 22 nt, Human
aaugaacacagcccucuacuuu

SEQ ID NO: 994707 - RNA, 22 nt, Human
agucuucccugugccagagugu

SEQ ID NO: 994708 - RNA, 22 nt, Human
uuuuaucugugacaucuggcag

SEQ ID NO: 994709 - RNA, 22 nt, Human
aguaacucauguaaaccucaca

SEQ ID NO: 994710 - RNA, 22 nt, Human
agggcagccugagugcuggccc

SEQ ID NO: 994711 - RNA, 22 nt, Human
cacagaagaaucaugcuguguu

SEQ ID NO: 994712 - RNA, 20 nt, Human
aggagcugaauuagaggguu

SEQ ID NO: 994713 - RNA, 22 nt, Human
uaucuuuaacuugcaguauuua

SEQ ID NO: 994714 - RNA, 20 nt, Human
cccucugcacauggcugugg

SEQ ID NO: 994715 - RNA, 21 nt, Human
gugguuauuuucauuagcauc

SEQ ID NO: 994716 - RNA, 22 nt, Human
ugagcccuaagggucaagcagg

SEQ ID NO: 994717 - RNA, 21 nt, Human
ccucuggcuugugcugugccc

SEQ ID NO: 994718 - RNA, 22 nt, Human
auaaugugaagauaaugcaaga

SEQ ID NO: 994719 - RNA, 22 nt, Human
caaaguuaugaaugauaagauu

SEQ ID NO: 994720 - RNA, 22 nt, Human
caaaaguaauggcgguuuuuac

SEQ ID NO: 994721 - RNA, 21 nt, Human
uugaaggaucacuucuguacc

SEQ ID NO: 994722 - RNA, 21 nt, Human
cauuucuauugaugagaaaag

SEQ ID NO: 994723 - RNA, 22 nt, Human
ugcuggggucauggggcgcccg

SEQ ID NO: 994724 - RNA, 22 nt, Human
augugacaauauuuggucuuau

SEQ ID NO: 994725 - RNA, 21 nt, Human
guggcucugccaggacugaaa

SEQ ID NO: 994726 - RNA, 23 nt, Human
cuccuggaggguccggcccugcc

SEQ ID NO: 994727 - RNA, 22 nt, Human
cacugaagccacuggaagagga

SEQ ID NO: 994728 - RNA, 22 nt, Human
ccugagggcgccgagcucccag

SEQ ID NO: 994729 - RNA, 22 nt, Human
cagcagcucccauccgcugagc

SEQ ID NO: 994730 - RNA, 22 nt, Human
aagccaggcaugcuuggacagu

SEQ ID NO: 994731 - RNA, 22 nt, Human
uccucccacauaggacaauggg

SEQ ID NO: 994732 - RNA, 22 nt, Human
cagccuuuuccauguauuguug

SEQ ID NO: 994733 - RNA, 22 nt, Human
cugccugugugugccugcagaa

SEQ ID NO: 994734 - RNA, 22 nt, Human
uuuaaucaggcaaagcauaaua

SEQ ID NO: 994735 - RNA, 19 nt, Human
aauguaguguuaugucaac

SEQ ID NO: 994736 - RNA, 22 nt, Human
cagggacauugguggccagguu

SEQ ID NO: 994737 - RNA, 22 nt, Human
uccuggccugucuggaguagcu

SEQ ID NO: 994738 - RNA, 22 nt, Human
uguauuagaucugagaacuucu

SEQ ID NO: 994739 - RNA, 22 nt, Human
acauuaucccuggcacaacugc

SEQ ID NO: 994740 - RNA, 22 nt, Human
gcugagguaggagguugcagug

SEQ ID NO: 994741 - RNA, 22 nt, Human
agaggccagggacacugcucaa

SEQ ID NO: 994742 - RNA, 19 nt, Human
uggcugggugccaauggcc

SEQ ID NO: 994743 - RNA, 22 nt, Human
ucucaggaucuaauacauggua

SEQ ID NO: 994744 - RNA, 22 nt, Human
aucauuuaaaacaagucucuau

SEQ ID NO: 994745 - RNA, 22 nt, Human
ugggacugcucuugcugggguc

SEQ ID NO: 994746 - RNA, 22 nt, Human
aaacugcugguugcuggccagc

SEQ ID NO: 994747 - RNA, 23 nt, Human
gagagcugacugucaagacuguu

SEQ ID NO: 994748 - RNA, 22 nt, Human
agggcagagaucugagugggca

SEQ ID NO: 994749 - RNA, 22 nt, Human
ccaggaagcggugagggcugcc

SEQ ID NO: 994750 - RNA, 22 nt, Human
cagggccuucguaaguguccgg

SEQ ID NO: 994751 - RNA, 22 nt, Human
aagacccacaaggcugaauguu

SEQ ID NO: 994752 - RNA, 22 nt, Human
ccuggccuccuggccuucucau

SEQ ID NO: 994753 - RNA, 22 nt, Human
uuggccaauggugauucccggc

SEQ ID NO: 994754 - RNA, 23 nt, Human
ugcaggggaggcuuaaagcaggu

SEQ ID NO: 994755 - RNA, 22 nt, Human
augaguaaaaccacuauuuaca

SEQ ID NO: 994756 - RNA, 21 nt, Human
auacuuugaauuacagccuug

SEQ ID NO: 994757 - RNA, 22 nt, Human
cuggccagaguuggagggugug

SEQ ID NO: 994758 - RNA, 18 nt, Human
aggcacuggaauuaaggg

SEQ ID NO: 994759 - RNA, 22 nt, Human
uccuuucccuuuccauccuggc

SEQ ID NO: 994760 - RNA, 22 nt, Human
uggagcucaaaggccuguggga

SEQ ID NO: 994761 - RNA, 22 nt, Human
ggcagcucacugauuagcaauu

SEQ ID NO: 994762 - RNA, 20 nt, Human
accuuucaaaugauucagca

SEQ ID NO: 994763 - RNA, 22 nt, Human
agcagggcugcagugugucuuu

SEQ ID NO: 994764 - RNA, 22 nt, Human
uacaaaguagaaauucaguaaa

SEQ ID NO: 994765 - RNA, 22 nt, Human
cuggggaggcagggcugccccu

SEQ ID NO: 994766 - RNA, 22 nt, Human
ucauggcacuuagcacaguccu

SEQ ID NO: 994767 - RNA, 21 nt, Human
gcaggcuggucaaaccucagu

SEQ ID NO: 994768 - RNA, 22 nt, Human
guucacaagaugugguggggag

SEQ ID NO: 994769 - RNA, 22 nt, Human
gaggccuggguuggaggugcau

SEQ ID NO: 994770 - RNA, 22 nt, Human
uccuggccucacaguccugggu

SEQ ID NO: 994771 - RNA, 22 nt, Human
cuucaugcugauauccucgaug

SEQ ID NO: 994772 - RNA, 22 nt, Human
aagggcagcuauuaucgucauc

SEQ ID NO: 994773 - RNA, 22 nt, Human
cuuggcagagggcugggcucag

SEQ ID NO: 994774 - RNA, 22 nt, Human
caggcugaucagggcugggaug

SEQ ID NO: 994775 - RNA, 22 nt, Human
acucaagauagggaaaguacaa

SEQ ID NO: 994776 - RNA, 22 nt, Human
ucagagaacacagaggugaugu

SEQ ID NO: 994777 - RNA, 22 nt, Human
ucagcagggccuccuugugcag

SEQ ID NO: 994778 - RNA, 22 nt, Human
agagcuggcugguagcccugau

SEQ ID NO: 994779 - RNA, 22 nt, Human
acuucauuguaauauuauagca

SEQ ID NO: 994780 - RNA, 18 nt, Human
gggcauggaugcagcauc

SEQ ID NO: 994781 - RNA, 22 nt, Human
agacuucucaguuuuauuagua

SEQ ID NO: 994782 - RNA, 22 nt, Human
caauagaaaacucaauacuuaa

SEQ ID NO: 994783 - RNA, 22 nt, Human
cuucccuuggugaacagagcau

SEQ ID NO: 994784 - RNA, 22 nt, Human
cuggccuggucuggccucucca

SEQ ID NO: 994785 - RNA, 22 nt, Human
aguuggagugaacaugagauug

SEQ ID NO: 994786 - RNA, 20 nt, Human
uaaggcuguuuuguauuccu

SEQ ID NO: 994787 - RNA, 22 nt, Human
gacuguguccaugugcuggauu

SEQ ID NO: 994788 - RNA, 22 nt, Human
ccagucacagguguguuuauau

SEQ ID NO: 994789 - RNA, 22 nt, Human
cuuauaguaugauguugagaau

SEQ ID NO: 994790 - RNA, 22 nt, Human
uaaacagaaagcagauguacuu

SEQ ID NO: 994791 - RNA, 22 nt, Human
auaguaacuggcauguuuauga

SEQ ID NO: 994792 - RNA, 22 nt, Human
ugagcugggcugggcugagcug

SEQ ID NO: 994793 - RNA, 22 nt, Human
ugcucuguaaggucagaaaagg

SEQ ID NO: 994794 - RNA, 22 nt, Human
ggcuucaccaggugcaugcaug

SEQ ID NO: 994795 - RNA, 20 nt, Human
ccaauaaagcucuauaggga

SEQ ID NO: 994796 - RNA, 22 nt, Human
agcaaaguagcugcuguucuua

SEQ ID NO: 994797 - RNA, 22 nt, Human
auuagguuagugugcaagagaa

SEQ ID NO: 994798 - RNA, 22 nt, Human
gagcuuaggccagggacaggga

SEQ ID NO: 994799 - RNA, 22 nt, Human
ucauaaaaauagacucuaaagu

SEQ ID NO: 994800 - RNA, 22 nt, Human
aaauguguguauguacauauau

SEQ ID NO: 994801 - RNA, 19 nt, Human
cccuggcaggcaagccugg

SEQ ID NO: 994802 - RNA, 22 nt, Human
acucugcuaaauguguaggcuc

SEQ ID NO: 994803 - RNA, 22 nt, Human
ucucuggaguauaaccagggau

SEQ ID NO: 994804 - RNA, 22 nt, Human
gagaagcaauuuccaacugugc

SEQ ID NO: 994805 - RNA, 22 nt, Human
uggcucaguuaggucagaaaca

SEQ ID NO: 994806 - RNA, 16 nt, Human
agaggccuugaggaag

SEQ ID NO: 994807 - RNA, 22 nt, Human
accuuguuaaaaugaggauucu

SEQ ID NO: 994808 - RNA, 22 nt, Human
ggauuuggaagaccgggucaca

SEQ ID NO: 994809 - RNA, 22 nt, Human
gaagagcuguagccugcucuuu

SEQ ID NO: 994810 - RNA, 22 nt, Human
ugagccugaguucaaggcugca

SEQ ID NO: 994811 - RNA, 22 nt, Human
ucuggaguccagauccauuugg

SEQ ID NO: 994812 - RNA, 22 nt, Human
guuccaggcaagugggauagga

SEQ ID NO: 994813 - RNA, 22 nt, Human
uggcucugccacuaacuuggua

SEQ ID NO: 994814 - RNA, 22 nt, Human
uguguguauaugcauuuaucua

SEQ ID NO: 994815 - RNA, 22 nt, Human
gcccucucggcauagcaggggc

SEQ ID NO: 994816 - RNA, 22 nt, Human
uccugggcugcagggaagagca

SEQ ID NO: 994817 - RNA, 22 nt, Human
ucugggcagcagcagcuaguag

SEQ ID NO: 994818 - RNA, 22 nt, Human
uugcauugcuuggucuucaaga

SEQ ID NO: 994819 - RNA, 22 nt, Human
gggucccaggaaggagcagugu

SEQ ID NO: 994820 - RNA, 22 nt, Human
ccucgaccuccccaggcucagg

SEQ ID NO: 994821 - RNA, 21 nt, Human
accucaagcaacaaccaaggu

SEQ ID NO: 994822 - RNA, 22 nt, Human
acagacagggcaccugccuccu

SEQ ID NO: 994823 - RNA, 22 nt, Human
gacauuucaaucucauuauggg

SEQ ID NO: 994824 - RNA, 22 nt, Human
gcucugagaggugcagcaguaa

SEQ ID NO: 994825 - RNA, 21 nt, Human
ccagcuccaggaccuuggauc

SEQ ID NO: 994826 - RNA, 21 nt, Human
uccuggccagggcacuaggca

SEQ ID NO: 994827 - RNA, 22 nt, Human
ccucccuuggccauagccagcc

SEQ ID NO: 994828 - RNA, 22 nt, Human
uuccauauguauauagcuguua

SEQ ID NO: 994829 - RNA, 22 nt, Human
uggagcugacucacaccagcua

SEQ ID NO: 994830 - RNA, 22 nt, Human
acagcaggauuuggcgauguug

SEQ ID NO: 994831 - RNA, 22 nt, Human
ccagggugagaaaaggcuggau

SEQ ID NO: 994832 - RNA, 22 nt, Human
ccugcagguaaggcuaacugcc

SEQ ID NO: 994833 - RNA, 22 nt, Human
cagucccagcugcucagaaggc

SEQ ID NO: 994834 - RNA, 22 nt, Human
cuccucacacccacugcaacca

SEQ ID NO: 994835 - RNA, 22 nt, Human
aaagcagcagcaccugcauuuc

SEQ ID NO: 994836 - RNA, 22 nt, Human
ucacucuguguuugaacucaag

SEQ ID NO: 994837 - RNA, 21 nt, Human
ugacauaauccauaguacaaa

SEQ ID NO: 994838 - RNA, 22 nt, Human
uggcaacauggacaggucugcc

SEQ ID NO: 994839 - RNA, 22 nt, Human
ucacucuguuagaggaaagugc

SEQ ID NO: 994840 - RNA, 22 nt, Human
agcagcuggugagcaagcucag

SEQ ID NO: 994841 - RNA, 22 nt, Human
aguuucuaccgguacauucagg

SEQ ID NO: 994842 - RNA, 22 nt, Human
ugucagaacucuauugaugucc

SEQ ID NO: 994843 - RNA, 23 nt, Human
gacaccuuugccagaucaagaug

SEQ ID NO: 994844 - RNA, 23 nt, Human
agggguggucaguacccgcagug

SEQ ID NO: 994845 - RNA, 22 nt, Human
auaugaaaguaagcaugugugu

SEQ ID NO: 994846 - RNA, 22 nt, Human
ggcugcuggcauugagguaggu

SEQ ID NO: 994847 - RNA, 22 nt, Human
ugugugccagccuacgaggagc

SEQ ID NO: 994848 - RNA, 22 nt, Human
acagggcaugugcaagagacau

SEQ ID NO: 994849 - RNA, 22 nt, Human
gaguggggucugggcaucaguc

SEQ ID NO: 994850 - RNA, 22 nt, Human
cccuuccucccaggcuucugug

SEQ ID NO: 994851 - RNA, 22 nt, Human
ggcuccuggggaggugagcuug

SEQ ID NO: 994852 - RNA, 22 nt, Human
uccaguggcacuggagacuaga

SEQ ID NO: 994853 - RNA, 22 nt, Human
guggagccaggggcuguaggua

SEQ ID NO: 994854 - RNA, 22 nt, Human
auguagcaugaggcacugugcc

SEQ ID NO: 994855 - RNA, 22 nt, Human
ucagggaaauuuccauguguuu

SEQ ID NO: 994856 - RNA, 22 nt, Human
agccacagucaaccuguccaua

SEQ ID NO: 994857 - RNA, 22 nt, Human
aacugcauuugcauaaguccau

SEQ ID NO: 994858 - RNA, 22 nt, Human
auggccaagagucgauuugggg

SEQ ID NO: 994859 - RNA, 22 nt, Human
cugagcugguggaagcaugcag

SEQ ID NO: 994860 - RNA, 22 nt, Human
aaggagcucccggcagaccagg

SEQ ID NO: 994861 - RNA, 22 nt, Human
agugaaauaugcccauugcugu

SEQ ID NO: 994862 - RNA, 22 nt, Human
ucaaagucuaucuguaauuacu

SEQ ID NO: 994863 - RNA, 22 nt, Human
ccugggccugaaaacauuucuc

SEQ ID NO: 994864 - RNA, 22 nt, Human
uuacuggcugggccugagggcu

SEQ ID NO: 994865 - RNA, 22 nt, Human
cugaaggagguagagugacaua

SEQ ID NO: 994866 - RNA, 23 nt, Human
aggugcagcccuggaccugcccc

SEQ ID NO: 994867 - RNA, 22 nt, Human
agcagggcaaagucaggcuaac

SEQ ID NO: 994868 - RNA, 22 nt, Human
cuacauggagaagaaaauucuu

SEQ ID NO: 994869 - RNA, 22 nt, Human
cagacagggaccucgcuccaga

SEQ ID NO: 994870 - RNA, 22 nt, Human
uguauuuucugaagauaaucaa

SEQ ID NO: 994871 - RNA, 22 nt, Human
uggcuagcccuuguggggagag

SEQ ID NO: 994872 - RNA, 21 nt, Human
ugauuuccagaaaauuggccc

SEQ ID NO: 994873 - RNA, 22 nt, Human
aggcugucaucuuugcaggcag

SEQ ID NO: 994874 - RNA, 22 nt, Human
aaagacauggaacuagagaugg

SEQ ID NO: 994875 - RNA, 22 nt, Human
cagagcagaaaccugggugauu

SEQ ID NO: 994876 - RNA, 22 nt, Human
aaaugaacucuuccugcauccc

SEQ ID NO: 994877 - RNA, 22 nt, Human
uggccugcccagagcagcucug

SEQ ID NO: 994878 - RNA, 22 nt, Human
gaugcugagagguggagggaac

SEQ ID NO: 994879 - RNA, 21 nt, Human
ugccaggccugagcugggguc

SEQ ID NO: 994880 - RNA, 22 nt, Human
aaggcacugagccagccgucuc

SEQ ID NO: 994881 - RNA, 22 nt, Human
aauguacaaggguuccaguuuu

SEQ ID NO: 994882 - RNA, 22 nt, Human
ccagggcaugggaagaacugaa

SEQ ID NO: 994883 - RNA, 22 nt, Human
ucugucacccaggcuggagugc

SEQ ID NO: 994884 - RNA, 22 nt, Human
aucaguuucuaccauguggaau

SEQ ID NO: 994885 - RNA, 22 nt, Human
cuuuuacugugaaaagaaacug

SEQ ID NO: 994886 - RNA, 22 nt, Human
ugugaugguucacugggcauga

SEQ ID NO: 994887 - RNA, 22 nt, Human
uugcaguugucuuuccuaauuu

SEQ ID NO: 994888 - RNA, 22 nt, Human
auaaauuuauaauuguuuccug

SEQ ID NO: 994889 - RNA, 22 nt, Human
ggugaggcagguggcugcugag

SEQ ID NO: 994890 - RNA, 22 nt, Human
guggccugggguuuguucugag

SEQ ID NO: 994891 - RNA, 22 nt, Human
uggcucuguugugcugagccag

SEQ ID NO: 994892 - RNA, 22 nt, Human
gcuggccauucucuuugagaug

SEQ ID NO: 994893 - RNA, 22 nt, Human
cagagcugcuucccaguuugug

SEQ ID NO: 994894 - RNA, 18 nt, Human
ccauuucaugauuauuac

SEQ ID NO: 994895 - RNA, 22 nt, Human
ucugucacuuuuauuuacugaa

SEQ ID NO: 994896 - RNA, 22 nt, Human
cagcugagaccagaaugcaggu

SEQ ID NO: 994897 - RNA, 22 nt, Human
ggugaaggucuacugugugcca

SEQ ID NO: 994898 - RNA, 22 nt, Human
cauugaaaccuaacauaggcug

SEQ ID NO: 994899 - RNA, 22 nt, Human
uggccucugugggagcugagca

SEQ ID NO: 994900 - RNA, 22 nt, Human
ugugccaugaggcucugauaug

SEQ ID NO: 994901 - RNA, 20 nt, Human
gggaguggugguagccugug

SEQ ID NO: 994902 - RNA, 22 nt, Human
aaaaguauuuauggcuauguaa

SEQ ID NO: 994903 - RNA, 22 nt, Human
cugcagaggucuugcugauggu

SEQ ID NO: 994904 - RNA, 21 nt, Human
ugcuucucuagaucaacuacu

SEQ ID NO: 994905 - RNA, 22 nt, Human
agcauuuauuucuuagaaauug

SEQ ID NO: 994906 - RNA, 23 nt, Human
agaauuguaaauagaauauaccu

SEQ ID NO: 994907 - RNA, 22 nt, Human
aacagacauauuuuuaauaugc

SEQ ID NO: 994908 - RNA, 22 nt, Human
ugaugcugagccugggacugac

SEQ ID NO: 994909 - RNA, 22 nt, Human
cuggggcugcagcgaucuucau

SEQ ID NO: 994910 - RNA, 22 nt, Human
ugucauaaaacacaagcuguug

SEQ ID NO: 994911 - RNA, 22 nt, Human
ugcauauuuuauaaagauggaa

SEQ ID NO: 994912 - RNA, 22 nt, Human
cacagaauaaauugguaucaga

SEQ ID NO: 994913 - RNA, 19 nt, Human
ugagaaggcaguggggagc

SEQ ID NO: 994914 - RNA, 22 nt, Human
ccagaggugcugggagaggucu

SEQ ID NO: 994915 - RNA, 22 nt, Human
cagcaggggaacugugggccag

SEQ ID NO: 994916 - RNA, 22 nt, Human
agauaacuuuuggguauucaug

SEQ ID NO: 994917 - RNA, 22 nt, Human
ggauccuuaacuaucacaguga

SEQ ID NO: 994918 - RNA, 22 nt, Human
uccuggccagaggacaaagcug

SEQ ID NO: 994919 - RNA, 22 nt, Human
ggugcagugguguggcaaaggg

SEQ ID NO: 994920 - RNA, 22 nt, Human
guaacagaaagucaugcucauu

SEQ ID NO: 994921 - RNA, 22 nt, Human
gugcugcagagucucgugccgc

SEQ ID NO: 994922 - RNA, 22 nt, Human
ugggugggagcacccugucugg

SEQ ID NO: 994923 - RNA, 22 nt, Human
ugaugggaggugcugcaggacc

SEQ ID NO: 994924 - RNA, 22 nt, Human
gacagggcgcccagccuguuuc

SEQ ID NO: 994925 - RNA, 22 nt, Human
caaaaguaauguaugcucaucg

SEQ ID NO: 994926 - RNA, 22 nt, Human
ccagcccugccucucagggccc

SEQ ID NO: 994927 - RNA, 19 nt, Human
ggccuggauuuagggcucc

SEQ ID NO: 994928 - RNA, 22 nt, Human
ccagggcacguugggacaguac

SEQ ID NO: 994929 - RNA, 22 nt, Human
ucuucacaccgggcagcaggaa

SEQ ID NO: 994930 - RNA, 22 nt, Human
auuucugauaaacguaagcugc

SEQ ID NO: 994931 - RNA, 22 nt, Human
ucagggcacaggccuguggguu

SEQ ID NO: 994932 - RNA, 22 nt, Human
aggacuucuccgauaagucaga

SEQ ID NO: 994933 - RNA, 22 nt, Human
uggcagaggaggcucagauuga

SEQ ID NO: 994934 - RNA, 22 nt, Human
gagauucuguagucaggcaucu

SEQ ID NO: 994935 - RNA, 22 nt, Human
agcugcagucaagcugggccac

SEQ ID NO: 994936 - RNA, 22 nt, Human
aaggucauuuaacaauuuauga

SEQ ID NO: 994937 - RNA, 18 nt, Human
aggccaaacuuguaagca

SEQ ID NO: 994938 - RNA, 22 nt, Human
guguggcugugggagauguuca

SEQ ID NO: 994939 - RNA, 20 nt, Human
gugcuucagaagccauugcu

SEQ ID NO: 994940 - RNA, 22 nt, Human
ucuuuaaucauaaccaagaugg

SEQ ID NO: 994941 - RNA, 22 nt, Human
acauucaugucccacuucuagc

SEQ ID NO: 994942 - RNA, 19 nt, Human
uguuggugcggauguggag

SEQ ID NO: 994943 - RNA, 22 nt, Human
cugagcuuccaguuccuccagg

SEQ ID NO: 994944 - RNA, 21 nt, Human
ucuggagcccuaagcugagaa

SEQ ID NO: 994945 - RNA, 22 nt, Human
uugggcuggcagagguggucuu

SEQ ID NO: 994946 - RNA, 22 nt, Human
caaaugugacuuuugggcuucu

SEQ ID NO: 994947 - RNA, 22 nt, Human
gcagguguggaguggggugagc

SEQ ID NO: 994948 - RNA, 19 nt, Human
cgcaggagccgaggugacc

SEQ ID NO: 994949 - RNA, 23 nt, Human
uuacuuuugcaccaaccuaauau

SEQ ID NO: 994950 - RNA, 22 nt, Human
aaauauguaaccaaggugaagu

SEQ ID NO: 994951 - RNA, 22 nt, Human
auuuauguaucuguguagauca

SEQ ID NO: 994952 - RNA, 22 nt, Human
caaagaugcugauguuggauca

SEQ ID NO: 994953 - RNA, 22 nt, Human
ccuuccaggagucucugcaggu

SEQ ID NO: 994954 - RNA, 22 nt, Human
caaaaguaauugugguuuucac

SEQ ID NO: 994955 - RNA, 22 nt, Human
cugugcaguaggucagggcugg

SEQ ID NO: 994956 - RNA, 22 nt, Human
cuugcuuuguccagaaauucag

SEQ ID NO: 994957 - RNA, 22 nt, Human
ugagaggccccagcucuuggcc

SEQ ID NO: 994958 - RNA, 22 nt, Human
accaggcugugaagugagacua

SEQ ID NO: 994959 - RNA, 22 nt, Human
agaguguuauuugcucuguauu

SEQ ID NO: 994960 - RNA, 22 nt, Human
agacccugcaccucucgugggc

SEQ ID NO: 994961 - RNA, 18 nt, Human
agcagcugucagaaugcc

SEQ ID NO: 994962 - RNA, 22 nt, Human
gccugggaagacuaagugggag

SEQ ID NO: 994963 - RNA, 22 nt, Human
agccuccaucccaugcacaaag

SEQ ID NO: 994964 - RNA, 22 nt, Human
ucucucagcuuugagaccugcu

SEQ ID NO: 994965 - RNA, 22 nt, Human
cagagagagugggguguggauu

SEQ ID NO: 994966 - RNA, 22 nt, Human
gcucagagggaacaaggggcug

SEQ ID NO: 994967 - RNA, 22 nt, Human
aaucaguucuacaucuuaucca

SEQ ID NO: 994968 - RNA, 22 nt, Human
gcuguccagagcaugggagcaa

SEQ ID NO: 994969 - RNA, 23 nt, Human
cagugcagggcaacucagacucc

SEQ ID NO: 994970 - RNA, 22 nt, Human
cuguuuucaaagagagagaaug

SEQ ID NO: 994971 - RNA, 22 nt, Human
agaugcugugaggaagcuagga

SEQ ID NO: 994972 - RNA, 22 nt, Human
gcucccacgcaauucuuuucag

SEQ ID NO: 994973 - RNA, 22 nt, Human
cacugcagcaccaugcagggcu

SEQ ID NO: 994974 - RNA, 22 nt, Human
ccagucugugugccagccugcg

SEQ ID NO: 994975 - RNA, 22 nt, Human
aggcacugugcugaugucuuau

SEQ ID NO: 994976 - RNA, 22 nt, Human
guuugcauguguacuuaauugg

SEQ ID NO: 994977 - RNA, 22 nt, Human
ccuggcuuccuggagcucacaa

SEQ ID NO: 994978 - RNA, 22 nt, Human
aauuucaauuacuuuugcacca

SEQ ID NO: 994979 - RNA, 22 nt, Human
agaaaucucaguaucucaggga

SEQ ID NO: 994980 - RNA, 22 nt, Human
ugcugguggagaaaguggaggu

SEQ ID NO: 994981 - RNA, 22 nt, Human
ggcuucugguaaagaccacacc

SEQ ID NO: 994982 - RNA, 22 nt, Human
agggcugcaucugccuggugaa

SEQ ID NO: 994983 - RNA, 22 nt, Human
ugaagccagcuuuggaagacac

SEQ ID NO: 994984 - RNA, 22 nt, Human
agcagggcagguaaggaucaga

SEQ ID NO: 994985 - RNA, 22 nt, Human
agcccaugcaacaggccuagcg

SEQ ID NO: 994986 - RNA, 23 nt, Human
gcucagagguuuuucucuggaug

SEQ ID NO: 994987 - RNA, 22 nt, Human
cuguggcugcagccuugguccu

SEQ ID NO: 994988 - RNA, 22 nt, Human
agggacugagcuaggaucuagu

SEQ ID NO: 994989 - RNA, 22 nt, Human
gcagcaggcuuuucauaccuug

SEQ ID NO: 994990 - RNA, 22 nt, Human
gauggcacacagacauccccgc

SEQ ID NO: 994991 - RNA, 22 nt, Human
aucagcaagacuaggggaauac

SEQ ID NO: 994992 - RNA, 22 nt, Human
ggagagcaggguccugagauac

SEQ ID NO: 994993 - RNA, 22 nt, Human
ugccaggggaccuagggauguc

SEQ ID NO: 994994 - RNA, 22 nt, Human
aggcacuguacuagguacaggg

SEQ ID NO: 994995 - RNA, 22 nt, Human
ugggccugggcuccuguccucu

SEQ ID NO: 994996 - RNA, 22 nt, Human
cagccaggagcucccccugcuc

SEQ ID NO: 994997 - RNA, 22 nt, Human
uggcucugucaaacugcacaca

SEQ ID NO: 994998 - RNA, 22 nt, Human
cugccuugguuucuagcagggc

SEQ ID NO: 994999 - RNA, 22 nt, Human
cugcuuugauuagaagaguaca

SEQ ID NO: 995000 - RNA, 22 nt, Human
gucucagaguccuacuuauucc

SEQ ID NO: 995001 - RNA, 22 nt, Human
uuaauacagucuccagaaguaa

SEQ ID NO: 995002 - RNA, 22 nt, Human
cucuggacacuggcaugggguc

SEQ ID NO: 995003 - RNA, 22 nt, Human
aaugcagugagccauuaaaugg

SEQ ID NO: 995004 - RNA, 20 nt, Human
uauuucugggcaaccauuua

SEQ ID NO: 995005 - RNA, 22 nt, Human
ucagagugcagggaguagcagc

SEQ ID NO: 995006 - RNA, 22 nt, Human
gagauuggccuggcuugccaac

SEQ ID NO: 995007 - RNA, 22 nt, Human
guccuggggaauacagaagccg

SEQ ID NO: 995008 - RNA, 22 nt, Human
uccauuuucaucucauguauaa

SEQ ID NO: 995009 - RNA, 22 nt, Human
gccagcucagugccaggccccu

SEQ ID NO: 995010 - RNA, 22 nt, Human
guuguauucuucaauaucagag

SEQ ID NO: 995011 - RNA, 22 nt, Human
agggaagaaaauccaucgcugc

SEQ ID NO: 995012 - RNA, 22 nt, Human
uggcagcuugaaugcagucuuu

SEQ ID NO: 995013 - RNA, 22 nt, Human
agcuagaauguuccuuuucauu

SEQ ID NO: 995014 - RNA, 22 nt, Human
ugucacauugaauaugauuuau

SEQ ID NO: 995015 - RNA, 22 nt, Human
gcacagggagcaggucucuggu

SEQ ID NO: 995016 - RNA, 22 nt, Human
uaagaauuguguugaauagagu

SEQ ID NO: 995017 - RNA, 22 nt, Human
acagaacuuccugcuggagugg

SEQ ID NO: 995018 - RNA, 22 nt, Human
uuaguaauguguuaauaugaau

SEQ ID NO: 995019 - RNA, 19 nt, Human
uggggccuccugucccugg

SEQ ID NO: 995020 - RNA, 22 nt, Human
cccagguggguuggccucuguc

SEQ ID NO: 995021 - RNA, 22 nt, Human
gcucugagagugggugauucug

SEQ ID NO: 995022 - RNA, 22 nt, Human
gagaggccaccugacgagcagu

SEQ ID NO: 995023 - RNA, 22 nt, Human
uuaggcauuggaaggucagcuu

SEQ ID NO: 995024 - RNA, 21 nt, Human
gugguucuagagaaacagaau

SEQ ID NO: 995025 - RNA, 22 nt, Human
cugggaggcaccgcgucgugcu

SEQ ID NO: 995026 - RNA, 22 nt, Human
caggcagcauuuacucugauga

SEQ ID NO: 995027 - RNA, 22 nt, Human
ugucaugcccaggagcaaggua

SEQ ID NO: 995028 - RNA, 22 nt, Human
gcugccugccuaguuccacagu

SEQ ID NO: 995029 - RNA, 22 nt, Human
ccagcugcugugaggaccacag

SEQ ID NO: 995030 - RNA, 22 nt, Human
auuuagaaguuggagggcaaga

SEQ ID NO: 995031 - RNA, 22 nt, Human
ugaaaucuacccuauucagggu

SEQ ID NO: 995032 - RNA, 21 nt, Human
uggcucuguucaauauaugga

SEQ ID NO: 995033 - RNA, 22 nt, Human
gagagcugucagcguagcaccg

SEQ ID NO: 995034 - RNA, 21 nt, Human
gugcucugggcagcagagggc

SEQ ID NO: 995035 - RNA, 22 nt, Human
ccagcccuucccaacuggccag

SEQ ID NO: 995036 - RNA, 22 nt, Human
gccucccuguucuuccacaaua

SEQ ID NO: 995037 - RNA, 22 nt, Human
ggagggcucaauugacuccuga

SEQ ID NO: 995038 - RNA, 22 nt, Human
aagggcagagggaaucccacau

SEQ ID NO: 995039 - RNA, 22 nt, Human
cuccucccucuuugccacacau

SEQ ID NO: 995040 - RNA, 22 nt, Human
cagggugggcacccagccucca

SEQ ID NO: 995041 - RNA, 22 nt, Human
agcacuuuccuggcaaaugugg

SEQ ID NO: 995042 - RNA, 22 nt, Human
uuuuuccuagcgauuugucagc

SEQ ID NO: 995043 - RNA, 22 nt, Human
auucuuggcaaggagauuuaaa

SEQ ID NO: 995044 - RNA, 22 nt, Human
ggcuucccuuuccgagaggaga

SEQ ID NO: 995045 - RNA, 22 nt, Human
uggcgcaacucauucauggugu

SEQ ID NO: 995046 - RNA, 22 nt, Human
ugcagaagcagagaguugccaa

SEQ ID NO: 995047 - RNA, 22 nt, Human
ccugcccuagagaugacacaau

SEQ ID NO: 995048 - RNA, 22 nt, Human
gcuggccuccugcuagauggaa

SEQ ID NO: 995049 - RNA, 22 nt, Human
uuucuuaggcucuaaaaugacu

SEQ ID NO: 995050 - RNA, 22 nt, Human
gcagggugauagugaggcucag

SEQ ID NO: 995051 - RNA, 22 nt, Human
cucucugggggccaugccaaga

SEQ ID NO: 995052 - RNA, 21 nt, Human
cauuucaugauuauagaaaug

SEQ ID NO: 995053 - RNA, 21 nt, Human
ccuauugaauauaggaagauu

SEQ ID NO: 995054 - RNA, 22 nt, Human
ugcauuguugaccaguugugca

SEQ ID NO: 995055 - RNA, 22 nt, Human
ccagagcccagcacacggugcu

SEQ ID NO: 995056 - RNA, 22 nt, Human
aggccugagcagaggaguggac

SEQ ID NO: 995057 - RNA, 22 nt, Human
guucacaagaguuacagacaga

SEQ ID NO: 995058 - RNA, 22 nt, Human
uccagucaucucccuucacauu

SEQ ID NO: 995059 - RNA, 22 nt, Human
ucugccugaaauucacauguaa

SEQ ID NO: 995060 - RNA, 22 nt, Human
uuuucacacaaggugauaaguu

SEQ ID NO: 995061 - RNA, 22 nt, Human
cagcuugggaguuugguuuuau

SEQ ID NO: 995062 - RNA, 22 nt, Human
ugcuaucucuauauccauuuau

SEQ ID NO: 995063 - RNA, 22 nt, Human
ggaggggccggcugccugccac

SEQ ID NO: 995064 - RNA, 22 nt, Human
guauuugauacaugaaauggug

SEQ ID NO: 995065 - RNA, 22 nt, Human
uguucuuucaguuagacacagu

SEQ ID NO: 995066 - RNA, 22 nt, Human
uauguguacaucugguugagca

SEQ ID NO: 995067 - RNA, 22 nt, Human
gagcugggacauggguccucuc

SEQ ID NO: 995068 - RNA, 17 nt, Human
gccuggcccagccuggc

SEQ ID NO: 995069 - RNA, 22 nt, Human
uccagugguacauggagacacu

SEQ ID NO: 995070 - RNA, 22 nt, Human
cagaggcagaggucaucucugg

SEQ ID NO: 995071 - RNA, 23 nt, Human
gggaccagcuagggcugugaccu

SEQ ID NO: 995072 - RNA, 20 nt, Human
aaggcacuaugucugcuagc

SEQ ID NO: 995073 - RNA, 20 nt, Human
ugggccuguggcagaagucu

SEQ ID NO: 995074 - RNA, 18 nt, Human
gaaaggagagacaguagg

SEQ ID NO: 995075 - RNA, 22 nt, Human
aacuccuguucuaugacaagag

SEQ ID NO: 995076 - RNA, 22 nt, Human
ugaaggcuguuggauggggaag

SEQ ID NO: 995077 - RNA, 22 nt, Human
ugucucugaacagcuuacuaaa

SEQ ID NO: 995078 - RNA, 22 nt, Human
caaggcugcugcgggucgcacc

SEQ ID NO: 995079 - RNA, 22 nt, Human
gguagcacauugcauuaggaga

SEQ ID NO: 995080 - RNA, 22 nt, Human
uuugacagcuuguuacaaaguu

SEQ ID NO: 995081 - RNA, 22 nt, Human
accaaggaagagauucucaguu

SEQ ID NO: 995082 - RNA, 20 nt, Human
cucugcuuuaggagagucag

SEQ ID NO: 995083 - RNA, 22 nt, Human
agggaugguggagguugcaagu

SEQ ID NO: 995084 - RNA, 19 nt, Human
acugccugaggcucacagg

SEQ ID NO: 995085 - RNA, 22 nt, Human
ucauugaacgaagagcuccauu

SEQ ID NO: 995086 - RNA, 22 nt, Human
guguugacucuuggacuucaag

SEQ ID NO: 995087 - RNA, 20 nt, Human
aauguauauuuuaugccagg

SEQ ID NO: 995088 - RNA, 22 nt, Human
uuguccuuggaugaagcuggga

SEQ ID NO: 995089 - RNA, 22 nt, Human
acauuugucuucuuucagauua

SEQ ID NO: 995090 - RNA, 22 nt, Human
aagucuguagaaaaacaguuua

SEQ ID NO: 995091 - RNA, 22 nt, Human
cacauacaaugguguuauuugg

SEQ ID NO: 995092 - RNA, 22 nt, Human
agcugccacagagccuggccag

SEQ ID NO: 995093 - RNA, 22 nt, Human
acugaaagauaaaucaguuagc

SEQ ID NO: 995094 - RNA, 22 nt, Human
cucugagaaagcugugagcuaa

SEQ ID NO: 995095 - RNA, 22 nt, Human
ucacucuggaguccgcuaccag

SEQ ID NO: 995096 - RNA, 22 nt, Human
ccacagggacuguuaaaacccu

SEQ ID NO: 995097 - RNA, 22 nt, Human
gcacccagggacuuggcuggcc

SEQ ID NO: 995098 - RNA, 22 nt, Human
cacauaaguggguuccauugca

SEQ ID NO: 995099 - RNA, 22 nt, Human
cagcugccuguauuguccucau

SEQ ID NO: 995100 - RNA, 22 nt, Human
gaggcccaguccugcaagcacg

SEQ ID NO: 995101 - RNA, 22 nt, Human
auggggugagacuaggauuaaa

SEQ ID NO: 995102 - RNA, 22 nt, Human
agucuucagagaaauuaacucu

SEQ ID NO: 995103 - RNA, 21 nt, Human
ucuccaguauccuucucugag

SEQ ID NO: 995104 - RNA, 22 nt, Human
cuuggccucuucucaggguggg

SEQ ID NO: 995105 - RNA, 22 nt, Human
cuggggacuugcagacacaauu

SEQ ID NO: 995106 - RNA, 22 nt, Human
agccacagagagggagcugcaa

SEQ ID NO: 995107 - RNA, 22 nt, Human
ggagccugggcauuaguaauuu

SEQ ID NO: 995108 - RNA, 22 nt, Human
acugugcuuucucuggaggcau

SEQ ID NO: 995109 - RNA, 22 nt, Human
gcacagggcccugugcguaggu

SEQ ID NO: 995110 - RNA, 22 nt, Human
uccagggaccucccugagagcu

SEQ ID NO: 995111 - RNA, 22 nt, Human
caggacagagcccagacugugu

SEQ ID NO: 995112 - RNA, 22 nt, Human
gcaggccuuggcaaugagccug

SEQ ID NO: 995113 - RNA, 22 nt, Human
ggcugcaguuugucuuuugcuu

SEQ ID NO: 995114 - RNA, 22 nt, Human
gcccagcuccucugcagacccu

SEQ ID NO: 995115 - RNA, 22 nt, Human
gcaguggggcgcugggaguugg

SEQ ID NO: 995116 - RNA, 22 nt, Human
aggugagguuugggagguguca

SEQ ID NO: 995117 - RNA, 22 nt, Human
uacaguuuguuacauuguuagu

SEQ ID NO: 995118 - RNA, 22 nt, Human
agcaggcuuucaagagucuucu

SEQ ID NO: 995119 - RNA, 22 nt, Human
acagaaauugggcaaauggaag

SEQ ID NO: 995120 - RNA, 22 nt, Human
ggagcugcauuuagggagccuu

SEQ ID NO: 995121 - RNA, 19 nt, Human
ugucucugaaagaugagcu

SEQ ID NO: 995122 - RNA, 22 nt, Human
gcagcugccuauucagggcuug

SEQ ID NO: 995123 - RNA, 22 nt, Human
uggcagagucaucacaucugga

SEQ ID NO: 995124 - RNA, 22 nt, Human
agcucccagaagccagagucgg

SEQ ID NO: 995125 - RNA, 22 nt, Human
ugggauggcauccugggccuug

SEQ ID NO: 995126 - RNA, 22 nt, Human
gcugagcuagaaaaggaccaca

SEQ ID NO: 995127 - RNA, 22 nt, Human
guccacauaggaacccagcuuc

SEQ ID NO: 995128 - RNA, 22 nt, Human
auguuacagaaagcaaagauga

SEQ ID NO: 995129 - RNA, 22 nt, Human
uuucaauguaacauuuccaggc

SEQ ID NO: 995130 - RNA, 21 nt, Human
gccagggaagagaguuggcug

SEQ ID NO: 995131 - RNA, 22 nt, Human
ccacagggaacaugacagccuu

SEQ ID NO: 995132 - RNA, 22 nt, Human
uugcacuccagcccgagcaaca

SEQ ID NO: 995133 - RNA, 22 nt, Human
uguauuuugugaggaucacucu

SEQ ID NO: 995134 - RNA, 22 nt, Human
ucaggauccauagacucccaaa

SEQ ID NO: 995135 - RNA, 22 nt, Human
uagaauaugauuaauuuucuua

SEQ ID NO: 995136 - RNA, 22 nt, Human
uggcucugcaccucaguguacc

SEQ ID NO: 995137 - RNA, 22 nt, Human
uucaaugaggauagaacuggau

SEQ ID NO: 995138 - RNA, 22 nt, Human
guuuuuccuugcugaggacccg

SEQ ID NO: 995139 - RNA, 23 nt, Human
gaguguucauagcaggcucuugc

SEQ ID NO: 995140 - RNA, 22 nt, Human
augcaguagauaggcacuuuua

SEQ ID NO: 995141 - RNA, 22 nt, Human
uagauuucaggcuggcuugcgg

SEQ ID NO: 995142 - RNA, 22 nt, Human
agggcagagauuaauuaagaca

SEQ ID NO: 995143 - RNA, 22 nt, Human
uagagugguuaacaguuuagaa

SEQ ID NO: 995144 - RNA, 22 nt, Human
gcugcucuuuucagagaugaga

SEQ ID NO: 995145 - RNA, 22 nt, Human
ugcauuauuugcaugugccugu

SEQ ID NO: 995146 - RNA, 22 nt, Human
cagucauuuuauuugaaaauua

SEQ ID NO: 995147 - RNA, 22 nt, Human
aguguccccuccaagggccugg

SEQ ID NO: 995148 - RNA, 23 nt, Human
ggccucuguguucugcccacaug

SEQ ID NO: 995149 - RNA, 22 nt, Human
cucagagaaaaggagcaagggu

SEQ ID NO: 995150 - RNA, 18 nt, Human
aagcugcccucaggcagg

SEQ ID NO: 995151 - RNA, 22 nt, Human
gugugccaggaacuggcugcug

SEQ ID NO: 995152 - RNA, 22 nt, Human
agggagcuuccgaacuacagcu

SEQ ID NO: 995153 - RNA, 22 nt, Human
ccugagaggcccucucacuguc

SEQ ID NO: 995154 - RNA, 22 nt, Human
ucucucagaggccaggguccug

SEQ ID NO: 995155 - RNA, 22 nt, Human
gcugcucugaaaaugacuguug

SEQ ID NO: 995156 - RNA, 21 nt, Human
ggagcugcaggagccgaaggc

SEQ ID NO: 995157 - RNA, 22 nt, Human
uuagauaauguuauuguaauuu

SEQ ID NO: 995158 - RNA, 22 nt, Human
uuuagaguugaguauucauugg

SEQ ID NO: 995159 - RNA, 22 nt, Human
augcaguaaauguuaagaaaaa

SEQ ID NO: 995160 - RNA, 22 nt, Human
gagccuggauagccuuguucca

SEQ ID NO: 995161 - RNA, 22 nt, Human
ugggacaguuguccuccacucu

SEQ ID NO: 995162 - RNA, 22 nt, Human
gcaggaagaugagcucagguaa

SEQ ID NO: 995163 - RNA, 22 nt, Human
guauuuucaagagcaguaguau

SEQ ID NO: 995164 - RNA, 22 nt, Human
acagcugugaaaauccacagga

SEQ ID NO: 995165 - RNA, 22 nt, Human
ugacauaaaccagugagcaaaa

SEQ ID NO: 995166 - RNA, 20 nt, Human
accccagccccucuaucuga

SEQ ID NO: 995167 - RNA, 22 nt, Human
ugccuuccuggagcugaaggcu

SEQ ID NO: 995168 - RNA, 23 nt, Human
ccaaagucgaagucuaguccaga

SEQ ID NO: 995169 - RNA, 22 nt, Human
ugucacaaacauacauuauaga

SEQ ID NO: 995170 - RNA, 21 nt, Human
uggcucuggguaggagagugc

SEQ ID NO: 995171 - RNA, 22 nt, Human
guggcugguuuccugcaugcaa

SEQ ID NO: 995172 - RNA, 22 nt, Human
gucccaggcagagucaggaggg

SEQ ID NO: 995173 - RNA, 22 nt, Human
uaccaggcagcugcacagaggc

SEQ ID NO: 995174 - RNA, 22 nt, Human
ucaguguccggagccugagugc

SEQ ID NO: 995175 - RNA, 22 nt, Human
ugacaccacaacuagccauuga

SEQ ID NO: 995176 - RNA, 22 nt, Human
gcaggcucuucuuucugcccag

SEQ ID NO: 995177 - RNA, 22 nt, Human
uuauugagcacauaguaugugg

SEQ ID NO: 995178 - RNA, 22 nt, Human
ccagacaggaacacacaucucc

SEQ ID NO: 995179 - RNA, 22 nt, Human
caaagcucaugcucuuagccau

SEQ ID NO: 995180 - RNA, 22 nt, Human
uucucuuagcuguaaagucaau

SEQ ID NO: 995181 - RNA, 22 nt, Human
ccuuagagaguacugggcugcc

SEQ ID NO: 995182 - RNA, 22 nt, Human
gucccucugugucccugcaguc

SEQ ID NO: 995183 - RNA, 22 nt, Human
cugggaggauucauugagguga

SEQ ID NO: 995184 - RNA, 22 nt, Human
aggaggcugguucaggccauau

SEQ ID NO: 995185 - RNA, 22 nt, Human
gccugcuggauguggccaggcc

SEQ ID NO: 995186 - RNA, 22 nt, Human
ugacagaaauaguucuuaauuu

SEQ ID NO: 995187 - RNA, 22 nt, Human
acagggcaccugagguaggaag

SEQ ID NO: 995188 - RNA, 22 nt, Human
ccuuggagcggucagcacuggu

SEQ ID NO: 995189 - RNA, 22 nt, Human
uggcagcagacaucugaggucu

SEQ ID NO: 995190 - RNA, 22 nt, Human
aucuuugaagaggacuugaagu

SEQ ID NO: 995191 - RNA, 22 nt, Human
acccacgaagaugagcggcaug

SEQ ID NO: 995192 - RNA, 22 nt, Human
ucuuguuaucaggaaaacagua

SEQ ID NO: 995193 - RNA, 22 nt, Human
uccuucagauuccugcuucugg

SEQ ID NO: 995194 - RNA, 18 nt, Human
agucucagcggaggagua

SEQ ID NO: 995195 - RNA, 22 nt, Human
uuuacuuugugucaagucaaga

SEQ ID NO: 995196 - RNA, 22 nt, Human
aauaguguuguucacucaggag

SEQ ID NO: 995197 - RNA, 22 nt, Human
gaagagcugcucagaacaugau

SEQ ID NO: 995198 - RNA, 22 nt, Human
uggggacaggagacuuacagcu

SEQ ID NO: 995199 - RNA, 22 nt, Human
uuuccucuucgauuaaguuugg

SEQ ID NO: 995200 - RNA, 22 nt, Human
agggaggaucugcuccuugucu

SEQ ID NO: 995201 - RNA, 22 nt, Human
aggggccauuguucugcccgcu

SEQ ID NO: 995202 - RNA, 18 nt, Human
acaaaggucugcaagacc

SEQ ID NO: 995203 - RNA, 22 nt, Human
gauggcagucaaccaggugagg

SEQ ID NO: 995204 - RNA, 22 nt, Human
cuggggugucucgucugccauu

SEQ ID NO: 995205 - RNA, 21 nt, Human
auugaaagucaacaaucaguu

SEQ ID NO: 995206 - RNA, 23 nt, Human
ccugugugcccuuaauucacagc

SEQ ID NO: 995207 - RNA, 22 nt, Human
uuuauuauccaguguugucaug

SEQ ID NO: 995208 - RNA, 22 nt, Human
uuuuaagaugcuaguauuucag

SEQ ID NO: 995209 - RNA, 22 nt, Human
ccuggccagccagggcuggggu

SEQ ID NO: 995210 - RNA, 22 nt, Human
uuggccaagacucauguccuau

SEQ ID NO: 995211 - RNA, 22 nt, Human
aggaccagccuccaggucucuu

SEQ ID NO: 995212 - RNA, 22 nt, Human
agagaaggucacuaaggaccca

SEQ ID NO: 995213 - RNA, 22 nt, Human
aagggcaggagaagacggauau

SEQ ID NO: 995214 - RNA, 22 nt, Human
auguaacuucugugaaucugac

SEQ ID NO: 995215 - RNA, 22 nt, Human
ggcucugcccagguggacagca

SEQ ID NO: 995216 - RNA, 22 nt, Human
agguaaggcuguaagcuaagcc

SEQ ID NO: 995217 - RNA, 22 nt, Human
cgcugggcgccgaccugcuggc

SEQ ID NO: 995218 - RNA, 20 nt, Human
agugugcauuuagagucugc

SEQ ID NO: 995219 - RNA, 22 nt, Human
ugggcagaguagcucagaagaa

SEQ ID NO: 995220 - RNA, 21 nt, Human
ucucuggaguuagcagagaga

SEQ ID NO: 995221 - RNA, 22 nt, Human
augggaggcaggcucagaaccg

SEQ ID NO: 995222 - RNA, 22 nt, Human
aagcugccuugcugaggagaaa

SEQ ID NO: 995223 - RNA, 22 nt, Human
cagggccagccauccugcuggg

SEQ ID NO: 995224 - RNA, 22 nt, Human
cccaggcugauguucagcgggu

SEQ ID NO: 995225 - RNA, 22 nt, Human
ccaaaguccauaguuuacauua

SEQ ID NO: 995226 - RNA, 22 nt, Human
ggcagggucuggacugaaagcu

SEQ ID NO: 995227 - RNA, 21 nt, Human
guggccugauuaugaaugggu

SEQ ID NO: 995228 - RNA, 23 nt, Human
gacagagugagaccuugucuuac

SEQ ID NO: 995229 - RNA, 20 nt, Human
ucuccuggugacaguaccca

SEQ ID NO: 995230 - RNA, 22 nt, Human
gaggucaauaauaugugcuuua

SEQ ID NO: 995231 - RNA, 22 nt, Human
augucacagucugacucaguga

SEQ ID NO: 995232 - RNA, 22 nt, Human
gcucuggguagccacugccugg

SEQ ID NO: 995233 - RNA, 22 nt, Human
gagggaaggacccauuuuaagu

SEQ ID NO: 995234 - RNA, 22 nt, Human
auccaaagcccuaaguuaacug

SEQ ID NO: 995235 - RNA, 22 nt, Human
gcuguauuuaacaacuggcuca

SEQ ID NO: 995236 - RNA, 22 nt, Human
ccagggcuggugggagaugcug

SEQ ID NO: 995237 - RNA, 22 nt, Human
caguggcagagaacagagaccu

SEQ ID NO: 995238 - RNA, 22 nt, Human
ccuguguggaaaccgcaugacg

SEQ ID NO: 995239 - RNA, 22 nt, Human
aaaguuuuagaacuaggaagca

SEQ ID NO: 995240 - RNA, 22 nt, Human
gagggcugaugcuuacuuauuu

SEQ ID NO: 995241 - RNA, 22 nt, Human
guggaggagaggcgccuugcgg

SEQ ID NO: 995242 - RNA, 22 nt, Human
uguucaauccccagguccugaa

SEQ ID NO: 995243 - RNA, 23 nt, Human
ucccuggaggcagguccagggcc

SEQ ID NO: 995244 - RNA, 22 nt, Human
cuccuggaccagggcuauuggg

SEQ ID NO: 995245 - RNA, 22 nt, Human
gccuggcuccuaaggacuggcu

SEQ ID NO: 995246 - RNA, 22 nt, Human
gggagggaggugaugcuuggcu

SEQ ID NO: 995247 - RNA, 23 nt, Human
uggagcugggcucagacccuggg

SEQ ID NO: 995248 - RNA, 22 nt, Human
uacaagagguauauagaaacag

SEQ ID NO: 995249 - RNA, 22 nt, Human
caucagcacuaugauuaaagua

SEQ ID NO: 995250 - RNA, 22 nt, Human
acagugucaugucguguucccc

SEQ ID NO: 995251 - RNA, 22 nt, Human
cuuuuuaucucuuaaugauguu

SEQ ID NO: 995252 - RNA, 22 nt, Human
ccaggguggaggcuggauggag

SEQ ID NO: 995253 - RNA, 22 nt, Human
uggacaaaugauuucuaccuuu

SEQ ID NO: 995254 - RNA, 22 nt, Human
gggacuggcacagggcugggag

SEQ ID NO: 995255 - RNA, 22 nt, Human
ucucagagauuuauggaaaacu

SEQ ID NO: 995256 - RNA, 22 nt, Human
aauaauuuccagccaacuggaa

SEQ ID NO: 995257 - RNA, 23 nt, Human
uggcagcuguguaagagaaagca

SEQ ID NO: 995258 - RNA, 22 nt, Human
aggccucagugaucaucaucag

SEQ ID NO: 995259 - RNA, 22 nt, Human
uucaaaacaaucuguuugcauu

SEQ ID NO: 995260 - RNA, 22 nt, Human
ugauuaacugucuauuaaucau

SEQ ID NO: 995261 - RNA, 22 nt, Human
caagaacauugugaucacuuca

SEQ ID NO: 995262 - RNA, 22 nt, Human
agcucacaguguccuuccucaa

SEQ ID NO: 995263 - RNA, 22 nt, Human
cagugcaguuucccagaugcug

SEQ ID NO: 995264 - RNA, 22 nt, Human
ucaaaugcucuuugcagagagg

SEQ ID NO: 995265 - RNA, 22 nt, Human
ugacaauacagagagagcaaaa

SEQ ID NO: 995266 - RNA, 22 nt, Human
aggaaaaaccuguuaaugguag

SEQ ID NO: 995267 - RNA, 22 nt, Human
gaaggcugaugacagauucugc

SEQ ID NO: 995268 - RNA, 22 nt, Human
gcugagguggcugccuuaguaa

SEQ ID NO: 995269 - RNA, 22 nt, Human
caguuuuuagauuaguuggugg

SEQ ID NO: 995270 - RNA, 22 nt, Human
ucugcaggacugaggccuguuu

SEQ ID NO: 995271 - RNA, 22 nt, Human
uagaaaagaauuuuauuugaua

SEQ ID NO: 995272 - RNA, 20 nt, Human
guucucacugaucugcaggg

SEQ ID NO: 995273 - RNA, 21 nt, Human
uggcccuggccacggcugcca

SEQ ID NO: 995274 - RNA, 19 nt, Human
ggugaccaccuggucagug

SEQ ID NO: 995275 - RNA, 22 nt, Human
caaugauguuuagauaaaaucc

SEQ ID NO: 995276 - RNA, 22 nt, Human
cucucugaggcaggccuguggg

SEQ ID NO: 995277 - RNA, 17 nt, Human
ugagcaguagaagaugc

SEQ ID NO: 995278 - RNA, 18 nt, Human
cggcagagugcuucuagc

SEQ ID NO: 995279 - RNA, 22 nt, Human
auagaauagcauagaaaauuga

SEQ ID NO: 995280 - RNA, 20 nt, Human
uggagcugugguaaggagca

SEQ ID NO: 995281 - RNA, 22 nt, Human
ucugccuuuucacugccacuaa

SEQ ID NO: 995282 - RNA, 22 nt, Human
ugauuuccuaggucuggagaag

SEQ ID NO: 995283 - RNA, 22 nt, Human
uuucuuauauucugucauuguu

SEQ ID NO: 995284 - RNA, 22 nt, Human
ucccuggguccugcuugcucuc

SEQ ID NO: 995285 - RNA, 22 nt, Human
gcucucugccauaugaggauac

SEQ ID NO: 995286 - RNA, 23 nt, Human
aaguaacagggauaauagcaguu

SEQ ID NO: 995287 - RNA, 22 nt, Human
agaauccugaugaaaaggagag

SEQ ID NO: 995288 - RNA, 22 nt, Human
ucacauuuuccuugguaucugu

SEQ ID NO: 995289 - RNA, 17 nt, Human
cugagcauccgugcucu

SEQ ID NO: 995290 - RNA, 23 nt, Human
ucccagggaaggugagcgaggcu

SEQ ID NO: 995291 - RNA, 22 nt, Human
gcacacaguauaugcucauuaa

SEQ ID NO: 995292 - RNA, 22 nt, Human
ugaaguccuagaacuccuggua

SEQ ID NO: 995293 - RNA, 22 nt, Human
ccacagagacagagcccagggu

SEQ ID NO: 995294 - RNA, 22 nt, Human
ugucaccaguuccaggaaauaa

SEQ ID NO: 995295 - RNA, 17 nt, Human
ggugaguguccaggugg

SEQ ID NO: 995296 - RNA, 22 nt, Human
caggaaaaaugccaggagucag

SEQ ID NO: 995297 - RNA, 22 nt, Human
ucucaggguuuguacaagugua

SEQ ID NO: 995298 - RNA, 22 nt, Human
uucacagggcagcagcugagcc

SEQ ID NO: 995299 - RNA, 22 nt, Human
caggaacaauguaagucucauu

SEQ ID NO: 995300 - RNA, 22 nt, Human
uaaauguaccuucugccuuacu

SEQ ID NO: 995301 - RNA, 21 nt, Human
ucagggcagcugcucuucaga

SEQ ID NO: 995302 - RNA, 22 nt, Human
agagcuuagaauuucagaugau

SEQ ID NO: 995303 - RNA, 22 nt, Human
agagcugcaggguggacccagg

SEQ ID NO: 995304 - RNA, 22 nt, Human
cugugccuggggggcagagcug

SEQ ID NO: 995305 - RNA, 20 nt, Human
aguaggggaaugcaagagca

SEQ ID NO: 995306 - RNA, 22 nt, Human
acguguucaauuuccaucugac

SEQ ID NO: 995307 - RNA, 22 nt, Human
cuuucagagguuacucaggaaa

SEQ ID NO: 995308 - RNA, 22 nt, Human
agcagccaguucucugugguag

SEQ ID NO: 995309 - RNA, 22 nt, Human
agugaggcuaauaggcaauggu

SEQ ID NO: 995310 - RNA, 22 nt, Human
ccuuuuauacucagugauauca

SEQ ID NO: 995311 - RNA, 22 nt, Human
uuggccaagucacugguuaaug

SEQ ID NO: 995312 - RNA, 22 nt, Human
ccugucuggaacauggccuguu

SEQ ID NO: 995313 - RNA, 22 nt, Human
aggccaggcaacauucugaagu

SEQ ID NO: 995314 - RNA, 22 nt, Human
uccugccucaggcucuggagua

SEQ ID NO: 995315 - RNA, 22 nt, Human
ugcugccaggucuugcugucca

SEQ ID NO: 995316 - RNA, 22 nt, Human
agggcugagacuaaggccagau

SEQ ID NO: 995317 - RNA, 22 nt, Human
aggcagcaaagaaaugaugcug

SEQ ID NO: 995318 - RNA, 20 nt, Human
uaucaaucagaaagaagacu

SEQ ID NO: 995319 - RNA, 22 nt, Human
cacauuuaauccuuuauaagua

SEQ ID NO: 995320 - RNA, 22 nt, Human
gcaggagccacuucagggaugc

SEQ ID NO: 995321 - RNA, 22 nt, Human
cagcuggaucccugcagaacuu

SEQ ID NO: 995322 - RNA, 22 nt, Human
ugucucugagaugacucccacc

SEQ ID NO: 995323 - RNA, 22 nt, Human
gccaggcuggaaagaacagaca

SEQ ID NO: 995324 - RNA, 22 nt, Human
acauuucugcauguaggguaau

SEQ ID NO: 995325 - RNA, 22 nt, Human
gcucacagccggcuggcagggg

SEQ ID NO: 995326 - RNA, 22 nt, Human
agguuuucagcuguauccugag

SEQ ID NO: 995327 - RNA, 22 nt, Human
uacccagcuucaagucaggacu

SEQ ID NO: 995328 - RNA, 22 nt, Human
aagaugcuuauugcuccugcag

SEQ ID NO: 995329 - RNA, 18 nt, Human
cagcagagacauucaaaa

SEQ ID NO: 995330 - RNA, 22 nt, Human
cuuacauuuaaucaugugucau

SEQ ID NO: 995331 - RNA, 22 nt, Human
uccagggcuuggcugggacggu

SEQ ID NO: 995332 - RNA, 18 nt, Human
agcuggcccuggcugccg

SEQ ID NO: 995333 - RNA, 19 nt, Human
ugcagccacgugagagacu

SEQ ID NO: 995334 - RNA, 22 nt, Human
acagguggcuuauuggcugauu

SEQ ID NO: 995335 - RNA, 22 nt, Human
ucucuggcagggauaucuggcu

SEQ ID NO: 995336 - RNA, 22 nt, Human
ucucaagcuuguugguauguuu

SEQ ID NO: 995337 - RNA, 22 nt, Human
auccuugagccuuaucuuuugu

SEQ ID NO: 995338 - RNA, 22 nt, Human
guuugcauuucuugaacuauau

SEQ ID NO: 995339 - RNA, 22 nt, Human
uacauuguucaugcaugagaaa

SEQ ID NO: 995340 - RNA, 22 nt, Human
gaagccuugaacugcaaacccc

SEQ ID NO: 995341 - RNA, 22 nt, Human
ggagccugcgggagcucccauu

SEQ ID NO: 995342 - RNA, 22 nt, Human
ugcagaaggccugacauugcac

SEQ ID NO: 995343 - RNA, 22 nt, Human
gcucccaguucccaaagugacc

SEQ ID NO: 995344 - RNA, 22 nt, Human
cucccucugucuuguccagaaa

SEQ ID NO: 995345 - RNA, 22 nt, Human
cuggccuuuuguuucuggagaa

SEQ ID NO: 995346 - RNA, 22 nt, Human
aggccagcuguuacuagagcca

SEQ ID NO: 995347 - RNA, 22 nt, Human
uaaacaugugagugugcauaua

SEQ ID NO: 995348 - RNA, 18 nt, Human
aggcuucuuggcucaguc

SEQ ID NO: 995349 - RNA, 22 nt, Human
cagacaggcuagccagacucac

SEQ ID NO: 995350 - RNA, 23 nt, Human
gugauuucagggaacagaaucag

SEQ ID NO: 995351 - RNA, 22 nt, Human
aggucacacaacugucagaggc

SEQ ID NO: 995352 - RNA, 22 nt, Human
uguuccuaaauaugaauggaga

SEQ ID NO: 995353 - RNA, 22 nt, Human
cugcagggcagggccuccuggc

SEQ ID NO: 995354 - RNA, 22 nt, Human
gacagggcaagacucugucuaa

SEQ ID NO: 995355 - RNA, 22 nt, Human
ugacacagaaauuaagcuguca

SEQ ID NO: 995356 - RNA, 22 nt, Human
ucuuccaguguagacaucugcc

SEQ ID NO: 995357 - RNA, 22 nt, Human
ucgugucagaucagagguuccu

SEQ ID NO: 995358 - RNA, 22 nt, Human
cacugcucgcugcagcauggcc

SEQ ID NO: 995359 - RNA, 20 nt, Human
gcaaggcacagugaggaggg

SEQ ID NO: 995360 - RNA, 22 nt, Human
agcuggccuguuagagcugagu

SEQ ID NO: 995361 - RNA, 22 nt, Human
auuuaguguguauugcuauuau

SEQ ID NO: 995362 - RNA, 22 nt, Human
aagcugccaaugguaagcugcu

SEQ ID NO: 995363 - RNA, 22 nt, Human
aagaaauauugggccuuauaaa

SEQ ID NO: 995364 - RNA, 21 nt, Human
ggccugagcaccuguccaccu

SEQ ID NO: 995365 - RNA, 22 nt, Human
ugcucauuggcgaucugaggga

SEQ ID NO: 995366 - RNA, 21 nt, Human
cacugcagccuugaccugggc

SEQ ID NO: 995367 - RNA, 22 nt, Human
uagcaggguaaauguagaugga

SEQ ID NO: 995368 - RNA, 23 nt, Human
uggccugcagaguuucugcuggg

SEQ ID NO: 995369 - RNA, 22 nt, Human
caggcugaggcaguaggguuug

SEQ ID NO: 995370 - RNA, 22 nt, Human
gagaggccaaaaucccugcccc

SEQ ID NO: 995371 - RNA, 22 nt, Human
uggaaagagguagaggaucugg

SEQ ID NO: 995372 - RNA, 22 nt, Human
uuauguaccugaauuaguaaag

SEQ ID NO: 995373 - RNA, 22 nt, Human
auauucguggucaaguaaggcc

SEQ ID NO: 995374 - RNA, 22 nt, Human
gcucccaccuccagccugaguu

SEQ ID NO: 995375 - RNA, 18 nt, Human
uucagcagcagacacacu

SEQ ID NO: 995376 - RNA, 20 nt, Human
ucauugcacauaauggaagc

SEQ ID NO: 995377 - RNA, 22 nt, Human
ucuggagcuggagggcaaggca

SEQ ID NO: 995378 - RNA, 22 nt, Human
gcugucuucacuuccugguuuc

SEQ ID NO: 995379 - RNA, 22 nt, Human
gcucugcuggagggaaagagaa

SEQ ID NO: 995380 - RNA, 22 nt, Human
uaaugugugucaucaguagagu

SEQ ID NO: 995381 - RNA, 22 nt, Human
augcagagacagauguggcaug

SEQ ID NO: 995382 - RNA, 22 nt, Human
gccagagcacaggcugguagua

SEQ ID NO: 995383 - RNA, 22 nt, Human
cuguucaugcugauucuguaug

SEQ ID NO: 995384 - RNA, 22 nt, Human
ugggcaagucacuucugucuuu

SEQ ID NO: 995385 - RNA, 22 nt, Human
aggucauugaaguuauuuucuu

SEQ ID NO: 995386 - RNA, 18 nt, Human
gcagcugacacuggaguu

SEQ ID NO: 995387 - RNA, 22 nt, Human
ccagcuccgggaguugcugcug

SEQ ID NO: 995388 - RNA, 20 nt, Human
cugcugugugugccucagcc

SEQ ID NO: 995389 - RNA, 22 nt, Human
ccuccaggaacuugagagacac

SEQ ID NO: 995390 - RNA, 22 nt, Human
ggccacaagugguccugagucc

SEQ ID NO: 995391 - RNA, 22 nt, Human
ucauugucuugauaugauuguc

SEQ ID NO: 995392 - RNA, 22 nt, Human
gagacugcauuguccaaggguu

SEQ ID NO: 995393 - RNA, 22 nt, Human
cucugggcaggaccaguggacc

SEQ ID NO: 995394 - RNA, 22 nt, Human
cuggaaggcucugcugccuguc

SEQ ID NO: 995395 - RNA, 22 nt, Human
ccugggaggcugugggucugcu

SEQ ID NO: 995396 - RNA, 23 nt, Human
aaaguguagccagguuaagaacc

SEQ ID NO: 995397 - RNA, 22 nt, Human
cugccuggaaugccagcuucuc

SEQ ID NO: 995398 - RNA, 19 nt, Human
uccucagugacaaccucag

SEQ ID NO: 995399 - RNA, 22 nt, Human
agaaauguggaucguuuuaaaa

SEQ ID NO: 995400 - RNA, 22 nt, Human
cccagggcuuuucucacuagac

SEQ ID NO: 995401 - RNA, 22 nt, Human
gccaccagguuagauccagccu

SEQ ID NO: 995402 - RNA, 17 nt, Human
cuggagccaagagggcc

SEQ ID NO: 995403 - RNA, 22 nt, Human
ccuuuuauaaaguuguauugaa

SEQ ID NO: 995404 - RNA, 22 nt, Human
cugugcuucgcaacuccaaggu

SEQ ID NO: 995405 - RNA, 17 nt, Human
gcuuccugugcugggga

SEQ ID NO: 995406 - RNA, 22 nt, Human
ccagccagccuugaucugagua

SEQ ID NO: 995407 - RNA, 22 nt, Human
cucuggcuucuaccuugcaguu

SEQ ID NO: 995408 - RNA, 22 nt, Human
gugcaugugcauccauguguac

SEQ ID NO: 995409 - RNA, 22 nt, Human
auugacaaauggauguugacau

SEQ ID NO: 995410 - RNA, 22 nt, Human
uuucacaaagcauagcacuuua

SEQ ID NO: 995411 - RNA, 22 nt, Human
uaugcacaauaugaucuauuug

SEQ ID NO: 995412 - RNA, 22 nt, Human
gagcagugacuggagcaugaga

SEQ ID NO: 995413 - RNA, 22 nt, Human
agcaauaugacauugcuacauc

SEQ ID NO: 995414 - RNA, 22 nt, Human
uuggcucaggaccccugugacu

SEQ ID NO: 995415 - RNA, 22 nt, Human
acaggcugccuaccaaguauca

SEQ ID NO: 995416 - RNA, 22 nt, Human
ggccuggaaugcuuuccuacca

SEQ ID NO: 995417 - RNA, 22 nt, Human
aaggcugagggcuguaccuggc

SEQ ID NO: 995418 - RNA, 22 nt, Human
aucaguuuggugcuuucaguga

SEQ ID NO: 995419 - RNA, 22 nt, Human
augauuuccaguuguugcuaag

SEQ ID NO: 995420 - RNA, 20 nt, Human
auaauuuacccugcaccacu

SEQ ID NO: 995421 - RNA, 22 nt, Human
ggcugggagcuggacaggccgg

SEQ ID NO: 995422 - RNA, 22 nt, Human
cagcucccaguggcagcuccuu

SEQ ID NO: 995423 - RNA, 22 nt, Human
gcuguucugcgucccaggcugg

SEQ ID NO: 995424 - RNA, 22 nt, Human
ggcaggugcaccugagccaucu

SEQ ID NO: 995425 - RNA, 22 nt, Human
gugucaugggguuuguuauaca

SEQ ID NO: 995426 - RNA, 22 nt, Human
agagacaccgcgcaucauggcu

SEQ ID NO: 995427 - RNA, 22 nt, Human
aauaagauugacacaaguaccu

SEQ ID NO: 995428 - RNA, 22 nt, Human
cccaggccccagggcuugucag

SEQ ID NO: 995429 - RNA, 22 nt, Human
uaaauucugaucaaguuccuuc

SEQ ID NO: 995430 - RNA, 22 nt, Human
acaaggcugaacagugaagccg

SEQ ID NO: 995431 - RNA, 22 nt, Human
cagcccaggccgacaguuccuc

SEQ ID NO: 995432 - RNA, 22 nt, Human
uaggcaggugugcacugcccac

SEQ ID NO: 995433 - RNA, 22 nt, Human
gcugcucugcuguguaagcagg

SEQ ID NO: 995434 - RNA, 22 nt, Human
auacaaguugugauaauguaaa

SEQ ID NO: 995435 - RNA, 22 nt, Human
gccuggagaggaagccggugga

SEQ ID NO: 995436 - RNA, 22 nt, Human
guguccaucagcagccacugug

SEQ ID NO: 995437 - RNA, 22 nt, Human
uccagggagagccgcugcucca

SEQ ID NO: 995438 - RNA, 22 nt, Human
gucucagagagcuacucucuua

SEQ ID NO: 995439 - RNA, 22 nt, Human
ccaggagcagggcuggcugcac

SEQ ID NO: 995440 - RNA, 22 nt, Human
aggguggccaugagggagagau

SEQ ID NO: 995441 - RNA, 22 nt, Human
uccugggcuuuguuucucuccu

SEQ ID NO: 995442 - RNA, 22 nt, Human
caggagcucucaucgucagggc

SEQ ID NO: 995443 - RNA, 22 nt, Human
ugccucugugugcaggugagca

SEQ ID NO: 995444 - RNA, 22 nt, Human
ucuggccuauuucugucagauc

SEQ ID NO: 995445 - RNA, 22 nt, Human
ucugccaccaccuacacuagua

SEQ ID NO: 995446 - RNA, 22 nt, Human
cugcugcauuccucuuuaugag

SEQ ID NO: 995447 - RNA, 22 nt, Human
uuaaugcagaaaucaaacugac

SEQ ID NO: 995448 - RNA, 22 nt, Human
ucaggcuggaaugcaguggggc

SEQ ID NO: 995449 - RNA, 22 nt, Human
acaaaaagcuccauuacugucc

SEQ ID NO: 995450 - RNA, 22 nt, Human
gcugucccaugguugcaagaug

SEQ ID NO: 995451 - RNA, 22 nt, Human
gaaaaugugucaucccuacugu

SEQ ID NO: 995452 - RNA, 22 nt, Human
uggggcuguggauucucacgaa

SEQ ID NO: 995453 - RNA, 22 nt, Human
accuggcacuacaggcaccugu

SEQ ID NO: 995454 - RNA, 22 nt, Human
ucugucaggagauuggcagcug

SEQ ID NO: 995455 - RNA, 22 nt, Human
uaggaucucaccauagaaggaa

SEQ ID NO: 995456 - RNA, 22 nt, Human
gcccagcacauugcugaggacc

SEQ ID NO: 995457 - RNA, 22 nt, Human
ggcagcaguaggagcuaaucuu

SEQ ID NO: 995458 - RNA, 22 nt, Human
caggucagagucccccuguccu

SEQ ID NO: 995459 - RNA, 18 nt, Human
aggauauuaagaguacag

SEQ ID NO: 995460 - RNA, 22 nt, Human
ucccaguguggcaggccaugga

SEQ ID NO: 995461 - RNA, 22 nt, Human
uuuuuaagagauucuccagucu

SEQ ID NO: 995462 - RNA, 20 nt, Human
uuggcagcagcucagccacc

SEQ ID NO: 995463 - RNA, 22 nt, Human
auugaaaguccuaucuaaggga

SEQ ID NO: 995464 - RNA, 19 nt, Human
ucaaagcaagcauguucug

SEQ ID NO: 995465 - RNA, 22 nt, Human
aaauacagaguugcuuaaaagc

SEQ ID NO: 995466 - RNA, 22 nt, Human
aguggcaggcggagauguagga

SEQ ID NO: 995467 - RNA, 22 nt, Human
cugggcacuugcucacagcucu

SEQ ID NO: 995468 - RNA, 22 nt, Human
gggagcugagcuggaagagaau

SEQ ID NO: 995469 - RNA, 22 nt, Human
cgcagaagagguugucuagucc

SEQ ID NO: 995470 - RNA, 22 nt, Human
uauuugaaaguguacaaaaacu

SEQ ID NO: 995471 - RNA, 22 nt, Human
ugccaggaggaggugggacaga

SEQ ID NO: 995472 - RNA, 22 nt, Human
gaagcagccacggggagacaga

SEQ ID NO: 995473 - RNA, 22 nt, Human
guuauuagaagugaaggauugu

SEQ ID NO: 995474 - RNA, 22 nt, Human
aagccagguuccauggaggagc

SEQ ID NO: 995475 - RNA, 22 nt, Human
gcauuccuacaggcugcuauga

SEQ ID NO: 995476 - RNA, 22 nt, Human
gcaggccugacuguagggggca

SEQ ID NO: 995477 - RNA, 22 nt, Human
agccacagggggugagggacaa

SEQ ID NO: 995478 - RNA, 22 nt, Human
ucacgagaggcacagaauagag

SEQ ID NO: 995479 - RNA, 22 nt, Human
auuugagaugguaaauaacuuu

SEQ ID NO: 995480 - RNA, 22 nt, Human
gcagggcugcagagggcacugu

SEQ ID NO: 995481 - RNA, 22 nt, Human
uggccugucuuguugugcuaga

SEQ ID NO: 995482 - RNA, 22 nt, Human
gugcauauaugcacauaugugu

SEQ ID NO: 995483 - RNA, 22 nt, Human
uggccauagcucagcuccuuca

SEQ ID NO: 995484 - RNA, 22 nt, Human
uagggcagccuuauagcuccca

SEQ ID NO: 995485 - RNA, 22 nt, Human
gcugauguuuaguugauguuac

SEQ ID NO: 995486 - RNA, 22 nt, Human
gcaggagcccuggcauguucuu

SEQ ID NO: 995487 - RNA, 22 nt, Human
agguauagaauugaaaggguuu

SEQ ID NO: 995488 - RNA, 22 nt, Human
ugaugguugauuauaaaucagu

SEQ ID NO: 995489 - RNA, 22 nt, Human
cacugccuggaaggagagacau

SEQ ID NO: 995490 - RNA, 22 nt, Human
ggagugggcagcacugcccugu

SEQ ID NO: 995491 - RNA, 22 nt, Human
uuauuuucuccucagaaagugg

SEQ ID NO: 995492 - RNA, 22 nt, Human
ggagucccagcaaagccuuccc

SEQ ID NO: 995493 - RNA, 18 nt, Human
aggcuucccaggcaggcc

SEQ ID NO: 995494 - RNA, 22 nt, Human
uuucagaucauuuuuuaaguac

SEQ ID NO: 995495 - RNA, 22 nt, Human
ucacucugggcccuacugggcu

SEQ ID NO: 995496 - RNA, 22 nt, Human
ggcaguggguggaucucaggga

SEQ ID NO: 995497 - RNA, 22 nt, Human
ucacaggguguacaucaccuau

SEQ ID NO: 995498 - RNA, 22 nt, Human
ugucccaggcugaaguacagug

SEQ ID NO: 995499 - RNA, 22 nt, Human
ucuuugcaucccuuccauaguu

SEQ ID NO: 995500 - RNA, 18 nt, Human
cccagcccaccauuucuc

SEQ ID NO: 995501 - RNA, 22 nt, Human
guggccugccagcagauggcgc

SEQ ID NO: 995502 - RNA, 22 nt, Human
acagcaugucuaguuaaauacu

SEQ ID NO: 995503 - RNA, 22 nt, Human
caguggcugugaccagggaccu

SEQ ID NO: 995504 - RNA, 18 nt, Human
acagaggcagacauguau

SEQ ID NO: 995505 - RNA, 22 nt, Human
ucacagcaaaagugugcagagc

SEQ ID NO: 995506 - RNA, 22 nt, Human
cucuggaauguuuacaugcccu

SEQ ID NO: 995507 - RNA, 22 nt, Human
ggagugacucacagcugggaca

SEQ ID NO: 995508 - RNA, 22 nt, Human
caugaagcuugaagcaguccac

SEQ ID NO: 995509 - RNA, 22 nt, Human
gcagcuuggauuucuguaguuu

SEQ ID NO: 995510 - RNA, 22 nt, Human
gugggaugguagguagguaaua

SEQ ID NO: 995511 - RNA, 22 nt, Human
cuguagcaaguuauucaauaaa

SEQ ID NO: 995512 - RNA, 21 nt, Human
ccugagggugguugugaagau

SEQ ID NO: 995513 - RNA, 16 nt, Human
aggccaaaaaggggca

SEQ ID NO: 995514 - RNA, 22 nt, Human
cucacaggagaaagucaugguc

SEQ ID NO: 995515 - RNA, 22 nt, Human
gccaccucggcuuucucugcuc

SEQ ID NO: 995516 - RNA, 22 nt, Human
cugagccacugcuuguucagug

SEQ ID NO: 995517 - RNA, 22 nt, Human
gcuggaaggcuaggcucaguug

SEQ ID NO: 995518 - RNA, 22 nt, Human
uauaacaguuuaggugguguca

SEQ ID NO: 995519 - RNA, 22 nt, Human
uggcagggaguugcaggauuuc

SEQ ID NO: 995520 - RNA, 22 nt, Human
ucuaggagaaccaucagggagg

SEQ ID NO: 995521 - RNA, 21 nt, Human
gccacguuucagucuucucag

SEQ ID NO: 995522 - RNA, 22 nt, Human
agacagaacagaauaauuguug

SEQ ID NO: 995523 - RNA, 22 nt, Human
ggccucuguucugcauuccucc

SEQ ID NO: 995524 - RNA, 22 nt, Human
uacaugaacaaaauagcagaaa

SEQ ID NO: 995525 - RNA, 22 nt, Human
ccaggaggcagagguuacagug

SEQ ID NO: 995526 - RNA, 22 nt, Human
cucugagaggugagaagcagca

SEQ ID NO: 995527 - RNA, 22 nt, Human
uguguuccugccuggcucuggu

SEQ ID NO: 995528 - RNA, 22 nt, Human
cagaagaauggugucugagcuc

SEQ ID NO: 995529 - RNA, 22 nt, Human
aagguacaccaaaguucaaguu

SEQ ID NO: 995530 - RNA, 22 nt, Human
ugggcagacauugaguuuguuc

SEQ ID NO: 995531 - RNA, 22 nt, Human
gagaggaguaggcugauggugc

SEQ ID NO: 995532 - RNA, 17 nt, Human
cagggcugucugccuag

SEQ ID NO: 995533 - RNA, 23 nt, Human
ggucccaguggagaggccucacc

SEQ ID NO: 995534 - RNA, 22 nt, Human
uagaaaagauaacauucugugc

SEQ ID NO: 995535 - RNA, 22 nt, Human
aucuggcuggauucuuagcguu

SEQ ID NO: 995536 - RNA, 22 nt, Human
ugauuuccucuacuagcaauua

SEQ ID NO: 995537 - RNA, 22 nt, Human
cuggggcugcgguggaggagcc

SEQ ID NO: 995538 - RNA, 22 nt, Human
uacauugugauguuucaauaca

SEQ ID NO: 995539 - RNA, 22 nt, Human
uuuauauagagauuugugcaug

SEQ ID NO: 995540 - RNA, 22 nt, Human
caggaggcaucauggagcggac

SEQ ID NO: 995541 - RNA, 22 nt, Human
gcauaauauacaugcuugaucc

SEQ ID NO: 995542 - RNA, 22 nt, Human
uauuaucauugguaauaugguc

SEQ ID NO: 995543 - RNA, 18 nt, Human
ucagggaaucuuggccuu

SEQ ID NO: 995544 - RNA, 22 nt, Human
guggccugucagaagccguggg

SEQ ID NO: 995545 - RNA, 22 nt, Human
ggacacaagcuccggggcugca

SEQ ID NO: 995546 - RNA, 18 nt, Human
aaguaacagaagagcaca

SEQ ID NO: 995547 - RNA, 22 nt, Human
cugggccucaaucucagaguuu

SEQ ID NO: 995548 - RNA, 22 nt, Human
ggcucacgcaauuaucccggcc

SEQ ID NO: 995549 - RNA, 22 nt, Human
agcuguccuggcucaggcugug

SEQ ID NO: 995550 - RNA, 22 nt, Human
caguuucuguuuuaaauagcag

SEQ ID NO: 995551 - RNA, 22 nt, Human
agcccuucaaccugccuacucc

SEQ ID NO: 995552 - RNA, 22 nt, Human
gucaccagugcuaagaggugga

SEQ ID NO: 995553 - RNA, 23 nt, Human
cuccucguaacucuguggugggu

SEQ ID NO: 995554 - RNA, 22 nt, Human
gaugguuuggaaugaaguagcu

SEQ ID NO: 995555 - RNA, 22 nt, Human
ccagcuuguuugaagcucguca

SEQ ID NO: 995556 - RNA, 22 nt, Human
acucugcuuaauuaaaaccagg

SEQ ID NO: 995557 - RNA, 22 nt, Human
aaacucaaauuaaacuagcuua

SEQ ID NO: 995558 - RNA, 22 nt, Human
cagcccuggaacagcugacuca

SEQ ID NO: 995559 - RNA, 22 nt, Human
agcuguguguuuccacugagcu

SEQ ID NO: 995560 - RNA, 22 nt, Human
agccaaagaucagugugcaagu

SEQ ID NO: 995561 - RNA, 22 nt, Human
aucagcaaucaaauugcagagu

SEQ ID NO: 995562 - RNA, 22 nt, Human
aaaaaugucauuauggaacuga

SEQ ID NO: 995563 - RNA, 22 nt, Human
gcuggccauagaagccaaagag

SEQ ID NO: 995564 - RNA, 22 nt, Human
uggcagcaccagcaguguccuu

SEQ ID NO: 995565 - RNA, 22 nt, Human
acucugcuauugcagugcaaaa

SEQ ID NO: 995566 - RNA, 22 nt, Human
ccuaagaauuaaugaauacacc

SEQ ID NO: 995567 - RNA, 21 nt, Human
ccugagccuguuuauccagaa

SEQ ID NO: 995568 - RNA, 22 nt, Human
gccuggcaggggccugggagug

SEQ ID NO: 995569 - RNA, 22 nt, Human
gcacagcucgagcucaggaggg

SEQ ID NO: 995570 - RNA, 19 nt, Human
ccucugcuccaguuuccuu

SEQ ID NO: 995571 - RNA, 21 nt, Human
uccuccuucaaguccuggccu

SEQ ID NO: 995572 - RNA, 22 nt, Human
gcaccuuuuucuaggagaaugu

SEQ ID NO: 995573 - RNA, 22 nt, Human
ucucugauguauaucagagaac

SEQ ID NO: 995574 - RNA, 22 nt, Human
gggucagcugcugggggcugac

SEQ ID NO: 995575 - RNA, 22 nt, Human
ccugucugaaggcagggggaug

SEQ ID NO: 995576 - RNA, 21 nt, Human
ggcuccugcuuugugaggggc

SEQ ID NO: 995577 - RNA, 22 nt, Human
uugaaaggugaacaugaugcac

SEQ ID NO: 995578 - RNA, 22 nt, Human
agcugucuuucugccuccugau

SEQ ID NO: 995579 - RNA, 22 nt, Human
ucuucagagacucugagccccu

SEQ ID NO: 995580 - RNA, 23 nt, Human
cagaagcaccuguugacugcugc

SEQ ID NO: 995581 - RNA, 22 nt, Human
cugggccuagcaacagaggagu

SEQ ID NO: 995582 - RNA, 22 nt, Human
ugcugccaagcccgugcuccug

SEQ ID NO: 995583 - RNA, 17 nt, Human
agaugcuggccacaugu

SEQ ID NO: 995584 - RNA, 22 nt, Human
ucucuggagggcuccaggcggg

SEQ ID NO: 995585 - RNA, 22 nt, Human
caguuauuaugaggucauuagg

SEQ ID NO: 995586 - RNA, 22 nt, Human
guggccuuuccugaagaaauga

SEQ ID NO: 995587 - RNA, 22 nt, Human
agagauucauguuuacuguagg

SEQ ID NO: 995588 - RNA, 22 nt, Human
ugggcagaggcucugaagucca

SEQ ID NO: 995589 - RNA, 22 nt, Human
gcuggcugcgucaucacagggc

SEQ ID NO: 995590 - RNA, 21 nt, Human
auccuugaucagaagagugcu

SEQ ID NO: 995591 - RNA, 22 nt, Human
cagaaugcaaauuuuauaauau

SEQ ID NO: 995592 - RNA, 22 nt, Human
aauguguacaugacagauagaa

SEQ ID NO: 995593 - RNA, 22 nt, Human
caggacaguauaggcuuuagga

SEQ ID NO: 995594 - RNA, 22 nt, Human
caacagaagguguacuacugaa

SEQ ID NO: 995595 - RNA, 22 nt, Human
uauuuaauaaaacuauggcaug

SEQ ID NO: 995596 - RNA, 22 nt, Human
gaaggccucacucugcagcaua

SEQ ID NO: 995597 - RNA, 22 nt, Human
cccuggagggauuucucaauca

SEQ ID NO: 995598 - RNA, 22 nt, Human
ucacucugagaggucacuggaa

SEQ ID NO: 995599 - RNA, 22 nt, Human
aaggcacugacugugcagggga

SEQ ID NO: 995600 - RNA, 22 nt, Human
ggccucaguuucuucaacugua

SEQ ID NO: 995601 - RNA, 22 nt, Human
agucugcacucagguggagguc

SEQ ID NO: 995602 - RNA, 22 nt, Human
uuggccaaauaaucuugcagau

SEQ ID NO: 995603 - RNA, 22 nt, Human
ucugcuggccuuagcaggucua

SEQ ID NO: 995604 - RNA, 22 nt, Human
cucccuggcacagcgagagguu

SEQ ID NO: 995605 - RNA, 22 nt, Human
ucccagaggacuguuggugcua

SEQ ID NO: 995606 - RNA, 22 nt, Human
cuggagcccaggccuggugucu

SEQ ID NO: 995607 - RNA, 18 nt, Human
gucuggaggucaggagcu

SEQ ID NO: 995608 - RNA, 17 nt, Human
gcaaucucagucuccuu

SEQ ID NO: 995609 - RNA, 22 nt, Human
uuaguuaggaaacaaaguuguu

SEQ ID NO: 995610 - RNA, 22 nt, Human
ccugggagagucuguggucucc

SEQ ID NO: 995611 - RNA, 22 nt, Human
augguacaauguguuuguuagg

SEQ ID NO: 995612 - RNA, 22 nt, Human
ggcuggcacucuguccaguguc

SEQ ID NO: 995613 - RNA, 22 nt, Human
cggccaagccggggccccgaag

SEQ ID NO: 995614 - RNA, 22 nt, Human
gugccugggguugagcuaugaa

SEQ ID NO: 995615 - RNA, 22 nt, Human
agcugcucugauaaaccuacuu

SEQ ID NO: 995616 - RNA, 22 nt, Human
cugaggucucuuuccauaguga

SEQ ID NO: 995617 - RNA, 22 nt, Human
aggcacugguccauuuucugca

SEQ ID NO: 995618 - RNA, 22 nt, Human
aggccugacuugaauuuagggc

SEQ ID NO: 995619 - RNA, 22 nt, Human
aaaaauagcuucucuugucccu

SEQ ID NO: 995620 - RNA, 22 nt, Human
gcuggccucgcaggcaggaugu

SEQ ID NO: 995621 - RNA, 22 nt, Human
aaggugucacugggacaggaaa

SEQ ID NO: 995622 - RNA, 22 nt, Human
aaguaugugauacauguuaauu

SEQ ID NO: 995623 - RNA, 22 nt, Human
auuggucaggacuggcaugugg

SEQ ID NO: 995624 - RNA, 17 nt, Human
accagccucuccugggg

SEQ ID NO: 995625 - RNA, 22 nt, Human
gcagccacucucauuccacgug

SEQ ID NO: 995626 - RNA, 20 nt, Human
accauaauguuaauuacaaa

SEQ ID NO: 995627 - RNA, 22 nt, Human
aggagcuggaguccaggcaagu

SEQ ID NO: 995628 - RNA, 22 nt, Human
ucuggcagggguucugcacuug

SEQ ID NO: 995629 - RNA, 22 nt, Human
uccaguggugguuugaagggca

SEQ ID NO: 995630 - RNA, 22 nt, Human
ugcaggagcagagauggcugga

SEQ ID NO: 995631 - RNA, 22 nt, Human
ccugcugugaaacuggcauaug

SEQ ID NO: 995632 - RNA, 22 nt, Human
ucagugcagaauagugaugcau

SEQ ID NO: 995633 - RNA, 22 nt, Human
uugcauugauguuccuucuugc

SEQ ID NO: 995634 - RNA, 22 nt, Human
agcucccagcuccuuugagaga

SEQ ID NO: 995635 - RNA, 22 nt, Human
agcagaagaaagccacaugacu

SEQ ID NO: 995636 - RNA, 21 nt, Human
gagcauggcuuacaucagcag

SEQ ID NO: 995637 - RNA, 22 nt, Human
gcagggcucugcuguaguccua

SEQ ID NO: 995638 - RNA, 22 nt, Human
cagaauaugacaagauuuuccu

SEQ ID NO: 995639 - RNA, 22 nt, Human
auggcagggcagccucucagag

SEQ ID NO: 995640 - RNA, 22 nt, Human
uggagggcucuuucaccuggua

SEQ ID NO: 995641 - RNA, 22 nt, Human
cugguccuccuugccuucagau

SEQ ID NO: 995642 - RNA, 17 nt, Human
ucagcaaagacaaagga

SEQ ID NO: 995643 - RNA, 22 nt, Human
gccugucaauuuuguguacaau

SEQ ID NO: 995644 - RNA, 22 nt, Human
gggauggcucaaaggagucagg

SEQ ID NO: 995645 - RNA, 22 nt, Human
aaaaaugaaacggcugguuggc

SEQ ID NO: 995646 - RNA, 22 nt, Human
uuccgcuggggccgccuggcgg

SEQ ID NO: 995647 - RNA, 22 nt, Human
uggccacagccucugccaguuc

SEQ ID NO: 995648 - RNA, 23 nt, Human
aggaggaaaaguuaucugcugag

SEQ ID NO: 995649 - RNA, 16 nt, Human
gcuccugggcccucga

SEQ ID NO: 995650 - RNA, 22 nt, Human
ccuggggagaagagcuuccccc

SEQ ID NO: 995651 - RNA, 22 nt, Human
gagggcagagucuaaugaugca

SEQ ID NO: 995652 - RNA, 22 nt, Human
caaagguaaagaucugcugugg

SEQ ID NO: 995653 - RNA, 22 nt, Human
aaguuugacagaaguuucuaau

SEQ ID NO: 995654 - RNA, 22 nt, Human
ugcaccauguaaguggccacgu

SEQ ID NO: 995655 - RNA, 22 nt, Human
ugucaugcuuauguuacauacu

SEQ ID NO: 995656 - RNA, 22 nt, Human
caggcagcugacugucagauau

SEQ ID NO: 995657 - RNA, 22 nt, Human
aaaaagauguccugaaguuuag

SEQ ID NO: 995658 - RNA, 22 nt, Human
acagagcuuaauucaggagcuu

SEQ ID NO: 995659 - RNA, 22 nt, Human
uacacauguuuggcaaguaugu

SEQ ID NO: 995660 - RNA, 22 nt, Human
aggcugcuuucauggccgcccc

SEQ ID NO: 995661 - RNA, 22 nt, Human
cccagcaucuccaggcauggcc

SEQ ID NO: 995662 - RNA, 22 nt, Human
gaacagaauuaccgaagaucug

SEQ ID NO: 995663 - RNA, 22 nt, Human
ccagcugcuugggaaaaugucu

SEQ ID NO: 995664 - RNA, 22 nt, Human
uccugcagccacugcaggcaga

SEQ ID NO: 995665 - RNA, 22 nt, Human
acagggcagugucuugaaaaau

SEQ ID NO: 995666 - RNA, 22 nt, Human
aagggcagcugacagaugcuua

SEQ ID NO: 995667 - RNA, 22 nt, Human
uguccucuaauuggccucuugc

SEQ ID NO: 995668 - RNA, 22 nt, Human
aaggcagauauaaagacuagag

SEQ ID NO: 995669 - RNA, 22 nt, Human
cagcaagauuuuuaaagcaagg

SEQ ID NO: 995670 - RNA, 22 nt, Human
uggcuggggccugaauccugca

SEQ ID NO: 995671 - RNA, 22 nt, Human
aacuuuauuguuaggggcuaaa

SEQ ID NO: 995672 - RNA, 22 nt, Human
ccaccuccaccuauugccagcc

SEQ ID NO: 995673 - RNA, 22 nt, Human
uuggcuucuggcagucuggacg

SEQ ID NO: 995674 - RNA, 22 nt, Human
agccuggccugggcaggcacau

SEQ ID NO: 995675 - RNA, 22 nt, Human
uucaaugauuuuuagggaucau

SEQ ID NO: 995676 - RNA, 22 nt, Human
cugagccaguagucagggacaa

SEQ ID NO: 995677 - RNA, 23 nt, Human
acagcugcaccuggccgccuggc

SEQ ID NO: 995678 - RNA, 22 nt, Human
uccuuggcuuucuggagcuucu

SEQ ID NO: 995679 - RNA, 22 nt, Human
aaggcacuguacuaguuaguua

SEQ ID NO: 995680 - RNA, 22 nt, Human
ccagguggugaaagugggcccu

SEQ ID NO: 995681 - RNA, 22 nt, Human
ucagggcagguuaacuugggug

SEQ ID NO: 995682 - RNA, 22 nt, Human
ggugggcaacauuuggccugag

SEQ ID NO: 995683 - RNA, 22 nt, Human
gagcagaacaggccggguggga

SEQ ID NO: 995684 - RNA, 22 nt, Human
uuauuuaaaauguagguuggga

SEQ ID NO: 995685 - RNA, 22 nt, Human
aaaucagugcucauuugaaagg

SEQ ID NO: 995686 - RNA, 22 nt, Human
ccuuuucaacuaagauucugca

SEQ ID NO: 995687 - RNA, 20 nt, Human
cagcuuggaugagaggcuga

SEQ ID NO: 995688 - RNA, 22 nt, Human
gaguuauuggguggaaagguag

SEQ ID NO: 995689 - RNA, 22 nt, Human
cagggcaguuuuacuucucucu

SEQ ID NO: 995690 - RNA, 22 nt, Human
aaaucacuaaguuauagugugg

SEQ ID NO: 995691 - RNA, 22 nt, Human
uuguggaaauacagacuccaag

SEQ ID NO: 995692 - RNA, 22 nt, Human
ccaaagugcugagauuacaggu

SEQ ID NO: 995693 - RNA, 20 nt, Human
agccagaagaaggcuggaga

SEQ ID NO: 995694 - RNA, 20 nt, Human
ugugugcacacaugacauuc

SEQ ID NO: 995695 - RNA, 22 nt, Human
aaguuauuuccucgugacugaa

SEQ ID NO: 995696 - RNA, 22 nt, Human
cagagcugucauuugccaguga

SEQ ID NO: 995697 - RNA, 22 nt, Human
uauuaguagcuugaaauuggug

SEQ ID NO: 995698 - RNA, 22 nt, Human
gccugagcuacuagggagucug

SEQ ID NO: 995699 - RNA, 22 nt, Human
gguuggaggugggaauagcuag

SEQ ID NO: 995700 - RNA, 22 nt, Human
gcucugcugcuuacuagauggu

SEQ ID NO: 995701 - RNA, 22 nt, Human
caggccucaggggcucaggcug

SEQ ID NO: 995702 - RNA, 22 nt, Human
uccuuuuuaagucguuguggua

SEQ ID NO: 995703 - RNA, 22 nt, Human
aaucagaaaauucaguggaauu

SEQ ID NO: 995704 - RNA, 22 nt, Human
uaagaacagauaaaguuucccc

SEQ ID NO: 995705 - RNA, 22 nt, Human
acugugcaaugaguaauaaacu

SEQ ID NO: 995706 - RNA, 22 nt, Human
gcuggccaaaguguaccuggag

SEQ ID NO: 995707 - RNA, 22 nt, Human
ggguggcacaggugcagagggu

SEQ ID NO: 995708 - RNA, 22 nt, Human
ggcugcaggcagaggcugucug

SEQ ID NO: 995709 - RNA, 22 nt, Human
gaguguuccagaaacuggcccu

SEQ ID NO: 995710 - RNA, 22 nt, Human
aauuaguauugcgauucauuag

SEQ ID NO: 995711 - RNA, 22 nt, Human
gcagcagagcuuuguccuggcu

SEQ ID NO: 995712 - RNA, 22 nt, Human
uauuggugggggcagagagaga

SEQ ID NO: 995713 - RNA, 22 nt, Human
ucaugcccagagcaguaaauua

SEQ ID NO: 995714 - RNA, 22 nt, Human
ugaaagcacucacuucugcucu

SEQ ID NO: 995715 - RNA, 22 nt, Human
caagaugccccugguagggauc

SEQ ID NO: 995716 - RNA, 23 nt, Human
acuuuagauaaauuaugugcaca

SEQ ID NO: 995717 - RNA, 22 nt, Human
uugaaugaccaugaugcaaggg

SEQ ID NO: 995718 - RNA, 22 nt, Human
aguggcagagguugacugcagu

SEQ ID NO: 995719 - RNA, 22 nt, Human
ccucucccacguggcagaggcu

SEQ ID NO: 995720 - RNA, 22 nt, Human
uccagcucuaacaugcugggcc

SEQ ID NO: 995721 - RNA, 22 nt, Human
auauuucuugagcaccugguau

SEQ ID NO: 995722 - RNA, 22 nt, Human
uagacacaagagaaggguauaa

SEQ ID NO: 995723 - RNA, 22 nt, Human
auuucacucucccugccacuua

SEQ ID NO: 995724 - RNA, 22 nt, Human
aaauaguaaagugguagccauc

SEQ ID NO: 995725 - RNA, 22 nt, Human
acuggcugaaguuuacuuuuug

SEQ ID NO: 995726 - RNA, 22 nt, Human
gucccaggugggcuccaccucu

SEQ ID NO: 995727 - RNA, 22 nt, Human
agagcuggauggucaagauggc

SEQ ID NO: 995728 - RNA, 22 nt, Human
uccuugaaaaucuugguuuaga

SEQ ID NO: 995729 - RNA, 22 nt, Human
cuggccacuggagguggcaccc

SEQ ID NO: 995730 - RNA, 22 nt, Human
caggccugauacacugaacucu

SEQ ID NO: 995731 - RNA, 22 nt, Human
aaugcuguaaagaugcuaucug

SEQ ID NO: 995732 - RNA, 22 nt, Human
cguguggucccggcaaggcaag

SEQ ID NO: 995733 - RNA, 22 nt, Human
aaaaacuguaauuacuuuugca

SEQ ID NO: 995734 - RNA, 22 nt, Human
gggcuugcugauuugggcagga

SEQ ID NO: 995735 - RNA, 22 nt, Human
cuccagggagcuuggaaagacc

SEQ ID NO: 995736 - RNA, 22 nt, Human
cuggagccuucaccaggggaaa

SEQ ID NO: 995737 - RNA, 22 nt, Human
aucuggcuuaccuagggugccu

SEQ ID NO: 995738 - RNA, 22 nt, Human
aagugaguggccuggagaggug

SEQ ID NO: 995739 - RNA, 22 nt, Human
cugggcugcgggcgccccucca

SEQ ID NO: 995740 - RNA, 22 nt, Human
caagccugucucaccagugcua

SEQ ID NO: 995741 - RNA, 22 nt, Human
auuucuucaggucagaaauaga

SEQ ID NO: 995742 - RNA, 22 nt, Human
cagagacagaaaauggaucuag

SEQ ID NO: 995743 - RNA, 22 nt, Human
gcugagagcaaagcaugucuag

SEQ ID NO: 995744 - RNA, 22 nt, Human
uaugugaauacagcaguggaug

SEQ ID NO: 995745 - RNA, 22 nt, Human
uccagccaagggagguuacuag

SEQ ID NO: 995746 - RNA, 22 nt, Human
agggaucaaaaaauguacaugc

SEQ ID NO: 995747 - RNA, 22 nt, Human
guacuuccagccaagugagaca

SEQ ID NO: 995748 - RNA, 22 nt, Human
agcucccugagaugccacagca

SEQ ID NO: 995749 - RNA, 22 nt, Human
uggccugaauuauggcagaucu

SEQ ID NO: 995750 - RNA, 22 nt, Human
cagcagagcauuugguaggagg

SEQ ID NO: 995751 - RNA, 22 nt, Human
acugucucucuagcaguucagg

SEQ ID NO: 995752 - RNA, 22 nt, Human
guacauuggcaacucucuuaga

SEQ ID NO: 995753 - RNA, 22 nt, Human
cagggccauuggcguggcuguc

SEQ ID NO: 995754 - RNA, 22 nt, Human
ggugcuggacacguggcacucc

SEQ ID NO: 995755 - RNA, 22 nt, Human
agugucugccaacugcaugguc

SEQ ID NO: 995756 - RNA, 22 nt, Human
uuacaaagcguugagacaagua

SEQ ID NO: 995757 - RNA, 22 nt, Human
cucuggagaacuccuugugucu

SEQ ID NO: 995758 - RNA, 22 nt, Human
aguggccagugcugcucugggg

SEQ ID NO: 995759 - RNA, 22 nt, Human
ugugcagcuaguccuggacuug

SEQ ID NO: 995760 - RNA, 22 nt, Human
uccuggccuuauccccaaacug

SEQ ID NO: 995761 - RNA, 22 nt, Human
aggccugucuggggcucagcca

SEQ ID NO: 995762 - RNA, 22 nt, Human
ugggccugacucaccugccucc

SEQ ID NO: 995763 - RNA, 22 nt, Human
agccuggagaagauguguauug

SEQ ID NO: 995764 - RNA, 22 nt, Human
cauuuagacauuugauuugggg

SEQ ID NO: 995765 - RNA, 22 nt, Human
aaauaaguuaaacuagaaugau

SEQ ID NO: 995766 - RNA, 22 nt, Human
agccaggauggucucgaucggc

SEQ ID NO: 995767 - RNA, 22 nt, Human
cugcugggaaggucugcucagu

SEQ ID NO: 995768 - RNA, 22 nt, Human
auagugcaguggacugaguuaa

SEQ ID NO: 995769 - RNA, 22 nt, Human
ccagccuggagggcaguggugg

SEQ ID NO: 995770 - RNA, 22 nt, Human
acuuugcacuaaguuacucauu

SEQ ID NO: 995771 - RNA, 22 nt, Human
ggucagggcucuuccaguggcu

SEQ ID NO: 995772 - RNA, 22 nt, Human
cccccaaggccaggcugagacc

SEQ ID NO: 995773 - RNA, 22 nt, Human
uuuccucuuccgagggggaggc

SEQ ID NO: 995774 - RNA, 22 nt, Human
accuauuuaugcaauuaugaaa

SEQ ID NO: 995775 - RNA, 22 nt, Human
agucaguguagaaagcccaggc

SEQ ID NO: 995776 - RNA, 22 nt, Human
gaggggcuggguagggcaaccc

SEQ ID NO: 995777 - RNA, 22 nt, Human
ucucccagaggaucccagugga

SEQ ID NO: 995778 - RNA, 22 nt, Human
uguagcacagagcuuugacacu

SEQ ID NO: 995779 - RNA, 22 nt, Human
cagggccucuccuccaggaacu

SEQ ID NO: 995780 - RNA, 22 nt, Human
gagagcuguaauagucaugucu

SEQ ID NO: 995781 - RNA, 22 nt, Human
gucucccacuuucuggccucuu

SEQ ID NO: 995782 - RNA, 20 nt, Human
aggcacuggauuucuuauau

SEQ ID NO: 995783 - RNA, 22 nt, Human
gcccucagaguuccccacagug

SEQ ID NO: 995784 - RNA, 22 nt, Human
ucauccaguaccauggaaggca

SEQ ID NO: 995785 - RNA, 22 nt, Human
aggccaaauagcagguuugcua

SEQ ID NO: 995786 - RNA, 18 nt, Human
cauuaugugguuauagaa

SEQ ID NO: 995787 - RNA, 17 nt, Human
cauguguaugugggagu

SEQ ID NO: 995788 - RNA, 22 nt, Human
acauccugaagucagucauuug

SEQ ID NO: 995789 - RNA, 20 nt, Human
ugcucaggauggagaggugu

SEQ ID NO: 995790 - RNA, 22 nt, Human
gaggccacgguuuuccuugggg

SEQ ID NO: 995791 - RNA, 22 nt, Human
uguuuauaccuugguauaacca

SEQ ID NO: 995792 - RNA, 22 nt, Human
gccugggagggcagcagugugg

SEQ ID NO: 995793 - RNA, 22 nt, Human
gcauggcagugaggauggugcu

SEQ ID NO: 995794 - RNA, 22 nt, Human
cauuucuguacauguuuuggug

SEQ ID NO: 995795 - RNA, 22 nt, Human
uucaagaugccagggacgcggc

SEQ ID NO: 995796 - RNA, 21 nt, Human
gagcucucaggcaagaagcag

SEQ ID NO: 995797 - RNA, 22 nt, Human
cuggcagguggauggggacucc

SEQ ID NO: 995798 - RNA, 20 nt, Human
gcuuuuucuaauagcagucc

SEQ ID NO: 995799 - RNA, 22 nt, Human
agauuucccaaauacuuguuau

SEQ ID NO: 995800 - RNA, 22 nt, Human
uucaggauucuuucagacuggg

SEQ ID NO: 995801 - RNA, 22 nt, Human
gagcuggcuccgccaugcugcu

SEQ ID NO: 995802 - RNA, 22 nt, Human
gcagcuggagccagccagacac

SEQ ID NO: 995803 - RNA, 22 nt, Human
cccaggcagggacgugcucugg

SEQ ID NO: 995804 - RNA, 22 nt, Human
ccuagagcucugcuuuaucuaa

SEQ ID NO: 995805 - RNA, 17 nt, Human
ugcauguccuuuguucc

SEQ ID NO: 995806 - RNA, 22 nt, Human
ugccuggguucccaccccaaag

SEQ ID NO: 995807 - RNA, 22 nt, Human
aggcaguguauugcuagcggcu

SEQ ID NO: 995808 - RNA, 22 nt, Human
agaauucuggaguugggaggaa

SEQ ID NO: 995809 - RNA, 22 nt, Human
augauugguggucagcaguaug

SEQ ID NO: 995810 - RNA, 22 nt, Human
uuccuucucagcccucgaggau

SEQ ID NO: 995811 - RNA, 21 nt, Human
ucuuuccugcccaguugcccu

SEQ ID NO: 995812 - RNA, 22 nt, Human
aggagagagaacacuugggucc

SEQ ID NO: 995813 - RNA, 22 nt, Human
uauauagaaaagcagauguugg

SEQ ID NO: 995814 - RNA, 22 nt, Human
agugggcaugaucuggugucug

SEQ ID NO: 995815 - RNA, 22 nt, Human
acaaugcaccagcaucuucacc

SEQ ID NO: 995816 - RNA, 22 nt, Human
acacaguauuacaauaggugcu

SEQ ID NO: 995817 - RNA, 22 nt, Human
ugcauugcaguuaacucaguau

SEQ ID NO: 995818 - RNA, 22 nt, Human
agcugauuccacuuuuucccca

SEQ ID NO: 995819 - RNA, 22 nt, Human
uuuuauuaucuuugaaugggac

SEQ ID NO: 995820 - RNA, 18 nt, Human
uggcucuggacuugcucc

SEQ ID NO: 995821 - RNA, 22 nt, Human
gcugucaguuuuacccacagac

SEQ ID NO: 995822 - RNA, 22 nt, Human
cacacaggagagugcuggaggu

SEQ ID NO: 995823 - RNA, 22 nt, Human
ugguccugagcaccagccugac

SEQ ID NO: 995824 - RNA, 22 nt, Human
aaagauguuuuauaaguuaugg

SEQ ID NO: 995825 - RNA, 22 nt, Human
cagcaggguauacagggaauuu

SEQ ID NO: 995826 - RNA, 21 nt, Human
ucacaugcccauuacuggagc

SEQ ID NO: 995827 - RNA, 22 nt, Human
agcaggguuccaggaguugcag

SEQ ID NO: 995828 - RNA, 22 nt, Human
gaugauggacaaagcauuggug

SEQ ID NO: 995829 - RNA, 18 nt, Human
gcugagguggugucagag

SEQ ID NO: 995830 - RNA, 22 nt, Human
ccugggagguggagguugcagu

SEQ ID NO: 995831 - RNA, 22 nt, Human
ccaggcagcaaauuuucugaau

SEQ ID NO: 995832 - RNA, 22 nt, Human
ucccagagugagccaggggcag

SEQ ID NO: 995833 - RNA, 22 nt, Human
gcagacaggcccaguggaggga

SEQ ID NO: 995834 - RNA, 22 nt, Human
gggcugcuuuuuucuuagcaga

SEQ ID NO: 995835 - RNA, 21 nt, Human
aggcagaaagagcccaggcug

SEQ ID NO: 995836 - RNA, 22 nt, Human
ccacagggcacaagggagguug

SEQ ID NO: 995837 - RNA, 22 nt, Human
ugugugccugagccgugccugg

SEQ ID NO: 995838 - RNA, 22 nt, Human
cugcugcugagagcucagccug

SEQ ID NO: 995839 - RNA, 21 nt, Human
uguaugcacgcacaugcacac

SEQ ID NO: 995840 - RNA, 22 nt, Human
uagcugccuuugggcuccugcu

SEQ ID NO: 995841 - RNA, 22 nt, Human
ugggcugcccugaugguccuca

SEQ ID NO: 995842 - RNA, 22 nt, Human
agaaaugaagcaggaguuauua

SEQ ID NO: 995843 - RNA, 22 nt, Human
aaagccuugggauuugugauca

SEQ ID NO: 995844 - RNA, 22 nt, Human
cugagaaggaagccuccacucu

SEQ ID NO: 995845 - RNA, 22 nt, Human
ccagagacgucggucagggcgc

SEQ ID NO: 995846 - RNA, 22 nt, Human
uggcaucauagccaaggugcuu

SEQ ID NO: 995847 - RNA, 22 nt, Human
cucagaaguucagccuagagua

SEQ ID NO: 995848 - RNA, 22 nt, Human
agagccuugaagaucuggaaaa

SEQ ID NO: 995849 - RNA, 22 nt, Human
gggauggggggaagcguccaug

SEQ ID NO: 995850 - RNA, 22 nt, Human
gggcacugcuggaggcucccug

SEQ ID NO: 995851 - RNA, 17 nt, Human
ucugaagccagucugcu

SEQ ID NO: 995852 - RNA, 22 nt, Human
ugagggaguuggguguauagga

SEQ ID NO: 995853 - RNA, 18 nt, Human
gcuccuggagucugacuc

SEQ ID NO: 995854 - RNA, 22 nt, Human
agggagaaaauuggaugcacaa

SEQ ID NO: 995855 - RNA, 22 nt, Human
auucacaaaugcugccccauuc

SEQ ID NO: 995856 - RNA, 22 nt, Human
gcugcuuccuuuccugcugacc

SEQ ID NO: 995857 - RNA, 19 nt, Human
uuucaauggcuuagagaaa

SEQ ID NO: 995858 - RNA, 22 nt, Human
cucagaguggggcucccugagg

SEQ ID NO: 995859 - RNA, 18 nt, Human
cagggccccagaauuauc

SEQ ID NO: 995860 - RNA, 22 nt, Human
gaaaggucaguuccacuuccau

SEQ ID NO: 995861 - RNA, 22 nt, Human
agggggaggcugugcugcgucu

SEQ ID NO: 995862 - RNA, 22 nt, Human
ggcuggcucagggcuugagaga

SEQ ID NO: 995863 - RNA, 22 nt, Human
cagggugcgccacucagaugua

SEQ ID NO: 995864 - RNA, 22 nt, Human
acucugcucuguauuucacugu

SEQ ID NO: 995865 - RNA, 22 nt, Human
ggcccugagcugaaguacugug

SEQ ID NO: 995866 - RNA, 22 nt, Human
cuguacaggugaggagggggcu

SEQ ID NO: 995867 - RNA, 22 nt, Human
agaaaugugaauuucauuuccu

SEQ ID NO: 995868 - RNA, 22 nt, Human
ucagcagaggggaaggcaucug

SEQ ID NO: 995869 - RNA, 17 nt, Human
uuccccugaccaagccu

SEQ ID NO: 995870 - RNA, 22 nt, Human
ccuggcugcuuucacuauggag

SEQ ID NO: 995871 - RNA, 22 nt, Human
gcucucugccuuucucaaugac

SEQ ID NO: 995872 - RNA, 18 nt, Human
gcccagaggucugggccc

SEQ ID NO: 995873 - RNA, 22 nt, Human
gccagccccuuagggcucuccc

SEQ ID NO: 995874 - RNA, 22 nt, Human
cucagaguccccaguggguuug

SEQ ID NO: 995875 - RNA, 22 nt, Human
ugauacagucagcucacaauug

SEQ ID NO: 995876 - RNA, 22 nt, Human
uaaaccuugguagcaucuugcu

SEQ ID NO: 995877 - RNA, 22 nt, Human
gcauuuguguucuuccuagagc

SEQ ID NO: 995878 - RNA, 22 nt, Human
aaauauuagggagaacagggac

SEQ ID NO: 995879 - RNA, 22 nt, Human
ugaggccaggaucccaggcucu

SEQ ID NO: 995880 - RNA, 22 nt, Human
gcccagccuccaagcuccaagg

SEQ ID NO: 995881 - RNA, 22 nt, Human
aaagguuaguucuuagaagugc

SEQ ID NO: 995882 - RNA, 22 nt, Human
agggcagcacaaggcauggacu

SEQ ID NO: 995883 - RNA, 22 nt, Human
gcuucuggaggagcugggcuga

SEQ ID NO: 995884 - RNA, 22 nt, Human
auuguacaugcagugagucauc

SEQ ID NO: 995885 - RNA, 22 nt, Human
ccugggugacccgugagcgucc

SEQ ID NO: 995886 - RNA, 22 nt, Human
uggggcuggggaucuugagccu

SEQ ID NO: 995887 - RNA, 22 nt, Human
ugcagaagcagagccgguggcc

SEQ ID NO: 995888 - RNA, 22 nt, Human
agucucagggccacccggggaa

SEQ ID NO: 995889 - RNA, 22 nt, Human
agcagcuggggccugugacgau

SEQ ID NO: 995890 - RNA, 22 nt, Human
cagucacauugcccugcauuua

SEQ ID NO: 995891 - RNA, 22 nt, Human
guacuuccguggacuaauuguu

SEQ ID NO: 995892 - RNA, 22 nt, Human
uacagaaaucacaucgcuuuga

SEQ ID NO: 995893 - RNA, 22 nt, Human
uaaauguguguagccaucugug

SEQ ID NO: 995894 - RNA, 21 nt, Human
gaaaggucuuaacuuacagag

SEQ ID NO: 995895 - RNA, 22 nt, Human
gaagcagcuaggaucuucauuu

SEQ ID NO: 995896 - RNA, 22 nt, Human
uggcacugccaaccugcuaggu

SEQ ID NO: 995897 - RNA, 22 nt, Human
gggugggguguaucggauccua

SEQ ID NO: 995898 - RNA, 22 nt, Human
guccuggcccacuggcaggcug

SEQ ID NO: 995899 - RNA, 22 nt, Human
cacagcuaggaggaaagcagag

SEQ ID NO: 995900 - RNA, 22 nt, Human
caggccugggcuucggggcuga

SEQ ID NO: 995901 - RNA, 22 nt, Human
aaggcagccucugccagccggg

SEQ ID NO: 995902 - RNA, 22 nt, Human
ucaguguagcagacuuguagcc

SEQ ID NO: 995903 - RNA, 22 nt, Human
gccuuuuuuguugcucugucac

SEQ ID NO: 995904 - RNA, 22 nt, Human
ggucuuccgagaggccugugcu

SEQ ID NO: 995905 - RNA, 22 nt, Human
cugcccaaauccuucuuccucu

SEQ ID NO: 995906 - RNA, 22 nt, Human
auuaggauguguauauuguguu

SEQ ID NO: 995907 - RNA, 22 nt, Human
ugucacauaggcaaaauguuuu

SEQ ID NO: 995908 - RNA, 22 nt, Human
cuucacaaucaccuuuucggaa

SEQ ID NO: 995909 - RNA, 22 nt, Human
cuggccuagcucucugcuugaa

SEQ ID NO: 995910 - RNA, 22 nt, Human
ggcugcagguugguuggcagcu

SEQ ID NO: 995911 - RNA, 22 nt, Human
uauguacaucguugaauucaaa

SEQ ID NO: 995912 - RNA, 22 nt, Human
cuccucacuuuccagacugggc

SEQ ID NO: 995913 - RNA, 22 nt, Human
ugcuucaggagaugucaccaug

SEQ ID NO: 995914 - RNA, 22 nt, Human
agcugcuguggggcucggccug

SEQ ID NO: 995915 - RNA, 22 nt, Human
ugagagugauugguucgaaugu

SEQ ID NO: 995916 - RNA, 22 nt, Human
ucucuggagcugcagauccagg

SEQ ID NO: 995917 - RNA, 22 nt, Human
cugcuuuguaaaauagacauaa

SEQ ID NO: 995918 - RNA, 22 nt, Human
aagauuucagaguuugggggaa

SEQ ID NO: 995919 - RNA, 18 nt, Human
ccagguggugacagagau

SEQ ID NO: 995920 - RNA, 22 nt, Human
gaggcugggaaguccaagacca

SEQ ID NO: 995921 - RNA, 22 nt, Human
uguggcugacuccuggucccca

SEQ ID NO: 995922 - RNA, 22 nt, Human
agcaguggagcgagauguuuaa

SEQ ID NO: 995923 - RNA, 22 nt, Human
acauuucuaauuuaauguaaca

SEQ ID NO: 995924 - RNA, 22 nt, Human
ugcuauugugaacagugccaca

SEQ ID NO: 995925 - RNA, 22 nt, Human
agcuauguauaaauaggccacu

SEQ ID NO: 995926 - RNA, 22 nt, Human
agggcagagacaugcuuccuga

SEQ ID NO: 995927 - RNA, 22 nt, Human
aaaauggucucagcuggcacca

SEQ ID NO: 995928 - RNA, 22 nt, Human
uccucugcuccaggcuggacuu

SEQ ID NO: 995929 - RNA, 22 nt, Human
aaaggcuaugagauagaagaua

SEQ ID NO: 995930 - RNA, 22 nt, Human
ucauugaauauggggccauaca

SEQ ID NO: 995931 - RNA, 22 nt, Human
cuggcccagagagcagagcuua

SEQ ID NO: 995932 - RNA, 22 nt, Human
gaaaugcagaaccugagaccau

SEQ ID NO: 995933 - RNA, 21 nt, Human
ugcuuuaugggaaaaauguca

SEQ ID NO: 995934 - RNA, 22 nt, Human
agauuucacaugcugcucuauu

SEQ ID NO: 995935 - RNA, 22 nt, Human
agccagggauggcagugcccag

SEQ ID NO: 995936 - RNA, 22 nt, Human
uugcucaggcuuagagcuacua

SEQ ID NO: 995937 - RNA, 22 nt, Human
ugagcccaggaguuggagaccg

SEQ ID NO: 995938 - RNA, 22 nt, Human
uccugcugagcgucugucauuu

SEQ ID NO: 995939 - RNA, 21 nt, Human
ugagagccuccaaccggcuac

SEQ ID NO: 995940 - RNA, 22 nt, Human
gagugugggcacgggggccuug

SEQ ID NO: 995941 - RNA, 22 nt, Human
ucuccugggaggacaaggaagg

SEQ ID NO: 995942 - RNA, 22 nt, Human
ccacucugauuuuggcuccacu

SEQ ID NO: 995943 - RNA, 22 nt, Human
ggugcagaaggaagggagcugg

SEQ ID NO: 995944 - RNA, 22 nt, Human
auuuccucaugaucauaaugca

SEQ ID NO: 995945 - RNA, 22 nt, Human
agccuggagguaaugaggaaac

SEQ ID NO: 995946 - RNA, 22 nt, Human
gcaaggcugagcacauuugcau

SEQ ID NO: 995947 - RNA, 22 nt, Human
uguggugagaaacugguagauu

SEQ ID NO: 995948 - RNA, 22 nt, Human
agugugaccuuauuuggaaaca

SEQ ID NO: 995949 - RNA, 22 nt, Human
uuuccucugggcccugccaccc

SEQ ID NO: 995950 - RNA, 22 nt, Human
gcuccuggugcaaaguuucuuc

SEQ ID NO: 995951 - RNA, 22 nt, Human
ggaagugaggaauuagguuuau

SEQ ID NO: 995952 - RNA, 22 nt, Human
cagagccaggccugcccucuuu

SEQ ID NO: 995953 - RNA, 21 nt, Human
cacucaggguaugugccaggc

SEQ ID NO: 995954 - RNA, 22 nt, Human
aaugaaauguagcuuauccaua

SEQ ID NO: 995955 - RNA, 22 nt, Human
aagaacaguguccugggacucg

SEQ ID NO: 995956 - RNA, 22 nt, Human
gcaggagucacugacuuggucc

SEQ ID NO: 995957 - RNA, 22 nt, Human
ugaagcaggugaauggaugucg

SEQ ID NO: 995958 - RNA, 22 nt, Human
gcuggccaggaagagucucaga

SEQ ID NO: 995959 - RNA, 22 nt, Human
auauaauaguuucauaaaggcu

SEQ ID NO: 995960 - RNA, 22 nt, Human
ucucuggguuuuuguccuguac

SEQ ID NO: 995961 - RNA, 22 nt, Human
aaaaucugguaauuugaaugug

SEQ ID NO: 995962 - RNA, 18 nt, Human
acuaugcugaauaaaugg

SEQ ID NO: 995963 - RNA, 22 nt, Human
gugaccaucagagaauaacaaa

SEQ ID NO: 995964 - RNA, 22 nt, Human
accagagcgcucaagccuuccc

SEQ ID NO: 995965 - RNA, 22 nt, Human
ggaagugaggaaauauuuuguu

SEQ ID NO: 995966 - RNA, 22 nt, Human
uguaggaguccaaucaggagac

SEQ ID NO: 995967 - RNA, 22 nt, Human
uucucuucuguucagugcccaa

SEQ ID NO: 995968 - RNA, 22 nt, Human
agggcuggccacaugauuuggu

SEQ ID NO: 995969 - RNA, 22 nt, Human
gagugaaaaaggaagggccaua

SEQ ID NO: 995970 - RNA, 22 nt, Human
ugccaggccucaggagucucca

SEQ ID NO: 995971 - RNA, 20 nt, Human
aggccaaacccagcgcgccc

SEQ ID NO: 995972 - RNA, 22 nt, Human
agcccuagagcuggaggucagu

SEQ ID NO: 995973 - RNA, 22 nt, Human
gcagcaggcacggucucgacau

SEQ ID NO: 995974 - RNA, 22 nt, Human
ggucucaggagacuggagagca

SEQ ID NO: 995975 - RNA, 22 nt, Human
gggugggccugucuggccaugu

SEQ ID NO: 995976 - RNA, 22 nt, Human
caaguaaagaaucacauuucuu

SEQ ID NO: 995977 - RNA, 22 nt, Human
ucugagagguuaagcaauuuga

SEQ ID NO: 995978 - RNA, 22 nt, Human
ugagccaguggaagauggcagu

SEQ ID NO: 995979 - RNA, 22 nt, Human
cuguccugauggugccacuggu

SEQ ID NO: 995980 - RNA, 22 nt, Human
cugccacuagcuuucacaucuu

SEQ ID NO: 995981 - RNA, 17 nt, Human
agaaagaggauccacag

SEQ ID NO: 995982 - RNA, 22 nt, Human
ggccagagagccgcuguuagga

SEQ ID NO: 995983 - RNA, 22 nt, Human
agcaucuggucaugagugagaa

SEQ ID NO: 995984 - RNA, 22 nt, Human
gaucaaaagcuggguucuaaaa

SEQ ID NO: 995985 - RNA, 20 nt, Human
auggccaaccugcuuaugac

SEQ ID NO: 995986 - RNA, 22 nt, Human
uuguuuuggagaugagcuaaaa

SEQ ID NO: 995987 - RNA, 22 nt, Human
aguacuuugcacuuugcucaga

SEQ ID NO: 995988 - RNA, 19 nt, Human
acaaagcugugagcagcuu

SEQ ID NO: 995989 - RNA, 22 nt, Human
agagcugugaaaaugagguuug

SEQ ID NO: 995990 - RNA, 22 nt, Human
uggcccugcuguaucaucugcu

SEQ ID NO: 995991 - RNA, 22 nt, Human
auacuuacuuuucuucagacua

SEQ ID NO: 995992 - RNA, 22 nt, Human
gaggccugcuuuggcacucugg

SEQ ID NO: 995993 - RNA, 22 nt, Human
uuggccaauuuagaacguguug

SEQ ID NO: 995994 - RNA, 22 nt, Human
ccugggcuugcaucugugcugg

SEQ ID NO: 995995 - RNA, 22 nt, Human
uggcuuucucccccagcuucuc

SEQ ID NO: 995996 - RNA, 22 nt, Human
uccucagaugcucuuggacgcc

SEQ ID NO: 995997 - RNA, 22 nt, Human
aaaugcacaggagaaccaauuc

SEQ ID NO: 995998 - RNA, 22 nt, Human
cucccaagggguaagggagcug

SEQ ID NO: 995999 - RNA, 22 nt, Human
uccuauugguagacauuucugu

SEQ ID NO: 996000 - RNA, 22 nt, Human
ucucuggaauuuugagagugac

SEQ ID NO: 996001 - RNA, 22 nt, Human
cugagguggaacagaggugaag

SEQ ID NO: 996002 - RNA, 21 nt, Human
cugcucugacagugaggccag

SEQ ID NO: 996003 - RNA, 22 nt, Human
ccuucugcucccuggccagggc

SEQ ID NO: 996004 - RNA, 22 nt, Human
ggagugaaucacuagaugcaga

SEQ ID NO: 996005 - RNA, 22 nt, Human
gagcugucuggggacucugggu

SEQ ID NO: 996006 - RNA, 22 nt, Human
cacagaaguuucauagucucga

SEQ ID NO: 996007 - RNA, 22 nt, Human
cacagggcuuugauggcugagu

SEQ ID NO: 996008 - RNA, 22 nt, Human
auguagcagauauuugugcaca

SEQ ID NO: 996009 - RNA, 22 nt, Human
gccuggagggucccucucugga

SEQ ID NO: 996010 - RNA, 22 nt, Human
ccaggcugggcggggaaccugg

SEQ ID NO: 996011 - RNA, 22 nt, Human
cucacuggcaagacuacaggug

SEQ ID NO: 996012 - RNA, 22 nt, Human
gcugucaggaacaugccuuggu

SEQ ID NO: 996013 - RNA, 22 nt, Human
ugcagugggccggaggccaggg

SEQ ID NO: 996014 - RNA, 22 nt, Human
ucagaagacuacuaggacacau

SEQ ID NO: 996015 - RNA, 22 nt, Human
ugccagcaguagcaguaggcca

SEQ ID NO: 996016 - RNA, 22 nt, Human
gucacuggggccacaugcagaa

SEQ ID NO: 996017 - RNA, 22 nt, Human
uuagaaaauuugcuucuuugga

SEQ ID NO: 996018 - RNA, 22 nt, Human
guuauaaauaccuaauaggauu

SEQ ID NO: 996019 - RNA, 22 nt, Human
aacauuucugagaauaucaguu

SEQ ID NO: 996020 - RNA, 22 nt, Human
agaugcugugucuguucccuug

SEQ ID NO: 996021 - RNA, 22 nt, Human
uaaagcacgucuauuuaaugau

SEQ ID NO: 996022 - RNA, 22 nt, Human
acagcuggcaggggggcaugaa

SEQ ID NO: 996023 - RNA, 18 nt, Human
ugacucacccugucagug

SEQ ID NO: 996024 - RNA, 20 nt, Human
acccagcucugugcccuggg

SEQ ID NO: 996025 - RNA, 22 nt, Human
uuccuuguuuguagcucuggga

SEQ ID NO: 996026 - RNA, 22 nt, Human
uccugccuucauacugcuguau

SEQ ID NO: 996027 - RNA, 22 nt, Human
uuggccuuguuaaggaggcccu

SEQ ID NO: 996028 - RNA, 22 nt, Human
gucuuucuuaauucaagugcuu

SEQ ID NO: 996029 - RNA, 22 nt, Human
gcucagaggagcaucauaagga

SEQ ID NO: 996030 - RNA, 22 nt, Human
cucuggacagcaggugcugugg

SEQ ID NO: 996031 - RNA, 18 nt, Human
acagacaaaauggaaaug

SEQ ID NO: 996032 - RNA, 22 nt, Human
acagaccucuagauuacauuug

SEQ ID NO: 996033 - RNA, 22 nt, Human
cuuuugauaguugcugagcagg

SEQ ID NO: 996034 - RNA, 22 nt, Human
auguagcagaagauguuuuccu

SEQ ID NO: 996035 - RNA, 22 nt, Human
caggcagcagaggaguguggga

SEQ ID NO: 996036 - RNA, 22 nt, Human
auauauaagcugaugagccaca

SEQ ID NO: 996037 - RNA, 22 nt, Human
agcacagauucugaagaguccu

SEQ ID NO: 996038 - RNA, 22 nt, Human
uccuggcccggccgggccugcu

SEQ ID NO: 996039 - RNA, 22 nt, Human
cagccagggagcaaagaguuga

SEQ ID NO: 996040 - RNA, 22 nt, Human
auaauaacaccugaauaggaaa

SEQ ID NO: 996041 - RNA, 22 nt, Human
ugguuuugcuccaguauaaaua

SEQ ID NO: 996042 - RNA, 22 nt, Human
uguacaguguagucaugagguu

SEQ ID NO: 996043 - RNA, 22 nt, Human
gcucccaggaagagaagggcca

SEQ ID NO: 996044 - RNA, 22 nt, Human
agcugcugagagucugccgggc

SEQ ID NO: 996045 - RNA, 22 nt, Human
agcuguguggugucugacagcu

SEQ ID NO: 996046 - RNA, 19 nt, Human
cugggccagaaucagcuca

SEQ ID NO: 996047 - RNA, 22 nt, Human
gaagcagcagcuggggacaguu

SEQ ID NO: 996048 - RNA, 22 nt, Human
agggcuggagccacagcuggga

SEQ ID NO: 996049 - RNA, 20 nt, Human
gcugccuuguccugcuuggu

SEQ ID NO: 996050 - RNA, 22 nt, Human
acccagaggugucuagcaagcu

SEQ ID NO: 996051 - RNA, 23 nt, Human
agccagggcacugguggagauug

SEQ ID NO: 996052 - RNA, 22 nt, Human
ugcacacaguucucaggaaaga

SEQ ID NO: 996053 - RNA, 22 nt, Human
ucuggcucuaacuaggcaucag

SEQ ID NO: 996054 - RNA, 22 nt, Human
uugaggagucaggggcacggaa

SEQ ID NO: 996055 - RNA, 22 nt, Human
aauuuggcagugucuugaagua

SEQ ID NO: 996056 - RNA, 22 nt, Human
cagcaucuuucucuucuggagu

SEQ ID NO: 996057 - RNA, 22 nt, Human
cugagccagagggagucggguc

SEQ ID NO: 996058 - RNA, 23 nt, Human
cuggcuccgaagacuccaggauc

SEQ ID NO: 996059 - RNA, 22 nt, Human
acagacauucagcuaagucuau

SEQ ID NO: 996060 - RNA, 22 nt, Human
uauaguacauggaaucuucaua

SEQ ID NO: 996061 - RNA, 20 nt, Human
gauuucaaagcagaguggcc

SEQ ID NO: 996062 - RNA, 22 nt, Human
ucagccacuacccaccuuaaca

SEQ ID NO: 996063 - RNA, 22 nt, Human
aagggcaggaaaagauggaugu

SEQ ID NO: 996064 - RNA, 22 nt, Human
ccugggucacucaggcaggcgg

SEQ ID NO: 996065 - RNA, 22 nt, Human
auggauaagaacaaauaucuga

SEQ ID NO: 996066 - RNA, 22 nt, Human
gucccuggaucugggacagcug

SEQ ID NO: 996067 - RNA, 22 nt, Human
cccucagcuucucccugcagcu

SEQ ID NO: 996068 - RNA, 18 nt, Human
ggaaaaggagugucuagc

SEQ ID NO: 996069 - RNA, 22 nt, Human
cagcacugcugcuguacacaca

SEQ ID NO: 996070 - RNA, 22 nt, Human
gcagaaggucuggcacuucagg

SEQ ID NO: 996071 - RNA, 22 nt, Human
auuagggaaggauuuggccuga

SEQ ID NO: 996072 - RNA, 22 nt, Human
aaggcagcccuggcucagccug

SEQ ID NO: 996073 - RNA, 22 nt, Human
agaaagcacucugucuuuuacc

SEQ ID NO: 996074 - RNA, 18 nt, Human
ggagccagucugucucug

SEQ ID NO: 996075 - RNA, 22 nt, Human
cauucauuuacuuucaacagcu

SEQ ID NO: 996076 - RNA, 22 nt, Human
uuugggaagaggaaucucugga

SEQ ID NO: 996077 - RNA, 22 nt, Human
aauuucaaacuaauaggaacca

SEQ ID NO: 996078 - RNA, 22 nt, Human
ccuggcugggguagaagugagg

SEQ ID NO: 996079 - RNA, 22 nt, Human
gccaggcuggcaaaaggaaacc

SEQ ID NO: 996080 - RNA, 22 nt, Human
auucaucaacugauagccauag

SEQ ID NO: 996081 - RNA, 22 nt, Human
caucacuguccaaaguucaguu

SEQ ID NO: 996082 - RNA, 22 nt, Human
gaagagcuuaguuguccuagaa

SEQ ID NO: 996083 - RNA, 22 nt, Human
gcucacuggccugaagaggacg

SEQ ID NO: 996084 - RNA, 22 nt, Human
ccagggugagugucauggguua

SEQ ID NO: 996085 - RNA, 22 nt, Human
gaugguuuaugauagaugggaa

SEQ ID NO: 996086 - RNA, 22 nt, Human
cauggcccucuucuggagcaau

SEQ ID NO: 996087 - RNA, 22 nt, Human
aaagaacaucggagugggcggg

SEQ ID NO: 996088 - RNA, 22 nt, Human
gagcuuccacucuagaaggagu

SEQ ID NO: 996089 - RNA, 20 nt, Human
ugaaaaggucaggagacaug

SEQ ID NO: 996090 - RNA, 22 nt, Human
ccaaggagcaaguuuacaccug

SEQ ID NO: 996091 - RNA, 19 nt, Human
guggccagggcaggggcug

SEQ ID NO: 996092 - RNA, 22 nt, Human
ccaggaaugaaauguagauaaa

SEQ ID NO: 996093 - RNA, 22 nt, Human
agugacagcugggaaggugaaa

SEQ ID NO: 996094 - RNA, 22 nt, Human
uuucuagaggcuccaggggagu

SEQ ID NO: 996095 - RNA, 22 nt, Human
acagagcugggaucugaaccca

SEQ ID NO: 996096 - RNA, 22 nt, Human
gcagggaagggaaacagagacc

SEQ ID NO: 996097 - RNA, 22 nt, Human
agggguggagaguguugccagu

SEQ ID NO: 996098 - RNA, 15 nt, Human
aggcacugugggacc

SEQ ID NO: 996099 - RNA, 22 nt, Human
uccaaagggaagcgcuuucugu

SEQ ID NO: 996100 - RNA, 22 nt, Human
gcacaugagcugcugggauggg

SEQ ID NO: 996101 - RNA, 22 nt, Human
gagcugcuucugugugccgggu

SEQ ID NO: 996102 - RNA, 18 nt, Human
uggagccagcucuaggau

SEQ ID NO: 996103 - RNA, 21 nt, Human
aggugggagaccauguagguc

SEQ ID NO: 996104 - RNA, 22 nt, Human
caagagcugugaccucauucac

SEQ ID NO: 996105 - RNA, 22 nt, Human
uaguuuaauggucaacuaauga

SEQ ID NO: 996106 - RNA, 22 nt, Human
gccuucugugcuccuggccuuu

SEQ ID NO: 996107 - RNA, 22 nt, Human
aaauaguuguuuggaucaauaa

SEQ ID NO: 996108 - RNA, 22 nt, Human
aggccugaaguguggagugggg

SEQ ID NO: 996109 - RNA, 22 nt, Human
cccccagccagcagugcucagc

SEQ ID NO: 996110 - RNA, 22 nt, Human
uuuccuuccuugcuagccugag

SEQ ID NO: 996111 - RNA, 22 nt, Human
cagggccaagcugcagcaucug

SEQ ID NO: 996112 - RNA, 22 nt, Human
gagucacauuaauuuaauuuua

SEQ ID NO: 996113 - RNA, 22 nt, Human
uauguuuuucaagugcacacua

SEQ ID NO: 996114 - RNA, 22 nt, Human
cccagacucaucccugggagcu

SEQ ID NO: 996115 - RNA, 22 nt, Human
agaggcuccuagccacuggcuu

SEQ ID NO: 996116 - RNA, 22 nt, Human
auuccaaagccugaauaaugga

SEQ ID NO: 996117 - RNA, 22 nt, Human
cccugccugugggcaucaacau

SEQ ID NO: 996118 - RNA, 22 nt, Human
gccagaaacauacacaucacuu

SEQ ID NO: 996119 - RNA, 22 nt, Human
gccagagcugagugagguucuu

SEQ ID NO: 996120 - RNA, 22 nt, Human
caguagcacuagauaugugugg

SEQ ID NO: 996121 - RNA, 22 nt, Human
ucucuuucuauugcaccaugcu

SEQ ID NO: 996122 - RNA, 22 nt, Human
aaccuuuugcaagugccuugac

SEQ ID NO: 996123 - RNA, 22 nt, Human
gccucuggggcagcugagucau

SEQ ID NO: 996124 - RNA, 21 nt, Human
cauauuaaaucggugccuuua

SEQ ID NO: 996125 - RNA, 18 nt, Human
uaaaugcauguuaauaac

SEQ ID NO: 996126 - RNA, 22 nt, Human
uggcuggcaaggcuggagucag

SEQ ID NO: 996127 - RNA, 22 nt, Human
auaugugugaugcauggacuaa

SEQ ID NO: 996128 - RNA, 23 nt, Human
ccagucucacguauacaggauuu

SEQ ID NO: 996129 - RNA, 22 nt, Human
ccugggcagguguggcuucccc

SEQ ID NO: 996130 - RNA, 22 nt, Human
cagagguauugcaaaagccuag

SEQ ID NO: 996131 - RNA, 22 nt, Human
cugagcucuaaugucagccuug

SEQ ID NO: 996132 - RNA, 22 nt, Human
ccacugucagaggggcugugcc

SEQ ID NO: 996133 - RNA, 22 nt, Human
gcugggcaccggagagacccca

SEQ ID NO: 996134 - RNA, 22 nt, Human
auugacaaggaaacuauaccag

SEQ ID NO: 996135 - RNA, 22 nt, Human
ucugucacuauuggccagaaca

SEQ ID NO: 996136 - RNA, 22 nt, Human
ggaggccaaggcagguggauca

SEQ ID NO: 996137 - RNA, 22 nt, Human
uccaggcuagguuuacaggaca

SEQ ID NO: 996138 - RNA, 22 nt, Human
uggccugguccuugucaaggca

SEQ ID NO: 996139 - RNA, 22 nt, Human
ugagagugaaaugucacauguc

SEQ ID NO: 996140 - RNA, 22 nt, Human
gcugucuugcucacucuugcag

SEQ ID NO: 996141 - RNA, 22 nt, Human
aggccagguuccucaaucuuga

SEQ ID NO: 996142 - RNA, 22 nt, Human
aggaugggccugggauaugcuu

SEQ ID NO: 996143 - RNA, 22 nt, Human
cuacauuucccagcugccuucc

SEQ ID NO: 996144 - RNA, 22 nt, Human
aggggcuguggaaaccaacucu

SEQ ID NO: 996145 - RNA, 20 nt, Human
gcugccagugccugaugcuu

SEQ ID NO: 996146 - RNA, 22 nt, Human
caggaugggugucggccagcac

SEQ ID NO: 996147 - RNA, 22 nt, Human
acauuucucaucuaguagagua

SEQ ID NO: 996148 - RNA, 22 nt, Human
acucuuuuauaaagcaucuuga

SEQ ID NO: 996149 - RNA, 22 nt, Human
ugagaauaggcauagaaccugg

SEQ ID NO: 996150 - RNA, 22 nt, Human
auggacagugugucuguuucca

SEQ ID NO: 996151 - RNA, 22 nt, Human
uaaaguauauuuuuucucaaua

SEQ ID NO: 996152 - RNA, 22 nt, Human
cucagagucugcauuucuguca

SEQ ID NO: 996153 - RNA, 22 nt, Human
aaaagacauaugugggcauucu

SEQ ID NO: 996154 - RNA, 22 nt, Human
cagaagcacuaggaggaaacgu

SEQ ID NO: 996155 - RNA, 22 nt, Human
uggccugggccggcagauauac

SEQ ID NO: 996156 - RNA, 23 nt, Human
ucuuuccucagcacacaccaaga

SEQ ID NO: 996157 - RNA, 23 nt, Human
agaggccaacuucuugccccucc

SEQ ID NO: 996158 - RNA, 22 nt, Human
caggacaguuugcuuugcccug

SEQ ID NO: 996159 - RNA, 22 nt, Human
caugucuggguauaugcauaug

SEQ ID NO: 996160 - RNA, 22 nt, Human
ccuggagcaggagcugcagagg

SEQ ID NO: 996161 - RNA, 22 nt, Human
ucucccacagccgugcuucaag

SEQ ID NO: 996162 - RNA, 22 nt, Human
uguguauagcaguuuccagucu

SEQ ID NO: 996163 - RNA, 22 nt, Human
ccuggcucuucagagguuccua

SEQ ID NO: 996164 - RNA, 22 nt, Human
aauauuaauagaagggguucua

SEQ ID NO: 996165 - RNA, 22 nt, Human
ccugccaggccagugagcuucc

SEQ ID NO: 996166 - RNA, 22 nt, Human
cagggaguuuuuguuccucuag

SEQ ID NO: 996167 - RNA, 22 nt, Human
acaaaugcuuaguucaccaaaa

SEQ ID NO: 996168 - RNA, 22 nt, Human
ccagagcugcauccagcagguu

SEQ ID NO: 996169 - RNA, 22 nt, Human
uuuugaaagccagguuuguaug

SEQ ID NO: 996170 - RNA, 22 nt, Human
auuguggugucaguuauaggca

SEQ ID NO: 996171 - RNA, 22 nt, Human
acuguguguuugucuagcacag

SEQ ID NO: 996172 - RNA, 22 nt, Human
aagcugccugccacgcuagaua

SEQ ID NO: 996173 - RNA, 22 nt, Human
cauaagaaauuuaacagaacuu

SEQ ID NO: 996174 - RNA, 22 nt, Human
cccagcaggucggugcugccug

SEQ ID NO: 996175 - RNA, 22 nt, Human
aaacaaguuuagaauaaugaau

SEQ ID NO: 996176 - RNA, 22 nt, Human
uccugagaugagacagugcugc

SEQ ID NO: 996177 - RNA, 22 nt, Human
uccagccuaauguucuucccac

SEQ ID NO: 996178 - RNA, 22 nt, Human
gggccugugcacaguucuguua

SEQ ID NO: 996179 - RNA, 22 nt, Human
caggaugugaggaggccauuug

SEQ ID NO: 996180 - RNA, 22 nt, Human
agagcugugcuuugcaccacgu

SEQ ID NO: 996181 - RNA, 22 nt, Human
ggcagcaugagccuggugaauu

SEQ ID NO: 996182 - RNA, 22 nt, Human
guuuuauuggaacacagccaug

SEQ ID NO: 996183 - RNA, 22 nt, Human
ugaauaagaauuauuauaauga

SEQ ID NO: 996184 - RNA, 22 nt, Human
gcaggcagagagggguuuccag

SEQ ID NO: 996185 - RNA, 22 nt, Human
cccucugccugcgcccuggugu

SEQ ID NO: 996186 - RNA, 22 nt, Human
auaaaaacugacccauccuuug

SEQ ID NO: 996187 - RNA, 22 nt, Human
agcccuggcccggcugugcuuu

SEQ ID NO: 996188 - RNA, 22 nt, Human
caguacuuaacuuauaggagag

SEQ ID NO: 996189 - RNA, 22 nt, Human
ucugaggcuauguucaggcuaa

SEQ ID NO: 996190 - RNA, 17 nt, Human
uccuucagugccucugc

SEQ ID NO: 996191 - RNA, 22 nt, Human
ggagacagugacuuagagacug

SEQ ID NO: 996192 - RNA, 22 nt, Human
cagugcuccugauguacccuug

SEQ ID NO: 996193 - RNA, 22 nt, Human
cuuuauguuggggugucuuagu

SEQ ID NO: 996194 - RNA, 22 nt, Human
guggcagagguuccucagugug

SEQ ID NO: 996195 - RNA, 22 nt, Human
cagccaggcccccgagucguug

SEQ ID NO: 996196 - RNA, 22 nt, Human
accacuguaucuccagcacauu

SEQ ID NO: 996197 - RNA, 22 nt, Human
ucuuuacaaucuaagcauaguu

SEQ ID NO: 996198 - RNA, 22 nt, Human
uagugaaacaguuaucaaucug

SEQ ID NO: 996199 - RNA, 22 nt, Human
gccugccuuuguaugacccuga

SEQ ID NO: 996200 - RNA, 22 nt, Human
uguguacucaauugagccauuu

SEQ ID NO: 996201 - RNA, 22 nt, Human
gaggaggcuaagugggcucugg

SEQ ID NO: 996202 - RNA, 22 nt, Human
gaugcacuugccccuccucaga

SEQ ID NO: 996203 - RNA, 22 nt, Human
acauuucucagguaagucauuu

SEQ ID NO: 996204 - RNA, 22 nt, Human
acugggaguucuccaugucccu

SEQ ID NO: 996205 - RNA, 22 nt, Human
guaauaaugguccccaaacacu

SEQ ID NO: 996206 - RNA, 22 nt, Human
ugccugaguuuaacccucagag

SEQ ID NO: 996207 - RNA, 22 nt, Human
ucagaaauacuaucagcuuuug

SEQ ID NO: 996208 - RNA, 22 nt, Human
ucaaagucacaacucucuaauu

SEQ ID NO: 996209 - RNA, 22 nt, Human
cugggaugucuauagaacacuu

SEQ ID NO: 996210 - RNA, 22 nt, Human
ggucucagacuggcaggcagug

SEQ ID NO: 996211 - RNA, 22 nt, Human
uaaggcacccgugagcugccag

SEQ ID NO: 996212 - RNA, 22 nt, Human
ccugagcugaacuaagcaguuu

SEQ ID NO: 996213 - RNA, 22 nt, Human
aaagguaacaguuauaaccagg

SEQ ID NO: 996214 - RNA, 22 nt, Human
cuuccagagauagggccucaag

SEQ ID NO: 996215 - RNA, 22 nt, Human
cuggccugaggucggcuguagg

SEQ ID NO: 996216 - RNA, 22 nt, Human
gcccaugcucucaggcgggccu

SEQ ID NO: 996217 - RNA, 17 nt, Human
gcuggcugacccaugcc

SEQ ID NO: 996218 - RNA, 22 nt, Human
ggcaugggccgaggugccuccu

SEQ ID NO: 996219 - RNA, 22 nt, Human
ccugagguggcugcagcacugc

SEQ ID NO: 996220 - RNA, 22 nt, Human
caggguggcaggcaccauggcc

SEQ ID NO: 996221 - RNA, 22 nt, Human
uuucacauguggaaugccaggu

SEQ ID NO: 996222 - RNA, 19 nt, Human
uggccagguacugucugcu

SEQ ID NO: 996223 - RNA, 20 nt, Human
agcuggccuguccuaggccu

SEQ ID NO: 996224 - RNA, 22 nt, Human
ggagggcaucaaucaggccugg

SEQ ID NO: 996225 - RNA, 23 nt, Human
uggggagaguuacccuggaagcg

SEQ ID NO: 996226 - RNA, 22 nt, Human
gcucugcuugcaucaugacugc

SEQ ID NO: 996227 - RNA, 21 nt, Human
uggcagggguaguaguacagc

SEQ ID NO: 996228 - RNA, 22 nt, Human
auguguagaacuguaaugccca

SEQ ID NO: 996229 - RNA, 22 nt, Human
auuguguaauuuucagcucaua

SEQ ID NO: 996230 - RNA, 22 nt, Human
aacagaacccgagugugaaucu

SEQ ID NO: 996231 - RNA, 22 nt, Human
aaguucaaggcagguccugagg

SEQ ID NO: 996232 - RNA, 17 nt, Human
aggugcagaggcagagc

SEQ ID NO: 996233 - RNA, 22 nt, Human
uguuuuaugagccauauaaccu

SEQ ID NO: 996234 - RNA, 22 nt, Human
gccuggagugguccugcugccc

SEQ ID NO: 996235 - RNA, 22 nt, Human
uggcucagauaauucaaggggc

SEQ ID NO: 996236 - RNA, 22 nt, Human
gggcagggguagcauuccaagu

SEQ ID NO: 996237 - RNA, 22 nt, Human
gugcauguuaaugguguacaaa

SEQ ID NO: 996238 - RNA, 22 nt, Human
caaaagcaguucuaucugaguu

SEQ ID NO: 996239 - RNA, 22 nt, Human
acuuaguauuuuucagcuuuga

SEQ ID NO: 996240 - RNA, 22 nt, Human
uggcuuccugcacagugucugc

SEQ ID NO: 996241 - RNA, 22 nt, Human
agacccugucaguguuaggaaa

SEQ ID NO: 996242 - RNA, 22 nt, Human
gggcacuguggggcccaugcug

SEQ ID NO: 996243 - RNA, 22 nt, Human
auguacauuuuccuaauguuuu

SEQ ID NO: 996244 - RNA, 22 nt, Human
uggaagagacacuuacauucag

SEQ ID NO: 996245 - RNA, 22 nt, Human
cccagggacagaugggcagcua

SEQ ID NO: 996246 - RNA, 22 nt, Human
ggggauggaggcgugugguccu

SEQ ID NO: 996247 - RNA, 23 nt, Human
ccugucugugcuggguggacaca

SEQ ID NO: 996248 - RNA, 21 nt, Human
gccucugcugucuuauuguga

SEQ ID NO: 996249 - RNA, 22 nt, Human
ccagggcagcgccccuccacgc

SEQ ID NO: 996250 - RNA, 22 nt, Human
auccugggcagugugucacucu

SEQ ID NO: 996251 - RNA, 22 nt, Human
ucugccuugagguccucagcuc

SEQ ID NO: 996252 - RNA, 22 nt, Human
cuggagagauccuccugaaaaa

SEQ ID NO: 996253 - RNA, 22 nt, Human
uggcucaggccacuucuuuuau

SEQ ID NO: 996254 - RNA, 22 nt, Human
gcucugcucuaacauuccugac

SEQ ID NO: 996255 - RNA, 22 nt, Human
uaacagaaaggggacagaaaua

SEQ ID NO: 996256 - RNA, 22 nt, Human
uauuacugagguuuuauggagu

SEQ ID NO: 996257 - RNA, 22 nt, Human
ucagaggaauaaugcugcauuu

SEQ ID NO: 996258 - RNA, 21 nt, Human
ucugucugguuuuagaguggc

SEQ ID NO: 996259 - RNA, 22 nt, Human
ugccagcacuucuggcugucug

SEQ ID NO: 996260 - RNA, 22 nt, Human
cuggagccggcgagccccagcc

SEQ ID NO: 996261 - RNA, 22 nt, Human
agagcuggggccagagucaagg

SEQ ID NO: 996262 - RNA, 22 nt, Human
cugggccagcaacugcaaugga

SEQ ID NO: 996263 - RNA, 21 nt, Human
cagagguggccugaccucuga

SEQ ID NO: 996264 - RNA, 22 nt, Human
gcaaggcugugcacuuugcauu

SEQ ID NO: 996265 - RNA, 22 nt, Human
cccagcuccaagggacagcgaa

SEQ ID NO: 996266 - RNA, 22 nt, Human
gcagugccuugcuucucugucu

SEQ ID NO: 996267 - RNA, 22 nt, Human
gucucccaucguuugugaggaa

SEQ ID NO: 996268 - RNA, 22 nt, Human
uccugcagagccgcccucaggu

SEQ ID NO: 996269 - RNA, 22 nt, Human
gaagagcugugauucaggcuua

SEQ ID NO: 996270 - RNA, 22 nt, Human
uugagggaacaugagaaucauc

SEQ ID NO: 996271 - RNA, 22 nt, Human
ccugucuguauugguuugcuau

SEQ ID NO: 996272 - RNA, 22 nt, Human
uuagagaugucccaaaaugaag

SEQ ID NO: 996273 - RNA, 22 nt, Human
cagcuggcguggagugauugca

SEQ ID NO: 996274 - RNA, 22 nt, Human
cacagcugaaguagccaugugg

SEQ ID NO: 996275 - RNA, 22 nt, Human
caguguguggauccucccagga

SEQ ID NO: 996276 - RNA, 21 nt, Human
ugccagggauuuacagagccu

SEQ ID NO: 996277 - RNA, 22 nt, Human
aauguguguucggggcccagag

SEQ ID NO: 996278 - RNA, 22 nt, Human
acaggugaccugcucauaugaa

SEQ ID NO: 996279 - RNA, 22 nt, Human
cugguccuugacgcgugggagg

SEQ ID NO: 996280 - RNA, 22 nt, Human
agccaaggacacggagccuccu

SEQ ID NO: 996281 - RNA, 22 nt, Human
gcccugucggaacugcgaccuc

SEQ ID NO: 996282 - RNA, 22 nt, Human
cggggcugcucguccuccugug

SEQ ID NO: 996283 - RNA, 22 nt, Human
aaauguggguaaugggacugga

SEQ ID NO: 996284 - RNA, 22 nt, Human
aguauguagugcaaucagucag

SEQ ID NO: 996285 - RNA, 22 nt, Human
cugggccaucuccuuugugugg

SEQ ID NO: 996286 - RNA, 19 nt, Human
agcagccauagacaauaug

SEQ ID NO: 996287 - RNA, 21 nt, Human
agcuuguguguaucacagugu

SEQ ID NO: 996288 - RNA, 22 nt, Human
cuuuauguccuugaagaguugu

SEQ ID NO: 996289 - RNA, 22 nt, Human
ugccaggcgugguggugcgcac

SEQ ID NO: 996290 - RNA, 22 nt, Human
aggugcagcaugaguccaacgg

SEQ ID NO: 996291 - RNA, 22 nt, Human
cuggagcucuguguguuccuga

SEQ ID NO: 996292 - RNA, 22 nt, Human
cagcuggcauaccugggcccgg

SEQ ID NO: 996293 - RNA, 22 nt, Human
cuggagaggccccaagauauuu

SEQ ID NO: 996294 - RNA, 22 nt, Human
ggcugcagauagccagccacca

SEQ ID NO: 996295 - RNA, 22 nt, Human
auucuuggagcagucaaagaag

SEQ ID NO: 996296 - RNA, 22 nt, Human
uuucagaugcaauuaauuuuca

SEQ ID NO: 996297 - RNA, 22 nt, Human
ccuccugguccagcaucucuuu

SEQ ID NO: 996298 - RNA, 20 nt, Human
ggaccagguggggcgguggc

SEQ ID NO: 996299 - RNA, 22 nt, Human
ggcugagcacuuuaggcaggag

SEQ ID NO: 996300 - RNA, 22 nt, Human
aaaguguugggaagaaagugca

SEQ ID NO: 996301 - RNA, 22 nt, Human
cugagccagcuggcaugugcua

SEQ ID NO: 996302 - RNA, 22 nt, Human
caaaaagcuuagguaacaagcc

SEQ ID NO: 996303 - RNA, 22 nt, Human
agcagccacagcagaucugagu

SEQ ID NO: 996304 - RNA, 22 nt, Human
ugagccaggcucaagugauccu

SEQ ID NO: 996305 - RNA, 22 nt, Human
ugcccacaggaagacaccagcg

SEQ ID NO: 996306 - RNA, 22 nt, Human
aggccuggguguucaccagaag

SEQ ID NO: 996307 - RNA, 22 nt, Human
acagagcugggugcccccugga

SEQ ID NO: 996308 - RNA, 17 nt, Human
cuggagccuccaacucc

SEQ ID NO: 996309 - RNA, 22 nt, Human
guuuuauaggugaaauauuacu

SEQ ID NO: 996310 - RNA, 22 nt, Human
uagggcaggugaagaaaagcua

SEQ ID NO: 996311 - RNA, 19 nt, Human
cugugcuuuaaacuccuau

SEQ ID NO: 996312 - RNA, 22 nt, Human
gaggccugaggcugccuggagc

SEQ ID NO: 996313 - RNA, 22 nt, Human
ggagccaguauuuaguggucuu

SEQ ID NO: 996314 - RNA, 22 nt, Human
ggcuucuuccugugaacauguu

SEQ ID NO: 996315 - RNA, 22 nt, Human
cugagcugggcucucuugaggg

SEQ ID NO: 996316 - RNA, 22 nt, Human
ucaggccacuucacaggugauu

SEQ ID NO: 996317 - RNA, 22 nt, Human
ggguccagcgacagcaggcuca

SEQ ID NO: 996318 - RNA, 22 nt, Human
uuuggaaaguugucacuuuaga

SEQ ID NO: 996319 - RNA, 17 nt, Human
uugggagagaaagguau

SEQ ID NO: 996320 - RNA, 22 nt, Human
gcugugcuggaaggggaccugc

SEQ ID NO: 996321 - RNA, 22 nt, Human
acauucuuaacaguuaaaaacu

SEQ ID NO: 996322 - RNA, 22 nt, Human
ugcucccaggcauucucuguug

SEQ ID NO: 996323 - RNA, 22 nt, Human
ggaagagccuggggugucaggc

SEQ ID NO: 996324 - RNA, 22 nt, Human
uugcaccauuucacuuccauua

SEQ ID NO: 996325 - RNA, 22 nt, Human
ggcacagggaggcccuggugug

SEQ ID NO: 996326 - RNA, 22 nt, Human
uggggaagggcacccuggagac

SEQ ID NO: 996327 - RNA, 20 nt, Human
ccagguggugccuggagagg

SEQ ID NO: 996328 - RNA, 22 nt, Human
ugggggucaggaugaggccuug

SEQ ID NO: 996329 - RNA, 23 nt, Human
aagcugccuucgcaguuggucug

SEQ ID NO: 996330 - RNA, 22 nt, Human
ucagggcauucaagaggccugg

SEQ ID NO: 996331 - RNA, 22 nt, Human
cugcauucauaucagauagaag

SEQ ID NO: 996332 - RNA, 22 nt, Human
agaagccagcuucagcugcccg

SEQ ID NO: 996333 - RNA, 22 nt, Human
cuuucauucuuagauauuagug

SEQ ID NO: 996334 - RNA, 22 nt, Human
gcugggcuugguuucccugcuu

SEQ ID NO: 996335 - RNA, 22 nt, Human
acuuccugaauggggcuaauua

SEQ ID NO: 996336 - RNA, 22 nt, Human
uugcagcagggugaauucacuc

SEQ ID NO: 996337 - RNA, 22 nt, Human
aucaguuuaaaugggcuguugg

SEQ ID NO: 996338 - RNA, 22 nt, Human
cauugacaucaggcuuggccaa

SEQ ID NO: 996339 - RNA, 22 nt, Human
gccagacacuccccugggcagg

SEQ ID NO: 996340 - RNA, 22 nt, Human
gcuggcagagacaagaagacua

SEQ ID NO: 996341 - RNA, 22 nt, Human
cccuggaggaccccaauguggc

SEQ ID NO: 996342 - RNA, 21 nt, Human
agcagaggggacauguuugau

SEQ ID NO: 996343 - RNA, 22 nt, Human
uggaagccaggcccgcuccuaa

SEQ ID NO: 996344 - RNA, 22 nt, Human
ccuggccaguuuccaggcccug

SEQ ID NO: 996345 - RNA, 18 nt, Human
gagcugccauauuuaguu

SEQ ID NO: 996346 - RNA, 22 nt, Human
ggggcagaaguagugccccuga

SEQ ID NO: 996347 - RNA, 22 nt, Human
aucacgucaugguuugaucugg

SEQ ID NO: 996348 - RNA, 18 nt, Human
cugaggcuggcaggagcc

SEQ ID NO: 996349 - RNA, 22 nt, Human
ucucagaguuuuuuuccaggac

SEQ ID NO: 996350 - RNA, 22 nt, Human
ccaggcucaggugcgagagaca

SEQ ID NO: 996351 - RNA, 22 nt, Human
uggcucagcauucacuggucuu

SEQ ID NO: 996352 - RNA, 22 nt, Human
uagaaaucauuuagaaguauug

SEQ ID NO: 996353 - RNA, 22 nt, Human
agguggaacguucaggugcuag

SEQ ID NO: 996354 - RNA, 19 nt, Human
gagcccucuccauggccac

SEQ ID NO: 996355 - RNA, 22 nt, Human
uaugcauuuuauagugcaaagc

SEQ ID NO: 996356 - RNA, 22 nt, Human
gccucugcccauccaccaucag

SEQ ID NO: 996357 - RNA, 22 nt, Human
uuccauuguuucugucuucacu

SEQ ID NO: 996358 - RNA, 22 nt, Human
uggaggaaucagggcuuaggcu

SEQ ID NO: 996359 - RNA, 22 nt, Human
aaauguguuucgaaaacuggug

SEQ ID NO: 996360 - RNA, 22 nt, Human
caugcacaaagguaagaugcgu

SEQ ID NO: 996361 - RNA, 22 nt, Human
ucugccacuagugguuaccuua

SEQ ID NO: 996362 - RNA, 22 nt, Human
cuguuuaucuaggaguugcagg

SEQ ID NO: 996363 - RNA, 22 nt, Human
ccugccuggagcugagugugga

SEQ ID NO: 996364 - RNA, 22 nt, Human
gccuggguccacugaucaugcu

SEQ ID NO: 996365 - RNA, 22 nt, Human
ucccugggccuccugcuaugca

SEQ ID NO: 996366 - RNA, 20 nt, Human
uugaggagauauugaauacu

SEQ ID NO: 996367 - RNA, 22 nt, Human
agccucucuccagcuuggcaga

SEQ ID NO: 996368 - RNA, 22 nt, Human
gagcacugauuuauuuuugucu

SEQ ID NO: 996369 - RNA, 19 nt, Human
aguguguacugaaagcacu

SEQ ID NO: 996370 - RNA, 22 nt, Human
aagcugccacacggugaguacu

SEQ ID NO: 996371 - RNA, 22 nt, Human
aaaguguacuaugucaugaaca

SEQ ID NO: 996372 - RNA, 22 nt, Human
cauucacauucuucuuacuguu

SEQ ID NO: 996373 - RNA, 23 nt, Human
uuucacaaugagcauuacagaau

SEQ ID NO: 996374 - RNA, 22 nt, Human
cucaggauauugggcuggagca

SEQ ID NO: 996375 - RNA, 22 nt, Human
cagggcagggauguugcggcag

SEQ ID NO: 996376 - RNA, 22 nt, Human
aagcccagcugaaagcauuuuu

SEQ ID NO: 996377 - RNA, 22 nt, Human
gcagggagguuugcugaccugg

SEQ ID NO: 996378 - RNA, 22 nt, Human
ugaagacagaccaaggagaaug

SEQ ID NO: 996379 - RNA, 22 nt, Human
uuauguaggauaaugaauugcc

SEQ ID NO: 996380 - RNA, 22 nt, Human
auaaagaggauguauuuacagc

SEQ ID NO: 996381 - RNA, 22 nt, Human
ggcagcuguggacgucgucauu

SEQ ID NO: 996382 - RNA, 22 nt, Human
ccuggcugucguuuugugaaau

SEQ ID NO: 996383 - RNA, 19 nt, Human
aagcagcccuggcaagagc

SEQ ID NO: 996384 - RNA, 22 nt, Human
ugcaccuucauuuuaggcagcu

SEQ ID NO: 996385 - RNA, 22 nt, Human
uuauuuuuaaaaguucacacag

SEQ ID NO: 996386 - RNA, 22 nt, Human
uccugaggaaaguucaugaaug

SEQ ID NO: 996387 - RNA, 22 nt, Human
aggcucuguuauucuagagggc

SEQ ID NO: 996388 - RNA, 22 nt, Human
gccuucaggaggguuccagaca

SEQ ID NO: 996389 - RNA, 22 nt, Human
ugcugucaguuggcaggaugag

SEQ ID NO: 996390 - RNA, 22 nt, Human
uuucacaacacaaucucguuaa

SEQ ID NO: 996391 - RNA, 22 nt, Human
ccugggagcuguggaaaggcug

SEQ ID NO: 996392 - RNA, 22 nt, Human
ugggccugccccaggcuucagc

SEQ ID NO: 996393 - RNA, 22 nt, Human
ucucagagagcuguguuuuccu

SEQ ID NO: 996394 - RNA, 22 nt, Human
gaagcagcuagcccacuaguca

SEQ ID NO: 996395 - RNA, 22 nt, Human
ccagggcaucacauccaguguu

SEQ ID NO: 996396 - RNA, 22 nt, Human
cagcucugggugacaggagggc

SEQ ID NO: 996397 - RNA, 22 nt, Human
auggccaagaauauuucucaac

SEQ ID NO: 996398 - RNA, 22 nt, Human
caggguccggcugccuggcugu

SEQ ID NO: 996399 - RNA, 22 nt, Human
gcccugugcgacucuagagguu

SEQ ID NO: 996400 - RNA, 22 nt, Human
uggaaagaauuccuaugguuca

SEQ ID NO: 996401 - RNA, 20 nt, Human
cuaucuccuggcgugccuuc

SEQ ID NO: 996402 - RNA, 22 nt, Human
aaaauguguuuaugcauuucgu

SEQ ID NO: 996403 - RNA, 22 nt, Human
acugugcacaauucuaaguccu

SEQ ID NO: 996404 - RNA, 22 nt, Human
gcagauggcugagccugcagau

SEQ ID NO: 996405 - RNA, 22 nt, Human
aggagugcaaauaguccagaga

SEQ ID NO: 996406 - RNA, 22 nt, Human
ccugucauacuaacguaguggg

SEQ ID NO: 996407 - RNA, 22 nt, Human
aggcuuccuggaggaagaggua

SEQ ID NO: 996408 - RNA, 22 nt, Human
aaggccagcuuguagggcuggu

SEQ ID NO: 996409 - RNA, 17 nt, Human
ucugggcuucagugguc

SEQ ID NO: 996410 - RNA, 22 nt, Human
ucagguggcuucggggaguggc

SEQ ID NO: 996411 - RNA, 22 nt, Human
caggggcucccugggugccagu

SEQ ID NO: 996412 - RNA, 22 nt, Human
uuaaguccuugguaauuuucuu

SEQ ID NO: 996413 - RNA, 22 nt, Human
uccagagcagguggucagaagg

SEQ ID NO: 996414 - RNA, 22 nt, Human
caaaauguucuggcaccuuuaa

SEQ ID NO: 996415 - RNA, 22 nt, Human
aagcagaugggacuccaaggca

SEQ ID NO: 996416 - RNA, 22 nt, Human
uaaguuuaaauguacaugaagc

SEQ ID NO: 996417 - RNA, 22 nt, Human
cagagccugccaccuuucuccc

SEQ ID NO: 996418 - RNA, 23 nt, Human
agaugaggcuucuccauguuggu

SEQ ID NO: 996419 - RNA, 18 nt, Human
aacuucaacuacaaugga

SEQ ID NO: 996420 - RNA, 18 nt, Human
guucaaggucaagagaga

SEQ ID NO: 996421 - RNA, 22 nt, Human
ugcaaacuauugguagagaugg

SEQ ID NO: 996422 - RNA, 22 nt, Human
uucucucauucaaauuaaagug

SEQ ID NO: 996423 - RNA, 22 nt, Human
uuuaggaugcucuauucugacu

SEQ ID NO: 996424 - RNA, 22 nt, Human
auagaguccaaaguaugaauau

SEQ ID NO: 996425 - RNA, 22 nt, Human
aggcugucugaccccagagccc

SEQ ID NO: 996426 - RNA, 22 nt, Human
uuguauucauugcuuacccaau

SEQ ID NO: 996427 - RNA, 22 nt, Human
gccuguguggaugcgccggugc

SEQ ID NO: 996428 - RNA, 22 nt, Human
cccaaacaguuccugugguacu

SEQ ID NO: 996429 - RNA, 22 nt, Human
gaagagcugacagugucauccu

SEQ ID NO: 996430 - RNA, 19 nt, Human
acauuuaaauucagaucuc

SEQ ID NO: 996431 - RNA, 22 nt, Human
uaagaacaguguuucaucucua

SEQ ID NO: 996432 - RNA, 22 nt, Human
gaagcccauuuguacagcacau

SEQ ID NO: 996433 - RNA, 22 nt, Human
gugcucuccuggcugcccugac

SEQ ID NO: 996434 - RNA, 22 nt, Human
ugucucugcuuuccuugcaggg

SEQ ID NO: 996435 - RNA, 22 nt, Human
ucuccuggagcaggaagguggg

SEQ ID NO: 996436 - RNA, 22 nt, Human
ccagcugaggcagccacacagg

SEQ ID NO: 996437 - RNA, 22 nt, Human
caaaugcauaguuuauaagaag

SEQ ID NO: 996438 - RNA, 22 nt, Human
gggcuggcucccagguguugaa

SEQ ID NO: 996439 - RNA, 22 nt, Human
gcugggaggaauuuggggaaua

SEQ ID NO: 996440 - RNA, 22 nt, Human
aaagaauuuguacacccuacua

SEQ ID NO: 996441 - RNA, 22 nt, Human
uacaaaugaguuguaugaacca

SEQ ID NO: 996442 - RNA, 22 nt, Human
gggccaugagagguucaucaac

SEQ ID NO: 996443 - RNA, 22 nt, Human
ugccugucuuuccucccucgua

SEQ ID NO: 996444 - RNA, 22 nt, Human
gcucugcugacagcugggacag

SEQ ID NO: 996445 - RNA, 22 nt, Human
uauucacaggcuggagugaugu

SEQ ID NO: 996446 - RNA, 22 nt, Human
auugucuucuggucuuaucuuu

SEQ ID NO: 996447 - RNA, 22 nt, Human
gcaggcugugaggcucagaugg

SEQ ID NO: 996448 - RNA, 22 nt, Human
ugcaccugagaggucucugagg

SEQ ID NO: 996449 - RNA, 22 nt, Human
ccagagccucuuaugaagaucg

SEQ ID NO: 996450 - RNA, 22 nt, Human
acaaaugcagcauaaagugaac

SEQ ID NO: 996451 - RNA, 22 nt, Human
uggccugguuauauugcuauca

SEQ ID NO: 996452 - RNA, 22 nt, Human
caucaaauggcaagugaaagcu

SEQ ID NO: 996453 - RNA, 22 nt, Human
aaacccaucugucugucugcag

SEQ ID NO: 996454 - RNA, 22 nt, Human
ugcuguuauacuuagcugguua

SEQ ID NO: 996455 - RNA, 22 nt, Human
uuggcacagagcugcagccugg

SEQ ID NO: 996456 - RNA, 22 nt, Human
aggggugaaggcccgauaggag

SEQ ID NO: 996457 - RNA, 18 nt, Human
uggcagagugucuguucu

SEQ ID NO: 996458 - RNA, 22 nt, Human
cccugagagugagugccaccuu

SEQ ID NO: 996459 - RNA, 22 nt, Human
cccagcaucccagugggcagca

SEQ ID NO: 996460 - RNA, 22 nt, Human
ucaggcugcccguucagggcuc

SEQ ID NO: 996461 - RNA, 22 nt, Human
uuucacaagacagcuacuguug

SEQ ID NO: 996462 - RNA, 22 nt, Human
gcucugcugaagccccuugcau

SEQ ID NO: 996463 - RNA, 19 nt, Human
gcugugugaccuugggcaa

SEQ ID NO: 996464 - RNA, 17 nt, Human
ugguggcuggagucagg

SEQ ID NO: 996465 - RNA, 22 nt, Human
cuggcacaugcucccugagugg

SEQ ID NO: 996466 - RNA, 22 nt, Human
cugugaggcccugggugcugga

SEQ ID NO: 996467 - RNA, 22 nt, Human
ggacacaguggaagacagcuug

SEQ ID NO: 996468 - RNA, 22 nt, Human
ccugagcuggaagagcuugugc

SEQ ID NO: 996469 - RNA, 22 nt, Human
agccuggaggccaggagacagu

SEQ ID NO: 996470 - RNA, 22 nt, Human
acagccagaggagccaggcugg

SEQ ID NO: 996471 - RNA, 22 nt, Human
gggugcaggcagcccaggcagg

SEQ ID NO: 996472 - RNA, 21 nt, Human
uggcucaguugcugggcacag

SEQ ID NO: 996473 - RNA, 22 nt, Human
aggucauuacaauuaucauuuu

SEQ ID NO: 996474 - RNA, 22 nt, Human
gcagggacaacugugcaccuga

SEQ ID NO: 996475 - RNA, 22 nt, Human
ggagucagccugucagagugua

SEQ ID NO: 996476 - RNA, 22 nt, Human
cuggagccagccagggcccucu

SEQ ID NO: 996477 - RNA, 22 nt, Human
uuagaaaggagcuuauuucuuu

SEQ ID NO: 996478 - RNA, 23 nt, Human
ggcacugaagcuacaauggugag

SEQ ID NO: 996479 - RNA, 22 nt, Human
ccagccuggacugggucuugug

SEQ ID NO: 996480 - RNA, 22 nt, Human
uaauaaaugaaagugcuggcau

SEQ ID NO: 996481 - RNA, 20 nt, Human
gaggcucugggcauggcgcc

SEQ ID NO: 996482 - RNA, 22 nt, Human
gaaggccauugcguccugggau

SEQ ID NO: 996483 - RNA, 22 nt, Human
cacaaaaguaggaggcaggcgg

SEQ ID NO: 996484 - RNA, 22 nt, Human
ugggcagauuaaugcaguggcu

SEQ ID NO: 996485 - RNA, 22 nt, Human
cccagcccugaccuauuggaaa

SEQ ID NO: 996486 - RNA, 22 nt, Human
gucagaggaauggaugagugau

SEQ ID NO: 996487 - RNA, 22 nt, Human
ccuggccucgugcucacggcuc

SEQ ID NO: 996488 - RNA, 18 nt, Human
gcugccugcauuccucac

SEQ ID NO: 996489 - RNA, 23 nt, Human
cccagcagauuguaaagugucca

SEQ ID NO: 996490 - RNA, 22 nt, Human
ucuggagaacuugcaagaggau

SEQ ID NO: 996491 - RNA, 22 nt, Human
cucuggaguucuucaagcuacu

SEQ ID NO: 996492 - RNA, 22 nt, Human
agccacagugcaagagagaaaa

SEQ ID NO: 996493 - RNA, 22 nt, Human
gggcugggaauggcuaaguaug

SEQ ID NO: 996494 - RNA, 22 nt, Human
aagagcuggaugaagaaaucaa

SEQ ID NO: 996495 - RNA, 22 nt, Human
cacugcaguuccccagugcgca

SEQ ID NO: 996496 - RNA, 21 nt, Human
gugucaugguugacuuuggca

SEQ ID NO: 996497 - RNA, 22 nt, Human
cuggccaggcuugggacagaca

SEQ ID NO: 996498 - RNA, 22 nt, Human
uuagaaacccagacucuuaggu

SEQ ID NO: 996499 - RNA, 22 nt, Human
uccuggccucgcuguccaccuu

SEQ ID NO: 996500 - RNA, 20 nt, Human
aucuggcucagauccugcag

SEQ ID NO: 996501 - RNA, 22 nt, Human
uuucagugcuucuguuuaccgg

SEQ ID NO: 996502 - RNA, 20 nt, Human
ccugucugcaauggagguca

SEQ ID NO: 996503 - RNA, 23 nt, Human
cugaggccugcugcguucagguu

SEQ ID NO: 996504 - RNA, 22 nt, Human
ggcaccugcucaucuggacuca

SEQ ID NO: 996505 - RNA, 22 nt, Human
acacagaaccucauagccucuc

SEQ ID NO: 996506 - RNA, 22 nt, Human
cuggcucccucgcugaggugcu

SEQ ID NO: 996507 - RNA, 22 nt, Human
ccacagagacaggguccuugcu

SEQ ID NO: 996508 - RNA, 22 nt, Human
uucacauuugcccuuaugugug

SEQ ID NO: 996509 - RNA, 22 nt, Human
aggggacacggcuucuccaggg

SEQ ID NO: 996510 - RNA, 22 nt, Human
gcugggcuucucaaugcugccu

SEQ ID NO: 996511 - RNA, 22 nt, Human
ucccagagacagagccuccucc

SEQ ID NO: 996512 - RNA, 22 nt, Human
ucugggcuuuacacugugcuua

SEQ ID NO: 996513 - RNA, 22 nt, Human
ucuggcucauaggaaggccauu

SEQ ID NO: 996514 - RNA, 22 nt, Human
uuuccauauuuggucuuuggga

SEQ ID NO: 996515 - RNA, 22 nt, Human
aggcucagagaugaguaagcac

SEQ ID NO: 996516 - RNA, 22 nt, Human
gccuggcaggccuguuggggcu

SEQ ID NO: 996517 - RNA, 22 nt, Human
aaacauugcuaaauaaugcugc

SEQ ID NO: 996518 - RNA, 22 nt, Human
ggcugcagcagagggacucacg

SEQ ID NO: 996519 - RNA, 22 nt, Human
gagccaggcaccuucuguguug

SEQ ID NO: 996520 - RNA, 22 nt, Human
gaacccaguccaggugcagccu

SEQ ID NO: 996521 - RNA, 22 nt, Human
augccacugacauggacaauuu

SEQ ID NO: 996522 - RNA, 22 nt, Human
ugcccuuggguaacuugcugau

SEQ ID NO: 996523 - RNA, 18 nt, Human
uggagccauugccaccau

SEQ ID NO: 996524 - RNA, 22 nt, Human
aaacuacuaugggaauguacuu

SEQ ID NO: 996525 - RNA, 22 nt, Human
uccagggcuggguuggcucagc

SEQ ID NO: 996526 - RNA, 22 nt, Human
ucucagagaucuuucugcaugu

SEQ ID NO: 996527 - RNA, 22 nt, Human
aauucauccaugaacaauucca

SEQ ID NO: 996528 - RNA, 22 nt, Human
ugcaggagcugugcggugaggg

SEQ ID NO: 996529 - RNA, 22 nt, Human
auuuggauucuuauuuagcacu

SEQ ID NO: 996530 - RNA, 22 nt, Human
aaacagaaauuuccucaugcuc

SEQ ID NO: 996531 - RNA, 22 nt, Human
ucuggccaacccucaaguugua

SEQ ID NO: 996532 - RNA, 22 nt, Human
ggagagaaauugagguagcaag

SEQ ID NO: 996533 - RNA, 22 nt, Human
cuauuagguuggugcaaaagua

SEQ ID NO: 996534 - RNA, 20 nt, Human
ggccugagcauggcuggcag

SEQ ID NO: 996535 - RNA, 22 nt, Human
aagauguaucuuuccuuuaauu

SEQ ID NO: 996536 - RNA, 22 nt, Human
cuguccuuacugcuucuggcuu

SEQ ID NO: 996537 - RNA, 22 nt, Human
ccagcuccuucugucuguggag

SEQ ID NO: 996538 - RNA, 22 nt, Human
agagcuguucagcagccagguu

SEQ ID NO: 996539 - RNA, 18 nt, Human
auguauguacauauuuau

SEQ ID NO: 996540 - RNA, 22 nt, Human
guaaaucccauccuuucucugg

SEQ ID NO: 996541 - RNA, 22 nt, Human
cagcuggcagcccuggcccugc

SEQ ID NO: 996542 - RNA, 22 nt, Human
gccuggcacauugcaguggauu

SEQ ID NO: 996543 - RNA, 22 nt, Human
aggcacugacucaagggagcca

SEQ ID NO: 996544 - RNA, 22 nt, Human
cuagagaggcagauguccugug

SEQ ID NO: 996545 - RNA, 19 nt, Human
ccagcccugucacuucuug

SEQ ID NO: 996546 - RNA, 22 nt, Human
gccugcagggugaugggcugcc

SEQ ID NO: 996547 - RNA, 22 nt, Human
aggucauuuuugccuucuauuu

SEQ ID NO: 996548 - RNA, 22 nt, Human
gagaggcugacuggcuguccug

SEQ ID NO: 996549 - RNA, 19 nt, Human
gcugucugaugcugagguc

SEQ ID NO: 996550 - RNA, 22 nt, Human
uauaaaguuucgaaagauguau

SEQ ID NO: 996551 - RNA, 22 nt, Human
gccagcuggagacuggcagggg

SEQ ID NO: 996552 - RNA, 22 nt, Human
cucucuggcuuggcacggagau

SEQ ID NO: 996553 - RNA, 22 nt, Human
gggagguucuguucgcacuuga

SEQ ID NO: 996554 - RNA, 22 nt, Human
uuggccaaggaccuuuuuggag

SEQ ID NO: 996555 - RNA, 21 nt, Human
ugagccaggcugacggcugug

SEQ ID NO: 996556 - RNA, 22 nt, Human
ggagaccagaaggaagcuucga

SEQ ID NO: 996557 - RNA, 22 nt, Human
agggugccugcugcagguucag

SEQ ID NO: 996558 - RNA, 22 nt, Human
cagcugggagcuccauuagaua

SEQ ID NO: 996559 - RNA, 22 nt, Human
cacuaaguaagcuccucuacaa

SEQ ID NO: 996560 - RNA, 22 nt, Human
cugagauggaguuuugcucuug

SEQ ID NO: 996561 - RNA, 22 nt, Human
auggccaaagccacagcagagg

SEQ ID NO: 996562 - RNA, 22 nt, Human
cuggagagaccgaaagaggcug

SEQ ID NO: 996563 - RNA, 22 nt, Human
agugaaauagcauuuaugaagc

SEQ ID NO: 996564 - RNA, 19 nt, Human
uggucuaaaugugugcccc

SEQ ID NO: 996565 - RNA, 23 nt, Human
gccugggacugguagugugaccu

SEQ ID NO: 996566 - RNA, 22 nt, Human
ccuguguguaggccaggggagu

SEQ ID NO: 996567 - RNA, 22 nt, Human
uucuucaauuauuggaaagaaa

SEQ ID NO: 996568 - RNA, 22 nt, Human
gccuucaguaguauccucauga

SEQ ID NO: 996569 - RNA, 23 nt, Human
gccaggcuccggucuguggccac

SEQ ID NO: 996570 - RNA, 22 nt, Human
aaacugccuccugggcaacuaa

SEQ ID NO: 996571 - RNA, 19 nt, Human
acagaaauguaagugagac

SEQ ID NO: 996572 - RNA, 19 nt, Human
ucuggagcugaugcaggug

SEQ ID NO: 996573 - RNA, 22 nt, Human
aaagucauacauggugcuuacu

SEQ ID NO: 996574 - RNA, 22 nt, Human
ugaaaucuuuaguuucuguccc

SEQ ID NO: 996575 - RNA, 22 nt, Human
uuguuauaaagacuaaauaugu

SEQ ID NO: 996576 - RNA, 19 nt, Human
ggcuccuguggcugcagcc

SEQ ID NO: 996577 - RNA, 22 nt, Human
ggccucucuggcauggcugccc

SEQ ID NO: 996578 - RNA, 22 nt, Human
auguuguagcauaugaaauaua

SEQ ID NO: 996579 - RNA, 20 nt, Human
ucacauccucucccaacaug

SEQ ID NO: 996580 - RNA, 22 nt, Human
ggccucugccccagccacaccu

SEQ ID NO: 996581 - RNA, 22 nt, Human
uauguacagggauagaacuuga

SEQ ID NO: 996582 - RNA, 21 nt, Human
aaagugguaaggauuauuuug

SEQ ID NO: 996583 - RNA, 22 nt, Human
ggucccaggaaucuguguucua

SEQ ID NO: 996584 - RNA, 22 nt, Human
cauuaagauuuuuuucuacugg

SEQ ID NO: 996585 - RNA, 22 nt, Human
gucaaguuaagauaaggucaug

SEQ ID NO: 996586 - RNA, 22 nt, Human
caggugcucccagagaagugcu

SEQ ID NO: 996587 - RNA, 22 nt, Human
agccucugucaagcuuuucaaa

SEQ ID NO: 996588 - RNA, 22 nt, Human
ccugcagagccacgugccagcg

SEQ ID NO: 996589 - RNA, 22 nt, Human
acaggcugcccgcuccccaccu

SEQ ID NO: 996590 - RNA, 22 nt, Human
guccuggggauacagaagugaa

SEQ ID NO: 996591 - RNA, 18 nt, Human
gggcaagcggcugucacc

SEQ ID NO: 996592 - RNA, 22 nt, Human
ccugcagguccccggaugcgca

SEQ ID NO: 996593 - RNA, 22 nt, Human
aaauauaauuucugccucaaua

SEQ ID NO: 996594 - RNA, 22 nt, Human
ggcucaggcuggagugcagugg

SEQ ID NO: 996595 - RNA, 22 nt, Human
ugcauugcauuugucaugaaga

SEQ ID NO: 996596 - RNA, 19 nt, Human
ucacaggcaucuccccaga

SEQ ID NO: 996597 - RNA, 22 nt, Human
gggcccagcgugguuccaucug

SEQ ID NO: 996598 - RNA, 23 nt, Human
uggcucugagagguucagaugcu

SEQ ID NO: 996599 - RNA, 22 nt, Human
uggcagaguaggauggcccugu

SEQ ID NO: 996600 - RNA, 22 nt, Human
aucaaaguaggcauauguuuuu

SEQ ID NO: 996601 - RNA, 22 nt, Human
cuggggcucacuuuggucaggc

SEQ ID NO: 996602 - RNA, 22 nt, Human
gggcugcugccaaucacagccu

SEQ ID NO: 996603 - RNA, 22 nt, Human
ucucagaguuuacggggcugaa

SEQ ID NO: 996604 - RNA, 22 nt, Human
gagccugaauuugaccugcuua

SEQ ID NO: 996605 - RNA, 23 nt, Human
aggauguaggauguauggcagag

SEQ ID NO: 996606 - RNA, 22 nt, Human
uagaauaugugguguauacuuu

SEQ ID NO: 996607 - RNA, 22 nt, Human
ucugucacuuauuaagauggau

SEQ ID NO: 996608 - RNA, 17 nt, Human
gcagccagugcagcagg

SEQ ID NO: 996609 - RNA, 22 nt, Human
agacaggacacaagcugcauaa

SEQ ID NO: 996610 - RNA, 22 nt, Human
cugaagcaaaggaucgagcuaa

SEQ ID NO: 996611 - RNA, 22 nt, Human
gggcccuggauuuaagcaugga

SEQ ID NO: 996612 - RNA, 22 nt, Human
uggcagagucugggcuugggca

SEQ ID NO: 996613 - RNA, 22 nt, Human
gggcacugcuuugcucugucac

SEQ ID NO: 996614 - RNA, 22 nt, Human
agucucugugagcucccaaugg

SEQ ID NO: 996615 - RNA, 22 nt, Human
gugccugcagcaauccauggca

SEQ ID NO: 996616 - RNA, 22 nt, Human
aguauuucuaguugguucuacu

SEQ ID NO: 996617 - RNA, 22 nt, Human
ccugugcccucagccuggcucu

SEQ ID NO: 996618 - RNA, 19 nt, Human
uccuccuuacuuccucuug

SEQ ID NO: 996619 - RNA, 22 nt, Human
auucacaaauaacaggugcaga

SEQ ID NO: 996620 - RNA, 21 nt, Human
gcaggguccuuuccauuccua

SEQ ID NO: 996621 - RNA, 22 nt, Human
uaaaugugucuauggacccgcc

SEQ ID NO: 996622 - RNA, 22 nt, Human
agccaggcugcaguuggcuggc

SEQ ID NO: 996623 - RNA, 22 nt, Human
ucuggcucuuugggugauugua

SEQ ID NO: 996624 - RNA, 22 nt, Human
cugaaggaagcagaagcgaggu

SEQ ID NO: 996625 - RNA, 22 nt, Human
auuuacagaagcauguaauagc

SEQ ID NO: 996626 - RNA, 22 nt, Human
ggguacaaagauuucauaagau

SEQ ID NO: 996627 - RNA, 22 nt, Human
ucuguagcaagugagaggcauu

SEQ ID NO: 996628 - RNA, 22 nt, Human
cuggcagcauuaacagagagca

SEQ ID NO: 996629 - RNA, 22 nt, Human
uauuaugagguauuuggacuuu

SEQ ID NO: 996630 - RNA, 22 nt, Human
ggcagcaguggcugcuauuguc

SEQ ID NO: 996631 - RNA, 22 nt, Human
ugcugccacugguagucucauu

SEQ ID NO: 996632 - RNA, 17 nt, Human
uucaagauauugaaaug

SEQ ID NO: 996633 - RNA, 22 nt, Human
aagguacagaaauuaacaagga

SEQ ID NO: 996634 - RNA, 22 nt, Human
ggaguuggugagcaccaggcuu

SEQ ID NO: 996635 - RNA, 22 nt, Human
cugcagaggguuugagcauccu

SEQ ID NO: 996636 - RNA, 22 nt, Human
uacaguaaagcugcuaugaauu

SEQ ID NO: 996637 - RNA, 22 nt, Human
cagccagcuggcacugugagua

SEQ ID NO: 996638 - RNA, 22 nt, Human
acuaacauguuaaucaaaagaa

SEQ ID NO: 996639 - RNA, 23 nt, Human
aacaccaaggcucagagagauaa

SEQ ID NO: 996640 - RNA, 22 nt, Human
agggugcagaaggagccuagga

SEQ ID NO: 996641 - RNA, 22 nt, Human
auggccaaaucuaaacuguugg

SEQ ID NO: 996642 - RNA, 22 nt, Human
caguuuuucaaaauuacaugau

SEQ ID NO: 996643 - RNA, 22 nt, Human
acccuggguucccgcagcacca

SEQ ID NO: 996644 - RNA, 22 nt, Human
cagcauggggcuuggagucagc

SEQ ID NO: 996645 - RNA, 22 nt, Human
gcucugcuaauauuguaguacc

SEQ ID NO: 996646 - RNA, 22 nt, Human
gcucccagcauugcugcugaau

SEQ ID NO: 996647 - RNA, 22 nt, Human
cagcugaguguuggcauguuca

SEQ ID NO: 996648 - RNA, 22 nt, Human
gccauuuagggaggcaagguga

SEQ ID NO: 996649 - RNA, 22 nt, Human
aaacauucucagcccugcuugc

SEQ ID NO: 996650 - RNA, 22 nt, Human
ccacacugaaccucagugucuu

SEQ ID NO: 996651 - RNA, 22 nt, Human
aacacauauuuauauaugcaca

SEQ ID NO: 996652 - RNA, 22 nt, Human
ucaaaaguuucacauagagaua

SEQ ID NO: 996653 - RNA, 20 nt, Human
acaauagauuugagcaaagu

SEQ ID NO: 996654 - RNA, 17 nt, Human
cugcuuugugcaacgcu

SEQ ID NO: 996655 - RNA, 22 nt, Human
uuaugcuaguauaguccuuaga

SEQ ID NO: 996656 - RNA, 22 nt, Human
aaggucauggcaaauuacuuuu

SEQ ID NO: 996657 - RNA, 22 nt, Human
caaaaguagugaaguuguacau

SEQ ID NO: 996658 - RNA, 22 nt, Human
cccucccaggaguggccagaga

SEQ ID NO: 996659 - RNA, 22 nt, Human
cagucauuggcuaaagcucccu

SEQ ID NO: 996660 - RNA, 22 nt, Human
ccuguguggccaggcuggaguc

SEQ ID NO: 996661 - RNA, 22 nt, Human
uggcaggggaggugcuugcuua

SEQ ID NO: 996662 - RNA, 22 nt, Human
agaaaguucugugaguuguuca

SEQ ID NO: 996663 - RNA, 22 nt, Human
aacuaacagucauuaaaagaac

SEQ ID NO: 996664 - RNA, 22 nt, Human
cauggcagaaaccugagcugcu

SEQ ID NO: 996665 - RNA, 22 nt, Human
ucaggagucugugcaguuccac

SEQ ID NO: 996666 - RNA, 22 nt, Human
caugucuguguacacaugcaca

SEQ ID NO: 996667 - RNA, 20 nt, Human
uccuggccucccuggggcuc

SEQ ID NO: 996668 - RNA, 19 nt, Human
gcuuuuuguugucaaaggu

SEQ ID NO: 996669 - RNA, 22 nt, Human
ggccugaggcgucccagcugug

SEQ ID NO: 996670 - RNA, 22 nt, Human
uuugcauuuauaaguuggugga

SEQ ID NO: 996671 - RNA, 22 nt, Human
augugcuaaacucaacaaaucu

SEQ ID NO: 996672 - RNA, 22 nt, Human
ucugugaacaucacauugacag

SEQ ID NO: 996673 - RNA, 23 nt, Human
cccagagcacagccuccagaugc

SEQ ID NO: 996674 - RNA, 22 nt, Human
acaaaggugcgucccuucagcu

SEQ ID NO: 996675 - RNA, 22 nt, Human
ccucccaccguaucucaguggc

SEQ ID NO: 996676 - RNA, 22 nt, Human
ucagcugaaguggagaagcaga

SEQ ID NO: 996677 - RNA, 22 nt, Human
gaggccuggcugggaggaggug

SEQ ID NO: 996678 - RNA, 22 nt, Human
aagauuuacuagcauaauagcu

SEQ ID NO: 996679 - RNA, 19 nt, Human
auuugaaagcugugcuugc

SEQ ID NO: 996680 - RNA, 22 nt, Human
gaaaugcaggcuuggauucagc

SEQ ID NO: 996681 - RNA, 21 nt, Human
ggcccugguuacgccuccucu

SEQ ID NO: 996682 - RNA, 22 nt, Human
caauguguguguuuuucucaac

SEQ ID NO: 996683 - RNA, 22 nt, Human
ugccaggcccugugcuggaugc

SEQ ID NO: 996684 - RNA, 22 nt, Human
ucaaugauuagaguuuagugug

SEQ ID NO: 996685 - RNA, 22 nt, Human
uaagucaugauucuguguuacu

SEQ ID NO: 996686 - RNA, 22 nt, Human
gaggcagcaaaauauaucauaa

SEQ ID NO: 996687 - RNA, 18 nt, Human
uggacaggguggagaaaa

SEQ ID NO: 996688 - RNA, 22 nt, Human
cccaggcuggagugcaauggca

SEQ ID NO: 996689 - RNA, 22 nt, Human
ugaagcccugugucagcuucca

SEQ ID NO: 996690 - RNA, 22 nt, Human
agugaaaucagguuuugacugc

SEQ ID NO: 996691 - RNA, 22 nt, Human
agagcagaggcauggccguggg

SEQ ID NO: 996692 - RNA, 22 nt, Human
cuugggagacacaagaagacau

SEQ ID NO: 996693 - RNA, 22 nt, Human
auuugucuuugagugcccugcu

SEQ ID NO: 996694 - RNA, 22 nt, Human
uuagaaaucaccucugaagauc

SEQ ID NO: 996695 - RNA, 22 nt, Human
aggcuauuuccacucuucucau

SEQ ID NO: 996696 - RNA, 22 nt, Human
cuguccuguggaccugaggacg

SEQ ID NO: 996697 - RNA, 23 nt, Human
cagguggcuccacgagggguggg

SEQ ID NO: 996698 - RNA, 22 nt, Human
gaggaaaauggaguguaauuaa

SEQ ID NO: 996699 - RNA, 22 nt, Human
cuccaggccauggcugcggagg

SEQ ID NO: 996700 - RNA, 22 nt, Human
cccagcucucugcucuuagccu

SEQ ID NO: 996701 - RNA, 22 nt, Human
uuagugauuacuacauagauga

SEQ ID NO: 996702 - RNA, 22 nt, Human
uaggccagcccuuaguccuguc

SEQ ID NO: 996703 - RNA, 22 nt, Human
guuugaaugcaguaugcauuuu

SEQ ID NO: 996704 - RNA, 22 nt, Human
aaaugcauguagaauaauagag

SEQ ID NO: 996705 - RNA, 22 nt, Human
agggccugacacccuugccagc

SEQ ID NO: 996706 - RNA, 22 nt, Human
uagagaaauaagcuuugccuug

SEQ ID NO: 996707 - RNA, 22 nt, Human
cauuuaaagguuguggguaaaa

SEQ ID NO: 996708 - RNA, 22 nt, Human
agcaccuucacaggcucucagg

SEQ ID NO: 996709 - RNA, 19 nt, Human
agcuccugggcucugggcc

SEQ ID NO: 996710 - RNA, 22 nt, Human
gugcaugucggggugcauguca

SEQ ID NO: 996711 - RNA, 22 nt, Human
uauccaaaguuucucagaaacu

SEQ ID NO: 996712 - RNA, 22 nt, Human
gaaagaagcuuuagauggcuau

SEQ ID NO: 996713 - RNA, 22 nt, Human
agcagcagaggucagaaaggua

SEQ ID NO: 996714 - RNA, 22 nt, Human
aggcacugggggaugagcaagg

SEQ ID NO: 996715 - RNA, 22 nt, Human
ccagucccagcucugccaugcu

SEQ ID NO: 996716 - RNA, 22 nt, Human
agccucugcacgggcacgggug

SEQ ID NO: 996717 - RNA, 22 nt, Human
agagcuggacgucugagcccua

SEQ ID NO: 996718 - RNA, 22 nt, Human
gccccagccaaggugacacgaa

SEQ ID NO: 996719 - RNA, 17 nt, Human
cacaggugugguuugag

SEQ ID NO: 996720 - RNA, 22 nt, Human
acauuuuuuagagucccacauu

SEQ ID NO: 996721 - RNA, 23 nt, Human
agcagccagagauccucggcccu

SEQ ID NO: 996722 - RNA, 22 nt, Human
ccagcagcccucuuccaagacu

SEQ ID NO: 996723 - RNA, 22 nt, Human
ucugcucagugcuuaucucuaa

SEQ ID NO: 996724 - RNA, 21 nt, Human
acagaacuguauagugauaaa

SEQ ID NO: 996725 - RNA, 22 nt, Human
ucagcaggcaggaggcaugcca

SEQ ID NO: 996726 - RNA, 19 nt, Human
acuuccugcccgcuccuuu

SEQ ID NO: 996727 - RNA, 23 nt, Human
ucagaaugcacugaauuuacccu

SEQ ID NO: 996728 - RNA, 22 nt, Human
ucuguaaaacuucuuuguaaau

SEQ ID NO: 996729 - RNA, 22 nt, Human
ggcgugggaaguggggcuucug

SEQ ID NO: 996730 - RNA, 17 nt, Human
cagacaggcugucaccc

SEQ ID NO: 996731 - RNA, 22 nt, Human
aagaggaaaugauugacuauau

SEQ ID NO: 996732 - RNA, 22 nt, Human
gagcagugguugaacagaggca

SEQ ID NO: 996733 - RNA, 22 nt, Human
gucacaggccuggaugaggggc

SEQ ID NO: 996734 - RNA, 19 nt, Human
ccagagcccgccagauggg

SEQ ID NO: 996735 - RNA, 22 nt, Human
uuacaggggacauuggggacau

SEQ ID NO: 996736 - RNA, 22 nt, Human
ucaaaguuuguggcaauuuauu

SEQ ID NO: 996737 - RNA, 22 nt, Human
cugugccaguguauuccuguga

SEQ ID NO: 996738 - RNA, 17 nt, Human
agguggcugcugcgccu

SEQ ID NO: 996739 - RNA, 22 nt, Human
ccagcuccucuucccaguguca

SEQ ID NO: 996740 - RNA, 22 nt, Human
gcugcagcccggcgcgccugag

SEQ ID NO: 996741 - RNA, 22 nt, Human
uuccauaaugagauucccagcc

SEQ ID NO: 996742 - RNA, 22 nt, Human
acagggaacaggaauauacaaa

SEQ ID NO: 996743 - RNA, 22 nt, Human
guuugucuuaauuaggcaucga

SEQ ID NO: 996744 - RNA, 22 nt, Human
auugacaauuagcccuuaggug

SEQ ID NO: 996745 - RNA, 19 nt, Human
ugaggccaaggucacagau

SEQ ID NO: 996746 - RNA, 22 nt, Human
acaugcauucucuaaaagcaaa

SEQ ID NO: 996747 - RNA, 22 nt, Human
ggacucuguuuuccugaucacu

SEQ ID NO: 996748 - RNA, 22 nt, Human
ugucaugcagguuuguuauaga

SEQ ID NO: 996749 - RNA, 22 nt, Human
ccagucccgcaugguccagaau

SEQ ID NO: 996750 - RNA, 22 nt, Human
cagcugccccuccagggcuggg

SEQ ID NO: 996751 - RNA, 22 nt, Human
aaaguguugggauuacaggugu

SEQ ID NO: 996752 - RNA, 22 nt, Human
ggugccagccuagugcaguggu

SEQ ID NO: 996753 - RNA, 22 nt, Human
ggucugaguggggccugagauu

SEQ ID NO: 996754 - RNA, 22 nt, Human
cuggccauguugccucugagac

SEQ ID NO: 996755 - RNA, 22 nt, Human
augcuauacucaaagaaauuca

SEQ ID NO: 996756 - RNA, 22 nt, Human
uccugcagaccucagucagguc

SEQ ID NO: 996757 - RNA, 22 nt, Human
aaaaaugcuuggacuuaauaaa

SEQ ID NO: 996758 - RNA, 22 nt, Human
ugggcagauguggcucuccuug

SEQ ID NO: 996759 - RNA, 22 nt, Human
uagccuucucaagacaaaguug

SEQ ID NO: 996760 - RNA, 19 nt, Human
gucaucuuuuaauaaugug

SEQ ID NO: 996761 - RNA, 22 nt, Human
gauuuagagaauguuuuguaag

SEQ ID NO: 996762 - RNA, 20 nt, Human
ggcucugcuugugagcagcc

SEQ ID NO: 996763 - RNA, 22 nt, Human
cacuggggaaaacaggcuucuu

SEQ ID NO: 996764 - RNA, 22 nt, Human
uguaaucauuacaguacaugga

SEQ ID NO: 996765 - RNA, 17 nt, Human
aaaauucuguaaagagg

SEQ ID NO: 996766 - RNA, 21 nt, Human
acagggcaugcagcuggcugu

SEQ ID NO: 996767 - RNA, 22 nt, Human
cuccuggaggauagugacuggg

SEQ ID NO: 996768 - RNA, 22 nt, Human
ugaagacacauacaagggaaug

SEQ ID NO: 996769 - RNA, 22 nt, Human
uaggagaggugaauggcacacu

SEQ ID NO: 996770 - RNA, 22 nt, Human
auggacagugugaagcagauag

SEQ ID NO: 996771 - RNA, 22 nt, Human
cauugcccaguaggaucaccag

SEQ ID NO: 996772 - RNA, 22 nt, Human
cugcccugcuugaugacagcga

SEQ ID NO: 996773 - RNA, 22 nt, Human
ugcauuccuccaccuccugcac

SEQ ID NO: 996774 - RNA, 22 nt, Human
ugccagccagguucugaggcua

SEQ ID NO: 996775 - RNA, 22 nt, Human
uucagcaagaauuuacugagcu

SEQ ID NO: 996776 - RNA, 22 nt, Human
uucaagauaauaggaaugaaaa

SEQ ID NO: 996777 - RNA, 22 nt, Human
cauggacucugguuuggggagc

SEQ ID NO: 996778 - RNA, 20 nt, Human
uucauucauuccacaacuuc

SEQ ID NO: 996779 - RNA, 20 nt, Human
gccuggaggcaaugggaaga

SEQ ID NO: 996780 - RNA, 22 nt, Human
auguuauuuuggaaaauacaaa

SEQ ID NO: 996781 - RNA, 20 nt, Human
ggcugugcccuuccguggcc

SEQ ID NO: 996782 - RNA, 22 nt, Human
accuguuuguguccauuaguga

SEQ ID NO: 996783 - RNA, 22 nt, Human
caggagccccaggcugacaaua

SEQ ID NO: 996784 - RNA, 18 nt, Human
gaggccugagaaccaggu

SEQ ID NO: 996785 - RNA, 22 nt, Human
cuuucacaguccugacugagcg

SEQ ID NO: 996786 - RNA, 22 nt, Human
auggaaagcuaagccauuuacc

SEQ ID NO: 996787 - RNA, 22 nt, Human
uagcugcccaucuuuccuuuag

SEQ ID NO: 996788 - RNA, 22 nt, Human
ucaugcacaugugucaccauca

SEQ ID NO: 996789 - RNA, 22 nt, Human
agccuggagaggcgccauacac

SEQ ID NO: 996790 - RNA, 22 nt, Human
cacugcuuauaaauucuaggca

SEQ ID NO: 996791 - RNA, 22 nt, Human
uccaagggcagcagccauagcc

SEQ ID NO: 996792 - RNA, 21 nt, Human
uucaagauauuuaaaaggugg

SEQ ID NO: 996793 - RNA, 22 nt, Human
cauugcacaucugagaagagau

SEQ ID NO: 996794 - RNA, 22 nt, Human
aaugcuagugugauauguaagg

SEQ ID NO: 996795 - RNA, 22 nt, Human
aagccgggccugagaaaugaca

SEQ ID NO: 996796 - RNA, 22 nt, Human
cucucccagucaggcucaggau

SEQ ID NO: 996797 - RNA, 22 nt, Human
agggaaugcuccguauaaaucu

SEQ ID NO: 996798 - RNA, 22 nt, Human
uccuuuccagccucaccucagc

SEQ ID NO: 996799 - RNA, 22 nt, Human
ucagagugaggcgucaacauga

SEQ ID NO: 996800 - RNA, 22 nt, Human
ccagcccuguaaggaugaggca

SEQ ID NO: 996801 - RNA, 22 nt, Human
uaauuuaauuccauggauucua

SEQ ID NO: 996802 - RNA, 22 nt, Human
aggggccugguuggccucuguu

SEQ ID NO: 996803 - RNA, 22 nt, Human
ucaaagucauggcuaguaauga

SEQ ID NO: 996804 - RNA, 16 nt, Human
agcagggcgggaagga

SEQ ID NO: 996805 - RNA, 22 nt, Human
cagccuccugggacacucaccg

SEQ ID NO: 996806 - RNA, 22 nt, Human
gcauugaguccacucugucuuu

SEQ ID NO: 996807 - RNA, 22 nt, Human
ucuggccaggauggcaagacca

SEQ ID NO: 996808 - RNA, 20 nt, Human
agcugguuaucuuaauucuu

SEQ ID NO: 996809 - RNA, 22 nt, Human
cucaggauuuacuaauuucaag

SEQ ID NO: 996810 - RNA, 21 nt, Human
acagacagggccagugucccc

SEQ ID NO: 996811 - RNA, 22 nt, Human
ggcagcugggucacaccgaucu

SEQ ID NO: 996812 - RNA, 22 nt, Human
cagggcugcuggccgugcccuc

SEQ ID NO: 996813 - RNA, 22 nt, Human
ucugacauuuugagaaugacau

SEQ ID NO: 996814 - RNA, 21 nt, Human
augaagucuaugcuucugugu

SEQ ID NO: 996815 - RNA, 22 nt, Human
ugcccuguuccugccuccagcu

SEQ ID NO: 996816 - RNA, 22 nt, Human
cagagcuggagggaacccuggc

SEQ ID NO: 996817 - RNA, 22 nt, Human
gugugccagacaugaugcuaug

SEQ ID NO: 996818 - RNA, 22 nt, Human
gcugagguggagauugcaguga

SEQ ID NO: 996819 - RNA, 22 nt, Human
caagagcuacccugugccauau

SEQ ID NO: 996820 - RNA, 22 nt, Human
auuuuucucuuuccacugagau

SEQ ID NO: 996821 - RNA, 22 nt, Human
gcacucugccaggucuccugau

SEQ ID NO: 996822 - RNA, 22 nt, Human
uauuucugauugcucaugaggc

SEQ ID NO: 996823 - RNA, 22 nt, Human
gaggugggaugugugugcuacu

SEQ ID NO: 996824 - RNA, 22 nt, Human
agagccuggacuuuucugagcc

SEQ ID NO: 996825 - RNA, 22 nt, Human
ucccaagugucuuggaccaggg

SEQ ID NO: 996826 - RNA, 19 nt, Human
ccucuccgcccaccagccc

SEQ ID NO: 996827 - RNA, 22 nt, Human
cuguggcuaggaagcuguggga

SEQ ID NO: 996828 - RNA, 22 nt, Human
cugggaggugaacagaaaaacu

SEQ ID NO: 996829 - RNA, 18 nt, Human
aagaggaggagcagguug

SEQ ID NO: 996830 - RNA, 22 nt, Human
cugccugugcaugcagucagaa

SEQ ID NO: 996831 - RNA, 22 nt, Human
auugaaagauauacuguucuca

SEQ ID NO: 996832 - RNA, 22 nt, Human
uacaguaucuucuggcaagcau

SEQ ID NO: 996833 - RNA, 22 nt, Human
uuguaacagcuguuuauauagu

SEQ ID NO: 996834 - RNA, 22 nt, Human
cauucacaucuuguuccaucac

SEQ ID NO: 996835 - RNA, 22 nt, Human
ggcuucuccagguacugagcau

SEQ ID NO: 996836 - RNA, 22 nt, Human
aaaugauggaaaugaggcugaa

SEQ ID NO: 996837 - RNA, 22 nt, Human
cccuggcaugcaugucccuggc

SEQ ID NO: 996838 - RNA, 22 nt, Human
agcccagguugaggcugcagug

SEQ ID NO: 996839 - RNA, 22 nt, Human
uccauuuuguagguaugcuaca

SEQ ID NO: 996840 - RNA, 22 nt, Human
gaaaucugaacucuguauccuu

SEQ ID NO: 996841 - RNA, 22 nt, Human
gacaucauagggugggaggaaa

SEQ ID NO: 996842 - RNA, 22 nt, Human
cucagggccaaggaugcuguug

SEQ ID NO: 996843 - RNA, 22 nt, Human
aucuggcucuuccuggaguucc

SEQ ID NO: 996844 - RNA, 22 nt, Human
aguguuucucagaagggccuau

SEQ ID NO: 996845 - RNA, 22 nt, Human
acacugaauaauugagaguuga

SEQ ID NO: 996846 - RNA, 22 nt, Human
gcuaggagauugagcucugaag

SEQ ID NO: 996847 - RNA, 22 nt, Human
ucccagagcagaugugcuaaag

SEQ ID NO: 996848 - RNA, 22 nt, Human
ucuggagcaacagagcaggaca

SEQ ID NO: 996849 - RNA, 17 nt, Human
ggccuguguggcugcag

SEQ ID NO: 996850 - RNA, 22 nt, Human
cagagcagugaggaguugugua

SEQ ID NO: 996851 - RNA, 22 nt, Human
ucuccuggcccugucgccaucu

SEQ ID NO: 996852 - RNA, 22 nt, Human
gcaggaguguauuugcauguaa

SEQ ID NO: 996853 - RNA, 22 nt, Human
cuggagcugucuucacaggccu

SEQ ID NO: 996854 - RNA, 22 nt, Human
gcugccacgaucucugcuguag

SEQ ID NO: 996855 - RNA, 22 nt, Human
gugucccaaucuacuuuucccu

SEQ ID NO: 996856 - RNA, 22 nt, Human
gagcagcugguaggugaaccca

SEQ ID NO: 996857 - RNA, 22 nt, Human
gaggccugguuugcaugagaau

SEQ ID NO: 996858 - RNA, 22 nt, Human
ggcacugagaacaggcugacuu

SEQ ID NO: 996859 - RNA, 22 nt, Human
guggugcaggccagcaggggcg

SEQ ID NO: 996860 - RNA, 22 nt, Human
ugucuguacaaauuuucugugu

SEQ ID NO: 996861 - RNA, 22 nt, Human
ucuccuggauagauacuaucca

SEQ ID NO: 996862 - RNA, 22 nt, Human
gacuccugggccucugagaggc

SEQ ID NO: 996863 - RNA, 22 nt, Human
uaugcacacauguaugcaugug

SEQ ID NO: 996864 - RNA, 22 nt, Human
cacaggugcuccucggggagcu

SEQ ID NO: 996865 - RNA, 22 nt, Human
agagccuggaccugagcuacaa

SEQ ID NO: 996866 - RNA, 22 nt, Human
uagagcuauuuagagcauuuua

SEQ ID NO: 996867 - RNA, 22 nt, Human
ucugugacuugcgggaggagaa

SEQ ID NO: 996868 - RNA, 22 nt, Human
gacccagcuuaagucacauguu

SEQ ID NO: 996869 - RNA, 22 nt, Human
caggcacugugcugagcucugc

SEQ ID NO: 996870 - RNA, 22 nt, Human
ugcagccaggaaauauuugcug

SEQ ID NO: 996871 - RNA, 22 nt, Human
cuauuuaugugcuauuuuguau

SEQ ID NO: 996872 - RNA, 22 nt, Human
cagaagcagugagagaugugca

SEQ ID NO: 996873 - RNA, 22 nt, Human
aggcccugcccagugccacaag

SEQ ID NO: 996874 - RNA, 19 nt, Human
ucugucacuggggguauuc

SEQ ID NO: 996875 - RNA, 22 nt, Human
aagcugccuuccaugugaggaa

SEQ ID NO: 996876 - RNA, 22 nt, Human
ucacauuuguuccucugcacuu

SEQ ID NO: 996877 - RNA, 23 nt, Human
auuugagaaaguauuuuuaagac

SEQ ID NO: 996878 - RNA, 22 nt, Human
aggccagcucacccuggcuccu

SEQ ID NO: 996879 - RNA, 22 nt, Human
ucuggagcuuccucauuuacag

SEQ ID NO: 996880 - RNA, 22 nt, Human
agcagagcggggccuccggaag

SEQ ID NO: 996881 - RNA, 22 nt, Human
cuuaacagagagaaguguugcu

SEQ ID NO: 996882 - RNA, 22 nt, Human
guggccaauuuccaucuguaag

SEQ ID NO: 996883 - RNA, 22 nt, Human
agggaagaagcugguaguaggu

SEQ ID NO: 996884 - RNA, 22 nt, Human
aggcaguggcugagaccagggg

SEQ ID NO: 996885 - RNA, 22 nt, Human
auaagaaacauuauucuuucca

SEQ ID NO: 996886 - RNA, 22 nt, Human
gauuucaaggauguuagaggug

SEQ ID NO: 996887 - RNA, 23 nt, Human
agacagaggcugaggcuggccgc

SEQ ID NO: 996888 - RNA, 22 nt, Human
acagaauauugguuacuguugc

SEQ ID NO: 996889 - RNA, 22 nt, Human
caccaucagcagcaggugucaa

SEQ ID NO: 996890 - RNA, 22 nt, Human
uuucuguuaggcaucauuuuaa

SEQ ID NO: 996891 - RNA, 22 nt, Human
uccucuggggucagggcacuac

SEQ ID NO: 996892 - RNA, 22 nt, Human
cagcauuggguuaccuuuguuu

SEQ ID NO: 996893 - RNA, 22 nt, Human
uggucaacaggcagggaugaaa

SEQ ID NO: 996894 - RNA, 22 nt, Human
uccuggccuugcgucuugggag

SEQ ID NO: 996895 - RNA, 22 nt, Human
aggcccaguuauccuacuuguu

SEQ ID NO: 996896 - RNA, 22 nt, Human
ucugagcuacgaugccugucac

SEQ ID NO: 996897 - RNA, 23 nt, Human
ccugggcauuggcugcagcuucu

SEQ ID NO: 996898 - RNA, 22 nt, Human
aacauuucagcaaauaagaaca

SEQ ID NO: 996899 - RNA, 17 nt, Human
agcugagcuggccaggg

SEQ ID NO: 996900 - RNA, 18 nt, Human
ugcagcaagugcuaaaua

SEQ ID NO: 996901 - RNA, 20 nt, Human
cagagaccugucuucacaga

SEQ ID NO: 996902 - RNA, 17 nt, Human
ucaggcugggugcagug

SEQ ID NO: 996903 - RNA, 22 nt, Human
ccaggugggaggaaagcagaga

SEQ ID NO: 996904 - RNA, 22 nt, Human
gggaccaggugggugcauuccg

SEQ ID NO: 996905 - RNA, 22 nt, Human
ucaaugaugcugaagguagcgu

SEQ ID NO: 996906 - RNA, 22 nt, Human
uccaagggcaacaauggaacac

SEQ ID NO: 996907 - RNA, 22 nt, Human
ggaugcaggaguugaagaagga

SEQ ID NO: 996908 - RNA, 22 nt, Human
aggccaaagcaagacccuguaa

SEQ ID NO: 996909 - RNA, 22 nt, Human
aggcagaggagaaugaucuucc

SEQ ID NO: 996910 - RNA, 17 nt, Human
ucagcaggggccaagcu

SEQ ID NO: 996911 - RNA, 22 nt, Human
uggcaacaccuggaagacaugg

SEQ ID NO: 996912 - RNA, 22 nt, Human
uccuggagaauccugccaccug

SEQ ID NO: 996913 - RNA, 22 nt, Human
uggggcugugagacuacaggau

SEQ ID NO: 996914 - RNA, 22 nt, Human
ggucaggggcugcucuacagag

SEQ ID NO: 996915 - RNA, 22 nt, Human
gggcccuggacguggcggcaga

SEQ ID NO: 996916 - RNA, 22 nt, Human
ccuccaggcugaauaucuagaa

SEQ ID NO: 996917 - RNA, 22 nt, Human
ccugaggggcugcaggccagcu

SEQ ID NO: 996918 - RNA, 22 nt, Human
caagggcuucaaguggccaaga

SEQ ID NO: 996919 - RNA, 23 nt, Human
gccugggacucaggaggagcuca

SEQ ID NO: 996920 - RNA, 22 nt, Human
gaaaaaugagcugaugucaggg

SEQ ID NO: 996921 - RNA, 19 nt, Human
ccugggaggcggagguugc

SEQ ID NO: 996922 - RNA, 22 nt, Human
uggcagagagagugcagucgac

SEQ ID NO: 996923 - RNA, 22 nt, Human
agagauaugaguaguugugaca

SEQ ID NO: 996924 - RNA, 22 nt, Human
uguguauucagcaagcgaaaca

SEQ ID NO: 996925 - RNA, 22 nt, Human
acaaacuaccuacagauguuca

SEQ ID NO: 996926 - RNA, 22 nt, Human
ccagaaaaugcagaacauagaa

SEQ ID NO: 996927 - RNA, 22 nt, Human
gccaggugggagacagacagca

SEQ ID NO: 996928 - RNA, 22 nt, Human
gccuugccucagccauggaaac

SEQ ID NO: 996929 - RNA, 22 nt, Human
auuauguagguuaggugguugu

SEQ ID NO: 996930 - RNA, 18 nt, Human
cugaaggauccaggugua

SEQ ID NO: 996931 - RNA, 19 nt, Human
uuucuuaggccuuuggccu

SEQ ID NO: 996932 - RNA, 22 nt, Human
aggcugcuucagcugcagggag

SEQ ID NO: 996933 - RNA, 22 nt, Human
cugcagcuccccugagaucaag

SEQ ID NO: 996934 - RNA, 22 nt, Human
ugaggugaagaguggagcucag

SEQ ID NO: 996935 - RNA, 22 nt, Human
uuuaguagaugcagcauuauuu

SEQ ID NO: 996936 - RNA, 22 nt, Human
ggccacuccgcugcuacuggaa

SEQ ID NO: 996937 - RNA, 22 nt, Human
gcaguggcaccgcuggcucugg

SEQ ID NO: 996938 - RNA, 17 nt, Human
cagugcagagcccuuuc

SEQ ID NO: 996939 - RNA, 22 nt, Human
gcaggagccaggccgagcuggu

SEQ ID NO: 996940 - RNA, 22 nt, Human
uuuuuccuuggaugugucucuc

SEQ ID NO: 996941 - RNA, 22 nt, Human
ugguccagacauuucugaggua

SEQ ID NO: 996942 - RNA, 22 nt, Human
cacugaaggacaguaggaaggg

SEQ ID NO: 996943 - RNA, 22 nt, Human
aagggagguaaagcuauuuaaa

SEQ ID NO: 996944 - RNA, 22 nt, Human
cucugucccagacccaccucuc

SEQ ID NO: 996945 - RNA, 21 nt, Human
gccagagcaguacaaugaggu

SEQ ID NO: 996946 - RNA, 22 nt, Human
ucauacauaacuuguacaguga

SEQ ID NO: 996947 - RNA, 22 nt, Human
uugaaauauggauugaccuuga

SEQ ID NO: 996948 - RNA, 22 nt, Human
gccugccuucggugcgcagcgg

SEQ ID NO: 996949 - RNA, 22 nt, Human
gagcugccuacauugccaagag

SEQ ID NO: 996950 - RNA, 22 nt, Human
uccucagacuucccuuugugua

SEQ ID NO: 996951 - RNA, 22 nt, Human
acucucugguauuggcaaguuu

SEQ ID NO: 996952 - RNA, 22 nt, Human
aaugaugguuucaucacuugaa

SEQ ID NO: 996953 - RNA, 15 nt, Human
ugggcagaucacuug

SEQ ID NO: 996954 - RNA, 17 nt, Human
ucuggccuuccugaacu

SEQ ID NO: 996955 - RNA, 22 nt, Human
ugucaccucuuuggcugcagcu

SEQ ID NO: 996956 - RNA, 22 nt, Human
cugcagagguugguucuaagau

SEQ ID NO: 996957 - RNA, 22 nt, Human
cugcucuguuaauuaaacuuug

SEQ ID NO: 996958 - RNA, 22 nt, Human
uccucacagucaacacuuugag

SEQ ID NO: 996959 - RNA, 22 nt, Human
agccagacauggcuccugcucc

SEQ ID NO: 996960 - RNA, 22 nt, Human
ccagcuccugggucuuagucag

SEQ ID NO: 996961 - RNA, 19 nt, Human
cugagagaugcuucacaca

SEQ ID NO: 996962 - RNA, 22 nt, Human
agagcugaauuuggguggugga

SEQ ID NO: 996963 - RNA, 17 nt, Human
agaggcagauacuugga

SEQ ID NO: 996964 - RNA, 22 nt, Human
auaacagaugugaagugcuaau

SEQ ID NO: 996965 - RNA, 22 nt, Human
gccaggcucagcagucaaccug

SEQ ID NO: 996966 - RNA, 22 nt, Human
cuagaaaaauacuuuauuguga

SEQ ID NO: 996967 - RNA, 22 nt, Human
cugccugugccaaugcuccuuu

SEQ ID NO: 996968 - RNA, 22 nt, Human
auaucuuuguuuuugccaagau

SEQ ID NO: 996969 - RNA, 22 nt, Human
agcugccaucugaagaacugca

SEQ ID NO: 996970 - RNA, 22 nt, Human
gcuccuggcucuggccaaggga

SEQ ID NO: 996971 - RNA, 19 nt, Human
ggacacagaaagcugcauu

SEQ ID NO: 996972 - RNA, 22 nt, Human
ugaaaucuuauacuuugguagu

SEQ ID NO: 996973 - RNA, 22 nt, Human
agcaggagcccuuaucaccagg

SEQ ID NO: 996974 - RNA, 22 nt, Human
acccagagccagggucaggagc

SEQ ID NO: 996975 - RNA, 22 nt, Human
ugggccugauucuugaauccug

SEQ ID NO: 996976 - RNA, 22 nt, Human
cugaggcaugaaugugggcuuu

SEQ ID NO: 996977 - RNA, 22 nt, Human
uuagugucuucuucauccucug

SEQ ID NO: 996978 - RNA, 22 nt, Human
ugcagcagacugaguaugagaa

SEQ ID NO: 996979 - RNA, 20 nt, Human
cagggccacgcuccaaggca

SEQ ID NO: 996980 - RNA, 22 nt, Human
ccaaggagaaugacaccaugga

SEQ ID NO: 996981 - RNA, 22 nt, Human
gggcugcugcugccagcgacac

SEQ ID NO: 996982 - RNA, 22 nt, Human
aggaccugacuggcuccugcuu

SEQ ID NO: 996983 - RNA, 22 nt, Human
caaagugcugagauuacaggua

SEQ ID NO: 996984 - RNA, 22 nt, Human
ccagagaccagaacauggggau

SEQ ID NO: 996985 - RNA, 22 nt, Human
caguggcaugguugacugcagu

SEQ ID NO: 996986 - RNA, 22 nt, Human
aggggugaaagagggcccucaa

SEQ ID NO: 996987 - RNA, 22 nt, Human
cacucugcaggccaaaccaaag

SEQ ID NO: 996988 - RNA, 22 nt, Human
cugagccaaccacagcaggagc

SEQ ID NO: 996989 - RNA, 22 nt, Human
agagccugaggccaggaaaaug

SEQ ID NO: 996990 - RNA, 22 nt, Human
cagggugccaaagaacaaauau

SEQ ID NO: 996991 - RNA, 22 nt, Human
ggccucugaggacagccuuggc

SEQ ID NO: 996992 - RNA, 22 nt, Human
uccuugaagcuuguaucuaaua

SEQ ID NO: 996993 - RNA, 22 nt, Human
caggccugagacaucugagaua

SEQ ID NO: 996994 - RNA, 22 nt, Human
cuggccaaugccuggggaauag

SEQ ID NO: 996995 - RNA, 18 nt, Human
uggcucagauggcuuuaa

SEQ ID NO: 996996 - RNA, 22 nt, Human
cauugcacugcagcccgggcaa

SEQ ID NO: 996997 - RNA, 22 nt, Human
uacauucuggaaaggcacagac

SEQ ID NO: 996998 - RNA, 22 nt, Human
ccugugugcacacgaggccaug

SEQ ID NO: 996999 - RNA, 22 nt, Human
gaagcagcuuucuggugaggag

SEQ ID NO: 997000 - RNA, 22 nt, Human
uaagaacaguagaacaguaggu

SEQ ID NO: 997001 - RNA, 22 nt, Human
gguacaaggagugaagguuugg

SEQ ID NO: 997002 - RNA, 22 nt, Human
gcuuccuagaucugugguacuc

SEQ ID NO: 997003 - RNA, 22 nt, Human
acuucuggugucauacugcauu

SEQ ID NO: 997004 - RNA, 23 nt, Human
ccugcagcugcuggggcuccacc

SEQ ID NO: 997005 - RNA, 22 nt, Human
acacagaguauuuagaaggggu

SEQ ID NO: 997006 - RNA, 19 nt, Human
cauaauacaguggaucuga

SEQ ID NO: 997007 - RNA, 22 nt, Human
uaguuacagcaggcaggauaua

SEQ ID NO: 997008 - RNA, 18 nt, Human
ccuggcagccaugcgcgc

SEQ ID NO: 997009 - RNA, 22 nt, Human
ggcugcuguacugaugucaguu

SEQ ID NO: 997010 - RNA, 22 nt, Human
cugucaccuguucacugcagca

SEQ ID NO: 997011 - RNA, 22 nt, Human
aaauguguuugauaggaauauu

SEQ ID NO: 997012 - RNA, 22 nt, Human
gccugugcauagcagcggacuc

SEQ ID NO: 997013 - RNA, 22 nt, Human
aagcacuuagaagagugccugc

SEQ ID NO: 997014 - RNA, 22 nt, Human
ggaugcugcuaucaggcuucga

SEQ ID NO: 997015 - RNA, 22 nt, Human
gaggccugguuuccagcauccu

SEQ ID NO: 997016 - RNA, 22 nt, Human
cacaggcuugucagcaugaggc

SEQ ID NO: 997017 - RNA, 22 nt, Human
acucugcuggcugcagggcagc

SEQ ID NO: 997018 - RNA, 22 nt, Human
ggcucugggucuguggggagcg

SEQ ID NO: 997019 - RNA, 22 nt, Human
caggguagacaguaggugucug

SEQ ID NO: 997020 - RNA, 17 nt, Human
uggacccuugggccucc

SEQ ID NO: 997021 - RNA, 22 nt, Human
uauccaauucaccauugauggg

SEQ ID NO: 997022 - RNA, 22 nt, Human
gggcuggaggagauccagaggc

SEQ ID NO: 997023 - RNA, 22 nt, Human
aaaaguucccugguuagaaaag

SEQ ID NO: 997024 - RNA, 22 nt, Human
cccuccccacaaagcuucacac

SEQ ID NO: 997025 - RNA, 22 nt, Human
agauuucagguuggggcagaag

SEQ ID NO: 997026 - RNA, 22 nt, Human
acuggcaguggcagcagaaaga

SEQ ID NO: 997027 - RNA, 22 nt, Human
aaaugucugagacuucugaacu

SEQ ID NO: 997028 - RNA, 22 nt, Human
augaaagaugauuuaaaguacu

SEQ ID NO: 997029 - RNA, 22 nt, Human
gcuccagaugaaaggccagagg

SEQ ID NO: 997030 - RNA, 22 nt, Human
cagggcuggauccuccagacuc

SEQ ID NO: 997031 - RNA, 22 nt, Human
gucuuuauuugagauugucauu

SEQ ID NO: 997032 - RNA, 22 nt, Human
uggcucagugcauucacaguaa

SEQ ID NO: 997033 - RNA, 22 nt, Human
aggaaaaauaaggcagcagggc

SEQ ID NO: 997034 - RNA, 22 nt, Human
caggaggaaaugugacccugcu

SEQ ID NO: 997035 - RNA, 22 nt, Human
aguaaaaauugaggugcaaaau

SEQ ID NO: 997036 - RNA, 21 nt, Human
cuguuucuugugaagugacac

SEQ ID NO: 997037 - RNA, 22 nt, Human
aaggcacugaaaaauugugugu

SEQ ID NO: 997038 - RNA, 22 nt, Human
uaaaugcaagugcuccugggag

SEQ ID NO: 997039 - RNA, 22 nt, Human
gagcccucucuguaggcaagua

SEQ ID NO: 997040 - RNA, 22 nt, Human
aggcuccuaucgcuuucagcaa

SEQ ID NO: 997041 - RNA, 22 nt, Human
uggcucaggagggaucuuugcu

SEQ ID NO: 997042 - RNA, 22 nt, Human
ggcagauggaagaggcuggguc

SEQ ID NO: 997043 - RNA, 22 nt, Human
gaggcagcuuggggcugugggu

SEQ ID NO: 997044 - RNA, 20 nt, Human
uggcuccugcgguggaacca

SEQ ID NO: 997045 - RNA, 22 nt, Human
auacauauaugguacuuccugg

SEQ ID NO: 997046 - RNA, 22 nt, Human
ucagggcauggcugcacuuggc

SEQ ID NO: 997047 - RNA, 22 nt, Human
cugagggccuuggcuccugccc

SEQ ID NO: 997048 - RNA, 22 nt, Human
cagucucagaggugggaguggg

SEQ ID NO: 997049 - RNA, 22 nt, Human
gcugccacauuuucaggacuaa

SEQ ID NO: 997050 - RNA, 22 nt, Human
ccugucaggguuugccucagaa

SEQ ID NO: 997051 - RNA, 22 nt, Human
gagcccaggcagagguugcagu

SEQ ID NO: 997052 - RNA, 22 nt, Human
ugucacuucaggaaugcaggga

SEQ ID NO: 997053 - RNA, 22 nt, Human
cacagguggcuccaaguuagag

SEQ ID NO: 997054 - RNA, 22 nt, Human
aaaugcaauuguauguacucca

SEQ ID NO: 997055 - RNA, 22 nt, Human
cagaggccucacuuccagccag

SEQ ID NO: 997056 - RNA, 22 nt, Human
aucuucaacuugaucauuugaa

SEQ ID NO: 997057 - RNA, 22 nt, Human
agaaagaacgcacuugugcugc

SEQ ID NO: 997058 - RNA, 22 nt, Human
ucagcagugcagggugaggcag

SEQ ID NO: 997059 - RNA, 22 nt, Human
uuauuaguguugauauuaggau

SEQ ID NO: 997060 - RNA, 22 nt, Human
aggccagggucccacacucgca

SEQ ID NO: 997061 - RNA, 22 nt, Human
cuuguacauagagaagaagccu

SEQ ID NO: 997062 - RNA, 22 nt, Human
agcagccauuuaaaaugaauug

SEQ ID NO: 997063 - RNA, 22 nt, Human
ccuggagcgcgggucaagcugg

SEQ ID NO: 997064 - RNA, 22 nt, Human
ggaggccaaggcgggcggauca

SEQ ID NO: 997065 - RNA, 22 nt, Human
gggcugccuuucuucugggagc

SEQ ID NO: 997066 - RNA, 22 nt, Human
gagauggggucagcugggacau

SEQ ID NO: 997067 - RNA, 22 nt, Human
uuccaguugguagaauguaagg

SEQ ID NO: 997068 - RNA, 21 nt, Human
gcagagccggggcgagaaggc

SEQ ID NO: 997069 - RNA, 22 nt, Human
cuucugaggcagcuauucaguu

SEQ ID NO: 997070 - RNA, 22 nt, Human
aaaguuagaaugauaucaacga

SEQ ID NO: 997071 - RNA, 22 nt, Human
aaguuauaucaucucauugacg

SEQ ID NO: 997072 - RNA, 22 nt, Human
cugggcugcaucaaagaggcau

SEQ ID NO: 997073 - RNA, 22 nt, Human
gcugucugcaucucuagagcuu

SEQ ID NO: 997074 - RNA, 22 nt, Human
uggcagcacuagguacugagcu

SEQ ID NO: 997075 - RNA, 21 nt, Human
gggccuggcugcgcaggacgg

SEQ ID NO: 997076 - RNA, 22 nt, Human
cuacucugaauugaagugauau

SEQ ID NO: 997077 - RNA, 22 nt, Human
gcaccacaucaaugaggggagc

SEQ ID NO: 997078 - RNA, 22 nt, Human
uccagucaagcuugagaauuuc

SEQ ID NO: 997079 - RNA, 22 nt, Human
cugggaguugacgaggcuugua

SEQ ID NO: 997080 - RNA, 22 nt, Human
aaugauguauguauaaggcagg

SEQ ID NO: 997081 - RNA, 22 nt, Human
agaaaugcauuagcacauauag

SEQ ID NO: 997082 - RNA, 22 nt, Human
cauuuacuguugaaucccuagc

SEQ ID NO: 997083 - RNA, 22 nt, Human
gcucucugguuccagucaggaa

SEQ ID NO: 997084 - RNA, 22 nt, Human
accagagcuggcagaguaucaa

SEQ ID NO: 997085 - RNA, 22 nt, Human
cuuaggaugaguuuuugcguuu

SEQ ID NO: 997086 - RNA, 22 nt, Human
uucacaggaggguggaugcaug

SEQ ID NO: 997087 - RNA, 22 nt, Human
gguuugcauucugaaaggcuca

SEQ ID NO: 997088 - RNA, 22 nt, Human
gcaguaaaaaaggauaugugca

SEQ ID NO: 997089 - RNA, 22 nt, Human
gagcagcuguccccaaagcuuc

SEQ ID NO: 997090 - RNA, 22 nt, Human
uuuuaaguuaauauaauugagg

SEQ ID NO: 997091 - RNA, 22 nt, Human
guccuggggauuauagaguguu

SEQ ID NO: 997092 - RNA, 22 nt, Human
aggagcagaacuguuguggagg

SEQ ID NO: 997093 - RNA, 22 nt, Human
agcagcaggagccgugggguga

SEQ ID NO: 997094 - RNA, 22 nt, Human
ccaaaguccauaguuuacuuua

SEQ ID NO: 997095 - RNA, 22 nt, Human
cacucugagccaaaacuaauuc

SEQ ID NO: 997096 - RNA, 22 nt, Human
uuggccaauccuauuggguggg

SEQ ID NO: 997097 - RNA, 22 nt, Human
uggcucaggaucuaagcagaau

SEQ ID NO: 997098 - RNA, 22 nt, Human
ccagagcuucggggcggcugua

SEQ ID NO: 997099 - RNA, 22 nt, Human
gagguagcaugcuggaagggac

SEQ ID NO: 997100 - RNA, 22 nt, Human
ucugagaggauuccugucccga

SEQ ID NO: 997101 - RNA, 22 nt, Human
uggcucagagcagggacucugg

SEQ ID NO: 997102 - RNA, 22 nt, Human
cauugcuuugugcauauuuaaa

SEQ ID NO: 997103 - RNA, 22 nt, Human
caugagcugcugggagccuguc

SEQ ID NO: 997104 - RNA, 20 nt, Human
uuucacaaugaacaugucuc

SEQ ID NO: 997105 - RNA, 22 nt, Human
aagcagccagccaucaugcccg

SEQ ID NO: 997106 - RNA, 22 nt, Human
ggcacugacugugcagcgcacc

SEQ ID NO: 997107 - RNA, 22 nt, Human
uuuuauuggagugauaccaagc

SEQ ID NO: 997108 - RNA, 18 nt, Human
aggaagcaggaggaaggc

SEQ ID NO: 997109 - RNA, 22 nt, Human
ccugaggcccuggcugugcuga

SEQ ID NO: 997110 - RNA, 22 nt, Human
uaauuauaacaguuacaucuua

SEQ ID NO: 997111 - RNA, 22 nt, Human
uggagggcaucuguggucaggc

SEQ ID NO: 997112 - RNA, 22 nt, Human
auuugucugcuugcugccuucc

SEQ ID NO: 997113 - RNA, 22 nt, Human
uccuucagaaaaccucagucuu

SEQ ID NO: 997114 - RNA, 22 nt, Human
agggggcaggagagaccugcug

SEQ ID NO: 997115 - RNA, 22 nt, Human
acacaggggcucggcugggugc

SEQ ID NO: 997116 - RNA, 23 nt, Human
ucugggccacuugucugcacuuc

SEQ ID NO: 997117 - RNA, 22 nt, Human
gcacccagaggucagcagugcu

SEQ ID NO: 997118 - RNA, 22 nt, Human
ugggcuggcugaggcauucacu

SEQ ID NO: 997119 - RNA, 22 nt, Human
cugggggcaagcagacagcugu

SEQ ID NO: 997120 - RNA, 22 nt, Human
gaugguuugguaaaaguauguu

SEQ ID NO: 997121 - RNA, 22 nt, Human
ggcccacuugaaauggagcuca

SEQ ID NO: 997122 - RNA, 22 nt, Human
ugucucugugagaucugacgau

SEQ ID NO: 997123 - RNA, 22 nt, Human
gcucccaggaugaggagccagg

SEQ ID NO: 997124 - RNA, 22 nt, Human
cagcaggcucugaguggcugcc

SEQ ID NO: 997125 - RNA, 22 nt, Human
guguauaacuaucuaucuagua

SEQ ID NO: 997126 - RNA, 22 nt, Human
aagccaagaguuaacuauuugu

SEQ ID NO: 997127 - RNA, 22 nt, Human
cagcuugcuaauuuugacuuca

SEQ ID NO: 997128 - RNA, 22 nt, Human
ucccagagccaagcuauggaug

SEQ ID NO: 997129 - RNA, 22 nt, Human
auacauguuguaccauauguuu

SEQ ID NO: 997130 - RNA, 22 nt, Human
aaaucaguuaagaugaggccau

SEQ ID NO: 997131 - RNA, 22 nt, Human
cuauugaaaguguacaauucaa

SEQ ID NO: 997132 - RNA, 22 nt, Human
gagcaggcauucuaguggcuga

SEQ ID NO: 997133 - RNA, 22 nt, Human
ugcaguggaaagacucagacuu

SEQ ID NO: 997134 - RNA, 22 nt, Human
ugcaccuuguugcuuuuacgaa

SEQ ID NO: 997135 - RNA, 22 nt, Human
uuauuuggaaauauggcuucug

SEQ ID NO: 997136 - RNA, 22 nt, Human
uggccucucuaccaggcagccu

SEQ ID NO: 997137 - RNA, 22 nt, Human
uuguuuugcuaaagggucauca

SEQ ID NO: 997138 - RNA, 22 nt, Human
guaacugaggcagcuuuuaaga

SEQ ID NO: 997139 - RNA, 22 nt, Human
ugcaggcaggggaugagcagcc

SEQ ID NO: 997140 - RNA, 22 nt, Human
agugaaaacacuaguucuugcc

SEQ ID NO: 997141 - RNA, 22 nt, Human
ugggccugggagggcagacgcu

SEQ ID NO: 997142 - RNA, 22 nt, Human
cacagcagagggagccauugaa

SEQ ID NO: 997143 - RNA, 22 nt, Human
aagaacauuuaugauggcauuu

SEQ ID NO: 997144 - RNA, 22 nt, Human
uuuccucugacugcuccccugc

SEQ ID NO: 997145 - RNA, 22 nt, Human
gagcugugagggacacauugcu

SEQ ID NO: 997146 - RNA, 22 nt, Human
ggguccagaguugaagagguua

SEQ ID NO: 997147 - RNA, 22 nt, Human
ugcucugcaagcaggagcaaga

SEQ ID NO: 997148 - RNA, 22 nt, Human
gcucccagcaauugaggcagcc

SEQ ID NO: 997149 - RNA, 22 nt, Human
gucucagggacugcuucugggg

SEQ ID NO: 997150 - RNA, 22 nt, Human
aguccaggaguugggugacauu

SEQ ID NO: 997151 - RNA, 22 nt, Human
uuagugauaggaagccagauug

SEQ ID NO: 997152 - RNA, 22 nt, Human
ucagaggagaaguugggaaaau

SEQ ID NO: 997153 - RNA, 22 nt, Human
cuggcagcccaaccuagagucu

SEQ ID NO: 997154 - RNA, 22 nt, Human
uacauaguauucacauuguuuu

SEQ ID NO: 997155 - RNA, 22 nt, Human
ggcccagccggcgagucucgcg

SEQ ID NO: 997156 - RNA, 22 nt, Human
agcucauggugcuaucucaggg

SEQ ID NO: 997157 - RNA, 22 nt, Human
gcaguggcaugaugugggcuca

SEQ ID NO: 997158 - RNA, 22 nt, Human
ggcagaguggagugcggccucc

SEQ ID NO: 997159 - RNA, 22 nt, Human
ggucccaggauugguugcgcag

SEQ ID NO: 997160 - RNA, 22 nt, Human
gcucugggcugcccucuggaca

SEQ ID NO: 997161 - RNA, 22 nt, Human
cucaggcccacagcagacccac

SEQ ID NO: 997162 - RNA, 22 nt, Human
gcuggccugaccugaggcuggg

SEQ ID NO: 997163 - RNA, 22 nt, Human
ucagagugugacuuggucauga

SEQ ID NO: 997164 - RNA, 22 nt, Human
acagaauacuacagacugguua

SEQ ID NO: 997165 - RNA, 22 nt, Human
guggagccaggaucuccgcaca

SEQ ID NO: 997166 - RNA, 22 nt, Human
cgucccaguuccagccgcgcug

SEQ ID NO: 997167 - RNA, 22 nt, Human
gaugcugaagugaagugaucuu

SEQ ID NO: 997168 - RNA, 22 nt, Human
ugcuggcccaugaagacgcagu

SEQ ID NO: 997169 - RNA, 22 nt, Human
cauugcaccacauugcaucccu

SEQ ID NO: 997170 - RNA, 22 nt, Human
ccugggaguggcacucacagca

SEQ ID NO: 997171 - RNA, 22 nt, Human
aaggcugaggagggccugcagg

SEQ ID NO: 997172 - RNA, 22 nt, Human
auuguauuuccagcuugaaugu

SEQ ID NO: 997173 - RNA, 22 nt, Human
aggauccuccuuagaaaagacc

SEQ ID NO: 997174 - RNA, 17 nt, Human
ucuccuggcucuaucag

SEQ ID NO: 997175 - RNA, 22 nt, Human
ucagagugugagacauauugga

SEQ ID NO: 997176 - RNA, 22 nt, Human
gaggccuggucuaugagauguu

SEQ ID NO: 997177 - RNA, 19 nt, Human
cccaaggcccugggcaggc

SEQ ID NO: 997178 - RNA, 22 nt, Human
aucaguuuaacugucaagagcc

SEQ ID NO: 997179 - RNA, 22 nt, Human
gaaggagagggucaaggauaau

SEQ ID NO: 997180 - RNA, 22 nt, Human
ugaaggaaagagggaacauccc

SEQ ID NO: 997181 - RNA, 22 nt, Human
uuuguuuucaaugugucauuca

SEQ ID NO: 997182 - RNA, 22 nt, Human
ggcucaggccuguaauccuagc

SEQ ID NO: 997183 - RNA, 22 nt, Human
aaggccugaacaugaggagaug

SEQ ID NO: 997184 - RNA, 22 nt, Human
ugaaggagcucaaugaugaugc

SEQ ID NO: 997185 - RNA, 22 nt, Human
ugcauuguuuagaacucuuugg

SEQ ID NO: 997186 - RNA, 22 nt, Human
auggccaagcuuacucuguugu

SEQ ID NO: 997187 - RNA, 22 nt, Human
cacacauugaauucauucuugu

SEQ ID NO: 997188 - RNA, 22 nt, Human
uaaaugcaguacaaauuguucu

SEQ ID NO: 997189 - RNA, 22 nt, Human
ccuccuggugacaaggcaaagc

SEQ ID NO: 997190 - RNA, 22 nt, Human
ugggcacaggggaauggaugaa

SEQ ID NO: 997191 - RNA, 19 nt, Human
acccucucagugccugagg

SEQ ID NO: 997192 - RNA, 20 nt, Human
cuuccacacaagaagcacag

SEQ ID NO: 997193 - RNA, 20 nt, Human
gccuggcacccggggcuggc

SEQ ID NO: 997194 - RNA, 22 nt, Human
acauuugaggauguuaagaaug

SEQ ID NO: 997195 - RNA, 23 nt, Human
uggcucugugucacauacaggau

SEQ ID NO: 997196 - RNA, 22 nt, Human
ccugccagcauggcuuaucucc

SEQ ID NO: 997197 - RNA, 22 nt, Human
uggcucaguuccaucaucugga

SEQ ID NO: 997198 - RNA, 20 nt, Human
auuccauaguuggcacuuuu

SEQ ID NO: 997199 - RNA, 23 nt, Human
gagugcagaauagacaugcagug

SEQ ID NO: 997200 - RNA, 22 nt, Human
ugcaugcugcacacaugcguag

SEQ ID NO: 997201 - RNA, 22 nt, Human
aaaagagugacugauaaguaua

SEQ ID NO: 997202 - RNA, 22 nt, Human
ugcuuuuaagaacaaugcugcu

SEQ ID NO: 997203 - RNA, 22 nt, Human
gggcugagggguaucucauggg

SEQ ID NO: 997204 - RNA, 22 nt, Human
cugggccagaccuuguggucuu

SEQ ID NO: 997205 - RNA, 22 nt, Human
auugacaaucuacuauguucug

SEQ ID NO: 997206 - RNA, 22 nt, Human
aauaugcauguauacaugugua

SEQ ID NO: 997207 - RNA, 22 nt, Human
uacucugcaaguugaagguggc

SEQ ID NO: 997208 - RNA, 22 nt, Human
acagagaugcaaguguguauuu

SEQ ID NO: 997209 - RNA, 22 nt, Human
uuccuccacgugacaggagcca

SEQ ID NO: 997210 - RNA, 22 nt, Human
auuguggcuagacagucacaau

SEQ ID NO: 997211 - RNA, 22 nt, Human
aggagcuguuuuguucagcaaa

SEQ ID NO: 997212 - RNA, 22 nt, Human
uugaggagcaggaugggaggcu

SEQ ID NO: 997213 - RNA, 22 nt, Human
gagcugccggcccacaguacua

SEQ ID NO: 997214 - RNA, 23 nt, Human
agagcuuucuaaaauguaaaucu

SEQ ID NO: 997215 - RNA, 22 nt, Human
aagcaaaagguuacacuucugg

SEQ ID NO: 997216 - RNA, 22 nt, Human
uguuccaucaguuuuugguuga

SEQ ID NO: 997217 - RNA, 22 nt, Human
auacaugucaucauauguuugu

SEQ ID NO: 997218 - RNA, 21 nt, Human
ugugucacuaacuagaggcua

SEQ ID NO: 997219 - RNA, 22 nt, Human
agcugagcucaggcugauguaa

SEQ ID NO: 997220 - RNA, 22 nt, Human
caggcagaagaaguggaaggac

SEQ ID NO: 997221 - RNA, 22 nt, Human
aaguucaaucagaugaaaaagc

SEQ ID NO: 997222 - RNA, 20 nt, Human
ggguggaguugcggucugug

SEQ ID NO: 997223 - RNA, 22 nt, Human
cagugucuccagaugcuccaau

SEQ ID NO: 997224 - RNA, 22 nt, Human
acuggcagccacaacuggcagg

SEQ ID NO: 997225 - RNA, 22 nt, Human
ggcugccucaaagcucaagcuc

SEQ ID NO: 997226 - RNA, 22 nt, Human
agggcccauagaucgucagcuu

SEQ ID NO: 997227 - RNA, 22 nt, Human
aaaaaugaauucuucaguggca

SEQ ID NO: 997228 - RNA, 22 nt, Human
cccaaggcugcagugagcauga

SEQ ID NO: 997229 - RNA, 22 nt, Human
ccagcccugucaccaacuggag

SEQ ID NO: 997230 - RNA, 22 nt, Human
gcccagcaccucucucaggguu

SEQ ID NO: 997231 - RNA, 22 nt, Human
cagccugcuagggcaaugccuu

SEQ ID NO: 997232 - RNA, 23 nt, Human
gcucugagggcuuaucccuccca

SEQ ID NO: 997233 - RNA, 21 nt, Human
uuauugagacauuuguggaaa

SEQ ID NO: 997234 - RNA, 22 nt, Human
ugguccagaugccuuggcuuua

SEQ ID NO: 997235 - RNA, 22 nt, Human
aauaauuagugggacagagaac

SEQ ID NO: 997236 - RNA, 22 nt, Human
ugucuucaucuccaugcacaga

SEQ ID NO: 997237 - RNA, 22 nt, Human
cagacaggaauucuggcguggu

SEQ ID NO: 997238 - RNA, 22 nt, Human
aaaaauaggucaaccguguaug

SEQ ID NO: 997239 - RNA, 21 nt, Human
uaaaugugagcagggcugggc

SEQ ID NO: 997240 - RNA, 22 nt, Human
agcaguggcugaagauguuccu

SEQ ID NO: 997241 - RNA, 23 nt, Human
aacuccugaaucgugagccaucu

SEQ ID NO: 997242 - RNA, 22 nt, Human
cacuguguaagaagaugggcuu

SEQ ID NO: 997243 - RNA, 22 nt, Human
ggcacugagcugccuuggggca

SEQ ID NO: 997244 - RNA, 22 nt, Human
gacagaguuguugauguaugcu

SEQ ID NO: 997245 - RNA, 22 nt, Human
cccuggaggagcuuagagcuug

SEQ ID NO: 997246 - RNA, 22 nt, Human
cuucuuuccuuccuccaguggc

SEQ ID NO: 997247 - RNA, 22 nt, Human
aucuacaggcugaggugggagg

SEQ ID NO: 997248 - RNA, 17 nt, Human
acuccuggucugaaggg

SEQ ID NO: 997249 - RNA, 22 nt, Human
ccuggcagcaggugggcccgug

SEQ ID NO: 997250 - RNA, 22 nt, Human
gugccuuccccgguggucuguu

SEQ ID NO: 997251 - RNA, 22 nt, Human
auaaacacuucuagggcacaca

SEQ ID NO: 997252 - RNA, 22 nt, Human
gcugcagcuguaggacacaauu

SEQ ID NO: 997253 - RNA, 22 nt, Human
uuuccucuucuggcaggcaggg

SEQ ID NO: 997254 - RNA, 22 nt, Human
gcucagggaacuuuuugcaggc

SEQ ID NO: 997255 - RNA, 22 nt, Human
cagggcuggcuguggcaaucuc

SEQ ID NO: 997256 - RNA, 22 nt, Human
cucuggcuuugcucaugcaucc

SEQ ID NO: 997257 - RNA, 19 nt, Human
cugccuguuauggagagaa

SEQ ID NO: 997258 - RNA, 22 nt, Human
agcagggcagugcuucagcucu

SEQ ID NO: 997259 - RNA, 19 nt, Human
ugagugggccccugcagac

SEQ ID NO: 997260 - RNA, 22 nt, Human
ggcugagccuggagcaucuggu

SEQ ID NO: 997261 - RNA, 22 nt, Human
uugugaaauguuucaaaauagu

SEQ ID NO: 997262 - RNA, 22 nt, Human
gaugauuuuaugucuugucauu

SEQ ID NO: 997263 - RNA, 22 nt, Human
cagcagccuacaaugcacagaa

SEQ ID NO: 997264 - RNA, 22 nt, Human
agcagaacauuuucagggcugu

SEQ ID NO: 997265 - RNA, 22 nt, Human
gucaucuuugcccugugcagga

SEQ ID NO: 997266 - RNA, 22 nt, Human
uuuccuucaucaucugagagcu

SEQ ID NO: 997267 - RNA, 22 nt, Human
auuagcugaccucuaaggagcc

SEQ ID NO: 997268 - RNA, 22 nt, Human
accaggggaugguuggcacugu

SEQ ID NO: 997269 - RNA, 22 nt, Human
cucaggaggugguagaggcccu

SEQ ID NO: 997270 - RNA, 22 nt, Human
ggaaagagcccagcagugcuug

SEQ ID NO: 997271 - RNA, 22 nt, Human
agcagccacccagcugcucauu

SEQ ID NO: 997272 - RNA, 22 nt, Human
ugcagccuugccuccucccagc

SEQ ID NO: 997273 - RNA, 22 nt, Human
gaugggaggaaccugggucccu

SEQ ID NO: 997274 - RNA, 22 nt, Human
cuugaaagauuuggccucugug

SEQ ID NO: 997275 - RNA, 22 nt, Human
aagaaucauccugcaagagucu

SEQ ID NO: 997276 - RNA, 22 nt, Human
guacuucccugggaggcaagca

SEQ ID NO: 997277 - RNA, 22 nt, Human
uguggccucaaggcugcccuca

SEQ ID NO: 997278 - RNA, 22 nt, Human
ugcagaguaaaagcagaugcua

SEQ ID NO: 997279 - RNA, 22 nt, Human
agccuguggaucccugcacugg

SEQ ID NO: 997280 - RNA, 23 nt, Human
uugaaagguagcuggcagcuaga

SEQ ID NO: 997281 - RNA, 22 nt, Human
agcugucuccagauacaggauu

SEQ ID NO: 997282 - RNA, 22 nt, Human
cggcagagacggcgcuuugaac

SEQ ID NO: 997283 - RNA, 22 nt, Human
ggcucaggagaggggcuaaaag

SEQ ID NO: 997284 - RNA, 22 nt, Human
gcagccaggaaagcuggacccu

SEQ ID NO: 997285 - RNA, 22 nt, Human
aaaggucauugaaaaggaggaa

SEQ ID NO: 997286 - RNA, 22 nt, Human
gagcucauucauucauugccug

SEQ ID NO: 997287 - RNA, 22 nt, Human
cagacuggccacaucugcacug

SEQ ID NO: 997288 - RNA, 22 nt, Human
cagcagagcugugugggaaggg

SEQ ID NO: 997289 - RNA, 22 nt, Human
acucuugucucaacuuuuguau

SEQ ID NO: 997290 - RNA, 22 nt, Human
gcuggcucagggacuagaguuu

SEQ ID NO: 997291 - RNA, 22 nt, Human
gagccucguggcggccacugcg

SEQ ID NO: 997292 - RNA, 22 nt, Human
ucaaacuagccugacugguauu

SEQ ID NO: 997293 - RNA, 22 nt, Human
ggccaaaugaaaucugagcaau

SEQ ID NO: 997294 - RNA, 22 nt, Human
acaaagugcacaagaugagaac

SEQ ID NO: 997295 - RNA, 22 nt, Human
agcagcucaaagccugcaagga

SEQ ID NO: 997296 - RNA, 22 nt, Human
agaugagggguagaaaggacuu

SEQ ID NO: 997297 - RNA, 22 nt, Human
accuggcaugaagcaugccuua

SEQ ID NO: 997298 - RNA, 22 nt, Human
cagcuucucagaaagcugaggu

SEQ ID NO: 997299 - RNA, 22 nt, Human
ggaugcugggagacagcaggca

SEQ ID NO: 997300 - RNA, 22 nt, Human
agcauuuaggagaauuugagaa

SEQ ID NO: 997301 - RNA, 22 nt, Human
gcuggccucaucacugacuucu

SEQ ID NO: 997302 - RNA, 22 nt, Human
gcugagaguguaggauguuuac

SEQ ID NO: 997303 - RNA, 22 nt, Human
gcugucugucucugucccacca

SEQ ID NO: 997304 - RNA, 22 nt, Human
ugcuggaggccugacuguguuu

SEQ ID NO: 997305 - RNA, 22 nt, Human
uuugcauuauauuuauagaaga

SEQ ID NO: 997306 - RNA, 22 nt, Human
acagagcaguucuggagcuggc

SEQ ID NO: 997307 - RNA, 22 nt, Human
uccuugaauauaauaacaguag

SEQ ID NO: 997308 - RNA, 22 nt, Human
cauuagaagaacaguuauauua

SEQ ID NO: 997309 - RNA, 22 nt, Human
uggcacugggacagaugcucuc

SEQ ID NO: 997310 - RNA, 22 nt, Human
gccuggagcucggcugagggcg

SEQ ID NO: 997311 - RNA, 22 nt, Human
aaaggucagacuuaggcugggc

SEQ ID NO: 997312 - RNA, 22 nt, Human
uuuauuauucucuggagaaugu

SEQ ID NO: 997313 - RNA, 22 nt, Human
ucccuggcuguguucaggugcg

SEQ ID NO: 997314 - RNA, 22 nt, Human
gucauggaggauugugaguggu

SEQ ID NO: 997315 - RNA, 22 nt, Human
cagcuuugauucuuucugccau

SEQ ID NO: 997316 - RNA, 22 nt, Human
uugcucuguaauaaucuggggu

SEQ ID NO: 997317 - RNA, 22 nt, Human
aagacagagggaagcaaugaug

SEQ ID NO: 997318 - RNA, 22 nt, Human
ugucccagacauaaguggacau

SEQ ID NO: 997319 - RNA, 20 nt, Human
cuggguggcaagcaaggggg

SEQ ID NO: 997320 - RNA, 22 nt, Human
ugcucuguauucuauggcaguu

SEQ ID NO: 997321 - RNA, 22 nt, Human
cauuuagagucuugcaauuuua

SEQ ID NO: 997322 - RNA, 22 nt, Human
ccucaggcuuacgggcaaugga

SEQ ID NO: 997323 - RNA, 22 nt, Human
ucagagugcagcgggaggcugg

SEQ ID NO: 997324 - RNA, 22 nt, Human
ucuuuacaucacaauuguaugg

SEQ ID NO: 997325 - RNA, 22 nt, Human
acagggcauuuccucuaugugu

SEQ ID NO: 997326 - RNA, 22 nt, Human
ggcugccugcuccuccugcacg

SEQ ID NO: 997327 - RNA, 22 nt, Human
gcucugaggcugugaggugcug

SEQ ID NO: 997328 - RNA, 22 nt, Human
caaaguuaucaacugcaacauu

SEQ ID NO: 997329 - RNA, 22 nt, Human
acagggcagguggcuacugguc

SEQ ID NO: 997330 - RNA, 22 nt, Human
aggcugaggcagguggaucacc

SEQ ID NO: 997331 - RNA, 22 nt, Human
caaguaugagaaagcuauuacc

SEQ ID NO: 997332 - RNA, 22 nt, Human
agugaccauuuucagcuagagg

SEQ ID NO: 997333 - RNA, 22 nt, Human
caaaaguaaucguggcuuuugc

SEQ ID NO: 997334 - RNA, 22 nt, Human
ugggacagagugagcuuuggcc

SEQ ID NO: 997335 - RNA, 22 nt, Human
guaaauaacugguaauuggggu

SEQ ID NO: 997336 - RNA, 22 nt, Human
uuaugacaggaaaaucacagaa

SEQ ID NO: 997337 - RNA, 22 nt, Human
ugcaggugaaaauuaugaggau

SEQ ID NO: 997338 - RNA, 22 nt, Human
gggagcuguaguccagauaccg

SEQ ID NO: 997339 - RNA, 22 nt, Human
uagggcaguuucauguuaucuu

SEQ ID NO: 997340 - RNA, 22 nt, Human
cacagggcagugcugcccacuc

SEQ ID NO: 997341 - RNA, 22 nt, Human
cagugcagccaaggacaggcac

SEQ ID NO: 997342 - RNA, 22 nt, Human
agagccugugauugucaucacc

SEQ ID NO: 997343 - RNA, 22 nt, Human
uagagaaaagcagggaucagga

SEQ ID NO: 997344 - RNA, 22 nt, Human
ggccucggcccacugcugcggu

SEQ ID NO: 997345 - RNA, 22 nt, Human
guggguggaggcgucgagggca

SEQ ID NO: 997346 - RNA, 22 nt, Human
gcugggcagccccuacagagag

SEQ ID NO: 997347 - RNA, 22 nt, Human
acagcagcacuauugacauuuu

SEQ ID NO: 997348 - RNA, 22 nt, Human
auucuggauuaucaguccacca

SEQ ID NO: 997349 - RNA, 22 nt, Human
cagccuuuaagcuuggauaggu

SEQ ID NO: 997350 - RNA, 22 nt, Human
aaaucaguuagugguaggauug

SEQ ID NO: 997351 - RNA, 22 nt, Human
uccucaggaugugggguagaau

SEQ ID NO: 997352 - RNA, 22 nt, Human
uacaaacuuguuuuaaguaagu

SEQ ID NO: 997353 - RNA, 22 nt, Human
ggagcuguaacgagccauugcu

SEQ ID NO: 997354 - RNA, 22 nt, Human
guuaggauguggggacuuuggg

SEQ ID NO: 997355 - RNA, 22 nt, Human
ugggugaggaugaugaggcagc

SEQ ID NO: 997356 - RNA, 22 nt, Human
uaagucauaagucaugauguua

SEQ ID NO: 997357 - RNA, 20 nt, Human
cuuuggcaaugagaacaggg

SEQ ID NO: 997358 - RNA, 22 nt, Human
ucacguuuuacugagugagaua

SEQ ID NO: 997359 - RNA, 22 nt, Human
ggcugcuucucacucauuugca

SEQ ID NO: 997360 - RNA, 22 nt, Human
cuaagccacucaaaucuugugg

SEQ ID NO: 997361 - RNA, 22 nt, Human
ugacauaaguugguagaaagga

SEQ ID NO: 997362 - RNA, 22 nt, Human
aacagcagggggaccugcuggu

SEQ ID NO: 997363 - RNA, 22 nt, Human
uuauuagguuauucucuguacu

SEQ ID NO: 997364 - RNA, 22 nt, Human
agggcugccugcucugcauuga

SEQ ID NO: 997365 - RNA, 21 nt, Human
aggcucagagaucaaacagua

SEQ ID NO: 997366 - RNA, 22 nt, Human
auguuacacauaggcauaaaug

SEQ ID NO: 997367 - RNA, 22 nt, Human
uccuggaggcaaaugaagacuc

SEQ ID NO: 997368 - RNA, 22 nt, Human
aggccuggccccaguugcuagg

SEQ ID NO: 997369 - RNA, 22 nt, Human
cccugcugucaggugcugggag

SEQ ID NO: 997370 - RNA, 22 nt, Human
acaguaauaaguguuggugagg

SEQ ID NO: 997371 - RNA, 22 nt, Human
aggccugagguuccugugcuca

SEQ ID NO: 997372 - RNA, 22 nt, Human
ccuccuggauggauuuggugga

SEQ ID NO: 997373 - RNA, 22 nt, Human
uucuugauuucaugcaguuaag

SEQ ID NO: 997374 - RNA, 22 nt, Human
uaaaugauaauaaugcuagugu

SEQ ID NO: 997375 - RNA, 19 nt, Human
uggcuucuguuuucauguu

SEQ ID NO: 997376 - RNA, 22 nt, Human
gcucuggaagcaucugagagga

SEQ ID NO: 997377 - RNA, 22 nt, Human
uuauguagcagaaagauguuug

SEQ ID NO: 997378 - RNA, 22 nt, Human
aggcacuggucuaccccuuagu

SEQ ID NO: 997379 - RNA, 22 nt, Human
ucuagaaacaugacauugaucu

SEQ ID NO: 997380 - RNA, 22 nt, Human
gaaggaaaggucucaugccuuu

SEQ ID NO: 997381 - RNA, 22 nt, Human
acauuucuaguuguucaucucc

SEQ ID NO: 997382 - RNA, 22 nt, Human
ccagcuccaggacugggagcug

SEQ ID NO: 997383 - RNA, 22 nt, Human
agccuggaccaggggccucaga

SEQ ID NO: 997384 - RNA, 22 nt, Human
cagccugggcuccagagucccu

SEQ ID NO: 997385 - RNA, 22 nt, Human
ggucucagcccucgccagcagc

SEQ ID NO: 997386 - RNA, 22 nt, Human
uugaaaggaauacagaggccua

SEQ ID NO: 997387 - RNA, 22 nt, Human
agaccagcugccucccagggcc

SEQ ID NO: 997388 - RNA, 22 nt, Human
acaggcugcugagccauuugcu

SEQ ID NO: 997389 - RNA, 22 nt, Human
auuucacucuuaauugcuuccu

SEQ ID NO: 997390 - RNA, 22 nt, Human
uaguuauuauuguuacuaucag

SEQ ID NO: 997391 - RNA, 22 nt, Human
ucagcuggcaguucagaggcug

SEQ ID NO: 997392 - RNA, 22 nt, Human
gaacagcuucuugggagcuggg

SEQ ID NO: 997393 - RNA, 20 nt, Human
ugcagggcugccucccagcu

SEQ ID NO: 997394 - RNA, 22 nt, Human
cugaagagcucuccuguccccu

SEQ ID NO: 997395 - RNA, 22 nt, Human
aaaagggacuacucucagcucc

SEQ ID NO: 997396 - RNA, 22 nt, Human
aggggagaguuaaugugaaugu

SEQ ID NO: 997397 - RNA, 22 nt, Human
gguuugcacgauauuuccaugg

SEQ ID NO: 997398 - RNA, 22 nt, Human
auccagggauaaaaguaagguu

SEQ ID NO: 997399 - RNA, 22 nt, Human
ggauccuucuuugaccucacag

SEQ ID NO: 997400 - RNA, 22 nt, Human
gcauuuagcuuuaaaauauuuc

SEQ ID NO: 997401 - RNA, 22 nt, Human
uggcuucaucugcagcacugcc

SEQ ID NO: 997402 - RNA, 22 nt, Human
uggcugggcccccaccugccuc

SEQ ID NO: 997403 - RNA, 22 nt, Human
accugagccuagggagguugag

SEQ ID NO: 997404 - RNA, 22 nt, Human
uuaugaaagacauuucuguugg

SEQ ID NO: 997405 - RNA, 21 nt, Human
aauaaaacaguuggugucaau

SEQ ID NO: 997406 - RNA, 22 nt, Human
uagggcagaguccaggaugggc

SEQ ID NO: 997407 - RNA, 22 nt, Human
gaggggcucuugggcaugaagg

SEQ ID NO: 997408 - RNA, 21 nt, Human
uagcacuucgcuguaauuggg

SEQ ID NO: 997409 - RNA, 22 nt, Human
gcagggaggaagagaugcuucc

SEQ ID NO: 997410 - RNA, 22 nt, Human
uuagggcuuuucugaauaggcc

SEQ ID NO: 997411 - RNA, 22 nt, Human
ugaccaaagaguugcuuguauu

SEQ ID NO: 997412 - RNA, 22 nt, Human
uguguuaacacugcaugauaau

SEQ ID NO: 997413 - RNA, 22 nt, Human
uuugugaaaugaagucacaacu

SEQ ID NO: 997414 - RNA, 22 nt, Human
aaagauuugaaauuaggcauca

SEQ ID NO: 997415 - RNA, 22 nt, Human
ucucugguggcuccaucaguag

SEQ ID NO: 997416 - RNA, 22 nt, Human
gcuuccuucuaccacaucaugc

SEQ ID NO: 997417 - RNA, 22 nt, Human
aagcugccagauucagucugcu

SEQ ID NO: 997418 - RNA, 22 nt, Human
auuuccauacacccauuucuga

SEQ ID NO: 997419 - RNA, 22 nt, Human
acagagcuucccagccugagca

SEQ ID NO: 997420 - RNA, 22 nt, Human
agcugcuaugacaacaccagcc

SEQ ID NO: 997421 - RNA, 22 nt, Human
acagcagcuaaaggugucuccu

SEQ ID NO: 997422 - RNA, 22 nt, Human
caguagcauguaauaaagacag

SEQ ID NO: 997423 - RNA, 22 nt, Human
cagagcugggaucccaugggcg

SEQ ID NO: 997424 - RNA, 22 nt, Human
ugguccaagugagguggccucu

SEQ ID NO: 997425 - RNA, 22 nt, Human
cugaggucaauuaaucaacaac

SEQ ID NO: 997426 - RNA, 22 nt, Human
acacucugcucugagcuucagg

SEQ ID NO: 997427 - RNA, 22 nt, Human
cagagccauuauggagacuugc

SEQ ID NO: 997428 - RNA, 22 nt, Human
ggccucaguuucuccauggguu

SEQ ID NO: 997429 - RNA, 21 nt, Human
ugcauuccuccauccaacagg

SEQ ID NO: 997430 - RNA, 22 nt, Human
agagccugcaucaggcuugggg

SEQ ID NO: 997431 - RNA, 22 nt, Human
aggcaggggagcuggaagggua

SEQ ID NO: 997432 - RNA, 20 nt, Human
ggcagcaggaguuuccucuu

SEQ ID NO: 997433 - RNA, 22 nt, Human
cagaguguauucugcaguugca

SEQ ID NO: 997434 - RNA, 22 nt, Human
gcucucagguacaaagcugugu

SEQ ID NO: 997435 - RNA, 22 nt, Human
aaaaaugugaccacaggguguu

SEQ ID NO: 997436 - RNA, 20 nt, Human
cuguagggugcagcaggcuc

SEQ ID NO: 997437 - RNA, 22 nt, Human
ucagggcagccuaaggcaccuc

SEQ ID NO: 997438 - RNA, 22 nt, Human
ugagcccaggaguaugaggcug

SEQ ID NO: 997439 - RNA, 22 nt, Human
aaagacugguguguuacauaua

SEQ ID NO: 997440 - RNA, 21 nt, Human
accagcaggagaucagaagga

SEQ ID NO: 997441 - RNA, 22 nt, Human
acagguggccccgagggagugg

SEQ ID NO: 997442 - RNA, 22 nt, Human
aaguccaucucugccccacaca

SEQ ID NO: 997443 - RNA, 22 nt, Human
agugaaauacugucguuuuuag

SEQ ID NO: 997444 - RNA, 22 nt, Human
uaaaguucagugcaugaaugug

SEQ ID NO: 997445 - RNA, 20 nt, Human
aggcucagcugagcucuugg

SEQ ID NO: 997446 - RNA, 22 nt, Human
acagcagagugugagauagcca

SEQ ID NO: 997447 - RNA, 22 nt, Human
aggagccaggaaaccugcucug

SEQ ID NO: 997448 - RNA, 22 nt, Human
aggcucauucuugccucugagc

SEQ ID NO: 997449 - RNA, 22 nt, Human
cauugcacuccaucuugggcaa

SEQ ID NO: 997450 - RNA, 22 nt, Human
ccagcucccugaagccuggucu

SEQ ID NO: 997451 - RNA, 22 nt, Human
caggauccuggcugcauggacg

SEQ ID NO: 997452 - RNA, 22 nt, Human
ucuccugguauguaugcaccug

SEQ ID NO: 997453 - RNA, 22 nt, Human
ucugcuguccuuuauauagauu

SEQ ID NO: 997454 - RNA, 22 nt, Human
auuauaaagaacaugugugugg

SEQ ID NO: 997455 - RNA, 22 nt, Human
uuuauguaauuucauaggugug

SEQ ID NO: 997456 - RNA, 22 nt, Human
ugggcucuccuggaggacaaca

SEQ ID NO: 997457 - RNA, 22 nt, Human
uugcuuccucgaggccagcgug

SEQ ID NO: 997458 - RNA, 22 nt, Human
gccaguuccuguggagucagag

SEQ ID NO: 997459 - RNA, 22 nt, Human
uuccuggugguggugacagcac

SEQ ID NO: 997460 - RNA, 19 nt, Human
cugcugggugcugagggag

SEQ ID NO: 997461 - RNA, 22 nt, Human
cagggucuuggcgccaucaccc

SEQ ID NO: 997462 - RNA, 21 nt, Human
uggccaaacuggagcauuuga

SEQ ID NO: 997463 - RNA, 22 nt, Human
guguaaggccccagguucuuua

SEQ ID NO: 997464 - RNA, 22 nt, Human
aauguguacuuuuucaugcuca

SEQ ID NO: 997465 - RNA, 22 nt, Human
ucagcaaugagaacuggcauuu

SEQ ID NO: 997466 - RNA, 22 nt, Human
ggcucaggggccaggccugucc

SEQ ID NO: 997467 - RNA, 22 nt, Human
guguuuccucuagaagccaugg

SEQ ID NO: 997468 - RNA, 22 nt, Human
ugcugaaacaauaacauacugg

SEQ ID NO: 997469 - RNA, 22 nt, Human
auccauggaggacaagagcaau

SEQ ID NO: 997470 - RNA, 22 nt, Human
gccacccccaaguagguggucu

SEQ ID NO: 997471 - RNA, 20 nt, Human
uggagcuccagcguccaugu

SEQ ID NO: 997472 - RNA, 23 nt, Human
uuugcaaauuggacacaaccaca

SEQ ID NO: 997473 - RNA, 22 nt, Human
gggcugggauggcuugaagauu

SEQ ID NO: 997474 - RNA, 22 nt, Human
aucaaaguuucccagaaguugu

SEQ ID NO: 997475 - RNA, 22 nt, Human
aaagcugcugccaaucaggcuu

SEQ ID NO: 997476 - RNA, 22 nt, Human
uuugcuauuuuucugugcagcu

SEQ ID NO: 997477 - RNA, 22 nt, Human
caguggcuguuucuggaaggca

SEQ ID NO: 997478 - RNA, 22 nt, Human
cuggcagcuucaggacacucgg

SEQ ID NO: 997479 - RNA, 22 nt, Human
aacucugcuuauaguuugucca

SEQ ID NO: 997480 - RNA, 22 nt, Human
uagcagggaagaugaucagaau

SEQ ID NO: 997481 - RNA, 22 nt, Human
auaugucgcuacaucauuagau

SEQ ID NO: 997482 - RNA, 22 nt, Human
uggcuggggagccccgacuccc

SEQ ID NO: 997483 - RNA, 22 nt, Human
gcucccacugcagcccugagcc

SEQ ID NO: 997484 - RNA, 22 nt, Human
caggguacagaguuuucuaaac

SEQ ID NO: 997485 - RNA, 22 nt, Human
guccucugggcuuugagcaguc

SEQ ID NO: 997486 - RNA, 22 nt, Human
ucagggcaagucucagaagguu

SEQ ID NO: 997487 - RNA, 22 nt, Human
gcacagaaguaaaauacaaguc

SEQ ID NO: 997488 - RNA, 22 nt, Human
cauggaaggcaaaagacacaga

SEQ ID NO: 997489 - RNA, 22 nt, Human
gcugccuguugaagggucugug

SEQ ID NO: 997490 - RNA, 22 nt, Human
agaggucagaacaggaaagugu

SEQ ID NO: 997491 - RNA, 22 nt, Human
uccagcagguuggucaggugca

SEQ ID NO: 997492 - RNA, 22 nt, Human
uuuuauuaguggcuagaugggg

SEQ ID NO: 997493 - RNA, 22 nt, Human
aggaguggaauuacuggguucu

SEQ ID NO: 997494 - RNA, 22 nt, Human
ucccagagcucuggagguugga

SEQ ID NO: 997495 - RNA, 22 nt, Human
uuauuagguuuacauaaagguu

SEQ ID NO: 997496 - RNA, 22 nt, Human
uuuguaaaaggaggaagcaugg

SEQ ID NO: 997497 - RNA, 22 nt, Human
agugggcagcccaggaggucuu

SEQ ID NO: 997498 - RNA, 22 nt, Human
aaaugcagauuuugaugcagca

SEQ ID NO: 997499 - RNA, 22 nt, Human
uccuucaggccucauucucaua

SEQ ID NO: 997500 - RNA, 22 nt, Human
cccaggcugaugggaugggcca

SEQ ID NO: 997501 - RNA, 22 nt, Human
ucuggcuccaccuccuuuacua

SEQ ID NO: 997502 - RNA, 22 nt, Human
cuacuuuaauuuucugcagaga

SEQ ID NO: 997503 - RNA, 22 nt, Human
gagccuguguuuccuguagcca

SEQ ID NO: 997504 - RNA, 20 nt, Human
ugacucugcaaccgucucuc

SEQ ID NO: 997505 - RNA, 22 nt, Human
ucucuuccaguaagagucuuua

SEQ ID NO: 997506 - RNA, 22 nt, Human
agugaacaaagguagugagcau

SEQ ID NO: 997507 - RNA, 18 nt, Human
agcuggggccucuggucc

SEQ ID NO: 997508 - RNA, 22 nt, Human
agugggaggcggcugacgggcg

SEQ ID NO: 997509 - RNA, 22 nt, Human
ccagcagacacacaggcguggg

SEQ ID NO: 997510 - RNA, 22 nt, Human
gugccugccccacuccucagca

SEQ ID NO: 997511 - RNA, 22 nt, Human
auucuucacuguuucagaauga

SEQ ID NO: 997512 - RNA, 22 nt, Human
ggauggagaugaccauggugac

SEQ ID NO: 997513 - RNA, 22 nt, Human
caggaaaggugugucaugaugg

SEQ ID NO: 997514 - RNA, 22 nt, Human
cagcaggcagccauuucacugu

SEQ ID NO: 997515 - RNA, 16 nt, Human
ucucugcuucauaggu

SEQ ID NO: 997516 - RNA, 22 nt, Human
cauaacauccuugcuacuuuga

SEQ ID NO: 997517 - RNA, 22 nt, Human
cauggccugccuccuccuggug

SEQ ID NO: 997518 - RNA, 22 nt, Human
cucuuuccucagccacagucua

SEQ ID NO: 997519 - RNA, 22 nt, Human
cagccuuugugaacaucaggug

SEQ ID NO: 997520 - RNA, 22 nt, Human
aggcuucuacguggucccaggg

SEQ ID NO: 997521 - RNA, 22 nt, Human
uuggcagcauccaagucucggg

SEQ ID NO: 997522 - RNA, 22 nt, Human
ucacaggagggagagacaccca

SEQ ID NO: 997523 - RNA, 22 nt, Human
gaggccuggugugucucccgcu

SEQ ID NO: 997524 - RNA, 22 nt, Human
caggccuggggcuggcuuccag

SEQ ID NO: 997525 - RNA, 22 nt, Human
gccauaaauugcuggucaaaau

SEQ ID NO: 997526 - RNA, 18 nt, Human
cuucagugacagucuggc

SEQ ID NO: 997527 - RNA, 23 nt, Human
uccagcagagccuuccaggaggg

SEQ ID NO: 997528 - RNA, 18 nt, Human
aggagccuuugcacugga

SEQ ID NO: 997529 - RNA, 22 nt, Human
gagaaagacguaggcugggagg

SEQ ID NO: 997530 - RNA, 22 nt, Human
uaacuccaucucugugucugcu

SEQ ID NO: 997531 - RNA, 22 nt, Human
cugggacacccaaggaaagagc

SEQ ID NO: 997532 - RNA, 21 nt, Human
ucagaacaauuccaugccucc

SEQ ID NO: 997533 - RNA, 21 nt, Human
ggagggcagcccagacuggcu

SEQ ID NO: 997534 - RNA, 22 nt, Human
aauucacaauguguagucaugc

SEQ ID NO: 997535 - RNA, 22 nt, Human
cagggccaccguguuugcugcu

SEQ ID NO: 997536 - RNA, 22 nt, Human
gggcugugagaguggggcugcu

SEQ ID NO: 997537 - RNA, 22 nt, Human
gcacagccacugagugagaacc

SEQ ID NO: 997538 - RNA, 22 nt, Human
cagaaauggaauuuuccaucac

SEQ ID NO: 997539 - RNA, 22 nt, Human
agggccagaaucccucagucua

SEQ ID NO: 997540 - RNA, 22 nt, Human
uccuggccuccguucucugcau

SEQ ID NO: 997541 - RNA, 22 nt, Human
ccccagccuuccaugggaauug

SEQ ID NO: 997542 - RNA, 22 nt, Human
uggcuuccuggacagaugcggu

SEQ ID NO: 997543 - RNA, 22 nt, Human
gcaggcagagguggaggagaca

SEQ ID NO: 997544 - RNA, 22 nt, Human
gacagcauggugucuguucagg

SEQ ID NO: 997545 - RNA, 18 nt, Human
agccuggaggguugaagu

SEQ ID NO: 997546 - RNA, 22 nt, Human
gcaggugguccccguggagugg

SEQ ID NO: 997547 - RNA, 22 nt, Human
ucucagagaccugaacucccug

SEQ ID NO: 997548 - RNA, 22 nt, Human
ugagcuggucuugaguguagcu

SEQ ID NO: 997549 - RNA, 22 nt, Human
gcagccugaugaucuggguugu

SEQ ID NO: 997550 - RNA, 22 nt, Human
gaggggcugggcagucccugga

SEQ ID NO: 997551 - RNA, 22 nt, Human
gccuuccuuacaccugcucagc

SEQ ID NO: 997552 - RNA, 22 nt, Human
agcuggaggggccagcaggugu

SEQ ID NO: 997553 - RNA, 22 nt, Human
acagccuggacuggcucucugc

SEQ ID NO: 997554 - RNA, 22 nt, Human
augcugagugagugaaacccag

SEQ ID NO: 997555 - RNA, 22 nt, Human
cagccccucccucaggcaggug

SEQ ID NO: 997556 - RNA, 22 nt, Human
ucaucacuguaucauugauaga

SEQ ID NO: 997557 - RNA, 22 nt, Human
aaaugguauuuacucuguauua

SEQ ID NO: 997558 - RNA, 22 nt, Human
acccagaggcggagguugcagu

SEQ ID NO: 997559 - RNA, 22 nt, Human
aggacuccauguguccuggaga

SEQ ID NO: 997560 - RNA, 22 nt, Human
ccagagucuuuauauuccugaa

SEQ ID NO: 997561 - RNA, 22 nt, Human
ggaaagaccugagauaggaaua

SEQ ID NO: 997562 - RNA, 22 nt, Human
agccuggccacucagggccuga

SEQ ID NO: 997563 - RNA, 22 nt, Human
aggugcagcugacaccaugugg

SEQ ID NO: 997564 - RNA, 22 nt, Human
cagcugacgccagaguggaauu

SEQ ID NO: 997565 - RNA, 22 nt, Human
gccugguggugugcucaagugg

SEQ ID NO: 997566 - RNA, 22 nt, Human
ggucugaaaauggugaccacca

SEQ ID NO: 997567 - RNA, 22 nt, Human
uuucauguuuauggaaaaugag

SEQ ID NO: 997568 - RNA, 22 nt, Human
uccaaggguucaugugcauuca

SEQ ID NO: 997569 - RNA, 22 nt, Human
aaugagcuagaccugcuuccuc

SEQ ID NO: 997570 - RNA, 22 nt, Human
cagcagagguuggaacaguucu

SEQ ID NO: 997571 - RNA, 22 nt, Human
agcgggugcugugucagcccuc

SEQ ID NO: 997572 - RNA, 22 nt, Human
ugccucagcugaggccgcucca

SEQ ID NO: 997573 - RNA, 22 nt, Human
ugcagauucaaaugaaaugcaa

SEQ ID NO: 997574 - RNA, 22 nt, Human
agugaaauaaagcugccuaugg

SEQ ID NO: 997575 - RNA, 22 nt, Human
acugucugcaaaacucauacuc

SEQ ID NO: 997576 - RNA, 22 nt, Human
ugcugugagguugagaaggaag

SEQ ID NO: 997577 - RNA, 22 nt, Human
cccagcaguuguuggugcacau

SEQ ID NO: 997578 - RNA, 19 nt, Human
ucuggcuccgccucuuagu

SEQ ID NO: 997579 - RNA, 22 nt, Human
cagcucccgccaucgggaggca

SEQ ID NO: 997580 - RNA, 22 nt, Human
agaaauguggaggaacagggcu

SEQ ID NO: 997581 - RNA, 22 nt, Human
cucagcccagcccaggaccagg

SEQ ID NO: 997582 - RNA, 18 nt, Human
augggaggggccaagaga

SEQ ID NO: 997583 - RNA, 22 nt, Human
ugagccuguccugugcauguga

SEQ ID NO: 997584 - RNA, 22 nt, Human
uuuuggucagguuggucucgaa

SEQ ID NO: 997585 - RNA, 22 nt, Human
uccccagccgugaaggagagga

SEQ ID NO: 997586 - RNA, 22 nt, Human
agagccuguuuugugggagaug

SEQ ID NO: 997587 - RNA, 23 nt, Human
gccugccugaccugugcaaaguc

SEQ ID NO: 997588 - RNA, 22 nt, Human
cauucauuuaugaaauaucuau

SEQ ID NO: 997589 - RNA, 22 nt, Human
gcugucugcaagccaggaaaug

SEQ ID NO: 997590 - RNA, 23 nt, Human
uccugaggguuucccagccuugg

SEQ ID NO: 997591 - RNA, 22 nt, Human
aaggccugcucagcugucugug

SEQ ID NO: 997592 - RNA, 20 nt, Human
agagccuggaaaaagacauc

SEQ ID NO: 997593 - RNA, 22 nt, Human
cgcugggggaacagcgagggug

SEQ ID NO: 997594 - RNA, 22 nt, Human
uaugaguacaaggacucugucu

SEQ ID NO: 997595 - RNA, 22 nt, Human
acagagcuguacaugugccaug

SEQ ID NO: 997596 - RNA, 22 nt, Human
uggcagaguucgcugugccuuu

SEQ ID NO: 997597 - RNA, 22 nt, Human
aaaugcacaauaaaguaaaggc

SEQ ID NO: 997598 - RNA, 22 nt, Human
cugaggccucucuccugggcuu

SEQ ID NO: 997599 - RNA, 22 nt, Human
ucccagagcucugacaccagcu

SEQ ID NO: 997600 - RNA, 22 nt, Human
uuuccucugagugagcugggag

SEQ ID NO: 997601 - RNA, 22 nt, Human
gaggcugccccuuccucagcug

SEQ ID NO: 997602 - RNA, 21 nt, Human
ggccugaguauaggacaggcc

SEQ ID NO: 997603 - RNA, 22 nt, Human
ucaggaucggccuuuuuuuaag

SEQ ID NO: 997604 - RNA, 22 nt, Human
augguuuguaacccaauacucc

SEQ ID NO: 997605 - RNA, 22 nt, Human
auugucugaauccaaagcucug

SEQ ID NO: 997606 - RNA, 22 nt, Human
gccuuugcaccaucagugcaau

SEQ ID NO: 997607 - RNA, 18 nt, Human
ucuuggcagcaucuggca

SEQ ID NO: 997608 - RNA, 22 nt, Human
ugggccuccaauuccagcggga

SEQ ID NO: 997609 - RNA, 22 nt, Human
gugucccaauguucaggacggc

SEQ ID NO: 997610 - RNA, 22 nt, Human
ugugcccauuccacuugaguac

SEQ ID NO: 997611 - RNA, 22 nt, Human
agcucucaagauaagaaagaac

SEQ ID NO: 997612 - RNA, 22 nt, Human
uggggugguaauacaccguucu

SEQ ID NO: 997613 - RNA, 22 nt, Human
ggcacugggcaccggcugaggg

SEQ ID NO: 997614 - RNA, 22 nt, Human
ugugcuucuugcagcuccugua

SEQ ID NO: 997615 - RNA, 22 nt, Human
cuggcagcucuacucagagccu

SEQ ID NO: 997616 - RNA, 22 nt, Human
auauuaggaguuaaauguauua

SEQ ID NO: 997617 - RNA, 22 nt, Human
agaacagcaguuaugguucauu

SEQ ID NO: 997618 - RNA, 22 nt, Human
cagagcuggagaaguggauuua

SEQ ID NO: 997619 - RNA, 22 nt, Human
cugaaggauuuaguucuuugcu

SEQ ID NO: 997620 - RNA, 22 nt, Human
ucccagccauuccuuuaggugu

SEQ ID NO: 997621 - RNA, 22 nt, Human
guguccagggccguguugucuu

SEQ ID NO: 997622 - RNA, 22 nt, Human
uugaccauaccuccaggcaguu

SEQ ID NO: 997623 - RNA, 22 nt, Human
ucugagaguagagcugccucuu

SEQ ID NO: 997624 - RNA, 22 nt, Human
ugcucugguccucccucggcgc

SEQ ID NO: 997625 - RNA, 22 nt, Human
auacauuagaaucugguacuca

SEQ ID NO: 997626 - RNA, 22 nt, Human
ccagcucuggcuucuugcuggg

SEQ ID NO: 997627 - RNA, 22 nt, Human
cugugcuuaccugcccagguga

SEQ ID NO: 997628 - RNA, 22 nt, Human
acaggacuguggaaggaucucu

SEQ ID NO: 997629 - RNA, 22 nt, Human
agccuucagcaguucaggugcc

SEQ ID NO: 997630 - RNA, 22 nt, Human
cucacugcccugaaguuggguu

SEQ ID NO: 997631 - RNA, 22 nt, Human
ggcaccuggauguagcagugaa

SEQ ID NO: 997632 - RNA, 22 nt, Human
ucauugcagcuucagguguuca

SEQ ID NO: 997633 - RNA, 22 nt, Human
aggagcugaaacuucucauaug

SEQ ID NO: 997634 - RNA, 22 nt, Human
caggcacuagcagaaugaggcu

SEQ ID NO: 997635 - RNA, 22 nt, Human
aggagacauaacuaugaugaga

SEQ ID NO: 997636 - RNA, 22 nt, Human
ccugccuguaagauggguacaa

SEQ ID NO: 997637 - RNA, 22 nt, Human
gaggcucugugaugugccaggc

SEQ ID NO: 997638 - RNA, 22 nt, Human
auccaaaucaugucagaagaac

SEQ ID NO: 997639 - RNA, 22 nt, Human
gcugauccuuuuaugucuagcu

SEQ ID NO: 997640 - RNA, 22 nt, Human
cauuaucucuucuauaugcuag

SEQ ID NO: 997641 - RNA, 22 nt, Human
agcagcaggcuguguggacuga

SEQ ID NO: 997642 - RNA, 22 nt, Human
cagagccugccucuggcugugg

SEQ ID NO: 997643 - RNA, 22 nt, Human
aucaguuucacuugcuugcaaa

SEQ ID NO: 997644 - RNA, 22 nt, Human
uggcucugaccagguagaggag

SEQ ID NO: 997645 - RNA, 22 nt, Human
guggcugcagagggcacagcau

SEQ ID NO: 997646 - RNA, 21 nt, Human
aaguaaaucagagaaauaacc

SEQ ID NO: 997647 - RNA, 22 nt, Human
auuuaaaugcuuaagaggguuu

SEQ ID NO: 997648 - RNA, 22 nt, Human
aggaggccgggauucuggagau

SEQ ID NO: 997649 - RNA, 23 nt, Human
aaggucacagaacuuagcaagcc

SEQ ID NO: 997650 - RNA, 22 nt, Human
cacugaaggcugcagcucagcc

SEQ ID NO: 997651 - RNA, 20 nt, Human
gucaucgccggcagcaaaga

SEQ ID NO: 997652 - RNA, 22 nt, Human
gccacagggcagaugcgcagag

SEQ ID NO: 997653 - RNA, 22 nt, Human
uuuccucugcugccauugcccc

SEQ ID NO: 997654 - RNA, 22 nt, Human
ggaggcuccacugcucuuccug

SEQ ID NO: 997655 - RNA, 22 nt, Human
ccagcugcagguguuccagaug

SEQ ID NO: 997656 - RNA, 22 nt, Human
aaguuuguucagggcuuacauu

SEQ ID NO: 997657 - RNA, 22 nt, Human
aaagauuugaguucugcuuaua

SEQ ID NO: 997658 - RNA, 22 nt, Human
uguaucaaaccaaauuaauucu

SEQ ID NO: 997659 - RNA, 22 nt, Human
gcuggcagguccaagauagagc

SEQ ID NO: 997660 - RNA, 22 nt, Human
ggucccagcugcucaagaggcu

SEQ ID NO: 997661 - RNA, 22 nt, Human
uugaggaguguuuagggugagg

SEQ ID NO: 997662 - RNA, 22 nt, Human
agaauaugaggaaacugugaau

SEQ ID NO: 997663 - RNA, 18 nt, Human
ugugguggagcugccuuc

SEQ ID NO: 997664 - RNA, 22 nt, Human
aacugcuguggccuaguacuua

SEQ ID NO: 997665 - RNA, 22 nt, Human
aauaggcaguuggauaugcaag

SEQ ID NO: 997666 - RNA, 22 nt, Human
uccagccaugacucggacagug

SEQ ID NO: 997667 - RNA, 22 nt, Human
uauuagagaaaagauggaugug

SEQ ID NO: 997668 - RNA, 22 nt, Human
ccuggcugcuauagcagcaugu

SEQ ID NO: 997669 - RNA, 22 nt, Human
agccacagagcaggagaccuuu

SEQ ID NO: 997670 - RNA, 23 nt, Human
cugcagccgcguggggacgugga

SEQ ID NO: 997671 - RNA, 22 nt, Human
aaguuugagagccuuuaguaua

SEQ ID NO: 997672 - RNA, 22 nt, Human
ggaggccaaggagggcggauca

SEQ ID NO: 997673 - RNA, 22 nt, Human
agggugccuggaagccacucac

SEQ ID NO: 997674 - RNA, 22 nt, Human
aucaggauguuuggcugucaua

SEQ ID NO: 997675 - RNA, 22 nt, Human
ugcauuguaggauguuuagcag

SEQ ID NO: 997676 - RNA, 22 nt, Human
agcucccagggcugggcaaguu

SEQ ID NO: 997677 - RNA, 22 nt, Human
cucaggauuaaggaaucuaaau

SEQ ID NO: 997678 - RNA, 22 nt, Human
gaaaucugucuuuguuugaaua

SEQ ID NO: 997679 - RNA, 22 nt, Human
cugaggaugguguggucuucuc

SEQ ID NO: 997680 - RNA, 22 nt, Human
agcagccaaaugaagauuuuac

SEQ ID NO: 997681 - RNA, 22 nt, Human
uuaaagagucuacugcacaucc

SEQ ID NO: 997682 - RNA, 22 nt, Human
cauuucugggagacaugcuaga

SEQ ID NO: 997683 - RNA, 22 nt, Human
ucucaggaguagugggauccau

SEQ ID NO: 997684 - RNA, 22 nt, Human
ucaaagcaucagucaauuuagg

SEQ ID NO: 997685 - RNA, 22 nt, Human
agauacauuguucuaagcauug

SEQ ID NO: 997686 - RNA, 22 nt, Human
ucaaguauaucuagucauuagg

SEQ ID NO: 997687 - RNA, 22 nt, Human
caggggacauuaaagcuccaua

SEQ ID NO: 997688 - RNA, 22 nt, Human
augaugguaaauucaguauccg

SEQ ID NO: 997689 - RNA, 22 nt, Human
aggggcuggaguucgagguuac

SEQ ID NO: 997690 - RNA, 22 nt, Human
gcaguccucucauuggccuccu

SEQ ID NO: 997691 - RNA, 22 nt, Human
ccagggcuccauugcucauccu

SEQ ID NO: 997692 - RNA, 19 nt, Human
aggguccagggagcggcuc

SEQ ID NO: 997693 - RNA, 22 nt, Human
ucacuuuugaucccuaugcagu

SEQ ID NO: 997694 - RNA, 22 nt, Human
uggccacccagcugacgccuuc

SEQ ID NO: 997695 - RNA, 22 nt, Human
ugcagggccgcuggaggucaug

SEQ ID NO: 997696 - RNA, 19 nt, Human
ugucucagugucccuuccu

SEQ ID NO: 997697 - RNA, 22 nt, Human
agauacaucauuuauaccuuca

SEQ ID NO: 997698 - RNA, 22 nt, Human
gcugagcuagcuaucucagucu

SEQ ID NO: 997699 - RNA, 18 nt, Human
aucuuuccauagcauguu

SEQ ID NO: 997700 - RNA, 22 nt, Human
uuucacaaaugucuuuaacuug

SEQ ID NO: 997701 - RNA, 22 nt, Human
agggccagaggcaccuugcagc

SEQ ID NO: 997702 - RNA, 22 nt, Human
uagcagggucucaggagucagg

SEQ ID NO: 997703 - RNA, 22 nt, Human
cucugagagagcuggugagcac

SEQ ID NO: 997704 - RNA, 22 nt, Human
ugucccauggacacaacuucuu

SEQ ID NO: 997705 - RNA, 22 nt, Human
cugccugugccaccgccucauu

SEQ ID NO: 997706 - RNA, 22 nt, Human
cugccuggguucaaguccuguu

SEQ ID NO: 997707 - RNA, 22 nt, Human
aagcagcagaccugauuuugaa

SEQ ID NO: 997708 - RNA, 22 nt, Human
gggcaagcucuucagaagcucu

SEQ ID NO: 997709 - RNA, 22 nt, Human
aucuacagugcacaggacagcc

SEQ ID NO: 997710 - RNA, 22 nt, Human
ucugucaccgagggcauccaaa

SEQ ID NO: 997711 - RNA, 22 nt, Human
ggucccaguugcccaggucagg

SEQ ID NO: 997712 - RNA, 22 nt, Human
uuucaagagggaacugaacaca

SEQ ID NO: 997713 - RNA, 22 nt, Human
agggcagcauugccuuucucca

SEQ ID NO: 997714 - RNA, 20 nt, Human
ggcacuggaagcacacagga

SEQ ID NO: 997715 - RNA, 22 nt, Human
agcuggcauacuuugcuaggaa

SEQ ID NO: 997716 - RNA, 22 nt, Human
cccucugcucaggugcauaggc

SEQ ID NO: 997717 - RNA, 22 nt, Human
gcugccuuuugcuccucccacc

SEQ ID NO: 997718 - RNA, 22 nt, Human
gcaggccagcugugcagauggg

SEQ ID NO: 997719 - RNA, 22 nt, Human
ucugagagucucugaggcagau

SEQ ID NO: 997720 - RNA, 22 nt, Human
uagaaacagagagauaugcccc

SEQ ID NO: 997721 - RNA, 22 nt, Human
augcaucauggaaaacucaguu

SEQ ID NO: 997722 - RNA, 22 nt, Human
ucacaagaauuuguagaugaaa

SEQ ID NO: 997723 - RNA, 22 nt, Human
uaggcaauauuagacuuugucu

SEQ ID NO: 997724 - RNA, 22 nt, Human
accucugcaguagggcugugcc

SEQ ID NO: 997725 - RNA, 22 nt, Human
ugaaaaggagccuuagguaggu

SEQ ID NO: 997726 - RNA, 22 nt, Human
ggucagggggaucugugaggua

SEQ ID NO: 997727 - RNA, 22 nt, Human
gcucuggacuggggccugagaa

SEQ ID NO: 997728 - RNA, 22 nt, Human
gcucugggauuaccagccuuag

SEQ ID NO: 997729 - RNA, 22 nt, Human
cugaggcuuggaggggucuggu

SEQ ID NO: 997730 - RNA, 22 nt, Human
ugaaggaauggaggaucagagc

SEQ ID NO: 997731 - RNA, 19 nt, Human
cugaagucuuuucagcugg

SEQ ID NO: 997732 - RNA, 22 nt, Human
ugaaauguaaauaggacuagaa

SEQ ID NO: 997733 - RNA, 22 nt, Human
acuggccagguucaaaauacag

SEQ ID NO: 997734 - RNA, 22 nt, Human
cugcugagaaaagacugaggga

SEQ ID NO: 997735 - RNA, 22 nt, Human
ucaaggaggugcuuggcuucac

SEQ ID NO: 997736 - RNA, 22 nt, Human
caggucagaggcgcagccccca

SEQ ID NO: 997737 - RNA, 22 nt, Human
ucuccuggaagaauaccacacu

SEQ ID NO: 997738 - RNA, 22 nt, Human
gcuggcugaggucuagcucuuu

SEQ ID NO: 997739 - RNA, 22 nt, Human
gucccuggaauggacucugcgc

SEQ ID NO: 997740 - RNA, 20 nt, Human
gcucccugguagaaauguuu

SEQ ID NO: 997741 - RNA, 22 nt, Human
ucaugucaguuucuucuauaaa

SEQ ID NO: 997742 - RNA, 17 nt, Human
gguguauggggagggaa

SEQ ID NO: 997743 - RNA, 22 nt, Human
uguguuccuucgucuucccuuc

SEQ ID NO: 997744 - RNA, 22 nt, Human
uuucaacauauaccauaaugcc

SEQ ID NO: 997745 - RNA, 22 nt, Human
ggagauggcucugcaaggucua

SEQ ID NO: 997746 - RNA, 22 nt, Human
ugggcugccagcucuccagaug

SEQ ID NO: 997747 - RNA, 20 nt, Human
cucaggauacugcaaaguug

SEQ ID NO: 997748 - RNA, 22 nt, Human
gcucuuccauuucucuugaacu

SEQ ID NO: 997749 - RNA, 22 nt, Human
ggugcugguucaggguggcugu

SEQ ID NO: 997750 - RNA, 22 nt, Human
gcagagccaggagcccaggauc

SEQ ID NO: 997751 - RNA, 22 nt, Human
gaaccaaguaggauacaaggag

SEQ ID NO: 997752 - RNA, 22 nt, Human
ggcagcugugaagugccucaca

SEQ ID NO: 997753 - RNA, 22 nt, Human
aagggcagcuuaaauugguagc

SEQ ID NO: 997754 - RNA, 22 nt, Human
ucccagggacaccaagcuguuu

SEQ ID NO: 997755 - RNA, 22 nt, Human
ccugccugcaaaaugggacaag

SEQ ID NO: 997756 - RNA, 22 nt, Human
uuccaugugaguacacugugau

SEQ ID NO: 997757 - RNA, 22 nt, Human
aggucaaggccaaaagaguggu

SEQ ID NO: 997758 - RNA, 17 nt, Human
ggccuugggcugcucuu

SEQ ID NO: 997759 - RNA, 22 nt, Human
acaguaauuaaaauggaucugc

SEQ ID NO: 997760 - RNA, 22 nt, Human
gucuggccugccagcucuggug

SEQ ID NO: 997761 - RNA, 22 nt, Human
acagugucugacacauuguagc

SEQ ID NO: 997762 - RNA, 22 nt, Human
ggucucagaucuuuauuaaggc

SEQ ID NO: 997763 - RNA, 22 nt, Human
gggagagagagcucauguugaa

SEQ ID NO: 997764 - RNA, 22 nt, Human
caugcuuugggucagaaaugcc

SEQ ID NO: 997765 - RNA, 22 nt, Human
aucuggcucccuuggaauccgu

SEQ ID NO: 997766 - RNA, 22 nt, Human
gcucagccgaacuucagagcag

SEQ ID NO: 997767 - RNA, 22 nt, Human
gcacacagauuaggaaacagaa

SEQ ID NO: 997768 - RNA, 22 nt, Human
cuugaaagucacaugcagcccu

SEQ ID NO: 997769 - RNA, 22 nt, Human
cugucagguuggucucagagcu

SEQ ID NO: 997770 - RNA, 22 nt, Human
gccagccugugggggcucugug

SEQ ID NO: 997771 - RNA, 22 nt, Human
cugggcacaaguggcccuggau

SEQ ID NO: 997772 - RNA, 22 nt, Human
gguucacacuuucaugauuuca

SEQ ID NO: 997773 - RNA, 22 nt, Human
gccuuccugcagcucugagcgu

SEQ ID NO: 997774 - RNA, 22 nt, Human
uucacauugugcagauuauggu

SEQ ID NO: 997775 - RNA, 22 nt, Human
aagcagcauaauugcuauuuua

SEQ ID NO: 997776 - RNA, 22 nt, Human
auaagagcuagucuuuuccuug

SEQ ID NO: 997777 - RNA, 22 nt, Human
ccugggcauucuuugaguucuc

SEQ ID NO: 997778 - RNA, 22 nt, Human
ggcugcugguggaaugguaggc

SEQ ID NO: 997779 - RNA, 22 nt, Human
aauucacaaaaccagauugcuu

SEQ ID NO: 997780 - RNA, 22 nt, Human
cagggcaguaacgggaacaucu

SEQ ID NO: 997781 - RNA, 22 nt, Human
agugacugacaccuguaauccc

SEQ ID NO: 997782 - RNA, 20 nt, Human
ucccuggaggugguggcauc

SEQ ID NO: 997783 - RNA, 22 nt, Human
acugaguguaggacuuugaguu

SEQ ID NO: 997784 - RNA, 22 nt, Human
aggauguuaucugugcaggugg

SEQ ID NO: 997785 - RNA, 22 nt, Human
aagauuuccuucaguagagcua

SEQ ID NO: 997786 - RNA, 19 nt, Human
augucuguugaauuucaua

SEQ ID NO: 997787 - RNA, 22 nt, Human
cacugaaggcuaggauuagaug

SEQ ID NO: 997788 - RNA, 22 nt, Human
ucccagccuuccuuguggugaa

SEQ ID NO: 997789 - RNA, 22 nt, Human
acucugcuugcccaauggaaac

SEQ ID NO: 997790 - RNA, 22 nt, Human
aggacuucaucaccuguauaaa

SEQ ID NO: 997791 - RNA, 22 nt, Human
uggaggaugccauccaggauac

SEQ ID NO: 997792 - RNA, 22 nt, Human
aauuuagaauucgcuagcuaau

SEQ ID NO: 997793 - RNA, 22 nt, Human
ucucuggccgagagucccuggg

SEQ ID NO: 997794 - RNA, 22 nt, Human
augcaccugaacuccaucagcu

SEQ ID NO: 997795 - RNA, 22 nt, Human
ccaaaauguuugaaugcaugug

SEQ ID NO: 997796 - RNA, 22 nt, Human
ucagggaacaauguuauggcuu

SEQ ID NO: 997797 - RNA, 22 nt, Human
gcaguggcuaagcucgcaugca

SEQ ID NO: 997798 - RNA, 22 nt, Human
ucucaggggccuggaguccugg

SEQ ID NO: 997799 - RNA, 22 nt, Human
ggccugcuucucagugagcuug

SEQ ID NO: 997800 - RNA, 22 nt, Human
gguggccaggccagcucuggcc

SEQ ID NO: 997801 - RNA, 22 nt, Human
cuggagcuaggaaguccaagau

SEQ ID NO: 997802 - RNA, 22 nt, Human
aaucauaauucaaauaagcuua

SEQ ID NO: 997803 - RNA, 22 nt, Human
uacaguaacauguuguacaagc

SEQ ID NO: 997804 - RNA, 22 nt, Human
ccagagccccugagcuucccug

SEQ ID NO: 997805 - RNA, 22 nt, Human
uuucacaaguaaaguccuaagu

SEQ ID NO: 997806 - RNA, 22 nt, Human
gcagggcagccacaggcccccu

SEQ ID NO: 997807 - RNA, 20 nt, Human
gcugggggugugcugaguga

SEQ ID NO: 997808 - RNA, 22 nt, Human
uccaggaggguuuucugccuuc

SEQ ID NO: 997809 - RNA, 22 nt, Human
aagaaaugcagaaaugugcugg

SEQ ID NO: 997810 - RNA, 21 nt, Human
gauguuggaggcuggggucug

SEQ ID NO: 997811 - RNA, 22 nt, Human
agagugaucagauaucaggugu

SEQ ID NO: 997812 - RNA, 22 nt, Human
acauuucuuugcuagacagcag

SEQ ID NO: 997813 - RNA, 22 nt, Human
gcugucucauacaaggcccugc

SEQ ID NO: 997814 - RNA, 22 nt, Human
cagcagcugcgugcccaggccg

SEQ ID NO: 997815 - RNA, 22 nt, Human
aucuauuaugcugagaaacugu

SEQ ID NO: 997816 - RNA, 22 nt, Human
ccuuucucauuuuaagcauuag

SEQ ID NO: 997817 - RNA, 22 nt, Human
aaauaguuacuucugcugucuu

SEQ ID NO: 997818 - RNA, 22 nt, Human
gccuggagaagauggaacuagc

SEQ ID NO: 997819 - RNA, 22 nt, Human
aggauuuugacuuauucaggga

SEQ ID NO: 997820 - RNA, 22 nt, Human
aggugaguuacaggaggagguc

SEQ ID NO: 997821 - RNA, 22 nt, Human
uuugggaacucuaucauggaaa

SEQ ID NO: 997822 - RNA, 22 nt, Human
uaggaugagggguggccaagua

SEQ ID NO: 997823 - RNA, 22 nt, Human
gaugcacuuucuuuucaacagu

SEQ ID NO: 997824 - RNA, 22 nt, Human
cauugaaauauggaaacugaug

SEQ ID NO: 997825 - RNA, 22 nt, Human
uuccuggcugaacugaacuccu

SEQ ID NO: 997826 - RNA, 22 nt, Human
cauguacauucuguagauggag

SEQ ID NO: 997827 - RNA, 22 nt, Human
acugcuuacaaaaggaaagaau

SEQ ID NO: 997828 - RNA, 22 nt, Human
cuggccuaaaauugcuucugca

SEQ ID NO: 997829 - RNA, 22 nt, Human
aagccagauagaagaacucauu

SEQ ID NO: 997830 - RNA, 22 nt, Human
aggagaaagacuggacagccaa

SEQ ID NO: 997831 - RNA, 22 nt, Human
cccagcuccuuggaugggcagg

SEQ ID NO: 997832 - RNA, 21 nt, Human
ugauccuuucccccauguugc

SEQ ID NO: 997833 - RNA, 22 nt, Human
aauuagagaucaguucuuugac

SEQ ID NO: 997834 - RNA, 22 nt, Human
cagcuccccaugguuccugaag

SEQ ID NO: 997835 - RNA, 22 nt, Human
ucagaacauugacauucuuauu

SEQ ID NO: 997836 - RNA, 22 nt, Human
caugcaggcccgccugaauggg

SEQ ID NO: 997837 - RNA, 22 nt, Human
ccagccaggcuggcuguggagg

SEQ ID NO: 997838 - RNA, 22 nt, Human
cuccuggcuucugaaaucgugg

SEQ ID NO: 997839 - RNA, 22 nt, Human
gauggggaugagaagugagcag

SEQ ID NO: 997840 - RNA, 22 nt, Human
ccagucagccaagcugcagcgg

SEQ ID NO: 997841 - RNA, 22 nt, Human
cugggugguuuugaugugaauu

SEQ ID NO: 997842 - RNA, 19 nt, Human
gccacuccugaugcugccc

SEQ ID NO: 997843 - RNA, 22 nt, Human
caggugccucaggaugagacaa

SEQ ID NO: 997844 - RNA, 22 nt, Human
aagggcagaauagagaagaugg

SEQ ID NO: 997845 - RNA, 22 nt, Human
ggcagcagcaagguuggagcug

SEQ ID NO: 997846 - RNA, 22 nt, Human
ccaggagucaauaaaggaagcu

SEQ ID NO: 997847 - RNA, 22 nt, Human
cacaugugugcugaggacugug

SEQ ID NO: 997848 - RNA, 22 nt, Human
gcuuggaaguaggauugggaga

SEQ ID NO: 997849 - RNA, 22 nt, Human
ugcucacagcccagaacauaau

SEQ ID NO: 997850 - RNA, 22 nt, Human
ccugcacuaccuggggcugcug

SEQ ID NO: 997851 - RNA, 22 nt, Human
gccgaagcugccgucugguccu

SEQ ID NO: 997852 - RNA, 18 nt, Human
uccagcgugcuccagggc

SEQ ID NO: 997853 - RNA, 22 nt, Human
augauacaagcaaaacuaauca

SEQ ID NO: 997854 - RNA, 22 nt, Human
cuuauuauaaaauccuguuuga

SEQ ID NO: 997855 - RNA, 22 nt, Human
uucagcaaugacagccuauaua

SEQ ID NO: 997856 - RNA, 22 nt, Human
gagaagcaaucaguggccaccc

SEQ ID NO: 997857 - RNA, 22 nt, Human
ggccacaacuugcuccuagccc

SEQ ID NO: 997858 - RNA, 22 nt, Human
uauuuaauuugcucauugugau

SEQ ID NO: 997859 - RNA, 22 nt, Human
ugaacgcagguccacauggcuc

SEQ ID NO: 997860 - RNA, 20 nt, Human
aggagaugauccagagucag

SEQ ID NO: 997861 - RNA, 22 nt, Human
aagaguuaagcaacagauacca

SEQ ID NO: 997862 - RNA, 22 nt, Human
aaagguuaagguguucaagaaa

SEQ ID NO: 997863 - RNA, 22 nt, Human
uaaucacaucaggguaaauggg

SEQ ID NO: 997864 - RNA, 22 nt, Human
gguggagcuggaccaggagagg

SEQ ID NO: 997865 - RNA, 22 nt, Human
ggccccacgggggaguccuagu

SEQ ID NO: 997866 - RNA, 22 nt, Human
agcuggcccucgagagccaauu

SEQ ID NO: 997867 - RNA, 18 nt, Human
gcuccuggaccaggucac

SEQ ID NO: 997868 - RNA, 22 nt, Human
uaaaugugcacuuuacuuuuca

SEQ ID NO: 997869 - RNA, 22 nt, Human
agucauaauuauaaacaucagu

SEQ ID NO: 997870 - RNA, 22 nt, Human
cugagccauaagggaggcuggg

SEQ ID NO: 997871 - RNA, 17 nt, Human
guccugggaggagagag

SEQ ID NO: 997872 - RNA, 22 nt, Human
uagagcuguaucaaagagccuu

SEQ ID NO: 997873 - RNA, 22 nt, Human
ccugagagcgaguggccucaug

SEQ ID NO: 997874 - RNA, 22 nt, Human
uugaaggaggcuccuuuuuaaa

SEQ ID NO: 997875 - RNA, 22 nt, Human
cccaccaguacagaugguagau

SEQ ID NO: 997876 - RNA, 22 nt, Human
gcuuccucgcugggcagaggca

SEQ ID NO: 997877 - RNA, 20 nt, Human
aggcugccaggucucacauc

SEQ ID NO: 997878 - RNA, 22 nt, Human
aaaucuguaagcaauugcucag

SEQ ID NO: 997879 - RNA, 22 nt, Human
cuggcacacaaguauuuccuuu

SEQ ID NO: 997880 - RNA, 22 nt, Human
ugcccaaguccuccaccgaggu

SEQ ID NO: 997881 - RNA, 22 nt, Human
uagggcuauaagagaauaagac

SEQ ID NO: 997882 - RNA, 22 nt, Human
ugccugggggacuaaggccaaa

SEQ ID NO: 997883 - RNA, 22 nt, Human
uuaagucauuucugauuauaga

SEQ ID NO: 997884 - RNA, 18 nt, Human
aucucccauuggccaagg

SEQ ID NO: 997885 - RNA, 19 nt, Human
ucaguuuuagucaucaguu

SEQ ID NO: 997886 - RNA, 22 nt, Human
agcugcccuggcggagcugcuc

SEQ ID NO: 997887 - RNA, 22 nt, Human
uuccuggcaccaccacuucuag

SEQ ID NO: 997888 - RNA, 22 nt, Human
caagaacaguuugccaaauugg

SEQ ID NO: 997889 - RNA, 22 nt, Human
ucugucacucccugaugaugaa

SEQ ID NO: 997890 - RNA, 22 nt, Human
aaaugcacucugcuucugugac

SEQ ID NO: 997891 - RNA, 22 nt, Human
uccacuuuagcaaugauugaau

SEQ ID NO: 997892 - RNA, 22 nt, Human
agauuuccugcacugccuuuga

SEQ ID NO: 997893 - RNA, 22 nt, Human
ucauguaaguauagaaagcagu

SEQ ID NO: 997894 - RNA, 21 nt, Human
cuggacugaggagacagucgc

SEQ ID NO: 997895 - RNA, 19 nt, Human
uggcuccugccugccuucu

SEQ ID NO: 997896 - RNA, 22 nt, Human
gcucagagaaucagcagacacc

SEQ ID NO: 997897 - RNA, 22 nt, Human
gcucuggacccuggaguggcug

SEQ ID NO: 997898 - RNA, 22 nt, Human
cacugcauggaugauggcugua

SEQ ID NO: 997899 - RNA, 23 nt, Human
ucacagggcacuggcugggguug

SEQ ID NO: 997900 - RNA, 22 nt, Human
ugcaauaaggaguaauaguaaa

SEQ ID NO: 997901 - RNA, 22 nt, Human
uagggcaggggaggaaucugaa

SEQ ID NO: 997902 - RNA, 22 nt, Human
aaaugcuguguuuuaacauaga

SEQ ID NO: 997903 - RNA, 22 nt, Human
cagggccaaguuggugccuuuu

SEQ ID NO: 997904 - RNA, 22 nt, Human
agggcucugggguggcagagau

SEQ ID NO: 997905 - RNA, 22 nt, Human
uccuuggcaugccgucuucucc

SEQ ID NO: 997906 - RNA, 23 nt, Human
gggugggccaaauuagguagccu

SEQ ID NO: 997907 - RNA, 22 nt, Human
uagcagaaccagcagucaauuu

SEQ ID NO: 997908 - RNA, 22 nt, Human
acaugauuggacuccuuccccu

SEQ ID NO: 997909 - RNA, 22 nt, Human
caaggugcagcguugucaagcu

SEQ ID NO: 997910 - RNA, 22 nt, Human
aauagaauguaaucuaauacau

SEQ ID NO: 997911 - RNA, 22 nt, Human
ucuuuccuguaacugcuguuca

SEQ ID NO: 997912 - RNA, 22 nt, Human
aaaguauuuuugacaggcauua

SEQ ID NO: 997913 - RNA, 22 nt, Human
aggacccugagcgggcaugccg

SEQ ID NO: 997914 - RNA, 22 nt, Human
gauuaggagggagaggcaagua

SEQ ID NO: 997915 - RNA, 22 nt, Human
ugagagugguucagcucagaag

SEQ ID NO: 997916 - RNA, 22 nt, Human
agcagcucuggcacuguagcau

SEQ ID NO: 997917 - RNA, 22 nt, Human
uucauucccaagaguaaacaua

SEQ ID NO: 997918 - RNA, 22 nt, Human
ccagguggacggcgaguacagg

SEQ ID NO: 997919 - RNA, 19 nt, Human
agggcugcucuggccuggg

SEQ ID NO: 997920 - RNA, 22 nt, Human
ggaccugccagaacucaggcua

SEQ ID NO: 997921 - RNA, 22 nt, Human
aggagcugcaaauauuaguaau

SEQ ID NO: 997922 - RNA, 22 nt, Human
cauugcucaggcccagcaggaa

SEQ ID NO: 997923 - RNA, 22 nt, Human
gcccagcuuuuugaggcaggca

SEQ ID NO: 997924 - RNA, 22 nt, Human
agcaggugcauggcgagcgcgg

SEQ ID NO: 997925 - RNA, 22 nt, Human
cugucaggggcggguggagcgg

SEQ ID NO: 997926 - RNA, 22 nt, Human
agagcaggcauaaagcuuugaa

SEQ ID NO: 997927 - RNA, 22 nt, Human
augcaguaaauguucuaguuug

SEQ ID NO: 997928 - RNA, 22 nt, Human
cuggugccauucuguggccuag

SEQ ID NO: 997929 - RNA, 22 nt, Human
aggcucugaucagguggcugug

SEQ ID NO: 997930 - RNA, 22 nt, Human
ccagucugaggccuggugaggg

SEQ ID NO: 997931 - RNA, 22 nt, Human
guccucuguguaggcugcagac

SEQ ID NO: 997932 - RNA, 22 nt, Human
agcagggcuugccgcuuguccu

SEQ ID NO: 997933 - RNA, 22 nt, Human
cugaggccuaagacaugaauga

SEQ ID NO: 997934 - RNA, 18 nt, Human
uggccuggagacaacucu

SEQ ID NO: 997935 - RNA, 22 nt, Human
uauauuaaagugcuuugcagug

SEQ ID NO: 997936 - RNA, 22 nt, Human
uuugaaauguaucaguauaggu

SEQ ID NO: 997937 - RNA, 18 nt, Human
acaguaaagaaaggaauu

SEQ ID NO: 997938 - RNA, 22 nt, Human
aggcucagauccuuguguccug

SEQ ID NO: 997939 - RNA, 22 nt, Human
ggcaggagaaaggucucuucuu

SEQ ID NO: 997940 - RNA, 22 nt, Human
gggcacuggaaggcucucaggc

SEQ ID NO: 997941 - RNA, 22 nt, Human
ugcaacauuauuaaacuaagca

SEQ ID NO: 997942 - RNA, 22 nt, Human
ugggggagauuagagcuucuua

SEQ ID NO: 997943 - RNA, 23 nt, Human
uguagcaucucuuauuucucagc

SEQ ID NO: 997944 - RNA, 22 nt, Human
uaccuuggguugaguucauucu

SEQ ID NO: 997945 - RNA, 22 nt, Human
cugaaauuccauuucagccaca

SEQ ID NO: 997946 - RNA, 22 nt, Human
ucagaagccggaagugcuccuc

SEQ ID NO: 997947 - RNA, 22 nt, Human
gccugccucaaaaucccaguuc

SEQ ID NO: 997948 - RNA, 22 nt, Human
cagggccagccgcagcauccac

SEQ ID NO: 997949 - RNA, 22 nt, Human
agucucaggcagaggaaggcua

SEQ ID NO: 997950 - RNA, 19 nt, Human
ccuggcccugcugcgcggg

SEQ ID NO: 997951 - RNA, 17 nt, Human
gauuuccugaaguucuu

SEQ ID NO: 997952 - RNA, 22 nt, Human
ucagccagugccuugaucuugc

SEQ ID NO: 997953 - RNA, 19 nt, Human
auagaaaggguuaaagaca

SEQ ID NO: 997954 - RNA, 22 nt, Human
cuuucaaugugccugccuuggg

SEQ ID NO: 997955 - RNA, 22 nt, Human
caggaaagaaaugagaacacca

SEQ ID NO: 997956 - RNA, 22 nt, Human
aacaaauggggccuuguaugaa

SEQ ID NO: 997957 - RNA, 22 nt, Human
agcauuuaauuacaguuuaauu

SEQ ID NO: 997958 - RNA, 22 nt, Human
gcaggggcuacucugagcuucc

SEQ ID NO: 997959 - RNA, 22 nt, Human
auagucaaccuuguaauuagcc

SEQ ID NO: 997960 - RNA, 22 nt, Human
caagagcugcaaauagcgugac

SEQ ID NO: 997961 - RNA, 21 nt, Human
agcucagccgggcacaguggc

SEQ ID NO: 997962 - RNA, 22 nt, Human
caagaaauguuuacugagcauc

SEQ ID NO: 997963 - RNA, 22 nt, Human
uugaagcaugguacuuguucaa

SEQ ID NO: 997964 - RNA, 22 nt, Human
uccucaggauguggaguagaau

SEQ ID NO: 997965 - RNA, 22 nt, Human
acuuucucaggaauucacagac

SEQ ID NO: 997966 - RNA, 22 nt, Human
ucugugccuccguaacacacca

SEQ ID NO: 997967 - RNA, 22 nt, Human
uaaccuuucaggcauguagguu

SEQ ID NO: 997968 - RNA, 19 nt, Human
gaagaagcuugagaaguag

SEQ ID NO: 997969 - RNA, 22 nt, Human
uggcugggggugcuauagcugc

SEQ ID NO: 997970 - RNA, 22 nt, Human
gacacagagauaggccuguguu

SEQ ID NO: 997971 - RNA, 22 nt, Human
agcagcuccugccaugagugcu

SEQ ID NO: 997972 - RNA, 22 nt, Human
ucuggauggucagcucuuccug

SEQ ID NO: 997973 - RNA, 22 nt, Human
gucucagaccacccucuuuggc

SEQ ID NO: 997974 - RNA, 19 nt, Human
cagucccaaauucuuguca

SEQ ID NO: 997975 - RNA, 22 nt, Human
cccuggcauaaaacuucuccag

SEQ ID NO: 997976 - RNA, 22 nt, Human
augcugaggacaaagagaucaa

SEQ ID NO: 997977 - RNA, 22 nt, Human
acuuccugcuaugagcuucugu

SEQ ID NO: 997978 - RNA, 22 nt, Human
ugggcuggcccaccacaccucg

SEQ ID NO: 997979 - RNA, 22 nt, Human
gagagcugcaagguagggcggg

SEQ ID NO: 997980 - RNA, 22 nt, Human
agagcagcacguuguccccaca

SEQ ID NO: 997981 - RNA, 22 nt, Human
auauguguauuugguuagccua

SEQ ID NO: 997982 - RNA, 22 nt, Human
uccugggcccaggcugccaggg

SEQ ID NO: 997983 - RNA, 22 nt, Human
agguggggccaaaugcuacagu

SEQ ID NO: 997984 - RNA, 22 nt, Human
ccugagaccaaguugcagccau

SEQ ID NO: 997985 - RNA, 22 nt, Human
gcccccucuuuggagccagcca

SEQ ID NO: 997986 - RNA, 22 nt, Human
cagaguggcagucccaggccca

SEQ ID NO: 997987 - RNA, 22 nt, Human
accucugcuucccggguucaag

SEQ ID NO: 997988 - RNA, 22 nt, Human
gcccagcuggcuuccagcacau

SEQ ID NO: 997989 - RNA, 22 nt, Human
ggcuuccuggagaaggucugag

SEQ ID NO: 997990 - RNA, 22 nt, Human
ugggcugcagagcccggccuuc

SEQ ID NO: 997991 - RNA, 22 nt, Human
gggcagagacucagaaacagaa

SEQ ID NO: 997992 - RNA, 22 nt, Human
gccuggaggggacagucucugg

SEQ ID NO: 997993 - RNA, 20 nt, Human
uccucagaagacauuugggg

SEQ ID NO: 997994 - RNA, 22 nt, Human
caugggcucuucuggacugcac

SEQ ID NO: 997995 - RNA, 22 nt, Human
cauagaaaagaguagguaaugu

SEQ ID NO: 997996 - RNA, 20 nt, Human
acagaauaugcugguugugg

SEQ ID NO: 997997 - RNA, 22 nt, Human
gugucccagcagcacauuggcu

SEQ ID NO: 997998 - RNA, 22 nt, Human
acacccagagcgccagugccga

SEQ ID NO: 997999 - RNA, 22 nt, Human
ucaaaaaguugaagaguugggg

SEQ ID NO: 998000 - RNA, 22 nt, Human
ucucccacugcaagcccaggcu

SEQ ID NO: 998001 - RNA, 22 nt, Human
guccucagagugggcagguccu

SEQ ID NO: 998002 - RNA, 22 nt, Human
ugaaccaggaggcagccagcac

SEQ ID NO: 998003 - RNA, 22 nt, Human
ggcugaaguguaguggcucacu

SEQ ID NO: 998004 - RNA, 22 nt, Human
aacacuuucuuccuugcucagg

SEQ ID NO: 998005 - RNA, 21 nt, Human
uuccuggcggcagaaacguga

SEQ ID NO: 998006 - RNA, 18 nt, Human
cccagcuccacuucccuc

SEQ ID NO: 998007 - RNA, 22 nt, Human
gcugccuggcuuuaguccacuu

SEQ ID NO: 998008 - RNA, 22 nt, Human
aggcagugcagaguccucuucu

SEQ ID NO: 998009 - RNA, 22 nt, Human
ccucagagccuccagaaggaau

SEQ ID NO: 998010 - RNA, 17 nt, Human
uuccucucacauuuuuu

SEQ ID NO: 998011 - RNA, 23 nt, Human
uggagaugccccacucccugucu

SEQ ID NO: 998012 - RNA, 22 nt, Human
caucuggcuagcuaucauugug

SEQ ID NO: 998013 - RNA, 22 nt, Human
uaggccaggacagagcuuccag

SEQ ID NO: 998014 - RNA, 22 nt, Human
aaaaguguccagauuaugaaga

SEQ ID NO: 998015 - RNA, 22 nt, Human
acaaagucucuaauaaucuucu

SEQ ID NO: 998016 - RNA, 22 nt, Human
ucuggccugggccugccggugc

SEQ ID NO: 998017 - RNA, 22 nt, Human
aaggccugggaggccucucuuc

SEQ ID NO: 998018 - RNA, 22 nt, Human
uugauacaggccuucuagauga

SEQ ID NO: 998019 - RNA, 22 nt, Human
ggaugcuggggaccaaucucug

SEQ ID NO: 998020 - RNA, 22 nt, Human
cagagggcucuuggcugccugc

SEQ ID NO: 998021 - RNA, 22 nt, Human
guucacaauuuuuacugauugg

SEQ ID NO: 998022 - RNA, 22 nt, Human
uggcagagcccagacuccaguc

SEQ ID NO: 998023 - RNA, 22 nt, Human
acagaguaggugcugucgacug

SEQ ID NO: 998024 - RNA, 22 nt, Human
ccagagccuggcaucugcauaa

SEQ ID NO: 998025 - RNA, 20 nt, Human
agcccaggccugugugaguc

SEQ ID NO: 998026 - RNA, 22 nt, Human
agugaaauuccuggucuuuguu

SEQ ID NO: 998027 - RNA, 22 nt, Human
aggugaguugguaggaaguuug

SEQ ID NO: 998028 - RNA, 23 nt, Human
uggcccugaaucuguccuggagg

SEQ ID NO: 998029 - RNA, 22 nt, Human
ccuggagcucacugggagccgg

SEQ ID NO: 998030 - RNA, 22 nt, Human
ccuggccuuaagggcagggagc

SEQ ID NO: 998031 - RNA, 22 nt, Human
agagugggccucugagucccag

SEQ ID NO: 998032 - RNA, 22 nt, Human
uuuacugugcauuagaaucacc

SEQ ID NO: 998033 - RNA, 22 nt, Human
ggcucuggugugaagcagccuc

SEQ ID NO: 998034 - RNA, 22 nt, Human
ugccucagagugggcuugcuau

SEQ ID NO: 998035 - RNA, 22 nt, Human
gauuucuguaacacuucagaua

SEQ ID NO: 998036 - RNA, 23 nt, Human
ucuggcuccauccuuggggaucc

SEQ ID NO: 998037 - RNA, 22 nt, Human
auguaaggcugccuaugacacu

SEQ ID NO: 998038 - RNA, 22 nt, Human
cagcugccacaccucuuucucu

SEQ ID NO: 998039 - RNA, 22 nt, Human
aguucacauuccgagguacugg

SEQ ID NO: 998040 - RNA, 20 nt, Human
uacugggcaagcccacagac

SEQ ID NO: 998041 - RNA, 21 nt, Human
gcaaggcuuuuguguuuccca

SEQ ID NO: 998042 - RNA, 22 nt, Human
ucugaagaacugaguaaacaug

SEQ ID NO: 998043 - RNA, 22 nt, Human
gccuggguuccaugaucuccag

SEQ ID NO: 998044 - RNA, 22 nt, Human
uggcccugcuaugauccugcaa

SEQ ID NO: 998045 - RNA, 22 nt, Human
cucuccuggggagcacacacac

SEQ ID NO: 998046 - RNA, 17 nt, Human
agcagcugaagcagcca

SEQ ID NO: 998047 - RNA, 22 nt, Human
gccuggagcccaguguggggcu

SEQ ID NO: 998048 - RNA, 22 nt, Human
aauaacaggcucaucagaugcu

SEQ ID NO: 998049 - RNA, 22 nt, Human
aacauucaccucuaccuccuuc

SEQ ID NO: 998050 - RNA, 21 nt, Human
aaggagccuaggaggcucagg

SEQ ID NO: 998051 - RNA, 22 nt, Human
cugagggucaacuugauuguau

SEQ ID NO: 998052 - RNA, 22 nt, Human
ggcuccagggaguggagagaag

SEQ ID NO: 998053 - RNA, 22 nt, Human
gcagcauauuguacuggccugc

SEQ ID NO: 998054 - RNA, 21 nt, Human
ccaccaggucuucugcucggg

SEQ ID NO: 998055 - RNA, 22 nt, Human
cauggcagagaaggggaacugg

SEQ ID NO: 998056 - RNA, 22 nt, Human
agccaucauuucugucacuggc

SEQ ID NO: 998057 - RNA, 22 nt, Human
ugcuggcucaguuugcagacuc

SEQ ID NO: 998058 - RNA, 22 nt, Human
accagguggccccagcgugguu

SEQ ID NO: 998059 - RNA, 22 nt, Human
cugugccuaagaugcaugucuc

SEQ ID NO: 998060 - RNA, 17 nt, Human
aggcuggcucacaggga

SEQ ID NO: 998061 - RNA, 22 nt, Human
agagccuggggauuggcaaggg

SEQ ID NO: 998062 - RNA, 22 nt, Human
cggcuggggcuguccccaugac

SEQ ID NO: 998063 - RNA, 19 nt, Human
ugaagcagcaaacucucag

SEQ ID NO: 998064 - RNA, 22 nt, Human
caggcagccaggggaccugucc

SEQ ID NO: 998065 - RNA, 19 nt, Human
ccuggccagacuucugccc

SEQ ID NO: 998066 - RNA, 22 nt, Human
gucugcccucacgccagcuggg

SEQ ID NO: 998067 - RNA, 22 nt, Human
ccugggcaacauagugagaccu

SEQ ID NO: 998068 - RNA, 22 nt, Human
agucuccuuggccucaaugccu

SEQ ID NO: 998069 - RNA, 22 nt, Human
gacauucacagguaaacauucc

SEQ ID NO: 998070 - RNA, 22 nt, Human
ugucaccaugccagcuucugcc

SEQ ID NO: 998071 - RNA, 19 nt, Human
cagaccuguccagccugug

SEQ ID NO: 998072 - RNA, 22 nt, Human
gggcuucucuuuagugagcuga

SEQ ID NO: 998073 - RNA, 22 nt, Human
gccucaggacuggcauacucau

SEQ ID NO: 998074 - RNA, 22 nt, Human
cccugggcaagcccuauuuucc

SEQ ID NO: 998075 - RNA, 22 nt, Human
acuuccuguuaugugugccucu

SEQ ID NO: 998076 - RNA, 22 nt, Human
cugccagccaggccagguaggc

SEQ ID NO: 998077 - RNA, 22 nt, Human
ggaaccaggaguuacacgaguu

SEQ ID NO: 998078 - RNA, 22 nt, Human
gccuggagggauagaaugcaag

SEQ ID NO: 998079 - RNA, 22 nt, Human
cagagccacugucugccaggca

SEQ ID NO: 998080 - RNA, 20 nt, Human
cugccuggaggccucuaccu

SEQ ID NO: 998081 - RNA, 22 nt, Human
ugagggcugcuuccagagcuag

SEQ ID NO: 998082 - RNA, 22 nt, Human
aguggugcugcgcgcggagcuc

SEQ ID NO: 998083 - RNA, 20 nt, Human
ccugggcuccaggagccccg

SEQ ID NO: 998084 - RNA, 22 nt, Human
ccaggagcaaagaucacuggga

SEQ ID NO: 998085 - RNA, 22 nt, Human
acuuuggaucugauguaaucag

SEQ ID NO: 998086 - RNA, 20 nt, Human
aggcagacaaggagucuguu

SEQ ID NO: 998087 - RNA, 22 nt, Human
cagcaggcccagaguuucaugg

SEQ ID NO: 998088 - RNA, 22 nt, Human
gccacugcacuccagcccaggc

SEQ ID NO: 998089 - RNA, 22 nt, Human
aaugggagguaguaugggaggu

SEQ ID NO: 998090 - RNA, 22 nt, Human
augucuuucucacagccaguuc

SEQ ID NO: 998091 - RNA, 22 nt, Human
ucagaagaagagacuccacagc

SEQ ID NO: 998092 - RNA, 22 nt, Human
cucaccaggaacagcugcggag

SEQ ID NO: 998093 - RNA, 22 nt, Human
ucagcaguuuuauaugcagcuu

SEQ ID NO: 998094 - RNA, 22 nt, Human
cacugaguucccugacauuuca

SEQ ID NO: 998095 - RNA, 22 nt, Human
uaaaugugucuuuuuaaggccu

SEQ ID NO: 998096 - RNA, 22 nt, Human
uaguaaaaguuuaguugaaagu

SEQ ID NO: 998097 - RNA, 22 nt, Human
cagcccuggugccaagguuccc

SEQ ID NO: 998098 - RNA, 22 nt, Human
agaugauggccauguccucucc

SEQ ID NO: 998099 - RNA, 22 nt, Human
agcugccaaguuucucaguuua

SEQ ID NO: 998100 - RNA, 22 nt, Human
gcuggcaggguucucacugaaa

SEQ ID NO: 998101 - RNA, 22 nt, Human
ugugccugucacccucagagag

SEQ ID NO: 998102 - RNA, 22 nt, Human
gccugcaguucugugcuaggca

SEQ ID NO: 998103 - RNA, 22 nt, Human
ugaaaaggaguccuuguuuuca

SEQ ID NO: 998104 - RNA, 22 nt, Human
cccaggagguggagguugcagu

SEQ ID NO: 998105 - RNA, 22 nt, Human
auauauaaccuggauaaggcuu

SEQ ID NO: 998106 - RNA, 21 nt, Human
ugcuggaaaaagugguucuag

SEQ ID NO: 998107 - RNA, 22 nt, Human
gcugucacacauggccccagcu

SEQ ID NO: 998108 - RNA, 22 nt, Human
aaccaaauggaugguaagaggg

SEQ ID NO: 998109 - RNA, 22 nt, Human
acuguacacgugucauuuacag

SEQ ID NO: 998110 - RNA, 22 nt, Human
uuggccaaggucacugggugag

SEQ ID NO: 998111 - RNA, 22 nt, Human
gaagaagcaggaguguguagca

SEQ ID NO: 998112 - RNA, 22 nt, Human
ucccagaggucucugcugguuc

SEQ ID NO: 998113 - RNA, 22 nt, Human
gaguuauuugguuugcaugcag

SEQ ID NO: 998114 - RNA, 22 nt, Human
uccuggccaggaugaccuaaca

SEQ ID NO: 998115 - RNA, 22 nt, Human
agguacagggugaaaguuuaug

SEQ ID NO: 998116 - RNA, 22 nt, Human
aggaggccccuccuggguugcu

SEQ ID NO: 998117 - RNA, 22 nt, Human
ggcucagggaaugaggaagaau

SEQ ID NO: 998118 - RNA, 22 nt, Human
cccaccccuggacaggugagug

SEQ ID NO: 998119 - RNA, 22 nt, Human
caacccaaaagcguuuccauuu

SEQ ID NO: 998120 - RNA, 22 nt, Human
gccugucucuuggaacuuggua

SEQ ID NO: 998121 - RNA, 22 nt, Human
cuacauuuugugauuaugaaau

SEQ ID NO: 998122 - RNA, 22 nt, Human
agaaaugcucuuccugaccaga

SEQ ID NO: 998123 - RNA, 22 nt, Human
uaauguguugaauauuuguaca

SEQ ID NO: 998124 - RNA, 22 nt, Human
uuucaacaggaugauaauaggc

SEQ ID NO: 998125 - RNA, 22 nt, Human
ucaucacauaugucaugauuug

SEQ ID NO: 998126 - RNA, 22 nt, Human
aagagcugcccaaggugaacag

SEQ ID NO: 998127 - RNA, 22 nt, Human
auucugaguccaugggggcagg

SEQ ID NO: 998128 - RNA, 22 nt, Human
cagucccaaggaggaagcaguc

SEQ ID NO: 998129 - RNA, 22 nt, Human
ggccuuggggaggauggugucc

SEQ ID NO: 998130 - RNA, 22 nt, Human
caggggcaggugugagaucauc

SEQ ID NO: 998131 - RNA, 22 nt, Human
uuguaacaaucugucauaaaug

SEQ ID NO: 998132 - RNA, 22 nt, Human
augucccaagauacagcuagag

SEQ ID NO: 998133 - RNA, 17 nt, Human
ccaggugggaggugggg

SEQ ID NO: 998134 - RNA, 22 nt, Human
auuuauuaagcaucugcuaugu

SEQ ID NO: 998135 - RNA, 22 nt, Human
cuggcagcugugugaagaacug

SEQ ID NO: 998136 - RNA, 22 nt, Human
uggcucugcugaaccuagugca

SEQ ID NO: 998137 - RNA, 21 nt, Human
ccucugcucgggcaugcguuu

SEQ ID NO: 998138 - RNA, 22 nt, Human
agggucccgaaggagacagcaa

SEQ ID NO: 998139 - RNA, 22 nt, Human
caaaugcaugagaaauaagagg

SEQ ID NO: 998140 - RNA, 22 nt, Human
acauuucucagggaguuuugcu

SEQ ID NO: 998141 - RNA, 22 nt, Human
gccuguccuggaugcucugcaa

SEQ ID NO: 998142 - RNA, 22 nt, Human
cccagcacaggcaauuccauac

SEQ ID NO: 998143 - RNA, 22 nt, Human
uacuuucuagcucuccccaguu

SEQ ID NO: 998144 - RNA, 19 nt, Human
gcagccaggugcucuaccu

SEQ ID NO: 998145 - RNA, 23 nt, Human
cacugcagcguggucuggcagga

SEQ ID NO: 998146 - RNA, 22 nt, Human
caguggucugugcuucuguaca

SEQ ID NO: 998147 - RNA, 22 nt, Human
agugaguggacccugcaaggaa

SEQ ID NO: 998148 - RNA, 22 nt, Human
uaugcauagguaucuauacuca

SEQ ID NO: 998149 - RNA, 22 nt, Human
uuggccaacauggugaaacccc

SEQ ID NO: 998150 - RNA, 22 nt, Human
gugcucuggcuggucucccggu

SEQ ID NO: 998151 - RNA, 22 nt, Human
uccuggaguauuucuguggugu

SEQ ID NO: 998152 - RNA, 22 nt, Human
uucauuccuucuguaccuugcc

SEQ ID NO: 998153 - RNA, 22 nt, Human
ucauccaguuguggagagggaa

SEQ ID NO: 998154 - RNA, 22 nt, Human
uuauccaaacuggugaaucauu

SEQ ID NO: 998155 - RNA, 22 nt, Human
ggcacucagagauucaggcugu

SEQ ID NO: 998156 - RNA, 22 nt, Human
ccccuuccuuccucagacagcc

SEQ ID NO: 998157 - RNA, 22 nt, Human
agcuauguaacagugccaugga

SEQ ID NO: 998158 - RNA, 22 nt, Human
ucacaacuugaagcugauuuaa

SEQ ID NO: 998159 - RNA, 22 nt, Human
cuggagccacugggucuuguau

SEQ ID NO: 998160 - RNA, 22 nt, Human
uuaauuuauguccaaaccagau

SEQ ID NO: 998161 - RNA, 22 nt, Human
agcagagcgccugcucagaggg

SEQ ID NO: 998162 - RNA, 22 nt, Human
uaaauguguaaaccuccauuac

SEQ ID NO: 998163 - RNA, 22 nt, Human
uagccgcuuaauuauuugguga

SEQ ID NO: 998164 - RNA, 22 nt, Human
ucuaagccuaggaaaugaguuu

SEQ ID NO: 998165 - RNA, 22 nt, Human
cagagccagcccacuguucccg

SEQ ID NO: 998166 - RNA, 22 nt, Human
uuuccucuucuucccaugucau

SEQ ID NO: 998167 - RNA, 22 nt, Human
aagcccagaugugagaacugag

SEQ ID NO: 998168 - RNA, 22 nt, Human
acccaggagcaggcugggcagu

SEQ ID NO: 998169 - RNA, 22 nt, Human
ucaggugguccuaagugccauc

SEQ ID NO: 998170 - RNA, 22 nt, Human
cuggcaggucucgcugacgugu

SEQ ID NO: 998171 - RNA, 22 nt, Human
cccucugcugccuggcuggguc

SEQ ID NO: 998172 - RNA, 22 nt, Human
gugcugcucacaucuggaggua

SEQ ID NO: 998173 - RNA, 22 nt, Human
acugccaggauggcacuagagg

SEQ ID NO: 998174 - RNA, 22 nt, Human
aaauaauuauagcgagucuauc

SEQ ID NO: 998175 - RNA, 22 nt, Human
gugauuccuauuaguacaugca

SEQ ID NO: 998176 - RNA, 22 nt, Human
gacuccugccuccucuguuugc

SEQ ID NO: 998177 - RNA, 22 nt, Human
agccucucuuuauucccagcua

SEQ ID NO: 998178 - RNA, 22 nt, Human
ucuuuuuauauugacaaaaggu

SEQ ID NO: 998179 - RNA, 22 nt, Human
cucccaggguagggagagacua

SEQ ID NO: 998180 - RNA, 22 nt, Human
aggagggugauccgggcugguc

SEQ ID NO: 998181 - RNA, 22 nt, Human
cucugugggggagaggcagcug

SEQ ID NO: 998182 - RNA, 22 nt, Human
gaaggagacccugaagaugcug

SEQ ID NO: 998183 - RNA, 22 nt, Human
cuggcagcucugagucccuucu

SEQ ID NO: 998184 - RNA, 22 nt, Human
guaacaaaguuucuaggugcug

SEQ ID NO: 998185 - RNA, 22 nt, Human
cuucaaacccagauuaaaugca

SEQ ID NO: 998186 - RNA, 22 nt, Human
ggcagcuccucucagcaaaaga

SEQ ID NO: 998187 - RNA, 22 nt, Human
ucagccugcgucauggugacac

SEQ ID NO: 998188 - RNA, 22 nt, Human
caaugauucugcaacugugugc

SEQ ID NO: 998189 - RNA, 21 nt, Human
acagcagacaggcuuaggacc

SEQ ID NO: 998190 - RNA, 22 nt, Human
cagagcuggagcuugaauggag

SEQ ID NO: 998191 - RNA, 22 nt, Human
cagggccucauccucagagauu

SEQ ID NO: 998192 - RNA, 22 nt, Human
ucccagaggcuccagucucuau

SEQ ID NO: 998193 - RNA, 22 nt, Human
ugcuggccucggcgcugggccu

SEQ ID NO: 998194 - RNA, 22 nt, Human
aacccaggaguuggaggcugug

SEQ ID NO: 998195 - RNA, 22 nt, Human
gguggcaagggcagccaguaac

SEQ ID NO: 998196 - RNA, 22 nt, Human
caacagcuggaggcuuggcccg

SEQ ID NO: 998197 - RNA, 22 nt, Human
ucaccucucuggccgucuaccu

SEQ ID NO: 998198 - RNA, 22 nt, Human
aaacccaggguuuugucuuccc

SEQ ID NO: 998199 - RNA, 22 nt, Human
gucccucugccugugguucucu

SEQ ID NO: 998200 - RNA, 22 nt, Human
ucugcccaggaggucccauggg

SEQ ID NO: 998201 - RNA, 22 nt, Human
gcaguccuuaggagaggaagua

SEQ ID NO: 998202 - RNA, 22 nt, Human
guccuggggauuauagaguguu

SEQ ID NO: 998203 - RNA, 21 nt, Human
ggccuuggcgggggccgaauu

SEQ ID NO: 998204 - RNA, 22 nt, Human
gguggcaccuuacccugcgcag

SEQ ID NO: 998205 - RNA, 22 nt, Human
uuugcuggagaugagcgugggu

SEQ ID NO: 998206 - RNA, 22 nt, Human
aggggcuuguggaguugcuggu

SEQ ID NO: 998207 - RNA, 22 nt, Human
ucuccucuccuuucauguuguu

SEQ ID NO: 998208 - RNA, 22 nt, Human
uggggcuccuccuggcaggagg

SEQ ID NO: 998209 - RNA, 22 nt, Human
gucuccuuguggaucucaagga

SEQ ID NO: 998210 - RNA, 22 nt, Human
cagacagagucuucccaucagu

SEQ ID NO: 998211 - RNA, 22 nt, Human
gucuccugaggcauccauugaa

SEQ ID NO: 998212 - RNA, 23 nt, Human
aauagcugguaaugauagcacaa

SEQ ID NO: 998213 - RNA, 21 nt, Human
gcuccuggugcugcguggcgc

SEQ ID NO: 998214 - RNA, 22 nt, Human
gcuggccugaccugaggcuggg

SEQ ID NO: 998215 - RNA, 22 nt, Human
agggggcuccuuggugugcaga

SEQ ID NO: 998216 - RNA, 22 nt, Human
ugcauguuucuguauguuaaug

SEQ ID NO: 998217 - RNA, 22 nt, Human
ugcaugcagcuggucgggcgcc

SEQ ID NO: 998218 - RNA, 20 nt, Human
ucucuaacaugaaugcuauc

SEQ ID NO: 998219 - RNA, 22 nt, Human
cagggacugagauccagacugu

SEQ ID NO: 998220 - RNA, 22 nt, Human
uccuggggaggucgaggcugag

SEQ ID NO: 998221 - RNA, 22 nt, Human
cccagccuuugcuuccugguuc

SEQ ID NO: 998222 - RNA, 22 nt, Human
uuccuggggacuuaccgucauu

SEQ ID NO: 998223 - RNA, 22 nt, Human
agccagucggggccaugcuggg

SEQ ID NO: 998224 - RNA, 22 nt, Human
ccuccugggccuugcucuguga

SEQ ID NO: 998225 - RNA, 22 nt, Human
uuggggccgggauaagguuguu

SEQ ID NO: 998226 - RNA, 22 nt, Human
cuaguagcccauuuuggauacc

SEQ ID NO: 998227 - RNA, 22 nt, Human
ucaguccuuaucugguguucag

SEQ ID NO: 998228 - RNA, 22 nt, Human
uucucucaguuaaacuuuguga

SEQ ID NO: 998229 - RNA, 22 nt, Human
ugggcugcuucuauuggugguc

SEQ ID NO: 998230 - RNA, 17 nt, Human
ucuccuggcucuaucag

SEQ ID NO: 998231 - RNA, 22 nt, Human
cuccguggcuguggacgcagcc

SEQ ID NO: 998232 - RNA, 22 nt, Human
auggccugcagugcugccacag

SEQ ID NO: 998233 - RNA, 22 nt, Human
agucuauuuuugguucuucggg

SEQ ID NO: 998234 - RNA, 23 nt, Human
uagauccuuccaacuacucuuac

SEQ ID NO: 998235 - RNA, 18 nt, Human
uccuuucaccccuucucu

SEQ ID NO: 998236 - RNA, 22 nt, Human
ugcauccuguucuagguuuggg

SEQ ID NO: 998237 - RNA, 22 nt, Human
gcagcucucuggccugcccugg

SEQ ID NO: 998238 - RNA, 22 nt, Human
ucccagucuagagccggauugg

SEQ ID NO: 998239 - RNA, 21 nt, Human
uuccuccucuggagaagaaga

SEQ ID NO: 998240 - RNA, 22 nt, Human
auccuggguaaguuccuuuuaa

SEQ ID NO: 998241 - RNA, 22 nt, Human
ugguggcacugacaucagacac

SEQ ID NO: 998242 - RNA, 22 nt, Human
uccuccuuuccccgcuggagcc

SEQ ID NO: 998243 - RNA, 22 nt, Human
ucuccuggcauuugguugagua

SEQ ID NO: 998244 - RNA, 22 nt, Human
gcaguccuguagcgacuuuuuu

SEQ ID NO: 998245 - RNA, 22 nt, Human
uucuccucagcaaggcagcuuu

SEQ ID NO: 998246 - RNA, 22 nt, Human
uccuuacacuggggaaggugua

SEQ ID NO: 998247 - RNA, 22 nt, Human
cccuguccugcuaggcccuggu

SEQ ID NO: 998248 - RNA, 22 nt, Human
auaguagcgagaucucagcuca

SEQ ID NO: 998249 - RNA, 22 nt, Human
agguggcagacuaacagaagga

SEQ ID NO: 998250 - RNA, 22 nt, Human
cuuccagugcauagguagauca

SEQ ID NO: 998251 - RNA, 22 nt, Human
uccuggguccauggcagccgaa

SEQ ID NO: 998252 - RNA, 22 nt, Human
cuacuucuguggcucuaagaga

SEQ ID NO: 998253 - RNA, 22 nt, Human
cuggccuggcaggggaccucua

SEQ ID NO: 998254 - RNA, 22 nt, Human
acuucccacugcagugacugag

SEQ ID NO: 998255 - RNA, 22 nt, Human
ccuggggaccugccucagcccu

SEQ ID NO: 998256 - RNA, 22 nt, Human
ggccuugggauguggcugcagc

SEQ ID NO: 998257 - RNA, 22 nt, Human
ccugaguucuuauuuccaguca

SEQ ID NO: 998258 - RNA, 22 nt, Human
ggaccugaacauaaaacgaggc

SEQ ID NO: 998259 - RNA, 22 nt, Human
uggcagcagggccccuggagga

SEQ ID NO: 998260 - RNA, 22 nt, Human
gagcagcagcugggccagguuc

SEQ ID NO: 998261 - RNA, 22 nt, Human
uggccugauuuugcuaagagaa

SEQ ID NO: 998262 - RNA, 22 nt, Human
cggggccuagucuaccucggca

SEQ ID NO: 998263 - RNA, 22 nt, Human
ucuccucuauuucuguauguau

SEQ ID NO: 998264 - RNA, 22 nt, Human
ucucugugaauggcgucaccug

SEQ ID NO: 998265 - RNA, 22 nt, Human
gugccuccaggcucgacuaguc

SEQ ID NO: 998266 - RNA, 22 nt, Human
guggcagcggcccaggccgucu

SEQ ID NO: 998267 - RNA, 22 nt, Human
ucuugggcaauuucucuagagg

SEQ ID NO: 998268 - RNA, 22 nt, Human
ccaguucuuucugugugcaaca

SEQ ID NO: 998269 - RNA, 22 nt, Human
gggcuuggcuggggccaccaga

SEQ ID NO: 998270 - RNA, 22 nt, Human
ggucuccugaccuuuagucccu

SEQ ID NO: 998271 - RNA, 22 nt, Human
acauauuuugaaagcuuucuaa

SEQ ID NO: 998272 - RNA, 22 nt, Human
cccagccugaucucggccagcu

SEQ ID NO: 998273 - RNA, 20 nt, Human
cucaccagguguaggcugag

SEQ ID NO: 998274 - RNA, 22 nt, Human
accuccuccaaggagccauagg

SEQ ID NO: 998275 - RNA, 20 nt, Human
uuuuccacuccucaaaacag

SEQ ID NO: 998276 - RNA, 22 nt, Human
acuuuggugcgaagucacuuua

SEQ ID NO: 998277 - RNA, 22 nt, Human
ucuacuuccgcaaaaggcacau

SEQ ID NO: 998278 - RNA, 22 nt, Human
ucccugggguaucgcugaggca

SEQ ID NO: 998279 - RNA, 21 nt, Human
uccuccuguagaggguccugg

SEQ ID NO: 998280 - RNA, 18 nt, Human
ucaguccuccauagagcu

SEQ ID NO: 998281 - RNA, 22 nt, Human
aggccugaggaccagauaaaug

SEQ ID NO: 998282 - RNA, 22 nt, Human
ucuuccuggauggggguugaug

SEQ ID NO: 998283 - RNA, 22 nt, Human
gaggaggcuuccgggaggcacg

SEQ ID NO: 998284 - RNA, 22 nt, Human
agcuuuggcaucugacuagccg

SEQ ID NO: 998285 - RNA, 22 nt, Human
auguuugaaauuguaaguauau

SEQ ID NO: 998286 - RNA, 22 nt, Human
ucuaauuuuggcauuuuaaccu

SEQ ID NO: 998287 - RNA, 22 nt, Human
augcauaucuccuaucuccuca

SEQ ID NO: 998288 - RNA, 22 nt, Human
acuccuggguuccggagauucu

SEQ ID NO: 998289 - RNA, 22 nt, Human
auccugggaaguggccuccucc

SEQ ID NO: 998290 - RNA, 22 nt, Human
gcuccugggcccugggcuaacu

SEQ ID NO: 998291 - RNA, 22 nt, Human
auccgggguucauuuucacuga

SEQ ID NO: 998292 - RNA, 22 nt, Human
uuacccagugaagccgaggcag

SEQ ID NO: 998293 - RNA, 22 nt, Human
gagcuuggugcugccuguuguc

SEQ ID NO: 998294 - RNA, 22 nt, Human
cuccacagccccuccaguggca

SEQ ID NO: 998295 - RNA, 22 nt, Human
acaguccuguacaggccauauc

SEQ ID NO: 998296 - RNA, 22 nt, Human
ccugugggagggagcggcugga

SEQ ID NO: 998297 - RNA, 19 nt, Human
uggcagcauugguaccuug

SEQ ID NO: 998298 - RNA, 20 nt, Human
guccugggagccacagcaca

SEQ ID NO: 998299 - RNA, 22 nt, Human
caagucuagcuuggucacuugg

SEQ ID NO: 998300 - RNA, 22 nt, Human
cuguggccagagcgccguugac

SEQ ID NO: 998301 - RNA, 22 nt, Japanese encephalitis virus
caccaccauggccaugacugac

SEQ ID NO: 998302 - RNA, 22 nt, Japanese encephalitis virus
aggagguccuucgcaagaggug

SEQ ID NO: 998303 - RNA, 22 nt, Japanese encephalitis virus
uggcucgagcgagcaugcggug

SEQ ID NO: 998304 - RNA, 23 nt, Japanese encephalitis virus
ugccucuguccaaugggcuaggu

SEQ ID NO: 998305 - RNA, 22 nt, Japanese encephalitis virus
cuuccucaccaccagcuacaua

SEQ ID NO: 998306 - RNA, 22 nt, Japanese encephalitis virus
uagcugguggugaggaagaaca

SEQ ID NO: 998307 - RNA, 22 nt, Japanese encephalitis virus
aagcucaugagcaaaccuuggg

SEQ ID NO: 998308 - RNA, 22 nt, Japanese encephalitis virus
accaguccauugggcaugugua

SEQ ID NO: 998309 - RNA, 22 nt, Japanese encephalitis virus
uaguagcugauguugagauaga

SEQ ID NO: 998310 - RNA, 22 nt, Japanese encephalitis virus
cuuccucaccaccagcuacaua

SEQ ID NO: 998311 - RNA, 22 nt, Human
guaugugugcaaauguaaauau

SEQ ID NO: 998312 - RNA, 22 nt, Human
aguguguagcauuuggcaggca

SEQ ID NO: 998313 - RNA, 22 nt, Human
auggcuguagucaucugaaggc

SEQ ID NO: 998314 - RNA, 22 nt, Human
ggugugugaggagucacuuagu

SEQ ID NO: 998315 - RNA, 22 nt, Human
cugucuguacaaauguggggcc

SEQ ID NO: 998316 - RNA, 22 nt, Human
ggaggggucucuagcgaggaga

SEQ ID NO: 998317 - RNA, 22 nt, Human
uuguuuucuccacugcaucuua

SEQ ID NO: 998318 - RNA, 22 nt, Human
cugauguguuuuaguuugguaa

SEQ ID NO: 998319 - RNA, 22 nt, Human
ugugugaguaaggcugagagag

SEQ ID NO: 998320 - RNA, 22 nt, Human
aauuucucacucucuugaucac

SEQ ID NO: 998321 - RNA, 22 nt, Human
ucuuuacaucacaauuguaugg

SEQ ID NO: 998322 - RNA, 22 nt, Human
cuggagggcuucugcagguuac

SEQ ID NO: 998323 - RNA, 22 nt, Human
uggcugugucccuguccagagu

SEQ ID NO: 998324 - RNA, 19 nt, Human
uagcugccuguuaccucca

SEQ ID NO: 998325 - RNA, 22 nt, Human
gauauuuucgcagggagaauuc

SEQ ID NO: 998326 - RNA, 19 nt, Human
uuuacaaguucuuuguaug

SEQ ID NO: 998327 - RNA, 22 nt, Human
auuuacagaugaugcuauuuga

SEQ ID NO: 998328 - RNA, 19 nt, Human
uucuguguuaauuccuuua

SEQ ID NO: 998329 - RNA, 21 nt, Human
aaauuuucuuggcuguagugu

SEQ ID NO: 998330 - RNA, 22 nt, Human
ugcagcugagucacccagccau

SEQ ID NO: 998331 - RNA, 22 nt, Human
aucuuuuuacuaacacugcuua

SEQ ID NO: 998332 - RNA, 21 nt, Human
uguguauguccaaugcccuac

SEQ ID NO: 998333 - RNA, 22 nt, Human
gugugcgccgacacagccaggu

SEQ ID NO: 998334 - RNA, 22 nt, Human
agggcagugggaaagccugcuc

SEQ ID NO: 998335 - RNA, 22 nt, Human
ucucuguggagcaguguguuca

SEQ ID NO: 998336 - RNA, 22 nt, Human
uuuucucuacaaaauaaccagc

SEQ ID NO: 998337 - RNA, 20 nt, Human
uccaguauguuauuuggugu

SEQ ID NO: 998338 - RNA, 22 nt, Human
aggcugugugcuccuuaugaga

SEQ ID NO: 998339 - RNA, 22 nt, Human
uuguggcugugcaccgcugccu

SEQ ID NO: 998340 - RNA, 22 nt, Human
gauauuuugagaaauccuauga

SEQ ID NO: 998341 - RNA, 22 nt, Human
cuuuucucuguaccguauaucu

SEQ ID NO: 998342 - RNA, 22 nt, Human
ucaguguggguaagcaugcugu

SEQ ID NO: 998343 - RNA, 22 nt, Human
agcaguauucuccuguggugga

SEQ ID NO: 998344 - RNA, 19 nt, Human
cucuuuccauuguauuugc

SEQ ID NO: 998345 - RNA, 22 nt, Human
auuaacuuuugaucaguguggu

SEQ ID NO: 998346 - RNA, 22 nt, Human
accuuuuuccaaagcuucuuac

SEQ ID NO: 998347 - RNA, 22 nt, Human
gagcugccagacaugggaauga

SEQ ID NO: 998348 - RNA, 22 nt, Human
uucuucugaaacagugacagac

SEQ ID NO: 998349 - RNA, 22 nt, Human
agcuguguguuuccacugagcu

SEQ ID NO: 998350 - RNA, 20 nt, Human
cacaguauucuuccuuaaaa

SEQ ID NO: 998351 - RNA, 22 nt, Human
cgcaugugcguugauugcagug

SEQ ID NO: 998352 - RNA, 22 nt, Human
ccuuuacacguaaggcuguuga

SEQ ID NO: 998353 - RNA, 19 nt, Human
caggacagacuucaaagcc

SEQ ID NO: 998354 - RNA, 22 nt, Human
cguguguguaccugcgcauuua

SEQ ID NO: 998355 - RNA, 22 nt, Human
cagggugcuuccguggagcugu

SEQ ID NO: 998356 - RNA, 23 nt, Human
uauguguaaggagaaggagugag

SEQ ID NO: 998357 - RNA, 22 nt, Human
auggcugugaaggucacacccu

SEQ ID NO: 998358 - RNA, 22 nt, Human
cuuuacagaaagagaacucugg

SEQ ID NO: 998359 - RNA, 22 nt, Human
uugucugucccagcuugugcau

SEQ ID NO: 998360 - RNA, 22 nt, Human
cuggccccaucuggagucugag

SEQ ID NO: 998361 - RNA, 22 nt, Human
ugagggguaaguaaaggaauug

SEQ ID NO: 998362 - RNA, 17 nt, Human
agugugugaaauggugg

SEQ ID NO: 998363 - RNA, 22 nt, Human
uagggguguuucgagagagguu

SEQ ID NO: 998364 - RNA, 22 nt, Human
uguggcugccacccugaagccg

SEQ ID NO: 998365 - RNA, 22 nt, Human
uguguauguguauacacuauau

SEQ ID NO: 998366 - RNA, 22 nt, Human
ugugugaaucuauugaauauau

SEQ ID NO: 998367 - RNA, 22 nt, Human
ucugagugagggugugagauau

SEQ ID NO: 998368 - RNA, 22 nt, Human
agugugugcaugcauucgugca

SEQ ID NO: 998369 - RNA, 20 nt, Human
cugcucugcuuugcaggugg

SEQ ID NO: 998370 - RNA, 22 nt, Human
uucucuguaguugccuggugga

SEQ ID NO: 998371 - RNA, 22 nt, Human
uauuuucauucugugugacugu

SEQ ID NO: 998372 - RNA, 22 nt, Human
gcuguguuggugaagcuguagc

SEQ ID NO: 998373 - RNA, 22 nt, Human
cuggcuguaacauuuugccaua

SEQ ID NO: 998374 - RNA, 22 nt, Human
cuguguaguauuuguacacaua

SEQ ID NO: 998375 - RNA, 22 nt, Human
guguggggagcugcagccacau

SEQ ID NO: 998376 - RNA, 22 nt, Human
gacuguguccaugugcuggauu

SEQ ID NO: 998377 - RNA, 22 nt, Human
uuacauguggagucugauugca

SEQ ID NO: 998378 - RNA, 18 nt, Human
ugucucuccuuucugugu

SEQ ID NO: 998379 - RNA, 22 nt, Human
uuuucaucucugcuuuguaccu

SEQ ID NO: 998380 - RNA, 22 nt, Human
cuuuccagaccuccuuguagcu

SEQ ID NO: 998381 - RNA, 22 nt, Human
aguguuaaugguguauauuagg

SEQ ID NO: 998382 - RNA, 22 nt, Human
uauguucugacucuacauggga

SEQ ID NO: 998383 - RNA, 22 nt, Human
ucucucugagcccugcuuuuuc

SEQ ID NO: 998384 - RNA, 20 nt, Human
gaggaaaagcugccaggccu

SEQ ID NO: 998385 - RNA, 22 nt, Human
uaucugugaaauguguuuguau

SEQ ID NO: 998386 - RNA, 19 nt, Human
ucucugcuucucuuggcau

SEQ ID NO: 998387 - RNA, 22 nt, Human
uuagcaguuuccauuuugguca

SEQ ID NO: 998388 - RNA, 22 nt, Human
uuuaucuuuaggacuuugcaga

SEQ ID NO: 998389 - RNA, 22 nt, Human
guuaagaagcuagagaugaaca

SEQ ID NO: 998390 - RNA, 22 nt, Human
guuacagucaggagauauuuug

SEQ ID NO: 998391 - RNA, 22 nt, Human
gguggcugcacccuggcuaacu

SEQ ID NO: 998392 - RNA, 22 nt, Human
guuucucugucuguuacauugg

SEQ ID NO: 998393 - RNA, 22 nt, Human
uuuucugugauucugagguugg

SEQ ID NO: 998394 - RNA, 22 nt, Human
cuuuacauccuguuucccguuu

SEQ ID NO: 998395 - RNA, 22 nt, Human
uuuugucuaagaacuuugcaaa

SEQ ID NO: 998396 - RNA, 22 nt, Human
acuuuuuacaggguguauacca

SEQ ID NO: 998397 - RNA, 22 nt, Human
uuuaacagauaguuucuucugu

SEQ ID NO: 998398 - RNA, 22 nt, Human
uguuuauuacaguucuuggaau

SEQ ID NO: 998399 - RNA, 22 nt, Human
acuuuacaggcacuucaaguau

SEQ ID NO: 998400 - RNA, 22 nt, Human
agcugcccagcuaggaagaagg

SEQ ID NO: 998401 - RNA, 22 nt, Human
uggaggagaccauuccacucag

SEQ ID NO: 998402 - RNA, 22 nt, Human
uugauuuuuccagcuucuagag

SEQ ID NO: 998403 - RNA, 22 nt, Human
uucaguauauuacucuugucaa

SEQ ID NO: 998404 - RNA, 22 nt, Human
agcugugugcauuugggucuca

SEQ ID NO: 998405 - RNA, 22 nt, Human
gcuguguggcugugccgucacg

SEQ ID NO: 998406 - RNA, 22 nt, Human
ugggugugcccagauggugucc

SEQ ID NO: 998407 - RNA, 22 nt, Human
auacaguagacaaucucaugaa

SEQ ID NO: 998408 - RNA, 22 nt, Human
ucucuguggcaagcaugcugcu

SEQ ID NO: 998409 - RNA, 22 nt, Human
agcagcugagccccagcuguga

SEQ ID NO: 998410 - RNA, 22 nt, Human
gcauguguuagagugugcaugc

SEQ ID NO: 998411 - RNA, 22 nt, Human
cuguguaugacuccagagggua

SEQ ID NO: 998412 - RNA, 22 nt, Human
auuacaguggguaaacagaauu

SEQ ID NO: 998413 - RNA, 22 nt, Human
ugucuuuaagcaaacaguguuu

SEQ ID NO: 998414 - RNA, 22 nt, Human
uuauucucaucucccuacuuag

SEQ ID NO: 998415 - RNA, 22 nt, Human
uuguguguagacucagccauug

SEQ ID NO: 998416 - RNA, 22 nt, Human
acugugcuaucuacugaauuau

SEQ ID NO: 998417 - RNA, 22 nt, Human
auauuuucacagaacuugcaaa

SEQ ID NO: 998418 - RNA, 22 nt, Human
ucugcucuguacugcacuggcc

SEQ ID NO: 998419 - RNA, 22 nt, Human
uauugucuaggaauuguuuaaa

SEQ ID NO: 998420 - RNA, 23 nt, Human
ucuauuacuuauuguacucugga

SEQ ID NO: 998421 - RNA, 22 nt, Human
uuucuacucauccuuuggagaa

SEQ ID NO: 998422 - RNA, 22 nt, Human
ucaugugucugcugcagcuguu

SEQ ID NO: 998423 - RNA, 22 nt, Human
uuuaggaagaucugaaggaaga

SEQ ID NO: 998424 - RNA, 22 nt, Human
auguggcuaguggcuaugaucu

SEQ ID NO: 998425 - RNA, 22 nt, Human
ucuuucagccacuuaccugucu

SEQ ID NO: 998426 - RNA, 22 nt, Human
uacaguauuaugagugauugaa

SEQ ID NO: 998427 - RNA, 22 nt, Human
cuuucucuucgaaaaccugccc

SEQ ID NO: 998428 - RNA, 22 nt, Human
aguggcugccaagagcaaugcu

SEQ ID NO: 998429 - RNA, 22 nt, Human
gugugcuguuguucagguagaa

SEQ ID NO: 998430 - RNA, 22 nt, Human
aggcaguucucguguguguccc

SEQ ID NO: 998431 - RNA, 21 nt, Human
uuuaggaaguuuaaggcaggu

SEQ ID NO: 998432 - RNA, 22 nt, Human
guguguacaaauuucauguaaa

SEQ ID NO: 998433 - RNA, 22 nt, Human
uucuguguugugacauucuaga

SEQ ID NO: 998434 - RNA, 22 nt, Human
ugucucuuggagggucuaguga

SEQ ID NO: 998435 - RNA, 22 nt, Human
uagcugccuuugggcuccugcu

SEQ ID NO: 998436 - RNA, 22 nt, Human
cugcugugugaccauggacagg

SEQ ID NO: 998437 - RNA, 22 nt, Human
cugcucuaacugcauuaguuuu

SEQ ID NO: 998438 - RNA, 22 nt, Human
aggcugugggguucugcuuuca

SEQ ID NO: 998439 - RNA, 22 nt, Human
aguguguagcaauaugcuggca

SEQ ID NO: 998440 - RNA, 18 nt, Human
cugcccagagcauuucau

SEQ ID NO: 998441 - RNA, 22 nt, Human
auguauguuuucaguuguauua

SEQ ID NO: 998442 - RNA, 22 nt, Human
auggcugugagacaaagagcug

SEQ ID NO: 998443 - RNA, 22 nt, Human
uucugcugguguuuugugaggc

SEQ ID NO: 998444 - RNA, 22 nt, Human
uacagcuaugucuugguguucu

SEQ ID NO: 998445 - RNA, 22 nt, Human
cuuuuuauagcuauguccuaug

SEQ ID NO: 998446 - RNA, 23 nt, Human
uuacaugugugcacacauucugg

SEQ ID NO: 998447 - RNA, 22 nt, Human
uuucugucauaguuaucuuugu

SEQ ID NO: 998448 - RNA, 22 nt, Human
gcucucugcaagucagcagccu

SEQ ID NO: 998449 - RNA, 22 nt, Human
uguggcugcagacacuggagcc

SEQ ID NO: 998450 - RNA, 22 nt, Human
gcugugagaaacagggaguguc

SEQ ID NO: 998451 - RNA, 22 nt, Human
cauguguggucuguggcuaucu

SEQ ID NO: 998452 - RNA, 22 nt, Human
acaguauauuuucuugauuguu

SEQ ID NO: 998453 - RNA, 18 nt, Human
ugaacuuuggugucucuc

SEQ ID NO: 998454 - RNA, 22 nt, Human
uuacaauaguuccuucuuuugu

SEQ ID NO: 998455 - RNA, 22 nt, Human
uggccugguuguugcugccguu

SEQ ID NO: 998456 - RNA, 22 nt, Human
aguaucaucuccauuucacuga

SEQ ID NO: 998457 - RNA, 22 nt, Human
agggugugcuguugggucuuuc

SEQ ID NO: 998458 - RNA, 22 nt, Human
uggcugcguuuuccgauguauu

SEQ ID NO: 998459 - RNA, 22 nt, Human
guguguguucaauaaauuuaag

SEQ ID NO: 998460 - RNA, 22 nt, Human
uuucuuuccauacauauugcua

SEQ ID NO: 998461 - RNA, 22 nt, Human
aucuuuaccaccaaagaaugcu

SEQ ID NO: 998462 - RNA, 22 nt, Human
guuaacuugguagucuaagugu

SEQ ID NO: 998463 - RNA, 22 nt, Human
acuuguuuggucucauguuuaa

SEQ ID NO: 998464 - RNA, 22 nt, Human
ccuuuacaucugacuucuuuca

SEQ ID NO: 998465 - RNA, 22 nt, Human
uuuuauguaauccuuacugucg

SEQ ID NO: 998466 - RNA, 22 nt, Human
uagacuuuuaagucccucuuua

SEQ ID NO: 998467 - RNA, 19 nt, Human
cuguacagguugcuucugg

SEQ ID NO: 998468 - RNA, 22 nt, Human
uuacacuaagcuacuucuauau

SEQ ID NO: 998469 - RNA, 22 nt, Human
uaguauuuaaucacuuuugucu

SEQ ID NO: 998470 - RNA, 22 nt, Human
gcccacucuggagccuguuccc

SEQ ID NO: 998471 - RNA, 18 nt, Human
cucuguguuggugugaag

SEQ ID NO: 998472 - RNA, 22 nt, Human
uguuacagaaugaauuuccgga

SEQ ID NO: 998473 - RNA, 22 nt, Human
ggcuuguggcaaguguuuuaag

SEQ ID NO: 998474 - RNA, 21 nt, Human
auuuucucuggaugaugguca

SEQ ID NO: 998475 - RNA, 22 nt, Human
caguuuuaucaucugugaaaug

SEQ ID NO: 998476 - RNA, 18 nt, Human
agugugugcccuuucagg

SEQ ID NO: 998477 - RNA, 22 nt, Human
cuuuacagaauaagaauacugg

SEQ ID NO: 998478 - RNA, 22 nt, Human
cuggcugucuucugggagcugu

SEQ ID NO: 998479 - RNA, 22 nt, Human
uuguaacuuaaguuuugcauau

SEQ ID NO: 998480 - RNA, 22 nt, Human
guguguguaucugccuaucaca

SEQ ID NO: 998481 - RNA, 22 nt, Human
acagugauugguuuggggguga

SEQ ID NO: 998482 - RNA, 22 nt, Human
auauuucuccaaauguuuucaa

SEQ ID NO: 998483 - RNA, 22 nt, Human
ucugucugggugccucgaguac

SEQ ID NO: 998484 - RNA, 22 nt, Human
aguguguacucauauacuucca

SEQ ID NO: 998485 - RNA, 22 nt, Human
cuggccccgguuccuaaaaacc

SEQ ID NO: 998486 - RNA, 22 nt, Human
auguguguauauauagucauuu

SEQ ID NO: 998487 - RNA, 22 nt, Human
cugucugugaccucugcauguc

SEQ ID NO: 998488 - RNA, 22 nt, Human
uuggcuguauguacaucuguua

SEQ ID NO: 998489 - RNA, 22 nt, Human
uaugugugcauguauacauuaa

SEQ ID NO: 998490 - RNA, 22 nt, Human
uauauucuuucaccuucuuccu

SEQ ID NO: 998491 - RNA, 22 nt, Human
auguggcuccuuacucaucagc

SEQ ID NO: 998492 - RNA, 22 nt, Human
guguacugcaaaugcugcugcc

SEQ ID NO: 998493 - RNA, 22 nt, Human
aucuuuacaguguaagugcaga

SEQ ID NO: 998494 - RNA, 22 nt, Human
uagcugccaaaagggugggcua

SEQ ID NO: 998495 - RNA, 22 nt, Human
uucucucugugucauuauggac

SEQ ID NO: 998496 - RNA, 22 nt, Human
gacaguauuuaacuaguucauu

SEQ ID NO: 998497 - RNA, 22 nt, Human
uuuguaugaacugguauguagg

SEQ ID NO: 998498 - RNA, 22 nt, Human
cucucucuuguguugcugcaga

SEQ ID NO: 998499 - RNA, 22 nt, Human
cuggagggcugcagcgaggcug

SEQ ID NO: 998500 - RNA, 22 nt, Human
uuucacagcugucuuccgucuc

SEQ ID NO: 998501 - RNA, 22 nt, Human
cuuuacugccaugcauuuauaa

SEQ ID NO: 998502 - RNA, 22 nt, Human
uguggguggagugauauuagcu

SEQ ID NO: 998503 - RNA, 22 nt, Human
aaaguuugaaugauauauuagu

SEQ ID NO: 998504 - RNA, 22 nt, Human
acaguaauauugaugcucguca

SEQ ID NO: 998505 - RNA, 22 nt, Human
cuauuuucccauaugguugaca

SEQ ID NO: 998506 - RNA, 22 nt, Human
caguauguacucuuaucaugua

SEQ ID NO: 998507 - RNA, 22 nt, Human
cuauuuucauucuuacauuguc

SEQ ID NO: 998508 - RNA, 22 nt, Human
ucuuugcagaauuuaacuuugc

SEQ ID NO: 998509 - RNA, 22 nt, Human
auucucuguagauggcuugaga

SEQ ID NO: 998510 - RNA, 22 nt, Human
uguggcugcaaaggaaggcugc

SEQ ID NO: 998511 - RNA, 22 nt, Human
aguggcuguuccaggugaggac

SEQ ID NO: 998512 - RNA, 22 nt, Human
auuuuccuagucaugugcuucu

SEQ ID NO: 998513 - RNA, 22 nt, Human
aggcuguggugggcuuugagcc

SEQ ID NO: 998514 - RNA, 22 nt, Human
guauguguugaauucagggguc

SEQ ID NO: 998515 - RNA, 22 nt, Human
ggggugagaucaaggaagcccu

SEQ ID NO: 998516 - RNA, 22 nt, Human
cuuauuuaugucugucucuaau

SEQ ID NO: 998517 - RNA, 22 nt, Human
uuguguguacugguuaugggca

SEQ ID NO: 998518 - RNA, 22 nt, Human
aguguauucagaauguagcaaa

SEQ ID NO: 998519 - RNA, 22 nt, Human
auuuuccuccaugugagcaguu

SEQ ID NO: 998520 - RNA, 22 nt, Human
agcuguguccugaagacacugc

SEQ ID NO: 998521 - RNA, 22 nt, Human
uuuacuuuugguaaggucauuu

SEQ ID NO: 998522 - RNA, 23 nt, Human
ccugugugcccuuaauucacagc

SEQ ID NO: 998523 - RNA, 22 nt, Human
cuacaguacuggaugcucagcc

SEQ ID NO: 998524 - RNA, 22 nt, Human
uuauuugcugauuucaguuuca

SEQ ID NO: 998525 - RNA, 22 nt, Human
gauuuucuugggaaacaaugag

SEQ ID NO: 998526 - RNA, 22 nt, Human
acuuuguugaagaauauguuag

SEQ ID NO: 998527 - RNA, 22 nt, Human
ucuuuaagaguucauuugcaug

SEQ ID NO: 998528 - RNA, 22 nt, Human
uuauuugcccauguuuagcaga

SEQ ID NO: 998529 - RNA, 22 nt, Human
aaggcaggaugggaaaagauuu

SEQ ID NO: 998530 - RNA, 22 nt, Human
ugaggcagugcugggaagccug

SEQ ID NO: 998531 - RNA, 22 nt, Human
uucugcucaguaguaagagugc

SEQ ID NO: 998532 - RNA, 22 nt, Human
uucuucuuuaucucaguauccu

SEQ ID NO: 998533 - RNA, 22 nt, Human
uuacaguaauguauuauuuaac

SEQ ID NO: 998534 - RNA, 22 nt, Human
ucucucuucagagauaccuugc

SEQ ID NO: 998535 - RNA, 22 nt, Human
uauguggccuuuuaugucugac

SEQ ID NO: 998536 - RNA, 22 nt, Human
ggcagugagcuggagggaagga

SEQ ID NO: 998537 - RNA, 22 nt, Human
aaggcaguucacucacgcagcc

SEQ ID NO: 998538 - RNA, 22 nt, Human
uguuacagugacuaauguuuua

SEQ ID NO: 998539 - RNA, 22 nt, Human
aguggcuggcauaggaacagac

SEQ ID NO: 998540 - RNA, 22 nt, Human
ucuuugcaugugcuucuuggcc

SEQ ID NO: 998541 - RNA, 22 nt, Human
uuagaguagagccauuucuguu

SEQ ID NO: 998542 - RNA, 22 nt, Human
acaguguagaauccuguacuua

SEQ ID NO: 998543 - RNA, 22 nt, Human
gugcuguaucagaaucugcucu

SEQ ID NO: 998544 - RNA, 22 nt, Human
ucugcucugggccagcuauuaa

SEQ ID NO: 998545 - RNA, 22 nt, Human
ucuuuucuugcauuauugcacu

SEQ ID NO: 998546 - RNA, 18 nt, Human
uuccaguagcuguaucac

SEQ ID NO: 998547 - RNA, 19 nt, Human
uuaucuguguugcaguggu

SEQ ID NO: 998548 - RNA, 22 nt, Human
accguauauguuugcugugccc

SEQ ID NO: 998549 - RNA, 18 nt, Human
acagugauuguucuaugc

SEQ ID NO: 998550 - RNA, 22 nt, Human
aaguuuuaacaaguacuuacua

SEQ ID NO: 998551 - RNA, 22 nt, Human
ugugaguaauaaagucauuuuu

SEQ ID NO: 998552 - RNA, 22 nt, Human
uuacaguagauuuugaaugugg

SEQ ID NO: 998553 - RNA, 22 nt, Human
gugugugccaacuuuaugugca

SEQ ID NO: 998554 - RNA, 22 nt, Human
gugcugugugauccaugcuggc

SEQ ID NO: 998555 - RNA, 22 nt, Human
gccagccccuuagggcucuccc

SEQ ID NO: 998556 - RNA, 22 nt, Human
guauuauucucagcuuugggau

SEQ ID NO: 998557 - RNA, 20 nt, Human
aguguaugaaucuggauggg

SEQ ID NO: 998558 - RNA, 20 nt, Human
auacaguaggugcucaauau

SEQ ID NO: 998559 - RNA, 22 nt, Human
gcagcugcagguggucccaugc

SEQ ID NO: 998560 - RNA, 22 nt, Human
gagcugugauuggugucucacu

SEQ ID NO: 998561 - RNA, 22 nt, Human
uuuuccucuguuauuaguguga

SEQ ID NO: 998562 - RNA, 22 nt, Human
cuucacagagucccugauuguu

SEQ ID NO: 998563 - RNA, 23 nt, Human
uucucuuuagauuuacauuacuc

SEQ ID NO: 998564 - RNA, 22 nt, Human
aggcugugaugagccucaugga

SEQ ID NO: 998565 - RNA, 21 nt, Human
cugugucgcucucgcugggag

SEQ ID NO: 998566 - RNA, 22 nt, Human
agcugugucauccuggaaaaug

SEQ ID NO: 998567 - RNA, 20 nt, Human
auguaugcaaaugucuucca

SEQ ID NO: 998568 - RNA, 22 nt, Human
auggcuguuuagcuucucugcu

SEQ ID NO: 998569 - RNA, 22 nt, Human
gcucugugguggggcagaguuu

SEQ ID NO: 998570 - RNA, 21 nt, Human
gccuguguaaauugaguuucc

SEQ ID NO: 998571 - RNA, 22 nt, Human
agcugcccagauaggaggaggc

SEQ ID NO: 998572 - RNA, 20 nt, Human
gugugugcuccaugcaugcu

SEQ ID NO: 998573 - RNA, 22 nt, Human
uuuuccucugcagagcaguuag

SEQ ID NO: 998574 - RNA, 22 nt, Human
acagauauuaugguuucuccuu

SEQ ID NO: 998575 - RNA, 22 nt, Human
uguguguguuuauaaaucuaaa

SEQ ID NO: 998576 - RNA, 22 nt, Human
uguguguguuuacaguuucuca

SEQ ID NO: 998577 - RNA, 22 nt, Human
aggcuguguggauaauauuggg

SEQ ID NO: 998578 - RNA, 22 nt, Human
gagcugccugugugccaugaug

SEQ ID NO: 998579 - RNA, 22 nt, Human
uauuucucucacgguugccugg

SEQ ID NO: 998580 - RNA, 22 nt, Human
aacaguuugcuuuaagaggcac

SEQ ID NO: 998581 - RNA, 22 nt, Human
aggaggugacagccugcaucug

SEQ ID NO: 998582 - RNA, 22 nt, Human
ugugggugaugaauuuguucuu

SEQ ID NO: 998583 - RNA, 22 nt, Human
uugauuuucaauucauugacaa

SEQ ID NO: 998584 - RNA, 22 nt, Human
uguggcugugguuuucauaaau

SEQ ID NO: 998585 - RNA, 19 nt, Human
ucuuuucacgcauuuugaa

SEQ ID NO: 998586 - RNA, 22 nt, Human
aucuguguguucaggaaguccu

SEQ ID NO: 998587 - RNA, 22 nt, Human
uagugugucccuggggaguguu

SEQ ID NO: 998588 - RNA, 22 nt, Human
aaauaaagguccacuuuagggc

SEQ ID NO: 998589 - RNA, 22 nt, Human
uuauuuccuaaaucucuuuguu

SEQ ID NO: 998590 - RNA, 22 nt, Human
cugugaguaaugaccugucuug

SEQ ID NO: 998591 - RNA, 22 nt, Human
auguggcuugucgauauuagca

SEQ ID NO: 998592 - RNA, 22 nt, Human
cugugugcucggauggacucgu

SEQ ID NO: 998593 - RNA, 22 nt, Human
acagaauauuuggcaugcgucu

SEQ ID NO: 998594 - RNA, 18 nt, Human
gcuuuuuagugcaucuuc

SEQ ID NO: 998595 - RNA, 22 nt, Human
ccuggagggacccuggcccugu

SEQ ID NO: 998596 - RNA, 22 nt, Human
uuuacagcagcaugauuuauaa

SEQ ID NO: 998597 - RNA, 22 nt, Human
uauuuccugcauggugauguaa

SEQ ID NO: 998598 - RNA, 22 nt, Human
uaacaguacauccuuuucucuu

SEQ ID NO: 998599 - RNA, 22 nt, Human
cuucugugacguaugugaggac

SEQ ID NO: 998600 - RNA, 22 nt, Human
cucuuuacugcuacuacaaaga

SEQ ID NO: 998601 - RNA, 22 nt, Human
uucuuucugaauacaguugagu

SEQ ID NO: 998602 - RNA, 19 nt, Human
cucuuuacucccuugccuu

SEQ ID NO: 998603 - RNA, 22 nt, Human
gauguguguuuauacauauauu

SEQ ID NO: 998604 - RNA, 22 nt, Human
guuaacuuucaggugcauguuu

SEQ ID NO: 998605 - RNA, 22 nt, Human
uucucuuucugcugggcuggaa

SEQ ID NO: 998606 - RNA, 22 nt, Human
uaacucuuuacuauacauuuau

SEQ ID NO: 998607 - RNA, 23 nt, Human
uguggcugagaaauugacaacuu

SEQ ID NO: 998608 - RNA, 22 nt, Human
uuggcuguuuuaucuccuggug

SEQ ID NO: 998609 - RNA, 20 nt, Human
uauuuugcaauuaugguuca

SEQ ID NO: 998610 - RNA, 22 nt, Human
cauguauauuuuauguggagag

SEQ ID NO: 998611 - RNA, 17 nt, Human
ucugugauaguguagau

SEQ ID NO: 998612 - RNA, 22 nt, Human
ucuucuuugaaucauagugacc

SEQ ID NO: 998613 - RNA, 22 nt, Human
ggagggguggucgcgaagagca

SEQ ID NO: 998614 - RNA, 17 nt, Human
gacagcugguuccuggc

SEQ ID NO: 998615 - RNA, 22 nt, Human
auuuacagacccucccacuaag

SEQ ID NO: 998616 - RNA, 22 nt, Human
ugcagcugacccacuccagucc

SEQ ID NO: 998617 - RNA, 22 nt, Human
gugugagugaaaguaguuugau

SEQ ID NO: 998618 - RNA, 22 nt, Human
cuggccccagaguuucacuugg

SEQ ID NO: 998619 - RNA, 22 nt, Human
caggauauuuacguucugcuac

SEQ ID NO: 998620 - RNA, 22 nt, Human
aggaggugagcggucauguggu

SEQ ID NO: 998621 - RNA, 22 nt, Human
ugugccuggcccagugguguca

SEQ ID NO: 998622 - RNA, 22 nt, Human
cugugccuucugccuggaacau

SEQ ID NO: 998623 - RNA, 22 nt, Human
auguguuggauauuagugggga

SEQ ID NO: 998624 - RNA, 20 nt, Human
uucuaacuacucucccuuug

SEQ ID NO: 998625 - RNA, 22 nt, Human
uuaguuuucccaucuuuauggu

SEQ ID NO: 998626 - RNA, 18 nt, Human
auguggcuagugcaacug

SEQ ID NO: 998627 - RNA, 22 nt, Human
cagcccacgucagggccacuca

SEQ ID NO: 998628 - RNA, 22 nt, Human
uuuguguguauauguauauaga

SEQ ID NO: 998629 - RNA, 19 nt, Human
uaacucuuuccuuuucccc

SEQ ID NO: 998630 - RNA, 22 nt, Human
uuuagcuucaguucuagcuucu

SEQ ID NO: 998631 - RNA, 23 nt, Human
aguggcugagaguguuucauaug

SEQ ID NO: 998632 - RNA, 22 nt, Human
agaguauaauuagugucuucua

SEQ ID NO: 998633 - RNA, 22 nt, Human
uuuacaauagggucugaaugaa

SEQ ID NO: 998634 - RNA, 22 nt, Human
acagugaucaguuacugucugu

SEQ ID NO: 998635 - RNA, 22 nt, Human
cuucugugaaugaaguguggga

SEQ ID NO: 998636 - RNA, 22 nt, Human
cugucuguuuuguauacaggcc

SEQ ID NO: 998637 - RNA, 22 nt, Human
ugggaagggagaguguccugga

SEQ ID NO: 998638 - RNA, 22 nt, Human
aguguaugaacuuaagagagag

SEQ ID NO: 998639 - RNA, 22 nt, Human
ugcaguguuccuguggguuuau

SEQ ID NO: 998640 - RNA, 22 nt, Human
uacuuuuccagggcuggcugag

SEQ ID NO: 998641 - RNA, 22 nt, Human
ucacaguaguuguucucuguuu

SEQ ID NO: 998642 - RNA, 22 nt, Human
aguggcugcugacuuuaauaca

SEQ ID NO: 998643 - RNA, 19 nt, Human
guggccugcgcugggugcg

SEQ ID NO: 998644 - RNA, 22 nt, Human
aacuuauugaacauucucgaau

SEQ ID NO: 998645 - RNA, 22 nt, Human
auucucugccauugcgguggau

SEQ ID NO: 998646 - RNA, 22 nt, Human
uuuuacuucauuccugacuuca

SEQ ID NO: 998647 - RNA, 22 nt, Human
aguggcugucuuccaaaaucug

SEQ ID NO: 998648 - RNA, 22 nt, Human
ucucuucuuguguuuuccugcc

SEQ ID NO: 998649 - RNA, 22 nt, Human
uuuacaguccccaggugaggau

SEQ ID NO: 998650 - RNA, 22 nt, Human
ccaggcccugcuccucacacca

SEQ ID NO: 998651 - RNA, 23 nt, Human
auguggcuagugagaccaagaaa

SEQ ID NO: 998652 - RNA, 22 nt, Human
gggcuguguacuaugaggaggg

SEQ ID NO: 998653 - RNA, 22 nt, Human
uucugcugguaacuauguuuca

SEQ ID NO: 998654 - RNA, 22 nt, Human
uguaugugcuugagaagguggg

SEQ ID NO: 998655 - RNA, 22 nt, Human
uuauuugugaaucauuuaucua

SEQ ID NO: 998656 - RNA, 22 nt, Human
uguggccuuauuuguauggggg

SEQ ID NO: 998657 - RNA, 22 nt, Human
uauuuuaucugccagaguggag

SEQ ID NO: 998658 - RNA, 22 nt, Human
agcauauuguaugucuauaugu

SEQ ID NO: 998659 - RNA, 22 nt, Human
gaugugugcugcauaguauauu

SEQ ID NO: 998660 - RNA, 20 nt, Human
ugugugcuaggacuacagug

SEQ ID NO: 998661 - RNA, 22 nt, Human
guggagggugagcucauguuug

SEQ ID NO: 998662 - RNA, 22 nt, Human
gggacucugagagccugagggu

SEQ ID NO: 998663 - RNA, 22 nt, Human
uggcuguguuaccacuucaugu

SEQ ID NO: 998664 - RNA, 20 nt, Human
aguguaugaacagaugcggg

SEQ ID NO: 998665 - RNA, 22 nt, Human
ggugugugguccucucacuuag

SEQ ID NO: 998666 - RNA, 22 nt, Human
augccugucucagggucuguuu

SEQ ID NO: 998667 - RNA, 22 nt, Human
ggugugccuggggcuuagcugc

SEQ ID NO: 998668 - RNA, 22 nt, Human
guacaguaguaaaagugaauga

SEQ ID NO: 998669 - RNA, 19 nt, Human
uuucugucuguguuuugcc

SEQ ID NO: 998670 - RNA, 22 nt, Human
cuggcuguuucaaauguauaga

SEQ ID NO: 998671 - RNA, 22 nt, Human
cuggccccaggcagccugcugg

SEQ ID NO: 998672 - RNA, 22 nt, Human
acagauauaugauuguguaaau

SEQ ID NO: 998673 - RNA, 22 nt, Human
cuaacuuuauuugcuaaguaga

SEQ ID NO: 998674 - RNA, 22 nt, Human
gcuguguugggaaucauguggg

SEQ ID NO: 998675 - RNA, 22 nt, Human
uuucucucuuaaggaguuuaaa

SEQ ID NO: 998676 - RNA, 22 nt, Human
auguggcuagugcaacugagaa

SEQ ID NO: 998677 - RNA, 22 nt, Human
caguguaucauuagugugauga

SEQ ID NO: 998678 - RNA, 22 nt, Human
cuguuugugauuagcagugggu

SEQ ID NO: 998679 - RNA, 22 nt, Human
gcuuuacacagaugaauauuuc

SEQ ID NO: 998680 - RNA, 22 nt, Human
ucuuaacauauuauuuuagcac

SEQ ID NO: 998681 - RNA, 22 nt, Human
uuacaguguuacuugaugucca

SEQ ID NO: 998682 - RNA, 22 nt, Human
ucuucacaugaccuucaugucu

SEQ ID NO: 998683 - RNA, 22 nt, Human
aggggugacacauaucagugca

SEQ ID NO: 998684 - RNA, 22 nt, Human
aucucuuugauggcuccuguga

SEQ ID NO: 998685 - RNA, 22 nt, Human
gcuuuacaaguggugcagauua

SEQ ID NO: 998686 - RNA, 22 nt, Human
uaccaguaauaguaugugagau

SEQ ID NO: 998687 - RNA, 22 nt, Human
gcugagugaaaguuugcugugu

SEQ ID NO: 998688 - RNA, 22 nt, Human
uuucuucuuucccagugauggg

SEQ ID NO: 998689 - RNA, 22 nt, Human
ucucucuugaaguauuagcuag

SEQ ID NO: 998690 - RNA, 22 nt, Human
caguaauaagcuggagggugug

SEQ ID NO: 998691 - RNA, 22 nt, Human
ccuguguggaaggcaggaggcc

SEQ ID NO: 998692 - RNA, 22 nt, Human
guguggcuagaagugucuuguu

SEQ ID NO: 998693 - RNA, 22 nt, Human
ugacuuuuggaccucacugucc

SEQ ID NO: 998694 - RNA, 18 nt, Human
aagcugcccucaggcagg

SEQ ID NO: 998695 - RNA, 22 nt, Human
cuguuacauagcuuuucuuaac

SEQ ID NO: 998696 - RNA, 22 nt, Human
uauguguaaucauaucugauac

SEQ ID NO: 998697 - RNA, 21 nt, Human
ugugugggcauaucugcugca

SEQ ID NO: 998698 - RNA, 18 nt, Human
ccuguguguguugcaggc

SEQ ID NO: 998699 - RNA, 20 nt, Human
ugcccagcaagagugcaguu

SEQ ID NO: 998700 - RNA, 22 nt, Human
caguaaaugugauuuuucuugu

SEQ ID NO: 998701 - RNA, 22 nt, Human
agcuggccuuagugagcaccug

SEQ ID NO: 998702 - RNA, 22 nt, Human
uucuauuucuuaaucuuggcug

SEQ ID NO: 998703 - RNA, 22 nt, Human
ugccugugcccuuugcugggag

SEQ ID NO: 998704 - RNA, 22 nt, Human
uucugugugccagaguugugcu

SEQ ID NO: 998705 - RNA, 16 nt, Human
uuucucucugcuauuu

SEQ ID NO: 998706 - RNA, 22 nt, Human
uauauuugcuaaaugugugcaa

SEQ ID NO: 998707 - RNA, 22 nt, Human
auuacaguaaaugcuacaggca

SEQ ID NO: 998708 - RNA, 22 nt, Human
uaguauaucuuuaguacauagu

SEQ ID NO: 998709 - RNA, 22 nt, Human
ucuaaucuacaaaaggaaauuc

SEQ ID NO: 998710 - RNA, 22 nt, Human
uuuaaucuucaaaauagucuua

SEQ ID NO: 998711 - RNA, 20 nt, Human
uauauuuucucuuuggccuu

SEQ ID NO: 998712 - RNA, 22 nt, Human
cugcucuguuucuuagcugggu

SEQ ID NO: 998713 - RNA, 18 nt, Human
uguaaugcagcggguggc

SEQ ID NO: 998714 - RNA, 22 nt, Human
gcagcugccuauucagggcuug

SEQ ID NO: 998715 - RNA, 22 nt, Human
uagaguauauaggccuuugugu

SEQ ID NO: 998716 - RNA, 22 nt, Human
uuguggcugucgagaauugagg

SEQ ID NO: 998717 - RNA, 22 nt, Human
uuugacagaaaguuauuauuuu

SEQ ID NO: 998718 - RNA, 22 nt, Human
auggcuguuuugugacuucuca

SEQ ID NO: 998719 - RNA, 23 nt, Human
caacuuuuggcuacaugcuuagc

SEQ ID NO: 998720 - RNA, 22 nt, Human
cuuuuucacuguguccucacac

SEQ ID NO: 998721 - RNA, 22 nt, Human
uggagguggaguuggaaacuga

SEQ ID NO: 998722 - RNA, 22 nt, Human
uuuacacggcauuaucuucaug

SEQ ID NO: 998723 - RNA, 22 nt, Human
agcugccccaugagaggcaggu

SEQ ID NO: 998724 - RNA, 22 nt, Human
uucucugcucucacauacagaa

SEQ ID NO: 998725 - RNA, 22 nt, Human
ugggggcauggaccagccuggc

SEQ ID NO: 998726 - RNA, 22 nt, Human
aauuucucucucaugcuucaug

SEQ ID NO: 998727 - RNA, 22 nt, Human
uuuguguauguaugcuuguaca

SEQ ID NO: 998728 - RNA, 22 nt, Human
ugugagugaaugggucugaagu

SEQ ID NO: 998729 - RNA, 22 nt, Human
auggcuguguuagaugcuaagu

SEQ ID NO: 998730 - RNA, 22 nt, Human
ugugugugacaaccuaguucag

SEQ ID NO: 998731 - RNA, 22 nt, Human
uuuauaguagcaugauuuauag

SEQ ID NO: 998732 - RNA, 22 nt, Human
ucuucacagaugcauauacuuc

SEQ ID NO: 998733 - RNA, 22 nt, Human
uacauguauugauuucucuucu

SEQ ID NO: 998734 - RNA, 19 nt, Human
uguguguuuauauauguau

SEQ ID NO: 998735 - RNA, 22 nt, Human
uuaccaguuuugccauuugcua

SEQ ID NO: 998736 - RNA, 22 nt, Human
gcucucuguuauuaagaucuuu

SEQ ID NO: 998737 - RNA, 22 nt, Human
ucuuugcaacucccauuuccau

SEQ ID NO: 998738 - RNA, 22 nt, Human
gucucuuuuauggugaguugau

SEQ ID NO: 998739 - RNA, 22 nt, Human
ucugcucuguggcuucagcuaa

SEQ ID NO: 998740 - RNA, 22 nt, Human
ccguguguaugguggaacugcu

SEQ ID NO: 998741 - RNA, 22 nt, Human
aacaguaugugagauuuacaca

SEQ ID NO: 998742 - RNA, 22 nt, Human
gguguggcugugaguuuuugau

SEQ ID NO: 998743 - RNA, 22 nt, Human
uacauauacugagugauuugcu

SEQ ID NO: 998744 - RNA, 22 nt, Human
uauuuucaccuucucuggauau

SEQ ID NO: 998745 - RNA, 22 nt, Human
auggcuguaaauucagagaugg

SEQ ID NO: 998746 - RNA, 22 nt, Human
cuguggcugcagaccuuaaaca

SEQ ID NO: 998747 - RNA, 23 nt, Human
aucucucugguggucacagucag

SEQ ID NO: 998748 - RNA, 22 nt, Human
auggcugugguaucagacgcag

SEQ ID NO: 998749 - RNA, 22 nt, Human
ggcagugaaucugagagccugg

SEQ ID NO: 998750 - RNA, 22 nt, Human
uuuaacuugaucaguagagcau

SEQ ID NO: 998751 - RNA, 22 nt, Human
uguauguguccuaauucaagca

SEQ ID NO: 998752 - RNA, 22 nt, Human
uucacagugguagugcauuuag

SEQ ID NO: 998753 - RNA, 22 nt, Human
gcaguuuuagagcuuuaagaug

SEQ ID NO: 998754 - RNA, 22 nt, Human
ggaagaaagcacacaaacuuga

SEQ ID NO: 998755 - RNA, 22 nt, Human
uuuuacaguuccaugcaaagcg

SEQ ID NO: 998756 - RNA, 22 nt, Human
uuucugcucauccuaguggagc
